United States Patent Application Publication US 2003/0104410 A1 - sequence listing, part 2

SEQ ID NO: 39378 - DNA, 25 bp, Homo sapien
gacgtaggacatcgtcgtggcacta

SEQ ID NO: 39379 - DNA, 25 bp, Homo sapien
gtgatgaagttttccaaccgtagaa

SEQ ID NO: 39380 - DNA, 25 bp, Homo sapien
gtgatgaagtttaccaaccgtagaa

SEQ ID NO: 39381 - DNA, 25 bp, Homo sapien
cgaaagtagttaccagagacacttc

SEQ ID NO: 39382 - DNA, 25 bp, Homo sapien
cgaaagtagttagcagagacacttc

SEQ ID NO: 39383 - DNA, 25 bp, Homo sapien
ctcggagtctagaacgtgaccatcg

SEQ ID NO: 39384 - DNA, 25 bp, Homo sapien
ctcggagtctagtacgtgaccatcg

SEQ ID NO: 39385 - DNA, 25 bp, Homo sapien
gttgtcggtatgtatacttcgatcg

SEQ ID NO: 39386 - DNA, 25 bp, Homo sapien
gttgtcggtatgaatacttcgatcg

SEQ ID NO: 39387 - DNA, 25 bp, Homo sapien
acgaccacgtactgtttattgttcg

SEQ ID NO: 39388 - DNA, 25 bp, Homo sapien
acgaccacgtacagtttattgttcg

SEQ ID NO: 39389 - DNA, 25 bp, Homo sapien
cttacgggagtcagtcttctgtgcc

SEQ ID NO: 39390 - DNA, 25 bp, Homo sapien
cttacgggagtctgtcttctgtgcc

SEQ ID NO: 39391 - DNA, 25 bp, Homo sapien
gtatgtttgattttcgtgttacacc

SEQ ID NO: 39392 - DNA, 25 bp, Homo sapien
gtatgtttgattatcgtgttacacc

SEQ ID NO: 39393 - DNA, 25 bp, Homo sapien
tattgaatactttatgtgtgtctcc

SEQ ID NO: 39394 - DNA, 25 bp, Homo sapien
tattgaatacttaatgtgtgtctcc

SEQ ID NO: 39395 - DNA, 25 bp, Homo sapien
gtagacatcttctgtctttctctcg

SEQ ID NO: 39396 - DNA, 25 bp, Homo sapien
gtagacatcttcagtctttctctcg

SEQ ID NO: 39397 - DNA, 25 bp, Homo sapien
aagtttctacaatactcgtcctacc

SEQ ID NO: 39398 - DNA, 25 bp, Homo sapien
aagtttctacaaaactcgtcctacc

SEQ ID NO: 39399 - DNA, 25 bp, Homo sapien
aatgactcacaacactcggttcgag

SEQ ID NO: 39400 - DNA, 25 bp, Homo sapien
aatgactcacaagactcggttcgag

SEQ ID NO: 39401 - DNA, 25 bp, Homo sapien
ggcacacgtacaaactatatccgac

SEQ ID NO: 39402 - DNA, 25 bp, Homo sapien
ggcacacgtacatactatatccgac

SEQ ID NO: 39403 - DNA, 25 bp, Homo sapien
gaagagcaataatacttatacacga

SEQ ID NO: 39404 - DNA, 25 bp, Homo sapien
gaagagcaataaaacttatacacga

SEQ ID NO: 39405 - DNA, 25 bp, Homo sapien
acggaagaaccgaaactactaatca

SEQ ID NO: 39406 - DNA, 25 bp, Homo sapien
acggaagaaccgtaactactaatca

SEQ ID NO: 39407 - DNA, 25 bp, Homo sapien
acctcagtgtactggtaccctcaaa

SEQ ID NO: 39408 - DNA, 25 bp, Homo sapien
acctcagtgtacaggtaccctcaaa

SEQ ID NO: 39409 - DNA, 25 bp, Homo sapien
accagacgtcggacacgttctacaa

SEQ ID NO: 39410 - DNA, 25 bp, Homo sapien
accagacgtcggtcacgttctacaa

SEQ ID NO: 39411 - DNA, 25 bp, Homo sapien
ctacacgtcgagtcggaccaccagt

SEQ ID NO: 39412 - DNA, 25 bp, Homo sapien
ctacacgtcgagacggaccaccagt

SEQ ID NO: 39413 - DNA, 25 bp, Homo sapien
tcgaagtcgtgtaggaaccgtcggt

SEQ ID NO: 39414 - DNA, 25 bp, Homo sapien
tcgaagtcgtgttggaaccgtcggt

SEQ ID NO: 39415 - DNA, 25 bp, Homo sapien
cgtaaagtgtttacacagtagactg

SEQ ID NO: 39416 - DNA, 25 bp, Homo sapien
cgtaaagtgttttcacagtagactg

SEQ ID NO: 39417 - DNA, 25 bp, Homo sapien
ttcttcgttgtcaacccgtttcgac

SEQ ID NO: 39418 - DNA, 25 bp, Homo sapien
ttcttcgttgtctacccgtttcgac

SEQ ID NO: 39419 - DNA, 25 bp, Homo sapien
tttagtcttcgtttataccgtttta

SEQ ID NO: 39420 - DNA, 25 bp, Homo sapien
tttagtcttcgtatataccgtttta

SEQ ID NO: 39421 - DNA, 25 bp, Homo sapien
ttagctatacacaatacatattata

SEQ ID NO: 39422 - DNA, 25 bp, Homo sapien
ttagctatacactatacatattata

SEQ ID NO: 39423 - DNA, 25 bp, Homo sapien
ggtccgtactcttatagtgattaaa

SEQ ID NO: 39424 - DNA, 25 bp, Homo sapien
ggtccgtactctaatagtgattaaa

SEQ ID NO: 39425 - DNA, 25 bp, Homo sapien
agtaacatctacatgtcttcagttg

SEQ ID NO: 39426 - DNA, 25 bp, Homo sapien
agtaacatctacttgtcttcagttg

SEQ ID NO: 39427 - DNA, 25 bp, Homo sapien
actatgacacacagagtttcttatg

SEQ ID NO: 39428 - DNA, 25 bp, Homo sapien
actatgacacactgagtttcttatg

SEQ ID NO: 39429 - DNA, 25 bp, Homo sapien
attgtgtacgacagatattcgaatt

SEQ ID NO: 39430 - DNA, 25 bp, Homo sapien
attgtgtacgactgatattcgaatt

SEQ ID NO: 39431 - DNA, 25 bp, Homo sapien
atacgtgtgtattatcatctgtgtc

SEQ ID NO: 39432 - DNA, 25 bp, Homo sapien
atacgtgtgtataatcatctgtgtc

SEQ ID NO: 39433 - DNA, 25 bp, Homo sapien
ggaggagtaactcaacgtcgtgtcg

SEQ ID NO: 39434 - DNA, 25 bp, Homo sapien
ggaggagtaactgaacgtcgtgtcg

SEQ ID NO: 39435 - DNA, 25 bp, Homo sapien
ggataacgagacgagaacggacgtc

SEQ ID NO: 39436 - DNA, 25 bp, Homo sapien
ggataacgagaccagaacggacgtc

SEQ ID NO: 39437 - DNA, 25 bp, Homo sapien
ggtatagacgaagtaacagtacact

SEQ ID NO: 39438 - DNA, 25 bp, Homo sapien
ggtatagacgaactaacagtacact

SEQ ID NO: 39439 - DNA, 25 bp, Homo sapien
gataccgagaccttgaactagtact

SEQ ID NO: 39440 - DNA, 25 bp, Homo sapien
gataccgagaccatgaactagtact

SEQ ID NO: 39441 - DNA, 25 bp, Homo sapien
aagttcacccatgtcgtagaagtat

SEQ ID NO: 39442 - DNA, 25 bp, Homo sapien
aagttcacccatctcgtagaagtat

SEQ ID NO: 39443 - DNA, 25 bp, Homo sapien
aatgcagtactcttgtgttgaacat

SEQ ID NO: 39444 - DNA, 25 bp, Homo sapien
aatgcagtactcatgtgttgaacat

SEQ ID NO: 39445 - DNA, 25 bp, Homo sapien
tcgacagtctcatcgacctcttcga

SEQ ID NO: 39446 - DNA, 25 bp, Homo sapien
tcgacagtctcaacgacctcttcga

SEQ ID NO: 39447 - DNA, 25 bp, Homo sapien
gagggacagacaaaggtcctctcct

SEQ ID NO: 39448 - DNA, 25 bp, Homo sapien
gagggacagacataggtcctctcct

SEQ ID NO: 39449 - DNA, 25 bp, Homo sapien
gttaaagtgacaatggtcctcccgt

SEQ ID NO: 39450 - DNA, 25 bp, Homo sapien
gttaaagtgacattggtcctcccgt

SEQ ID NO: 39451 - DNA, 25 bp, Homo sapien
tgacaagtatattgtgtactttcct

SEQ ID NO: 39452 - DNA, 25 bp, Homo sapien
tgacaagtatatagtgtactttcct

SEQ ID NO: 39453 - DNA, 25 bp, Homo sapien
ccgagtttggttagtttactcactt

SEQ ID NO: 39454 - DNA, 25 bp, Homo sapien
ccgagtttggtttgtttactcactt

SEQ ID NO: 39455 - DNA, 25 bp, Homo sapien
gtctcgagtttgtgtgtttgaccca

SEQ ID NO: 39456 - DNA, 25 bp, Homo sapien
gtctcgagtttgagtgtttgaccca

SEQ ID NO: 39457 - DNA, 25 bp, Homo sapien
gtccgggttttatcctagggtccta

SEQ ID NO: 39458 - DNA, 25 bp, Homo sapien
gtccgggttttaacctagggtccta

SEQ ID NO: 39459 - DNA, 25 bp, Homo sapien
gggtgtacccttcagaggggtcctc

SEQ ID NO: 39460 - DNA, 25 bp, Homo sapien
gggtgtacccttgagaggggtcctc

SEQ ID NO: 39461 - DNA, 25 bp, Homo sapien
gtggcgtaagccaaagggttccgtc

SEQ ID NO: 39462 - DNA, 25 bp, Homo sapien
gtggcgtaagcctaagggttccgtc

SEQ ID NO: 39463 - DNA, 25 bp, Homo sapien
agttgataattgaccggtgttcttc

SEQ ID NO: 39464 - DNA, 25 bp, Homo sapien
agttgataattgtccggtgttcttc

SEQ ID NO: 39465 - DNA, 25 bp, Homo sapien
tgtactaaagctttgtggtatcttc

SEQ ID NO: 39466 - DNA, 25 bp, Homo sapien
tgtactaaagctatgtggtatcttc

SEQ ID NO: 39467 - DNA, 25 bp, Homo sapien
aaagtgtgtctacttagagtcatct

SEQ ID NO: 39468 - DNA, 25 bp, Homo sapien
aaagtgtgtctagttagagtcatct

SEQ ID NO: 39469 - DNA, 25 bp, Homo sapien
caaagtgtgcgtgacgaagggatct

SEQ ID NO: 39470 - DNA, 25 bp, Homo sapien
caaagtgtgcgtcacgaagggatct

SEQ ID NO: 39471 - DNA, 25 bp, Homo sapien
ccaaagtaaccgttagaaggtcata

SEQ ID NO: 39472 - DNA, 25 bp, Homo sapien
ccaaagtaaccgatagaaggtcata

SEQ ID NO: 39473 - DNA, 25 bp, Homo sapien
atgaagtaactaataactcttcaga

SEQ ID NO: 39474 - DNA, 25 bp, Homo sapien
atgaagtaactattaactcttcaga

SEQ ID NO: 39475 - DNA, 25 bp, Homo sapien
gagaagtctctactaaccgatcttt

SEQ ID NO: 39476 - DNA, 25 bp, Homo sapien
gagaagtctctagtaaccgatcttt

SEQ ID NO: 39477 - DNA, 25 bp, Homo sapien
gtactagacctacaggacaaaccaa

SEQ ID NO: 39478 - DNA, 25 bp, Homo sapien
gtactagacctagaggacaaaccaa

SEQ ID NO: 39479 - DNA, 25 bp, Homo sapien
gtgacactattactcaggtcaacat

SEQ ID NO: 39480 - DNA, 25 bp, Homo sapien
gtgacactattagtcaggtcaacat

SEQ ID NO: 39481 - DNA, 25 bp, Homo sapien
tgacagtgatagtcgaagtgacctt

SEQ ID NO: 39482 - DNA, 25 bp, Homo sapien
tgacagtgatagacgaagtgacctt

SEQ ID NO: 39483 - DNA, 25 bp, Homo sapien
cctgtattgttgaacactgtcaaac

SEQ ID NO: 39484 - DNA, 25 bp, Homo sapien
cctgtattgttgtacactgtcaaac

SEQ ID NO: 39485 - DNA, 25 bp, Homo sapien
tcttatttcgtcagtgactacaccg

SEQ ID NO: 39486 - DNA, 25 bp, Homo sapien
tcttatttcgtctgtgactacaccg

SEQ ID NO: 39487 - DNA, 25 bp, Homo sapien
gaactttcgttctgtacacacgccc

SEQ ID NO: 39488 - DNA, 25 bp, Homo sapien
gaactttcgttcagtacacacgccc

SEQ ID NO: 39489 - DNA, 25 bp, Homo sapien
gaacttgtcgaggacctaccggcac

SEQ ID NO: 39490 - DNA, 25 bp, Homo sapien
gaacttgtcgagcacctaccggcac

SEQ ID NO: 39491 - DNA, 25 bp, Homo sapien
aaaggtcgtcaggactccccgttcc

SEQ ID NO: 39492 - DNA, 25 bp, Homo sapien
aaaggtcgtcagcactccccgttcc

SEQ ID NO: 39493 - DNA, 25 bp, Homo sapien
acgtcgacgtccttcacggtgtcta

SEQ ID NO: 39494 - DNA, 25 bp, Homo sapien
acgtcgacgtccatcacggtgtcta

SEQ ID NO: 39495 - DNA, 25 bp, Homo sapien
ggaccgaactacctcagccgggcga

SEQ ID NO: 39496 - DNA, 25 bp, Homo sapien
ggaccgaactacgtcagccgggcga

SEQ ID NO: 39497 - DNA, 25 bp, Homo sapien
gaccgtacacactttccaacggcta

SEQ ID NO: 39498 - DNA, 25 bp, Homo sapien
gaccgtacacacattccaacggcta

SEQ ID NO: 39499 - DNA, 25 bp, Homo sapien
gtccgtccctattgtcgtaacctcc

SEQ ID NO: 39500 - DNA, 25 bp, Homo sapien
gtccgtccctatagtcgtaacctcc

SEQ ID NO: 39501 - DNA, 25 bp, Homo sapien
tgctacgccatctagagacactcct

SEQ ID NO: 39502 - DNA, 25 bp, Homo sapien
tgctacgccatcaagagacactcct

SEQ ID NO: 39503 - DNA, 25 bp, Homo sapien
gacaggtccagctttgtaacaaggt

SEQ ID NO: 39504 - DNA, 25 bp, Homo sapien
gacaggtccagcattgtaacaaggt

SEQ ID NO: 39505 - DNA, 25 bp, Homo sapien
ggaccactaccactaccacggaggt

SEQ ID NO: 39506 - DNA, 25 bp, Homo sapien
ggaccactaccagtaccacggaggt

SEQ ID NO: 39507 - DNA, 25 bp, Homo sapien
acaccggacccaacctagtcgaggt

SEQ ID NO: 39508 - DNA, 25 bp, Homo sapien
acaccggacccatcctagtcgaggt

SEQ ID NO: 39509 - DNA, 25 bp, Homo sapien
ctactcttcctatgtcctcgacagg

SEQ ID NO: 39510 - DNA, 25 bp, Homo sapien
ctactcttcctaagtcctcgacagg

SEQ ID NO: 39511 - DNA, 25 bp, Homo sapien
gtttctttacgaagtcctagaacta

SEQ ID NO: 39512 - DNA, 25 bp, Homo sapien
gtttctttacgatgtcctagaacta

SEQ ID NO: 39513 - DNA, 25 bp, Homo sapien
gtttcccgtcgaaaccacgagtctc

SEQ ID NO: 39514 - DNA, 25 bp, Homo sapien
gtttcccgtcgataccacgagtctc

SEQ ID NO: 39515 - DNA, 25 bp, Homo sapien
gtgtcccggagtttccacagtagac

SEQ ID NO: 39516 - DNA, 25 bp, Homo sapien
gtgtcccggagtatccacagtagac

SEQ ID NO: 39517 - DNA, 25 bp, Homo sapien
cttatattcggataggcatacggtc

SEQ ID NO: 39518 - DNA, 25 bp, Homo sapien
cttatattcggaaaggcatacggtc

SEQ ID NO: 39519 - DNA, 25 bp, Homo sapien
gaacatcgtggtcgtgggccagact

SEQ ID NO: 39520 - DNA, 25 bp, Homo sapien
gaacatcgtggtggtgggccagact

SEQ ID NO: 39521 - DNA, 25 bp, Homo sapien
gaagatcgtggtggcggcgaccctt

SEQ ID NO: 39522 - DNA, 25 bp, Homo sapien
gaagatcgtggtcgcggcgaccctt

SEQ ID NO: 39523 - DNA, 25 bp, Homo sapien
gaacataaacgactcggtcaccata

SEQ ID NO: 39524 - DNA, 25 bp, Homo sapien
gaacataaacgagtcggtcaccata

SEQ ID NO: 39525 - DNA, 25 bp, Homo sapien
aggtagagactaataacaccgacaa

SEQ ID NO: 39526 - DNA, 25 bp, Homo sapien
aggtagagactattaacaccgacaa

SEQ ID NO: 39527 - DNA, 25 bp, Homo sapien
gagtgtataaagaatcctacgattc

SEQ ID NO: 39528 - DNA, 25 bp, Homo sapien
gagtgtataaagtatcctacgattc

SEQ ID NO: 39529 - DNA, 25 bp, Homo sapien
gaagttttttcactcgtcacgtata

SEQ ID NO: 39530 - DNA, 25 bp, Homo sapien
gaagttttttcagtcgtcacgtata

SEQ ID NO: 39531 - DNA, 25 bp, Homo sapien
gtgagtcatcttttcaacgttaatt

SEQ ID NO: 39532 - DNA, 25 bp, Homo sapien
gtgagtcatcttatcaacgttaatt

SEQ ID NO: 39533 - DNA, 25 bp, Homo sapien
tgggacccctgaatccactcttcgt

SEQ ID NO: 39534 - DNA, 25 bp, Homo sapien
tgggacccctgattccactcttcgt

SEQ ID NO: 39535 - DNA, 25 bp, Homo sapien
gaaggccttcatctactactcttgt

SEQ ID NO: 39536 - DNA, 25 bp, Homo sapien
gaaggccttcatgtactactcttgt

SEQ ID NO: 39537 - DNA, 25 bp, Homo sapien
aagttcccttaactagttcgtctag

SEQ ID NO: 39538 - DNA, 25 bp, Homo sapien
aagttcccttaagtagttcgtctag

SEQ ID NO: 39539 - DNA, 25 bp, Homo sapien
gaagttctctcgtttaaaaactcgg

SEQ ID NO: 39540 - DNA, 25 bp, Homo sapien
gaagttctctcgattaaaaactcgg

SEQ ID NO: 39541 - DNA, 25 bp, Homo sapien
cactaagatgtctcgggaaccggtc

SEQ ID NO: 39542 - DNA, 25 bp, Homo sapien
cactaagatgtcacgggaaccggtc

SEQ ID NO: 39543 - DNA, 25 bp, Homo sapien
agtctgacgtttacgggaacaccag

SEQ ID NO: 39544 - DNA, 25 bp, Homo sapien
agtctgacgttttcgggaacaccag

SEQ ID NO: 39545 - DNA, 25 bp, Homo sapien
ataagcgacatttctatgaccgaag

SEQ ID NO: 39546 - DNA, 25 bp, Homo sapien
ataagcgacattactatgaccgaag

SEQ ID NO: 39547 - DNA, 25 bp, Homo sapien
agaagacccgttactaagacctcgg

SEQ ID NO: 39548 - DNA, 25 bp, Homo sapien
agaagacccgtttctaagacctcgg

SEQ ID NO: 39549 - DNA, 25 bp, Homo sapien
gagcaacgtcgggtacggaccgccc

SEQ ID NO: 39550 - DNA, 25 bp, Homo sapien
gagcaacgtcggctacggaccgccc

SEQ ID NO: 39551 - DNA, 25 bp, Homo sapien
gacacaagagtgttcaagtgcctcg

SEQ ID NO: 39552 - DNA, 25 bp, Homo sapien
gacacaagagtgatcaagtgcctcg

SEQ ID NO: 39553 - DNA, 25 bp, Homo sapien
tgaccaaggtacatattgtgaccct

SEQ ID NO: 39554 - DNA, 25 bp, Homo sapien
tgaccaaggtacttattgtgaccct

SEQ ID NO: 39555 - DNA, 25 bp, Homo sapien
gtaacgccaggaaatgattactcat

SEQ ID NO: 39556 - DNA, 25 bp, Homo sapien
gtaacgccaggatatgattactcat

SEQ ID NO: 39557 - DNA, 25 bp, Homo sapien
gaagaacaggtcacggaagtccagt

SEQ ID NO: 39558 - DNA, 25 bp, Homo sapien
gaagaacaggtctcggaagtccagt

SEQ ID NO: 39559 - DNA, 25 bp, Homo sapien
taccacggtcagttgagaggtttga

SEQ ID NO: 39560 - DNA, 25 bp, Homo sapien
taccacggtcagatgagaggtttga

SEQ ID NO: 39561 - DNA, 25 bp, Homo sapien
aaccgcggttacgacagcaaataac

SEQ ID NO: 39562 - DNA, 25 bp, Homo sapien
aaccgcggttaccacagcaaataac

SEQ ID NO: 39563 - DNA, 25 bp, Homo sapien
cgtcggaactcaacggtcctatcac

SEQ ID NO: 39564 - DNA, 25 bp, Homo sapien
cgtcggaactcatcggtcctatcac

SEQ ID NO: 39565 - DNA, 25 bp, Homo sapien
ggtggaaccagtgactgtacagacc

SEQ ID NO: 39566 - DNA, 25 bp, Homo sapien
ggtggaaccagtcactgtacagacc

SEQ ID NO: 39567 - DNA, 25 bp, Homo sapien
gtgtaggcactcgaactgaggagac

SEQ ID NO: 39568 - DNA, 25 bp, Homo sapien
gtgtaggcactccaactgaggagac

SEQ ID NO: 39569 - DNA, 25 bp, Homo sapien
gtcgtggtgcaccaacggcatcgcg

SEQ ID NO: 39570 - DNA, 25 bp, Homo sapien
gtcgtggtgcacgaacggcatcgcg

SEQ ID NO: 39571 - DNA, 25 bp, Homo sapien
tagggtcgaccgaccgagtcaccgg

SEQ ID NO: 39572 - DNA, 25 bp, Homo sapien
tagggtcgaccgtccgagtcaccgg

SEQ ID NO: 39573 - DNA, 25 bp, Homo sapien
cggtcgacctctcgagtctacctcg

SEQ ID NO: 39574 - DNA, 25 bp, Homo sapien
cggtcgacctctggagtctacctcg

SEQ ID NO: 39575 - DNA, 25 bp, Homo sapien
gtcagggtactttctgtgtgcccct

SEQ ID NO: 39576 - DNA, 25 bp, Homo sapien
gtcagggtacttactgtgtgcccct

SEQ ID NO: 39577 - DNA, 25 bp, Homo sapien
cgggcgtgtatcgacgcttcccact

SEQ ID NO: 39578 - DNA, 25 bp, Homo sapien
cgggcgtgtatccacgcttcccact

SEQ ID NO: 39579 - DNA, 25 bp, Homo sapien
acggcccgtttccttatcacgtctg

SEQ ID NO: 39580 - DNA, 25 bp, Homo sapien
acggcccgtttcgttatcacgtctg

SEQ ID NO: 39581 - DNA, 25 bp, Homo sapien
ccatcctgtctgtctacctgtctgt

SEQ ID NO: 39582 - DNA, 25 bp, Homo sapien
ccatcctgtctgactacctgtctgt

SEQ ID NO: 39583 - DNA, 25 bp, Homo sapien
acctctgttgttcgagaccctccgt

SEQ ID NO: 39584 - DNA, 25 bp, Homo sapien
acctctgttgttggagaccctccgt

SEQ ID NO: 39585 - DNA, 25 bp, Homo sapien
gtactcggttgtctcgtcatcctgg

SEQ ID NO: 39586 - DNA, 25 bp, Homo sapien
gtactcggttgtgtcgtcatcctgg

SEQ ID NO: 39587 - DNA, 25 bp, Homo sapien
gttacggtacatgagaggaccctcc

SEQ ID NO: 39588 - DNA, 25 bp, Homo sapien
gttacggtacatcagaggaccctcc

SEQ ID NO: 39589 - DNA, 25 bp, Homo sapien
tctcgggtgtataggtctaccacaa

SEQ ID NO: 39590 - DNA, 25 bp, Homo sapien
tctcgggtgtattggtctaccacaa

SEQ ID NO: 39591 - DNA, 25 bp, Homo sapien
agttcccaaactacgtacaggtaaa

SEQ ID NO: 39592 - DNA, 25 bp, Homo sapien
agttcccaaacttcgtacaggtaaa

SEQ ID NO: 39593 - DNA, 25 bp, Homo sapien
ttcaccgaagagtcctaccacacag

SEQ ID NO: 39594 - DNA, 25 bp, Homo sapien
ttcaccgaagagacctaccacacag

SEQ ID NO: 39595 - DNA, 25 bp, Homo sapien
tgccacgagggaagtacgcactgga

SEQ ID NO: 39596 - DNA, 25 bp, Homo sapien
tgccacgagggatgtacgcactgga

SEQ ID NO: 39597 - DNA, 25 bp, Homo sapien
tgtcttggagcctgtcgacccgcac

SEQ ID NO: 39598 - DNA, 25 bp, Homo sapien
tgtcttggagccagtcgacccgcac

SEQ ID NO: 39599 - DNA, 25 bp, Homo sapien
ttttgttctctagtggaagttccca

SEQ ID NO: 39600 - DNA, 25 bp, Homo sapien
ttttgttctctactggaagttccca

SEQ ID NO: 39601 - DNA, 25 bp, Homo sapien
acggaacgtcaaggaatcgtttaaa

SEQ ID NO: 39602 - DNA, 25 bp, Homo sapien
acggaacgtcaacgaatcgtttaaa

SEQ ID NO: 39603 - DNA, 25 bp, Homo sapien
aaaccctacgctaagacgttcaaag

SEQ ID NO: 39604 - DNA, 25 bp, Homo sapien
aaaccctacgcttagacgttcaaag

SEQ ID NO: 39605 - DNA, 25 bp, Homo sapien
cacacgactatttctctgatcagtg

SEQ ID NO: 39606 - DNA, 25 bp, Homo sapien
cacacgactattactctgatcagtg

SEQ ID NO: 39607 - DNA, 25 bp, Homo sapien
gcgaccacttctactactttcaggt

SEQ ID NO: 39608 - DNA, 25 bp, Homo sapien
gcgaccacttcttctactttcaggt

SEQ ID NO: 39609 - DNA, 25 bp, Homo sapien
tcaccaccgatacttgggtctccag

SEQ ID NO: 39610 - DNA, 25 bp, Homo sapien
tcaccaccgatagttgggtctccag

SEQ ID NO: 39611 - DNA, 25 bp, Homo sapien
tattgaagggaatcggagtctcttc

SEQ ID NO: 39612 - DNA, 25 bp, Homo sapien
tattgaagggaaacggagtctcttc

SEQ ID NO: 39613 - DNA, 25 bp, Homo sapien
tctcgttagggcttaggtacctccc

SEQ ID NO: 39614 - DNA, 25 bp, Homo sapien
tctcgttagggcataggtacctccc

SEQ ID NO: 39615 - DNA, 25 bp, Homo sapien
ttctgttcggtgtacacatttcctt

SEQ ID NO: 39616 - DNA, 25 bp, Homo sapien
ttctgttcggtgaacacatttcctt

SEQ ID NO: 39617 - DNA, 25 bp, Homo sapien
tccagaaggacgacgacggtccctc

SEQ ID NO: 39618 - DNA, 25 bp, Homo sapien
tccagaaggacgtcgacggtccctc

SEQ ID NO: 39619 - DNA, 25 bp, Homo sapien
tttgtctaaagactccgaggtcccc

SEQ ID NO: 39620 - DNA, 25 bp, Homo sapien
tttgtctaaagagtccgaggtcccc

SEQ ID NO: 39621 - DNA, 25 bp, Homo sapien
atctaagaaatacaagttctgtcgt

SEQ ID NO: 39622 - DNA, 25 bp, Homo sapien
atctaagaaatagaagttctgtcgt

SEQ ID NO: 39623 - DNA, 25 bp, Homo sapien
gataagaaagcaagaatgtcacttc

SEQ ID NO: 39624 - DNA, 25 bp, Homo sapien
gataagaaagcatgaatgtcacttc

SEQ ID NO: 39625 - DNA, 25 bp, Homo sapien
catgagacaggtcaaggaaatcttt

SEQ ID NO: 39626 - DNA, 25 bp, Homo sapien
catgagacaggtgaaggaaatcttt

SEQ ID NO: 39627 - DNA, 25 bp, Homo sapien
gttccgtcgacactcgttttcctct

SEQ ID NO: 39628 - DNA, 25 bp, Homo sapien
gttccgtcgacagtcgttttcctct

SEQ ID NO: 39629 - DNA, 25 bp, Homo sapien
ccttctccgattgagtgtattttgt

SEQ ID NO: 39630 - DNA, 25 bp, Homo sapien
ccttctccgattcagtgtattttgt

SEQ ID NO: 39631 - DNA, 25 bp, Homo sapien
agtacttttcattcggaggttttac

SEQ ID NO: 39632 - DNA, 25 bp, Homo sapien
agtacttttcatacggaggttttac

SEQ ID NO: 39633 - DNA, 25 bp, Homo sapien
gtctaattgagtcgttactcttttc

SEQ ID NO: 39634 - DNA, 25 bp, Homo sapien
gtctaattgagtggttactcttttc

SEQ ID NO: 39635 - DNA, 25 bp, Homo sapien
ccggtgcttttcgtcatattcttac

SEQ ID NO: 39636 - DNA, 25 bp, Homo sapien
ccggtgcttttcctcatattcttac

SEQ ID NO: 39637 - DNA, 25 bp, Homo sapien
ggcggcgtcactgcttctgttttcg

SEQ ID NO: 39638 - DNA, 25 bp, Homo sapien
ggcggcgtcactccttctgttttcg

SEQ ID NO: 39639 - DNA, 25 bp, Homo sapien
ggactctccacgaatcctctcaggt

SEQ ID NO: 39640 - DNA, 25 bp, Homo sapien
ggactctccacgtatcctctcaggt

SEQ ID NO: 39641 - DNA, 25 bp, Homo sapien
tcgtcctcgcctgaatcgtccaagt

SEQ ID NO: 39642 - DNA, 25 bp, Homo sapien
tcgtcctcgcctcaatcgtccaagt

SEQ ID NO: 39643 - DNA, 25 bp, Homo sapien
tccatactaccgagtctcacgacag

SEQ ID NO: 39644 - DNA, 25 bp, Homo sapien
tccatactaccgtgtctcacgacag

SEQ ID NO: 39645 - DNA, 25 bp, Homo sapien
ttccttaccacgtacgttcctctac

SEQ ID NO: 39646 - DNA, 25 bp, Homo sapien
ttccttaccacgaacgttcctctac

SEQ ID NO: 39647 - DNA, 25 bp, Homo sapien
ggtcatgcctctcaagaacctcgag

SEQ ID NO: 39648 - DNA, 25 bp, Homo sapien
ggtcatgcctctgaagaacctcgag

SEQ ID NO: 39649 - DNA, 25 bp, Homo sapien
tggacactttttgaagagactcacc

SEQ ID NO: 39650 - DNA, 25 bp, Homo sapien
tggacactttttcaagagactcacc

SEQ ID NO: 39651 - DNA, 25 bp, Homo sapien
ttacagcgtgtcaccaaaccctacg

SEQ ID NO: 39652 - DNA, 25 bp, Homo sapien
ttacagcgtgtctccaaaccctacg

SEQ ID NO: 39653 - DNA, 25 bp, Homo sapien
gtgtctcttcttacacggaccactc

SEQ ID NO: 39654 - DNA, 25 bp, Homo sapien
gtgtctcttctttcacggaccactc

SEQ ID NO: 39655 - DNA, 25 bp, Homo sapien
agggtctattcgattccagccgtcc

SEQ ID NO: 39656 - DNA, 25 bp, Homo sapien
agggtctattcgtttccagccgtcc

SEQ ID NO: 39657 - DNA, 25 bp, Homo sapien
ggtggtttcctcttcaacgaccgcc

SEQ ID NO: 39658 - DNA, 25 bp, Homo sapien
ggtggtttcctcatcaacgaccgcc

SEQ ID NO: 39659 - DNA, 25 bp, Homo sapien
ggtgggtcccggatcccgtccgaca

SEQ ID NO: 39660 - DNA, 25 bp, Homo sapien
ggtgggtcccggttcccgtccgaca

SEQ ID NO: 39661 - DNA, 25 bp, Homo sapien
ggacctttccgtgctaccctttaac

SEQ ID NO: 39662 - DNA, 25 bp, Homo sapien
ggacctttccgtcctaccctttaac

SEQ ID NO: 39663 - DNA, 25 bp, Homo sapien
aatgtatacctactacctcagatgg

SEQ ID NO: 39664 - DNA, 25 bp, Homo sapien
aatgtatacctagtacctcagatgg

SEQ ID NO: 39665 - DNA, 25 bp, Homo sapien
agtgtttacccgagaccagatccgt

SEQ ID NO: 39666 - DNA, 25 bp, Homo sapien
agtgtttacccgtgaccagatccgt

SEQ ID NO: 39667 - DNA, 25 bp, Homo sapien
acgacttctccgtttcatcattagg

SEQ ID NO: 39668 - DNA, 25 bp, Homo sapien
acgacttctccgattcatcattagg

SEQ ID NO: 39669 - DNA, 25 bp, Homo sapien
tacttgtagagactctccataaagg

SEQ ID NO: 39670 - DNA, 25 bp, Homo sapien
tacttgtagagagtctccataaagg

SEQ ID NO: 39671 - DNA, 25 bp, Homo sapien
taaactaagaagtatccaacagtgt

SEQ ID NO: 39672 - DNA, 25 bp, Homo sapien
taaactaagaagaatccaacagtgt

SEQ ID NO: 39673 - DNA, 25 bp, Homo sapien
gatgtcggacaatccctatccacct

SEQ ID NO: 39674 - DNA, 25 bp, Homo sapien
gatgtcggacaaaccctatccacct

SEQ ID NO: 39675 - DNA, 25 bp, Homo sapien
tgactggtggtgacgggtcacctcc

SEQ ID NO: 39676 - DNA, 25 bp, Homo sapien
tgactggtggtgtcgggtcacctcc

SEQ ID NO: 39677 - DNA, 25 bp, Homo sapien
caggggtctgtacttacactcctcc

SEQ ID NO: 39678 - DNA, 25 bp, Homo sapien
caggggtctgtagttacactcctcc

SEQ ID NO: 39679 - DNA, 25 bp, Homo sapien
aacgccggttctgaaggacctccgc

SEQ ID NO: 39680 - DNA, 25 bp, Homo sapien
aacgccggttctcaaggacctccgc

SEQ ID NO: 39681 - DNA, 25 bp, Homo sapien
aaaggttactcaagtgtatacatgc

SEQ ID NO: 39682 - DNA, 25 bp, Homo sapien
aaaggttactcatgtgtatacatgc

SEQ ID NO: 39683 - DNA, 25 bp, Homo sapien
gaatataggattccatcatcacttg

SEQ ID NO: 39684 - DNA, 25 bp, Homo sapien
gaatataggattgcatcatcacttg

SEQ ID NO: 39685 - DNA, 25 bp, Homo sapien
gatatgtcgtataacctttcgattt

SEQ ID NO: 39686 - DNA, 25 bp, Homo sapien
gatatgtcgtattacctttcgattt

SEQ ID NO: 39687 - DNA, 25 bp, Homo sapien
agacggggtctcgacttcctcatta

SEQ ID NO: 39688 - DNA, 25 bp, Homo sapien
agacggggtctccacttcctcatta

SEQ ID NO: 39689 - DNA, 25 bp, Homo sapien
tactaggtgtttcatgataaaacac

SEQ ID NO: 39690 - DNA, 25 bp, Homo sapien
tactaggtgtttgatgataaaacac

SEQ ID NO: 39691 - DNA, 25 bp, Homo sapien
tggactactccaataaacgagtcac

SEQ ID NO: 39692 - DNA, 25 bp, Homo sapien
tggactactccattaaacgagtcac

SEQ ID NO: 39693 - DNA, 25 bp, Homo sapien
gacgtttcagttaagaacgtacact

SEQ ID NO: 39694 - DNA, 25 bp, Homo sapien
gacgtttcagtttagaacgtacact

SEQ ID NO: 39695 - DNA, 25 bp, Homo sapien
cgtcccgacgacgagacgacttact

SEQ ID NO: 39696 - DNA, 25 bp, Homo sapien
cgtcccgacgaccagacgacttact

SEQ ID NO: 39697 - DNA, 25 bp, Homo sapien
tggtctctcatcgtttcagaagtta

SEQ ID NO: 39698 - DNA, 25 bp, Homo sapien
tggtctctcatcctttcagaagtta

SEQ ID NO: 39699 - DNA, 25 bp, Homo sapien
ggtccaacgcgtcctgtgagaggta

SEQ ID NO: 39700 - DNA, 25 bp, Homo sapien
ggtccaacgcgtgctgtgagaggta

SEQ ID NO: 39701 - DNA, 25 bp, Homo sapien
gtcctccaatacctctggttcgtct

SEQ ID NO: 39702 - DNA, 25 bp, Homo sapien
gtcctccaatacgtctggttcgtct

SEQ ID NO: 39703 - DNA, 25 bp, Homo sapien
cttccgaaagattttgagtctacgt

SEQ ID NO: 39704 - DNA, 25 bp, Homo sapien
cttccgaaagatattgagtctacgt

SEQ ID NO: 39705 - DNA, 25 bp, Homo sapien
ttgagaccaacgaggtcgactctct

SEQ ID NO: 39706 - DNA, 25 bp, Homo sapien
ttgagaccaacgtggtcgactctct

SEQ ID NO: 39707 - DNA, 25 bp, Homo sapien
tttggactcatcttaagtcgaaccg

SEQ ID NO: 39708 - DNA, 25 bp, Homo sapien
tttggactcatcataagtcgaaccg

SEQ ID NO: 39709 - DNA, 25 bp, Homo sapien
atggtagtcgattatatttcgactg

SEQ ID NO: 39710 - DNA, 25 bp, Homo sapien
atggtagtcgataatatttcgactg

SEQ ID NO: 39711 - DNA, 25 bp, Homo sapien
gttctggatactgatgatacgtctc

SEQ ID NO: 39712 - DNA, 25 bp, Homo sapien
gttctggatactcatgatacgtctc

SEQ ID NO: 39713 - DNA, 25 bp, Homo sapien
tcgggtaggcttttacagactgtag

SEQ ID NO: 39714 - DNA, 25 bp, Homo sapien
tcgggtaggcttatacagactgtag

SEQ ID NO: 39715 - DNA, 25 bp, Homo sapien
tacttgatcctttataagacgatgt

SEQ ID NO: 39716 - DNA, 25 bp, Homo sapien
tacttgatccttaataagacgatgt

SEQ ID NO: 39717 - DNA, 25 bp, Homo sapien
ctactctcaccgtcgtaatcaaagg

SEQ ID NO: 39718 - DNA, 25 bp, Homo sapien
ctactctcaccgacgtaatcaaagg

SEQ ID NO: 39719 - DNA, 25 bp, Homo sapien
catcaacacggatatcagacacggt

SEQ ID NO: 39720 - DNA, 25 bp, Homo sapien
catcaacacggaaatcagacacggt

SEQ ID NO: 39721 - DNA, 25 bp, Homo sapien
gtagttgcactcgaagttagtaaca

SEQ ID NO: 39722 - DNA, 25 bp, Homo sapien
gtagttgcactccaagttagtaaca

SEQ ID NO: 39723 - DNA, 25 bp, Homo sapien
tttcgtcatcgtctatgtagttata

SEQ ID NO: 39724 - DNA, 25 bp, Homo sapien
tttcgtcatcgtgtatgtagttata

SEQ ID NO: 39725 - DNA, 25 bp, Homo sapien
taggtatcaccatgcaaagtatttt

SEQ ID NO: 39726 - DNA, 25 bp, Homo sapien
taggtatcaccaagcaaagtatttt

SEQ ID NO: 39727 - DNA, 25 bp, Homo sapien
attgaccgacatcgacaaaatgtaa

SEQ ID NO: 39728 - DNA, 25 bp, Homo sapien
attgaccgacatggacaaaatgtaa

SEQ ID NO: 39729 - DNA, 25 bp, Homo sapien
atgtatgttttccaaagagtaacct

SEQ ID NO: 39730 - DNA, 25 bp, Homo sapien
atgtatgttttcgaaagagtaacct

SEQ ID NO: 39731 - DNA, 25 bp, Homo sapien
ggacttttgtcgtccaagaccgaaa

SEQ ID NO: 39732 - DNA, 25 bp, Homo sapien
ggacttttgtcgaccaagaccgaaa

SEQ ID NO: 39733 - DNA, 25 bp, Homo sapien
atgtttcgtcggtgtaatcgtcaag

SEQ ID NO: 39734 - DNA, 25 bp, Homo sapien
atgtttcgtcggagtaatcgtcaag

SEQ ID NO: 39735 - DNA, 25 bp, Homo sapien
cctttatttggatatcgtacctaag

SEQ ID NO: 39736 - DNA, 25 bp, Homo sapien
cctttatttggaaatcgtacctaag

SEQ ID NO: 39737 - DNA, 25 bp, Homo sapien
tctatgtaaggttagaacgtatttc

SEQ ID NO: 39738 - DNA, 25 bp, Homo sapien
tctatgtaaggtaagaacgtatttc

SEQ ID NO: 39739 - DNA, 25 bp, Homo sapien
cgcgagtattaatggagacctttgc

SEQ ID NO: 39740 - DNA, 25 bp, Homo sapien
cgcgagtattaaaggagacctttgc

SEQ ID NO: 39741 - DNA, 25 bp, Homo sapien
cggaagaaatgacgagttcgttcat

SEQ ID NO: 39742 - DNA, 25 bp, Homo sapien
cggaagaaatgaggagttcgttcat

SEQ ID NO: 39743 - DNA, 25 bp, Homo sapien
aataaatagatgtcggtcttcctat

SEQ ID NO: 39744 - DNA, 25 bp, Homo sapien
aataaatagatgacggtcttcctat

SEQ ID NO: 39745 - DNA, 25 bp, Homo sapien
cgtccctaggtgaccgtctcgttcc

SEQ ID NO: 39746 - DNA, 25 bp, Homo sapien
cgtccctaggtgtccgtctcgttcc

SEQ ID NO: 39747 - DNA, 25 bp, Homo sapien
tcccccaagaaggtaaggtcctcga

SEQ ID NO: 39748 - DNA, 25 bp, Homo sapien
tcccccaagaagctaaggtcctcga

SEQ ID NO: 39749 - DNA, 25 bp, Homo sapien
aaaaacggtttgactccgtctcccc

SEQ ID NO: 39750 - DNA, 25 bp, Homo sapien
aaaaacggtttgtctccgtctcccc

SEQ ID NO: 39751 - DNA, 25 bp, Homo sapien
gaagaactttagaaatttgtcccac

SEQ ID NO: 39752 - DNA, 25 bp, Homo sapien
gaagaactttagtaatttgtcccac

SEQ ID NO: 39753 - DNA, 25 bp, Homo sapien
gaactcgacgaaaaggaggccgttt

SEQ ID NO: 39754 - DNA, 25 bp, Homo sapien
gaactcgacgaataggaggccgttt

SEQ ID NO: 39755 - DNA, 25 bp, Homo sapien
cccgtagccgtctggacaccgtctt

SEQ ID NO: 39756 - DNA, 25 bp, Homo sapien
cccgtagccgtcaggacaccgtctt

SEQ ID NO: 39757 - DNA, 25 bp, Homo sapien
tctttagttcgaagtgtcaccgttt

SEQ ID NO: 39758 - DNA, 25 bp, Homo sapien
tctttagttcgatgtgtcaccgttt

SEQ ID NO: 39759 - DNA, 25 bp, Homo sapien
cccgtgtgttgttggtgtcaagtat

SEQ ID NO: 39760 - DNA, 25 bp, Homo sapien
cccgtgtgttgtaggtgtcaagtat

SEQ ID NO: 39761 - DNA, 25 bp, Homo sapien
actgggtttctactgtgtctgacat

SEQ ID NO: 39762 - DNA, 25 bp, Homo sapien
actgggtttctagtgtgtctgacat

SEQ ID NO: 39763 - DNA, 25 bp, Homo sapien
actaaggtccctaagacccagtaac

SEQ ID NO: 39764 - DNA, 25 bp, Homo sapien
actaaggtcccttagacccagtaac

SEQ ID NO: 39765 - DNA, 25 bp, Homo sapien
ggtttacggcccagagccaccgaca

SEQ ID NO: 39766 - DNA, 25 bp, Homo sapien
ggtttacggccctgagccaccgaca

SEQ ID NO: 39767 - DNA, 25 bp, Homo sapien
gaacctaggacctggatcctgggta

SEQ ID NO: 39768 - DNA, 25 bp, Homo sapien
gaacctaggaccaggatcctgggta

SEQ ID NO: 39769 - DNA, 25 bp, Homo sapien
cttcggtgaccactgcttcgtcatc

SEQ ID NO: 39770 - DNA, 25 bp, Homo sapien
cttcggtgaccagtgcttcgtcatc

SEQ ID NO: 39771 - DNA, 25 bp, Homo sapien
ccgtggattaatcctccgcacgact

SEQ ID NO: 39772 - DNA, 25 bp, Homo sapien
ccgtggattaatgctccgcacgact

SEQ ID NO: 39773 - DNA, 25 bp, Homo sapien
tttgtcacaatgttactgacctatg

SEQ ID NO: 39774 - DNA, 25 bp, Homo sapien
tttgtcacaatgatactgacctatg

SEQ ID NO: 39775 - DNA, 25 bp, Homo sapien
ggttagtcattatggcagaccttat

SEQ ID NO: 39776 - DNA, 25 bp, Homo sapien
ggttagtcattaaggcagaccttat

SEQ ID NO: 39777 - DNA, 25 bp, Homo sapien
gtttcacctataagtcggatccagt

SEQ ID NO: 39778 - DNA, 25 bp, Homo sapien
gtttcacctatatgtcggatccagt

SEQ ID NO: 39779 - DNA, 25 bp, Homo sapien
ctctgtactctgttggtgactcttg

SEQ ID NO: 39780 - DNA, 25 bp, Homo sapien
ctctgtactctgatggtgactcttg

SEQ ID NO: 39781 - DNA, 25 bp, Homo sapien
ctcgtcgactggtggtacagcggta

SEQ ID NO: 39782 - DNA, 25 bp, Homo sapien
ctcgtcgactggaggtacagcggta

SEQ ID NO: 39783 - DNA, 25 bp, Homo sapien
tattgtgcctgtctgtctcgagggg

SEQ ID NO: 39784 - DNA, 25 bp, Homo sapien
tattgtgcctgtgtgtctcgagggg

SEQ ID NO: 39785 - DNA, 25 bp, Homo sapien
ggtatttccctttctttcaggaggt

SEQ ID NO: 39786 - DNA, 25 bp, Homo sapien
ggtatttcccttactttcaggaggt

SEQ ID NO: 39787 - DNA, 25 bp, Homo sapien
gtttcgtttcctctcatcctcgggg

SEQ ID NO: 39788 - DNA, 25 bp, Homo sapien
gtttcgtttcctgtcatcctcgggg

SEQ ID NO: 39789 - DNA, 25 bp, Homo sapien
gccttgagcttctgcttcaggagcc

SEQ ID NO: 39790 - DNA, 25 bp, Homo sapien
gccttgagcttcagcttcaggagcc

SEQ ID NO: 39791 - DNA, 25 bp, Homo sapien
acatccatccttcgttctatctggg

SEQ ID NO: 39792 - DNA, 25 bp, Homo sapien
acatccatccttggttctatctggg

SEQ ID NO: 39793 - DNA, 25 bp, Homo sapien
aaaccatccttcttgtccaacggtg

SEQ ID NO: 39794 - DNA, 25 bp, Homo sapien
aaaccatccttcatgtccaacggtg

SEQ ID NO: 39795 - DNA, 25 bp, Homo sapien
taaaatgtcccaatgttttacagag

SEQ ID NO: 39796 - DNA, 25 bp, Homo sapien
taaaatgtcccattgttttacagag

SEQ ID NO: 39797 - DNA, 25 bp, Homo sapien
agttatgtcctactgtgttttatcc

SEQ ID NO: 39798 - DNA, 25 bp, Homo sapien
agttatgtcctagtgtgttttatcc

SEQ ID NO: 39799 - DNA, 25 bp, Homo sapien
tctctaaccagttgtctgtgcctgt

SEQ ID NO: 39800 - DNA, 25 bp, Homo sapien
tctctaaccagtagtctgtgcctgt

SEQ ID NO: 39801 - DNA, 25 bp, Homo sapien
tgtaaggactgtaagacgtccggtt

SEQ ID NO: 39802 - DNA, 25 bp, Homo sapien
tgtaaggactgttagacgtccggtt

SEQ ID NO: 39803 - DNA, 25 bp, Homo sapien
taattacgggtgtaagtcgttctct

SEQ ID NO: 39804 - DNA, 25 bp, Homo sapien
taattacgggtgaaagtcgttctct

SEQ ID NO: 39805 - DNA, 25 bp, Homo sapien
attacttatcgtgttgactggttcc

SEQ ID NO: 39806 - DNA, 25 bp, Homo sapien
attacttatcgtcttgactggttcc

SEQ ID NO: 39807 - DNA, 25 bp, Homo sapien
gatcctttatgtgtcgagtggttcc

SEQ ID NO: 39808 - DNA, 25 bp, Homo sapien
gatcctttatgtctcgagtggttcc

SEQ ID NO: 39809 - DNA, 25 bp, Homo sapien
tccgtaaaagtcgtcggggtcgccg

SEQ ID NO: 39810 - DNA, 25 bp, Homo sapien
tccgtaaaagtcctcggggtcgccg

SEQ ID NO: 39811 - DNA, 25 bp, Homo sapien
tctcagtgtcaggactgggagcacc

SEQ ID NO: 39812 - DNA, 25 bp, Homo sapien
tctcagtgtcagcactgggagcacc

SEQ ID NO: 39813 - DNA, 25 bp, Homo sapien
gtgtcagttcctccacgggagcccg

SEQ ID NO: 39814 - DNA, 25 bp, Homo sapien
gtgtcagttcctgcacgggagcccg

SEQ ID NO: 39815 - DNA, 25 bp, Homo sapien
accgttgattgtttggtaacttctg

SEQ ID NO: 39816 - DNA, 25 bp, Homo sapien
accgttgattgtatggtaacttctg

SEQ ID NO: 39817 - DNA, 25 bp, Homo sapien
cgttaaaccgtggtgtcaagaccat

SEQ ID NO: 39818 - DNA, 25 bp, Homo sapien
cgttaaaccgtgctgtcaagaccat

SEQ ID NO: 39819 - DNA, 25 bp, Homo sapien
tttcacttgtgtatacgtccgacca

SEQ ID NO: 39820 - DNA, 25 bp, Homo sapien
tttcacttgtgtttacgtccgacca

SEQ ID NO: 39821 - DNA, 25 bp, Homo sapien
gtgtcgtcctttttcatcggaacga

SEQ ID NO: 39822 - DNA, 25 bp, Homo sapien
gtgtcgtcctttatcatcggaacga

SEQ ID NO: 39823 - DNA, 25 bp, Homo sapien
gtgtgtcatctattttgtgtcacca

SEQ ID NO: 39824 - DNA, 25 bp, Homo sapien
gtgtgtcatctaatttgtgtcacca

SEQ ID NO: 39825 - DNA, 25 bp, Homo sapien
agtccacaattcctgtgcactcgtg

SEQ ID NO: 39826 - DNA, 25 bp, Homo sapien
agtccacaattcgtgtgcactcgtg

SEQ ID NO: 39827 - DNA, 25 bp, Homo sapien
ttcgcctgacacacggaacatcgcg

SEQ ID NO: 39828 - DNA, 25 bp, Homo sapien
ttcgcctgacactcggaacatcgcg

SEQ ID NO: 39829 - DNA, 25 bp, Homo sapien
ttccgcgacgaagtggaacatcggt

SEQ ID NO: 39830 - DNA, 25 bp, Homo sapien
ttccgcgacgaactggaacatcggt

SEQ ID NO: 39831 - DNA, 25 bp, Homo sapien
gtctaatttgaacaggaacactgtg

SEQ ID NO: 39832 - DNA, 25 bp, Homo sapien
gtctaatttgaagaggaacactgtg

SEQ ID NO: 39833 - DNA, 25 bp, Homo sapien
gagaccctgggaagaccccgacaca

SEQ ID NO: 39834 - DNA, 25 bp, Homo sapien
gagaccctgggatgaccccgacaca

SEQ ID NO: 39835 - DNA, 25 bp, Homo sapien
gaaccaatttatgcaatgacgacta

SEQ ID NO: 39836 - DNA, 25 bp, Homo sapien
gaaccaatttatccaatgacgacta

SEQ ID NO: 39837 - DNA, 25 bp, Homo sapien
aagaaattttagcaaccacgactag

SEQ ID NO: 39838 - DNA, 25 bp, Homo sapien
aagaaattttaggaaccacgactag

SEQ ID NO: 39839 - DNA, 25 bp, Homo sapien
aaacctttataggagacctgtcacg

SEQ ID NO: 39840 - DNA, 25 bp, Homo sapien
aaacctttatagcagacctgtcacg

SEQ ID NO: 39841 - DNA, 25 bp, Homo sapien
tatgaacgtccatgccgtcctgcgg

SEQ ID NO: 39842 - DNA, 25 bp, Homo sapien
tatgaacgtccaagccgtcctgcgg

SEQ ID NO: 39843 - DNA, 25 bp, Homo sapien
tgacttcgtcgagttccccgagtcg

SEQ ID NO: 39844 - DNA, 25 bp, Homo sapien
tgacttcgtcgacttccccgagtcg

SEQ ID NO: 39845 - DNA, 25 bp, Homo sapien
aggccgagttggactctttaccatg

SEQ ID NO: 39846 - DNA, 25 bp, Homo sapien
aggccgagttggtctctttaccatg

SEQ ID NO: 39847 - DNA, 25 bp, Homo sapien
gattcagggactttatcttctcatt

SEQ ID NO: 39848 - DNA, 25 bp, Homo sapien
gattcagggactatatcttctcatt

SEQ ID NO: 39849 - DNA, 25 bp, Homo sapien
ggtacaggacagagacctattcttc

SEQ ID NO: 39850 - DNA, 25 bp, Homo sapien
ggtacaggacagtgacctattcttc

SEQ ID NO: 39851 - DNA, 25 bp, Homo sapien
gtcgaaaagatataccagttatcaa

SEQ ID NO: 39852 - DNA, 25 bp, Homo sapien
gtcgaaaagataaaccagttatcaa

SEQ ID NO: 39853 - DNA, 25 bp, Homo sapien
gaagtaagacttattctaccgtcac

SEQ ID NO: 39854 - DNA, 25 bp, Homo sapien
gaagtaagactttttctaccgtcac

SEQ ID NO: 39855 - DNA, 25 bp, Homo sapien
caagaagacgttgttacaatctcgt

SEQ ID NO: 39856 - DNA, 25 bp, Homo sapien
caagaagacgttcttacaatctcgt

SEQ ID NO: 39857 - DNA, 25 bp, Homo sapien
tgaacatgattgctatacatctcgg

SEQ ID NO: 39858 - DNA, 25 bp, Homo sapien
tgaacatgattggtatacatctcgg

SEQ ID NO: 39859 - DNA, 25 bp, Homo sapien
atactcatgtcaagggtctttatat

SEQ ID NO: 39860 - DNA, 25 bp, Homo sapien
atactcatgtcatgggtctttatat

SEQ ID NO: 39861 - DNA, 25 bp, Homo sapien
gactcacacttccttgctcgaagac

SEQ ID NO: 39862 - DNA, 25 bp, Homo sapien
gactcacacttcgttgctcgaagac

SEQ ID NO: 39863 - DNA, 25 bp, Homo sapien
gacgacgttgtgctgtgtttccaaa

SEQ ID NO: 39864 - DNA, 25 bp, Homo sapien
gacgacgttgtggtgtgtttccaaa

SEQ ID NO: 39865 - DNA, 25 bp, Homo sapien
cagagattagtagtaagtccctaaa

SEQ ID NO: 39866 - DNA, 25 bp, Homo sapien
cagagattagtactaagtccctaaa

SEQ ID NO: 39867 - DNA, 25 bp, Homo sapien
gaatatgtgatgtatcggccggacg

SEQ ID NO: 39868 - DNA, 25 bp, Homo sapien
gaatatgtgatgaatcggccggacg

SEQ ID NO: 39869 - DNA, 25 bp, Homo sapien
aacatgattgctatacatctcggtg

SEQ ID NO: 39870 - DNA, 25 bp, Homo sapien
aacatgattgctttacatctcggtg

SEQ ID NO: 39871 - DNA, 25 bp, Homo sapien
taagaccttttctccgatgtagaag

SEQ ID NO: 39872 - DNA, 25 bp, Homo sapien
taagaccttttcaccgatgtagaag

SEQ ID NO: 39873 - DNA, 25 bp, Homo sapien
ggaacccctcgtccaggttgtccga

SEQ ID NO: 39874 - DNA, 25 bp, Homo sapien
ggaacccctcgtgcaggttgtccga

SEQ ID NO: 39875 - DNA, 25 bp, Homo sapien
atcgactctcctccagtcggtttca

SEQ ID NO: 39876 - DNA, 25 bp, Homo sapien
atcgactctcctgcagtcggtttca

SEQ ID NO: 39877 - DNA, 25 bp, Homo sapien
tcgcggcccgtattatcttttgact

SEQ ID NO: 39878 - DNA, 25 bp, Homo sapien
tcgcggcccgtaatatcttttgact

SEQ ID NO: 39879 - DNA, 25 bp, Homo sapien
gtccgaccctagattaactatgtta

SEQ ID NO: 39880 - DNA, 25 bp, Homo sapien
gtccgaccctagtttaactatgtta

SEQ ID NO: 39881 - DNA, 25 bp, Homo sapien
acgaaatctctctttaagagtacaa

SEQ ID NO: 39882 - DNA, 25 bp, Homo sapien
acgaaatctctcattaagagtacaa

SEQ ID NO: 39883 - DNA, 25 bp, Homo sapien
agacatgtttcgaacatagttacaa

SEQ ID NO: 39884 - DNA, 25 bp, Homo sapien
agacatgtttcgtacatagttacaa

SEQ ID NO: 39885 - DNA, 25 bp, Homo sapien
acgagtaaggagacccgtgtcggaa

SEQ ID NO: 39886 - DNA, 25 bp, Homo sapien
acgagtaaggagtcccgtgtcggaa

SEQ ID NO: 39887 - DNA, 25 bp, Homo sapien
acaggtcgacgtctccttgacccga

SEQ ID NO: 39888 - DNA, 25 bp, Homo sapien
acaggtcgacgtgtccttgacccga

SEQ ID NO: 39889 - DNA, 25 bp, Homo sapien
aagtctatatgtcttgacggtcagt

SEQ ID NO: 39890 - DNA, 25 bp, Homo sapien
aagtctatatgtgttgacggtcagt

SEQ ID NO: 39891 - DNA, 25 bp, Homo sapien
tgataaaaggggtatgtgtacacgt

SEQ ID NO: 39892 - DNA, 25 bp, Homo sapien
tgataaaaggggaatgtgtacacgt

SEQ ID NO: 39893 - DNA, 25 bp, Homo sapien
tccccggaatgtgaccaacgtaagt

SEQ ID NO: 39894 - DNA, 25 bp, Homo sapien
tccccggaatgtcaccaacgtaagt

SEQ ID NO: 39895 - DNA, 25 bp, Homo sapien
tacaagaaggtaggtcacaaccatg

SEQ ID NO: 39896 - DNA, 25 bp, Homo sapien
tacaagaaggtacgtcacaaccatg

SEQ ID NO: 39897 - DNA, 25 bp, Homo sapien
actgtaaagggtaccccttaccaac

SEQ ID NO: 39898 - DNA, 25 bp, Homo sapien
actgtaaagggttccccttaccaac

SEQ ID NO: 39899 - DNA, 25 bp, Homo sapien
attcttggagtattcgttcccccga

SEQ ID NO: 39900 - DNA, 25 bp, Homo sapien
attcttggagtaatcgttcccccga

SEQ ID NO: 39901 - DNA, 25 bp, Homo sapien
ggatatagaaatttctccctaactg

SEQ ID NO: 39902 - DNA, 25 bp, Homo sapien
ggatatagaaatatctccctaactg

SEQ ID NO: 39903 - DNA, 25 bp, Homo sapien
acactcaaggagtcacactaacgtc

SEQ ID NO: 39904 - DNA, 25 bp, Homo sapien
acactcaaggagacacactaacgtc

SEQ ID NO: 39905 - DNA, 25 bp, Homo sapien
tccgcaaaagtggaggagacctaaa

SEQ ID NO: 39906 - DNA, 25 bp, Homo sapien
tccgcaaaagtgcaggagacctaaa

SEQ ID NO: 39907 - DNA, 25 bp, Homo sapien
ccagacaaagaaggtcccgacacag

SEQ ID NO: 39908 - DNA, 25 bp, Homo sapien
ccagacaaagaacgtcccgacacag

SEQ ID NO: 39909 - DNA, 25 bp, Homo sapien
aaaccggagagaagggtccctcagt

SEQ ID NO: 39910 - DNA, 25 bp, Homo sapien
aaaccggagagatgggtccctcagt

SEQ ID NO: 39911 - DNA, 25 bp, Homo sapien
cagattcccagagtcagacttttac

SEQ ID NO: 39912 - DNA, 25 bp, Homo sapien
cagattcccagactcagacttttac

SEQ ID NO: 39913 - DNA, 25 bp, Homo sapien
cggttcctcccattcacgtgggtcg

SEQ ID NO: 39914 - DNA, 25 bp, Homo sapien
cggttcctcccaatcacgtgggtcg

SEQ ID NO: 39915 - DNA, 25 bp, Homo sapien
ccgtgtcccaagtgtcattcgtgta

SEQ ID NO: 39916 - DNA, 25 bp, Homo sapien
ccgtgtcccaagagtcattcgtgta

SEQ ID NO: 39917 - DNA, 25 bp, Homo sapien
agtcttccaagacgtcgtctaggga

SEQ ID NO: 39918 - DNA, 25 bp, Homo sapien
agtcttccaagaggtcgtctaggga

SEQ ID NO: 39919 - DNA, 25 bp, Homo sapien
gtactataacccttggtagagtgta

SEQ ID NO: 39920 - DNA, 25 bp, Homo sapien
gtactataacccatggtagagtgta

SEQ ID NO: 39921 - DNA, 25 bp, Homo sapien
agaatctcacttccaggaagtgtat

SEQ ID NO: 39922 - DNA, 25 bp, Homo sapien
agaatctcacttgcaggaagtgtat

SEQ ID NO: 39923 - DNA, 25 bp, Homo sapien
aactccgtactggacgggaacggtc

SEQ ID NO: 39924 - DNA, 25 bp, Homo sapien
aactccgtactgcacgggaacggtc

SEQ ID NO: 39925 - DNA, 25 bp, Homo sapien
tgttactggacgaatgacaccgtcg

SEQ ID NO: 39926 - DNA, 25 bp, Homo sapien
tgttactggacgtatgacaccgtcg

SEQ ID NO: 39927 - DNA, 25 bp, Homo sapien
gccgctctgtcgccgattcacagtt

SEQ ID NO: 39928 - DNA, 25 bp, Homo sapien
gccgctctgtcggcgattcacagtt

SEQ ID NO: 39929 - DNA, 25 bp, Homo sapien
tctattcctcctagggtcgtcgagg

SEQ ID NO: 39930 - DNA, 25 bp, Homo sapien
tctattcctccttgggtcgtcgagg

SEQ ID NO: 39931 - DNA, 25 bp, Homo sapien
taatcggaccaggagaccgtaggtg

SEQ ID NO: 39932 - DNA, 25 bp, Homo sapien
taatcggaccagcagaccgtaggtg

SEQ ID NO: 39933 - DNA, 25 bp, Homo sapien
ttgaagtaccctgacaacatgtgtg

SEQ ID NO: 39934 - DNA, 25 bp, Homo sapien
ttgaagtaccctcacaacatgtgtg

SEQ ID NO: 39935 - DNA, 25 bp, Homo sapien
ccgtgattctactcacatcttgtgg

SEQ ID NO: 39936 - DNA, 25 bp, Homo sapien
ccgtgattctacacacatcttgtgg

SEQ ID NO: 39937 - DNA, 25 bp, Homo sapien
ctttatttacttgtgtacttcagag

SEQ ID NO: 39938 - DNA, 25 bp, Homo sapien
ctttatttacttctgtacttcagag

SEQ ID NO: 39939 - DNA, 25 bp, Homo sapien
ttcttatcccttctgtcagtaggac

SEQ ID NO: 39940 - DNA, 25 bp, Homo sapien
ttcttatcccttgtgtcagtaggac

SEQ ID NO: 39941 - DNA, 25 bp, Homo sapien
ctagtcttcctctattgggtctggg

SEQ ID NO: 39942 - DNA, 25 bp, Homo sapien
ctagtcttcctcaattgggtctggg

SEQ ID NO: 39943 - DNA, 25 bp, Homo sapien
tcccaggaagtctgaggtctacggg

SEQ ID NO: 39944 - DNA, 25 bp, Homo sapien
tcccaggaagtcagaggtctacggg

SEQ ID NO: 39945 - DNA, 25 bp, Homo sapien
cccgaccgtaacgggagttgctggt

SEQ ID NO: 39946 - DNA, 25 bp, Homo sapien
cccgaccgtaaccggagttgctggt

SEQ ID NO: 39947 - DNA, 25 bp, Homo sapien
ctaccgacggtgtaagggtgtcgcc

SEQ ID NO: 39948 - DNA, 25 bp, Homo sapien
ctaccgacggtgaaagggtgtcgcc

SEQ ID NO: 39949 - DNA, 25 bp, Homo sapien
cagaaacactgtcttccatgtcacc

SEQ ID NO: 39950 - DNA, 25 bp, Homo sapien
cagaaacactgtgttccatgtcacc

SEQ ID NO: 39951 - DNA, 25 bp, Homo sapien
gaaacgactgtgtcagcaggaccct

SEQ ID NO: 39952 - DNA, 25 bp, Homo sapien
gaaacgactgtgacagcaggaccct

SEQ ID NO: 39953 - DNA, 25 bp, Homo sapien
aaaccgacgatcagaaagagcccgt

SEQ ID NO: 39954 - DNA, 25 bp, Homo sapien
aaaccgacgatctgaaagagcccgt

SEQ ID NO: 39955 - DNA, 25 bp, Homo sapien
gaagcatccggtcgtcgaggagccc

SEQ ID NO: 39956 - DNA, 25 bp, Homo sapien
gaagcatccggtggtcgaggagccc

SEQ ID NO: 39957 - DNA, 25 bp, Homo sapien
cagccggtcgagaaagacgtcctac

SEQ ID NO: 39958 - DNA, 25 bp, Homo sapien
cagccggtcgagtaagacgtcctac

SEQ ID NO: 39959 - DNA, 25 bp, Homo sapien
actctttacagtggactgaagtatt

SEQ ID NO: 39960 - DNA, 25 bp, Homo sapien
actctttacagtcgactgaagtatt

SEQ ID NO: 39961 - DNA, 25 bp, Homo sapien
gagaccgcgacatctagacgtacaa

SEQ ID NO: 39962 - DNA, 25 bp, Homo sapien
gagaccgcgacaactagacgtacaa

SEQ ID NO: 39963 - DNA, 25 bp, Homo sapien
cagcccgtcggcgtgtgatactcgt

SEQ ID NO: 39964 - DNA, 25 bp, Homo sapien
cagcccgtcggcctgtgatactcgt

SEQ ID NO: 39965 - DNA, 25 bp, Homo sapien
gtcttcgtgtttttctcataaatag

SEQ ID NO: 39966 - DNA, 25 bp, Homo sapien
gtcttcgtgtttatctcataaatag

SEQ ID NO: 39967 - DNA, 25 bp, Homo sapien
tcgtgttataccaatcagagtaatc

SEQ ID NO: 39968 - DNA, 25 bp, Homo sapien
tcgtgttatacctatcagagtaatc

SEQ ID NO: 39969 - DNA, 25 bp, Homo sapien
gtactgttaacatatactgtgacaa

SEQ ID NO: 39970 - DNA, 25 bp, Homo sapien
gtactgttaacaaatactgtgacaa

SEQ ID NO: 39971 - DNA, 25 bp, Homo sapien
tcgttgtttgaaagttctgttccta

SEQ ID NO: 39972 - DNA, 25 bp, Homo sapien
tcgttgtttgaatgttctgttccta

SEQ ID NO: 39973 - DNA, 25 bp, Homo sapien
tttttctgtcgaaaggttcgattca

SEQ ID NO: 39974 - DNA, 25 bp, Homo sapien
tttttctgtcgataggttcgattca

SEQ ID NO: 39975 - DNA, 25 bp, Homo sapien
tgtcgtgacaaaccagactagttta

SEQ ID NO: 39976 - DNA, 25 bp, Homo sapien
tgtcgtgacaaagcagactagttta

SEQ ID NO: 39977 - DNA, 25 bp, Homo sapien
cctgcagaagaagctcttctagttc

SEQ ID NO: 39978 - DNA, 25 bp, Homo sapien
cctgcagaagaacctcttctagttc

SEQ ID NO: 39979 - DNA, 25 bp, Homo sapien
tgtagaactaaagacacttttacgt

SEQ ID NO: 39980 - DNA, 25 bp, Homo sapien
tgtagaactaaacacacttttacgt

SEQ ID NO: 39981 - DNA, 25 bp, Homo sapien
atgttgtaataacgtcctccttacg

SEQ ID NO: 39982 - DNA, 25 bp, Homo sapien
atgttgtaataaggtcctccttacg

SEQ ID NO: 39983 - DNA, 25 bp, Homo sapien
ttggagacgactagtcctccctacg

SEQ ID NO: 39984 - DNA, 25 bp, Homo sapien
ttggagacgacttgtcctccctacg

SEQ ID NO: 39985 - DNA, 25 bp, Homo sapien
gatcaacaggtttacgaacctctac

SEQ ID NO: 39986 - DNA, 25 bp, Homo sapien
gatcaacaggttaacgaacctctac

SEQ ID NO: 39987 - DNA, 25 bp, Homo sapien
gaaacaggtcgtataataactactc

SEQ ID NO: 39988 - DNA, 25 bp, Homo sapien
gaaacaggtcgtttaataactactc

SEQ ID NO: 39989 - DNA, 25 bp, Homo sapien
gtgtactgggtcaagaaccactcag

SEQ ID NO: 39990 - DNA, 25 bp, Homo sapien
gtgtactgggtctagaaccactcag

SEQ ID NO: 39991 - DNA, 25 bp, Homo sapien
gtcacactagggtctcccgtaccag

SEQ ID NO: 39992 - DNA, 25 bp, Homo sapien
gtcacactagggactcccgtaccag

SEQ ID NO: 39993 - DNA, 25 bp, Homo sapien
acacgacgaaggacccgacgaccag

SEQ ID NO: 39994 - DNA, 25 bp, Homo sapien
acacgacgaaggtcccgacgaccag

SEQ ID NO: 39995 - DNA, 25 bp, Homo sapien
tcgtagacatggaccggtaccacgt

SEQ ID NO: 39996 - DNA, 25 bp, Homo sapien
tcgtagacatggtccggtaccacgt

SEQ ID NO: 39997 - DNA, 25 bp, Homo sapien
tactctgaccacgtcctgtagaaac

SEQ ID NO: 39998 - DNA, 25 bp, Homo sapien
tactctgaccacctcctgtagaaac

SEQ ID NO: 39999 - DNA, 25 bp, Homo sapien
tattcacacacctaagacacggaga

SEQ ID NO: 40000 - DNA, 25 bp, Homo sapien
tattcacacaccaaagacacggaga

SEQ ID NO: 40001 - DNA, 25 bp, Homo sapien
acagagtaggtgttatacactaaca

SEQ ID NO: 40002 - DNA, 25 bp, Homo sapien
acagagtaggtgatatacactaaca

SEQ ID NO: 40003 - DNA, 25 bp, Homo sapien
tagaagtcgaacagagtgaccacca

SEQ ID NO: 40004 - DNA, 25 bp, Homo sapien
tagaagtcgaactgagtgaccacca

SEQ ID NO: 40005 - DNA, 25 bp, Homo sapien
cggtcgagactaggtggacgaccta

SEQ ID NO: 40006 - DNA, 25 bp, Homo sapien
cggtcgagactacgtggacgaccta

SEQ ID NO: 40007 - DNA, 25 bp, Homo sapien
tgtttaagtttaaccaacctcgaag

SEQ ID NO: 40008 - DNA, 25 bp, Homo sapien
tgtttaagtttatccaacctcgaag

SEQ ID NO: 40009 - DNA, 25 bp, Homo sapien
acgaaagtagtccacaagaacaacg

SEQ ID NO: 40010 - DNA, 25 bp, Homo sapien
acgaaagtagtcgacaagaacaacg

SEQ ID NO: 40011 - DNA, 25 bp, Homo sapien
ggtctaggtcggaacgagacctatg

SEQ ID NO: 40012 - DNA, 25 bp, Homo sapien
ggtctaggtcggtacgagacctatg

SEQ ID NO: 40013 - DNA, 25 bp, Homo sapien
ttgtcggtatgtatacttcgatcgt

SEQ ID NO: 40014 - DNA, 25 bp, Homo sapien
ttgtcggtatgtttacttcgatcgt

SEQ ID NO: 40015 - DNA, 25 bp, Homo sapien
cacccgtagtcttttacttggtacg

SEQ ID NO: 40016 - DNA, 25 bp, Homo sapien
cacccgtagtctattacttggtacg

SEQ ID NO: 40017 - DNA, 25 bp, Homo sapien
cttaccggaactacttgtagtgtcc

SEQ ID NO: 40018 - DNA, 25 bp, Homo sapien
cttaccggaacttcttgtagtgtcc

SEQ ID NO: 40019 - DNA, 25 bp, Homo sapien
agtttatgacttgtagtgttacacc

SEQ ID NO: 40020 - DNA, 25 bp, Homo sapien
agtttatgacttctagtgttacacc

SEQ ID NO: 40021 - DNA, 25 bp, Homo sapien
aatgtcgaagttttcagtgtgtccc

SEQ ID NO: 40022 - DNA, 25 bp, Homo sapien
aatgtcgaagttatcagtgtgtccc

SEQ ID NO: 40023 - DNA, 25 bp, Homo sapien
aatagatatctttcgtctgatcttc

SEQ ID NO: 40024 - DNA, 25 bp, Homo sapien
aatagatatcttacgtctgatcttc

SEQ ID NO: 40025 - DNA, 25 bp, Homo sapien
actatctatacataactcgttcatc

SEQ ID NO: 40026 - DNA, 25 bp, Homo sapien
actatctatacaaaactcgttcatc

SEQ ID NO: 40027 - DNA, 25 bp, Homo sapien
ttactactaccatatcgtcgttcgg

SEQ ID NO: 40028 - DNA, 25 bp, Homo sapien
ttactactaccaaatcgtcgttcgg

SEQ ID NO: 40029 - DNA, 25 bp, Homo sapien
gtcgaacgtcataactacgttgtgg

SEQ ID NO: 40030 - DNA, 25 bp, Homo sapien
gtcgaacgtcattactacgttgtgg

SEQ ID NO: 40031 - DNA, 25 bp, Homo sapien
gcgtcgacatcatcaccttacacgg

SEQ ID NO: 40032 - DNA, 25 bp, Homo sapien
gcgtcgacatcaacaccttacacgg

SEQ ID NO: 40033 - DNA, 25 bp, Homo sapien
cggtagagtaaccaaaccttaccat

SEQ ID NO: 40034 - DNA, 25 bp, Homo sapien
cggtagagtaacgaaaccttaccat

SEQ ID NO: 40035 - DNA, 25 bp, Homo sapien
cctcagtgtactggtaccctcaaag

SEQ ID NO: 40036 - DNA, 25 bp, Homo sapien
cctcagtgtactcgtaccctcaaag

SEQ ID NO: 40037 - DNA, 25 bp, Homo sapien
gtcccatctcggactacttctcgaa

SEQ ID NO: 40038 - DNA, 25 bp, Homo sapien
gtcccatctcggtctacttctcgaa

SEQ ID NO: 40039 - DNA, 25 bp, Homo sapien
cctacgtcgacgtccttcacggtgt

SEQ ID NO: 40040 - DNA, 25 bp, Homo sapien
cctacgtcgacgaccttcacggtgt

SEQ ID NO: 40041 - DNA, 25 bp, Homo sapien
tacgactgtcggaggaacgactcgg

SEQ ID NO: 40042 - DNA, 25 bp, Homo sapien
tacgactgtcggtggaacgactcgg

SEQ ID NO: 40043 - DNA, 25 bp, Homo sapien
cctagaggtgtttcagcaggacgtg

SEQ ID NO: 40044 - DNA, 25 bp, Homo sapien
cctagaggtgttacagcaggacgtg

SEQ ID NO: 40045 - DNA, 25 bp, Homo sapien
cctagttgtatcttaccctttgtcg

SEQ ID NO: 40046 - DNA, 25 bp, Homo sapien
cctagttgtatcataccctttgtcg

SEQ ID NO: 40047 - DNA, 25 bp, Homo sapien
tctcatcttgtctaacacgagtttg

SEQ ID NO: 40048 - DNA, 25 bp, Homo sapien
tctcatcttgtcaaacacgagtttg

SEQ ID NO: 40049 - DNA, 25 bp, Homo sapien
tgtagtttactcaaaagtacgtttc

SEQ ID NO: 40050 - DNA, 25 bp, Homo sapien
tgtagtttactctaaagtacgtttc

SEQ ID NO: 40051 - DNA, 25 bp, Homo sapien
ggtcgacgtcttttataacttaaga

SEQ ID NO: 40052 - DNA, 25 bp, Homo sapien
ggtcgacgtcttatataacttaaga

SEQ ID NO: 40053 - DNA, 25 bp, Homo sapien
gagtaacctctcatttagtttatag

SEQ ID NO: 40054 - DNA, 25 bp, Homo sapien
gagtaacctctcttttagtttatag

SEQ ID NO: 40055 - DNA, 25 bp, Homo sapien
cgtattaacgcttgtttatgtactg

SEQ ID NO: 40056 - DNA, 25 bp, Homo sapien
cgtattaacgctagtttatgtactg

SEQ ID NO: 40057 - DNA, 25 bp, Homo sapien
ttggtacgacgtgactttgtacatt

SEQ ID NO: 40058 - DNA, 25 bp, Homo sapien
ttggtacgacgtcactttgtacatt

SEQ ID NO: 40059 - DNA, 25 bp, Homo sapien
acgtaggttactaatgatcgtgatc

SEQ ID NO: 40060 - DNA, 25 bp, Homo sapien
acgtaggttacttatgatcgtgatc

SEQ ID NO: 40061 - DNA, 25 bp, Homo sapien
cgaaggtgatatcatagtcgtctct

SEQ ID NO: 40062 - DNA, 25 bp, Homo sapien
cgaaggtgatatgatagtcgtctct

SEQ ID NO: 40063 - DNA, 25 bp, Homo sapien
tcgaaggagactaagaaggcgtcgt

SEQ ID NO: 40064 - DNA, 25 bp, Homo sapien
tcgaaggagacttagaaggcgtcgt

SEQ ID NO: 40065 - DNA, 25 bp, Homo sapien
gtgtagagacaagttactgtcgtac

SEQ ID NO: 40066 - DNA, 25 bp, Homo sapien
gtgtagagacaacttactgtcgtac

SEQ ID NO: 40067 - DNA, 25 bp, Homo sapien
gaccggtagacctgtaacctgtact

SEQ ID NO: 40068 - DNA, 25 bp, Homo sapien
gaccggtagaccagtaacctgtact

SEQ ID NO: 40069 - DNA, 25 bp, Homo sapien
taggtccctaatgtcgtcgataagt

SEQ ID NO: 40070 - DNA, 25 bp, Homo sapien
taggtccctaatctcgtcgataagt

SEQ ID NO: 40071 - DNA, 25 bp, Homo sapien
atatgcagtctattttatcatatat

SEQ ID NO: 40072 - DNA, 25 bp, Homo sapien
atatgcagtctaatttatcatatat

SEQ ID NO: 40073 - DNA, 25 bp, Homo sapien
ctcgacagctacctcggtctcttgg

SEQ ID NO: 40074 - DNA, 25 bp, Homo sapien
ctcgacagctacgtcggtctcttgg

SEQ ID NO: 40075 - DNA, 25 bp, Homo sapien
agcggacgaaagacggtcctctctg

SEQ ID NO: 40076 - DNA, 25 bp, Homo sapien
agcggacgaaagtcggtcctctctg

SEQ ID NO: 40077 - DNA, 25 bp, Homo sapien
gtgtaagaacattggtcgacgtccc

SEQ ID NO: 40078 - DNA, 25 bp, Homo sapien
gtgtaagaacataggtcgacgtccc

SEQ ID NO: 40079 - DNA, 25 bp, Homo sapien
ctgacaagtatattgtgtactttcc

SEQ ID NO: 40080 - DNA, 25 bp, Homo sapien
ctgacaagtataatgtgtactttcc

SEQ ID NO: 40081 - DNA, 25 bp, Homo sapien
cgtgtcaagtgtaggtattcttctt

SEQ ID NO: 40082 - DNA, 25 bp, Homo sapien
cgtgtcaagtgttggtattcttctt

SEQ ID NO: 40083 - DNA, 25 bp, Homo sapien
tctcgagtttgtgtgtttgacccat

SEQ ID NO: 40084 - DNA, 25 bp, Homo sapien
tctcgagtttgtctgtttgacccat

SEQ ID NO: 40085 - DNA, 25 bp, Homo sapien
tccgggggtcttactacgggtccta

SEQ ID NO: 40086 - DNA, 25 bp, Homo sapien
tccgggggtctttctacgggtccta

SEQ ID NO: 40087 - DNA, 25 bp, Homo sapien
ggggtcatccgtttcaggggtcctc

SEQ ID NO: 40088 - DNA, 25 bp, Homo sapien
ggggtcatccgtatcaggggtcctc

SEQ ID NO: 40089 - DNA, 25 bp, Homo sapien
tggcgtaagccaaagggttccgtcg

SEQ ID NO: 40090 - DNA, 25 bp, Homo sapien
tggcgtaagccatagggttccgtcg

SEQ ID NO: 40091 - DNA, 25 bp, Homo sapien
gggagtcattgactggtttctagtc

SEQ ID NO: 40092 - DNA, 25 bp, Homo sapien
gggagtcattgagtggtttctagtc

SEQ ID NO: 40093 - DNA, 25 bp, Homo sapien
tactgacgaggtaattaggttcttc

SEQ ID NO: 40094 - DNA, 25 bp, Homo sapien
tactgacgaggttattaggttcttc

SEQ ID NO: 40095 - DNA, 25 bp, Homo sapien
aaagtgtgtctacttagagtcatct

SEQ ID NO: 40096 - DNA, 25 bp, Homo sapien
aaagtgtgtctagttagagtcatct

SEQ ID NO: 40097 - DNA, 25 bp, Homo sapien
caaaagtagacttcgttagggactt

SEQ ID NO: 40098 - DNA, 25 bp, Homo sapien
caaaagtagactacgttagggactt

SEQ ID NO: 40099 - DNA, 25 bp, Homo sapien
tccaaatgtaattgtcagtgcacta

SEQ ID NO: 40100 - DNA, 25 bp, Homo sapien
tccaaatgtaatagtcagtgcacta

SEQ ID NO: 40101 - DNA, 25 bp, Homo sapien
actcaagtaaagaagatacgtccaa

SEQ ID NO: 40102 - DNA, 25 bp, Homo sapien
actcaagtaaagtagatacgtccaa

SEQ ID NO: 40103 - DNA, 25 bp, Homo sapien
gggaagtccgagtagaccgttctgc

SEQ ID NO: 40104 - DNA, 25 bp, Homo sapien
gggaagtccgagaagaccgttctgc

SEQ ID NO: 40105 - DNA, 25 bp, Homo sapien
gtagaatctttaggacgaaaccgaa

SEQ ID NO: 40106 - DNA, 25 bp, Homo sapien
gtagaatctttacgacgaaaccgaa

SEQ ID NO: 40107 - DNA, 25 bp, Homo sapien
tgagaacttatacgtcgcatcagaa

SEQ ID NO: 40108 - DNA, 25 bp, Homo sapien
tgagaacttataggtcgcatcagaa

SEQ ID NO: 40109 - DNA, 25 bp, Homo sapien
gacactcgaagtggaactagaccat

SEQ ID NO: 40110 - DNA, 25 bp, Homo sapien
gacactcgaagtcgaactagaccat

SEQ ID NO: 40111 - DNA, 25 bp, Homo sapien
catgttactgggaacacttcaacct

SEQ ID NO: 40112 - DNA, 25 bp, Homo sapien
catgttactgggtacacttcaacct

SEQ ID NO: 40113 - DNA, 25 bp, Homo sapien
tgtttgtgttgtcagtgactgtacc

SEQ ID NO: 40114 - DNA, 25 bp, Homo sapien
tgtttgtgttgtgagtgactgtacc

SEQ ID NO: 40115 - DNA, 25 bp, Homo sapien
agatctttgtcttgtgactaccctc

SEQ ID NO: 40116 - DNA, 25 bp, Homo sapien
agatctttgtctagtgactaccctc

SEQ ID NO: 40117 - DNA, 25 bp, Homo sapien
cgaacttgtcgaggacctaccggca

SEQ ID NO: 40118 - DNA, 25 bp, Homo sapien
cgaacttgtcgacgacctaccggca

SEQ ID NO: 40119 - DNA, 25 bp, Homo sapien
aaggtcgtcaggactccccgttcct

SEQ ID NO: 40120 - DNA, 25 bp, Homo sapien
aaggtcgtcaggtctccccgttcct

SEQ ID NO: 40121 - DNA, 25 bp, Homo sapien
cgtctcgtacccagtcactgtgtca

SEQ ID NO: 40122 - DNA, 25 bp, Homo sapien
cgtctcgtaccctgtcactgtgtca

SEQ ID NO: 40123 - DNA, 25 bp, Homo sapien
gatcggacctacctctgcggcggca

SEQ ID NO: 40124 - DNA, 25 bp, Homo sapien
gatcggacctacgtctgcggcggca

SEQ ID NO: 40125 - DNA, 25 bp, Homo sapien
cggactcgtccatttccggtcggca

SEQ ID NO: 40126 - DNA, 25 bp, Homo sapien
cggactcgtccaattccggtcggca

SEQ ID NO: 40127 - DNA, 25 bp, Homo sapien
gtccgcccgttctgtgtgccgtcta

SEQ ID NO: 40128 - DNA, 25 bp, Homo sapien
gtccgcccgttcagtgtgccgtcta

SEQ ID NO: 40129 - DNA, 25 bp, Homo sapien
tgcacaccagtacctggaccgtctt

SEQ ID NO: 40130 - DNA, 25 bp, Homo sapien
tgcacaccagtagctggaccgtctt

SEQ ID NO: 40131 - DNA, 25 bp, Homo sapien
gaaggtccagcaaaggacacactct

SEQ ID NO: 40132 - DNA, 25 bp, Homo sapien
gaaggtccagcataggacacactct

SEQ ID NO: 40133 - DNA, 25 bp, Homo sapien
gcgtcctaccagtccgggtacgagt

SEQ ID NO: 40134 - DNA, 25 bp, Homo sapien
gcgtcctaccagaccgggtacgagt

SEQ ID NO: 40135 - DNA, 25 bp, Homo sapien
aacaccggacccaacctagtcgagg

SEQ ID NO: 40136 - DNA, 25 bp, Homo sapien
aacaccggaccctacctagtcgagg

SEQ ID NO: 40137 - DNA, 25 bp, Homo sapien
taactctggtctctcactcgtcagg

SEQ ID NO: 40138 - DNA, 25 bp, Homo sapien
taactctggtctgtcactcgtcagg

SEQ ID NO: 40139 - DNA, 25 bp, Homo sapien
atttgtttgactagtcctagacata

SEQ ID NO: 40140 - DNA, 25 bp, Homo sapien
atttgtttgacttgtcctagacata

SEQ ID NO: 40141 - DNA, 25 bp, Homo sapien
gttgtccggacctccacgacgtcat

SEQ ID NO: 40142 - DNA, 25 bp, Homo sapien
gttgtccggaccaccacgacgtcat

SEQ ID NO: 40143 - DNA, 25 bp, Homo sapien
agtgtcaggagattctccacagtaa

SEQ ID NO: 40144 - DNA, 25 bp, Homo sapien
agtgtcaggagaatctccacagtaa

SEQ ID NO: 40145 - DNA, 25 bp, Homo sapien
ttatatgtccaaaggacgacaggtc

SEQ ID NO: 40146 - DNA, 25 bp, Homo sapien
ttatatgtccaatggacgacaggtc

SEQ ID NO: 40147 - DNA, 25 bp, Homo sapien
gaaatcgtcgggtggtccgaacgtc

SEQ ID NO: 40148 - DNA, 25 bp, Homo sapien
gaaatcgtcgggaggtccgaacgtc

SEQ ID NO: 40149 - DNA, 25 bp, Homo sapien
aagtgtcgggtagacgtgtcccctt

SEQ ID NO: 40150 - DNA, 25 bp, Homo sapien
aagtgtcgggtacacgtgtcccctt

SEQ ID NO: 40151 - DNA, 25 bp, Homo sapien
gacaaaggacgacaggtccactcta

SEQ ID NO: 40152 - DNA, 25 bp, Homo sapien
gacaaaggacgagaggtccactcta

SEQ ID NO: 40153 - DNA, 25 bp, Homo sapien
cagaggaggaagaacgacccgacaa

SEQ ID NO: 40154 - DNA, 25 bp, Homo sapien
cagaggaggaagtacgacccgacaa

SEQ ID NO: 40155 - DNA, 25 bp, Homo sapien
agagtgttcaagtgcctcgactcac

SEQ ID NO: 40156 - DNA, 25 bp, Homo sapien
agagtgttcaagagcctcgactcac

SEQ ID NO: 40157 - DNA, 25 bp, Homo sapien
aaaagtttgttataaccgtccgtaa

SEQ ID NO: 40158 - DNA, 25 bp, Homo sapien
aaaagtttgttaaaaccgtccgtaa

SEQ ID NO: 40159 - DNA, 25 bp, Homo sapien
gtgtcttttattaagtcgttatatt

SEQ ID NO: 40160 - DNA, 25 bp, Homo sapien
gtgtcttttatttagtcgttatatt

SEQ ID NO: 40161 - DNA, 25 bp, Homo sapien
gacggaccccagaatacctctttct

SEQ ID NO: 40162 - DNA, 25 bp, Homo sapien
gacggaccccagtatacctctttct

SEQ ID NO: 40163 - DNA, 25 bp, Homo sapien
gggggccttccttacgtctcttatt

SEQ ID NO: 40164 - DNA, 25 bp, Homo sapien
gggggccttcctaacgtctcttatt

SEQ ID NO: 40165 - DNA, 25 bp, Homo sapien
gggttccttcttacgtgtctctctg

SEQ ID NO: 40166 - DNA, 25 bp, Homo sapien
gggttccttctttcgtgtctctctg

SEQ ID NO: 40167 - DNA, 25 bp, Homo sapien
gagattcctgggttctttacgtcgg

SEQ ID NO: 40168 - DNA, 25 bp, Homo sapien
gagattcctgggatctttacgtcgg

SEQ ID NO: 40169 - DNA, 25 bp, Homo sapien
tacaagagtgtcagggtcaatggtc

SEQ ID NO: 40170 - DNA, 25 bp, Homo sapien
tacaagagtgtctgggtcaatggtc

SEQ ID NO: 40171 - DNA, 25 bp, Homo sapien
aattaacgacttacggagaaaccga

SEQ ID NO: 40172 - DNA, 25 bp, Homo sapien
aattaacgactttcggagaaaccga

SEQ ID NO: 40173 - DNA, 25 bp, Homo sapien
tagtcgacacttgtagacgacagaa

SEQ ID NO: 40174 - DNA, 25 bp, Homo sapien
tagtcgacacttctagacgacagaa

SEQ ID NO: 40175 - DNA, 25 bp, Homo sapien
gtcccgttgtacgacgtaacgtcgg

SEQ ID NO: 40176 - DNA, 25 bp, Homo sapien
gtcccgttgtaccacgtaacgtcgg

SEQ ID NO: 40177 - DNA, 25 bp, Homo sapien
gacaaacgtcgtagacgaaccgccc

SEQ ID NO: 40178 - DNA, 25 bp, Homo sapien
gacaaacgtcgttgacgaaccgccc

SEQ ID NO: 40179 - DNA, 25 bp, Homo sapien
tcgacaaagggtaacaagacacccg

SEQ ID NO: 40180 - DNA, 25 bp, Homo sapien
tcgacaaagggttacaagacacccg

SEQ ID NO: 40181 - DNA, 25 bp, Homo sapien
gtgacacaaggtaggttggacgtcc

SEQ ID NO: 40182 - DNA, 25 bp, Homo sapien
gtgacacaaggttggttggacgtcc

SEQ ID NO: 40183 - DNA, 25 bp, Homo sapien
ggacctcaggacgatgggtcgtaca

SEQ ID NO: 40184 - DNA, 25 bp, Homo sapien
ggacctcaggaccatgggtcgtaca

SEQ ID NO: 40185 - DNA, 25 bp, Homo sapien
tggacgacctaggtcccggggttca

SEQ ID NO: 40186 - DNA, 25 bp, Homo sapien
tggacgacctagctcccggggttca

SEQ ID NO: 40187 - DNA, 25 bp, Homo sapien
tcgaacagtcgatcggggagtttga

SEQ ID NO: 40188 - DNA, 25 bp, Homo sapien
tcgaacagtcgaacggggagtttga

SEQ ID NO: 40189 - DNA, 25 bp, Homo sapien
cacggagtcccgtagtcatacttga

SEQ ID NO: 40190 - DNA, 25 bp, Homo sapien
cacggagtcccgaagtcatacttga

SEQ ID NO: 40191 - DNA, 25 bp, Homo sapien
cgtcagcacacagtgtacctgtaca

SEQ ID NO: 40192 - DNA, 25 bp, Homo sapien
cgtcagcacacactgtacctgtaca

SEQ ID NO: 40193 - DNA, 25 bp, Homo sapien
ggtgtgaacaaatcggacggacact

SEQ ID NO: 40194 - DNA, 25 bp, Homo sapien
ggtgtgaacaaaacggacggacact

SEQ ID NO: 40195 - DNA, 25 bp, Homo sapien
tggaggacacacgaacagaagtaac

SEQ ID NO: 40196 - DNA, 25 bp, Homo sapien
tggaggacacaccaacagaagtaac

SEQ ID NO: 40197 - DNA, 25 bp, Homo sapien
gtcagtcaccaccaaagcatcgacg

SEQ ID NO: 40198 - DNA, 25 bp, Homo sapien
gtcagtcaccacgaaagcatcgacg

SEQ ID NO: 40199 - DNA, 25 bp, Homo sapien
taggttcctacgaccgtagtttcgg

SEQ ID NO: 40200 - DNA, 25 bp, Homo sapien
taggttcctacgtccgtagtttcgg

SEQ ID NO: 40201 - DNA, 25 bp, Homo sapien
ggtcgacgcacacgacgtctccggt

SEQ ID NO: 40202 - DNA, 25 bp, Homo sapien
ggtcgacgcacaggacgtctccggt

SEQ ID NO: 40203 - DNA, 25 bp, Homo sapien
gtctagggactgttactggggtccc

SEQ ID NO: 40204 - DNA, 25 bp, Homo sapien
gtctagggactgatactggggtccc

SEQ ID NO: 40205 - DNA, 25 bp, Homo sapien
cttcgcgagtaagacgcggtgccac

SEQ ID NO: 40206 - DNA, 25 bp, Homo sapien
cttcgcgagtaacacgcggtgccac

SEQ ID NO: 40207 - DNA, 25 bp, Homo sapien
ccctccgttttgatatcacgtactg

SEQ ID NO: 40208 - DNA, 25 bp, Homo sapien
ccctccgttttgttatcacgtactg

SEQ ID NO: 40209 - DNA, 25 bp, Homo sapien
ccgacccttctttctagggactcgt

SEQ ID NO: 40210 - DNA, 25 bp, Homo sapien
ccgacccttcttactagggactcgt

SEQ ID NO: 40211 - DNA, 25 bp, Homo sapien
ccttggtgtctacgacatgcactgt

SEQ ID NO: 40212 - DNA, 25 bp, Homo sapien
ccttggtgtctaggacatgcactgt

SEQ ID NO: 40213 - DNA, 25 bp, Homo sapien
tagtctcagtttctcgaagtgctgg

SEQ ID NO: 40214 - DNA, 25 bp, Homo sapien
tagtctcagtttgtcgaagtgctgg

SEQ ID NO: 40215 - DNA, 25 bp, Homo sapien
ttgtgtcggtcaaaggtgacccttc

SEQ ID NO: 40216 - DNA, 25 bp, Homo sapien
ttgtgtcggtcataggtgacccttc

SEQ ID NO: 40217 - DNA, 25 bp, Homo sapien
ctgtaggtacttaggtcgtcccatc

SEQ ID NO: 40218 - DNA, 25 bp, Homo sapien
ctgtaggtactttggtcgtcccatc

SEQ ID NO: 40219 - DNA, 25 bp, Homo sapien
gccccgtaaactacacagataatag

SEQ ID NO: 40220 - DNA, 25 bp, Homo sapien
gccccgtaaacttcacagataatag

SEQ ID NO: 40221 - DNA, 25 bp, Homo sapien
tctcccatagagttcactcagaaag

SEQ ID NO: 40222 - DNA, 25 bp, Homo sapien
tctcccatagagatcactcagaaag

SEQ ID NO: 40223 - DNA, 25 bp, Homo sapien
cgccgacgagggactccagtgcgac

SEQ ID NO: 40224 - DNA, 25 bp, Homo sapien
cgccgacgagggtctccagtgcgac

SEQ ID NO: 40225 - DNA, 25 bp, Homo sapien
gccagagagacctggaccggacgac

SEQ ID NO: 40226 - DNA, 25 bp, Homo sapien
gccagagagaccaggaccggacgac

SEQ ID NO: 40227 - DNA, 25 bp, Homo sapien
tttgttactgaagagagggtcccac

SEQ ID NO: 40228 - DNA, 25 bp, Homo sapien
tttgttactgaacagagggtcccac

SEQ ID NO: 40229 - DNA, 25 bp, Homo sapien
cggatagtacaagaatctttccgag

SEQ ID NO: 40230 - DNA, 25 bp, Homo sapien
cggatagtacaacaatctttccgag

SEQ ID NO: 40231 - DNA, 25 bp, Homo sapien
aaaacgtcagtagcaaatgtctaaa

SEQ ID NO: 40232 - DNA, 25 bp, Homo sapien
aaaacgtcagtaccaaatgtctaaa

SEQ ID NO: 40233 - DNA, 25 bp, Homo sapien
acacagtacgttttatgtgtcagta

SEQ ID NO: 40234 - DNA, 25 bp, Homo sapien
acacagtacgttatatgtgtcagta

SEQ ID NO: 40235 - DNA, 25 bp, Homo sapien
gcgacccagtctaactctgtttggt

SEQ ID NO: 40236 - DNA, 25 bp, Homo sapien
gcgacccagtcttactctgtttggt

SEQ ID NO: 40237 - DNA, 25 bp, Homo sapien
cccgtccagatttgagtgtcttcag

SEQ ID NO: 40238 - DNA, 25 bp, Homo sapien
cccgtccagattagagtgtcttcag

SEQ ID NO: 40239 - DNA, 25 bp, Homo sapien
atctgaagggaaaggtagaccttgt

SEQ ID NO: 40240 - DNA, 25 bp, Homo sapien
atctgaagggaatggtagaccttgt

SEQ ID NO: 40241 - DNA, 25 bp, Homo sapien
tctagttattgaaaggtacgccttt

SEQ ID NO: 40242 - DNA, 25 bp, Homo sapien
tctagttattgataggtacgccttt

SEQ ID NO: 40243 - DNA, 25 bp, Homo sapien
ttctcttggagttcaattctctctg

SEQ ID NO: 40244 - DNA, 25 bp, Homo sapien
ttctcttggagtacaattctctctg

SEQ ID NO: 40245 - DNA, 25 bp, Homo sapien
actccaagaagacagaggtaccctc

SEQ ID NO: 40246 - DNA, 25 bp, Homo sapien
actccaagaagagagaggtaccctc

SEQ ID NO: 40247 - DNA, 25 bp, Homo sapien
ttcgcttataagagaaggtcccact

SEQ ID NO: 40248 - DNA, 25 bp, Homo sapien
ttcgcttataagtgaaggtcccact

SEQ ID NO: 40249 - DNA, 25 bp, Homo sapien
tcctataatacattcaagttctcct

SEQ ID NO: 40250 - DNA, 25 bp, Homo sapien
tcctataatacaatcaagttctcct

SEQ ID NO: 40251 - DNA, 25 bp, Homo sapien
taagacacagacaaaacagtttccg

SEQ ID NO: 40252 - DNA, 25 bp, Homo sapien
taagacacagactaaacagtttccg

SEQ ID NO: 40253 - DNA, 25 bp, Homo sapien
gttggactaagtcaagcaatatttc

SEQ ID NO: 40254 - DNA, 25 bp, Homo sapien
gttggactaagtgaagcaatatttc

SEQ ID NO: 40255 - DNA, 25 bp, Homo sapien
gttccgtccgaatcgtcgattccct

SEQ ID NO: 40256 - DNA, 25 bp, Homo sapien
gttccgtccgaaacgtcgattccct

SEQ ID NO: 40257 - DNA, 25 bp, Homo sapien
atccttcctctccagaggtattttg

SEQ ID NO: 40258 - DNA, 25 bp, Homo sapien
atccttcctctcgagaggtattttg

SEQ ID NO: 40259 - DNA, 25 bp, Homo sapien
atctttactacatggggtgttttac

SEQ ID NO: 40260 - DNA, 25 bp, Homo sapien
atctttactacaaggggtgttttac

SEQ ID NO: 40261 - DNA, 25 bp, Homo sapien
cagtcgtaatttaggtggtcttttc

SEQ ID NO: 40262 - DNA, 25 bp, Homo sapien
cagtcgtaattttggtggtcttttc

SEQ ID NO: 40263 - DNA, 25 bp, Homo sapien
ccggtagtatttgtttatacatttc

SEQ ID NO: 40264 - DNA, 25 bp, Homo sapien
ccggtagtatttctttatacatttc

SEQ ID NO: 40265 - DNA, 25 bp, Homo sapien
gtacgtgtactgaccttactttttc

SEQ ID NO: 40266 - DNA, 25 bp, Homo sapien
gtacgtgtactgtccttactttttc

SEQ ID NO: 40267 - DNA, 25 bp, Homo sapien
acgactctcctgaatcctgggtcgt

SEQ ID NO: 40268 - DNA, 25 bp, Homo sapien
acgactctcctgtatcctgggtcgt

SEQ ID NO: 40269 - DNA, 25 bp, Homo sapien
tcgcatcgacctgaacttaccgggt

SEQ ID NO: 40270 - DNA, 25 bp, Homo sapien
tcgcatcgacctcaacttaccgggt

SEQ ID NO: 40271 - DNA, 25 bp, Homo sapien
tccccgactccgtgttcacgatagt

SEQ ID NO: 40272 - DNA, 25 bp, Homo sapien
tccccgactccgagttcacgatagt

SEQ ID NO: 40273 - DNA, 25 bp, Homo sapien
tctcctttcccgtagttccggacgt

SEQ ID NO: 40274 - DNA, 25 bp, Homo sapien
tctcctttcccgaagttccggacgt

SEQ ID NO: 40275 - DNA, 25 bp, Homo sapien
ttcttcctgtccaagaacccgtagt

SEQ ID NO: 40276 - DNA, 25 bp, Homo sapien
ttcttcctgtcctagaacccgtagt

SEQ ID NO: 40277 - DNA, 25 bp, Homo sapien
tgtagacatttttgaactagatcca

SEQ ID NO: 40278 - DNA, 25 bp, Homo sapien
tgtagacattttagaactagatcca

SEQ ID NO: 40279 - DNA, 25 bp, Homo sapien
gtgaccggttccagagaagatccag

SEQ ID NO: 40280 - DNA, 25 bp, Homo sapien
gtgaccggttcctgagaagatccag

SEQ ID NO: 40281 - DNA, 25 bp, Homo sapien
tgtagttccttctccacggaccaac

SEQ ID NO: 40282 - DNA, 25 bp, Homo sapien
tgtagttccttcaccacggaccaac

SEQ ID NO: 40283 - DNA, 25 bp, Homo sapien
ggtttatatcgtcctccggaccttc

SEQ ID NO: 40284 - DNA, 25 bp, Homo sapien
ggtttatatcgtgctccggaccttc

SEQ ID NO: 40285 - DNA, 25 bp, Homo sapien
ggggttttcactttccaacacctcg

SEQ ID NO: 40286 - DNA, 25 bp, Homo sapien
ggggttttcactatccaacacctcg

SEQ ID NO: 40287 - DNA, 25 bp, Homo sapien
ggttgatgtccgagtccctctgctg

SEQ ID NO: 40288 - DNA, 25 bp, Homo sapien
ggttgatgtccgtgtccctctgctg

SEQ ID NO: 40289 - DNA, 25 bp, Homo sapien
gtacctttccgagtccacatcagac

SEQ ID NO: 40290 - DNA, 25 bp, Homo sapien
gtacctttccgactccacatcagac

SEQ ID NO: 40291 - DNA, 25 bp, Homo sapien
atatgttactcgtcacccgagatgg

SEQ ID NO: 40292 - DNA, 25 bp, Homo sapien
atatgttactcgacacccgagatgg

SEQ ID NO: 40293 - DNA, 25 bp, Homo sapien
gacgtttacgggaacaccagatgcg

SEQ ID NO: 40294 - DNA, 25 bp, Homo sapien
gacgtttacgggtacaccagatgcg

SEQ ID NO: 40295 - DNA, 25 bp, Homo sapien
gctagtctccggacgaaagtctagg

SEQ ID NO: 40296 - DNA, 25 bp, Homo sapien
gctagtctccggtcgaaagtctagg

SEQ ID NO: 40297 - DNA, 25 bp, Homo sapien
tagttgtgacactacttcaacaagg

SEQ ID NO: 40298 - DNA, 25 bp, Homo sapien
tagttgtgacacaacttcaacaagg

SEQ ID NO: 40299 - DNA, 25 bp, Homo sapien
aagaagaggaactatcacagacatg

SEQ ID NO: 40300 - DNA, 25 bp, Homo sapien
aagaagaggaacaatcacagacatg

SEQ ID NO: 40301 - DNA, 25 bp, Homo sapien
gaagaccgaaaggacctactccacc

SEQ ID NO: 40302 - DNA, 25 bp, Homo sapien
gaagaccgaaagcacctactccacc

SEQ ID NO: 40303 - DNA, 25 bp, Homo sapien
tgttgaggacaatcgggtctcctcc

SEQ ID NO: 40304 - DNA, 25 bp, Homo sapien
tgttgaggacaaacgggtctcctcc

SEQ ID NO: 40305 - DNA, 25 bp, Homo sapien
tctggggctagacgtctctccttcc

SEQ ID NO: 40306 - DNA, 25 bp, Homo sapien
tctggggctagaggtctctccttcc

SEQ ID NO: 40307 - DNA, 25 bp, Homo sapien
gagccggttcaggtgcccgtctgct

SEQ ID NO: 40308 - DNA, 25 bp, Homo sapien
gagccggttcagctgcccgtctgct

SEQ ID NO: 40309 - DNA, 25 bp, Homo sapien
gaagggtctctcgtagtgttcttcc

SEQ ID NO: 40310 - DNA, 25 bp, Homo sapien
gaagggtctctcctagtgttcttcc

SEQ ID NO: 40311 - DNA, 25 bp, Homo sapien
gatttggattccatcttcattacgt

SEQ ID NO: 40312 - DNA, 25 bp, Homo sapien
gatttggattccttcttcattacgt

SEQ ID NO: 40313 - DNA, 25 bp, Homo sapien
atgtttcggagtaactctttcattg

SEQ ID NO: 40314 - DNA, 25 bp, Homo sapien
atgtttcggagttactctttcattg

SEQ ID NO: 40315 - DNA, 25 bp, Homo sapien
aggtcggttacctacttcccactta

SEQ ID NO: 40316 - DNA, 25 bp, Homo sapien
aggtcggttaccaacttcccactta

SEQ ID NO: 40317 - DNA, 25 bp, Homo sapien
ctaggtctttcaggacacaactaca

SEQ ID NO: 40318 - DNA, 25 bp, Homo sapien
ctaggtctttcacgacacaactaca

SEQ ID NO: 40319 - DNA, 25 bp, Homo sapien
ggagtctctccaagtagaacgatca

SEQ ID NO: 40320 - DNA, 25 bp, Homo sapien
ggagtctctccatgtagaacgatca

SEQ ID NO: 40321 - DNA, 25 bp, Homo sapien
gacgtttacctaaaatacgtcgact

SEQ ID NO: 40322 - DNA, 25 bp, Homo sapien
gacgtttacctataatacgtcgact

SEQ ID NO: 40323 - DNA, 25 bp, Homo sapien
ggtcatcggacgtatctacgttact

SEQ ID NO: 40324 - DNA, 25 bp, Homo sapien
ggtcatcggacgaatctacgttact

SEQ ID NO: 40325 - DNA, 25 bp, Homo sapien
tggtcactcttagttttaacagttt

SEQ ID NO: 40326 - DNA, 25 bp, Homo sapien
tggtcactcttacttttaacagttt

SEQ ID NO: 40327 - DNA, 25 bp, Homo sapien
ggtcacaaccgtacttaatacgttc

SEQ ID NO: 40328 - DNA, 25 bp, Homo sapien
ggtcacaaccgttcttaatacgttc

SEQ ID NO: 40329 - DNA, 25 bp, Homo sapien
gacctctaacatcgtgggtgtgtct

SEQ ID NO: 40330 - DNA, 25 bp, Homo sapien
gacctctaacatggtgggtgtgtct

SEQ ID NO: 40331 - DNA, 25 bp, Homo sapien
ctcccgactattctttgagtcgtct

SEQ ID NO: 40332 - DNA, 25 bp, Homo sapien
ctcccgactattgtttgagtcgtct

SEQ ID NO: 40333 - DNA, 25 bp, Homo sapien
cttgagtcaaacaagagtgactctc

SEQ ID NO: 40334 - DNA, 25 bp, Homo sapien
cttgagtcaaactagagtgactctc

SEQ ID NO: 40335 - DNA, 25 bp, Homo sapien
ttatggaacagttgtaatcgagcac

SEQ ID NO: 40336 - DNA, 25 bp, Homo sapien
ttatggaacagtagtaatcgagcac

SEQ ID NO: 40337 - DNA, 25 bp, Homo sapien
taggttacgagtactatgttctcag

SEQ ID NO: 40338 - DNA, 25 bp, Homo sapien
taggttacgagttctatgttctcag

SEQ ID NO: 40339 - DNA, 25 bp, Homo sapien
tagtcttgagtctgactgatgtcct

SEQ ID NO: 40340 - DNA, 25 bp, Homo sapien
tagtcttgagtcagactgatgtcct

SEQ ID NO: 40341 - DNA, 25 bp, Homo sapien
tctggtaagaccactacgagactga

SEQ ID NO: 40342 - DNA, 25 bp, Homo sapien
tctggtaagacctctacgagactga

SEQ ID NO: 40343 - DNA, 25 bp, Homo sapien
acttggtcaccttcttagagtagag

SEQ ID NO: 40344 - DNA, 25 bp, Homo sapien
acttggtcacctacttagagtagag

SEQ ID NO: 40345 - DNA, 25 bp, Homo sapien
aggacttcatcctgtaagtcaagga

SEQ ID NO: 40346 - DNA, 25 bp, Homo sapien
aggacttcatccagtaagtcaagga

SEQ ID NO: 40347 - DNA, 25 bp, Homo sapien
cttccacaccggtgtcgaaccgagt

SEQ ID NO: 40348 - DNA, 25 bp, Homo sapien
cttccacaccggagtcgaaccgagt

SEQ ID NO: 40349 - DNA, 25 bp, Homo sapien
ggttttgcagacgaagtcagaacta

SEQ ID NO: 40350 - DNA, 25 bp, Homo sapien
ggttttgcagaccaagtcagaacta

SEQ ID NO: 40351 - DNA, 25 bp, Homo sapien
tagtttcccggtctatactgttata

SEQ ID NO: 40352 - DNA, 25 bp, Homo sapien
tagtttcccggtgtatactgttata

SEQ ID NO: 40353 - DNA, 25 bp, Homo sapien
ggttctccactgtttatacttgtta

SEQ ID NO: 40354 - DNA, 25 bp, Homo sapien
ggttctccactgattatacttgtta

SEQ ID NO: 40355 - DNA, 25 bp, Homo sapien
tggacgtcaattcaaaaactgttac

SEQ ID NO: 40356 - DNA, 25 bp, Homo sapien
tggacgtcaattgaaaaactgttac

SEQ ID NO: 40357 - DNA, 25 bp, Homo sapien
aatgtgttctcgaacaaagtaaact

SEQ ID NO: 40358 - DNA, 25 bp, Homo sapien
aatgtgttctcgtacaaagtaaact

SEQ ID NO: 40359 - DNA, 25 bp, Homo sapien
actttggtgttcggctagaggaaga

SEQ ID NO: 40360 - DNA, 25 bp, Homo sapien
actttggtgttccgctagaggaaga

SEQ ID NO: 40361 - DNA, 25 bp, Homo sapien
cagttttgtgtcgtctaaagacata

SEQ ID NO: 40362 - DNA, 25 bp, Homo sapien
cagttttgtgtcctctaaagacata

SEQ ID NO: 40363 - DNA, 25 bp, Homo sapien
actttactttggttcatgacaaacg

SEQ ID NO: 40364 - DNA, 25 bp, Homo sapien
actttactttggatcatgacaaacg

SEQ ID NO: 40365 - DNA, 25 bp, Homo sapien
cttctaaaggtatcgatgacttatg

SEQ ID NO: 40366 - DNA, 25 bp, Homo sapien
cttctaaaggtaacgatgacttatg

SEQ ID NO: 40367 - DNA, 25 bp, Homo sapien
acagtttactagtagaacccgttgg

SEQ ID NO: 40368 - DNA, 25 bp, Homo sapien
acagtttactagaagaacccgttgg

SEQ ID NO: 40369 - DNA, 25 bp, Homo sapien
ggaagttcacgtcaaagtatttcat

SEQ ID NO: 40370 - DNA, 25 bp, Homo sapien
ggaagttcacgtgaaagtatttcat

SEQ ID NO: 40371 - DNA, 25 bp, Homo sapien
acgaaatagggatcgccttctcact

SEQ ID NO: 40372 - DNA, 25 bp, Homo sapien
acgaaatagggaacgccttctcact

SEQ ID NO: 40373 - DNA, 25 bp, Homo sapien
ccgtccctggtgagacgtttctgct

SEQ ID NO: 40374 - DNA, 25 bp, Homo sapien
ccgtccctggtgtgacgtttctgct

SEQ ID NO: 40375 - DNA, 25 bp, Homo sapien
gccacagatggttacggtccgtcgg

SEQ ID NO: 40376 - DNA, 25 bp, Homo sapien
gccacagatggtaacggtccgtcgg

SEQ ID NO: 40377 - DNA, 25 bp, Homo sapien
agtccgtctgagacgggtctccccg

SEQ ID NO: 40378 - DNA, 25 bp, Homo sapien
agtccgtctgagtcgggtctccccg

SEQ ID NO: 40379 - DNA, 25 bp, Homo sapien
aagaaacttgatagttagttacccc

SEQ ID NO: 40380 - DNA, 25 bp, Homo sapien
aagaaacttgattgttagttacccc

SEQ ID NO: 40381 - DNA, 25 bp, Homo sapien
gaggactggagactggagttccttt

SEQ ID NO: 40382 - DNA, 25 bp, Homo sapien
gaggactggagagtggagttccttt

SEQ ID NO: 40383 - DNA, 25 bp, Homo sapien
ccggtgacgtcgtggtaaccgttct

SEQ ID NO: 40384 - DNA, 25 bp, Homo sapien
ccggtgacgtcgaggtaaccgttct

SEQ ID NO: 40385 - DNA, 25 bp, Homo sapien
tcttggtgtcgaggtgactccgatt

SEQ ID NO: 40386 - DNA, 25 bp, Homo sapien
tcttggtgtcgacgtgactccgatt

SEQ ID NO: 40387 - DNA, 25 bp, Homo sapien
tgctgtggtttatctggtcaagact

SEQ ID NO: 40388 - DNA, 25 bp, Homo sapien
tgctgtggtttaactggtcaagact

SEQ ID NO: 40389 - DNA, 25 bp, Homo sapien
ctggtgtctttatgggtaccgacac

SEQ ID NO: 40390 - DNA, 25 bp, Homo sapien
ctggtgtctttaagggtaccgacac

SEQ ID NO: 40391 - DNA, 25 bp, Homo sapien
aaacaaggtcctgatgaccccgaac

SEQ ID NO: 40392 - DNA, 25 bp, Homo sapien
aaacaaggtcctcatgaccccgaac

SEQ ID NO: 40393 - DNA, 25 bp, Homo sapien
gtctcaggtcccaggaactccgtca

SEQ ID NO: 40394 - DNA, 25 bp, Homo sapien
gtctcaggtccctggaactccgtca

SEQ ID NO: 40395 - DNA, 25 bp, Homo sapien
cgctactgagcctgggtcccgagga

SEQ ID NO: 40396 - DNA, 25 bp, Homo sapien
cgctactgagccagggtcccgagga

SEQ ID NO: 40397 - DNA, 25 bp, Homo sapien
cttctgagccagtcggttcgtaaca

SEQ ID NO: 40398 - DNA, 25 bp, Homo sapien
cttctgagccagacggttcgtaaca

SEQ ID NO: 40399 - DNA, 25 bp, Homo sapien
cgtggagttagaggtctcctcacta

SEQ ID NO: 40400 - DNA, 25 bp, Homo sapien
cgtggagttagacgtctcctcacta

SEQ ID NO: 40401 - DNA, 25 bp, Homo sapien
tatgtcgatttacgtcttaccactg

SEQ ID NO: 40402 - DNA, 25 bp, Homo sapien
tatgtcgatttaggtcttaccactg

SEQ ID NO: 40403 - DNA, 25 bp, Homo sapien
tctagtttttagtcgtagtcctcta

SEQ ID NO: 40404 - DNA, 25 bp, Homo sapien
tctagtttttagacgtagtcctcta

SEQ ID NO: 40405 - DNA, 25 bp, Homo sapien
tgtttcacctataagtcggatccag

SEQ ID NO: 40406 - DNA, 25 bp, Homo sapien
tgtttcacctattagtcggatccag

SEQ ID NO: 40407 - DNA, 25 bp, Homo sapien
ctttgtcaacggttggtgactcctg

SEQ ID NO: 40408 - DNA, 25 bp, Homo sapien
ctttgtcaacggatggtgactcctg

SEQ ID NO: 40409 - DNA, 25 bp, Homo sapien
ttctcatcgagatcggtaagtgcta

SEQ ID NO: 40410 - DNA, 25 bp, Homo sapien
ttctcatcgagaacggtaagtgcta

SEQ ID NO: 40411 - DNA, 25 bp, Homo sapien
attttccgtgtgagtagcaggtctg

SEQ ID NO: 40412 - DNA, 25 bp, Homo sapien
attttccgtgtgtgtagcaggtctg

SEQ ID NO: 40413 - DNA, 25 bp, Homo sapien
gattcttccttttttgacaggaagt

SEQ ID NO: 40414 - DNA, 25 bp, Homo sapien
gattcttcctttattgacaggaagt

SEQ ID NO: 40415 - DNA, 25 bp, Homo sapien
tttcgtttcctctcatcctcggggt

SEQ ID NO: 40416 - DNA, 25 bp, Homo sapien
tttcgtttcctcacatcctcggggt

SEQ ID NO: 40417 - DNA, 25 bp, Homo sapien
ccttgagcttctgcttcaggagccg

SEQ ID NO: 40418 - DNA, 25 bp, Homo sapien
ccttgagcttctccttcaggagccg

SEQ ID NO: 40419 - DNA, 25 bp, Homo sapien
ttccgaccttgtcctctcatgggcg

SEQ ID NO: 40420 - DNA, 25 bp, Homo sapien
ttccgaccttgtgctctcatgggcg

SEQ ID NO: 40421 - DNA, 25 bp, Homo sapien
aaacctcctttgttcccaagtgtgt

SEQ ID NO: 40422 - DNA, 25 bp, Homo sapien
aaacctcctttgatcccaagtgtgt

SEQ ID NO: 40423 - DNA, 25 bp, Homo sapien
taaaaatctcttgtgttttcggacg

SEQ ID NO: 40424 - DNA, 25 bp, Homo sapien
taaaaatctcttctgttttcggacg

SEQ ID NO: 40425 - DNA, 25 bp, Homo sapien
aaattaatcctgacgtcttttggac

SEQ ID NO: 40426 - DNA, 25 bp, Homo sapien
aaattaatcctgtcgtcttttggac

SEQ ID NO: 40427 - DNA, 25 bp, Homo sapien
aaatcgacggtgaaccgagtaatgt

SEQ ID NO: 40428 - DNA, 25 bp, Homo sapien
aaatcgacggtgtaccgagtaatgt

SEQ ID NO: 40429 - DNA, 25 bp, Homo sapien
tctagacggacttcgtgctcctgtt

SEQ ID NO: 40430 - DNA, 25 bp, Homo sapien
tctagacggactacgtgctcctgtt

SEQ ID NO: 40431 - DNA, 25 bp, Homo sapien
atttacggtgtgtatagacgttccg

SEQ ID NO: 40432 - DNA, 25 bp, Homo sapien
atttacggtgtgaatagacgttccg

SEQ ID NO: 40433 - DNA, 25 bp, Homo sapien
caattcttagttttgactggtcccg

SEQ ID NO: 40434 - DNA, 25 bp, Homo sapien
caattcttagttatgactggtcccg

SEQ ID NO: 40435 - DNA, 25 bp, Homo sapien
aatgttacatatatcgagggtctcc

SEQ ID NO: 40436 - DNA, 25 bp, Homo sapien
aatgttacatatttcgagggtctcc

SEQ ID NO: 40437 - DNA, 25 bp, Homo sapien
gtacacgaagaaggttcggggtccc

SEQ ID NO: 40438 - DNA, 25 bp, Homo sapien
gtacacgaagaacgttcggggtccc

SEQ ID NO: 40439 - DNA, 25 bp, Homo sapien
tcgaggtacaggttcaggtagtccc

SEQ ID NO: 40440 - DNA, 25 bp, Homo sapien
tcgaggtacaggatcaggtagtccc

SEQ ID NO: 40441 - DNA, 25 bp, Homo sapien
tctgcggtcacgaccgggagtcccg

SEQ ID NO: 40442 - DNA, 25 bp, Homo sapien
tctgcggtcacgtccgggagtcccg

SEQ ID NO: 40443 - DNA, 25 bp, Homo sapien
tcttgaactgcatcggtaactcttg

SEQ ID NO: 40444 - DNA, 25 bp, Homo sapien
tcttgaactgcaacggtaactcttg

SEQ ID NO: 40445 - DNA, 25 bp, Homo sapien
cgttagacattggaggatcgaccta

SEQ ID NO: 40446 - DNA, 25 bp, Homo sapien
cgttagacattgcaggatcgaccta

SEQ ID NO: 40447 - DNA, 25 bp, Homo sapien
tcctctgtgtctaagtcacgtccta

SEQ ID NO: 40448 - DNA, 25 bp, Homo sapien
tcctctgtgtcttagtcacgtccta

SEQ ID NO: 40449 - DNA, 25 bp, Homo sapien
gttctcctttttatccgtcacgtcg

SEQ ID NO: 40450 - DNA, 25 bp, Homo sapien
gttctcctttttttccgtcacgtcg

SEQ ID NO: 40451 - DNA, 25 bp, Homo sapien
gtctcctattacctttctgctacca

SEQ ID NO: 40452 - DNA, 25 bp, Homo sapien
gtctcctattacgtttctgctacca

SEQ ID NO: 40453 - DNA, 25 bp, Homo sapien
ggtccaactttcttctgtctctgta

SEQ ID NO: 40454 - DNA, 25 bp, Homo sapien
ggtccaactttcatctgtctctgta

SEQ ID NO: 40455 - DNA, 25 bp, Homo sapien
attccctgtcataggaactactgtt

SEQ ID NO: 40456 - DNA, 25 bp, Homo sapien
attccctgtcattggaactactgtt

SEQ ID NO: 40457 - DNA, 25 bp, Homo sapien
ttcgcggagagaggtggaacaatct

SEQ ID NO: 40458 - DNA, 25 bp, Homo sapien
ttcgcggagagacgtggaacaatct

SEQ ID NO: 40459 - DNA, 25 bp, Homo sapien
gaaacatcggaaacgggaaccagtg

SEQ ID NO: 40460 - DNA, 25 bp, Homo sapien
gaaacatcggaatcgggaaccagtg

SEQ ID NO: 40461 - DNA, 25 bp, Homo sapien
gagaccaaggaaaccccgtcgacca

SEQ ID NO: 40462 - DNA, 25 bp, Homo sapien
gagaccaaggaatccccgtcgacca

SEQ ID NO: 40463 - DNA, 25 bp, Homo sapien
gaaccaatttgttccttagacacag

SEQ ID NO: 40464 - DNA, 25 bp, Homo sapien
gaaccaatttgtaccttagacacag

SEQ ID NO: 40465 - DNA, 25 bp, Homo sapien
ggaacaacatttgttaaccacatag

SEQ ID NO: 40466 - DNA, 25 bp, Homo sapien
ggaacaacatttcttaaccacatag

SEQ ID NO: 40467 - DNA, 25 bp, Homo sapien
gacaacctttaaacagacctttagt

SEQ ID NO: 40468 - DNA, 25 bp, Homo sapien
gacaacctttaatcagacctttagt

SEQ ID NO: 40469 - DNA, 25 bp, Homo sapien
cacacgtccaagacgacttgtgcgt

SEQ ID NO: 40470 - DNA, 25 bp, Homo sapien
cacacgtccaagtcgacttgtgcgt

SEQ ID NO: 40471 - DNA, 25 bp, Homo sapien
ttgacgatccgacgttcctctcttc

SEQ ID NO: 40472 - DNA, 25 bp, Homo sapien
ttgacgatccgaggttcctctcttc

SEQ ID NO: 40473 - DNA, 25 bp, Homo sapien
ggggagtctgcgtgttttacgcatt

SEQ ID NO: 40474 - DNA, 25 bp, Homo sapien
ggggagtctgcgagttttacgcatt

SEQ ID NO: 40475 - DNA, 25 bp, Homo sapien
gtctacggtgccagtatttgacatt

SEQ ID NO: 40476 - DNA, 25 bp, Homo sapien
gtctacggtgcctgtatttgacatt

SEQ ID NO: 40477 - DNA, 25 bp, Homo sapien
ataaggagacggaacgtctttcttc

SEQ ID NO: 40478 - DNA, 25 bp, Homo sapien
ataaggagacggtacgtctttcttc

SEQ ID NO: 40479 - DNA, 25 bp, Homo sapien
gacataaagaggtaacgtttatccc

SEQ ID NO: 40480 - DNA, 25 bp, Homo sapien
gacataaagaggaaacgtttatccc

SEQ ID NO: 40481 - DNA, 25 bp, Homo sapien
gtcataaaagagaattttacccacg

SEQ ID NO: 40482 - DNA, 25 bp, Homo sapien
gtcataaaagagtattttacccacg

SEQ ID NO: 40483 - DNA, 25 bp, Homo sapien
aaagcgaactgttctgtcaattacg

SEQ ID NO: 40484 - DNA, 25 bp, Homo sapien
aaagcgaactgtactgtcaattacg

SEQ ID NO: 40485 - DNA, 25 bp, Homo sapien
agaccaaactgtcgttacaatatcg

SEQ ID NO: 40486 - DNA, 25 bp, Homo sapien
agaccaaactgtggttacaatatcg

SEQ ID NO: 40487 - DNA, 25 bp, Homo sapien
cataccgatgtcatggcatatattt

SEQ ID NO: 40488 - DNA, 25 bp, Homo sapien
cataccgatgtcttggcatatattt

SEQ ID NO: 40489 - DNA, 25 bp, Homo sapien
actcgaccgttcagggtctgtaacc

SEQ ID NO: 40490 - DNA, 25 bp, Homo sapien
actcgaccgttctgggtctgtaacc

SEQ ID NO: 40491 - DNA, 25 bp, Homo sapien
gacgtcggtcgtctgtttcctaaca

SEQ ID NO: 40492 - DNA, 25 bp, Homo sapien
gacgtcggtcgtgtgtttcctaaca

SEQ ID NO: 40493 - DNA, 25 bp, Homo sapien
ggagacggtatgtgagtccctaaag

SEQ ID NO: 40494 - DNA, 25 bp, Homo sapien
ggagacggtatgagagtccctaaag

SEQ ID NO: 40495 - DNA, 25 bp, Homo sapien
gaaggttaatgtaatcgtccctgag

SEQ ID NO: 40496 - DNA, 25 bp, Homo sapien
gaaggttaatgttatcgtccctgag

SEQ ID NO: 40497 - DNA, 25 bp, Homo sapien
aaaggattttcgatcgacttcgatg

SEQ ID NO: 40498 - DNA, 25 bp, Homo sapien
aaaggattttcgttcgacttcgatg

SEQ ID NO: 40499 - DNA, 25 bp, Homo sapien
acagacattttttcagattcgacag

SEQ ID NO: 40500 - DNA, 25 bp, Homo sapien
acagacatttttacagattcgacag

SEQ ID NO: 40501 - DNA, 25 bp, Homo sapien
gagacactttctgtaggattcgtga

SEQ ID NO: 40502 - DNA, 25 bp, Homo sapien
gagacactttctctaggattcgtga

SEQ ID NO: 40503 - DNA, 25 bp, Homo sapien
agaacctgtcctctaagagtttcat

SEQ ID NO: 40504 - DNA, 25 bp, Homo sapien
agaacctgtcctgtaagagtttcat

SEQ ID NO: 40505 - DNA, 25 bp, Homo sapien
cgcgcgtccgtcgactcttttcgat

SEQ ID NO: 40506 - DNA, 25 bp, Homo sapien
cgcgcgtccgtccactcttttcgat

SEQ ID NO: 40507 - DNA, 25 bp, Homo sapien
gcgaccgctacgatcgtccctgtga

SEQ ID NO: 40508 - DNA, 25 bp, Homo sapien
gcgaccgctacgttcgtccctgtga

SEQ ID NO: 40509 - DNA, 25 bp, Homo sapien
cgagagctcctcttcaaagtctcta

SEQ ID NO: 40510 - DNA, 25 bp, Homo sapien
cgagagctcctcatcaaagtctcta

SEQ ID NO: 40511 - DNA, 25 bp, Homo sapien
tcagaattttactcgaagttgacta

SEQ ID NO: 40512 - DNA, 25 bp, Homo sapien
tcagaattttacacgaagttgacta

SEQ ID NO: 40513 - DNA, 25 bp, Homo sapien
ctcgcgaaagggacagacggttgaa

SEQ ID NO: 40514 - DNA, 25 bp, Homo sapien
ctcgcgaaagggtcagacggttgaa

SEQ ID NO: 40515 - DNA, 25 bp, Homo sapien
tccagggacgtttccgatgacggaa

SEQ ID NO: 40516 - DNA, 25 bp, Homo sapien
tccagggacgttaccgatgacggaa

SEQ ID NO: 40517 - DNA, 25 bp, Homo sapien
atgtctactactctttgacagtgat

SEQ ID NO: 40518 - DNA, 25 bp, Homo sapien
atgtctactactgtttgacagtgat

SEQ ID NO: 40519 - DNA, 25 bp, Homo sapien
tgataacaatggtgtacaataccgt

SEQ ID NO: 40520 - DNA, 25 bp, Homo sapien
tgataacaatggagtacaataccgt

SEQ ID NO: 40521 - DNA, 25 bp, Homo sapien
gtccgtctcaaaagcccaagtaagt

SEQ ID NO: 40522 - DNA, 25 bp, Homo sapien
gtccgtctcaaatgcccaagtaagt

SEQ ID NO: 40523 - DNA, 25 bp, Homo sapien
tcaataacgatagtccacgtaaatg

SEQ ID NO: 40524 - DNA, 25 bp, Homo sapien
tcaataacgatactccacgtaaatg

SEQ ID NO: 40525 - DNA, 25 bp, Homo sapien
tcataaagaagtacccctagagaaa

SEQ ID NO: 40526 - DNA, 25 bp, Homo sapien
tcataaagaagttcccctagagaaa

SEQ ID NO: 40527 - DNA, 25 bp, Homo sapien
tctgttatagaatatgttcccacca

SEQ ID NO: 40528 - DNA, 25 bp, Homo sapien
tctgttatagaaaatgttcccacca

SEQ ID NO: 40529 - DNA, 25 bp, Homo sapien
gaggttaaaatgactccaccgactg

SEQ ID NO: 40530 - DNA, 25 bp, Homo sapien
gaggttaaaatgtctccaccgactg

SEQ ID NO: 40531 - DNA, 25 bp, Homo sapien
aactcaagtcgactccctagtacga

SEQ ID NO: 40532 - DNA, 25 bp, Homo sapien
aactcaagtcgagtccctagtacga

SEQ ID NO: 40533 - DNA, 25 bp, Homo sapien
tcctaaaaggacagagacccttaga

SEQ ID NO: 40534 - DNA, 25 bp, Homo sapien
tcctaaaaggactgagacccttaga

SEQ ID NO: 40535 - DNA, 25 bp, Homo sapien
ttcacaaaatgatggtcctcaagtg

SEQ ID NO: 40536 - DNA, 25 bp, Homo sapien
ttcacaaaatgaaggtcctcaagtg

SEQ ID NO: 40537 - DNA, 25 bp, Homo sapien
acagagaagaaaaggtccccgacgt

SEQ ID NO: 40538 - DNA, 25 bp, Homo sapien
acagagaagaaatggtccccgacgt

SEQ ID NO: 40539 - DNA, 25 bp, Homo sapien
caaggtcccgagacccgacttttag

SEQ ID NO: 40540 - DNA, 25 bp, Homo sapien
caaggtcccgagtcccgacttttag

SEQ ID NO: 40541 - DNA, 25 bp, Homo sapien
cattcttacccctgtcactgggtag

SEQ ID NO: 40542 - DNA, 25 bp, Homo sapien
cattcttaccccagtcactgggtag

SEQ ID NO: 40543 - DNA, 25 bp, Homo sapien
tcactgtcctcatgaaaattgtgta

SEQ ID NO: 40544 - DNA, 25 bp, Homo sapien
tcactgtcctcaagaaaattgtgta

SEQ ID NO: 40545 - DNA, 25 bp, Homo sapien
agttcacttaagaacctactgtgga

SEQ ID NO: 40546 - DNA, 25 bp, Homo sapien
agttcacttaagtacctactgtgga

SEQ ID NO: 40547 - DNA, 25 bp, Homo sapien
tactatacatactctacgagaagga

SEQ ID NO: 40548 - DNA, 25 bp, Homo sapien
tactatacatacactacgagaagga

SEQ ID NO: 40549 - DNA, 25 bp, Homo sapien
gaacttacactctaaccgagaggta

SEQ ID NO: 40550 - DNA, 25 bp, Homo sapien
gaacttacactcaaaccgagaggta

SEQ ID NO: 40551 - DNA, 25 bp, Homo sapien
tggactccactctccggtaacggtt

SEQ ID NO: 40552 - DNA, 25 bp, Homo sapien
tggactccactcaccggtaacggtt

SEQ ID NO: 40553 - DNA, 25 bp, Homo sapien
tgtccgtaccggaaggacccgtact

SEQ ID NO: 40554 - DNA, 25 bp, Homo sapien
tgtccgtaccggtaggacccgtact

SEQ ID NO: 40555 - DNA, 25 bp, Homo sapien
tcgtactcttactgagattcaagtt

SEQ ID NO: 40556 - DNA, 25 bp, Homo sapien
tcgtactcttacagagattcaagtt

SEQ ID NO: 40557 - DNA, 25 bp, Homo sapien
acttctactccaaggcgtgcgacgg

SEQ ID NO: 40558 - DNA, 25 bp, Homo sapien
acttctactccatggcgtgcgacgg

SEQ ID NO: 40559 - DNA, 25 bp, Homo sapien
tttaagtcgtgaacagggaccaggg

SEQ ID NO: 40560 - DNA, 25 bp, Homo sapien
tttaagtcgtgatcagggaccaggg

SEQ ID NO: 40561 - DNA, 25 bp, Homo sapien
ttaaactgtcctgacaacatcggac

SEQ ID NO: 40562 - DNA, 25 bp, Homo sapien
ttaaactgtcctcacaacatcggac

SEQ ID NO: 40563 - DNA, 25 bp, Homo sapien
cctcatccgcttacgatacttcggg

SEQ ID NO: 40564 - DNA, 25 bp, Homo sapien
cctcatccgctttcgatacttcggg

SEQ ID NO: 40565 - DNA, 25 bp, Homo sapien
cgtttttccttcgttactatagaag

SEQ ID NO: 40566 - DNA, 25 bp, Homo sapien
cgtttttccttccttactatagaag

SEQ ID NO: 40567 - DNA, 25 bp, Homo sapien
tgacttaaccctttttccgtaggac

SEQ ID NO: 40568 - DNA, 25 bp, Homo sapien
tgacttaaccctatttccgtaggac

SEQ ID NO: 40569 - DNA, 25 bp, Homo sapien
tagctgtccccgaagggcgtcagga

SEQ ID NO: 40570 - DNA, 25 bp, Homo sapien
tagctgtccccgtagggcgtcagga

SEQ ID NO: 40571 - DNA, 25 bp, Homo sapien
ccaagaggacgttgaggtcactgag

SEQ ID NO: 40572 - DNA, 25 bp, Homo sapien
ccaagaggacgtagaggtcactgag

SEQ ID NO: 40573 - DNA, 25 bp, Homo sapien
accagtaggaacgagaagtcctggt

SEQ ID NO: 40574 - DNA, 25 bp, Homo sapien
accagtaggaaccagaagtcctggt

SEQ ID NO: 40575 - DNA, 25 bp, Homo sapien
gactccgtcggagagagaggttccc

SEQ ID NO: 40576 - DNA, 25 bp, Homo sapien
gactccgtcggacagagaggttccc

SEQ ID NO: 40577 - DNA, 25 bp, Homo sapien
cagaaacgactgagggtcattgacc

SEQ ID NO: 40578 - DNA, 25 bp, Homo sapien
cagaaacgactgtgggtcattgacc

SEQ ID NO: 40579 - DNA, 25 bp, Homo sapien
aaagactgagccagtcaagagaccg

SEQ ID NO: 40580 - DNA, 25 bp, Homo sapien
aaagactgagcctgtcaagagaccg

SEQ ID NO: 40581 - DNA, 25 bp, Homo sapien
aatagggagatccatcaaggctcgt

SEQ ID NO: 40582 - DNA, 25 bp, Homo sapien
aatagggagatcgatcaaggctcgt

SEQ ID NO: 40583 - DNA, 25 bp, Homo sapien
agagtcagggttctcggaagcactc

SEQ ID NO: 40584 - DNA, 25 bp, Homo sapien
agagtcagggttgtcggaagcactc

SEQ ID NO: 40585 - DNA, 25 bp, Homo sapien
caggctctgcgtgagaacgcacgtc

SEQ ID NO: 40586 - DNA, 25 bp, Homo sapien
caggctctgcgtcagaacgcacgtc

SEQ ID NO: 40587 - DNA, 25 bp, Homo sapien
actctattatatggactggttacat

SEQ ID NO: 40588 - DNA, 25 bp, Homo sapien
actctattatatcgactggttacat

SEQ ID NO: 40589 - DNA, 25 bp, Homo sapien
ttccgcagtcgtgagaccgcgacat

SEQ ID NO: 40590 - DNA, 25 bp, Homo sapien
ttccgcagtcgtcagaccgcgacat

SEQ ID NO: 40591 - DNA, 25 bp, Homo sapien
gcgtgtgatactcgttgtacgtcta

SEQ ID NO: 40592 - DNA, 25 bp, Homo sapien
gcgtgtgatactggttgtacgtcta

SEQ ID NO: 40593 - DNA, 25 bp, Homo sapien
attccgtgagttttccaagaatagt

SEQ ID NO: 40594 - DNA, 25 bp, Homo sapien
attccgtgagttatccaagaatagt

SEQ ID NO: 40595 - DNA, 25 bp, Homo sapien
ttgtaaaccacttctagagagatac

SEQ ID NO: 40596 - DNA, 25 bp, Homo sapien
ttgtaaaccactactagagagatac

SEQ ID NO: 40597 - DNA, 25 bp, Homo sapien
ggtgtataacaactactcgaggaat

SEQ ID NO: 40598 - DNA, 25 bp, Homo sapien
ggtgtataacaagtactcgaggaat

SEQ ID NO: 40599 - DNA, 25 bp, Homo sapien
tttgttcgtaatagttctcttccag

SEQ ID NO: 40600 - DNA, 25 bp, Homo sapien
tttgttcgtaattgttctcttccag

SEQ ID NO: 40601 - DNA, 25 bp, Homo sapien
tcttttcagtaaagggtcttttcag

SEQ ID NO: 40602 - DNA, 25 bp, Homo sapien
tcttttcagtaatgggtcttttcag

SEQ ID NO: 40603 - DNA, 25 bp, Homo sapien
attttctgaaagatcacatgttctg

SEQ ID NO: 40604 - DNA, 25 bp, Homo sapien
attttctgaaagttcacatgttctg

SEQ ID NO: 40605 - DNA, 25 bp, Homo sapien
acgttcagtaaatcgctatttttcg

SEQ ID NO: 40606 - DNA, 25 bp, Homo sapien
acgttcagtaaaacgctatttttcg

SEQ ID NO: 40607 - DNA, 25 bp, Homo sapien
catagaacaatagactttcgttagt

SEQ ID NO: 40608 - DNA, 25 bp, Homo sapien
catagaacaatacactttcgttagt

SEQ ID NO: 40609 - DNA, 25 bp, Homo sapien
aggatgtaatacagtcacttcctta

SEQ ID NO: 40610 - DNA, 25 bp, Homo sapien
aggatgtaatactgtcacttcctta

SEQ ID NO: 40611 - DNA, 25 bp, Homo sapien
tagtttggatctcgtctctccctac

SEQ ID NO: 40612 - DNA, 25 bp, Homo sapien
tagtttggatctggtctctccctac

SEQ ID NO: 40613 - DNA, 25 bp, Homo sapien
ggatcctcgtagctttacaacccta

SEQ ID NO: 40614 - DNA, 25 bp, Homo sapien
ggatcctcgtaggtttacaacccta

SEQ ID NO: 40615 - DNA, 25 bp, Homo sapien
tcagacaggtgtataacaactactc

SEQ ID NO: 40616 - DNA, 25 bp, Homo sapien
tcagacaggtgtttaacaactactc

SEQ ID NO: 40617 - DNA, 25 bp, Homo sapien
attaccggtgtctaaaagactacta

SEQ ID NO: 40618 - DNA, 25 bp, Homo sapien
attaccggtgtcaaaaagactacta

SEQ ID NO: 40619 - DNA, 25 bp, Homo sapien
gtccgacgtgggaacaacttaccta

SEQ ID NO: 40620 - DNA, 25 bp, Homo sapien
gtccgacgtgggtacaacttaccta

SEQ ID NO: 40621 - DNA, 25 bp, Homo sapien
cttccgagaaggaccgcagacacga

SEQ ID NO: 40622 - DNA, 25 bp, Homo sapien
cttccgagaaggtccgcagacacga

SEQ ID NO: 40623 - DNA, 25 bp, Homo sapien
ccagacactgttacggtgtaccggt

SEQ ID NO: 40624 - DNA, 25 bp, Homo sapien
ccagacactgtttcggtgtaccggt

SEQ ID NO: 40625 - DNA, 25 bp, Homo sapien
tcctagacctaggtagttggtaaac

SEQ ID NO: 40626 - DNA, 25 bp, Homo sapien
tcctagacctagctagttggtaaac

SEQ ID NO: 40627 - DNA, 25 bp, Homo sapien
ttcacgaacccagactagtagtaga

SEQ ID NO: 40628 - DNA, 25 bp, Homo sapien
ttcacgaacccacactagtagtaga

SEQ ID NO: 40629 - DNA, 25 bp, Homo sapien
aacagtgggtacctactactgacga

SEQ ID NO: 40630 - DNA, 25 bp, Homo sapien
aacagtgggtacgtactactgacga

SEQ ID NO: 40631 - DNA, 25 bp, Homo sapien
ataacgtgagaggaggaacaccgag

SEQ ID NO: 40632 - DNA, 25 bp, Homo sapien
ataacgtgagagcaggaacaccgag

SEQ ID NO: 40633 - DNA, 25 bp, Homo sapien
gtccgtccgaccagggacgacacta

SEQ ID NO: 40634 - DNA, 25 bp, Homo sapien
gtccgtccgacctgggacgacacta

SEQ ID NO: 40635 - DNA, 25 bp, Homo sapien
gctgtaacttctaaccagaagacaa

SEQ ID NO: 40636 - DNA, 25 bp, Homo sapien
gctgtaacttcttaccagaagacaa

SEQ ID NO: 40637 - DNA, 25 bp, Homo sapien
aagaacagttctcctaggtagacaa

SEQ ID NO: 40638 - DNA, 25 bp, Homo sapien
aagaacagttctgctaggtagacaa

SEQ ID NO: 40639 - DNA, 25 bp, Homo sapien
ccgacaggtcggtagtagagcatgt

SEQ ID NO: 40640 - DNA, 25 bp, Homo sapien
ccgacaggtcggaagtagagcatgt

SEQ ID NO: 40641 - DNA, 25 bp, Homo sapien
cgttgtcggtatgtatacttcgatc

SEQ ID NO: 40642 - DNA, 25 bp, Homo sapien
cgttgtcggtatctatacttcgatc

SEQ ID NO: 40643 - DNA, 25 bp, Homo sapien
ctcaccgtagctcgttattgacgtt

SEQ ID NO: 40644 - DNA, 25 bp, Homo sapien
ctcaccgtagctggttattgacgtt

SEQ ID NO: 40645 - DNA, 25 bp, Homo sapien
tacgcggagactggtaatacgttcc

SEQ ID NO: 40646 - DNA, 25 bp, Homo sapien
tacgcggagactcgtaatacgttcc

SEQ ID NO: 40647 - DNA, 25 bp, Homo sapien
ttatagtcgaatcgtagtatttccg

SEQ ID NO: 40648 - DNA, 25 bp, Homo sapien
ttatagtcgaatggtagtatttccg

SEQ ID NO: 40649 - DNA, 25 bp, Homo sapien
atagtcgaagaatttacgtaatccc

SEQ ID NO: 40650 - DNA, 25 bp, Homo sapien
atagtcgaagaaattacgtaatccc

SEQ ID NO: 40651 - DNA, 25 bp, Homo sapien
aatagataactgtcgacaattgtcg

SEQ ID NO: 40652 - DNA, 25 bp, Homo sapien
aatagataactgacgacaattgtcg

SEQ ID NO: 40653 - DNA, 25 bp, Homo sapien
atgtagtaactgtaacgtcttattc

SEQ ID NO: 40654 - DNA, 25 bp, Homo sapien
atgtagtaactgaaacgtcttattc

SEQ ID NO: 40655 - DNA, 25 bp, Homo sapien
gtaacgtactacgtaaacgttttgc

SEQ ID NO: 40656 - DNA, 25 bp, Homo sapien
gtaacgtactacctaaacgttttgc

SEQ ID NO: 40657 - DNA, 25 bp, Homo sapien
tcgaacgtcataactacgttgtggt

SEQ ID NO: 40658 - DNA, 25 bp, Homo sapien
tcgaacgtcatatctacgttgtggt

SEQ ID NO: 40659 - DNA, 25 bp, Homo sapien
gtctacacataatcatctgttcggt

SEQ ID NO: 40660 - DNA, 25 bp, Homo sapien
gtctacacataaacatctgttcggt

SEQ ID NO: 40661 - DNA, 25 bp, Homo sapien
cggtagtgaaaatgacctgtatctt

SEQ ID NO: 40662 - DNA, 25 bp, Homo sapien
cggtagtgaaaaagacctgtatctt

SEQ ID NO: 40663 - DNA, 25 bp, Homo sapien
ctcgtactggacaaaccccgaatat

SEQ ID NO: 40664 - DNA, 25 bp, Homo sapien
ctcgtactggactaaccccgaatat

SEQ ID NO: 40665 - DNA, 25 bp, Homo sapien
tccacaccacggaccgctgtagaat

SEQ ID NO: 40666 - DNA, 25 bp, Homo sapien
tccacaccacggtccgctgtagaat

SEQ ID NO: 40667 - DNA, 25 bp, Homo sapien
tggccctcgctgtccttctcggagt

SEQ ID NO: 40668 - DNA, 25 bp, Homo sapien
tggccctcgctgaccttctcggagt

SEQ ID NO: 40669 - DNA, 25 bp, Homo sapien
tctcgacctcggaggagatctcggt

SEQ ID NO: 40670 - DNA, 25 bp, Homo sapien
tctcgacctcggtggagatctcggt

SEQ ID NO: 40671 - DNA, 25 bp, Homo sapien
tcgtgggtgtgttcaaagacacgtt

SEQ ID NO: 40672 - DNA, 25 bp, Homo sapien
tcgtgggtgtgtacaaagacacgtt

SEQ ID NO: 40673 - DNA, 25 bp, Homo sapien
ggtcgtatttatttcccttgtgtct

SEQ ID NO: 40674 - DNA, 25 bp, Homo sapien
ggtcgtatttatatcccttgtgtct

SEQ ID NO: 40675 - DNA, 25 bp, Homo sapien
tctcatcttctttacgagctgtttg

SEQ ID NO: 40676 - DNA, 25 bp, Homo sapien
tctcatcttcttaacgagctgtttg

SEQ ID NO: 40677 - DNA, 25 bp, Homo sapien
gtagtttactcaaaagtacgtttcg

SEQ ID NO: 40678 - DNA, 25 bp, Homo sapien
gtagtttactcataagtacgtttcg

SEQ ID NO: 40679 - DNA, 25 bp, Homo sapien
cggacgagtatttcataatcgttta

SEQ ID NO: 40680 - DNA, 25 bp, Homo sapien
cggacgagtattacataatcgttta

SEQ ID NO: 40681 - DNA, 25 bp, Homo sapien
ggtaactctctgactactatttaag

SEQ ID NO: 40682 - DNA, 25 bp, Homo sapien
ggtaactctctgtctactatttaag

SEQ ID NO: 40683 - DNA, 25 bp, Homo sapien
gaaaacgtctacttctttcgtatag

SEQ ID NO: 40684 - DNA, 25 bp, Homo sapien
gaaaacgtctacatctttcgtatag

SEQ ID NO: 40685 - DNA, 25 bp, Homo sapien
tagtgtcgtcgtcttcgttacatgt

SEQ ID NO: 40686 - DNA, 25 bp, Homo sapien
tagtgtcgtcgtgttcgttacatgt

SEQ ID NO: 40687 - DNA, 25 bp, Homo sapien
gtagtgtctcgcttgactctaatcg

SEQ ID NO: 40688 - DNA, 25 bp, Homo sapien
gtagtgtctcgcatgactctaatcg

SEQ ID NO: 40689 - DNA, 25 bp, Homo sapien
gaagtcgtgcatgacctaccgtcgt

SEQ ID NO: 40690 - DNA, 25 bp, Homo sapien
gaagtcgtgcatcacctaccgtcgt

SEQ ID NO: 40691 - DNA, 25 bp, Homo sapien
ccgaaggagacgaaacccgtcgtcg

SEQ ID NO: 40692 - DNA, 25 bp, Homo sapien
ccgaaggagacgtaacccgtcgtcg

SEQ ID NO: 40693 - DNA, 25 bp, Homo sapien
gtggtagagagtactctctgtcgtc

SEQ ID NO: 40694 - DNA, 25 bp, Homo sapien
gtggtagagagttctctctgtcgtc

SEQ ID NO: 40695 - DNA, 25 bp, Homo sapien
accgagtagacgtcgtccggtcact

SEQ ID NO: 40696 - DNA, 25 bp, Homo sapien
accgagtagacgacgtccggtcact

SEQ ID NO: 40697 - DNA, 25 bp, Homo sapien
tcttaccctattacgtccgctgagt

SEQ ID NO: 40698 - DNA, 25 bp, Homo sapien
tcttaccctatttcgtccgctgagt

SEQ ID NO: 40699 - DNA, 25 bp, Homo sapien
ctggtgtctatattctatcatgagt

SEQ ID NO: 40700 - DNA, 25 bp, Homo sapien
ctggtgtctataatctatcatgagt

SEQ ID NO: 40701 - DNA, 25 bp, Homo sapien
ctcgcagatattttctacgtatggt

SEQ ID NO: 40702 - DNA, 25 bp, Homo sapien
ctcgcagatattatctacgtatggt

SEQ ID NO: 40703 - DNA, 25 bp, Homo sapien
agaccacaagagtgactcctacctg

SEQ ID NO: 40704 - DNA, 25 bp, Homo sapien
agaccacaagagagactcctacctg

SEQ ID NO: 40705 - DNA, 25 bp, Homo sapien
agagaacaaatcgagtcctacctac

SEQ ID NO: 40706 - DNA, 25 bp, Homo sapien
agagaacaaatccagtcctacctac

SEQ ID NO: 40707 - DNA, 25 bp, Homo sapien
gtcgtgaaataattgttcctgtctc

SEQ ID NO: 40708 - DNA, 25 bp, Homo sapien
gtcgtgaaataaatgttcctgtctc

SEQ ID NO: 40709 - DNA, 25 bp, Homo sapien
cgtgaaagtgtaaagtttcactcta

SEQ ID NO: 40710 - DNA, 25 bp, Homo sapien
cgtgaaagtgtatagtttcactcta

SEQ ID NO: 40711 - DNA, 25 bp, Homo sapien
ccgagttgagtgtagtttgcctcga

SEQ ID NO: 40712 - DNA, 25 bp, Homo sapien
ccgagttgagtgaagtttgcctcga

SEQ ID NO: 40713 - DNA, 25 bp, Homo sapien
ctcccggggtctcttacgggtccag

SEQ ID NO: 40714 - DNA, 25 bp, Homo sapien
ctcccggggtctgttacgggtccag

SEQ ID NO: 40715 - DNA, 25 bp, Homo sapien
ggctcagcctcatcaggcggtgctc

SEQ ID NO: 40716 - DNA, 25 bp, Homo sapien
ggctcagcctcaacaggcggtgctc

SEQ ID NO: 40717 - DNA, 25 bp, Homo sapien
gtgacgggaccaaaggtcgttccta

SEQ ID NO: 40718 - DNA, 25 bp, Homo sapien
gtgacgggaccataggtcgttccta

SEQ ID NO: 40719 - DNA, 25 bp, Homo sapien
cggtgttcagtccaagtggttttta

SEQ ID NO: 40720 - DNA, 25 bp, Homo sapien
cggtgttcagtcgaagtggttttta

SEQ ID NO: 40721 - DNA, 25 bp, Homo sapien
ctgacgaggtaattaggttcttcgt

SEQ ID NO: 40722 - DNA, 25 bp, Homo sapien
ctgacgaggtaaataggttcttcgt

SEQ ID NO: 40723 - DNA, 25 bp, Homo sapien
acgtatgtactatctatgtgtgatc

SEQ ID NO: 40724 - DNA, 25 bp, Homo sapien
acgtatgtactaactatgtgtgatc

SEQ ID NO: 40725 - DNA, 25 bp, Homo sapien
gaacgacagactcctgtgggacgtc

SEQ ID NO: 40726 - DNA, 25 bp, Homo sapien
gaacgacagactgctgtgggacgtc

SEQ ID NO: 40727 - DNA, 25 bp, Homo sapien
cgagaattacatctgtggaacgtat

SEQ ID NO: 40728 - DNA, 25 bp, Homo sapien
cgagaattacatgtgtggaacgtat

SEQ ID NO: 40729 - DNA, 25 bp, Homo sapien
acggaaagaagaagacagtcctata

SEQ ID NO: 40730 - DNA, 25 bp, Homo sapien
acggaaagaagatgacagtcctata

SEQ ID NO: 40731 - DNA, 25 bp, Homo sapien
ggatagaacggttagacggtcctga

SEQ ID NO: 40732 - DNA, 25 bp, Homo sapien
ggatagaacggtaagacggtcctga

SEQ ID NO: 40733 - DNA, 25 bp, Homo sapien
tagaatctttaggacgaaaccgaac

SEQ ID NO: 40734 - DNA, 25 bp, Homo sapien
tagaatctttagcacgaaaccgaac

SEQ ID NO: 40735 - DNA, 25 bp, Homo sapien
agagtatacatacgtccatacagaa

SEQ ID NO: 40736 - DNA, 25 bp, Homo sapien
agagtatacataggtccatacagaa

SEQ ID NO: 40737 - DNA, 25 bp, Homo sapien
agatctagaagtgcaacgtagacca

SEQ ID NO: 40738 - DNA, 25 bp, Homo sapien
agatctagaagtccaacgtagacca

SEQ ID NO: 40739 - DNA, 25 bp, Homo sapien
gttctagtgagtactatttagacct

SEQ ID NO: 40740 - DNA, 25 bp, Homo sapien
gttctagtgagttctatttagacct

SEQ ID NO: 40741 - DNA, 25 bp, Homo sapien
cggttagtgtagcttatttagtacc

SEQ ID NO: 40742 - DNA, 25 bp, Homo sapien
cggttagtgtaggttatttagtacc

SEQ ID NO: 40743 - DNA, 25 bp, Homo sapien
gtgactttattcttgtgactaaccc

SEQ ID NO: 40744 - DNA, 25 bp, Homo sapien
gtgactttattcatgtgactaaccc

SEQ ID NO: 40745 - DNA, 25 bp, Homo sapien
ggaactctgtcgtcctaaccgacca

SEQ ID NO: 40746 - DNA, 25 bp, Homo sapien
ggaactctgtcgacctaaccgacca

SEQ ID NO: 40747 - DNA, 25 bp, Homo sapien
aggtcgacaggcatctcccttcggt

SEQ ID NO: 40748 - DNA, 25 bp, Homo sapien
aggtcgacaggcttctcccttcggt

SEQ ID NO: 40749 - DNA, 25 bp, Homo sapien
tcgtactcgccacgtcctgtgtcga

SEQ ID NO: 40750 - DNA, 25 bp, Homo sapien
tcgtactcgccaggtcctgtgtcga

SEQ ID NO: 40751 - DNA, 25 bp, Homo sapien
attgactccgcgaagtgggtgtcac

SEQ ID NO: 40752 - DNA, 25 bp, Homo sapien
attgactccgcgtagtgggtgtcac

SEQ ID NO: 40753 - DNA, 25 bp, Homo sapien
ggactcgtccatttccggtcggcac

SEQ ID NO: 40754 - DNA, 25 bp, Homo sapien
ggactcgtccatatccggtcggcac

SEQ ID NO: 40755 - DNA, 25 bp, Homo sapien
tgtccgtcccgtggtgttgccgccg

SEQ ID NO: 40756 - DNA, 25 bp, Homo sapien
tgtccgtcccgtcgtgttgccgccg

SEQ ID NO: 40757 - DNA, 25 bp, Homo sapien
tgcccgcagtacctcggccgtcggt

SEQ ID NO: 40758 - DNA, 25 bp, Homo sapien
tgcccgcagtacgtcggccgtcggt

SEQ ID NO: 40759 - DNA, 25 bp, Homo sapien
ttaatcactgcagtggacacgacct

SEQ ID NO: 40760 - DNA, 25 bp, Homo sapien
ttaatcactgcactggacacgacct

SEQ ID NO: 40761 - DNA, 25 bp, Homo sapien
aactcccgtcagtacacgggtcgat

SEQ ID NO: 40762 - DNA, 25 bp, Homo sapien
aactcccgtcagaacacgggtcgat

SEQ ID NO: 40763 - DNA, 25 bp, Homo sapien
aatccggacctgaacagtagagaca

SEQ ID NO: 40764 - DNA, 25 bp, Homo sapien
aatccggacctgtacagtagagaca

SEQ ID NO: 40765 - DNA, 25 bp, Homo sapien
aaaccggactctctccgtacacgaa

SEQ ID NO: 40766 - DNA, 25 bp, Homo sapien
aaaccggactctgtccgtacacgaa

SEQ ID NO: 40767 - DNA, 25 bp, Homo sapien
gatttacctgtgaggtctcagacaa

SEQ ID NO: 40768 - DNA, 25 bp, Homo sapien
gatttacctgtgtggtctcagacaa

SEQ ID NO: 40769 - DNA, 25 bp, Homo sapien
gtctttcggtccttcctagacacga

SEQ ID NO: 40770 - DNA, 25 bp, Homo sapien
gtctttcggtccatcctagacacga

SEQ ID NO: 40771 - DNA, 25 bp, Homo sapien
aagtttatgagagtctctcagacaa

SEQ ID NO: 40772 - DNA, 25 bp, Homo sapien
aagtttatgagactctctcagacaa

SEQ ID NO: 40773 - DNA, 25 bp, Homo sapien
atcgtatgttcactcgggaagagac

SEQ ID NO: 40774 - DNA, 25 bp, Homo sapien
atcgtatgttcagtcgggaagagac

SEQ ID NO: 40775 - DNA, 25 bp, Homo sapien
aagatggtcgagtctgacagagagc

SEQ ID NO: 40776 - DNA, 25 bp, Homo sapien
aagatggtcgagactgacagagagc

SEQ ID NO: 40777 - DNA, 25 bp, Homo sapien
aagtgtgggactaatgacttccgtt

SEQ ID NO: 40778 - DNA, 25 bp, Homo sapien
aagtgtgggacttatgacttccgtt

SEQ ID NO: 40779 - DNA, 25 bp, Homo sapien
aaaaggataataggtcacctcgtat

SEQ ID NO: 40780 - DNA, 25 bp, Homo sapien
aaaaggataatacgtcacctcgtat

SEQ ID NO: 40781 - DNA, 25 bp, Homo sapien
cagggaggaccgagactccgactga

SEQ ID NO: 40782 - DNA, 25 bp, Homo sapien
cagggaggaccgtgactccgactga

SEQ ID NO: 40783 - DNA, 25 bp, Homo sapien
agaggggacacgtgacacagatgac

SEQ ID NO: 40784 - DNA, 25 bp, Homo sapien
agaggggacacgagacacagatgac

SEQ ID NO: 40785 - DNA, 25 bp, Homo sapien
ggagatttttactaaccgtctgtca

SEQ ID NO: 40786 - DNA, 25 bp, Homo sapien
ggagatttttacaaaccgtctgtca

SEQ ID NO: 40787 - DNA, 25 bp, Homo sapien
atggtgctcttttaaatcgtttaca

SEQ ID NO: 40788 - DNA, 25 bp, Homo sapien
atggtgctctttaaaatcgtttaca

SEQ ID NO: 40789 - DNA, 25 bp, Homo sapien
gtaagagaccctgagaaatcttttt

SEQ ID NO: 40790 - DNA, 25 bp, Homo sapien
gtaagagaccctcagaaatcttttt

SEQ ID NO: 40791 - DNA, 25 bp, Homo sapien
gaacaccgtcccttacgtcttgttt

SEQ ID NO: 40792 - DNA, 25 bp, Homo sapien
gaacaccgtcccatacgtcttgttt

SEQ ID NO: 40793 - DNA, 25 bp, Homo sapien
cggagtcccttctttcgtgtctttt

SEQ ID NO: 40794 - DNA, 25 bp, Homo sapien
cggagtcccttcattcgtgtctttt

SEQ ID NO: 40795 - DNA, 25 bp, Homo sapien
agagttccttacgttcgttttgact

SEQ ID NO: 40796 - DNA, 25 bp, Homo sapien
agagttccttaccttcgttttgact

SEQ ID NO: 40797 - DNA, 25 bp, Homo sapien
ttaagtgtctcttcggtgaatggtc

SEQ ID NO: 40798 - DNA, 25 bp, Homo sapien
ttaagtgtctctacggtgaatggtc

SEQ ID NO: 40799 - DNA, 25 bp, Homo sapien
aatctaaccttatcgtgaacaagga

SEQ ID NO: 40800 - DNA, 25 bp, Homo sapien
aatctaaccttaacgtgaacaagga

SEQ ID NO: 40801 - DNA, 25 bp, Homo sapien
ttttaggacattgtagacacaaact

SEQ ID NO: 40802 - DNA, 25 bp, Homo sapien
ttttaggacattctagacacaaact

SEQ ID NO: 40803 - DNA, 25 bp, Homo sapien
gtgtcccctgacaacacagtaccgt

SEQ ID NO: 40804 - DNA, 25 bp, Homo sapien
gtgtcccctgactacacagtaccgt

SEQ ID NO: 40805 - DNA, 25 bp, Homo sapien
aaaccgtcgtcgaaaccgacgccgt

SEQ ID NO: 40806 - DNA, 25 bp, Homo sapien
aaaccgtcgtcgtaaccgacgccgt

SEQ ID NO: 40807 - DNA, 25 bp, Homo sapien
ccacaaaggagtgaaaccgtaccag

SEQ ID NO: 40808 - DNA, 25 bp, Homo sapien
ccacaaaggagtcaaaccgtaccag

SEQ ID NO: 40809 - DNA, 25 bp, Homo sapien
tgtcaccaaggtaggtacaggctca

SEQ ID NO: 40810 - DNA, 25 bp, Homo sapien
tgtcaccaaggttggtacaggctca

SEQ ID NO: 40811 - DNA, 25 bp, Homo sapien
ggacccaggagtctgcgtagtgaca

SEQ ID NO: 40812 - DNA, 25 bp, Homo sapien
ggacccaggagtgtgcgtagtgaca

SEQ ID NO: 40813 - DNA, 25 bp, Homo sapien
gggaccctaggttcagggtcgttcc

SEQ ID NO: 40814 - DNA, 25 bp, Homo sapien
gggaccctaggtacagggtcgttcc

SEQ ID NO: 40815 - DNA, 25 bp, Homo sapien
atccatatcgaacagtggtcttgag

SEQ ID NO: 40816 - DNA, 25 bp, Homo sapien
atccatatcgaagagtggtcttgag

SEQ ID NO: 40817 - DNA, 25 bp, Homo sapien
tccgcgagcaagagacggtacatga

SEQ ID NO: 40818 - DNA, 25 bp, Homo sapien
tccgcgagcaagtgacggtacatga

SEQ ID NO: 40819 - DNA, 25 bp, Homo sapien
ctgtcagacacaactgagaacttca

SEQ ID NO: 40820 - DNA, 25 bp, Homo sapien
ctgtcagacacatctgagaacttca

SEQ ID NO: 40821 - DNA, 25 bp, Homo sapien
gggtgtgaacaaatcggacggacac

SEQ ID NO: 40822 - DNA, 25 bp, Homo sapien
gggtgtgaacaattcggacggacac

SEQ ID NO: 40823 - DNA, 25 bp, Homo sapien
atggaggacacacgaacagaagtaa

SEQ ID NO: 40824 - DNA, 25 bp, Homo sapien
atggaggacacaggaacagaagtaa

SEQ ID NO: 40825 - DNA, 25 bp, Homo sapien
ttccgtcaccgacaataaatcgtag

SEQ ID NO: 40826 - DNA, 25 bp, Homo sapien
ttccgtcaccgagaataaatcgtag

SEQ ID NO: 40827 - DNA, 25 bp, Homo sapien
tacggactacccaccgaggttgtag

SEQ ID NO: 40828 - DNA, 25 bp, Homo sapien
tacggactaccctccgaggttgtag

SEQ ID NO: 40829 - DNA, 25 bp, Homo sapien
agctcgacgacacagcgtctgtcgg

SEQ ID NO: 40830 - DNA, 25 bp, Homo sapien
agctcgacgacagagcgtctgtcgg

SEQ ID NO: 40831 - DNA, 25 bp, Homo sapien
ctaggtgacagtgacttggctctcc

SEQ ID NO: 40832 - DNA, 25 bp, Homo sapien
ctaggtgacagtcacttggctctcc

SEQ ID NO: 40833 - DNA, 25 bp, Homo sapien
ttcgcgagtaagacgcggtgccact

SEQ ID NO: 40834 - DNA, 25 bp, Homo sapien
ttcgcgagtaagtcgcggtgccact

SEQ ID NO: 40835 - DNA, 25 bp, Homo sapien
cctccgtcgattagtctcagactct

SEQ ID NO: 40836 - DNA, 25 bp, Homo sapien
cctccgtcgatttgtctcagactct

SEQ ID NO: 40837 - DNA, 25 bp, Homo sapien
gactcctctgtttctcggagtactt

SEQ ID NO: 40838 - DNA, 25 bp, Homo sapien
gactcctctgttactcggagtactt

SEQ ID NO: 40839 - DNA, 25 bp, Homo sapien
aattgtgtgtctccattgttactgt

SEQ ID NO: 40840 - DNA, 25 bp, Homo sapien
aattgtgtgtctgcattgttactgt

SEQ ID NO: 40841 - DNA, 25 bp, Homo sapien
tcacccggtgtctgtcgaaggttgg

SEQ ID NO: 40842 - DNA, 25 bp, Homo sapien
tcacccggtgtcagtcgaaggttgg

SEQ ID NO: 40843 - DNA, 25 bp, Homo sapien
ttttactcggttctgggactgtttc

SEQ ID NO: 40844 - DNA, 25 bp, Homo sapien
ttttactcggttgtgggactgtttc

SEQ ID NO: 40845 - DNA, 25 bp, Homo sapien
atgtggtctcttggtgtccagttct

SEQ ID NO: 40846 - DNA, 25 bp, Homo sapien
atgtggtctcttcgtgtccagttct

SEQ ID NO: 40847 - DNA, 25 bp, Homo sapien
accttgagatacttctaagatattg

SEQ ID NO: 40848 - DNA, 25 bp, Homo sapien
accttgagatacatctaagatattg

SEQ ID NO: 40849 - DNA, 25 bp, Homo sapien
aagtgccgaaagacactcagtaaag

SEQ ID NO: 40850 - DNA, 25 bp, Homo sapien
aagtgccgaaagtcactcagtaaag

SEQ ID NO: 40851 - DNA, 25 bp, Homo sapien
cgttccggagagtctaccagtgcga

SEQ ID NO: 40852 - DNA, 25 bp, Homo sapien
cgttccggagagactaccagtgcga

SEQ ID NO: 40853 - DNA, 25 bp, Homo sapien
agccagagagacctggaccggacga

SEQ ID NO: 40854 - DNA, 25 bp, Homo sapien
agccagagagacgtggaccggacga

SEQ ID NO: 40855 - DNA, 25 bp, Homo sapien
ttgtttgaaacgaagaggccacgat

SEQ ID NO: 40856 - DNA, 25 bp, Homo sapien
ttgtttgaaacgtagaggccacgat

SEQ ID NO: 40857 - DNA, 25 bp, Homo sapien
gtacatgaaacgtaacttcctcgac

SEQ ID NO: 40858 - DNA, 25 bp, Homo sapien
gtacatgaaacgaaacttcctcgac

SEQ ID NO: 40859 - DNA, 25 bp, Homo sapien
aaaacggagtaaccatatttacaat

SEQ ID NO: 40860 - DNA, 25 bp, Homo sapien
aaaacggagtaagcatatttacaat

SEQ ID NO: 40861 - DNA, 25 bp, Homo sapien
ccacagtagtcttcttgttacgatc

SEQ ID NO: 40862 - DNA, 25 bp, Homo sapien
ccacagtagtctacttgttacgatc

SEQ ID NO: 40863 - DNA, 25 bp, Homo sapien
ccccgtactcgtagtctgttcgatt

SEQ ID NO: 40864 - DNA, 25 bp, Homo sapien
ccccgtactcgttgtctgttcgatt

SEQ ID NO: 40865 - DNA, 25 bp, Homo sapien
ccgactccagatttcgagttttgat

SEQ ID NO: 40866 - DNA, 25 bp, Homo sapien
ccgactccagatatcgagttttgat

SEQ ID NO: 40867 - DNA, 25 bp, Homo sapien
tcggttgggtacaaggtgacctctg

SEQ ID NO: 40868 - DNA, 25 bp, Homo sapien
tcggttgggtactaggtgacctctg

SEQ ID NO: 40869 - DNA, 25 bp, Homo sapien
tcattatgtgacttagttgaacttc

SEQ ID NO: 40870 - DNA, 25 bp, Homo sapien
tcattatgtgacatagttgaacttc

SEQ ID NO: 40871 - DNA, 25 bp, Homo sapien
tactttacggactcaattacacttg

SEQ ID NO: 40872 - DNA, 25 bp, Homo sapien
tactttacggacacaattacacttg

SEQ ID NO: 40873 - DNA, 25 bp, Homo sapien
ctaccgaagaaactaaagaccactg

SEQ ID NO: 40874 - DNA, 25 bp, Homo sapien
ctaccgaagaaagtaaagaccactg

SEQ ID NO: 40875 - DNA, 25 bp, Homo sapien
accccttaaagaaacaggtcccacg

SEQ ID NO: 40876 - DNA, 25 bp, Homo sapien
accccttaaagatacaggtcccacg

SEQ ID NO: 40877 - DNA, 25 bp, Homo sapien
cccgttaagtaatgtggtgttccct

SEQ ID NO: 40878 - DNA, 25 bp, Homo sapien
cccgttaagtaaagtggtgttccct

SEQ ID NO: 40879 - DNA, 25 bp, Homo sapien
tctcagaacggaaaacgggtttcct

SEQ ID NO: 40880 - DNA, 25 bp, Homo sapien
tctcagaacggataacgggtttcct

SEQ ID NO: 40881 - DNA, 25 bp, Homo sapien
gttctgatggtcaaggaatttcgtc

SEQ ID NO: 40882 - DNA, 25 bp, Homo sapien
gttctgatggtctaggaatttcgtc

SEQ ID NO: 40883 - DNA, 25 bp, Homo sapien
gtgactgttgaagtagacgttcctc

SEQ ID NO: 40884 - DNA, 25 bp, Homo sapien
gtgactgttgaactagacgttcctc

SEQ ID NO: 40885 - DNA, 25 bp, Homo sapien
cctcgtccacttcaagagtttcctg

SEQ ID NO: 40886 - DNA, 25 bp, Homo sapien
cctcgtccacttgaagagtttcctg

SEQ ID NO: 40887 - DNA, 25 bp, Homo sapien
cctgtctacgactatgggtttcata

SEQ ID NO: 40888 - DNA, 25 bp, Homo sapien
cctgtctacgacaatgggtttcata

SEQ ID NO: 40889 - DNA, 25 bp, Homo sapien
cagtcttacaatatcgtggtttttt

SEQ ID NO: 40890 - DNA, 25 bp, Homo sapien
cagtcttacaatttcgtggtttttt

SEQ ID NO: 40891 - DNA, 25 bp, Homo sapien
gacgtaagtttcgtctttacatttt

SEQ ID NO: 40892 - DNA, 25 bp, Homo sapien
gacgtaagtttcctctttacatttt

SEQ ID NO: 40893 - DNA, 25 bp, Homo sapien
cacggtatgatctttatatgtttct

SEQ ID NO: 40894 - DNA, 25 bp, Homo sapien
cacggtatgatcattatatgtttct

SEQ ID NO: 40895 - DNA, 25 bp, Homo sapien
acagattcactgaatcactggaagt

SEQ ID NO: 40896 - DNA, 25 bp, Homo sapien
acagattcactgtatcactggaagt

SEQ ID NO: 40897 - DNA, 25 bp, Homo sapien
tccttcgactggaacttcgagaggt

SEQ ID NO: 40898 - DNA, 25 bp, Homo sapien
tccttcgactggtacttcgagaggt

SEQ ID NO: 40899 - DNA, 25 bp, Homo sapien
ttcacctaccggtcttacgacatgt

SEQ ID NO: 40900 - DNA, 25 bp, Homo sapien
ttcacctaccggacttacgacatgt

SEQ ID NO: 40901 - DNA, 25 bp, Homo sapien
ccctcagtctcctcgttacaggagt

SEQ ID NO: 40902 - DNA, 25 bp, Homo sapien
ccctcagtctccacgttacaggagt

SEQ ID NO: 40903 - DNA, 25 bp, Homo sapien
ttaaccttctactagaacacggtag

SEQ ID NO: 40904 - DNA, 25 bp, Homo sapien
ttaaccttctacaagaacacggtag

SEQ ID NO: 40905 - DNA, 25 bp, Homo sapien
ggataatcctttcaatgagtaccta

SEQ ID NO: 40906 - DNA, 25 bp, Homo sapien
ggataatcctttgaatgagtaccta

SEQ ID NO: 40907 - DNA, 25 bp, Homo sapien
gtcgtgggcttcctagaaagatgca

SEQ ID NO: 40908 - DNA, 25 bp, Homo sapien
gtcgtgggcttcgtagaaagatgca

SEQ ID NO: 40909 - DNA, 25 bp, Homo sapien
agttgattcttctccgcggactcaa

SEQ ID NO: 40910 - DNA, 25 bp, Homo sapien
agttgattcttcaccgcggactcaa

SEQ ID NO: 40911 - DNA, 25 bp, Homo sapien
gtttttatcttgctcggtacctgtc

SEQ ID NO: 40912 - DNA, 25 bp, Homo sapien
gtttttatcttggtcggtacctgtc

SEQ ID NO: 40913 - DNA, 25 bp, Homo sapien
taggttttcctctgcgacgaacccc

SEQ ID NO: 40914 - DNA, 25 bp, Homo sapien
taggttttcctcagcgacgaacccc

SEQ ID NO: 40915 - DNA, 25 bp, Homo sapien
aggtggtgtccgacgcactcccttc

SEQ ID NO: 40916 - DNA, 25 bp, Homo sapien
aggtggtgtccgtcgcactcccttc

SEQ ID NO: 40917 - DNA, 25 bp, Homo sapien
gccgtgtctccatcgtcctcagggc

SEQ ID NO: 40918 - DNA, 25 bp, Homo sapien
gccgtgtctccaacgtcctcagggc

SEQ ID NO: 40919 - DNA, 25 bp, Homo sapien
gacgttttactgtctccccgatggt

SEQ ID NO: 40920 - DNA, 25 bp, Homo sapien
gacgttttactgactccccgatggt

SEQ ID NO: 40921 - DNA, 25 bp, Homo sapien
gcgttttactgaatacctctgttgg

SEQ ID NO: 40922 - DNA, 25 bp, Homo sapien
gcgttttactgattacctctgttgg

SEQ ID NO: 40923 - DNA, 25 bp, Homo sapien
cgtctgctactgtgacggcagcagg

SEQ ID NO: 40924 - DNA, 25 bp, Homo sapien
cgtctgctactgagacggcagcagg

SEQ ID NO: 40925 - DNA, 25 bp, Homo sapien
gtctcggactactacttccccagta

SEQ ID NO: 40926 - DNA, 25 bp, Homo sapien
gtctcggactacaacttccccagta

SEQ ID NO: 40927 - DNA, 25 bp, Homo sapien
cggtgaggaaccttcatagacgatg

SEQ ID NO: 40928 - DNA, 25 bp, Homo sapien
cggtgaggaaccatcatagacgatg

SEQ ID NO: 40929 - DNA, 25 bp, Homo sapien
gaagaccgaaaggacctactccacc

SEQ ID NO: 40930 - DNA, 25 bp, Homo sapien
gaagaccgaaagcacctactccacc

SEQ ID NO: 40931 - DNA, 25 bp, Homo sapien
ggacggatgaaactaggtctccctc

SEQ ID NO: 40932 - DNA, 25 bp, Homo sapien
ggacggatgaaagtaggtctccctc

SEQ ID NO: 40933 - DNA, 25 bp, Homo sapien
acgtcggggaacgagtcctccttcc

SEQ ID NO: 40934 - DNA, 25 bp, Homo sapien
acgtcggggaaccagtcctccttcc

SEQ ID NO: 40935 - DNA, 25 bp, Homo sapien
ggagaggtccgaggtcccactctgc

SEQ ID NO: 40936 - DNA, 25 bp, Homo sapien
ggagaggtccgacgtcccactctgc

SEQ ID NO: 40937 - DNA, 25 bp, Homo sapien
ataggtgtcctcgtgtcggcgttgc

SEQ ID NO: 40938 - DNA, 25 bp, Homo sapien
ataggtgtcctcctgtcggcgttgc

SEQ ID NO: 40939 - DNA, 25 bp, Homo sapien
tagttaggtgtctccttcttttaac

SEQ ID NO: 40940 - DNA, 25 bp, Homo sapien
tagttaggtgtcaccttcttttaac

SEQ ID NO: 40941 - DNA, 25 bp, Homo sapien
cactgtttcgggactcttgcctgtg

SEQ ID NO: 40942 - DNA, 25 bp, Homo sapien
cactgtttcgggtctcttgcctgtg

SEQ ID NO: 40943 - DNA, 25 bp, Homo sapien
ccggtcggtgcctctttccagttat

SEQ ID NO: 40944 - DNA, 25 bp, Homo sapien
ccggtcggtgccactttccagttat

SEQ ID NO: 40945 - DNA, 25 bp, Homo sapien
tgagtctatatgtaaccaacgtaca

SEQ ID NO: 40946 - DNA, 25 bp, Homo sapien
tgagtctatatgaaaccaacgtaca

SEQ ID NO: 40947 - DNA, 25 bp, Homo sapien
gtgagtttttagataactcatacac

SEQ ID NO: 40948 - DNA, 25 bp, Homo sapien
gtgagtttttagttaactcatacac

SEQ ID NO: 40949 - DNA, 25 bp, Homo sapien
gtagttcacataagtacttgtcact

SEQ ID NO: 40950 - DNA, 25 bp, Homo sapien
gtagttcacatatgtacttgtcact

SEQ ID NO: 40951 - DNA, 25 bp, Homo sapien
ggtcgatggtactctacacgtctgt

SEQ ID NO: 40952 - DNA, 25 bp, Homo sapien
ggtcgatggtacactacacgtctgt

SEQ ID NO: 40953 - DNA, 25 bp, Homo sapien
agtccgtactaagattaaaccgttt

SEQ ID NO: 40954 - DNA, 25 bp, Homo sapien
agtccgtactaacattaaaccgttt

SEQ ID NO: 40955 - DNA, 25 bp, Homo sapien
ggtacatactgaactctaatagttc

SEQ ID NO: 40956 - DNA, 25 bp, Homo sapien
ggtacatactgatctctaatagttc

SEQ ID NO: 40957 - DNA, 25 bp, Homo sapien
gactgtcagtcaatgtcggggtgtc

SEQ ID NO: 40958 - DNA, 25 bp, Homo sapien
gactgtcagtcattgtcggggtgtc

SEQ ID NO: 40959 - DNA, 25 bp, Homo sapien
actccactgtatcgtcggtggtctt

SEQ ID NO: 40960 - DNA, 25 bp, Homo sapien
actccactgtatggtcggtggtctt

SEQ ID NO: 40961 - DNA, 25 bp, Homo sapien
tagggtcgaaacagtgaggttctct

SEQ ID NO: 40962 - DNA, 25 bp, Homo sapien
tagggtcgaaactgtgaggttctct

SEQ ID NO: 40963 - DNA, 25 bp, Homo sapien
ttttggacaaggttacaacgaactc

SEQ ID NO: 40964 - DNA, 25 bp, Homo sapien
ttttggacaaggatacaacgaactc

SEQ ID NO: 40965 - DNA, 25 bp, Homo sapien
tcggtctacgagactctctccactg

SEQ ID NO: 40966 - DNA, 25 bp, Homo sapien
tcggtctacgagtctctctccactg

SEQ ID NO: 40967 - DNA, 25 bp, Homo sapien
tgtatctagagtctctgtgtgactg

SEQ ID NO: 40968 - DNA, 25 bp, Homo sapien
tgtatctagagtgtctgtgtgactg

SEQ ID NO: 40969 - DNA, 25 bp, Homo sapien
tctcttgaagatgtactgagactga

SEQ ID NO: 40970 - DNA, 25 bp, Homo sapien
tctcttgaagatctactgagactga

SEQ ID NO: 40971 - DNA, 25 bp, Homo sapien
tcctttgaacactacttacgaggag

SEQ ID NO: 40972 - DNA, 25 bp, Homo sapien
tcctttgaacacaacttacgaggag

SEQ ID NO: 40973 - DNA, 25 bp, Homo sapien
cgtccttcaaccaagagtccgaggc

SEQ ID NO: 40974 - DNA, 25 bp, Homo sapien
cgtccttcaacctagagtccgaggc

SEQ ID NO: 40975 - DNA, 25 bp, Homo sapien
ccccagacacggtgtcgagacggac

SEQ ID NO: 40976 - DNA, 25 bp, Homo sapien
ccccagacacggagtcgagacggac

SEQ ID NO: 40977 - DNA, 25 bp, Homo sapien
tgtcttggacacgaagacggtacaa

SEQ ID NO: 40978 - DNA, 25 bp, Homo sapien
tgtcttggacaccaagacggtacaa

SEQ ID NO: 40979 - DNA, 25 bp, Homo sapien
tctgttgtcccgacaaacggtttag

SEQ ID NO: 40980 - DNA, 25 bp, Homo sapien
tctgttgtcccgtcaaacggtttag

SEQ ID NO: 40981 - DNA, 25 bp, Homo sapien
aaggtgttaccctcagttactttta

SEQ ID NO: 40982 - DNA, 25 bp, Homo sapien
aaggtgttacccacagttactttta

SEQ ID NO: 40983 - DNA, 25 bp, Homo sapien
actggattaagaccaaaaactgtta

SEQ ID NO: 40984 - DNA, 25 bp, Homo sapien
actggattaagagcaaaaactgtta

SEQ ID NO: 40985 - DNA, 25 bp, Homo sapien
aattaggtaccgaaaagacgtaaca

SEQ ID NO: 40986 - DNA, 25 bp, Homo sapien
aattaggtaccgtaaagacgtaaca

SEQ ID NO: 40987 - DNA, 25 bp, Homo sapien
attactgggaactactaaggacaca

SEQ ID NO: 40988 - DNA, 25 bp, Homo sapien
attactgggaacaactaaggacaca

SEQ ID NO: 40989 - DNA, 25 bp, Homo sapien
atcttgtgttacgttactgaactaa

SEQ ID NO: 40990 - DNA, 25 bp, Homo sapien
atcttgtgttaccttactgaactaa

SEQ ID NO: 40991 - DNA, 25 bp, Homo sapien
cactttttgtggacatgcgtaatac

SEQ ID NO: 40992 - DNA, 25 bp, Homo sapien
cactttttgtggtcatgcgtaatac

SEQ ID NO: 40993 - DNA, 25 bp, Homo sapien
aactctttggtacgtatgacatatg

SEQ ID NO: 40994 - DNA, 25 bp, Homo sapien
aactctttggtaggtatgacatatg

SEQ ID NO: 40995 - DNA, 25 bp, Homo sapien
acagtttttcagtagtcacggtagg

SEQ ID NO: 40996 - DNA, 25 bp, Homo sapien
acagtttttcagaagtcacggtagg

SEQ ID NO: 40997 - DNA, 25 bp, Homo sapien
ggtacgtatttcacaaagatttcat

SEQ ID NO: 40998 - DNA, 25 bp, Homo sapien
ggtacgtatttctcaaagatttcat

SEQ ID NO: 40999 - DNA, 25 bp, Homo sapien
gacgaaatgaagtcgtccttcttac

SEQ ID NO: 41000 - DNA, 25 bp, Homo sapien
gacgaaatgaagacgtccttcttac

SEQ ID NO: 41001 - DNA, 25 bp, Homo sapien
tcaccctgagagacacctatctgac

SEQ ID NO: 41002 - DNA, 25 bp, Homo sapien
tcaccctgagagtcacctatctgac

SEQ ID NO: 41003 - DNA, 25 bp, Homo sapien
gacccgtcagcgtcacggtccggag

SEQ ID NO: 41004 - DNA, 25 bp, Homo sapien
gacccgtcagcgacacggtccggag

SEQ ID NO: 41005 - DNA, 25 bp, Homo sapien
taagctcctgagacgtttctccctg

SEQ ID NO: 41006 - DNA, 25 bp, Homo sapien
taagctcctgagtcgtttctccctg

SEQ ID NO: 41007 - DNA, 25 bp, Homo sapien
agtaaacccgatatttctaccgccg

SEQ ID NO: 41008 - DNA, 25 bp, Homo sapien
agtaaacccgatttttctaccgccg

SEQ ID NO: 41009 - DNA, 25 bp, Homo sapien
gaggatccgtcactcaatctccttt

SEQ ID NO: 41010 - DNA, 25 bp, Homo sapien
gaggatccgtcagtcaatctccttt

SEQ ID NO: 41011 - DNA, 25 bp, Homo sapien
atcctgatagtctgagtaacggttc

SEQ ID NO: 41012 - DNA, 25 bp, Homo sapien
atcctgatagtcagagtaacggttc

SEQ ID NO: 41013 - DNA, 25 bp, Homo sapien
ttcgtttgacgtggataccgactct

SEQ ID NO: 41014 - DNA, 25 bp, Homo sapien
ttcgtttgacgtcgataccgactct

SEQ ID NO: 41015 - DNA, 25 bp, Homo sapien
agatgaggttgaaccggtcctaact

SEQ ID NO: 41016 - DNA, 25 bp, Homo sapien
agatgaggttgatccggtcctaact

SEQ ID NO: 41017 - DNA, 25 bp, Homo sapien
cttcgggtgcctcaagggtccacac

SEQ ID NO: 41018 - DNA, 25 bp, Homo sapien
cttcgggtgcctgaagggtccacac

SEQ ID NO: 41019 - DNA, 25 bp, Homo sapien
atacaaggacctatgactcctgtaa

SEQ ID NO: 41020 - DNA, 25 bp, Homo sapien
atacaaggacctttgactcctgtaa

SEQ ID NO: 41021 - DNA, 25 bp, Homo sapien
actgagagccagaagaacccgtcat

SEQ ID NO: 41022 - DNA, 25 bp, Homo sapien
actgagagccagtagaacccgtcat

SEQ ID NO: 41023 - DNA, 25 bp, Homo sapien
ctcggtaccctaggagcccggtcgg

SEQ ID NO: 41024 - DNA, 25 bp, Homo sapien
ctcggtaccctacgagcccggtcgg

SEQ ID NO: 41025 - DNA, 25 bp, Homo sapien
tgtatagcctagtcgagtccgtgcc

SEQ ID NO: 41026 - DNA, 25 bp, Homo sapien
tgtatagcctagacgagtccgtgcc

SEQ ID NO: 41027 - DNA, 25 bp, Homo sapien
tatgtgtctagagtgtcacgtaaca

SEQ ID NO: 41028 - DNA, 25 bp, Homo sapien
tatgtgtctagactgtcacgtaaca

SEQ ID NO: 41029 - DNA, 25 bp, Homo sapien
aatagatcgttacgtcttacttatg

SEQ ID NO: 41030 - DNA, 25 bp, Homo sapien
aatagatcgttaggtcttacttatg

SEQ ID NO: 41031 - DNA, 25 bp, Homo sapien
tagtttttagtcgtagtcctctact

SEQ ID NO: 41032 - DNA, 25 bp, Homo sapien
tagtttttagtcctagtcctctact

SEQ ID NO: 41033 - DNA, 25 bp, Homo sapien
gttataatcttatgacggtgtctca

SEQ ID NO: 41034 - DNA, 25 bp, Homo sapien
gttataatcttaagacggtgtctca

SEQ ID NO: 41035 - DNA, 25 bp, Homo sapien
tcctctttcatatatggtgtccctg

SEQ ID NO: 41036 - DNA, 25 bp, Homo sapien
tcctctttcataaatggtgtccctg

SEQ ID NO: 41037 - DNA, 25 bp, Homo sapien
aaattctcaaagtccgagaggcgta

SEQ ID NO: 41038 - DNA, 25 bp, Homo sapien
aaattctcaaagaccgagaggcgta

SEQ ID NO: 41039 - DNA, 25 bp, Homo sapien
tcttcccgttagacgagggcgtcga

SEQ ID NO: 41040 - DNA, 25 bp, Homo sapien
tcttcccgttagtcgagggcgtcga

SEQ ID NO: 41041 - DNA, 25 bp, Homo sapien
ttctttcgtctttcgttgaaggtaa

SEQ ID NO: 41042 - DNA, 25 bp, Homo sapien
ttctttcgtcttacgttgaaggtaa

SEQ ID NO: 41043 - DNA, 25 bp, Homo sapien
cttctgtttccctcatagtctgggg

SEQ ID NO: 41044 - DNA, 25 bp, Homo sapien
cttctgtttcccacatagtctgggg

SEQ ID NO: 41045 - DNA, 25 bp, Homo sapien
cctattaacgcctgacttgggagcc

SEQ ID NO: 41046 - DNA, 25 bp, Homo sapien
cctattaacgccagacttgggagcc

SEQ ID NO: 41047 - DNA, 25 bp, Homo sapien
ccttgaccctgagtctcacggggct

SEQ ID NO: 41048 - DNA, 25 bp, Homo sapien
ccttgaccctgactctcacggggct

SEQ ID NO: 41049 - DNA, 25 bp, Homo sapien
aactctcctttgtaccagtgtgggt

SEQ ID NO: 41050 - DNA, 25 bp, Homo sapien
aactctcctttgaaccagtgtgggt

SEQ ID NO: 41051 - DNA, 25 bp, Homo sapien
taaaaacccctttctttgtggtagt

SEQ ID NO: 41052 - DNA, 25 bp, Homo sapien
taaaaaccccttactttgtggtagt

SEQ ID NO: 41053 - DNA, 25 bp, Homo sapien
taaaaaactccgtgttttagggact

SEQ ID NO: 41054 - DNA, 25 bp, Homo sapien
taaaaaactccgagttttagggact

SEQ ID NO: 41055 - DNA, 25 bp, Homo sapien
ttcagtcgcagttctctcagggact

SEQ ID NO: 41056 - DNA, 25 bp, Homo sapien
ttcagtcgcagtactctcagggact

SEQ ID NO: 41057 - DNA, 25 bp, Homo sapien
ttttaacggagttcgatccaggtat

SEQ ID NO: 41058 - DNA, 25 bp, Homo sapien
ttttaacggagtacgatccaggtat

SEQ ID NO: 41059 - DNA, 25 bp, Homo sapien
atgtatacgggttttaccgactctt

SEQ ID NO: 41060 - DNA, 25 bp, Homo sapien
atgtatacgggtattaccgactctt

SEQ ID NO: 41061 - DNA, 25 bp, Homo sapien
atttcgttacgtgttcagtggaccc

SEQ ID NO: 41062 - DNA, 25 bp, Homo sapien
atttcgttacgtcttcagtggaccc

SEQ ID NO: 41063 - DNA, 25 bp, Homo sapien
accgtgccactatttcagggtcctc

SEQ ID NO: 41064 - DNA, 25 bp, Homo sapien
accgtgccactaattcagggtcctc

SEQ ID NO: 41065 - DNA, 25 bp, Homo sapien
acccgatacacagtgtcaggagccc

SEQ ID NO: 41066 - DNA, 25 bp, Homo sapien
acccgatacacactgtcaggagccc

SEQ ID NO: 41067 - DNA, 25 bp, Homo sapien
tccgtcgactggttcgggacgtccc

SEQ ID NO: 41068 - DNA, 25 bp, Homo sapien
tccgtcgactggatcgggacgtccc

SEQ ID NO: 41069 - DNA, 25 bp, Homo sapien
tctcgccggagactcgcggatcctc

SEQ ID NO: 41070 - DNA, 25 bp, Homo sapien
tctcgccggagagtcgcggatcctc

SEQ ID NO: 41071 - DNA, 25 bp, Homo sapien
ccttgaccgtgcttcggttcctatg

SEQ ID NO: 41072 - DNA, 25 bp, Homo sapien
ccttgaccgtgcatcggttcctatg

SEQ ID NO: 41073 - DNA, 25 bp, Homo sapien
tttgacacatcgtggactcgaccta

SEQ ID NO: 41074 - DNA, 25 bp, Homo sapien
tttgacacatcgaggactcgaccta

SEQ ID NO: 41075 - DNA, 25 bp, Homo sapien
ctccttacacgtagagaccgaccta

SEQ ID NO: 41076 - DNA, 25 bp, Homo sapien
ctccttacacgttgagaccgaccta

SEQ ID NO: 41077 - DNA, 25 bp, Homo sapien
agttctccttggtgaccctcctact

SEQ ID NO: 41078 - DNA, 25 bp, Homo sapien
agttctccttggagaccctcctact

SEQ ID NO: 41079 - DNA, 25 bp, Homo sapien
ttcctagtctagtcttaggctccac

SEQ ID NO: 41080 - DNA, 25 bp, Homo sapien
ttcctagtctagacttaggctccac

SEQ ID NO: 41081 - DNA, 25 bp, Homo sapien
ggcgcagctgcctgtcgtgtgtcca

SEQ ID NO: 41082 - DNA, 25 bp, Homo sapien
ggcgcagctgccagtcgtgtgtcca

SEQ ID NO: 41083 - DNA, 25 bp, Homo sapien
ttccctccgacgagtcgaagtatga

SEQ ID NO: 41084 - DNA, 25 bp, Homo sapien
ttccctccgacgtgtcgaagtatga

SEQ ID NO: 41085 - DNA, 25 bp, Homo sapien
ttcgcggagtggatcggagaattac

SEQ ID NO: 41086 - DNA, 25 bp, Homo sapien
ttcgcggagtggttcggagaattac

SEQ ID NO: 41087 - DNA, 25 bp, Homo sapien
gaaacagggtagattgaaaccggtc

SEQ ID NO: 41088 - DNA, 25 bp, Homo sapien
gaaacagggtagtttgaaaccggtc

SEQ ID NO: 41089 - DNA, 25 bp, Homo sapien
ggagaccaaggaaaaacagactcca

SEQ ID NO: 41090 - DNA, 25 bp, Homo sapien
ggagaccaaggataaacagactcca

SEQ ID NO: 41091 - DNA, 25 bp, Homo sapien
gtgtaacaaatttttgactgatcca

SEQ ID NO: 41092 - DNA, 25 bp, Homo sapien
gtgtaacaaattattgactgatcca

SEQ ID NO: 41093 - DNA, 25 bp, Homo sapien
ggaaacaatttgattcatcgactta

SEQ ID NO: 41094 - DNA, 25 bp, Homo sapien
ggaaacaatttgtttcatcgactta

SEQ ID NO: 41095 - DNA, 25 bp, Homo sapien
gagaaaccgattataaaccttctag

SEQ ID NO: 41096 - DNA, 25 bp, Homo sapien
gagaaaccgattttaaaccttctag

SEQ ID NO: 41097 - DNA, 25 bp, Homo sapien
acgtcgtttaggaagacttgtgtct

SEQ ID NO: 41098 - DNA, 25 bp, Homo sapien
acgtcgtttaggtagacttgtgtct

SEQ ID NO: 41099 - DNA, 25 bp, Homo sapien
acgtagctcgtacgtattcttttat

SEQ ID NO: 41100 - DNA, 25 bp, Homo sapien
acgtagctcgtaggtattcttttat

SEQ ID NO: 41101 - DNA, 25 bp, Homo sapien
gcgatagtcttcaattttcgtcatt

SEQ ID NO: 41102 - DNA, 25 bp, Homo sapien
gcgatagtcttctattttcgtcatt

SEQ ID NO: 41103 - DNA, 25 bp, Homo sapien
cagtcagtctggaattttcgaatat

SEQ ID NO: 41104 - DNA, 25 bp, Homo sapien
cagtcagtctggtattttcgaatat

SEQ ID NO: 41105 - DNA, 25 bp, Homo sapien
actgagtggacgaaaccttcctgtt

SEQ ID NO: 41106 - DNA, 25 bp, Homo sapien
actgagtggacgtaaccttcctgtt

SEQ ID NO: 41107 - DNA, 25 bp, Homo sapien
ccatataagaagtaacggatccacc

SEQ ID NO: 41108 - DNA, 25 bp, Homo sapien
ccatataagaagaaacggatccacc

SEQ ID NO: 41109 - DNA, 25 bp, Homo sapien
agcaaaagaagaagggactacccga

SEQ ID NO: 41110 - DNA, 25 bp, Homo sapien
agcaaaagaagatgggactacccga

SEQ ID NO: 41111 - DNA, 25 bp, Homo sapien
ttcaaaggaaggtctaacaatgtac

SEQ ID NO: 41112 - DNA, 25 bp, Homo sapien
ttcaaaggaaggactaacaatgtac

SEQ ID NO: 41113 - DNA, 25 bp, Homo sapien
agacccagacttagaacatctatcg

SEQ ID NO: 41114 - DNA, 25 bp, Homo sapien
agacccagactttgaacatctatcg

SEQ ID NO: 41115 - DNA, 25 bp, Homo sapien
agaccatccgtttgtcagactcttt

SEQ ID NO: 41116 - DNA, 25 bp, Homo sapien
agaccatccgttagtcagactcttt

SEQ ID NO: 41117 - DNA, 25 bp, Homo sapien
ggactcccttcatgagcgtgtcacc

SEQ ID NO: 41118 - DNA, 25 bp, Homo sapien
ggactcccttcaagagcgtgtcacc

SEQ ID NO: 41119 - DNA, 25 bp, Homo sapien
agggactcgggtcttgttcgaccaa

SEQ ID NO: 41120 - DNA, 25 bp, Homo sapien
agggactcgggtgttgttcgaccaa

SEQ ID NO: 41121 - DNA, 25 bp, Homo sapien
aggggtcggatacggtgtgcataaa

SEQ ID NO: 41122 - DNA, 25 bp, Homo sapien
aggggtcggatagggtgtgcataaa

SEQ ID NO: 41123 - DNA, 25 bp, Homo sapien
caaggtaaaagtaattcccgtagag

SEQ ID NO: 41124 - DNA, 25 bp, Homo sapien
caaggtaaaagttattcccgtagag

SEQ ID NO: 41125 - DNA, 25 bp, Homo sapien
caagagattcttcaaacttcgagcg

SEQ ID NO: 41126 - DNA, 25 bp, Homo sapien
caagagattcttgaaacttcgagcg

SEQ ID NO: 41127 - DNA, 25 bp, Homo sapien
ccagatttttgtgacagtttcatag

SEQ ID NO: 41128 - DNA, 25 bp, Homo sapien
ccagatttttgtcacagtttcatag

SEQ ID NO: 41129 - DNA, 25 bp, Homo sapien
agacactttctgtaggattcgtgac

SEQ ID NO: 41130 - DNA, 25 bp, Homo sapien
agacactttctgaaggattcgtgac

SEQ ID NO: 41131 - DNA, 25 bp, Homo sapien
aagaacctgtcctctaagagtttca

SEQ ID NO: 41132 - DNA, 25 bp, Homo sapien
aagaacctgtccactaagagtttca

SEQ ID NO: 41133 - DNA, 25 bp, Homo sapien
agaccgttcctcggcgacttttcat

SEQ ID NO: 41134 - DNA, 25 bp, Homo sapien
agaccgttcctccgcgacttttcat

SEQ ID NO: 41135 - DNA, 25 bp, Homo sapien
gaggactctctccgttctccttaga

SEQ ID NO: 41136 - DNA, 25 bp, Homo sapien
gaggactctctcggttctccttaga

SEQ ID NO: 41137 - DNA, 25 bp, Homo sapien
cgaagactccatgtaaacgtcttag

SEQ ID NO: 41138 - DNA, 25 bp, Homo sapien
cgaagactccatctaaacgtcttag

SEQ ID NO: 41139 - DNA, 25 bp, Homo sapien
taaacagtttactcacaactgacta

SEQ ID NO: 41140 - DNA, 25 bp, Homo sapien
taaacagtttacacacaactgacta

SEQ ID NO: 41141 - DNA, 25 bp, Homo sapien
ccacaaaggtaataactgttcgata

SEQ ID NO: 41142 - DNA, 25 bp, Homo sapien
ccacaaaggtaaaaactgttcgata

SEQ ID NO: 41143 - DNA, 25 bp, Homo sapien
ctcgtcaaagagacccctgaggaac

SEQ ID NO: 41144 - DNA, 25 bp, Homo sapien
ctcgtcaaagagtcccctgaggaac

SEQ ID NO: 41145 - DNA, 25 bp, Homo sapien
acactgtagggtctttcgacagtga

SEQ ID NO: 41146 - DNA, 25 bp, Homo sapien
acactgtagggtgtttcgacagtga

SEQ ID NO: 41147 - DNA, 25 bp, Homo sapien
ctcataaggtgtgttgtacaagcct

SEQ ID NO: 41148 - DNA, 25 bp, Homo sapien
ctcataaggtgtcttgtacaagcct

SEQ ID NO: 41149 - DNA, 25 bp, Homo sapien
ggtccccgaaggtctctcaagaagt

SEQ ID NO: 41150 - DNA, 25 bp, Homo sapien
ggtccccgaaggactctcaagaagt

SEQ ID NO: 41151 - DNA, 25 bp, Homo sapien
tccactacgccagtccctaagtaag

SEQ ID NO: 41152 - DNA, 25 bp, Homo sapien
tccactacgccactccctaagtaag

SEQ ID NO: 41153 - DNA, 25 bp, Homo sapien
ttataaagtgataccccagaaagtg

SEQ ID NO: 41154 - DNA, 25 bp, Homo sapien
ttataaagtgattccccagaaagtg

SEQ ID NO: 41155 - DNA, 25 bp, Homo sapien
ttaagacaggattatgttcaaacca

SEQ ID NO: 41156 - DNA, 25 bp, Homo sapien
ttaagacaggataatgttcaaacca

SEQ ID NO: 41157 - DNA, 25 bp, Homo sapien
gatgttaaagtaacattcaccccag

SEQ ID NO: 41158 - DNA, 25 bp, Homo sapien
gatgttaaagtatcattcaccccag

SEQ ID NO: 41159 - DNA, 25 bp, Homo sapien
tagacgaaatgactccgctgactag

SEQ ID NO: 41160 - DNA, 25 bp, Homo sapien
tagacgaaatgagtccgctgactag

SEQ ID NO: 41161 - DNA, 25 bp, Homo sapien
tccagataagacagagacccttgta

SEQ ID NO: 41162 - DNA, 25 bp, Homo sapien
tccagataagactgagacccttgta

SEQ ID NO: 41163 - DNA, 25 bp, Homo sapien
cagacaagtgactggtttcaggtgt

SEQ ID NO: 41164 - DNA, 25 bp, Homo sapien
cagacaagtgacaggtttcaggtgt

SEQ ID NO: 41165 - DNA, 25 bp, Homo sapien
aagagaagaaaggtctctaccgatt

SEQ ID NO: 41166 - DNA, 25 bp, Homo sapien
aagagaagaaagctctctaccgatt

SEQ ID NO: 41167 - DNA, 25 bp, Homo sapien
ccgaggtccgggacccgtctgcttg

SEQ ID NO: 41168 - DNA, 25 bp, Homo sapien
ccgaggtccgggtcccgtctgcttg

SEQ ID NO: 41169 - DNA, 25 bp, Homo sapien
actccttacccgtgacctgtcggtg

SEQ ID NO: 41170 - DNA, 25 bp, Homo sapien
actccttacccgagacctgtcggtg

SEQ ID NO: 41171 - DNA, 25 bp, Homo sapien
ctactatcccaccaaaagtagtgga

SEQ ID NO: 41172 - DNA, 25 bp, Homo sapien
ctactatcccacgaaaagtagtgga

SEQ ID NO: 41173 - DNA, 25 bp, Homo sapien
atgcgtcaagaacctactgtcggac

SEQ ID NO: 41174 - DNA, 25 bp, Homo sapien
atgcgtcaagaagctactgtcggac

SEQ ID NO: 41175 - DNA, 25 bp, Homo sapien
gatactaacaacaacgaacagcgga

SEQ ID NO: 41176 - DNA, 25 bp, Homo sapien
gatactaacaactacgaacagcgga

SEQ ID NO: 41177 - DNA, 25 bp, Homo sapien
aggaacttcaactacagcgtcggga

SEQ ID NO: 41178 - DNA, 25 bp, Homo sapien
aggaacttcaacaacagcgtcggga

SEQ ID NO: 41179 - DNA, 25 bp, Homo sapien
acaggactcgaaacaaccgggggtt

SEQ ID NO: 41180 - DNA, 25 bp, Homo sapien
acaggactcgaatcaaccgggggtt

SEQ ID NO: 41181 - DNA, 25 bp, Homo sapien
aattcgcgatccaagagggcgtcgt

SEQ ID NO: 41182 - DNA, 25 bp, Homo sapien
aattcgcgatcctagagggcgtcgt

SEQ ID NO: 41183 - DNA, 25 bp, Homo sapien
aagtcgtgcttcgagaatcgcagtc

SEQ ID NO: 41184 - DNA, 25 bp, Homo sapien
aagtcgtgcttccagaatcgcagtc

SEQ ID NO: 41185 - DNA, 25 bp, Homo sapien
aaccacaaactattgtcttcgtgta

SEQ ID NO: 41186 - DNA, 25 bp, Homo sapien
aaccacaaactaatgtcttcgtgta

SEQ ID NO: 41187 - DNA, 25 bp, Homo sapien
gtactgtcgctaccaggtgcccggg

SEQ ID NO: 41188 - DNA, 25 bp, Homo sapien
gtactgtcgctagcaggtgcccggg

SEQ ID NO: 41189 - DNA, 25 bp, Homo sapien
gtttccagtcctgctagacccggcg

SEQ ID NO: 41190 - DNA, 25 bp, Homo sapien
gtttccagtcctcctagacccggcg

SEQ ID NO: 41191 - DNA, 25 bp, Homo sapien
gtctactctgcttcggaacatggag

SEQ ID NO: 41192 - DNA, 25 bp, Homo sapien
gtctactctgctacggaacatggag

SEQ ID NO: 41193 - DNA, 25 bp, Homo sapien
ttttactcgacgtccgaacaagaag

SEQ ID NO: 41194 - DNA, 25 bp, Homo sapien
ttttactcgacgaccgaacaagaag

SEQ ID NO: 41195 - DNA, 25 bp, Homo sapien
gacttaaccctttttccgtaggact

SEQ ID NO: 41196 - DNA, 25 bp, Homo sapien
gacttaacccttattccgtaggact

SEQ ID NO: 41197 - DNA, 25 bp, Homo sapien
agaccgttcccgaggccgtcacgga

SEQ ID NO: 41198 - DNA, 25 bp, Homo sapien
agaccgttcccgtggccgtcacgga

SEQ ID NO: 41199 - DNA, 25 bp, Homo sapien
ccgccgtgcgacttgaggtcaacga

SEQ ID NO: 41200 - DNA, 25 bp, Homo sapien
ccgccgtgcgacatgaggtcaacga

SEQ ID NO: 41201 - DNA, 25 bp, Homo sapien
accatggtagaagaagtcttgacgt

SEQ ID NO: 41202 - DNA, 25 bp, Homo sapien
accatggtagaacaagtcttgacgt

SEQ ID NO: 41203 - DNA, 25 bp, Homo sapien
gtatccgtggtagaagggacttctt

SEQ ID NO: 41204 - DNA, 25 bp, Homo sapien
gtatccgtggtacaagggacttctt

SEQ ID NO: 41205 - DNA, 25 bp, Homo sapien
acaacgtacggaagggttattgcac

SEQ ID NO: 41206 - DNA, 25 bp, Homo sapien
acaacgtacggatgggttattgcac

SEQ ID NO: 41207 - DNA, 25 bp, Homo sapien
acaagaccgagcgatcgtaagcccg

SEQ ID NO: 41208 - DNA, 25 bp, Homo sapien
acaagaccgagccatcgtaagcccg

SEQ ID NO: 41209 - DNA, 25 bp, Homo sapien
atatgtgacggagcaatccaggtcc

SEQ ID NO: 41210 - DNA, 25 bp, Homo sapien
atatgtgacggaccaatccaggtcc

SEQ ID NO: 41211 - DNA, 25 bp, Homo sapien
tatgaggtgtgactggaacggtacc

SEQ ID NO: 41212 - DNA, 25 bp, Homo sapien
tatgaggtgtgagtggaacggtacc

SEQ ID NO: 41213 - DNA, 25 bp, Homo sapien
cgtacgtgtcttggtggaaggactc

SEQ ID NO: 41214 - DNA, 25 bp, Homo sapien
cgtacgtgtcttcgtggaaggactc

SEQ ID NO: 41215 - DNA, 25 bp, Homo sapien
aacgtatattttcgatggttactac

SEQ ID NO: 41216 - DNA, 25 bp, Homo sapien
aacgtatattttggatggttactac

SEQ ID NO: 41217 - DNA, 25 bp, Homo sapien
gtaacggtcattccgcagtcgtgag

SEQ ID NO: 41218 - DNA, 25 bp, Homo sapien
gtaacggtcattgcgcagtcgtgag

SEQ ID NO: 41219 - DNA, 25 bp, Homo sapien
ttgtacgtctagatgtcgcggtctc

SEQ ID NO: 41220 - DNA, 25 bp, Homo sapien
ttgtacgtctagttgtcgcggtctc

SEQ ID NO: 41221 - DNA, 25 bp, Homo sapien
attaccgtggattttcatggatacg

SEQ ID NO: 41222 - DNA, 25 bp, Homo sapien
attaccgtggatattcatggatacg

SEQ ID NO: 41223 - DNA, 25 bp, Homo sapien
taagaaatctattactagtcggatc

SEQ ID NO: 41224 - DNA, 25 bp, Homo sapien
taagaaatctataactagtcggatc

SEQ ID NO: 41225 - DNA, 25 bp, Homo sapien
agcgttaatttactacgtcgggaat

SEQ ID NO: 41226 - DNA, 25 bp, Homo sapien
agcgttaatttagtacgtcgggaat

SEQ ID NO: 41227 - DNA, 25 bp, Homo sapien
ttttctacgtatggttctctatgca

SEQ ID NO: 41228 - DNA, 25 bp, Homo sapien
ttttctacgtatcgttctctatgca

SEQ ID NO: 41229 - DNA, 25 bp, Homo sapien
ctttgacagtaaagggtcttttcag

SEQ ID NO: 41230 - DNA, 25 bp, Homo sapien
ctttgacagtaatgggtcttttcag

SEQ ID NO: 41231 - DNA, 25 bp, Homo sapien
ttgtgactgtaatgtttcatgtccc

SEQ ID NO: 41232 - DNA, 25 bp, Homo sapien
ttgtgactgtaaagtttcatgtccc

SEQ ID NO: 41233 - DNA, 25 bp, Homo sapien
gacgttcagtaaatcgctatttttc

SEQ ID NO: 41234 - DNA, 25 bp, Homo sapien
gacgttcagtaattcgctatttttc

SEQ ID NO: 41235 - DNA, 25 bp, Homo sapien
ccatagaacaatagactttcgttag

SEQ ID NO: 41236 - DNA, 25 bp, Homo sapien
ccatagaacaattgactttcgttag

SEQ ID NO: 41237 - DNA, 25 bp, Homo sapien
ggaaatatagatagtaccttcctta

SEQ ID NO: 41238 - DNA, 25 bp, Homo sapien
ggaaatatagattgtaccttcctta

SEQ ID NO: 41239 - DNA, 25 bp, Homo sapien
ttttaggacgtttgtcttacattac

SEQ ID NO: 41240 - DNA, 25 bp, Homo sapien
ttttaggacgttagtcttacattac

SEQ ID NO: 41241 - DNA, 25 bp, Homo sapien
gtttctgtagatgttagtaccttac

SEQ ID NO: 41242 - DNA, 25 bp, Homo sapien
gtttctgtagatcttagtaccttac

SEQ ID NO: 41243 - DNA, 25 bp, Homo sapien
ttagtacaggttatcgtatacaacc

SEQ ID NO: 41244 - DNA, 25 bp, Homo sapien
ttagtacaggttttcgtatacaacc

SEQ ID NO: 41245 - DNA, 25 bp, Homo sapien
tttgtgtgtccgttatagagacaca

SEQ ID NO: 41246 - DNA, 25 bp, Homo sapien
tttgtgtgtccgatatagagacaca

SEQ ID NO: 41247 - DNA, 25 bp, Homo sapien
gttcgtccgtgcacatctgtaccag

SEQ ID NO: 41248 - DNA, 25 bp, Homo sapien
gttcgtccgtgctcatctgtaccag

SEQ ID NO: 41249 - DNA, 25 bp, Homo sapien
ccccgagaggcgtccggtgacacgg

SEQ ID NO: 41250 - DNA, 25 bp, Homo sapien
ccccgagaggcgaccggtgacacgg

SEQ ID NO: 41251 - DNA, 25 bp, Homo sapien
gcccgacaatttacggttacacagt

SEQ ID NO: 41252 - DNA, 25 bp, Homo sapien
gcccgacaattttcggttacacagt

SEQ ID NO: 41253 - DNA, 25 bp, Homo sapien
tcacggtaccaggtttagtgtagaa

SEQ ID NO: 41254 - DNA, 25 bp, Homo sapien
tcacggtaccagctttagtgtagaa

SEQ ID NO: 41255 - DNA, 25 bp, Homo sapien
tacgagaacatctttttacgtacga

SEQ ID NO: 41256 - DNA, 25 bp, Homo sapien
tacgagaacatcattttacgtacga

SEQ ID NO: 41257 - DNA, 25 bp, Homo sapien
aacaagaaggacaacgactcgacga

SEQ ID NO: 41258 - DNA, 25 bp, Homo sapien
aacaagaaggactacgactcgacga

SEQ ID NO: 41259 - DNA, 25 bp, Homo sapien
caaaaggtagaggaagaacactgac

SEQ ID NO: 41260 - DNA, 25 bp, Homo sapien
caaaaggtagagcaagaacactgac

SEQ ID NO: 41261 - DNA, 25 bp, Homo sapien
cgacgtccgactagggtcgacacat

SEQ ID NO: 41262 - DNA, 25 bp, Homo sapien
cgacgtccgacttgggtcgacacat

SEQ ID NO: 41263 - DNA, 25 bp, Homo sapien
ctttcgtttcacgagaagtacacga

SEQ ID NO: 41264 - DNA, 25 bp, Homo sapien
ctttcgtttcaccagaagtacacga

SEQ ID NO: 41265 - DNA, 25 bp, Homo sapien
aagtaaattcgaccagagtgactta

SEQ ID NO: 41266 - DNA, 25 bp, Homo sapien
aagtaaattcgagcagagtgactta

SEQ ID NO: 41267 - DNA, 25 bp, Homo sapien
cctcgcaggcggagtaggtcctacg

SEQ ID NO: 41268 - DNA, 25 bp, Homo sapien
cctcgcaggcggtgtaggtcctacg

SEQ ID NO: 41269 - DNA, 25 bp, Homo sapien
cgttctacggttgtcgttgtcgttg

SEQ ID NO: 41270 - DNA, 25 bp, Homo sapien
cgttctacggttctcgttgtcgttg

SEQ ID NO: 41271 - DNA, 25 bp, Homo sapien
cctcttcgtgttcgtatatctgatt

SEQ ID NO: 41272 - DNA, 25 bp, Homo sapien
cctcttcgtgttggtatatctgatt

SEQ ID NO: 41273 - DNA, 25 bp, Homo sapien
ccacaggtaagtggtaataggtctt

SEQ ID NO: 41274 - DNA, 25 bp, Homo sapien
ccacaggtaagtcgtaataggtctt

SEQ ID NO: 41275 - DNA, 25 bp, Homo sapien
tcgatgtgtatttcgtacttttccg

SEQ ID NO: 41276 - DNA, 25 bp, Homo sapien
tcgatgtgtattacgtacttttccg

SEQ ID NO: 41277 - DNA, 25 bp, Homo sapien
atgaggacgaatttacgttttcgac

SEQ ID NO: 41278 - DNA, 25 bp, Homo sapien
atgaggacgaatatacgttttcgac

SEQ ID NO: 41279 - DNA, 25 bp, Homo sapien
aagatacaccgtacacataatgtcg

SEQ ID NO: 41280 - DNA, 25 bp, Homo sapien
aagatacaccgttcacataatgtcg

SEQ ID NO: 41281 - DNA, 25 bp, Homo sapien
aaagtagtaactttgaccaatagtc

SEQ ID NO: 41282 - DNA, 25 bp, Homo sapien
aaagtagtaactatgaccaatagtc

SEQ ID NO: 41283 - DNA, 25 bp, Homo sapien
ggacgataccgagacgttcttatct

SEQ ID NO: 41284 - DNA, 25 bp, Homo sapien
ggacgataccgacacgttcttatct

SEQ ID NO: 41285 - DNA, 25 bp, Homo sapien
tgttacgtcacaagtatctgtatgt

SEQ ID NO: 41286 - DNA, 25 bp, Homo sapien
tgttacgtcacatgtatctgtatgt

SEQ ID NO: 41287 - DNA, 25 bp, Homo sapien
cgtctacacataatcatctgttcgg

SEQ ID NO: 41288 - DNA, 25 bp, Homo sapien
cgtctacacatattcatctgttcgg

SEQ ID NO: 41289 - DNA, 25 bp, Homo sapien
tggatcacttattcacctgtattgt

SEQ ID NO: 41290 - DNA, 25 bp, Homo sapien
tggatcacttatacacctgtattgt

SEQ ID NO: 41291 - DNA, 25 bp, Homo sapien
tcctggacgacttaccccgagatct

SEQ ID NO: 41292 - DNA, 25 bp, Homo sapien
tcctggacgactaaccccgagatct

SEQ ID NO: 41293 - DNA, 25 bp, Homo sapien
tcacgagaacggacgcggtcagaat

SEQ ID NO: 41294 - DNA, 25 bp, Homo sapien
tcacgagaacggtcgcggtcagaat

SEQ ID NO: 41295 - DNA, 25 bp, Homo sapien
ttgtccctcctgtctggtctgtgtt

SEQ ID NO: 41296 - DNA, 25 bp, Homo sapien
ttgtccctcctgactggtctgtgtt

SEQ ID NO: 41297 - DNA, 25 bp, Homo sapien
actcctccgtcgaaggcgatccggt

SEQ ID NO: 41298 - DNA, 25 bp, Homo sapien
actcctccgtcgtaggcgatccggt

SEQ ID NO: 41299 - DNA, 25 bp, Homo sapien
tctcgctatgtgtcgattaacctgt

SEQ ID NO: 41300 - DNA, 25 bp, Homo sapien
tctcgctatgtgacgattaacctgt

SEQ ID NO: 41301 - DNA, 25 bp, Homo sapien
tggtcgtatttatttcccttgtgtc

SEQ ID NO: 41302 - DNA, 25 bp, Homo sapien
tggtcgtatttaattcccttgtgtc

SEQ ID NO: 41303 - DNA, 25 bp, Homo sapien
ttgtctagtttcattcgagccattc

SEQ ID NO: 41304 - DNA, 25 bp, Homo sapien
ttgtctagtttctttcgagccattc

SEQ ID NO: 41305 - DNA, 25 bp, Homo sapien
tttgttaactcaaagacgattatcg

SEQ ID NO: 41306 - DNA, 25 bp, Homo sapien
tttgttaactcatagacgattatcg

SEQ ID NO: 41307 - DNA, 25 bp, Homo sapien
tcggtacgtatttcacaaagatttc

SEQ ID NO: 41308 - DNA, 25 bp, Homo sapien
tcggtacgtattacacaaagatttc

SEQ ID NO: 41309 - DNA, 25 bp, Homo sapien
ccgtaactctccaatctagtttgag

SEQ ID NO: 41310 - DNA, 25 bp, Homo sapien
ccgtaactctcctatctagtttgag

SEQ ID NO: 41311 - DNA, 25 bp, Homo sapien
taacaacgtctccttttcgtacgtg

SEQ ID NO: 41312 - DNA, 25 bp, Homo sapien
taacaacgtctcgttttcgtacgtg

SEQ ID NO: 41313 - DNA, 25 bp, Homo sapien
agttacgtcgttcctcgtcacttgt

SEQ ID NO: 41314 - DNA, 25 bp, Homo sapien
agttacgtcgttgctcgtcacttgt

SEQ ID NO: 41315 - DNA, 25 bp, Homo sapien
atatgtgtcgacgtcgtctctttcg

SEQ ID NO: 41316 - DNA, 25 bp, Homo sapien
atatgtgtcgacctcgtctctttcg

SEQ ID NO: 41317 - DNA, 25 bp, Homo sapien
gaagtctcgcacctctacgacttcg

SEQ ID NO: 41318 - DNA, 25 bp, Homo sapien
gaagtctcgcacgtctacgacttcg

SEQ ID NO: 41319 - DNA, 25 bp, Homo sapien
gaaggagacgtatactacatatcgt

SEQ ID NO: 41320 - DNA, 25 bp, Homo sapien
gaaggagacgtaaactacatatcgt

SEQ ID NO: 41321 - DNA, 25 bp, Homo sapien
ggagtaggagtcaatatcgtcgtct

SEQ ID NO: 41322 - DNA, 25 bp, Homo sapien
ggagtaggagtctatatcgtcgtct

SEQ ID NO: 41323 - DNA, 25 bp, Homo sapien
gacttagtaagttcgctcctcgtct

SEQ ID NO: 41324 - DNA, 25 bp, Homo sapien
gacttagtaagtacgctcctcgtct

SEQ ID NO: 41325 - DNA, 25 bp, Homo sapien
ttgactccttctactccgtcagtag

SEQ ID NO: 41326 - DNA, 25 bp, Homo sapien
ttgactccttcttctccgtcagtag

SEQ ID NO: 41327 - DNA, 25 bp, Homo sapien
tttgagtcgtctcttctctcacagg

SEQ ID NO: 41328 - DNA, 25 bp, Homo sapien
tttgagtcgtctgttctctcacagg

SEQ ID NO: 41329 - DNA, 25 bp, Homo sapien
tcgatagacttttctagactatggt

SEQ ID NO: 41330 - DNA, 25 bp, Homo sapien
tcgatagactttactagactatggt

SEQ ID NO: 41331 - DNA, 25 bp, Homo sapien
tcaccagaaagttagaccctacatg

SEQ ID NO: 41332 - DNA, 25 bp, Homo sapien
tcaccagaaagtaagaccctacatg

SEQ ID NO: 41333 - DNA, 25 bp, Homo sapien
agagaagaaaacagaacctcttagt

SEQ ID NO: 41334 - DNA, 25 bp, Homo sapien
agagaagaaaactgaacctcttagt

SEQ ID NO: 41335 - DNA, 25 bp, Homo sapien
cttgaagaaaacttgtaccgtgttt

SEQ ID NO: 41336 - DNA, 25 bp, Homo sapien
cttgaagaaaacatgtaccgtgttt

SEQ ID NO: 41337 - DNA, 25 bp, Homo sapien
cggatacagtttgagttctcactta

SEQ ID NO: 41338 - DNA, 25 bp, Homo sapien
cggatacagtttcagttctcactta

SEQ ID NO: 41339 - DNA, 25 bp, Homo sapien
ccgatataagttctactgttcatga

SEQ ID NO: 41340 - DNA, 25 bp, Homo sapien
ccgatataagttgtactgttcatga

SEQ ID NO: 41341 - DNA, 25 bp, Homo sapien
taccgggagtctcgttagggcttag

SEQ ID NO: 41342 - DNA, 25 bp, Homo sapien
taccgggagtctggttagggcttag

SEQ ID NO: 41343 - DNA, 25 bp, Homo sapien
gccacggcaccatcgggaggttcac

SEQ ID NO: 41344 - DNA, 25 bp, Homo sapien
gccacggcaccaacgggaggttcac

SEQ ID NO: 41345 - DNA, 25 bp, Homo sapien
gaaggtcgacaaagggtcgtttcta

SEQ ID NO: 41346 - DNA, 25 bp, Homo sapien
gaaggtcgacaatgggtcgtttcta

SEQ ID NO: 41347 - DNA, 25 bp, Homo sapien
ttgcattcgtcatagggtctttcta

SEQ ID NO: 41348 - DNA, 25 bp, Homo sapien
ttgcattcgtcaaagggtctttcta

SEQ ID NO: 41349 - DNA, 25 bp, Homo sapien
gtaacgggtaactgtgtttacttcg

SEQ ID NO: 41350 - DNA, 25 bp, Homo sapien
gtaacgggtaacagtgtttacttcg

SEQ ID NO: 41351 - DNA, 25 bp, Homo sapien
gtcacgtatgtctctaagttatatc

SEQ ID NO: 41352 - DNA, 25 bp, Homo sapien
gtcacgtatgtcactaagttatatc

SEQ ID NO: 41353 - DNA, 25 bp, Homo sapien
tgagaacgagtcactggaggacgtc

SEQ ID NO: 41354 - DNA, 25 bp, Homo sapien
tgagaacgagtctctggaggacgtc

SEQ ID NO: 41355 - DNA, 25 bp, Homo sapien
agaaggtacgctctgcgtaggagta

SEQ ID NO: 41356 - DNA, 25 bp, Homo sapien
agaaggtacgctgtgcgtaggagta

SEQ ID NO: 41357 - DNA, 25 bp, Homo sapien
ccgaaaagagaaacggagcctacta

SEQ ID NO: 41358 - DNA, 25 bp, Homo sapien
ccgaaaagagaatcggagcctacta

SEQ ID NO: 41359 - DNA, 25 bp, Homo sapien
ggaaggtaaggttacgaggtcctca

SEQ ID NO: 41360 - DNA, 25 bp, Homo sapien
ggaaggtaaggtaacgaggtcctca

SEQ ID NO: 41361 - DNA, 25 bp, Homo sapien
agatatgttcagacacggtaccgaa

SEQ ID NO: 41362 - DNA, 25 bp, Homo sapien
agatatgttcagtcacggtaccgaa

SEQ ID NO: 41363 - DNA, 25 bp, Homo sapien
acagtagtataaaccgtccaaaaag

SEQ ID NO: 41364 - DNA, 25 bp, Homo sapien
acagtagtataatccgtccaaaaag

SEQ ID NO: 41365 - DNA, 25 bp, Homo sapien
ataagtctagtagtccaacagaaat

SEQ ID NO: 41366 - DNA, 25 bp, Homo sapien
ataagtctagtactccaacagaaat

SEQ ID NO: 41367 - DNA, 25 bp, Homo sapien
gaatctaggactcctactttagacc

SEQ ID NO: 41368 - DNA, 25 bp, Homo sapien
gaatctaggactgctactttagacc

SEQ ID NO: 41369 - DNA, 25 bp, Homo sapien
cgtttacgtgggtttgtgtgtacct

SEQ ID NO: 41370 - DNA, 25 bp, Homo sapien
cgtttacgtgggattgtgtgtacct

SEQ ID NO: 41371 - DNA, 25 bp, Homo sapien
aattactatgttatgacgtagcacc

SEQ ID NO: 41372 - DNA, 25 bp, Homo sapien
aattactatgttttgacgtagcacc

SEQ ID NO: 41373 - DNA, 25 bp, Homo sapien
cggatatatgtctcctatccgtccc

SEQ ID NO: 41374 - DNA, 25 bp, Homo sapien
cggatatatgtcacctatccgtccc

SEQ ID NO: 41375 - DNA, 25 bp, Homo sapien
aggagactaggtattcccttacgac

SEQ ID NO: 41376 - DNA, 25 bp, Homo sapien
aggagactaggttttcccttacgac

SEQ ID NO: 41377 - DNA, 25 bp, Homo sapien
acgtctcgcgctactcctcgtgtaa

SEQ ID NO: 41378 - DNA, 25 bp, Homo sapien
acgtctcgcgcttctcctcgtgtaa

SEQ ID NO: 41379 - DNA, 25 bp, Homo sapien
catgtctccgcgtctccgggtcgta

SEQ ID NO: 41380 - DNA, 25 bp, Homo sapien
catgtctccgcgactccgggtcgta

SEQ ID NO: 41381 - DNA, 25 bp, Homo sapien
gactcgtccctgtccgggtcgacta

SEQ ID NO: 41382 - DNA, 25 bp, Homo sapien
gactcgtccctgaccgggtcgacta

SEQ ID NO: 41383 - DNA, 25 bp, Homo sapien
gtccgtacccggacgtgtttacgcc

SEQ ID NO: 41384 - DNA, 25 bp, Homo sapien
gtccgtacccggtcgtgtttacgcc

SEQ ID NO: 41385 - DNA, 25 bp, Homo sapien
tgttccgtcagacgtcggatcgtgg

SEQ ID NO: 41386 - DNA, 25 bp, Homo sapien
tgttccgtcagaggtcggatcgtgg

SEQ ID NO: 41387 - DNA, 25 bp, Homo sapien
gagtcctgcgaggaggaccgtctac

SEQ ID NO: 41388 - DNA, 25 bp, Homo sapien
gagtcctgcgagcaggaccgtctac

SEQ ID NO: 41389 - DNA, 25 bp, Homo sapien
acgacccttgagtacgacgttgtca

SEQ ID NO: 41390 - DNA, 25 bp, Homo sapien
acgacccttgagaacgacgttgtca

SEQ ID NO: 41391 - DNA, 25 bp, Homo sapien
ttatccggactcgaacagagtcaca

SEQ ID NO: 41392 - DNA, 25 bp, Homo sapien
ttatccggactccaacagagtcaca

SEQ ID NO: 41393 - DNA, 25 bp, Homo sapien
aagatcacggacaccgtccgtccaa

SEQ ID NO: 41394 - DNA, 25 bp, Homo sapien
aagatcacggactccgtccgtccaa

SEQ ID NO: 41395 - DNA, 25 bp, Homo sapien
atccaccttggtcgtccgtagaaac

SEQ ID NO: 41396 - DNA, 25 bp, Homo sapien
atccaccttggtggtccgtagaaac

SEQ ID NO: 41397 - DNA, 25 bp, Homo sapien
gtccttctttctaccgtagactaga

SEQ ID NO: 41398 - DNA, 25 bp, Homo sapien
gtccttctttcttccgtagactaga

SEQ ID NO: 41399 - DNA, 25 bp, Homo sapien
aagtatgttaaaccttctcagtcaa

SEQ ID NO: 41400 - DNA, 25 bp, Homo sapien
aagtatgttaaagcttctcagtcaa

SEQ ID NO: 41401 - DNA, 25 bp, Homo sapien
tgtatcggtaagctcggggtaagac

SEQ ID NO: 41402 - DNA, 25 bp, Homo sapien
tgtatcggtaaggtcggggtaagac

SEQ ID NO: 41403 - DNA, 25 bp, Homo sapien
agatggtcgagtctgacagagagct

SEQ ID NO: 41404 - DNA, 25 bp, Homo sapien
agatggtcgagtgtgacagagagct

SEQ ID NO: 41405 - DNA, 25 bp, Homo sapien
actcgggtgagaaggacactccgtt

SEQ ID NO: 41406 - DNA, 25 bp, Homo sapien
actcgggtgagatggacactccgtt

SEQ ID NO: 41407 - DNA, 25 bp, Homo sapien
aaggtgagagaaggtcacacgttct

SEQ ID NO: 41408 - DNA, 25 bp, Homo sapien
aaggtgagagaacgtcacacgttct

SEQ ID NO: 41409 - DNA, 25 bp, Homo sapien
tcaaaaggaccgagacgtcaaccat

SEQ ID NO: 41410 - DNA, 25 bp, Homo sapien
tcaaaaggaccgtgacgtcaaccat

SEQ ID NO: 41411 - DNA, 25 bp, Homo sapien
gggcgtgctacgttgaccaactgat

SEQ ID NO: 41412 - DNA, 25 bp, Homo sapien
gggcgtgctacgatgaccaactgat

SEQ ID NO: 41413 - DNA, 25 bp, Homo sapien
agattctcgttgtcacctagttcga

SEQ ID NO: 41414 - DNA, 25 bp, Homo sapien
agattctcgttgacacctagttcga

SEQ ID NO: 41415 - DNA, 25 bp, Homo sapien
tgtgggtctttgtaatctcttagac

SEQ ID NO: 41416 - DNA, 25 bp, Homo sapien
tgtgggtctttgaaatctcttagac

SEQ ID NO: 41417 - DNA, 25 bp, Homo sapien
tatgtgactccgtaaaatctgtttt

SEQ ID NO: 41418 - DNA, 25 bp, Homo sapien
tatgtgactccgaaaaatctgtttt

SEQ ID NO: 41419 - DNA, 25 bp, Homo sapien
ggaataccgtacaaacttttgtatt

SEQ ID NO: 41420 - DNA, 25 bp, Homo sapien
ggaataccgtactaacttttgtatt

SEQ ID NO: 41421 - DNA, 25 bp, Homo sapien
gaagtactccttgacatgtttattt

SEQ ID NO: 41422 - DNA, 25 bp, Homo sapien
gaagtactccttcacatgtttattt

SEQ ID NO: 41423 - DNA, 25 bp, Homo sapien
taagagttccttacgttcgttttga

SEQ ID NO: 41424 - DNA, 25 bp, Homo sapien
taagagttcctttcgttcgttttga

SEQ ID NO: 41425 - DNA, 25 bp, Homo sapien
cacaggagtccttcggtgaattagc

SEQ ID NO: 41426 - DNA, 25 bp, Homo sapien
cacaggagtcctacggtgaattagc

SEQ ID NO: 41427 - DNA, 25 bp, Homo sapien
aaagtagacctttctcgtgaatgaa

SEQ ID NO: 41428 - DNA, 25 bp, Homo sapien
aaagtagaccttactcgtgaatgaa

SEQ ID NO: 41429 - DNA, 25 bp, Homo sapien
gtaagactagtggtctaacaaaact

SEQ ID NO: 41430 - DNA, 25 bp, Homo sapien
gtaagactagtgctctaacaaaact

SEQ ID NO: 41431 - DNA, 25 bp, Homo sapien
gtgtcacccgtttaccgaatacact

SEQ ID NO: 41432 - DNA, 25 bp, Homo sapien
gtgtcacccgttaaccgaatacact

SEQ ID NO: 41433 - DNA, 25 bp, Homo sapien
gaaaacgtgtacataaccagtacct

SEQ ID NO: 41434 - DNA, 25 bp, Homo sapien
gaaaacgtgtacttaaccagtacct

SEQ ID NO: 41435 - DNA, 25 bp, Homo sapien
caaagaagacgtcaagaccgacaag

SEQ ID NO: 41436 - DNA, 25 bp, Homo sapien
caaagaagacgtgaagaccgacaag

SEQ ID NO: 41437 - DNA, 25 bp, Homo sapien
cgaaaaagtcggtactagagactca

SEQ ID NO: 41438 - DNA, 25 bp, Homo sapien
cgaaaaagtcggaactagagactca

SEQ ID NO: 41439 - DNA, 25 bp, Homo sapien
gtgactcaagggtatcgtgtgtgca

SEQ ID NO: 41440 - DNA, 25 bp, Homo sapien
gtgactcaagggaatcgtgtgtgca

SEQ ID NO: 41441 - DNA, 25 bp, Homo sapien
ggtgaccctgagtacaccggaggcc

SEQ ID NO: 41442 - DNA, 25 bp, Homo sapien
ggtgaccctgagaacaccggaggcc

SEQ ID NO: 41443 - DNA, 25 bp, Homo sapien
ggtccattgaaacctgttatctgta

SEQ ID NO: 41444 - DNA, 25 bp, Homo sapien
ggtccattgaaagctgttatctgta

SEQ ID NO: 41445 - DNA, 25 bp, Homo sapien
gtccgggacaacaatattagctgta

SEQ ID NO: 41446 - DNA, 25 bp, Homo sapien
gtccgggacaactatattagctgta

SEQ ID NO: 41447 - DNA, 25 bp, Homo sapien
cagccgtacataatcgagatcttaa

SEQ ID NO: 41448 - DNA, 25 bp, Homo sapien
cagccgtacatattcgagatcttaa

SEQ ID NO: 41449 - DNA, 25 bp, Homo sapien
cggtctgaacaaatcgacactggac

SEQ ID NO: 41450 - DNA, 25 bp, Homo sapien
cggtctgaacaattcgacactggac

SEQ ID NO: 41451 - DNA, 25 bp, Homo sapien
ataggactgatccagacaaaagaga

SEQ ID NO: 41452 - DNA, 25 bp, Homo sapien
ataggactgatcgagacaaaagaga

SEQ ID NO: 41453 - DNA, 25 bp, Homo sapien
gtgagtcactcatgacaaaacagag

SEQ ID NO: 41454 - DNA, 25 bp, Homo sapien
gtgagtcactcaagacaaaacagag

SEQ ID NO: 41455 - DNA, 25 bp, Homo sapien
tcgagacgtaccacccgaagacgga

SEQ ID NO: 41456 - DNA, 25 bp, Homo sapien
tcgagacgtacctcccgaagacgga

SEQ ID NO: 41457 - DNA, 25 bp, Homo sapien
agcgtacctacacagttactagtgg

SEQ ID NO: 41458 - DNA, 25 bp, Homo sapien
agcgtacctacagagttactagtgg

SEQ ID NO: 41459 - DNA, 25 bp, Homo sapien
cacgagtgaccgactgtggagtttc

SEQ ID NO: 41460 - DNA, 25 bp, Homo sapien
cacgagtgaccgtctgtggagtttc

SEQ ID NO: 41461 - DNA, 25 bp, Homo sapien
aggtacggaaactcgcggagccact

SEQ ID NO: 41462 - DNA, 25 bp, Homo sapien
aggtacggaaacacgcggagccact

SEQ ID NO: 41463 - DNA, 25 bp, Homo sapien
gactccagactgatgtcacagacgc

SEQ ID NO: 41464 - DNA, 25 bp, Homo sapien
gactccagactgttgtcacagacgc

SEQ ID NO: 41465 - DNA, 25 bp, Homo sapien
tctctctgtatttctgacagactat

SEQ ID NO: 41466 - DNA, 25 bp, Homo sapien
tctctctgtattactgacagactat

SEQ ID NO: 41467 - DNA, 25 bp, Homo sapien
tactttgtactggattgtagactct

SEQ ID NO: 41468 - DNA, 25 bp, Homo sapien
tactttgtactgcattgtagactct

SEQ ID NO: 41469 - DNA, 25 bp, Homo sapien
cccgtgtctcgtcagtgtgtctatg

SEQ ID NO: 41470 - DNA, 25 bp, Homo sapien
cccgtgtctcgtgagtgtgtctatg

SEQ ID NO: 41471 - DNA, 25 bp, Homo sapien
tttaccgtcggtcgtgtgccatttc

SEQ ID NO: 41472 - DNA, 25 bp, Homo sapien
tttaccgtcggtggtgtgccatttc

SEQ ID NO: 41473 - DNA, 25 bp, Homo sapien
attgtgacgtctctgggccatgtct

SEQ ID NO: 41474 - DNA, 25 bp, Homo sapien
attgtgacgtctgtgggccatgtct

SEQ ID NO: 41475 - DNA, 25 bp, Homo sapien
tgacacttgagttttcaagacattc

SEQ ID NO: 41476 - DNA, 25 bp, Homo sapien
tgacacttgagtattcaagacattc

SEQ ID NO: 41477 - DNA, 25 bp, Homo sapien
agtgttcagaagttcatgacgatca

SEQ ID NO: 41478 - DNA, 25 bp, Homo sapien
agtgttcagaagatcatgacgatca

SEQ ID NO: 41479 - DNA, 25 bp, Homo sapien
agttagtgggactctatcaggtcga

SEQ ID NO: 41480 - DNA, 25 bp, Homo sapien
agttagtgggacactatcaggtcga

SEQ ID NO: 41481 - DNA, 25 bp, Homo sapien
aaggagaagagacaggacacggcga

SEQ ID NO: 41482 - DNA, 25 bp, Homo sapien
aaggagaagagagaggacacggcga

SEQ ID NO: 41483 - DNA, 25 bp, Homo sapien
ttgttgctaaacacgaggaccggac

SEQ ID NO: 41484 - DNA, 25 bp, Homo sapien
ttgttgctaaactcgaggaccggac

SEQ ID NO: 41485 - DNA, 25 bp, Homo sapien
tgtacatgaaacgtaacttcctcga

SEQ ID NO: 41486 - DNA, 25 bp, Homo sapien
tgtacatgaaacctaacttcctcga

SEQ ID NO: 41487 - DNA, 25 bp, Homo sapien
ttaaacggattaccattcttcgtga

SEQ ID NO: 41488 - DNA, 25 bp, Homo sapien
ttaaacggattagcattcttcgtga

SEQ ID NO: 41489 - DNA, 25 bp, Homo sapien
tcctacattacgtgttttcgtaacg

SEQ ID NO: 41490 - DNA, 25 bp, Homo sapien
tcctacattacgagttttcgtaacg

SEQ ID NO: 41491 - DNA, 25 bp, Homo sapien
gcccgtagttgtacgtctttcaacg

SEQ ID NO: 41492 - DNA, 25 bp, Homo sapien
gcccgtagttgttcgtctttcaacg

SEQ ID NO: 41493 - DNA, 25 bp, Homo sapien
agctctcagatttacgagttttctc

SEQ ID NO: 41494 - DNA, 25 bp, Homo sapien
agctctcagattaacgagttttctc

SEQ ID NO: 41495 - DNA, 25 bp, Homo sapien
tacgtgttttcgtaacggtgccttg

SEQ ID NO: 41496 - DNA, 25 bp, Homo sapien
tacgtgttttcgaaacggtgccttg

SEQ ID NO: 41497 - DNA, 25 bp, Homo sapien
cattatgtgacttagttgaacttct

SEQ ID NO: 41498 - DNA, 25 bp, Homo sapien
cattatgtgactaagttgaacttct

SEQ ID NO: 41499 - DNA, 25 bp, Homo sapien
gttcctacgtggtcatttacacttg

SEQ ID NO: 41500 - DNA, 25 bp, Homo sapien
gttcctacgtggacatttacacttg

SEQ ID NO: 41501 - DNA, 25 bp, Homo sapien
cgtccgcaaagacagacacccttgt

SEQ ID NO: 41502 - DNA, 25 bp, Homo sapien
cgtccgcaaagagagacacccttgt

SEQ ID NO: 41503 - DNA, 25 bp, Homo sapien
ccccaatagtagacgggtcctgagt

SEQ ID NO: 41504 - DNA, 25 bp, Homo sapien
ccccaatagtagtcgggtcctgagt

SEQ ID NO: 41505 - DNA, 25 bp, Homo sapien
cttctataagttttcggtgttcacc

SEQ ID NO: 41506 - DNA, 25 bp, Homo sapien
cttctataagttatcggtgttcacc

SEQ ID NO: 41507 - DNA, 25 bp, Homo sapien
tacttgaaccgcactacgggcttcc

SEQ ID NO: 41508 - DNA, 25 bp, Homo sapien
tacttgaaccgctctacgggcttcc

SEQ ID NO: 41509 - DNA, 25 bp, Homo sapien
gtgttgagggtcaccggatctttcg

SEQ ID NO: 41510 - DNA, 25 bp, Homo sapien
gtgttgagggtctccggatctttcg

SEQ ID NO: 41511 - DNA, 25 bp, Homo sapien
tgtgtcgtgttttatcaagtccctc

SEQ ID NO: 41512 - DNA, 25 bp, Homo sapien
tgtgtcgtgtttaatcaagtccctc

SEQ ID NO: 41513 - DNA, 25 bp, Homo sapien
ctctcttctcttaaagggtccctcg

SEQ ID NO: 41514 - DNA, 25 bp, Homo sapien
ctctcttctctttaagggtccctcg

SEQ ID NO: 41515 - DNA, 25 bp, Homo sapien
cctctttcacagagggtgtatcatc

SEQ ID NO: 41516 - DNA, 25 bp, Homo sapien
cctctttcacagtgggtgtatcatc

SEQ ID NO: 41517 - DNA, 25 bp, Homo sapien
ctcttgagataacgaggtgttcttt

SEQ ID NO: 41518 - DNA, 25 bp, Homo sapien
ctcttgagataaggaggtgttcttt

SEQ ID NO: 41519 - DNA, 25 bp, Homo sapien
ggacttatttactcttgagatcttt

SEQ ID NO: 41520 - DNA, 25 bp, Homo sapien
ggacttatttacacttgagatcttt

SEQ ID NO: 41521 - DNA, 25 bp, Homo sapien
ggtactacattgttccttgaatttt

SEQ ID NO: 41522 - DNA, 25 bp, Homo sapien
ggtactacattgatccttgaatttt

SEQ ID NO: 41523 - DNA, 25 bp, Homo sapien
tacagattccctttgaagtcgtatt

SEQ ID NO: 41524 - DNA, 25 bp, Homo sapien
tacagattccctatgaagtcgtatt

SEQ ID NO: 41525 - DNA, 25 bp, Homo sapien
cttacactcggtaacttagacgatt

SEQ ID NO: 41526 - DNA, 25 bp, Homo sapien
cttacactcggttacttagacgatt

SEQ ID NO: 41527 - DNA, 25 bp, Homo sapien
caccgacagtgttattacgacacta

SEQ ID NO: 41528 - DNA, 25 bp, Homo sapien
caccgacagtgtaattacgacacta

SEQ ID NO: 41529 - DNA, 25 bp, Homo sapien
tcccgtcgtccgtacttacgaagat

SEQ ID NO: 41530 - DNA, 25 bp, Homo sapien
tcccgtcgtccgaacttacgaagat

SEQ ID NO: 41531 - DNA, 25 bp, Homo sapien
tatacctcctcgtgacacgaccgag

SEQ ID NO: 41532 - DNA, 25 bp, Homo sapien
tatacctcctcgagacacgaccgag

SEQ ID NO: 41533 - DNA, 25 bp, Homo sapien
aaaacctttcacgtcgacgtacttg

SEQ ID NO: 41534 - DNA, 25 bp, Homo sapien
aaaacctttcacctcgacgtacttg

SEQ ID NO: 41535 - DNA, 25 bp, Homo sapien
cgtggtcctccctgaaagagtcgca

SEQ ID NO: 41536 - DNA, 25 bp, Homo sapien
cgtggtcctcccagaaagagtcgca

SEQ ID NO: 41537 - DNA, 25 bp, Homo sapien
cctgttgactccacagggactcaca

SEQ ID NO: 41538 - DNA, 25 bp, Homo sapien
cctgttgactcctcagggactcaca

SEQ ID NO: 41539 - DNA, 25 bp, Homo sapien
gttttttactagtgtggtccggtac

SEQ ID NO: 41540 - DNA, 25 bp, Homo sapien
gttttttactagagtggtccggtac

SEQ ID NO: 41541 - DNA, 25 bp, Homo sapien
gggttattccacactcgagacccac

SEQ ID NO: 41542 - DNA, 25 bp, Homo sapien
gggttattccactctcgagacccac

SEQ ID NO: 41543 - DNA, 25 bp, Homo sapien
tgtgtggctccgagtctaccccttc

SEQ ID NO: 41544 - DNA, 25 bp, Homo sapien
tgtgtggctccgtgtctaccccttc

SEQ ID NO: 41545 - DNA, 25 bp, Homo sapien
cctgggcgtccgagtcctcaggtgc

SEQ ID NO: 41546 - DNA, 25 bp, Homo sapien
cctgggcgtccgtgtcctcaggtgc

SEQ ID NO: 41547 - DNA, 25 bp, Homo sapien
taggtatgtctgattccccggaggt

SEQ ID NO: 41548 - DNA, 25 bp, Homo sapien
taggtatgtctgtttccccggaggt

SEQ ID NO: 41549 - DNA, 25 bp, Homo sapien
tgtcgcttctcttaatccctgggag

SEQ ID NO: 41550 - DNA, 25 bp, Homo sapien
tgtcgcttctctaaatccctgggag

SEQ ID NO: 41551 - DNA, 25 bp, Homo sapien
tcgtcccgactacgagtccctgggg

SEQ ID NO: 41552 - DNA, 25 bp, Homo sapien
tcgtcccgactaggagtccctgggg

SEQ ID NO: 41553 - DNA, 25 bp, Homo sapien
gtccgacgacaatagtccacgcagg

SEQ ID NO: 41554 - DNA, 25 bp, Homo sapien
gtccgacgacaaaagtccacgcagg

SEQ ID NO: 41555 - DNA, 25 bp, Homo sapien
ccgagggaaaacgtctccgacgagg

SEQ ID NO: 41556 - DNA, 25 bp, Homo sapien
ccgagggaaaacctctccgacgagg

SEQ ID NO: 41557 - DNA, 25 bp, Homo sapien
aaagaccgaaaggacctactccacc

SEQ ID NO: 41558 - DNA, 25 bp, Homo sapien
aaagaccgaaagcacctactccacc

SEQ ID NO: 41559 - DNA, 25 bp, Homo sapien
gaatgatgtaaactaacctgacctc

SEQ ID NO: 41560 - DNA, 25 bp, Homo sapien
gaatgatgtaaagtaacctgacctc

SEQ ID NO: 41561 - DNA, 25 bp, Homo sapien
ttcggggtaacctgttctctctttc

SEQ ID NO: 41562 - DNA, 25 bp, Homo sapien
ttcggggtaaccagttctctctttc

SEQ ID NO: 41563 - DNA, 25 bp, Homo sapien
ggtaggtcagtagtccctctgttct

SEQ ID NO: 41564 - DNA, 25 bp, Homo sapien
ggtaggtcagtactccctctgttct

SEQ ID NO: 41565 - DNA, 25 bp, Homo sapien
tggttctacttctgtgaccgttgtc

SEQ ID NO: 41566 - DNA, 25 bp, Homo sapien
tggttctacttcagtgaccgttgtc

SEQ ID NO: 41567 - DNA, 25 bp, Homo sapien
atagttaggtgtctccttcttttaa

SEQ ID NO: 41568 - DNA, 25 bp, Homo sapien
atagttaggtgtgtccttcttttaa

SEQ ID NO: 41569 - DNA, 25 bp, Homo sapien
acattttgtcggatccttgccgtta

SEQ ID NO: 41570 - DNA, 25 bp, Homo sapien
acattttgtcggttccttgccgtta

SEQ ID NO: 41571 - DNA, 25 bp, Homo sapien
gattttgtgtcctcttcgtccatta

SEQ ID NO: 41572 - DNA, 25 bp, Homo sapien
gattttgtgtccacttcgtccatta

SEQ ID NO: 41573 - DNA, 25 bp, Homo sapien
tggttactaaagtttacacagtaca

SEQ ID NO: 41574 - DNA, 25 bp, Homo sapien
tggttactaaagattacacagtaca

SEQ ID NO: 41575 - DNA, 25 bp, Homo sapien
gtagttttccagtaactacaacgac

SEQ ID NO: 41576 - DNA, 25 bp, Homo sapien
gtagttttccagaaactacaacgac

SEQ ID NO: 41577 - DNA, 25 bp, Homo sapien
gtagtcctaagtaatacgtacatca

SEQ ID NO: 41578 - DNA, 25 bp, Homo sapien
gtagtcctaagttatacgtacatca

SEQ ID NO: 41579 - DNA, 25 bp, Homo sapien
gtcgatgtcgagtcaccgtcgacgt

SEQ ID NO: 41580 - DNA, 25 bp, Homo sapien
gtcgatgtcgagacaccgtcgacgt

SEQ ID NO: 41581 - DNA, 25 bp, Homo sapien
gtaccctcatcgttgtaatcctgtt

SEQ ID NO: 41582 - DNA, 25 bp, Homo sapien
gtaccctcatcgatgtaatcctgtt

SEQ ID NO: 41583 - DNA, 25 bp, Homo sapien
tgtctaaagtgaatcgtatatcttc

SEQ ID NO: 41584 - DNA, 25 bp, Homo sapien
tgtctaaagtgattcgtatatcttc

SEQ ID NO: 41585 - DNA, 25 bp, Homo sapien
ccttcgtagaagatgtctgtgggtc

SEQ ID NO: 41586 - DNA, 25 bp, Homo sapien
ccttcgtagaagttgtctgtgggtc

SEQ ID NO: 41587 - DNA, 25 bp, Homo sapien
cccgttgagtttgtcggtgagtgtt

SEQ ID NO: 41588 - DNA, 25 bp, Homo sapien
cccgttgagtttctcggtgagtgtt

SEQ ID NO: 41589 - DNA, 25 bp, Homo sapien
ctagaggcgaattactggtggtgct

SEQ ID NO: 41590 - DNA, 25 bp, Homo sapien
ctagaggcgaataactggtggtgct

SEQ ID NO: 41591 - DNA, 25 bp, Homo sapien
attttcggacaatgttattcgtttc

SEQ ID NO: 41592 - DNA, 25 bp, Homo sapien
attttcggacaaagttattcgtttc

SEQ ID NO: 41593 - DNA, 25 bp, Homo sapien
tatcggtactaaagtttatccactc

SEQ ID NO: 41594 - DNA, 25 bp, Homo sapien
tatcggtactaatgtttatccactc

SEQ ID NO: 41595 - DNA, 25 bp, Homo sapien
gtgttagagtttcatagtacgactc

SEQ ID NO: 41596 - DNA, 25 bp, Homo sapien
gtgttagagtttgatagtacgactc

SEQ ID NO: 41597 - DNA, 25 bp, Homo sapien
ctcttgatagttaccggtatactga

SEQ ID NO: 41598 - DNA, 25 bp, Homo sapien
ctcttgatagtttccggtatactga

SEQ ID NO: 41599 - DNA, 25 bp, Homo sapien
gttcttggagccttctgtgaggtag

SEQ ID NO: 41600 - DNA, 25 bp, Homo sapien
gttcttggagccatctgtgaggtag

SEQ ID NO: 41601 - DNA, 25 bp, Homo sapien
tctattctgacctcagttcgaggag

SEQ ID NO: 41602 - DNA, 25 bp, Homo sapien
tctattctgaccacagttcgaggag

SEQ ID NO: 41603 - DNA, 25 bp, Homo sapien
ctctccgaacggtagtcggacagat

SEQ ID NO: 41604 - DNA, 25 bp, Homo sapien
ctctccgaacggaagtcggacagat

SEQ ID NO: 41605 - DNA, 25 bp, Homo sapien
tctgcgtcaggaacggaaacggcaa

SEQ ID NO: 41606 - DNA, 25 bp, Homo sapien
tctgcgtcaggatcggaaacggcaa

SEQ ID NO: 41607 - DNA, 25 bp, Homo sapien
gttgtttcttgctacatacggttta

SEQ ID NO: 41608 - DNA, 25 bp, Homo sapien
gttgtttcttgcaacatacggttta

SEQ ID NO: 41609 - DNA, 25 bp, Homo sapien
taagtggttccctttaagactttta

SEQ ID NO: 41610 - DNA, 25 bp, Homo sapien
taagtggttcccattaagactttta

SEQ ID NO: 41611 - DNA, 25 bp, Homo sapien
gagattaaagacaaagaccgtgttc

SEQ ID NO: 41612 - DNA, 25 bp, Homo sapien
gagattaaagactaagaccgtgttc

SEQ ID NO: 41613 - DNA, 25 bp, Homo sapien
gatctattatcgacaatacgtagaa

SEQ ID NO: 41614 - DNA, 25 bp, Homo sapien
gatctattatcgtcaatacgtagaa

SEQ ID NO: 41615 - DNA, 25 bp, Homo sapien
ctactgatggacttataaggtcaca

SEQ ID NO: 41616 - DNA, 25 bp, Homo sapien
ctactgatggacatataaggtcaca

SEQ ID NO: 41617 - DNA, 25 bp, Homo sapien
agtctttctgactctatgaccgtaa

SEQ ID NO: 41618 - DNA, 25 bp, Homo sapien
agtctttctgacactatgaccgtaa

SEQ ID NO: 41619 - DNA, 25 bp, Homo sapien
catgtttcttggtaattcgtataac

SEQ ID NO: 41620 - DNA, 25 bp, Homo sapien
catgtttcttggaaattcgtataac

SEQ ID NO: 41621 - DNA, 25 bp, Homo sapien
tattacttgtgtcttgtacactaag

SEQ ID NO: 41622 - DNA, 25 bp, Homo sapien
tattacttgtgtgttgtacactaag

SEQ ID NO: 41623 - DNA, 25 bp, Homo sapien
acaaaatttcagtgtcacggacgtg

SEQ ID NO: 41624 - DNA, 25 bp, Homo sapien
acaaaatttcagagtcacggacgtg

SEQ ID NO: 41625 - DNA, 25 bp, Homo sapien
cggtacgtatttcacaaagatttca

SEQ ID NO: 41626 - DNA, 25 bp, Homo sapien
cggtacgtatttgacaaagatttca

SEQ ID NO: 41627 - DNA, 25 bp, Homo sapien
gagtaaatcagaaatcactgttgtc

SEQ ID NO: 41628 - DNA, 25 bp, Homo sapien
gagtaaatcagatatcactgttgtc

SEQ ID NO: 41629 - DNA, 25 bp, Homo sapien
acactcctggtccgtccctattgtc

SEQ ID NO: 41630 - DNA, 25 bp, Homo sapien
acactcctggtcggtccctattgtc

SEQ ID NO: 41631 - DNA, 25 bp, Homo sapien
cgacccggagcatcacggcttcgag

SEQ ID NO: 41632 - DNA, 25 bp, Homo sapien
cgacccggagcaacacggcttcgag

SEQ ID NO: 41633 - DNA, 25 bp, Homo sapien
agacgtccgtggactccaccttcta

SEQ ID NO: 41634 - DNA, 25 bp, Homo sapien
agacgtccgtggtctccaccttcta

SEQ ID NO: 41635 - DNA, 25 bp, Homo sapien
acgaggaccggacattcctccgcta

SEQ ID NO: 41636 - DNA, 25 bp, Homo sapien
acgaggaccggagattcctccgcta

SEQ ID NO: 41637 - DNA, 25 bp, Homo sapien
aagacccgtcgactaagcccctaat

SEQ ID NO: 41638 - DNA, 25 bp, Homo sapien
aagacccgtcgagtaagcccctaat

SEQ ID NO: 41639 - DNA, 25 bp, Homo sapien
gatcctgatcgtaatacaaacgatc

SEQ ID NO: 41640 - DNA, 25 bp, Homo sapien
gatcctgatcgttatacaaacgatc

SEQ ID NO: 41641 - DNA, 25 bp, Homo sapien
ttatctttgactacgcaagacgtct

SEQ ID NO: 41642 - DNA, 25 bp, Homo sapien
ttatctttgacttcgcaagacgtct

SEQ ID NO: 41643 - DNA, 25 bp, Homo sapien
cagatgaggttgaaccggtcctaac

SEQ ID NO: 41644 - DNA, 25 bp, Homo sapien
cagatgaggttgtaccggtcctaac

SEQ ID NO: 41645 - DNA, 25 bp, Homo sapien
cgacggggacccacgggtcctaact

SEQ ID NO: 41646 - DNA, 25 bp, Homo sapien
cgacggggaccctcgggtcctaact

SEQ ID NO: 41647 - DNA, 25 bp, Homo sapien
tcgagatgacccatcgactcattta

SEQ ID NO: 41648 - DNA, 25 bp, Homo sapien
tcgagatgacccttcgactcattta

SEQ ID NO: 41649 - DNA, 25 bp, Homo sapien
tacagggaccagagtagaccttcct

SEQ ID NO: 41650 - DNA, 25 bp, Homo sapien
tacagggaccagtgtagaccttcct

SEQ ID NO: 41651 - DNA, 25 bp, Homo sapien
actggcgcatcgtgctccggtcgtg

SEQ ID NO: 41652 - DNA, 25 bp, Homo sapien
actggcgcatcgagctccggtcgtg

SEQ ID NO: 41653 - DNA, 25 bp, Homo sapien
atggtgctacagtcggttcgtcgcc

SEQ ID NO: 41654 - DNA, 25 bp, Homo sapien
atggtgctacagacggttcgtcgcc

SEQ ID NO: 41655 - DNA, 25 bp, Homo sapien
agtcgtgtcggaggtgtccagtaca

SEQ ID NO: 41656 - DNA, 25 bp, Homo sapien
agtcgtgtcggacgtgtccagtaca

SEQ ID NO: 41657 - DNA, 25 bp, Homo sapien
catagacgtcgtgggtcctacttca

SEQ ID NO: 41658 - DNA, 25 bp, Homo sapien
catagacgtcgtcggtcctacttca

SEQ ID NO: 41659 - DNA, 25 bp, Homo sapien
tctttttagtcgaacgtcagtctat

SEQ ID NO: 41660 - DNA, 25 bp, Homo sapien
tctttttagtcgtacgtcagtctat

SEQ ID NO: 41661 - DNA, 25 bp, Homo sapien
ttacctactctttgaggttatcgta

SEQ ID NO: 41662 - DNA, 25 bp, Homo sapien
ttacctactcttagaggttatcgta

SEQ ID NO: 41663 - DNA, 25 bp, Homo sapien
tatttattcatgtgaggtgtccctg

SEQ ID NO: 41664 - DNA, 25 bp, Homo sapien
tatttattcatgagaggtgtccctg

SEQ ID NO: 41665 - DNA, 25 bp, Homo sapien
taaattcttcaacaaccgtaaggga

SEQ ID NO: 41666 - DNA, 25 bp, Homo sapien
taaattcttcaagaaccgtaaggga

SEQ ID NO: 41667 - DNA, 25 bp, Homo sapien
ttttccgacaagacgggtagtgtca

SEQ ID NO: 41668 - DNA, 25 bp, Homo sapien
ttttccgacaagtcgggtagtgtca

SEQ ID NO: 41669 - DNA, 25 bp, Homo sapien
ttctttctctttcagtcgtaaggaa

SEQ ID NO: 41670 - DNA, 25 bp, Homo sapien
ttctttctctttgagtcgtaaggaa

SEQ ID NO: 41671 - DNA, 25 bp, Homo sapien
cttactttttcctcaagacaggttg

SEQ ID NO: 41672 - DNA, 25 bp, Homo sapien
cttactttttccacaagacaggttg

SEQ ID NO: 41673 - DNA, 25 bp, Homo sapien
tccttataccccagacctgggggtc

SEQ ID NO: 41674 - DNA, 25 bp, Homo sapien
tccttatacccctgacctgggggtc

SEQ ID NO: 41675 - DNA, 25 bp, Homo sapien
ccttgaccttgactcttgggtcgtc

SEQ ID NO: 41676 - DNA, 25 bp, Homo sapien
ccttgaccttgagtcttgggtcgtc

SEQ ID NO: 41677 - DNA, 25 bp, Homo sapien
taactctcctttgtaccagtgtggg

SEQ ID NO: 41678 - DNA, 25 bp, Homo sapien
taactctcctttctaccagtgtggg

SEQ ID NO: 41679 - DNA, 25 bp, Homo sapien
aacaccaacccttgacgttttggat

SEQ ID NO: 41680 - DNA, 25 bp, Homo sapien
aacaccaaccctagacgttttggat

SEQ ID NO: 41681 - DNA, 25 bp, Homo sapien
taaaaaatcacaagatcttcgggac

SEQ ID NO: 41682 - DNA, 25 bp, Homo sapien
taaaaaatcacatgatcttcgggac

SEQ ID NO: 41683 - DNA, 25 bp, Homo sapien
ttatcagtgaagactttgagcgact

SEQ ID NO: 41684 - DNA, 25 bp, Homo sapien
ttatcagtgaagtctttgagcgact

SEQ ID NO: 41685 - DNA, 25 bp, Homo sapien
tttctaacgggagagtcacaggtct

SEQ ID NO: 41686 - DNA, 25 bp, Homo sapien
tttctaacgggacagtcacaggtct

SEQ ID NO: 41687 - DNA, 25 bp, Homo sapien
taaggacgatctaacacacgtcgtt

SEQ ID NO: 41688 - DNA, 25 bp, Homo sapien
taaggacgatcttacacacgtcgtt

SEQ ID NO: 41689 - DNA, 25 bp, Homo sapien
tatacttacgtaaatctgtggccta

SEQ ID NO: 41690 - DNA, 25 bp, Homo sapien
tatacttacgtatatctgtggccta

SEQ ID NO: 41691 - DNA, 25 bp, Homo sapien
cctgacagacagtatcaggtgcgcc

SEQ ID NO: 41692 - DNA, 25 bp, Homo sapien
cctgacagacagaatcaggtgcgcc

SEQ ID NO: 41693 - DNA, 25 bp, Homo sapien
acgcacctcagagagtcagggccgc

SEQ ID NO: 41694 - DNA, 25 bp, Homo sapien
acgcacctcagacagtcagggccgc

SEQ ID NO: 41695 - DNA, 25 bp, Homo sapien
actcctcctagtcatcgggatccga

SEQ ID NO: 41696 - DNA, 25 bp, Homo sapien
actcctcctagtgatcgggatccga

SEQ ID NO: 41697 - DNA, 25 bp, Homo sapien
ttgacctcagacctcgggatccact

SEQ ID NO: 41698 - DNA, 25 bp, Homo sapien
ttgacctcagacgtcgggatccact

SEQ ID NO: 41699 - DNA, 25 bp, Homo sapien
tccaggacgggcttcgggtccatct

SEQ ID NO: 41700 - DNA, 25 bp, Homo sapien
tccaggacgggcatcgggtccatct

SEQ ID NO: 41701 - DNA, 25 bp, Homo sapien
tttgacgtgccgatggactaccatt

SEQ ID NO: 41702 - DNA, 25 bp, Homo sapien
tttgacgtgccgttggactaccatt

SEQ ID NO: 41703 - DNA, 25 bp, Homo sapien
ttccttacgacgtgaacactaggta

SEQ ID NO: 41704 - DNA, 25 bp, Homo sapien
ttccttacgacgagaacactaggta

SEQ ID NO: 41705 - DNA, 25 bp, Homo sapien
agttcctctttggtaggacctcctt

SEQ ID NO: 41706 - DNA, 25 bp, Homo sapien
agttcctctttgctaggacctcctt

SEQ ID NO: 41707 - DNA, 25 bp, Homo sapien
ttccgtttaggtctagagtctctca

SEQ ID NO: 41708 - DNA, 25 bp, Homo sapien
ttccgtttaggtgtagagtctctca

SEQ ID NO: 41709 - DNA, 25 bp, Homo sapien
ggtccatctcgtccaggagtctcca

SEQ ID NO: 41710 - DNA, 25 bp, Homo sapien
ggtccatctcgtgcaggagtctcca

SEQ ID NO: 41711 - DNA, 25 bp, Homo sapien
ttctaccgccggtatcgaagtatga

SEQ ID NO: 41712 - DNA, 25 bp, Homo sapien
ttctaccgccggaatcgaagtatga

SEQ ID NO: 41713 - DNA, 25 bp, Homo sapien
tgtcgccgactccttcggaaatgac

SEQ ID NO: 41714 - DNA, 25 bp, Homo sapien
tgtcgccgactcgttcggaaatgac

SEQ ID NO: 41715 - DNA, 25 bp, Homo sapien
tgatgaggtacgtctgaaacgggtc

SEQ ID NO: 41716 - DNA, 25 bp, Homo sapien
tgatgaggtacgactgaaacgggtc

SEQ ID NO: 41717 - DNA, 25 bp, Homo sapien
tacctaaggtacaaggaagctccct

SEQ ID NO: 41718 - DNA, 25 bp, Homo sapien
tacctaaggtactaggaagctccct

SEQ ID NO: 41719 - DNA, 25 bp, Homo sapien
gttacgaacattttggaagtcttcc

SEQ ID NO: 41720 - DNA, 25 bp, Homo sapien
gttacgaacattatggaagtcttcc

SEQ ID NO: 41721 - DNA, 25 bp, Homo sapien
gagacaaaattcgtttcagctataa

SEQ ID NO: 41722 - DNA, 25 bp, Homo sapien
gagacaaaattcctttcagctataa

SEQ ID NO: 41723 - DNA, 25 bp, Homo sapien
agaaaccggtcataaactcttcacg

SEQ ID NO: 41724 - DNA, 25 bp, Homo sapien
agaaaccggtcaaaaactcttcacg

SEQ ID NO: 41725 - DNA, 25 bp, Homo sapien
tttaaagtcgttagaaaacctggtc

SEQ ID NO: 41726 - DNA, 25 bp, Homo sapien
tttaaagtcgtttgaaaacctggtc

SEQ ID NO: 41727 - DNA, 25 bp, Homo sapien
aatgtctcgtggattgtcttgacgt

SEQ ID NO: 41728 - DNA, 25 bp, Homo sapien
aatgtctcgtggtttgtcttgacgt

SEQ ID NO: 41729 - DNA, 25 bp, Homo sapien
tagtctctcgagtcttgtctcttct

SEQ ID NO: 41730 - DNA, 25 bp, Homo sapien
tagtctctcgagacttgtctcttct

SEQ ID NO: 41731 - DNA, 25 bp, Homo sapien
ggtcataccgggactattcatatat

SEQ ID NO: 41732 - DNA, 25 bp, Homo sapien
ggtcataccgggtctattcatatat

SEQ ID NO: 41733 - DNA, 25 bp, Homo sapien
agatcggtggacgaggtcttccttt

SEQ ID NO: 41734 - DNA, 25 bp, Homo sapien
agatcggtggaccaggtcttccttt

SEQ ID NO: 41735 - DNA, 25 bp, Homo sapien
acataatgtgaacagggatcctctc

SEQ ID NO: 41736 - DNA, 25 bp, Homo sapien
acataatgtgaagagggatcctctc

SEQ ID NO: 41737 - DNA, 25 bp, Homo sapien
acgaaaagagaagtgggtcccgtga

SEQ ID NO: 41738 - DNA, 25 bp, Homo sapien
acgaaaagagaactgggtcccgtga

SEQ ID NO: 41739 - DNA, 25 bp, Homo sapien
ttccaaaggaagagtcaacacaaga

SEQ ID NO: 41740 - DNA, 25 bp, Homo sapien
ttccaaaggaagtgtcaacacaaga

SEQ ID NO: 41741 - DNA, 25 bp, Homo sapien
cagacaccccttaaaacctactatg

SEQ ID NO: 41742 - DNA, 25 bp, Homo sapien
cagacacccctttaaacctactatg

SEQ ID NO: 41743 - DNA, 25 bp, Homo sapien
agcctctcacttgagtccctcgttt

SEQ ID NO: 41744 - DNA, 25 bp, Homo sapien
agcctctcacttcagtccctcgttt

SEQ ID NO: 41745 - DNA, 25 bp, Homo sapien
gaccgccagtcctggctgtcacgtt

SEQ ID NO: 41746 - DNA, 25 bp, Homo sapien
gaccgccagtccaggctgtcacgtt

SEQ ID NO: 41747 - DNA, 25 bp, Homo sapien
agatcgggtccgagttcagcgagac

SEQ ID NO: 41748 - DNA, 25 bp, Homo sapien
agatcgggtccgtgttcagcgagac

SEQ ID NO: 41749 - DNA, 25 bp, Homo sapien
gggtcggatacggtgtgcataaaga

SEQ ID NO: 41750 - DNA, 25 bp, Homo sapien
gggtcggatacgctgtgcataaaga

SEQ ID NO: 41751 - DNA, 25 bp, Homo sapien
gaggaaaagtgtaacccacggacgt

SEQ ID NO: 41752 - DNA, 25 bp, Homo sapien
gaggaaaagtgttacccacggacgt

SEQ ID NO: 41753 - DNA, 25 bp, Homo sapien
gacgaggagttttcggaacttcagg

SEQ ID NO: 41754 - DNA, 25 bp, Homo sapien
gacgaggagtttacggaacttcagg

SEQ ID NO: 41755 - DNA, 25 bp, Homo sapien
acagttggtatcttcgaaattcatg

SEQ ID NO: 41756 - DNA, 25 bp, Homo sapien
acagttggtatcatcgaaattcatg

SEQ ID NO: 41757 - DNA, 25 bp, Homo sapien
acgcatttcgtggagtagatctgga

SEQ ID NO: 41758 - DNA, 25 bp, Homo sapien
acgcatttcgtgcagtagatctgga

SEQ ID NO: 41759 - DNA, 25 bp, Homo sapien
aactctctgtggtcttaagtttcga

SEQ ID NO: 41760 - DNA, 25 bp, Homo sapien
aactctctgtggacttaagtttcga

SEQ ID NO: 41761 - DNA, 25 bp, Homo sapien
agccgtagggtcaggagtttgtcga

SEQ ID NO: 41762 - DNA, 25 bp, Homo sapien
agccgtagggtctggagtttgtcga

SEQ ID NO: 41763 - DNA, 25 bp, Homo sapien
agaggaccgtcttgatcttcgtgga

SEQ ID NO: 41764 - DNA, 25 bp, Homo sapien
agaggaccgtctagatcttcgtgga

SEQ ID NO: 41765 - DNA, 25 bp, Homo sapien
gaagagaccgcgacctaaacgtcca

SEQ ID NO: 41766 - DNA, 25 bp, Homo sapien
gaagagaccgcgtcctaaacgtcca

SEQ ID NO: 41767 - DNA, 25 bp, Homo sapien
aaaaactggtactacaacagtgata

SEQ ID NO: 41768 - DNA, 25 bp, Homo sapien
aaaaactggtacaacaacagtgata

SEQ ID NO: 41769 - DNA, 25 bp, Homo sapien
gtcatataaggacaacacttggata

SEQ ID NO: 41770 - DNA, 25 bp, Homo sapien
gtcatataaggagaacacttggata

SEQ ID NO: 41771 - DNA, 25 bp, Homo sapien
aatccaaacgggaccctcgggaact

SEQ ID NO: 41772 - DNA, 25 bp, Homo sapien
aatccaaacgggtccctcgggaact

SEQ ID NO: 41773 - DNA, 25 bp, Homo sapien
acttagggtgcttccgacgactaac

SEQ ID NO: 41774 - DNA, 25 bp, Homo sapien
acttagggtgctaccgacgactaac

SEQ ID NO: 41775 - DNA, 25 bp, Homo sapien
tacacaaggcttttagacagaacct

SEQ ID NO: 41776 - DNA, 25 bp, Homo sapien
tacacaaggcttatagacagaacct

SEQ ID NO: 41777 - DNA, 25 bp, Homo sapien
ggtccaagaaagaatcgtctacaaa

SEQ ID NO: 41778 - DNA, 25 bp, Homo sapien
ggtccaagaaagtatcgtctacaaa

SEQ ID NO: 41779 - DNA, 25 bp, Homo sapien
agtccaacccagatcccacaggagt

SEQ ID NO: 41780 - DNA, 25 bp, Homo sapien
agtccaacccagttcccacaggagt

SEQ ID NO: 41781 - DNA, 25 bp, Homo sapien
taaataaaggtcaccctcaaaagtg

SEQ ID NO: 41782 - DNA, 25 bp, Homo sapien
taaataaaggtctccctcaaaagtg

SEQ ID NO: 41783 - DNA, 25 bp, Homo sapien
acaagaggacaatgtccaaacagag

SEQ ID NO: 41784 - DNA, 25 bp, Homo sapien
acaagaggacaaagtccaaacagag

SEQ ID NO: 41785 - DNA, 25 bp, Homo sapien
ttactgaaagaaatttctaccccgg

SEQ ID NO: 41786 - DNA, 25 bp, Homo sapien
ttactgaaagaattttctaccccgg

SEQ ID NO: 41787 - DNA, 25 bp, Homo sapien
gaatacaaatcattctcgactcctg

SEQ ID NO: 41788 - DNA, 25 bp, Homo sapien
gaatacaaatcaatctcgactcctg

SEQ ID NO: 41789 - DNA, 25 bp, Homo sapien
tcaatataagtatggtaccctttag

SEQ ID NO: 41790 - DNA, 25 bp, Homo sapien
tcaatataagtaaggtaccctttag

SEQ ID NO: 41791 - DNA, 25 bp, Homo sapien
cagaagaggtactcttgtcaagagt

SEQ ID NO: 41792 - DNA, 25 bp, Homo sapien
cagaagaggtacacttgtcaagagt

SEQ ID NO: 41793 - DNA, 25 bp, Homo sapien
cagaggagatggatctctaacagat

SEQ ID NO: 41794 - DNA, 25 bp, Homo sapien
cagaggagatggttctctaacagat

SEQ ID NO: 41795 - DNA, 25 bp, Homo sapien
agtgtacgggacacccttgacgttg

SEQ ID NO: 41796 - DNA, 25 bp, Homo sapien
agtgtacgggactcccttgacgttg

SEQ ID NO: 41797 - DNA, 25 bp, Homo sapien
actccttcctcagtaccgttcggta

SEQ ID NO: 41798 - DNA, 25 bp, Homo sapien
actccttcctcactaccgttcggta

SEQ ID NO: 41799 - DNA, 25 bp, Homo sapien
cctacttacccacgaaccgaaggga

SEQ ID NO: 41800 - DNA, 25 bp, Homo sapien
cctacttacccaggaaccgaaggga

SEQ ID NO: 41801 - DNA, 25 bp, Homo sapien
tgtctcagacgaacagacttcgaga

SEQ ID NO: 41802 - DNA, 25 bp, Homo sapien
tgtctcagacgatcagacttcgaga

SEQ ID NO: 41803 - DNA, 25 bp, Homo sapien
atactaacaacaacgaacagcggag

SEQ ID NO: 41804 - DNA, 25 bp, Homo sapien
atactaacaacatcgaacagcggag

SEQ ID NO: 41805 - DNA, 25 bp, Homo sapien
agaattctagacttacagctcttga

SEQ ID NO: 41806 - DNA, 25 bp, Homo sapien
agaattctagacatacagctcttga

SEQ ID NO: 41807 - DNA, 25 bp, Homo sapien
acaggacccatcaacaatagtggtt

SEQ ID NO: 41808 - DNA, 25 bp, Homo sapien
acaggacccatctacaatagtggtt

SEQ ID NO: 41809 - DNA, 25 bp, Homo sapien
gaaggcacactcacaaggcgcgtct

SEQ ID NO: 41810 - DNA, 25 bp, Homo sapien
gaaggcacactctcaaggcgcgtct

SEQ ID NO: 41811 - DNA, 25 bp, Homo sapien
gagggtacaccctcgaataggagtc

SEQ ID NO: 41812 - DNA, 25 bp, Homo sapien
gagggtacacccacgaataggagtc

SEQ ID NO: 41813 - DNA, 25 bp, Homo sapien
atatccacgaccagtgctaggagtc

SEQ ID NO: 41814 - DNA, 25 bp, Homo sapien
atatccacgacctgtgctaggagtc

SEQ ID NO: 41815 - DNA, 25 bp, Homo sapien
tcagtcatagctcgtcgcaccggag

SEQ ID NO: 41816 - DNA, 25 bp, Homo sapien
tcagtcatagctggtcgcaccggag

SEQ ID NO: 41817 - DNA, 25 bp, Homo sapien
tttatacccagtgtcctgcccggtg

SEQ ID NO: 41818 - DNA, 25 bp, Homo sapien
tttatacccagtctcctgcccggtg

SEQ ID NO: 41819 - DNA, 25 bp, Homo sapien
agtctcctgtctctgaacgtcggga

SEQ ID NO: 41820 - DNA, 25 bp, Homo sapien
agtctcctgtctgtgaacgtcggga

SEQ ID NO: 41821 - DNA, 25 bp, Homo sapien
tttacttctgtcttgcgaaacggaa

SEQ ID NO: 41822 - DNA, 25 bp, Homo sapien
tttacttctgtcatgcgaaacggaa

SEQ ID NO: 41823 - DNA, 25 bp, Homo sapien
taacctactcttcgaaccgtaggac

SEQ ID NO: 41824 - DNA, 25 bp, Homo sapien
taacctactcttggaaccgtaggac

SEQ ID NO: 41825 - DNA, 25 bp, Homo sapien
gggtctcgccctggaccgctaggac

SEQ ID NO: 41826 - DNA, 25 bp, Homo sapien
gggtctcgccctcgaccgctaggac

SEQ ID NO: 41827 - DNA, 25 bp, Homo sapien
gcctcgtccagaagacggcagtaga

SEQ ID NO: 41828 - DNA, 25 bp, Homo sapien
gcctcgtccagatgacggcagtaga

SEQ ID NO: 41829 - DNA, 25 bp, Homo sapien
ccagtggacgagaagaagtcgttga

SEQ ID NO: 41830 - DNA, 25 bp, Homo sapien
ccagtggacgagtagaagtcgttga

SEQ ID NO: 41831 - DNA, 25 bp, Homo sapien
atccagtggtcatagaggatgtctt

SEQ ID NO: 41832 - DNA, 25 bp, Homo sapien
atccagtggtcaaagaggatgtctt

SEQ ID NO: 41833 - DNA, 25 bp, Homo sapien
acagagtcggaaagggctaagtaca

SEQ ID NO: 41834 - DNA, 25 bp, Homo sapien
acagagtcggaatgggctaagtaca

SEQ ID NO: 41835 - DNA, 25 bp, Homo sapien
acactcgaccgactgggaagagtcc

SEQ ID NO: 41836 - DNA, 25 bp, Homo sapien
acactcgaccgagtgggaagagtcc

SEQ ID NO: 41837 - DNA, 25 bp, Homo sapien
aattgaccggccgtacacaggacgc

SEQ ID NO: 41838 - DNA, 25 bp, Homo sapien
aattgaccggccctacacaggacgc

SEQ ID NO: 41839 - DNA, 25 bp, Homo sapien
cttgagggagaactagaacggtccg

SEQ ID NO: 41840 - DNA, 25 bp, Homo sapien
cttgagggagaagtagaacggtccg

SEQ ID NO: 41841 - DNA, 25 bp, Homo sapien
accgctggttaggtggaagtgtacc

SEQ ID NO: 41842 - DNA, 25 bp, Homo sapien
accgctggttagctggaagtgtacc

SEQ ID NO: 41843 - DNA, 25 bp, Homo sapien
cgtagtatgtttcgtatcgttgtca

SEQ ID NO: 41844 - DNA, 25 bp, Homo sapien
cgtagtatgtttggtatcgttgtca

SEQ ID NO: 41845 - DNA, 25 bp, Homo sapien
aatgcgacaccttcgtaacggtcat

SEQ ID NO: 41846 - DNA, 25 bp, Homo sapien
aatgcgacacctacgtaacggtcat

SEQ ID NO: 41847 - DNA, 25 bp, Homo sapien
atgtcgcggtctcacgactgcggaa

SEQ ID NO: 41848 - DNA, 25 bp, Homo sapien
atgtcgcggtctgacgactgcggaa

SEQ ID NO: 41849 - DNA, 25 bp, Homo sapien
tatccgtcggttgttctatgcttac

SEQ ID NO: 41850 - DNA, 25 bp, Homo sapien
tatccgtcggttcttctatgcttac

SEQ ID NO: 41851 - DNA, 25 bp, Homo sapien
ttaggaatagcttactgtacggttc

SEQ ID NO: 41852 - DNA, 25 bp, Homo sapien
ttaggaatagctaactgtacggttc

SEQ ID NO: 41853 - DNA, 25 bp, Homo sapien
catctttatttctcgcgtaggaact

SEQ ID NO: 41854 - DNA, 25 bp, Homo sapien
catctttatttcacgcgtaggaact

SEQ ID NO: 41855 - DNA, 25 bp, Homo sapien
gtttcacgtaaacctacgtcttgca

SEQ ID NO: 41856 - DNA, 25 bp, Homo sapien
gtttcacgtaaagctacgtcttgca

SEQ ID NO: 41857 - DNA, 25 bp, Homo sapien
tctttgacagtaaagggtcttttca

SEQ ID NO: 41858 - DNA, 25 bp, Homo sapien
tctttgacagtatagggtcttttca

SEQ ID NO: 41859 - DNA, 25 bp, Homo sapien
ttagtgacagaatttcgaagttccc

SEQ ID NO: 41860 - DNA, 25 bp, Homo sapien
ttagtgacagaaattcgaagttccc

SEQ ID NO: 41861 - DNA, 25 bp, Homo sapien
tgtatctcaaaagtcgttgttattc

SEQ ID NO: 41862 - DNA, 25 bp, Homo sapien
tgtatctcaaaactcgttgttattc

SEQ ID NO: 41863 - DNA, 25 bp, Homo sapien
acttcgaacaaaagtgttctttagt

SEQ ID NO: 41864 - DNA, 25 bp, Homo sapien
acttcgaacaaatgtgttctttagt

SEQ ID NO: 41865 - DNA, 25 bp, Homo sapien
gaagttatagaagtaactatcctca

SEQ ID NO: 41866 - DNA, 25 bp, Homo sapien
gaagttatagaactaactatcctca

SEQ ID NO: 41867 - DNA, 25 bp, Homo sapien
gaattttaggctttgtcttaccttc

SEQ ID NO: 41868 - DNA, 25 bp, Homo sapien
gaattttaggctatgtcttaccttc

SEQ ID NO: 41869 - DNA, 25 bp, Homo sapien
ttatgcgtatacgtctacgtcctta

SEQ ID NO: 41870 - DNA, 25 bp, Homo sapien
ttatgcgtatacctctacgtcctta

SEQ ID NO: 41871 - DNA, 25 bp, Homo sapien
ctttatctaggtgttcgtattaacc

SEQ ID NO: 41872 - DNA, 25 bp, Homo sapien
ctttatctaggtcttcgtattaacc

SEQ ID NO: 41873 - DNA, 25 bp, Homo sapien
tacttgaggtccttgagtagtatca

SEQ ID NO: 41874 - DNA, 25 bp, Homo sapien
tacttgaggtccatgagtagtatca

SEQ ID NO: 41875 - DNA, 25 bp, Homo sapien
ttacttcgtgtcgactatcttcccg

SEQ ID NO: 41876 - DNA, 25 bp, Homo sapien
ttacttcgtgtccactatcttcccg

SEQ ID NO: 41877 - DNA, 25 bp, Homo sapien
tacccagaggcgtctactcttccgg

SEQ ID NO: 41878 - DNA, 25 bp, Homo sapien
tacccagaggcgactactcttccgg

SEQ ID NO: 41879 - DNA, 25 bp, Homo sapien
tcccaagagttccactagtctcctg

SEQ ID NO: 41880 - DNA, 25 bp, Homo sapien
tcccaagagttcgactagtctcctg

SEQ ID NO: 41881 - DNA, 25 bp, Homo sapien
tcacggtaccatagtttagtcgaat

SEQ ID NO: 41882 - DNA, 25 bp, Homo sapien
tcacggtaccattgtttagtcgaat

SEQ ID NO: 41883 - DNA, 25 bp, Homo sapien
taacgtgtagaatttttctacgtca

SEQ ID NO: 41884 - DNA, 25 bp, Homo sapien
taacgtgtagaaattttctacgtca

SEQ ID NO: 41885 - DNA, 25 bp, Homo sapien
taaggagaagcgtttgtctcacgta

SEQ ID NO: 41886 - DNA, 25 bp, Homo sapien
taaggagaagcgattgtctcacgta

SEQ ID NO: 41887 - DNA, 25 bp, Homo sapien
cactaagaggtaaggacaaaccgga

SEQ ID NO: 41888 - DNA, 25 bp, Homo sapien
cactaagaggtatggacaaaccgga

SEQ ID NO: 41889 - DNA, 25 bp, Homo sapien
aataacgtcaacacgggtcacctat

SEQ ID NO: 41890 - DNA, 25 bp, Homo sapien
aataacgtcaactcgggtcacctat

SEQ ID NO: 41891 - DNA, 25 bp, Homo sapien
tttcgtttacgacacgtcggaccga

SEQ ID NO: 41892 - DNA, 25 bp, Homo sapien
tttcgtttacgagacgtcggaccga

SEQ ID NO: 41893 - DNA, 25 bp, Homo sapien
agtaaattcgaccagagtgacttat

SEQ ID NO: 41894 - DNA, 25 bp, Homo sapien
agtaaattcgacgagagtgacttat

SEQ ID NO: 41895 - DNA, 25 bp, Homo sapien
cacgcccttccgagagtgtccgtag

SEQ ID NO: 41896 - DNA, 25 bp, Homo sapien
cacgcccttccgtgagtgtccgtag

SEQ ID NO: 41897 - DNA, 25 bp, Homo sapien
cgtctctaccttggtcctgtcacta

SEQ ID NO: 41898 - DNA, 25 bp, Homo sapien
cgtctctaccttcgtcctgtcacta

SEQ ID NO: 41899 - DNA, 25 bp, Homo sapien
gccgtctttttacgtctttgagtct

SEQ ID NO: 41900 - DNA, 25 bp, Homo sapien
gccgtctttttaggtctttgagtct

SEQ ID NO: 41901 - DNA, 25 bp, Homo sapien
cccttgtatataggtatcgttattt

SEQ ID NO: 41902 - DNA, 25 bp, Homo sapien
cccttgtatatacgtatcgttattt

SEQ ID NO: 41903 - DNA, 25 bp, Homo sapien
acgtgtgtattatcatctgtgtctc

SEQ ID NO: 41904 - DNA, 25 bp, Homo sapien
acgtgtgtattaacatctgtgtctc

SEQ ID NO: 41905 - DNA, 25 bp, Homo sapien
tgaggactagtgattcgttttcgac

SEQ ID NO: 41906 - DNA, 25 bp, Homo sapien
tgaggactagtgtttcgttttcgac

SEQ ID NO: 41907 - DNA, 25 bp, Homo sapien
acagaagaccgtcatcatattcgtc

SEQ ID NO: 41908 - DNA, 25 bp, Homo sapien
acagaagaccgtgatcatattcgtc

SEQ ID NO: 41909 - DNA, 25 bp, Homo sapien
tactagtagaatttgacctgtattc

SEQ ID NO: 41910 - DNA, 25 bp, Homo sapien
tactagtagaatatgacctgtattc

SEQ ID NO: 41911 - DNA, 25 bp, Homo sapien
tttgaaccgtaggacttctaagtct

SEQ ID NO: 41912 - DNA, 25 bp, Homo sapien
tttgaaccgtagcacttctaagtct

SEQ ID NO: 41913 - DNA, 25 bp, Homo sapien
ctgtaacgacgattatatcgtttgt

SEQ ID NO: 41914 - DNA, 25 bp, Homo sapien
ctgtaacgacgaatatatcgtttgt

SEQ ID NO: 41915 - DNA, 25 bp, Homo sapien
gactctaacaatctacttcgttcgg

SEQ ID NO: 41916 - DNA, 25 bp, Homo sapien
gactctaacaatgtacttcgttcgg

SEQ ID NO: 41917 - DNA, 25 bp, Homo sapien
atggatcacttattcacctgtattg

SEQ ID NO: 41918 - DNA, 25 bp, Homo sapien
atggatcacttaatcacctgtattg

SEQ ID NO: 41919 - DNA, 25 bp, Homo sapien
gtccttcttcgttcacccgtagttc

SEQ ID NO: 41920 - DNA, 25 bp, Homo sapien
gtccttcttcgtacacccgtagttc

SEQ ID NO: 41921 - DNA, 25 bp, Homo sapien
cgaagtacctcgacgacgggtagaa

SEQ ID NO: 41922 - DNA, 25 bp, Homo sapien
cgaagtacctcgtcgacgggtagaa

SEQ ID NO: 41923 - DNA, 25 bp, Homo sapien
tttcccccgtagtcgtagggtcgga

SEQ ID NO: 41924 - DNA, 25 bp, Homo sapien
tttcccccgtagacgtagggtcgga

SEQ ID NO: 41925 - DNA, 25 bp, Homo sapien
tctacttcggtgataggggtccggt

SEQ ID NO: 41926 - DNA, 25 bp, Homo sapien
tctacttcggtgttaggggtccggt

SEQ ID NO: 41927 - DNA, 25 bp, Homo sapien
ctctcctctgtgtggtgacccgtct

SEQ ID NO: 41928 - DNA, 25 bp, Homo sapien
ctctcctctgtgaggtgacccgtct

SEQ ID NO: 41929 - DNA, 25 bp, Homo sapien
tggtctaatttgtccgtcttccgtc

SEQ ID NO: 41930 - DNA, 25 bp, Homo sapien
tggtctaatttgaccgtcttccgtc

SEQ ID NO: 41931 - DNA, 25 bp, Homo sapien
ttgtcttttaattcagtcgtaattc

SEQ ID NO: 41932 - DNA, 25 bp, Homo sapien
ttgtcttttaatacagtcgtaattc

SEQ ID NO: 41933 - DNA, 25 bp, Homo sapien
tgtgtgtttacttaaaggcttcgtc

SEQ ID NO: 41934 - DNA, 25 bp, Homo sapien
tgtgtgtttactaaaaggcttcgtc

SEQ ID NO: 41935 - DNA, 25 bp, Homo sapien
ttggacgtttctaccaccgatttac

SEQ ID NO: 41936 - DNA, 25 bp, Homo sapien
ttggacgtttcttccaccgatttac

SEQ ID NO: 41937 - DNA, 25 bp, Homo sapien
cacgaatctccctctagtacttgtg

SEQ ID NO: 41938 - DNA, 25 bp, Homo sapien
cacgaatctcccactagtacttgtg

SEQ ID NO: 41939 - DNA, 25 bp, Homo sapien
cgagaccctctactctattactgtg

SEQ ID NO: 41940 - DNA, 25 bp, Homo sapien
cgagaccctctagtctattactgtg

SEQ ID NO: 41941 - DNA, 25 bp, Homo sapien
gtcagattctgtatactctcacttg

SEQ ID NO: 41942 - DNA, 25 bp, Homo sapien
gtcagattctgtttactctcacttg

SEQ ID NO: 41943 - DNA, 25 bp, Homo sapien
cagatgtgtgtatgtttacacttcg

SEQ ID NO: 41944 - DNA, 25 bp, Homo sapien
cagatgtgtgtaagtttacacttcg

SEQ ID NO: 41945 - DNA, 25 bp, Homo sapien
aacgtcgtacccttctacctgtcgt

SEQ ID NO: 41946 - DNA, 25 bp, Homo sapien
aacgtcgtacccatctacctgtcgt

SEQ ID NO: 41947 - DNA, 25 bp, Homo sapien
gaagtacgaaagtcgtacgaagtct

SEQ ID NO: 41948 - DNA, 25 bp, Homo sapien
gaagtacgaaagacgtacgaagtct

SEQ ID NO: 41949 - DNA, 25 bp, Homo sapien
gtggtggagtcaatactcgtcgact

SEQ ID NO: 41950 - DNA, 25 bp, Homo sapien
gtggtggagtcattactcgtcgact

SEQ ID NO: 41951 - DNA, 25 bp, Homo sapien
gtacttgtcagttacgtgtcttctt

SEQ ID NO: 41952 - DNA, 25 bp, Homo sapien
gtacttgtcagtaacgtgtcttctt

SEQ ID NO: 41953 - DNA, 25 bp, Homo sapien
cttgactcgtctattcaccgtcatg

SEQ ID NO: 41954 - DNA, 25 bp, Homo sapien
cttgactcgtcttttcaccgtcatg

SEQ ID NO: 41955 - DNA, 25 bp, Homo sapien
gtattgagtccttcttctcgaccaa

SEQ ID NO: 41956 - DNA, 25 bp, Homo sapien
gtattgagtcctacttctcgaccaa

SEQ ID NO: 41957 - DNA, 25 bp, Homo sapien
atcgatagacttttctagactatgg

SEQ ID NO: 41958 - DNA, 25 bp, Homo sapien
atcgatagacttatctagactatgg

SEQ ID NO: 41959 - DNA, 25 bp, Homo sapien
ccaccagaatagtacgagaccatgg

SEQ ID NO: 41960 - DNA, 25 bp, Homo sapien
ccaccagaatagaacgagaccatgg

SEQ ID NO: 41961 - DNA, 25 bp, Homo sapien
gtataaagaagaacaacctactgat

SEQ ID NO: 41962 - DNA, 25 bp, Homo sapien
gtataaagaagatcaacctactgat

SEQ ID NO: 41963 - DNA, 25 bp, Homo sapien
tgtgaaaaagtatcttaccgacatt

SEQ ID NO: 41964 - DNA, 25 bp, Homo sapien
tgtgaaaaagtaacttaccgacatt

SEQ ID NO: 41965 - DNA, 25 bp, Homo sapien
cgtgaaagactggagtctcgtccaa

SEQ ID NO: 41966 - DNA, 25 bp, Homo sapien
cgtgaaagactgcagtctcgtccaa

SEQ ID NO: 41967 - DNA, 25 bp, Homo sapien
aggtaaaagtttactcgttccgtga

SEQ ID NO: 41968 - DNA, 25 bp, Homo sapien
aggtaaaagttttctcgttccgtga

SEQ ID NO: 41969 - DNA, 25 bp, Homo sapien
tcagtggagtctgtctgtgaccttg

SEQ ID NO: 41970 - DNA, 25 bp, Homo sapien
tcagtggagtctctctgtgaccttg

SEQ ID NO: 41971 - DNA, 25 bp, Homo sapien
ccagcgagatcttcatgagagctca

SEQ ID NO: 41972 - DNA, 25 bp, Homo sapien
ccagcgagatctacatgagagctca

SEQ ID NO: 41973 - DNA, 25 bp, Homo sapien
agagagggacttaggtgtagcttcc

SEQ ID NO: 41974 - DNA, 25 bp, Homo sapien
agagagggactttggtgtagcttcc

SEQ ID NO: 41975 - DNA, 25 bp, Homo sapien
gtacattgtcgatacatgtgttttc

SEQ ID NO: 41976 - DNA, 25 bp, Homo sapien
gtacattgtcgaaacatgtgttttc

SEQ ID NO: 41977 - DNA, 25 bp, Homo sapien
ggtatcgagactataggtttacttc

SEQ ID NO: 41978 - DNA, 25 bp, Homo sapien
ggtatcgagactttaggtttacttc

SEQ ID NO: 41979 - DNA, 25 bp, Homo sapien
cgatgtatgttatctagtttacttc

SEQ ID NO: 41980 - DNA, 25 bp, Homo sapien
cgatgtatgttaactagtttacttc

SEQ ID NO: 41981 - DNA, 25 bp, Homo sapien
gagcacggtctagtagtggtgtgtc

SEQ ID NO: 41982 - DNA, 25 bp, Homo sapien
gagcacggtctactagtggtgtgtc

SEQ ID NO: 41983 - DNA, 25 bp, Homo sapien
aattcgtcgtctcttcgagggtcgt

SEQ ID NO: 41984 - DNA, 25 bp, Homo sapien
aattcgtcgtctgttcgagggtcgt

SEQ ID NO: 41985 - DNA, 25 bp, Homo sapien
ccaaaaggttacagagaacctatat

SEQ ID NO: 41986 - DNA, 25 bp, Homo sapien
ccaaaaggttactgagaacctatat

SEQ ID NO: 41987 - DNA, 25 bp, Homo sapien
agggaatgaaggttcaggaactcta

SEQ ID NO: 41988 - DNA, 25 bp, Homo sapien
agggaatgaaggatcaggaactcta

SEQ ID NO: 41989 - DNA, 25 bp, Homo sapien
agcatgttcgagatcacagacagaa

SEQ ID NO: 41990 - DNA, 25 bp, Homo sapien
agcatgttcgagttcacagacagaa

SEQ ID NO: 41991 - DNA, 25 bp, Homo sapien
agaagtgtaaacatcccaacgagag

SEQ ID NO: 41992 - DNA, 25 bp, Homo sapien
agaagtgtaaacttcccaacgagag

SEQ ID NO: 41993 - DNA, 25 bp, Homo sapien
agaacttatacgtcgcatcagaaga

SEQ ID NO: 41994 - DNA, 25 bp, Homo sapien
agaacttatacgacgcatcagaaga

SEQ ID NO: 41995 - DNA, 25 bp, Homo sapien
aggaattgtaaaccacttctagaga

SEQ ID NO: 41996 - DNA, 25 bp, Homo sapien
aggaattgtaaagcacttctagaga

SEQ ID NO: 41997 - DNA, 25 bp, Homo sapien
acgttctacgggtctgtggtgcacg

SEQ ID NO: 41998 - DNA, 25 bp, Homo sapien
acgttctacgggactgtggtgcacg

SEQ ID NO: 41999 - DNA, 25 bp, Homo sapien
atgaatgcgtcgatgtcgagtcacc

SEQ ID NO: 42000 - DNA, 25 bp, Homo sapien
atgaatgcgtcgttgtcgagtcacc

SEQ ID NO: 42001 - DNA, 25 bp, Homo sapien
gttaatgttctgtttatcacgtccc

SEQ ID NO: 42002 - DNA, 25 bp, Homo sapien
gttaatgttctgattatcacgtccc

SEQ ID NO: 42003 - DNA, 25 bp, Homo sapien
ttaaagatgtggattccacgtcaca

SEQ ID NO: 42004 - DNA, 25 bp, Homo sapien
ttaaagatgtggtttccacgtcaca

SEQ ID NO: 42005 - DNA, 25 bp, Homo sapien
taaacatgacggtttacaccgtgaa

SEQ ID NO: 42006 - DNA, 25 bp, Homo sapien
taaacatgacggattacaccgtgaa

SEQ ID NO: 42007 - DNA, 25 bp, Homo sapien
acatctctccggtcaccagtgttac

SEQ ID NO: 42008 - DNA, 25 bp, Homo sapien
acatctctccggacaccagtgttac

SEQ ID NO: 42009 - DNA, 25 bp, Homo sapien
accgacctcgtgaccgggcgtagta

SEQ ID NO: 42010 - DNA, 25 bp, Homo sapien
accgacctcgtgtccgggcgtagta

SEQ ID NO: 42011 - DNA, 25 bp, Homo sapien
tccgtatccgtgtggttgtcgtgta

SEQ ID NO: 42012 - DNA, 25 bp, Homo sapien
tccgtatccgtgaggttgtcgtgta

SEQ ID NO: 42013 - DNA, 25 bp, Homo sapien
tcggtcctcacaggtcgagctcggg

SEQ ID NO: 42014 - DNA, 25 bp, Homo sapien
tcggtcctcacacgtcgagctcggg

SEQ ID NO: 42015 - DNA, 25 bp, Homo sapien
gtcactgacgtagtactgcctgtcg

SEQ ID NO: 42016 - DNA, 25 bp, Homo sapien
gtcactgacgtactactgcctgtcg

SEQ ID NO: 42017 - DNA, 25 bp, Homo sapien
aacgacctggtgtacagtctgtcct

SEQ ID NO: 42018 - DNA, 25 bp, Homo sapien
aacgacctggtgaacagtctgtcct

SEQ ID NO: 42019 - DNA, 25 bp, Homo sapien
ttttcgaccgaagaacgaggttcct

SEQ ID NO: 42020 - DNA, 25 bp, Homo sapien
ttttcgaccgaacaacgaggttcct

SEQ ID NO: 42021 - DNA, 25 bp, Homo sapien
tctcacggtacacagaccgtcctga

SEQ ID NO: 42022 - DNA, 25 bp, Homo sapien
tctcacggtacagagaccgtcctga

SEQ ID NO: 42023 - DNA, 25 bp, Homo sapien
ccctctctggtgtctcgtagaagta

SEQ ID NO: 42024 - DNA, 25 bp, Homo sapien
ccctctctggtgactcgtagaagta

SEQ ID NO: 42025 - DNA, 25 bp, Homo sapien
accctctaatcgaccgacgacagag

SEQ ID NO: 42026 - DNA, 25 bp, Homo sapien
accctctaatcgtccgacgacagag

SEQ ID NO: 42027 - DNA, 25 bp, Homo sapien
agtatgttaaaccttctcagtcaac

SEQ ID NO: 42028 - DNA, 25 bp, Homo sapien
agtatgttaaacgttctcagtcaac

SEQ ID NO: 42029 - DNA, 25 bp, Homo sapien
agtttcagtatagttcgggtcatac

SEQ ID NO: 42030 - DNA, 25 bp, Homo sapien
agtttcagtatacttcgggtcatac

SEQ ID NO: 42031 - DNA, 25 bp, Homo sapien
agaatgtgtggtctccagtaactct

SEQ ID NO: 42032 - DNA, 25 bp, Homo sapien
agaatgtgtggtgtccagtaactct

SEQ ID NO: 42033 - DNA, 25 bp, Homo sapien
gaagagttggaaggtcctaccgtct

SEQ ID NO: 42034 - DNA, 25 bp, Homo sapien
gaagagttggaacgtcctaccgtct

SEQ ID NO: 42035 - DNA, 25 bp, Homo sapien
gtgaaacgggagaaggtccgacttt

SEQ ID NO: 42036 - DNA, 25 bp, Homo sapien
gtgaaacgggagtaggtccgacttt

SEQ ID NO: 42037 - DNA, 25 bp, Homo sapien
taaggaggaagtagagtcacacctt

SEQ ID NO: 42038 - DNA, 25 bp, Homo sapien
taaggaggaagttgagtcacacctt

SEQ ID NO: 42039 - DNA, 25 bp, Homo sapien
agacgtgtctattgccatactgtgt

SEQ ID NO: 42040 - DNA, 25 bp, Homo sapien
agacgtgtctatagccatactgtgt

SEQ ID NO: 42041 - DNA, 25 bp, Homo sapien
aaagtcactctgtccctatctagtg

SEQ ID NO: 42042 - DNA, 25 bp, Homo sapien
aaagtcactctgaccctatctagtg

SEQ ID NO: 42043 - DNA, 25 bp, Homo sapien
gtggggtccctttacctctcttatc

SEQ ID NO: 42044 - DNA, 25 bp, Homo sapien
gtggggtcccttaacctctcttatc

SEQ ID NO: 42045 - DNA, 25 bp, Homo sapien
tcgtggaaccgctacaacttttgtt

SEQ ID NO: 42046 - DNA, 25 bp, Homo sapien
tcgtggaaccgcaacaacttttgtt

SEQ ID NO: 42047 - DNA, 25 bp, Homo sapien
ctgtaagaacgaaaaactttcgttt

SEQ ID NO: 42048 - DNA, 25 bp, Homo sapien
ctgtaagaacgataaactttcgttt

SEQ ID NO: 42049 - DNA, 25 bp, Homo sapien
gcagtagtccttacagctctttgtt

SEQ ID NO: 42050 - DNA, 25 bp, Homo sapien
gcagtagtcctttcagctctttgtt

SEQ ID NO: 42051 - DNA, 25 bp, Homo sapien
aacaaggtcccttcctcgttattga

SEQ ID NO: 42052 - DNA, 25 bp, Homo sapien
aacaaggtccctacctcgttattga

SEQ ID NO: 42053 - DNA, 25 bp, Homo sapien
acaagcggccgtcttatgattagac

SEQ ID NO: 42054 - DNA, 25 bp, Homo sapien
acaagcggccgtgttatgattagac

SEQ ID NO: 42055 - DNA, 25 bp, Homo sapien
aaagtgacacatacttaagactgaa

SEQ ID NO: 42056 - DNA, 25 bp, Homo sapien
aaagtgacacattcttaagactgaa

SEQ ID NO: 42057 - DNA, 25 bp, Homo sapien
gagtcagactatcattaacgaaatt

SEQ ID NO: 42058 - DNA, 25 bp, Homo sapien
gagtcagactatgattaacgaaatt

SEQ ID NO: 42059 - DNA, 25 bp, Homo sapien
cgtaagtaccgataacgaagtacct

SEQ ID NO: 42060 - DNA, 25 bp, Homo sapien
cgtaagtaccgaaaacgaagtacct

SEQ ID NO: 42061 - DNA, 25 bp, Homo sapien
gaaatactgtacctaaaagtcgtac

SEQ ID NO: 42062 - DNA, 25 bp, Homo sapien
gaaatactgtacgtaaaagtcgtac

SEQ ID NO: 42063 - DNA, 25 bp, Homo sapien
acaaagaatcgtcgtaacagatgta

SEQ ID NO: 42064 - DNA, 25 bp, Homo sapien
acaaagaatcgtggtaacagatgta

SEQ ID NO: 42065 - DNA, 25 bp, Homo sapien
gaaaaagtcggtactagagactcat

SEQ ID NO: 42066 - DNA, 25 bp, Homo sapien
gaaaaagtcggttctagagactcat

SEQ ID NO: 42067 - DNA, 25 bp, Homo sapien
tgatcgagaaggactcgtggtcgcc

SEQ ID NO: 42068 - DNA, 25 bp, Homo sapien
tgatcgagaaggtctcgtggtcgcc

SEQ ID NO: 42069 - DNA, 25 bp, Homo sapien
atgactcactggtacaggtcaggcc

SEQ ID NO: 42070 - DNA, 25 bp, Homo sapien
atgactcactggaacaggtcaggcc

SEQ ID NO: 42071 - DNA, 25 bp, Homo sapien
cgatcccctgaacgagtgtcatcaa

SEQ ID NO: 42072 - DNA, 25 bp, Homo sapien
cgatcccctgaaggagtgtcatcaa

SEQ ID NO: 42073 - DNA, 25 bp, Homo sapien
tcctaggagaacaacattatcatag

SEQ ID NO: 42074 - DNA, 25 bp, Homo sapien
tcctaggagaactacattatcatag

SEQ ID NO: 42075 - DNA, 25 bp, Homo sapien
ttcaggacgacagatcggatttaga

SEQ ID NO: 42076 - DNA, 25 bp, Homo sapien
ttcaggacgacacatcggatttaga

SEQ ID NO: 42077 - DNA, 25 bp, Homo sapien
cgagtctcgaacctttcaacataga

SEQ ID NO: 42078 - DNA, 25 bp, Homo sapien
cgagtctcgaacgtttcaacataga

SEQ ID NO: 42079 - DNA, 25 bp, Homo sapien
tggtctcacgacctaacaaaagtaa

SEQ ID NO: 42080 - DNA, 25 bp, Homo sapien
tggtctcacgacgtaacaaaagtaa

SEQ ID NO: 42081 - DNA, 25 bp, Homo sapien
tgtgagtcactcatgacaaaacaga

SEQ ID NO: 42082 - DNA, 25 bp, Homo sapien
tgtgagtcactcttgacaaaacaga

SEQ ID NO: 42083 - DNA, 25 bp, Homo sapien
tgtcgaggacctaccggcacgacaa

SEQ ID NO: 42084 - DNA, 25 bp, Homo sapien
tgtcgaggaccttccggcacgacaa

SEQ ID NO: 42085 - DNA, 25 bp, Homo sapien
aagtgtacctaatcgagcaacttag

SEQ ID NO: 42086 - DNA, 25 bp, Homo sapien
aagtgtacctaaacgagcaacttag

SEQ ID NO: 42087 - DNA, 25 bp, Homo sapien
agcccagtgaccactgagcggtttt

SEQ ID NO: 42088 - DNA, 25 bp, Homo sapien
agcccagtgacctctgagcggtttt

SEQ ID NO: 42089 - DNA, 25 bp, Homo sapien
gtagcggcaacctgacgcggcgcat

SEQ ID NO: 42090 - DNA, 25 bp, Homo sapien
gtagcggcaaccagacgcggcgcat

SEQ ID NO: 42091 - DNA, 25 bp, Homo sapien
gagcgtcccgacgaggtcccgacga

SEQ ID NO: 42092 - DNA, 25 bp, Homo sapien
gagcgtcccgaccaggtcccgacga

SEQ ID NO: 42093 - DNA, 25 bp, Homo sapien
ctctctctgtatttctgacagacta

SEQ ID NO: 42094 - DNA, 25 bp, Homo sapien
ctctctctgtatatctgacagacta

SEQ ID NO: 42095 - DNA, 25 bp, Homo sapien
atgttgttacggttgtcgtacgacc

SEQ ID NO: 42096 - DNA, 25 bp, Homo sapien
atgttgttacggatgtcgtacgacc

SEQ ID NO: 42097 - DNA, 25 bp, Homo sapien
atacgtttctgtcatagtcgttatc

SEQ ID NO: 42098 - DNA, 25 bp, Homo sapien
atacgtttctgtgatagtcgttatc

SEQ ID NO: 42099 - DNA, 25 bp, Homo sapien
gtgacctctggttgtgtgccatttc

SEQ ID NO: 42100 - DNA, 25 bp, Homo sapien
gtgacctctggtagtgtgccatttc

SEQ ID NO: 42101 - DNA, 25 bp, Homo sapien
ggtttaggtctcagtgagccccttc

SEQ ID NO: 42102 - DNA, 25 bp, Homo sapien
ggtttaggtctctgtgagccccttc

SEQ ID NO: 42103 - DNA, 25 bp, Homo sapien
agacactgggtcttttcgccatctc

SEQ ID NO: 42104 - DNA, 25 bp, Homo sapien
agacactgggtcatttcgccatctc

SEQ ID NO: 42105 - DNA, 25 bp, Homo sapien
gaccgtctcaaatttacgtgcatta

SEQ ID NO: 42106 - DNA, 25 bp, Homo sapien
gaccgtctcaaaattacgtgcatta

SEQ ID NO: 42107 - DNA, 25 bp, Homo sapien
cggtgtcaggactctcgaccgagga

SEQ ID NO: 42108 - DNA, 25 bp, Homo sapien
cggtgtcaggacactcgaccgagga

SEQ ID NO: 42109 - DNA, 25 bp, Homo sapien
gtgacagagacatcggacacgggtc

SEQ ID NO: 42110 - DNA, 25 bp, Homo sapien
gtgacagagacaacggacacgggtc

SEQ ID NO: 42111 - DNA, 25 bp, Homo sapien
ttatcagagacgagagacactggtc

SEQ ID NO: 42112 - DNA, 25 bp, Homo sapien
ttatcagagacgtgagacactggtc

SEQ ID NO: 42113 - DNA, 25 bp, Homo sapien
gtacctcaagaggtagacttaccca

SEQ ID NO: 42114 - DNA, 25 bp, Homo sapien
gtacctcaagagctagacttaccca

SEQ ID NO: 42115 - DNA, 25 bp, Homo sapien
ttctcggaactacagttcttctcga

SEQ ID NO: 42116 - DNA, 25 bp, Homo sapien
ttctcggaactagagttcttctcga

SEQ ID NO: 42117 - DNA, 25 bp, Homo sapien
tcgtgaataactcagttattgtaac

SEQ ID NO: 42118 - DNA, 25 bp, Homo sapien
tcgtgaataactgagttattgtaac

SEQ ID NO: 42119 - DNA, 25 bp, Homo sapien
gacccgacgtttaactcatgtcacc

SEQ ID NO: 42120 - DNA, 25 bp, Homo sapien
gacccgacgttttactcatgtcacc

SEQ ID NO: 42121 - DNA, 25 bp, Homo sapien
ggtgacctctacttttcgattttcc

SEQ ID NO: 42122 - DNA, 25 bp, Homo sapien
ggtgacctctacatttcgattttcc

SEQ ID NO: 42123 - DNA, 25 bp, Homo sapien
cggtagtttacgtaacggttcctcc

SEQ ID NO: 42124 - DNA, 25 bp, Homo sapien
cggtagtttacgaaacggttcctcc

SEQ ID NO: 42125 - DNA, 25 bp, Homo sapien
ttcatctttgagtagtggatcttct

SEQ ID NO: 42126 - DNA, 25 bp, Homo sapien
ttcatctttgagaagtggatcttct

SEQ ID NO: 42127 - DNA, 25 bp, Homo sapien
tcccgatgtggtagtggtaccgttg

SEQ ID NO: 42128 - DNA, 25 bp, Homo sapien
tcccgatgtggttgtggtaccgttg

SEQ ID NO: 42129 - DNA, 25 bp, Homo sapien
tcccgagagtggtaggagacattgt

SEQ ID NO: 42130 - DNA, 25 bp, Homo sapien
tcccgagagtggaaggagacattgt

SEQ ID NO: 42131 - DNA, 25 bp, Homo sapien
taccgaaagtagaggagacttcagt

SEQ ID NO: 42132 - DNA, 25 bp, Homo sapien
taccgaaagtagtggagacttcagt

SEQ ID NO: 42133 - DNA, 25 bp, Homo sapien
attacaaagttttacgatgtgcacc

SEQ ID NO: 42134 - DNA, 25 bp, Homo sapien
attacaaagtttaacgatgtgcacc

SEQ ID NO: 42135 - DNA, 25 bp, Homo sapien
ggttttacaagcaccggtgacttcc

SEQ ID NO: 42136 - DNA, 25 bp, Homo sapien
ggttttacaagctccggtgacttcc

SEQ ID NO: 42137 - DNA, 25 bp, Homo sapien
gtgttcaaggtgaccggaaccttcg

SEQ ID NO: 42138 - DNA, 25 bp, Homo sapien
gtgttcaaggtgtccggaaccttcg

SEQ ID NO: 42139 - DNA, 25 bp, Homo sapien
gtgttcgtggtgtatgaggaccttc

SEQ ID NO: 42140 - DNA, 25 bp, Homo sapien
gtgttcgtggtgaatgaggaccttc

SEQ ID NO: 42141 - DNA, 25 bp, Homo sapien
gtgtcctcgtcaaaaggcgccctcg

SEQ ID NO: 42142 - DNA, 25 bp, Homo sapien
gtgtcctcgtcataaggcgccctcg

SEQ ID NO: 42143 - DNA, 25 bp, Homo sapien
cgtttgtcacagacgggtgaattcg

SEQ ID NO: 42144 - DNA, 25 bp, Homo sapien
cgtttgtcacagtcgggtgaattcg

SEQ ID NO: 42145 - DNA, 25 bp, Homo sapien
cttgtggacacacgagaggattgtt

SEQ ID NO: 42146 - DNA, 25 bp, Homo sapien
cttgtggacacaggagaggattgtt

SEQ ID NO: 42147 - DNA, 25 bp, Homo sapien
gtcatgtctgtcgattgagatcttt

SEQ ID NO: 42148 - DNA, 25 bp, Homo sapien
gtcatgtctgtccattgagatcttt

SEQ ID NO: 42149 - DNA, 25 bp, Homo sapien
tgtctgattattgacttgaattatt

SEQ ID NO: 42150 - DNA, 25 bp, Homo sapien
tgtctgattattcacttgaattatt

SEQ ID NO: 42151 - DNA, 25 bp, Homo sapien
tcagtcttacttcttgaagtcggtt

SEQ ID NO: 42152 - DNA, 25 bp, Homo sapien
tcagtcttacttgttgaagtcggtt

SEQ ID NO: 42153 - DNA, 25 bp, Homo sapien
cttactcgtgaggttatagtcggtt

SEQ ID NO: 42154 - DNA, 25 bp, Homo sapien
cttactcgtgagcttatagtcggtt

SEQ ID NO: 42155 - DNA, 25 bp, Homo sapien
acaccgctagtgtgtcacgtaagtg

SEQ ID NO: 42156 - DNA, 25 bp, Homo sapien
acaccgctagtgagtcacgtaagtg

SEQ ID NO: 42157 - DNA, 25 bp, Homo sapien
cccgtctccgtcgtcgtcgtagatt

SEQ ID NO: 42158 - DNA, 25 bp, Homo sapien
cccgtctccgtcctcgtcgtagatt

SEQ ID NO: 42159 - DNA, 25 bp, Homo sapien
atacctcctcgtgacacgaccgagg

SEQ ID NO: 42160 - DNA, 25 bp, Homo sapien
atacctcctcgtcacacgaccgagg

SEQ ID NO: 42161 - DNA, 25 bp, Homo sapien
aagacctactgaccaccgactgttg

SEQ ID NO: 42162 - DNA, 25 bp, Homo sapien
aagacctactgagcaccgactgttg

SEQ ID NO: 42163 - DNA, 25 bp, Homo sapien
gggccctccagaaccgagtcgagac

SEQ ID NO: 42164 - DNA, 25 bp, Homo sapien
gggccctccagatccgagtcgagac

SEQ ID NO: 42165 - DNA, 25 bp, Homo sapien
agcaccactctcgtgaggacgggtc

SEQ ID NO: 42166 - DNA, 25 bp, Homo sapien
agcaccactctcctgaggacgggtc

SEQ ID NO: 42167 - DNA, 25 bp, Homo sapien
ctatttttactagagttcgtcccga

SEQ ID NO: 42168 - DNA, 25 bp, Homo sapien
ctatttttactacagttcgtcccga

SEQ ID NO: 42169 - DNA, 25 bp, Homo sapien
gagtgttttatccatcacgtcccac

SEQ ID NO: 42170 - DNA, 25 bp, Homo sapien
gagtgttttatcgatcacgtcccac

SEQ ID NO: 42171 - DNA, 25 bp, Homo sapien
ttgtcggttccgagtgtcgacccca

SEQ ID NO: 42172 - DNA, 25 bp, Homo sapien
ttgtcggttccgtgtgtcgacccca

SEQ ID NO: 42173 - DNA, 25 bp, Homo sapien
ctgcgagacccgtgtcctcgggtta

SEQ ID NO: 42174 - DNA, 25 bp, Homo sapien
ctgcgagacccgagtcctcgggtta

SEQ ID NO: 42175 - DNA, 25 bp, Homo sapien
actagggtcctgagtcccggagaag

SEQ ID NO: 42176 - DNA, 25 bp, Homo sapien
actagggtcctgtgtcccggagaag

SEQ ID NO: 42177 - DNA, 25 bp, Homo sapien
gtgtcgcttctcttaatccctggga

SEQ ID NO: 42178 - DNA, 25 bp, Homo sapien
gtgtcgcttctcataatccctggga

SEQ ID NO: 42179 - DNA, 25 bp, Homo sapien
gtcgtctacccgtggaccctggtgg

SEQ ID NO: 42180 - DNA, 25 bp, Homo sapien
gtcgtctacccgaggaccctggtgg

SEQ ID NO: 42181 - DNA, 25 bp, Homo sapien
cgtccgaccgaaagaccccgggtgt

SEQ ID NO: 42182 - DNA, 25 bp, Homo sapien
cgtccgaccgaatgaccccgggtgt

SEQ ID NO: 42183 - DNA, 25 bp, Homo sapien
ctcgggcaaacagtcgcagcgagag

SEQ ID NO: 42184 - DNA, 25 bp, Homo sapien
ctcgggcaaacactcgcagcgagag

SEQ ID NO: 42185 - DNA, 25 bp, Homo sapien
aaagaccgaaaggacctactccacc

SEQ ID NO: 42186 - DNA, 25 bp, Homo sapien
aaagaccgaaagcacctactccacc

SEQ ID NO: 42187 - DNA, 25 bp, Homo sapien
gatgaccaagacgtaactccgcctc

SEQ ID NO: 42188 - DNA, 25 bp, Homo sapien
gatgaccaagacctaactccgcctc

SEQ ID NO: 42189 - DNA, 25 bp, Homo sapien
ttcttggataacctttccgttctcg

SEQ ID NO: 42190 - DNA, 25 bp, Homo sapien
ttcttggataacgtttccgttctcg

SEQ ID NO: 42191 - DNA, 25 bp, Homo sapien
tcctggtatagaggtcccgttttct

SEQ ID NO: 42192 - DNA, 25 bp, Homo sapien
tcctggtatagacgtcccgttttct

SEQ ID NO: 42193 - DNA, 25 bp, Homo sapien
ttagtttacgtaataggtacctttc

SEQ ID NO: 42194 - DNA, 25 bp, Homo sapien
ttagtttacgtattaggtacctttc

SEQ ID NO: 42195 - DNA, 25 bp, Homo sapien
tgttcagtagtacaccttgatttta

SEQ ID NO: 42196 - DNA, 25 bp, Homo sapien
tgttcagtagtagaccttgatttta

SEQ ID NO: 42197 - DNA, 25 bp, Homo sapien
tgatttattgggacctttccgttac

SEQ ID NO: 42198 - DNA, 25 bp, Homo sapien
tgatttattgggtcctttccgttac

SEQ ID NO: 42199 - DNA, 25 bp, Homo sapien
gattctgttccctctgtgtcaatta

SEQ ID NO: 42200 - DNA, 25 bp, Homo sapien
gattctgttcccactgtgtcaatta

SEQ ID NO: 42201 - DNA, 25 bp, Homo sapien
actggttccaggttctacacttcta

SEQ ID NO: 42202 - DNA, 25 bp, Homo sapien
actggttccaggatctacacttcta

SEQ ID NO: 42203 - DNA, 25 bp, Homo sapien
aggtctttcaagtacgaacatagtc

SEQ ID NO: 42204 - DNA, 25 bp, Homo sapien
aggtctttcaagaacgaacatagtc

SEQ ID NO: 42205 - DNA, 25 bp, Homo sapien
tacgtccatgtatgacgacatcgag

SEQ ID NO: 42206 - DNA, 25 bp, Homo sapien
tacgtccatgtaagacgacatcgag

SEQ ID NO: 42207 - DNA, 25 bp, Homo sapien
atcgtattcgctcacacctcgtagt

SEQ ID NO: 42208 - DNA, 25 bp, Homo sapien
atcgtattcgctgacacctcgtagt

SEQ ID NO: 42209 - DNA, 25 bp, Homo sapien
atccatcgtttgttagagtcctgtg

SEQ ID NO: 42210 - DNA, 25 bp, Homo sapien
atccatcgtttgatagagtcctgtg

SEQ ID NO: 42211 - DNA, 25 bp, Homo sapien
ttgcatatgtccatgtaagtctgtc

SEQ ID NO: 42212 - DNA, 25 bp, Homo sapien
ttgcatatgtccttgtaagtctgtc

SEQ ID NO: 42213 - DNA, 25 bp, Homo sapien
ccttctactgcaggtcgtgagggtc

SEQ ID NO: 42214 - DNA, 25 bp, Homo sapien
ccttctactgcacgtcgtgagggtc

SEQ ID NO: 42215 - DNA, 25 bp, Homo sapien
gttcgagtgcacgtccgtggagtct

SEQ ID NO: 42216 - DNA, 25 bp, Homo sapien
gttcgagtgcacctccgtggagtct

SEQ ID NO: 42217 - DNA, 25 bp, Homo sapien
cttagaggtggatcactgttggtgc

SEQ ID NO: 42218 - DNA, 25 bp, Homo sapien
cttagaggtggaacactgttggtgc

SEQ ID NO: 42219 - DNA, 25 bp, Homo sapien
tttatacggtacgattatttgttcc

SEQ ID NO: 42220 - DNA, 25 bp, Homo sapien
tttatacggtaccattatttgttcc

SEQ ID NO: 42221 - DNA, 25 bp, Homo sapien
tgtaacgtgactgtgtttttcagtc

SEQ ID NO: 42222 - DNA, 25 bp, Homo sapien
tgtaacgtgactctgtttttcagtc

SEQ ID NO: 42223 - DNA, 25 bp, Homo sapien
attggtgtaactttgattacgacac

SEQ ID NO: 42224 - DNA, 25 bp, Homo sapien
attggtgtaactatgattacgacac

SEQ ID NO: 42225 - DNA, 25 bp, Homo sapien
tgtttgtgtgtcataccggttacca

SEQ ID NO: 42226 - DNA, 25 bp, Homo sapien
tgtttgtgtgtcttaccggttacca

SEQ ID NO: 42227 - DNA, 25 bp, Homo sapien
ttcttcgggaggttctgtgaggact

SEQ ID NO: 42228 - DNA, 25 bp, Homo sapien
ttcttcgggaggatctgtgaggact

SEQ ID NO: 42229 - DNA, 25 bp, Homo sapien
tctacttgggactcattggtcgact

SEQ ID NO: 42230 - DNA, 25 bp, Homo sapien
tctacttgggacacattggtcgact

SEQ ID NO: 42231 - DNA, 25 bp, Homo sapien
atctcgcgaacgtcatgaacatact

SEQ ID NO: 42232 - DNA, 25 bp, Homo sapien
atctcgcgaacgacatgaacatact

SEQ ID NO: 42233 - DNA, 25 bp, Homo sapien
ataggacctgcaacggaaatgacaa

SEQ ID NO: 42234 - DNA, 25 bp, Homo sapien
ataggacctgcatcggaaatgacaa

SEQ ID NO: 42235 - DNA, 25 bp, Homo sapien
gatctttcttgctgaatacagtaaa

SEQ ID NO: 42236 - DNA, 25 bp, Homo sapien
gatctttcttgcagaatacagtaaa

SEQ ID NO: 42237 - DNA, 25 bp, Homo sapien
tcagtccttcctgtttgactttgta

SEQ ID NO: 42238 - DNA, 25 bp, Homo sapien
tcagtccttcctctttgactttgta

SEQ ID NO: 42239 - DNA, 25 bp, Homo sapien
agaattgaaactacagaggtcgttc

SEQ ID NO: 42240 - DNA, 25 bp, Homo sapien
agaattgaaacttcagaggtcgttc

SEQ ID NO: 42241 - DNA, 25 bp, Homo sapien
gatctagtaatgctcattcgtcatt

SEQ ID NO: 42242 - DNA, 25 bp, Homo sapien
gatctagtaatggtcattcgtcatt

SEQ ID NO: 42243 - DNA, 25 bp, Homo sapien
ttctcgatggtgtaaagttcactac

SEQ ID NO: 42244 - DNA, 25 bp, Homo sapien
ttctcgatggtgaaaagttcactac

SEQ ID NO: 42245 - DNA, 25 bp, Homo sapien
cgtgttatgacactatgacctagta

SEQ ID NO: 42246 - DNA, 25 bp, Homo sapien
cgtgttatgacagtatgacctagta

SEQ ID NO: 42247 - DNA, 25 bp, Homo sapien
catttttggtcgataattcacgtaa

SEQ ID NO: 42248 - DNA, 25 bp, Homo sapien
catttttggtcgttaattcacgtaa

SEQ ID NO: 42249 - DNA, 25 bp, Homo sapien
tattccgttgtcgttctacacgaag

SEQ ID NO: 42250 - DNA, 25 bp, Homo sapien
tattccgttgtccttctacacgaag

SEQ ID NO: 42251 - DNA, 25 bp, Homo sapien
aaagtatttcaacgttacaacgtag

SEQ ID NO: 42252 - DNA, 25 bp, Homo sapien
aaagtatttcaaggttacaacgtag

SEQ ID NO: 42253 - DNA, 25 bp, Homo sapien
cacgtagatttacacaggatttaat

SEQ ID NO: 42254 - DNA, 25 bp, Homo sapien
cacgtagatttagacaggatttaat

SEQ ID NO: 42255 - DNA, 25 bp, Homo sapien
gaaatcgtagaaggtacactttagc

SEQ ID NO: 42256 - DNA, 25 bp, Homo sapien
gaaatcgtagaacgtacactttagc

SEQ ID NO: 42257 - DNA, 25 bp, Homo sapien
gcgaacctcgtgacttacctttgtc

SEQ ID NO: 42258 - DNA, 25 bp, Homo sapien
gcgaacctcgtgtcttacctttgtc

SEQ ID NO: 42259 - DNA, 25 bp, Homo sapien
accgtctgtgactccggacttcgac

SEQ ID NO: 42260 - DNA, 25 bp, Homo sapien
accgtctgtgacaccggacttcgac

SEQ ID NO: 42261 - DNA, 25 bp, Homo sapien
acgagtctgtgaaccccaattcgta

SEQ ID NO: 42262 - DNA, 25 bp, Homo sapien
acgagtctgtgatccccaattcgta

SEQ ID NO: 42263 - DNA, 25 bp, Homo sapien
aaggttcggaaaactccgactccag

SEQ ID NO: 42264 - DNA, 25 bp, Homo sapien
aaggttcggaaatctccgactccag

SEQ ID NO: 42265 - DNA, 25 bp, Homo sapien
aagactccggacagggccacgcaca

SEQ ID NO: 42266 - DNA, 25 bp, Homo sapien
aagactccggactgggccacgcaca

SEQ ID NO: 42267 - DNA, 25 bp, Homo sapien
gatccagatcgttctacgatgaaac

SEQ ID NO: 42268 - DNA, 25 bp, Homo sapien
gatccagatcgtactacgatgaaac

SEQ ID NO: 42269 - DNA, 25 bp, Homo sapien
agtttataactaacgacagagatct

SEQ ID NO: 42270 - DNA, 25 bp, Homo sapien
agtttataactatcgacagagatct

SEQ ID NO: 42271 - DNA, 25 bp, Homo sapien
tcagatgaggttgaaccggtcctaa

SEQ ID NO: 42272 - DNA, 25 bp, Homo sapien
tcagatgaggttcaaccggtcctaa

SEQ ID NO: 42273 - DNA, 25 bp, Homo sapien
acgagtgagcccaagaagccacact

SEQ ID NO: 42274 - DNA, 25 bp, Homo sapien
acgagtgagccctagaagccacact

SEQ ID NO: 42275 - DNA, 25 bp, Homo sapien
cgagatgacccatcgactcatttat

SEQ ID NO: 42276 - DNA, 25 bp, Homo sapien
cgagatgacccaacgactcatttat

SEQ ID NO: 42277 - DNA, 25 bp, Homo sapien
gcaagagagcaaagagactttctct

SEQ ID NO: 42278 - DNA, 25 bp, Homo sapien
gcaagagagcaatgagactttctct

SEQ ID NO: 42279 - DNA, 25 bp, Homo sapien
acagagccatcgtgacccactgtcg

SEQ ID NO: 42280 - DNA, 25 bp, Homo sapien
acagagccatcgagacccactgtcg

SEQ ID NO: 42281 - DNA, 25 bp, Homo sapien
catgggctactggtacgtcccggcc

SEQ ID NO: 42282 - DNA, 25 bp, Homo sapien
catgggctactgctacgtcccggcc

SEQ ID NO: 42283 - DNA, 25 bp, Homo sapien
tgacgtgtcctgtcgttcccgtcga

SEQ ID NO: 42284 - DNA, 25 bp, Homo sapien
tgacgtgtcctgacgttcccgtcga

SEQ ID NO: 42285 - DNA, 25 bp, Homo sapien
cagtgactacgtgtgtgttttcgat

SEQ ID NO: 42286 - DNA, 25 bp, Homo sapien
cagtgactacgtctgtgttttcgat

SEQ ID NO: 42287 - DNA, 25 bp, Homo sapien
atgactcttgtgacgtaacgtctat

SEQ ID NO: 42288 - DNA, 25 bp, Homo sapien
atgactcttgtgtcgtaacgtctat

SEQ ID NO: 42289 - DNA, 25 bp, Homo sapien
ttaccccttaaggacgttgtactat

SEQ ID NO: 42290 - DNA, 25 bp, Homo sapien
ttaccccttaagcacgttgtactat

SEQ ID NO: 42291 - DNA, 25 bp, Homo sapien
gtatatcatgttaaaggtcacacta

SEQ ID NO: 42292 - DNA, 25 bp, Homo sapien
gtatatcatgtttaaggtcacacta

SEQ ID NO: 42293 - DNA, 25 bp, Homo sapien
tatttctttcaactaaaccaaggat

SEQ ID NO: 42294 - DNA, 25 bp, Homo sapien
tatttctttcaagtaaaccaaggat

SEQ ID NO: 42295 - DNA, 25 bp, Homo sapien
ctgttccacaaaacatcgtagttga

SEQ ID NO: 42296 - DNA, 25 bp, Homo sapien
ctgttccacaaatcatcgtagttga

SEQ ID NO: 42297 - DNA, 25 bp, Homo sapien
tcctcttccactttccggtaaggaa

SEQ ID NO: 42298 - DNA, 25 bp, Homo sapien
tcctcttccactatccggtaaggaa

SEQ ID NO: 42299 - DNA, 25 bp, Homo sapien
cttcttattgcctccgaacggggac

SEQ ID NO: 42300 - DNA, 25 bp, Homo sapien
cttcttattgccaccgaacggggac

SEQ ID NO: 42301 - DNA, 25 bp, Homo sapien
tcctttaccccgaactccatgggac

SEQ ID NO: 42302 - DNA, 25 bp, Homo sapien
tcctttaccccgtactccatgggac

SEQ ID NO: 42303 - DNA, 25 bp, Homo sapien
cattgtccttgttctttaggtggtc

SEQ ID NO: 42304 - DNA, 25 bp, Homo sapien
cattgtccttgtactttaggtggtc

SEQ ID NO: 42305 - DNA, 25 bp, Homo sapien
gtagattccttttcgccaggggtcg

SEQ ID NO: 42306 - DNA, 25 bp, Homo sapien
gtagattcctttacgccaggggtcg

SEQ ID NO: 42307 - DNA, 25 bp, Homo sapien
aaacgaaaccattccggtttgtgta

SEQ ID NO: 42308 - DNA, 25 bp, Homo sapien
aaacgaaaccataccggtttgtgta

SEQ ID NO: 42309 - DNA, 25 bp, Homo sapien
taaaccaattaaagtcttccgtgga

SEQ ID NO: 42310 - DNA, 25 bp, Homo sapien
taaaccaattaatgtcttccgtgga

SEQ ID NO: 42311 - DNA, 25 bp, Homo sapien
aatagaccagtgacgtttttgagca

SEQ ID NO: 42312 - DNA, 25 bp, Homo sapien
aatagaccagtgtcgtttttgagca

SEQ ID NO: 42313 - DNA, 25 bp, Homo sapien
agcatacggtgacagtgtcgaggtt

SEQ ID NO: 42314 - DNA, 25 bp, Homo sapien
agcatacggtgagagtgtcgaggtt

SEQ ID NO: 42315 - DNA, 25 bp, Homo sapien
cggaagagacgtgtataacagtatt

SEQ ID NO: 42316 - DNA, 25 bp, Homo sapien
cggaagagacgtctataacagtatt

SEQ ID NO: 42317 - DNA, 25 bp, Homo sapien
cgtcttagtaattcagggacgtctt

SEQ ID NO: 42318 - DNA, 25 bp, Homo sapien
cgtcttagtaatacagggacgtctt

SEQ ID NO: 42319 - DNA, 25 bp, Homo sapien
ctcgaggacaaaacagggtcgtctc

SEQ ID NO: 42320 - DNA, 25 bp, Homo sapien
ctcgaggacaaatcagggtcgtctc

SEQ ID NO: 42321 - DNA, 25 bp, Homo sapien
gacaccggacgtcttcagggtccgc

SEQ ID NO: 42322 - DNA, 25 bp, Homo sapien
gacaccggacgtgttcagggtccgc

SEQ ID NO: 42323 - DNA, 25 bp, Homo sapien
actcccgacttcaacagtgagacca

SEQ ID NO: 42324 - DNA, 25 bp, Homo sapien
actcccgacttctacagtgagacca

SEQ ID NO: 42325 - DNA, 25 bp, Homo sapien
taaccgtcagtcgtcgagtttccta

SEQ ID NO: 42326 - DNA, 25 bp, Homo sapien
taaccgtcagtcctcgagtttccta

SEQ ID NO: 42327 - DNA, 25 bp, Homo sapien
tcctactccgggtgtcggagccatc

SEQ ID NO: 42328 - DNA, 25 bp, Homo sapien
tcctactccgggagtcggagccatc

SEQ ID NO: 42329 - DNA, 25 bp, Homo sapien
attttcagggtcttgggtccagtct

SEQ ID NO: 42330 - DNA, 25 bp, Homo sapien
attttcagggtcatgggtccagtct

SEQ ID NO: 42331 - DNA, 25 bp, Homo sapien
gttccgttcgacaagtaacaaagtt

SEQ ID NO: 42332 - DNA, 25 bp, Homo sapien
gttccgttcgactagtaacaaagtt

SEQ ID NO: 42333 - DNA, 25 bp, Homo sapien
cgtgtctcatttcgaggacccgatt

SEQ ID NO: 42334 - DNA, 25 bp, Homo sapien
cgtgtctcatttggaggacccgatt

SEQ ID NO: 42335 - DNA, 25 bp, Homo sapien
ttcctttggggttgtacgtacgtga

SEQ ID NO: 42336 - DNA, 25 bp, Homo sapien
ttcctttggggtagtacgtacgtga

SEQ ID NO: 42337 - DNA, 25 bp, Homo sapien
ttcacttctccgtcggatctacgaa

SEQ ID NO: 42338 - DNA, 25 bp, Homo sapien
ttcacttctccgacggatctacgaa

SEQ ID NO: 42339 - DNA, 25 bp, Homo sapien
ccgtttccccgctaccgaatagaga

SEQ ID NO: 42340 - DNA, 25 bp, Homo sapien
ccgtttccccgcaaccgaatagaga

SEQ ID NO: 42341 - DNA, 25 bp, Homo sapien
cgtgtcacctactcttcggaaattc

SEQ ID NO: 42342 - DNA, 25 bp, Homo sapien
cgtgtcacctacacttcggaaattc

SEQ ID NO: 42343 - DNA, 25 bp, Homo sapien
tgtactggtccctgtgcaacatgtc

SEQ ID NO: 42344 - DNA, 25 bp, Homo sapien
tgtactggtcccagtgcaacatgtc

SEQ ID NO: 42345 - DNA, 25 bp, Homo sapien
acgctaagagacctggacaaaccct

SEQ ID NO: 42346 - DNA, 25 bp, Homo sapien
acgctaagagacgtggacaaaccct

SEQ ID NO: 42347 - DNA, 25 bp, Homo sapien
tacgaagagtgctaggaatgttcct

SEQ ID NO: 42348 - DNA, 25 bp, Homo sapien
tacgaagagtgcaaggaatgttcct

SEQ ID NO: 42349 - DNA, 25 bp, Homo sapien
agaagaagatgtggtttcattacaa

SEQ ID NO: 42350 - DNA, 25 bp, Homo sapien
agaagaagatgtcgtttcattacaa

SEQ ID NO: 42351 - DNA, 25 bp, Homo sapien
aaagagagggtctattcgattccag

SEQ ID NO: 42352 - DNA, 25 bp, Homo sapien
aaagagagggtcaattcgattccag

SEQ ID NO: 42353 - DNA, 25 bp, Homo sapien
tttatagagaggagaaacccaggtc

SEQ ID NO: 42354 - DNA, 25 bp, Homo sapien
tttatagagaggtgaaacccaggtc

SEQ ID NO: 42355 - DNA, 25 bp, Homo sapien
gaattcggtcggaacttctattcgt

SEQ ID NO: 42356 - DNA, 25 bp, Homo sapien
gaattcggtcggtacttctattcgt

SEQ ID NO: 42357 - DNA, 25 bp, Homo sapien
gattcttcgtagacttgttacctcg

SEQ ID NO: 42358 - DNA, 25 bp, Homo sapien
gattcttcgtagtcttgttacctcg

SEQ ID NO: 42359 - DNA, 25 bp, Homo sapien
tacgactcccggaacttttattagt

SEQ ID NO: 42360 - DNA, 25 bp, Homo sapien
tacgactcccggtacttttattagt

SEQ ID NO: 42361 - DNA, 25 bp, Homo sapien
tcacgtcgaccccggttgtccttgt

SEQ ID NO: 42362 - DNA, 25 bp, Homo sapien
tcacgtcgacccgggttgtccttgt

SEQ ID NO: 42363 - DNA, 25 bp, Homo sapien
tacaaaggtcaaaccgggagccctc

SEQ ID NO: 42364 - DNA, 25 bp, Homo sapien
tacaaaggtcaatccgggagccctc

SEQ ID NO: 42365 - DNA, 25 bp, Homo sapien
aaagaagaaacacgagtgtcccgga

SEQ ID NO: 42366 - DNA, 25 bp, Homo sapien
aaagaagaaacaggagtgtcccgga

SEQ ID NO: 42367 - DNA, 25 bp, Homo sapien
tcaagaagtgtacaggaaaccataa

SEQ ID NO: 42368 - DNA, 25 bp, Homo sapien
tcaagaagtgtagaggaaaccataa

SEQ ID NO: 42369 - DNA, 25 bp, Homo sapien
aaactctctcggagagacctataag

SEQ ID NO: 42370 - DNA, 25 bp, Homo sapien
aaactctctcggtgagacctataag

SEQ ID NO: 42371 - DNA, 25 bp, Homo sapien
tagcctttacttgagtgtcatttat

SEQ ID NO: 42372 - DNA, 25 bp, Homo sapien
tagcctttacttcagtgtcatttat

SEQ ID NO: 42373 - DNA, 25 bp, Homo sapien
tcaaccccatcttgagcagtcactt

SEQ ID NO: 42374 - DNA, 25 bp, Homo sapien
tcaaccccatctagagcagtcactt

SEQ ID NO: 42375 - DNA, 25 bp, Homo sapien
cgagcaggtccgagctcagcgacag

SEQ ID NO: 42376 - DNA, 25 bp, Homo sapien
cgagcaggtccgtgctcagcgacag

SEQ ID NO: 42377 - DNA, 25 bp, Homo sapien
ggtcggtagactctgtgcaaaagac

SEQ ID NO: 42378 - DNA, 25 bp, Homo sapien
ggtcggtagactgtgtgcaaaagac

SEQ ID NO: 42379 - DNA, 25 bp, Homo sapien
gcggaaaggtagacctccgtgacgt

SEQ ID NO: 42380 - DNA, 25 bp, Homo sapien
gcggaaaggtagtcctccgtgacgt

SEQ ID NO: 42381 - DNA, 25 bp, Homo sapien
ttcagaggaattaaggacattccgg

SEQ ID NO: 42382 - DNA, 25 bp, Homo sapien
ttcagaggaatttaggacattccgg

SEQ ID NO: 42383 - DNA, 25 bp, Homo sapien
caggtcggacgtttgatgattccag

SEQ ID NO: 42384 - DNA, 25 bp, Homo sapien
caggtcggacgtatgatgattccag

SEQ ID NO: 42385 - DNA, 25 bp, Homo sapien
agacatccagtgtgtgatctcggta

SEQ ID NO: 42386 - DNA, 25 bp, Homo sapien
agacatccagtgagtgatctcggta

SEQ ID NO: 42387 - DNA, 25 bp, Homo sapien
cgtctaccggtgtcttgatcttgta

SEQ ID NO: 42388 - DNA, 25 bp, Homo sapien
cgtctaccggtgacttgatcttgta

SEQ ID NO: 42389 - DNA, 25 bp, Homo sapien
taagctcagggtcctggtttatgta

SEQ ID NO: 42390 - DNA, 25 bp, Homo sapien
taagctcagggtgctggtttatgta

SEQ ID NO: 42391 - DNA, 25 bp, Homo sapien
agaggaaccgtttgaggttcaggac

SEQ ID NO: 42392 - DNA, 25 bp, Homo sapien
agaggaaccgttagaggttcaggac

SEQ ID NO: 42393 - DNA, 25 bp, Homo sapien
gagatgaaccggacctgacagagga

SEQ ID NO: 42394 - DNA, 25 bp, Homo sapien
gagatgaaccggtcctgacagagga

SEQ ID NO: 42395 - DNA, 25 bp, Homo sapien
agaaatctaggttctcaaagcggtg

SEQ ID NO: 42396 - DNA, 25 bp, Homo sapien
agaaatctaggtactcaaagcggtg

SEQ ID NO: 42397 - DNA, 25 bp, Homo sapien
cacatattaatccacacttgcggtg

SEQ ID NO: 42398 - DNA, 25 bp, Homo sapien
cacatattaatcgacacttgcggtg

SEQ ID NO: 42399 - DNA, 25 bp, Homo sapien
tctcgaacccggaccctcggagaag

SEQ ID NO: 42400 - DNA, 25 bp, Homo sapien
tctcgaacccggtccctcggagaag

SEQ ID NO: 42401 - DNA, 25 bp, Homo sapien
attactgtgccgtcgtcgacgataa

SEQ ID NO: 42402 - DNA, 25 bp, Homo sapien
attactgtgccgacgtcgacgataa

SEQ ID NO: 42403 - DNA, 25 bp, Homo sapien
tcactaaggctccagacgaaaacct

SEQ ID NO: 42404 - DNA, 25 bp, Homo sapien
tcactaaggctcgagacgaaaacct

SEQ ID NO: 42405 - DNA, 25 bp, Homo sapien
tacaaaggataaactgtctacgaaa

SEQ ID NO: 42406 - DNA, 25 bp, Homo sapien
tacaaaggataatctgtctacgaaa

SEQ ID NO: 42407 - DNA, 25 bp, Homo sapien
cgccaactccagtcttctacgaggg

SEQ ID NO: 42408 - DNA, 25 bp, Homo sapien
cgccaactccagacttctacgaggg

SEQ ID NO: 42409 - DNA, 25 bp, Homo sapien
tttcaaaacgtcaccgaccaaaagg

SEQ ID NO: 42410 - DNA, 25 bp, Homo sapien
tttcaaaacgtctccgaccaaaagg

SEQ ID NO: 42411 - DNA, 25 bp, Homo sapien
tacaagaaaacttgttcaaacagag

SEQ ID NO: 42412 - DNA, 25 bp, Homo sapien
tacaagaaaactagttcaaacagag

SEQ ID NO: 42413 - DNA, 25 bp, Homo sapien
acacaaagacagtacttcaaaccgg

SEQ ID NO: 42414 - DNA, 25 bp, Homo sapien
acacaaagacagaacttcaaaccgg

SEQ ID NO: 42415 - DNA, 25 bp, Homo sapien
caagtaaaattgttatcataccgtg

SEQ ID NO: 42416 - DNA, 25 bp, Homo sapien
caagtaaaattgatatcataccgtg

SEQ ID NO: 42417 - DNA, 25 bp, Homo sapien
caatataagtatggtaccctttagt

SEQ ID NO: 42418 - DNA, 25 bp, Homo sapien
caatataagtatcgtaccctttagt

SEQ ID NO: 42419 - DNA, 25 bp, Homo sapien
atcagaaagagaccttggtcaaagt

SEQ ID NO: 42420 - DNA, 25 bp, Homo sapien
atcagaaagagagcttggtcaaagt

SEQ ID NO: 42421 - DNA, 25 bp, Homo sapien
cacaaagaggtctttatatacaagt

SEQ ID NO: 42422 - DNA, 25 bp, Homo sapien
cacaaagaggtcattatatacaagt

SEQ ID NO: 42423 - DNA, 25 bp, Homo sapien
gtctacgcagagacatcctgacttt

SEQ ID NO: 42424 - DNA, 25 bp, Homo sapien
gtctacgcagagtcatcctgacttt

SEQ ID NO: 42425 - DNA, 25 bp, Homo sapien
attcctcctcgaactcagtgtggta

SEQ ID NO: 42426 - DNA, 25 bp, Homo sapien
attcctcctcgatctcagtgtggta

SEQ ID NO: 42427 - DNA, 25 bp, Homo sapien
ttcttaccacgatcaacacatggga

SEQ ID NO: 42428 - DNA, 25 bp, Homo sapien
ttcttaccacgaacaacacatggga

SEQ ID NO: 42429 - DNA, 25 bp, Homo sapien
ttttattcggacacaagttcgagac

SEQ ID NO: 42430 - DNA, 25 bp, Homo sapien
ttttattcggactcaagttcgagac

SEQ ID NO: 42431 - DNA, 25 bp, Homo sapien
agtatgacggacacaaagtacgaat

SEQ ID NO: 42432 - DNA, 25 bp, Homo sapien
agtatgacggactcaaagtacgaat

SEQ ID NO: 42433 - DNA, 25 bp, Homo sapien
ggtttcgagacgttcagtacctgca

SEQ ID NO: 42434 - DNA, 25 bp, Homo sapien
ggtttcgagacgatcagtacctgca

SEQ ID NO: 42435 - DNA, 25 bp, Homo sapien
actaggaaacgaaccgcaattgggt

SEQ ID NO: 42436 - DNA, 25 bp, Homo sapien
actaggaaacgatccgcaattgggt

SEQ ID NO: 42437 - DNA, 25 bp, Homo sapien
aacgagaacatcgtcaacgggacgg

SEQ ID NO: 42438 - DNA, 25 bp, Homo sapien
aacgagaacatcctcaacgggacgg

SEQ ID NO: 42439 - DNA, 25 bp, Homo sapien
gaggcgaacatctaaaacgcgcgtt

SEQ ID NO: 42440 - DNA, 25 bp, Homo sapien
gaggcgaacatcaaaaacgcgcgtt

SEQ ID NO: 42441 - DNA, 25 bp, Homo sapien
gagttcccgaccagtgaacgacatc

SEQ ID NO: 42442 - DNA, 25 bp, Homo sapien
gagttcccgacctgtgaacgacatc

SEQ ID NO: 42443 - DNA, 25 bp, Homo sapien
agacgtaaagctaggcacgcggacg

SEQ ID NO: 42444 - DNA, 25 bp, Homo sapien
agacgtaaagcttggcacgcggacg

SEQ ID NO: 42445 - DNA, 25 bp, Homo sapien
accaccgtctgtgtcctgtcccggg

SEQ ID NO: 42446 - DNA, 25 bp, Homo sapien
accaccgtctgtctcctgtcccggg

SEQ ID NO: 42447 - DNA, 25 bp, Homo sapien
aatcacgttgtttctggtccgggac

SEQ ID NO: 42448 - DNA, 25 bp, Homo sapien
aatcacgttgttactggtccgggac

SEQ ID NO: 42449 - DNA, 25 bp, Homo sapien
gtttcggttgtctttttaacgaaac

SEQ ID NO: 42450 - DNA, 25 bp, Homo sapien
gtttcggttgtcattttaacgaaac

SEQ ID NO: 42451 - DNA, 25 bp, Homo sapien
ggttcgccccttcacaaagtaggac

SEQ ID NO: 42452 - DNA, 25 bp, Homo sapien
ggttcgccccttgacaaagtaggac

SEQ ID NO: 42453 - DNA, 25 bp, Homo sapien
agtctcgaccactggtaacactgga

SEQ ID NO: 42454 - DNA, 25 bp, Homo sapien
agtctcgaccacaggtaacactgga

SEQ ID NO: 42455 - DNA, 25 bp, Homo sapien
gcgtccgtccgaatgaggtcggtaa

SEQ ID NO: 42456 - DNA, 25 bp, Homo sapien
gcgtccgtccgattgaggtcggtaa

SEQ ID NO: 42457 - DNA, 25 bp, Homo sapien
tacaggaacgaaagacagtcatgac

SEQ ID NO: 42458 - DNA, 25 bp, Homo sapien
tacaggaacgaatgacagtcatgac

SEQ ID NO: 42459 - DNA, 25 bp, Homo sapien
caagtggtcgacctagggtgtgtca

SEQ ID NO: 42460 - DNA, 25 bp, Homo sapien
caagtggtcgacgtagggtgtgtca

SEQ ID NO: 42461 - DNA, 25 bp, Homo sapien
caggtgtgtaatagcgtcttagaca

SEQ ID NO: 42462 - DNA, 25 bp, Homo sapien
caggtgtgtaattgcgtcttagaca

SEQ ID NO: 42463 - DNA, 25 bp, Homo sapien
acaccggtcgacacgggacagagaa

SEQ ID NO: 42464 - DNA, 25 bp, Homo sapien
acaccggtcgactcgggacagagaa

SEQ ID NO: 42465 - DNA, 25 bp, Homo sapien
aacccgccgtactgcggaaaggcgc

SEQ ID NO: 42466 - DNA, 25 bp, Homo sapien
aacccgccgtacagcggaaaggcgc

SEQ ID NO: 42467 - DNA, 25 bp, Homo sapien
ctcaagggtgagcggaaggtactcg

SEQ ID NO: 42468 - DNA, 25 bp, Homo sapien
ctcaagggtgaggggaaggtactcg

SEQ ID NO: 42469 - DNA, 25 bp, Homo sapien
acagagggtgagaaggacatcgtcc

SEQ ID NO: 42470 - DNA, 25 bp, Homo sapien
acagagggtgagtaggacatcgtcc

SEQ ID NO: 42471 - DNA, 25 bp, Homo sapien
agacgtcgtattatggttgttgtcc

SEQ ID NO: 42472 - DNA, 25 bp, Homo sapien
agacgtcgtattttggttgttgtcc

SEQ ID NO: 42473 - DNA, 25 bp, Homo sapien
cgagtaggtcggtccaggtgttggg

SEQ ID NO: 42474 - DNA, 25 bp, Homo sapien
cgagtaggtcggaccaggtgttggg

SEQ ID NO: 42475 - DNA, 25 bp, Homo sapien
ctcacgactgcggaatgaccgttac

SEQ ID NO: 42476 - DNA, 25 bp, Homo sapien
ctcacgactgcgcaatgaccgttac

SEQ ID NO: 42477 - DNA, 25 bp, Homo sapien
ttatcaacgattgtgtcagggttac

SEQ ID NO: 42478 - DNA, 25 bp, Homo sapien
ttatcaacgattctgtcagggttac

SEQ ID NO: 42479 - DNA, 25 bp, Homo sapien
tattgggttccttcttacgtgtctc

SEQ ID NO: 42480 - DNA, 25 bp, Homo sapien
tattgggttcctacttacgtgtctc

SEQ ID NO: 42481 - DNA, 25 bp, Homo sapien
atctttgtttcgaccgtatagatcg

SEQ ID NO: 42482 - DNA, 25 bp, Homo sapien
atctttgtttcgtccgtatagatcg

SEQ ID NO: 42483 - DNA, 25 bp, Homo sapien
tgttctcgtacacttccttcgcgtc

SEQ ID NO: 42484 - DNA, 25 bp, Homo sapien
tgttctcgtacagttccttcgcgtc

SEQ ID NO: 42485 - DNA, 25 bp, Homo sapien
tctagacacgagagtgttctttgca

SEQ ID NO: 42486 - DNA, 25 bp, Homo sapien
tctagacacgagtgtgttctttgca

SEQ ID NO: 42487 - DNA, 25 bp, Homo sapien
tagtgacagaatttcgaagttcccg

SEQ ID NO: 42488 - DNA, 25 bp, Homo sapien
tagtgacagaatatcgaagttcccg

SEQ ID NO: 42489 - DNA, 25 bp, Homo sapien
atctacgaggaaatcgtatattttc

SEQ ID NO: 42490 - DNA, 25 bp, Homo sapien
atctacgaggaattcgtatattttc

SEQ ID NO: 42491 - DNA, 25 bp, Homo sapien
gacttcaaaaaggtgtccttgtcgt

SEQ ID NO: 42492 - DNA, 25 bp, Homo sapien
gacttcaaaaagctgtccttgtcgt

SEQ ID NO: 42493 - DNA, 25 bp, Homo sapien
ggatgtaatacagtcacttccttag

SEQ ID NO: 42494 - DNA, 25 bp, Homo sapien
ggatgtaatacactcacttccttag

SEQ ID NO: 42495 - DNA, 25 bp, Homo sapien
agtttatgtcaaagtacttaccttg

SEQ ID NO: 42496 - DNA, 25 bp, Homo sapien
agtttatgtcaatgtacttaccttg

SEQ ID NO: 42497 - DNA, 25 bp, Homo sapien
gatttaccgatcgtctgtacctctt

SEQ ID NO: 42498 - DNA, 25 bp, Homo sapien
gatttaccgatcctctgtacctctt

SEQ ID NO: 42499 - DNA, 25 bp, Homo sapien
cgattctgcgtcgtctctttctacc

SEQ ID NO: 42500 - DNA, 25 bp, Homo sapien
cgattctgcgtcctctctttctacc

SEQ ID NO: 42501 - DNA, 25 bp, Homo sapien
gacttgagacgaccatctaggttca

SEQ ID NO: 42502 - DNA, 25 bp, Homo sapien
gacttgagacgagcatctaggttca

SEQ ID NO: 42503 - DNA, 25 bp, Homo sapien
ttaccggtgtggtatcgtgtcccgt

SEQ ID NO: 42504 - DNA, 25 bp, Homo sapien
ttaccggtgtggaatcgtgtcccgt

SEQ ID NO: 42505 - DNA, 25 bp, Homo sapien
aaccacgggcgtgaatatcttccgg

SEQ ID NO: 42506 - DNA, 25 bp, Homo sapien
aaccacgggcgtcaatatcttccgg

SEQ ID NO: 42507 - DNA, 25 bp, Homo sapien
gtcgccagaagtatcctgtctcctc

SEQ ID NO: 42508 - DNA, 25 bp, Homo sapien
gtcgccagaagtttcctgtctcctc

SEQ ID NO: 42509 - DNA, 25 bp, Homo sapien
tctcacggtgcgtttagttttgaga

SEQ ID NO: 42510 - DNA, 25 bp, Homo sapien
tctcacggtgcgattagttttgaga

SEQ ID NO: 42511 - DNA, 25 bp, Homo sapien
ctatcggtagaatttattgtctcac

SEQ ID NO: 42512 - DNA, 25 bp, Homo sapien
ctatcggtagaaattattgtctcac

SEQ ID NO: 42513 - DNA, 25 bp, Homo sapien
tctcaggtagaagatgttctctgta

SEQ ID NO: 42514 - DNA, 25 bp, Homo sapien
tctcaggtagaacatgttctctgta

SEQ ID NO: 42515 - DNA, 25 bp, Homo sapien
ccaagacagtaataacaaccgtgta

SEQ ID NO: 42516 - DNA, 25 bp, Homo sapien
ccaagacagtaaaaacaaccgtgta

SEQ ID NO: 42517 - DNA, 25 bp, Homo sapien
aacacgtcaactgaccggactacca

SEQ ID NO: 42518 - DNA, 25 bp, Homo sapien
aacacgtcaactcaccggactacca

SEQ ID NO: 42519 - DNA, 25 bp, Homo sapien
cattgtttacgtccaggaactacac

SEQ ID NO: 42520 - DNA, 25 bp, Homo sapien
cattgtttacgtgcaggaactacac

SEQ ID NO: 42521 - DNA, 25 bp, Homo sapien
ccgaagtttacatcgagagaactta

SEQ ID NO: 42522 - DNA, 25 bp, Homo sapien
ccgaagtttacaacgagagaactta

SEQ ID NO: 42523 - DNA, 25 bp, Homo sapien
ccgtctacctccagggggtctcgta

SEQ ID NO: 42524 - DNA, 25 bp, Homo sapien
ccgtctacctcctgggggtctcgta

SEQ ID NO: 42525 - DNA, 25 bp, Homo sapien
cgtcgtcctttaggtcccgactctt

SEQ ID NO: 42526 - DNA, 25 bp, Homo sapien
cgtcgtcctttacgtcccgactctt

SEQ ID NO: 42527 - DNA, 25 bp, Homo sapien
gaacgcttctttagtctctttgtct

SEQ ID NO: 42528 - DNA, 25 bp, Homo sapien
gaacgcttcttttgtctctttgtct

SEQ ID NO: 42529 - DNA, 25 bp, Homo sapien
gaaccttcacttgtacgtttgtatt

SEQ ID NO: 42530 - DNA, 25 bp, Homo sapien
gaaccttcacttctacgtttgtatt

SEQ ID NO: 42531 - DNA, 25 bp, Homo sapien
tacgagagtagtttcactctttctc

SEQ ID NO: 42532 - DNA, 25 bp, Homo sapien
tacgagagtagtatcactctttctc

SEQ ID NO: 42533 - DNA, 25 bp, Homo sapien
tgagtaagtgtgactctatttcact

SEQ ID NO: 42534 - DNA, 25 bp, Homo sapien
tgagtaagtgtgtctctatttcact

SEQ ID NO: 42535 - DNA, 25 bp, Homo sapien
cgggagtctgtgttactatattcct

SEQ ID NO: 42536 - DNA, 25 bp, Homo sapien
cgggagtctgtgatactatattcct

SEQ ID NO: 42537 - DNA, 25 bp, Homo sapien
tactggaagtcgacgacctgtattc

SEQ ID NO: 42538 - DNA, 25 bp, Homo sapien
tactggaagtcgtcgacctgtattc

SEQ ID NO: 42539 - DNA, 25 bp, Homo sapien
tctggaagtcgacgactccacgttc

SEQ ID NO: 42540 - DNA, 25 bp, Homo sapien
tctggaagtcgaggactccacgttc

SEQ ID NO: 42541 - DNA, 25 bp, Homo sapien
ctacttcagagatatacacgtttgt

SEQ ID NO: 42542 - DNA, 25 bp, Homo sapien
ctacttcagagaaatacacgtttgt

SEQ ID NO: 42543 - DNA, 25 bp, Homo sapien
gactcaaaagtcttactatttcgtg

SEQ ID NO: 42544 - DNA, 25 bp, Homo sapien
gactcaaaagtcatactatttcgtg

SEQ ID NO: 42545 - DNA, 25 bp, Homo sapien
tgagataattactaactctttcgtg

SEQ ID NO: 42546 - DNA, 25 bp, Homo sapien
tgagataattacaaactctttcgtg

SEQ ID NO: 42547 - DNA, 25 bp, Homo sapien
gaccgtttctgtccactccggtctg

SEQ ID NO: 42548 - DNA, 25 bp, Homo sapien
gaccgtttctgtgcactccggtctg

SEQ ID NO: 42549 - DNA, 25 bp, Homo sapien
cgcacatcctgaacagcgtgtagaa

SEQ ID NO: 42550 - DNA, 25 bp, Homo sapien
cgcacatcctgatcagcgtgtagaa

SEQ ID NO: 42551 - DNA, 25 bp, Homo sapien
gtcccccgtagattaggtccgcgag

SEQ ID NO: 42552 - DNA, 25 bp, Homo sapien
gtcccccgtagaataggtccgcgag

SEQ ID NO: 42553 - DNA, 25 bp, Homo sapien
tcgctccagtcgaggtggtccgagt

SEQ ID NO: 42554 - DNA, 25 bp, Homo sapien
tcgctccagtcgtggtggtccgagt

SEQ ID NO: 42555 - DNA, 25 bp, Homo sapien
tcgtcctttgtgtggtcgcgccggt

SEQ ID NO: 42556 - DNA, 25 bp, Homo sapien
tcgtcctttgtgaggtcgcgccggt

SEQ ID NO: 42557 - DNA, 25 bp, Homo sapien
ttatctcttttgactcgttcccgag

SEQ ID NO: 42558 - DNA, 25 bp, Homo sapien
ttatctcttttgtctcgttcccgag

SEQ ID NO: 42559 - DNA, 25 bp, Homo sapien
cttatccctttgtcagttcgattcg

SEQ ID NO: 42560 - DNA, 25 bp, Homo sapien
cttatccctttgacagttcgattcg

SEQ ID NO: 42561 - DNA, 25 bp, Homo sapien
tttggtctctcttacaagattttcg

SEQ ID NO: 42562 - DNA, 25 bp, Homo sapien
tttggtctctctaacaagattttcg

SEQ ID NO: 42563 - DNA, 25 bp, Homo sapien
tttaggtattctccaatacgatttg

SEQ ID NO: 42564 - DNA, 25 bp, Homo sapien
tttaggtattctgcaatacgatttg

SEQ ID NO: 42565 - DNA, 25 bp, Homo sapien
tcgggttccagcatctcgacttgtg

SEQ ID NO: 42566 - DNA, 25 bp, Homo sapien
tcgggttccagcttctcgacttgtg

SEQ ID NO: 42567 - DNA, 25 bp, Homo sapien
ccagacccgtaagtctaccctgtag

SEQ ID NO: 42568 - DNA, 25 bp, Homo sapien
ccagacccgtaactctaccctgtag

SEQ ID NO: 42569 - DNA, 25 bp, Homo sapien
gtccgattctgtctcctacctatcg

SEQ ID NO: 42570 - DNA, 25 bp, Homo sapien
gtccgattctgtgtcctacctatcg

SEQ ID NO: 42571 - DNA, 25 bp, Homo sapien
gagatgtctgggttgtacacatcgt

SEQ ID NO: 42572 - DNA, 25 bp, Homo sapien
gagatgtctgggatgtacacatcgt

SEQ ID NO: 42573 - DNA, 25 bp, Homo sapien
tgaatatctactgcatctacccgtg

SEQ ID NO: 42574 - DNA, 25 bp, Homo sapien
tgaatatctactccatctacccgtg

SEQ ID NO: 42575 - DNA, 25 bp, Homo sapien
tatacgtaaagatctagacgtcgta

SEQ ID NO: 42576 - DNA, 25 bp, Homo sapien
tatacgtaaagaactagacgtcgta

SEQ ID NO: 42577 - DNA, 25 bp, Homo sapien
tttatgtcgagcaactcgcgtgagt

SEQ ID NO: 42578 - DNA, 25 bp, Homo sapien
tttatgtcgagctactcgcgtgagt

SEQ ID NO: 42579 - DNA, 25 bp, Homo sapien
ggttctcgtcattctctcgtgttgt

SEQ ID NO: 42580 - DNA, 25 bp, Homo sapien
ggttctcgtcatactctcgtgttgt

SEQ ID NO: 42581 - DNA, 25 bp, Homo sapien
ttgtacgtcttcattgttgtcatag

SEQ ID NO: 42582 - DNA, 25 bp, Homo sapien
ttgtacgtcttctttgttgtcatag

SEQ ID NO: 42583 - DNA, 25 bp, Homo sapien
cgttttgtctctacttcttctcata

SEQ ID NO: 42584 - DNA, 25 bp, Homo sapien
cgttttgtctcttcttcttctcata

SEQ ID NO: 42585 - DNA, 25 bp, Homo sapien
atgtgtaccttttctgtactagtgg

SEQ ID NO: 42586 - DNA, 25 bp, Homo sapien
atgtgtacctttactgtactagtgg

SEQ ID NO: 42587 - DNA, 25 bp, Homo sapien
ccactgaacatgttacaacggttgg

SEQ ID NO: 42588 - DNA, 25 bp, Homo sapien
ccactgaacatgatacaacggttgg

SEQ ID NO: 42589 - DNA, 25 bp, Homo sapien
atacgaacgaaagagactcgactga

SEQ ID NO: 42590 - DNA, 25 bp, Homo sapien
atacgaacgaaacagactcgactga

SEQ ID NO: 42591 - DNA, 25 bp, Homo sapien
atatcgaaaagatgttactcgcatt

SEQ ID NO: 42592 - DNA, 25 bp, Homo sapien
atatcgaaaagaagttactcgcatt

SEQ ID NO: 42593 - DNA, 25 bp, Homo sapien
agtcggaaactgaagtcttgacaag

SEQ ID NO: 42594 - DNA, 25 bp, Homo sapien
agtcggaaactgtagtcttgacaag

SEQ ID NO: 42595 - DNA, 25 bp, Homo sapien
ggtgaaaggtttgacctccgtagta

SEQ ID NO: 42596 - DNA, 25 bp, Homo sapien
ggtgaaaggtttcacctccgtagta

SEQ ID NO: 42597 - DNA, 25 bp, Homo sapien
cggttgagtcgagttacggccttcg

SEQ ID NO: 42598 - DNA, 25 bp, Homo sapien
cggttgagtcgacttacggccttcg

SEQ ID NO: 42599 - DNA, 25 bp, Homo sapien
acgtcgtagacctcactggcgctca

SEQ ID NO: 42600 - DNA, 25 bp, Homo sapien
acgtcgtagaccacactggcgctca

SEQ ID NO: 42601 - DNA, 25 bp, Homo sapien
agaggactcttacctgtgacttaac

SEQ ID NO: 42602 - DNA, 25 bp, Homo sapien
agaggactcttagctgtgacttaac

SEQ ID NO: 42603 - DNA, 25 bp, Homo sapien
gaatgtgacgaatccttgtatttac

SEQ ID NO: 42604 - DNA, 25 bp, Homo sapien
gaatgtgacgaaaccttgtatttac

SEQ ID NO: 42605 - DNA, 25 bp, Homo sapien
gggtagtaacgtataggtctttctc

SEQ ID NO: 42606 - DNA, 25 bp, Homo sapien
gggtagtaacgtttaggtctttctc

SEQ ID NO: 42607 - DNA, 25 bp, Homo sapien
cagttagtgttgttacgtttgtctc

SEQ ID NO: 42608 - DNA, 25 bp, Homo sapien
cagttagtgttgatacgtttgtctc

SEQ ID NO: 42609 - DNA, 25 bp, Homo sapien
gacgccgttcaggtcgtggtgtatc

SEQ ID NO: 42610 - DNA, 25 bp, Homo sapien
gacgccgttcagctcgtggtgtatc

SEQ ID NO: 42611 - DNA, 25 bp, Homo sapien
ggtcgtacgtcacgtcgtcgggttt

SEQ ID NO: 42612 - DNA, 25 bp, Homo sapien
ggtcgtacgtcaggtcgtcgggttt

SEQ ID NO: 42613 - DNA, 25 bp, Homo sapien
ccacaaggttgtaagcgaacttaat

SEQ ID NO: 42614 - DNA, 25 bp, Homo sapien
ccacaaggttgttagcgaacttaat

SEQ ID NO: 42615 - DNA, 25 bp, Homo sapien
acccaaagattgttcgaggagttca

SEQ ID NO: 42616 - DNA, 25 bp, Homo sapien
acccaaagattgatcgaggagttca

SEQ ID NO: 42617 - DNA, 25 bp, Homo sapien
tcagaggtctggtcacagacgagaa

SEQ ID NO: 42618 - DNA, 25 bp, Homo sapien
tcagaggtctggacacagacgagaa

SEQ ID NO: 42619 - DNA, 25 bp, Homo sapien
gactatgttaaaactcaacacgaga

SEQ ID NO: 42620 - DNA, 25 bp, Homo sapien
gactatgttaaatctcaacacgaga

SEQ ID NO: 42621 - DNA, 25 bp, Homo sapien
gaatgatacttaccattacacggat

SEQ ID NO: 42622 - DNA, 25 bp, Homo sapien
gaatgatacttagcattacacggat

SEQ ID NO: 42623 - DNA, 25 bp, Homo sapien
ggaattgtaaaccacttctagagag

SEQ ID NO: 42624 - DNA, 25 bp, Homo sapien
ggaattgtaaacgacttctagagag

SEQ ID NO: 42625 - DNA, 25 bp, Homo sapien
cacttctcgtggtctctgggtcgcg

SEQ ID NO: 42626 - DNA, 25 bp, Homo sapien
cacttctcgtggactctgggtcgcg

SEQ ID NO: 42627 - DNA, 25 bp, Homo sapien
ctgagttgtccgatggatcgacgtc

SEQ ID NO: 42628 - DNA, 25 bp, Homo sapien
ctgagttgtccgttggatcgacgtc

SEQ ID NO: 42629 - DNA, 25 bp, Homo sapien
tgtaatttgtgttttccgtccgtcg

SEQ ID NO: 42630 - DNA, 25 bp, Homo sapien
tgtaatttgtgtattccgtccgtcg

SEQ ID NO: 42631 - DNA, 25 bp, Homo sapien
gataagatttgtgtacccgtcagag

SEQ ID NO: 42632 - DNA, 25 bp, Homo sapien
gataagatttgtctacccgtcagag

SEQ ID NO: 42633 - DNA, 25 bp, Homo sapien
gaaacagtgaggttctctaccggga

SEQ ID NO: 42634 - DNA, 25 bp, Homo sapien
gaaacagtgaggatctctaccggga

SEQ ID NO: 42635 - DNA, 25 bp, Homo sapien
aataccgtccggtacctcacggaag

SEQ ID NO: 42636 - DNA, 25 bp, Homo sapien
aataccgtccggaacctcacggaag

SEQ ID NO: 42637 - DNA, 25 bp, Homo sapien
taggcacctcggaccggtccgtaga

SEQ ID NO: 42638 - DNA, 25 bp, Homo sapien
taggcacctcggtccggtccgtaga

SEQ ID NO: 42639 - DNA, 25 bp, Homo sapien
atccactccggttcggcgtggtgct

SEQ ID NO: 42640 - DNA, 25 bp, Homo sapien
atccactccggtacggcgtggtgct

SEQ ID NO: 42641 - DNA, 25 bp, Homo sapien
cgtccacctcatacgggtcgtgggt

SEQ ID NO: 42642 - DNA, 25 bp, Homo sapien
cgtccacctcattcgggtcgtgggt

SEQ ID NO: 42643 - DNA, 25 bp, Homo sapien
ccgtcctgagtacgtcggaatgcgt

SEQ ID NO: 42644 - DNA, 25 bp, Homo sapien
ccgtcctgagtaggtcggaatgcgt

SEQ ID NO: 42645 - DNA, 25 bp, Homo sapien
tcgcccctggagtccgtccgtccgt

SEQ ID NO: 42646 - DNA, 25 bp, Homo sapien
tcgcccctggagaccgtccgtccgt

SEQ ID NO: 42647 - DNA, 25 bp, Homo sapien
cttttccccgaggaacgaggtgtcc

SEQ ID NO: 42648 - DNA, 25 bp, Homo sapien
cttttccccgagcaacgaggtgtcc

SEQ ID NO: 42649 - DNA, 25 bp, Homo sapien
gacccggtacgacagactccctaga

SEQ ID NO: 42650 - DNA, 25 bp, Homo sapien
gacccggtacgagagactccctaga

SEQ ID NO: 42651 - DNA, 25 bp, Homo sapien
gtcctcttcatcgactcgtgaacga

SEQ ID NO: 42652 - DNA, 25 bp, Homo sapien
gtcctcttcatccactcgtgaacga

SEQ ID NO: 42653 - DNA, 25 bp, Homo sapien
cactgttacatgtctacggacagag

SEQ ID NO: 42654 - DNA, 25 bp, Homo sapien
cactgttacatgactacggacagag

SEQ ID NO: 42655 - DNA, 25 bp, Homo sapien
agtatatttagacgtatccaggaac

SEQ ID NO: 42656 - DNA, 25 bp, Homo sapien
agtatatttagaggtatccaggaac

SEQ ID NO: 42657 - DNA, 25 bp, Homo sapien
agtcttctacaaggttcgaagtcaa

SEQ ID NO: 42658 - DNA, 25 bp, Homo sapien
agtcttctacaacgttcgaagtcaa

SEQ ID NO: 42659 - DNA, 25 bp, Homo sapien
ataatgtagatggttcgaatcacct

SEQ ID NO: 42660 - DNA, 25 bp, Homo sapien
ataatgtagatgcttcgaatcacct

SEQ ID NO: 42661 - DNA, 25 bp, Homo sapien
gaagagtatgtgtgctcaacagtac

SEQ ID NO: 42662 - DNA, 25 bp, Homo sapien
gaagagtatgtgagctcaacagtac

SEQ ID NO: 42663 - DNA, 25 bp, Homo sapien
aaactcgtggtaagcgtggactgtt

SEQ ID NO: 42664 - DNA, 25 bp, Homo sapien
aaactcgtggtatgcgtggactgtt

SEQ ID NO: 42665 - DNA, 25 bp, Homo sapien
tcttaggcgtgagtgtgggaacctt

SEQ ID NO: 42666 - DNA, 25 bp, Homo sapien
tcttaggcgtgactgtgggaacctt

SEQ ID NO: 42667 - DNA, 25 bp, Homo sapien
gggacggcgtatttcacgaacttgt

SEQ ID NO: 42668 - DNA, 25 bp, Homo sapien
gggacggcgtatatcacgaacttgt

SEQ ID NO: 42669 - DNA, 25 bp, Homo sapien
gaagtcgagcagacccatcagtcgt

SEQ ID NO: 42670 - DNA, 25 bp, Homo sapien
gaagtcgagcagtcccatcagtcgt

SEQ ID NO: 42671 - DNA, 25 bp, Homo sapien
gcggaggtccctttacctattcttt

SEQ ID NO: 42672 - DNA, 25 bp, Homo sapien
gcggaggtccctatacctattcttt

SEQ ID NO: 42673 - DNA, 25 bp, Homo sapien
cgtcggatccgtgaacccgtttttt

SEQ ID NO: 42674 - DNA, 25 bp, Homo sapien
cgtcggatccgtcaacccgtttttt

SEQ ID NO: 42675 - DNA, 25 bp, Homo sapien
tgcgagacagtacaaactcttattt

SEQ ID NO: 42676 - DNA, 25 bp, Homo sapien
tgcgagacagtagaaactcttattt

SEQ ID NO: 42677 - DNA, 25 bp, Homo sapien
cacgagtccgattcggacttttatt

SEQ ID NO: 42678 - DNA, 25 bp, Homo sapien
cacgagtccgatacggacttttatt

SEQ ID NO: 42679 - DNA, 25 bp, Homo sapien
aaaggtccctatgatctgtatatgc

SEQ ID NO: 42680 - DNA, 25 bp, Homo sapien
aaaggtccctatcatctgtatatgc

SEQ ID NO: 42681 - DNA, 25 bp, Homo sapien
gacaagcggccgtcttatgattaga

SEQ ID NO: 42682 - DNA, 25 bp, Homo sapien
gacaagcggccgacttatgattaga

SEQ ID NO: 42683 - DNA, 25 bp, Homo sapien
aaaagtgacaacacttgtgaacgaa

SEQ ID NO: 42684 - DNA, 25 bp, Homo sapien
aaaagtgacaactcttgtgaacgaa

SEQ ID NO: 42685 - DNA, 25 bp, Homo sapien
agaagtcacattctttcaacgagtt

SEQ ID NO: 42686 - DNA, 25 bp, Homo sapien
agaagtcacattgtttcaacgagtt

SEQ ID NO: 42687 - DNA, 25 bp, Homo sapien
ccgacagtcggcttctcgaagtcct

SEQ ID NO: 42688 - DNA, 25 bp, Homo sapien
ccgacagtcggcatctcgaagtcct

SEQ ID NO: 42689 - DNA, 25 bp, Homo sapien
gagaatctcgtcttcacacagtcgg

SEQ ID NO: 42690 - DNA, 25 bp, Homo sapien
gagaatctcgtcatcacacagtcgg

SEQ ID NO: 42691 - DNA, 25 bp, Homo sapien
caaacattcgtttacagagatgtct

SEQ ID NO: 42692 - DNA, 25 bp, Homo sapien
caaacattcgttaacagagatgtct

SEQ ID NO: 42693 - DNA, 25 bp, Homo sapien
gaaaattacggtatcgatcactact

SEQ ID NO: 42694 - DNA, 25 bp, Homo sapien
gaaaattacggtttcgatcactact

SEQ ID NO: 42695 - DNA, 25 bp, Homo sapien
gaacgacatcggtctctgtgtcccg

SEQ ID NO: 42696 - DNA, 25 bp, Homo sapien
gaacgacatcggactctgtgtcccg

SEQ ID NO: 42697 - DNA, 25 bp, Homo sapien
atgactcctggacctggtgggacac

SEQ ID NO: 42698 - DNA, 25 bp, Homo sapien
atgactcctggagctggtgggacac

SEQ ID NO: 42699 - DNA, 25 bp, Homo sapien
gatcccctgaacgagtgtcatcaac

SEQ ID NO: 42700 - DNA, 25 bp, Homo sapien
gatcccctgaaccagtgtcatcaac

SEQ ID NO: 42701 - DNA, 25 bp, Homo sapien
tcctccgtaaaaacgattccgaagt

SEQ ID NO: 42702 - DNA, 25 bp, Homo sapien
tcctccgtaaaatcgattccgaagt

SEQ ID NO: 42703 - DNA, 25 bp, Homo sapien
gaggagacaacgacggtatttacga

SEQ ID NO: 42704 - DNA, 25 bp, Homo sapien
gaggagacaacgtcggtatttacga

SEQ ID NO: 42705 - DNA, 25 bp, Homo sapien
gagtctcgaacctttcaacatagat

SEQ ID NO: 42706 - DNA, 25 bp, Homo sapien
gagtctcgaaccattcaacatagat

SEQ ID NO: 42707 - DNA, 25 bp, Homo sapien
tggtcctcgaccacgaagaataacg

SEQ ID NO: 42708 - DNA, 25 bp, Homo sapien
tggtcctcgacctcgaagaataacg

SEQ ID NO: 42709 - DNA, 25 bp, Homo sapien
tttatctaccattacacaacaagac

SEQ ID NO: 42710 - DNA, 25 bp, Homo sapien
tttatctaccataacacaacaagac

SEQ ID NO: 42711 - DNA, 25 bp, Homo sapien
cgtaaggaccttagtgacagaagac

SEQ ID NO: 42712 - DNA, 25 bp, Homo sapien
cgtaaggacctttgtgacagaagac

SEQ ID NO: 42713 - DNA, 25 bp, Homo sapien
cctaagtgtcctatcaggaacgttc

SEQ ID NO: 42714 - DNA, 25 bp, Homo sapien
cctaagtgtcctttcaggaacgttc

SEQ ID NO: 42715 - DNA, 25 bp, Homo sapien
agtgccatgatcaccggggtctctt

SEQ ID NO: 42716 - DNA, 25 bp, Homo sapien
agtgccatgatctccggggtctctt

SEQ ID NO: 42717 - DNA, 25 bp, Homo sapien
agtagcggcaacctgacgcggcgca

SEQ ID NO: 42718 - DNA, 25 bp, Homo sapien
agtagcggcaacgtgacgcggcgca

SEQ ID NO: 42719 - DNA, 25 bp, Homo sapien
ggcgacgaccgaggacggggcgaca

SEQ ID NO: 42720 - DNA, 25 bp, Homo sapien
ggcgacgaccgacgacggggcgaca

SEQ ID NO: 42721 - DNA, 25 bp, Homo sapien
tctctactcccgttctgaacgacga

SEQ ID NO: 42722 - DNA, 25 bp, Homo sapien
tctctactcccgatctgaacgacga

SEQ ID NO: 42723 - DNA, 25 bp, Homo sapien
ccatatcttatctatgtgacgacgc

SEQ ID NO: 42724 - DNA, 25 bp, Homo sapien
ccatatcttatcaatgtgacgacgc

SEQ ID NO: 42725 - DNA, 25 bp, Homo sapien
agtagtatctactgtttgtgatacc

SEQ ID NO: 42726 - DNA, 25 bp, Homo sapien
agtagtatctacagtttgtgatacc

SEQ ID NO: 42727 - DNA, 25 bp, Homo sapien
ggaccttggtatgtagtcctattcc

SEQ ID NO: 42728 - DNA, 25 bp, Homo sapien
ggaccttggtatctagtcctattcc

SEQ ID NO: 42729 - DNA, 25 bp, Homo sapien
tggtttagggtcaggaggaccccct

SEQ ID NO: 42730 - DNA, 25 bp, Homo sapien
tggtttagggtctggaggaccccct

SEQ ID NO: 42731 - DNA, 25 bp, Homo sapien
agctggggtcttgtcgcccgtctcg

SEQ ID NO: 42732 - DNA, 25 bp, Homo sapien
agctggggtcttctcgcccgtctcg

SEQ ID NO: 42733 - DNA, 25 bp, Homo sapien
gatcggtcaattatcgtctctttct

SEQ ID NO: 42734 - DNA, 25 bp, Homo sapien
gatcggtcaattttcgtctctttct

SEQ ID NO: 42735 - DNA, 25 bp, Homo sapien
gacggtccgacctctcgaccagaga

SEQ ID NO: 42736 - DNA, 25 bp, Homo sapien
gacggtccgaccactcgaccagaga

SEQ ID NO: 42737 - DNA, 25 bp, Homo sapien
gtgacagaacgttcggtccgtggtc

SEQ ID NO: 42738 - DNA, 25 bp, Homo sapien
gtgacagaacgtacggtccgtggtc

SEQ ID NO: 42739 - DNA, 25 bp, Homo sapien
gtgcagagacgtaccgtcacgggtt

SEQ ID NO: 42740 - DNA, 25 bp, Homo sapien
gtgcagagacgttccgtcacgggtt

SEQ ID NO: 42741 - DNA, 25 bp, Homo sapien
aagtcccgaaaggtagctacccgca

SEQ ID NO: 42742 - DNA, 25 bp, Homo sapien
aagtcccgaaagctagctacccgca

SEQ ID NO: 42743 - DNA, 25 bp, Homo sapien
gttcgtctgaacattattttctcga

SEQ ID NO: 42744 - DNA, 25 bp, Homo sapien
gttcgtctgaactttattttctcga

SEQ ID NO: 42745 - DNA, 25 bp, Homo sapien
cttctggataattgttgttactaac

SEQ ID NO: 42746 - DNA, 25 bp, Homo sapien
cttctggataatagttgttactaac

SEQ ID NO: 42747 - DNA, 25 bp, Homo sapien
gaccacgaataaacttacggtcacc

SEQ ID NO: 42748 - DNA, 25 bp, Homo sapien
gaccacgaataatcttacggtcacc

SEQ ID NO: 42749 - DNA, 25 bp, Homo sapien
cgccgacctcaatttcttcgtttgc

SEQ ID NO: 42750 - DNA, 25 bp, Homo sapien
cgccgacctcaaattcttcgtttgc

SEQ ID NO: 42751 - DNA, 25 bp, Homo sapien
cggagtcttacctcgtgtctccctt

SEQ ID NO: 42752 - DNA, 25 bp, Homo sapien
cggagtcttaccacgtgtctccctt

SEQ ID NO: 42753 - DNA, 25 bp, Homo sapien
tccgagtgtttgtctggtgatcttt

SEQ ID NO: 42754 - DNA, 25 bp, Homo sapien
tccgagtgtttgactggtgatcttt

SEQ ID NO: 42755 - DNA, 25 bp, Homo sapien
cccgcgtactggtcttggaccgttt

SEQ ID NO: 42756 - DNA, 25 bp, Homo sapien
cccgcgtactggacttggaccgttt

SEQ ID NO: 42757 - DNA, 25 bp, Homo sapien
ccgccgaggtgtgtccggaccttgt

SEQ ID NO: 42758 - DNA, 25 bp, Homo sapien
ccgccgaggtgtctccggaccttgt

SEQ ID NO: 42759 - DNA, 25 bp, Homo sapien
tctaccatgaggagtcggacttccg

SEQ ID NO: 42760 - DNA, 25 bp, Homo sapien
tctaccatgaggtgtcggacttccg

SEQ ID NO: 42761 - DNA, 25 bp, Homo sapien
tttcaaagtgtatttatgtgacctc

SEQ ID NO: 42762 - DNA, 25 bp, Homo sapien
tttcaaagtgtaattatgtgacctc

SEQ ID NO: 42763 - DNA, 25 bp, Homo sapien
ttttcgaagtctttggtgacatacc

SEQ ID NO: 42764 - DNA, 25 bp, Homo sapien
ttttcgaagtctatggtgacatacc

SEQ ID NO: 42765 - DNA, 25 bp, Homo sapien
gttttctaggtgagtgggaccagtc

SEQ ID NO: 42766 - DNA, 25 bp, Homo sapien
gttttctaggtgtgtgggaccagtc

SEQ ID NO: 42767 - DNA, 25 bp, Homo sapien
ttgtcggtggtgtttcgggaccttc

SEQ ID NO: 42768 - DNA, 25 bp, Homo sapien
ttgtcggtggtgattcgggaccttc

SEQ ID NO: 42769 - DNA, 25 bp, Homo sapien
gtcgtcctcgagtaaagagaccccc

SEQ ID NO: 42770 - DNA, 25 bp, Homo sapien
gtcgtcctcgagaaaagagaccccc

SEQ ID NO: 42771 - DNA, 25 bp, Homo sapien
acgttttcgaaaaggatcgtcctcc

SEQ ID NO: 42772 - DNA, 25 bp, Homo sapien
acgttttcgaaatggatcgtcctcc

SEQ ID NO: 42773 - DNA, 25 bp, Homo sapien
tattgagacgactgggggactcttt

SEQ ID NO: 42774 - DNA, 25 bp, Homo sapien
tattgagacgacagggggactcttt

SEQ ID NO: 42775 - DNA, 25 bp, Homo sapien
tcactgtgtctcaaagggactcttc

SEQ ID NO: 42776 - DNA, 25 bp, Homo sapien
tcactgtgtctctaagggactcttc

SEQ ID NO: 42777 - DNA, 25 bp, Homo sapien
cttctgatttggactgtagatttgt

SEQ ID NO: 42778 - DNA, 25 bp, Homo sapien
cttctgatttggtctgtagatttgt

SEQ ID NO: 42779 - DNA, 25 bp, Homo sapien
cacgttatatgacttgactagtttt

SEQ ID NO: 42780 - DNA, 25 bp, Homo sapien
cacgttatatgagttgactagtttt

SEQ ID NO: 42781 - DNA, 25 bp, Homo sapien
ccaattatcgaagttgtacgtgttt

SEQ ID NO: 42782 - DNA, 25 bp, Homo sapien
ccaattatcgaacttgtacgtgttt

SEQ ID NO: 42783 - DNA, 25 bp, Homo sapien
acactcgtcagtccttaacggatcg

SEQ ID NO: 42784 - DNA, 25 bp, Homo sapien
acactcgtcagtgcttaacggatcg

SEQ ID NO: 42785 - DNA, 25 bp, Homo sapien
ctcgtcttcgtccacgtctagttct

SEQ ID NO: 42786 - DNA, 25 bp, Homo sapien
ctcgtcttcgtcgacgtctagttct

SEQ ID NO: 42787 - DNA, 25 bp, Homo sapien
ataactcttcgtacataacgtgtcg

SEQ ID NO: 42788 - DNA, 25 bp, Homo sapien
ataactcttcgttcataacgtgtcg

SEQ ID NO: 42789 - DNA, 25 bp, Homo sapien
cgactctactgagacctaccgtgcg

SEQ ID NO: 42790 - DNA, 25 bp, Homo sapien
cgactctactgacacctaccgtgcg

SEQ ID NO: 42791 - DNA, 25 bp, Homo sapien
tgggccctccagaaccgagtcgaga

SEQ ID NO: 42792 - DNA, 25 bp, Homo sapien
tgggccctccagtaccgagtcgaga

SEQ ID NO: 42793 - DNA, 25 bp, Homo sapien
cgcgtggacccttggtggaccacat

SEQ ID NO: 42794 - DNA, 25 bp, Homo sapien
cgcgtggaccctaggtggaccacat

SEQ ID NO: 42795 - DNA, 25 bp, Homo sapien
cactggacttcagagttcggtacca

SEQ ID NO: 42796 - DNA, 25 bp, Homo sapien
cactggacttcacagttcggtacca

SEQ ID NO: 42797 - DNA, 25 bp, Homo sapien
gggtgagttctcaatctcgtccacc

SEQ ID NO: 42798 - DNA, 25 bp, Homo sapien
gggtgagttctctatctcgtccacc

SEQ ID NO: 42799 - DNA, 25 bp, Homo sapien
tgtcggttccgagtgtcgaccccag

SEQ ID NO: 42800 - DNA, 25 bp, Homo sapien
tgtcggttccgactgtcgaccccag

SEQ ID NO: 42801 - DNA, 25 bp, Homo sapien
tgtcgccccgtatgtcctcggctgg

SEQ ID NO: 42802 - DNA, 25 bp, Homo sapien
tgtcgccccgtaagtcctcggctgg

SEQ ID NO: 42803 - DNA, 25 bp, Homo sapien
aacagggcccgtgtcacccgggacg

SEQ ID NO: 42804 - DNA, 25 bp, Homo sapien
aacagggcccgtctcacccgggacg

SEQ ID NO: 42805 - DNA, 25 bp, Homo sapien
gtgtccttcctctgatctccaggaa

SEQ ID NO: 42806 - DNA, 25 bp, Homo sapien
gtgtccttcctcagatctccaggaa

SEQ ID NO: 42807 - DNA, 25 bp, Homo sapien
ttgcgttccgcgtggacccttggtg

SEQ ID NO: 42808 - DNA, 25 bp, Homo sapien
ttgcgttccgcgaggacccttggtg

SEQ ID NO: 42809 - DNA, 25 bp, Homo sapien
cgtccgcgccgggacccacgggtgt

SEQ ID NO: 42810 - DNA, 25 bp, Homo sapien
cgtccgcgccggcacccacgggtgt

SEQ ID NO: 42811 - DNA, 25 bp, Homo sapien
ctgggccaactaggtccgacccgag

SEQ ID NO: 42812 - DNA, 25 bp, Homo sapien
ctgggccaactacgtccgacccgag

SEQ ID NO: 42813 - DNA, 25 bp, Homo sapien
aagacacgaaaggacccgtaccctc

SEQ ID NO: 42814 - DNA, 25 bp, Homo sapien
aagacacgaaagcacccgtaccctc

SEQ ID NO: 42815 - DNA, 25 bp, Homo sapien
gaagaccgaaacgaatatacctctt

SEQ ID NO: 42816 - DNA, 25 bp, Homo sapien
gaagaccgaaaccaatatacctctt

SEQ ID NO: 42817 - DNA, 25 bp, Homo sapien
cttggaaaccgtggtctactcttct

SEQ ID NO: 42818 - DNA, 25 bp, Homo sapien
cttggaaaccgtcgtctactcttct

SEQ ID NO: 42819 - DNA, 25 bp, Homo sapien
tcctaggtcggagtctccttctcct

SEQ ID NO: 42820 - DNA, 25 bp, Homo sapien
tcctaggtcggactctccttctcct

SEQ ID NO: 42821 - DNA, 25 bp, Homo sapien
gtagttgtacgtaataatccgtttc

SEQ ID NO: 42822 - DNA, 25 bp, Homo sapien
gtagttgtacgttataatccgtttc

SEQ ID NO: 42823 - DNA, 25 bp, Homo sapien
agtaccgaagttcaccttgatttta

SEQ ID NO: 42824 - DNA, 25 bp, Homo sapien
agtaccgaagttgaccttgatttta

SEQ ID NO: 42825 - DNA, 25 bp, Homo sapien
ttatgttgtggaccaggttccttac

SEQ ID NO: 42826 - DNA, 25 bp, Homo sapien
ttatgttgtggagcaggttccttac

SEQ ID NO: 42827 - DNA, 25 bp, Homo sapien
ttcttctccccttaggtttacttac

SEQ ID NO: 42828 - DNA, 25 bp, Homo sapien
ttcttctcccctaaggtttacttac

SEQ ID NO: 42829 - DNA, 25 bp, Homo sapien
gatatgtctggtactctctcgtgtt

SEQ ID NO: 42830 - DNA, 25 bp, Homo sapien
gatatgtctggttctctctcgtgtt

SEQ ID NO: 42831 - DNA, 25 bp, Homo sapien
agggttaacaagtacgaaccacgtc

SEQ ID NO: 42832 - DNA, 25 bp, Homo sapien
agggttaacaagaacgaaccacgtc

SEQ ID NO: 42833 - DNA, 25 bp, Homo sapien
agtcaccatagactcgacatacgtc

SEQ ID NO: 42834 - DNA, 25 bp, Homo sapien
agtcaccatagagtcgacatacgtc

SEQ ID NO: 42835 - DNA, 25 bp, Homo sapien
ttacagtcgtctcaacactcgtacg

SEQ ID NO: 42836 - DNA, 25 bp, Homo sapien
ttacagtcgtctgaacactcgtacg

SEQ ID NO: 42837 - DNA, 25 bp, Homo sapien
atgaatgattcgttatatctctgtc

SEQ ID NO: 42838 - DNA, 25 bp, Homo sapien
atgaatgattcgatatatctctgtc

SEQ ID NO: 42839 - DNA, 25 bp, Homo sapien
ggtatgcatataacccttatgttgc

SEQ ID NO: 42840 - DNA, 25 bp, Homo sapien
ggtatgcatatatcccttatgttgc

SEQ ID NO: 42841 - DNA, 25 bp, Homo sapien
gtgtcctttactacccttgggtgtc

SEQ ID NO: 42842 - DNA, 25 bp, Homo sapien
gtgtcctttacttcccttgggtgtc

SEQ ID NO: 42843 - DNA, 25 bp, Homo sapien
ttcagtagtcacgttgtgacgtagg

SEQ ID NO: 42844 - DNA, 25 bp, Homo sapien
ttcagtagtcaccttgtgacgtagg

SEQ ID NO: 42845 - DNA, 25 bp, Homo sapien
ctccttcaggggtcctgtgtgatga

SEQ ID NO: 42846 - DNA, 25 bp, Homo sapien
ctccttcaggggacctgtgtgatga

SEQ ID NO: 42847 - DNA, 25 bp, Homo sapien
cgttatcggcggacattctgtttac

SEQ ID NO: 42848 - DNA, 25 bp, Homo sapien
cgttatcggcggtcattctgtttac

SEQ ID NO: 42849 - DNA, 25 bp, Homo sapien
tctttacgagctgtttgtcttcctc

SEQ ID NO: 42850 - DNA, 25 bp, Homo sapien
tctttacgagctctttgtcttcctc

SEQ ID NO: 42851 - DNA, 25 bp, Homo sapien
tgtattctggttgtttgattcacac

SEQ ID NO: 42852 - DNA, 25 bp, Homo sapien
tgtattctggttctttgattcacac

SEQ ID NO: 42853 - DNA, 25 bp, Homo sapien
tgtttagatgtcatcgggttaccgc

SEQ ID NO: 42854 - DNA, 25 bp, Homo sapien
tgtttagatgtcttcgggttaccgc

SEQ ID NO: 42855 - DNA, 25 bp, Homo sapien
attcttggcgtattttgctaggtct

SEQ ID NO: 42856 - DNA, 25 bp, Homo sapien
attcttggcgtaatttgctaggtct

SEQ ID NO: 42857 - DNA, 25 bp, Homo sapien
tctcttgcggactctgtcccgtgct

SEQ ID NO: 42858 - DNA, 25 bp, Homo sapien
tctcttgcggacactgtcccgtgct

SEQ ID NO: 42859 - DNA, 25 bp, Homo sapien
tctggatcgaactagtacgctatct

SEQ ID NO: 42860 - DNA, 25 bp, Homo sapien
tctggatcgaacaagtacgctatct

SEQ ID NO: 42861 - DNA, 25 bp, Homo sapien
gaaagacctgtctcggaagggacaa

SEQ ID NO: 42862 - DNA, 25 bp, Homo sapien
gaaagacctgtcacggaagggacaa

SEQ ID NO: 42863 - DNA, 25 bp, Homo sapien
ggatccctctacgaccaaaagtaaa

SEQ ID NO: 42864 - DNA, 25 bp, Homo sapien
ggatccctctaccaccaaaagtaaa

SEQ ID NO: 42865 - DNA, 25 bp, Homo sapien
cagtccttcctccttttcgtgatga

SEQ ID NO: 42866 - DNA, 25 bp, Homo sapien
cagtccttcctcgttttcgtgatga

SEQ ID NO: 42867 - DNA, 25 bp, Homo sapien
gatatttatcacttggggtacgttc

SEQ ID NO: 42868 - DNA, 25 bp, Homo sapien
gatatttatcacatggggtacgttc

SEQ ID NO: 42869 - DNA, 25 bp, Homo sapien
actgtaaaagatattcgtacgatct

SEQ ID NO: 42870 - DNA, 25 bp, Homo sapien
actgtaaaagattttcgtacgatct

SEQ ID NO: 42871 - DNA, 25 bp, Homo sapien
ctccgtatcgggtgctgtctcatct

SEQ ID NO: 42872 - DNA, 25 bp, Homo sapien
ctccgtatcgggagctgtctcatct

SEQ ID NO: 42873 - DNA, 25 bp, Homo sapien
ccgttatgacatcagtgactacttt

SEQ ID NO: 42874 - DNA, 25 bp, Homo sapien
ccgttatgacatgagtgactacttt

SEQ ID NO: 42875 - DNA, 25 bp, Homo sapien
attttcggacatgatatcacgtagg

SEQ ID NO: 42876 - DNA, 25 bp, Homo sapien
attttcggacatcatatcacgtagg

SEQ ID NO: 42877 - DNA, 25 bp, Homo sapien
ttctccgttacaattcactcgagag

SEQ ID NO: 42878 - DNA, 25 bp, Homo sapien
ttctccgttacatttcactcgagag

SEQ ID NO: 42879 - DNA, 25 bp, Homo sapien
agtaccttaacacgtataccagtag

SEQ ID NO: 42880 - DNA, 25 bp, Homo sapien
agtaccttaacaggtataccagtag

SEQ ID NO: 42881 - DNA, 25 bp, Homo sapien
actgagcgttaaccaagactttaat

SEQ ID NO: 42882 - DNA, 25 bp, Homo sapien
actgagcgttaagcaagactttaat

SEQ ID NO: 42883 - DNA, 25 bp, Homo sapien
attagctgtaaagacctttagacgt

SEQ ID NO: 42884 - DNA, 25 bp, Homo sapien
attagctgtaaacacctttagacgt

SEQ ID NO: 42885 - DNA, 25 bp, Homo sapien
gtgaagctctaggacccccttgtct

SEQ ID NO: 42886 - DNA, 25 bp, Homo sapien
gtgaagctctagcacccccttgtct

SEQ ID NO: 42887 - DNA, 25 bp, Homo sapien
gaccgttgtgacacctcgaccggac

SEQ ID NO: 42888 - DNA, 25 bp, Homo sapien
gaccgttgtgactcctcgaccggac

SEQ ID NO: 42889 - DNA, 25 bp, Homo sapien
acgagtcttgacattcctgacggca

SEQ ID NO: 42890 - DNA, 25 bp, Homo sapien
acgagtcttgactttcctgacggca

SEQ ID NO: 42891 - DNA, 25 bp, Homo sapien
cggttacggactggtccggacccag

SEQ ID NO: 42892 - DNA, 25 bp, Homo sapien
cggttacggactcgtccggacccag

SEQ ID NO: 42893 - DNA, 25 bp, Homo sapien
cgagtttcggacacggccagaccag

SEQ ID NO: 42894 - DNA, 25 bp, Homo sapien
cgagtttcggactcggccagaccag

SEQ ID NO: 42895 - DNA, 25 bp, Homo sapien
taccgaagtcgttccgatgacactc

SEQ ID NO: 42896 - DNA, 25 bp, Homo sapien
taccgaagtcgtaccgatgacactc

SEQ ID NO: 42897 - DNA, 25 bp, Homo sapien
atcttggtcgtaagaacgacgactc

SEQ ID NO: 42898 - DNA, 25 bp, Homo sapien
atcttggtcgtatgaacgacgactc

SEQ ID NO: 42899 - DNA, 25 bp, Homo sapien
ctgatgttgttgaccggtaactatc

SEQ ID NO: 42900 - DNA, 25 bp, Homo sapien
ctgatgttgttgtccggtaactatc

SEQ ID NO: 42901 - DNA, 25 bp, Homo sapien
tacgatgtgcaccatgatgacaaac

SEQ ID NO: 42902 - DNA, 25 bp, Homo sapien
tacgatgtgcacgatgatgacaaac

SEQ ID NO: 42903 - DNA, 25 bp, Homo sapien
cgaaagacactctcgagttattatt

SEQ ID NO: 42904 - DNA, 25 bp, Homo sapien
cgaaagacactcacgagttattatt

SEQ ID NO: 42905 - DNA, 25 bp, Homo sapien
aacaacgctacagacgatttactct

SEQ ID NO: 42906 - DNA, 25 bp, Homo sapien
aacaacgctacacacgatttactct

SEQ ID NO: 42907 - DNA, 25 bp, Homo sapien
aaagacttatcgtgacactacctgg

SEQ ID NO: 42908 - DNA, 25 bp, Homo sapien
aaagacttatcgagacactacctgg

SEQ ID NO: 42909 - DNA, 25 bp, Homo sapien
aaagtagcatcgagtacccgtccgg

SEQ ID NO: 42910 - DNA, 25 bp, Homo sapien
aaagtagcatcgtgtacccgtccgg

SEQ ID NO: 42911 - DNA, 25 bp, Homo sapien
tagaggctgtcgtctccgccgtcga

SEQ ID NO: 42912 - DNA, 25 bp, Homo sapien
tagaggctgtcgactccgccgtcga

SEQ ID NO: 42913 - DNA, 25 bp, Homo sapien
caagtacacgtatgtgtgttcttca

SEQ ID NO: 42914 - DNA, 25 bp, Homo sapien
caagtacacgtaagtgtgttcttca

SEQ ID NO: 42915 - DNA, 25 bp, Homo sapien
catagtacactttgttgttcgtata

SEQ ID NO: 42916 - DNA, 25 bp, Homo sapien
catagtacacttagttgttcgtata

SEQ ID NO: 42917 - DNA, 25 bp, Homo sapien
ttatcgtccttaatactgctgtata

SEQ ID NO: 42918 - DNA, 25 bp, Homo sapien
ttatcgtccttattactgctgtata

SEQ ID NO: 42919 - DNA, 25 bp, Homo sapien
ctgtattcacttacaaggtacctta

SEQ ID NO: 42920 - DNA, 25 bp, Homo sapien
ctgtattcactttcaaggtacctta

SEQ ID NO: 42921 - DNA, 25 bp, Homo sapien
tgtctttcacgctccagacaaggat

SEQ ID NO: 42922 - DNA, 25 bp, Homo sapien
tgtctttcacgcaccagacaaggat

SEQ ID NO: 42923 - DNA, 25 bp, Homo sapien
cctgtactcacctccatcagtgtga

SEQ ID NO: 42924 - DNA, 25 bp, Homo sapien
cctgtactcaccaccatcagtgtga

SEQ ID NO: 42925 - DNA, 25 bp, Homo sapien
tcccttccaccactgagtcagggta

SEQ ID NO: 42926 - DNA, 25 bp, Homo sapien
tcccttccaccagtgagtcagggta

SEQ ID NO: 42927 - DNA, 25 bp, Homo sapien
gacccttctgcctccggacggaaga

SEQ ID NO: 42928 - DNA, 25 bp, Homo sapien
gacccttctgccaccggacggaaga

SEQ ID NO: 42929 - DNA, 25 bp, Homo sapien
tcctctttccacttacccggggaga

SEQ ID NO: 42930 - DNA, 25 bp, Homo sapien
tcctctttccacatacccggggaga

SEQ ID NO: 42931 - DNA, 25 bp, Homo sapien
catgtgttttcgtctttagcgtgaa

SEQ ID NO: 42932 - DNA, 25 bp, Homo sapien
catgtgttttcgactttagcgtgaa

SEQ ID NO: 42933 - DNA, 25 bp, Homo sapien
ctaattgattcgtccttaggggtag

SEQ ID NO: 42934 - DNA, 25 bp, Homo sapien
ctaattgattcgaccttaggggtag

SEQ ID NO: 42935 - DNA, 25 bp, Homo sapien
aaacacagacccactggtcctgtta

SEQ ID NO: 42936 - DNA, 25 bp, Homo sapien
aaacacagaccctctggtcctgtta

SEQ ID NO: 42937 - DNA, 25 bp, Homo sapien
tcaaagatttaaactttccgtggac

SEQ ID NO: 42938 - DNA, 25 bp, Homo sapien
tcaaagatttaatctttccgtggac

SEQ ID NO: 42939 - DNA, 25 bp, Homo sapien
atcgaaacctttacttgtttcagga

SEQ ID NO: 42940 - DNA, 25 bp, Homo sapien
atcgaaaccttttcttgtttcagga

SEQ ID NO: 42941 - DNA, 25 bp, Homo sapien
gctacgacggtctctggtcgaggtt

SEQ ID NO: 42942 - DNA, 25 bp, Homo sapien
gctacgacggtcactggtcgaggtt

SEQ ID NO: 42943 - DNA, 25 bp, Homo sapien
cgagactagactgtaaactgtactt

SEQ ID NO: 42944 - DNA, 25 bp, Homo sapien
cgagactagactctaaactgtactt

SEQ ID NO: 42945 - DNA, 25 bp, Homo sapien
tcgatagaatgtcagtaagactctt

SEQ ID NO: 42946 - DNA, 25 bp, Homo sapien
tcgatagaatgtgagtaagactctt

SEQ ID NO: 42947 - DNA, 25 bp, Homo sapien
ccaggcacaaacgagaggtctcgtc

SEQ ID NO: 42948 - DNA, 25 bp, Homo sapien
ccaggcacaaaccagaggtctcgtc

SEQ ID NO: 42949 - DNA, 25 bp, Homo sapien
ctactggacagcacggggtcacgtc

SEQ ID NO: 42950 - DNA, 25 bp, Homo sapien
ctactggacagctcggggtcacgtc

SEQ ID NO: 42951 - DNA, 25 bp, Homo sapien
actaccggaactatcgatggaccta

SEQ ID NO: 42952 - DNA, 25 bp, Homo sapien
actaccggaactttcgatggaccta

SEQ ID NO: 42953 - DNA, 25 bp, Homo sapien
ataatgtctattggagtcgttcgca

SEQ ID NO: 42954 - DNA, 25 bp, Homo sapien
ataatgtctattcgagtcgttcgca

SEQ ID NO: 42955 - DNA, 25 bp, Homo sapien
cctctaccttagtttcgggtctcca

SEQ ID NO: 42956 - DNA, 25 bp, Homo sapien
cctctaccttagattcgggtctcca

SEQ ID NO: 42957 - DNA, 25 bp, Homo sapien
tcgtaggagtactggggtcctgtct

SEQ ID NO: 42958 - DNA, 25 bp, Homo sapien
tcgtaggagtacaggggtcctgtct

SEQ ID NO: 42959 - DNA, 25 bp, Homo sapien
ttctactgtgtaaaggaccagactt

SEQ ID NO: 42960 - DNA, 25 bp, Homo sapien
ttctactgtgtataggaccagactt

SEQ ID NO: 42961 - DNA, 25 bp, Homo sapien
ctgtgccttttactgagactccatt

SEQ ID NO: 42962 - DNA, 25 bp, Homo sapien
ctgtgccttttagtgagactccatt

SEQ ID NO: 42963 - DNA, 25 bp, Homo sapien
attccgtttgggttttccgtacgtt

SEQ ID NO: 42964 - DNA, 25 bp, Homo sapien
attccgtttgggatttccgtacgtt

SEQ ID NO: 42965 - DNA, 25 bp, Homo sapien
ttccttctccggatcttatagagat

SEQ ID NO: 42966 - DNA, 25 bp, Homo sapien
ttccttctccggttcttatagagat

SEQ ID NO: 42967 - DNA, 25 bp, Homo sapien
cgtttcccactggacctgtatagaa

SEQ ID NO: 42968 - DNA, 25 bp, Homo sapien
cgtttcccactgcacctgtatagaa

SEQ ID NO: 42969 - DNA, 25 bp, Homo sapien
gtgtccccttctaccgtagaagtta

SEQ ID NO: 42970 - DNA, 25 bp, Homo sapien
gtgtccccttcttccgtagaagtta

SEQ ID NO: 42971 - DNA, 25 bp, Homo sapien
ttgtccctcttcttgctaattgtcg

SEQ ID NO: 42972 - DNA, 25 bp, Homo sapien
ttgtccctcttcatgctaattgtcg

SEQ ID NO: 42973 - DNA, 25 bp, Homo sapien
ccggaggctctacgacaataccgcg

SEQ ID NO: 42974 - DNA, 25 bp, Homo sapien
ccggaggctctaggacaataccgcg

SEQ ID NO: 42975 - DNA, 25 bp, Homo sapien
aactagaagtcctgagaacttccct

SEQ ID NO: 42976 - DNA, 25 bp, Homo sapien
aactagaagtccagagaacttccct

SEQ ID NO: 42977 - DNA, 25 bp, Homo sapien
gagagagaagtcgttgtcattcagc

SEQ ID NO: 42978 - DNA, 25 bp, Homo sapien
gagagagaagtccttgtcattcagc

SEQ ID NO: 42979 - DNA, 25 bp, Homo sapien
caaagagagggtctattcgattcca

SEQ ID NO: 42980 - DNA, 25 bp, Homo sapien
caaagagagggtgtattcgattcca

SEQ ID NO: 42981 - DNA, 25 bp, Homo sapien
ttttgacagaggagatccccagtcc

SEQ ID NO: 42982 - DNA, 25 bp, Homo sapien
ttttgacagaggtgatccccagtcc

SEQ ID NO: 42983 - DNA, 25 bp, Homo sapien
gaaatgtgtcggtttactctactcc

SEQ ID NO: 42984 - DNA, 25 bp, Homo sapien
gaaatgtgtcggattactctactcc

SEQ ID NO: 42985 - DNA, 25 bp, Homo sapien
cggtatccttggactccgtcaccct

SEQ ID NO: 42986 - DNA, 25 bp, Homo sapien
cggtatccttggtctccgtcaccct

SEQ ID NO: 42987 - DNA, 25 bp, Homo sapien
tcgtctccgggtttccttataacgt

SEQ ID NO: 42988 - DNA, 25 bp, Homo sapien
tcgtctccgggtatccttataacgt

SEQ ID NO: 42989 - DNA, 25 bp, Homo sapien
tccgcgacccggtcgttacgtttac

SEQ ID NO: 42990 - DNA, 25 bp, Homo sapien
tccgcgacccggacgttacgtttac

SEQ ID NO: 42991 - DNA, 25 bp, Homo sapien
ctagagtcggcacaccggggccatc

SEQ ID NO: 42992 - DNA, 25 bp, Homo sapien
ctagagtcggcagaccggggccatc

SEQ ID NO: 42993 - DNA, 25 bp, Homo sapien
gaaagacaggaacaggtgcccggac

SEQ ID NO: 42994 - DNA, 25 bp, Homo sapien
gaaagacaggaagaggtgcccggac

SEQ ID NO: 42995 - DNA, 25 bp, Homo sapien
tcagaggagtcaacaggaaaccaaa

SEQ ID NO: 42996 - DNA, 25 bp, Homo sapien
tcagaggagtcatcaggaaaccaaa

SEQ ID NO: 42997 - DNA, 25 bp, Homo sapien
acaaactccgtcaggaaaacaacag

SEQ ID NO: 42998 - DNA, 25 bp, Homo sapien
acaaactccgtctggaaaacaacag

SEQ ID NO: 42999 - DNA, 25 bp, Homo sapien
agtccttcctgtgatctcaatgtac

SEQ ID NO: 43000 - DNA, 25 bp, Homo sapien
agtccttcctgtcatctcaatgtac

SEQ ID NO: 43001 - DNA, 25 bp, Homo sapien
ttagtccttcatcaatgtcattctt

SEQ ID NO: 43002 - DNA, 25 bp, Homo sapien
ttagtccttcatgaatgtcattctt

SEQ ID NO: 43003 - DNA, 25 bp, Homo sapien
cgagcaactcggagtccagtcgaca

SEQ ID NO: 43004 - DNA, 25 bp, Homo sapien
cgagcaactcggtgtccagtcgaca

SEQ ID NO: 43005 - DNA, 25 bp, Homo sapien
gtggtggaactctggtgcaagacca

SEQ ID NO: 43006 - DNA, 25 bp, Homo sapien
gtggtggaactcaggtgcaagacca

SEQ ID NO: 43007 - DNA, 25 bp, Homo sapien
ggtcgaaagggtgactacccgtgac

SEQ ID NO: 43008 - DNA, 25 bp, Homo sapien
ggtcgaaagggtcactacccgtgac

SEQ ID NO: 43009 - DNA, 25 bp, Homo sapien
tcaaggaattcagtacatctctctg

SEQ ID NO: 43010 - DNA, 25 bp, Homo sapien
tcaaggaattcactacatctctctg

SEQ ID NO: 43011 - DNA, 25 bp, Homo sapien
ccgagtcggacgtccatttatccga

SEQ ID NO: 43012 - DNA, 25 bp, Homo sapien
ccgagtcggacgaccatttatccga

SEQ ID NO: 43013 - DNA, 25 bp, Homo sapien
gagaccctccgtctgtgtttggtag

SEQ ID NO: 43014 - DNA, 25 bp, Homo sapien
gagaccctccgtgtgtgtttggtag

SEQ ID NO: 43015 - DNA, 25 bp, Homo sapien
ccgtcccagttcgttgatcttgtac

SEQ ID NO: 43016 - DNA, 25 bp, Homo sapien
ccgtcccagttccttgatcttgtac

SEQ ID NO: 43017 - DNA, 25 bp, Homo sapien
ttgtcctggttcctggctctgtgtc

SEQ ID NO: 43018 - DNA, 25 bp, Homo sapien
ttgtcctggttcgtggctctgtgtc

SEQ ID NO: 43019 - DNA, 25 bp, Homo sapien
agtaaccacgtttgggttcgtagca

SEQ ID NO: 43020 - DNA, 25 bp, Homo sapien
agtaaccacgttagggttcgtagca

SEQ ID NO: 43021 - DNA, 25 bp, Homo sapien
taggtacaccggacccgaggtagga

SEQ ID NO: 43022 - DNA, 25 bp, Homo sapien
taggtacaccggtcccgaggtagga

SEQ ID NO: 43023 - DNA, 25 bp, Homo sapien
aaggtagaacggtccaaaggtcgtg

SEQ ID NO: 43024 - DNA, 25 bp, Homo sapien
aaggtagaacggaccaaaggtcgtg

SEQ ID NO: 43025 - DNA, 25 bp, Homo sapien
acacgtaaaagacaaccttcgtgtg

SEQ ID NO: 43026 - DNA, 25 bp, Homo sapien
acacgtaaaagagaaccttcgtgtg

SEQ ID NO: 43027 - DNA, 25 bp, Homo sapien
tctcaacccgggacactctcggtgg

SEQ ID NO: 43028 - DNA, 25 bp, Homo sapien
tctcaacccgggtcactctcggtgg

SEQ ID NO: 43029 - DNA, 25 bp, Homo sapien
tactgtgccgtcgtcgacgataacg

SEQ ID NO: 43030 - DNA, 25 bp, Homo sapien
tactgtgccgtcctcgacgataacg

SEQ ID NO: 43031 - DNA, 25 bp, Homo sapien
ttaaaggtgtctcaggacgaaacgc

SEQ ID NO: 43032 - DNA, 25 bp, Homo sapien
ttaaaggtgtctgaggacgaaacgc

SEQ ID NO: 43033 - DNA, 25 bp, Homo sapien
tcaagggttacagtcgtctcaacac

SEQ ID NO: 43034 - DNA, 25 bp, Homo sapien
tcaagggttacactcgtctcaacac

SEQ ID NO: 43035 - DNA, 25 bp, Homo sapien
gtctcattgcagtcgtgtccgaaag

SEQ ID NO: 43036 - DNA, 25 bp, Homo sapien
gtctcattgcagacgtgtccgaaag

SEQ ID NO: 43037 - DNA, 25 bp, Homo sapien
taccaaacgtacacgagccaaaatg

SEQ ID NO: 43038 - DNA, 25 bp, Homo sapien
taccaaacgtactcgagccaaaatg

SEQ ID NO: 43039 - DNA, 25 bp, Homo sapien
ttaccaaatacagtggtcacaaatg

SEQ ID NO: 43040 - DNA, 25 bp, Homo sapien
ttaccaaatacactggtcacaaatg

SEQ ID NO: 43041 - DNA, 25 bp, Homo sapien
aacgagattcagtctgtcaacaggg

SEQ ID NO: 43042 - DNA, 25 bp, Homo sapien
aacgagattcagactgtcaacaggg

SEQ ID NO: 43043 - DNA, 25 bp, Homo sapien
cgaaaagttgtgttaccatacggtg

SEQ ID NO: 43044 - DNA, 25 bp, Homo sapien
cgaaaagttgtgataccatacggtg

SEQ ID NO: 43045 - DNA, 25 bp, Homo sapien
acgaaataagttgtccttcgcgagt

SEQ ID NO: 43046 - DNA, 25 bp, Homo sapien
acgaaataagttctccttcgcgagt

SEQ ID NO: 43047 - DNA, 25 bp, Homo sapien
tctagaaaagtacctggctcaccat

SEQ ID NO: 43048 - DNA, 25 bp, Homo sapien
tctagaaaagtagctggctcaccat

SEQ ID NO: 43049 - DNA, 25 bp, Homo sapien
gacactaagagaggtcagttttcaa

SEQ ID NO: 43050 - DNA, 25 bp, Homo sapien
gacactaagagacgtcagttttcaa

SEQ ID NO: 43051 - DNA, 25 bp, Homo sapien
tactaacgagagtacattggacatt

SEQ ID NO: 43052 - DNA, 25 bp, Homo sapien
tactaacgagagaacattggacatt

SEQ ID NO: 43053 - DNA, 25 bp, Homo sapien
tatcagtccagaacgtcatgtttag

SEQ ID NO: 43054 - DNA, 25 bp, Homo sapien
tatcagtccagatcgtcatgtttag

SEQ ID NO: 43055 - DNA, 25 bp, Homo sapien
ttccaaacataaacgacactggaga

SEQ ID NO: 43056 - DNA, 25 bp, Homo sapien
ttccaaacataatcgacactggaga

SEQ ID NO: 43057 - DNA, 25 bp, Homo sapien
tgttttaatccgtttacaaggcaga

SEQ ID NO: 43058 - DNA, 25 bp, Homo sapien
tgttttaatccgattacaaggcaga

SEQ ID NO: 43059 - DNA, 25 bp, Homo sapien
tttgtctgtacgtactaaatacaat

SEQ ID NO: 43060 - DNA, 25 bp, Homo sapien
tttgtctgtacgaactaaatacaat

SEQ ID NO: 43061 - DNA, 25 bp, Homo sapien
ttcgagacgttcagtacctgcacgt

SEQ ID NO: 43062 - DNA, 25 bp, Homo sapien
ttcgagacgttctgtacctgcacgt

SEQ ID NO: 43063 - DNA, 25 bp, Homo sapien
acaggaagtcgagtccagttgggag

SEQ ID NO: 43064 - DNA, 25 bp, Homo sapien
acaggaagtcgactccagttgggag

SEQ ID NO: 43065 - DNA, 25 bp, Homo sapien
aacgagagacctgtcaaggagaccg

SEQ ID NO: 43066 - DNA, 25 bp, Homo sapien
aacgagagacctctcaaggagaccg

SEQ ID NO: 43067 - DNA, 25 bp, Homo sapien
actacggaacctacaatagggcgtc

SEQ ID NO: 43068 - DNA, 25 bp, Homo sapien
actacggaaccttcaatagggcgtc

SEQ ID NO: 43069 - DNA, 25 bp, Homo sapien
tcagttcgaccgtcatgacaacctc

SEQ ID NO: 43070 - DNA, 25 bp, Homo sapien
tcagttcgaccgacatgacaacctc

SEQ ID NO: 43071 - DNA, 25 bp, Homo sapien
agacgtcaccatagtgacacccgtc

SEQ ID NO: 43072 - DNA, 25 bp, Homo sapien
agacgtcaccattgtgacacccgtc

SEQ ID NO: 43073 - DNA, 25 bp, Homo sapien
cgagaccgttgtgtccggacctgga

SEQ ID NO: 43074 - DNA, 25 bp, Homo sapien
cgagaccgttgtctccggacctgga

SEQ ID NO: 43075 - DNA, 25 bp, Homo sapien
aaaccacgtttctctaggtcccgaa

SEQ ID NO: 43076 - DNA, 25 bp, Homo sapien
aaaccacgtttcactaggtcccgaa

SEQ ID NO: 43077 - DNA, 25 bp, Homo sapien
atttcggttcgtccttttccacaga

SEQ ID NO: 43078 - DNA, 25 bp, Homo sapien
atttcggttcgtgcttttccacaga

SEQ ID NO: 43079 - DNA, 25 bp, Homo sapien
aggtgtcgcttcattgccaagtgga

SEQ ID NO: 43080 - DNA, 25 bp, Homo sapien
aggtgtcgcttctttgccaagtgga

SEQ ID NO: 43081 - DNA, 25 bp, Homo sapien
tgcgtctgtcggtggtgctactgga

SEQ ID NO: 43082 - DNA, 25 bp, Homo sapien
tgcgtctgtcggaggtgctactgga

SEQ ID NO: 43083 - DNA, 25 bp, Homo sapien
tcgacgtctccgactgggtcgagga

SEQ ID NO: 43084 - DNA, 25 bp, Homo sapien
tcgacgtctccgtctgggtcgagga

SEQ ID NO: 43085 - DNA, 25 bp, Homo sapien
ctaagtcccgtatctgaagcatgac

SEQ ID NO: 43086 - DNA, 25 bp, Homo sapien
ctaagtcccgtaactgaagcatgac

SEQ ID NO: 43087 - DNA, 25 bp, Homo sapien
tcaagtgtgtcacaggtggacgtga

SEQ ID NO: 43088 - DNA, 25 bp, Homo sapien
tcaagtgtgtcagaggtggacgtga

SEQ ID NO: 43089 - DNA, 25 bp, Homo sapien
caagttgactattacggttgtgaac

SEQ ID NO: 43090 - DNA, 25 bp, Homo sapien
caagttgactataacggttgtgaac

SEQ ID NO: 43091 - DNA, 25 bp, Homo sapien
ccaagggtgacttcgggaaagtaga

SEQ ID NO: 43092 - DNA, 25 bp, Homo sapien
ccaagggtgactacgggaaagtaga

SEQ ID NO: 43093 - DNA, 25 bp, Homo sapien
cacactcccggtcgaggaaggtacc

SEQ ID NO: 43094 - DNA, 25 bp, Homo sapien
cacactcccggtggaggaaggtacc

SEQ ID NO: 43095 - DNA, 25 bp, Homo sapien
ccaatgggtggaaggtcagtgtacc

SEQ ID NO: 43096 - DNA, 25 bp, Homo sapien
ccaatgggtggatggtcagtgtacc

SEQ ID NO: 43097 - DNA, 25 bp, Homo sapien
ccgaggagtgtcataggaactctcc

SEQ ID NO: 43098 - DNA, 25 bp, Homo sapien
ccgaggagtgtcttaggaactctcc

SEQ ID NO: 43099 - DNA, 25 bp, Homo sapien
aatgtattagttcgtttatcgtcac

SEQ ID NO: 43100 - DNA, 25 bp, Homo sapien
aatgtattagttggtttatcgtcac

SEQ ID NO: 43101 - DNA, 25 bp, Homo sapien
actgcaagggcggtcaccgccgagt

SEQ ID NO: 43102 - DNA, 25 bp, Homo sapien
actgcaagggcgctcaccgccgagt

SEQ ID NO: 43103 - DNA, 25 bp, Homo sapien
atgaccgttacgaaggtgtcgcatt

SEQ ID NO: 43104 - DNA, 25 bp, Homo sapien
atgaccgttacgtaggtgtcgcatt

SEQ ID NO: 43105 - DNA, 25 bp, Homo sapien
tttacagagatttgagtcaggttcc

SEQ ID NO: 43106 - DNA, 25 bp, Homo sapien
tttacagagattagagtcaggttcc

SEQ ID NO: 43107 - DNA, 25 bp, Homo sapien
taaaggacgtttcctctatcgttcc

SEQ ID NO: 43108 - DNA, 25 bp, Homo sapien
taaaggacgtttgctctatcgttcc

SEQ ID NO: 43109 - DNA, 25 bp, Homo sapien
atttaatgttgtactctactgaacg

SEQ ID NO: 43110 - DNA, 25 bp, Homo sapien
atttaatgttgttctctactgaacg

SEQ ID NO: 43111 - DNA, 25 bp, Homo sapien
ggtctccgactagtgtcctctgcgc

SEQ ID NO: 43112 - DNA, 25 bp, Homo sapien
ggtctccgactactgtcctctgcgc

SEQ ID NO: 43113 - DNA, 25 bp, Homo sapien
tctagaaggccgatgtctttggacg

SEQ ID NO: 43114 - DNA, 25 bp, Homo sapien
tctagaaggccgttgtctttggacg

SEQ ID NO: 43115 - DNA, 25 bp, Homo sapien
tagtagaaggacttttaatgtcctc

SEQ ID NO: 43116 - DNA, 25 bp, Homo sapien
tagtagaaggacatttaatgtcctc

SEQ ID NO: 43117 - DNA, 25 bp, Homo sapien
aaacgaggatacttgtaaattactc

SEQ ID NO: 43118 - DNA, 25 bp, Homo sapien
aaacgaggatacatgtaaattactc

SEQ ID NO: 43119 - DNA, 25 bp, Homo sapien
aaatcgaagaaacgtgtacatttcg

SEQ ID NO: 43120 - DNA, 25 bp, Homo sapien
aaatcgaagaaaggtgtacatttcg

SEQ ID NO: 43121 - DNA, 25 bp, Homo sapien
gatgtaatacagtcacttccttagt

SEQ ID NO: 43122 - DNA, 25 bp, Homo sapien
gatgtaatacagacacttccttagt

SEQ ID NO: 43123 - DNA, 25 bp, Homo sapien
cgtttatatcaaacgtacttgtttg

SEQ ID NO: 43124 - DNA, 25 bp, Homo sapien
cgtttatatcaatcgtacttgtttg

SEQ ID NO: 43125 - DNA, 25 bp, Homo sapien
gatcttccgatatgtttatacgttt

SEQ ID NO: 43126 - DNA, 25 bp, Homo sapien
gatcttccgataagtttatacgttt

SEQ ID NO: 43127 - DNA, 25 bp, Homo sapien
gacgtcttcggttttctattctaat

SEQ ID NO: 43128 - DNA, 25 bp, Homo sapien
gacgtcttcggtattctattctaat

SEQ ID NO: 43129 - DNA, 25 bp, Homo sapien
gatctgagacgaaatcagacctcac

SEQ ID NO: 43130 - DNA, 25 bp, Homo sapien
gatctgagacgatatcagacctcac

SEQ ID NO: 43131 - DNA, 25 bp, Homo sapien
cttctggtggtgtctagagttccgt

SEQ ID NO: 43132 - DNA, 25 bp, Homo sapien
cttctggtggtgactagagttccgt

SEQ ID NO: 43133 - DNA, 25 bp, Homo sapien
aacccgggtgtgtaaagtctcctct

SEQ ID NO: 43134 - DNA, 25 bp, Homo sapien
aacccgggtgtgaaaagtctcctct

SEQ ID NO: 43135 - DNA, 25 bp, Homo sapien
cctagtagagttacaccgtccctct

SEQ ID NO: 43136 - DNA, 25 bp, Homo sapien
cctagtagagtttcaccgtccctct

SEQ ID NO: 43137 - DNA, 25 bp, Homo sapien
ctcacggtgcgtttagttttgagat

SEQ ID NO: 43138 - DNA, 25 bp, Homo sapien
ctcacggtgcgtatagttttgagat

SEQ ID NO: 43139 - DNA, 25 bp, Homo sapien
tatgtgtcgaaaagtatctttctac

SEQ ID NO: 43140 - DNA, 25 bp, Homo sapien
tatgtgtcgaaatgtatctttctac

SEQ ID NO: 43141 - DNA, 25 bp, Homo sapien
cttcggttagaaaaagttctttact

SEQ ID NO: 43142 - DNA, 25 bp, Homo sapien
cttcggttagaataagttctttact

SEQ ID NO: 43143 - DNA, 25 bp, Homo sapien
cctcagtgacgtaaaaaatccgttc

SEQ ID NO: 43144 - DNA, 25 bp, Homo sapien
cctcagtgacgttaaaaatccgttc

SEQ ID NO: 43145 - DNA, 25 bp, Homo sapien
taaacgtacaatgacgaaggtccac

SEQ ID NO: 43146 - DNA, 25 bp, Homo sapien
taaacgtacaatcacgaaggtccac

SEQ ID NO: 43147 - DNA, 25 bp, Homo sapien
cattagtttagtcgactgattaacg

SEQ ID NO: 43148 - DNA, 25 bp, Homo sapien
cattagtttagtggactgattaacg

SEQ ID NO: 43149 - DNA, 25 bp, Homo sapien
ccgtaagttcaacactcgagtctta

SEQ ID NO: 43150 - DNA, 25 bp, Homo sapien
ccgtaagttcaagactcgagtctta

SEQ ID NO: 43151 - DNA, 25 bp, Homo sapien
tcggtcgtattccaggggtgtccga

SEQ ID NO: 43152 - DNA, 25 bp, Homo sapien
tcggtcgtattcgaggggtgtccga

SEQ ID NO: 43153 - DNA, 25 bp, Homo sapien
gtctactcttgaggtcctcgtcacc

SEQ ID NO: 43154 - DNA, 25 bp, Homo sapien
gtctactcttgacgtcctcgtcacc

SEQ ID NO: 43155 - DNA, 25 bp, Homo sapien
ttctcgttttgtctctacttcttct

SEQ ID NO: 43156 - DNA, 25 bp, Homo sapien
ttctcgttttgtgtctacttcttct

SEQ ID NO: 43157 - DNA, 25 bp, Homo sapien
gagaacttcatttcgtgcttatatt

SEQ ID NO: 43158 - DNA, 25 bp, Homo sapien
gagaacttcattacgtgcttatatt

SEQ ID NO: 43159 - DNA, 25 bp, Homo sapien
gacacgagagtgtcttcgtcttttc

SEQ ID NO: 43160 - DNA, 25 bp, Homo sapien
gacacgagagtgacttcgtcttttc

SEQ ID NO: 43161 - DNA, 25 bp, Homo sapien
tgtacgtaaaggaatctttgtccgt

SEQ ID NO: 43162 - DNA, 25 bp, Homo sapien
tgtacgtaaaggtatctttgtccgt

SEQ ID NO: 43163 - DNA, 25 bp, Homo sapien
gatatatgtgtcttactatagttcc

SEQ ID NO: 43164 - DNA, 25 bp, Homo sapien
gatatatgtgtcatactatagttcc

SEQ ID NO: 43165 - DNA, 25 bp, Homo sapien
agacaacagtcgagacctgtctcac

SEQ ID NO: 43166 - DNA, 25 bp, Homo sapien
agacaacagtcgtgacctgtctcac

SEQ ID NO: 43167 - DNA, 25 bp, Homo sapien
aaccgaaagtcgtgacctccgtctc

SEQ ID NO: 43168 - DNA, 25 bp, Homo sapien
aaccgaaagtcgagacctccgtctc

SEQ ID NO: 43169 - DNA, 25 bp, Homo sapien
ccacgtcagagactacctacgtttt

SEQ ID NO: 43170 - DNA, 25 bp, Homo sapien
ccacgtcagagagtacctacgtttt

SEQ ID NO: 43171 - DNA, 25 bp, Homo sapien
aggactcaaaagtcttactatttcg

SEQ ID NO: 43172 - DNA, 25 bp, Homo sapien
aggactcaaaagacttactatttcg

SEQ ID NO: 43173 - DNA, 25 bp, Homo sapien
gtggacgaaatatacttcttgcgtg

SEQ ID NO: 43174 - DNA, 25 bp, Homo sapien
gtggacgaaataaacttcttgcgtg

SEQ ID NO: 43175 - DNA, 25 bp, Homo sapien
cgagtcttctcttccttccggtcgg

SEQ ID NO: 43176 - DNA, 25 bp, Homo sapien
cgagtcttctctaccttccggtcgg

SEQ ID NO: 43177 - DNA, 25 bp, Homo sapien
cgattactcctgatcaggtacagaa

SEQ ID NO: 43178 - DNA, 25 bp, Homo sapien
cgattactcctgttcaggtacagaa

SEQ ID NO: 43179 - DNA, 25 bp, Homo sapien
gttctcccgcacttaggtccggtag

SEQ ID NO: 43180 - DNA, 25 bp, Homo sapien
gttctcccgcacataggtccggtag

SEQ ID NO: 43181 - DNA, 25 bp, Homo sapien
gcctaccctcctagtagtgccgagt

SEQ ID NO: 43182 - DNA, 25 bp, Homo sapien
gcctaccctccttgtagtgccgagt

SEQ ID NO: 43183 - DNA, 25 bp, Homo sapien
accctttgtcgctgtgcgacccgag

SEQ ID NO: 43184 - DNA, 25 bp, Homo sapien
accctttgtcgcagtgcgacccgag

SEQ ID NO: 43185 - DNA, 25 bp, Homo sapien
ttaccatttgtggtaccttacccag

SEQ ID NO: 43186 - DNA, 25 bp, Homo sapien
ttaccatttgtgctaccttacccag

SEQ ID NO: 43187 - DNA, 25 bp, Homo sapien
tctgtccctttgaccgttcgacttc

SEQ ID NO: 43188 - DNA, 25 bp, Homo sapien
tctgtccctttgtccgttcgacttc

SEQ ID NO: 43189 - DNA, 25 bp, Homo sapien
tcttcggtttactgacaggaatttc

SEQ ID NO: 43190 - DNA, 25 bp, Homo sapien
tcttcggtttacagacaggaatttc

SEQ ID NO: 43191 - DNA, 25 bp, Homo sapien
tttggtcttccgaatctacttcttg

SEQ ID NO: 43192 - DNA, 25 bp, Homo sapien
tttggtcttccgtatctacttcttg

SEQ ID NO: 43193 - DNA, 25 bp, Homo sapien
gggacttcccggatctcctctgtcg

SEQ ID NO: 43194 - DNA, 25 bp, Homo sapien
gggacttcccggttctcctctgtcg

SEQ ID NO: 43195 - DNA, 25 bp, Homo sapien
ccgtgtccgcaagtctcccgtagag

SEQ ID NO: 43196 - DNA, 25 bp, Homo sapien
ccgtgtccgcaactctcccgtagag

SEQ ID NO: 43197 - DNA, 25 bp, Homo sapien
cttacttcggtcccctacctagagt

SEQ ID NO: 43198 - DNA, 25 bp, Homo sapien
cttacttcggtcgcctacctagagt

SEQ ID NO: 43199 - DNA, 25 bp, Homo sapien
acgactttgtaggtgtgtaacatct

SEQ ID NO: 43200 - DNA, 25 bp, Homo sapien
acgactttgtagctgtgtaacatct

SEQ ID NO: 43201 - DNA, 25 bp, Homo sapien
gaaatgttacgttcacttaccactg

SEQ ID NO: 43202 - DNA, 25 bp, Homo sapien
gaaatgttacgtacacttaccactg

SEQ ID NO: 43203 - DNA, 25 bp, Homo sapien
cagtacgtcgaatgacttaacgtca

SEQ ID NO: 43204 - DNA, 25 bp, Homo sapien
cagtacgtcgaaagacttaacgtca

SEQ ID NO: 43205 - DNA, 25 bp, Homo sapien
gtatgatcggagactctgacggagt

SEQ ID NO: 43206 - DNA, 25 bp, Homo sapien
gtatgatcggagtctctgacggagt

SEQ ID NO: 43207 - DNA, 25 bp, Homo sapien
ggtcctgtcgattccgacgatgagt

SEQ ID NO: 43208 - DNA, 25 bp, Homo sapien
ggtcctgtcgataccgacgatgagt

SEQ ID NO: 43209 - DNA, 25 bp, Homo sapien
tgtaccttcttgatcaactacgtag

SEQ ID NO: 43210 - DNA, 25 bp, Homo sapien
tgtaccttcttgttcaactacgtag

SEQ ID NO: 43211 - DNA, 25 bp, Homo sapien
tggttttaccctatattttcagtag

SEQ ID NO: 43212 - DNA, 25 bp, Homo sapien
tggttttaccctttattttcagtag

SEQ ID NO: 43213 - DNA, 25 bp, Homo sapien
acttagtactttatttactagcgag

SEQ ID NO: 43214 - DNA, 25 bp, Homo sapien
acttagtactttttttactagcgag

SEQ ID NO: 43215 - DNA, 25 bp, Homo sapien
ctagatacgaacttttacaatttgg

SEQ ID NO: 43216 - DNA, 25 bp, Homo sapien
ctagatacgaacatttacaatttgg

SEQ ID NO: 43217 - DNA, 25 bp, Homo sapien
tcgatcgtaaacaaagaactcttga

SEQ ID NO: 43218 - DNA, 25 bp, Homo sapien
tcgatcgtaaactaagaactcttga

SEQ ID NO: 43219 - DNA, 25 bp, Homo sapien
atgtaaagacgaagtaactccagag

SEQ ID NO: 43220 - DNA, 25 bp, Homo sapien
atgtaaagacgatgtaactccagag

SEQ ID NO: 43221 - DNA, 25 bp, Homo sapien
tgtgacatctacatgtcctccagag

SEQ ID NO: 43222 - DNA, 25 bp, Homo sapien
tgtgacatctacttgtcctccagag

SEQ ID NO: 43223 - DNA, 25 bp, Homo sapien
tgaagaactatttcctacctagagt

SEQ ID NO: 43224 - DNA, 25 bp, Homo sapien
tgaagaactattacctacctagagt

SEQ ID NO: 43225 - DNA, 25 bp, Homo sapien
cggtatgatcattctactttcttcg

SEQ ID NO: 43226 - DNA, 25 bp, Homo sapien
cggtatgatcatactactttcttcg

SEQ ID NO: 43227 - DNA, 25 bp, Homo sapien
cgtgtcgtgacctccgagtggtccc

SEQ ID NO: 43228 - DNA, 25 bp, Homo sapien
cgtgtcgtgaccaccgagtggtccc

SEQ ID NO: 43229 - DNA, 25 bp, Homo sapien
ggtgacctagacgtcgtgagtctgc

SEQ ID NO: 43230 - DNA, 25 bp, Homo sapien
ggtgacctagacctcgtgagtctgc

SEQ ID NO: 43231 - DNA, 25 bp, Homo sapien
gtttggacgaattctctgtattgtc

SEQ ID NO: 43232 - DNA, 25 bp, Homo sapien
gtttggacgaatactctgtattgtc

SEQ ID NO: 43233 - DNA, 25 bp, Homo sapien
tcacgttaagttaaagtcgtttctc

SEQ ID NO: 43234 - DNA, 25 bp, Homo sapien
tcacgttaagtttaagtcgtttctc

SEQ ID NO: 43235 - DNA, 25 bp, Homo sapien
cgagtctgtagtattagttttcact

SEQ ID NO: 43236 - DNA, 25 bp, Homo sapien
cgagtctgtagttttagttttcact

SEQ ID NO: 43237 - DNA, 25 bp, Homo sapien
gaggcggtactgttgtctgtgtaac

SEQ ID NO: 43238 - DNA, 25 bp, Homo sapien
gaggcggtactgatgtctgtgtaac

SEQ ID NO: 43239 - DNA, 25 bp, Homo sapien
aaggttgacgtccaggtacgggttt

SEQ ID NO: 43240 - DNA, 25 bp, Homo sapien
aaggttgacgtcgaggtacgggttt

SEQ ID NO: 43241 - DNA, 25 bp, Homo sapien
cacaaaagatcgaggacggtgtgat

SEQ ID NO: 43242 - DNA, 25 bp, Homo sapien
cacaaaagatcgtggacggtgtgat

SEQ ID NO: 43243 - DNA, 25 bp, Homo sapien
ccccaaaataggtcgggtttacagt

SEQ ID NO: 43244 - DNA, 25 bp, Homo sapien
ccccaaaataggacgggtttacagt

SEQ ID NO: 43245 - DNA, 25 bp, Homo sapien
cagaacgttcggtccgtggtcgaat

SEQ ID NO: 43246 - DNA, 25 bp, Homo sapien
cagaacgttcggaccgtggtcgaat

SEQ ID NO: 43247 - DNA, 25 bp, Homo sapien
caagagttagaaagtcatcacgaag

SEQ ID NO: 43248 - DNA, 25 bp, Homo sapien
caagagttagaatgtcatcacgaag

SEQ ID NO: 43249 - DNA, 25 bp, Homo sapien
gaaaggaacctacgacttaacgaga

SEQ ID NO: 43250 - DNA, 25 bp, Homo sapien
gaaaggaacctaggacttaacgaga

SEQ ID NO: 43251 - DNA, 25 bp, Homo sapien
gaagagtttcaactactctaagagg

SEQ ID NO: 43252 - DNA, 25 bp, Homo sapien
gaagagtttcaagtactctaagagg

SEQ ID NO: 43253 - DNA, 25 bp, Homo sapien
accgctcgtggagtcgttgagtccg

SEQ ID NO: 43254 - DNA, 25 bp, Homo sapien
accgctcgtggactcgttgagtccg

SEQ ID NO: 43255 - DNA, 25 bp, Homo sapien
ctgacctgaccgagcgaacgactcg

SEQ ID NO: 43256 - DNA, 25 bp, Homo sapien
ctgacctgaccgtgcgaacgactcg

SEQ ID NO: 43257 - DNA, 25 bp, Homo sapien
ttaaatctgtctatgtcccacgtgt

SEQ ID NO: 43258 - DNA, 25 bp, Homo sapien
ttaaatctgtctttgtcccacgtgt

SEQ ID NO: 43259 - DNA, 25 bp, Homo sapien
ataagagtttattacaccatccgag

SEQ ID NO: 43260 - DNA, 25 bp, Homo sapien
ataagagtttataacaccatccgag

SEQ ID NO: 43261 - DNA, 25 bp, Homo sapien
aaacagtgaggttctctaccgggac

SEQ ID NO: 43262 - DNA, 25 bp, Homo sapien
aaacagtgaggtactctaccgggac

SEQ ID NO: 43263 - DNA, 25 bp, Homo sapien
aacttgtcgaggacctaccggcacg

SEQ ID NO: 43264 - DNA, 25 bp, Homo sapien
aacttgtcgaggtcctaccggcacg

SEQ ID NO: 43265 - DNA, 25 bp, Homo sapien
acagggaccgggacctcgtccgtaa

SEQ ID NO: 43266 - DNA, 25 bp, Homo sapien
acagggaccgggtcctcgtccgtaa

SEQ ID NO: 43267 - DNA, 25 bp, Homo sapien
aagaggacccggtcagcgtccggct

SEQ ID NO: 43268 - DNA, 25 bp, Homo sapien
aagaggacccggacagcgtccggct

SEQ ID NO: 43269 - DNA, 25 bp, Homo sapien
tctctacctcctacgggtctgcgag

SEQ ID NO: 43270 - DNA, 25 bp, Homo sapien
tctctacctccttcgggtctgcgag

SEQ ID NO: 43271 - DNA, 25 bp, Homo sapien
ccgtcctgacacgtcgggagtgtcg

SEQ ID NO: 43272 - DNA, 25 bp, Homo sapien
ccgtcctgacacctcgggagtgtcg

SEQ ID NO: 43273 - DNA, 25 bp, Homo sapien
gtcgcccctggagtccgtccgtccg

SEQ ID NO: 43274 - DNA, 25 bp, Homo sapien
gtcgcccctggactccgtccgtccg

SEQ ID NO: 43275 - DNA, 25 bp, Homo sapien
tactcccgcggctacggtgagtacc

SEQ ID NO: 43276 - DNA, 25 bp, Homo sapien
tactcccgcggcaacggtgagtacc

SEQ ID NO: 43277 - DNA, 25 bp, Homo sapien
agacacccgcgacacaccgtggtaa

SEQ ID NO: 43278 - DNA, 25 bp, Homo sapien
agacacccgcgagacaccgtggtaa

SEQ ID NO: 43279 - DNA, 25 bp, Homo sapien
ggtcacgtcctctaccactgggaga

SEQ ID NO: 43280 - DNA, 25 bp, Homo sapien
ggtcacgtcctcaaccactgggaga

SEQ ID NO: 43281 - DNA, 25 bp, Homo sapien
gacccgttactaagacctcgggaga

SEQ ID NO: 43282 - DNA, 25 bp, Homo sapien
gacccgttactatgacctcgggaga

SEQ ID NO: 43283 - DNA, 25 bp, Homo sapien
tacttttacgttcacccgaggatac

SEQ ID NO: 43284 - DNA, 25 bp, Homo sapien
tacttttacgttgacccgaggatac

SEQ ID NO: 43285 - DNA, 25 bp, Homo sapien
gtcttctatgtactatccagcagtc

SEQ ID NO: 43286 - DNA, 25 bp, Homo sapien
gtcttctatgtagtatccagcagtc

SEQ ID NO: 43287 - DNA, 25 bp, Homo sapien
aataatgtagatggttcgaatcacc

SEQ ID NO: 43288 - DNA, 25 bp, Homo sapien
aataatgtagatcgttcgaatcacc

SEQ ID NO: 43289 - DNA, 25 bp, Homo sapien
aagagtatgtgtgctcaacagtacg

SEQ ID NO: 43290 - DNA, 25 bp, Homo sapien
aagagtatgtgtcctcaacagtacg

SEQ ID NO: 43291 - DNA, 25 bp, Homo sapien
cagacctcgtggtcggtgagacttt

SEQ ID NO: 43292 - DNA, 25 bp, Homo sapien
cagacctcgtggacggtgagacttt

SEQ ID NO: 43293 - DNA, 25 bp, Homo sapien
ttataattcgaaagtgccgaacctt

SEQ ID NO: 43294 - DNA, 25 bp, Homo sapien
ttataattcgaatgtgccgaacctt

SEQ ID NO: 43295 - DNA, 25 bp, Homo sapien
gagcgtactggaacttcacaacttg

SEQ ID NO: 43296 - DNA, 25 bp, Homo sapien
gagcgtactggatcttcacaacttg

SEQ ID NO: 43297 - DNA, 25 bp, Homo sapien
gagacgtcggggatacccatcgacc

SEQ ID NO: 43298 - DNA, 25 bp, Homo sapien
gagacgtcggggttacccatcgacc

SEQ ID NO: 43299 - DNA, 25 bp, Homo sapien
cggtaggttatgtctaactttcttt

SEQ ID NO: 43300 - DNA, 25 bp, Homo sapien
cggtaggttatgactaactttcttt

SEQ ID NO: 43301 - DNA, 25 bp, Homo sapien
ccagtggacttcgaactcctttttt

SEQ ID NO: 43302 - DNA, 25 bp, Homo sapien
ccagtggacttccaactcctttttt

SEQ ID NO: 43303 - DNA, 25 bp, Homo sapien
gcgagacagtacaaactcttatttc

SEQ ID NO: 43304 - DNA, 25 bp, Homo sapien
gcgagacagtactaactcttatttc

SEQ ID NO: 43305 - DNA, 25 bp, Homo sapien
gagacagaagtcgacttattatact

SEQ ID NO: 43306 - DNA, 25 bp, Homo sapien
gagacagaagtccacttattatact

SEQ ID NO: 43307 - DNA, 25 bp, Homo sapien
ttaagtgccaatgatcgtaattgac

SEQ ID NO: 43308 - DNA, 25 bp, Homo sapien
ttaagtgccaatcatcgtaattgac

SEQ ID NO: 43309 - DNA, 25 bp, Homo sapien
cgaatgcacacttttatgactatga

SEQ ID NO: 43310 - DNA, 25 bp, Homo sapien
cgaatgcacactattatgactatga

SEQ ID NO: 43311 - DNA, 25 bp, Homo sapien
atcaagtgtccaccatttgaaccga

SEQ ID NO: 43312 - DNA, 25 bp, Homo sapien
atcaagtgtccagcatttgaaccga

SEQ ID NO: 43313 - DNA, 25 bp, Homo sapien
aaaagtgacaacacttgtgaacgaa

SEQ ID NO: 43314 - DNA, 25 bp, Homo sapien
aaaagtgacaactcttgtgaacgaa

SEQ ID NO: 43315 - DNA, 25 bp, Homo sapien
cacagtcgagcgttcacgaaggcgt

SEQ ID NO: 43316 - DNA, 25 bp, Homo sapien
cacagtcgagcgatcacgaaggcgt

SEQ ID NO: 43317 - DNA, 25 bp, Homo sapien
gaggaagctctcgtcacagacgcgg

SEQ ID NO: 43318 - DNA, 25 bp, Homo sapien
gaggaagctctcctcacagacgcgg

SEQ ID NO: 43319 - DNA, 25 bp, Homo sapien
caaaaactcacttcgtaaggtgtgt

SEQ ID NO: 43320 - DNA, 25 bp, Homo sapien
caaaaactcactacgtaaggtgtgt

SEQ ID NO: 43321 - DNA, 25 bp, Homo sapien
aaaagttaccgtaactgtatccgtc

SEQ ID NO: 43322 - DNA, 25 bp, Homo sapien
aaaagttaccgttactgtatccgtc

SEQ ID NO: 43323 - DNA, 25 bp, Homo sapien
gtaaaagtagtgtagtacagttccc

SEQ ID NO: 43324 - DNA, 25 bp, Homo sapien
gtaaaagtagtgaagtacagttccc

SEQ ID NO: 43325 - DNA, 25 bp, Homo sapien
atgtccagtggtcaagcgttggacc

SEQ ID NO: 43326 - DNA, 25 bp, Homo sapien
atgtccagtggtgaagcgttggacc

SEQ ID NO: 43327 - DNA, 25 bp, Homo sapien
atcccctgaacgagtgtcatcaacg

SEQ ID NO: 43328 - DNA, 25 bp, Homo sapien
atcccctgaacgtgtgtcatcaacg

SEQ ID NO: 43329 - DNA, 25 bp, Homo sapien
atccaccgagaaccaggatccaagt

SEQ ID NO: 43330 - DNA, 25 bp, Homo sapien
atccaccgagaagcaggatccaagt

SEQ ID NO: 43331 - DNA, 25 bp, Homo sapien
gggacgataacgtggatcacagtag

SEQ ID NO: 43332 - DNA, 25 bp, Homo sapien
gggacgataacgaggatcacagtag

SEQ ID NO: 43333 - DNA, 25 bp, Homo sapien
aggtgtcgaaagagtaccacaagag

SEQ ID NO: 43334 - DNA, 25 bp, Homo sapien
aggtgtcgaaagtgtaccacaagag

SEQ ID NO: 43335 - DNA, 25 bp, Homo sapien
tgcgtgactaacgatgaaactataa

SEQ ID NO: 43336 - DNA, 25 bp, Homo sapien
tgcgtgactaaccatgaaactataa

SEQ ID NO: 43337 - DNA, 25 bp, Homo sapien
ttttatctaccattacacaacaaga

SEQ ID NO: 43338 - DNA, 25 bp, Homo sapien
ttttatctaccaatacacaacaaga

SEQ ID NO: 43339 - DNA, 25 bp, Homo sapien
actagagttaccacaggacataaga

SEQ ID NO: 43340 - DNA, 25 bp, Homo sapien
actagagttacctcaggacataaga

SEQ ID NO: 43341 - DNA, 25 bp, Homo sapien
cacgaagttcccatcagtgaacaac

SEQ ID NO: 43342 - DNA, 25 bp, Homo sapien
cacgaagttcccttcagtgaacaac

SEQ ID NO: 43343 - DNA, 25 bp, Homo sapien
tgggaccaggatctccgggagccct

SEQ ID NO: 43344 - DNA, 25 bp, Homo sapien
tgggaccaggatgtccgggagccct

SEQ ID NO: 43345 - DNA, 25 bp, Homo sapien
gacgtaagggaacttgcggtcgcta

SEQ ID NO: 43346 - DNA, 25 bp, Homo sapien
gacgtaagggaagttgcggtcgcta

SEQ ID NO: 43347 - DNA, 25 bp, Homo sapien
cgaggagctacagcaggaggcacta

SEQ ID NO: 43348 - DNA, 25 bp, Homo sapien
cgaggagctacaccaggaggcacta

SEQ ID NO: 43349 - DNA, 25 bp, Homo sapien
ccactacccgatgtcacgacgtagt

SEQ ID NO: 43350 - DNA, 25 bp, Homo sapien
ccactacccgatctcacgacgtagt

SEQ ID NO: 43351 - DNA, 25 bp, Homo sapien
catatattacgttatgtgacacggt

SEQ ID NO: 43352 - DNA, 25 bp, Homo sapien
catatattacgtaatgtgacacggt

SEQ ID NO: 43353 - DNA, 25 bp, Homo sapien
gactcagtattcctttgtgtactcc

SEQ ID NO: 43354 - DNA, 25 bp, Homo sapien
gactcagtattcgtttgtgtactcc

SEQ ID NO: 43355 - DNA, 25 bp, Homo sapien
aagactggttatgtgtgtctttctc

SEQ ID NO: 43356 - DNA, 25 bp, Homo sapien
aagactggttatctgtgtctttctc

SEQ ID NO: 43357 - DNA, 25 bp, Homo sapien
gggagtttggttctcgtggtccccc

SEQ ID NO: 43358 - DNA, 25 bp, Homo sapien
gggagtttggttgtcgtggtccccc

SEQ ID NO: 43359 - DNA, 25 bp, Homo sapien
aagacaggggttgtcggtacccctc

SEQ ID NO: 43360 - DNA, 25 bp, Homo sapien
aagacaggggttctcggtacccctc

SEQ ID NO: 43361 - DNA, 25 bp, Homo sapien
gacgtcggtccgttttcgccctttc

SEQ ID NO: 43362 - DNA, 25 bp, Homo sapien
gacgtcggtccgatttcgccctttc

SEQ ID NO: 43363 - DNA, 25 bp, Homo sapien
ggacgtgtccctgtctcgaccaaag

SEQ ID NO: 43364 - DNA, 25 bp, Homo sapien
ggacgtgtccctctctcgaccaaag

SEQ ID NO: 43365 - DNA, 25 bp, Homo sapien
acgtgtcccacttcacgtccgtggg

SEQ ID NO: 43366 - DNA, 25 bp, Homo sapien
acgtgtcccactacacgtccgtggg

SEQ ID NO: 43367 - DNA, 25 bp, Homo sapien
gtggtgacgactacctcggtggtct

SEQ ID NO: 43368 - DNA, 25 bp, Homo sapien
gtggtgacgacttcctcggtggtct

SEQ ID NO: 43369 - DNA, 25 bp, Homo sapien
gtcgtccaagaggtcccgccggtac

SEQ ID NO: 43370 - DNA, 25 bp, Homo sapien
gtcgtccaagagctcccgccggtac

SEQ ID NO: 43371 - DNA, 25 bp, Homo sapien
ggcgtctgaaatttaccttactcac

SEQ ID NO: 43372 - DNA, 25 bp, Homo sapien
ggcgtctgaaatataccttactcac

SEQ ID NO: 43373 - DNA, 25 bp, Homo sapien
gattgaagaaattgtctttacacac

SEQ ID NO: 43374 - DNA, 25 bp, Homo sapien
gattgaagaaatagtctttacacac

SEQ ID NO: 43375 - DNA, 25 bp, Homo sapien
aaacacgccgaataagtttgtcacc

SEQ ID NO: 43376 - DNA, 25 bp, Homo sapien
aaacacgccgaaaaagtttgtcacc

SEQ ID NO: 43377 - DNA, 25 bp, Homo sapien
ccaacgacccaagaattgtgttacc

SEQ ID NO: 43378 - DNA, 25 bp, Homo sapien
ccaacgacccaacaattgtgttacc

SEQ ID NO: 43379 - DNA, 25 bp, Homo sapien
cgggctacacaatgtttcgttctct

SEQ ID NO: 43380 - DNA, 25 bp, Homo sapien
cgggctacacaaagtttcgttctct

SEQ ID NO: 43381 - DNA, 25 bp, Homo sapien
cccaggttctgatcgggtcctttgt

SEQ ID NO: 43382 - DNA, 25 bp, Homo sapien
cccaggttctgaacgggtcctttgt

SEQ ID NO: 43383 - DNA, 25 bp, Homo sapien
caccgacgttggacggcggccgttc

SEQ ID NO: 43384 - DNA, 25 bp, Homo sapien
caccgacgttggtcggcggccgttc

SEQ ID NO: 43385 - DNA, 25 bp, Homo sapien
cccgccgaggtgtgtccggaccttg

SEQ ID NO: 43386 - DNA, 25 bp, Homo sapien
cccgccgaggtgagtccggaccttg

SEQ ID NO: 43387 - DNA, 25 bp, Homo sapien
tcccacttagggaacgagattccgt

SEQ ID NO: 43388 - DNA, 25 bp, Homo sapien
tcccacttagggtacgagattccgt

SEQ ID NO: 43389 - DNA, 25 bp, Homo sapien
tgcaatgtgtactattgatctctcg

SEQ ID NO: 43390 - DNA, 25 bp, Homo sapien
tgcaatgtgtacaattgatctctcg

SEQ ID NO: 43391 - DNA, 25 bp, Homo sapien
ttttcatgttgactcgtgacacccg

SEQ ID NO: 43392 - DNA, 25 bp, Homo sapien
ttttcatgttgagtcgtgacacccg

SEQ ID NO: 43393 - DNA, 25 bp, Homo sapien
gttttctacggttttggacacaacc

SEQ ID NO: 43394 - DNA, 25 bp, Homo sapien
gttttctacggtattggacacaacc

SEQ ID NO: 43395 - DNA, 25 bp, Homo sapien
tcgggtcgtgtgtccgggacactcc

SEQ ID NO: 43396 - DNA, 25 bp, Homo sapien
tcgggtcgtgtgaccgggacactcc

SEQ ID NO: 43397 - DNA, 25 bp, Homo sapien
gtgcctcgtgaagacggacacaccc

SEQ ID NO: 43398 - DNA, 25 bp, Homo sapien
gtgcctcgtgaacacggacacaccc

SEQ ID NO: 43399 - DNA, 25 bp, Homo sapien
gttttacggattcgtctcgacctcc

SEQ ID NO: 43400 - DNA, 25 bp, Homo sapien
gttttacggattggtctcgacctcc

SEQ ID NO: 43401 - DNA, 25 bp, Homo sapien
gttttacgtgacctggggctcttcg

SEQ ID NO: 43402 - DNA, 25 bp, Homo sapien
gttttacgtgacgtggggctcttcg

SEQ ID NO: 43403 - DNA, 25 bp, Homo sapien
tcattgtaccggttacgtggctttc

SEQ ID NO: 43404 - DNA, 25 bp, Homo sapien
tcattgtaccggatacgtggctttc

SEQ ID NO: 43405 - DNA, 25 bp, Homo sapien
ctcttatttggtcctcggactttcg

SEQ ID NO: 43406 - DNA, 25 bp, Homo sapien
ctcttatttggtgctcggactttcg

SEQ ID NO: 43407 - DNA, 25 bp, Homo sapien
ggtcttattgtgattcgacatttct

SEQ ID NO: 43408 - DNA, 25 bp, Homo sapien
ggtcttattgtgtttcgacatttct

SEQ ID NO: 43409 - DNA, 25 bp, Homo sapien
cggatctttcgaaacttatctgttt

SEQ ID NO: 43410 - DNA, 25 bp, Homo sapien
cggatctttcgatacttatctgttt

SEQ ID NO: 43411 - DNA, 25 bp, Homo sapien
cttaaatctcatattaacgtgtatc

SEQ ID NO: 43412 - DNA, 25 bp, Homo sapien
cttaaatctcattttaacgtgtatc

SEQ ID NO: 43413 - DNA, 25 bp, Homo sapien
tcctcgtcggctccagtcgtcgttt

SEQ ID NO: 43414 - DNA, 25 bp, Homo sapien
tcctcgtcggctgcagtcgtcgttt

SEQ ID NO: 43415 - DNA, 25 bp, Homo sapien
tacacctgtttcatcgactcgtcgt

SEQ ID NO: 43416 - DNA, 25 bp, Homo sapien
tacacctgtttcttcgactcgtcgt

SEQ ID NO: 43417 - DNA, 25 bp, Homo sapien
accgtcgtggtcagttaccgtagcg

SEQ ID NO: 43418 - DNA, 25 bp, Homo sapien
accgtcgtggtctgttaccgtagcg

SEQ ID NO: 43419 - DNA, 25 bp, Homo sapien
gaccgtctcgcgtctcgagcgtaga

SEQ ID NO: 43420 - DNA, 25 bp, Homo sapien
gaccgtctcgcgactcgagcgtaga

SEQ ID NO: 43421 - DNA, 25 bp, Homo sapien
gcccgcggaccctgggagagaccaa

SEQ ID NO: 43422 - DNA, 25 bp, Homo sapien
gcccgcggacccagggagagaccaa

SEQ ID NO: 43423 - DNA, 25 bp, Homo sapien
cacgggatttaggacgttcgcgccc

SEQ ID NO: 43424 - DNA, 25 bp, Homo sapien
cacgggatttagcacgttcgcgccc

SEQ ID NO: 43425 - DNA, 25 bp, Homo sapien
gggggttacgtcacgtcagtcgccc

SEQ ID NO: 43426 - DNA, 25 bp, Homo sapien
gggggttacgtctcgtcagtcgccc

SEQ ID NO: 43427 - DNA, 25 bp, Homo sapien
gatggttccgttggtcaccgactca

SEQ ID NO: 43428 - DNA, 25 bp, Homo sapien
gatggttccgttcgtcaccgactca

SEQ ID NO: 43429 - DNA, 25 bp, Homo sapien
cgtcgaccccgtgtcctggtctatg

SEQ ID NO: 43430 - DNA, 25 bp, Homo sapien
cgtcgaccccgtctcctggtctatg

SEQ ID NO: 43431 - DNA, 25 bp, Homo sapien
tcgaaggcccgtagtccccggacgg

SEQ ID NO: 43432 - DNA, 25 bp, Homo sapien
tcgaaggcccgttgtccccggacgg

SEQ ID NO: 43433 - DNA, 25 bp, Homo sapien
tatacacctctttgatctccgggaa

SEQ ID NO: 43434 - DNA, 25 bp, Homo sapien
tatacacctcttagatctccgggaa

SEQ ID NO: 43435 - DNA, 25 bp, Homo sapien
tttcttctacagaggccctgcggta

SEQ ID NO: 43436 - DNA, 25 bp, Homo sapien
tttcttctacagtggccctgcggta

SEQ ID NO: 43437 - DNA, 25 bp, Homo sapien
gtccacgtcgggaccctcgtcggtg

SEQ ID NO: 43438 - DNA, 25 bp, Homo sapien
gtccacgtcgggtccctcgtcggtg

SEQ ID NO: 43439 - DNA, 25 bp, Homo sapien
ctgggaccgggtcctctcgagccga

SEQ ID NO: 43440 - DNA, 25 bp, Homo sapien
ctgggaccgggtgctctcgagccga

SEQ ID NO: 43441 - DNA, 25 bp, Homo sapien
ccgacgacaagaggtcccgtgccgc

SEQ ID NO: 43442 - DNA, 25 bp, Homo sapien
ccgacgacaagacgtcccgtgccgc

SEQ ID NO: 43443 - DNA, 25 bp, Homo sapien
tagaccgaagaaggactcgtccctt

SEQ ID NO: 43444 - DNA, 25 bp, Homo sapien
tagaccgaagaacgactcgtccctt

SEQ ID NO: 43445 - DNA, 25 bp, Homo sapien
tgctggtgaaacagggactccatct

SEQ ID NO: 43446 - DNA, 25 bp, Homo sapien
tgctggtgaaactgggactccatct

SEQ ID NO: 43447 - DNA, 25 bp, Homo sapien
ctgcctttcggagtccacttctctt

SEQ ID NO: 43448 - DNA, 25 bp, Homo sapien
ctgcctttcggactccacttctctt

SEQ ID NO: 43449 - DNA, 25 bp, Homo sapien
gttctgttaagttctaccgtcttac

SEQ ID NO: 43450 - DNA, 25 bp, Homo sapien
gttctgttaagtactaccgtcttac

SEQ ID NO: 43451 - DNA, 25 bp, Homo sapien
atcacgaatgaaatctgattcgtta

SEQ ID NO: 43452 - DNA, 25 bp, Homo sapien
atcacgaatgaattctgattcgtta

SEQ ID NO: 43453 - DNA, 25 bp, Homo sapien
ttgataggtgcctggatacacttac

SEQ ID NO: 43454 - DNA, 25 bp, Homo sapien
ttgataggtgccaggatacacttac

SEQ ID NO: 43455 - DNA, 25 bp, Homo sapien
ttgtttctcgcttggtttcgctacg

SEQ ID NO: 43456 - DNA, 25 bp, Homo sapien
ttgtttctcgctaggtttcgctacg

SEQ ID NO: 43457 - DNA, 25 bp, Homo sapien
cctttagaccgacgaagacttgttc

SEQ ID NO: 43458 - DNA, 25 bp, Homo sapien
cctttagaccgaggaagacttgttc

SEQ ID NO: 43459 - DNA, 25 bp, Homo sapien
atttaatacaagtcgagactcgacc

SEQ ID NO: 43460 - DNA, 25 bp, Homo sapien
atttaatacaagacgagactcgacc

SEQ ID NO: 43461 - DNA, 25 bp, Homo sapien
gtcaccatagactcgacatacgtct

SEQ ID NO: 43462 - DNA, 25 bp, Homo sapien
gtcaccatagacacgacatacgtct

SEQ ID NO: 43463 - DNA, 25 bp, Homo sapien
cactaagacgtctgtacaactgtac

SEQ ID NO: 43464 - DNA, 25 bp, Homo sapien
cactaagacgtcagtacaactgtac

SEQ ID NO: 43465 - DNA, 25 bp, Homo sapien
atgtatgtcactaagacgtctgtac

SEQ ID NO: 43466 - DNA, 25 bp, Homo sapien
atgtatgtcacttagacgtctgtac

SEQ ID NO: 43467 - DNA, 25 bp, Homo sapien
ggttggaggatctcttcgtgttgac

SEQ ID NO: 43468 - DNA, 25 bp, Homo sapien
ggttggaggatcacttcgtgttgac

SEQ ID NO: 43469 - DNA, 25 bp, Homo sapien
gaggtacttgggacccttggttgtc

SEQ ID NO: 43470 - DNA, 25 bp, Homo sapien
gaggtacttgggtcccttggttgtc

SEQ ID NO: 43471 - DNA, 25 bp, Homo sapien
gctaaggtcaccatggtcgtagtgt

SEQ ID NO: 43472 - DNA, 25 bp, Homo sapien
gctaaggtcaccttggtcgtagtgt

SEQ ID NO: 43473 - DNA, 25 bp, Homo sapien
gtaggacgaggttccccggactcga

SEQ ID NO: 43474 - DNA, 25 bp, Homo sapien
gtaggacgaggtaccccggactcga

SEQ ID NO: 43475 - DNA, 25 bp, Homo sapien
cttcttatggggagattctatctcc

SEQ ID NO: 43476 - DNA, 25 bp, Homo sapien
cttcttatggggtgattctatctcc

SEQ ID NO: 43477 - DNA, 25 bp, Homo sapien
gacattagggtagtgcttcttcccg

SEQ ID NO: 43478 - DNA, 25 bp, Homo sapien
gacattagggtactgcttcttcccg

SEQ ID NO: 43479 - DNA, 25 bp, Homo sapien
gagtccttgtctcttttattccacg

SEQ ID NO: 43480 - DNA, 25 bp, Homo sapien
gagtccttgtctgttttattccacg

SEQ ID NO: 43481 - DNA, 25 bp, Homo sapien
gaattttaggttgtcggtttactcc

SEQ ID NO: 43482 - DNA, 25 bp, Homo sapien
gaattttaggttctcggtttactcc

SEQ ID NO: 43483 - DNA, 25 bp, Homo sapien
ggaatttggagtatttcgttacctc

SEQ ID NO: 43484 - DNA, 25 bp, Homo sapien
ggaatttggagtttttcgttacctc

SEQ ID NO: 43485 - DNA, 25 bp, Homo sapien
tttctctgaagctctgttctactgc

SEQ ID NO: 43486 - DNA, 25 bp, Homo sapien
tttctctgaagcactgttctactgc

SEQ ID NO: 43487 - DNA, 25 bp, Homo sapien
cgtcggatgaacttgtaacgtatgt

SEQ ID NO: 43488 - DNA, 25 bp, Homo sapien
cgtcggatgaacatgtaacgtatgt

SEQ ID NO: 43489 - DNA, 25 bp, Homo sapien
aagacctccctcctaagagagaaat

SEQ ID NO: 43490 - DNA, 25 bp, Homo sapien
aagacctccctcgtaagagagaaat

SEQ ID NO: 43491 - DNA, 25 bp, Homo sapien
atacgtttctactccaaaggaagag

SEQ ID NO: 43492 - DNA, 25 bp, Homo sapien
atacgtttctacaccaaaggaagag

SEQ ID NO: 43493 - DNA, 25 bp, Homo sapien
cataccttccttctccacggaagag

SEQ ID NO: 43494 - DNA, 25 bp, Homo sapien
cataccttccttgtccacggaagag

SEQ ID NO: 43495 - DNA, 25 bp, Homo sapien
gacgtcttatattcatcggggttta

SEQ ID NO: 43496 - DNA, 25 bp, Homo sapien
gacgtcttatatacatcggggttta

SEQ ID NO: 43497 - DNA, 25 bp, Homo sapien
tatgttaaagatacgttcgacgaac

SEQ ID NO: 43498 - DNA, 25 bp, Homo sapien
tatgttaaagattcgttcgacgaac

SEQ ID NO: 43499 - DNA, 25 bp, Homo sapien
tacggttgggagttctggtacacct

SEQ ID NO: 43500 - DNA, 25 bp, Homo sapien
tacggttgggagatctggtacacct

SEQ ID NO: 43501 - DNA, 25 bp, Homo sapien
tgtgttatgtcaactctgatacctt

SEQ ID NO: 43502 - DNA, 25 bp, Homo sapien
tgtgttatgtcatctctgatacctt

SEQ ID NO: 43503 - DNA, 25 bp, Homo sapien
ttgttggtacatctgtacgacgtgg

SEQ ID NO: 43504 - DNA, 25 bp, Homo sapien
ttgttggtacatgtgtacgacgtgg

SEQ ID NO: 43505 - DNA, 25 bp, Homo sapien
ttctccttacctactctcgtctgtg

SEQ ID NO: 43506 - DNA, 25 bp, Homo sapien
ttctccttaccttctctcgtctgtg

SEQ ID NO: 43507 - DNA, 25 bp, Homo sapien
gacctacgtccacttgtctacgtag

SEQ ID NO: 43508 - DNA, 25 bp, Homo sapien
gacctacgtccagttgtctacgtag

SEQ ID NO: 43509 - DNA, 25 bp, Homo sapien
ataacgaggtaacaagactcctaat

SEQ ID NO: 43510 - DNA, 25 bp, Homo sapien
ataacgaggtaagaagactcctaat

SEQ ID NO: 43511 - DNA, 25 bp, Homo sapien
tgcggtaaacggaactctctacgat

SEQ ID NO: 43512 - DNA, 25 bp, Homo sapien
tgcggtaaacggtactctctacgat

SEQ ID NO: 43513 - DNA, 25 bp, Homo sapien
agtgaagctctaggacccccttgtc

SEQ ID NO: 43514 - DNA, 25 bp, Homo sapien
agtgaagctctacgacccccttgtc

SEQ ID NO: 43515 - DNA, 25 bp, Homo sapien
tgcacgggtgacacttctactcggc

SEQ ID NO: 43516 - DNA, 25 bp, Homo sapien
tgcacgggtgactcttctactcggc

SEQ ID NO: 43517 - DNA, 25 bp, Homo sapien
gagtacttgtaaatcctgacggtaa

SEQ ID NO: 43518 - DNA, 25 bp, Homo sapien
gagtacttgtaattcctgacggtaa

SEQ ID NO: 43519 - DNA, 25 bp, Homo sapien
gagtgtctggtttcgcccgaccgca

SEQ ID NO: 43520 - DNA, 25 bp, Homo sapien
gagtgtctggttacgcccgaccgca

SEQ ID NO: 43521 - DNA, 25 bp, Homo sapien
tcgagtttcggacacggccagacca

SEQ ID NO: 43522 - DNA, 25 bp, Homo sapien
tcgagtttcggagacggccagacca

SEQ ID NO: 43523 - DNA, 25 bp, Homo sapien
gggtcaggaggatccgaagacactt

SEQ ID NO: 43524 - DNA, 25 bp, Homo sapien
gggtcaggaggaaccgaagacactt

SEQ ID NO: 43525 - DNA, 25 bp, Homo sapien
ttggatcttaggaccgaacgacgaa

SEQ ID NO: 43526 - DNA, 25 bp, Homo sapien
ttggatcttaggtccgaacgacgaa

SEQ ID NO: 43527 - DNA, 25 bp, Homo sapien
ctgatgttttgaatggtactacaca

SEQ ID NO: 43528 - DNA, 25 bp, Homo sapien
ctgatgttttgattggtactacaca

SEQ ID NO: 43529 - DNA, 25 bp, Homo sapien
taggtgtccgacgatggagaacaga

SEQ ID NO: 43530 - DNA, 25 bp, Homo sapien
taggtgtccgaccatggagaacaga

SEQ ID NO: 43531 - DNA, 25 bp, Homo sapien
cgaaagacctcaagagtaatctgac

SEQ ID NO: 43532 - DNA, 25 bp, Homo sapien
cgaaagacctcatgagtaatctgac

SEQ ID NO: 43533 - DNA, 25 bp, Homo sapien
accagacccagtgacgatccgatct

SEQ ID NO: 43534 - DNA, 25 bp, Homo sapien
accagacccagtcacgatccgatct

SEQ ID NO: 43535 - DNA, 25 bp, Homo sapien
ataaacatcggtgacatccggtcgt

SEQ ID NO: 43536 - DNA, 25 bp, Homo sapien
ataaacatcggtcacatccggtcgt

SEQ ID NO: 43537 - DNA, 25 bp, Homo sapien
tccaagaaatcgagaccctgagtgt

SEQ ID NO: 43538 - DNA, 25 bp, Homo sapien
tccaagaaatcgtgaccctgagtgt

SEQ ID NO: 43539 - DNA, 25 bp, Homo sapien
gaggatgtctaatccgactgtcgag

SEQ ID NO: 43540 - DNA, 25 bp, Homo sapien
gaggatgtctaaaccgactgtcgag

SEQ ID NO: 43541 - DNA, 25 bp, Homo sapien
cagagatgtctttgactactcgtca

SEQ ID NO: 43542 - DNA, 25 bp, Homo sapien
cagagatgtcttagactactcgtca

SEQ ID NO: 43543 - DNA, 25 bp, Homo sapien
ccagagaccgtttcttgttacgtcc

SEQ ID NO: 43544 - DNA, 25 bp, Homo sapien
ccagagaccgttacttgttacgtcc

SEQ ID NO: 43545 - DNA, 25 bp, Homo sapien
gtcaaacgcttaatatctctgttag

SEQ ID NO: 43546 - DNA, 25 bp, Homo sapien
gtcaaacgcttattatctctgttag

SEQ ID NO: 43547 - DNA, 25 bp, Homo sapien
gtcgtttacgtcacatagcgtttta

SEQ ID NO: 43548 - DNA, 25 bp, Homo sapien
gtcgtttacgtctcatagcgtttta

SEQ ID NO: 43549 - DNA, 25 bp, Homo sapien
tttgttcactactctgagaattgta

SEQ ID NO: 43550 - DNA, 25 bp, Homo sapien
tttgttcactacactgagaattgta

SEQ ID NO: 43551 - DNA, 25 bp, Homo sapien
actgtcctctcttccaaacgtgtta

SEQ ID NO: 43552 - DNA, 25 bp, Homo sapien
actgtcctctctaccaaacgtgtta

SEQ ID NO: 43553 - DNA, 25 bp, Homo sapien
gccactgccaccaggcgaaagtgga

SEQ ID NO: 43554 - DNA, 25 bp, Homo sapien
gccactgccacctggcgaaagtgga

SEQ ID NO: 43555 - DNA, 25 bp, Homo sapien
cgcctgcacccctgcggagcgagaa

SEQ ID NO: 43556 - DNA, 25 bp, Homo sapien
cgcctgcaccccagcggagcgagaa

SEQ ID NO: 43557 - DNA, 25 bp, Homo sapien
tcctttaccaccttccgggtcgaga

SEQ ID NO: 43558 - DNA, 25 bp, Homo sapien
tcctttaccaccatccgggtcgaga

SEQ ID NO: 43559 - DNA, 25 bp, Homo sapien
ctccgtttcccgtatacaaggtgaa

SEQ ID NO: 43560 - DNA, 25 bp, Homo sapien
ctccgtttcccgaatacaaggtgaa

SEQ ID NO: 43561 - DNA, 25 bp, Homo sapien
acatttacttcgtccgcaggggtct

SEQ ID NO: 43562 - DNA, 25 bp, Homo sapien
acatttacttcgaccgcaggggtct

SEQ ID NO: 43563 - DNA, 25 bp, Homo sapien
aacctagactgaaacgggtgcttta

SEQ ID NO: 43564 - DNA, 25 bp, Homo sapien
aacctagactgatacgggtgcttta

SEQ ID NO: 43565 - DNA, 25 bp, Homo sapien
cttcaaaacttgactttccggtgac

SEQ ID NO: 43566 - DNA, 25 bp, Homo sapien
cttcaaaacttgtctttccggtgac

SEQ ID NO: 43567 - DNA, 25 bp, Homo sapien
cctcaacctcttgtgtgttgccgga

SEQ ID NO: 43568 - DNA, 25 bp, Homo sapien
cctcaacctcttctgtgttgccgga

SEQ ID NO: 43569 - DNA, 25 bp, Homo sapien
acctatacgtgcactgagtcgaggg

SEQ ID NO: 43570 - DNA, 25 bp, Homo sapien
acctatacgtgctctgagtcgaggg

SEQ ID NO: 43571 - DNA, 25 bp, Homo sapien
cgaacagcgtccagagtagagactt

SEQ ID NO: 43572 - DNA, 25 bp, Homo sapien
cgaacagcgtcctgagtagagactt

SEQ ID NO: 43573 - DNA, 25 bp, Homo sapien
tcgataaatacgagtagaccgttat

SEQ ID NO: 43574 - DNA, 25 bp, Homo sapien
tcgataaatacgtgtagaccgttat

SEQ ID NO: 43575 - DNA, 25 bp, Homo sapien
cagggagtagaaccggaggctctac

SEQ ID NO: 43576 - DNA, 25 bp, Homo sapien
cagggagtagaagcggaggctctac

SEQ ID NO: 43577 - DNA, 25 bp, Homo sapien
gactatgcatgcagaggggcacgtt

SEQ ID NO: 43578 - DNA, 25 bp, Homo sapien
gactatgcatgctgaggggcacgtt

SEQ ID NO: 43579 - DNA, 25 bp, Homo sapien
ctaccggagcctaaggggagacgta

SEQ ID NO: 43580 - DNA, 25 bp, Homo sapien
ctaccggagccttaggggagacgta

SEQ ID NO: 43581 - DNA, 25 bp, Homo sapien
atcactgactcctgcgaccgtggca

SEQ ID NO: 43582 - DNA, 25 bp, Homo sapien
atcactgactccagcgaccgtggca

SEQ ID NO: 43583 - DNA, 25 bp, Homo sapien
atttcacagttgtttgggtacggca

SEQ ID NO: 43584 - DNA, 25 bp, Homo sapien
atttcacagttgattgggtacggca

SEQ ID NO: 43585 - DNA, 25 bp, Homo sapien
tcgaggacgcactgcggccgtcgtc

SEQ ID NO: 43586 - DNA, 25 bp, Homo sapien
tcgaggacgcacagcggccgtcgtc

SEQ ID NO: 43587 - DNA, 25 bp, Homo sapien
tcttcgtacgtaaacgtgacccctc

SEQ ID NO: 43588 - DNA, 25 bp, Homo sapien
tcttcgtacgtatacgtgacccctc

SEQ ID NO: 43589 - DNA, 25 bp, Homo sapien
tgccgatgttagtgtagatccggtt

SEQ ID NO: 43590 - DNA, 25 bp, Homo sapien
tgccgatgttagagtagatccggtt

SEQ ID NO: 43591 - DNA, 25 bp, Homo sapien
ttccgaggttgtggtttctcggtct

SEQ ID NO: 43592 - DNA, 25 bp, Homo sapien
ttccgaggttgtcgtttctcggtct

SEQ ID NO: 43593 - DNA, 25 bp, Homo sapien
tatccttttcggatcagttaagtct

SEQ ID NO: 43594 - DNA, 25 bp, Homo sapien
tatccttttcggttcagttaagtct

SEQ ID NO: 43595 - DNA, 25 bp, Homo sapien
cctgctcccctggagtccgataaga

SEQ ID NO: 43596 - DNA, 25 bp, Homo sapien
cctgctcccctgcagtccgataaga

SEQ ID NO: 43597 - DNA, 25 bp, Homo sapien
cagtgtccacccttcctggaagtta

SEQ ID NO: 43598 - DNA, 25 bp, Homo sapien
cagtgtccacccatcctggaagtta

SEQ ID NO: 43599 - DNA, 25 bp, Homo sapien
gtttaccttcctttgactaattgtg

SEQ ID NO: 43600 - DNA, 25 bp, Homo sapien
gtttaccttcctatgactaattgtg

SEQ ID NO: 43601 - DNA, 25 bp, Homo sapien
tcaccgcggctcaggacgaaccggg

SEQ ID NO: 43602 - DNA, 25 bp, Homo sapien
tcaccgcggctctggacgaaccggg

SEQ ID NO: 43603 - DNA, 25 bp, Homo sapien
accgaagtccgtagagtattcactc

SEQ ID NO: 43604 - DNA, 25 bp, Homo sapien
accgaagtccgttgagtattcactc

SEQ ID NO: 43605 - DNA, 25 bp, Homo sapien
gaatacgaagtcgtctccattcgcc

SEQ ID NO: 43606 - DNA, 25 bp, Homo sapien
gaatacgaagtcctctccattcgcc

SEQ ID NO: 43607 - DNA, 25 bp, Homo sapien
tacagtagaggtccttccattcgaa

SEQ ID NO: 43608 - DNA, 25 bp, Homo sapien
tacagtagaggtgcttccattcgaa

SEQ ID NO: 43609 - DNA, 25 bp, Homo sapien
tttagaaaggggttctcccgtattt

SEQ ID NO: 43610 - DNA, 25 bp, Homo sapien
tttagaaaggggatctcccgtattt

SEQ ID NO: 43611 - DNA, 25 bp, Homo sapien
tttacaatggggttgtgctacctct

SEQ ID NO: 43612 - DNA, 25 bp, Homo sapien
tttacaatggggatgtgctacctct

SEQ ID NO: 43613 - DNA, 25 bp, Homo sapien
aatgttccttggacgcggccctcgt

SEQ ID NO: 43614 - DNA, 25 bp, Homo sapien
aatgttccttggtcgcggccctcgt

SEQ ID NO: 43615 - DNA, 25 bp, Homo sapien
tgtctccgtcggtcggttaaaacgt

SEQ ID NO: 43616 - DNA, 25 bp, Homo sapien
tgtctccgtcggacggttaaaacgt

SEQ ID NO: 43617 - DNA, 25 bp, Homo sapien
cgacacggaggttgttactaagtac

SEQ ID NO: 43618 - DNA, 25 bp, Homo sapien
cgacacggaggtagttactaagtac

SEQ ID NO: 43619 - DNA, 25 bp, Homo sapien
aggtcagcaagacgtggtcgcaaga

SEQ ID NO: 43620 - DNA, 25 bp, Homo sapien
aggtcagcaagaggtggtcgcaaga

SEQ ID NO: 43621 - DNA, 25 bp, Homo sapien
taaagggtataacgagggcctggac

SEQ ID NO: 43622 - DNA, 25 bp, Homo sapien
taaagggtataaggagggcctggac

SEQ ID NO: 43623 - DNA, 25 bp, Homo sapien
caaggagtcacgaggttagtccaaa

SEQ ID NO: 43624 - DNA, 25 bp, Homo sapien
caaggagtcacgtggttagtccaaa

SEQ ID NO: 43625 - DNA, 25 bp, Homo sapien
cgaaactactcgacggggaacaaca

SEQ ID NO: 43626 - DNA, 25 bp, Homo sapien
cgaaactactcgtcggggaacaaca

SEQ ID NO: 43627 - DNA, 25 bp, Homo sapien
accttcttgtactttcacactctac

SEQ ID NO: 43628 - DNA, 25 bp, Homo sapien
accttcttgtacattcacactctac

SEQ ID NO: 43629 - DNA, 25 bp, Homo sapien
ggtcattactatcgatgtcaatctt

SEQ ID NO: 43630 - DNA, 25 bp, Homo sapien
ggtcattactatggatgtcaatctt

SEQ ID NO: 43631 - DNA, 25 bp, Homo sapien
gagcaactcggagtccagtcgacag

SEQ ID NO: 43632 - DNA, 25 bp, Homo sapien
gagcaactcggactccagtcgacag

SEQ ID NO: 43633 - DNA, 25 bp, Homo sapien
agggggaaccagtcccagacgcacg

SEQ ID NO: 43634 - DNA, 25 bp, Homo sapien
agggggaaccagacccagacgcacg

SEQ ID NO: 43635 - DNA, 25 bp, Homo sapien
ggggtcgaaagtatgatcccgacac

SEQ ID NO: 43636 - DNA, 25 bp, Homo sapien
ggggtcgaaagtttgatcccgacac

SEQ ID NO: 43637 - DNA, 25 bp, Homo sapien
aagagacatttagtactctttcacg

SEQ ID NO: 43638 - DNA, 25 bp, Homo sapien
aagagacatttactactctttcacg

SEQ ID NO: 43639 - DNA, 25 bp, Homo sapien
acagtggaggaactctattccgact

SEQ ID NO: 43640 - DNA, 25 bp, Homo sapien
acagtggaggaagtctattccgact

SEQ ID NO: 43641 - DNA, 25 bp, Homo sapien
tagtcctaccgtaagtttttcggta

SEQ ID NO: 43642 - DNA, 25 bp, Homo sapien
tagtcctaccgttagtttttcggta

SEQ ID NO: 43643 - DNA, 25 bp, Homo sapien
cgtcccagttcgttgatcttgtact

SEQ ID NO: 43644 - DNA, 25 bp, Homo sapien
cgtcccagttcgatgatcttgtact

SEQ ID NO: 43645 - DNA, 25 bp, Homo sapien
ttgctccagtagtgggcttgtcgtc

SEQ ID NO: 43646 - DNA, 25 bp, Homo sapien
ttgctccagtagagggcttgtcgtc

SEQ ID NO: 43647 - DNA, 25 bp, Homo sapien
tagtccctcgtttgggtcacggcct

SEQ ID NO: 43648 - DNA, 25 bp, Homo sapien
tagtccctcgttagggtcacggcct

SEQ ID NO: 43649 - DNA, 25 bp, Homo sapien
tgcgtcccgacgacaccagtcggga

SEQ ID NO: 43650 - DNA, 25 bp, Homo sapien
tgcgtcccgacgtcaccagtcggga

SEQ ID NO: 43651 - DNA, 25 bp, Homo sapien
accgataaaccgtccataacggcga

SEQ ID NO: 43652 - DNA, 25 bp, Homo sapien
accgataaaccgaccataacggcga

SEQ ID NO: 43653 - DNA, 25 bp, Homo sapien
acgtagaacaagataaacccggtgg

SEQ ID NO: 43654 - DNA, 25 bp, Homo sapien
acgtagaacaagttaaacccggtgg

SEQ ID NO: 43655 - DNA, 25 bp, Homo sapien
ttaaacacacggaatacctcgatgg

SEQ ID NO: 43656 - DNA, 25 bp, Homo sapien
ttaaacacacggtatacctcgatgg

SEQ ID NO: 43657 - DNA, 25 bp, Homo sapien
gtaagactcggtcactcagataacg

SEQ ID NO: 43658 - DNA, 25 bp, Homo sapien
gtaagactcggtgactcagataacg

SEQ ID NO: 43659 - DNA, 25 bp, Homo sapien
ctttataggttctaagacaaacgtc

SEQ ID NO: 43660 - DNA, 25 bp, Homo sapien
ctttataggttcaaagacaaacgtc

SEQ ID NO: 43661 - DNA, 25 bp, Homo sapien
tcaaagggtcgacctcttagaactc

SEQ ID NO: 43662 - DNA, 25 bp, Homo sapien
tcaaagggtcgagctcttagaactc

SEQ ID NO: 43663 - DNA, 25 bp, Homo sapien
tctcagagggactcggactgaaacg

SEQ ID NO: 43664 - DNA, 25 bp, Homo sapien
tctcagagggacacggactgaaacg

SEQ ID NO: 43665 - DNA, 25 bp, Homo sapien
gtttcaacacaaaggaccgaaaatg

SEQ ID NO: 43666 - DNA, 25 bp, Homo sapien
gtttcaacacaatggaccgaaaatg

SEQ ID NO: 43667 - DNA, 25 bp, Homo sapien
tgtcacaaaaggtcgccagacaatg

SEQ ID NO: 43668 - DNA, 25 bp, Homo sapien
tgtcacaaaaggacgccagacaatg

SEQ ID NO: 43669 - DNA, 25 bp, Homo sapien
acgagacttcagacgggtcacatgg

SEQ ID NO: 43670 - DNA, 25 bp, Homo sapien
acgagacttcagtcgggtcacatgg

SEQ ID NO: 43671 - DNA, 25 bp, Homo sapien
aagaagtaggtgtagtcaacgtgtg

SEQ ID NO: 43672 - DNA, 25 bp, Homo sapien
aagaagtaggtgaagtcaacgtgtg

SEQ ID NO: 43673 - DNA, 25 bp, Homo sapien
taagaaacaattgtactctcagggt

SEQ ID NO: 43674 - DNA, 25 bp, Homo sapien
taagaaacaattctactctcagggt

SEQ ID NO: 43675 - DNA, 25 bp, Homo sapien
cttagacaaagtttgattccgcact

SEQ ID NO: 43676 - DNA, 25 bp, Homo sapien
cttagacaaagtatgattccgcact

SEQ ID NO: 43677 - DNA, 25 bp, Homo sapien
atactaaaggtacgagtttatcaca

SEQ ID NO: 43678 - DNA, 25 bp, Homo sapien
atactaaaggtaggagtttatcaca

SEQ ID NO: 43679 - DNA, 25 bp, Homo sapien
ggtacgaacaagtcattgaacaagt

SEQ ID NO: 43680 - DNA, 25 bp, Homo sapien
ggtacgaacaagacattgaacaagt

SEQ ID NO: 43681 - DNA, 25 bp, Homo sapien
gggaccatccagaagtctatgttca

SEQ ID NO: 43682 - DNA, 25 bp, Homo sapien
gggaccatccagtagtctatgttca

SEQ ID NO: 43683 - DNA, 25 bp, Homo sapien
gtatccaatacagaagacatccaga

SEQ ID NO: 43684 - DNA, 25 bp, Homo sapien
gtatccaatacacaagacatccaga

SEQ ID NO: 43685 - DNA, 25 bp, Homo sapien
tgttttaatacaccaaatgtgtcaa

SEQ ID NO: 43686 - DNA, 25 bp, Homo sapien
tgttttaatacagcaaatgtgtcaa

SEQ ID NO: 43687 - DNA, 25 bp, Homo sapien
ttgacgttcgactactacacttcaa

SEQ ID NO: 43688 - DNA, 25 bp, Homo sapien
ttgacgttcgacaactacacttcaa

SEQ ID NO: 43689 - DNA, 25 bp, Homo sapien
tgactcgcgcgtaccaccgtgaccg

SEQ ID NO: 43690 - DNA, 25 bp, Homo sapien
tgactcgcgcgttccaccgtgaccg

SEQ ID NO: 43691 - DNA, 25 bp, Homo sapien
caagtaagtctacttctgttgggac

SEQ ID NO: 43692 - DNA, 25 bp, Homo sapien
caagtaagtctagttctgttgggac

SEQ ID NO: 43693 - DNA, 25 bp, Homo sapien
ccacggagaagtgtcaagggtacac

SEQ ID NO: 43694 - DNA, 25 bp, Homo sapien
ccacggagaagtctcaagggtacac

SEQ ID NO: 43695 - DNA, 25 bp, Homo sapien
acacggaagctcgacgaaaggcgag

SEQ ID NO: 43696 - DNA, 25 bp, Homo sapien
acacggaagctccacgaaaggcgag

SEQ ID NO: 43697 - DNA, 25 bp, Homo sapien
tcagttcgaccgtcatgacaacctc

SEQ ID NO: 43698 - DNA, 25 bp, Homo sapien
tcagttcgaccgacatgacaacctc

SEQ ID NO: 43699 - DNA, 25 bp, Homo sapien
atgtcgaccaccttgacgaaccgtt

SEQ ID NO: 43700 - DNA, 25 bp, Homo sapien
atgtcgaccaccatgacgaaccgtt

SEQ ID NO: 43701 - DNA, 25 bp, Homo sapien
accgttcgcagtcctgactcgggac

SEQ ID NO: 43702 - DNA, 25 bp, Homo sapien
accgttcgcagtgctgactcgggac

SEQ ID NO: 43703 - DNA, 25 bp, Homo sapien
aacaccggtgcacaggtccacagac

SEQ ID NO: 43704 - DNA, 25 bp, Homo sapien
aacaccggtgcagaggtccacagac

SEQ ID NO: 43705 - DNA, 25 bp, Homo sapien
aatcacgggtgtactttgtccccac

SEQ ID NO: 43706 - DNA, 25 bp, Homo sapien
aatcacgggtgttctttgtccccac

SEQ ID NO: 43707 - DNA, 25 bp, Homo sapien
gtcgaggttctgtgtccaagtggta

SEQ ID NO: 43708 - DNA, 25 bp, Homo sapien
gtcgaggttctgagtccaagtggta

SEQ ID NO: 43709 - DNA, 25 bp, Homo sapien
tcggttagtctgtcatgcactgtaa

SEQ ID NO: 43710 - DNA, 25 bp, Homo sapien
tcggttagtctgacatgcactgtaa

SEQ ID NO: 43711 - DNA, 25 bp, Homo sapien
tatacgagcccgaacagggtcagga

SEQ ID NO: 43712 - DNA, 25 bp, Homo sapien
tatacgagcccgtacagggtcagga

SEQ ID NO: 43713 - DNA, 25 bp, Homo sapien
ctagattaccgtttcgaaggagtga

SEQ ID NO: 43714 - DNA, 25 bp, Homo sapien
ctagattaccgtatcgaaggagtga

SEQ ID NO: 43715 - DNA, 25 bp, Homo sapien
ttcaagtttgacgtgagtggaccga

SEQ ID NO: 43716 - DNA, 25 bp, Homo sapien
ttcaagtttgacctgagtggaccga

SEQ ID NO: 43717 - DNA, 25 bp, Homo sapien
ctcaagttacgttataaggtttcaa

SEQ ID NO: 43718 - DNA, 25 bp, Homo sapien
ctcaagttacgtaataaggtttcaa

SEQ ID NO: 43719 - DNA, 25 bp, Homo sapien
caactattcgtttcgggtaaataat

SEQ ID NO: 43720 - DNA, 25 bp, Homo sapien
caactattcgttacgggtaaataat

SEQ ID NO: 43721 - DNA, 25 bp, Homo sapien
gacagaccccggacgaggaagtttt

SEQ ID NO: 43722 - DNA, 25 bp, Homo sapien
gacagaccccggtcgaggaagtttt

SEQ ID NO: 43723 - DNA, 25 bp, Homo sapien
aagatggggtgtaggtaacggactt

SEQ ID NO: 43724 - DNA, 25 bp, Homo sapien
aagatggggtgttggtaacggactt

SEQ ID NO: 43725 - DNA, 25 bp, Homo sapien
tccctcgagggtttggaactcgacc

SEQ ID NO: 43726 - DNA, 25 bp, Homo sapien
tccctcgagggtatggaactcgacc

SEQ ID NO: 43727 - DNA, 25 bp, Homo sapien
tgaaattttagttgattcatcgtcc

SEQ ID NO: 43728 - DNA, 25 bp, Homo sapien
tgaaattttagtagattcatcgtcc

SEQ ID NO: 43729 - DNA, 25 bp, Homo sapien
tctctagattccggcagtggacgcg

SEQ ID NO: 43730 - DNA, 25 bp, Homo sapien
tctctagattcccgcagtggacgcg

SEQ ID NO: 43731 - DNA, 25 bp, Homo sapien
cccaacacctggaccgacctactcg

SEQ ID NO: 43732 - DNA, 25 bp, Homo sapien
cccaacacctggtccgacctactcg

SEQ ID NO: 43733 - DNA, 25 bp, Homo sapien
attaacagaaagtcggttaggttcc

SEQ ID NO: 43734 - DNA, 25 bp, Homo sapien
attaacagaaagacggttaggttcc

SEQ ID NO: 43735 - DNA, 25 bp, Homo sapien
acaaaggagattccttatgatcacg

SEQ ID NO: 43736 - DNA, 25 bp, Homo sapien
acaaaggagattgcttatgatcacg

SEQ ID NO: 43737 - DNA, 25 bp, Homo sapien
ttagatatgttgactctggtacgac

SEQ ID NO: 43738 - DNA, 25 bp, Homo sapien
ttagatatgttgtctctggtacgac

SEQ ID NO: 43739 - DNA, 25 bp, Homo sapien
tcgtgtttctaagatcctatgacgc

SEQ ID NO: 43740 - DNA, 25 bp, Homo sapien
tcgtgtttctaacatcctatgacgc

SEQ ID NO: 43741 - DNA, 25 bp, Homo sapien
tgtgttactgtcaatttctgtggac

SEQ ID NO: 43742 - DNA, 25 bp, Homo sapien
tgtgttactgtctatttctgtggac

SEQ ID NO: 43743 - DNA, 25 bp, Homo sapien
tagagacttgactttattagtgccc

SEQ ID NO: 43744 - DNA, 25 bp, Homo sapien
tagagacttgacattattagtgccc

SEQ ID NO: 43745 - DNA, 25 bp, Homo sapien
ttaacgtaggatttgacaacttatc

SEQ ID NO: 43746 - DNA, 25 bp, Homo sapien
ttaacgtaggatatgacaacttatc

SEQ ID NO: 43747 - DNA, 25 bp, Homo sapien
aagtcagagaaatctgaactgttct

SEQ ID NO: 43748 - DNA, 25 bp, Homo sapien
aagtcagagaaaactgaactgttct

SEQ ID NO: 43749 - DNA, 25 bp, Homo sapien
gatcgacagtaaaacgaataccttc

SEQ ID NO: 43750 - DNA, 25 bp, Homo sapien
gatcgacagtaatacgaataccttc

SEQ ID NO: 43751 - DNA, 25 bp, Homo sapien
gggtttcatcaagatctcgtcttcg

SEQ ID NO: 43752 - DNA, 25 bp, Homo sapien
gggtttcatcaacatctcgtcttcg

SEQ ID NO: 43753 - DNA, 25 bp, Homo sapien
aggttctttgcacttctagtctatt

SEQ ID NO: 43754 - DNA, 25 bp, Homo sapien
aggttctttgcagttctagtctatt

SEQ ID NO: 43755 - DNA, 25 bp, Homo sapien
agacgtcttcggttttctattctaa

SEQ ID NO: 43756 - DNA, 25 bp, Homo sapien
agacgtcttcggatttctattctaa

SEQ ID NO: 43757 - DNA, 25 bp, Homo sapien
aagagtctgaggaatattgactcca

SEQ ID NO: 43758 - DNA, 25 bp, Homo sapien
aagagtctgaggtatattgactcca

SEQ ID NO: 43759 - DNA, 25 bp, Homo sapien
ggttccggtgggtactagagttaca

SEQ ID NO: 43760 - DNA, 25 bp, Homo sapien
ggttccggtgggaactagagttaca

SEQ ID NO: 43761 - DNA, 25 bp, Homo sapien
gaacccgggtgtgtaaagtctcctc

SEQ ID NO: 43762 - DNA, 25 bp, Homo sapien
gaacccgggtgtctaaagtctcctc

SEQ ID NO: 43763 - DNA, 25 bp, Homo sapien
ctcttcaagattacaccgtcctctc

SEQ ID NO: 43764 - DNA, 25 bp, Homo sapien
ctcttcaagatttcaccgtcctctc

SEQ ID NO: 43765 - DNA, 25 bp, Homo sapien
tctccatgagtgtcgcttctagaac

SEQ ID NO: 43766 - DNA, 25 bp, Homo sapien
tctccatgagtgacgcttctagaac

SEQ ID NO: 43767 - DNA, 25 bp, Homo sapien
tcttcggtgaagagtatctaccttc

SEQ ID NO: 43768 - DNA, 25 bp, Homo sapien
tcttcggtgaagtgtatctaccttc

SEQ ID NO: 43769 - DNA, 25 bp, Homo sapien
gtgtcgtttagataaagttcctgtc

SEQ ID NO: 43770 - DNA, 25 bp, Homo sapien
gtgtcgtttagaaaaagttcctgtc

SEQ ID NO: 43771 - DNA, 25 bp, Homo sapien
ctcaccgacgaaaagaagtccttcg

SEQ ID NO: 43772 - DNA, 25 bp, Homo sapien
ctcaccgacgaatagaagtccttcg

SEQ ID NO: 43773 - DNA, 25 bp, Homo sapien
aacacgtcgaagagtaacgtgtcca

SEQ ID NO: 43774 - DNA, 25 bp, Homo sapien
aacacgtcgaagtgtaacgtgtcca

SEQ ID NO: 43775 - DNA, 25 bp, Homo sapien
acattagtttagtcgactgattaac

SEQ ID NO: 43776 - DNA, 25 bp, Homo sapien
acattagtttagacgactgattaac

SEQ ID NO: 43777 - DNA, 25 bp, Homo sapien
tgtaagtgtcaacacacgatctctg

SEQ ID NO: 43778 - DNA, 25 bp, Homo sapien
tgtaagtgtcaagacacgatctctg

SEQ ID NO: 43779 - DNA, 25 bp, Homo sapien
ggtatagtgcaaagagactgtccac

SEQ ID NO: 43780 - DNA, 25 bp, Homo sapien
ggtatagtgcaatgagactgtccac

SEQ ID NO: 43781 - DNA, 25 bp, Homo sapien
gtacatctatcatgtcactgtccag

SEQ ID NO: 43782 - DNA, 25 bp, Homo sapien
gtacatctatcaagtcactgtccag

SEQ ID NO: 43783 - DNA, 25 bp, Homo sapien
attctcgttttgtctctacttcttc

SEQ ID NO: 43784 - DNA, 25 bp, Homo sapien
attctcgttttgactctacttcttc

SEQ ID NO: 43785 - DNA, 25 bp, Homo sapien
agtgatcgttcatggtacccttttt

SEQ ID NO: 43786 - DNA, 25 bp, Homo sapien
agtgatcgttcaaggtacccttttt

SEQ ID NO: 43787 - DNA, 25 bp, Homo sapien
aagacagtaatgaattccgttttct

SEQ ID NO: 43788 - DNA, 25 bp, Homo sapien
aagacagtaatgtattccgttttct

SEQ ID NO: 43789 - DNA, 25 bp, Homo sapien
tactagtaaggttgttgttgttcgt

SEQ ID NO: 43790 - DNA, 25 bp, Homo sapien
tactagtaaggtagttgttgttcgt

SEQ ID NO: 43791 - DNA, 25 bp, Homo sapien
cgattaagtgtcgttacgtgtgttc

SEQ ID NO: 43792 - DNA, 25 bp, Homo sapien
cgattaagtgtccttacgtgtgttc

SEQ ID NO: 43793 - DNA, 25 bp, Homo sapien
gacgatatacattccgcctgtcttc

SEQ ID NO: 43794 - DNA, 25 bp, Homo sapien
gacgatatacataccgcctgtcttc

SEQ ID NO: 43795 - DNA, 25 bp, Homo sapien
atcgaaagtcgtcgactctccatct

SEQ ID NO: 43796 - DNA, 25 bp, Homo sapien
atcgaaagtcgtggactctccatct

SEQ ID NO: 43797 - DNA, 25 bp, Homo sapien
cctcgataaggtcgtatccgtcttt

SEQ ID NO: 43798 - DNA, 25 bp, Homo sapien
cctcgataaggtggtatccgtcttt

SEQ ID NO: 43799 - DNA, 25 bp, Homo sapien
gcctcggaaaagtttactactattc

SEQ ID NO: 43800 - DNA, 25 bp, Homo sapien
gcctcggaaaagattactactattc

SEQ ID NO: 43801 - DNA, 25 bp, Homo sapien
cgtgacggaaaaacttttcgtgtgt

SEQ ID NO: 43802 - DNA, 25 bp, Homo sapien
cgtgacggaaaatcttttcgtgtgt

SEQ ID NO: 43803 - DNA, 25 bp, Homo sapien
cgagtatttactgagactttttcgg

SEQ ID NO: 43804 - DNA, 25 bp, Homo sapien
cgagtatttactcagactttttcgg

SEQ ID NO: 43805 - DNA, 25 bp, Homo sapien
ccgatcccctgaacgagtgtcatca

SEQ ID NO: 43806 - DNA, 25 bp, Homo sapien
ccgatcccctgatcgagtgtcatca

SEQ ID NO: 43807 - DNA, 25 bp, Homo sapien
gtctccgcggcgtcgaggtccgtca

SEQ ID NO: 43808 - DNA, 25 bp, Homo sapien
gtctccgcggcgacgaggtccgtca

SEQ ID NO: 43809 - DNA, 25 bp, Homo sapien
tgcccgcggcctcgtcgtgcacgag

SEQ ID NO: 43810 - DNA, 25 bp, Homo sapien
tgcccgcggcctggtcgtgcacgag

SEQ ID NO: 43811 - DNA, 25 bp, Homo sapien
agtccgtctggtccaggacgtccca

SEQ ID NO: 43812 - DNA, 25 bp, Homo sapien
agtccgtctggtgcaggacgtccca

SEQ ID NO: 43813 - DNA, 25 bp, Homo sapien
ctaccattgtgtcgacttgactcca

SEQ ID NO: 43814 - DNA, 25 bp, Homo sapien
ctaccattgtgtggacttgactcca

SEQ ID NO: 43815 - DNA, 25 bp, Homo sapien
tggaccgttctgaccgttccgtcac

SEQ ID NO: 43816 - DNA, 25 bp, Homo sapien
tggaccgttctgtccgttccgtcac

SEQ ID NO: 43817 - DNA, 25 bp, Homo sapien
cttcggtttactgacaggaatttct

SEQ ID NO: 43818 - DNA, 25 bp, Homo sapien
cttcggtttactcacaggaatttct

SEQ ID NO: 43819 - DNA, 25 bp, Homo sapien
cttcgtgtttccaatcatctcatac

SEQ ID NO: 43820 - DNA, 25 bp, Homo sapien
cttcgtgtttcctatcatctcatac

SEQ ID NO: 43821 - DNA, 25 bp, Homo sapien
tgggaatacccgagtatcctcagtc

SEQ ID NO: 43822 - DNA, 25 bp, Homo sapien
tgggaatacccgtgtatcctcagtc

SEQ ID NO: 43823 - DNA, 25 bp, Homo sapien
ggaacgacagaggttacctcgtata

SEQ ID NO: 43824 - DNA, 25 bp, Homo sapien
ggaacgacagagcttacctcgtata

SEQ ID NO: 43825 - DNA, 25 bp, Homo sapien
catgtattaagtctctctcctgtag

SEQ ID NO: 43826 - DNA, 25 bp, Homo sapien
catgtattaagtgtctctcctgtag

SEQ ID NO: 43827 - DNA, 25 bp, Homo sapien
aaggactttgtactagtgtccagtc

SEQ ID NO: 43828 - DNA, 25 bp, Homo sapien
aaggactttgtagtagtgtccagtc

SEQ ID NO: 43829 - DNA, 25 bp, Homo sapien
gtaaacttttgttactcgtctcctg

SEQ ID NO: 43830 - DNA, 25 bp, Homo sapien
gtaaacttttgtaactcgtctcctg

SEQ ID NO: 43831 - DNA, 25 bp, Homo sapien
tacgtgtcttactgactgtcatcag

SEQ ID NO: 43832 - DNA, 25 bp, Homo sapien
tacgtgtcttacagactgtcatcag

SEQ ID NO: 43833 - DNA, 25 bp, Homo sapien
tatacgactggtaatcttgacgtaa

SEQ ID NO: 43834 - DNA, 25 bp, Homo sapien
tatacgactggttatcttgacgtaa

SEQ ID NO: 43835 - DNA, 25 bp, Homo sapien
gagtcctgtcgttatccaactatac

SEQ ID NO: 43836 - DNA, 25 bp, Homo sapien
gagtcctgtcgtaatccaactatac

SEQ ID NO: 43837 - DNA, 25 bp, Homo sapien
gtaccttcttgatcaactacgtagt

SEQ ID NO: 43838 - DNA, 25 bp, Homo sapien
gtaccttcttgaacaactacgtagt

SEQ ID NO: 43839 - DNA, 25 bp, Homo sapien
tggttttcccctaatcgaatcaggt

SEQ ID NO: 43840 - DNA, 25 bp, Homo sapien
tggttttccccttatcgaatcaggt

SEQ ID NO: 43841 - DNA, 25 bp, Homo sapien
acgttatactttatcttcgagccgt

SEQ ID NO: 43842 - DNA, 25 bp, Homo sapien
acgttatactttttcttcgagccgt

SEQ ID NO: 43843 - DNA, 25 bp, Homo sapien
cctaacacgaacctttggtatttgg

SEQ ID NO: 43844 - DNA, 25 bp, Homo sapien
cctaacacgaacgtttggtatttgg

SEQ ID NO: 43845 - DNA, 25 bp, Homo sapien
caagagaagatatgacactcttgac

SEQ ID NO: 43846 - DNA, 25 bp, Homo sapien
caagagaagataagacactcttgac

SEQ ID NO: 43847 - DNA, 25 bp, Homo sapien
cacagtgaagaaagaactcgaccag

SEQ ID NO: 43848 - DNA, 25 bp, Homo sapien
cacagtgaagaatgaactcgaccag

SEQ ID NO: 43849 - DNA, 25 bp, Homo sapien
ggagtacaacacaggcctccgacga

SEQ ID NO: 43850 - DNA, 25 bp, Homo sapien
ggagtacaacactggcctccgacga

SEQ ID NO: 43851 - DNA, 25 bp, Homo sapien
gaggaactctattccgactctacat

SEQ ID NO: 43852 - DNA, 25 bp, Homo sapien
gaggaactctataccgactctacat

SEQ ID NO: 43853 - DNA, 25 bp, Homo sapien
ggatgaactatttactcgactctgc

SEQ ID NO: 43854 - DNA, 25 bp, Homo sapien
ggatgaactattaactcgactctgc

SEQ ID NO: 43855 - DNA, 25 bp, Homo sapien
cggtactagaactccatgacgtccc

SEQ ID NO: 43856 - DNA, 25 bp, Homo sapien
cggtactagaacaccatgacgtccc

SEQ ID NO: 43857 - DNA, 25 bp, Homo sapien
ggagtaaccagactacgtgcgtcaa

SEQ ID NO: 43858 - DNA, 25 bp, Homo sapien
ggagtaaccagagtacgtgcgtcaa

SEQ ID NO: 43859 - DNA, 25 bp, Homo sapien
gtttgagacaatagtatgcttactc

SEQ ID NO: 43860 - DNA, 25 bp, Homo sapien
gtttgagacaattgtatgcttactc

SEQ ID NO: 43861 - DNA, 25 bp, Homo sapien
agtaaagtcttaagtcgttacttac

SEQ ID NO: 43862 - DNA, 25 bp, Homo sapien
agtaaagtcttatgtcgttacttac

SEQ ID NO: 43863 - DNA, 25 bp, Homo sapien
ggtctgatactattatgtctcttct

SEQ ID NO: 43864 - DNA, 25 bp, Homo sapien
ggtctgatactaatatgtctcttct

SEQ ID NO: 43865 - DNA, 25 bp, Homo sapien
aggcggtactgttgtctgtgtaact

SEQ ID NO: 43866 - DNA, 25 bp, Homo sapien
aggcggtactgtagtctgtgtaact

SEQ ID NO: 43867 - DNA, 25 bp, Homo sapien
aggtctgcgacttggtctaggagta

SEQ ID NO: 43868 - DNA, 25 bp, Homo sapien
aggtctgcgactaggtctaggagta

SEQ ID NO: 43869 - DNA, 25 bp, Homo sapien
gaataggaacgtacggtccgtgaga

SEQ ID NO: 43870 - DNA, 25 bp, Homo sapien
gaataggaacgttcggtccgtgaga

SEQ ID NO: 43871 - DNA, 25 bp, Homo sapien
ccaataagaggttcagtttgtcgag

SEQ ID NO: 43872 - DNA, 25 bp, Homo sapien
ccaataagaggtacagtttgtcgag

SEQ ID NO: 43873 - DNA, 25 bp, Homo sapien
ccagaagggtcgtcagtttgtacat

SEQ ID NO: 43874 - DNA, 25 bp, Homo sapien
ccagaagggtcgacagtttgtacat

SEQ ID NO: 43875 - DNA, 25 bp, Homo sapien
caaagatagtagacgtcaccaaagt

SEQ ID NO: 43876 - DNA, 25 bp, Homo sapien
caaagatagtagtcgtcaccaaagt

SEQ ID NO: 43877 - DNA, 25 bp, Homo sapien
aaggaacctacgacttaacgagacg

SEQ ID NO: 43878 - DNA, 25 bp, Homo sapien
aaggaacctacgtcttaacgagacg

SEQ ID NO: 43879 - DNA, 25 bp, Homo sapien
gacaagtttcaaaactactagagga

SEQ ID NO: 43880 - DNA, 25 bp, Homo sapien
gacaagtttcaatactactagagga

SEQ ID NO: 43881 - DNA, 25 bp, Homo sapien
acaccgctcgtgtggttgaagtcgg

SEQ ID NO: 43882 - DNA, 25 bp, Homo sapien
acaccgctcgtgaggttgaagtcgg

SEQ ID NO: 43883 - DNA, 25 bp, Homo sapien
accgacactgacagaacgcaaaccg

SEQ ID NO: 43884 - DNA, 25 bp, Homo sapien
accgacactgactgaacgcaaaccg

SEQ ID NO: 43885 - DNA, 25 bp, Homo sapien
cacacttgtctgtagtacccgactg

SEQ ID NO: 43886 - DNA, 25 bp, Homo sapien
cacacttgtctgaagtacccgactg

SEQ ID NO: 43887 - DNA, 25 bp, Homo sapien
aataagtctttaagtaaacctccgg

SEQ ID NO: 43888 - DNA, 25 bp, Homo sapien
aataagtctttatgtaaacctccgg

SEQ ID NO: 43889 - DNA, 25 bp, Homo sapien
agaaccgtggggttagtcctaggac

SEQ ID NO: 43890 - DNA, 25 bp, Homo sapien
agaaccgtggggatagtcctaggac

SEQ ID NO: 43891 - DNA, 25 bp, Homo sapien
aaatgtcggaggaactaccgactca

SEQ ID NO: 43892 - DNA, 25 bp, Homo sapien
aaatgtcggaggtactaccgactca

SEQ ID NO: 43893 - DNA, 25 bp, Homo sapien
agggctccgggtctcgtcgacgtaa

SEQ ID NO: 43894 - DNA, 25 bp, Homo sapien
agggctccgggtgtcgtcgacgtaa

SEQ ID NO: 43895 - DNA, 25 bp, Homo sapien
aagtcgacccggtcaccgaccgatt

SEQ ID NO: 43896 - DNA, 25 bp, Homo sapien
aagtcgacccggacaccgaccgatt

SEQ ID NO: 43897 - DNA, 25 bp, Homo sapien
ggctcgaccctcacggtgaccggag

SEQ ID NO: 43898 - DNA, 25 bp, Homo sapien
ggctcgaccctctcggtgaccggag

SEQ ID NO: 43899 - DNA, 25 bp, Homo sapien
ctaccccgacatgacgtcgcgcggg

SEQ ID NO: 43900 - DNA, 25 bp, Homo sapien
ctaccccgacatcacgtcgcgcggg

SEQ ID NO: 43901 - DNA, 25 bp, Homo sapien
gtcaacctaggataccgtccgaccg

SEQ ID NO: 43902 - DNA, 25 bp, Homo sapien
gtcaacctaggaaaccgtccgaccg

SEQ ID NO: 43903 - DNA, 25 bp, Homo sapien
gtctcgcctgggtaccgtacgagcc

SEQ ID NO: 43904 - DNA, 25 bp, Homo sapien
gtctcgcctgggaaccgtacgagcc

SEQ ID NO: 43905 - DNA, 25 bp, Homo sapien
cgtacacccgggacgactcgggtga

SEQ ID NO: 43906 - DNA, 25 bp, Homo sapien
cgtacacccgggtcgactcgggtga

SEQ ID NO: 43907 - DNA, 25 bp, Homo sapien
gtcacgtcctctaccactgggagac

SEQ ID NO: 43908 - DNA, 25 bp, Homo sapien
gtcacgtcctcttccactgggagac

SEQ ID NO: 43909 - DNA, 25 bp, Homo sapien
cagcgtcgtcttgacctcggtgagg

SEQ ID NO: 43910 - DNA, 25 bp, Homo sapien
cagcgtcgtcttcacctcggtgagg

SEQ ID NO: 43911 - DNA, 25 bp, Homo sapien
atacttttacgttcacccgaggata

SEQ ID NO: 43912 - DNA, 25 bp, Homo sapien
atacttttacgtacacccgaggata

SEQ ID NO: 43913 - DNA, 25 bp, Homo sapien
aacgctatttgttacatccgggatt

SEQ ID NO: 43914 - DNA, 25 bp, Homo sapien
aacgctatttgtaacatccgggatt

SEQ ID NO: 43915 - DNA, 25 bp, Homo sapien
gaaaatgtaagagaccgagattacc

SEQ ID NO: 43916 - DNA, 25 bp, Homo sapien
gaaaatgtaagacaccgagattacc

SEQ ID NO: 43917 - DNA, 25 bp, Homo sapien
atacgaagttctcctgtaaagtacg

SEQ ID NO: 43918 - DNA, 25 bp, Homo sapien
atacgaagttctgctgtaaagtacg

SEQ ID NO: 43919 - DNA, 25 bp, Homo sapien
acagatccacggtcgggaactatat

SEQ ID NO: 43920 - DNA, 25 bp, Homo sapien
acagatccacggacgggaactatat

SEQ ID NO: 43921 - DNA, 25 bp, Homo sapien
ttgaatctcaagagacggtaaccta

SEQ ID NO: 43922 - DNA, 25 bp, Homo sapien
ttgaatctcaagtgacggtaaccta

SEQ ID NO: 43923 - DNA, 25 bp, Homo sapien
tgagactacaggaaccctaaacttt

SEQ ID NO: 43924 - DNA, 25 bp, Homo sapien
tgagactacaggtaccctaaacttt

SEQ ID NO: 43925 - DNA, 25 bp, Homo sapien
tgggacgtcaggacaccacaacacc

SEQ ID NO: 43926 - DNA, 25 bp, Homo sapien
tgggacgtcaggtcaccacaacacc

SEQ ID NO: 43927 - DNA, 25 bp, Homo sapien
cgaggagtaaggtcaagaatctctt

SEQ ID NO: 43928 - DNA, 25 bp, Homo sapien
cgaggagtaaggacaagaatctctt

SEQ ID NO: 43929 - DNA, 25 bp, Homo sapien
cttaggtacttcgaattctttgatt

SEQ ID NO: 43930 - DNA, 25 bp, Homo sapien
cttaggtacttccaattctttgatt

SEQ ID NO: 43931 - DNA, 25 bp, Homo sapien
tgggcaagtacaagacctttcgttc

SEQ ID NO: 43932 - DNA, 25 bp, Homo sapien
tgggcaagtacatgacctttcgttc

SEQ ID NO: 43933 - DNA, 25 bp, Homo sapien
gtttgagaagacatcaaccatttct

SEQ ID NO: 43934 - DNA, 25 bp, Homo sapien
gtttgagaagacttcaaccatttct

SEQ ID NO: 43935 - DNA, 25 bp, Homo sapien
cttaggtaccgagtcatcctattga

SEQ ID NO: 43936 - DNA, 25 bp, Homo sapien
cttaggtaccgactcatcctattga

SEQ ID NO: 43937 - DNA, 25 bp, Homo sapien
ccgagatgcccgtgttactcattgg

SEQ ID NO: 43938 - DNA, 25 bp, Homo sapien
ccgagatgcccgagttactcattgg

SEQ ID NO: 43939 - DNA, 25 bp, Homo sapien
ctcagggtccaggtttctcttccgg

SEQ ID NO: 43940 - DNA, 25 bp, Homo sapien
ctcagggtccagctttctcttccgg

SEQ ID NO: 43941 - DNA, 25 bp, Homo sapien
caaaggacatactatttcaagaagt

SEQ ID NO: 43942 - DNA, 25 bp, Homo sapien
caaaggacatacaatttcaagaagt

SEQ ID NO: 43943 - DNA, 25 bp, Homo sapien
agaagtcgaggagtcgacagagact

SEQ ID NO: 43944 - DNA, 25 bp, Homo sapien
agaagtcgaggactcgacagagact

SEQ ID NO: 43945 - DNA, 25 bp, Homo sapien
gaggtaagtcgtaacctcaagaggg

SEQ ID NO: 43946 - DNA, 25 bp, Homo sapien
gaggtaagtcgttacctcaagaggg

SEQ ID NO: 43947 - DNA, 25 bp, Homo sapien
tcagaaaaagtccttcgtaagggtg

SEQ ID NO: 43948 - DNA, 25 bp, Homo sapien
tcagaaaaagtcgttcgtaagggtg

SEQ ID NO: 43949 - DNA, 25 bp, Homo sapien
agaaaaagttctttactgattcgtc

SEQ ID NO: 43950 - DNA, 25 bp, Homo sapien
agaaaaagttctatactgattcgtc

SEQ ID NO: 43951 - DNA, 25 bp, Homo sapien
taaaagtggtaaacatacttacgtc

SEQ ID NO: 43952 - DNA, 25 bp, Homo sapien
taaaagtggtaatcatacttacgtc

SEQ ID NO: 43953 - DNA, 25 bp, Homo sapien
cgtcacacgggtgaatcgattcacc

SEQ ID NO: 43954 - DNA, 25 bp, Homo sapien
cgtcacacgggtcaatcgattcacc

SEQ ID NO: 43955 - DNA, 25 bp, Homo sapien
tcgcccgtgaacagaggcgagcccg

SEQ ID NO: 43956 - DNA, 25 bp, Homo sapien
tcgcccgtgaactgaggcgagcccg

SEQ ID NO: 43957 - DNA, 25 bp, Homo sapien
tccctcagaccttagagatcacaag

SEQ ID NO: 43958 - DNA, 25 bp, Homo sapien
tccctcagacctaagagatcacaag

SEQ ID NO: 43959 - DNA, 25 bp, Homo sapien
tgacgaaactgaagttcacagtagt

SEQ ID NO: 43960 - DNA, 25 bp, Homo sapien
tgacgaaactgatgttcacagtagt

SEQ ID NO: 43961 - DNA, 25 bp, Homo sapien
aagtcgtcaacagagtctgacaagg

SEQ ID NO: 43962 - DNA, 25 bp, Homo sapien
aagtcgtcaacacagtctgacaagg

SEQ ID NO: 43963 - DNA, 25 bp, Homo sapien
tcgtgatacacactgatgacagtaa

SEQ ID NO: 43964 - DNA, 25 bp, Homo sapien
tcgtgatacacagtgatgacagtaa

SEQ ID NO: 43965 - DNA, 25 bp, Homo sapien
ttgtctctaattgacagtctataga

SEQ ID NO: 43966 - DNA, 25 bp, Homo sapien
ttgtctctaattcacagtctataga

SEQ ID NO: 43967 - DNA, 25 bp, Homo sapien
atattctaccattgacgttgtaaga

SEQ ID NO: 43968 - DNA, 25 bp, Homo sapien
atattctaccatagacgttgtaaga

SEQ ID NO: 43969 - DNA, 25 bp, Homo sapien
caatgttccctacaggtcgtacaca

SEQ ID NO: 43970 - DNA, 25 bp, Homo sapien
caatgttccctagaggtcgtacaca

SEQ ID NO: 43971 - DNA, 25 bp, Homo sapien
caggaacagggacgtccaggagccc

SEQ ID NO: 43972 - DNA, 25 bp, Homo sapien
caggaacagggaggtccaggagccc

SEQ ID NO: 43973 - DNA, 25 bp, Homo sapien
tgacaagaggaacttggagtgactc

SEQ ID NO: 43974 - DNA, 25 bp, Homo sapien
tgacaagaggaagttggagtgactc

SEQ ID NO: 43975 - DNA, 25 bp, Homo sapien
acgtcgagctactatgagaggcaca

SEQ ID NO: 43976 - DNA, 25 bp, Homo sapien
acgtcgagctacaatgagaggcaca

SEQ ID NO: 43977 - DNA, 25 bp, Homo sapien
acccactagcacatgagtccacagt

SEQ ID NO: 43978 - DNA, 25 bp, Homo sapien
acccactagcacttgagtccacagt

SEQ ID NO: 43979 - DNA, 25 bp, Homo sapien
tcagtatacgggttatgtgacccgt

SEQ ID NO: 43980 - DNA, 25 bp, Homo sapien
tcagtatacgggatatgtgacccgt

SEQ ID NO: 43981 - DNA, 25 bp, Homo sapien
cactcatattagagtcaggtactcc

SEQ ID NO: 43982 - DNA, 25 bp, Homo sapien
cactcatattagtgtcaggtactcc

SEQ ID NO: 43983 - DNA, 25 bp, Homo sapien
tagactggattttgtgttatctctc

SEQ ID NO: 43984 - DNA, 25 bp, Homo sapien
tagactggatttagtgttatctctc

SEQ ID NO: 43985 - DNA, 25 bp, Homo sapien
ggagcctcggaactgaggtcacccc

SEQ ID NO: 43986 - DNA, 25 bp, Homo sapien
ggagcctcggaagtgaggtcacccc

SEQ ID NO: 43987 - DNA, 25 bp, Homo sapien
aggacacgtgggttttgttcgcccc

SEQ ID NO: 43988 - DNA, 25 bp, Homo sapien
aggacacgtgggatttgttcgcccc

SEQ ID NO: 43989 - DNA, 25 bp, Homo sapien
agatcggtccatctcgttcctagcc

SEQ ID NO: 43990 - DNA, 25 bp, Homo sapien
agatcggtccatgtcgttcctagcc

SEQ ID NO: 43991 - DNA, 25 bp, Homo sapien
ggggagtccactgtcgtcgcaccca

SEQ ID NO: 43992 - DNA, 25 bp, Homo sapien
ggggagtccactctcgtcgcaccca

SEQ ID NO: 43993 - DNA, 25 bp, Homo sapien
tttcacagtccctttccgtccgggg

SEQ ID NO: 43994 - DNA, 25 bp, Homo sapien
tttcacagtcccattccgtccgggg

SEQ ID NO: 43995 - DNA, 25 bp, Homo sapien
ggtcgcgtccacgtcctctgtggtc

SEQ ID NO: 43996 - DNA, 25 bp, Homo sapien
ggtcgcgtccacctcctctgtggtc

SEQ ID NO: 43997 - DNA, 25 bp, Homo sapien
acgtgtgcaacaaccccgctgtgac

SEQ ID NO: 43998 - DNA, 25 bp, Homo sapien
acgtgtgcaacatccccgctgtgac

SEQ ID NO: 43999 - DNA, 25 bp, Homo sapien
ggggtcgtgaagaccccttcgtcgc

SEQ ID NO: 44000 - DNA, 25 bp, Homo sapien
ggggtcgtgaagtccccttcgtcgc

SEQ ID NO: 44001 - DNA, 25 bp, Homo sapien
gggtgtaaaaagacgtctttatcac

SEQ ID NO: 44002 - DNA, 25 bp, Homo sapien
gggtgtaaaaagtcgtctttatcac

SEQ ID NO: 44003 - DNA, 25 bp, Homo sapien
gacggaccgaccaaaaactttttcc

SEQ ID NO: 44004 - DNA, 25 bp, Homo sapien
gacggaccgacctaaaactttttcc

SEQ ID NO: 44005 - DNA, 25 bp, Homo sapien
aacagtcaccaagaattgacttcac

SEQ ID NO: 44006 - DNA, 25 bp, Homo sapien
aacagtcaccaacaattgacttcac

SEQ ID NO: 44007 - DNA, 25 bp, Homo sapien
gaagacatatcatgtttcttctcgt

SEQ ID NO: 44008 - DNA, 25 bp, Homo sapien
gaagacatatcaagtttcttctcgt

SEQ ID NO: 44009 - DNA, 25 bp, Homo sapien
cccaggtgtctgttgggtccctcct

SEQ ID NO: 44010 - DNA, 25 bp, Homo sapien
cccaggtgtctgatgggtccctcct

SEQ ID NO: 44011 - DNA, 25 bp, Homo sapien
catgagtctgtgtgagtgccctgtc

SEQ ID NO: 44012 - DNA, 25 bp, Homo sapien
catgagtctgtgagagtgccctgtc

SEQ ID NO: 44013 - DNA, 25 bp, Homo sapien
cccccgagggtgtgtctgcccgtgg

SEQ ID NO: 44014 - DNA, 25 bp, Homo sapien
cccccgagggtgagtctgcccgtgg

SEQ ID NO: 44015 - DNA, 25 bp, Homo sapien
gtccctcttgggacgtgccgtcagt

SEQ ID NO: 44016 - DNA, 25 bp, Homo sapien
gtccctcttgggtcgtgccgtcagt

SEQ ID NO: 44017 - DNA, 25 bp, Homo sapien
atgcatattgtatagttagactcca

SEQ ID NO: 44018 - DNA, 25 bp, Homo sapien
atgcatattgtaaagttagactcca

SEQ ID NO: 44019 - DNA, 25 bp, Homo sapien
tttctcctttgagtctgtctccacg

SEQ ID NO: 44020 - DNA, 25 bp, Homo sapien
tttctcctttgactctgtctccacg

SEQ ID NO: 44021 - DNA, 25 bp, Homo sapien
gttttcgacgttttctgggaaacgg

SEQ ID NO: 44022 - DNA, 25 bp, Homo sapien
gttttcgacgttatctgggaaacgg

SEQ ID NO: 44023 - DNA, 25 bp, Homo sapien
tctggtcgtgcgaccgggcctcgtc

SEQ ID NO: 44024 - DNA, 25 bp, Homo sapien
tctggtcgtgcgtccgggcctcgtc

SEQ ID NO: 44025 - DNA, 25 bp, Homo sapien
gtggctcgtgcatccggtgtcccta

SEQ ID NO: 44026 - DNA, 25 bp, Homo sapien
gtggctcgtgcaaccggtgtcccta

SEQ ID NO: 44027 - DNA, 25 bp, Homo sapien
gtttccttatcacgtctgtccgtcc

SEQ ID NO: 44028 - DNA, 25 bp, Homo sapien
gtttccttatcaggtctgtccgtcc

SEQ ID NO: 44029 - DNA, 25 bp, Homo sapien
tgttttacgtgacctggggctcttc

SEQ ID NO: 44030 - DNA, 25 bp, Homo sapien
tgttttacgtgagctggggctcttc

SEQ ID NO: 44031 - DNA, 25 bp, Homo sapien
tgctttgtccggtagggcgttctcg

SEQ ID NO: 44032 - DNA, 25 bp, Homo sapien
tgctttgtccggaagggcgttctcg

SEQ ID NO: 44033 - DNA, 25 bp, Homo sapien
tcttttctggagagacgacgtcctc

SEQ ID NO: 44034 - DNA, 25 bp, Homo sapien
tcttttctggagtgacgacgtcctc

SEQ ID NO: 44035 - DNA, 25 bp, Homo sapien
ctcgttttcgtcattgtagattctc

SEQ ID NO: 44036 - DNA, 25 bp, Homo sapien
ctcgttttcgtctttgtagattctc

SEQ ID NO: 44037 - DNA, 25 bp, Homo sapien
gctgttcttcgacctccttctgttt

SEQ ID NO: 44038 - DNA, 25 bp, Homo sapien
gctgttcttcgagctccttctgttt

SEQ ID NO: 44039 - DNA, 25 bp, Homo sapien
tcagaacctcgagacttattgttct

SEQ ID NO: 44040 - DNA, 25 bp, Homo sapien
tcagaacctcgacacttattgttct

SEQ ID NO: 44041 - DNA, 25 bp, Homo sapien
tttacccgtcgaccaacatggttct

SEQ ID NO: 44042 - DNA, 25 bp, Homo sapien
tttacccgtcgagcaacatggttct

SEQ ID NO: 44043 - DNA, 25 bp, Homo sapien
ttttacaccgagctctacttgattg

SEQ ID NO: 44044 - DNA, 25 bp, Homo sapien
ttttacaccgaggtctacttgattg

SEQ ID NO: 44045 - DNA, 25 bp, Homo sapien
gaacccgtaggtcattaccgagtcg

SEQ ID NO: 44046 - DNA, 25 bp, Homo sapien
gaacccgtaggtgattaccgagtcg

SEQ ID NO: 44047 - DNA, 25 bp, Homo sapien
ctgacctctccgtgtcagcgagtac

SEQ ID NO: 44048 - DNA, 25 bp, Homo sapien
ctgacctctccgagtcagcgagtac

SEQ ID NO: 44049 - DNA, 25 bp, Homo sapien
tgggacccaggaccgagaccgacga

SEQ ID NO: 44050 - DNA, 25 bp, Homo sapien
tgggacccaggagcgagaccgacga

SEQ ID NO: 44051 - DNA, 25 bp, Homo sapien
tctcgggtatccagggtgtgacccc

SEQ ID NO: 44052 - DNA, 25 bp, Homo sapien
tctcgggtatcctgggtgtgacccc

SEQ ID NO: 44053 - DNA, 25 bp, Homo sapien
ggggtgtcagtctccacgacgccgc

SEQ ID NO: 44054 - DNA, 25 bp, Homo sapien
ggggtgtcagtcaccacgacgccgc

SEQ ID NO: 44055 - DNA, 25 bp, Homo sapien
ggttacagtcgtctcaacactcgta

SEQ ID NO: 44056 - DNA, 25 bp, Homo sapien
ggttacagtcgtgtcaacactcgta

SEQ ID NO: 44057 - DNA, 25 bp, Homo sapien
agacgacctcctgtctcaggacttc

SEQ ID NO: 44058 - DNA, 25 bp, Homo sapien
agacgacctcctctctcaggacttc

SEQ ID NO: 44059 - DNA, 25 bp, Homo sapien
tgagggcccttatcgccggactctc

SEQ ID NO: 44060 - DNA, 25 bp, Homo sapien
tgagggcccttaacgccggactctc

SEQ ID NO: 44061 - DNA, 25 bp, Homo sapien
taacaagacttctgattcgggagga

SEQ ID NO: 44062 - DNA, 25 bp, Homo sapien
taacaagacttcagattcgggagga

SEQ ID NO: 44063 - DNA, 25 bp, Homo sapien
ttctccagacagagcccttgggact

SEQ ID NO: 44064 - DNA, 25 bp, Homo sapien
ttctccagacagtgcccttgggact

SEQ ID NO: 44065 - DNA, 25 bp, Homo sapien
tcagacgggtagacccctacgagtc

SEQ ID NO: 44066 - DNA, 25 bp, Homo sapien
tcagacgggtagtcccctacgagtc

SEQ ID NO: 44067 - DNA, 25 bp, Homo sapien
tcttggaccgggtcttcttcacgac

SEQ ID NO: 44068 - DNA, 25 bp, Homo sapien
tcttggaccgggacttcttcacgac

SEQ ID NO: 44069 - DNA, 25 bp, Homo sapien
ttccggaagaggacccggtcagcgt

SEQ ID NO: 44070 - DNA, 25 bp, Homo sapien
ttccggaagaggtcccggtcagcgt

SEQ ID NO: 44071 - DNA, 25 bp, Homo sapien
acgacagaagtagagccgtcgcctg

SEQ ID NO: 44072 - DNA, 25 bp, Homo sapien
acgacagaagtacagccgtcgcctg

SEQ ID NO: 44073 - DNA, 25 bp, Homo sapien
tcgctggtaaaaagaggtgcacctt

SEQ ID NO: 44074 - DNA, 25 bp, Homo sapien
tcgctggtaaaatgaggtgcacctt

SEQ ID NO: 44075 - DNA, 25 bp, Homo sapien
cggaccaaaggagtccatgtctctt

SEQ ID NO: 44076 - DNA, 25 bp, Homo sapien
cggaccaaaggactccatgtctctt

SEQ ID NO: 44077 - DNA, 25 bp, Homo sapien
tactgtgtcacgtcgtacctcttcg

SEQ ID NO: 44078 - DNA, 25 bp, Homo sapien
tactgtgtcacgacgtacctcttcg

SEQ ID NO: 44079 - DNA, 25 bp, Homo sapien
cgacgaacaagagttgtttcgttac

SEQ ID NO: 44080 - DNA, 25 bp, Homo sapien
cgacgaacaagacttgtttcgttac

SEQ ID NO: 44081 - DNA, 25 bp, Homo sapien
gacacgggtacctacgtttacttac

SEQ ID NO: 44082 - DNA, 25 bp, Homo sapien
gacacgggtaccaacgtttacttac

SEQ ID NO: 44083 - DNA, 25 bp, Homo sapien
gtccttttgtcctgctttccgtacg

SEQ ID NO: 44084 - DNA, 25 bp, Homo sapien
gtccttttgtccagctttccgtacg

SEQ ID NO: 44085 - DNA, 25 bp, Homo sapien
cgtcgtttagacgacaaaattcttt

SEQ ID NO: 44086 - DNA, 25 bp, Homo sapien
cgtcgtttagaccacaaaattcttt

SEQ ID NO: 44087 - DNA, 25 bp, Homo sapien
gttataaccataaaggctcgtacct

SEQ ID NO: 44088 - DNA, 25 bp, Homo sapien
gttataaccatataggctcgtacct

SEQ ID NO: 44089 - DNA, 25 bp, Homo sapien
gtcctctatgacaacgagatactct

SEQ ID NO: 44090 - DNA, 25 bp, Homo sapien
gtcctctatgactacgagatactct

SEQ ID NO: 44091 - DNA, 25 bp, Homo sapien
gttccacaggtcttacgatactacc

SEQ ID NO: 44092 - DNA, 25 bp, Homo sapien
gttccacaggtcatacgatactacc

SEQ ID NO: 44093 - DNA, 25 bp, Homo sapien
aatcgtctgtccagagaccgtagac

SEQ ID NO: 44094 - DNA, 25 bp, Homo sapien
aatcgtctgtcctgagaccgtagac

SEQ ID NO: 44095 - DNA, 25 bp, Homo sapien
gttgaaggtctcgacttctcatcga

SEQ ID NO: 44096 - DNA, 25 bp, Homo sapien
gttgaaggtctccacttctcatcga

SEQ ID NO: 44097 - DNA, 25 bp, Homo sapien
ggagattcgggtgacccttgtttga

SEQ ID NO: 44098 - DNA, 25 bp, Homo sapien
ggagattcgggtcacccttgtttga

SEQ ID NO: 44099 - DNA, 25 bp, Homo sapien
agctaaggtcaccatggtcgtagtg

SEQ ID NO: 44100 - DNA, 25 bp, Homo sapien
agctaaggtcacgatggtcgtagtg

SEQ ID NO: 44101 - DNA, 25 bp, Homo sapien
tcaatgttagggcaccgagggttcc

SEQ ID NO: 44102 - DNA, 25 bp, Homo sapien
tcaatgttaggggaccgagggttcc

SEQ ID NO: 44103 - DNA, 25 bp, Homo sapien
cttcttatggggagattctatctcc

SEQ ID NO: 44104 - DNA, 25 bp, Homo sapien
cttcttatggggtgattctatctcc

SEQ ID NO: 44105 - DNA, 25 bp, Homo sapien
tgacagatgggggtgctttacctcc

SEQ ID NO: 44106 - DNA, 25 bp, Homo sapien
tgacagatggggctgctttacctcc

SEQ ID NO: 44107 - DNA, 25 bp, Homo sapien
tagtacaatgttcttttgttgtcac

SEQ ID NO: 44108 - DNA, 25 bp, Homo sapien
tagtacaatgttgttttgttgtcac

SEQ ID NO: 44109 - DNA, 25 bp, Homo sapien
ccttattaggttttctggtctctcc

SEQ ID NO: 44110 - DNA, 25 bp, Homo sapien
ccttattaggttatctggtctctcc

SEQ ID NO: 44111 - DNA, 25 bp, Homo sapien
gaatcttatgtgttttggttccgtc

SEQ ID NO: 44112 - DNA, 25 bp, Homo sapien
gaatcttatgtgatttggttccgtc

SEQ ID NO: 44113 - DNA, 25 bp, Homo sapien
ctttttagtcaggatttgtcctgtc

SEQ ID NO: 44114 - DNA, 25 bp, Homo sapien
ctttttagtcagcatttgtcctgtc

SEQ ID NO: 44115 - DNA, 25 bp, Homo sapien
cgtagtggtaaatgtgacactactt

SEQ ID NO: 44116 - DNA, 25 bp, Homo sapien
cgtagtggtaaaagtgacactactt

SEQ ID NO: 44117 - DNA, 25 bp, Homo sapien
gacctcgacctcaaactagaagtaa

SEQ ID NO: 44118 - DNA, 25 bp, Homo sapien
gacctcgacctctaactagaagtaa

SEQ ID NO: 44119 - DNA, 25 bp, Homo sapien
atagctactccgtccattacggaaa

SEQ ID NO: 44120 - DNA, 25 bp, Homo sapien
atagctactccgaccattacggaaa

SEQ ID NO: 44121 - DNA, 25 bp, Homo sapien
aacgattctcttgtctcagtgaaag

SEQ ID NO: 44122 - DNA, 25 bp, Homo sapien
aacgattctcttctctcagtgaaag

SEQ ID NO: 44123 - DNA, 25 bp, Homo sapien
aaacgacttcattcccgtgggattt

SEQ ID NO: 44124 - DNA, 25 bp, Homo sapien
aaacgacttcatacccgtgggattt

SEQ ID NO: 44125 - DNA, 25 bp, Homo sapien
tgtgtctaaagaagattcgactcta

SEQ ID NO: 44126 - DNA, 25 bp, Homo sapien
tgtgtctaaagatgattcgactcta

SEQ ID NO: 44127 - DNA, 25 bp, Homo sapien
cggctgcgggtgtcgcgactactct

SEQ ID NO: 44128 - DNA, 25 bp, Homo sapien
cggctgcgggtgacgcgactactct

SEQ ID NO: 44129 - DNA, 25 bp, Homo sapien
gatttgtcggtctacgagactctct

SEQ ID NO: 44130 - DNA, 25 bp, Homo sapien
gatttgtcggtcaacgagactctct

SEQ ID NO: 44131 - DNA, 25 bp, Homo sapien
tcgtgtactatcatcgtaaccgtgt

SEQ ID NO: 44132 - DNA, 25 bp, Homo sapien
tcgtgtactatcttcgtaaccgtgt

SEQ ID NO: 44133 - DNA, 25 bp, Homo sapien
acttcacttccttcgtgtctctgtg

SEQ ID NO: 44134 - DNA, 25 bp, Homo sapien
acttcacttcctacgtgtctctgtg

SEQ ID NO: 44135 - DNA, 25 bp, Homo sapien
acatacgtcactctctcgtctacgg

SEQ ID NO: 44136 - DNA, 25 bp, Homo sapien
acatacgtcactgtctcgtctacgg

SEQ ID NO: 44137 - DNA, 25 bp, Homo sapien
tagacgagtaagcatacgatccaat

SEQ ID NO: 44138 - DNA, 25 bp, Homo sapien
tagacgagtaaggatacgatccaat

SEQ ID NO: 44139 - DNA, 25 bp, Homo sapien
ttctagaggtaacgggacgtcctaa

SEQ ID NO: 44140 - DNA, 25 bp, Homo sapien
ttctagaggtaaggggacgtcctaa

SEQ ID NO: 44141 - DNA, 25 bp, Homo sapien
gtggaaggtctatgggccctttacg

SEQ ID NO: 44142 - DNA, 25 bp, Homo sapien
gtggaaggtctaagggccctttacg

SEQ ID NO: 44143 - DNA, 25 bp, Homo sapien
tggactcggggagacctccgtggtc

SEQ ID NO: 44144 - DNA, 25 bp, Homo sapien
tggactcggggacacctccgtggtc

SEQ ID NO: 44145 - DNA, 25 bp, Homo sapien
gatacgttgtaaaacttacgattca

SEQ ID NO: 44146 - DNA, 25 bp, Homo sapien
gatacgttgtaatacttacgattca

SEQ ID NO: 44147 - DNA, 25 bp, Homo sapien
ggtctcgagtggtacccgacgtcca

SEQ ID NO: 44148 - DNA, 25 bp, Homo sapien
ggtctcgagtggaacccgacgtcca

SEQ ID NO: 44149 - DNA, 25 bp, Homo sapien
cgagtgttcggaagaccgccaagca

SEQ ID NO: 44150 - DNA, 25 bp, Homo sapien
cgagtgttcggatgaccgccaagca

SEQ ID NO: 44151 - DNA, 25 bp, Homo sapien
agtatcaggaagttccgaagaactt

SEQ ID NO: 44152 - DNA, 25 bp, Homo sapien
agtatcaggaagatccgaagaactt

SEQ ID NO: 44153 - DNA, 25 bp, Homo sapien
ttgtcgtttctacgaaccaaagaac

SEQ ID NO: 44154 - DNA, 25 bp, Homo sapien
ttgtcgtttctaggaaccaaagaac

SEQ ID NO: 44155 - DNA, 25 bp, Homo sapien
gggttttgtgaacagatacgtactc

SEQ ID NO: 44156 - DNA, 25 bp, Homo sapien
gggttttgtgaagagatacgtactc

SEQ ID NO: 44157 - DNA, 25 bp, Homo sapien
acatggtcccacgatgtgaaataac

SEQ ID NO: 44158 - DNA, 25 bp, Homo sapien
acatggtcccaccatgtgaaataac

SEQ ID NO: 44159 - DNA, 25 bp, Homo sapien
aggaaacccgcaacacgtaaataac

SEQ ID NO: 44160 - DNA, 25 bp, Homo sapien
aggaaacccgcatcacgtaaataac

SEQ ID NO: 44161 - DNA, 25 bp, Homo sapien
gacccagacgagatcgacgtatact

SEQ ID NO: 44162 - DNA, 25 bp, Homo sapien
gacccagacgagttcgacgtatact

SEQ ID NO: 44163 - DNA, 25 bp, Homo sapien
tgcgaccctagtgacatcccgtcgt

SEQ ID NO: 44164 - DNA, 25 bp, Homo sapien
tgcgaccctagtcacatcccgtcgt

SEQ ID NO: 44165 - DNA, 25 bp, Homo sapien
ttccaagaaatcgagaccctgagtg

SEQ ID NO: 44166 - DNA, 25 bp, Homo sapien
ttccaagaaatccagaccctgagtg

SEQ ID NO: 44167 - DNA, 25 bp, Homo sapien
cggggatgtctcctccgaagtagag

SEQ ID NO: 44168 - DNA, 25 bp, Homo sapien
cggggatgtctcgtccgaagtagag

SEQ ID NO: 44169 - DNA, 25 bp, Homo sapien
ctaagaatgtactttgctaagtcac

SEQ ID NO: 44170 - DNA, 25 bp, Homo sapien
ctaagaatgtacattgctaagtcac

SEQ ID NO: 44171 - DNA, 25 bp, Homo sapien
tcaaaaccgttatgtgacgtatccc

SEQ ID NO: 44172 - DNA, 25 bp, Homo sapien
tcaaaaccgttaagtgacgtatccc

SEQ ID NO: 44173 - DNA, 25 bp, Homo sapien
atcaaacgtcttctgtgtctacttg

SEQ ID NO: 44174 - DNA, 25 bp, Homo sapien
atcaaacgtcttgtgtgtctacttg

SEQ ID NO: 44175 - DNA, 25 bp, Homo sapien
gtcttgactaaattgtcgttctcta

SEQ ID NO: 44176 - DNA, 25 bp, Homo sapien
gtcttgactaaaatgtcgttctcta

SEQ ID NO: 44177 - DNA, 25 bp, Homo sapien
acatgttcatacgaggaggatctta

SEQ ID NO: 44178 - DNA, 25 bp, Homo sapien
acatgttcataccaggaggatctta

SEQ ID NO: 44179 - DNA, 25 bp, Homo sapien
acatgtttactcgaacaatgtgtta

SEQ ID NO: 44180 - DNA, 25 bp, Homo sapien
acatgtttactccaacaatgtgtta

SEQ ID NO: 44181 - DNA, 25 bp, Homo sapien
gggaccgggacccaacaaagtgtga

SEQ ID NO: 44182 - DNA, 25 bp, Homo sapien
gggaccgggaccgaacaaagtgtga

SEQ ID NO: 44183 - DNA, 25 bp, Homo sapien
ggcccggagcctcgtcggaggggta

SEQ ID NO: 44184 - DNA, 25 bp, Homo sapien
ggcccggagcctggtcggaggggta

SEQ ID NO: 44185 - DNA, 25 bp, Homo sapien
tccaggaaccagtaccgaggtgaga

SEQ ID NO: 44186 - DNA, 25 bp, Homo sapien
tccaggaaccagaaccgaggtgaga

SEQ ID NO: 44187 - DNA, 25 bp, Homo sapien
cctccgtttccacaaccgagggtga

SEQ ID NO: 44188 - DNA, 25 bp, Homo sapien
cctccgtttccagaaccgagggtga

SEQ ID NO: 44189 - DNA, 25 bp, Homo sapien
ctccggttcccgtccgtcaagggtt

SEQ ID NO: 44190 - DNA, 25 bp, Homo sapien
ctccggttcccgaccgtcaagggtt

SEQ ID NO: 44191 - DNA, 25 bp, Homo sapien
cacccaatgtagagtgtggacttta

SEQ ID NO: 44192 - DNA, 25 bp, Homo sapien
cacccaatgtagtgtgtggacttta

SEQ ID NO: 44193 - DNA, 25 bp, Homo sapien
ttcaaaacttgactttccggtgacg

SEQ ID NO: 44194 - DNA, 25 bp, Homo sapien
ttcaaaacttgagtttccggtgacg

SEQ ID NO: 44195 - DNA, 25 bp, Homo sapien
ctcaacctcttgtgtgttgccggag

SEQ ID NO: 44196 - DNA, 25 bp, Homo sapien
ctcaacctcttgagtgttgccggag

SEQ ID NO: 44197 - DNA, 25 bp, Homo sapien
atccttgtgtctggtgagctagtgg

SEQ ID NO: 44198 - DNA, 25 bp, Homo sapien
atccttgtgtctcgtgagctagtgg

SEQ ID NO: 44199 - DNA, 25 bp, Homo sapien
ctcactagtactctgagtaggactc

SEQ ID NO: 44200 - DNA, 25 bp, Homo sapien
ctcactagtactgtgagtaggactc

SEQ ID NO: 44201 - DNA, 25 bp, Homo sapien
tcttaagactagttagttaccgata

SEQ ID NO: 44202 - DNA, 25 bp, Homo sapien
tcttaagactagatagttaccgata

SEQ ID NO: 44203 - DNA, 25 bp, Homo sapien
acatggtgtagaagggtgacccgta

SEQ ID NO: 44204 - DNA, 25 bp, Homo sapien
acatggtgtagatgggtgacccgta

SEQ ID NO: 44205 - DNA, 25 bp, Homo sapien
tcaaggtgtgacagagggcacagtc

SEQ ID NO: 44206 - DNA, 25 bp, Homo sapien
tcaaggtgtgactgagggcacagtc

SEQ ID NO: 44207 - DNA, 25 bp, Homo sapien
acggtatcacgaagggcgacgacga

SEQ ID NO: 44208 - DNA, 25 bp, Homo sapien
acggtatcacgatgggcgacgacga

SEQ ID NO: 44209 - DNA, 25 bp, Homo sapien
taacggttccgagaccgtgagactt

SEQ ID NO: 44210 - DNA, 25 bp, Homo sapien
taacggttccgacaccgtgagactt

SEQ ID NO: 44211 - DNA, 25 bp, Homo sapien
tcttcacggtctcgtcaaggttgca

SEQ ID NO: 44212 - DNA, 25 bp, Homo sapien
tcttcacggtctggtcaaggttgca

SEQ ID NO: 44213 - DNA, 25 bp, Homo sapien
tgagtgacacactgaagtccgtctc

SEQ ID NO: 44214 - DNA, 25 bp, Homo sapien
tgagtgacacacagaagtccgtctc

SEQ ID NO: 44215 - DNA, 25 bp, Homo sapien
atgatcgagacgacgaaccgtctcc

SEQ ID NO: 44216 - DNA, 25 bp, Homo sapien
atgatcgagacgtcgaaccgtctcc

SEQ ID NO: 44217 - DNA, 25 bp, Homo sapien
gaaattatagtctgacatctctgtt

SEQ ID NO: 44218 - DNA, 25 bp, Homo sapien
gaaattatagtcagacatctctgtt

SEQ ID NO: 44219 - DNA, 25 bp, Homo sapien
cttccgatgtttttacagtctggtt

SEQ ID NO: 44220 - DNA, 25 bp, Homo sapien
cttccgatgtttatacagtctggtt

SEQ ID NO: 44221 - DNA, 25 bp, Homo sapien
gatccttcttcgactcgacttaagg

SEQ ID NO: 44222 - DNA, 25 bp, Homo sapien
gatccttcttcgtctcgacttaagg

SEQ ID NO: 44223 - DNA, 25 bp, Homo sapien
agtctctcttgtggacccataagac

SEQ ID NO: 44224 - DNA, 25 bp, Homo sapien
agtctctcttgtcgacccataagac

SEQ ID NO: 44225 - DNA, 25 bp, Homo sapien
tccgtacgtctcttcccggaggtaa

SEQ ID NO: 44226 - DNA, 25 bp, Homo sapien
tccgtacgtctcatcccggaggtaa

SEQ ID NO: 44227 - DNA, 25 bp, Homo sapien
ttagctctaccttggctaacggtgg

SEQ ID NO: 44228 - DNA, 25 bp, Homo sapien
ttagctctacctaggctaacggtgg

SEQ ID NO: 44229 - DNA, 25 bp, Homo sapien
acccgcgacctaggacgactaaggg

SEQ ID NO: 44230 - DNA, 25 bp, Homo sapien
acccgcgacctacgacgactaaggg

SEQ ID NO: 44231 - DNA, 25 bp, Homo sapien
aaccggtcgtccaagagcttcatct

SEQ ID NO: 44232 - DNA, 25 bp, Homo sapien
aaccggtcgtcctagagcttcatct

SEQ ID NO: 44233 - DNA, 25 bp, Homo sapien
attacgtaacgtgtccgaacttccc

SEQ ID NO: 44234 - DNA, 25 bp, Homo sapien
attacgtaacgtctccgaacttccc

SEQ ID NO: 44235 - DNA, 25 bp, Homo sapien
aacgagagacgtctctgaattcaag

SEQ ID NO: 44236 - DNA, 25 bp, Homo sapien
aacgagagacgtgtctgaattcaag

SEQ ID NO: 44237 - DNA, 25 bp, Homo sapien
tcaggtaaggggttctcgaatattt

SEQ ID NO: 44238 - DNA, 25 bp, Homo sapien
tcaggtaaggggatctcgaatattt

SEQ ID NO: 44239 - DNA, 25 bp, Homo sapien
tcaccaagtgggattctagataatt

SEQ ID NO: 44240 - DNA, 25 bp, Homo sapien
tcaccaagtgggtttctagataatt

SEQ ID NO: 44241 - DNA, 25 bp, Homo sapien
tacccccgtttgacgggtctcctgt

SEQ ID NO: 44242 - DNA, 25 bp, Homo sapien
tacccccgtttgtcgggtctcctgt

SEQ ID NO: 44243 - DNA, 25 bp, Homo sapien
atttctccggtctcggttataagtc

SEQ ID NO: 44244 - DNA, 25 bp, Homo sapien
atttctccggtcacggttataagtc

SEQ ID NO: 44245 - DNA, 25 bp, Homo sapien
actcgacccgtagtggttaacagta

SEQ ID NO: 44246 - DNA, 25 bp, Homo sapien
actcgacccgtactggttaacagta

SEQ ID NO: 44247 - DNA, 25 bp, Homo sapien
aaggcacgtccttaagggtccaaga

SEQ ID NO: 44248 - DNA, 25 bp, Homo sapien
aaggcacgtcctaaagggtccaaga

SEQ ID NO: 44249 - DNA, 25 bp, Homo sapien
atagggttcaagttggtccggtgac

SEQ ID NO: 44250 - DNA, 25 bp, Homo sapien
atagggttcaagatggtccggtgac

SEQ ID NO: 44251 - DNA, 25 bp, Homo sapien
tcagagggtccgaggtttcctattt

SEQ ID NO: 44252 - DNA, 25 bp, Homo sapien
tcagagggtccgtggtttcctattt

SEQ ID NO: 44253 - DNA, 25 bp, Homo sapien
tggaacctccgtctgtttaacaaca

SEQ ID NO: 44254 - DNA, 25 bp, Homo sapien
tggaacctccgtgtgtttaacaaca

SEQ ID NO: 44255 - DNA, 25 bp, Homo sapien
accttactccgtttcgtcaagcgta

SEQ ID NO: 44256 - DNA, 25 bp, Homo sapien
accttactccgtatcgtcaagcgta

SEQ ID NO: 44257 - DNA, 25 bp, Homo sapien
cgtcagtctaattcagtgtaaattt

SEQ ID NO: 44258 - DNA, 25 bp, Homo sapien
cgtcagtctaatacagtgtaaattt

SEQ ID NO: 44259 - DNA, 25 bp, Homo sapien
gaccaatccgactctacacggtcag

SEQ ID NO: 44260 - DNA, 25 bp, Homo sapien
gaccaatccgacactacacggtcag

SEQ ID NO: 44261 - DNA, 25 bp, Homo sapien
ggggcccgcaggaccagacgtcact

SEQ ID NO: 44262 - DNA, 25 bp, Homo sapien
ggggcccgcaggtccagacgtcact

SEQ ID NO: 44263 - DNA, 25 bp, Homo sapien
ggggtcgaagacgtgagattcccac

SEQ ID NO: 44264 - DNA, 25 bp, Homo sapien
ggggtcgaagacctgagattcccac

SEQ ID NO: 44265 - DNA, 25 bp, Homo sapien
gagagaactttaagtactttaaccg

SEQ ID NO: 44266 - DNA, 25 bp, Homo sapien
gagagaactttatgtactttaaccg

SEQ ID NO: 44267 - DNA, 25 bp, Homo sapien
taagtggacgtctacctattctccc

SEQ ID NO: 44268 - DNA, 25 bp, Homo sapien
taagtggacgtcaacctattctccc

SEQ ID NO: 44269 - DNA, 25 bp, Homo sapien
ttatccgtacacaggttttctgtta

SEQ ID NO: 44270 - DNA, 25 bp, Homo sapien
ttatccgtacactggttttctgtta

SEQ ID NO: 44271 - DNA, 25 bp, Homo sapien
tatcccaggggttactgttagtact

SEQ ID NO: 44272 - DNA, 25 bp, Homo sapien
tatcccaggggtaactgttagtact

SEQ ID NO: 44273 - DNA, 25 bp, Homo sapien
tggtctttgtagtcggacctttgtc

SEQ ID NO: 44274 - DNA, 25 bp, Homo sapien
tggtctttgtagacggacctttgtc

SEQ ID NO: 44275 - DNA, 25 bp, Homo sapien
gtcactctgtagaagggtccgaccc

SEQ ID NO: 44276 - DNA, 25 bp, Homo sapien
gtcactctgtagtagggtccgaccc

SEQ ID NO: 44277 - DNA, 25 bp, Homo sapien
tgcctctacgagagacacatcacca

SEQ ID NO: 44278 - DNA, 25 bp, Homo sapien
tgcctctacgagtgacacatcacca

SEQ ID NO: 44279 - DNA, 25 bp, Homo sapien
accatgagacggtccgagttggcga

SEQ ID NO: 44280 - DNA, 25 bp, Homo sapien
accatgagacggaccgagttggcga

SEQ ID NO: 44281 - DNA, 25 bp, Homo sapien
cacgacaacaggtcctacccgggat

SEQ ID NO: 44282 - DNA, 25 bp, Homo sapien
cacgacaacaggacctacccgggat

SEQ ID NO: 44283 - DNA, 25 bp, Homo sapien
taattaaacaacgaaacccggtgag

SEQ ID NO: 44284 - DNA, 25 bp, Homo sapien
taattaaacaaccaaacccggtgag

SEQ ID NO: 44285 - DNA, 25 bp, Homo sapien
agaagacacgatcacaccagtaggt

SEQ ID NO: 44286 - DNA, 25 bp, Homo sapien
agaagacacgatgacaccagtaggt

SEQ ID NO: 44287 - DNA, 25 bp, Homo sapien
gtttgaggttcaggacgacaagagc

SEQ ID NO: 44288 - DNA, 25 bp, Homo sapien
gtttgaggttcacgacgacaagagc

SEQ ID NO: 44289 - DNA, 25 bp, Homo sapien
tttcaagagggaacctctaaaacct

SEQ ID NO: 44290 - DNA, 25 bp, Homo sapien
tttcaagagggatcctctaaaacct

SEQ ID NO: 44291 - DNA, 25 bp, Homo sapien
caccagagggactccaggtagacag

SEQ ID NO: 44292 - DNA, 25 bp, Homo sapien
caccagagggacaccaggtagacag

SEQ ID NO: 44293 - DNA, 25 bp, Homo sapien
ggtgttaccaaagaggccagaaacc

SEQ ID NO: 44294 - DNA, 25 bp, Homo sapien
ggtgttaccaaacaggccagaaacc

SEQ ID NO: 44295 - DNA, 25 bp, Homo sapien
aattaccaaaggaccactaagaatg

SEQ ID NO: 44296 - DNA, 25 bp, Homo sapien
aattaccaaaggtccactaagaatg

SEQ ID NO: 44297 - DNA, 25 bp, Homo sapien
aattgaaatcagtccagtcaaagag

SEQ ID NO: 44298 - DNA, 25 bp, Homo sapien
aattgaaatcagaccagtcaaagag

SEQ ID NO: 44299 - DNA, 25 bp, Homo sapien
tcggaagaaaggtcatcaaggtcgt

SEQ ID NO: 44300 - DNA, 25 bp, Homo sapien
tcggaagaaaggacatcaaggtcgt

SEQ ID NO: 44301 - DNA, 25 bp, Homo sapien
gagaccaagtcagaccgtcacgggt

SEQ ID NO: 44302 - DNA, 25 bp, Homo sapien
gagaccaagtcacaccgtcacgggt

SEQ ID NO: 44303 - DNA, 25 bp, Homo sapien
aagacataggtgaagaagtccgcct

SEQ ID NO: 44304 - DNA, 25 bp, Homo sapien
aagacataggtgtagaagtccgcct

SEQ ID NO: 44305 - DNA, 25 bp, Homo sapien
gatcttaaggtactgaattcgactc

SEQ ID NO: 44306 - DNA, 25 bp, Homo sapien
gatcttaaggtagtgaattcgactc

SEQ ID NO: 44307 - DNA, 25 bp, Homo sapien
ggtacgaaacaatcaatagcctaat

SEQ ID NO: 44308 - DNA, 25 bp, Homo sapien
ggtacgaaacaaacaatagcctaat

SEQ ID NO: 44309 - DNA, 25 bp, Homo sapien
agggaccaaacacgactatggttaa

SEQ ID NO: 44310 - DNA, 25 bp, Homo sapien
agggaccaaacaggactatggttaa

SEQ ID NO: 44311 - DNA, 25 bp, Homo sapien
ctttcccatacataaaccttctaga

SEQ ID NO: 44312 - DNA, 25 bp, Homo sapien
ctttcccatacaaaaaccttctaga

SEQ ID NO: 44313 - DNA, 25 bp, Homo sapien
gtggtttcacacgacaaatttcaag

SEQ ID NO: 44314 - DNA, 25 bp, Homo sapien
gtggtttcacaccacaaatttcaag

SEQ ID NO: 44315 - DNA, 25 bp, Homo sapien
cttaccgtcgacttaccatctcaag

SEQ ID NO: 44316 - DNA, 25 bp, Homo sapien
cttaccgtcgacataccatctcaag

SEQ ID NO: 44317 - DNA, 25 bp, Homo sapien
tgacgtcgtccgtccaggtcgaggt

SEQ ID NO: 44318 - DNA, 25 bp, Homo sapien
tgacgtcgtccgaccaggtcgaggt

SEQ ID NO: 44319 - DNA, 25 bp, Homo sapien
aagagtctaggttctcgtatcgggc

SEQ ID NO: 44320 - DNA, 25 bp, Homo sapien
aagagtctaggtactcgtatcgggc

SEQ ID NO: 44321 - DNA, 25 bp, Homo sapien
acagtaagagtagaccgtatggtcc

SEQ ID NO: 44322 - DNA, 25 bp, Homo sapien
acagtaagagtacaccgtatggtcc

SEQ ID NO: 44323 - DNA, 25 bp, Homo sapien
tcacggatagcttccggaagtgcgc

SEQ ID NO: 44324 - DNA, 25 bp, Homo sapien
tcacggatagctaccggaagtgcgc

SEQ ID NO: 44325 - DNA, 25 bp, Homo sapien
ctgaggtgaccgtccaactagaccc

SEQ ID NO: 44326 - DNA, 25 bp, Homo sapien
ctgaggtgaccgaccaactagaccc

SEQ ID NO: 44327 - DNA, 25 bp, Homo sapien
cagagggaccccttataaactcggt

SEQ ID NO: 44328 - DNA, 25 bp, Homo sapien
cagagggaccccatataaactcggt

SEQ ID NO: 44329 - DNA, 25 bp, Homo sapien
acggtggctagtcctccaggtgacg

SEQ ID NO: 44330 - DNA, 25 bp, Homo sapien
acggtggctagtgctccaggtgacg

SEQ ID NO: 44331 - DNA, 25 bp, Homo sapien
acaccggtggtagagcgcgaggaac

SEQ ID NO: 44332 - DNA, 25 bp, Homo sapien
acaccggtggtacagcgcgaggaac

SEQ ID NO: 44333 - DNA, 25 bp, Homo sapien
ataacgggcttcacggtcacccgac

SEQ ID NO: 44334 - DNA, 25 bp, Homo sapien
ataacgggcttctcggtcacccgac

SEQ ID NO: 44335 - DNA, 25 bp, Homo sapien
agtcggggcgtgtgcctgagcggtc

SEQ ID NO: 44336 - DNA, 25 bp, Homo sapien
agtcggggcgtgagcctgagcggtc

SEQ ID NO: 44337 - DNA, 25 bp, Homo sapien
tcgtgtaaggtgtcatgtttcgaca

SEQ ID NO: 44338 - DNA, 25 bp, Homo sapien
tcgtgtaaggtgacatgtttcgaca

SEQ ID NO: 44339 - DNA, 25 bp, Homo sapien
gtctagtccccgaacattgttagga

SEQ ID NO: 44340 - DNA, 25 bp, Homo sapien
gtctagtccccgtacattgttagga

SEQ ID NO: 44341 - DNA, 25 bp, Homo sapien
tagacttccgtatgtcttagaatga

SEQ ID NO: 44342 - DNA, 25 bp, Homo sapien
tagacttccgtaagtcttagaatga

SEQ ID NO: 44343 - DNA, 25 bp, Homo sapien
ttaaactttgtcagggtggaccggt

SEQ ID NO: 44344 - DNA, 25 bp, Homo sapien
ttaaactttgtctgggtggaccggt

SEQ ID NO: 44345 - DNA, 25 bp, Homo sapien
caagtgttatatcaggtcctcaagt

SEQ ID NO: 44346 - DNA, 25 bp, Homo sapien
caagtgttatatgaggtcctcaagt

SEQ ID NO: 44347 - DNA, 25 bp, Homo sapien
cgtcctatgttttccggtcccaagt

SEQ ID NO: 44348 - DNA, 25 bp, Homo sapien
cgtcctatgtttaccggtcccaagt

SEQ ID NO: 44349 - DNA, 25 bp, Homo sapien
gacagaaccttgagacggcacccat

SEQ ID NO: 44350 - DNA, 25 bp, Homo sapien
gacagaaccttgtgacggcacccat

SEQ ID NO: 44351 - DNA, 25 bp, Homo sapien
ccaatggttggtactgaaccgactg

SEQ ID NO: 44352 - DNA, 25 bp, Homo sapien
ccaatggttggttctgaaccgactg

SEQ ID NO: 44353 - DNA, 25 bp, Homo sapien
ccaatcactgggatggaaccgacac

SEQ ID NO: 44354 - DNA, 25 bp, Homo sapien
ccaatcactgggttggaaccgacac

SEQ ID NO: 44355 - DNA, 25 bp, Homo sapien
tgatttagtagttgattcttctccg

SEQ ID NO: 44356 - DNA, 25 bp, Homo sapien
tgatttagtagtagattcttctccg

SEQ ID NO: 44357 - DNA, 25 bp, Homo sapien
cgtaaccgccgctctctagattccg

SEQ ID NO: 44358 - DNA, 25 bp, Homo sapien
cgtaaccgccgcactctagattccg

SEQ ID NO: 44359 - DNA, 25 bp, Homo sapien
actcggcggtgaccgcccttgcagt

SEQ ID NO: 44360 - DNA, 25 bp, Homo sapien
actcggcggtgagcgcccttgcagt

SEQ ID NO: 44361 - DNA, 25 bp, Homo sapien
agtcattgaaagtctttaggatctc

SEQ ID NO: 44362 - DNA, 25 bp, Homo sapien
agtcattgaaagactttaggatctc

SEQ ID NO: 44363 - DNA, 25 bp, Homo sapien
actatttaagatcttttgatcgacg

SEQ ID NO: 44364 - DNA, 25 bp, Homo sapien
actatttaagatgttttgatcgacg

SEQ ID NO: 44365 - DNA, 25 bp, Homo sapien
ttctaacatttgtctacgtggtaac

SEQ ID NO: 44366 - DNA, 25 bp, Homo sapien
ttctaacatttgactacgtggtaac

SEQ ID NO: 44367 - DNA, 25 bp, Homo sapien
gttgtagtcctttcatctctatgaa

SEQ ID NO: 44368 - DNA, 25 bp, Homo sapien
gttgtagtccttacatctctatgaa

SEQ ID NO: 44369 - DNA, 25 bp, Homo sapien
tgtcgtgttttctacggttttggac

SEQ ID NO: 44370 - DNA, 25 bp, Homo sapien
tgtcgtgttttcaacggttttggac

SEQ ID NO: 44371 - DNA, 25 bp, Homo sapien
tgactcttgtaactgttgtgtccct

SEQ ID NO: 44372 - DNA, 25 bp, Homo sapien
tgactcttgtaagtgttgtgtccct

SEQ ID NO: 44373 - DNA, 25 bp, Homo sapien
tgaactgtgaaatgacttacgtttc

SEQ ID NO: 44374 - DNA, 25 bp, Homo sapien
tgaactgtgaaaagacttacgtttc

SEQ ID NO: 44375 - DNA, 25 bp, Homo sapien
agatctgtagaaaagtccactttat

SEQ ID NO: 44376 - DNA, 25 bp, Homo sapien
agatctgtagaatagtccactttat

SEQ ID NO: 44377 - DNA, 25 bp, Homo sapien
tcgatgaagtaactaataactcttc

SEQ ID NO: 44378 - DNA, 25 bp, Homo sapien
tcgatgaagtaagtaataactcttc

SEQ ID NO: 44379 - DNA, 25 bp, Homo sapien
agtcgttgaattgaaattcgtcttc

SEQ ID NO: 44380 - DNA, 25 bp, Homo sapien
agtcgttgaattcaaattcgtcttc

SEQ ID NO: 44381 - DNA, 25 bp, Homo sapien
gtgcttcttgcacgtcttctacttt

SEQ ID NO: 44382 - DNA, 25 bp, Homo sapien
gtgcttcttgcaggtcttctacttt

SEQ ID NO: 44383 - DNA, 25 bp, Homo sapien
aagtatcttcggttttctattctga

SEQ ID NO: 44384 - DNA, 25 bp, Homo sapien
aagtatcttcggatttctattctga

SEQ ID NO: 44385 - DNA, 25 bp, Homo sapien
gactctgaggaatctttacgtctta

SEQ ID NO: 44386 - DNA, 25 bp, Homo sapien
gactctgaggaaactttacgtctta

SEQ ID NO: 44387 - DNA, 25 bp, Homo sapien
accgatgacgactactaagttacta

SEQ ID NO: 44388 - DNA, 25 bp, Homo sapien
accgatgacgacaactaagttacta

SEQ ID NO: 44389 - DNA, 25 bp, Homo sapien
actctggagtaggtataaattcctc

SEQ ID NO: 44390 - DNA, 25 bp, Homo sapien
actctggagtagctataaattcctc

SEQ ID NO: 44391 - DNA, 25 bp, Homo sapien
ttctacgaaggtctccggtcctctc

SEQ ID NO: 44392 - DNA, 25 bp, Homo sapien
ttctacgaaggtgtccggtcctctc

SEQ ID NO: 44393 - DNA, 25 bp, Homo sapien
tctccgaatcggtcctctacaggac

SEQ ID NO: 44394 - DNA, 25 bp, Homo sapien
tctccgaatcggacctctacaggac

SEQ ID NO: 44395 - DNA, 25 bp, Homo sapien
cttcggtgaagagtatctaccttcg

SEQ ID NO: 44396 - DNA, 25 bp, Homo sapien
cttcggtgaagactatctaccttcg

SEQ ID NO: 44397 - DNA, 25 bp, Homo sapien
gtctttagagtagtattctccggtc

SEQ ID NO: 44398 - DNA, 25 bp, Homo sapien
gtctttagagtactattctccggtc

SEQ ID NO: 44399 - DNA, 25 bp, Homo sapien
ttctagtacaacaagaagtccttct

SEQ ID NO: 44400 - DNA, 25 bp, Homo sapien
ttctagtacaactagaagtccttct

SEQ ID NO: 44401 - DNA, 25 bp, Homo sapien
aagtaagtcgaagagacacggtccc

SEQ ID NO: 44402 - DNA, 25 bp, Homo sapien
aagtaagtcgaacagacacggtccc

SEQ ID NO: 44403 - DNA, 25 bp, Homo sapien
atatgagttaagtcaacgtagttcc

SEQ ID NO: 44404 - DNA, 25 bp, Homo sapien
atatgagttaagacaacgtagttcc

SEQ ID NO: 44405 - DNA, 25 bp, Homo sapien
ttggtgtctagagaccgtacttccg

SEQ ID NO: 44406 - DNA, 25 bp, Homo sapien
ttggtgtctagacaccgtacttccg

SEQ ID NO: 44407 - DNA, 25 bp, Homo sapien
gggtatagtgcaaagagactgtcca

SEQ ID NO: 44408 - DNA, 25 bp, Homo sapien
gggtatagtgcatagagactgtcca

SEQ ID NO: 44409 - DNA, 25 bp, Homo sapien
atgtgtcatcataaagaccttccag

SEQ ID NO: 44410 - DNA, 25 bp, Homo sapien
atgtgtcatcattaagaccttccag

SEQ ID NO: 44411 - DNA, 25 bp, Homo sapien
atttcgtgaatgtctctagttattc

SEQ ID NO: 44412 - DNA, 25 bp, Homo sapien
atttcgtgaatgactctagttattc

SEQ ID NO: 44413 - DNA, 25 bp, Homo sapien
tgatcttaatgtgactcattgttac

SEQ ID NO: 44414 - DNA, 25 bp, Homo sapien
tgatcttaatgtcactcattgttac

SEQ ID NO: 44415 - DNA, 25 bp, Homo sapien
cgagaagaatgtaaatctcttttac

SEQ ID NO: 44416 - DNA, 25 bp, Homo sapien
cgagaagaatgttaatctcttttac

SEQ ID NO: 44417 - DNA, 25 bp, Homo sapien
ctactagtaaggttgttgttgttcg

SEQ ID NO: 44418 - DNA, 25 bp, Homo sapien
ctactagtaaggatgttgttgttcg

SEQ ID NO: 44419 - DNA, 25 bp, Homo sapien
tacgatctaaggtgttcgttgtcac

SEQ ID NO: 44420 - DNA, 25 bp, Homo sapien
tacgatctaaggagttcgttgtcac

SEQ ID NO: 44421 - DNA, 25 bp, Homo sapien
agagacttacggtccctcttgtgtc

SEQ ID NO: 44422 - DNA, 25 bp, Homo sapien
agagacttacggaccctcttgtgtc

SEQ ID NO: 44423 - DNA, 25 bp, Homo sapien
gatacgaacaggatccctactcttc

SEQ ID NO: 44424 - DNA, 25 bp, Homo sapien
gatacgaacaggttccctactcttc

SEQ ID NO: 44425 - DNA, 25 bp, Homo sapien
acttataaggttttccgtctgtcgt

SEQ ID NO: 44426 - DNA, 25 bp, Homo sapien
acttataaggttatccgtctgtcgt

SEQ ID NO: 44427 - DNA, 25 bp, Homo sapien
gacccggtaagaggaatctctcttc

SEQ ID NO: 44428 - DNA, 25 bp, Homo sapien
gacccggtaagacgaatctctcttc

SEQ ID NO: 44429 - DNA, 25 bp, Homo sapien
tatgacggaaacgttactttacttt

SEQ ID NO: 44430 - DNA, 25 bp, Homo sapien
tatgacggaaaccttactttacttt

SEQ ID NO: 44431 - DNA, 25 bp, Homo sapien
ccgagtgtttacgtgcttttatggt

SEQ ID NO: 44432 - DNA, 25 bp, Homo sapien
ccgagtgtttacctgcttttatggt

SEQ ID NO: 44433 - DNA, 25 bp, Homo sapien
cgagtccctctcttcattcgttcag

SEQ ID NO: 44434 - DNA, 25 bp, Homo sapien
cgagtccctctcatcattcgttcag

SEQ ID NO: 44435 - DNA, 25 bp, Homo sapien
ctccagtgacgacgaggtccgtcag

SEQ ID NO: 44436 - DNA, 25 bp, Homo sapien
ctccagtgacgaggaggtccgtcag

SEQ ID NO: 44437 - DNA, 25 bp, Homo sapien
gtgcccgcggcctcgtcgtgcacga

SEQ ID NO: 44438 - DNA, 25 bp, Homo sapien
gtgcccgcggccacgtcgtgcacga

SEQ ID NO: 44439 - DNA, 25 bp, Homo sapien
agtcctggagtctgaggagtcccac

SEQ ID NO: 44440 - DNA, 25 bp, Homo sapien
agtcctggagtcagaggagtcccac

SEQ ID NO: 44441 - DNA, 25 bp, Homo sapien
tctaccactgggagacgggaccccg

SEQ ID NO: 44442 - DNA, 25 bp, Homo sapien
tctaccactgggtgacgggaccccg

SEQ ID NO: 44443 - DNA, 25 bp, Homo sapien
ctggacagcgggactcgtgtcaccc

SEQ ID NO: 44444 - DNA, 25 bp, Homo sapien
ctggacagcgggtctcgtgtcaccc

SEQ ID NO: 44445 - DNA, 25 bp, Homo sapien
tccgggttccaccagtagtatttct

SEQ ID NO: 44446 - DNA, 25 bp, Homo sapien
tccgggttccacgagtagtatttct

SEQ ID NO: 44447 - DNA, 25 bp, Homo sapien
ttcgttgttcctaatgtgtgtaata

SEQ ID NO: 44448 - DNA, 25 bp, Homo sapien
ttcgttgttccttatgtgtgtaata

SEQ ID NO: 44449 - DNA, 25 bp, Homo sapien
gggagtactccgagagtctgttgac

SEQ ID NO: 44450 - DNA, 25 bp, Homo sapien
gggagtactccgtgagtctgttgac

SEQ ID NO: 44451 - DNA, 25 bp, Homo sapien
ggtgagacacagagtgacttactta

SEQ ID NO: 44452 - DNA, 25 bp, Homo sapien
ggtgagacacagtgtgacttactta

SEQ ID NO: 44453 - DNA, 25 bp, Homo sapien
cggtgtattacaatagtcctttata

SEQ ID NO: 44454 - DNA, 25 bp, Homo sapien
cggtgtattacattagtcctttata

SEQ ID NO: 44455 - DNA, 25 bp, Homo sapien
tacagtgaacttttgtgttccatac

SEQ ID NO: 44456 - DNA, 25 bp, Homo sapien
tacagtgaacttatgtgttccatac

SEQ ID NO: 44457 - DNA, 25 bp, Homo sapien
gataaacagtttaatagtcttcctg

SEQ ID NO: 44458 - DNA, 25 bp, Homo sapien
gataaacagttttatagtcttcctg

SEQ ID NO: 44459 - DNA, 25 bp, Homo sapien
acttttcgtacctgtcgtactcgag

SEQ ID NO: 44460 - DNA, 25 bp, Homo sapien
acttttcgtaccagtcgtactcgag

SEQ ID NO: 44461 - DNA, 25 bp, Homo sapien
tttataccaggtaattatcgtctga

SEQ ID NO: 44462 - DNA, 25 bp, Homo sapien
tttataccaggttattatcgtctga

SEQ ID NO: 44463 - DNA, 25 bp, Homo sapien
ttggtccggcgttattcagatgtac

SEQ ID NO: 44464 - DNA, 25 bp, Homo sapien
ttggtccggcgtaattcagatgtac

SEQ ID NO: 44465 - DNA, 25 bp, Homo sapien
tcacccttacgttcagctacgtagt

SEQ ID NO: 44466 - DNA, 25 bp, Homo sapien
tcacccttacgtacagctacgtagt

SEQ ID NO: 44467 - DNA, 25 bp, Homo sapien
gtctgttccccttctccgattgagt

SEQ ID NO: 44468 - DNA, 25 bp, Homo sapien
gtctgttcccctactccgattgagt

SEQ ID NO: 44469 - DNA, 25 bp, Homo sapien
acttcgactttacttccgaggacgt

SEQ ID NO: 44470 - DNA, 25 bp, Homo sapien
acttcgactttagttccgaggacgt

SEQ ID NO: 44471 - DNA, 25 bp, Homo sapien
caactcggacttagttgtttgttgt

SEQ ID NO: 44472 - DNA, 25 bp, Homo sapien
caactcggactttgttgtttgttgt

SEQ ID NO: 44473 - DNA, 25 bp, Homo sapien
caaagagaagtttggatcctatacg

SEQ ID NO: 44474 - DNA, 25 bp, Homo sapien
caaagagaagttaggatcctatacg

SEQ ID NO: 44475 - DNA, 25 bp, Homo sapien
tcacagtgaagaaagaactcgacca

SEQ ID NO: 44476 - DNA, 25 bp, Homo sapien
tcacagtgaagatagaactcgacca

SEQ ID NO: 44477 - DNA, 25 bp, Homo sapien
ggaagtggacgcagagcctctccga

SEQ ID NO: 44478 - DNA, 25 bp, Homo sapien
ggaagtggacgctgagcctctccga

SEQ ID NO: 44479 - DNA, 25 bp, Homo sapien
ggggtgacaccgagtccgaccacga

SEQ ID NO: 44480 - DNA, 25 bp, Homo sapien
ggggtgacaccgtgtccgaccacga

SEQ ID NO: 44481 - DNA, 25 bp, Homo sapien
cggtgaacttcttccgacactgtct

SEQ ID NO: 44482 - DNA, 25 bp, Homo sapien
cggtgaacttctaccgacactgtct

SEQ ID NO: 44483 - DNA, 25 bp, Homo sapien
cagtctgagacttctcgatgaatcc

SEQ ID NO: 44484 - DNA, 25 bp, Homo sapien
cagtctgagactactcgatgaatcc

SEQ ID NO: 44485 - DNA, 25 bp, Homo sapien
gtgagtaacctaatccgtttctaac

SEQ ID NO: 44486 - DNA, 25 bp, Homo sapien
gtgagtaacctattccgtttctaac

SEQ ID NO: 44487 - DNA, 25 bp, Homo sapien
tatcgaacacttcgtctgctcgtcc

SEQ ID NO: 44488 - DNA, 25 bp, Homo sapien
tatcgaacacttggtctgctcgtcc

SEQ ID NO: 44489 - DNA, 25 bp, Homo sapien
tttcaagtaaatgtggtgttacttc

SEQ ID NO: 44490 - DNA, 25 bp, Homo sapien
tttcaagtaaatctggtgttacttc

SEQ ID NO: 44491 - DNA, 25 bp, Homo sapien
aagtctggtcctcagtgtctacttc

SEQ ID NO: 44492 - DNA, 25 bp, Homo sapien
aagtctggtcctgagtgtctacttc

SEQ ID NO: 44493 - DNA, 25 bp, Homo sapien
aaggacggtcttacgcgtgtcttgt

SEQ ID NO: 44494 - DNA, 25 bp, Homo sapien
aaggacggtctttcgcgtgtcttgt

SEQ ID NO: 44495 - DNA, 25 bp, Homo sapien
gtctacggttcttacgctggtgtag

SEQ ID NO: 44496 - DNA, 25 bp, Homo sapien
gtctacggttctaacgctggtgtag

SEQ ID NO: 44497 - DNA, 25 bp, Homo sapien
agtgagaggtacaggtcctcgagta

SEQ ID NO: 44498 - DNA, 25 bp, Homo sapien
agtgagaggtactggtcctcgagta

SEQ ID NO: 44499 - DNA, 25 bp, Homo sapien
aacgacaggacgttcagtttgtcgg

SEQ ID NO: 44500 - DNA, 25 bp, Homo sapien
aacgacaggacgatcagtttgtcgg

SEQ ID NO: 44501 - DNA, 25 bp, Homo sapien
aaacacaggtcgtacatctttactg

SEQ ID NO: 44502 - DNA, 25 bp, Homo sapien
aaacacaggtcgaacatctttactg

SEQ ID NO: 44503 - DNA, 25 bp, Homo sapien
cagtaaaagtaggtccatcataagt

SEQ ID NO: 44504 - DNA, 25 bp, Homo sapien
cagtaaaagtagctccatcataagt

SEQ ID NO: 44505 - DNA, 25 bp, Homo sapien
aggaacagacaccataagtcgacgt

SEQ ID NO: 44506 - DNA, 25 bp, Homo sapien
aggaacagacacgataagtcgacgt

SEQ ID NO: 44507 - DNA, 25 bp, Homo sapien
caagtgttcataaacataactcgtg

SEQ ID NO: 44508 - DNA, 25 bp, Homo sapien
caagtgttcatatacataactcgtg

SEQ ID NO: 44509 - DNA, 25 bp, Homo sapien
gacccgtacgtttcggttgaagttg

SEQ ID NO: 44510 - DNA, 25 bp, Homo sapien
gacccgtacgttacggttgaagttg

SEQ ID NO: 44511 - DNA, 25 bp, Homo sapien
gaccgacactcgatgggtcagaatc

SEQ ID NO: 44512 - DNA, 25 bp, Homo sapien
gaccgacactcgttgggtcagaatc

SEQ ID NO: 44513 - DNA, 25 bp, Homo sapien
agacacatgtggacgtacccgaccg

SEQ ID NO: 44514 - DNA, 25 bp, Homo sapien
agacacatgtggtcgtacccgaccg

SEQ ID NO: 44515 - DNA, 25 bp, Homo sapien
acgagtcttctaggagtgcctcagg

SEQ ID NO: 44516 - DNA, 25 bp, Homo sapien
acgagtcttctacgagtgcctcagg

SEQ ID NO: 44517 - DNA, 25 bp, Homo sapien
acgtgtgttgtgtgtcctcgacgac

SEQ ID NO: 44518 - DNA, 25 bp, Homo sapien
acgtgtgttgtgagtcctcgacgac

SEQ ID NO: 44519 - DNA, 25 bp, Homo sapien
caaaagctggggaactcacacacac

SEQ ID NO: 44520 - DNA, 25 bp, Homo sapien
caaaagctggggtactcacacacac

SEQ ID NO: 44521 - DNA, 25 bp, Homo sapien
aagggctccgaggtctactccggaa

SEQ ID NO: 44522 - DNA, 25 bp, Homo sapien
aagggctccgagctctactccggaa

SEQ ID NO: 44523 - DNA, 25 bp, Homo sapien
gacgcgcgcgggacatcaccgatat

SEQ ID NO: 44524 - DNA, 25 bp, Homo sapien
gacgcgcgcgggtcatcaccgatat

SEQ ID NO: 44525 - DNA, 25 bp, Homo sapien
tagactgcccgtttcggtcccggat

SEQ ID NO: 44526 - DNA, 25 bp, Homo sapien
tagactgcccgtatcggtcccggat

SEQ ID NO: 44527 - DNA, 25 bp, Homo sapien
ctcccaccagtcgtcgcgtcggacg

SEQ ID NO: 44528 - DNA, 25 bp, Homo sapien
ctcccaccagtcctcgcgtcggacg

SEQ ID NO: 44529 - DNA, 25 bp, Homo sapien
gacctacagaaacctcgtcgactcg

SEQ ID NO: 44530 - DNA, 25 bp, Homo sapien
gacctacagaaagctcgtcgactcg

SEQ ID NO: 44531 - DNA, 25 bp, Homo sapien
tcagtcctcgggtaccttcgtaccg

SEQ ID NO: 44532 - DNA, 25 bp, Homo sapien
tcagtcctcgggaaccttcgtaccg

SEQ ID NO: 44533 - DNA, 25 bp, Homo sapien
tacactccaggacacactggtcgtc

SEQ ID NO: 44534 - DNA, 25 bp, Homo sapien
tacactccaggagacactggtcgtc

SEQ ID NO: 44535 - DNA, 25 bp, Homo sapien
acggaagtcccgaccacttgggtac

SEQ ID NO: 44536 - DNA, 25 bp, Homo sapien
acggaagtcccgtccacttgggtac

SEQ ID NO: 44537 - DNA, 25 bp, Homo sapien
actgacgtccttgcactggtgtgtc

SEQ ID NO: 44538 - DNA, 25 bp, Homo sapien
actgacgtccttccactggtgtgtc

SEQ ID NO: 44539 - DNA, 25 bp, Homo sapien
tactaaatagttcacaccggagatc

SEQ ID NO: 44540 - DNA, 25 bp, Homo sapien
tactaaatagttgacaccggagatc

SEQ ID NO: 44541 - DNA, 25 bp, Homo sapien
accgatatttgttccgtccgtgaaa

SEQ ID NO: 44542 - DNA, 25 bp, Homo sapien
accgatatttgtaccgtccgtgaaa

SEQ ID NO: 44543 - DNA, 25 bp, Homo sapien
gaaacatgaagaacgcccggaacct

SEQ ID NO: 44544 - DNA, 25 bp, Homo sapien
gaaacatgaagatcgcccggaacct

SEQ ID NO: 44545 - DNA, 25 bp, Homo sapien
agatcgtaaatccactgtgatatct

SEQ ID NO: 44546 - DNA, 25 bp, Homo sapien
agatcgtaaatcgactgtgatatct

SEQ ID NO: 44547 - DNA, 25 bp, Homo sapien
caagatgtcaggttccgttcatatt

SEQ ID NO: 44548 - DNA, 25 bp, Homo sapien
caagatgtcaggatccgttcatatt

SEQ ID NO: 44549 - DNA, 25 bp, Homo sapien
taaggtccaggaagcgcgtcattat

SEQ ID NO: 44550 - DNA, 25 bp, Homo sapien
taaggtccaggatgcgcgtcattat

SEQ ID NO: 44551 - DNA, 25 bp, Homo sapien
attagagtcaggtactcccacattt

SEQ ID NO: 44552 - DNA, 25 bp, Homo sapien
attagagtcaggaactcccacattt

SEQ ID NO: 44553 - DNA, 25 bp, Homo sapien
gagacgtacaggagtaccccacggc

SEQ ID NO: 44554 - DNA, 25 bp, Homo sapien
gagacgtacaggtgtaccccacggc

SEQ ID NO: 44555 - DNA, 25 bp, Homo sapien
agacgaggaaggtcgaggaaacctc

SEQ ID NO: 44556 - DNA, 25 bp, Homo sapien
agacgaggaaggacgaggaaacctc

SEQ ID NO: 44557 - DNA, 25 bp, Homo sapien
aggtactgtggaactatctttaatc

SEQ ID NO: 44558 - DNA, 25 bp, Homo sapien
aggtactgtggatctatctttaatc

SEQ ID NO: 44559 - DNA, 25 bp, Homo sapien
agggagacaagaaagacctttcttt

SEQ ID NO: 44560 - DNA, 25 bp, Homo sapien
agggagacaagatagacctttcttt

SEQ ID NO: 44561 - DNA, 25 bp, Homo sapien
gtgtcaatagtctcgaacacatttt

SEQ ID NO: 44562 - DNA, 25 bp, Homo sapien
gtgtcaatagtcacgaacacatttt

SEQ ID NO: 44563 - DNA, 25 bp, Homo sapien
gatcgaactaagtacatccattgat

SEQ ID NO: 44564 - DNA, 25 bp, Homo sapien
gatcgaactaagaacatccattgat

SEQ ID NO: 44565 - DNA, 25 bp, Homo sapien
ttgaatgcaagactctccattcggt

SEQ ID NO: 44566 - DNA, 25 bp, Homo sapien
ttgaatgcaagagtctccattcggt

SEQ ID NO: 44567 - DNA, 25 bp, Homo sapien
ctcagatgtcaagtgtatccctcca

SEQ ID NO: 44568 - DNA, 25 bp, Homo sapien
ctcagatgtcaactgtatccctcca

SEQ ID NO: 44569 - DNA, 25 bp, Homo sapien
tcaaaggacatactatttcaagaag

SEQ ID NO: 44570 - DNA, 25 bp, Homo sapien
tcaaaggacatagtatttcaagaag

SEQ ID NO: 44571 - DNA, 25 bp, Homo sapien
gtaggtcgagtgttctcgagaagac

SEQ ID NO: 44572 - DNA, 25 bp, Homo sapien
gtaggtcgagtgatctcgagaagac

SEQ ID NO: 44573 - DNA, 25 bp, Homo sapien
tgagacgagtcgtcctcaaggcgtg

SEQ ID NO: 44574 - DNA, 25 bp, Homo sapien
tgagacgagtcgacctcaaggcgtg

SEQ ID NO: 44575 - DNA, 25 bp, Homo sapien
aaagaacaagaccttctagaaggta

SEQ ID NO: 44576 - DNA, 25 bp, Homo sapien
aaagaacaagacgttctagaaggta

SEQ ID NO: 44577 - DNA, 25 bp, Homo sapien
aaaggagattccttatgatcacgtc

SEQ ID NO: 44578 - DNA, 25 bp, Homo sapien
aaaggagattccatatgatcacgtc

SEQ ID NO: 44579 - DNA, 25 bp, Homo sapien
tataaaggctacaacgagtatggtc

SEQ ID NO: 44580 - DNA, 25 bp, Homo sapien
tataaaggctactacgagtatggtc

SEQ ID NO: 44581 - DNA, 25 bp, Homo sapien
gtcacacgggtgaatcgattcacct

SEQ ID NO: 44582 - DNA, 25 bp, Homo sapien
gtcacacgggtgtatcgattcacct

SEQ ID NO: 44583 - DNA, 25 bp, Homo sapien
cgcctcgtcgtagggaggaggcacc

SEQ ID NO: 44584 - DNA, 25 bp, Homo sapien
cgcctcgtcgtacggaggaggcacc

SEQ ID NO: 44585 - DNA, 25 bp, Homo sapien
tgtccccgagacgtggatctcacaa

SEQ ID NO: 44586 - DNA, 25 bp, Homo sapien
tgtccccgagacctggatctcacaa

SEQ ID NO: 44587 - DNA, 25 bp, Homo sapien
gcccgagcactgaccgtcacagtag

SEQ ID NO: 44588 - DNA, 25 bp, Homo sapien
gcccgagcactgtccgtcacagtag

SEQ ID NO: 44589 - DNA, 25 bp, Homo sapien
gtgtcgaccacgtgtcgtgaaagag

SEQ ID NO: 44590 - DNA, 25 bp, Homo sapien
gtgtcgaccacgagtcgtgaaagag

SEQ ID NO: 44591 - DNA, 25 bp, Homo sapien
ctgtggtaacacaggttgacatata

SEQ ID NO: 44592 - DNA, 25 bp, Homo sapien
ctgtggtaacactggttgacatata

SEQ ID NO: 44593 - DNA, 25 bp, Homo sapien
ttgtttacacgtaactctagaatga

SEQ ID NO: 44594 - DNA, 25 bp, Homo sapien
ttgtttacacgttactctagaatga

SEQ ID NO: 44595 - DNA, 25 bp, Homo sapien
agtttctctcagtctcgagttcaga

SEQ ID NO: 44596 - DNA, 25 bp, Homo sapien
agtttctctcagactcgagttcaga

SEQ ID NO: 44597 - DNA, 25 bp, Homo sapien
cagatttacctgtgaggtctcagac

SEQ ID NO: 44598 - DNA, 25 bp, Homo sapien
cagatttacctgagaggtctcagac

SEQ ID NO: 44599 - DNA, 25 bp, Homo sapien
gaacgaaggaactgtcaagaagccc

SEQ ID NO: 44600 - DNA, 25 bp, Homo sapien
gaacgaaggaacagtcaagaagccc

SEQ ID NO: 44601 - DNA, 25 bp, Homo sapien
gacacaggagaaggttgcagcgacc

SEQ ID NO: 44602 - DNA, 25 bp, Homo sapien
gacacaggagaacgttgcagcgacc

SEQ ID NO: 44603 - DNA, 25 bp, Homo sapien
cgagtcagcacagtcagagccgaca

SEQ ID NO: 44604 - DNA, 25 bp, Homo sapien
cgagtcagcacactcagagccgaca

SEQ ID NO: 44605 - DNA, 25 bp, Homo sapien
ccagacaccgaatcttgagccacag

SEQ ID NO: 44606 - DNA, 25 bp, Homo sapien
ccagacaccgaaacttgagccacag

SEQ ID NO: 44607 - DNA, 25 bp, Homo sapien
tcagatacgtaggttttgctctcgt

SEQ ID NO: 44608 - DNA, 25 bp, Homo sapien
tcagatacgtagcttttgctctcgt

SEQ ID NO: 44609 - DNA, 25 bp, Homo sapien
acctcaactgtgagtacaagtcttc

SEQ ID NO: 44610 - DNA, 25 bp, Homo sapien
acctcaactgtgtgtacaagtcttc

SEQ ID NO: 44611 - DNA, 25 bp, Homo sapien
tgtcttgacttttcgtcagattgtc

SEQ ID NO: 44612 - DNA, 25 bp, Homo sapien
tgtcttgactttacgtcagattgtc

SEQ ID NO: 44613 - DNA, 25 bp, Homo sapien
gcagccgtggacattgagggcccta

SEQ ID NO: 44614 - DNA, 25 bp, Homo sapien
gcagccgtggactttgagggcccta

SEQ ID NO: 44615 - DNA, 25 bp, Homo sapien
tcacgtggtagtgtgtggtcccccg

SEQ ID NO: 44616 - DNA, 25 bp, Homo sapien
tcacgtggtagtctgtggtcccccg

SEQ ID NO: 44617 - DNA, 25 bp, Homo sapien
gactcgagccatgaggttcaccacc

SEQ ID NO: 44618 - DNA, 25 bp, Homo sapien
gactcgagccatcaggttcaccacc

SEQ ID NO: 44619 - DNA, 25 bp, Homo sapien
agaagagcacattcacgcgcaccca

SEQ ID NO: 44620 - DNA, 25 bp, Homo sapien
agaagagcacatacacgcgcaccca

SEQ ID NO: 44621 - DNA, 25 bp, Homo sapien
ttaaagaccacaaacacccggtcag

SEQ ID NO: 44622 - DNA, 25 bp, Homo sapien
ttaaagaccacatacacccggtcag

SEQ ID NO: 44623 - DNA, 25 bp, Homo sapien
ggacgactccagacacttgtgtcga

SEQ ID NO: 44624 - DNA, 25 bp, Homo sapien
ggacgactccagtcacttgtgtcga

SEQ ID NO: 44625 - DNA, 25 bp, Homo sapien
cacgtgtgcaacaaccccgctgtga

SEQ ID NO: 44626 - DNA, 25 bp, Homo sapien
cacgtgtgcaactaccccgctgtga

SEQ ID NO: 44627 - DNA, 25 bp, Homo sapien
gtggtggtgaagaacccgacctccc

SEQ ID NO: 44628 - DNA, 25 bp, Homo sapien
gtggtggtgaagtacccgacctccc

SEQ ID NO: 44629 - DNA, 25 bp, Homo sapien
gggtcagtagaaaaccgtttttaca

SEQ ID NO: 44630 - DNA, 25 bp, Homo sapien
gggtcagtagaataccgtttttaca

SEQ ID NO: 44631 - DNA, 25 bp, Homo sapien
aggcagacaaaaggtctttttacac

SEQ ID NO: 44632 - DNA, 25 bp, Homo sapien
aggcagacaaaacgtctttttacac

SEQ ID NO: 44633 - DNA, 25 bp, Homo sapien
aaggagtcaaaagagtttctttctc

SEQ ID NO: 44634 - DNA, 25 bp, Homo sapien
aaggagtcaaaacagtttctttctc

SEQ ID NO: 44635 - DNA, 25 bp, Homo sapien
agaggcaaaactgtgtttctattcg

SEQ ID NO: 44636 - DNA, 25 bp, Homo sapien
agaggcaaaactctgtttctattcg

SEQ ID NO: 44637 - DNA, 25 bp, Homo sapien
ctccaggtgtcctgggtttctcttc

SEQ ID NO: 44638 - DNA, 25 bp, Homo sapien
ctccaggtgtccagggtttctcttc

SEQ ID NO: 44639 - DNA, 25 bp, Homo sapien
tagatcgtgtacaggggccctcgtc

SEQ ID NO: 44640 - DNA, 25 bp, Homo sapien
tagatcgtgtactggggccctcgtc

SEQ ID NO: 44641 - DNA, 25 bp, Homo sapien
gacccagggtggactccccgtcgtg

SEQ ID NO: 44642 - DNA, 25 bp, Homo sapien
gacccagggtggtctccccgtcgtg

SEQ ID NO: 44643 - DNA, 25 bp, Homo sapien
tctccccatgggactatccgtctgt

SEQ ID NO: 44644 - DNA, 25 bp, Homo sapien
tctccccatgggtctatccgtctgt

SEQ ID NO: 44645 - DNA, 25 bp, Homo sapien
ttgcagacttcttaatgtaacccag

SEQ ID NO: 44646 - DNA, 25 bp, Homo sapien
ttgcagacttctaaatgtaacccag

SEQ ID NO: 44647 - DNA, 25 bp, Homo sapien
tttttgtagtttaattctggccacg

SEQ ID NO: 44648 - DNA, 25 bp, Homo sapien
tttttgtagttttattctggccacg

SEQ ID NO: 44649 - DNA, 25 bp, Homo sapien
tatttgtcactttgtttcgggaacc

SEQ ID NO: 44650 - DNA, 25 bp, Homo sapien
tatttgtcacttagtttcgggaacc

SEQ ID NO: 44651 - DNA, 25 bp, Homo sapien
ttcaggcttcgaaacgcggcccgtc

SEQ ID NO: 44652 - DNA, 25 bp, Homo sapien
ttcaggcttcgatacgcggcccgtc

SEQ ID NO: 44653 - DNA, 25 bp, Homo sapien
cggccgtcgcaaaggtctccactat

SEQ ID NO: 44654 - DNA, 25 bp, Homo sapien
cggccgtcgcaatggtctccactat

SEQ ID NO: 44655 - DNA, 25 bp, Homo sapien
gtttccgtcttaaagaagtccgtcc

SEQ ID NO: 44656 - DNA, 25 bp, Homo sapien
gtttccgtcttatagaagtccgtcc

SEQ ID NO: 44657 - DNA, 25 bp, Homo sapien
gtttgacgtgtcttgaatgcttatc

SEQ ID NO: 44658 - DNA, 25 bp, Homo sapien
gtttgacgtgtcatgaatgcttatc

SEQ ID NO: 44659 - DNA, 25 bp, Homo sapien
ggttctcccgagttaggtgattctc

SEQ ID NO: 44660 - DNA, 25 bp, Homo sapien
ggttctcccgagataggtgattctc

SEQ ID NO: 44661 - DNA, 25 bp, Homo sapien
ttattactgagacgagtcgagtccc

SEQ ID NO: 44662 - DNA, 25 bp, Homo sapien
ttattactgagaggagtcgagtccc

SEQ ID NO: 44663 - DNA, 25 bp, Homo sapien
actttgttccgtaaatagatgtctc

SEQ ID NO: 44664 - DNA, 25 bp, Homo sapien
actttgttccgttaatagatgtctc

SEQ ID NO: 44665 - DNA, 25 bp, Homo sapien
tctttcttcgacaaccggttgttct

SEQ ID NO: 44666 - DNA, 25 bp, Homo sapien
tctttcttcgactaccggttgttct

SEQ ID NO: 44667 - DNA, 25 bp, Homo sapien
atcagaacctcgagacttattgttc

SEQ ID NO: 44668 - DNA, 25 bp, Homo sapien
atcagaacctcgtgacttattgttc

SEQ ID NO: 44669 - DNA, 25 bp, Homo sapien
ccgggtacccgtcatcaaatggttc

SEQ ID NO: 44670 - DNA, 25 bp, Homo sapien
ccgggtacccgtgatcaaatggttc

SEQ ID NO: 44671 - DNA, 25 bp, Homo sapien
ttacttccggaccttacagtgatgg

SEQ ID NO: 44672 - DNA, 25 bp, Homo sapien
ttacttccggacgttacagtgatgg

SEQ ID NO: 44673 - DNA, 25 bp, Homo sapien
gtaacccgaggtcgtctacgtgctg

SEQ ID NO: 44674 - DNA, 25 bp, Homo sapien
gtaacccgaggtggtctacgtgctg

SEQ ID NO: 44675 - DNA, 25 bp, Homo sapien
acctcgacctcatgggcaggagtcg

SEQ ID NO: 44676 - DNA, 25 bp, Homo sapien
acctcgacctcaagggcaggagtcg

SEQ ID NO: 44677 - DNA, 25 bp, Homo sapien
tcgggaaccagaacggacacgcgaa

SEQ ID NO: 44678 - DNA, 25 bp, Homo sapien
tcgggaaccagatcggacacgcgaa

SEQ ID NO: 44679 - DNA, 25 bp, Homo sapien
ctccggagtagcagtgggtcaccca

SEQ ID NO: 44680 - DNA, 25 bp, Homo sapien
ctccggagtagctgtgggtcaccca

SEQ ID NO: 44681 - DNA, 25 bp, Homo sapien
gtggggtacatcgtccggcgtaccc

SEQ ID NO: 44682 - DNA, 25 bp, Homo sapien
gtggggtacatcctccggcgtaccc

SEQ ID NO: 44683 - DNA, 25 bp, Homo sapien
tagacatcgtgtccagtacactgac

SEQ ID NO: 44684 - DNA, 25 bp, Homo sapien
tagacatcgtgtgcagtacactgac

SEQ ID NO: 44685 - DNA, 25 bp, Homo sapien
atgtaccactctgtccagtcctgtc

SEQ ID NO: 44686 - DNA, 25 bp, Homo sapien
atgtaccactctctccagtcctgtc

SEQ ID NO: 44687 - DNA, 25 bp, Homo sapien
gatgacctactctttcccggactta

SEQ ID NO: 44688 - DNA, 25 bp, Homo sapien
gatgacctactcattcccggactta

SEQ ID NO: 44689 - DNA, 25 bp, Homo sapien
tgaaacatcctaatccgtaggagga

SEQ ID NO: 44690 - DNA, 25 bp, Homo sapien
tgaaacatcctattccgtaggagga

SEQ ID NO: 44691 - DNA, 25 bp, Homo sapien
tttccagaccctttcctcgggtgac

SEQ ID NO: 44692 - DNA, 25 bp, Homo sapien
tttccagaccctatcctcgggtgac

SEQ ID NO: 44693 - DNA, 25 bp, Homo sapien
ttcaacccgtagacactaccaggtc

SEQ ID NO: 44694 - DNA, 25 bp, Homo sapien
ttcaacccgtagtcactaccaggtc

SEQ ID NO: 44695 - DNA, 25 bp, Homo sapien
tttttacaagtgtcttccacagacg

SEQ ID NO: 44696 - DNA, 25 bp, Homo sapien
tttttacaagtgacttccacagacg

SEQ ID NO: 44697 - DNA, 25 bp, Homo sapien
cttgccgaagagcaacctcatcagc

SEQ ID NO: 44698 - DNA, 25 bp, Homo sapien
cttgccgaagaggaacctcatcagc

SEQ ID NO: 44699 - DNA, 25 bp, Homo sapien
acgaccgaagtgaacgcaccgccgg

SEQ ID NO: 44700 - DNA, 25 bp, Homo sapien
acgaccgaagtgtacgcaccgccgg

SEQ ID NO: 44701 - DNA, 25 bp, Homo sapien
gtacctggtaaaaggaggttcccct

SEQ ID NO: 44702 - DNA, 25 bp, Homo sapien
gtacctggtaaatggaggttcccct

SEQ ID NO: 44703 - DNA, 25 bp, Homo sapien
ggttcaggaggagtagcttcgccct

SEQ ID NO: 44704 - DNA, 25 bp, Homo sapien
ggttcaggaggactagcttcgccct

SEQ ID NO: 44705 - DNA, 25 bp, Homo sapien
ctactgtgtccgtcgttcgtcatgt

SEQ ID NO: 44706 - DNA, 25 bp, Homo sapien
ctactgtgtccgacgttcgtcatgt

SEQ ID NO: 44707 - DNA, 25 bp, Homo sapien
ccccgacaaagagtctgtttcttac

SEQ ID NO: 44708 - DNA, 25 bp, Homo sapien
ccccgacaaagactctgtttcttac

SEQ ID NO: 44709 - DNA, 25 bp, Homo sapien
accgcagggacctcgggtcttacgt

SEQ ID NO: 44710 - DNA, 25 bp, Homo sapien
accgcagggaccacgggtcttacgt

SEQ ID NO: 44711 - DNA, 25 bp, Homo sapien
aactcttgggtcaggcttgtcttag

SEQ ID NO: 44712 - DNA, 25 bp, Homo sapien
aactcttgggtctggcttgtcttag

SEQ ID NO: 44713 - DNA, 25 bp, Homo sapien
ggttctactgacgtcaaaatgtttt

SEQ ID NO: 44714 - DNA, 25 bp, Homo sapien
ggttctactgacctcaaaatgtttt

SEQ ID NO: 44715 - DNA, 25 bp, Homo sapien
gtctaaaccctcaagaggttacgtt

SEQ ID NO: 44716 - DNA, 25 bp, Homo sapien
gtctaaaccctctagaggttacgtt

SEQ ID NO: 44717 - DNA, 25 bp, Homo sapien
gaccctgttagtgacgtagatatct

SEQ ID NO: 44718 - DNA, 25 bp, Homo sapien
gaccctgttagtcacgtagatatct

SEQ ID NO: 44719 - DNA, 25 bp, Homo sapien
gtactccctgattcgtagatacatc

SEQ ID NO: 44720 - DNA, 25 bp, Homo sapien
gtactccctgatacgtagatacatc

SEQ ID NO: 44721 - DNA, 25 bp, Homo sapien
gacatcctgtcaggtagaccggtct

SEQ ID NO: 44722 - DNA, 25 bp, Homo sapien
gacatcctgtcacgtagaccggtct

SEQ ID NO: 44723 - DNA, 25 bp, Homo sapien
ggaaagtgtctttccttcactgact

SEQ ID NO: 44724 - DNA, 25 bp, Homo sapien
ggaaagtgtcttaccttcactgact

SEQ ID NO: 44725 - DNA, 25 bp, Homo sapien
tggttacggtggtccgctgttatga

SEQ ID NO: 44726 - DNA, 25 bp, Homo sapien
tggttacggtggaccgctgttatga

SEQ ID NO: 44727 - DNA, 25 bp, Homo sapien
acttacggtcaccagtgtgcacgag

SEQ ID NO: 44728 - DNA, 25 bp, Homo sapien
acttacggtcacgagtgtgcacgag

SEQ ID NO: 44729 - DNA, 25 bp, Homo sapien
cactttctgggaaccgaggtcccac

SEQ ID NO: 44730 - DNA, 25 bp, Homo sapien
cactttctgggatccgaggtcccac

SEQ ID NO: 44731 - DNA, 25 bp, Homo sapien
ttaccttcggggagtacaactcccc

SEQ ID NO: 44732 - DNA, 25 bp, Homo sapien
ttaccttcggggtgtacaactcccc

SEQ ID NO: 44733 - DNA, 25 bp, Homo sapien
acaggtgaggtcgtcccttcctccg

SEQ ID NO: 44734 - DNA, 25 bp, Homo sapien
acaggtgaggtcctcccttcctccg

SEQ ID NO: 44735 - DNA, 25 bp, Homo sapien
caatataaaggtctgtattttgtcc

SEQ ID NO: 44736 - DNA, 25 bp, Homo sapien
caatataaaggtgtgtattttgtcc

SEQ ID NO: 44737 - DNA, 25 bp, Homo sapien
ctcataaaggtttttcgagacctcc

SEQ ID NO: 44738 - DNA, 25 bp, Homo sapien
ctcataaaggttattcgagacctcc

SEQ ID NO: 44739 - DNA, 25 bp, Homo sapien
aaactcagttcgttttggatctcct

SEQ ID NO: 44740 - DNA, 25 bp, Homo sapien
aaactcagttcgatttggatctcct

SEQ ID NO: 44741 - DNA, 25 bp, Homo sapien
tattagtctgaccattagtccttcg

SEQ ID NO: 44742 - DNA, 25 bp, Homo sapien
tattagtctgacgattagtccttcg

SEQ ID NO: 44743 - DNA, 25 bp, Homo sapien
actgtactgtgattaagtgaccttt

SEQ ID NO: 44744 - DNA, 25 bp, Homo sapien
actgtactgtgaataagtgaccttt

SEQ ID NO: 44745 - DNA, 25 bp, Homo sapien
gaccgcggctccaacgtaaagtaga

SEQ ID NO: 44746 - DNA, 25 bp, Homo sapien
gaccgcggctcctacgtaaagtaga

SEQ ID NO: 44747 - DNA, 25 bp, Homo sapien
agcccgggtccgacgtcgagagaac

SEQ ID NO: 44748 - DNA, 25 bp, Homo sapien
agcccgggtccgtcgtcgagagaac

SEQ ID NO: 44749 - DNA, 25 bp, Homo sapien
catcatctccttggttctgagaaac

SEQ ID NO: 44750 - DNA, 25 bp, Homo sapien
catcatctccttcgttctgagaaac

SEQ ID NO: 44751 - DNA, 25 bp, Homo sapien
actcacttctttcggtgtgtgtttt

SEQ ID NO: 44752 - DNA, 25 bp, Homo sapien
actcacttctttgggtgtgtgtttt

SEQ ID NO: 44753 - DNA, 25 bp, Homo sapien
gtgtcgtacaagagtctgtggtaca

SEQ ID NO: 44754 - DNA, 25 bp, Homo sapien
gtgtcgtacaagtgtctgtggtaca

SEQ ID NO: 44755 - DNA, 25 bp, Homo sapien
ccgctcgcggggatagacgacctct

SEQ ID NO: 44756 - DNA, 25 bp, Homo sapien
ccgctcgcggggttagacgacctct

SEQ ID NO: 44757 - DNA, 25 bp, Homo sapien
tacttctcggggtcgtagtacctct

SEQ ID NO: 44758 - DNA, 25 bp, Homo sapien
tacttctcggggacgtagtacctct

SEQ ID NO: 44759 - DNA, 25 bp, Homo sapien
ctcgtgtactatcatcgtaaccgtg

SEQ ID NO: 44760 - DNA, 25 bp, Homo sapien
ctcgtgtactatgatcgtaaccgtg

SEQ ID NO: 44761 - DNA, 25 bp, Homo sapien
cttcctagtcactcgtcgtattatg

SEQ ID NO: 44762 - DNA, 25 bp, Homo sapien
cttcctagtcacacgtcgtattatg

SEQ ID NO: 44763 - DNA, 25 bp, Homo sapien
tatcacatcactcgacgtaccacgg

SEQ ID NO: 44764 - DNA, 25 bp, Homo sapien
tatcacatcactggacgtaccacgg

SEQ ID NO: 44765 - DNA, 25 bp, Homo sapien
gtagtgaatacgtcagactccagag

SEQ ID NO: 44766 - DNA, 25 bp, Homo sapien
gtagtgaatacgacagactccagag

SEQ ID NO: 44767 - DNA, 25 bp, Homo sapien
tgtcgtagagtttggggatccttac

SEQ ID NO: 44768 - DNA, 25 bp, Homo sapien
tgtcgtagagttaggggatccttac

SEQ ID NO: 44769 - DNA, 25 bp, Homo sapien
gggacgtcttaggtggacgtcttta

SEQ ID NO: 44770 - DNA, 25 bp, Homo sapien
gggacgtcttagctggacgtcttta

SEQ ID NO: 44771 - DNA, 25 bp, Homo sapien
tgagcacgggacgacctcctgtctc

SEQ ID NO: 44772 - DNA, 25 bp, Homo sapien
tgagcacgggaccacctcctgtctc

SEQ ID NO: 44773 - DNA, 25 bp, Homo sapien
gatctactggatacttccgtgtcgg

SEQ ID NO: 44774 - DNA, 25 bp, Homo sapien
gatctactggattcttccgtgtcgg

SEQ ID NO: 44775 - DNA, 25 bp, Homo sapien
ggtactaagggtcaccacgacccga

SEQ ID NO: 44776 - DNA, 25 bp, Homo sapien
ggtactaagggtgaccacgacccga

SEQ ID NO: 44777 - DNA, 25 bp, Homo sapien
tacatgtctcggagccctcatctca

SEQ ID NO: 44778 - DNA, 25 bp, Homo sapien
tacatgtctcggtgccctcatctca

SEQ ID NO: 44779 - DNA, 25 bp, Homo sapien
taagtatcaggatactccaagaatc

SEQ ID NO: 44780 - DNA, 25 bp, Homo sapien
taagtatcaggaaactccaagaatc

SEQ ID NO: 44781 - DNA, 25 bp, Homo sapien
ttgtagcttctacacgccaacaagg

SEQ ID NO: 44782 - DNA, 25 bp, Homo sapien
ttgtagcttctagacgccaacaagg

SEQ ID NO: 44783 - DNA, 25 bp, Homo sapien
gagatttagggtctagaactacgac

SEQ ID NO: 44784 - DNA, 25 bp, Homo sapien
gagatttagggtgtagaactacgac

SEQ ID NO: 44785 - DNA, 25 bp, Homo sapien
aaggagacctcagtttggaagttac

SEQ ID NO: 44786 - DNA, 25 bp, Homo sapien
aaggagacctcactttggaagttac

SEQ ID NO: 44787 - DNA, 25 bp, Homo sapien
caggaagacccctttgaagtctaca

SEQ ID NO: 44788 - DNA, 25 bp, Homo sapien
caggaagaccccattgaagtctaca

SEQ ID NO: 44789 - DNA, 25 bp, Homo sapien
gcccggacgtagaagtcgtcgtcgt

SEQ ID NO: 44790 - DNA, 25 bp, Homo sapien
gcccggacgtagtagtcgtcgtcgt

SEQ ID NO: 44791 - DNA, 25 bp, Homo sapien
gtggaccctgtatcataagtcgtct

SEQ ID NO: 44792 - DNA, 25 bp, Homo sapien
gtggaccctgtaacataagtcgtct

SEQ ID NO: 44793 - DNA, 25 bp, Homo sapien
ttccagagaaagctcaaccacaatg

SEQ ID NO: 44794 - DNA, 25 bp, Homo sapien
ttccagagaaaggtcaaccacaatg

SEQ ID NO: 44795 - DNA, 25 bp, Homo sapien
acggggatgtctcctccgaagtaga

SEQ ID NO: 44796 - DNA, 25 bp, Homo sapien
acggggatgtctgctccgaagtaga

SEQ ID NO: 44797 - DNA, 25 bp, Homo sapien
gtaaaatgtcatctctagacgtaga

SEQ ID NO: 44798 - DNA, 25 bp, Homo sapien
gtaaaatgtcatgtctagacgtaga

SEQ ID NO: 44799 - DNA, 25 bp, Homo sapien
tcaaaacgagtgaaggctaacgacc

SEQ ID NO: 44800 - DNA, 25 bp, Homo sapien
tcaaaacgagtgtaggctaacgacc

SEQ ID NO: 44801 - DNA, 25 bp, Homo sapien
ctataaaacctgaggagtctacttg

SEQ ID NO: 44802 - DNA, 25 bp, Homo sapien
ctataaaacctgtggagtctacttg

SEQ ID NO: 44803 - DNA, 25 bp, Homo sapien
aatcctgacccatggtcgtctcttc

SEQ ID NO: 44804 - DNA, 25 bp, Homo sapien
aatcctgacccaaggtcgtctcttc

SEQ ID NO: 44805 - DNA, 25 bp, Homo sapien
tacttcggtcaagaagggttctcta

SEQ ID NO: 44806 - DNA, 25 bp, Homo sapien
tacttcggtcaacaagggttctcta

SEQ ID NO: 44807 - DNA, 25 bp, Homo sapien
acttcgttttcatcgataatggtta

SEQ ID NO: 44808 - DNA, 25 bp, Homo sapien
acttcgttttcaacgataatggtta

SEQ ID NO: 44809 - DNA, 25 bp, Homo sapien
acagtggtctcgtgacaaagagtga

SEQ ID NO: 44810 - DNA, 25 bp, Homo sapien
acagtggtctcgagacaaagagtga

SEQ ID NO: 44811 - DNA, 25 bp, Homo sapien
ggaccagagccacgtacaggaagga

SEQ ID NO: 44812 - DNA, 25 bp, Homo sapien
ggaccagagccaggtacaggaagga

SEQ ID NO: 44813 - DNA, 25 bp, Homo sapien
gcaagtaaccagtcggcgaggtcga

SEQ ID NO: 44814 - DNA, 25 bp, Homo sapien
gcaagtaaccagacggcgaggtcga

SEQ ID NO: 44815 - DNA, 25 bp, Homo sapien
cctgtgttcagaaactggggtcgta

SEQ ID NO: 44816 - DNA, 25 bp, Homo sapien
cctgtgttcagatactggggtcgta

SEQ ID NO: 44817 - DNA, 25 bp, Homo sapien
cgtcggtttccgaaactcagatgga

SEQ ID NO: 44818 - DNA, 25 bp, Homo sapien
cgtcggtttccgtaactcagatgga

SEQ ID NO: 44819 - DNA, 25 bp, Homo sapien
ctacttcatttggtgtctggattaa

SEQ ID NO: 44820 - DNA, 25 bp, Homo sapien
ctacttcatttgctgtctggattaa

SEQ ID NO: 44821 - DNA, 25 bp, Homo sapien
ctgtcaaaatgtctgttttgttgac

SEQ ID NO: 44822 - DNA, 25 bp, Homo sapien
ctgtcaaaatgtgtgttttgttgac

SEQ ID NO: 44823 - DNA, 25 bp, Homo sapien
tcaacctcttgtgtgttgccggagt

SEQ ID NO: 44824 - DNA, 25 bp, Homo sapien
tcaacctcttgtctgttgccggagt

SEQ ID NO: 44825 - DNA, 25 bp, Homo sapien
tgtccttcgttcacgtaagcagggt

SEQ ID NO: 44826 - DNA, 25 bp, Homo sapien
tgtccttcgttctcgtaagcagggt

SEQ ID NO: 44827 - DNA, 25 bp, Homo sapien
cgcttcttactatcgtcatagaatc

SEQ ID NO: 44828 - DNA, 25 bp, Homo sapien
cgcttcttactaacgtcatagaatc

SEQ ID NO: 44829 - DNA, 25 bp, Homo sapien
cttaagactagttagttaccgatac

SEQ ID NO: 44830 - DNA, 25 bp, Homo sapien
cttaagactagtaagttaccgatac

SEQ ID NO: 44831 - DNA, 25 bp, Homo sapien
cactttgagaagtgtagtaccactc

SEQ ID NO: 44832 - DNA, 25 bp, Homo sapien
cactttgagaagagtagtaccactc

SEQ ID NO: 44833 - DNA, 25 bp, Homo sapien
tcagttctgtgtcagcgggcaagtc

SEQ ID NO: 44834 - DNA, 25 bp, Homo sapien
tcagttctgtgtgagcgggcaagtc

SEQ ID NO: 44835 - DNA, 25 bp, Homo sapien
aggcttcgagacagggacgcgacta

SEQ ID NO: 44836 - DNA, 25 bp, Homo sapien
aggcttcgagactgggacgcgacta

SEQ ID NO: 44837 - DNA, 25 bp, Homo sapien
gcgctatacggagaccagagacgtt

SEQ ID NO: 44838 - DNA, 25 bp, Homo sapien
gcgctatacggacaccagagacgtt

SEQ ID NO: 44839 - DNA, 25 bp, Homo sapien
tccgttctgacttcaggttgagtat

SEQ ID NO: 44840 - DNA, 25 bp, Homo sapien
tccgttctgactacaggttgagtat

SEQ ID NO: 44841 - DNA, 25 bp, Homo sapien
gagttacgtacgtgaattcgtcgtc

SEQ ID NO: 44842 - DNA, 25 bp, Homo sapien
gagttacgtacgagaattcgtcgtc

SEQ ID NO: 44843 - DNA, 25 bp, Homo sapien
tcgaggacgacgttaaactcttcct

SEQ ID NO: 44844 - DNA, 25 bp, Homo sapien
tcgaggacgacgataaactcttcct

SEQ ID NO: 44845 - DNA, 25 bp, Homo sapien
gaagacgtgtaagaacactctccct

SEQ ID NO: 44846 - DNA, 25 bp, Homo sapien
gaagacgtgtaacaacactctccct

SEQ ID NO: 44847 - DNA, 25 bp, Homo sapien
acttcggatgttgtataatgtcctt

SEQ ID NO: 44848 - DNA, 25 bp, Homo sapien
acttcggatgttctataatgtcctt

SEQ ID NO: 44849 - DNA, 25 bp, Homo sapien
ttccgatcttcgtttaactcaacgg

SEQ ID NO: 44850 - DNA, 25 bp, Homo sapien
ttccgatcttcgattaactcaacgg

SEQ ID NO: 44851 - DNA, 25 bp, Homo sapien
tctccttctgtgactcccttagacg

SEQ ID NO: 44852 - DNA, 25 bp, Homo sapien
tctccttctgtgtctcccttagacg

SEQ ID NO: 44853 - DNA, 25 bp, Homo sapien
tttccgacttactttcccattaagt

SEQ ID NO: 44854 - DNA, 25 bp, Homo sapien
tttccgacttacattcccattaagt

SEQ ID NO: 44855 - DNA, 25 bp, Homo sapien
tcatgcactcctttcctaaggtgag

SEQ ID NO: 44856 - DNA, 25 bp, Homo sapien
tcatgcactcctatcctaaggtgag

SEQ ID NO: 44857 - DNA, 25 bp, Homo sapien
accacgtcggcaggtcctagggcgt

SEQ ID NO: 44858 - DNA, 25 bp, Homo sapien
accacgtcggcacgtcctagggcgt

SEQ ID NO: 44859 - DNA, 25 bp, Homo sapien
gaaccggtcgtccaagagcttcatc

SEQ ID NO: 44860 - DNA, 25 bp, Homo sapien
gaaccggtcgtcgaagagcttcatc

SEQ ID NO: 44861 - DNA, 25 bp, Homo sapien
aagttcgttcgagtccaccttcctc

SEQ ID NO: 44862 - DNA, 25 bp, Homo sapien
aagttcgttcgactccaccttcctc

SEQ ID NO: 44863 - DNA, 25 bp, Homo sapien
aagaaagggctacttgactttccag

SEQ ID NO: 44864 - DNA, 25 bp, Homo sapien
aagaaagggctagttgactttccag

SEQ ID NO: 44865 - DNA, 25 bp, Homo sapien
caggttgtgcggttctcgggacttt

SEQ ID NO: 44866 - DNA, 25 bp, Homo sapien
caggttgtgcggatctcgggacttt

SEQ ID NO: 44867 - DNA, 25 bp, Homo sapien
accaagtgtgtgataccatagtttt

SEQ ID NO: 44868 - DNA, 25 bp, Homo sapien
accaagtgtgtgttaccatagtttt

SEQ ID NO: 44869 - DNA, 25 bp, Homo sapien
accttctgttttcacgggtattctt

SEQ ID NO: 44870 - DNA, 25 bp, Homo sapien
accttctgttttgacgggtattctt

SEQ ID NO: 44871 - DNA, 25 bp, Homo sapien
atgttcccttcttcggtaattagct

SEQ ID NO: 44872 - DNA, 25 bp, Homo sapien
atgttcccttctacggtaattagct

SEQ ID NO: 44873 - DNA, 25 bp, Homo sapien
gaccgacctagacctcggtttaagg

SEQ ID NO: 44874 - DNA, 25 bp, Homo sapien
gaccgacctagagctcggtttaagg

SEQ ID NO: 44875 - DNA, 25 bp, Homo sapien
tgggacacgttctgagccggccaaa

SEQ ID NO: 44876 - DNA, 25 bp, Homo sapien
tgggacacgttcagagccggccaaa

SEQ ID NO: 44877 - DNA, 25 bp, Homo sapien
aagggttcagagcagcgtgtccgaa

SEQ ID NO: 44878 - DNA, 25 bp, Homo sapien
aagggttcagaggagcgtgtccgaa

SEQ ID NO: 44879 - DNA, 25 bp, Homo sapien
cagacgggtcacatggtttttgtaa

SEQ ID NO: 44880 - DNA, 25 bp, Homo sapien
cagacgggtcacttggtttttgtaa

SEQ ID NO: 44881 - DNA, 25 bp, Homo sapien
aggacaatccttgtgttcaacgaca

SEQ ID NO: 44882 - DNA, 25 bp, Homo sapien
aggacaatccttctgttcaacgaca

SEQ ID NO: 44883 - DNA, 25 bp, Homo sapien
tacctgactcacctggtcgaaccta

SEQ ID NO: 44884 - DNA, 25 bp, Homo sapien
tacctgactcacgtggtcgaaccta

SEQ ID NO: 44885 - DNA, 25 bp, Homo sapien
catcgtatatagtgttacaactcta

SEQ ID NO: 44886 - DNA, 25 bp, Homo sapien
catcgtatatagagttacaactcta

SEQ ID NO: 44887 - DNA, 25 bp, Homo sapien
acacaggtccactacgacaggtcac

SEQ ID NO: 44888 - DNA, 25 bp, Homo sapien
acacaggtccacaacgacaggtcac

SEQ ID NO: 44889 - DNA, 25 bp, Homo sapien
ggaaccggaacaccaccgagagtca

SEQ ID NO: 44890 - DNA, 25 bp, Homo sapien
ggaaccggaacagcaccgagagtca

SEQ ID NO: 44891 - DNA, 25 bp, Homo sapien
cggggaagacctggtctgtcgccat

SEQ ID NO: 44892 - DNA, 25 bp, Homo sapien
cggggaagacctcgtctgtcgccat

SEQ ID NO: 44893 - DNA, 25 bp, Homo sapien
gtagagaattctagacttacagctc

SEQ ID NO: 44894 - DNA, 25 bp, Homo sapien
gtagagaattcttgacttacagctc

SEQ ID NO: 44895 - DNA, 25 bp, Homo sapien
agtgaagtgtttgactgtctcctct

SEQ ID NO: 44896 - DNA, 25 bp, Homo sapien
agtgaagtgtttcactgtctcctct

SEQ ID NO: 44897 - DNA, 25 bp, Homo sapien
aaatgacaccgttgttttcttcgta

SEQ ID NO: 44898 - DNA, 25 bp, Homo sapien
aaatgacaccgtagttttcttcgta

SEQ ID NO: 44899 - DNA, 25 bp, Homo sapien
tatccccgttagagtgtcgttatat

SEQ ID NO: 44900 - DNA, 25 bp, Homo sapien
tatccccgttagtgtgtcgttatat

SEQ ID NO: 44901 - DNA, 25 bp, Homo sapien
cggcttgggacgtcggtccgttttc

SEQ ID NO: 44902 - DNA, 25 bp, Homo sapien
cggcttgggacgacggtccgttttc

SEQ ID NO: 44903 - DNA, 25 bp, Homo sapien
agtcactcgtgtagggtgctgtccc

SEQ ID NO: 44904 - DNA, 25 bp, Homo sapien
agtcactcgtgttgggtgctgtccc

SEQ ID NO: 44905 - DNA, 25 bp, Homo sapien
aagtcctctacgtcagaagccccga

SEQ ID NO: 44906 - DNA, 25 bp, Homo sapien
aagtcctctacgacagaagccccga

SEQ ID NO: 44907 - DNA, 25 bp, Homo sapien
tcggaccgctacgagtgtcggacga

SEQ ID NO: 44908 - DNA, 25 bp, Homo sapien
tcggaccgctaccagtgtcggacga

SEQ ID NO: 44909 - DNA, 25 bp, Homo sapien
ctccgcgaaaggaccatcggggagt

SEQ ID NO: 44910 - DNA, 25 bp, Homo sapien
ctccgcgaaaggtccatcggggagt

SEQ ID NO: 44911 - DNA, 25 bp, Homo sapien
ccggaacaaccgaaccccgaggagt

SEQ ID NO: 44912 - DNA, 25 bp, Homo sapien
ccggaacaaccgtaccccgaggagt

SEQ ID NO: 44913 - DNA, 25 bp, Homo sapien
ccgtaaagaccgaagcctcggtagg

SEQ ID NO: 44914 - DNA, 25 bp, Homo sapien
ccgtaaagaccgtagcctcggtagg

SEQ ID NO: 44915 - DNA, 25 bp, Homo sapien
ctctcagcgccaggagctactgagc

SEQ ID NO: 44916 - DNA, 25 bp, Homo sapien
ctctcagcgccacgagctactgagc

SEQ ID NO: 44917 - DNA, 25 bp, Homo sapien
tgaaagaggcgaacatctaaaacgc

SEQ ID NO: 44918 - DNA, 25 bp, Homo sapien
tgaaagaggcgatcatctaaaacgc

SEQ ID NO: 44919 - DNA, 25 bp, Homo sapien
gaccggggaattccaggtagacgac

SEQ ID NO: 44920 - DNA, 25 bp, Homo sapien
gaccggggaattgcaggtagacgac

SEQ ID NO: 44921 - DNA, 25 bp, Homo sapien
ggttcccaaaaacgtcctcagaacc

SEQ ID NO: 44922 - DNA, 25 bp, Homo sapien
ggttcccaaaaaggtcctcagaacc

SEQ ID NO: 44923 - DNA, 25 bp, Homo sapien
ttcccaaacaggtccgtacggaagg

SEQ ID NO: 44924 - DNA, 25 bp, Homo sapien
ttcccaaacaggaccgtacggaagg

SEQ ID NO: 44925 - DNA, 25 bp, Homo sapien
agtttaaaacagaccgatcaatagg

SEQ ID NO: 44926 - DNA, 25 bp, Homo sapien
agtttaaaacagtccgatcaatagg

SEQ ID NO: 44927 - DNA, 25 bp, Homo sapien
tttgggaaaaggtacaacaatccgt

SEQ ID NO: 44928 - DNA, 25 bp, Homo sapien
tttgggaaaaggaacaacaatccgt

SEQ ID NO: 44929 - DNA, 25 bp, Homo sapien
cgtaggaaaagcatcacacacaggg

SEQ ID NO: 44930 - DNA, 25 bp, Homo sapien
cgtaggaaaagcttcacacacaggg

SEQ ID NO: 44931 - DNA, 25 bp, Homo sapien
acgaactagaggaacgcatctcggc

SEQ ID NO: 44932 - DNA, 25 bp, Homo sapien
acgaactagaggtacgcatctcggc

SEQ ID NO: 44933 - DNA, 25 bp, Homo sapien
cagaaggtggtaccagtgtagactc

SEQ ID NO: 44934 - DNA, 25 bp, Homo sapien
cagaaggtggtagcagtgtagactc

SEQ ID NO: 44935 - DNA, 25 bp, Homo sapien
gacgacgaagaaccagaagtccaag

SEQ ID NO: 44936 - DNA, 25 bp, Homo sapien
gacgacgaagaagcagaagtccaag

SEQ ID NO: 44937 - DNA, 25 bp, Homo sapien
ggtgacgacaaaagccatggtttgt

SEQ ID NO: 44938 - DNA, 25 bp, Homo sapien
ggtgacgacaaatgccatggtttgt

SEQ ID NO: 44939 - DNA, 25 bp, Homo sapien
gtctcaccataagtcaattgtcttg

SEQ ID NO: 44940 - DNA, 25 bp, Homo sapien
gtctcaccataactcaattgtcttg

SEQ ID NO: 44941 - DNA, 25 bp, Homo sapien
ggtggtttcacacgacaaatttcaa

SEQ ID NO: 44942 - DNA, 25 bp, Homo sapien
ggtggtttcacaggacaaatttcaa

SEQ ID NO: 44943 - DNA, 25 bp, Homo sapien
ctgcagtgacatccactcgttacag

SEQ ID NO: 44944 - DNA, 25 bp, Homo sapien
ctgcagtgacatgcactcgttacag

SEQ ID NO: 44945 - DNA, 25 bp, Homo sapien
cctgttctcacgtccaggtaccagt

SEQ ID NO: 44946 - DNA, 25 bp, Homo sapien
cctgttctcacgaccaggtaccagt

SEQ ID NO: 44947 - DNA, 25 bp, Homo sapien
tctgtagttaggtacctatcgaaga

SEQ ID NO: 44948 - DNA, 25 bp, Homo sapien
tctgtagttaggaacctatcgaaga

SEQ ID NO: 44949 - DNA, 25 bp, Homo sapien
catacgaagtaggtccatgagtgtc

SEQ ID NO: 44950 - DNA, 25 bp, Homo sapien
catacgaagtagctccatgagtgtc

SEQ ID NO: 44951 - DNA, 25 bp, Homo sapien
acgcagagctacttcgagaagtggc

SEQ ID NO: 44952 - DNA, 25 bp, Homo sapien
acgcagagctacatcgagaagtggc

SEQ ID NO: 44953 - DNA, 25 bp, Homo sapien
gtggagacgtccgcgacactagccc

SEQ ID NO: 44954 - DNA, 25 bp, Homo sapien
gtggagacgtccccgacactagccc

SEQ ID NO: 44955 - DNA, 25 bp, Homo sapien
cagggaactccagacagaacgtccg

SEQ ID NO: 44956 - DNA, 25 bp, Homo sapien
cagggaactccacacagaacgtccg

SEQ ID NO: 44957 - DNA, 25 bp, Homo sapien
gacgaggaccttccaccgacggtgc

SEQ ID NO: 44958 - DNA, 25 bp, Homo sapien
gacgaggaccttgcaccgacggtgc

SEQ ID NO: 44959 - DNA, 25 bp, Homo sapien
cgcaggctcgtagacacggtaggaa

SEQ ID NO: 44960 - DNA, 25 bp, Homo sapien
cgcaggctcgtacacacggtaggaa

SEQ ID NO: 44961 - DNA, 25 bp, Homo sapien
atgcggagctccacggcacgctgac

SEQ ID NO: 44962 - DNA, 25 bp, Homo sapien
atgcggagctcctcggcacgctgac

SEQ ID NO: 44963 - DNA, 25 bp, Homo sapien
tatgggggtcctggaccgagcactc

SEQ ID NO: 44964 - DNA, 25 bp, Homo sapien
tatgggggtcctcgaccgagcactc

SEQ ID NO: 44965 - DNA, 25 bp, Homo sapien
aatggtagcgggtcctgtgttcgca

SEQ ID NO: 44966 - DNA, 25 bp, Homo sapien
aatggtagcgggacctgtgttcgca

SEQ ID NO: 44967 - DNA, 25 bp, Homo sapien
cagtccgccgaaccttatatagata

SEQ ID NO: 44968 - DNA, 25 bp, Homo sapien
cagtccgccgaagcttatatagata

SEQ ID NO: 44969 - DNA, 25 bp, Homo sapien
aacttctgaaccttacatagtagta

SEQ ID NO: 44970 - DNA, 25 bp, Homo sapien
aacttctgaaccatacatagtagta

SEQ ID NO: 44971 - DNA, 25 bp, Homo sapien
tttaaactttgtcagggtggaccgg

SEQ ID NO: 44972 - DNA, 25 bp, Homo sapien
tttaaactttgtgagggtggaccgg

SEQ ID NO: 44973 - DNA, 25 bp, Homo sapien
tgaaagtgtctttccgggctcatag

SEQ ID NO: 44974 - DNA, 25 bp, Homo sapien
tgaaagtgtcttaccgggctcatag

SEQ ID NO: 44975 - DNA, 25 bp, Homo sapien
agaactagtgatttacctttccaag

SEQ ID NO: 44976 - DNA, 25 bp, Homo sapien
agaactagtgatatacctttccaag

SEQ ID NO: 44977 - DNA, 25 bp, Homo sapien
gcagacgacgcgtgaacaggcccca

SEQ ID NO: 44978 - DNA, 25 bp, Homo sapien
gcagacgacgcgagaacaggcccca

SEQ ID NO: 44979 - DNA, 25 bp, Homo sapien
ctcagactggtttggctggccgaag

SEQ ID NO: 44980 - DNA, 25 bp, Homo sapien
ctcagactggttaggctggccgaag

SEQ ID NO: 44981 - DNA, 25 bp, Homo sapien
cacaattatgtgcatcggaagcaac

SEQ ID NO: 44982 - DNA, 25 bp, Homo sapien
cacaattatgtggatcggaagcaac

SEQ ID NO: 44983 - DNA, 25 bp, Homo sapien
catgatgttgagttgagttttaccc

SEQ ID NO: 44984 - DNA, 25 bp, Homo sapien
catgatgttgagatgagttttaccc

SEQ ID NO: 44985 - DNA, 25 bp, Homo sapien
cgcacggacttgttcgtaaccgccg

SEQ ID NO: 44986 - DNA, 25 bp, Homo sapien
cgcacggacttgatcgtaaccgccg

SEQ ID NO: 44987 - DNA, 25 bp, Homo sapien
cgcgtccactgccggaatctagaga

SEQ ID NO: 44988 - DNA, 25 bp, Homo sapien
cgcgtccactgcgggaatctagaga

SEQ ID NO: 44989 - DNA, 25 bp, Homo sapien
agtacattgattttcttttgtatcc

SEQ ID NO: 44990 - DNA, 25 bp, Homo sapien
agtacattgattatcttttgtatcc

SEQ ID NO: 44991 - DNA, 25 bp, Homo sapien
aacattcaggatctactttgtatga

SEQ ID NO: 44992 - DNA, 25 bp, Homo sapien
aacattcaggatgtactttgtatga

SEQ ID NO: 44993 - DNA, 25 bp, Homo sapien
actttaaacagtcgtttacggttaa

SEQ ID NO: 44994 - DNA, 25 bp, Homo sapien
actttaaacagtggtttacggttaa

SEQ ID NO: 44995 - DNA, 25 bp, Homo sapien
tttgtctctacttcttctcataaag

SEQ ID NO: 44996 - DNA, 25 bp, Homo sapien
tttgtctctactacttctcataaag

SEQ ID NO: 44997 - DNA, 25 bp, Homo sapien
ttgtttcgtctctcgattcgatgga

SEQ ID NO: 44998 - DNA, 25 bp, Homo sapien
ttgtttcgtctcacgattcgatgga

SEQ ID NO: 44999 - DNA, 25 bp, Homo sapien
ctggtatattatcgtttgttcccgt

SEQ ID NO: 45000 - DNA, 25 bp, Homo sapien
ctggtatattatggtttgttcccgt

SEQ ID NO: 45001 - DNA, 25 bp, Homo sapien
tgaatgttagactaacttctccgac

SEQ ID NO: 45002 - DNA, 25 bp, Homo sapien
tgaatgttagacaaacttctccgac

SEQ ID NO: 45003 - DNA, 25 bp, Homo sapien
gagatctgtagaaaagtccacttta

SEQ ID NO: 45004 - DNA, 25 bp, Homo sapien
gagatctgtagataagtccacttta

SEQ ID NO: 45005 - DNA, 25 bp, Homo sapien
tacgattgagttttgaacatcttac

SEQ ID NO: 45006 - DNA, 25 bp, Homo sapien
tacgattgagttatgaacatcttac

SEQ ID NO: 45007 - DNA, 25 bp, Homo sapien
tcttggactccaagattctcgtctc

SEQ ID NO: 45008 - DNA, 25 bp, Homo sapien
tcttggactccatgattctcgtctc

SEQ ID NO: 45009 - DNA, 25 bp, Homo sapien
gacgtgtttgaactctctctctctt

SEQ ID NO: 45010 - DNA, 25 bp, Homo sapien
gacgtgtttgaagtctctctctctt

SEQ ID NO: 45011 - DNA, 25 bp, Homo sapien
tagtctttcgggtttcacttctcgg

SEQ ID NO: 45012 - DNA, 25 bp, Homo sapien
tagtctttcgggattcacttctcgg

SEQ ID NO: 45013 - DNA, 25 bp, Homo sapien
tagactcttcggacctttagttcag

SEQ ID NO: 45014 - DNA, 25 bp, Homo sapien
tagactcttcggtcctttagttcag

SEQ ID NO: 45015 - DNA, 25 bp, Homo sapien
cgtctaaagacctttacgttactag

SEQ ID NO: 45016 - DNA, 25 bp, Homo sapien
cgtctaaagaccattacgttactag

SEQ ID NO: 45017 - DNA, 25 bp, Homo sapien
tcctcgtgtaaggaatatttcctat

SEQ ID NO: 45018 - DNA, 25 bp, Homo sapien
tcctcgtgtaagcaatatttcctat

SEQ ID NO: 45019 - DNA, 25 bp, Homo sapien
tcctgacgtggtcttcatctcctac

SEQ ID NO: 45020 - DNA, 25 bp, Homo sapien
tcctgacgtggtgttcatctcctac

SEQ ID NO: 45021 - DNA, 25 bp, Homo sapien
tcccgagacaggtccaacgagaact

SEQ ID NO: 45022 - DNA, 25 bp, Homo sapien
tcccgagacaggaccaacgagaact

SEQ ID NO: 45023 - DNA, 25 bp, Homo sapien
cggtcggcaagagaccaccactacg

SEQ ID NO: 45024 - DNA, 25 bp, Homo sapien
cggtcggcaagacaccaccactacg

SEQ ID NO: 45025 - DNA, 25 bp, Homo sapien
cgtctttaggacgtatcttccctac

SEQ ID NO: 45026 - DNA, 25 bp, Homo sapien
cgtctttaggacctatcttccctac

SEQ ID NO: 45027 - DNA, 25 bp, Homo sapien
ttgtttgtaaacaagaagcactctg

SEQ ID NO: 45028 - DNA, 25 bp, Homo sapien
ttgtttgtaaactagaagcactctg

SEQ ID NO: 45029 - DNA, 25 bp, Homo sapien
agtgagtataacgaagaggtctctc

SEQ ID NO: 45030 - DNA, 25 bp, Homo sapien
agtgagtataaccaagaggtctctc

SEQ ID NO: 45031 - DNA, 25 bp, Homo sapien
atgagtctaaggttactcgtggtcc

SEQ ID NO: 45032 - DNA, 25 bp, Homo sapien
atgagtctaaggatactcgtggtcc

SEQ ID NO: 45033 - DNA, 25 bp, Homo sapien
attggtgtctagagaccgtacttcc

SEQ ID NO: 45034 - DNA, 25 bp, Homo sapien
attggtgtctagtgaccgtacttcc

SEQ ID NO: 45035 - DNA, 25 bp, Homo sapien
aaggtaatgtcaataaacttcctag

SEQ ID NO: 45036 - DNA, 25 bp, Homo sapien
aaggtaatgtcattaaacttcctag

SEQ ID NO: 45037 - DNA, 25 bp, Homo sapien
tgtgtaaagatttagaccttcatag

SEQ ID NO: 45038 - DNA, 25 bp, Homo sapien
tgtgtaaagattaagaccttcatag

SEQ ID NO: 45039 - DNA, 25 bp, Homo sapien
tatttgacacttttcgacgttttcg

SEQ ID NO: 45040 - DNA, 25 bp, Homo sapien
tatttgacacttatcgacgttttcg

SEQ ID NO: 45041 - DNA, 25 bp, Homo sapien
gatatgaactctgatctactgttta

SEQ ID NO: 45042 - DNA, 25 bp, Homo sapien
gatatgaactctcatctactgttta

SEQ ID NO: 45043 - DNA, 25 bp, Homo sapien
gtgaacgagactttacatcttttta

SEQ ID NO: 45044 - DNA, 25 bp, Homo sapien
gtgaacgagactatacatcttttta

SEQ ID NO: 45045 - DNA, 25 bp, Homo sapien
tctactagtaaggttgttgttgttc

SEQ ID NO: 45046 - DNA, 25 bp, Homo sapien
tctactagtaagcttgttgttgttc

SEQ ID NO: 45047 - DNA, 25 bp, Homo sapien
gtacacttggtttttcgttctctac

SEQ ID NO: 45048 - DNA, 25 bp, Homo sapien
gtacacttggttattcgttctctac

SEQ ID NO: 45049 - DNA, 25 bp, Homo sapien
aagaacttaggatattctgttactc

SEQ ID NO: 45050 - DNA, 25 bp, Homo sapien
aagaacttaggaaattctgttactc

SEQ ID NO: 45051 - DNA, 25 bp, Homo sapien
cgatgagacgggtacttctattatc

SEQ ID NO: 45052 - DNA, 25 bp, Homo sapien
cgatgagacgggaacttctattatc

SEQ ID NO: 45053 - DNA, 25 bp, Homo sapien
accttgaaggttttcgtcgttatag

SEQ ID NO: 45054 - DNA, 25 bp, Homo sapien
accttgaaggttatcgtcgttatag

SEQ ID NO: 45055 - DNA, 25 bp, Homo sapien
acacgtcgggagtaaatactctttt

SEQ ID NO: 45056 - DNA, 25 bp, Homo sapien
acacgtcgggagaaaatactctttt

SEQ ID NO: 45057 - DNA, 25 bp, Homo sapien
ctgacaaggaaagtaacttgtcttt

SEQ ID NO: 45058 - DNA, 25 bp, Homo sapien
ctgacaaggaaactaacttgtcttt

SEQ ID NO: 45059 - DNA, 25 bp, Homo sapien
caccgatttgacgtatccttttggt

SEQ ID NO: 45060 - DNA, 25 bp, Homo sapien
caccgatttgacctatccttttggt

SEQ ID NO: 45061 - DNA, 25 bp, Homo sapien
ctcgatctcttcgttcattcccggt

SEQ ID NO: 45062 - DNA, 25 bp, Homo sapien
ctcgatctcttccttcattcccggt

SEQ ID NO: 45063 - DNA, 25 bp, Homo sapien
tctcggtagacacaggtactacccg

SEQ ID NO: 45064 - DNA, 25 bp, Homo sapien
tctcggtagacagaggtactacccg

SEQ ID NO: 45065 - DNA, 25 bp, Homo sapien
gcccgacggacacacgagtgtccga

SEQ ID NO: 45066 - DNA, 25 bp, Homo sapien
gcccgacggacagacgagtgtccga

SEQ ID NO: 45067 - DNA, 25 bp, Homo sapien
cagaccagggactgggacgtccctc

SEQ ID NO: 45068 - DNA, 25 bp, Homo sapien
cagaccagggacagggacgtccctc

SEQ ID NO: 45069 - DNA, 25 bp, Homo sapien
tcgcactggtgaagtacaggtcccc

SEQ ID NO: 45070 - DNA, 25 bp, Homo sapien
tcgcactggtgatgtacaggtcccc

SEQ ID NO: 45071 - DNA, 25 bp, Homo sapien
ttaagacaggggttgtcggtacccc

SEQ ID NO: 45072 - DNA, 25 bp, Homo sapien
ttaagacaggggatgtcggtacccc

SEQ ID NO: 45073 - DNA, 25 bp, Homo sapien
ttacaggttcaaaggagtattacct

SEQ ID NO: 45074 - DNA, 25 bp, Homo sapien
ttacaggttcaatggagtattacct

SEQ ID NO: 45075 - DNA, 25 bp, Homo sapien
tcgttgttcaagttgtagtaatctc

SEQ ID NO: 45076 - DNA, 25 bp, Homo sapien
tcgttgttcaagatgtagtaatctc

SEQ ID NO: 45077 - DNA, 25 bp, Homo sapien
gaggagtctccgaaggatgtaatac

SEQ ID NO: 45078 - DNA, 25 bp, Homo sapien
gaggagtctccgtaggatgtaatac

SEQ ID NO: 45079 - DNA, 25 bp, Homo sapien
ggtgaacacacgaaggtagtcataa

SEQ ID NO: 45080 - DNA, 25 bp, Homo sapien
ggtgaacacacgtaggtagtcataa

SEQ ID NO: 45081 - DNA, 25 bp, Homo sapien
acacggtattacaatacgaatttta

SEQ ID NO: 45082 - DNA, 25 bp, Homo sapien
acacggtattactatacgaatttta

SEQ ID NO: 45083 - DNA, 25 bp, Homo sapien
tacagtgttaagtgttttaccttac

SEQ ID NO: 45084 - DNA, 25 bp, Homo sapien
tacagtgttaagagttttaccttac

SEQ ID NO: 45085 - DNA, 25 bp, Homo sapien
attaaagtatgtttgtcctacctcg

SEQ ID NO: 45086 - DNA, 25 bp, Homo sapien
attaaagtatgtatgtcctacctcg

SEQ ID NO: 45087 - DNA, 25 bp, Homo sapien
taactttgtcgttcgactctacccg

SEQ ID NO: 45088 - DNA, 25 bp, Homo sapien
taactttgtcgtacgactctacccg

SEQ ID NO: 45089 - DNA, 25 bp, Homo sapien
ttgaccagtgtgaatatcttcgact

SEQ ID NO: 45090 - DNA, 25 bp, Homo sapien
ttgaccagtgtgtatatcttcgact

SEQ ID NO: 45091 - DNA, 25 bp, Homo sapien
ctggaccggcgttcgatcactatgc

SEQ ID NO: 45092 - DNA, 25 bp, Homo sapien
ctggaccggcgtacgatcactatgc

SEQ ID NO: 45093 - DNA, 25 bp, Homo sapien
ttcacccttacgttcagctacgtag

SEQ ID NO: 45094 - DNA, 25 bp, Homo sapien
ttcacccttacgatcagctacgtag

SEQ ID NO: 45095 - DNA, 25 bp, Homo sapien
gggtctcactcctcttcaactagag

SEQ ID NO: 45096 - DNA, 25 bp, Homo sapien
gggtctcactccacttcaactagag

SEQ ID NO: 45097 - DNA, 25 bp, Homo sapien
aacttcgactttacttccgaggacg

SEQ ID NO: 45098 - DNA, 25 bp, Homo sapien
aacttcgacttttcttccgaggacg

SEQ ID NO: 45099 - DNA, 25 bp, Homo sapien
agaccgagactttgtttcctataag

SEQ ID NO: 45100 - DNA, 25 bp, Homo sapien
agaccgagacttagtttcctataag

SEQ ID NO: 45101 - DNA, 25 bp, Homo sapien
ccgaagagaagtatagttcccatac

SEQ ID NO: 45102 - DNA, 25 bp, Homo sapien
ccgaagagaagtttagttcccatac

SEQ ID NO: 45103 - DNA, 25 bp, Homo sapien
tgacatgaacgaaagaacactaccc

SEQ ID NO: 45104 - DNA, 25 bp, Homo sapien
tgacatgaacgatagaacactaccc

SEQ ID NO: 45105 - DNA, 25 bp, Homo sapien
gctgacaggaagagagcacctcctc

SEQ ID NO: 45106 - DNA, 25 bp, Homo sapien
gctgacaggaagtgagcacctcctc

SEQ ID NO: 45107 - DNA, 25 bp, Homo sapien
gggtgacaccgagtccgaccacgac

SEQ ID NO: 45108 - DNA, 25 bp, Homo sapien
gggtgacaccgactccgaccacgac

SEQ ID NO: 45109 - DNA, 25 bp, Homo sapien
gtggaactgtactaccacacgtgag

SEQ ID NO: 45110 - DNA, 25 bp, Homo sapien
gtggaactgtacaaccacacgtgag

SEQ ID NO: 45111 - DNA, 25 bp, Homo sapien
ggtggagagttcctatgacactcct

SEQ ID NO: 45112 - DNA, 25 bp, Homo sapien
ggtggagagttcgtatgacactcct

SEQ ID NO: 45113 - DNA, 25 bp, Homo sapien
tgtgagtaacctaatccgtttctaa

SEQ ID NO: 45114 - DNA, 25 bp, Homo sapien
tgtgagtaaccttatccgtttctaa

SEQ ID NO: 45115 - DNA, 25 bp, Homo sapien
atcgaacacttcgtctgctcgtcct

SEQ ID NO: 45116 - DNA, 25 bp, Homo sapien
atcgaacacttcctctgctcgtcct

SEQ ID NO: 45117 - DNA, 25 bp, Homo sapien
tcgaagaaacgtgtacatttcgtcc

SEQ ID NO: 45118 - DNA, 25 bp, Homo sapien
tcgaagaaacgtctacatttcgtcc

SEQ ID NO: 45119 - DNA, 25 bp, Homo sapien
tgggtctgtcgtcctgaggtttctc

SEQ ID NO: 45120 - DNA, 25 bp, Homo sapien
tgggtctgtcgtgctgaggtttctc

SEQ ID NO: 45121 - DNA, 25 bp, Homo sapien
tcaggacggtcgtcggcgtttctcg

SEQ ID NO: 45122 - DNA, 25 bp, Homo sapien
tcaggacggtcgacggcgtttctcg

SEQ ID NO: 45123 - DNA, 25 bp, Homo sapien
gcacgtgtcgcttccgtaggtcgag

SEQ ID NO: 45124 - DNA, 25 bp, Homo sapien
gcacgtgtcgctaccgtaggtcgag

SEQ ID NO: 45125 - DNA, 25 bp, Homo sapien
agtcgagggctcctactacgtgagg

SEQ ID NO: 45126 - DNA, 25 bp, Homo sapien
agtcgagggctcgtactacgtgagg

SEQ ID NO: 45127 - DNA, 25 bp, Homo sapien
gtacagcgagtatctgtatctaggg

SEQ ID NO: 45128 - DNA, 25 bp, Homo sapien
gtacagcgagtaactgtatctaggg

SEQ ID NO: 45129 - DNA, 25 bp, Homo sapien
acgactaagagaacttctgttacag

SEQ ID NO: 45130 - DNA, 25 bp, Homo sapien
acgactaagagatcttctgttacag

SEQ ID NO: 45131 - DNA, 25 bp, Homo sapien
cagtaaagagagtcttcctagtaat

SEQ ID NO: 45132 - DNA, 25 bp, Homo sapien
cagtaaagagagacttcctagtaat

SEQ ID NO: 45133 - DNA, 25 bp, Homo sapien
gaggacaaacacactcagtgtacgt

SEQ ID NO: 45134 - DNA, 25 bp, Homo sapien
gaggacaaacactctcagtgtacgt

SEQ ID NO: 45135 - DNA, 25 bp, Homo sapien
caagtagtatcaacaaccttaagtg

SEQ ID NO: 45136 - DNA, 25 bp, Homo sapien
caagtagtatcatcaaccttaagtg

SEQ ID NO: 45137 - DNA, 25 bp, Homo sapien
gacaccgtgtcttcggccgaggttt

SEQ ID NO: 45138 - DNA, 25 bp, Homo sapien
gacaccgtgtctacggccgaggttt

SEQ ID NO: 45139 - DNA, 25 bp, Homo sapien
gacacctacgtcgtgggaaggtcct

SEQ ID NO: 45140 - DNA, 25 bp, Homo sapien
gacacctacgtcctgggaaggtcct

SEQ ID NO: 45141 - DNA, 25 bp, Homo sapien
gtaccatgtctgcacaccagtacct

SEQ ID NO: 45142 - DNA, 25 bp, Homo sapien
gtaccatgtctggacaccagtacct

SEQ ID NO: 45143 - DNA, 25 bp, Homo sapien
cgagtcttctaggagtgcctcaggt

SEQ ID NO: 45144 - DNA, 25 bp, Homo sapien
cgagtcttctagcagtgcctcaggt

SEQ ID NO: 45145 - DNA, 25 bp, Homo sapien
cacgtgtgtgagtgttcctcgacac

SEQ ID NO: 45146 - DNA, 25 bp, Homo sapien
cacgtgtgtgagagttcctcgacac

SEQ ID NO: 45147 - DNA, 25 bp, Homo sapien
caaaagtggtggacgtctaccaccc

SEQ ID NO: 45148 - DNA, 25 bp, Homo sapien
caaaagtggtggtcgtctaccaccc

SEQ ID NO: 45149 - DNA, 25 bp, Homo sapien
aagggtttcacgttctacgtcccaa

SEQ ID NO: 45150 - DNA, 25 bp, Homo sapien
aagggtttcacgatctacgtcccaa

SEQ ID NO: 45151 - DNA, 25 bp, Homo sapien
cagaccgtcctcaggaatcccgata

SEQ ID NO: 45152 - DNA, 25 bp, Homo sapien
cagaccgtcctctggaatcccgata

SEQ ID NO: 45153 - DNA, 25 bp, Homo sapien
agacatctccggaggtccgtcgtga

SEQ ID NO: 45154 - DNA, 25 bp, Homo sapien
agacatctccggtggtccgtcgtga

SEQ ID NO: 45155 - DNA, 25 bp, Homo sapien
ccttcctccgtcgtcgtcgtcgagg

SEQ ID NO: 45156 - DNA, 25 bp, Homo sapien
ccttcctccgtcctcgtcgtcgagg

SEQ ID NO: 45157 - DNA, 25 bp, Homo sapien
agactcctacaacacgttcgatacg

SEQ ID NO: 45158 - DNA, 25 bp, Homo sapien
agactcctacaagacgttcgatacg

SEQ ID NO: 45159 - DNA, 25 bp, Homo sapien
agtgccggaggtgacgttacgacac

SEQ ID NO: 45160 - DNA, 25 bp, Homo sapien
agtgccggaggtcacgttacgacac

SEQ ID NO: 45161 - DNA, 25 bp, Homo sapien
aacgttcgaggaaacattcgtcgac

SEQ ID NO: 45162 - DNA, 25 bp, Homo sapien
aacgttcgaggatacattcgtcgac

SEQ ID NO: 45163 - DNA, 25 bp, Homo sapien
gaacgtacagagacccctgtgagac

SEQ ID NO: 45164 - DNA, 25 bp, Homo sapien
gaacgtacagagtcccctgtgagac

SEQ ID NO: 45165 - DNA, 25 bp, Homo sapien
ctgtcggacgttccatcggtaggtc

SEQ ID NO: 45166 - DNA, 25 bp, Homo sapien
ctgtcggacgttgcatcggtaggtc

SEQ ID NO: 45167 - DNA, 25 bp, Homo sapien
cgtgatcagtgtgcatcggtaactc

SEQ ID NO: 45168 - DNA, 25 bp, Homo sapien
cgtgatcagtgtccatcggtaactc

SEQ ID NO: 45169 - DNA, 25 bp, Homo sapien
caactatatgtgtcgtcttgtgaaa

SEQ ID NO: 45170 - DNA, 25 bp, Homo sapien
caactatatgtgacgtcttgtgaaa

SEQ ID NO: 45171 - DNA, 25 bp, Homo sapien
aaacatcggagcagtccttcaacct

SEQ ID NO: 45172 - DNA, 25 bp, Homo sapien
aaacatcggagctgtccttcaacct

SEQ ID NO: 45173 - DNA, 25 bp, Homo sapien
ttacattcgaaagtcctgtgaactc

SEQ ID NO: 45174 - DNA, 25 bp, Homo sapien
ttacattcgaaactcctgtgaactc

SEQ ID NO: 45175 - DNA, 25 bp, Homo sapien
aagtgcaggactcctgtacatactc

SEQ ID NO: 45176 - DNA, 25 bp, Homo sapien
aagtgcaggactgctgtacatactc

SEQ ID NO: 45177 - DNA, 25 bp, Homo sapien
agaggtcctagaggagccgcactta

SEQ ID NO: 45178 - DNA, 25 bp, Homo sapien
agaggtcctagacgagccgcactta

SEQ ID NO: 45179 - DNA, 25 bp, Homo sapien
atagagccgagaatctcacgaatta

SEQ ID NO: 45180 - DNA, 25 bp, Homo sapien
atagagccgagattctcacgaatta

SEQ ID NO: 45181 - DNA, 25 bp, Homo sapien
gagacgactcggagctcccggagtc

SEQ ID NO: 45182 - DNA, 25 bp, Homo sapien
gagacgactcggtgctcccggagtc

SEQ ID NO: 45183 - DNA, 25 bp, Homo sapien
acgagagaaggatgctcaatcggtc

SEQ ID NO: 45184 - DNA, 25 bp, Homo sapien
acgagagaaggaagctcaatcggtc

SEQ ID NO: 45185 - DNA, 25 bp, Homo sapien
cggactgtgcgactattagttaata

SEQ ID NO: 45186 - DNA, 25 bp, Homo sapien
cggactgtgcgagtattagttaata

SEQ ID NO: 45187 - DNA, 25 bp, Homo sapien
gtggtaactgggaaacccttactta

SEQ ID NO: 45188 - DNA, 25 bp, Homo sapien
gtggtaactgggtaacccttactta

SEQ ID NO: 45189 - DNA, 25 bp, Homo sapien
gtacaatagtcttcaacaattgtcg

SEQ ID NO: 45190 - DNA, 25 bp, Homo sapien
gtacaatagtctacaacaattgtcg

SEQ ID NO: 45191 - DNA, 25 bp, Homo sapien
tacaatacggtatcagtctaatttt

SEQ ID NO: 45192 - DNA, 25 bp, Homo sapien
tacaatacggtaacagtctaatttt

SEQ ID NO: 45193 - DNA, 25 bp, Homo sapien
tgaatccactgaatcttatattcgg

SEQ ID NO: 45194 - DNA, 25 bp, Homo sapien
tgaatccactgattcttatattcgg

SEQ ID NO: 45195 - DNA, 25 bp, Homo sapien
accgaattctatgttttcccgtgag

SEQ ID NO: 45196 - DNA, 25 bp, Homo sapien
accgaattctatcttttcccgtgag

SEQ ID NO: 45197 - DNA, 25 bp, Homo sapien
caagtaacagaattttcacagtaag

SEQ ID NO: 45198 - DNA, 25 bp, Homo sapien
caagtaacagaaatttcacagtaag

SEQ ID NO: 45199 - DNA, 25 bp, Homo sapien
tgtaggtcaggtcgtcgacgttaga

SEQ ID NO: 45200 - DNA, 25 bp, Homo sapien
tgtaggtcaggtggtcgacgttaga

SEQ ID NO: 45201 - DNA, 25 bp, Homo sapien
tggagtagtcaggacccacgaacgg

SEQ ID NO: 45202 - DNA, 25 bp, Homo sapien
tggagtagtcagcacccacgaacgg

SEQ ID NO: 45203 - DNA, 25 bp, Homo sapien
aagaaaagacgattcagagaccgtg

SEQ ID NO: 45204 - DNA, 25 bp, Homo sapien
aagaaaagacgaatcagagaccgtg

SEQ ID NO: 45205 - DNA, 25 bp, Homo sapien
aaaagactacacattatgaacacgg

SEQ ID NO: 45206 - DNA, 25 bp, Homo sapien
aaaagactacactttatgaacacgg

SEQ ID NO: 45207 - DNA, 25 bp, Homo sapien
tataaaaggctctctagaagactgt

SEQ ID NO: 45208 - DNA, 25 bp, Homo sapien
tataaaaggctcactagaagactgt

SEQ ID NO: 45209 - DNA, 25 bp, Homo sapien
acaccggtgtcgaaccgagttcccg

SEQ ID NO: 45210 - DNA, 25 bp, Homo sapien
acaccggtgtcgtaccgagttcccg

SEQ ID NO: 45211 - DNA, 25 bp, Homo sapien
cctccgtcgtcgtcgtcgaggcccg

SEQ ID NO: 45212 - DNA, 25 bp, Homo sapien
cctccgtcgtcgacgtcgaggcccg

SEQ ID NO: 45213 - DNA, 25 bp, Homo sapien
attcctccggaccttagatgtgaaa

SEQ ID NO: 45214 - DNA, 25 bp, Homo sapien
attcctccggacgttagatgtgaaa

SEQ ID NO: 45215 - DNA, 25 bp, Homo sapien
tcccgaccatgaactgctacgatat

SEQ ID NO: 45216 - DNA, 25 bp, Homo sapien
tcccgaccatgatctgctacgatat

SEQ ID NO: 45217 - DNA, 25 bp, Homo sapien
tgtatgacccaatcgtgaactatag

SEQ ID NO: 45218 - DNA, 25 bp, Homo sapien
tgtatgacccaaacgtgaactatag

SEQ ID NO: 45219 - DNA, 25 bp, Homo sapien
ctgtaagtatctctagttgacatta

SEQ ID NO: 45220 - DNA, 25 bp, Homo sapien
ctgtaagtatctgtagttgacatta

SEQ ID NO: 45221 - DNA, 25 bp, Homo sapien
agttttttacagaattagaactcac

SEQ ID NO: 45222 - DNA, 25 bp, Homo sapien
agttttttacagtattagaactcac

SEQ ID NO: 45223 - DNA, 25 bp, Homo sapien
cagtttactcagtatctagctcaga

SEQ ID NO: 45224 - DNA, 25 bp, Homo sapien
cagtttactcagaatctagctcaga

SEQ ID NO: 45225 - DNA, 25 bp, Homo sapien
agagtttacactgtacaggtttaac

SEQ ID NO: 45226 - DNA, 25 bp, Homo sapien
agagtttacactctacaggtttaac

SEQ ID NO: 45227 - DNA, 25 bp, Homo sapien
tgaaaaggaactacagaaactaccc

SEQ ID NO: 45228 - DNA, 25 bp, Homo sapien
tgaaaaggaacttcagaaactaccc

SEQ ID NO: 45229 - DNA, 25 bp, Homo sapien
gagaaggagaacacgagaacgaccc

SEQ ID NO: 45230 - DNA, 25 bp, Homo sapien
gagaaggagaactcgagaacgaccc

SEQ ID NO: 45231 - DNA, 25 bp, Homo sapien
gacaaagaagacgtcaagaccgaca

SEQ ID NO: 45232 - DNA, 25 bp, Homo sapien
gacaaagaagacctcaagaccgaca

SEQ ID NO: 45233 - DNA, 25 bp, Homo sapien
tccagagacaagactctggaacaca

SEQ ID NO: 45234 - DNA, 25 bp, Homo sapien
tccagagacaagtctctggaacaca

SEQ ID NO: 45235 - DNA, 25 bp, Homo sapien
tcctaagaagtgcttctggacctag

SEQ ID NO: 45236 - DNA, 25 bp, Homo sapien
tcctaagaagtggttctggacctag

SEQ ID NO: 45237 - DNA, 25 bp, Homo sapien
agttcagacaggtttacaagtcttc

SEQ ID NO: 45238 - DNA, 25 bp, Homo sapien
agttcagacaggattacaagtcttc

SEQ ID NO: 45239 - DNA, 25 bp, Homo sapien
ttgtattgacttgtcgtgaactttc

SEQ ID NO: 45240 - DNA, 25 bp, Homo sapien
ttgtattgacttctcgtgaactttc

SEQ ID NO: 45241 - DNA, 25 bp, Homo sapien
cagccgtggacattgagggccctag

SEQ ID NO: 45242 - DNA, 25 bp, Homo sapien
cagccgtggacaatgagggccctag

SEQ ID NO: 45243 - DNA, 25 bp, Homo sapien
gtcataggtcgtgtgggcacccacg

SEQ ID NO: 45244 - DNA, 25 bp, Homo sapien
gtcataggtcgtctgggcacccacg

SEQ ID NO: 45245 - DNA, 25 bp, Homo sapien
gtaccggtccgagaggtccccgaac

SEQ ID NO: 45246 - DNA, 25 bp, Homo sapien
gtaccggtccgacaggtccccgaac

SEQ ID NO: 45247 - DNA, 25 bp, Homo sapien
cgagaggcacgactcaggcgcccga

SEQ ID NO: 45248 - DNA, 25 bp, Homo sapien
cgagaggcacgagtcaggcgcccga

SEQ ID NO: 45249 - DNA, 25 bp, Homo sapien
gtcaaggaacaaccagacccccgag

SEQ ID NO: 45250 - DNA, 25 bp, Homo sapien
gtcaaggaacaagcagacccccgag

SEQ ID NO: 45251 - DNA, 25 bp, Homo sapien
ggaaaggcccggacgacttttcgag

SEQ ID NO: 45252 - DNA, 25 bp, Homo sapien
ggaaaggcccggtcgacttttcgag

SEQ ID NO: 45253 - DNA, 25 bp, Homo sapien
cacgggacccgaaggacctcttcga

SEQ ID NO: 45254 - DNA, 25 bp, Homo sapien
cacgggacccgatggacctcttcga

SEQ ID NO: 45255 - DNA, 25 bp, Homo sapien
tggtggtgaagaacccgacctccct

SEQ ID NO: 45256 - DNA, 25 bp, Homo sapien
tggtggtgaagatcccgacctccct

SEQ ID NO: 45257 - DNA, 25 bp, Homo sapien
aggggagtagaagaccttttagacc

SEQ ID NO: 45258 - DNA, 25 bp, Homo sapien
aggggagtagaacaccttttagacc

SEQ ID NO: 45259 - DNA, 25 bp, Homo sapien
agagaagcaaaatcctagtttaaac

SEQ ID NO: 45260 - DNA, 25 bp, Homo sapien
agagaagcaaaaacctagtttaaac

SEQ ID NO: 45261 - DNA, 25 bp, Homo sapien
cgaggaaccaaagaactatcttttt

SEQ ID NO: 45262 - DNA, 25 bp, Homo sapien
cgaggaaccaaacaactatcttttt

SEQ ID NO: 45263 - DNA, 25 bp, Homo sapien
aaggtcaagaatctcttttagttcg

SEQ ID NO: 45264 - DNA, 25 bp, Homo sapien
aaggtcaagaatgtcttttagttcg

SEQ ID NO: 45265 - DNA, 25 bp, Homo sapien
gtacagggtgactgggttcctgttc

SEQ ID NO: 45266 - DNA, 25 bp, Homo sapien
gtacagggtgacagggttcctgttc

SEQ ID NO: 45267 - DNA, 25 bp, Homo sapien
caagaacgtctaagggttcctttac

SEQ ID NO: 45268 - DNA, 25 bp, Homo sapien
caagaacgtctatgggttcctttac

SEQ ID NO: 45269 - DNA, 25 bp, Homo sapien
gacagcaggctgctcatccgccttg

SEQ ID NO: 45270 - DNA, 25 bp, Homo sapien
gacagcaggctggtcatccgccttg

SEQ ID NO: 45271 - DNA, 25 bp, Homo sapien
cagtccaatgggactctccgactcg

SEQ ID NO: 45272 - DNA, 25 bp, Homo sapien
cagtccaatgggtctctccgactcg

SEQ ID NO: 45273 - DNA, 25 bp, Homo sapien
ttgccactttatgtactaaccacgg

SEQ ID NO: 45274 - DNA, 25 bp, Homo sapien
ttgccactttatctactaaccacgg

SEQ ID NO: 45275 - DNA, 25 bp, Homo sapien
tttatgattgttacttgtaacaccg

SEQ ID NO: 45276 - DNA, 25 bp, Homo sapien
tttatgattgtttcttgtaacaccg

SEQ ID NO: 45277 - DNA, 25 bp, Homo sapien
ctttatgacttggtgtttgtaaacc

SEQ ID NO: 45278 - DNA, 25 bp, Homo sapien
ctttatgacttgctgtttgtaaacc

SEQ ID NO: 45279 - DNA, 25 bp, Homo sapien
ttcgggattgtaatcgggtcccgtg

SEQ ID NO: 45280 - DNA, 25 bp, Homo sapien
ttcgggattgtattcgggtcccgtg

SEQ ID NO: 45281 - DNA, 25 bp, Homo sapien
acggccgtcgcaaaggtctccacta

SEQ ID NO: 45282 - DNA, 25 bp, Homo sapien
acggccgtcgcataggtctccacta

SEQ ID NO: 45283 - DNA, 25 bp, Homo sapien
ctcgtcgtcgagaagaacgtcctcc

SEQ ID NO: 45284 - DNA, 25 bp, Homo sapien
ctcgtcgtcgagtagaacgtcctcc

SEQ ID NO: 45285 - DNA, 25 bp, Homo sapien
gttttattcgggaaggacttactct

SEQ ID NO: 45286 - DNA, 25 bp, Homo sapien
gttttattcgggtaggacttactct

SEQ ID NO: 45287 - DNA, 25 bp, Homo sapien
gatctctccgggtcgaggatctctt

SEQ ID NO: 45288 - DNA, 25 bp, Homo sapien
gatctctccgggacgaggatctctt

SEQ ID NO: 45289 - DNA, 25 bp, Homo sapien
cattcgttacgggagtcgagtcccg

SEQ ID NO: 45290 - DNA, 25 bp, Homo sapien
cattcgttacggcagtcgagtcccg

SEQ ID NO: 45291 - DNA, 25 bp, Homo sapien
atttctgcgtaaatagagtcgtcct

SEQ ID NO: 45292 - DNA, 25 bp, Homo sapien
atttctgcgtaattagagtcgtcct

SEQ ID NO: 45293 - DNA, 25 bp, Homo sapien
ctacttcttcccatcggttgtgtgt

SEQ ID NO: 45294 - DNA, 25 bp, Homo sapien
ctacttcttcccttcggttgtgtgt

SEQ ID NO: 45295 - DNA, 25 bp, Homo sapien
acccgaacccgagactgtagttttc

SEQ ID NO: 45296 - DNA, 25 bp, Homo sapien
acccgaacccgacactgtagttttc

SEQ ID NO: 45297 - DNA, 25 bp, Homo sapien
accgggatctctcaaataatgtttt

SEQ ID NO: 45298 - DNA, 25 bp, Homo sapien
accgggatctctgaaataatgtttt

SEQ ID NO: 45299 - DNA, 25 bp, Homo sapien
gtagaaccggacttctacatttgtt

SEQ ID NO: 45300 - DNA, 25 bp, Homo sapien
gtagaaccggacatctacatttgtt

SEQ ID NO: 45301 - DNA, 25 bp, Homo sapien
taacccgaggtcgtctacgtgctgt

SEQ ID NO: 45302 - DNA, 25 bp, Homo sapien
taacccgaggtcctctacgtgctgt

SEQ ID NO: 45303 - DNA, 25 bp, Homo sapien
gtcgacctcaacctcgacaggctgt

SEQ ID NO: 45304 - DNA, 25 bp, Homo sapien
gtcgacctcaacgtcgacaggctgt

SEQ ID NO: 45305 - DNA, 25 bp, Homo sapien
gggtgacctctacctcggaaggaag

SEQ ID NO: 45306 - DNA, 25 bp, Homo sapien
gggtgacctctagctcggaaggaag

SEQ ID NO: 45307 - DNA, 25 bp, Homo sapien
ggtccggacctcaggggcacccagt

SEQ ID NO: 45308 - DNA, 25 bp, Homo sapien
ggtccggacctctggggcacccagt

SEQ ID NO: 45309 - DNA, 25 bp, Homo sapien
tgagagcggcatgtcgcggcacctc

SEQ ID NO: 45310 - DNA, 25 bp, Homo sapien
tgagagcggcatctcgcggcacctc

SEQ ID NO: 45311 - DNA, 25 bp, Homo sapien
gaaatgacagtctccgagacgaccc

SEQ ID NO: 45312 - DNA, 25 bp, Homo sapien
gaaatgacagtcaccgagacgaccc

SEQ ID NO: 45313 - DNA, 25 bp, Homo sapien
gatcgaccacttggagcagccactc

SEQ ID NO: 45314 - DNA, 25 bp, Homo sapien
gatcgaccacttcgagcagccactc

SEQ ID NO: 45315 - DNA, 25 bp, Homo sapien
ggcgacaactttgtcgaggactcta

SEQ ID NO: 45316 - DNA, 25 bp, Homo sapien
ggcgacaactttctcgaggactcta

SEQ ID NO: 45317 - DNA, 25 bp, Homo sapien
tcaggacctcttacccgtaggacca

SEQ ID NO: 45318 - DNA, 25 bp, Homo sapien
tcaggacctctttcccgtaggacca

SEQ ID NO: 45319 - DNA, 25 bp, Homo sapien
acccgacctctttccgagagatgac

SEQ ID NO: 45320 - DNA, 25 bp, Homo sapien
acccgacctcttaccgagagatgac

SEQ ID NO: 45321 - DNA, 25 bp, Homo sapien
atcagaccctaggaactccttgtct

SEQ ID NO: 45322 - DNA, 25 bp, Homo sapien
atcagaccctagcaactccttgtct

SEQ ID NO: 45323 - DNA, 25 bp, Homo sapien
cttggtacaacctattccctagtcg

SEQ ID NO: 45324 - DNA, 25 bp, Homo sapien
cttggtacaaccaattccctagtcg

SEQ ID NO: 45325 - DNA, 25 bp, Homo sapien
gtagccacagacctaattcccagtc

SEQ ID NO: 45326 - DNA, 25 bp, Homo sapien
gtagccacagacgtaattcccagtc

SEQ ID NO: 45327 - DNA, 25 bp, Homo sapien
acaacgacagtgacagcctccgtcg

SEQ ID NO: 45328 - DNA, 25 bp, Homo sapien
acaacgacagtgtcagcctccgtcg

SEQ ID NO: 45329 - DNA, 25 bp, Homo sapien
ggacccaaataacgaagctctccct

SEQ ID NO: 45330 - DNA, 25 bp, Homo sapien
ggacccaaataaggaagctctccct

SEQ ID NO: 45331 - DNA, 25 bp, Homo sapien
gtccatgagtcagtaggtgtcccgc

SEQ ID NO: 45332 - DNA, 25 bp, Homo sapien
gtccatgagtcactaggtgtcccgc

SEQ ID NO: 45333 - DNA, 25 bp, Homo sapien
atacatcgactcagtcgttccatgt

SEQ ID NO: 45334 - DNA, 25 bp, Homo sapien
atacatcgactctgtcgttccatgt

SEQ ID NO: 45335 - DNA, 25 bp, Homo sapien
acccgtcacaagtttcggtttttct

SEQ ID NO: 45336 - DNA, 25 bp, Homo sapien
acccgtcacaagattcggtttttct

SEQ ID NO: 45337 - DNA, 25 bp, Homo sapien
ctctcaagaacctcgaggtcgtgct

SEQ ID NO: 45338 - DNA, 25 bp, Homo sapien
ctctcaagaaccacgaggtcgtgct

SEQ ID NO: 45339 - DNA, 25 bp, Homo sapien
agacctctaaagaggtctggtcttg

SEQ ID NO: 45340 - DNA, 25 bp, Homo sapien
agacctctaaagtggtctggtcttg

SEQ ID NO: 45341 - DNA, 25 bp, Homo sapien
ggttacactagaattgaaccttttc

SEQ ID NO: 45342 - DNA, 25 bp, Homo sapien
ggttacactagatttgaaccttttc

SEQ ID NO: 45343 - DNA, 25 bp, Homo sapien
gtctataatccgtttataggttcct

SEQ ID NO: 45344 - DNA, 25 bp, Homo sapien
gtctataatccgattataggttcct

SEQ ID NO: 45345 - DNA, 25 bp, Homo sapien
gaacctccgtctagacgtcgttatt

SEQ ID NO: 45346 - DNA, 25 bp, Homo sapien
gaacctccgtcttgacgtcgttatt

SEQ ID NO: 45347 - DNA, 25 bp, Homo sapien
gtctccctcgtttcgtaggtggtct

SEQ ID NO: 45348 - DNA, 25 bp, Homo sapien
gtctccctcgttacgtaggtggtct

SEQ ID NO: 45349 - DNA, 25 bp, Homo sapien
gtacctcctcgtcatggactcggat

SEQ ID NO: 45350 - DNA, 25 bp, Homo sapien
gtacctcctcgtgatggactcggat

SEQ ID NO: 45351 - DNA, 25 bp, Homo sapien
cggataatccttgtacttctacaga

SEQ ID NO: 45352 - DNA, 25 bp, Homo sapien
cggataatccttctacttctacaga

SEQ ID NO: 45353 - DNA, 25 bp, Homo sapien
tctggataggttttctcctttataa

SEQ ID NO: 45354 - DNA, 25 bp, Homo sapien
tctggataggttatctcctttataa

SEQ ID NO: 45355 - DNA, 25 bp, Homo sapien
ttcactgtcgtttccattgaccgag

SEQ ID NO: 45356 - DNA, 25 bp, Homo sapien
ttcactgtcgttaccattgaccgag

SEQ ID NO: 45357 - DNA, 25 bp, Homo sapien
gactgctctgggaccgggtcctctc

SEQ ID NO: 45358 - DNA, 25 bp, Homo sapien
gactgctctgggtccgggtcctctc

SEQ ID NO: 45359 - DNA, 25 bp, Homo sapien
ccttcgcgggttccagatcctcgtg

SEQ ID NO: 45360 - DNA, 25 bp, Homo sapien
ccttcgcgggttgcagatcctcgtg

SEQ ID NO: 45361 - DNA, 25 bp, Homo sapien
accattcgggtcgtcccttcttcgg

SEQ ID NO: 45362 - DNA, 25 bp, Homo sapien
accattcgggtcctcccttcttcgg

SEQ ID NO: 45363 - DNA, 25 bp, Homo sapien
taaaactaggtactgattttatccg

SEQ ID NO: 45364 - DNA, 25 bp, Homo sapien
taaaactaggtagtgattttatccg

SEQ ID NO: 45365 - DNA, 25 bp, Homo sapien
aacgaaagtttttatggacacgtcc

SEQ ID NO: 45366 - DNA, 25 bp, Homo sapien
aacgaaagttttaatggacacgtcc

SEQ ID NO: 45367 - DNA, 25 bp, Homo sapien
atacatttatagttaggtgtctcct

SEQ ID NO: 45368 - DNA, 25 bp, Homo sapien
atacatttatagataggtgtctcct

SEQ ID NO: 45369 - DNA, 25 bp, Homo sapien
gagtagatcctacattgtcacttcg

SEQ ID NO: 45370 - DNA, 25 bp, Homo sapien
gagtagatcctagattgtcacttcg

SEQ ID NO: 45371 - DNA, 25 bp, Homo sapien
tgtacttcgactagatacgaacttt

SEQ ID NO: 45372 - DNA, 25 bp, Homo sapien
tgtacttcgacttgatacgaacttt

SEQ ID NO: 45373 - DNA, 25 bp, Homo sapien
acgcgaggtcacaactaacacgaga

SEQ ID NO: 45374 - DNA, 25 bp, Homo sapien
acgcgaggtcactactaacacgaga

SEQ ID NO: 45375 - DNA, 25 bp, Homo sapien
aagacctggcccactcgacagaact

SEQ ID NO: 45376 - DNA, 25 bp, Homo sapien
aagacctggccctctcgacagaact

SEQ ID NO: 45377 - DNA, 25 bp, Homo sapien
tgacattcgttggttgtgacgaaac

SEQ ID NO: 45378 - DNA, 25 bp, Homo sapien
tgacattcgttgcttgtgacgaaac

SEQ ID NO: 45379 - DNA, 25 bp, Homo sapien
tctactcctgttcttgtgggactct

SEQ ID NO: 45380 - DNA, 25 bp, Homo sapien
tctactcctgttgttgtgggactct

SEQ ID NO: 45381 - DNA, 25 bp, Homo sapien
tgacgtcatagacgtcgtgggtcct

SEQ ID NO: 45382 - DNA, 25 bp, Homo sapien
tgacgtcatagaggtcgtgggtcct

SEQ ID NO: 45383 - DNA, 25 bp, Homo sapien
ccatcgagtcgaggtctgagaccat

SEQ ID NO: 45384 - DNA, 25 bp, Homo sapien
ccatcgagtcgacgtctgagaccat

SEQ ID NO: 45385 - DNA, 25 bp, Homo sapien
ggaccgcctgggtcgagtaccgtat

SEQ ID NO: 45386 - DNA, 25 bp, Homo sapien
ggaccgcctgggacgagtaccgtat

SEQ ID NO: 45387 - DNA, 25 bp, Homo sapien
gaaccacctcttcaacgtataccgg

SEQ ID NO: 45388 - DNA, 25 bp, Homo sapien
gaaccacctcttgaacgtataccgg

SEQ ID NO: 45389 - DNA, 25 bp, Homo sapien
ccaccctagttctcgtcgttttcgt

SEQ ID NO: 45390 - DNA, 25 bp, Homo sapien
ccaccctagttcacgtcgttttcgt

SEQ ID NO: 45391 - DNA, 25 bp, Homo sapien
ctcgtcatcctggacgtgtctaccg

SEQ ID NO: 45392 - DNA, 25 bp, Homo sapien
ctcgtcatcctgcacgtgtctaccg

SEQ ID NO: 45393 - DNA, 25 bp, Homo sapien
aagtgacgagtctctgactctcagg

SEQ ID NO: 45394 - DNA, 25 bp, Homo sapien
aagtgacgagtcactgactctcagg

SEQ ID NO: 45395 - DNA, 25 bp, Homo sapien
tgacagtgacattgggtactccttc

SEQ ID NO: 45396 - DNA, 25 bp, Homo sapien
tgacagtgacatagggtactccttc

SEQ ID NO: 45397 - DNA, 25 bp, Homo sapien
ccatgggagcttgtgaagtctttgt

SEQ ID NO: 45398 - DNA, 25 bp, Homo sapien
ccatgggagcttctgaagtctttgt

SEQ ID NO: 45399 - DNA, 25 bp, Homo sapien
gtggacagggacgacccgttcttcg

SEQ ID NO: 45400 - DNA, 25 bp, Homo sapien
gtggacagggaccacccgttcttcg

SEQ ID NO: 45401 - DNA, 25 bp, Homo sapien
tgactcatggatattacacagttcg

SEQ ID NO: 45402 - DNA, 25 bp, Homo sapien
tgactcatggattttacacagttcg

SEQ ID NO: 45403 - DNA, 25 bp, Homo sapien
tggtactaagggtcaccacgacccg

SEQ ID NO: 45404 - DNA, 25 bp, Homo sapien
tggtactaagggacaccacgacccg

SEQ ID NO: 45405 - DNA, 25 bp, Homo sapien
cctagagtcaggaggtcccagtccc

SEQ ID NO: 45406 - DNA, 25 bp, Homo sapien
cctagagtcaggtggtcccagtccc

SEQ ID NO: 45407 - DNA, 25 bp, Homo sapien
ttaagatcaaggtatccaaaagtac

SEQ ID NO: 45408 - DNA, 25 bp, Homo sapien
ttaagatcaaggaatccaaaagtac

SEQ ID NO: 45409 - DNA, 25 bp, Homo sapien
aagtccttctagcacctcaaagagg

SEQ ID NO: 45410 - DNA, 25 bp, Homo sapien
aagtccttctaggacctcaaagagg

SEQ ID NO: 45411 - DNA, 25 bp, Homo sapien
gagatttgaggacgtagacaacgtc

SEQ ID NO: 45412 - DNA, 25 bp, Homo sapien
gagatttgaggaggtagacaacgtc

SEQ ID NO: 45413 - DNA, 25 bp, Homo sapien
agggagtcccaggttctggaacttc

SEQ ID NO: 45414 - DNA, 25 bp, Homo sapien
agggagtcccagcttctggaacttc

SEQ ID NO: 45415 - DNA, 25 bp, Homo sapien
cgggaggatccctatggataactac

SEQ ID NO: 45416 - DNA, 25 bp, Homo sapien
cgggaggatcccaatggataactac

SEQ ID NO: 45417 - DNA, 25 bp, Homo sapien
cgccgtcgtcgaaactcgtcgtcgt

SEQ ID NO: 45418 - DNA, 25 bp, Homo sapien
cgccgtcgtcgatactcgtcgtcgt

SEQ ID NO: 45419 - DNA, 25 bp, Homo sapien
tggggcgacctgttattacctctct

SEQ ID NO: 45420 - DNA, 25 bp, Homo sapien
tggggcgacctgatattacctctct

SEQ ID NO: 45421 - DNA, 25 bp, Homo sapien
acaggaaacgatagacacaatactg

SEQ ID NO: 45422 - DNA, 25 bp, Homo sapien
acaggaaacgattgacacaatactg

SEQ ID NO: 45423 - DNA, 25 bp, Homo sapien
acggtgacagtgtgctcagacagaa

SEQ ID NO: 45424 - DNA, 25 bp, Homo sapien
acggtgacagtgagctcagacagaa

SEQ ID NO: 45425 - DNA, 25 bp, Homo sapien
gtccaaggaagatcgtctaggtaga

SEQ ID NO: 45426 - DNA, 25 bp, Homo sapien
gtccaaggaagaacgtctaggtaga

SEQ ID NO: 45427 - DNA, 25 bp, Homo sapien
gaccaataggtgaaggtcatgtaca

SEQ ID NO: 45428 - DNA, 25 bp, Homo sapien
gaccaataggtgtaggtcatgtaca

SEQ ID NO: 45429 - DNA, 25 bp, Homo sapien
acgtggaacctgagtgagtctattt

SEQ ID NO: 45430 - DNA, 25 bp, Homo sapien
acgtggaacctgtgtgagtctattt

SEQ ID NO: 45431 - DNA, 25 bp, Homo sapien
ggaatcccccttttgtgtctctatt

SEQ ID NO: 45432 - DNA, 25 bp, Homo sapien
ggaatcccccttatgtgtctctatt

SEQ ID NO: 45433 - DNA, 25 bp, Homo sapien
attcggtcaaatcaagagatcttat

SEQ ID NO: 45434 - DNA, 25 bp, Homo sapien
attcggtcaaatgaagagatcttat

SEQ ID NO: 45435 - DNA, 25 bp, Homo sapien
attcggtcttctaagagaatttctt

SEQ ID NO: 45436 - DNA, 25 bp, Homo sapien
attcggtcttcttagagaatttctt

SEQ ID NO: 45437 - DNA, 25 bp, Homo sapien
gtgtacggtccgtgacaaaacgttt

SEQ ID NO: 45438 - DNA, 25 bp, Homo sapien
gtgtacggtccgagacaaaacgttt

SEQ ID NO: 45439 - DNA, 25 bp, Homo sapien
gactggagactcacgtaaaaagtaa

SEQ ID NO: 45440 - DNA, 25 bp, Homo sapien
gactggagactctcgtaaaaagtaa

SEQ ID NO: 45441 - DNA, 25 bp, Homo sapien
gagaagtagactcaggtcccaggca

SEQ ID NO: 45442 - DNA, 25 bp, Homo sapien
gagaagtagactgaggtcccaggca

SEQ ID NO: 45443 - DNA, 25 bp, Homo sapien
aacctggtgcaaaactttaggtcga

SEQ ID NO: 45444 - DNA, 25 bp, Homo sapien
aacctggtgcaatactttaggtcga

SEQ ID NO: 45445 - DNA, 25 bp, Homo sapien
gtcggtttccgaaactcagatggag

SEQ ID NO: 45446 - DNA, 25 bp, Homo sapien
gtcggtttccgatactcagatggag

SEQ ID NO: 45447 - DNA, 25 bp, Homo sapien
cctccttcttgatctacttgatgga

SEQ ID NO: 45448 - DNA, 25 bp, Homo sapien
cctccttcttgaactacttgatgga

SEQ ID NO: 45449 - DNA, 25 bp, Homo sapien
ttgtaaaactttctactttgttgcg

SEQ ID NO: 45450 - DNA, 25 bp, Homo sapien
ttgtaaaactttgtactttgttgcg

SEQ ID NO: 45451 - DNA, 25 bp, Homo sapien
tcgaaaccttttattgtgtgtcagt

SEQ ID NO: 45452 - DNA, 25 bp, Homo sapien
tcgaaacctttttttgtgtgtcagt

SEQ ID NO: 45453 - DNA, 25 bp, Homo sapien
cgtgtccttttcgttcagtgatggt

SEQ ID NO: 45454 - DNA, 25 bp, Homo sapien
cgtgtccttttccttcagtgatggt

SEQ ID NO: 45455 - DNA, 25 bp, Homo sapien
tccctgtttctctgtcaggaagtct

SEQ ID NO: 45456 - DNA, 25 bp, Homo sapien
tccctgtttctcagtcaggaagtct

SEQ ID NO: 45457 - DNA, 25 bp, Homo sapien
ctttcgtacacgattgactagatct

SEQ ID NO: 45458 - DNA, 25 bp, Homo sapien
ctttcgtacacgtttgactagatct

SEQ ID NO: 45459 - DNA, 25 bp, Homo sapien
cattggaagacgtgtatacatatcg

SEQ ID NO: 45460 - DNA, 25 bp, Homo sapien
cattggaagacgagtatacatatcg

SEQ ID NO: 45461 - DNA, 25 bp, Homo sapien
cattcgagtcacagggtccgaagtc

SEQ ID NO: 45462 - DNA, 25 bp, Homo sapien
cattcgagtcactgggtccgaagtc

SEQ ID NO: 45463 - DNA, 25 bp, Homo sapien
gggttacgagacagggacgtctata

SEQ ID NO: 45464 - DNA, 25 bp, Homo sapien
gggttacgagactgggacgtctata

SEQ ID NO: 45465 - DNA, 25 bp, Homo sapien
ccgtgcttacggtcaccgagtaaga

SEQ ID NO: 45466 - DNA, 25 bp, Homo sapien
ccgtgcttacggacaccgagtaaga

SEQ ID NO: 45467 - DNA, 25 bp, Homo sapien
cttctacttgcttcatcgttgagtt

SEQ ID NO: 45468 - DNA, 25 bp, Homo sapien
cttctacttgctacatcgttgagtt

SEQ ID NO: 45469 - DNA, 25 bp, Homo sapien
cacgttcggaagttcttcgtcgtat

SEQ ID NO: 45470 - DNA, 25 bp, Homo sapien
cacgttcggaagatcttcgtcgtat

SEQ ID NO: 45471 - DNA, 25 bp, Homo sapien
cgacgtctacgataaactccttcgt

SEQ ID NO: 45472 - DNA, 25 bp, Homo sapien
cgacgtctacgaaaaactccttcgt

SEQ ID NO: 45473 - DNA, 25 bp, Homo sapien
gtaagactgacaagatgactccctt

SEQ ID NO: 45474 - DNA, 25 bp, Homo sapien
gtaagactgacatgatgactccctt

SEQ ID NO: 45475 - DNA, 25 bp, Homo sapien
attccgagtgatcgatgtctgcctt

SEQ ID NO: 45476 - DNA, 25 bp, Homo sapien
attccgagtgatggatgtctgcctt

SEQ ID NO: 45477 - DNA, 25 bp, Homo sapien
ttccacttatccttagtcttaactt

SEQ ID NO: 45478 - DNA, 25 bp, Homo sapien
ttccacttatccatagtcttaactt

SEQ ID NO: 45479 - DNA, 25 bp, Homo sapien
cctatatgtcgctcccttagtacgt

SEQ ID NO: 45480 - DNA, 25 bp, Homo sapien
cctatatgtcgcacccttagtacgt

SEQ ID NO: 45481 - DNA, 25 bp, Homo sapien
ttccacttatacgtcaaactataat

SEQ ID NO: 45482 - DNA, 25 bp, Homo sapien
ttccacttatacctcaaactataat

SEQ ID NO: 45483 - DNA, 25 bp, Homo sapien
catgcactcctttcctaaggtgagt

SEQ ID NO: 45484 - DNA, 25 bp, Homo sapien
catgcactccttacctaaggtgagt

SEQ ID NO: 45485 - DNA, 25 bp, Homo sapien
agactcactcggtccccaggtgcgt

SEQ ID NO: 45486 - DNA, 25 bp, Homo sapien
agactcactcggaccccaggtgcgt

SEQ ID NO: 45487 - DNA, 25 bp, Homo sapien
agaccgagagtccaagagcctctaa

SEQ ID NO: 45488 - DNA, 25 bp, Homo sapien
agaccgagagtcgaagagcctctaa

SEQ ID NO: 45489 - DNA, 25 bp, Homo sapien
acaactcttagagtccacctgttgc

SEQ ID NO: 45490 - DNA, 25 bp, Homo sapien
acaactcttagactccacctgttgc

SEQ ID NO: 45491 - DNA, 25 bp, Homo sapien
aaaacgtgtcaactttattgttctg

SEQ ID NO: 45492 - DNA, 25 bp, Homo sapien
aaaacgtgtcaagtttattgttctg

SEQ ID NO: 45493 - DNA, 25 bp, Homo sapien
ccagatctggggttcaccggactta

SEQ ID NO: 45494 - DNA, 25 bp, Homo sapien
ccagatctggggatcaccggactta

SEQ ID NO: 45495 - DNA, 25 bp, Homo sapien
caccaggtgtcgacccaatacttat

SEQ ID NO: 45496 - DNA, 25 bp, Homo sapien
caccaggtgtcgtcccaatacttat

SEQ ID NO: 45497 - DNA, 25 bp, Homo sapien
gtaccttctttctccgggattgtct

SEQ ID NO: 45498 - DNA, 25 bp, Homo sapien
gtaccttctttcaccgggattgtct

SEQ ID NO: 45499 - DNA, 25 bp, Homo sapien
tggccttcctttacaggtaattagc

SEQ ID NO: 45500 - DNA, 25 bp, Homo sapien
tggccttccttttcaggtaattagc

SEQ ID NO: 45501 - DNA, 25 bp, Homo sapien
cgttctacctctctcggtgtaaagg

SEQ ID NO: 45502 - DNA, 25 bp, Homo sapien
cgttctacctctgtcggtgtaaagg

SEQ ID NO: 45503 - DNA, 25 bp, Homo sapien
tgggtaacttcctgccgaacctcaa

SEQ ID NO: 45504 - DNA, 25 bp, Homo sapien
tgggtaacttccagccgaacctcaa

SEQ ID NO: 45505 - DNA, 25 bp, Homo sapien
aggaattcagtacatctctctgaca

SEQ ID NO: 45506 - DNA, 25 bp, Homo sapien
aggaattcagtagatctctctgaca

SEQ ID NO: 45507 - DNA, 25 bp, Homo sapien
acggaggttattcgtttacctgtaa

SEQ ID NO: 45508 - DNA, 25 bp, Homo sapien
acggaggttattggtttacctgtaa

SEQ ID NO: 45509 - DNA, 25 bp, Homo sapien
taaaagtcacttgtttgtgacgaca

SEQ ID NO: 45510 - DNA, 25 bp, Homo sapien
taaaagtcacttctttgtgacgaca

SEQ ID NO: 45511 - DNA, 25 bp, Homo sapien
acttacgacccgaggtcggacgaca

SEQ ID NO: 45512 - DNA, 25 bp, Homo sapien
acttacgacccgtggtcggacgaca

SEQ ID NO: 45513 - DNA, 25 bp, Homo sapien
acatcgatatcgatgttgaaccgtc

SEQ ID NO: 45514 - DNA, 25 bp, Homo sapien
acatcgatatcgttgttgaaccgtc

SEQ ID NO: 45515 - DNA, 25 bp, Homo sapien
ctacagctctcagacgtagggtcac

SEQ ID NO: 45516 - DNA, 25 bp, Homo sapien
ctacagctctcacacgtagggtcac

SEQ ID NO: 45517 - DNA, 25 bp, Homo sapien
cgcactactggacagcacggggtca

SEQ ID NO: 45518 - DNA, 25 bp, Homo sapien
cgcactactggagagcacggggtca

SEQ ID NO: 45519 - DNA, 25 bp, Homo sapien
cggagaaagaccagacaccggttca

SEQ ID NO: 45520 - DNA, 25 bp, Homo sapien
cggagaaagacctgacaccggttca

SEQ ID NO: 45521 - DNA, 25 bp, Homo sapien
cgagagaactttagactaacgaatt

SEQ ID NO: 45522 - DNA, 25 bp, Homo sapien
cgagagaacttttgactaacgaatt

SEQ ID NO: 45523 - DNA, 25 bp, Homo sapien
tagactcgtgtttcgactcaccctt

SEQ ID NO: 45524 - DNA, 25 bp, Homo sapien
tagactcgtgttacgactcaccctt

SEQ ID NO: 45525 - DNA, 25 bp, Homo sapien
gtaatgcacagttgaacttacctta

SEQ ID NO: 45526 - DNA, 25 bp, Homo sapien
gtaatgcacagtagaacttacctta

SEQ ID NO: 45527 - DNA, 25 bp, Homo sapien
taccaacgacagagtagtcgtataa

SEQ ID NO: 45528 - DNA, 25 bp, Homo sapien
taccaacgacagtgtagtcgtataa

SEQ ID NO: 45529 - DNA, 25 bp, Homo sapien
aggtattggagctcgcgttttattc

SEQ ID NO: 45530 - DNA, 25 bp, Homo sapien
aggtattggagcacgcgttttattc

SEQ ID NO: 45531 - DNA, 25 bp, Homo sapien
gtcttctcgtagagggtcttcttcc

SEQ ID NO: 45532 - DNA, 25 bp, Homo sapien
gtcttctcgtagtgggtcttcttcc

SEQ ID NO: 45533 - DNA, 25 bp, Homo sapien
gagtctatctaggaggaaccctcca

SEQ ID NO: 45534 - DNA, 25 bp, Homo sapien
gagtctatctagcaggaaccctcca

SEQ ID NO: 45535 - DNA, 25 bp, Homo sapien
gttaccacccgcgacgactcgcaca

SEQ ID NO: 45536 - DNA, 25 bp, Homo sapien
gttaccacccgccacgactcgcaca

SEQ ID NO: 45537 - DNA, 25 bp, Homo sapien
cccgtcaaccggaccgaaggcaacg

SEQ ID NO: 45538 - DNA, 25 bp, Homo sapien
cccgtcaaccggtccgaaggcaacg

SEQ ID NO: 45539 - DNA, 25 bp, Homo sapien
accgctaaaacttcccctcggaagt

SEQ ID NO: 45540 - DNA, 25 bp, Homo sapien
accgctaaaactacccctcggaagt

SEQ ID NO: 45541 - DNA, 25 bp, Homo sapien
acgctataaacaatccttcggaggt

SEQ ID NO: 45542 - DNA, 25 bp, Homo sapien
acgctataaacattccttcggaggt

SEQ ID NO: 45543 - DNA, 25 bp, Homo sapien
acgcctaggccgagagtctacgggc

SEQ ID NO: 45544 - DNA, 25 bp, Homo sapien
acgcctaggccgtgagtctacgggc

SEQ ID NO: 45545 - DNA, 25 bp, Homo sapien
acgaccgaggacaaagactcaaccc

SEQ ID NO: 45546 - DNA, 25 bp, Homo sapien
acgaccgaggactaagactcaaccc

SEQ ID NO: 45547 - DNA, 25 bp, Homo sapien
gaccggtggacccagcaggtgacgc

SEQ ID NO: 45548 - DNA, 25 bp, Homo sapien
gaccggtggaccgagcaggtgacgc

SEQ ID NO: 45549 - DNA, 25 bp, Homo sapien
ggataccccaaacattcacaggacc

SEQ ID NO: 45550 - DNA, 25 bp, Homo sapien
ggataccccaaagattcacaggacc

SEQ ID NO: 45551 - DNA, 25 bp, Homo sapien
tacccagaacagtttcccggagatc

SEQ ID NO: 45552 - DNA, 25 bp, Homo sapien
tacccagaacagattcccggagatc

SEQ ID NO: 45553 - DNA, 25 bp, Homo sapien
cgtcttcaagacaattcccgaaagg

SEQ ID NO: 45554 - DNA, 25 bp, Homo sapien
cgtcttcaagactattcccgaaagg

SEQ ID NO: 45555 - DNA, 25 bp, Homo sapien
tatgaggataaaggatccacaatca

SEQ ID NO: 45556 - DNA, 25 bp, Homo sapien
tatgaggataaacgatccacaatca

SEQ ID NO: 45557 - DNA, 25 bp, Homo sapien
gagtgaaaatactccacagtgtagg

SEQ ID NO: 45558 - DNA, 25 bp, Homo sapien
gagtgaaaatacaccacagtgtagg

SEQ ID NO: 45559 - DNA, 25 bp, Homo sapien
aggagacacaggtccgatatgtagg

SEQ ID NO: 45560 - DNA, 25 bp, Homo sapien
aggagacacaggaccgatatgtagg

SEQ ID NO: 45561 - DNA, 25 bp, Homo sapien
tccagagaagggaccatgtgacgtg

SEQ ID NO: 45562 - DNA, 25 bp, Homo sapien
tccagagaagggtccatgtgacgtg

SEQ ID NO: 45563 - DNA, 25 bp, Homo sapien
agagtcgaaggacctggtatgcaag

SEQ ID NO: 45564 - DNA, 25 bp, Homo sapien
agagtcgaaggagctggtatgcaag

SEQ ID NO: 45565 - DNA, 25 bp, Homo sapien
ggtacagacaaaatcaattgttcct

SEQ ID NO: 45566 - DNA, 25 bp, Homo sapien
ggtacagacaaattcaattgttcct

SEQ ID NO: 45567 - DNA, 25 bp, Homo sapien
tacttaccatcactcaacttttatt

SEQ ID NO: 45568 - DNA, 25 bp, Homo sapien
tacttaccatcagtcaacttttatt

SEQ ID NO: 45569 - DNA, 25 bp, Homo sapien
agttattctacacagaaatgttcaa

SEQ ID NO: 45570 - DNA, 25 bp, Homo sapien
agttattctacagagaaatgttcaa

SEQ ID NO: 45571 - DNA, 25 bp, Homo sapien
tttaatcgacatgacactgttcacg

SEQ ID NO: 45572 - DNA, 25 bp, Homo sapien
tttaatcgacatcacactgttcacg

SEQ ID NO: 45573 - DNA, 25 bp, Homo sapien
ctgtagactacctcgacagagttca

SEQ ID NO: 45574 - DNA, 25 bp, Homo sapien
ctgtagactaccacgacagagttca

SEQ ID NO: 45575 - DNA, 25 bp, Homo sapien
ctccgagtaaggtcctagcgttata

SEQ ID NO: 45576 - DNA, 25 bp, Homo sapien
ctccgagtaaggacctagcgttata

SEQ ID NO: 45577 - DNA, 25 bp, Homo sapien
ccccaagaagaggagcatgacgtgc

SEQ ID NO: 45578 - DNA, 25 bp, Homo sapien
ccccaagaagagcagcatgacgtgc

SEQ ID NO: 45579 - DNA, 25 bp, Homo sapien
gaccagagtcgagtcggaatacgga

SEQ ID NO: 45580 - DNA, 25 bp, Homo sapien
gaccagagtcgactcggaatacgga

SEQ ID NO: 45581 - DNA, 25 bp, Homo sapien
cggacgagtcgagacgtgaagaccc

SEQ ID NO: 45582 - DNA, 25 bp, Homo sapien
cggacgagtcgacacgtgaagaccc

SEQ ID NO: 45583 - DNA, 25 bp, Homo sapien
gaagggatgtccaccaggacgtccg

SEQ ID NO: 45584 - DNA, 25 bp, Homo sapien
gaagggatgtcctccaggacgtccg

SEQ ID NO: 45585 - DNA, 25 bp, Homo sapien
gcgggagactctcctccggatcgtc

SEQ ID NO: 45586 - DNA, 25 bp, Homo sapien
gcgggagactctgctccggatcgtc

SEQ ID NO: 45587 - DNA, 25 bp, Homo sapien
ccggggccgtacgactccgaggttt

SEQ ID NO: 45588 - DNA, 25 bp, Homo sapien
ccggggccgtaccactccgaggttt

SEQ ID NO: 45589 - DNA, 25 bp, Homo sapien
accggggtcttcacgcacagacttc

SEQ ID NO: 45590 - DNA, 25 bp, Homo sapien
accggggtcttctcgcacagacttc

SEQ ID NO: 45591 - DNA, 25 bp, Homo sapien
tagaggggcctcgaccagtccgtct

SEQ ID NO: 45592 - DNA, 25 bp, Homo sapien
tagaggggcctccaccagtccgtct

SEQ ID NO: 45593 - DNA, 25 bp, Homo sapien
gactgaggccggtcacctcttccga

SEQ ID NO: 45594 - DNA, 25 bp, Homo sapien
gactgaggccggacacctcttccga

SEQ ID NO: 45595 - DNA, 25 bp, Homo sapien
agtccgccgaaccttatatagatat

SEQ ID NO: 45596 - DNA, 25 bp, Homo sapien
agtccgccgaacgttatatagatat

SEQ ID NO: 45597 - DNA, 25 bp, Homo sapien
agacccctagaagcttacgataatt

SEQ ID NO: 45598 - DNA, 25 bp, Homo sapien
agacccctagaaccttacgataatt

SEQ ID NO: 45599 - DNA, 25 bp, Homo sapien
ttatatctttgtcagattccaacgg

SEQ ID NO: 45600 - DNA, 25 bp, Homo sapien
ttatatctttgtgagattccaacgg

SEQ ID NO: 45601 - DNA, 25 bp, Homo sapien
ttaaatgttcccagggacaacgtag

SEQ ID NO: 45602 - DNA, 25 bp, Homo sapien
ttaaatgttccctgggacaacgtag

SEQ ID NO: 45603 - DNA, 25 bp, Homo sapien
agagaagtttcttcctttcataacg

SEQ ID NO: 45604 - DNA, 25 bp, Homo sapien
agagaagtttctacctttcataacg

SEQ ID NO: 45605 - DNA, 25 bp, Homo sapien
agtaggaggttgactgtcgctccca

SEQ ID NO: 45606 - DNA, 25 bp, Homo sapien
agtaggaggttgtctgtcgctccca

SEQ ID NO: 45607 - DNA, 25 bp, Homo sapien
cagacagagttctttcttgaccaag

SEQ ID NO: 45608 - DNA, 25 bp, Homo sapien
cagacagagttcattcttgaccaag

SEQ ID NO: 45609 - DNA, 25 bp, Homo sapien
caaacttagtgtaaacctgggcgaa

SEQ ID NO: 45610 - DNA, 25 bp, Homo sapien
caaacttagtgttaacctgggcgaa

SEQ ID NO: 45611 - DNA, 25 bp, Homo sapien
tagatttaatacaggttgttactcc

SEQ ID NO: 45612 - DNA, 25 bp, Homo sapien
tagatttaatactggttgttactcc

SEQ ID NO: 45613 - DNA, 25 bp, Homo sapien
ccgtaggaagaccgcacggacttgt

SEQ ID NO: 45614 - DNA, 25 bp, Homo sapien
ccgtaggaagacggcacggacttgt

SEQ ID NO: 45615 - DNA, 25 bp, Homo sapien
cggaatctagagagcggcggttacg

SEQ ID NO: 45616 - DNA, 25 bp, Homo sapien
cggaatctagagtgcggcggttacg

SEQ ID NO: 45617 - DNA, 25 bp, Homo sapien
gaacttaggttactcgttttattcc

SEQ ID NO: 45618 - DNA, 25 bp, Homo sapien
gaacttaggttagtcgttttattcc

SEQ ID NO: 45619 - DNA, 25 bp, Homo sapien
acatatcagagagtctctgtttaaa

SEQ ID NO: 45620 - DNA, 25 bp, Homo sapien
acatatcagagactctctgtttaaa

SEQ ID NO: 45621 - DNA, 25 bp, Homo sapien
atacttttacacatccttttgtaaa

SEQ ID NO: 45622 - DNA, 25 bp, Homo sapien
atacttttacacttccttttgtaaa

SEQ ID NO: 45623 - DNA, 25 bp, Homo sapien
ttttgtctctacttcttctcataaa

SEQ ID NO: 45624 - DNA, 25 bp, Homo sapien
ttttgtctctacatcttctcataaa

SEQ ID NO: 45625 - DNA, 25 bp, Homo sapien
tcttttcctctcaagatccggtgga

SEQ ID NO: 45626 - DNA, 25 bp, Homo sapien
tcttttcctctctagatccggtgga

SEQ ID NO: 45627 - DNA, 25 bp, Homo sapien
cttgttaatttcgattggttcacgt

SEQ ID NO: 45628 - DNA, 25 bp, Homo sapien
cttgttaatttccattggttcacgt

SEQ ID NO: 45629 - DNA, 25 bp, Homo sapien
gtacgtaaagtttaccattttccga

SEQ ID NO: 45630 - DNA, 25 bp, Homo sapien
gtacgtaaagttaaccattttccga

SEQ ID NO: 45631 - DNA, 25 bp, Homo sapien
tagatctgtaaatatctcatatgtc

SEQ ID NO: 45632 - DNA, 25 bp, Homo sapien
tagatctgtaaaaatctcatatgtc

SEQ ID NO: 45633 - DNA, 25 bp, Homo sapien
tttcattgatatttggtcattgact

SEQ ID NO: 45634 - DNA, 25 bp, Homo sapien
tttcattgatatatggtcattgact

SEQ ID NO: 45635 - DNA, 25 bp, Homo sapien
tgtcttcggacacatggtccctcct

SEQ ID NO: 45636 - DNA, 25 bp, Homo sapien
tgtcttcggacagatggtccctcct

SEQ ID NO: 45637 - DNA, 25 bp, Homo sapien
agactgaatggacgtcgtctcccct

SEQ ID NO: 45638 - DNA, 25 bp, Homo sapien
agactgaatggaggtcgtctcccct

SEQ ID NO: 45639 - DNA, 25 bp, Homo sapien
gtactttctggtgtacctctgcggt

SEQ ID NO: 45640 - DNA, 25 bp, Homo sapien
gtactttctggtctacctctgcggt

SEQ ID NO: 45641 - DNA, 25 bp, Homo sapien
tcgtgctttcggacctccactgtca

SEQ ID NO: 45642 - DNA, 25 bp, Homo sapien
tcgtgctttcggtcctccactgtca

SEQ ID NO: 45643 - DNA, 25 bp, Homo sapien
gttctagagacctgtgtacttacta

SEQ ID NO: 45644 - DNA, 25 bp, Homo sapien
gttctagagaccagtgtacttacta

SEQ ID NO: 45645 - DNA, 25 bp, Homo sapien
caactgttagagtagttttcactat

SEQ ID NO: 45646 - DNA, 25 bp, Homo sapien
caactgttagagaagttttcactat

SEQ ID NO: 45647 - DNA, 25 bp, Homo sapien
gtcctgacgtggtcttcatctccta

SEQ ID NO: 45648 - DNA, 25 bp, Homo sapien
gtcctgacgtggacttcatctccta

SEQ ID NO: 45649 - DNA, 25 bp, Homo sapien
tcctcaggagcgtgacagtacggaa

SEQ ID NO: 45650 - DNA, 25 bp, Homo sapien
tcctcaggagcgagacagtacggaa

SEQ ID NO: 45651 - DNA, 25 bp, Homo sapien
ctgtcgagcacgtggcacaccatcg

SEQ ID NO: 45652 - DNA, 25 bp, Homo sapien
ctgtcgagcacgaggcacaccatcg

SEQ ID NO: 45653 - DNA, 25 bp, Homo sapien
cgttctaaagtaggtgtctttccta

SEQ ID NO: 45654 - DNA, 25 bp, Homo sapien
cgttctaaagtacgtgtctttccta

SEQ ID NO: 45655 - DNA, 25 bp, Homo sapien
gttttaacgactaagaagtcccgag

SEQ ID NO: 45656 - DNA, 25 bp, Homo sapien
gttttaacgacttagaagtcccgag

SEQ ID NO: 45657 - DNA, 25 bp, Homo sapien
tcctgataaactttagagtcgttcc

SEQ ID NO: 45658 - DNA, 25 bp, Homo sapien
tcctgataaactatagagtcgttcc

SEQ ID NO: 45659 - DNA, 25 bp, Homo sapien
tgagtcgaaagaagtcgaggtctct

SEQ ID NO: 45660 - DNA, 25 bp, Homo sapien
tgagtcgaaagatgtcgaggtctct

SEQ ID NO: 45661 - DNA, 25 bp, Homo sapien
atttggtgttagacccggtctcgtc

SEQ ID NO: 45662 - DNA, 25 bp, Homo sapien
atttggtgttagtcccggtctcgtc

SEQ ID NO: 45663 - DNA, 25 bp, Homo sapien
aatagttatgcataaagtgtcctct

SEQ ID NO: 45664 - DNA, 25 bp, Homo sapien
aatagttatgcaaaaagtgtcctct

SEQ ID NO: 45665 - DNA, 25 bp, Homo sapien
tagtgtacatgacgaaactttcatc

SEQ ID NO: 45666 - DNA, 25 bp, Homo sapien
tagtgtacatgaggaaactttcatc

SEQ ID NO: 45667 - DNA, 25 bp, Homo sapien
cttttaccagttttgacgtttctcg

SEQ ID NO: 45668 - DNA, 25 bp, Homo sapien
cttttaccagttatgacgtttctcg

SEQ ID NO: 45669 - DNA, 25 bp, Homo sapien
gtctagacacgtaaagttactttta

SEQ ID NO: 45670 - DNA, 25 bp, Homo sapien
gtctagacacgttaagttactttta

SEQ ID NO: 45671 - DNA, 25 bp, Homo sapien
gagagtccgacttagaatttcttta

SEQ ID NO: 45672 - DNA, 25 bp, Homo sapien
gagagtccgactaagaatttcttta

SEQ ID NO: 45673 - DNA, 25 bp, Homo sapien
cgtctagactatgatcgtttttgta

SEQ ID NO: 45674 - DNA, 25 bp, Homo sapien
cgtctagactatcatcgtttttgta

SEQ ID NO: 45675 - DNA, 25 bp, Homo sapien
gaccagtcggtaatgttctttgtct

SEQ ID NO: 45676 - DNA, 25 bp, Homo sapien
gaccagtcggtattgttctttgtct

SEQ ID NO: 45677 - DNA, 25 bp, Homo sapien
gaacatcgagaggtatttgttcgtc

SEQ ID NO: 45678 - DNA, 25 bp, Homo sapien
gaacatcgagagctatttgttcgtc

SEQ ID NO: 45679 - DNA, 25 bp, Homo sapien
cgaaagacggagtattggtcgttcg

SEQ ID NO: 45680 - DNA, 25 bp, Homo sapien
cgaaagacggagaattggtcgttcg

SEQ ID NO: 45681 - DNA, 25 bp, Homo sapien
gactttaaagacatttcggtcatag

SEQ ID NO: 45682 - DNA, 25 bp, Homo sapien
gactttaaagacttttcggtcatag

SEQ ID NO: 45683 - DNA, 25 bp, Homo sapien
accttatagaattgtatacttttat

SEQ ID NO: 45684 - DNA, 25 bp, Homo sapien
accttatagaatagtatacttttat

SEQ ID NO: 45685 - DNA, 25 bp, Homo sapien
cctaagtgaatagagacttgacttt

SEQ ID NO: 45686 - DNA, 25 bp, Homo sapien
cctaagtgaatacagacttgacttt

SEQ ID NO: 45687 - DNA, 25 bp, Homo sapien
actttgtgaaccttccttttagtgt

SEQ ID NO: 45688 - DNA, 25 bp, Homo sapien
actttgtgaaccatccttttagtgt

SEQ ID NO: 45689 - DNA, 25 bp, Homo sapien
ccgctgtttccgttctgttcctgtg

SEQ ID NO: 45690 - DNA, 25 bp, Homo sapien
ccgctgtttccgatctgttcctgtg

SEQ ID NO: 45691 - DNA, 25 bp, Homo sapien
tttctgtagacttcgggtatccgag

SEQ ID NO: 45692 - DNA, 25 bp, Homo sapien
tttctgtagactacgggtatccgag

SEQ ID NO: 45693 - DNA, 25 bp, Homo sapien
cgttcacggacatcggagtctccgg

SEQ ID NO: 45694 - DNA, 25 bp, Homo sapien
cgttcacggacaacggagtctccgg

SEQ ID NO: 45695 - DNA, 25 bp, Homo sapien
aaacactgggacagggataccccgt

SEQ ID NO: 45696 - DNA, 25 bp, Homo sapien
aaacactgggactgggataccccgt

SEQ ID NO: 45697 - DNA, 25 bp, Homo sapien
cacactgtggacaactgagagcacc

SEQ ID NO: 45698 - DNA, 25 bp, Homo sapien
cacactgtggactactgagagcacc

SEQ ID NO: 45699 - DNA, 25 bp, Homo sapien
taagacaggggttgtcggtacccct

SEQ ID NO: 45700 - DNA, 25 bp, Homo sapien
taagacaggggtagtcggtacccct

SEQ ID NO: 45701 - DNA, 25 bp, Homo sapien
tatagagaggtcaagggcgtttcac

SEQ ID NO: 45702 - DNA, 25 bp, Homo sapien
tatagagaggtctagggcgtttcac

SEQ ID NO: 45703 - DNA, 25 bp, Homo sapien
tatctggtatcaagggtagtttacc

SEQ ID NO: 45704 - DNA, 25 bp, Homo sapien
tatctggtatcatgggtagtttacc

SEQ ID NO: 45705 - DNA, 25 bp, Homo sapien
ttgggagttccaggagtatctgaac

SEQ ID NO: 45706 - DNA, 25 bp, Homo sapien
ttgggagttccacgagtatctgaac

SEQ ID NO: 45707 - DNA, 25 bp, Homo sapien
ggtcgattccgtaacgattcctaac

SEQ ID NO: 45708 - DNA, 25 bp, Homo sapien
ggtcgattccgttacgattcctaac

SEQ ID NO: 45709 - DNA, 25 bp, Homo sapien
acgcggacttgcaacgacatttgac

SEQ ID NO: 45710 - DNA, 25 bp, Homo sapien
acgcggacttgctacgacatttgac

SEQ ID NO: 45711 - DNA, 25 bp, Homo sapien
ctcagtgtttgctttttaccgttag

SEQ ID NO: 45712 - DNA, 25 bp, Homo sapien
ctcagtgtttgcattttaccgttag

SEQ ID NO: 45713 - DNA, 25 bp, Homo sapien
atgtcatatttatgtgtcctacttg

SEQ ID NO: 45714 - DNA, 25 bp, Homo sapien
atgtcatatttaagtgtcctacttg

SEQ ID NO: 45715 - DNA, 25 bp, Homo sapien
gtgactttatcttgtacctaactcg

SEQ ID NO: 45716 - DNA, 25 bp, Homo sapien
gtgactttatctagtacctaactcg

SEQ ID NO: 45717 - DNA, 25 bp, Homo sapien
gtgacatgtgtcttactaccttgat

SEQ ID NO: 45718 - DNA, 25 bp, Homo sapien
gtgacatgtgtcatactaccttgat

SEQ ID NO: 45719 - DNA, 25 bp, Homo sapien
cgtaggcaggcgtcgaagtacttgc

SEQ ID NO: 45720 - DNA, 25 bp, Homo sapien
cgtaggcaggcgacgaagtacttgc

SEQ ID NO: 45721 - DNA, 25 bp, Homo sapien
cggttcgacccgacaccgtaggtga

SEQ ID NO: 45722 - DNA, 25 bp, Homo sapien
cggttcgacccgtcaccgtaggtga

SEQ ID NO: 45723 - DNA, 25 bp, Homo sapien
tggtcgtcttcctctctcactaaga

SEQ ID NO: 45724 - DNA, 25 bp, Homo sapien
tggtcgtcttccactctcactaaga

SEQ ID NO: 45725 - DNA, 25 bp, Homo sapien
actgtcaccgtcgtcgtctccagga

SEQ ID NO: 45726 - DNA, 25 bp, Homo sapien
actgtcaccgtcctcgtctccagga

SEQ ID NO: 45727 - DNA, 25 bp, Homo sapien
tagaccgagactttgtttcctataa

SEQ ID NO: 45728 - DNA, 25 bp, Homo sapien
tagaccgagactatgtttcctataa

SEQ ID NO: 45729 - DNA, 25 bp, Homo sapien
tctgaaggaattaaggtccacttag

SEQ ID NO: 45730 - DNA, 25 bp, Homo sapien
tctgaaggaatttaggtccacttag

SEQ ID NO: 45731 - DNA, 25 bp, Homo sapien
gacatgaacgaaaagtactaacctc

SEQ ID NO: 45732 - DNA, 25 bp, Homo sapien
gacatgaacgaatagtactaacctc

SEQ ID NO: 45733 - DNA, 25 bp, Homo sapien
ccagaaagaccgaaaggacctcctc

SEQ ID NO: 45734 - DNA, 25 bp, Homo sapien
ccagaaagaccgtaaggacctcctc

SEQ ID NO: 45735 - DNA, 25 bp, Homo sapien
ggtgacaccgagtccgaccacgacg

SEQ ID NO: 45736 - DNA, 25 bp, Homo sapien
ggtgacaccgagaccgaccacgacg

SEQ ID NO: 45737 - DNA, 25 bp, Homo sapien
tggaactgtactaccacacgtgagt

SEQ ID NO: 45738 - DNA, 25 bp, Homo sapien
tggaactgtacttccacacgtgagt

SEQ ID NO: 45739 - DNA, 25 bp, Homo sapien
ggggagtagaccttcgacactgacg

SEQ ID NO: 45740 - DNA, 25 bp, Homo sapien
ggggagtagaccatcgacactgacg

SEQ ID NO: 45741 - DNA, 25 bp, Homo sapien
gaaaagtaatacagtctactctgag

SEQ ID NO: 45742 - DNA, 25 bp, Homo sapien
gaaaagtaatactgtctactctgag

SEQ ID NO: 45743 - DNA, 25 bp, Homo sapien
gatgaactatttactcgactctgct

SEQ ID NO: 45744 - DNA, 25 bp, Homo sapien
gatgaactattttctcgactctgct

SEQ ID NO: 45745 - DNA, 25 bp, Homo sapien
gtcgaagaactcttcctattgttcc

SEQ ID NO: 45746 - DNA, 25 bp, Homo sapien
gtcgaagaactcatcctattgttcc

SEQ ID NO: 45747 - DNA, 25 bp, Homo sapien
cggagtctcgtctccaggttctccg

SEQ ID NO: 45748 - DNA, 25 bp, Homo sapien
cggagtctcgtcaccaggttctccg

SEQ ID NO: 45749 - DNA, 25 bp, Homo sapien
ctcaagtagaggtcgaggtcttctc

SEQ ID NO: 45750 - DNA, 25 bp, Homo sapien
ctcaagtagaggacgaggtcttctc

SEQ ID NO: 45751 - DNA, 25 bp, Homo sapien
cgagacggcgactccgtcagtgtag

SEQ ID NO: 45752 - DNA, 25 bp, Homo sapien
cgagacggcgacaccgtcagtgtag

SEQ ID NO: 45753 - DNA, 25 bp, Homo sapien
gacgagtgtgtcgacgactctgaag

SEQ ID NO: 45754 - DNA, 25 bp, Homo sapien
gacgagtgtgtccacgactctgaag

SEQ ID NO: 45755 - DNA, 25 bp, Homo sapien
gtgtacacgggactgtatacttgtg

SEQ ID NO: 45756 - DNA, 25 bp, Homo sapien
gtgtacacgggagtgtatacttgtg

SEQ ID NO: 45757 - DNA, 25 bp, Homo sapien
tcgtactaagtgattatttctctag

SEQ ID NO: 45758 - DNA, 25 bp, Homo sapien
tcgtactaagtgtttatttctctag

SEQ ID NO: 45759 - DNA, 25 bp, Homo sapien
tagactaagagttttcgttaccgat

SEQ ID NO: 45760 - DNA, 25 bp, Homo sapien
tagactaagagtattcgttaccgat

SEQ ID NO: 45761 - DNA, 25 bp, Homo sapien
aagtaagaccacacggtagtgtcgt

SEQ ID NO: 45762 - DNA, 25 bp, Homo sapien
aagtaagaccactcggtagtgtcgt

SEQ ID NO: 45763 - DNA, 25 bp, Homo sapien
gagtagagtcgaacacacacttggg

SEQ ID NO: 45764 - DNA, 25 bp, Homo sapien
gagtagagtcgatcacacacttggg

SEQ ID NO: 45765 - DNA, 25 bp, Homo sapien
cgacaacgttcgtgactccggggtt

SEQ ID NO: 45766 - DNA, 25 bp, Homo sapien
cgacaacgttcgagactccggggtt

SEQ ID NO: 45767 - DNA, 25 bp, Homo sapien
ggacacacgtctgaggggcgggtgc

SEQ ID NO: 45768 - DNA, 25 bp, Homo sapien
ggacacacgtctcaggggcgggtgc

SEQ ID NO: 45769 - DNA, 25 bp, Homo sapien
gtctcttgatagtcgccgacgtacc

SEQ ID NO: 45770 - DNA, 25 bp, Homo sapien
gtctcttgatagacgccgacgtacc

SEQ ID NO: 45771 - DNA, 25 bp, Homo sapien
ggtcgacttgaggagagccacaagt

SEQ ID NO: 45772 - DNA, 25 bp, Homo sapien
ggtcgacttgagcagagccacaagt

SEQ ID NO: 45773 - DNA, 25 bp, Homo sapien
agcgggttgagaagtctcccgagac

SEQ ID NO: 45774 - DNA, 25 bp, Homo sapien
agcgggttgagatgtctcccgagac

SEQ ID NO: 45775 - DNA, 25 bp, Homo sapien
aaaagtggtggacgtctaccaccct

SEQ ID NO: 45776 - DNA, 25 bp, Homo sapien
aaaagtggtggaggtctaccaccct

SEQ ID NO: 45777 - DNA, 25 bp, Homo sapien
aggagatcctgaactacgtcctcaa

SEQ ID NO: 45778 - DNA, 25 bp, Homo sapien
aggagatcctgatctacgtcctcaa

SEQ ID NO: 45779 - DNA, 25 bp, Homo sapien
cagaagacctacgaaatctctgaag

SEQ ID NO: 45780 - DNA, 25 bp, Homo sapien
cagaagacctaccaaatctctgaag

SEQ ID NO: 45781 - DNA, 25 bp, Homo sapien
aacatctcccgaatagtcatctggt

SEQ ID NO: 45782 - DNA, 25 bp, Homo sapien
aacatctcccgattagtcatctggt

SEQ ID NO: 45783 - DNA, 25 bp, Homo sapien
actttcacacgtgtcggtcgtgtcg

SEQ ID NO: 45784 - DNA, 25 bp, Homo sapien
actttcacacgtctcggtcgtgtcg

SEQ ID NO: 45785 - DNA, 25 bp, Homo sapien
actcttcgtacataacgtgtcggta

SEQ ID NO: 45786 - DNA, 25 bp, Homo sapien
actcttcgtacaaaacgtgtcggta

SEQ ID NO: 45787 - DNA, 25 bp, Homo sapien
aacgtccgtgagagacgtctgtcga

SEQ ID NO: 45788 - DNA, 25 bp, Homo sapien
aacgtccgtgagtgacgtctgtcga

SEQ ID NO: 45789 - DNA, 25 bp, Homo sapien
actatgtgtgtagtccgttcgtcga

SEQ ID NO: 45790 - DNA, 25 bp, Homo sapien
actatgtgtgtactccgttcgtcga

SEQ ID NO: 45791 - DNA, 25 bp, Homo sapien
gcacgtaagtgtacccttgtgtgac

SEQ ID NO: 45792 - DNA, 25 bp, Homo sapien
gcacgtaagtgttcccttgtgtgac

SEQ ID NO: 45793 - DNA, 25 bp, Homo sapien
ttcctcgagacttccctggtgttac

SEQ ID NO: 45794 - DNA, 25 bp, Homo sapien
ttcctcgagactaccctggtgttac

SEQ ID NO: 45795 - DNA, 25 bp, Homo sapien
cggagtcgtacttaccctcggttta

SEQ ID NO: 45796 - DNA, 25 bp, Homo sapien
cggagtcgtactaaccctcggttta

SEQ ID NO: 45797 - DNA, 25 bp, Homo sapien
cgaacgttatgtttcatctggagaa

SEQ ID NO: 45798 - DNA, 25 bp, Homo sapien
cgaacgttatgtatcatctggagaa

SEQ ID NO: 45799 - DNA, 25 bp, Homo sapien
gaaaaggtgagacgtccttcggacc

SEQ ID NO: 45800 - DNA, 25 bp, Homo sapien
gaaaaggtgagaggtccttcggacc

SEQ ID NO: 45801 - DNA, 25 bp, Homo sapien
aaatgtgatagacgttacttgaacc

SEQ ID NO: 45802 - DNA, 25 bp, Homo sapien
aaatgtgatagaggttacttgaacc

SEQ ID NO: 45803 - DNA, 25 bp, Homo sapien
aaaggatggtcgttcgttgatactc

SEQ ID NO: 45804 - DNA, 25 bp, Homo sapien
aaaggatggtcgatcgttgatactc

SEQ ID NO: 45805 - DNA, 25 bp, Homo sapien
acaggtcctcgagtaggtgcagtta

SEQ ID NO: 45806 - DNA, 25 bp, Homo sapien
acaggtcctcgactaggtgcagtta

SEQ ID NO: 45807 - DNA, 25 bp, Homo sapien
tagagccgagaatctcacgaattac

SEQ ID NO: 45808 - DNA, 25 bp, Homo sapien
tagagccgagaaactcacgaattac

SEQ ID NO: 45809 - DNA, 25 bp, Homo sapien
gacgacctcgtgaagctcccaagtt

SEQ ID NO: 45810 - DNA, 25 bp, Homo sapien
gacgacctcgtgtagctcccaagtt

SEQ ID NO: 45811 - DNA, 25 bp, Homo sapien
acgagaaaggaggtatcaactcagc

SEQ ID NO: 45812 - DNA, 25 bp, Homo sapien
acgagaaaggagctatcaactcagc

SEQ ID NO: 45813 - DNA, 25 bp, Homo sapien
cacggacctcggaacattattcaca

SEQ ID NO: 45814 - DNA, 25 bp, Homo sapien
cacggacctcggtacattattcaca

SEQ ID NO: 45815 - DNA, 25 bp, Homo sapien
tggtaactgggaaacccttacttat

SEQ ID NO: 45816 - DNA, 25 bp, Homo sapien
tggtaactgggatacccttacttat

SEQ ID NO: 45817 - DNA, 25 bp, Homo sapien
taaatacgtggcaacaaacgtgtcg

SEQ ID NO: 45818 - DNA, 25 bp, Homo sapien
taaatacgtggctacaaacgtgtcg

SEQ ID NO: 45819 - DNA, 25 bp, Homo sapien
gtaaaaccagtcgtcaagttagtgt

SEQ ID NO: 45820 - DNA, 25 bp, Homo sapien
gtaaaaccagtcctcaagttagtgt

SEQ ID NO: 45821 - DNA, 25 bp, Homo sapien
aatccactcatttgtcgtagttgtg

SEQ ID NO: 45822 - DNA, 25 bp, Homo sapien
aatccactcattagtcgtagttgtg

SEQ ID NO: 45823 - DNA, 25 bp, Homo sapien
cagatttctatactgtttccttgag

SEQ ID NO: 45824 - DNA, 25 bp, Homo sapien
cagatttctatagtgtttccttgag

SEQ ID NO: 45825 - DNA, 25 bp, Homo sapien
cgaaatcaatattttctcgagacag

SEQ ID NO: 45826 - DNA, 25 bp, Homo sapien
cgaaatcaatatattctcgagacag

SEQ ID NO: 45827 - DNA, 25 bp, Homo sapien
aagtacctcatttcgtgagtctaga

SEQ ID NO: 45828 - DNA, 25 bp, Homo sapien
aagtacctcattacgtgagtctaga

SEQ ID NO: 45829 - DNA, 25 bp, Homo sapien
tggagacgtctattcaaacgatagg

SEQ ID NO: 45830 - DNA, 25 bp, Homo sapien
tggagacgtctaatcaaacgatagg

SEQ ID NO: 45831 - DNA, 25 bp, Homo sapien
gaaacagacgacttcagtcgtatgg

SEQ ID NO: 45832 - DNA, 25 bp, Homo sapien
gaaacagacgacatcagtcgtatgg

SEQ ID NO: 45833 - DNA, 25 bp, Homo sapien
aaactagtcgtactacagtaacagg

SEQ ID NO: 45834 - DNA, 25 bp, Homo sapien
aaactagtcgtagtacagtaacagg

SEQ ID NO: 45835 - DNA, 25 bp, Homo sapien
ttataaaaggctctctagaagactg

SEQ ID NO: 45836 - DNA, 25 bp, Homo sapien
ttataaaaggctgtctagaagactg

SEQ ID NO: 45837 - DNA, 25 bp, Homo sapien
gtaaccgggtccagtcggtctgccg

SEQ ID NO: 45838 - DNA, 25 bp, Homo sapien
gtaaccgggtcctgtcggtctgccg

SEQ ID NO: 45839 - DNA, 25 bp, Homo sapien
tcctccgtcgtcgtcgtcgaggccc

SEQ ID NO: 45840 - DNA, 25 bp, Homo sapien
tcctccgtcgtcctcgtcgaggccc

SEQ ID NO: 45841 - DNA, 25 bp, Homo sapien
tttcttcgagaccttcgggtgaaac

SEQ ID NO: 45842 - DNA, 25 bp, Homo sapien
tttcttcgagacgttcgggtgaaac

SEQ ID NO: 45843 - DNA, 25 bp, Homo sapien
ttcccgtaccgacacctggtgtaat

SEQ ID NO: 45844 - DNA, 25 bp, Homo sapien
ttcccgtaccgagacctggtgtaat

SEQ ID NO: 45845 - DNA, 25 bp, Homo sapien
cttgtaggaccctatcgtcatttag

SEQ ID NO: 45846 - DNA, 25 bp, Homo sapien
cttgtaggacccaatcgtcatttag

SEQ ID NO: 45847 - DNA, 25 bp, Homo sapien
cctgaagagtctgtattgatgtcta

SEQ ID NO: 45848 - DNA, 25 bp, Homo sapien
cctgaagagtctctattgatgtcta

SEQ ID NO: 45849 - DNA, 25 bp, Homo sapien
tgagtatataagaatctgaactcac

SEQ ID NO: 45850 - DNA, 25 bp, Homo sapien
tgagtatataagtatctgaactcac

SEQ ID NO: 45851 - DNA, 25 bp, Homo sapien
ccgaggttacaatatctgttcgtaa

SEQ ID NO: 45852 - DNA, 25 bp, Homo sapien
ccgaggttacaaaatctgttcgtaa

SEQ ID NO: 45853 - DNA, 25 bp, Homo sapien
agtagtttaatgtcgatgttctacc

SEQ ID NO: 45854 - DNA, 25 bp, Homo sapien
agtagtttaatgacgatgttctacc

SEQ ID NO: 45855 - DNA, 25 bp, Homo sapien
tcggagaggaaagaagaagctctcc

SEQ ID NO: 45856 - DNA, 25 bp, Homo sapien
tcggagaggaaacaagaagctctcc

SEQ ID NO: 45857 - DNA, 25 bp, Homo sapien
gaggagaatgacaagagaccgaccc

SEQ ID NO: 45858 - DNA, 25 bp, Homo sapien
gaggagaatgactagagaccgaccc

SEQ ID NO: 45859 - DNA, 25 bp, Homo sapien
gagaaaagagactcaagcagagact

SEQ ID NO: 45860 - DNA, 25 bp, Homo sapien
gagaaaagagacacaagcagagact

SEQ ID NO: 45861 - DNA, 25 bp, Homo sapien
ccgaaagaccggacctgagcaacga

SEQ ID NO: 45862 - DNA, 25 bp, Homo sapien
ccgaaagaccggtcctgagcaacga

SEQ ID NO: 45863 - DNA, 25 bp, Homo sapien
tagacaagaagatggtctggaccta

SEQ ID NO: 45864 - DNA, 25 bp, Homo sapien
tagacaagaagaaggtctggaccta

SEQ ID NO: 45865 - DNA, 25 bp, Homo sapien
agttcagaagagtttactcaggtcc

SEQ ID NO: 45866 - DNA, 25 bp, Homo sapien
agttcagaagagattactcaggtcc

SEQ ID NO: 45867 - DNA, 25 bp, Homo sapien
gtagtattaacagatgtcaactttc

SEQ ID NO: 45868 - DNA, 25 bp, Homo sapien
gtagtattaacacatgtcaactttc

SEQ ID NO: 45869 - DNA, 25 bp, Homo sapien
agagctccgacagagggaactcctg

SEQ ID NO: 45870 - DNA, 25 bp, Homo sapien
agagctccgacacagggaactcctg

SEQ ID NO: 45871 - DNA, 25 bp, Homo sapien
ggtcataggtcgtgtgggcacccac

SEQ ID NO: 45872 - DNA, 25 bp, Homo sapien
ggtcataggtcgagtgggcacccac

SEQ ID NO: 45873 - DNA, 25 bp, Homo sapien
aggtgctgtctgtgtaggccccaac

SEQ ID NO: 45874 - DNA, 25 bp, Homo sapien
aggtgctgtctgagtaggccccaac

SEQ ID NO: 45875 - DNA, 25 bp, Homo sapien
ggtagaagaagaaccgggcccagta

SEQ ID NO: 45876 - DNA, 25 bp, Homo sapien
ggtagaagaagatccgggcccagta

SEQ ID NO: 45877 - DNA, 25 bp, Homo sapien
gtggaggaacaacgtgaaccctgtg

SEQ ID NO: 45878 - DNA, 25 bp, Homo sapien
gtggaggaacaaggtgaaccctgtg

SEQ ID NO: 45879 - DNA, 25 bp, Homo sapien
taaaggacccgtcatgatctttaga

SEQ ID NO: 45880 - DNA, 25 bp, Homo sapien
taaaggacccgtgatgatctttaga

SEQ ID NO: 45881 - DNA, 25 bp, Homo sapien
taagcgacccgtaggactccttcct

SEQ ID NO: 45882 - DNA, 25 bp, Homo sapien
taagcgacccgttggactccttcct

SEQ ID NO: 45883 - DNA, 25 bp, Homo sapien
gacgggaacgagttcccatctccct

SEQ ID NO: 45884 - DNA, 25 bp, Homo sapien
gacgggaacgagatcccatctccct

SEQ ID NO: 45885 - DNA, 25 bp, Homo sapien
agacgggtagaaggaccctttgaca

SEQ ID NO: 45886 - DNA, 25 bp, Homo sapien
agacgggtagaacgaccctttgaca

SEQ ID NO: 45887 - DNA, 25 bp, Homo sapien
ggacaaataacaacctgttgtaaca

SEQ ID NO: 45888 - DNA, 25 bp, Homo sapien
ggacaaataacatcctgttgtaaca

SEQ ID NO: 45889 - DNA, 25 bp, Homo sapien
gaggaacaaccagaaatgtctttct

SEQ ID NO: 45890 - DNA, 25 bp, Homo sapien
gaggaacaaccacaaatgtctttct

SEQ ID NO: 45891 - DNA, 25 bp, Homo sapien
aaggaaacgaaaccacattttgtcg

SEQ ID NO: 45892 - DNA, 25 bp, Homo sapien
aaggaaacgaaagcacattttgtcg

SEQ ID NO: 45893 - DNA, 25 bp, Homo sapien
aggactggagactggagttcctttt

SEQ ID NO: 45894 - DNA, 25 bp, Homo sapien
aggactggagacaggagttcctttt

SEQ ID NO: 45895 - DNA, 25 bp, Homo sapien
cgaaagaacgccaggtgttcctcaa

SEQ ID NO: 45896 - DNA, 25 bp, Homo sapien
cgaaagaacgcctggtgttcctcaa

SEQ ID NO: 45897 - DNA, 25 bp, Homo sapien
gacgaggaaacctgctcttcccttg

SEQ ID NO: 45898 - DNA, 25 bp, Homo sapien
gacgaggaaaccagctcttcccttg

SEQ ID NO: 45899 - DNA, 25 bp, Homo sapien
catcaaaaagggatcgtccgtcgtc

SEQ ID NO: 45900 - DNA, 25 bp, Homo sapien
catcaaaaagggttcgtccgtcgtc

SEQ ID NO: 45901 - DNA, 25 bp, Homo sapien
attgtcaaaaatgtcatactcgcga

SEQ ID NO: 45902 - DNA, 25 bp, Homo sapien
attgtcaaaaatctcatactcgcga

SEQ ID NO: 45903 - DNA, 25 bp, Homo sapien
ttttgaataatcactgtaacgacag

SEQ ID NO: 45904 - DNA, 25 bp, Homo sapien
ttttgaataatctctgtaacgacag

SEQ ID NO: 45905 - DNA, 25 bp, Homo sapien
tttagataagattttgtacgcacac

SEQ ID NO: 45906 - DNA, 25 bp, Homo sapien
tttagataagatattgtacgcacac

SEQ ID NO: 45907 - DNA, 25 bp, Homo sapien
tagggatagaggattgtgtcccgtc

SEQ ID NO: 45908 - DNA, 25 bp, Homo sapien
tagggatagaggtttgtgtcccgtc

SEQ ID NO: 45909 - DNA, 25 bp, Homo sapien
taggcgcggccgaaggtcctcgaca

SEQ ID NO: 45910 - DNA, 25 bp, Homo sapien
taggcgcggccgtaggtcctcgaca

SEQ ID NO: 45911 - DNA, 25 bp, Homo sapien
agaccgacggagagaacgtccgacc

SEQ ID NO: 45912 - DNA, 25 bp, Homo sapien
agaccgacggagtgaacgtccgacc

SEQ ID NO: 45913 - DNA, 25 bp, Homo sapien
attcttcggtgaagagtatctacct

SEQ ID NO: 45914 - DNA, 25 bp, Homo sapien
attcttcggtgatgagtatctacct

SEQ ID NO: 45915 - DNA, 25 bp, Homo sapien
tgattatcccggtcggagatacttt

SEQ ID NO: 45916 - DNA, 25 bp, Homo sapien
tgattatcccggacggagatacttt

SEQ ID NO: 45917 - DNA, 25 bp, Homo sapien
tttcgtctcgtaggatgagtctccg

SEQ ID NO: 45918 - DNA, 25 bp, Homo sapien
tttcgtctcgtacgatgagtctccg

SEQ ID NO: 45919 - DNA, 25 bp, Homo sapien
gaaatttacgtgcaagataggtccc

SEQ ID NO: 45920 - DNA, 25 bp, Homo sapien
gaaatttacgtggaagataggtccc

SEQ ID NO: 45921 - DNA, 25 bp, Homo sapien
ctactttgtcacacggagatatgtt

SEQ ID NO: 45922 - DNA, 25 bp, Homo sapien
ctactttgtcactcggagatatgtt

SEQ ID NO: 45923 - DNA, 25 bp, Homo sapien
atccttcccgactcggtgttacttc

SEQ ID NO: 45924 - DNA, 25 bp, Homo sapien
atccttcccgacacggtgttacttc

SEQ ID NO: 45925 - DNA, 25 bp, Homo sapien
ggagatctcctacattacgtgtttt

SEQ ID NO: 45926 - DNA, 25 bp, Homo sapien
ggagatctcctagattacgtgtttt

SEQ ID NO: 45927 - DNA, 25 bp, Homo sapien
tgacctcgtcgctataactgtttat

SEQ ID NO: 45928 - DNA, 25 bp, Homo sapien
tgacctcgtcgcaataactgtttat

SEQ ID NO: 45929 - DNA, 25 bp, Homo sapien
gaaccgacgatcgaactacgtttgt

SEQ ID NO: 45930 - DNA, 25 bp, Homo sapien
gaaccgacgatccaactacgtttgt

SEQ ID NO: 45931 - DNA, 25 bp, Homo sapien
tgtcgacctagatcccggaggtctt

SEQ ID NO: 45932 - DNA, 25 bp, Homo sapien
tgtcgacctagaacccggaggtctt

SEQ ID NO: 45933 - DNA, 25 bp, Homo sapien
ggaggaccgttattccggagtgata

SEQ ID NO: 45934 - DNA, 25 bp, Homo sapien
ggaggaccgttaatccggagtgata

SEQ ID NO: 45935 - DNA, 25 bp, Homo sapien
gtgtctcggccctgggtggacccat

SEQ ID NO: 45936 - DNA, 25 bp, Homo sapien
gtgtctcggcccagggtggacccat

SEQ ID NO: 45937 - DNA, 25 bp, Homo sapien
ttatgtcgtgtcctggtgtggcccc

SEQ ID NO: 45938 - DNA, 25 bp, Homo sapien
ttatgtcgtgtcgtggtgtggcccc

SEQ ID NO: 45939 - DNA, 25 bp, Homo sapien
gtgatataacatgatccgaggaccc

SEQ ID NO: 45940 - DNA, 25 bp, Homo sapien
gtgatataacatcatccgaggaccc

SEQ ID NO: 45941 - DNA, 25 bp, Homo sapien
ggtcgaccacctaggtcaggctgtc

SEQ ID NO: 45942 - DNA, 25 bp, Homo sapien
ggtcgaccaccttggtcaggctgtc

SEQ ID NO: 45943 - DNA, 25 bp, Homo sapien
ggtcgcagactcttcttcgggggta

SEQ ID NO: 45944 - DNA, 25 bp, Homo sapien
ggtcgcagactcatcttcgggggta

SEQ ID NO: 45945 - DNA, 25 bp, Homo sapien
cgaggcagtccgacctgtgcgacca

SEQ ID NO: 45946 - DNA, 25 bp, Homo sapien
cgaggcagtccgtcctgtgcgacca

SEQ ID NO: 45947 - DNA, 25 bp, Homo sapien
caggtcgacgcctccgggacgttga

SEQ ID NO: 45948 - DNA, 25 bp, Homo sapien
caggtcgacgccaccgggacgttga

SEQ ID NO: 45949 - DNA, 25 bp, Homo sapien
agttagacccaaacatgtgttcgtt

SEQ ID NO: 45950 - DNA, 25 bp, Homo sapien
agttagacccaatcatgtgttcgtt

SEQ ID NO: 45951 - DNA, 25 bp, Homo sapien
ttgtggtaagaatattcgacccgtg

SEQ ID NO: 45952 - DNA, 25 bp, Homo sapien
ttgtggtaagaaaattcgacccgtg

SEQ ID NO: 45953 - DNA, 25 bp, Homo sapien
ggtgacataagacagattcccagag

SEQ ID NO: 45954 - DNA, 25 bp, Homo sapien
ggtgacataagagagattcccagag

SEQ ID NO: 45955 - DNA, 25 bp, Homo sapien
caaccgacgtcgacaccactaccgg

SEQ ID NO: 45956 - DNA, 25 bp, Homo sapien
caaccgacgtcgtcaccactaccgg

SEQ ID NO: 45957 - DNA, 25 bp, Homo sapien
gacccaaacagtagtcagtcatcca

SEQ ID NO: 45958 - DNA, 25 bp, Homo sapien
gacccaaacagttgtcagtcatcca

SEQ ID NO: 45959 - DNA, 25 bp, Homo sapien
agtccagcagcagtgggtcgaccga

SEQ ID NO: 45960 - DNA, 25 bp, Homo sapien
agtccagcagcactgggtcgaccga

SEQ ID NO: 45961 - DNA, 25 bp, Homo sapien
tccaacatggtcttgtgtcgacatg

SEQ ID NO: 45962 - DNA, 25 bp, Homo sapien
tccaacatggtcatgtgtcgacatg

SEQ ID NO: 45963 - DNA, 25 bp, Homo sapien
tccctccgaaggtttgtgtcttctc

SEQ ID NO: 45964 - DNA, 25 bp, Homo sapien
tccctccgaaggattgtgtcttctc

SEQ ID NO: 45965 - DNA, 25 bp, Homo sapien
ccgtcagaaaactcgtgtctgtggt

SEQ ID NO: 45966 - DNA, 25 bp, Homo sapien
ccgtcagaaaacacgtgtctgtggt

SEQ ID NO: 45967 - DNA, 25 bp, Homo sapien
agccgcaaacgtatttgttctctcg

SEQ ID NO: 45968 - DNA, 25 bp, Homo sapien
agccgcaaacgtttttgttctctcg

SEQ ID NO: 45969 - DNA, 25 bp, Homo sapien
acgagagaagtttctctcttcttac

SEQ ID NO: 45970 - DNA, 25 bp, Homo sapien
acgagagaagttactctcttcttac

SEQ ID NO: 45971 - DNA, 25 bp, Homo sapien
ggactataatccttgttatttctgt

SEQ ID NO: 45972 - DNA, 25 bp, Homo sapien
ggactataatccatgttatttctgt

SEQ ID NO: 45973 - DNA, 25 bp, Homo sapien
acgaaaacctatacgtatgtgtatt

SEQ ID NO: 45974 - DNA, 25 bp, Homo sapien
acgaaaacctattcgtatgtgtatt

SEQ ID NO: 45975 - DNA, 25 bp, Homo sapien
tatccactacttcgtatgtgttact

SEQ ID NO: 45976 - DNA, 25 bp, Homo sapien
tatccactacttggtatgtgttact

SEQ ID NO: 45977 - DNA, 25 bp, Homo sapien
attatccccgtgatctgagtcggat

SEQ ID NO: 45978 - DNA, 25 bp, Homo sapien
attatccccgtgttctgagtcggat

SEQ ID NO: 45979 - DNA, 25 bp, Homo sapien
gaattactcccgttgtctgtgaaga

SEQ ID NO: 45980 - DNA, 25 bp, Homo sapien
gaattactcccgatgtctgtgaaga

SEQ ID NO: 45981 - DNA, 25 bp, Homo sapien
tctgaatgattgtccgacttgatta

SEQ ID NO: 45982 - DNA, 25 bp, Homo sapien
tctgaatgattgaccgacttgatta

SEQ ID NO: 45983 - DNA, 25 bp, Homo sapien
tttctcatgtcgacccctgtgacca

SEQ ID NO: 45984 - DNA, 25 bp, Homo sapien
tttctcatgtcgtcccctgtgacca

SEQ ID NO: 45985 - DNA, 25 bp, Homo sapien
tctgcgttgtagtaaccgggtcccc

SEQ ID NO: 45986 - DNA, 25 bp, Homo sapien
tctgcgttgtagaaaccgggtcccc

SEQ ID NO: 45987 - DNA, 25 bp, Homo sapien
ccctctagggataccaagtcctccg

SEQ ID NO: 45988 - DNA, 25 bp, Homo sapien
ccctctagggattccaagtcctccg

SEQ ID NO: 45989 - DNA, 25 bp, Homo sapien
gtgcattgaggcacccttcttcggt

SEQ ID NO: 45990 - DNA, 25 bp, Homo sapien
gtgcattgaggctcccttcttcggt

SEQ ID NO: 45991 - DNA, 25 bp, Homo sapien
aaacttaggtacttcgaattctttg

SEQ ID NO: 45992 - DNA, 25 bp, Homo sapien
aaacttaggtacatcgaattctttg

SEQ ID NO: 45993 - DNA, 25 bp, Homo sapien
acagatttagttgagtggactgtcc

SEQ ID NO: 45994 - DNA, 25 bp, Homo sapien
acagatttagttcagtggactgtcc

SEQ ID NO: 45995 - DNA, 25 bp, Homo sapien
agaactttcatgttcgaggtctcct

SEQ ID NO: 45996 - DNA, 25 bp, Homo sapien
agaactttcatgatcgaggtctcct

SEQ ID NO: 45997 - DNA, 25 bp, Homo sapien
aacggattcagtcattcgtctttcg

SEQ ID NO: 45998 - DNA, 25 bp, Homo sapien
aacggattcagtgattcgtctttcg

SEQ ID NO: 45999 - DNA, 25 bp, Homo sapien
atgtattcacgtcgttctcatcgtt

SEQ ID NO: 46000 - DNA, 25 bp, Homo sapien
atgtattcacgtggttctcatcgtt

SEQ ID NO: 46001 - DNA, 25 bp, Homo sapien
agacggaggttcaatatctacgaga

SEQ ID NO: 46002 - DNA, 25 bp, Homo sapien
agacggaggttctatatctacgaga

SEQ ID NO: 46003 - DNA, 25 bp, Homo sapien
aaacacggggcctagacgctaggac

SEQ ID NO: 46004 - DNA, 25 bp, Homo sapien
aaacacggggccaagacgctaggac

SEQ ID NO: 46005 - DNA, 25 bp, Homo sapien
atgacagttttcgtaatcgcggaga

SEQ ID NO: 46006 - DNA, 25 bp, Homo sapien
atgacagttttcctaatcgcggaga

SEQ ID NO: 46007 - DNA, 25 bp, Homo sapien
gtctctcctgttcttcacgggactt

SEQ ID NO: 46008 - DNA, 25 bp, Homo sapien
gtctctcctgttgttcacgggactt

SEQ ID NO: 46009 - DNA, 25 bp, Homo sapien
tgtgctgttgaggtacacgggtacc

SEQ ID NO: 46010 - DNA, 25 bp, Homo sapien
tgtgctgttgagctacacgggtacc

SEQ ID NO: 46011 - DNA, 25 bp, Homo sapien
ctgtgagtacgaggtcgaggtccta

SEQ ID NO: 46012 - DNA, 25 bp, Homo sapien
ctgtgagtacgacgtcgaggtccta

SEQ ID NO: 46013 - DNA, 25 bp, Homo sapien
acacgtcttgggtcgtacgtccgta

SEQ ID NO: 46014 - DNA, 25 bp, Homo sapien
acacgtcttgggacgtacgtccgta

SEQ ID NO: 46015 - DNA, 25 bp, Homo sapien
atccactctcgacaacgtatcggtg

SEQ ID NO: 46016 - DNA, 25 bp, Homo sapien
atccactctcgagaacgtatcggtg

SEQ ID NO: 46017 - DNA, 25 bp, Homo sapien
cactactcccttcgtcgagttttcg

SEQ ID NO: 46018 - DNA, 25 bp, Homo sapien
cactactcccttggtcgagttttcg

SEQ ID NO: 46019 - DNA, 25 bp, Homo sapien
tacgtttcgtcgtcagtgtctccgt

SEQ ID NO: 46020 - DNA, 25 bp, Homo sapien
tacgtttcgtcgacagtgtctccgt

SEQ ID NO: 46021 - DNA, 25 bp, Homo sapien
agtgacttcagtccactctccgcgt

SEQ ID NO: 46022 - DNA, 25 bp, Homo sapien
agtgacttcagtgcactctccgcgt

SEQ ID NO: 46023 - DNA, 25 bp, Homo sapien
atgaagtgagattgtggaccatcac

SEQ ID NO: 46024 - DNA, 25 bp, Homo sapien
atgaagtgagatagtggaccatcac

SEQ ID NO: 46025 - DNA, 25 bp, Homo sapien
atcatggaatttgtgaaggatactt

SEQ ID NO: 46026 - DNA, 25 bp, Homo sapien
atcatggaatttctgaaggatactt

SEQ ID NO: 46027 - DNA, 25 bp, Homo sapien
tggacagggacgacccgttcttcgt

SEQ ID NO: 46028 - DNA, 25 bp, Homo sapien
tggacagggacgtcccgttcttcgt

SEQ ID NO: 46029 - DNA, 25 bp, Homo sapien
ctgactccgtggaggtctacaattg

SEQ ID NO: 46030 - DNA, 25 bp, Homo sapien
ctgactccgtggtggtctacaattg

SEQ ID NO: 46031 - DNA, 25 bp, Homo sapien
tgaccgtgagggacaccaaccgtcg

SEQ ID NO: 46032 - DNA, 25 bp, Homo sapien
tgaccgtgagggtcaccaaccgtcg

SEQ ID NO: 46033 - DNA, 25 bp, Homo sapien
gccaggtgtcggaaggcccaacacc

SEQ ID NO: 46034 - DNA, 25 bp, Homo sapien
gccaggtgtcggtaggcccaacacc

SEQ ID NO: 46035 - DNA, 25 bp, Homo sapien
taaatgacaggtttccgaagaggtc

SEQ ID NO: 46036 - DNA, 25 bp, Homo sapien
taaatgacaggtatccgaagaggtc

SEQ ID NO: 46037 - DNA, 25 bp, Homo sapien
agtctgtcctgaccttgaagaggtc

SEQ ID NO: 46038 - DNA, 25 bp, Homo sapien
agtctgtcctgagcttgaagaggtc

SEQ ID NO: 46039 - DNA, 25 bp, Homo sapien
agtatcatgagctagtcgtcaagtc

SEQ ID NO: 46040 - DNA, 25 bp, Homo sapien
agtatcatgagcaagtcgtcaagtc

SEQ ID NO: 46041 - DNA, 25 bp, Homo sapien
agtcccgagctacctgataacttcg

SEQ ID NO: 46042 - DNA, 25 bp, Homo sapien
agtcccgagctagctgataacttcg

SEQ ID NO: 46043 - DNA, 25 bp, Homo sapien
ggactggtcccgtgtgtgaacctac

SEQ ID NO: 46044 - DNA, 25 bp, Homo sapien
ggactggtcccgagtgtgaacctac

SEQ ID NO: 46045 - DNA, 25 bp, Homo sapien
atcctcgtgtacacgtcgtcgtcgt

SEQ ID NO: 46046 - DNA, 25 bp, Homo sapien
atcctcgtgtactcgtcgtcgtcgt

SEQ ID NO: 46047 - DNA, 25 bp, Homo sapien
tgaggcctcctggttctacctcgct

SEQ ID NO: 46048 - DNA, 25 bp, Homo sapien
tgaggcctcctgcttctacctcgct

SEQ ID NO: 46049 - DNA, 25 bp, Homo sapien
acaggaatcctttacctaatagacg

SEQ ID NO: 46050 - DNA, 25 bp, Homo sapien
acaggaatccttaacctaatagacg

SEQ ID NO: 46051 - DNA, 25 bp, Homo sapien
gaggtgacagggttccagtaactga

SEQ ID NO: 46052 - DNA, 25 bp, Homo sapien
gaggtgacagggatccagtaactga

SEQ ID NO: 46053 - DNA, 25 bp, Homo sapien
aacgtccaaaaactctcgtaagtga

SEQ ID NO: 46054 - DNA, 25 bp, Homo sapien
aacgtccaaaaagtctcgtaagtga

SEQ ID NO: 46055 - DNA, 25 bp, Homo sapien
agaacacaaaagtcgccatgtacga

SEQ ID NO: 46056 - DNA, 25 bp, Homo sapien
agaacacaaaagacgccatgtacga

SEQ ID NO: 46057 - DNA, 25 bp, Homo sapien
tggggaacctgactgagttgtcgtt

SEQ ID NO: 46058 - DNA, 25 bp, Homo sapien
tggggaacctgagtgagttgtcgtt

SEQ ID NO: 46059 - DNA, 25 bp, Homo sapien
aatgaccctcttttcggtatctaat

SEQ ID NO: 46060 - DNA, 25 bp, Homo sapien
aatgaccctcttatcggtatctaat

SEQ ID NO: 46061 - DNA, 25 bp, Homo sapien
aatcttcatgttcataggaccttag

SEQ ID NO: 46062 - DNA, 25 bp, Homo sapien
aatcttcatgttgataggaccttag

SEQ ID NO: 46063 - DNA, 25 bp, Homo sapien
atgtggtctttatgacaaacatgtt

SEQ ID NO: 46064 - DNA, 25 bp, Homo sapien
atgtggtctttaagacaaacatgtt

SEQ ID NO: 46065 - DNA, 25 bp, Homo sapien
gtaacgtgcgtttgactaaaatctt

SEQ ID NO: 46066 - DNA, 25 bp, Homo sapien
gtaacgtgcgttagactaaaatctt

SEQ ID NO: 46067 - DNA, 25 bp, Homo sapien
gtagtgcagaccacataaacacttt

SEQ ID NO: 46068 - DNA, 25 bp, Homo sapien
gtagtgcagacctcataaacacttt

SEQ ID NO: 46069 - DNA, 25 bp, Homo sapien
ggtagaaggaccctttgacaggaca

SEQ ID NO: 46070 - DNA, 25 bp, Homo sapien
ggtagaaggaccgtttgacaggaca

SEQ ID NO: 46071 - DNA, 25 bp, Homo sapien
ctaaaggcaagtatttgtcgtacga

SEQ ID NO: 46072 - DNA, 25 bp, Homo sapien
ctaaaggcaagtttttgtcgtacga

SEQ ID NO: 46073 - DNA, 25 bp, Homo sapien
tcggtagttccacagtcacttgtgg

SEQ ID NO: 46074 - DNA, 25 bp, Homo sapien
tcggtagttccagagtcacttgtgg

SEQ ID NO: 46075 - DNA, 25 bp, Homo sapien
cccgtcttcttgtcgagtccctggg

SEQ ID NO: 46076 - DNA, 25 bp, Homo sapien
cccgtcttcttgacgagtccctggg

SEQ ID NO: 46077 - DNA, 25 bp, Homo sapien
tgtaaattctctacgtttcctgtgg

SEQ ID NO: 46078 - DNA, 25 bp, Homo sapien
tgtaaattctcttcgtttcctgtgg

SEQ ID NO: 46079 - DNA, 25 bp, Homo sapien
tcgaaacctacttttttcggagaga

SEQ ID NO: 46080 - DNA, 25 bp, Homo sapien
tcgaaacctactattttcggagaga

SEQ ID NO: 46081 - DNA, 25 bp, Homo sapien
cgtgtccccttcgtttggactcact

SEQ ID NO: 46082 - DNA, 25 bp, Homo sapien
cgtgtccccttcctttggactcact

SEQ ID NO: 46083 - DNA, 25 bp, Homo sapien
tcctcgttctcctgtgaggaactat

SEQ ID NO: 46084 - DNA, 25 bp, Homo sapien
tcctcgttctccagtgaggaactat

SEQ ID NO: 46085 - DNA, 25 bp, Homo sapien
gtctttctaccgtttgcactagtat

SEQ ID NO: 46086 - DNA, 25 bp, Homo sapien
gtctttctaccgattgcactagtat

SEQ ID NO: 46087 - DNA, 25 bp, Homo sapien
agttaggacccgtgtgacgacttgt

SEQ ID NO: 46088 - DNA, 25 bp, Homo sapien
agttaggacccgagtgacgacttgt

SEQ ID NO: 46089 - DNA, 25 bp, Homo sapien
cacttgctcaagagtcggacactct

SEQ ID NO: 46090 - DNA, 25 bp, Homo sapien
cacttgctcaagtgtcggacactct

SEQ ID NO: 46091 - DNA, 25 bp, Homo sapien
gaggtgtcggtaaaggacgtctcta

SEQ ID NO: 46092 - DNA, 25 bp, Homo sapien
gaggtgtcggtataggacgtctcta

SEQ ID NO: 46093 - DNA, 25 bp, Homo sapien
cgtgcttacgatgtcggtatactaa

SEQ ID NO: 46094 - DNA, 25 bp, Homo sapien
cgtgcttacgatctcggtatactaa

SEQ ID NO: 46095 - DNA, 25 bp, Homo sapien
ttttctcttgattcgattgtgacga

SEQ ID NO: 46096 - DNA, 25 bp, Homo sapien
ttttctcttgatacgattgtgacga

SEQ ID NO: 46097 - DNA, 25 bp, Homo sapien
ctcgtcgtagaaacctcttgtgtat

SEQ ID NO: 46098 - DNA, 25 bp, Homo sapien
ctcgtcgtagaatcctcttgtgtat

SEQ ID NO: 46099 - DNA, 25 bp, Homo sapien
tcgtctcgagagttatactctttcg

SEQ ID NO: 46100 - DNA, 25 bp, Homo sapien
tcgtctcgagagatatactctttcg

SEQ ID NO: 46101 - DNA, 25 bp, Homo sapien
gtataggttcatatgtactccctat

SEQ ID NO: 46102 - DNA, 25 bp, Homo sapien
gtataggttcatttgtactccctat

SEQ ID NO: 46103 - DNA, 25 bp, Homo sapien
tactaaggccggtagtactgcgctt

SEQ ID NO: 46104 - DNA, 25 bp, Homo sapien
tactaaggccggaagtactgcgctt

SEQ ID NO: 46105 - DNA, 25 bp, Homo sapien
ctcctatttcggtgtactttctcgt

SEQ ID NO: 46106 - DNA, 25 bp, Homo sapien
ctcctatttcggagtactttctcgt

SEQ ID NO: 46107 - DNA, 25 bp, Homo sapien
ctaaacgtcgtgtcactcttctacg

SEQ ID NO: 46108 - DNA, 25 bp, Homo sapien
ctaaacgtcgtgacactcttctacg

SEQ ID NO: 46109 - DNA, 25 bp, Homo sapien
tgctaaagaagtacaacgtatacat

SEQ ID NO: 46110 - DNA, 25 bp, Homo sapien
tgctaaagaagttcaacgtatacat

SEQ ID NO: 46111 - DNA, 25 bp, Homo sapien
ctcatgcactcctttcctaaggtga

SEQ ID NO: 46112 - DNA, 25 bp, Homo sapien
ctcatgcactccattcctaaggtga

SEQ ID NO: 46113 - DNA, 25 bp, Homo sapien
agctcacgtcggtcccaaggacgtc

SEQ ID NO: 46114 - DNA, 25 bp, Homo sapien
agctcacgtcggacccaaggacgtc

SEQ ID NO: 46115 - DNA, 25 bp, Homo sapien
agtccgagggccagcgacccgagac

SEQ ID NO: 46116 - DNA, 25 bp, Homo sapien
agtccgagggcctgcgacccgagac

SEQ ID NO: 46117 - DNA, 25 bp, Homo sapien
aacaccagtgagacccacggtctgc

SEQ ID NO: 46118 - DNA, 25 bp, Homo sapien
aacaccagtgagtcccacggtctgc

SEQ ID NO: 46119 - DNA, 25 bp, Homo sapien
aaagagaccaaacttttcgtttcgg

SEQ ID NO: 46120 - DNA, 25 bp, Homo sapien
aaagagaccaaagttttcgtttcgg

SEQ ID NO: 46121 - DNA, 25 bp, Homo sapien
cccgcctgtgggttcccggtgtgtc

SEQ ID NO: 46122 - DNA, 25 bp, Homo sapien
cccgcctgtgggatcccggtgtgtc

SEQ ID NO: 46123 - DNA, 25 bp, Homo sapien
ccagtgtgcgaggtccaatacatgt

SEQ ID NO: 46124 - DNA, 25 bp, Homo sapien
ccagtgtgcgagctccaatacatgt

SEQ ID NO: 46125 - DNA, 25 bp, Homo sapien
ggtaccttctttctccgggattgtc

SEQ ID NO: 46126 - DNA, 25 bp, Homo sapien
ggtaccttctttgtccgggattgtc

SEQ ID NO: 46127 - DNA, 25 bp, Homo sapien
cctgtcagtttgacgggtattagtc

SEQ ID NO: 46128 - DNA, 25 bp, Homo sapien
cctgtcagtttgtcgggtattagtc

SEQ ID NO: 46129 - DNA, 25 bp, Homo sapien
cacttctaccctctcgaagacttgg

SEQ ID NO: 46130 - DNA, 25 bp, Homo sapien
cacttctaccctgtcgaagacttgg

SEQ ID NO: 46131 - DNA, 25 bp, Homo sapien
tgcggaacccctgacgcaaaccgaa

SEQ ID NO: 46132 - DNA, 25 bp, Homo sapien
tgcggaacccctcacgcaaaccgaa

SEQ ID NO: 46133 - DNA, 25 bp, Homo sapien
acgaaacctcattacaatcatcgaa

SEQ ID NO: 46134 - DNA, 25 bp, Homo sapien
acgaaacctcataacaatcatcgaa

SEQ ID NO: 46135 - DNA, 25 bp, Homo sapien
ctcggagcttttcgtctcaccttca

SEQ ID NO: 46136 - DNA, 25 bp, Homo sapien
ctcggagcttttggtctcaccttca

SEQ ID NO: 46137 - DNA, 25 bp, Homo sapien
ccaaatacacttgtgattcagtaca

SEQ ID NO: 46138 - DNA, 25 bp, Homo sapien
ccaaatacacttctgattcagtaca

SEQ ID NO: 46139 - DNA, 25 bp, Homo sapien
gattcactccgcaggtgaagtcgac

SEQ ID NO: 46140 - DNA, 25 bp, Homo sapien
gattcactccgctggtgaagtcgac

SEQ ID NO: 46141 - DNA, 25 bp, Homo sapien
aattcataccgatgttagacttgac

SEQ ID NO: 46142 - DNA, 25 bp, Homo sapien
aattcataccgaagttagacttgac

SEQ ID NO: 46143 - DNA, 25 bp, Homo sapien
acctcgacctcagactgagatcgac

SEQ ID NO: 46144 - DNA, 25 bp, Homo sapien
acctcgacctcacactgagatcgac

SEQ ID NO: 46145 - DNA, 25 bp, Homo sapien
tgctcacctggacagtccagggtcc

SEQ ID NO: 46146 - DNA, 25 bp, Homo sapien
tgctcacctggagagtccagggtcc

SEQ ID NO: 46147 - DNA, 25 bp, Homo sapien
actcggttaagagagtccggggtcc

SEQ ID NO: 46148 - DNA, 25 bp, Homo sapien
actcggttaagacagtccggggtcc

SEQ ID NO: 46149 - DNA, 25 bp, Homo sapien
tcggagatagaagtcgtcaagaatt

SEQ ID NO: 46150 - DNA, 25 bp, Homo sapien
tcggagatagaactcgtcaagaatt

SEQ ID NO: 46151 - DNA, 25 bp, Homo sapien
gtagactgtagtctcttcaccgggt

SEQ ID NO: 46152 - DNA, 25 bp, Homo sapien
gtagactgtagtgtcttcaccgggt

SEQ ID NO: 46153 - DNA, 25 bp, Homo sapien
gtaactagccattggaatactcaat

SEQ ID NO: 46154 - DNA, 25 bp, Homo sapien
gtaactagccataggaatactcaat

SEQ ID NO: 46155 - DNA, 25 bp, Homo sapien
tcctaccctactagggaactctaag

SEQ ID NO: 46156 - DNA, 25 bp, Homo sapien
tcctaccctacttgggaactctaag

SEQ ID NO: 46157 - DNA, 25 bp, Homo sapien
ggttgtgcatttgctcgtttatgtc

SEQ ID NO: 46158 - DNA, 25 bp, Homo sapien
ggttgtgcatttcctcgtttatgtc

SEQ ID NO: 46159 - DNA, 25 bp, Homo sapien
ggtctcctcgatgtccttttactcc

SEQ ID NO: 46160 - DNA, 25 bp, Homo sapien
ggtctcctcgatctccttttactcc

SEQ ID NO: 46161 - DNA, 25 bp, Homo sapien
gtgtcactgtagagtttacccacca

SEQ ID NO: 46162 - DNA, 25 bp, Homo sapien
gtgtcactgtagtgtttacccacca

SEQ ID NO: 46163 - DNA, 25 bp, Homo sapien
ttaccacccgcgacgactcgcacac

SEQ ID NO: 46164 - DNA, 25 bp, Homo sapien
ttaccacccgcgtcgactcgcacac

SEQ ID NO: 46165 - DNA, 25 bp, Homo sapien
ttcttgaaccggaccacgggcaact

SEQ ID NO: 46166 - DNA, 25 bp, Homo sapien
ttcttgaaccggtccacgggcaact

SEQ ID NO: 46167 - DNA, 25 bp, Homo sapien
actcacttaaagtcccctgtgtaag

SEQ ID NO: 46168 - DNA, 25 bp, Homo sapien
actcacttaaagacccctgtgtaag

SEQ ID NO: 46169 - DNA, 25 bp, Homo sapien
acctatatatggaccgtccggaagt

SEQ ID NO: 46170 - DNA, 25 bp, Homo sapien
acctatatatggtccgtccggaagt

SEQ ID NO: 46171 - DNA, 25 bp, Homo sapien
ctccaaggtccgacgtgtcagggac

SEQ ID NO: 46172 - DNA, 25 bp, Homo sapien
ctccaaggtccgtcgtgtcagggac

SEQ ID NO: 46173 - DNA, 25 bp, Homo sapien
ctcccaggactttagactccgcggc

SEQ ID NO: 46174 - DNA, 25 bp, Homo sapien
ctcccaggacttaagactccgcggc

SEQ ID NO: 46175 - DNA, 25 bp, Homo sapien
ccagttccgtcgtcgaacaagaaat

SEQ ID NO: 46176 - DNA, 25 bp, Homo sapien
ccagttccgtcgacgaacaagaaat

SEQ ID NO: 46177 - DNA, 25 bp, Homo sapien
tacccgtacaaactttgtcaggacc

SEQ ID NO: 46178 - DNA, 25 bp, Homo sapien
tacccgtacaaagtttgtcaggacc

SEQ ID NO: 46179 - DNA, 25 bp, Homo sapien
taccccgaacccttctgtcaggatg

SEQ ID NO: 46180 - DNA, 25 bp, Homo sapien
taccccgaacccatctgtcaggatg

SEQ ID NO: 46181 - DNA, 25 bp, Homo sapien
ggcccaagaccaacgtcccgaagga

SEQ ID NO: 46182 - DNA, 25 bp, Homo sapien
ggcccaagaccatcgtcccgaagga

SEQ ID NO: 46183 - DNA, 25 bp, Homo sapien
gatgatgaaaacgtcacccatatca

SEQ ID NO: 46184 - DNA, 25 bp, Homo sapien
gatgatgaaaacctcacccatatca

SEQ ID NO: 46185 - DNA, 25 bp, Homo sapien
gactgtaggaaaaatgacccattaa

SEQ ID NO: 46186 - DNA, 25 bp, Homo sapien
gactgtaggaaatatgacccattaa

SEQ ID NO: 46187 - DNA, 25 bp, Homo sapien
caggaaagccgttccgacgtatgaa

SEQ ID NO: 46188 - DNA, 25 bp, Homo sapien
caggaaagccgtaccgacgtatgaa

SEQ ID NO: 46189 - DNA, 25 bp, Homo sapien
atcaagcaggggaccactcggctag

SEQ ID NO: 46190 - DNA, 25 bp, Homo sapien
atcaagcaggggtccactcggctag

SEQ ID NO: 46191 - DNA, 25 bp, Homo sapien
gagtcgaaggacctggtatgcaagt

SEQ ID NO: 46192 - DNA, 25 bp, Homo sapien
gagtcgaaggacgtggtatgcaagt

SEQ ID NO: 46193 - DNA, 25 bp, Homo sapien
gagtcaaatctgaattacgttcact

SEQ ID NO: 46194 - DNA, 25 bp, Homo sapien
gagtcaaatctgtattacgttcact

SEQ ID NO: 46195 - DNA, 25 bp, Homo sapien
acttccgatgacctcaatgattctt

SEQ ID NO: 46196 - DNA, 25 bp, Homo sapien
acttccgatgacgtcaatgattctt

SEQ ID NO: 46197 - DNA, 25 bp, Homo sapien
aactagtgtcactcaaaatggttaa

SEQ ID NO: 46198 - DNA, 25 bp, Homo sapien
aactagtgtcacacaaaatggttaa

SEQ ID NO: 46199 - DNA, 25 bp, Homo sapien
gatattaaagacatgaactttaccg

SEQ ID NO: 46200 - DNA, 25 bp, Homo sapien
gatattaaagacttgaactttaccg

SEQ ID NO: 46201 - DNA, 25 bp, Homo sapien
acgatgaaacacttacgaaggttca

SEQ ID NO: 46202 - DNA, 25 bp, Homo sapien
acgatgaaacacatacgaaggttca

SEQ ID NO: 46203 - DNA, 25 bp, Homo sapien
gactcgagggagtcgaagcgttcta

SEQ ID NO: 46204 - DNA, 25 bp, Homo sapien
gactcgagggagacgaagcgttcta

SEQ ID NO: 46205 - DNA, 25 bp, Homo sapien
cctgaaaagagaggatcgactgact

SEQ ID NO: 46206 - DNA, 25 bp, Homo sapien
cctgaaaagagacgatcgactgact

SEQ ID NO: 46207 - DNA, 25 bp, Homo sapien
acctagaactagagtgagcacgtga

SEQ ID NO: 46208 - DNA, 25 bp, Homo sapien
acctagaactagtgtgagcacgtga

SEQ ID NO: 46209 - DNA, 25 bp, Homo sapien
ctgacggacgtgtaggaagagtcac

SEQ ID NO: 46210 - DNA, 25 bp, Homo sapien
ctgacggacgtgaaggaagagtcac

SEQ ID NO: 46211 - DNA, 25 bp, Homo sapien
cgacaatagtccacgcaggagtcac

SEQ ID NO: 46212 - DNA, 25 bp, Homo sapien
cgacaatagtcctcgcaggagtcac

SEQ ID NO: 46213 - DNA, 25 bp, Homo sapien
gcgcgacgagcccctcactgaggtc

SEQ ID NO: 46214 - DNA, 25 bp, Homo sapien
gcgcgacgagccgctcactgaggtc

SEQ ID NO: 46215 - DNA, 25 bp, Homo sapien
tgacgggcactcgacccgggtccgt

SEQ ID NO: 46216 - DNA, 25 bp, Homo sapien
tgacgggcactccacccgggtccgt

SEQ ID NO: 46217 - DNA, 25 bp, Homo sapien
gaagagtcatcgacgcacagccgtc

SEQ ID NO: 46218 - DNA, 25 bp, Homo sapien
gaagagtcatcgtcgcacagccgtc

SEQ ID NO: 46219 - DNA, 25 bp, Homo sapien
tgtagcgggctgctgaagagtccgc

SEQ ID NO: 46220 - DNA, 25 bp, Homo sapien
tgtagcgggctggtgaagagtccgc

SEQ ID NO: 46221 - DNA, 25 bp, Homo sapien
ctgaggtgtggtttacgaccttcaa

SEQ ID NO: 46222 - DNA, 25 bp, Homo sapien
ctgaggtgtggtatacgaccttcaa

SEQ ID NO: 46223 - DNA, 25 bp, Homo sapien
aatgcgactgaactcacgttcgaat

SEQ ID NO: 46224 - DNA, 25 bp, Homo sapien
aatgcgactgaagtcacgttcgaat

SEQ ID NO: 46225 - DNA, 25 bp, Homo sapien
gacctaccggactagttacataatt

SEQ ID NO: 46226 - DNA, 25 bp, Homo sapien
gacctaccggacaagttacataatt

SEQ ID NO: 46227 - DNA, 25 bp, Homo sapien
gttagtttcttccaattcacaagag

SEQ ID NO: 46228 - DNA, 25 bp, Homo sapien
gttagtttcttcgaattcacaagag

SEQ ID NO: 46229 - DNA, 25 bp, Homo sapien
tcttaatttcagaggagaaccgtat

SEQ ID NO: 46230 - DNA, 25 bp, Homo sapien
tcttaatttcagtggagaaccgtat

SEQ ID NO: 46231 - DNA, 25 bp, Homo sapien
taggaattttacctttgtcataacg

SEQ ID NO: 46232 - DNA, 25 bp, Homo sapien
taggaattttacgtttgtcataacg

SEQ ID NO: 46233 - DNA, 25 bp, Homo sapien
aggtacgactttatttcctcctcag

SEQ ID NO: 46234 - DNA, 25 bp, Homo sapien
aggtacgactttttttcctcctcag

SEQ ID NO: 46235 - DNA, 25 bp, Homo sapien
cacacagtatgtctttctcgaccaa

SEQ ID NO: 46236 - DNA, 25 bp, Homo sapien
cacacagtatgtgtttctcgaccaa

SEQ ID NO: 46237 - DNA, 25 bp, Homo sapien
gctaaacttttaagacctgggtaaa

SEQ ID NO: 46238 - DNA, 25 bp, Homo sapien
gctaaacttttatgacctgggtaaa

SEQ ID NO: 46239 - DNA, 25 bp, Homo sapien
tggtgtcaaagacgtgtgttactcc

SEQ ID NO: 46240 - DNA, 25 bp, Homo sapien
tggtgtcaaagaggtgtgttactcc

SEQ ID NO: 46241 - DNA, 25 bp, Homo sapien
tctattaccagacgccgtaggaaga

SEQ ID NO: 46242 - DNA, 25 bp, Homo sapien
tctattaccagaggccgtaggaaga

SEQ ID NO: 46243 - DNA, 25 bp, Homo sapien
cggcggttacgaacaagtccgtgcg

SEQ ID NO: 46244 - DNA, 25 bp, Homo sapien
cggcggttacgatcaagtccgtgcg

SEQ ID NO: 46245 - DNA, 25 bp, Homo sapien
aacttaggttactcgttttattccg

SEQ ID NO: 46246 - DNA, 25 bp, Homo sapien
aacttaggttacacgttttattccg

SEQ ID NO: 46247 - DNA, 25 bp, Homo sapien
actgtcagacgatgcgttttgtaaa

SEQ ID NO: 46248 - DNA, 25 bp, Homo sapien
actgtcagacgaagcgttttgtaaa

SEQ ID NO: 46249 - DNA, 25 bp, Homo sapien
atgtttgtaacagtcccttgtaaat

SEQ ID NO: 46250 - DNA, 25 bp, Homo sapien
atgtttgtaacactcccttgtaaat

SEQ ID NO: 46251 - DNA, 25 bp, Homo sapien
gttttgtctctacttcttctcataa

SEQ ID NO: 46252 - DNA, 25 bp, Homo sapien
gttttgtctctagttcttctcataa

SEQ ID NO: 46253 - DNA, 25 bp, Homo sapien
ctttttagtctcctgaccccgtgga

SEQ ID NO: 46254 - DNA, 25 bp, Homo sapien
ctttttagtctcgtgaccccgtgga

SEQ ID NO: 46255 - DNA, 25 bp, Homo sapien
ttttttctctctctctcggtgtctt

SEQ ID NO: 46256 - DNA, 25 bp, Homo sapien
ttttttctctctgtctcggtgtctt

SEQ ID NO: 46257 - DNA, 25 bp, Homo sapien
tgttatatttccttctgttagacga

SEQ ID NO: 46258 - DNA, 25 bp, Homo sapien
tgttatatttccatctgttagacga

SEQ ID NO: 46259 - DNA, 25 bp, Homo sapien
tagtcctgttgacatctgatatatt

SEQ ID NO: 46260 - DNA, 25 bp, Homo sapien
tagtcctgttgagatctgatatatt

SEQ ID NO: 46261 - DNA, 25 bp, Homo sapien
cgacttgatcttagttcgaatagta

SEQ ID NO: 46262 - DNA, 25 bp, Homo sapien
cgacttgatctttgttcgaatagta

SEQ ID NO: 46263 - DNA, 25 bp, Homo sapien
tctttgaatgatgctccgtctacct

SEQ ID NO: 46264 - DNA, 25 bp, Homo sapien
tctttgaatgatcctccgtctacct

SEQ ID NO: 46265 - DNA, 25 bp, Homo sapien
gtctatgaatgactccgtctcctct

SEQ ID NO: 46266 - DNA, 25 bp, Homo sapien
gtctatgaatgagtccgtctcctct

SEQ ID NO: 46267 - DNA, 25 bp, Homo sapien
gacatcttctgtgtcacttccgtgt

SEQ ID NO: 46268 - DNA, 25 bp, Homo sapien
gacatcttctgtctcacttccgtgt

SEQ ID NO: 46269 - DNA, 25 bp, Homo sapien
aggacgatttcgactctccacttcc

SEQ ID NO: 46270 - DNA, 25 bp, Homo sapien
aggacgatttcgtctctccacttcc

SEQ ID NO: 46271 - DNA, 25 bp, Homo sapien
gacggtttagcgtctcgtcactttc

SEQ ID NO: 46272 - DNA, 25 bp, Homo sapien
gacggtttagcgactcgtcactttc

SEQ ID NO: 46273 - DNA, 25 bp, Homo sapien
tgctatgttgagttatgtcctcata

SEQ ID NO: 46274 - DNA, 25 bp, Homo sapien
tgctatgttgagatatgtcctcata

SEQ ID NO: 46275 - DNA, 25 bp, Homo sapien
tcctacgacgggtggttcctcacta

SEQ ID NO: 46276 - DNA, 25 bp, Homo sapien
tcctacgacgggaggttcctcacta

SEQ ID NO: 46277 - DNA, 25 bp, Homo sapien
ctcaggagcgtgacagtacggaagt

SEQ ID NO: 46278 - DNA, 25 bp, Homo sapien
ctcaggagcgtgtcagtacggaagt

SEQ ID NO: 46279 - DNA, 25 bp, Homo sapien
tagtcgagtccgtgccaagcgttcg

SEQ ID NO: 46280 - DNA, 25 bp, Homo sapien
tagtcgagtccgagccaagcgttcg

SEQ ID NO: 46281 - DNA, 25 bp, Homo sapien
gtctcagcacgaagtccatgcacta

SEQ ID NO: 46282 - DNA, 25 bp, Homo sapien
gtctcagcacgatgtccatgcacta

SEQ ID NO: 46283 - DNA, 25 bp, Homo sapien
tttttatagatatactagcccgtag

SEQ ID NO: 46284 - DNA, 25 bp, Homo sapien
tttttatagataaactagcccgtag

SEQ ID NO: 46285 - DNA, 25 bp, Homo sapien
gtcctttagataaatactgtcttca

SEQ ID NO: 46286 - DNA, 25 bp, Homo sapien
gtcctttagatatatactgtcttca

SEQ ID NO: 46287 - DNA, 25 bp, Homo sapien
agtatcgaaagtaggactagtctct

SEQ ID NO: 46288 - DNA, 25 bp, Homo sapien
agtatcgaaagttggactagtctct

SEQ ID NO: 46289 - DNA, 25 bp, Homo sapien
tctgtgtagttaggtccgggtcctc

SEQ ID NO: 46290 - DNA, 25 bp, Homo sapien
tctgtgtagttacgtccgggtcctc

SEQ ID NO: 46291 - DNA, 25 bp, Homo sapien
ttagtttgaagtcaaggtgtctctc

SEQ ID NO: 46292 - DNA, 25 bp, Homo sapien
ttagtttgaagtgaaggtgtctctc

SEQ ID NO: 46293 - DNA, 25 bp, Homo sapien
tgttttgaccgtaaacggtgtcttc

SEQ ID NO: 46294 - DNA, 25 bp, Homo sapien
tgttttgaccgttaacggtgtcttc

SEQ ID NO: 46295 - DNA, 25 bp, Homo sapien
tttaccaacgtttcggtgttctacg

SEQ ID NO: 46296 - DNA, 25 bp, Homo sapien
tttaccaacgttacggtgttctacg

SEQ ID NO: 46297 - DNA, 25 bp, Homo sapien
gactacgacacattacagtgtttta

SEQ ID NO: 46298 - DNA, 25 bp, Homo sapien
gactacgacacaatacagtgtttta

SEQ ID NO: 46299 - DNA, 25 bp, Homo sapien
agacgtccgcagagagattctttag

SEQ ID NO: 46300 - DNA, 25 bp, Homo sapien
agacgtccgcagtgagattctttag

SEQ ID NO: 46301 - DNA, 25 bp, Homo sapien
tagtccgactattgttttcgttgta

SEQ ID NO: 46302 - DNA, 25 bp, Homo sapien
tagtccgactatagttttcgttgta

SEQ ID NO: 46303 - DNA, 25 bp, Homo sapien
agtcagacgtctcatgtttttgtat

SEQ ID NO: 46304 - DNA, 25 bp, Homo sapien
agtcagacgtctgatgtttttgtat

SEQ ID NO: 46305 - DNA, 25 bp, Homo sapien
agacccgacgaggtattctgtcttg

SEQ ID NO: 46306 - DNA, 25 bp, Homo sapien
agacccgacgagctattctgtcttg

SEQ ID NO: 46307 - DNA, 25 bp, Homo sapien
cgacaagacgggtagtgtcatttgt

SEQ ID NO: 46308 - DNA, 25 bp, Homo sapien
cgacaagacgggaagtgtcatttgt

SEQ ID NO: 46309 - DNA, 25 bp, Homo sapien
actttaaagacatttcggtcatagt

SEQ ID NO: 46310 - DNA, 25 bp, Homo sapien
actttaaagacaattcggtcatagt

SEQ ID NO: 46311 - DNA, 25 bp, Homo sapien
cctttataagacgatgtagttcttt

SEQ ID NO: 46312 - DNA, 25 bp, Homo sapien
cctttataagaccatgtagttcttt

SEQ ID NO: 46313 - DNA, 25 bp, Homo sapien
cctgtctgtaaagagactgcgtttt

SEQ ID NO: 46314 - DNA, 25 bp, Homo sapien
cctgtctgtaaacagactgcgtttt

SEQ ID NO: 46315 - DNA, 25 bp, Homo sapien
cgtttgtcgaactccctctttagtt

SEQ ID NO: 46316 - DNA, 25 bp, Homo sapien
cgtttgtcgaacaccctctttagtt

SEQ ID NO: 46317 - DNA, 25 bp, Homo sapien
ctgttgtttcctacagtcttacttg

SEQ ID NO: 46318 - DNA, 25 bp, Homo sapien
ctgttgtttccttcagtcttacttg

SEQ ID NO: 46319 - DNA, 25 bp, Homo sapien
tttgttaagacttcggtttctgtac

SEQ ID NO: 46320 - DNA, 25 bp, Homo sapien
tttgttaagactacggtttctgtac

SEQ ID NO: 46321 - DNA, 25 bp, Homo sapien
cccgtgtcaggacacggcgttccgg

SEQ ID NO: 46322 - DNA, 25 bp, Homo sapien
cccgtgtcaggagacggcgttccgg

SEQ ID NO: 46323 - DNA, 25 bp, Homo sapien
gcacgaccctggtaagggatcccct

SEQ ID NO: 46324 - DNA, 25 bp, Homo sapien
gcacgaccctggaaagggatcccct

SEQ ID NO: 46325 - DNA, 25 bp, Homo sapien
acactgtggacaactgagagcacct

SEQ ID NO: 46326 - DNA, 25 bp, Homo sapien
acactgtggacatctgagagcacct

SEQ ID NO: 46327 - DNA, 25 bp, Homo sapien
tggtacagtgggtgtggtcgtcgcc

SEQ ID NO: 46328 - DNA, 25 bp, Homo sapien
tggtacagtgggagtggtcgtcgcc

SEQ ID NO: 46329 - DNA, 25 bp, Homo sapien
tcgtagacggggaaatggtcgttca

SEQ ID NO: 46330 - DNA, 25 bp, Homo sapien
tcgtagacggggtaatggtcgttca

SEQ ID NO: 46331 - DNA, 25 bp, Homo sapien
atgtggtaccaaagtgtgtttcgtc

SEQ ID NO: 46332 - DNA, 25 bp, Homo sapien
atgtggtaccaatgtgtgtttcgtc

SEQ ID NO: 46333 - DNA, 25 bp, Homo sapien
acggggttcggatgacgttttagac

SEQ ID NO: 46334 - DNA, 25 bp, Homo sapien
acggggttcggaagacgttttagac

SEQ ID NO: 46335 - DNA, 25 bp, Homo sapien
gtgtcgagttacgaaccgttgataa

SEQ ID NO: 46336 - DNA, 25 bp, Homo sapien
gtgtcgagttaccaaccgttgataa

SEQ ID NO: 46337 - DNA, 25 bp, Homo sapien
gcaccggacttcgacaccatttcga

SEQ ID NO: 46338 - DNA, 25 bp, Homo sapien
gcaccggacttccacaccatttcga

SEQ ID NO: 46339 - DNA, 25 bp, Homo sapien
tacacgagtttcccactttacttta

SEQ ID NO: 46340 - DNA, 25 bp, Homo sapien
tacacgagtttcgcactttacttta

SEQ ID NO: 46341 - DNA, 25 bp, Homo sapien
aataggtctatcactgtttctttag

SEQ ID NO: 46342 - DNA, 25 bp, Homo sapien
aataggtctatctctgtttctttag

SEQ ID NO: 46343 - DNA, 25 bp, Homo sapien
ttgactgtaatttgacctgacgtcg

SEQ ID NO: 46344 - DNA, 25 bp, Homo sapien
ttgactgtaattagacctgacgtcg

SEQ ID NO: 46345 - DNA, 25 bp, Homo sapien
aagagacattttagtaccttacgtt

SEQ ID NO: 46346 - DNA, 25 bp, Homo sapien
aagagacatttttgtaccttacgtt

SEQ ID NO: 46347 - DNA, 25 bp, Homo sapien
cgtaaaatgtcttcagatacttgct

SEQ ID NO: 46348 - DNA, 25 bp, Homo sapien
cgtaaaatgtctacagatacttgct

SEQ ID NO: 46349 - DNA, 25 bp, Homo sapien
cgagtgcatccgacccgtcggtaca

SEQ ID NO: 46350 - DNA, 25 bp, Homo sapien
cgagtgcatccgtcccgtcggtaca

SEQ ID NO: 46351 - DNA, 25 bp, Homo sapien
tggtctctcccgtctgtcgtcagga

SEQ ID NO: 46352 - DNA, 25 bp, Homo sapien
tggtctctcccgactgtcgtcagga

SEQ ID NO: 46353 - DNA, 25 bp, Homo sapien
cctgacacccgtacgtctcggagga

SEQ ID NO: 46354 - DNA, 25 bp, Homo sapien
cctgacacccgttcgtctcggagga

SEQ ID NO: 46355 - DNA, 25 bp, Homo sapien
tcgccgtagcacctttctcctaaga

SEQ ID NO: 46356 - DNA, 25 bp, Homo sapien
tcgccgtagcacgtttctcctaaga

SEQ ID NO: 46357 - DNA, 25 bp, Homo sapien
tatgaaggagatcaagtgtccacca

SEQ ID NO: 46358 - DNA, 25 bp, Homo sapien
tatgaaggagatgaagtgtccacca

SEQ ID NO: 46359 - DNA, 25 bp, Homo sapien
agaagtcgaacagagtgaccaccac

SEQ ID NO: 46360 - DNA, 25 bp, Homo sapien
agaagtcgaacacagtgaccaccac

SEQ ID NO: 46361 - DNA, 25 bp, Homo sapien
ccagaaagaccgaaaggacctcctc

SEQ ID NO: 46362 - DNA, 25 bp, Homo sapien
ccagaaagaccgtaaggacctcctc

SEQ ID NO: 46363 - DNA, 25 bp, Homo sapien
gaggcgaacgggtcgcactcctacg

SEQ ID NO: 46364 - DNA, 25 bp, Homo sapien
gaggcgaacgggacgcactcctacg

SEQ ID NO: 46365 - DNA, 25 bp, Homo sapien
cgagacaggacgaaccaccgagagt

SEQ ID NO: 46366 - DNA, 25 bp, Homo sapien
cgagacaggacgtaccaccgagagt

SEQ ID NO: 46367 - DNA, 25 bp, Homo sapien
caagagtaactcatcgacgaagacg

SEQ ID NO: 46368 - DNA, 25 bp, Homo sapien
caagagtaactcttcgacgaagacg

SEQ ID NO: 46369 - DNA, 25 bp, Homo sapien
ccaaagaactacagtcgactcgagg

SEQ ID NO: 46370 - DNA, 25 bp, Homo sapien
ccaaagaactactgtcgactcgagg

SEQ ID NO: 46371 - DNA, 25 bp, Homo sapien
aatcgaattactacttgactgtgtt

SEQ ID NO: 46372 - DNA, 25 bp, Homo sapien
aatcgaattacttcttgactgtgtt

SEQ ID NO: 46373 - DNA, 25 bp, Homo sapien
tcgagtgatactcatcttattttgc

SEQ ID NO: 46374 - DNA, 25 bp, Homo sapien
tcgagtgatactgatcttattttgc

SEQ ID NO: 46375 - DNA, 25 bp, Homo sapien
atcggtggagtctccgaggttcccg

SEQ ID NO: 46376 - DNA, 25 bp, Homo sapien
atcggtggagtcaccgaggttcccg

SEQ ID NO: 46377 - DNA, 25 bp, Homo sapien
ccacgagaggactcgatgtcttcct

SEQ ID NO: 46378 - DNA, 25 bp, Homo sapien
ccacgagaggacacgatgtcttcct

SEQ ID NO: 46379 - DNA, 25 bp, Homo sapien
tcgagacggcgactccgtcagtgta

SEQ ID NO: 46380 - DNA, 25 bp, Homo sapien
tcgagacggcgagtccgtcagtgta

SEQ ID NO: 46381 - DNA, 25 bp, Homo sapien
ccgacacgtggcacgcgtctaggag

SEQ ID NO: 46382 - DNA, 25 bp, Homo sapien
ccgacacgtggctcgcgtctaggag

SEQ ID NO: 46383 - DNA, 25 bp, Homo sapien
ccggacacgggacattactgcgtcg

SEQ ID NO: 46384 - DNA, 25 bp, Homo sapien
ccggacacgggagattactgcgtcg

SEQ ID NO: 46385 - DNA, 25 bp, Homo sapien
cgtactaagtgattatttctctagt

SEQ ID NO: 46386 - DNA, 25 bp, Homo sapien
cgtactaagtgaatatttctctagt

SEQ ID NO: 46387 - DNA, 25 bp, Homo sapien
ctgactaagtcattctttaccgtgt

SEQ ID NO: 46388 - DNA, 25 bp, Homo sapien
ctgactaagtcaatctttaccgtgt

SEQ ID NO: 46389 - DNA, 25 bp, Homo sapien
tagaaacgccactacttacagtcgt

SEQ ID NO: 46390 - DNA, 25 bp, Homo sapien
tagaaacgccacaacttacagtcgt

SEQ ID NO: 46391 - DNA, 25 bp, Homo sapien
aaagtacatgtaacaaacttacagg

SEQ ID NO: 46392 - DNA, 25 bp, Homo sapien
aaagtacatgtatcaaacttacagg

SEQ ID NO: 46393 - DNA, 25 bp, Homo sapien
agaaacatcgtcgatccgggacggt

SEQ ID NO: 46394 - DNA, 25 bp, Homo sapien
agaaacatcgtccatccgggacggt

SEQ ID NO: 46395 - DNA, 25 bp, Homo sapien
gaaagtctccggaagtcgggacgta

SEQ ID NO: 46396 - DNA, 25 bp, Homo sapien
gaaagtctccggtagtcgggacgta

SEQ ID NO: 46397 - DNA, 25 bp, Homo sapien
tgaccttgaagaggtcgacgagacc

SEQ ID NO: 46398 - DNA, 25 bp, Homo sapien
tgaccttgaagacgtcgacgagacc

SEQ ID NO: 46399 - DNA, 25 bp, Homo sapien
gtctcacctgagaaagacctacaac

SEQ ID NO: 46400 - DNA, 25 bp, Homo sapien
gtctcacctgagtaagacctacaac

SEQ ID NO: 46401 - DNA, 25 bp, Homo sapien
aggtgtggttagagtctccacatac

SEQ ID NO: 46402 - DNA, 25 bp, Homo sapien
aggtgtggttagtgtctccacatac

SEQ ID NO: 46403 - DNA, 25 bp, Homo sapien
atactaggtccgtgtctacacaccc

SEQ ID NO: 46404 - DNA, 25 bp, Homo sapien
atactaggtccgagtctacacaccc

SEQ ID NO: 46405 - DNA, 25 bp, Homo sapien
gtgacgccctgaactcgtccttcat

SEQ ID NO: 46406 - DNA, 25 bp, Homo sapien
gtgacgccctgatctcgtccttcat

SEQ ID NO: 46407 - DNA, 25 bp, Homo sapien
ccagaagacctacgaaatctctgaa

SEQ ID NO: 46408 - DNA, 25 bp, Homo sapien
ccagaagacctaggaaatctctgaa

SEQ ID NO: 46409 - DNA, 25 bp, Homo sapien
ccaatatccgtcgtaaatcacatgg

SEQ ID NO: 46410 - DNA, 25 bp, Homo sapien
ccaatatccgtcctaaatcacatgg

SEQ ID NO: 46411 - DNA, 25 bp, Homo sapien
tcactcttccctggtccgtctgtag

SEQ ID NO: 46412 - DNA, 25 bp, Homo sapien
tcactcttccctcgtccgtctgtag

SEQ ID NO: 46413 - DNA, 25 bp, Homo sapien
actgtctcgtcattcaggtcagtac

SEQ ID NO: 46414 - DNA, 25 bp, Homo sapien
actgtctcgtcaatcaggtcagtac

SEQ ID NO: 46415 - DNA, 25 bp, Homo sapien
aacgtctaccagacgacctcgtcga

SEQ ID NO: 46416 - DNA, 25 bp, Homo sapien
aacgtctaccagtcgacctcgtcga

SEQ ID NO: 46417 - DNA, 25 bp, Homo sapien
acactgtgtgtgtttcacccgtcga

SEQ ID NO: 46418 - DNA, 25 bp, Homo sapien
acactgtgtgtgattcacccgtcga

SEQ ID NO: 46419 - DNA, 25 bp, Homo sapien
agcctagtagtgacgtaacttggga

SEQ ID NO: 46420 - DNA, 25 bp, Homo sapien
agcctagtagtgtcgtaacttggga

SEQ ID NO: 46421 - DNA, 25 bp, Homo sapien
ttaccttaacgttcgcctcggttta

SEQ ID NO: 46422 - DNA, 25 bp, Homo sapien
ttaccttaacgtacgcctcggttta

SEQ ID NO: 46423 - DNA, 25 bp, Homo sapien
ggacgttatcatcaccgccggttta

SEQ ID NO: 46424 - DNA, 25 bp, Homo sapien
ggacgttatcatgaccgccggttta

SEQ ID NO: 46425 - DNA, 25 bp, Homo sapien
ggacgtctatgttttagctcggaaa

SEQ ID NO: 46426 - DNA, 25 bp, Homo sapien
ggacgtctatgtattagctcggaaa

SEQ ID NO: 46427 - DNA, 25 bp, Homo sapien
gaacgactggaactccaccggacac

SEQ ID NO: 46428 - DNA, 25 bp, Homo sapien
gaacgactggaagtccaccggacac

SEQ ID NO: 46429 - DNA, 25 bp, Homo sapien
ataaatcgttgacgaacttgaacac

SEQ ID NO: 46430 - DNA, 25 bp, Homo sapien
ataaatcgttgaggaacttgaacac

SEQ ID NO: 46431 - DNA, 25 bp, Homo sapien
cgaaaggatgggatcgtcgataatc

SEQ ID NO: 46432 - DNA, 25 bp, Homo sapien
cgaaaggatgggttcgtcgataatc

SEQ ID NO: 46433 - DNA, 25 bp, Homo sapien
cacaggtcactgagaagtcaatgtc

SEQ ID NO: 46434 - DNA, 25 bp, Homo sapien
cacaggtcactgtgaagtcaatgtc

SEQ ID NO: 46435 - DNA, 25 bp, Homo sapien
aagtccgtaacaaccgacaattacg

SEQ ID NO: 46436 - DNA, 25 bp, Homo sapien
aagtccgtaacatccgacaattacg

SEQ ID NO: 46437 - DNA, 25 bp, Homo sapien
gacacctactcaagtactcccaagg

SEQ ID NO: 46438 - DNA, 25 bp, Homo sapien
gacacctactcatgtactcccaagg

SEQ ID NO: 46439 - DNA, 25 bp, Homo sapien
cgagaaagagaccttcgcactcacc

SEQ ID NO: 46440 - DNA, 25 bp, Homo sapien
cgagaaagagacgttcgcactcacc

SEQ ID NO: 46441 - DNA, 25 bp, Homo sapien
cgaacccgagactgtagttttcacc

SEQ ID NO: 46442 - DNA, 25 bp, Homo sapien
cgaacccgagacagtagttttcacc

SEQ ID NO: 46443 - DNA, 25 bp, Homo sapien
tgtgaaaccggtaaacccttctcga

SEQ ID NO: 46444 - DNA, 25 bp, Homo sapien
tgtgaaaccggttaacccttctcga

SEQ ID NO: 46445 - DNA, 25 bp, Homo sapien
tgaagatcggggaacgacattgtcg

SEQ ID NO: 46446 - DNA, 25 bp, Homo sapien
tgaagatcggggtacgacattgtcg

SEQ ID NO: 46447 - DNA, 25 bp, Homo sapien
ctagaaatcaagatctcaagttgtt

SEQ ID NO: 46448 - DNA, 25 bp, Homo sapien
ctagaaatcaagttctcaagttgtt

SEQ ID NO: 46449 - DNA, 25 bp, Homo sapien
tacctaccagtctctacaggtgtgt

SEQ ID NO: 46450 - DNA, 25 bp, Homo sapien
tacctaccagtcactacaggtgtgt

SEQ ID NO: 46451 - DNA, 25 bp, Homo sapien
attctcaaagtgtcgtctcttgtac

SEQ ID NO: 46452 - DNA, 25 bp, Homo sapien
attctcaaagtgacgtctcttgtac

SEQ ID NO: 46453 - DNA, 25 bp, Homo sapien
gaaatcaatattttctcgagacagt

SEQ ID NO: 46454 - DNA, 25 bp, Homo sapien
gaaatcaatattatctcgagacagt

SEQ ID NO: 46455 - DNA, 25 bp, Homo sapien
gtcaaacccatttcgttcgttacag

SEQ ID NO: 46456 - DNA, 25 bp, Homo sapien
gtcaaacccattacgttcgttacag

SEQ ID NO: 46457 - DNA, 25 bp, Homo sapien
acgacaactctttcaaactatacgg

SEQ ID NO: 46458 - DNA, 25 bp, Homo sapien
acgacaactcttacaaactatacgg

SEQ ID NO: 46459 - DNA, 25 bp, Homo sapien
acaacctacgacaacatgtacgtgg

SEQ ID NO: 46460 - DNA, 25 bp, Homo sapien
acaacctacgactacatgtacgtgg

SEQ ID NO: 46461 - DNA, 25 bp, Homo sapien
aagtagacatctctacgaagacagg

SEQ ID NO: 46462 - DNA, 25 bp, Homo sapien
aagtagacatctgtacgaagacagg

SEQ ID NO: 46463 - DNA, 25 bp, Homo sapien
taaaaaccggctaatctaaggacta

SEQ ID NO: 46464 - DNA, 25 bp, Homo sapien
taaaaaccggcttatctaaggacta

SEQ ID NO: 46465 - DNA, 25 bp, Homo sapien
tggaaacaggtcctatcggggcagt

SEQ ID NO: 46466 - DNA, 25 bp, Homo sapien
tggaaacaggtcgtatcggggcagt

SEQ ID NO: 46467 - DNA, 25 bp, Homo sapien
tcccgcgtacgtgtctggtcggctt

SEQ ID NO: 46468 - DNA, 25 bp, Homo sapien
tcccgcgtacgtctctggtcggctt

SEQ ID NO: 46469 - DNA, 25 bp, Homo sapien
ttcgtggagtctcctgtgtgtgaaa

SEQ ID NO: 46470 - DNA, 25 bp, Homo sapien
ttcgtggagtctgctgtgtgtgaaa

SEQ ID NO: 46471 - DNA, 25 bp, Homo sapien
tatccggtagcataggtgcgtaaag

SEQ ID NO: 46472 - DNA, 25 bp, Homo sapien
tatccggtagcaaaggtgcgtaaag

SEQ ID NO: 46473 - DNA, 25 bp, Homo sapien
ctgttaggtacagaaggcctgttag

SEQ ID NO: 46474 - DNA, 25 bp, Homo sapien
ctgttaggtacacaaggcctgttag

SEQ ID NO: 46475 - DNA, 25 bp, Homo sapien
cctgacaagttcacccatgtcgtag

SEQ ID NO: 46476 - DNA, 25 bp, Homo sapien
cctgacaagttctcccatgtcgtag

SEQ ID NO: 46477 - DNA, 25 bp, Homo sapien
tagaaataagtcttcgtgaaccgac

SEQ ID NO: 46478 - DNA, 25 bp, Homo sapien
tagaaataagtcatcgtgaaccgac

SEQ ID NO: 46479 - DNA, 25 bp, Homo sapien
ccaataaaagtgttctgtatcgata

SEQ ID NO: 46480 - DNA, 25 bp, Homo sapien
ccaataaaagtgatctgtatcgata

SEQ ID NO: 46481 - DNA, 25 bp, Homo sapien
gtcgattatatttcgactgtttacc

SEQ ID NO: 46482 - DNA, 25 bp, Homo sapien
gtcgattatattacgactgtttacc

SEQ ID NO: 46483 - DNA, 25 bp, Homo sapien
actaaggttaattaaaagtctctcc

SEQ ID NO: 46484 - DNA, 25 bp, Homo sapien
actaaggttaataaaaagtctctcc

SEQ ID NO: 46485 - DNA, 25 bp, Homo sapien
aagtggaaagtcaagtaaccaccta

SEQ ID NO: 46486 - DNA, 25 bp, Homo sapien
aagtggaaagtctagtaaccaccta

SEQ ID NO: 46487 - DNA, 25 bp, Homo sapien
aactaaaatgtctaaaccggagact

SEQ ID NO: 46488 - DNA, 25 bp, Homo sapien
aactaaaatgtcaaaaccggagact

SEQ ID NO: 46489 - DNA, 25 bp, Homo sapien
ccaagaacgggcatctgcaccacga

SEQ ID NO: 46490 - DNA, 25 bp, Homo sapien
ccaagaacgggcttctgcaccacga

SEQ ID NO: 46491 - DNA, 25 bp, Homo sapien
accaaaaggagatgattgctcctac

SEQ ID NO: 46492 - DNA, 25 bp, Homo sapien
accaaaaggagaagattgctcctac

SEQ ID NO: 46493 - DNA, 25 bp, Homo sapien
aggtacagaaggttcttcgaggttc

SEQ ID NO: 46494 - DNA, 25 bp, Homo sapien
aggtacagaaggatcttcgaggttc

SEQ ID NO: 46495 - DNA, 25 bp, Homo sapien
gggtcgtcgaaggagtctaaatttc

SEQ ID NO: 46496 - DNA, 25 bp, Homo sapien
gggtcgtcgaagcagtctaaatttc

SEQ ID NO: 46497 - DNA, 25 bp, Homo sapien
gagctccgacagagggaactcctgt

SEQ ID NO: 46498 - DNA, 25 bp, Homo sapien
gagctccgacagtgggaactcctgt

SEQ ID NO: 46499 - DNA, 25 bp, Homo sapien
aggtcataggtcgtgtgggcaccca

SEQ ID NO: 46500 - DNA, 25 bp, Homo sapien
aggtcataggtcctgtgggcaccca

SEQ ID NO: 46501 - DNA, 25 bp, Homo sapien
gtaacgtgtcggtgacggctcccca

SEQ ID NO: 46502 - DNA, 25 bp, Homo sapien
gtaacgtgtcggagacggctcccca

SEQ ID NO: 46503 - DNA, 25 bp, Homo sapien
acgtaactgaggacagggcccagag

SEQ ID NO: 46504 - DNA, 25 bp, Homo sapien
acgtaactgaggtcagggcccagag

SEQ ID NO: 46505 - DNA, 25 bp, Homo sapien
cggaggaagaacgtagaacccaagt

SEQ ID NO: 46506 - DNA, 25 bp, Homo sapien
cggaggaagaacctagaacccaagt

SEQ ID NO: 46507 - DNA, 25 bp, Homo sapien
aaaggacccgtcatgatctttagat

SEQ ID NO: 46508 - DNA, 25 bp, Homo sapien
aaaggacccgtcttgatctttagat

SEQ ID NO: 46509 - DNA, 25 bp, Homo sapien
gtaagcgacccgtaggactccttcc

SEQ ID NO: 46510 - DNA, 25 bp, Homo sapien
gtaagcgacccgaaggactccttcc

SEQ ID NO: 46511 - DNA, 25 bp, Homo sapien
ggagaggaaggagagcatctacctc

SEQ ID NO: 46512 - DNA, 25 bp, Homo sapien
ggagaggaaggacagcatctacctc

SEQ ID NO: 46513 - DNA, 25 bp, Homo sapien
ggacggagtaaacgaccctttttag

SEQ ID NO: 46514 - DNA, 25 bp, Homo sapien
ggacggagtaaaggaccctttttag

SEQ ID NO: 46515 - DNA, 25 bp, Homo sapien
ggtgacaaaacaactcgttttatta

SEQ ID NO: 46516 - DNA, 25 bp, Homo sapien
ggtgacaaaacatctcgttttatta

SEQ ID NO: 46517 - DNA, 25 bp, Homo sapien
agggacaattcaaatatgtctttct

SEQ ID NO: 46518 - DNA, 25 bp, Homo sapien
agggacaattcatatatgtctttct

SEQ ID NO: 46519 - DNA, 25 bp, Homo sapien
agaggaacaaccagaaatgtctttc

SEQ ID NO: 46520 - DNA, 25 bp, Homo sapien
agaggaacaacctgaaatgtctttc

SEQ ID NO: 46521 - DNA, 25 bp, Homo sapien
tgacacggagactgggtatcatttg

SEQ ID NO: 46522 - DNA, 25 bp, Homo sapien
tgacacggagacagggtatcatttg

SEQ ID NO: 46523 - DNA, 25 bp, Homo sapien
gagtcagaggagaaggttgtcccaa

SEQ ID NO: 46524 - DNA, 25 bp, Homo sapien
gagtcagaggagtaggttgtcccaa

SEQ ID NO: 46525 - DNA, 25 bp, Homo sapien
acacggagcacctgcgtttcctttt

SEQ ID NO: 46526 - DNA, 25 bp, Homo sapien
acacggagcaccagcgtttcctttt

SEQ ID NO: 46527 - DNA, 25 bp, Homo sapien
caggaaattagaggttctcagtgtc

SEQ ID NO: 46528 - DNA, 25 bp, Homo sapien
caggaaattagacgttctcagtgtc

SEQ ID NO: 46529 - DNA, 25 bp, Homo sapien
ttgtgaaaaagtatcttaccgacat

SEQ ID NO: 46530 - DNA, 25 bp, Homo sapien
ttgtgaaaaagtttcttaccgacat

SEQ ID NO: 46531 - DNA, 25 bp, Homo sapien
ttttgataattctcgtgacagacat

SEQ ID NO: 46532 - DNA, 25 bp, Homo sapien
ttttgataattcacgtgacagacat

SEQ ID NO: 46533 - DNA, 25 bp, Homo sapien
ttaagataagatttgtgtacccgtc

SEQ ID NO: 46534 - DNA, 25 bp, Homo sapien
ttaagataagatatgtgtacccgtc

SEQ ID NO: 46535 - DNA, 25 bp, Homo sapien
gagtagtgacaaagaatggtcccgc

SEQ ID NO: 46536 - DNA, 25 bp, Homo sapien
gagtagtgacaatgaatggtcccgc

SEQ ID NO: 46537 - DNA, 25 bp, Homo sapien
gtcggccggccgaaggtcctgactc

SEQ ID NO: 46538 - DNA, 25 bp, Homo sapien
gtcggccggccgtaggtcctgactc

SEQ ID NO: 46539 - DNA, 25 bp, Homo sapien
agcctgagacgtaggtcgcgcgacc

SEQ ID NO: 46540 - DNA, 25 bp, Homo sapien
agcctgagacgttggtcgcgcgacc

SEQ ID NO: 46541 - DNA, 25 bp, Homo sapien
acgccttggtaaaggagtctacact

SEQ ID NO: 46542 - DNA, 25 bp, Homo sapien
acgccttggtaatggagtctacact

SEQ ID NO: 46543 - DNA, 25 bp, Homo sapien
tatattaccccggaacgggaccttt

SEQ ID NO: 46544 - DNA, 25 bp, Homo sapien
tatattaccccgcaacgggaccttt

SEQ ID NO: 46545 - DNA, 25 bp, Homo sapien
ttgcacactcgaggagtgacttccg

SEQ ID NO: 46546 - DNA, 25 bp, Homo sapien
ttgcacactcgacgagtgacttccg

SEQ ID NO: 46547 - DNA, 25 bp, Homo sapien
atttccgtagtgaagatgtgtccac

SEQ ID NO: 46548 - DNA, 25 bp, Homo sapien
atttccgtagtgtagatgtgtccac

SEQ ID NO: 46549 - DNA, 25 bp, Homo sapien
cactttatacatacggacggtttct

SEQ ID NO: 46550 - DNA, 25 bp, Homo sapien
cactttatacattcggacggtttct

SEQ ID NO: 46551 - DNA, 25 bp, Homo sapien
cactttcgagacctcggttgctatc

SEQ ID NO: 46552 - DNA, 25 bp, Homo sapien
cactttcgagacgtcggttgctatc

SEQ ID NO: 46553 - DNA, 25 bp, Homo sapien
gagactctcggtcctttcgtgattt

SEQ ID NO: 46554 - DNA, 25 bp, Homo sapien
gagactctcggtgctttcgtgattt

SEQ ID NO: 46555 - DNA, 25 bp, Homo sapien
tgaccttacgtgtgagtacggttta

SEQ ID NO: 46556 - DNA, 25 bp, Homo sapien
tgaccttacgtgagagtacggttta

SEQ ID NO: 46557 - DNA, 25 bp, Homo sapien
gatactccgtctaccactacgtttt

SEQ ID NO: 46558 - DNA, 25 bp, Homo sapien
gatactccgtcttccactacgtttt

SEQ ID NO: 46559 - DNA, 25 bp, Homo sapien
gtgtccctcgactgccgaaggtcct

SEQ ID NO: 46560 - DNA, 25 bp, Homo sapien
gtgtccctcgacagccgaaggtcct

SEQ ID NO: 46561 - DNA, 25 bp, Homo sapien
tgaccgaccggaataccggaggttc

SEQ ID NO: 46562 - DNA, 25 bp, Homo sapien
tgaccgaccggattaccggaggttc

SEQ ID NO: 46563 - DNA, 25 bp, Homo sapien
ttttcggctccatcagggaccctat

SEQ ID NO: 46564 - DNA, 25 bp, Homo sapien
ttttcggctccaacagggaccctat

SEQ ID NO: 46565 - DNA, 25 bp, Homo sapien
ttatcgtttacctcgaggtgcctcc

SEQ ID NO: 46566 - DNA, 25 bp, Homo sapien
ttatcgtttaccacgaggtgcctcc

SEQ ID NO: 46567 - DNA, 25 bp, Homo sapien
ttgtaacactgaaccgatgactcac

SEQ ID NO: 46568 - DNA, 25 bp, Homo sapien
ttgtaacactgatccgatgactcac

SEQ ID NO: 46569 - DNA, 25 bp, Homo sapien
ggtcgttcacatcgttcgaggccta

SEQ ID NO: 46570 - DNA, 25 bp, Homo sapien
ggtcgttcacatggttcgaggccta

SEQ ID NO: 46571 - DNA, 25 bp, Homo sapien
ggtccgagactctcctccgggttac

SEQ ID NO: 46572 - DNA, 25 bp, Homo sapien
ggtccgagactcacctccgggttac

SEQ ID NO: 46573 - DNA, 25 bp, Homo sapien
cgtggggtcgacgaccttggaccac

SEQ ID NO: 46574 - DNA, 25 bp, Homo sapien
cgtggggtcgaccaccttggaccac

SEQ ID NO: 46575 - DNA, 25 bp, Homo sapien
tctagggagtgctccgggtttcgac

SEQ ID NO: 46576 - DNA, 25 bp, Homo sapien
tctagggagtgcaccgggtttcgac

SEQ ID NO: 46577 - DNA, 25 bp, Homo sapien
acgaagacccagacgtagggttgtc

SEQ ID NO: 46578 - DNA, 25 bp, Homo sapien
acgaagacccagtcgtagggttgtc

SEQ ID NO: 46579 - DNA, 25 bp, Homo sapien
tcgcggaagaaggtcttgacctcgg

SEQ ID NO: 46580 - DNA, 25 bp, Homo sapien
tcgcggaagaagctcttgacctcgg

SEQ ID NO: 46581 - DNA, 25 bp, Homo sapien
tgaggtgagaaaccttcactcagtg

SEQ ID NO: 46582 - DNA, 25 bp, Homo sapien
tgaggtgagaaagcttcactcagtg

SEQ ID NO: 46583 - DNA, 25 bp, Homo sapien
tccgaaccgaggacaccagccgtgt

SEQ ID NO: 46584 - DNA, 25 bp, Homo sapien
tccgaaccgaggtcaccagccgtgt

SEQ ID NO: 46585 - DNA, 25 bp, Homo sapien
ggacccaaacgacatcagcagacaa

SEQ ID NO: 46586 - DNA, 25 bp, Homo sapien
ggacccaaacgagatcagcagacaa

SEQ ID NO: 46587 - DNA, 25 bp, Homo sapien
ccagtacatcaggtagggcgacgga

SEQ ID NO: 46588 - DNA, 25 bp, Homo sapien
ccagtacatcagctagggcgacgga

SEQ ID NO: 46589 - DNA, 25 bp, Homo sapien
tccagtaataatgttgtcgacatgt

SEQ ID NO: 46590 - DNA, 25 bp, Homo sapien
tccagtaataatcttgtcgacatgt

SEQ ID NO: 46591 - DNA, 25 bp, Homo sapien
tgtccctagaatttcttgtcttatg

SEQ ID NO: 46592 - DNA, 25 bp, Homo sapien
tgtccctagaatatcttgtcttatg

SEQ ID NO: 46593 - DNA, 25 bp, Homo sapien
tgaccagtagaaacttggtctgttg

SEQ ID NO: 46594 - DNA, 25 bp, Homo sapien
tgaccagtagaatcttggtctgttg

SEQ ID NO: 46595 - DNA, 25 bp, Homo sapien
agcccaaatatctgtgttttactag

SEQ ID NO: 46596 - DNA, 25 bp, Homo sapien
agcccaaatatcagtgttttactag

SEQ ID NO: 46597 - DNA, 25 bp, Homo sapien
acgaaccgaaagtcttctttcttag

SEQ ID NO: 46598 - DNA, 25 bp, Homo sapien
acgaaccgaaagacttctttcttag

SEQ ID NO: 46599 - DNA, 25 bp, Homo sapien
tggactataatccttgttatttctg

SEQ ID NO: 46600 - DNA, 25 bp, Homo sapien
tggactataatcgttgttatttctg

SEQ ID NO: 46601 - DNA, 25 bp, Homo sapien
tgtcacaataccttcatatgtgttg

SEQ ID NO: 46602 - DNA, 25 bp, Homo sapien
tgtcacaataccatcatatgtgttg

SEQ ID NO: 46603 - DNA, 25 bp, Homo sapien
aactaccaccttcactactgtggag

SEQ ID NO: 46604 - DNA, 25 bp, Homo sapien
aactaccaccttgactactgtggag

SEQ ID NO: 46605 - DNA, 25 bp, Homo sapien
tgatccaccggaatctgtacgtaga

SEQ ID NO: 46606 - DNA, 25 bp, Homo sapien
tgatccaccggattctgtacgtaga

SEQ ID NO: 46607 - DNA, 25 bp, Homo sapien
acttaccaccgactcgtatgtaaag

SEQ ID NO: 46608 - DNA, 25 bp, Homo sapien
acttaccaccgagtcgtatgtaaag

SEQ ID NO: 46609 - DNA, 25 bp, Homo sapien
atgtacttagagtcgacgttgtttc

SEQ ID NO: 46610 - DNA, 25 bp, Homo sapien
atgtacttagagacgacgttgtttc

SEQ ID NO: 46611 - DNA, 25 bp, Homo sapien
ttacacattgtcatccggttgaccc

SEQ ID NO: 46612 - DNA, 25 bp, Homo sapien
ttacacattgtcttccggttgaccc

SEQ ID NO: 46613 - DNA, 25 bp, Homo sapien
tgtcttgtttagtctcccggtcccc

SEQ ID NO: 46614 - DNA, 25 bp, Homo sapien
tgtcttgtttagactcccggtcccc

SEQ ID NO: 46615 - DNA, 25 bp, Homo sapien
accctctagggataccaagtcctcc

SEQ ID NO: 46616 - DNA, 25 bp, Homo sapien
accctctagggaaaccaagtcctcc

SEQ ID NO: 46617 - DNA, 25 bp, Homo sapien
cattgtgtcgacacccagtcccgag

SEQ ID NO: 46618 - DNA, 25 bp, Homo sapien
cattgtgtcgactcccagtcccgag

SEQ ID NO: 46619 - DNA, 25 bp, Homo sapien
ctctagatacatcaatgtcgtcctg

SEQ ID NO: 46620 - DNA, 25 bp, Homo sapien
ctctagatacatgaatgtcgtcctg

SEQ ID NO: 46621 - DNA, 25 bp, Homo sapien
aaccttgtagattcgttcgacttcc

SEQ ID NO: 46622 - DNA, 25 bp, Homo sapien
aaccttgtagatacgttcgacttcc

SEQ ID NO: 46623 - DNA, 25 bp, Homo sapien
tgaactttgattacggacttactct

SEQ ID NO: 46624 - DNA, 25 bp, Homo sapien
tgaactttgatttcggacttactct

SEQ ID NO: 46625 - DNA, 25 bp, Homo sapien
aaacctttcagtttgtacgatgttt

SEQ ID NO: 46626 - DNA, 25 bp, Homo sapien
aaacctttcagtatgtacgatgttt

SEQ ID NO: 46627 - DNA, 25 bp, Homo sapien
atagattatgtcaaggttccatctt

SEQ ID NO: 46628 - DNA, 25 bp, Homo sapien
atagattatgtctaggttccatctt

SEQ ID NO: 46629 - DNA, 25 bp, Homo sapien
agacgagtgattctatttacgtcta

SEQ ID NO: 46630 - DNA, 25 bp, Homo sapien
agacgagtgattgtatttacgtcta

SEQ ID NO: 46631 - DNA, 25 bp, Homo sapien
aaaaggtgtgacgagagacctaagc

SEQ ID NO: 46632 - DNA, 25 bp, Homo sapien
aaaaggtgtgaccagagacctaagc

SEQ ID NO: 46633 - DNA, 25 bp, Homo sapien
aagacagtcgttctcggcccggagc

SEQ ID NO: 46634 - DNA, 25 bp, Homo sapien
aagacagtcgttgtcggcccggagc

SEQ ID NO: 46635 - DNA, 25 bp, Homo sapien
ctctactcctttcgttccggcaggt

SEQ ID NO: 46636 - DNA, 25 bp, Homo sapien
ctctactcctttggttccggcaggt

SEQ ID NO: 46637 - DNA, 25 bp, Homo sapien
tgtgctactgggtccggtcgtcgtc

SEQ ID NO: 46638 - DNA, 25 bp, Homo sapien
tgtgctactgggaccggtcgtcgtc

SEQ ID NO: 46639 - DNA, 25 bp, Homo sapien
gttccagtcgaggtcgtagagcctc

SEQ ID NO: 46640 - DNA, 25 bp, Homo sapien
gttccagtcgagctcgtagagcctc

SEQ ID NO: 46641 - DNA, 25 bp, Homo sapien
tacacggttgagattcgtagtcctt

SEQ ID NO: 46642 - DNA, 25 bp, Homo sapien
tacacggttgagtttcgtagtcctt

SEQ ID NO: 46643 - DNA, 25 bp, Homo sapien
tcctagttcgagttaactacgggtg

SEQ ID NO: 46644 - DNA, 25 bp, Homo sapien
tcctagttcgagataactacgggtg

SEQ ID NO: 46645 - DNA, 25 bp, Homo sapien
tacatcccggttggtcgatgagttg

SEQ ID NO: 46646 - DNA, 25 bp, Homo sapien
tacatcccggttcgtcgatgagttg

SEQ ID NO: 46647 - DNA, 25 bp, Homo sapien
cacttgtgtacatgaggtcgtcggt

SEQ ID NO: 46648 - DNA, 25 bp, Homo sapien
cacttgtgtacaagaggtcgtcggt

SEQ ID NO: 46649 - DNA, 25 bp, Homo sapien
ctcactccacggtactgtcgtcggt

SEQ ID NO: 46650 - DNA, 25 bp, Homo sapien
ctcactccacggaactgtcgtcggt

SEQ ID NO: 46651 - DNA, 25 bp, Homo sapien
cgaagtagagactcgggaccgattc

SEQ ID NO: 46652 - DNA, 25 bp, Homo sapien
cgaagtagagacacgggaccgattc

SEQ ID NO: 46653 - DNA, 25 bp, Homo sapien
gaagagaaagatcagggaggacttt

SEQ ID NO: 46654 - DNA, 25 bp, Homo sapien
gaagagaaagatgagggaggacttt

SEQ ID NO: 46655 - DNA, 25 bp, Homo sapien
tggactagaaggaaccactcctatt

SEQ ID NO: 46656 - DNA, 25 bp, Homo sapien
tggactagaaggtaccactcctatt

SEQ ID NO: 46657 - DNA, 25 bp, Homo sapien
ctgaacacgaagacggctcttattt

SEQ ID NO: 46658 - DNA, 25 bp, Homo sapien
ctgaacacgaagtcggctcttattt

SEQ ID NO: 46659 - DNA, 25 bp, Homo sapien
tgaccgtgggaaagaccgagacctt

SEQ ID NO: 46660 - DNA, 25 bp, Homo sapien
tgaccgtgggaatgaccgagacctt

SEQ ID NO: 46661 - DNA, 25 bp, Homo sapien
gtgtgtggagagctccttaacgacc

SEQ ID NO: 46662 - DNA, 25 bp, Homo sapien
gtgtgtggagaggtccttaacgacc

SEQ ID NO: 46663 - DNA, 25 bp, Homo sapien
atatgtcaggtagtggaaccgagtc

SEQ ID NO: 46664 - DNA, 25 bp, Homo sapien
atatgtcaggtactggaaccgagtc

SEQ ID NO: 46665 - DNA, 25 bp, Homo sapien
agaaggtcctcgaacttgaagggtc

SEQ ID NO: 46666 - DNA, 25 bp, Homo sapien
agaaggtcctcgtacttgaagggtc

SEQ ID NO: 46667 - DNA, 25 bp, Homo sapien
aaatcatctgcatgtcgacgaatcg

SEQ ID NO: 46668 - DNA, 25 bp, Homo sapien
aaatcatctgcaagtcgacgaatcg

SEQ ID NO: 46669 - DNA, 25 bp, Homo sapien
gaagtccagtagtaccaataacttc

SEQ ID NO: 46670 - DNA, 25 bp, Homo sapien
gaagtccagtagaaccaataacttc

SEQ ID NO: 46671 - DNA, 25 bp, Homo sapien
gggatggaaggactatgagtacctc

SEQ ID NO: 46672 - DNA, 25 bp, Homo sapien
gggatggaaggagtatgagtacctc

SEQ ID NO: 46673 - DNA, 25 bp, Homo sapien
atcgtaccttaggacgtcgtactct

SEQ ID NO: 46674 - DNA, 25 bp, Homo sapien
atcgtaccttagcacgtcgtactct

SEQ ID NO: 46675 - DNA, 25 bp, Homo sapien
gtagagcccctggttcgtctctgat

SEQ ID NO: 46676 - DNA, 25 bp, Homo sapien
gtagagcccctgcttcgtctctgat

SEQ ID NO: 46677 - DNA, 25 bp, Homo sapien
aggagaaacctttaccgaagtgagt

SEQ ID NO: 46678 - DNA, 25 bp, Homo sapien
aggagaaaccttaaccgaagtgagt

SEQ ID NO: 46679 - DNA, 25 bp, Homo sapien
agggacaggacgtttcgaattgtac

SEQ ID NO: 46680 - DNA, 25 bp, Homo sapien
agggacaggacgattcgaattgtac

SEQ ID NO: 46681 - DNA, 25 bp, Homo sapien
gccacgaacgaatctccgtgatgat

SEQ ID NO: 46682 - DNA, 25 bp, Homo sapien
gccacgaacgaaactccgtgatgat

SEQ ID NO: 46683 - DNA, 25 bp, Homo sapien
aaccagaacagtaaccctaggacat

SEQ ID NO: 46684 - DNA, 25 bp, Homo sapien
aaccagaacagttaccctaggacat

SEQ ID NO: 46685 - DNA, 25 bp, Homo sapien
cggagacctagtcgtgggagactat

SEQ ID NO: 46686 - DNA, 25 bp, Homo sapien
cggagacctagtggtgggagactat

SEQ ID NO: 46687 - DNA, 25 bp, Homo sapien
tcgaactctcttgttgacgtcgtaa

SEQ ID NO: 46688 - DNA, 25 bp, Homo sapien
tcgaactctcttcttgacgtcgtaa

SEQ ID NO: 46689 - DNA, 25 bp, Homo sapien
aagctgtttgttccaggacttcgta

SEQ ID NO: 46690 - DNA, 25 bp, Homo sapien
aagctgtttgttgcaggacttcgta

SEQ ID NO: 46691 - DNA, 25 bp, Homo sapien
acagggtctttttaacccagtgtgt

SEQ ID NO: 46692 - DNA, 25 bp, Homo sapien
acagggtcttttaaacccagtgtgt

SEQ ID NO: 46693 - DNA, 25 bp, Homo sapien
acgaggacgtggtttgaaccaattg

SEQ ID NO: 46694 - DNA, 25 bp, Homo sapien
acgaggacgtggattgaaccaattg

SEQ ID NO: 46695 - DNA, 25 bp, Homo sapien
gaggtgcaactactgaagaacattt

SEQ ID NO: 46696 - DNA, 25 bp, Homo sapien
gaggtgcaactagtgaagaacattt

SEQ ID NO: 46697 - DNA, 25 bp, Homo sapien
cggtaaaggaaccttcagtgaggaa

SEQ ID NO: 46698 - DNA, 25 bp, Homo sapien
cggtaaaggaacgttcagtgaggaa

SEQ ID NO: 46699 - DNA, 25 bp, Homo sapien
gcctaaaggagacctcagtttggaa

SEQ ID NO: 46700 - DNA, 25 bp, Homo sapien
gcctaaaggagagctcagtttggaa

SEQ ID NO: 46701 - DNA, 25 bp, Homo sapien
ctcctattctcacagtccttggtcg

SEQ ID NO: 46702 - DNA, 25 bp, Homo sapien
ctcctattctcagagtccttggtcg

SEQ ID NO: 46703 - DNA, 25 bp, Homo sapien
acccttcgttcgtgcgaccggtggg

SEQ ID NO: 46704 - DNA, 25 bp, Homo sapien
acccttcgttcgagcgaccggtggg

SEQ ID NO: 46705 - DNA, 25 bp, Homo sapien
attcctacttccacgtctttctggg

SEQ ID NO: 46706 - DNA, 25 bp, Homo sapien
attcctacttcctcgtctttctggg

SEQ ID NO: 46707 - DNA, 25 bp, Homo sapien
tcgaaacccttacgacctcggagga

SEQ ID NO: 46708 - DNA, 25 bp, Homo sapien
tcgaaacccttaggacctcggagga

SEQ ID NO: 46709 - DNA, 25 bp, Homo sapien
cggaagaacttagaggtggatcact

SEQ ID NO: 46710 - DNA, 25 bp, Homo sapien
cggaagaacttacaggtggatcact

SEQ ID NO: 46711 - DNA, 25 bp, Homo sapien
ctcctcgttctcctgtgaggaacta

SEQ ID NO: 46712 - DNA, 25 bp, Homo sapien
ctcctcgttctcgtgtgaggaacta

SEQ ID NO: 46713 - DNA, 25 bp, Homo sapien
tcctgtctaccgtgtccactcgtag

SEQ ID NO: 46714 - DNA, 25 bp, Homo sapien
tcctgtctaccgagtccactcgtag

SEQ ID NO: 46715 - DNA, 25 bp, Homo sapien
ggatcggacccgtgttacgaccgtg

SEQ ID NO: 46716 - DNA, 25 bp, Homo sapien
ggatcggacccgagttacgaccgtg

SEQ ID NO: 46717 - DNA, 25 bp, Homo sapien
acctgtccgaaaagtcgtgactctt

SEQ ID NO: 46718 - DNA, 25 bp, Homo sapien
acctgtccgaaatgtcgtgactctt

SEQ ID NO: 46719 - DNA, 25 bp, Homo sapien
atcggtagtcaaaagcgactctcat

SEQ ID NO: 46720 - DNA, 25 bp, Homo sapien
atcggtagtcaatagcgactctcat

SEQ ID NO: 46721 - DNA, 25 bp, Homo sapien
ggcgttgactgaaggtactactaac

SEQ ID NO: 46722 - DNA, 25 bp, Homo sapien
ggcgttgactgatggtactactaac

SEQ ID NO: 46723 - DNA, 25 bp, Homo sapien
atttctctctatatcaatttcgaat

SEQ ID NO: 46724 - DNA, 25 bp, Homo sapien
atttctctctatttcaatttcgaat

SEQ ID NO: 46725 - DNA, 25 bp, Homo sapien
cttctgtacgatgtcatttgtgtat

SEQ ID NO: 46726 - DNA, 25 bp, Homo sapien
cttctgtacgatctcatttgtgtat

SEQ ID NO: 46727 - DNA, 25 bp, Homo sapien
gtgtacgcgtagtcaagtttgtcgt

SEQ ID NO: 46728 - DNA, 25 bp, Homo sapien
gtgtacgcgtagacaagtttgtcgt

SEQ ID NO: 46729 - DNA, 25 bp, Homo sapien
gaaggttcgagtcaagttctcggtt

SEQ ID NO: 46730 - DNA, 25 bp, Homo sapien
gaaggttcgagtgaagttctcggtt

SEQ ID NO: 46731 - DNA, 25 bp, Homo sapien
acataggtcgacaggcatctccctt

SEQ ID NO: 46732 - DNA, 25 bp, Homo sapien
acataggtcgactggcatctccctt

SEQ ID NO: 46733 - DNA, 25 bp, Homo sapien
cttggtggtcggtgtcgtactttgt

SEQ ID NO: 46734 - DNA, 25 bp, Homo sapien
cttggtggtcggagtcgtactttgt

SEQ ID NO: 46735 - DNA, 25 bp, Homo sapien
ttcaagatctaggtaactctgttcg

SEQ ID NO: 46736 - DNA, 25 bp, Homo sapien
ttcaagatctagctaactctgttcg

SEQ ID NO: 46737 - DNA, 25 bp, Homo sapien
ttgtcaacgaaagtacaacttccgt

SEQ ID NO: 46738 - DNA, 25 bp, Homo sapien
ttgtcaacgaaactacaacttccgt

SEQ ID NO: 46739 - DNA, 25 bp, Homo sapien
acacgtgcatccaccacacatgtga

SEQ ID NO: 46740 - DNA, 25 bp, Homo sapien
acacgtgcatcctccacacatgtga

SEQ ID NO: 46741 - DNA, 25 bp, Homo sapien
gagaaagacgagtcccaaagacgtc

SEQ ID NO: 46742 - DNA, 25 bp, Homo sapien
gagaaagacgagacccaaagacgtc

SEQ ID NO: 46743 - DNA, 25 bp, Homo sapien
agcaaaggcacacacacgcgacgtt

SEQ ID NO: 46744 - DNA, 25 bp, Homo sapien
agcaaaggcacagacacgcgacgtt

SEQ ID NO: 46745 - DNA, 25 bp, Homo sapien
aacgacaagggaccaccaagactga

SEQ ID NO: 46746 - DNA, 25 bp, Homo sapien
aacgacaagggagcaccaagactga

SEQ ID NO: 46747 - DNA, 25 bp, Homo sapien
aagaagagcaaactccttttgtcga

SEQ ID NO: 46748 - DNA, 25 bp, Homo sapien
aagaagagcaaagtccttttgtcga

SEQ ID NO: 46749 - DNA, 25 bp, Homo sapien
ccatggggtatcatcgacgtgtgtc

SEQ ID NO: 46750 - DNA, 25 bp, Homo sapien
ccatggggtatcttcgacgtgtgtc

SEQ ID NO: 46751 - DNA, 25 bp, Homo sapien
ccgatgtgacgagtccgaagtccgg

SEQ ID NO: 46752 - DNA, 25 bp, Homo sapien
ccgatgtgacgactccgaagtccgg

SEQ ID NO: 46753 - DNA, 25 bp, Homo sapien
cctcctgttattcttccggattgtc

SEQ ID NO: 46754 - DNA, 25 bp, Homo sapien
cctcctgttattgttccggattgtc

SEQ ID NO: 46755 - DNA, 25 bp, Homo sapien
acctttgtttgtcgaagattacgtc

SEQ ID NO: 46756 - DNA, 25 bp, Homo sapien
acctttgtttgtggaagattacgtc

SEQ ID NO: 46757 - DNA, 25 bp, Homo sapien
gcctttcatttcgatacacttacgg

SEQ ID NO: 46758 - DNA, 25 bp, Homo sapien
gcctttcatttccatacacttacgg

SEQ ID NO: 46759 - DNA, 25 bp, Homo sapien
gacctgacccctgacaagaatgagg

SEQ ID NO: 46760 - DNA, 25 bp, Homo sapien
gacctgacccctcacaagaatgagg

SEQ ID NO: 46761 - DNA, 25 bp, Homo sapien
agtcgaattccttcagataatcgaa

SEQ ID NO: 46762 - DNA, 25 bp, Homo sapien
agtcgaattcctacagataatcgaa

SEQ ID NO: 46763 - DNA, 25 bp, Homo sapien
ccgtggctatttgtctaaggtgtca

SEQ ID NO: 46764 - DNA, 25 bp, Homo sapien
ccgtggctatttctctaaggtgtca

SEQ ID NO: 46765 - DNA, 25 bp, Homo sapien
cacaaagaccatgtgagtggagtca

SEQ ID NO: 46766 - DNA, 25 bp, Homo sapien
cacaaagaccatctgagtggagtca

SEQ ID NO: 46767 - DNA, 25 bp, Homo sapien
aaataacctcgctaggtaatagtca

SEQ ID NO: 46768 - DNA, 25 bp, Homo sapien
aaataacctcgcaaggtaatagtca

SEQ ID NO: 46769 - DNA, 25 bp, Homo sapien
aataaactctcaaatagactgtctc

SEQ ID NO: 46770 - DNA, 25 bp, Homo sapien
aataaactctcatatagactgtctc

SEQ ID NO: 46771 - DNA, 25 bp, Homo sapien
actccacctactttatagacatcat

SEQ ID NO: 46772 - DNA, 25 bp, Homo sapien
actccacctactatatagacatcat

SEQ ID NO: 46773 - DNA, 25 bp, Homo sapien
gcccctgaggcgttcaggtcggtcc

SEQ ID NO: 46774 - DNA, 25 bp, Homo sapien
gcccctgaggcgatcaggtcggtcc

SEQ ID NO: 46775 - DNA, 25 bp, Homo sapien
aactcttctgaagatccggggtctc

SEQ ID NO: 46776 - DNA, 25 bp, Homo sapien
aactcttctgaacatccggggtctc

SEQ ID NO: 46777 - DNA, 25 bp, Homo sapien
aagggaatgaaggttcaggaactct

SEQ ID NO: 46778 - DNA, 25 bp, Homo sapien
aagggaatgaagcttcaggaactct

SEQ ID NO: 46779 - DNA, 25 bp, Homo sapien
cccgtagatgagacttccccagtgt

SEQ ID NO: 46780 - DNA, 25 bp, Homo sapien
cccgtagatgagtcttccccagtgt

SEQ ID NO: 46781 - DNA, 25 bp, Homo sapien
caactacaagattggacaaccgggt

SEQ ID NO: 46782 - DNA, 25 bp, Homo sapien
caactacaagataggacaaccgggt

SEQ ID NO: 46783 - DNA, 25 bp, Homo sapien
atatcttcaactaggaagacctaga

SEQ ID NO: 46784 - DNA, 25 bp, Homo sapien
atatcttcaacttggaagacctaga

SEQ ID NO: 46785 - DNA, 25 bp, Homo sapien
gatgtgtcatcttccctctgttgac

SEQ ID NO: 46786 - DNA, 25 bp, Homo sapien
gatgtgtcatctaccctctgttgac

SEQ ID NO: 46787 - DNA, 25 bp, Homo sapien
gtctcctcgatgtccttttactccg

SEQ ID NO: 46788 - DNA, 25 bp, Homo sapien
gtctcctcgatgaccttttactccg

SEQ ID NO: 46789 - DNA, 25 bp, Homo sapien
gtcgtccggtatctatcatcaacca

SEQ ID NO: 46790 - DNA, 25 bp, Homo sapien
gtcgtccggtatgtatcatcaacca

SEQ ID NO: 46791 - DNA, 25 bp, Homo sapien
taccacccgcgacgactcgcacact

SEQ ID NO: 46792 - DNA, 25 bp, Homo sapien
taccacccgcgaggactcgcacact

SEQ ID NO: 46793 - DNA, 25 bp, Homo sapien
accttgaacccctcgacgggcatat

SEQ ID NO: 46794 - DNA, 25 bp, Homo sapien
accttgaaccccacgacgggcatat

SEQ ID NO: 46795 - DNA, 25 bp, Homo sapien
acctttataaagtcccgagtgtttt

SEQ ID NO: 46796 - DNA, 25 bp, Homo sapien
acctttataaagacccgagtgtttt

SEQ ID NO: 46797 - DNA, 25 bp, Homo sapien
aaataaaggtccagtactcggtaat

SEQ ID NO: 46798 - DNA, 25 bp, Homo sapien
aaataaaggtcctgtactcggtaat

SEQ ID NO: 46799 - DNA, 25 bp, Homo sapien
acacaggtcggtcgtagtaagggat

SEQ ID NO: 46800 - DNA, 25 bp, Homo sapien
acacaggtcggtggtagtaagggat

SEQ ID NO: 46801 - DNA, 25 bp, Homo sapien
gtcccaggactccagactccgcggc

SEQ ID NO: 46802 - DNA, 25 bp, Homo sapien
gtcccaggactcgagactccgcggc

SEQ ID NO: 46803 - DNA, 25 bp, Homo sapien
tcttgaaagagattgcaaaacttct

SEQ ID NO: 46804 - DNA, 25 bp, Homo sapien
tcttgaaagagaatgcaaaacttct

SEQ ID NO: 46805 - DNA, 25 bp, Homo sapien
agcacgctcaacctatgtgcaggcc

SEQ ID NO: 46806 - DNA, 25 bp, Homo sapien
agcacgctcaacgtatgtgcaggcc

SEQ ID NO: 46807 - DNA, 25 bp, Homo sapien
tttcccgatatctatggcagcgatt

SEQ ID NO: 46808 - DNA, 25 bp, Homo sapien
tttcccgatatcaatggcagcgatt

SEQ ID NO: 46809 - DNA, 25 bp, Homo sapien
ccaaactcaatcgtctagagacgtc

SEQ ID NO: 46810 - DNA, 25 bp, Homo sapien
ccaaactcaatcctctagagacgtc

SEQ ID NO: 46811 - DNA, 25 bp, Homo sapien
ttgaggtaaaactcccgtcatatcc

SEQ ID NO: 46812 - DNA, 25 bp, Homo sapien
ttgaggtaaaacacccgtcatatcc

SEQ ID NO: 46813 - DNA, 25 bp, Homo sapien
gaccaggtgaatataaaccagttaa

SEQ ID NO: 46814 - DNA, 25 bp, Homo sapien
gaccaggtgaatttaaaccagttaa

SEQ ID NO: 46815 - DNA, 25 bp, Homo sapien
tccaggaaatcctccactatcagta

SEQ ID NO: 46816 - DNA, 25 bp, Homo sapien
tccaggaaatccaccactatcagta

SEQ ID NO: 46817 - DNA, 25 bp, Homo sapien
cgaagaagtttcaccatcggtgtag

SEQ ID NO: 46818 - DNA, 25 bp, Homo sapien
cgaagaagtttctccatcggtgtag

SEQ ID NO: 46819 - DNA, 25 bp, Homo sapien
gtagttaaagtacccggatgcatag

SEQ ID NO: 46820 - DNA, 25 bp, Homo sapien
gtagttaaagtagccggatgcatag

SEQ ID NO: 46821 - DNA, 25 bp, Homo sapien
gagtcatatgttgaatttcactact

SEQ ID NO: 46822 - DNA, 25 bp, Homo sapien
gagtcatatgttcaatttcactact

SEQ ID NO: 46823 - DNA, 25 bp, Homo sapien
actgtccgagtggacaaaaattctt

SEQ ID NO: 46824 - DNA, 25 bp, Homo sapien
actgtccgagtgcacaaaaattctt

SEQ ID NO: 46825 - DNA, 25 bp, Homo sapien
aatgttcactcatagaactggttta

SEQ ID NO: 46826 - DNA, 25 bp, Homo sapien
aatgttcactcaaagaactggttta

SEQ ID NO: 46827 - DNA, 25 bp, Homo sapien
ccctttagacaaaggacactttccg

SEQ ID NO: 46828 - DNA, 25 bp, Homo sapien
ccctttagacaatggacactttccg

SEQ ID NO: 46829 - DNA, 25 bp, Homo sapien
catgaacacctaggagacatctcac

SEQ ID NO: 46830 - DNA, 25 bp, Homo sapien
catgaacacctacgagacatctcac

SEQ ID NO: 46831 - DNA, 25 bp, Homo sapien
actcgagggagtcgaagcgttctac

SEQ ID NO: 46832 - DNA, 25 bp, Homo sapien
actcgagggagtggaagcgttctac

SEQ ID NO: 46833 - DNA, 25 bp, Homo sapien
ccgtgaaaaggcagagacgactcgc

SEQ ID NO: 46834 - DNA, 25 bp, Homo sapien
ccgtgaaaaggctgagacgactcgc

SEQ ID NO: 46835 - DNA, 25 bp, Homo sapien
accgtgaacgtgaggaccgcgtaga

SEQ ID NO: 46836 - DNA, 25 bp, Homo sapien
accgtgaacgtgtggaccgcgtaga

SEQ ID NO: 46837 - DNA, 25 bp, Homo sapien
tatgaggacgtggtggaacatcgtc

SEQ ID NO: 46838 - DNA, 25 bp, Homo sapien
tatgaggacgtgctggaacatcgtc

SEQ ID NO: 46839 - DNA, 25 bp, Homo sapien
cgaaaggacccagacgagatcgacg

SEQ ID NO: 46840 - DNA, 25 bp, Homo sapien
cgaaaggacccacacgagatcgacg

SEQ ID NO: 46841 - DNA, 25 bp, Homo sapien
gcgacgaggaccctccgaggagtca

SEQ ID NO: 46842 - DNA, 25 bp, Homo sapien
gcgacgaggaccgtccgaggagtca

SEQ ID NO: 46843 - DNA, 25 bp, Homo sapien
agaacgctactcgactccgtgttcc

SEQ ID NO: 46844 - DNA, 25 bp, Homo sapien
agaacgctactccactccgtgttcc

SEQ ID NO: 46845 - DNA, 25 bp, Homo sapien
ggaaagtccgtcaccaggtgtcgac

SEQ ID NO: 46846 - DNA, 25 bp, Homo sapien
ggaaagtccgtctccaggtgtcgac

SEQ ID NO: 46847 - DNA, 25 bp, Homo sapien
tgtaaagtcctgttcgatggtggtc

SEQ ID NO: 46848 - DNA, 25 bp, Homo sapien
tgtaaagtcctgatcgatggtggtc

SEQ ID NO: 46849 - DNA, 25 bp, Homo sapien
tgggacgtctgtgatcatgttaaac

SEQ ID NO: 46850 - DNA, 25 bp, Homo sapien
tgggacgtctgtcatcatgttaaac

SEQ ID NO: 46851 - DNA, 25 bp, Homo sapien
aatgacgtatgtgaccatcgttgaa

SEQ ID NO: 46852 - DNA, 25 bp, Homo sapien
aatgacgtatgtcaccatcgttgaa

SEQ ID NO: 46853 - DNA, 25 bp, Homo sapien
cgcttacggtactgacttcttaatt

SEQ ID NO: 46854 - DNA, 25 bp, Homo sapien
cgcttacggtacagacttcttaatt

SEQ ID NO: 46855 - DNA, 25 bp, Homo sapien
gtatgttatccacttctcacagagt

SEQ ID NO: 46856 - DNA, 25 bp, Homo sapien
gtatgttatccagttctcacagagt

SEQ ID NO: 46857 - DNA, 25 bp, Homo sapien
gtttaatttcagacgtaacaacctg

SEQ ID NO: 46858 - DNA, 25 bp, Homo sapien
gtttaatttcagtcgtaacaacctg

SEQ ID NO: 46859 - DNA, 25 bp, Homo sapien
tattaatgttcactcatagaactgg

SEQ ID NO: 46860 - DNA, 25 bp, Homo sapien
tattaatgttcagtcatagaactgg

SEQ ID NO: 46861 - DNA, 25 bp, Homo sapien
aattacatttgtgttaactcctgag

SEQ ID NO: 46862 - DNA, 25 bp, Homo sapien
aattacatttgtcttaactcctgag

SEQ ID NO: 46863 - DNA, 25 bp, Homo sapien
gacataagatgtctctgtcctcaaa

SEQ ID NO: 46864 - DNA, 25 bp, Homo sapien
gacataagatgtgtctgtcctcaaa

SEQ ID NO: 46865 - DNA, 25 bp, Homo sapien
gatcaattttacacctggtgtaaag

SEQ ID NO: 46866 - DNA, 25 bp, Homo sapien
gatcaattttactcctggtgtaaag

SEQ ID NO: 46867 - DNA, 25 bp, Homo sapien
ggtatacaaggacgtagtccactcc

SEQ ID NO: 46868 - DNA, 25 bp, Homo sapien
ggtatacaaggaggtagtccactcc

SEQ ID NO: 46869 - DNA, 25 bp, Homo sapien
gagggcggtctattaccagacgccg

SEQ ID NO: 46870 - DNA, 25 bp, Homo sapien
gagggcggtctaataccagacgccg

SEQ ID NO: 46871 - DNA, 25 bp, Homo sapien
acaagtccgtgcggtcttcctacgg

SEQ ID NO: 46872 - DNA, 25 bp, Homo sapien
acaagtccgtgccgtcttcctacgg

SEQ ID NO: 46873 - DNA, 25 bp, Homo sapien
acttaggttactcgttttattccgt

SEQ ID NO: 46874 - DNA, 25 bp, Homo sapien
acttaggttactggttttattccgt

SEQ ID NO: 46875 - DNA, 25 bp, Homo sapien
ctgtcagtcactgtagtttgttcac

SEQ ID NO: 46876 - DNA, 25 bp, Homo sapien
ctgtcagtcactctagtttgttcac

SEQ ID NO: 46877 - DNA, 25 bp, Homo sapien
tttgaaagtctcgtgtctagtaaca

SEQ ID NO: 46878 - DNA, 25 bp, Homo sapien
tttgaaagtctcctgtctagtaaca

SEQ ID NO: 46879 - DNA, 25 bp, Homo sapien
gtagttgttatacacctgtctgaaa

SEQ ID NO: 46880 - DNA, 25 bp, Homo sapien
gtagttgttatagacctgtctgaaa

SEQ ID NO: 46881 - DNA, 25 bp, Homo sapien
tttttagtctcctgaccccgtggac

SEQ ID NO: 46882 - DNA, 25 bp, Homo sapien
tttttagtctccagaccccgtggac

SEQ ID NO: 46883 - DNA, 25 bp, Homo sapien
ttttttacttgacacctgtgtcagt

SEQ ID NO: 46884 - DNA, 25 bp, Homo sapien
ttttttacttgagacctgtgtcagt

SEQ ID NO: 46885 - DNA, 25 bp, Homo sapien
tgtttatttcggtacggttagagta

SEQ ID NO: 46886 - DNA, 25 bp, Homo sapien
tgtttatttcggaacggttagagta

SEQ ID NO: 46887 - DNA, 25 bp, Homo sapien
tagtcctaatgactctgtgattgtt

SEQ ID NO: 46888 - DNA, 25 bp, Homo sapien
tagtcctaatgagtctgtgattgtt

SEQ ID NO: 46889 - DNA, 25 bp, Homo sapien
tcgacctgatctaggctgaactaga

SEQ ID NO: 46890 - DNA, 25 bp, Homo sapien
tcgacctgatcttggctgaactaga

SEQ ID NO: 46891 - DNA, 25 bp, Homo sapien
ctttgagtaggagacgtcctctctc

SEQ ID NO: 46892 - DNA, 25 bp, Homo sapien
ctttgagtaggacacgtcctctctc

SEQ ID NO: 46893 - DNA, 25 bp, Homo sapien
ccgttatgaatgtgcacgtttctct

SEQ ID NO: 46894 - DNA, 25 bp, Homo sapien
ccgttatgaatgagcacgtttctct

SEQ ID NO: 46895 - DNA, 25 bp, Homo sapien
gaatttactgtagtgagttcactgt

SEQ ID NO: 46896 - DNA, 25 bp, Homo sapien
gaatttactgtactgagttcactgt

SEQ ID NO: 46897 - DNA, 25 bp, Homo sapien
ggagtatttcgttacctcatccacc

SEQ ID NO: 46898 - DNA, 25 bp, Homo sapien
ggagtatttcgtaacctcatccacc

SEQ ID NO: 46899 - DNA, 25 bp, Homo sapien
ggagtgttccggtctcttcgctctc

SEQ ID NO: 46900 - DNA, 25 bp, Homo sapien
ggagtgttccggactcttcgctctc

SEQ ID NO: 46901 - DNA, 25 bp, Homo sapien
tgtcttgtctcaggtattcctctca

SEQ ID NO: 46902 - DNA, 25 bp, Homo sapien
tgtcttgtctcacgtattcctctca

SEQ ID NO: 46903 - DNA, 25 bp, Homo sapien
tctccgcggcgtcgaggtccgtcaa

SEQ ID NO: 46904 - DNA, 25 bp, Homo sapien
tctccgcggcgtggaggtccgtcaa

SEQ ID NO: 46905 - DNA, 25 bp, Homo sapien
ctgggtacggtgaatgtactcaagt

SEQ ID NO: 46906 - DNA, 25 bp, Homo sapien
ctgggtacggtgtatgtactcaagt

SEQ ID NO: 46907 - DNA, 25 bp, Homo sapien
cggagtccggtggacacacccacgt

SEQ ID NO: 46908 - DNA, 25 bp, Homo sapien
cggagtccggtgcacacacccacgt

SEQ ID NO: 46909 - DNA, 25 bp, Homo sapien
gctcagtctcgaaaccgatccttac

SEQ ID NO: 46910 - DNA, 25 bp, Homo sapien
gctcagtctcgataccgatccttac

SEQ ID NO: 46911 - DNA, 25 bp, Homo sapien
ttttttagatgaactagtcctcgtg

SEQ ID NO: 46912 - DNA, 25 bp, Homo sapien
ttttttagatgatctagtcctcgtg

SEQ ID NO: 46913 - DNA, 25 bp, Homo sapien
gtcctttgataaatcttcagtcgtt

SEQ ID NO: 46914 - DNA, 25 bp, Homo sapien
gtcctttgataattcttcagtcgtt

SEQ ID NO: 46915 - DNA, 25 bp, Homo sapien
tttatcgaagatagtcgacagtcat

SEQ ID NO: 46916 - DNA, 25 bp, Homo sapien
tttatcgaagattgtcgacagtcat

SEQ ID NO: 46917 - DNA, 25 bp, Homo sapien
ctctatatgttaggtcggtgggaca

SEQ ID NO: 46918 - DNA, 25 bp, Homo sapien
ctctatatgttacgtcggtgggaca

SEQ ID NO: 46919 - DNA, 25 bp, Homo sapien
attgttctgtattctaagggtcttc

SEQ ID NO: 46920 - DNA, 25 bp, Homo sapien
attgttctgtatactaagggtcttc

SEQ ID NO: 46921 - DNA, 25 bp, Homo sapien
aatttttgaccttcagagagtttac

SEQ ID NO: 46922 - DNA, 25 bp, Homo sapien
aatttttgacctacagagagtttac

SEQ ID NO: 46923 - DNA, 25 bp, Homo sapien
ttactctgaccgtttcttgtttacg

SEQ ID NO: 46924 - DNA, 25 bp, Homo sapien
ttactctgaccgattcttgtttacg

SEQ ID NO: 46925 - DNA, 25 bp, Homo sapien
tagacacgacctaatacatggttta

SEQ ID NO: 46926 - DNA, 25 bp, Homo sapien
tagacacgaccttatacatggttta

SEQ ID NO: 46927 - DNA, 25 bp, Homo sapien
atacgtaaacaccgtaaatgtttta

SEQ ID NO: 46928 - DNA, 25 bp, Homo sapien
atacgtaaacacggtaaatgtttta

SEQ ID NO: 46929 - DNA, 25 bp, Homo sapien
atgactgacatgttactttcgtttt

SEQ ID NO: 46930 - DNA, 25 bp, Homo sapien
atgactgacatgatactttcgtttt

SEQ ID NO: 46931 - DNA, 25 bp, Homo sapien
cgtccgagtcgtgatgtttgagttt

SEQ ID NO: 46932 - DNA, 25 bp, Homo sapien
cgtccgagtcgtcatgtttgagttt

SEQ ID NO: 46933 - DNA, 25 bp, Homo sapien
aagactcgacggtttttctgtattc

SEQ ID NO: 46934 - DNA, 25 bp, Homo sapien
aagactcgacggattttctgtattc

SEQ ID NO: 46935 - DNA, 25 bp, Homo sapien
aagaagtcgaggttttctcgtttcg

SEQ ID NO: 46936 - DNA, 25 bp, Homo sapien
aagaagtcgaggatttctcgtttcg

SEQ ID NO: 46937 - DNA, 25 bp, Homo sapien
actgtaaaaacgttttctgtcctgt

SEQ ID NO: 46938 - DNA, 25 bp, Homo sapien
actgtaaaaacgatttctgtcctgt

SEQ ID NO: 46939 - DNA, 25 bp, Homo sapien
acttaaaagacattcgtaccgtttc

SEQ ID NO: 46940 - DNA, 25 bp, Homo sapien
acttaaaagacaatcgtaccgtttc

SEQ ID NO: 46941 - DNA, 25 bp, Homo sapien
ctatgtgaagaattacccgttctct

SEQ ID NO: 46942 - DNA, 25 bp, Homo sapien
ctatgtgaagaaatacccgttctct

SEQ ID NO: 46943 - DNA, 25 bp, Homo sapien
gttatgagaacacaagtctcttatt

SEQ ID NO: 46944 - DNA, 25 bp, Homo sapien
gttatgagaacagaagtctcttatt

SEQ ID NO: 46945 - DNA, 25 bp, Homo sapien
cgtgatgttccaagacatttcttat

SEQ ID NO: 46946 - DNA, 25 bp, Homo sapien
cgtgatgttccatgacatttcttat

SEQ ID NO: 46947 - DNA, 25 bp, Homo sapien
cttttaaagatcgtgtttacgtgac

SEQ ID NO: 46948 - DNA, 25 bp, Homo sapien
cttttaaagatcctgtttacgtgac

SEQ ID NO: 46949 - DNA, 25 bp, Homo sapien
tcgttgctcaggtccggtctttcgg

SEQ ID NO: 46950 - DNA, 25 bp, Homo sapien
tcgttgctcaggaccggtctttcgg

SEQ ID NO: 46951 - DNA, 25 bp, Homo sapien
ctaccgctgtaaaaggagatctccc

SEQ ID NO: 46952 - DNA, 25 bp, Homo sapien
ctaccgctgtaataggagatctccc

SEQ ID NO: 46953 - DNA, 25 bp, Homo sapien
gactacttgagaacctgggacacct

SEQ ID NO: 46954 - DNA, 25 bp, Homo sapien
gactacttgagatcctgggacacct

SEQ ID NO: 46955 - DNA, 25 bp, Homo sapien
tggacatgaagactgtaggtcgtcc

SEQ ID NO: 46956 - DNA, 25 bp, Homo sapien
tggacatgaagagtgtaggtcgtcc

SEQ ID NO: 46957 - DNA, 25 bp, Homo sapien
acgtgacgggaccaaaggtcgttcc

SEQ ID NO: 46958 - DNA, 25 bp, Homo sapien
acgtgacgggacgaaaggtcgttcc

SEQ ID NO: 46959 - DNA, 25 bp, Homo sapien
tgaggagctaccagtgtgtttcgac

SEQ ID NO: 46960 - DNA, 25 bp, Homo sapien
tgaggagctacctgtgtgtttcgac

SEQ ID NO: 46961 - DNA, 25 bp, Homo sapien
acgttttctcggtaggtttatcgac

SEQ ID NO: 46962 - DNA, 25 bp, Homo sapien
acgttttctcggaaggtttatcgac

SEQ ID NO: 46963 - DNA, 25 bp, Homo sapien
gtctcagtcaccacagtcttataga

SEQ ID NO: 46964 - DNA, 25 bp, Homo sapien
gtctcagtcacctcagtcttataga

SEQ ID NO: 46965 - DNA, 25 bp, Homo sapien
ccctgagtgtcctcattcttcgagt

SEQ ID NO: 46966 - DNA, 25 bp, Homo sapien
ccctgagtgtccacattcttcgagt

SEQ ID NO: 46967 - DNA, 25 bp, Homo sapien
attcaagttctcctcctttctcttt

SEQ ID NO: 46968 - DNA, 25 bp, Homo sapien
attcaagttctcgtcctttctcttt

SEQ ID NO: 46969 - DNA, 25 bp, Homo sapien
taaaggtatctctctcttttgtcag

SEQ ID NO: 46970 - DNA, 25 bp, Homo sapien
taaaggtatctcactcttttgtcag

SEQ ID NO: 46971 - DNA, 25 bp, Homo sapien
gacttcatatcttctcgtagtaccg

SEQ ID NO: 46972 - DNA, 25 bp, Homo sapien
gacttcatatctactcgtagtaccg

SEQ ID NO: 46973 - DNA, 25 bp, Homo sapien
gactacagtttattgtaccttcgtg

SEQ ID NO: 46974 - DNA, 25 bp, Homo sapien
gactacagtttaatgtaccttcgtg

SEQ ID NO: 46975 - DNA, 25 bp, Homo sapien
cgaaaatacgttcagagaacttctt

SEQ ID NO: 46976 - DNA, 25 bp, Homo sapien
cgaaaatacgttgagagaacttctt

SEQ ID NO: 46977 - DNA, 25 bp, Homo sapien
cgagtaaagtactcaccctctgtca

SEQ ID NO: 46978 - DNA, 25 bp, Homo sapien
cgagtaaagtacacaccctctgtca

SEQ ID NO: 46979 - DNA, 25 bp, Homo sapien
ggtctctcccgtctgtcgtcaggag

SEQ ID NO: 46980 - DNA, 25 bp, Homo sapien
ggtctctcccgtgtgtcgtcaggag

SEQ ID NO: 46981 - DNA, 25 bp, Homo sapien
gctgaagtccgaacgtctcggggac

SEQ ID NO: 46982 - DNA, 25 bp, Homo sapien
gctgaagtccgatcgtctcggggac

SEQ ID NO: 46983 - DNA, 25 bp, Homo sapien
cctgtaacgacctttctcgaaggat

SEQ ID NO: 46984 - DNA, 25 bp, Homo sapien
cctgtaacgaccattctcgaaggat

SEQ ID NO: 46985 - DNA, 25 bp, Homo sapien
aatgtaaggtaacattcgtccagga

SEQ ID NO: 46986 - DNA, 25 bp, Homo sapien
aatgtaaggtaagattcgtccagga

SEQ ID NO: 46987 - DNA, 25 bp, Homo sapien
caacgtcgaacaggtggtccaggac

SEQ ID NO: 46988 - DNA, 25 bp, Homo sapien
caacgtcgaacacgtggtccaggac

SEQ ID NO: 46989 - DNA, 25 bp, Homo sapien
cagaaagaccgaaaggacctactcc

SEQ ID NO: 46990 - DNA, 25 bp, Homo sapien
cagaaagaccgataggacctactcc

SEQ ID NO: 46991 - DNA, 25 bp, Homo sapien
gggcgaacggtgtcgatctcgtcct

SEQ ID NO: 46992 - DNA, 25 bp, Homo sapien
gggcgaacggtgacgatctcgtcct

SEQ ID NO: 46993 - DNA, 25 bp, Homo sapien
aagagaacggtggagacaccagact

SEQ ID NO: 46994 - DNA, 25 bp, Homo sapien
aagagaacggtgcagacaccagact

SEQ ID NO: 46995 - DNA, 25 bp, Homo sapien
gacgtaactaatatcgacacagacg

SEQ ID NO: 46996 - DNA, 25 bp, Homo sapien
gacgtaactaatttcgacacagacg

SEQ ID NO: 46997 - DNA, 25 bp, Homo sapien
tctaataaaacgtttgacgtcaggt

SEQ ID NO: 46998 - DNA, 25 bp, Homo sapien
tctaataaaacgattgacgtcaggt

SEQ ID NO: 46999 - DNA, 25 bp, Homo sapien
cttgatacaactgttgtcgtggtgt

SEQ ID NO: 47000 - DNA, 25 bp, Homo sapien
cttgatacaactcttgtcgtggtgt

SEQ ID NO: 47001 - DNA, 25 bp, Homo sapien
ctacttgaagaatcctattttgcgt

SEQ ID NO: 47002 - DNA, 25 bp, Homo sapien
ctacttgaagaaacctattttgcgt

SEQ ID NO: 47003 - DNA, 25 bp, Homo sapien
tcggtgtgagacgatagaggttccc

SEQ ID NO: 47004 - DNA, 25 bp, Homo sapien
tcggtgtgagaccatagaggttccc

SEQ ID NO: 47005 - DNA, 25 bp, Homo sapien
tctcgaaacgcctcgatgtcttcct

SEQ ID NO: 47006 - DNA, 25 bp, Homo sapien
tctcgaaacgccacgatgtcttcct

SEQ ID NO: 47007 - DNA, 25 bp, Homo sapien
ttcaacggctcgaccgtctagtgtt

SEQ ID NO: 47008 - DNA, 25 bp, Homo sapien
ttcaacggctcgtccgtctagtgtt

SEQ ID NO: 47009 - DNA, 25 bp, Homo sapien
cctacctgagcttcgcgtgtagtgc

SEQ ID NO: 47010 - DNA, 25 bp, Homo sapien
cctacctgagctacgcgtgtagtgc

SEQ ID NO: 47011 - DNA, 25 bp, Homo sapien
ctgtcaccgggacacggacgtggac

SEQ ID NO: 47012 - DNA, 25 bp, Homo sapien
ctgtcaccgggagacggacgtggac

SEQ ID NO: 47013 - DNA, 25 bp, Homo sapien
tacctcagtgatgattcgtgtcact

SEQ ID NO: 47014 - DNA, 25 bp, Homo sapien
tacctcagtgatcattcgtgtcact

SEQ ID NO: 47015 - DNA, 25 bp, Homo sapien
ctttagagtccttctttaacgtcgt

SEQ ID NO: 47016 - DNA, 25 bp, Homo sapien
ctttagagtcctactttaacgtcgt

SEQ ID NO: 47017 - DNA, 25 bp, Homo sapien
ataacgatcacgtatattacagtgt

SEQ ID NO: 47018 - DNA, 25 bp, Homo sapien
ataacgatcacgaatattacagtgt

SEQ ID NO: 47019 - DNA, 25 bp, Homo sapien
cacatagagcgtacataattacttg

SEQ ID NO: 47020 - DNA, 25 bp, Homo sapien
cacatagagcgttcataattacttg

SEQ ID NO: 47021 - DNA, 25 bp, Homo sapien
aataacaaccgtgtatccgggactt

SEQ ID NO: 47022 - DNA, 25 bp, Homo sapien
aataacaaccgtctatccgggactt

SEQ ID NO: 47023 - DNA, 25 bp, Homo sapien
agaacagtcctcctgtccgggactg

SEQ ID NO: 47024 - DNA, 25 bp, Homo sapien
agaacagtcctcgtgtccgggactg

SEQ ID NO: 47025 - DNA, 25 bp, Homo sapien
acaccgtctcagttccgaggacacg

SEQ ID NO: 47026 - DNA, 25 bp, Homo sapien
acaccgtctcagatccgaggacacg

SEQ ID NO: 47027 - DNA, 25 bp, Homo sapien
tccacacgttaggaaccgaccgaac

SEQ ID NO: 47028 - DNA, 25 bp, Homo sapien
tccacacgttagcaaccgaccgaac

SEQ ID NO: 47029 - DNA, 25 bp, Homo sapien
ggtgtggttagagtctccacatact

SEQ ID NO: 47030 - DNA, 25 bp, Homo sapien
ggtgtggttagactctccacatact

SEQ ID NO: 47031 - DNA, 25 bp, Homo sapien
gattgtgtaccatgtaccactacca

SEQ ID NO: 47032 - DNA, 25 bp, Homo sapien
gattgtgtaccaagtaccactacca

SEQ ID NO: 47033 - DNA, 25 bp, Homo sapien
tgtagcccctgaactctccaggact

SEQ ID NO: 47034 - DNA, 25 bp, Homo sapien
tgtagcccctgatctctccaggact

SEQ ID NO: 47035 - DNA, 25 bp, Homo sapien
agtgaccagtcgaacatctcgtgga

SEQ ID NO: 47036 - DNA, 25 bp, Homo sapien
agtgaccagtcgtacatctcgtgga

SEQ ID NO: 47037 - DNA, 25 bp, Homo sapien
caatattacgtcgtaaattctcggg

SEQ ID NO: 47038 - DNA, 25 bp, Homo sapien
caatattacgtcctaaattctcggg

SEQ ID NO: 47039 - DNA, 25 bp, Homo sapien
ttcctctgccatagtctacgtcttg

SEQ ID NO: 47040 - DNA, 25 bp, Homo sapien
ttcctctgccattgtctacgtcttg

SEQ ID NO: 47041 - DNA, 25 bp, Homo sapien
ctctgtcgccgattcacagttctcg

SEQ ID NO: 47042 - DNA, 25 bp, Homo sapien
ctctgtcgccgaatcacagttctcg

SEQ ID NO: 47043 - DNA, 25 bp, Homo sapien
aacgtacaccgagacccgacgtctg

SEQ ID NO: 47044 - DNA, 25 bp, Homo sapien
aacgtacaccgacacccgacgtctg

SEQ ID NO: 47045 - DNA, 25 bp, Homo sapien
atacagtgtcgtttgtccaccgtta

SEQ ID NO: 47046 - DNA, 25 bp, Homo sapien
atacagtgtcgtatgtccaccgtta

SEQ ID NO: 47047 - DNA, 25 bp, Homo sapien
agagacaggtcgacgcctccgggac

SEQ ID NO: 47048 - DNA, 25 bp, Homo sapien
agagacaggtcgtcgcctccgggac

SEQ ID NO: 47049 - DNA, 25 bp, Homo sapien
tatacctgtaggtgcccgtgtcgga

SEQ ID NO: 47050 - DNA, 25 bp, Homo sapien
tatacctgtaggagcccgtgtcgga

SEQ ID NO: 47051 - DNA, 25 bp, Homo sapien
gaacgcttcgcgaccccggtagaac

SEQ ID NO: 47052 - DNA, 25 bp, Homo sapien
gaacgcttcgcgtccccggtagaac

SEQ ID NO: 47053 - DNA, 25 bp, Homo sapien
tctggaccttgctttcccgtgaaac

SEQ ID NO: 47054 - DNA, 25 bp, Homo sapien
tctggaccttgcattcccgtgaaac

SEQ ID NO: 47055 - DNA, 25 bp, Homo sapien
aacgactggaactccaccggacact

SEQ ID NO: 47056 - DNA, 25 bp, Homo sapien
aacgactggaacaccaccggacact

SEQ ID NO: 47057 - DNA, 25 bp, Homo sapien
aacttgtgaccgtacgtgtggacac

SEQ ID NO: 47058 - DNA, 25 bp, Homo sapien
aacttgtgaccgaacgtgtggacac

SEQ ID NO: 47059 - DNA, 25 bp, Homo sapien
caaaagttagggacgtttacatcgt

SEQ ID NO: 47060 - DNA, 25 bp, Homo sapien
caaaagttagggtcgtttacatcgt

SEQ ID NO: 47061 - DNA, 25 bp, Homo sapien
cacaagcctcggtagttcaaagtcg

SEQ ID NO: 47062 - DNA, 25 bp, Homo sapien
cacaagcctcggaagttcaaagtcg

SEQ ID NO: 47063 - DNA, 25 bp, Homo sapien
gaaagcctccgtaccgacagaagac

SEQ ID NO: 47064 - DNA, 25 bp, Homo sapien
gaaagcctccgttccgacagaagac

SEQ ID NO: 47065 - DNA, 25 bp, Homo sapien
agaacctacgtcacttgagacaagg

SEQ ID NO: 47066 - DNA, 25 bp, Homo sapien
agaacctacgtctcttgagacaagg

SEQ ID NO: 47067 - DNA, 25 bp, Homo sapien
gaggagaaagaaccttcggaccagg

SEQ ID NO: 47068 - DNA, 25 bp, Homo sapien
gaggagaaagaagcttcggaccagg

SEQ ID NO: 47069 - DNA, 25 bp, Homo sapien
ggacctcgacgacttcgttccacgg

SEQ ID NO: 47070 - DNA, 25 bp, Homo sapien
ggacctcgacgagttcgttccacgg

SEQ ID NO: 47071 - DNA, 25 bp, Homo sapien
tcttcgagtcaggaccgggtacgtt

SEQ ID NO: 47072 - DNA, 25 bp, Homo sapien
tcttcgagtcagcaccgggtacgtt

SEQ ID NO: 47073 - DNA, 25 bp, Homo sapien
taagttcgagggaactactgttgcg

SEQ ID NO: 47074 - DNA, 25 bp, Homo sapien
taagttcgagggtactactgttgcg

SEQ ID NO: 47075 - DNA, 25 bp, Homo sapien
agacagtatcaattgtcaattgtcg

SEQ ID NO: 47076 - DNA, 25 bp, Homo sapien
agacagtatcaaatgtcaattgtcg

SEQ ID NO: 47077 - DNA, 25 bp, Homo sapien
gactgttccactcgacaaggtgtgt

SEQ ID NO: 47078 - DNA, 25 bp, Homo sapien
gactgttccactggacaaggtgtgt

SEQ ID NO: 47079 - DNA, 25 bp, Homo sapien
ccgtttttaatgtacgttgttgact

SEQ ID NO: 47080 - DNA, 25 bp, Homo sapien
ccgtttttaatgaacgttgttgact

SEQ ID NO: 47081 - DNA, 25 bp, Homo sapien
gacgattcactaagttttctgacca

SEQ ID NO: 47082 - DNA, 25 bp, Homo sapien
gacgattcactatgttttctgacca

SEQ ID NO: 47083 - DNA, 25 bp, Homo sapien
tgtaaggtacccatttcttgttcag

SEQ ID NO: 47084 - DNA, 25 bp, Homo sapien
tgtaaggtacccttttcttgttcag

SEQ ID NO: 47085 - DNA, 25 bp, Homo sapien
acaataccactttcacaagtgacgg

SEQ ID NO: 47086 - DNA, 25 bp, Homo sapien
acaataccacttacacaagtgacgg

SEQ ID NO: 47087 - DNA, 25 bp, Homo sapien
tactaagtcacaaacaagtctcgag

SEQ ID NO: 47088 - DNA, 25 bp, Homo sapien
tactaagtcacatacaagtctcgag

SEQ ID NO: 47089 - DNA, 25 bp, Homo sapien
ctctaacatctaaccgaagaccgag

SEQ ID NO: 47090 - DNA, 25 bp, Homo sapien
ctctaacatctatccgaagaccgag

SEQ ID NO: 47091 - DNA, 25 bp, Homo sapien
aaaaccggctaatctaaggactagt

SEQ ID NO: 47092 - DNA, 25 bp, Homo sapien
aaaaccggctaaactaaggactagt

SEQ ID NO: 47093 - DNA, 25 bp, Homo sapien
aaaacaccgttcatgaggtgtcagt

SEQ ID NO: 47094 - DNA, 25 bp, Homo sapien
aaaacaccgttcttgaggtgtcagt

SEQ ID NO: 47095 - DNA, 25 bp, Homo sapien
ccgccggtgctctgagtctgtctgt

SEQ ID NO: 47096 - DNA, 25 bp, Homo sapien
ccgccggtgctcagagtctgtctgt

SEQ ID NO: 47097 - DNA, 25 bp, Homo sapien
tctgtcggtcgtactggtgttgtaa

SEQ ID NO: 47098 - DNA, 25 bp, Homo sapien
tctgtcggtcgttctggtgttgtaa

SEQ ID NO: 47099 - DNA, 25 bp, Homo sapien
tctacggacggcttagagtggtaaa

SEQ ID NO: 47100 - DNA, 25 bp, Homo sapien
tctacggacggcatagagtggtaaa

SEQ ID NO: 47101 - DNA, 25 bp, Homo sapien
ctgttaggtacagaaggttcttcga

SEQ ID NO: 47102 - DNA, 25 bp, Homo sapien
ctgttaggtacacaaggttcttcga

SEQ ID NO: 47103 - DNA, 25 bp, Homo sapien
ttaagaactctcacgactcattgag

SEQ ID NO: 47104 - DNA, 25 bp, Homo sapien
ttaagaactctctcgactcattgag

SEQ ID NO: 47105 - DNA, 25 bp, Homo sapien
ttaagaatcagttttcaactgtacg

SEQ ID NO: 47106 - DNA, 25 bp, Homo sapien
ttaagaatcagtattcaactgtacg

SEQ ID NO: 47107 - DNA, 25 bp, Homo sapien
ccaaactggagttttgatcagtact

SEQ ID NO: 47108 - DNA, 25 bp, Homo sapien
ccaaactggagtattgatcagtact

SEQ ID NO: 47109 - DNA, 25 bp, Homo sapien
tagagttcttttacgactgattacc

SEQ ID NO: 47110 - DNA, 25 bp, Homo sapien
tagagttctttttcgactgattacc

SEQ ID NO: 47111 - DNA, 25 bp, Homo sapien
tatggttagactttcgatagtttcc

SEQ ID NO: 47112 - DNA, 25 bp, Homo sapien
tatggttagactatcgatagtttcc

SEQ ID NO: 47113 - DNA, 25 bp, Homo sapien
caatgtgtaatagaagacatcccta

SEQ ID NO: 47114 - DNA, 25 bp, Homo sapien
caatgtgtaatacaagacatcccta

SEQ ID NO: 47115 - DNA, 25 bp, Homo sapien
caaagaaatgccatacaccgaagtt

SEQ ID NO: 47116 - DNA, 25 bp, Homo sapien
caaagaaatgccttacaccgaagtt

SEQ ID NO: 47117 - DNA, 25 bp, Homo sapien
caagaacgggcatctgcaccacgac

SEQ ID NO: 47118 - DNA, 25 bp, Homo sapien
caagaacgggcaactgcaccacgac

SEQ ID NO: 47119 - DNA, 25 bp, Homo sapien
accaaaatgagaaagtggtccctac

SEQ ID NO: 47120 - DNA, 25 bp, Homo sapien
accaaaatgagatagtggtccctac

SEQ ID NO: 47121 - DNA, 25 bp, Homo sapien
aaacaaagtgacagttgaggctact

SEQ ID NO: 47122 - DNA, 25 bp, Homo sapien
aaacaaagtgactgttgaggctact

SEQ ID NO: 47123 - DNA, 25 bp, Homo sapien
gagtacgtcaaggataccattattc

SEQ ID NO: 47124 - DNA, 25 bp, Homo sapien
gagtacgtcaagcataccattattc

SEQ ID NO: 47125 - DNA, 25 bp, Homo sapien
gtgagcccaagaagccacactcctg

SEQ ID NO: 47126 - DNA, 25 bp, Homo sapien
gtgagcccaagatgccacactcctg

SEQ ID NO: 47127 - DNA, 25 bp, Homo sapien
tgtcctacggcactggtgtccccga

SEQ ID NO: 47128 - DNA, 25 bp, Homo sapien
tgtcctacggcagtggtgtccccga

SEQ ID NO: 47129 - DNA, 25 bp, Homo sapien
agtcacaccggagacaggtccacca

SEQ ID NO: 47130 - DNA, 25 bp, Homo sapien
agtcacaccggacacaggtccacca

SEQ ID NO: 47131 - DNA, 25 bp, Homo sapien
cagtacttccggacagcggcccgga

SEQ ID NO: 47132 - DNA, 25 bp, Homo sapien
cagtacttccggtcagcggcccgga

SEQ ID NO: 47133 - DNA, 25 bp, Homo sapien
attaggaagatcaacgaatccgaag

SEQ ID NO: 47134 - DNA, 25 bp, Homo sapien
attaggaagatctacgaatccgaag

SEQ ID NO: 47135 - DNA, 25 bp, Homo sapien
aacaagagggtcatagacttctaaa

SEQ ID NO: 47136 - DNA, 25 bp, Homo sapien
aacaagagggtcttagacttctaaa

SEQ ID NO: 47137 - DNA, 25 bp, Homo sapien
actaagagcccgtggcgtcctgctc

SEQ ID NO: 47138 - DNA, 25 bp, Homo sapien
actaagagcccgaggcgtcctgctc

SEQ ID NO: 47139 - DNA, 25 bp, Homo sapien
gaaggagtaacagaggattacctct

SEQ ID NO: 47140 - DNA, 25 bp, Homo sapien
gaaggagtaacacaggattacctct

SEQ ID NO: 47141 - DNA, 25 bp, Homo sapien
gacggagtaaacgaccctttttagt

SEQ ID NO: 47142 - DNA, 25 bp, Homo sapien
gacggagtaaaccaccctttttagt

SEQ ID NO: 47143 - DNA, 25 bp, Homo sapien
gatcgaaaaacgaccgttcttatta

SEQ ID NO: 47144 - DNA, 25 bp, Homo sapien
gatcgaaaaacgtccgttcttatta

SEQ ID NO: 47145 - DNA, 25 bp, Homo sapien
cggttacaattgtattatgtctttc

SEQ ID NO: 47146 - DNA, 25 bp, Homo sapien
cggttacaattgaattatgtctttc

SEQ ID NO: 47147 - DNA, 25 bp, Homo sapien
agagtgatttcaccgaaattctttc

SEQ ID NO: 47148 - DNA, 25 bp, Homo sapien
agagtgatttcagcgaaattctttc

SEQ ID NO: 47149 - DNA, 25 bp, Homo sapien
acacggacgacgaggagttacttta

SEQ ID NO: 47150 - DNA, 25 bp, Homo sapien
acacggacgacgtggagttacttta

SEQ ID NO: 47151 - DNA, 25 bp, Homo sapien
agtcagaggagaaggttgtcccaac

SEQ ID NO: 47152 - DNA, 25 bp, Homo sapien
agtcagaggagatggttgtcccaac

SEQ ID NO: 47153 - DNA, 25 bp, Homo sapien
acgtcaagacactcggtttccagaa

SEQ ID NO: 47154 - DNA, 25 bp, Homo sapien
acgtcaagacacacggtttccagaa

SEQ ID NO: 47155 - DNA, 25 bp, Homo sapien
cgagaagaccaaagattccagagtc

SEQ ID NO: 47156 - DNA, 25 bp, Homo sapien
cgagaagaccaatgattccagagtc

SEQ ID NO: 47157 - DNA, 25 bp, Homo sapien
tggtcaaacattcgtttacagagat

SEQ ID NO: 47158 - DNA, 25 bp, Homo sapien
tggtcaaacattggtttacagagat

SEQ ID NO: 47159 - DNA, 25 bp, Homo sapien
tttatgaaattgtgtcgacgatcac

SEQ ID NO: 47160 - DNA, 25 bp, Homo sapien
tttatgaaattgagtcgacgatcac

SEQ ID NO: 47161 - DNA, 25 bp, Homo sapien
gttataaaagtctttgtgtacaccc

SEQ ID NO: 47162 - DNA, 25 bp, Homo sapien
gttataaaagtcattgtgtacaccc

SEQ ID NO: 47163 - DNA, 25 bp, Homo sapien
ggatatagaaatctgtggtaccaac

SEQ ID NO: 47164 - DNA, 25 bp, Homo sapien
ggatatagaaatgtgtggtaccaac

SEQ ID NO: 47165 - DNA, 25 bp, Homo sapien
tcaggacgcgctagagtgcctgatc

SEQ ID NO: 47166 - DNA, 25 bp, Homo sapien
tcaggacgcgcttgagtgcctgatc

SEQ ID NO: 47167 - DNA, 25 bp, Homo sapien
aggacgaggctcaggactcgacgcc

SEQ ID NO: 47168 - DNA, 25 bp, Homo sapien
aggacgaggctctggactcgacgcc

SEQ ID NO: 47169 - DNA, 25 bp, Homo sapien
agtctcttgatcttgcggtactctc

SEQ ID NO: 47170 - DNA, 25 bp, Homo sapien
agtctcttgatcatgcggtactctc

SEQ ID NO: 47171 - DNA, 25 bp, Homo sapien
tatttaccacttgacgctgggcttc

SEQ ID NO: 47172 - DNA, 25 bp, Homo sapien
tatttaccacttcacgctgggcttc

SEQ ID NO: 47173 - DNA, 25 bp, Homo sapien
attgtcaccacactgtaggtctctc

SEQ ID NO: 47174 - DNA, 25 bp, Homo sapien
attgtcaccacagtgtaggtctctc

SEQ ID NO: 47175 - DNA, 25 bp, Homo sapien
attgtgactcggaagatgtatcctt

SEQ ID NO: 47176 - DNA, 25 bp, Homo sapien
attgtgactcggtagatgtatcctt

SEQ ID NO: 47177 - DNA, 25 bp, Homo sapien
aatgtattacatagagggtacctct

SEQ ID NO: 47178 - DNA, 25 bp, Homo sapien
aatgtattacattgagggtacctct

SEQ ID NO: 47179 - DNA, 25 bp, Homo sapien
catcatgacgacctcgtgaagctcc

SEQ ID NO: 47180 - DNA, 25 bp, Homo sapien
catcatgacgacgtcgtgaagctcc

SEQ ID NO: 47181 - DNA, 25 bp, Homo sapien
ggagtcctgagtcctttgtttgtgt

SEQ ID NO: 47182 - DNA, 25 bp, Homo sapien
ggagtcctgagtgctttgtttgtgt

SEQ ID NO: 47183 - DNA, 25 bp, Homo sapien
tgacgcttacggtactgacttctta

SEQ ID NO: 47184 - DNA, 25 bp, Homo sapien
tgacgcttacggaactgacttctta

SEQ ID NO: 47185 - DNA, 25 bp, Homo sapien
gacgtctcgtacacctacagtctta

SEQ ID NO: 47186 - DNA, 25 bp, Homo sapien
gacgtctcgtactcctacagtctta

SEQ ID NO: 47187 - DNA, 25 bp, Homo sapien
tacgccctagacgtccgtagaggcc

SEQ ID NO: 47188 - DNA, 25 bp, Homo sapien
tacgccctagacctccgtagaggcc

SEQ ID NO: 47189 - DNA, 25 bp, Homo sapien
ccgtccgtccggcttccggaggtcc

SEQ ID NO: 47190 - DNA, 25 bp, Homo sapien
ccgtccgtccgggttccggaggtcc

SEQ ID NO: 47191 - DNA, 25 bp, Homo sapien
ttttcggttcggattatggacccct

SEQ ID NO: 47192 - DNA, 25 bp, Homo sapien
ttttcggttcggtttatggacccct

SEQ ID NO: 47193 - DNA, 25 bp, Homo sapien
gttaagtttacagtggggtacctcc

SEQ ID NO: 47194 - DNA, 25 bp, Homo sapien
gttaagtttacactggggtacctcc

SEQ ID NO: 47195 - DNA, 25 bp, Homo sapien
tttggacacattaccggtcgccact

SEQ ID NO: 47196 - DNA, 25 bp, Homo sapien
tttggacacatttccggtcgccact

SEQ ID NO: 47197 - DNA, 25 bp, Homo sapien
cgtgcttccagtcgtctgcggtcca

SEQ ID NO: 47198 - DNA, 25 bp, Homo sapien
cgtgcttccagtggtctgcggtcca

SEQ ID NO: 47199 - DNA, 25 bp, Homo sapien
cggtccggccgggactccgggacct

SEQ ID NO: 47200 - DNA, 25 bp, Homo sapien
cggtccggccggcactccgggacct

SEQ ID NO: 47201 - DNA, 25 bp, Homo sapien
gcggcgcaggacgtacattcggccc

SEQ ID NO: 47202 - DNA, 25 bp, Homo sapien
gcggcgcaggacctacattcggccc

SEQ ID NO: 47203 - DNA, 25 bp, Homo sapien
cctgtggggatatccgggtttcacg

SEQ ID NO: 47204 - DNA, 25 bp, Homo sapien
cctgtggggataaccgggtttcacg

SEQ ID NO: 47205 - DNA, 25 bp, Homo sapien
tgtacgaaacccttatgagggtttc

SEQ ID NO: 47206 - DNA, 25 bp, Homo sapien
tgtacgaaacccatatgagggtttc

SEQ ID NO: 47207 - DNA, 25 bp, Homo sapien
tgttgcggaggcatttatgacctgg

SEQ ID NO: 47208 - DNA, 25 bp, Homo sapien
tgttgcggaggcttttatgacctgg

SEQ ID NO: 47209 - DNA, 25 bp, Homo sapien
tttgaatggattcttctactcttag

SEQ ID NO: 47210 - DNA, 25 bp, Homo sapien
tttgaatggattgttctactcttag

SEQ ID NO: 47211 - DNA, 25 bp, Homo sapien
taccagccgacgaaaaccatccgtg

SEQ ID NO: 47212 - DNA, 25 bp, Homo sapien
taccagccgacgtaaaccatccgtg

SEQ ID NO: 47213 - DNA, 25 bp, Homo sapien
cctccacaacgataacaccagtgga

SEQ ID NO: 47214 - DNA, 25 bp, Homo sapien
cctccacaacgaaaacaccagtgga

SEQ ID NO: 47215 - DNA, 25 bp, Homo sapien
ctgcagaagtcaaagagcgcggcga

SEQ ID NO: 47216 - DNA, 25 bp, Homo sapien
ctgcagaagtcatagagcgcggcga

SEQ ID NO: 47217 - DNA, 25 bp, Homo sapien
ccagtaataatgttgtcgacatgtt

SEQ ID NO: 47218 - DNA, 25 bp, Homo sapien
ccagtaataatgatgtcgacatgtt

SEQ ID NO: 47219 - DNA, 25 bp, Homo sapien
gtccatgtaatattcgagttctttt

SEQ ID NO: 47220 - DNA, 25 bp, Homo sapien
gtccatgtaataatcgagttctttt

SEQ ID NO: 47221 - DNA, 25 bp, Homo sapien
gtcgacccggaaacttcggtgattg

SEQ ID NO: 47222 - DNA, 25 bp, Homo sapien
gtcgacccggaatcttcggtgattg

SEQ ID NO: 47223 - DNA, 25 bp, Homo sapien
gggcccaaatagtgtcctgtctatg

SEQ ID NO: 47224 - DNA, 25 bp, Homo sapien
gggcccaaatagagtcctgtctatg

SEQ ID NO: 47225 - DNA, 25 bp, Homo sapien
gagtaccacaaatgttccttttatg

SEQ ID NO: 47226 - DNA, 25 bp, Homo sapien
gagtaccacaaaagttccttttatg

SEQ ID NO: 47227 - DNA, 25 bp, Homo sapien
cctgtcctctaagagtttcattttg

SEQ ID NO: 47228 - DNA, 25 bp, Homo sapien
cctgtcctctaacagtttcattttg

SEQ ID NO: 47229 - DNA, 25 bp, Homo sapien
tcttccgaaacactcgaatgtttag

SEQ ID NO: 47230 - DNA, 25 bp, Homo sapien
tcttccgaaacagtcgaatgtttag

SEQ ID NO: 47231 - DNA, 25 bp, Homo sapien
atctacactatcttgtatctgtgga

SEQ ID NO: 47232 - DNA, 25 bp, Homo sapien
atctacactatcatgtatctgtgga

SEQ ID NO: 47233 - DNA, 25 bp, Homo sapien
tgtatacgacgacgagaatcttaaa

SEQ ID NO: 47234 - DNA, 25 bp, Homo sapien
tgtatacgacgaggagaatcttaaa

SEQ ID NO: 47235 - DNA, 25 bp, Homo sapien
gacttcacactcatccttgtaagag

SEQ ID NO: 47236 - DNA, 25 bp, Homo sapien
gacttcacactcttccttgtaagag

SEQ ID NO: 47237 - DNA, 25 bp, Homo sapien
ttacgtgagttatcactagtgtttc

SEQ ID NO: 47238 - DNA, 25 bp, Homo sapien
ttacgtgagttaacactagtgtttc

SEQ ID NO: 47239 - DNA, 25 bp, Homo sapien
taccacttagtcttccggatggacc

SEQ ID NO: 47240 - DNA, 25 bp, Homo sapien
taccacttagtcatccggatggacc

SEQ ID NO: 47241 - DNA, 25 bp, Homo sapien
gtcttgtttagtctcccggtcccct

SEQ ID NO: 47242 - DNA, 25 bp, Homo sapien
gtcttgtttagtgtcccggtcccct

SEQ ID NO: 47243 - DNA, 25 bp, Homo sapien
agcccgtcggggtaccaagttgtcc

SEQ ID NO: 47244 - DNA, 25 bp, Homo sapien
agcccgtcggggaaccaagttgtcc

SEQ ID NO: 47245 - DNA, 25 bp, Homo sapien
cgatttgtcacgaccaagaccctac

SEQ ID NO: 47246 - DNA, 25 bp, Homo sapien
cgatttgtcacgtccaagaccctac

SEQ ID NO: 47247 - DNA, 25 bp, Homo sapien
acctcaggaatcaaggtagtcctag

SEQ ID NO: 47248 - DNA, 25 bp, Homo sapien
acctcaggaatctaggtagtcctag

SEQ ID NO: 47249 - DNA, 25 bp, Homo sapien
ttaaccctaggtattttgactcccg

SEQ ID NO: 47250 - DNA, 25 bp, Homo sapien
ttaaccctaggttttttgactcccg

SEQ ID NO: 47251 - DNA, 25 bp, Homo sapien
aacattgagtctctgtacttacagt

SEQ ID NO: 47252 - DNA, 25 bp, Homo sapien
aacattgagtctgtgtacttacagt

SEQ ID NO: 47253 - DNA, 25 bp, Homo sapien
gcacacatttgtttgacatgttact

SEQ ID NO: 47254 - DNA, 25 bp, Homo sapien
gcacacatttgtatgacatgttact

SEQ ID NO: 47255 - DNA, 25 bp, Homo sapien
atacttatgtcttggttaaatccgt

SEQ ID NO: 47256 - DNA, 25 bp, Homo sapien
atacttatgtctaggttaaatccgt

SEQ ID NO: 47257 - DNA, 25 bp, Homo sapien
gacgagtgattctatttacgtctag

SEQ ID NO: 47258 - DNA, 25 bp, Homo sapien
gacgagtgattcaatttacgtctag

SEQ ID NO: 47259 - DNA, 25 bp, Homo sapien
agaacggtgtcagtagagacctccc

SEQ ID NO: 47260 - DNA, 25 bp, Homo sapien
agaacggtgtcactagagacctccc

SEQ ID NO: 47261 - DNA, 25 bp, Homo sapien
atacagacgtttcgagcccgtcgcc

SEQ ID NO: 47262 - DNA, 25 bp, Homo sapien
atacagacgtttggagcccgtcgcc

SEQ ID NO: 47263 - DNA, 25 bp, Homo sapien
ttctgattttgttccggacgtaggt

SEQ ID NO: 47264 - DNA, 25 bp, Homo sapien
ttctgattttgtaccggacgtaggt

SEQ ID NO: 47265 - DNA, 25 bp, Homo sapien
atctgctattggtctggcgacgtgt

SEQ ID NO: 47266 - DNA, 25 bp, Homo sapien
atctgctattggactggcgacgtgt

SEQ ID NO: 47267 - DNA, 25 bp, Homo sapien
gtttacatcgagtcgtataagactt

SEQ ID NO: 47268 - DNA, 25 bp, Homo sapien
gtttacatcgagacgtataagactt

SEQ ID NO: 47269 - DNA, 25 bp, Homo sapien
gcggtgttacagtacactagtcctt

SEQ ID NO: 47270 - DNA, 25 bp, Homo sapien
gcggtgttacagaacactagtcctt

SEQ ID NO: 47271 - DNA, 25 bp, Homo sapien
gacctggtcagtaatactagggtct

SEQ ID NO: 47272 - DNA, 25 bp, Homo sapien
gacctggtcagttatactagggtct

SEQ ID NO: 47273 - DNA, 25 bp, Homo sapien
acaccggtagtggtacagtgggtgt

SEQ ID NO: 47274 - DNA, 25 bp, Homo sapien
acaccggtagtgctacagtgggtgt

SEQ ID NO: 47275 - DNA, 25 bp, Homo sapien
ccagttgtcgattaggtcgagacgt

SEQ ID NO: 47276 - DNA, 25 bp, Homo sapien
ccagttgtcgataaggtcgagacgt

SEQ ID NO: 47277 - DNA, 25 bp, Homo sapien
ctcctcttacgatatccgtcgacgt

SEQ ID NO: 47278 - DNA, 25 bp, Homo sapien
ctcctcttacgaaatccgtcgacgt

SEQ ID NO: 47279 - DNA, 25 bp, Homo sapien
caagtcgtcacgtcgcgaatgatcc

SEQ ID NO: 47280 - DNA, 25 bp, Homo sapien
caagtcgtcacgacgcgaatgatcc

SEQ ID NO: 47281 - DNA, 25 bp, Homo sapien
taagaacaattacgacaggtacttt

SEQ ID NO: 47282 - DNA, 25 bp, Homo sapien
taagaacaattaggacaggtacttt

SEQ ID NO: 47283 - DNA, 25 bp, Homo sapien
aggtctaaaagaaccctagtctgtt

SEQ ID NO: 47284 - DNA, 25 bp, Homo sapien
aggtctaaaagatccctagtctgtt

SEQ ID NO: 47285 - DNA, 25 bp, Homo sapien
tatggctcagagaccctactgtttt

SEQ ID NO: 47286 - DNA, 25 bp, Homo sapien
tatggctcagagtccctactgtttt

SEQ ID NO: 47287 - DNA, 25 bp, Homo sapien
tcgtaacctgggtccgccggtcctt

SEQ ID NO: 47288 - DNA, 25 bp, Homo sapien
tcgtaacctgggaccgccggtcctt

SEQ ID NO: 47289 - DNA, 25 bp, Homo sapien
gagtcggtgagactgtccaacctct

SEQ ID NO: 47290 - DNA, 25 bp, Homo sapien
gagtcggtgagagtgtccaacctct

SEQ ID NO: 47291 - DNA, 25 bp, Homo sapien
gttacgtcatgagtcgggaacgagc

SEQ ID NO: 47292 - DNA, 25 bp, Homo sapien
gttacgtcatgactcgggaacgagc

SEQ ID NO: 47293 - DNA, 25 bp, Homo sapien
ccgggtctctcatccgtgaagggtc

SEQ ID NO: 47294 - DNA, 25 bp, Homo sapien
ccgggtctctcaaccgtgaagggtc

SEQ ID NO: 47295 - DNA, 25 bp, Homo sapien
aaatcatcaggagtcgtagtggtcg

SEQ ID NO: 47296 - DNA, 25 bp, Homo sapien
aaatcatcaggactcgtagtggtcg

SEQ ID NO: 47297 - DNA, 25 bp, Homo sapien
gacataacactgtacaaataattcg

SEQ ID NO: 47298 - DNA, 25 bp, Homo sapien
gacataacactgaacaaataattcg

SEQ ID NO: 47299 - DNA, 25 bp, Homo sapien
ggtaaaacgaagtacataaaacttc

SEQ ID NO: 47300 - DNA, 25 bp, Homo sapien
ggtaaaacgaagaacataaaacttc

SEQ ID NO: 47301 - DNA, 25 bp, Homo sapien
agacgattaacttagacagtacatc

SEQ ID NO: 47302 - DNA, 25 bp, Homo sapien
agacgattaactaagacagtacatc

SEQ ID NO: 47303 - DNA, 25 bp, Homo sapien
gtaatcaacctgattctactactga

SEQ ID NO: 47304 - DNA, 25 bp, Homo sapien
gtaatcaacctgtttctactactga

SEQ ID NO: 47305 - DNA, 25 bp, Homo sapien
gaaggagaaacctttaccgaagtga

SEQ ID NO: 47306 - DNA, 25 bp, Homo sapien
gaaggagaaaccattaccgaagtga

SEQ ID NO: 47307 - DNA, 25 bp, Homo sapien
gcatgagaagggtttcaagtatctc

SEQ ID NO: 47308 - DNA, 25 bp, Homo sapien
gcatgagaagggattcaagtatctc

SEQ ID NO: 47309 - DNA, 25 bp, Homo sapien
gacagtaaaggatctcctgtatcga

SEQ ID NO: 47310 - DNA, 25 bp, Homo sapien
gacagtaaaggaactcctgtatcga

SEQ ID NO: 47311 - DNA, 25 bp, Homo sapien
gaactccaaagtcaccccggtacat

SEQ ID NO: 47312 - DNA, 25 bp, Homo sapien
gaactccaaagtgaccccggtacat

SEQ ID NO: 47313 - DNA, 25 bp, Homo sapien
gaactaaacaagacgtcggggacag

SEQ ID NO: 47314 - DNA, 25 bp, Homo sapien
gaactaaacaagtcgtcggggacag

SEQ ID NO: 47315 - DNA, 25 bp, Homo sapien
tctacaccaagtactcggagacgaa

SEQ ID NO: 47316 - DNA, 25 bp, Homo sapien
tctacaccaagttctcggagacgaa

SEQ ID NO: 47317 - DNA, 25 bp, Homo sapien
cgactttgtggtctacggatatgta

SEQ ID NO: 47318 - DNA, 25 bp, Homo sapien
cgactttgtggtgtacggatatgta

SEQ ID NO: 47319 - DNA, 25 bp, Homo sapien
cagaatcttaatggtacaccatgtt

SEQ ID NO: 47320 - DNA, 25 bp, Homo sapien
cagaatcttaatcgtacaccatgtt

SEQ ID NO: 47321 - DNA, 25 bp, Homo sapien
ttaagaagtgtatttgccccatgtg

SEQ ID NO: 47322 - DNA, 25 bp, Homo sapien
ttaagaagtgtaattgccccatgtg

SEQ ID NO: 47323 - DNA, 25 bp, Homo sapien
gtataacaacgactgaaaccattcg

SEQ ID NO: 47324 - DNA, 25 bp, Homo sapien
gtataacaacgagtgaaaccattcg

SEQ ID NO: 47325 - DNA, 25 bp, Homo sapien
taaaggtataccactgtgacggaag

SEQ ID NO: 47326 - DNA, 25 bp, Homo sapien
taaaggtatacctctgtgacggaag

SEQ ID NO: 47327 - DNA, 25 bp, Homo sapien
gtactaaaacgaacccattagggaa

SEQ ID NO: 47328 - DNA, 25 bp, Homo sapien
gtactaaaacgatcccattagggaa

SEQ ID NO: 47329 - DNA, 25 bp, Homo sapien
actccatagccctacgtccttgttg

SEQ ID NO: 47330 - DNA, 25 bp, Homo sapien
actccatagcccaacgtccttgttg

SEQ ID NO: 47331 - DNA, 25 bp, Homo sapien
ccactatgtccgaaggacctcgggg

SEQ ID NO: 47332 - DNA, 25 bp, Homo sapien
ccactatgtccgtaggacctcgggg

SEQ ID NO: 47333 - DNA, 25 bp, Homo sapien
tcaactagtctcacgcgtttgtggg

SEQ ID NO: 47334 - DNA, 25 bp, Homo sapien
tcaactagtctctcgcgtttgtggg

SEQ ID NO: 47335 - DNA, 25 bp, Homo sapien
ccgacaacccgtaaggacccgggga

SEQ ID NO: 47336 - DNA, 25 bp, Homo sapien
ccgacaacccgttaggacccgggga

SEQ ID NO: 47337 - DNA, 25 bp, Homo sapien
cccaggaccttaggacaagggtcat

SEQ ID NO: 47338 - DNA, 25 bp, Homo sapien
cccaggaccttacgacaagggtcat

SEQ ID NO: 47339 - DNA, 25 bp, Homo sapien
cccgacggtctcctgtggtgagacc

SEQ ID NO: 47340 - DNA, 25 bp, Homo sapien
cccgacggtctcgtgtggtgagacc

SEQ ID NO: 47341 - DNA, 25 bp, Homo sapien
cgacggtctcggtcgtctgaccact

SEQ ID NO: 47342 - DNA, 25 bp, Homo sapien
cgacggtctcggacgtctgaccact

SEQ ID NO: 47343 - DNA, 25 bp, Homo sapien
gatcggacccgtgttacgaccgtgt

SEQ ID NO: 47344 - DNA, 25 bp, Homo sapien
gatcggacccgtcttacgaccgtgt

SEQ ID NO: 47345 - DNA, 25 bp, Homo sapien
cgcgcgcgtcaactgtagtacctgt

SEQ ID NO: 47346 - DNA, 25 bp, Homo sapien
cgcgcgcgtcaagtgtagtacctgt

SEQ ID NO: 47347 - DNA, 25 bp, Homo sapien
aactggttaccaaagctacttcagt

SEQ ID NO: 47348 - DNA, 25 bp, Homo sapien
aactggttaccatagctacttcagt

SEQ ID NO: 47349 - DNA, 25 bp, Homo sapien
gtggttgtaagaagtctacttcacg

SEQ ID NO: 47350 - DNA, 25 bp, Homo sapien
gtggttgtaagatgtctacttcacg

SEQ ID NO: 47351 - DNA, 25 bp, Homo sapien
ctctctactgtatgaacttctgaag

SEQ ID NO: 47352 - DNA, 25 bp, Homo sapien
ctctctactgtaagaacttctgaag

SEQ ID NO: 47353 - DNA, 25 bp, Homo sapien
tcctctgtgagttctcatttcggat

SEQ ID NO: 47354 - DNA, 25 bp, Homo sapien
tcctctgtgagtactcatttcggat

SEQ ID NO: 47355 - DNA, 25 bp, Homo sapien
ctgtggagctcgatgtgtaagtcgt

SEQ ID NO: 47356 - DNA, 25 bp, Homo sapien
ctgtggagctcgttgtgtaagtcgt

SEQ ID NO: 47357 - DNA, 25 bp, Homo sapien
agtgtctgatcacgtgtctagttct

SEQ ID NO: 47358 - DNA, 25 bp, Homo sapien
agtgtctgatcaggtgtctagttct

SEQ ID NO: 47359 - DNA, 25 bp, Homo sapien
ataatcaagtcggagtcttacgttt

SEQ ID NO: 47360 - DNA, 25 bp, Homo sapien
ataatcaagtcgcagtcttacgttt

SEQ ID NO: 47361 - DNA, 25 bp, Homo sapien
cgttagggccggagtcgtcgtcttc

SEQ ID NO: 47362 - DNA, 25 bp, Homo sapien
cgttagggccggtgtcgtcgtcttc

SEQ ID NO: 47363 - DNA, 25 bp, Homo sapien
cttacagagatttatagtctgtttc

SEQ ID NO: 47364 - DNA, 25 bp, Homo sapien
cttacagagattaatagtctgtttc

SEQ ID NO: 47365 - DNA, 25 bp, Homo sapien
attatcagacagtaagtcatgttcc

SEQ ID NO: 47366 - DNA, 25 bp, Homo sapien
attatcagacagaaagtcatgttcc

SEQ ID NO: 47367 - DNA, 25 bp, Homo sapien
agaggcagaccaacccaagtctgtc

SEQ ID NO: 47368 - DNA, 25 bp, Homo sapien
agaggcagaccatcccaagtctgtc

SEQ ID NO: 47369 - DNA, 25 bp, Homo sapien
gtgcacacgaagaccccatagcgtc

SEQ ID NO: 47370 - DNA, 25 bp, Homo sapien
gtgcacacgaagtccccatagcgtc

SEQ ID NO: 47371 - DNA, 25 bp, Homo sapien
agctcaaggcactgcgagaccggtt

SEQ ID NO: 47372 - DNA, 25 bp, Homo sapien
agctcaaggcacagcgagaccggtt

SEQ ID NO: 47373 - DNA, 25 bp, Homo sapien
tacacagagcgaccaaaacagtgta

SEQ ID NO: 47374 - DNA, 25 bp, Homo sapien
tacacagagcgagcaaaacagtgta

SEQ ID NO: 47375 - DNA, 25 bp, Homo sapien
ataaagacggagaccctttgtgtga

SEQ ID NO: 47376 - DNA, 25 bp, Homo sapien
ataaagacggagtccctttgtgtga

SEQ ID NO: 47377 - DNA, 25 bp, Homo sapien
tcacacgggcggtccttgcgtgtgc

SEQ ID NO: 47378 - DNA, 25 bp, Homo sapien
tcacacgggcggaccttgcgtgtgc

SEQ ID NO: 47379 - DNA, 25 bp, Homo sapien
accccagggagtatctcgaagtggg

SEQ ID NO: 47380 - DNA, 25 bp, Homo sapien
accccagggagtttctcgaagtggg

SEQ ID NO: 47381 - DNA, 25 bp, Homo sapien
cctccaatgtgtcttgcagaatgcg

SEQ ID NO: 47382 - DNA, 25 bp, Homo sapien
cctccaatgtgtgttgcagaatgcg

SEQ ID NO: 47383 - DNA, 25 bp, Homo sapien
cctttgtttgtcgaagattacgtcg

SEQ ID NO: 47384 - DNA, 25 bp, Homo sapien
cctttgtttgtccaagattacgtcg

SEQ ID NO: 47385 - DNA, 25 bp, Homo sapien
atttgatgttcctcgactcgtaccg

SEQ ID NO: 47386 - DNA, 25 bp, Homo sapien
atttgatgttccacgactcgtaccg

SEQ ID NO: 47387 - DNA, 25 bp, Homo sapien
agaatgaccgctggacaagaatggc

SEQ ID NO: 47388 - DNA, 25 bp, Homo sapien
agaatgaccgctcgacaagaatggc

SEQ ID NO: 47389 - DNA, 25 bp, Homo sapien
agcctagatcccgaagataatcggc

SEQ ID NO: 47390 - DNA, 25 bp, Homo sapien
agcctagatccccaagataatcggc

SEQ ID NO: 47391 - DNA, 25 bp, Homo sapien
cttgacttccgtattaaggtgtcct

SEQ ID NO: 47392 - DNA, 25 bp, Homo sapien
cttgacttccgttttaaggtgtcct

SEQ ID NO: 47393 - DNA, 25 bp, Homo sapien
acgaaaccacattttgtcggatcct

SEQ ID NO: 47394 - DNA, 25 bp, Homo sapien
acgaaaccacatattgtcggatcct

SEQ ID NO: 47395 - DNA, 25 bp, Homo sapien
gaaataacccgctttgggacgtcac

SEQ ID NO: 47396 - DNA, 25 bp, Homo sapien
gaaataacccgcattgggacgtcac

SEQ ID NO: 47397 - DNA, 25 bp, Homo sapien
ataaatgtacacattagacggttac

SEQ ID NO: 47398 - DNA, 25 bp, Homo sapien
ataaatgtacactttagacggttac

SEQ ID NO: 47399 - DNA, 25 bp, Homo sapien
aaatccatgacatttacgaaactct

SEQ ID NO: 47400 - DNA, 25 bp, Homo sapien
aaatccatgacaattacgaaactct

SEQ ID NO: 47401 - DNA, 25 bp, Homo sapien
gccccgagtgtgacaggtacctcct

SEQ ID NO: 47402 - DNA, 25 bp, Homo sapien
gccccgagtgtgtcaggtacctcct

SEQ ID NO: 47403 - DNA, 25 bp, Homo sapien
tgtcgtctgaaggtctccggggtcc

SEQ ID NO: 47404 - DNA, 25 bp, Homo sapien
tgtcgtctgaagctctccggggtcc

SEQ ID NO: 47405 - DNA, 25 bp, Homo sapien
ggatgaacgacgttcagtgaactct

SEQ ID NO: 47406 - DNA, 25 bp, Homo sapien
ggatgaacgacgatcagtgaactct

SEQ ID NO: 47407 - DNA, 25 bp, Homo sapien
taccgaggtgagaattccgtccatt

SEQ ID NO: 47408 - DNA, 25 bp, Homo sapien
taccgaggtgagtattccgtccatt

SEQ ID NO: 47409 - DNA, 25 bp, Homo sapien
caggtcctagagtcggcacaccggg

SEQ ID NO: 47410 - DNA, 25 bp, Homo sapien
caggtcctagagacggcacaccggg

SEQ ID NO: 47411 - DNA, 25 bp, Homo sapien
aaatatttcaagactgaaacccggt

SEQ ID NO: 47412 - DNA, 25 bp, Homo sapien
aaatatttcaagtctgaaacccggt

SEQ ID NO: 47413 - DNA, 25 bp, Homo sapien
tactgtgtcatgtgtcctccgtttc

SEQ ID NO: 47414 - DNA, 25 bp, Homo sapien
tactgtgtcatgagtcctccgtttc

SEQ ID NO: 47415 - DNA, 25 bp, Homo sapien
tgtcttgtgctgtcccgcttctccg

SEQ ID NO: 47416 - DNA, 25 bp, Homo sapien
tgtcttgtgctgacccgcttctccg

SEQ ID NO: 47417 - DNA, 25 bp, Homo sapien
ggtcctcggactgttcacctgtcca

SEQ ID NO: 47418 - DNA, 25 bp, Homo sapien
ggtcctcggactcttcacctgtcca

SEQ ID NO: 47419 - DNA, 25 bp, Homo sapien
ttaccactccgatgagacttcccgt

SEQ ID NO: 47420 - DNA, 25 bp, Homo sapien
ttaccactccgaagagacttcccgt

SEQ ID NO: 47421 - DNA, 25 bp, Homo sapien
attttatcccctggacgggtcatat

SEQ ID NO: 47422 - DNA, 25 bp, Homo sapien
attttatcccctcgacgggtcatat

SEQ ID NO: 47423 - DNA, 25 bp, Homo sapien
tattttgtaactgtcccggagtttt

SEQ ID NO: 47424 - DNA, 25 bp, Homo sapien
tattttgtaactctcccggagtttt

SEQ ID NO: 47425 - DNA, 25 bp, Homo sapien
aggtacaaggccagtactagttaca

SEQ ID NO: 47426 - DNA, 25 bp, Homo sapien
aggtacaaggcctgtactagttaca

SEQ ID NO: 47427 - DNA, 25 bp, Homo sapien
aaccagaagagtcgacgaaggcagt

SEQ ID NO: 47428 - DNA, 25 bp, Homo sapien
aaccagaagagtggacgaaggcagt

SEQ ID NO: 47429 - DNA, 25 bp, Homo sapien
tcgtcccaggactgggcccggaagt

SEQ ID NO: 47430 - DNA, 25 bp, Homo sapien
tcgtcccaggacagggcccggaagt

SEQ ID NO: 47431 - DNA, 25 bp, Homo sapien
tccctaggcagtcaggaagcacggt

SEQ ID NO: 47432 - DNA, 25 bp, Homo sapien
tccctaggcagtgaggaagcacggt

SEQ ID NO: 47433 - DNA, 25 bp, Homo sapien
cgacctcgaacaatgttcatcgcct

SEQ ID NO: 47434 - DNA, 25 bp, Homo sapien
cgacctcgaacattgttcatcgcct

SEQ ID NO: 47435 - DNA, 25 bp, Homo sapien
ttcgccgaatcgttttgtcattatg

SEQ ID NO: 47436 - DNA, 25 bp, Homo sapien
ttcgccgaatcgatttgtcattatg

SEQ ID NO: 47437 - DNA, 25 bp, Homo sapien
ccaggaccgatacctttataacgtc

SEQ ID NO: 47438 - DNA, 25 bp, Homo sapien
ccaggaccgatagctttataacgtc

SEQ ID NO: 47439 - DNA, 25 bp, Homo sapien
tcgggcgaaaacttccttttactcc

SEQ ID NO: 47440 - DNA, 25 bp, Homo sapien
tcgggcgaaaacatccttttactcc

SEQ ID NO: 47441 - DNA, 25 bp, Homo sapien
cagaggtgaattttaccttagtttc

SEQ ID NO: 47442 - DNA, 25 bp, Homo sapien
cagaggtgaattataccttagtttc

SEQ ID NO: 47443 - DNA, 25 bp, Homo sapien
cacaggttattggaacctcctcata

SEQ ID NO: 47444 - DNA, 25 bp, Homo sapien
cacaggttattgcaacctcctcata

SEQ ID NO: 47445 - DNA, 25 bp, Homo sapien
gaagaagtttactcgcttaccagta

SEQ ID NO: 47446 - DNA, 25 bp, Homo sapien
gaagaagtttacacgcttaccagta

SEQ ID NO: 47447 - DNA, 25 bp, Homo sapien
taggtaaataacaggtactccgatg

SEQ ID NO: 47448 - DNA, 25 bp, Homo sapien
taggtaaataactggtactccgatg

SEQ ID NO: 47449 - DNA, 25 bp, Homo sapien
agtataatgtcttgtgtcttcctct

SEQ ID NO: 47450 - DNA, 25 bp, Homo sapien
agtataatgtctagtgtcttcctct

SEQ ID NO: 47451 - DNA, 25 bp, Homo sapien
cggtcgagatggtcagataattctt

SEQ ID NO: 47452 - DNA, 25 bp, Homo sapien
cggtcgagatggacagataattctt

SEQ ID NO: 47453 - DNA, 25 bp, Homo sapien
agaccgctcaccaaaacatggttta

SEQ ID NO: 47454 - DNA, 25 bp, Homo sapien
agaccgctcacctaaacatggttta

SEQ ID NO: 47455 - DNA, 25 bp, Homo sapien
gccctttagacaaaggacactttcc

SEQ ID NO: 47456 - DNA, 25 bp, Homo sapien
gccctttagacataggacactttcc

SEQ ID NO: 47457 - DNA, 25 bp, Homo sapien
ccatggacccgacgagacattccgt

SEQ ID NO: 47458 - DNA, 25 bp, Homo sapien
ccatggacccgaggagacattccgt

SEQ ID NO: 47459 - DNA, 25 bp, Homo sapien
ccgtggacggacaggaatcggtctc

SEQ ID NO: 47460 - DNA, 25 bp, Homo sapien
ccgtggacggactggaatcggtctc

SEQ ID NO: 47461 - DNA, 25 bp, Homo sapien
ccgtcggaacatcgaagacggactc

SEQ ID NO: 47462 - DNA, 25 bp, Homo sapien
ccgtcggaacatggaagacggactc

SEQ ID NO: 47463 - DNA, 25 bp, Homo sapien
cccgtgagacaggaggacgacctcc

SEQ ID NO: 47464 - DNA, 25 bp, Homo sapien
cccgtgagacagcaggacgacctcc

SEQ ID NO: 47465 - DNA, 25 bp, Homo sapien
ggaagtgacgtgcacgacctcgtcg

SEQ ID NO: 47466 - DNA, 25 bp, Homo sapien
ggaagtgacgtggacgacctcgtcg

SEQ ID NO: 47467 - DNA, 25 bp, Homo sapien
gaccaggacccgaaggagccgacgt

SEQ ID NO: 47468 - DNA, 25 bp, Homo sapien
gaccaggacccgtaggagccgacgt

SEQ ID NO: 47469 - DNA, 25 bp, Homo sapien
ggtcgggacctaccagtggagtcat

SEQ ID NO: 47470 - DNA, 25 bp, Homo sapien
ggtcgggacctagcagtggagtcat

SEQ ID NO: 47471 - DNA, 25 bp, Homo sapien
acgagtcactacacttcgtgtgtcc

SEQ ID NO: 47472 - DNA, 25 bp, Homo sapien
acgagtcactactcttcgtgtgtcc

SEQ ID NO: 47473 - DNA, 25 bp, Homo sapien
cagagtccgtacctccggctgtcga

SEQ ID NO: 47474 - DNA, 25 bp, Homo sapien
cagagtccgtacgtccggctgtcga

SEQ ID NO: 47475 - DNA, 25 bp, Homo sapien
ttcaagtctctgctccggaggagtc

SEQ ID NO: 47476 - DNA, 25 bp, Homo sapien
ttcaagtctctggtccggaggagtc

SEQ ID NO: 47477 - DNA, 25 bp, Homo sapien
gggacgtctgtgatcatgttaaact

SEQ ID NO: 47478 - DNA, 25 bp, Homo sapien
gggacgtctgtgttcatgttaaact

SEQ ID NO: 47479 - DNA, 25 bp, Homo sapien
taaggatatgtgtcactcgtgcaat

SEQ ID NO: 47480 - DNA, 25 bp, Homo sapien
taaggatatgtgacactcgtgcaat

SEQ ID NO: 47481 - DNA, 25 bp, Homo sapien
aaggatcggtgaaccgtcgtgaatt

SEQ ID NO: 47482 - DNA, 25 bp, Homo sapien
aaggatcggtgatccgtcgtgaatt

SEQ ID NO: 47483 - DNA, 25 bp, Homo sapien
agtatgttatccacttctcacagag

SEQ ID NO: 47484 - DNA, 25 bp, Homo sapien
agtatgttatcctcttctcacagag

SEQ ID NO: 47485 - DNA, 25 bp, Homo sapien
atatttgacacaggtaacacacctg

SEQ ID NO: 47486 - DNA, 25 bp, Homo sapien
atatttgacacacgtaacacacctg

SEQ ID NO: 47487 - DNA, 25 bp, Homo sapien
gtgtaatgaacaacctaaaacttgt

SEQ ID NO: 47488 - DNA, 25 bp, Homo sapien
gtgtaatgaacatcctaaaacttgt

SEQ ID NO: 47489 - DNA, 25 bp, Homo sapien
attaagtttatagacgaacacccag

SEQ ID NO: 47490 - DNA, 25 bp, Homo sapien
attaagtttatacacgaacacccag

SEQ ID NO: 47491 - DNA, 25 bp, Homo sapien
tgagaaagatgcaactgatctcaaa

SEQ ID NO: 47492 - DNA, 25 bp, Homo sapien
tgagaaagatgctactgatctcaaa

SEQ ID NO: 47493 - DNA, 25 bp, Homo sapien
caaaagtttacgacactggttaata

SEQ ID NO: 47494 - DNA, 25 bp, Homo sapien
caaaagtttacgtcactggttaata

SEQ ID NO: 47495 - DNA, 25 bp, Homo sapien
ggtatacagaggtgagaacactccg

SEQ ID NO: 47496 - DNA, 25 bp, Homo sapien
ggtatacagaggagagaacactccg

SEQ ID NO: 47497 - DNA, 25 bp, Homo sapien
tctagcttgcagcgtcagcgattgc

SEQ ID NO: 47498 - DNA, 25 bp, Homo sapien
tctagcttgcagggtcagcgattgc

SEQ ID NO: 47499 - DNA, 25 bp, Homo sapien
tcttcctacggcgtctggtaataga

SEQ ID NO: 47500 - DNA, 25 bp, Homo sapien
tcttcctacggcctctggtaataga

SEQ ID NO: 47501 - DNA, 25 bp, Homo sapien
ttataccgtgatcgttattattccg

SEQ ID NO: 47502 - DNA, 25 bp, Homo sapien
ttataccgtgatggttattattccg

SEQ ID NO: 47503 - DNA, 25 bp, Homo sapien
tctacgagttatgtgtgtttatccg

SEQ ID NO: 47504 - DNA, 25 bp, Homo sapien
tctacgagttatctgtgtttatccg

SEQ ID NO: 47505 - DNA, 25 bp, Homo sapien
tcgacgaagttctgtgtctagaccc

SEQ ID NO: 47506 - DNA, 25 bp, Homo sapien
tcgacgaagttcagtgtctagaccc

SEQ ID NO: 47507 - DNA, 25 bp, Homo sapien
gttgtctttatttactgtctgacaa

SEQ ID NO: 47508 - DNA, 25 bp, Homo sapien
gttgtctttattaactgtctgacaa

SEQ ID NO: 47509 - DNA, 25 bp, Homo sapien
tttttgtgtccttcgaccccgagga

SEQ ID NO: 47510 - DNA, 25 bp, Homo sapien
tttttgtgtcctacgaccccgagga

SEQ ID NO: 47511 - DNA, 25 bp, Homo sapien
tttgttctgtaacacactcgaccag

SEQ ID NO: 47512 - DNA, 25 bp, Homo sapien
tttgttctgtaagacactcgaccag

SEQ ID NO: 47513 - DNA, 25 bp, Homo sapien
tttgtttgtcagtacggtccacgtc

SEQ ID NO: 47514 - DNA, 25 bp, Homo sapien
tttgtttgtcagaacggtccacgtc

SEQ ID NO: 47515 - DNA, 25 bp, Homo sapien
agtgtttaataactctcgggttgtc

SEQ ID NO: 47516 - DNA, 25 bp, Homo sapien
agtgtttaataagtctcgggttgtc

SEQ ID NO: 47517 - DNA, 25 bp, Homo sapien
tcgccaatattgtccggactgacgt

SEQ ID NO: 47518 - DNA, 25 bp, Homo sapien
tcgccaatattgaccggactgacgt

SEQ ID NO: 47519 - DNA, 25 bp, Homo sapien
acttttgtggtaggagtcctcctac

SEQ ID NO: 47520 - DNA, 25 bp, Homo sapien
acttttgtggtacgagtcctcctac

SEQ ID NO: 47521 - DNA, 25 bp, Homo sapien
ccttgtattaggtcgtcatttctct

SEQ ID NO: 47522 - DNA, 25 bp, Homo sapien
ccttgtattaggacgtcatttctct

SEQ ID NO: 47523 - DNA, 25 bp, Homo sapien
cctaattttgtagtgagactcttgt

SEQ ID NO: 47524 - DNA, 25 bp, Homo sapien
cctaattttgtactgagactcttgt

SEQ ID NO: 47525 - DNA, 25 bp, Homo sapien
atattatctgtcgtgtataccatcg

SEQ ID NO: 47526 - DNA, 25 bp, Homo sapien
atattatctgtcctgtataccatcg

SEQ ID NO: 47527 - DNA, 25 bp, Homo sapien
actgtatccggtcgtcgttccactc

SEQ ID NO: 47528 - DNA, 25 bp, Homo sapien
actgtatccggtggtcgttccactc

SEQ ID NO: 47529 - DNA, 25 bp, Homo sapien
ttacagtgtctctggttttatctca

SEQ ID NO: 47530 - DNA, 25 bp, Homo sapien
ttacagtgtctcaggttttatctca

SEQ ID NO: 47531 - DNA, 25 bp, Homo sapien
tctatgggtcgtcgaaggagtctaa

SEQ ID NO: 47532 - DNA, 25 bp, Homo sapien
tctatgggtcgtggaaggagtctaa

SEQ ID NO: 47533 - DNA, 25 bp, Homo sapien
gtggtatgtcgtaagtgtcgtcaac

SEQ ID NO: 47534 - DNA, 25 bp, Homo sapien
gtggtatgtcgttagtgtcgtcaac

SEQ ID NO: 47535 - DNA, 25 bp, Homo sapien
ggagtggtgtcgaaccctccgtact

SEQ ID NO: 47536 - DNA, 25 bp, Homo sapien
ggagtggtgtcgtaccctccgtact

SEQ ID NO: 47537 - DNA, 25 bp, Homo sapien
tgctcagtctcgaaaccgatcctta

SEQ ID NO: 47538 - DNA, 25 bp, Homo sapien
tgctcagtctcgtaaccgatcctta

SEQ ID NO: 47539 - DNA, 25 bp, Homo sapien
tttactgttagatcgtatctacttg

SEQ ID NO: 47540 - DNA, 25 bp, Homo sapien
tttactgttagaacgtatctacttg

SEQ ID NO: 47541 - DNA, 25 bp, Homo sapien
tcttatgattagacgttctcgtctg

SEQ ID NO: 47542 - DNA, 25 bp, Homo sapien
tcttatgattagtcgttctcgtctg

SEQ ID NO: 47543 - DNA, 25 bp, Homo sapien
tattatcgaatgtgtccgacgtctc

SEQ ID NO: 47544 - DNA, 25 bp, Homo sapien
tattatcgaatgagtccgacgtctc

SEQ ID NO: 47545 - DNA, 25 bp, Homo sapien
ttacttacgtgagtcgacggggaca

SEQ ID NO: 47546 - DNA, 25 bp, Homo sapien
ttacttacgtgactcgacggggaca

SEQ ID NO: 47547 - DNA, 25 bp, Homo sapien
tgtgtcttcttgttacagtggtttc

SEQ ID NO: 47548 - DNA, 25 bp, Homo sapien
tgtgtcttcttgatacagtggtttc

SEQ ID NO: 47549 - DNA, 25 bp, Homo sapien
tttctgtagatcatcatggttctac

SEQ ID NO: 47550 - DNA, 25 bp, Homo sapien
tttctgtagatcttcatggttctac

SEQ ID NO: 47551 - DNA, 25 bp, Homo sapien
ttacgttgacagaatactggtttac

SEQ ID NO: 47552 - DNA, 25 bp, Homo sapien
ttacgttgacagtatactggtttac

SEQ ID NO: 47553 - DNA, 25 bp, Homo sapien
ttatatgtacgcaagtcctggttta

SEQ ID NO: 47554 - DNA, 25 bp, Homo sapien
ttatatgtacgctagtcctggttta

SEQ ID NO: 47555 - DNA, 25 bp, Homo sapien
tcgtataggtcgactaactgtttta

SEQ ID NO: 47556 - DNA, 25 bp, Homo sapien
tcgtataggtcgtctaactgtttta

SEQ ID NO: 47557 - DNA, 25 bp, Homo sapien
tcactgacgacctgtctcttgttta

SEQ ID NO: 47558 - DNA, 25 bp, Homo sapien
tcactgacgaccagtctcttgttta

SEQ ID NO: 47559 - DNA, 25 bp, Homo sapien
ctccggtcgtcgtagctctggtgtt

SEQ ID NO: 47560 - DNA, 25 bp, Homo sapien
ctccggtcgtcgaagctctggtgtt

SEQ ID NO: 47561 - DNA, 25 bp, Homo sapien
aggcctacggagacgtctctgtttc

SEQ ID NO: 47562 - DNA, 25 bp, Homo sapien
aggcctacggagtcgtctctgtttc

SEQ ID NO: 47563 - DNA, 25 bp, Homo sapien
tagaagtcagagagtctctggtgtc

SEQ ID NO: 47564 - DNA, 25 bp, Homo sapien
tagaagtcagagtgtctctggtgtc

SEQ ID NO: 47565 - DNA, 25 bp, Homo sapien
aactgtaataaaggttttctctgtc

SEQ ID NO: 47566 - DNA, 25 bp, Homo sapien
aactgtaataaacgttttctctgtc

SEQ ID NO: 47567 - DNA, 25 bp, Homo sapien
tcacagttaaaagagttttcgtttc

SEQ ID NO: 47568 - DNA, 25 bp, Homo sapien
tcacagttaaaacagttttcgtttc

SEQ ID NO: 47569 - DNA, 25 bp, Homo sapien
ttagtacaagaatctattgttccgt

SEQ ID NO: 47570 - DNA, 25 bp, Homo sapien
ttagtacaagaaactattgttccgt

SEQ ID NO: 47571 - DNA, 25 bp, Homo sapien
aatgaaagataatgtcttgtactgt

SEQ ID NO: 47572 - DNA, 25 bp, Homo sapien
aatgaaagataaagtcttgtactgt

SEQ ID NO: 47573 - DNA, 25 bp, Homo sapien
ccgtgatgttccaagacatttctta

SEQ ID NO: 47574 - DNA, 25 bp, Homo sapien
ccgtgatgttcctagacatttctta

SEQ ID NO: 47575 - DNA, 25 bp, Homo sapien
ctatttaaaggtctagttgtaccga

SEQ ID NO: 47576 - DNA, 25 bp, Homo sapien
ctatttaaaggtgtagttgtaccga

SEQ ID NO: 47577 - DNA, 25 bp, Homo sapien
cgttttcaggtatccttttatcgtg

SEQ ID NO: 47578 - DNA, 25 bp, Homo sapien
cgttttcaggtaaccttttatcgtg

SEQ ID NO: 47579 - DNA, 25 bp, Homo sapien
taccttctgacgagggactctcccg

SEQ ID NO: 47580 - DNA, 25 bp, Homo sapien
taccttctgacgtgggactctcccg

SEQ ID NO: 47581 - DNA, 25 bp, Homo sapien
gtgactgttgagaacaggaccaacc

SEQ ID NO: 47582 - DNA, 25 bp, Homo sapien
gtgactgttgagtacaggaccaacc

SEQ ID NO: 47583 - DNA, 25 bp, Homo sapien
agggtatgaggactcgtaggacacc

SEQ ID NO: 47584 - DNA, 25 bp, Homo sapien
agggtatgaggagtcgtaggacacc

SEQ ID NO: 47585 - DNA, 25 bp, Homo sapien
tggagcggacagaagtaggtcctcc

SEQ ID NO: 47586 - DNA, 25 bp, Homo sapien
tggagcggacagtagtaggtcctcc

SEQ ID NO: 47587 - DNA, 25 bp, Homo sapien
ggagaggatctaccagtggtatccc

SEQ ID NO: 47588 - DNA, 25 bp, Homo sapien
ggagaggatctagcagtggtatccc

SEQ ID NO: 47589 - DNA, 25 bp, Homo sapien
atatatcttcggtatgtcttaacga

SEQ ID NO: 47590 - DNA, 25 bp, Homo sapien
atatatcttcggaatgtcttaacga

SEQ ID NO: 47591 - DNA, 25 bp, Homo sapien
attgagcccggaagtcttagtagag

SEQ ID NO: 47592 - DNA, 25 bp, Homo sapien
attgagcccggatgtcttagtagag

SEQ ID NO: 47593 - DNA, 25 bp, Homo sapien
ccttaagatcccttatctcgttgag

SEQ ID NO: 47594 - DNA, 25 bp, Homo sapien
ccttaagatcccatatctcgttgag

SEQ ID NO: 47595 - DNA, 25 bp, Homo sapien
gtcaactgtctcgtcctcttctttg

SEQ ID NO: 47596 - DNA, 25 bp, Homo sapien
gtcaactgtctcctcctcttctttg

SEQ ID NO: 47597 - DNA, 25 bp, Homo sapien
acacagtgtccctctcttcttgctg

SEQ ID NO: 47598 - DNA, 25 bp, Homo sapien
acacagtgtcccactcttcttgctg

SEQ ID NO: 47599 - DNA, 25 bp, Homo sapien
gacgtaccaacctcgtcgtagacta

SEQ ID NO: 47600 - DNA, 25 bp, Homo sapien
gacgtaccaaccacgtcgtagacta

SEQ ID NO: 47601 - DNA, 25 bp, Homo sapien
gagacgacattaacggtaccttctc

SEQ ID NO: 47602 - DNA, 25 bp, Homo sapien
gagacgacattatcggtaccttctc

SEQ ID NO: 47603 - DNA, 25 bp, Homo sapien
acaagaacttaaggtaacgttctcg

SEQ ID NO: 47604 - DNA, 25 bp, Homo sapien
acaagaacttaacgtaacgttctcg

SEQ ID NO: 47605 - DNA, 25 bp, Homo sapien
acgtaaatacaagacttacgttcag

SEQ ID NO: 47606 - DNA, 25 bp, Homo sapien
acgtaaatacaacacttacgttcag

SEQ ID NO: 47607 - DNA, 25 bp, Homo sapien
tcgtctcctgtacttgtcagttacg

SEQ ID NO: 47608 - DNA, 25 bp, Homo sapien
tcgtctcctgtagttgtcagttacg

SEQ ID NO: 47609 - DNA, 25 bp, Homo sapien
ctggacgtccgaagtctgaggtcct

SEQ ID NO: 47610 - DNA, 25 bp, Homo sapien
ctggacgtccgatgtctgaggtcct

SEQ ID NO: 47611 - DNA, 25 bp, Homo sapien
ccctggacgtcctgtttaaagtggt

SEQ ID NO: 47612 - DNA, 25 bp, Homo sapien
ccctggacgtccagtttaaagtggt

SEQ ID NO: 47613 - DNA, 25 bp, Homo sapien
ggttaggttccaatctccgtagtga

SEQ ID NO: 47614 - DNA, 25 bp, Homo sapien
ggttaggttccattctccgtagtga

SEQ ID NO: 47615 - DNA, 25 bp, Homo sapien
acgtcgaagagtaacgtgtccagga

SEQ ID NO: 47616 - DNA, 25 bp, Homo sapien
acgtcgaagagttacgtgtccagga

SEQ ID NO: 47617 - DNA, 25 bp, Homo sapien
cagaaagaccgaaaggacctactcc

SEQ ID NO: 47618 - DNA, 25 bp, Homo sapien
cagaaagaccgataggacctactcc

SEQ ID NO: 47619 - DNA, 25 bp, Homo sapien
gagacgacggtccaatcgtcgtcct

SEQ ID NO: 47620 - DNA, 25 bp, Homo sapien
gagacgacggtcgaatcgtcgtcct

SEQ ID NO: 47621 - DNA, 25 bp, Homo sapien
cgaggaaacggaggaactaccgaac

SEQ ID NO: 47622 - DNA, 25 bp, Homo sapien
cgaggaaacggacgaactaccgaac

SEQ ID NO: 47623 - DNA, 25 bp, Homo sapien
ggacgaacgagatcatgtccgcacg

SEQ ID NO: 47624 - DNA, 25 bp, Homo sapien
ggacgaacgagaacatgtccgcacg

SEQ ID NO: 47625 - DNA, 25 bp, Homo sapien
tctctgaaagaatccgtgactcaag

SEQ ID NO: 47626 - DNA, 25 bp, Homo sapien
tctctgaaagaaaccgtgactcaag

SEQ ID NO: 47627 - DNA, 25 bp, Homo sapien
tctgtaacaatagtttcgtctgtag

SEQ ID NO: 47628 - DNA, 25 bp, Homo sapien
tctgtaacaatactttcgtctgtag

SEQ ID NO: 47629 - DNA, 25 bp, Homo sapien
cctacttgaagaatcctattttgcg

SEQ ID NO: 47630 - DNA, 25 bp, Homo sapien
cctacttgaagattcctattttgcg

SEQ ID NO: 47631 - DNA, 25 bp, Homo sapien
acgtgtggagacactacgagggccc

SEQ ID NO: 47632 - DNA, 25 bp, Homo sapien
acgtgtggagactctacgagggccc

SEQ ID NO: 47633 - DNA, 25 bp, Homo sapien
ttcgagacggacgaaatgtcctcct

SEQ ID NO: 47634 - DNA, 25 bp, Homo sapien
ttcgagacggaccaaatgtcctcct

SEQ ID NO: 47635 - DNA, 25 bp, Homo sapien
cttcaaggactgaatagtcctgtat

SEQ ID NO: 47636 - DNA, 25 bp, Homo sapien
cttcaaggactgtatagtcctgtat

SEQ ID NO: 47637 - DNA, 25 bp, Homo sapien
accccgtgaggttcgtcgtccgttc

SEQ ID NO: 47638 - DNA, 25 bp, Homo sapien
accccgtgaggtacgtcgtccgttc

SEQ ID NO: 47639 - DNA, 25 bp, Homo sapien
aatcccggtgagcaggtcgtcggtc

SEQ ID NO: 47640 - DNA, 25 bp, Homo sapien
aatcccggtgaggaggtcgtcggtc

SEQ ID NO: 47641 - DNA, 25 bp, Homo sapien
ttaccgtgtagtgagtgattttcct

SEQ ID NO: 47642 - DNA, 25 bp, Homo sapien
ttaccgtgtagtcagtgattttcct

SEQ ID NO: 47643 - DNA, 25 bp, Homo sapien
ctgtctgtatcctgacttcttatgt

SEQ ID NO: 47644 - DNA, 25 bp, Homo sapien
ctgtctgtatccagacttcttatgt

SEQ ID NO: 47645 - DNA, 25 bp, Homo sapien
agttcgtagtccttcgatgtaatgt

SEQ ID NO: 47646 - DNA, 25 bp, Homo sapien
agttcgtagtccatcgatgtaatgt

SEQ ID NO: 47647 - DNA, 25 bp, Homo sapien
aataaaaggtccaacattactgtag

SEQ ID NO: 47648 - DNA, 25 bp, Homo sapien
aataaaaggtcctacattactgtag

SEQ ID NO: 47649 - DNA, 25 bp, Homo sapien
taaaacaagagtgtatccgttcatc

SEQ ID NO: 47650 - DNA, 25 bp, Homo sapien
taaaacaagagtctatccgttcatc

SEQ ID NO: 47651 - DNA, 25 bp, Homo sapien
gatacagtcctcctatgtccagatg

SEQ ID NO: 47652 - DNA, 25 bp, Homo sapien
gatacagtcctcgtatgtccagatg

SEQ ID NO: 47653 - DNA, 25 bp, Homo sapien
aacaccgtctggaccgtaagtacac

SEQ ID NO: 47654 - DNA, 25 bp, Homo sapien
aacaccgtctggtccgtaagtacac

SEQ ID NO: 47655 - DNA, 25 bp, Homo sapien
acgacaaccttggagccacagtaac

SEQ ID NO: 47656 - DNA, 25 bp, Homo sapien
acgacaaccttgcagccacagtaac

SEQ ID NO: 47657 - DNA, 25 bp, Homo sapien
gaggtgtggttagagtctccacata

SEQ ID NO: 47658 - DNA, 25 bp, Homo sapien
gaggtgtggttacagtctccacata

SEQ ID NO: 47659 - DNA, 25 bp, Homo sapien
gatgtgtctacctagtacccaccac

SEQ ID NO: 47660 - DNA, 25 bp, Homo sapien
gatgtgtctaccaagtacccaccac

SEQ ID NO: 47661 - DNA, 25 bp, Homo sapien
tgtgtcccccgagacgtccacggag

SEQ ID NO: 47662 - DNA, 25 bp, Homo sapien
tgtgtcccccgacacgtccacggag

SEQ ID NO: 47663 - DNA, 25 bp, Homo sapien
gtaggccatggtcactgtcgtcgga

SEQ ID NO: 47664 - DNA, 25 bp, Homo sapien
gtaggccatggtgactgtcgtcgga

SEQ ID NO: 47665 - DNA, 25 bp, Homo sapien
cataagtttcgtgaggatttcggac

SEQ ID NO: 47666 - DNA, 25 bp, Homo sapien
cataagtttcgtcaggatttcggac

SEQ ID NO: 47667 - DNA, 25 bp, Homo sapien
tacctctgtcgtgagtttcatctta

SEQ ID NO: 47668 - DNA, 25 bp, Homo sapien
tacctctgtcgtcagtttcatctta

SEQ ID NO: 47669 - DNA, 25 bp, Homo sapien
gctctgtcgccgattcacagttctc

SEQ ID NO: 47670 - DNA, 25 bp, Homo sapien
gctctgtcgccgtttcacagttctc

SEQ ID NO: 47671 - DNA, 25 bp, Homo sapien
aaagtcccgagatctctgactctgt

SEQ ID NO: 47672 - DNA, 25 bp, Homo sapien
aaagtcccgagaactctgactctgt

SEQ ID NO: 47673 - DNA, 25 bp, Homo sapien
agtctagtgtctcagatcctccttt

SEQ ID NO: 47674 - DNA, 25 bp, Homo sapien
agtctagtgtctgagatcctccttt

SEQ ID NO: 47675 - DNA, 25 bp, Homo sapien
gagtcaggtcgaaacttccgggact

SEQ ID NO: 47676 - DNA, 25 bp, Homo sapien
gagtcaggtcgatacttccgggact

SEQ ID NO: 47677 - DNA, 25 bp, Homo sapien
tactacttccggtgttccgtcggga

SEQ ID NO: 47678 - DNA, 25 bp, Homo sapien
tactacttccggagttccgtcggga

SEQ ID NO: 47679 - DNA, 25 bp, Homo sapien
aggaagaaccggacctccgcgagaa

SEQ ID NO: 47680 - DNA, 25 bp, Homo sapien
aggaagaaccggtcctccgcgagaa

SEQ ID NO: 47681 - DNA, 25 bp, Homo sapien
gaaatactcgcttgtcctctgaaac

SEQ ID NO: 47682 - DNA, 25 bp, Homo sapien
gaaatactcgctagtcctctgaaac

SEQ ID NO: 47683 - DNA, 25 bp, Homo sapien
aagtatgaacaaaccacgggacact

SEQ ID NO: 47684 - DNA, 25 bp, Homo sapien
aagtatgaacaatccacgggacact

SEQ ID NO: 47685 - DNA, 25 bp, Homo sapien
gaaactttagaaccttggtgactac

SEQ ID NO: 47686 - DNA, 25 bp, Homo sapien
gaaactttagaagcttggtgactac

SEQ ID NO: 47687 - DNA, 25 bp, Homo sapien
tgataatagttgtagtcctttcatc

SEQ ID NO: 47688 - DNA, 25 bp, Homo sapien
tgataatagttgaagtcctttcatc

SEQ ID NO: 47689 - DNA, 25 bp, Homo sapien
caagacactcggtttccagaacgtc

SEQ ID NO: 47690 - DNA, 25 bp, Homo sapien
caagacactcggattccagaacgtc

SEQ ID NO: 47691 - DNA, 25 bp, Homo sapien
caccacctcagtttcgacagaagac

SEQ ID NO: 47692 - DNA, 25 bp, Homo sapien
caccacctcagtatcgacagaagac

SEQ ID NO: 47693 - DNA, 25 bp, Homo sapien
ggcacggactcatcttgaacaagac

SEQ ID NO: 47694 - DNA, 25 bp, Homo sapien
ggcacggactcaacttgaacaagac

SEQ ID NO: 47695 - DNA, 25 bp, Homo sapien
agagaaaatcaacctctcggaaagc

SEQ ID NO: 47696 - DNA, 25 bp, Homo sapien
agagaaaatcaagctctcggaaagc

SEQ ID NO: 47697 - DNA, 25 bp, Homo sapien
taggaaccccgacttcggtgcacgg

SEQ ID NO: 47698 - DNA, 25 bp, Homo sapien
taggaaccccgagttcggtgcacgg

SEQ ID NO: 47699 - DNA, 25 bp, Homo sapien
ggaacaccgaaaggacctcctctag

SEQ ID NO: 47700 - DNA, 25 bp, Homo sapien
ggaacaccgaaacgacctcctctag

SEQ ID NO: 47701 - DNA, 25 bp, Homo sapien
gaagagtctcgaaagatctcttttg

SEQ ID NO: 47702 - DNA, 25 bp, Homo sapien
gaagagtctcgatagatctcttttg

SEQ ID NO: 47703 - DNA, 25 bp, Homo sapien
agacattaacgttaagtcacatttg

SEQ ID NO: 47704 - DNA, 25 bp, Homo sapien
agacattaacgtaaagtcacatttg

SEQ ID NO: 47705 - DNA, 25 bp, Homo sapien
cactttcctatgtacacatgtagtg

SEQ ID NO: 47706 - DNA, 25 bp, Homo sapien
cactttcctatgaacacatgtagtg

SEQ ID NO: 47707 - DNA, 25 bp, Homo sapien
ctgtatttctgagatacgtctttgg

SEQ ID NO: 47708 - DNA, 25 bp, Homo sapien
ctgtatttctgacatacgtctttgg

SEQ ID NO: 47709 - DNA, 25 bp, Homo sapien
cgattcgctcagtgtctctaaccag

SEQ ID NO: 47710 - DNA, 25 bp, Homo sapien
cgattcgctcagagtctctaaccag

SEQ ID NO: 47711 - DNA, 25 bp, Homo sapien
taaggacctcattatctctgccgtg

SEQ ID NO: 47712 - DNA, 25 bp, Homo sapien
taaggacctcataatctctgccgtg

SEQ ID NO: 47713 - DNA, 25 bp, Homo sapien
aagaactactatttaccaaggaccg

SEQ ID NO: 47714 - DNA, 25 bp, Homo sapien
aagaactactatataccaaggaccg

SEQ ID NO: 47715 - DNA, 25 bp, Homo sapien
actaagtcacaaacaagtctcgagt

SEQ ID NO: 47716 - DNA, 25 bp, Homo sapien
actaagtcacaatcaagtctcgagt

SEQ ID NO: 47717 - DNA, 25 bp, Homo sapien
tactaagacttaatcgacatagcag

SEQ ID NO: 47718 - DNA, 25 bp, Homo sapien
tactaagacttattcgacatagcag

SEQ ID NO: 47719 - DNA, 25 bp, Homo sapien
caaaggtcactaatctaaagtcagt

SEQ ID NO: 47720 - DNA, 25 bp, Homo sapien
caaaggtcactattctaaagtcagt

SEQ ID NO: 47721 - DNA, 25 bp, Homo sapien
taaaacaccgttcatgaggtgtcag

SEQ ID NO: 47722 - DNA, 25 bp, Homo sapien
taaaacaccgttgatgaggtgtcag

SEQ ID NO: 47723 - DNA, 25 bp, Homo sapien
tgtcctgtgtcttgacgtcgtttgt

SEQ ID NO: 47724 - DNA, 25 bp, Homo sapien
tgtcctgtgtctagacgtcgtttgt

SEQ ID NO: 47725 - DNA, 25 bp, Homo sapien
tctttcgtcgtaaccggagtttcat

SEQ ID NO: 47726 - DNA, 25 bp, Homo sapien
tctttcgtcgtatccggagtttcat

SEQ ID NO: 47727 - DNA, 25 bp, Homo sapien
tctctagtctccttgagtgtgaaac

SEQ ID NO: 47728 - DNA, 25 bp, Homo sapien
tctctagtctccatgagtgtgaaac

SEQ ID NO: 47729 - DNA, 25 bp, Homo sapien
gtctacgttagagaaggtctttcga

SEQ ID NO: 47730 - DNA, 25 bp, Homo sapien
gtctacgttagacaaggtctttcga

SEQ ID NO: 47731 - DNA, 25 bp, Homo sapien
tctacaatctacacggtcatggtag

SEQ ID NO: 47732 - DNA, 25 bp, Homo sapien
tctacaatctactcggtcatggtag

SEQ ID NO: 47733 - DNA, 25 bp, Homo sapien
aagacagctactttgtcacacggag

SEQ ID NO: 47734 - DNA, 25 bp, Homo sapien
aagacagctactatgtcacacggag

SEQ ID NO: 47735 - DNA, 25 bp, Homo sapien
agcactggagtttctgactcgtgac

SEQ ID NO: 47736 - DNA, 25 bp, Homo sapien
agcactggagttactgactcgtgac

SEQ ID NO: 47737 - DNA, 25 bp, Homo sapien
tcgattatatttcgactgtttaccg

SEQ ID NO: 47738 - DNA, 25 bp, Homo sapien
tcgattatatttggactgtttaccg

SEQ ID NO: 47739 - DNA, 25 bp, Homo sapien
ctctatgttaatttctatggtgtcc

SEQ ID NO: 47740 - DNA, 25 bp, Homo sapien
ctctatgttaatatctatggtgtcc

SEQ ID NO: 47741 - DNA, 25 bp, Homo sapien
agtagtgttatacaaagagtccctg

SEQ ID NO: 47742 - DNA, 25 bp, Homo sapien
agtagtgttatagaaagagtccctg

SEQ ID NO: 47743 - DNA, 25 bp, Homo sapien
agtggtacatgaacaacaccaactg

SEQ ID NO: 47744 - DNA, 25 bp, Homo sapien
agtggtacatgatcaacaccaactg

SEQ ID NO: 47745 - DNA, 25 bp, Homo sapien
cactagaaggggtaccgaccaactg

SEQ ID NO: 47746 - DNA, 25 bp, Homo sapien
cactagaaggggaaccgaccaactg

SEQ ID NO: 47747 - DNA, 25 bp, Homo sapien
acaaaaaggataataggtcacctcg

SEQ ID NO: 47748 - DNA, 25 bp, Homo sapien
acaaaaaggatattaggtcacctcg

SEQ ID NO: 47749 - DNA, 25 bp, Homo sapien
caaacaagacagtagggtggctact

SEQ ID NO: 47750 - DNA, 25 bp, Homo sapien
caaacaagacagaagggtggctact

SEQ ID NO: 47751 - DNA, 25 bp, Homo sapien
gtagtcgaatacgacaccggttttc

SEQ ID NO: 47752 - DNA, 25 bp, Homo sapien
gtagtcgaataccacaccggttttc

SEQ ID NO: 47753 - DNA, 25 bp, Homo sapien
aagtcgtccaagagccacgtttccg

SEQ ID NO: 47754 - DNA, 25 bp, Homo sapien
aagtcgtccaagtgccacgtttccg

SEQ ID NO: 47755 - DNA, 25 bp, Homo sapien
agtcccgagcactgtgggaccctca

SEQ ID NO: 47756 - DNA, 25 bp, Homo sapien
agtcccgagcacagtgggaccctca

SEQ ID NO: 47757 - DNA, 25 bp, Homo sapien
gatctccctgaggacaggaccccat

SEQ ID NO: 47758 - DNA, 25 bp, Homo sapien
gatctccctgagcacaggaccccat

SEQ ID NO: 47759 - DNA, 25 bp, Homo sapien
attgcctggtcaacggcgaccggag

SEQ ID NO: 47760 - DNA, 25 bp, Homo sapien
attgcctggtcatcggcgaccggag

SEQ ID NO: 47761 - DNA, 25 bp, Homo sapien
ttagaagaagtcagcgaggtccaga

SEQ ID NO: 47762 - DNA, 25 bp, Homo sapien
ttagaagaagtctgcgaggtccaga

SEQ ID NO: 47763 - DNA, 25 bp, Homo sapien
ataagaggaccttgactttacgaat

SEQ ID NO: 47764 - DNA, 25 bp, Homo sapien
ataagaggacctagactttacgaat

SEQ ID NO: 47765 - DNA, 25 bp, Homo sapien
agaggacccggtcagcgtccggcta

SEQ ID NO: 47766 - DNA, 25 bp, Homo sapien
agaggacccggtgagcgtccggcta

SEQ ID NO: 47767 - DNA, 25 bp, Homo sapien
gacaggaagaaggtagggtcaccta

SEQ ID NO: 47768 - DNA, 25 bp, Homo sapien
gacaggaagaagctagggtcaccta

SEQ ID NO: 47769 - DNA, 25 bp, Homo sapien
tcacgggacagagacccattgtcta

SEQ ID NO: 47770 - DNA, 25 bp, Homo sapien
tcacgggacagacacccattgtcta

SEQ ID NO: 47771 - DNA, 25 bp, Homo sapien
gaagggtgagagacctctctgttta

SEQ ID NO: 47772 - DNA, 25 bp, Homo sapien
gaagggtgagagtcctctctgttta

SEQ ID NO: 47773 - DNA, 25 bp, Homo sapien
ccggtaaaactgtagtttgtctttt

SEQ ID NO: 47774 - DNA, 25 bp, Homo sapien
ccggtaaaactgaagtttgtctttt

SEQ ID NO: 47775 - DNA, 25 bp, Homo sapien
gggtaactttcacaagattcttatt

SEQ ID NO: 47776 - DNA, 25 bp, Homo sapien
gggtaactttcagaagattcttatt

SEQ ID NO: 47777 - DNA, 25 bp, Homo sapien
aatcgttagacgaggagttctacaa

SEQ ID NO: 47778 - DNA, 25 bp, Homo sapien
aatcgttagacgtggagttctacaa

SEQ ID NO: 47779 - DNA, 25 bp, Homo sapien
tggttaggtcagagggagtcccaac

SEQ ID NO: 47780 - DNA, 25 bp, Homo sapien
tggttaggtcagtgggagtcccaac

SEQ ID NO: 47781 - DNA, 25 bp, Homo sapien
cgaggaggaccgtggtcttcaccaa

SEQ ID NO: 47782 - DNA, 25 bp, Homo sapien
cgaggaggaccgaggtcttcaccaa

SEQ ID NO: 47783 - DNA, 25 bp, Homo sapien
ggatagaccggacatgtacaaagta

SEQ ID NO: 47784 - DNA, 25 bp, Homo sapien
ggatagaccggagatgtacaaagta

SEQ ID NO: 47785 - DNA, 25 bp, Homo sapien
gcaaaactgttaactttacagtaga

SEQ ID NO: 47786 - DNA, 25 bp, Homo sapien
gcaaaactgttatctttacagtaga

SEQ ID NO: 47787 - DNA, 25 bp, Homo sapien
acatgaaggttttagtctacgaaac

SEQ ID NO: 47788 - DNA, 25 bp, Homo sapien
acatgaaggtttaagtctacgaaac

SEQ ID NO: 47789 - DNA, 25 bp, Homo sapien
tatttacaaggttttgtgtacccgc

SEQ ID NO: 47790 - DNA, 25 bp, Homo sapien
tatttacaaggtattgtgtacccgc

SEQ ID NO: 47791 - DNA, 25 bp, Homo sapien
ctattaacaggtcttggtctctacc

SEQ ID NO: 47792 - DNA, 25 bp, Homo sapien
ctattaacaggtgttggtctctacc

SEQ ID NO: 47793 - DNA, 25 bp, Homo sapien
tagagcccctggttcgtctctgatc

SEQ ID NO: 47794 - DNA, 25 bp, Homo sapien
tagagcccctggatcgtctctgatc

SEQ ID NO: 47795 - DNA, 25 bp, Homo sapien
aggaccggtaccatcgcgtggtacc

SEQ ID NO: 47796 - DNA, 25 bp, Homo sapien
aggaccggtaccttcgcgtggtacc

SEQ ID NO: 47797 - DNA, 25 bp, Homo sapien
actccgtgactattaccggacgtcc

SEQ ID NO: 47798 - DNA, 25 bp, Homo sapien
actccgtgactaataccggacgtcc

SEQ ID NO: 47799 - DNA, 25 bp, Homo sapien
tcaccgcttaagatcacggctctac

SEQ ID NO: 47800 - DNA, 25 bp, Homo sapien
tcaccgcttaagttcacggctctac

SEQ ID NO: 47801 - DNA, 25 bp, Homo sapien
ctgtcatccgagtcgggtctctacg

SEQ ID NO: 47802 - DNA, 25 bp, Homo sapien
ctgtcatccgagacgggtctctacg

SEQ ID NO: 47803 - DNA, 25 bp, Homo sapien
tcttaagtcgagaaagtgttctctc

SEQ ID NO: 47804 - DNA, 25 bp, Homo sapien
tcttaagtcgagtaagtgttctctc

SEQ ID NO: 47805 - DNA, 25 bp, Homo sapien
aatgtacagcgaagagatggtcctc

SEQ ID NO: 47806 - DNA, 25 bp, Homo sapien
aatgtacagcgatgagatggtcctc

SEQ ID NO: 47807 - DNA, 25 bp, Homo sapien
tataatgactactggtaggagtccc

SEQ ID NO: 47808 - DNA, 25 bp, Homo sapien
tataatgactacaggtaggagtccc

SEQ ID NO: 47809 - DNA, 25 bp, Homo sapien
atcatgactgacatgttactttcgt

SEQ ID NO: 47810 - DNA, 25 bp, Homo sapien
atcatgactgacttgttactttcgt

SEQ ID NO: 47811 - DNA, 25 bp, Homo sapien
aatgtgcttaggtgtgtatctcttc

SEQ ID NO: 47812 - DNA, 25 bp, Homo sapien
aatgtgcttaggagtgtatctcttc

SEQ ID NO: 47813 - DNA, 25 bp, Homo sapien
ttgagtctctgtacttacagttgtt

SEQ ID NO: 47814 - DNA, 25 bp, Homo sapien
ttgagtctctgttcttacagttgtt

SEQ ID NO: 47815 - DNA, 25 bp, Homo sapien
ttttcctagtactccgtacagggac

SEQ ID NO: 47816 - DNA, 25 bp, Homo sapien
ttttcctagtacaccgtacagggac

SEQ ID NO: 47817 - DNA, 25 bp, Homo sapien
tgtgtccctcgactgccgaaggtcc

SEQ ID NO: 47818 - DNA, 25 bp, Homo sapien
tgtgtccctcgagtgccgaaggtcc

SEQ ID NO: 47819 - DNA, 25 bp, Homo sapien
ttatcggtccggagtacttgacccc

SEQ ID NO: 47820 - DNA, 25 bp, Homo sapien
ttatcggtccggtgtacttgacccc

SEQ ID NO: 47821 - DNA, 25 bp, Homo sapien
ataacgtgtccagtcctggacccac

SEQ ID NO: 47822 - DNA, 25 bp, Homo sapien
ataacgtgtccactcctggacccac

SEQ ID NO: 47823 - DNA, 25 bp, Homo sapien
gtcttgagaccaccttttgtcccac

SEQ ID NO: 47824 - DNA, 25 bp, Homo sapien
gtcttgagaccagcttttgtcccac

SEQ ID NO: 47825 - DNA, 25 bp, Homo sapien
gtcctgtccggttctctgggtccta

SEQ ID NO: 47826 - DNA, 25 bp, Homo sapien
gtcctgtccggtactctgggtccta

SEQ ID NO: 47827 - DNA, 25 bp, Homo sapien
cggttcgtgccgacctctgggtgct

SEQ ID NO: 47828 - DNA, 25 bp, Homo sapien
cggttcgtgccgtcctctgggtgct

SEQ ID NO: 47829 - DNA, 25 bp, Homo sapien
tggtcgtccggcgtcccgtggctcc

SEQ ID NO: 47830 - DNA, 25 bp, Homo sapien
tggtcgtccggcctcccgtggctcc

SEQ ID NO: 47831 - DNA, 25 bp, Homo sapien
cctgtgtccggcttggggtttcact

SEQ ID NO: 47832 - DNA, 25 bp, Homo sapien
cctgtgtccggcatggggtttcact

SEQ ID NO: 47833 - DNA, 25 bp, Homo sapien
cctacggaaccctactaaggttttg

SEQ ID NO: 47834 - DNA, 25 bp, Homo sapien
cctacggaacccaactaaggttttg

SEQ ID NO: 47835 - DNA, 25 bp, Homo sapien
tgtgcgagcgccaactaaggtttga

SEQ ID NO: 47836 - DNA, 25 bp, Homo sapien
tgtgcgagcgcctactaaggtttga

SEQ ID NO: 47837 - DNA, 25 bp, Homo sapien
ctcgtgaatgaagtccctttctgag

SEQ ID NO: 47838 - DNA, 25 bp, Homo sapien
ctcgtgaatgaactccctttctgag

SEQ ID NO: 47839 - DNA, 25 bp, Homo sapien
gaacaggtcgaaataaccctccggt

SEQ ID NO: 47840 - DNA, 25 bp, Homo sapien
gaacaggtcgaattaaccctccggt

SEQ ID NO: 47841 - DNA, 25 bp, Homo sapien
taccgcaagacctactccacgtgga

SEQ ID NO: 47842 - DNA, 25 bp, Homo sapien
taccgcaagaccaactccacgtgga

SEQ ID NO: 47843 - DNA, 25 bp, Homo sapien
tgtcaaagtccgaaacgtcttgcga

SEQ ID NO: 47844 - DNA, 25 bp, Homo sapien
tgtcaaagtccgtaacgtcttgcga

SEQ ID NO: 47845 - DNA, 25 bp, Homo sapien
tgaagaaactatttcgtctcatgtt

SEQ ID NO: 47846 - DNA, 25 bp, Homo sapien
tgaagaaactatatcgtctcatgtt

SEQ ID NO: 47847 - DNA, 25 bp, Homo sapien
gtatacgtaatatttcgttcctgtt

SEQ ID NO: 47848 - DNA, 25 bp, Homo sapien
gtatacgtaataattcgttcctgtt

SEQ ID NO: 47849 - DNA, 25 bp, Homo sapien
acttcaatcgaaaacttcggttttt

SEQ ID NO: 47850 - DNA, 25 bp, Homo sapien
acttcaatcgaatacttcggttttt

SEQ ID NO: 47851 - DNA, 25 bp, Homo sapien
gttctcctcaaaattgtcctttgtg

SEQ ID NO: 47852 - DNA, 25 bp, Homo sapien
gttctcctcaaatttgtcctttgtg

SEQ ID NO: 47853 - DNA, 25 bp, Homo sapien
agtcatcaagtatttccttttaggt

SEQ ID NO: 47854 - DNA, 25 bp, Homo sapien
agtcatcaagtaattccttttaggt

SEQ ID NO: 47855 - DNA, 25 bp, Homo sapien
ctagacctcatcgatgtcctttttg

SEQ ID NO: 47856 - DNA, 25 bp, Homo sapien
ctagacctcatccatgtcctttttg

SEQ ID NO: 47857 - DNA, 25 bp, Homo sapien
gtcctagaaccacgtcaagtgttta

SEQ ID NO: 47858 - DNA, 25 bp, Homo sapien
gtcctagaaccaggtcaagtgttta

SEQ ID NO: 47859 - DNA, 25 bp, Homo sapien
ctttacacatacgtcgtttgtctga

SEQ ID NO: 47860 - DNA, 25 bp, Homo sapien
ctttacacatacctcgtttgtctga

SEQ ID NO: 47861 - DNA, 25 bp, Homo sapien
cgtataacacgagaagactttacaa

SEQ ID NO: 47862 - DNA, 25 bp, Homo sapien
cgtataacacgacaagactttacaa

SEQ ID NO: 47863 - DNA, 25 bp, Homo sapien
ggctctctacgacatcgctggtaaa

SEQ ID NO: 47864 - DNA, 25 bp, Homo sapien
ggctctctacgagatcgctggtaaa

SEQ ID NO: 47865 - DNA, 25 bp, Homo sapien
cgttctcatcgttacctggtacatc

SEQ ID NO: 47866 - DNA, 25 bp, Homo sapien
cgttctcatcgtaacctggtacatc

SEQ ID NO: 47867 - DNA, 25 bp, Homo sapien
cccacctgctgtacgggtgtaatct

SEQ ID NO: 47868 - DNA, 25 bp, Homo sapien
cccacctgctgttcgggtgtaatct

SEQ ID NO: 47869 - DNA, 25 bp, Homo sapien
ctcctttcgtttgaccggtagccct

SEQ ID NO: 47870 - DNA, 25 bp, Homo sapien
ctcctttcgtttcaccggtagccct

SEQ ID NO: 47871 - DNA, 25 bp, Homo sapien
ccccgtcgggtggacacatttgcac

SEQ ID NO: 47872 - DNA, 25 bp, Homo sapien
ccccgtcgggtgcacacatttgcac

SEQ ID NO: 47873 - DNA, 25 bp, Homo sapien
ggtactgtcagtaccacagaggcac

SEQ ID NO: 47874 - DNA, 25 bp, Homo sapien
ggtactgtcagttccacagaggcac

SEQ ID NO: 47875 - DNA, 25 bp, Homo sapien
acctgttaggagatccaggttcctg

SEQ ID NO: 47876 - DNA, 25 bp, Homo sapien
acctgttaggagttccaggttcctg

SEQ ID NO: 47877 - DNA, 25 bp, Homo sapien
gaacccaggaatcatggacctaccg

SEQ ID NO: 47878 - DNA, 25 bp, Homo sapien
gaacccaggaatgatggacctaccg

SEQ ID NO: 47879 - DNA, 25 bp, Homo sapien
cagttaatacgtaaggacactcagt

SEQ ID NO: 47880 - DNA, 25 bp, Homo sapien
cagttaatacgttaggacactcagt

SEQ ID NO: 47881 - DNA, 25 bp, Homo sapien
gaccatatttgtttgtcatcgatat

SEQ ID NO: 47882 - DNA, 25 bp, Homo sapien
gaccatatttgtatgtcatcgatat

SEQ ID NO: 47883 - DNA, 25 bp, Homo sapien
aatacttatgtcttggttaaatccg

SEQ ID NO: 47884 - DNA, 25 bp, Homo sapien
aatacttatgtcatggttaaatccg

SEQ ID NO: 47885 - DNA, 25 bp, Homo sapien
gttgtacagtgaatcttcttttctg

SEQ ID NO: 47886 - DNA, 25 bp, Homo sapien
gttgtacagtgattcttcttttctg

SEQ ID NO: 47887 - DNA, 25 bp, Homo sapien
gaacggtgtcagtagagacctccct

SEQ ID NO: 47888 - DNA, 25 bp, Homo sapien
gaacggtgtcagaagagacctccct

SEQ ID NO: 47889 - DNA, 25 bp, Homo sapien
ccagacacggttacggagggctccc

SEQ ID NO: 47890 - DNA, 25 bp, Homo sapien
ccagacacggtttcggagggctccc

SEQ ID NO: 47891 - DNA, 25 bp, Homo sapien
cactgattttcgtctcgtgactatt

SEQ ID NO: 47892 - DNA, 25 bp, Homo sapien
cactgattttcgactcgtgactatt

SEQ ID NO: 47893 - DNA, 25 bp, Homo sapien
ctgttcttgacgtcggtcgcgatgt

SEQ ID NO: 47894 - DNA, 25 bp, Homo sapien
ctgttcttgacgacggtcgcgatgt

SEQ ID NO: 47895 - DNA, 25 bp, Homo sapien
agttttaccgagaacgttaacgatg

SEQ ID NO: 47896 - DNA, 25 bp, Homo sapien
agttttaccgagtacgttaacgatg

SEQ ID NO: 47897 - DNA, 25 bp, Homo sapien
aggtgttacgagtactacgcccgtt

SEQ ID NO: 47898 - DNA, 25 bp, Homo sapien
aggtgttacgagaactacgcccgtt

SEQ ID NO: 47899 - DNA, 25 bp, Homo sapien
gacctggtaagaactgtctcgactt

SEQ ID NO: 47900 - DNA, 25 bp, Homo sapien
gacctggtaagatctgtctcgactt

SEQ ID NO: 47901 - DNA, 25 bp, Homo sapien
tacctaggtaagtcgggagagtcgt

SEQ ID NO: 47902 - DNA, 25 bp, Homo sapien
tacctaggtaagacgggagagtcgt

SEQ ID NO: 47903 - DNA, 25 bp, Homo sapien
ccacgtctagacctcaggtcggagt

SEQ ID NO: 47904 - DNA, 25 bp, Homo sapien
ccacgtctagacgtcaggtcggagt

SEQ ID NO: 47905 - DNA, 25 bp, Homo sapien
gctcattgacgaactattctcgtat

SEQ ID NO: 47906 - DNA, 25 bp, Homo sapien
gctcattgacgatctattctcgtat

SEQ ID NO: 47907 - DNA, 25 bp, Homo sapien
aagatcgtaacgtgcgtttgactaa

SEQ ID NO: 47908 - DNA, 25 bp, Homo sapien
aagatcgtaacgagcgtttgactaa

SEQ ID NO: 47909 - DNA, 25 bp, Homo sapien
caaagagtcaatagcgtcaaggttt

SEQ ID NO: 47910 - DNA, 25 bp, Homo sapien
caaagagtcaattgcgtcaaggttt

SEQ ID NO: 47911 - DNA, 25 bp, Homo sapien
acagggtaaataaaccatagacctt

SEQ ID NO: 47912 - DNA, 25 bp, Homo sapien
acagggtaaatataccatagacctt

SEQ ID NO: 47913 - DNA, 25 bp, Homo sapien
tccggtttagagaacaccaggattt

SEQ ID NO: 47914 - DNA, 25 bp, Homo sapien
tccggtttagagtacaccaggattt

SEQ ID NO: 47915 - DNA, 25 bp, Homo sapien
tcagcgttcaggtgcccggcgctct

SEQ ID NO: 47916 - DNA, 25 bp, Homo sapien
tcagcgttcaggagcccggcgctct

SEQ ID NO: 47917 - DNA, 25 bp, Homo sapien
gtggcgagcgacctgccagacactc

SEQ ID NO: 47918 - DNA, 25 bp, Homo sapien
gtggcgagcgacgtgccagacactc

SEQ ID NO: 47919 - DNA, 25 bp, Homo sapien
tgtagttatgacgtcccgaccgctc

SEQ ID NO: 47920 - DNA, 25 bp, Homo sapien
tgtagttatgacctcccgaccgctc

SEQ ID NO: 47921 - DNA, 25 bp, Homo sapien
tgagtttataacctgagatcgtgtc

SEQ ID NO: 47922 - DNA, 25 bp, Homo sapien
tgagtttataacgtgagatcgtgtc

SEQ ID NO: 47923 - DNA, 25 bp, Homo sapien
attatactacggtacagtactgttc

SEQ ID NO: 47924 - DNA, 25 bp, Homo sapien
attatactacggaacagtactgttc

SEQ ID NO: 47925 - DNA, 25 bp, Homo sapien
ccggcacaatctcgacaaataattg

SEQ ID NO: 47926 - DNA, 25 bp, Homo sapien
ccggcacaatctggacaaataattg

SEQ ID NO: 47927 - DNA, 25 bp, Homo sapien
ggagaatagacacaccttaaacttg

SEQ ID NO: 47928 - DNA, 25 bp, Homo sapien
ggagaatagacagaccttaaacttg

SEQ ID NO: 47929 - DNA, 25 bp, Homo sapien
aagagacttatatcatacagatctg

SEQ ID NO: 47930 - DNA, 25 bp, Homo sapien
aagagacttataacatacagatctg

SEQ ID NO: 47931 - DNA, 25 bp, Homo sapien
gacgaaaaccttttctactactgtg

SEQ ID NO: 47932 - DNA, 25 bp, Homo sapien
gacgaaaaccttatctactactgtg

SEQ ID NO: 47933 - DNA, 25 bp, Homo sapien
aaggaaaactcttagaccgaatctt

SEQ ID NO: 47934 - DNA, 25 bp, Homo sapien
aaggaaaactctaagaccgaatctt

SEQ ID NO: 47935 - DNA, 25 bp, Homo sapien
cagtgaaagtggttgtctcatctca

SEQ ID NO: 47936 - DNA, 25 bp, Homo sapien
cagtgaaagtggatgtctcatctca

SEQ ID NO: 47937 - DNA, 25 bp, Homo sapien
aaggataataggtcacctcgtatta

SEQ ID NO: 47938 - DNA, 25 bp, Homo sapien
aaggataataggacacctcgtatta

SEQ ID NO: 47939 - DNA, 25 bp, Homo sapien
agtctgaacagtgaccccgatcgat

SEQ ID NO: 47940 - DNA, 25 bp, Homo sapien
agtctgaacagtcaccccgatcgat

SEQ ID NO: 47941 - DNA, 25 bp, Homo sapien
aactcgagaaagtacctgtggaagt

SEQ ID NO: 47942 - DNA, 25 bp, Homo sapien
aactcgagaaagaacctgtggaagt

SEQ ID NO: 47943 - DNA, 25 bp, Homo sapien
catccacccgagacttgaacgaagt

SEQ ID NO: 47944 - DNA, 25 bp, Homo sapien
catccacccgagtcttgaacgaagt

SEQ ID NO: 47945 - DNA, 25 bp, Homo sapien
aaacctttgggtctggtactaggta

SEQ ID NO: 47946 - DNA, 25 bp, Homo sapien
aaacctttgggtgtggtactaggta

SEQ ID NO: 47947 - DNA, 25 bp, Homo sapien
agaaatcttaagattacaccatgtg

SEQ ID NO: 47948 - DNA, 25 bp, Homo sapien
agaaatcttaagtttacaccatgtg

SEQ ID NO: 47949 - DNA, 25 bp, Homo sapien
agaacttaaagtacttccatagtcg

SEQ ID NO: 47950 - DNA, 25 bp, Homo sapien
agaacttaaagttcttccatagtcg

SEQ ID NO: 47951 - DNA, 25 bp, Homo sapien
gtaaataacaggtactccgatgtcg

SEQ ID NO: 47952 - DNA, 25 bp, Homo sapien
gtaaataacaggaactccgatgtcg

SEQ ID NO: 47953 - DNA, 25 bp, Homo sapien
ttcacaggtaacaaacctgacaaag

SEQ ID NO: 47954 - DNA, 25 bp, Homo sapien
ttcacaggtaactaacctgacaaag

SEQ ID NO: 47955 - DNA, 25 bp, Homo sapien
tattaaaccgatgtcgattagcaaa

SEQ ID NO: 47956 - DNA, 25 bp, Homo sapien
tattaaaccgatctcgattagcaaa

SEQ ID NO: 47957 - DNA, 25 bp, Homo sapien
actccactcgatctgattcttatgg

SEQ ID NO: 47958 - DNA, 25 bp, Homo sapien
actccactcgatgtgattcttatgg

SEQ ID NO: 47959 - DNA, 25 bp, Homo sapien
cccatggtcgatcacggtctcgggg

SEQ ID NO: 47960 - DNA, 25 bp, Homo sapien
cccatggtcgatgacggtctcgggg

SEQ ID NO: 47961 - DNA, 25 bp, Homo sapien
cccagactacccaccgagttgtggg

SEQ ID NO: 47962 - DNA, 25 bp, Homo sapien
cccagactaccctccgagttgtggg

SEQ ID NO: 47963 - DNA, 25 bp, Homo sapien
ctctaacactctaggaccctagggg

SEQ ID NO: 47964 - DNA, 25 bp, Homo sapien
ctctaacactcttggaccctagggg

SEQ ID NO: 47965 - DNA, 25 bp, Homo sapien
ccaagaacctcaggacctattgaat

SEQ ID NO: 47966 - DNA, 25 bp, Homo sapien
ccaagaacctcacgacctattgaat

SEQ ID NO: 47967 - DNA, 25 bp, Homo sapien
cacccagcgtcccagtgagtgaaat

SEQ ID NO: 47968 - DNA, 25 bp, Homo sapien
cacccagcgtccgagtgagtgaaat

SEQ ID NO: 47969 - DNA, 25 bp, Homo sapien
cacgtcgtccagtgactgtagacat

SEQ ID NO: 47970 - DNA, 25 bp, Homo sapien
cacgtcgtccagagactgtagacat

SEQ ID NO: 47971 - DNA, 25 bp, Homo sapien
aacccgtccacgagaagactcgtgt

SEQ ID NO: 47972 - DNA, 25 bp, Homo sapien
aacccgtccacgtgaagactcgtgt

SEQ ID NO: 47973 - DNA, 25 bp, Homo sapien
gacccgaccgaactagagtccgtct

SEQ ID NO: 47974 - DNA, 25 bp, Homo sapien
gacccgaccgaagtagagtccgtct

SEQ ID NO: 47975 - DNA, 25 bp, Homo sapien
ctaactggttaccaaagctacttca

SEQ ID NO: 47976 - DNA, 25 bp, Homo sapien
ctaactggttacgaaagctacttca

SEQ ID NO: 47977 - DNA, 25 bp, Homo sapien
gtcgagtaactaaataactcttcag

SEQ ID NO: 47978 - DNA, 25 bp, Homo sapien
gtcgagtaactatataactcttcag

SEQ ID NO: 47979 - DNA, 25 bp, Homo sapien
cagtccgattaatagttctgtcagt

SEQ ID NO: 47980 - DNA, 25 bp, Homo sapien
cagtccgattaaaagttctgtcagt

SEQ ID NO: 47981 - DNA, 25 bp, Homo sapien
gtcacccagatctttatttcgtcag

SEQ ID NO: 47982 - DNA, 25 bp, Homo sapien
gtcacccagatcattatttcgtcag

SEQ ID NO: 47983 - DNA, 25 bp, Homo sapien
gtttacgactacagtttacagtcgt

SEQ ID NO: 47984 - DNA, 25 bp, Homo sapien
gtttacgactactgtttacagtcgt

SEQ ID NO: 47985 - DNA, 25 bp, Homo sapien
aggatgagtacttcgtgtcacatct

SEQ ID NO: 47986 - DNA, 25 bp, Homo sapien
aggatgagtactacgtgtcacatct

SEQ ID NO: 47987 - DNA, 25 bp, Homo sapien
taaacgtcaatcgtagtcttagatt

SEQ ID NO: 47988 - DNA, 25 bp, Homo sapien
taaacgtcaatcctagtcttagatt

SEQ ID NO: 47989 - DNA, 25 bp, Homo sapien
ataagtgatggaatcgtcgtacatc

SEQ ID NO: 47990 - DNA, 25 bp, Homo sapien
ataagtgatggattcgtcgtacatc

SEQ ID NO: 47991 - DNA, 25 bp, Homo sapien
tataaagagatgattctgtactctc

SEQ ID NO: 47992 - DNA, 25 bp, Homo sapien
tataaagagatgtttctgtactctc

SEQ ID NO: 47993 - DNA, 25 bp, Homo sapien
attatgagcgaatcggtcctttcct

SEQ ID NO: 47994 - DNA, 25 bp, Homo sapien
attatgagcgaaacggtcctttcct

SEQ ID NO: 47995 - DNA, 25 bp, Homo sapien
cggacaaccagagtcacatactgtc

SEQ ID NO: 47996 - DNA, 25 bp, Homo sapien
cggacaaccagactcacatactgtc

SEQ ID NO: 47997 - DNA, 25 bp, Homo sapien
ctgtccagacagaccctgtaaggtc

SEQ ID NO: 47998 - DNA, 25 bp, Homo sapien
ctgtccagacagtccctgtaaggtc

SEQ ID NO: 47999 - DNA, 25 bp, Homo sapien
atactaaagcgtctgcggaccggtc

SEQ ID NO: 48000 - DNA, 25 bp, Homo sapien
atactaaagcgtgtgcggaccggtc

SEQ ID NO: 48001 - DNA, 25 bp, Homo sapien
tcaagagacgtcgtcacagacaggc

SEQ ID NO: 48002 - DNA, 25 bp, Homo sapien
tcaagagacgtcctcacagacaggc

SEQ ID NO: 48003 - DNA, 25 bp, Homo sapien
gaactgaacaagacccttttgtgac

SEQ ID NO: 48004 - DNA, 25 bp, Homo sapien
gaactgaacaagtcccttttgtgac

SEQ ID NO: 48005 - DNA, 25 bp, Homo sapien
aacccgggaccgtccttcaggtgcg

SEQ ID NO: 48006 - DNA, 25 bp, Homo sapien
aacccgggaccgaccttcaggtgcg

SEQ ID NO: 48007 - DNA, 25 bp, Homo sapien
ccaccggtcgggacttcaacgggag

SEQ ID NO: 48008 - DNA, 25 bp, Homo sapien
ccaccggtcgggtcttcaacgggag

SEQ ID NO: 48009 - DNA, 25 bp, Homo sapien
cctcaattgtgactttccgtattgc

SEQ ID NO: 48010 - DNA, 25 bp, Homo sapien
cctcaattgtgagtttccgtattgc

SEQ ID NO: 48011 - DNA, 25 bp, Homo sapien
ccacttggggtctgtgctattcgtc

SEQ ID NO: 48012 - DNA, 25 bp, Homo sapien
ccacttggggtcagtgctattcgtc

SEQ ID NO: 48013 - DNA, 25 bp, Homo sapien
gtttgatttcagcacactctacgtc

SEQ ID NO: 48014 - DNA, 25 bp, Homo sapien
gtttgatttcaggacactctacgtc

SEQ ID NO: 48015 - DNA, 25 bp, Homo sapien
ttatgactcgatgtcagaaactccc

SEQ ID NO: 48016 - DNA, 25 bp, Homo sapien
ttatgactcgatctcagaaactccc

SEQ ID NO: 48017 - DNA, 25 bp, Homo sapien
gtcctgataaacgtgagaaacccct

SEQ ID NO: 48018 - DNA, 25 bp, Homo sapien
gtcctgataaacctgagaaacccct

SEQ ID NO: 48019 - DNA, 25 bp, Homo sapien
ccgtcgattccgtgtaacgaaggcc

SEQ ID NO: 48020 - DNA, 25 bp, Homo sapien
ccgtcgattccgagtaacgaaggcc

SEQ ID NO: 48021 - DNA, 25 bp, Homo sapien
ccaaaattaccgtagttgtgggtcc

SEQ ID NO: 48022 - DNA, 25 bp, Homo sapien
ccaaaattaccgaagttgtgggtcc

SEQ ID NO: 48023 - DNA, 25 bp, Homo sapien
gataaaaaccatttgttgacgtacc

SEQ ID NO: 48024 - DNA, 25 bp, Homo sapien
gataaaaaccatatgttgacgtacc

SEQ ID NO: 48025 - DNA, 25 bp, Homo sapien
cagaaataatgtcacatttaggttc

SEQ ID NO: 48026 - DNA, 25 bp, Homo sapien
cagaaataatgtgacatttaggttc

SEQ ID NO: 48027 - DNA, 25 bp, Homo sapien
gcaaaacacactttatttgtaaacc

SEQ ID NO: 48028 - DNA, 25 bp, Homo sapien
gcaaaacacactatatttgtaaacc

SEQ ID NO: 48029 - DNA, 25 bp, Homo sapien
cccgcactgtaaatgtgtcctctct

SEQ ID NO: 48030 - DNA, 25 bp, Homo sapien
cccgcactgtaattgtgtcctctct

SEQ ID NO: 48031 - DNA, 25 bp, Homo sapien
atagtcgtctcagattctgggattc

SEQ ID NO: 48032 - DNA, 25 bp, Homo sapien
atagtcgtctcacattctgggattc

SEQ ID NO: 48033 - DNA, 25 bp, Homo sapien
aatgggatgataattccgtgaactc

SEQ ID NO: 48034 - DNA, 25 bp, Homo sapien
aatgggatgatatttccgtgaactc

SEQ ID NO: 48035 - DNA, 25 bp, Homo sapien
ttatgaggtcgaaatccagtgcatt

SEQ ID NO: 48036 - DNA, 25 bp, Homo sapien
ttatgaggtcgatatccagtgcatt

SEQ ID NO: 48037 - DNA, 25 bp, Homo sapien
cgagtcgctgagacgtccaagcagg

SEQ ID NO: 48038 - DNA, 25 bp, Homo sapien
cgagtcgctgagtcgtccaagcagg

SEQ ID NO: 48039 - DNA, 25 bp, Homo sapien
aaaaaaccagagtgtcgaaagccag

SEQ ID NO: 48040 - DNA, 25 bp, Homo sapien
aaaaaaccagagagtcgaaagccag

SEQ ID NO: 48041 - DNA, 25 bp, Homo sapien
tactgagtcaatttcctcctctgtt

SEQ ID NO: 48042 - DNA, 25 bp, Homo sapien
tactgagtcaatatcctcctctgtt

SEQ ID NO: 48043 - DNA, 25 bp, Homo sapien
tttctaaggctgtctcctcttcctg

SEQ ID NO: 48044 - DNA, 25 bp, Homo sapien
tttctaaggctgactcctcttcctg

SEQ ID NO: 48045 - DNA, 25 bp, Homo sapien
ttcctagggttctcgaccgttcctg

SEQ ID NO: 48046 - DNA, 25 bp, Homo sapien
ttcctagggttcacgaccgttcctg

SEQ ID NO: 48047 - DNA, 25 bp, Homo sapien
tttacaagtctctgagacattccgc

SEQ ID NO: 48048 - DNA, 25 bp, Homo sapien
tttacaagtctcagagacattccgc

SEQ ID NO: 48049 - DNA, 25 bp, Homo sapien
ttcttacacctccaggaaggtcatt

SEQ ID NO: 48050 - DNA, 25 bp, Homo sapien
ttcttacacctcgaggaaggtcatt

SEQ ID NO: 48051 - DNA, 25 bp, Homo sapien
attcgtttacctgtaaccaggtaaa

SEQ ID NO: 48052 - DNA, 25 bp, Homo sapien
attcgtttacctctaaccaggtaaa

SEQ ID NO: 48053 - DNA, 25 bp, Homo sapien
actgtacaatgaacagacagtctaa

SEQ ID NO: 48054 - DNA, 25 bp, Homo sapien
actgtacaatgatcagacagtctaa

SEQ ID NO: 48055 - DNA, 25 bp, Homo sapien
caaaagaaggatcagtacagagtca

SEQ ID NO: 48056 - DNA, 25 bp, Homo sapien
caaaagaaggatgagtacagagtca

SEQ ID NO: 48057 - DNA, 25 bp, Homo sapien
cctcaggaggacagggcccagaagt

SEQ ID NO: 48058 - DNA, 25 bp, Homo sapien
cctcaggaggactgggcccagaagt

SEQ ID NO: 48059 - DNA, 25 bp, Homo sapien
gacccaggacaggacggcctccggt

SEQ ID NO: 48060 - DNA, 25 bp, Homo sapien
gacccaggacagcacggcctccggt

SEQ ID NO: 48061 - DNA, 25 bp, Homo sapien
acccgtcaaagacgtgcatcgcgct

SEQ ID NO: 48062 - DNA, 25 bp, Homo sapien
acccgtcaaagaggtgcatcgcgct

SEQ ID NO: 48063 - DNA, 25 bp, Homo sapien
gatccctagaacgtttgtcatcatc

SEQ ID NO: 48064 - DNA, 25 bp, Homo sapien
gatccctagaacctttgtcatcatc

SEQ ID NO: 48065 - DNA, 25 bp, Homo sapien
cgaacggacctattttgttaagtcg

SEQ ID NO: 48066 - DNA, 25 bp, Homo sapien
cgaacggacctaatttgttaagtcg

SEQ ID NO: 48067 - DNA, 25 bp, Homo sapien
cggtccgaaagcacgtttcttcccg

SEQ ID NO: 48068 - DNA, 25 bp, Homo sapien
cggtccgaaagctcgtttcttcccg

SEQ ID NO: 48069 - DNA, 25 bp, Homo sapien
aaggtaatcgttttatcttagttcc

SEQ ID NO: 48070 - DNA, 25 bp, Homo sapien
aaggtaatcgttatatcttagttcc

SEQ ID NO: 48071 - DNA, 25 bp, Homo sapien
aaggttctagtggaacccttctgtt

SEQ ID NO: 48072 - DNA, 25 bp, Homo sapien
aaggttctagtgcaacccttctgtt

SEQ ID NO: 48073 - DNA, 25 bp, Homo sapien
ggaagtatctttacccgttccagtt

SEQ ID NO: 48074 - DNA, 25 bp, Homo sapien
ggaagtatcttttcccgttccagtt

SEQ ID NO: 48075 - DNA, 25 bp, Homo sapien
acaggtttcatcaggtctctcatgt

SEQ ID NO: 48076 - DNA, 25 bp, Homo sapien
acaggtttcatctggtctctcatgt

SEQ ID NO: 48077 - DNA, 25 bp, Homo sapien
ggtatcatcgacgtgtgtcatcctt

SEQ ID NO: 48078 - DNA, 25 bp, Homo sapien
ggtatcatcgacctgtgtcatcctt

SEQ ID NO: 48079 - DNA, 25 bp, Homo sapien
ggggtttgacactgagaagactctt

SEQ ID NO: 48080 - DNA, 25 bp, Homo sapien
ggggtttgacacagagaagactctt

SEQ ID NO: 48081 - DNA, 25 bp, Homo sapien
gaacggatccccaacaaagggttat

SEQ ID NO: 48082 - DNA, 25 bp, Homo sapien
gaacggatcccctacaaagggttat

SEQ ID NO: 48083 - DNA, 25 bp, Homo sapien
gacccttccaccactgtaatgtttc

SEQ ID NO: 48084 - DNA, 25 bp, Homo sapien
gacccttccacctctgtaatgtttc

SEQ ID NO: 48085 - DNA, 25 bp, Homo sapien
ccatggacgccctgagactttgtcg

SEQ ID NO: 48086 - DNA, 25 bp, Homo sapien
ccatggacgcccagagactttgtcg

SEQ ID NO: 48087 - DNA, 25 bp, Homo sapien
tcagggaggacccgagatccgtctc

SEQ ID NO: 48088 - DNA, 25 bp, Homo sapien
tcagggaggaccggagatccgtctc

SEQ ID NO: 48089 - DNA, 25 bp, Homo sapien
ggcgacgacatcgagaacggtagtc

SEQ ID NO: 48090 - DNA, 25 bp, Homo sapien
ggcgacgacatccagaacggtagtc

SEQ ID NO: 48091 - DNA, 25 bp, Homo sapien
ctagtcggacatgacggaccggtcc

SEQ ID NO: 48092 - DNA, 25 bp, Homo sapien
ctagtcggacatcacggaccggtcc

SEQ ID NO: 48093 - DNA, 25 bp, Homo sapien
cgggagaagactcgagactctcgac

SEQ ID NO: 48094 - DNA, 25 bp, Homo sapien
cgggagaagactggagactctcgac

SEQ ID NO: 48095 - DNA, 25 bp, Homo sapien
aacaaggaacctcgagagtccgacg

SEQ ID NO: 48096 - DNA, 25 bp, Homo sapien
aacaaggaacctggagagtccgacg

SEQ ID NO: 48097 - DNA, 25 bp, Homo sapien
aggtcgggactcttcatcggagcct

SEQ ID NO: 48098 - DNA, 25 bp, Homo sapien
aggtcgggactcatcatcggagcct

SEQ ID NO: 48099 - DNA, 25 bp, Homo sapien
ggaacggtcctcatcctgtgactcc

SEQ ID NO: 48100 - DNA, 25 bp, Homo sapien
ggaacggtcctcttcctgtgactcc

SEQ ID NO: 48101 - DNA, 25 bp, Homo sapien
tcaggtccgtcaacatgtcgtatca

SEQ ID NO: 48102 - DNA, 25 bp, Homo sapien
tcaggtccgtcatcatgtcgtatca

SEQ ID NO: 48103 - DNA, 25 bp, Homo sapien
cgggtcgtctgtcctgtgaggagtc

SEQ ID NO: 48104 - DNA, 25 bp, Homo sapien
cgggtcgtctgtgctgtgaggagtc

SEQ ID NO: 48105 - DNA, 25 bp, Homo sapien
ggtggttcgtcgttctgtgagaacc

SEQ ID NO: 48106 - DNA, 25 bp, Homo sapien
ggtggttcgtcgatctgtgagaacc

SEQ ID NO: 48107 - DNA, 25 bp, Homo sapien
aaggttctgtcgtgctcggacacac

SEQ ID NO: 48108 - DNA, 25 bp, Homo sapien
aaggttctgtcgagctcggacacac

SEQ ID NO: 48109 - DNA, 25 bp, Homo sapien
aagagatcagtgaaacgtttacctt

SEQ ID NO: 48110 - DNA, 25 bp, Homo sapien
aagagatcagtgtaacgtttacctt

SEQ ID NO: 48111 - DNA, 25 bp, Homo sapien
agtaagttaactagcgtttcacaga

SEQ ID NO: 48112 - DNA, 25 bp, Homo sapien
agtaagttaacttgcgtttcacaga

SEQ ID NO: 48113 - DNA, 25 bp, Homo sapien
cttatttgacatctaactcgcagtg

SEQ ID NO: 48114 - DNA, 25 bp, Homo sapien
cttatttgacatgtaactcgcagtg

SEQ ID NO: 48115 - DNA, 25 bp, Homo sapien
tctttatgacatctaaaacagtcgt

SEQ ID NO: 48116 - DNA, 25 bp, Homo sapien
tctttatgacatgtaaaacagtcgt

SEQ ID NO: 48117 - DNA, 25 bp, Homo sapien
ttggtttactaaacgaacgacaaag

SEQ ID NO: 48118 - DNA, 25 bp, Homo sapien
ttggtttactaatcgaacgacaaag

SEQ ID NO: 48119 - DNA, 25 bp, Homo sapien
aaatagttcgtcgatgataccataa

SEQ ID NO: 48120 - DNA, 25 bp, Homo sapien
aaatagttcgtccatgataccataa

SEQ ID NO: 48121 - DNA, 25 bp, Homo sapien
cataaagtttacaaaatctctaaat

SEQ ID NO: 48122 - DNA, 25 bp, Homo sapien
cataaagtttactaaatctctaaat

SEQ ID NO: 48123 - DNA, 25 bp, Homo sapien
gggaaagtagattgacgaacagtcc

SEQ ID NO: 48124 - DNA, 25 bp, Homo sapien
gggaaagtagatagacgaacagtcc

SEQ ID NO: 48125 - DNA, 25 bp, Homo sapien
aacgaggtacgttctagcttgcagc

SEQ ID NO: 48126 - DNA, 25 bp, Homo sapien
aacgaggtacgtactagcttgcagc

SEQ ID NO: 48127 - DNA, 25 bp, Homo sapien
cggcgtctggtaatagaccgccctc

SEQ ID NO: 48128 - DNA, 25 bp, Homo sapien
cggcgtctggtattagaccgccctc

SEQ ID NO: 48129 - DNA, 25 bp, Homo sapien
taatccgtcacttcgttatttctgg

SEQ ID NO: 48130 - DNA, 25 bp, Homo sapien
taatccgtcactacgttatttctgg

SEQ ID NO: 48131 - DNA, 25 bp, Homo sapien
tccttgtactatgttttgtatcacg

SEQ ID NO: 48132 - DNA, 25 bp, Homo sapien
tccttgtactatcttttgtatcacg

SEQ ID NO: 48133 - DNA, 25 bp, Homo sapien
tcgtagtagttatgtcttagactcc

SEQ ID NO: 48134 - DNA, 25 bp, Homo sapien
tcgtagtagttaagtcttagactcc

SEQ ID NO: 48135 - DNA, 25 bp, Homo sapien
ttcttttactattgagttctgacaa

SEQ ID NO: 48136 - DNA, 25 bp, Homo sapien
ttcttttactatagagttctgacaa

SEQ ID NO: 48137 - DNA, 25 bp, Homo sapien
ttttgtgtccttcgaccccgaggat

SEQ ID NO: 48138 - DNA, 25 bp, Homo sapien
ttttgtgtccttggaccccgaggat

SEQ ID NO: 48139 - DNA, 25 bp, Homo sapien
ttgtgttttccgtccgtcgtaccga

SEQ ID NO: 48140 - DNA, 25 bp, Homo sapien
ttgtgttttccgaccgtcgtaccga

SEQ ID NO: 48141 - DNA, 25 bp, Homo sapien
ttcttttgtcaggtgtcgtccaccg

SEQ ID NO: 48142 - DNA, 25 bp, Homo sapien
ttcttttgtcagctgtcgtccaccg

SEQ ID NO: 48143 - DNA, 25 bp, Homo sapien
gtgtacgttaatcaatcttgttttc

SEQ ID NO: 48144 - DNA, 25 bp, Homo sapien
gtgtacgttaatgaatcttgttttc

SEQ ID NO: 48145 - DNA, 25 bp, Homo sapien
gtcgccaatattgtccggactgacg

SEQ ID NO: 48146 - DNA, 25 bp, Homo sapien
gtcgccaatattctccggactgacg

SEQ ID NO: 48147 - DNA, 25 bp, Homo sapien
tctttgtggtcgtcgcggtcctacg

SEQ ID NO: 48148 - DNA, 25 bp, Homo sapien
tctttgtggtcgacgcggtcctacg

SEQ ID NO: 48149 - DNA, 25 bp, Homo sapien
tttatctaggtgttcgtattaacct

SEQ ID NO: 48150 - DNA, 25 bp, Homo sapien
tttatctaggtgatcgtattaacct

SEQ ID NO: 48151 - DNA, 25 bp, Homo sapien
taatgtcttgtactgtgacgttatt

SEQ ID NO: 48152 - DNA, 25 bp, Homo sapien
taatgtcttgtagtgtgacgttatt

SEQ ID NO: 48153 - DNA, 25 bp, Homo sapien
agtatagttgacttcgttaccatcg

SEQ ID NO: 48154 - DNA, 25 bp, Homo sapien
agtatagttgacatcgttaccatcg

SEQ ID NO: 48155 - DNA, 25 bp, Homo sapien
tatgttataggtcgtgtctaccacc

SEQ ID NO: 48156 - DNA, 25 bp, Homo sapien
tatgttataggtggtgtctaccacc

SEQ ID NO: 48157 - DNA, 25 bp, Homo sapien
tacagtctactctgaggttttccgg

SEQ ID NO: 48158 - DNA, 25 bp, Homo sapien
tacagtctactcagaggttttccgg

SEQ ID NO: 48159 - DNA, 25 bp, Homo sapien
ctatgtttcggtgagtaggagcaca

SEQ ID NO: 48160 - DNA, 25 bp, Homo sapien
ctatgtttcggtcagtaggagcaca

SEQ ID NO: 48161 - DNA, 25 bp, Homo sapien
gtgagtaagtcgaagagtatccact

SEQ ID NO: 48162 - DNA, 25 bp, Homo sapien
gtgagtaagtcgtagagtatccact

SEQ ID NO: 48163 - DNA, 25 bp, Homo sapien
gaggtagagtcgaccgacgtccgac

SEQ ID NO: 48164 - DNA, 25 bp, Homo sapien
gaggtagagtcgtccgacgtccgac

SEQ ID NO: 48165 - DNA, 25 bp, Homo sapien
tagaccaggtagaagaccgatttga

SEQ ID NO: 48166 - DNA, 25 bp, Homo sapien
tagaccaggtagtagaccgatttga

SEQ ID NO: 48167 - DNA, 25 bp, Homo sapien
acgtatatgttattctatctcgttg

SEQ ID NO: 48168 - DNA, 25 bp, Homo sapien
acgtatatgttaatctatctcgttg

SEQ ID NO: 48169 - DNA, 25 bp, Homo sapien
actataaatggaacgttctactctg

SEQ ID NO: 48170 - DNA, 25 bp, Homo sapien
actataaatggatcgttctactctg

SEQ ID NO: 48171 - DNA, 25 bp, Homo sapien
atataagtaaaactccgagtactcg

SEQ ID NO: 48172 - DNA, 25 bp, Homo sapien
atataagtaaaagtccgagtactcg

SEQ ID NO: 48173 - DNA, 25 bp, Homo sapien
tacttacgtgagtcgacggggacag

SEQ ID NO: 48174 - DNA, 25 bp, Homo sapien
tacttacgtgagacgacggggacag

SEQ ID NO: 48175 - DNA, 25 bp, Homo sapien
gttttcttgaacttaggttactcgt

SEQ ID NO: 48176 - DNA, 25 bp, Homo sapien
gttttcttgaacataggttactcgt

SEQ ID NO: 48177 - DNA, 25 bp, Homo sapien
gtgtatctgtcgtcatacattttcc

SEQ ID NO: 48178 - DNA, 25 bp, Homo sapien
gtgtatctgtcgacatacattttcc

SEQ ID NO: 48179 - DNA, 25 bp, Homo sapien
tagttctgttaaaacctgtgtttac

SEQ ID NO: 48180 - DNA, 25 bp, Homo sapien
tagttctgttaatacctgtgtttac

SEQ ID NO: 48181 - DNA, 25 bp, Homo sapien
tttattagaacactccaggtgttac

SEQ ID NO: 48182 - DNA, 25 bp, Homo sapien
tttattagaacagtccaggtgttac

SEQ ID NO: 48183 - DNA, 25 bp, Homo sapien
cgtataggtcgactaactgttttag

SEQ ID NO: 48184 - DNA, 25 bp, Homo sapien
cgtataggtcgagtaactgttttag

SEQ ID NO: 48185 - DNA, 25 bp, Homo sapien
ccttgacgtcgctctcgtgtttcta

SEQ ID NO: 48186 - DNA, 25 bp, Homo sapien
ccttgacgtcgcactcgtgtttcta

SEQ ID NO: 48187 - DNA, 25 bp, Homo sapien
tcctgcgtcgtgaaccgttgtgtga

SEQ ID NO: 48188 - DNA, 25 bp, Homo sapien
tcctgcgtcgtgtaccgttgtgtga

SEQ ID NO: 48189 - DNA, 25 bp, Homo sapien
gtcctccgtcggactcttgtctctg

SEQ ID NO: 48190 - DNA, 25 bp, Homo sapien
gtcctccgtcggtctcttgtctctg

SEQ ID NO: 48191 - DNA, 25 bp, Homo sapien
catgatgtcatgagtcttatgtgtc

SEQ ID NO: 48192 - DNA, 25 bp, Homo sapien
catgatgtcatgtgtcttatgtgtc

SEQ ID NO: 48193 - DNA, 25 bp, Homo sapien
tgtctctacaaggttatcctctgtc

SEQ ID NO: 48194 - DNA, 25 bp, Homo sapien
tgtctctacaagcttatcctctgtc

SEQ ID NO: 48195 - DNA, 25 bp, Homo sapien
caccttctataagttttcggtgttc

SEQ ID NO: 48196 - DNA, 25 bp, Homo sapien
caccttctataacttttcggtgttc

SEQ ID NO: 48197 - DNA, 25 bp, Homo sapien
tgttagtacaagaatctattgttcc

SEQ ID NO: 48198 - DNA, 25 bp, Homo sapien
tgttagtacaagtatctattgttcc

SEQ ID NO: 48199 - DNA, 25 bp, Homo sapien
gatacaagtatatttctgttaccgt

SEQ ID NO: 48200 - DNA, 25 bp, Homo sapien
gatacaagtataattctgttaccgt

SEQ ID NO: 48201 - DNA, 25 bp, Homo sapien
cggaggttcacttgaattgtataac

SEQ ID NO: 48202 - DNA, 25 bp, Homo sapien
cggaggttcactagaattgtataac

SEQ ID NO: 48203 - DNA, 25 bp, Homo sapien
ttttaaaggagtcacgttctctcga

SEQ ID NO: 48204 - DNA, 25 bp, Homo sapien
ttttaaaggagtgacgttctctcga

SEQ ID NO: 48205 - DNA, 25 bp, Homo sapien
cttttacacgggaactttatatctg

SEQ ID NO: 48206 - DNA, 25 bp, Homo sapien
cttttacacgggtactttatatctg

SEQ ID NO: 48207 - DNA, 25 bp, Homo sapien
ttatttctcgcgtaggaactctccc

SEQ ID NO: 48208 - DNA, 25 bp, Homo sapien
ttatttctcgcgaaggaactctccc

SEQ ID NO: 48209 - DNA, 25 bp, Homo sapien
tggtcggttcggaaaggaccagacc

SEQ ID NO: 48210 - DNA, 25 bp, Homo sapien
tggtcggttcggtaaggaccagacc

SEQ ID NO: 48211 - DNA, 25 bp, Homo sapien
taagggtgagaactgtagacgaacc

SEQ ID NO: 48212 - DNA, 25 bp, Homo sapien
taagggtgagaagtgtagacgaacc

SEQ ID NO: 48213 - DNA, 25 bp, Homo sapien
gtaaggagaggaaagtaggaccctc

SEQ ID NO: 48214 - DNA, 25 bp, Homo sapien
gtaaggagaggatagtaggaccctc

SEQ ID NO: 48215 - DNA, 25 bp, Homo sapien
agacggggattatagggtatctacc

SEQ ID NO: 48216 - DNA, 25 bp, Homo sapien
agacggggattaaagggtatctacc

SEQ ID NO: 48217 - DNA, 25 bp, Homo sapien
aagactcttcgtagatgtgttcaga

SEQ ID NO: 48218 - DNA, 25 bp, Homo sapien
aagactcttcgttgatgtgttcaga

SEQ ID NO: 48219 - DNA, 25 bp, Homo sapien
ttcgaccaccggtagtttacgtaac

SEQ ID NO: 48220 - DNA, 25 bp, Homo sapien
ttcgaccaccggaagtttacgtaac

SEQ ID NO: 48221 - DNA, 25 bp, Homo sapien
gttcagatctgttatagttcttgac

SEQ ID NO: 48222 - DNA, 25 bp, Homo sapien
gttcagatctgtaatagttcttgac

SEQ ID NO: 48223 - DNA, 25 bp, Homo sapien
tgtctcatgtgtgtcctttccttcg

SEQ ID NO: 48224 - DNA, 25 bp, Homo sapien
tgtctcatgtgtctcctttccttcg

SEQ ID NO: 48225 - DNA, 25 bp, Homo sapien
cacagtgtccctctcttcttgctgt

SEQ ID NO: 48226 - DNA, 25 bp, Homo sapien
cacagtgtccctgtcttcttgctgt

SEQ ID NO: 48227 - DNA, 25 bp, Homo sapien
acaccggacgtcttctcgtgagtac

SEQ ID NO: 48228 - DNA, 25 bp, Homo sapien
acaccggacgtcatctcgtgagtac

SEQ ID NO: 48229 - DNA, 25 bp, Homo sapien
accctcgtactctgtctcttcgtct

SEQ ID NO: 48230 - DNA, 25 bp, Homo sapien
accctcgtactcagtctcttcgtct

SEQ ID NO: 48231 - DNA, 25 bp, Homo sapien
tacaacaatgtaaggaccgtcttcg

SEQ ID NO: 48232 - DNA, 25 bp, Homo sapien
tacaacaatgtatggaccgtcttcg

SEQ ID NO: 48233 - DNA, 25 bp, Homo sapien
gacgtaaaactgttcacatttacag

SEQ ID NO: 48234 - DNA, 25 bp, Homo sapien
gacgtaaaactgatcacatttacag

SEQ ID NO: 48235 - DNA, 25 bp, Homo sapien
gtcacgtcactgatcttgtctgtga

SEQ ID NO: 48236 - DNA, 25 bp, Homo sapien
gtcacgtcactgttcttgtctgtga

SEQ ID NO: 48237 - DNA, 25 bp, Homo sapien
tcgcggtccgtcgtctagcggtcct

SEQ ID NO: 48238 - DNA, 25 bp, Homo sapien
tcgcggtccgtcctctagcggtcct

SEQ ID NO: 48239 - DNA, 25 bp, Homo sapien
acccttcgacccttttaaccggagt

SEQ ID NO: 48240 - DNA, 25 bp, Homo sapien
acccttcgacccatttaaccggagt

SEQ ID NO: 48241 - DNA, 25 bp, Homo sapien
gtatacggatcctatcttcggtaga

SEQ ID NO: 48242 - DNA, 25 bp, Homo sapien
gtatacggatccaatcttcggtaga

SEQ ID NO: 48243 - DNA, 25 bp, Homo sapien
taacgtaggtgaaactttcagtcga

SEQ ID NO: 48244 - DNA, 25 bp, Homo sapien
taacgtaggtgatactttcagtcga

SEQ ID NO: 48245 - DNA, 25 bp, Homo sapien
gaaagatgaatacgtaactacgaac

SEQ ID NO: 48246 - DNA, 25 bp, Homo sapien
gaaagatgaataggtaactacgaac

SEQ ID NO: 48247 - DNA, 25 bp, Homo sapien
cgagacgacggtccaatcgtcgtcc

SEQ ID NO: 48248 - DNA, 25 bp, Homo sapien
cgagacgacggtgcaatcgtcgtcc

SEQ ID NO: 48249 - DNA, 25 bp, Homo sapien
caggaacagcgacacctcgacaact

SEQ ID NO: 48250 - DNA, 25 bp, Homo sapien
caggaacagcgagacctcgacaact

SEQ ID NO: 48251 - DNA, 25 bp, Homo sapien
aggacaagtagacactcgtcccgtc

SEQ ID NO: 48252 - DNA, 25 bp, Homo sapien
aggacaagtagagactcgtcccgtc

SEQ ID NO: 48253 - DNA, 25 bp, Homo sapien
gtcgggaaagaatctccactcgaag

SEQ ID NO: 48254 - DNA, 25 bp, Homo sapien
gtcgggaaagaaactccactcgaag

SEQ ID NO: 48255 - DNA, 25 bp, Homo sapien
tgacggaaacaaacttccgtctcag

SEQ ID NO: 48256 - DNA, 25 bp, Homo sapien
tgacggaaacaatcttccgtctcag

SEQ ID NO: 48257 - DNA, 25 bp, Homo sapien
agttcatagacttacactattttgg

SEQ ID NO: 48258 - DNA, 25 bp, Homo sapien
agttcatagactaacactattttgg

SEQ ID NO: 48259 - DNA, 25 bp, Homo sapien
actgtaagagctaccacagtgaccc

SEQ ID NO: 48260 - DNA, 25 bp, Homo sapien
actgtaagagcttccacagtgaccc

SEQ ID NO: 48261 - DNA, 25 bp, Homo sapien
tgatacggttgtaaaagtcctctct

SEQ ID NO: 48262 - DNA, 25 bp, Homo sapien
tgatacggttgttaaagtcctctct

SEQ ID NO: 48263 - DNA, 25 bp, Homo sapien
tgaagacgggtctgaagtccttact

SEQ ID NO: 48264 - DNA, 25 bp, Homo sapien
tgaagacgggtcagaagtccttact

SEQ ID NO: 48265 - DNA, 25 bp, Homo sapien
caccgacgtggtaggtgtgcgttct

SEQ ID NO: 48266 - DNA, 25 bp, Homo sapien
caccgacgtggttggtgtgcgttct

SEQ ID NO: 48267 - DNA, 25 bp, Homo sapien
tcgcccgagagttgtgtcgtcggtc

SEQ ID NO: 48268 - DNA, 25 bp, Homo sapien
tcgcccgagagtagtgtcgtcggtc

SEQ ID NO: 48269 - DNA, 25 bp, Homo sapien
ttaccggtcgcgttggtcttgtgtc

SEQ ID NO: 48270 - DNA, 25 bp, Homo sapien
ttaccggtcgcgatggtcttgtgtc

SEQ ID NO: 48271 - DNA, 25 bp, Homo sapien
tctgtctgtatcctgacttcttatg

SEQ ID NO: 48272 - DNA, 25 bp, Homo sapien
tctgtctgtatcgtgacttcttatg

SEQ ID NO: 48273 - DNA, 25 bp, Homo sapien
cagttcgtagtccttcgatgtaatg

SEQ ID NO: 48274 - DNA, 25 bp, Homo sapien
cagttcgtagtcgttcgatgtaatg

SEQ ID NO: 48275 - DNA, 25 bp, Homo sapien
gtgaaagtgtctgaccgattcttag

SEQ ID NO: 48276 - DNA, 25 bp, Homo sapien
gtgaaagtgtctcaccgattcttag

SEQ ID NO: 48277 - DNA, 25 bp, Homo sapien
aataaaagaattacgtcgtgtcatc

SEQ ID NO: 48278 - DNA, 25 bp, Homo sapien
aataaaagaatttcgtcgtgtcatc

SEQ ID NO: 48279 - DNA, 25 bp, Homo sapien
ataacgggtctccttgtcctgactc

SEQ ID NO: 48280 - DNA, 25 bp, Homo sapien
ataacgggtctcgttgtcctgactc

SEQ ID NO: 48281 - DNA, 25 bp, Homo sapien
ttaccctccgtgttccatgtacacg

SEQ ID NO: 48282 - DNA, 25 bp, Homo sapien
ttaccctccgtgatccatgtacacg

SEQ ID NO: 48283 - DNA, 25 bp, Homo sapien
aacaacaccttgcagtcccttagag

SEQ ID NO: 48284 - DNA, 25 bp, Homo sapien
aacaacaccttggagtcccttagag

SEQ ID NO: 48285 - DNA, 25 bp, Homo sapien
aggcataccttagtagccctcatag

SEQ ID NO: 48286 - DNA, 25 bp, Homo sapien
aggcataccttactagccctcatag

SEQ ID NO: 48287 - DNA, 25 bp, Homo sapien
gtgggtgtctcctagcctcgaccac

SEQ ID NO: 48288 - DNA, 25 bp, Homo sapien
gtgggtgtctccaagcctcgaccac

SEQ ID NO: 48289 - DNA, 25 bp, Homo sapien
gtgtcttacccaggaccctacagat

SEQ ID NO: 48290 - DNA, 25 bp, Homo sapien
gtgtcttacccacgaccctacagat

SEQ ID NO: 48291 - DNA, 25 bp, Homo sapien
gtgtgtccaccgtcacagtgtccga

SEQ ID NO: 48292 - DNA, 25 bp, Homo sapien
gtgtgtccaccgacacagtgtccga

SEQ ID NO: 48293 - DNA, 25 bp, Homo sapien
tattcgctctgaacatttcgtgact

SEQ ID NO: 48294 - DNA, 25 bp, Homo sapien
tattcgctctgatcatttcgtgact

SEQ ID NO: 48295 - DNA, 25 bp, Homo sapien
gtacttcttcgtgaagatggtcttt

SEQ ID NO: 48296 - DNA, 25 bp, Homo sapien
gtacttcttcgtcaagatggtcttt

SEQ ID NO: 48297 - DNA, 25 bp, Homo sapien
ggactctctctactaatccggtttc

SEQ ID NO: 48298 - DNA, 25 bp, Homo sapien
ggactctctctagtaatccggtttc

SEQ ID NO: 48299 - DNA, 25 bp, Homo sapien
gaccagtcaaaatctctccgtctcg

SEQ ID NO: 48300 - DNA, 25 bp, Homo sapien
gaccagtcaaaaactctccgtctcg

SEQ ID NO: 48301 - DNA, 25 bp, Homo sapien
gtatcagtgatcaaccactcctatg

SEQ ID NO: 48302 - DNA, 25 bp, Homo sapien
gtatcagtgatctaccactcctatg

SEQ ID NO: 48303 - DNA, 25 bp, Homo sapien
acgtcaggtcccattacacgaggac

SEQ ID NO: 48304 - DNA, 25 bp, Homo sapien
acgtcaggtccctttacacgaggac

SEQ ID NO: 48305 - DNA, 25 bp, Homo sapien
taacttccgaactgtgttcgtggaa

SEQ ID NO: 48306 - DNA, 25 bp, Homo sapien
taacttccgaacagtgttcgtggaa

SEQ ID NO: 48307 - DNA, 25 bp, Homo sapien
gagacaggaccgaggtcccgcagaa

SEQ ID NO: 48308 - DNA, 25 bp, Homo sapien
gagacaggaccgtggtcccgcagaa

SEQ ID NO: 48309 - DNA, 25 bp, Homo sapien
tggaaaactgatttccactaaagac

SEQ ID NO: 48310 - DNA, 25 bp, Homo sapien
tggaaaactgatatccactaaagac

SEQ ID NO: 48311 - DNA, 25 bp, Homo sapien
aagaacgacacaacccacgagaacc

SEQ ID NO: 48312 - DNA, 25 bp, Homo sapien
aagaacgacacatcccacgagaacc

SEQ ID NO: 48313 - DNA, 25 bp, Homo sapien
aacttctacagtcacgtctgggacc

SEQ ID NO: 48314 - DNA, 25 bp, Homo sapien
aacttctacagtgacgtctgggacc

SEQ ID NO: 48315 - DNA, 25 bp, Homo sapien
tgaaggtctatgtgtacctttaatc

SEQ ID NO: 48316 - DNA, 25 bp, Homo sapien
tgaaggtctatgagtacctttaatc

SEQ ID NO: 48317 - DNA, 25 bp, Homo sapien
acagaacaaccgtttcgcaaacgtc

SEQ ID NO: 48318 - DNA, 25 bp, Homo sapien
acagaacaaccgattcgcaaacgtc

SEQ ID NO: 48319 - DNA, 25 bp, Homo sapien
agaacaacacgtttgactgacgaac

SEQ ID NO: 48320 - DNA, 25 bp, Homo sapien
agaacaacacgtatgactgacgaac

SEQ ID NO: 48321 - DNA, 25 bp, Homo sapien
ggaaaacgtcatttcgaacacgaac

SEQ ID NO: 48322 - DNA, 25 bp, Homo sapien
ggaaaacgtcatatcgaacacgaac

SEQ ID NO: 48323 - DNA, 25 bp, Homo sapien
agaggagaacaactcctcggccaac

SEQ ID NO: 48324 - DNA, 25 bp, Homo sapien
agaggagaacaagtcctcggccaac

SEQ ID NO: 48325 - DNA, 25 bp, Homo sapien
gcgaactcgcgcatttggtgcaggt

SEQ ID NO: 48326 - DNA, 25 bp, Homo sapien
gcgaactcgcgcttttggtgcaggt

SEQ ID NO: 48327 - DNA, 25 bp, Homo sapien
ggaacaccgaaaggacctcctctag

SEQ ID NO: 48328 - DNA, 25 bp, Homo sapien
ggaacaccgaaacgacctcctctag

SEQ ID NO: 48329 - DNA, 25 bp, Homo sapien
aagaaatcgtacaaagtcctttatg

SEQ ID NO: 48330 - DNA, 25 bp, Homo sapien
aagaaatcgtactaagtcctttatg

SEQ ID NO: 48331 - DNA, 25 bp, Homo sapien
gtaagactaagttatgtccactttg

SEQ ID NO: 48332 - DNA, 25 bp, Homo sapien
gtaagactaagtaatgtccactttg

SEQ ID NO: 48333 - DNA, 25 bp, Homo sapien
atgtctcaatacctacaactgagtg

SEQ ID NO: 48334 - DNA, 25 bp, Homo sapien
atgtctcaatacgtacaactgagtg

SEQ ID NO: 48335 - DNA, 25 bp, Homo sapien
ttactttatgaattacactactggg

SEQ ID NO: 48336 - DNA, 25 bp, Homo sapien
ttactttatgaaatacactactggg

SEQ ID NO: 48337 - DNA, 25 bp, Homo sapien
gtttcgacctagtatccgtacacaa

SEQ ID NO: 48338 - DNA, 25 bp, Homo sapien
gtttcgacctagaatccgtacacaa

SEQ ID NO: 48339 - DNA, 25 bp, Homo sapien
aaggaactcaagctactctgacagg

SEQ ID NO: 48340 - DNA, 25 bp, Homo sapien
aaggaactcaaggtactctgacagg

SEQ ID NO: 48341 - DNA, 25 bp, Homo sapien
gtaaactactgtgacccagaacacg

SEQ ID NO: 48342 - DNA, 25 bp, Homo sapien
gtaaactactgtcacccagaacacg

SEQ ID NO: 48343 - DNA, 25 bp, Homo sapien
ctaataagacacaagagtctacagt

SEQ ID NO: 48344 - DNA, 25 bp, Homo sapien
ctaataagacactagagtctacagt

SEQ ID NO: 48345 - DNA, 25 bp, Homo sapien
caaactagtcgtactacagtaacag

SEQ ID NO: 48346 - DNA, 25 bp, Homo sapien
caaactagtcgttctacagtaacag

SEQ ID NO: 48347 - DNA, 25 bp, Homo sapien
caaagtgtctcacctctgaatctgt

SEQ ID NO: 48348 - DNA, 25 bp, Homo sapien
caaagtgtctcagctctgaatctgt

SEQ ID NO: 48349 - DNA, 25 bp, Homo sapien
ctaaaacaccgttcatgaggtgtca

SEQ ID NO: 48350 - DNA, 25 bp, Homo sapien
ctaaaacaccgtacatgaggtgtca

SEQ ID NO: 48351 - DNA, 25 bp, Homo sapien
attccggttacgtgactcgtagtta

SEQ ID NO: 48352 - DNA, 25 bp, Homo sapien
attccggttacgagactcgtagtta

SEQ ID NO: 48353 - DNA, 25 bp, Homo sapien
tgttctctgaacgtagatcttacat

SEQ ID NO: 48354 - DNA, 25 bp, Homo sapien
tgttctctgaacctagatcttacat

SEQ ID NO: 48355 - DNA, 25 bp, Homo sapien
tgtatgtcgtccttcgtgtggaaac

SEQ ID NO: 48356 - DNA, 25 bp, Homo sapien
tgtatgtcgtccatcgtgtggaaac

SEQ ID NO: 48357 - DNA, 25 bp, Homo sapien
gttactggtaccaacgtcgggttca

SEQ ID NO: 48358 - DNA, 25 bp, Homo sapien
gttactggtacctacgtcgggttca

SEQ ID NO: 48359 - DNA, 25 bp, Homo sapien
atctacaatctacacggtcatggta

SEQ ID NO: 48360 - DNA, 25 bp, Homo sapien
atctacaatctagacggtcatggta

SEQ ID NO: 48361 - DNA, 25 bp, Homo sapien
cccaagtcctatttgtcaccggtag

SEQ ID NO: 48362 - DNA, 25 bp, Homo sapien
cccaagtcctatatgtcaccggtag

SEQ ID NO: 48363 - DNA, 25 bp, Homo sapien
tgaaatggaggttcgtacgccggac

SEQ ID NO: 48364 - DNA, 25 bp, Homo sapien
tgaaatggaggtacgtacgccggac

SEQ ID NO: 48365 - DNA, 25 bp, Homo sapien
cttgacttataggtttcctttgtcc

SEQ ID NO: 48366 - DNA, 25 bp, Homo sapien
cttgacttatagctttcctttgtcc

SEQ ID NO: 48367 - DNA, 25 bp, Homo sapien
tacagtcgttaactgtcttggttcc

SEQ ID NO: 48368 - DNA, 25 bp, Homo sapien
tacagtcgttaagtgtcttggttcc

SEQ ID NO: 48369 - DNA, 25 bp, Homo sapien
tagagtcgttgactcctggccttcg

SEQ ID NO: 48370 - DNA, 25 bp, Homo sapien
tagagtcgttgagtcctggccttcg

SEQ ID NO: 48371 - DNA, 25 bp, Homo sapien
gtggtcgggagtcaacaccagtctg

SEQ ID NO: 48372 - DNA, 25 bp, Homo sapien
gtggtcgggagtgaacaccagtctg

SEQ ID NO: 48373 - DNA, 25 bp, Homo sapien
tacaaaaggggaaccgacaatatgt

SEQ ID NO: 48374 - DNA, 25 bp, Homo sapien
tacaaaaggggatccgacaatatgt

SEQ ID NO: 48375 - DNA, 25 bp, Homo sapien
acaaaagggataacagtgtaccttc

SEQ ID NO: 48376 - DNA, 25 bp, Homo sapien
acaaaagggatatcagtgtaccttc

SEQ ID NO: 48377 - DNA, 25 bp, Homo sapien
aacagaagagtatgaggtgcaccgt

SEQ ID NO: 48378 - DNA, 25 bp, Homo sapien
aacagaagagtaagaggtgcaccgt

SEQ ID NO: 48379 - DNA, 25 bp, Homo sapien
gacgagaagtacaacaccggctttt

SEQ ID NO: 48380 - DNA, 25 bp, Homo sapien
gacgagaagtactacaccggctttt

SEQ ID NO: 48381 - DNA, 25 bp, Homo sapien
accgtgtccaagtttccggttctcc

SEQ ID NO: 48382 - DNA, 25 bp, Homo sapien
accgtgtccaagattccggttctcc

SEQ ID NO: 48383 - DNA, 25 bp, Homo sapien
gtctccgaagaatgcgagcctctcc

SEQ ID NO: 48384 - DNA, 25 bp, Homo sapien
gtctccgaagaaagcgagcctctcc

SEQ ID NO: 48385 - DNA, 25 bp, Homo sapien
tgatctccctgaggacaggacccca

SEQ ID NO: 48386 - DNA, 25 bp, Homo sapien
tgatctccctgacgacaggacccca

SEQ ID NO: 48387 - DNA, 25 bp, Homo sapien
tttcctcggtcaaggaccgaccgac

SEQ ID NO: 48388 - DNA, 25 bp, Homo sapien
tttcctcggtcatggaccgaccgac

SEQ ID NO: 48389 - DNA, 25 bp, Homo sapien
ttagtaaaagcaggagacgaccgaa

SEQ ID NO: 48390 - DNA, 25 bp, Homo sapien
ttagtaaaagcacgagacgaccgaa

SEQ ID NO: 48391 - DNA, 25 bp, Homo sapien
tgaaagaactctacgactaatcgaa

SEQ ID NO: 48392 - DNA, 25 bp, Homo sapien
tgaaagaactcttcgactaatcgaa

SEQ ID NO: 48393 - DNA, 25 bp, Homo sapien
agaggacaacggactcgttgtgcta

SEQ ID NO: 48394 - DNA, 25 bp, Homo sapien
agaggacaacggtctcgttgtgcta

SEQ ID NO: 48395 - DNA, 25 bp, Homo sapien
gacagggagaacttagggtaccctt

SEQ ID NO: 48396 - DNA, 25 bp, Homo sapien
gacagggagaacatagggtaccctt

SEQ ID NO: 48397 - DNA, 25 bp, Homo sapien
tcacgggtatgagacccgttcccga

SEQ ID NO: 48398 - DNA, 25 bp, Homo sapien
tcacgggtatgacacccgttcccga

SEQ ID NO: 48399 - DNA, 25 bp, Homo sapien
gaagtggttgagacgcccttcttag

SEQ ID NO: 48400 - DNA, 25 bp, Homo sapien
gaagtggttgagtcgcccttcttag

SEQ ID NO: 48401 - DNA, 25 bp, Homo sapien
actcggtttttgtgcccgtctttcg

SEQ ID NO: 48402 - DNA, 25 bp, Homo sapien
actcggtttttgagcccgtctttcg

SEQ ID NO: 48403 - DNA, 25 bp, Homo sapien
tgtgactcttcacaggctctttaac

SEQ ID NO: 48404 - DNA, 25 bp, Homo sapien
tgtgactcttcagaggctctttaac

SEQ ID NO: 48405 - DNA, 25 bp, Homo sapien
aacgtctagacgagggtgtctaaga

SEQ ID NO: 48406 - DNA, 25 bp, Homo sapien
aacgtctagacgtgggtgtctaaga

SEQ ID NO: 48407 - DNA, 25 bp, Homo sapien
agaaagttcaggtgggtctctcgaa

SEQ ID NO: 48408 - DNA, 25 bp, Homo sapien
agaaagttcaggagggtctctcgaa

SEQ ID NO: 48409 - DNA, 25 bp, Homo sapien
aggaggtaacctcgtttcgaccgga

SEQ ID NO: 48410 - DNA, 25 bp, Homo sapien
aggaggtaacctggtttcgaccgga

SEQ ID NO: 48411 - DNA, 25 bp, Homo sapien
cggaagtatctggaattacaacata

SEQ ID NO: 48412 - DNA, 25 bp, Homo sapien
cggaagtatctgcaattacaacata

SEQ ID NO: 48413 - DNA, 25 bp, Homo sapien
cgacaatatatgtcctgtccagaga

SEQ ID NO: 48414 - DNA, 25 bp, Homo sapien
cgacaatatatgacctgtccagaga

SEQ ID NO: 48415 - DNA, 25 bp, Homo sapien
cgacatagaagtaattttccgtaaa

SEQ ID NO: 48416 - DNA, 25 bp, Homo sapien
cgacatagaagttattttccgtaaa

SEQ ID NO: 48417 - DNA, 25 bp, Homo sapien
tcattacaaggattgtagttcaccc

SEQ ID NO: 48418 - DNA, 25 bp, Homo sapien
tcattacaaggaatgtagttcaccc

SEQ ID NO: 48419 - DNA, 25 bp, Homo sapien
acataaagaggtaacgtttatcccc

SEQ ID NO: 48420 - DNA, 25 bp, Homo sapien
acataaagaggttacgtttatcccc

SEQ ID NO: 48421 - DNA, 25 bp, Homo sapien
cgaaaccccgggacgtatctgtctc

SEQ ID NO: 48422 - DNA, 25 bp, Homo sapien
cgaaaccccgggtcgtatctgtctc

SEQ ID NO: 48423 - DNA, 25 bp, Homo sapien
aggacccgtccgtgtgtgtgttacg

SEQ ID NO: 48424 - DNA, 25 bp, Homo sapien
aggacccgtccgagtgtgtgttacg

SEQ ID NO: 48425 - DNA, 25 bp, Homo sapien
actgactgacacactcgtgtctctc

SEQ ID NO: 48426 - DNA, 25 bp, Homo sapien
actgactgacactctcgtgtctctc

SEQ ID NO: 48427 - DNA, 25 bp, Homo sapien
caacgactggagtccggactacgac

SEQ ID NO: 48428 - DNA, 25 bp, Homo sapien
caacgactggagaccggactacgac

SEQ ID NO: 48429 - DNA, 25 bp, Homo sapien
cttctatccgtagatcggtctcgac

SEQ ID NO: 48430 - DNA, 25 bp, Homo sapien
cttctatccgtacatcggtctcgac

SEQ ID NO: 48431 - DNA, 25 bp, Homo sapien
tttatatcgtgtgaagtgttacctg

SEQ ID NO: 48432 - DNA, 25 bp, Homo sapien
tttatatcgtgtcaagtgttacctg

SEQ ID NO: 48433 - DNA, 25 bp, Homo sapien
gtagtagactcgacaatgtgtcctc

SEQ ID NO: 48434 - DNA, 25 bp, Homo sapien
gtagtagactcgtcaatgtgtcctc

SEQ ID NO: 48435 - DNA, 25 bp, Homo sapien
agtatatagacgtcgagggtgaccc

SEQ ID NO: 48436 - DNA, 25 bp, Homo sapien
agtatatagacgacgagggtgaccc

SEQ ID NO: 48437 - DNA, 25 bp, Homo sapien
caattatgactacctgtgtttttgt

SEQ ID NO: 48438 - DNA, 25 bp, Homo sapien
caattatgactagctgtgtttttgt

SEQ ID NO: 48439 - DNA, 25 bp, Homo sapien
gaatttctgaggtttttctcgtgtc

SEQ ID NO: 48440 - DNA, 25 bp, Homo sapien
gaatttctgaggattttctcgtgtc

SEQ ID NO: 48441 - DNA, 25 bp, Homo sapien
cttgtgtcttcttgttacagtggtt

SEQ ID NO: 48442 - DNA, 25 bp, Homo sapien
cttgtgtcttctagttacagtggtt

SEQ ID NO: 48443 - DNA, 25 bp, Homo sapien
tctctcccgtctgtcgtcaggagac

SEQ ID NO: 48444 - DNA, 25 bp, Homo sapien
tctctcccgtctctcgtcaggagac

SEQ ID NO: 48445 - DNA, 25 bp, Homo sapien
ttgtcgtccacgtcggccaagatcc

SEQ ID NO: 48446 - DNA, 25 bp, Homo sapien
ttgtcgtccacgacggccaagatcc

SEQ ID NO: 48447 - DNA, 25 bp, Homo sapien
ttagggtccgggacagtcgagaccc

SEQ ID NO: 48448 - DNA, 25 bp, Homo sapien
ttagggtccgggtcagtcgagaccc

SEQ ID NO: 48449 - DNA, 25 bp, Homo sapien
ttatcgttcttggtcccggaccctc

SEQ ID NO: 48450 - DNA, 25 bp, Homo sapien
ttatcgttcttgctcccggaccctc

SEQ ID NO: 48451 - DNA, 25 bp, Homo sapien
tgtttttaccaggtcttttcctaac

SEQ ID NO: 48452 - DNA, 25 bp, Homo sapien
tgtttttaccagctcttttcctaac

SEQ ID NO: 48453 - DNA, 25 bp, Homo sapien
gaggcttaccggtcctggtgtccac

SEQ ID NO: 48454 - DNA, 25 bp, Homo sapien
gaggcttaccggacctggtgtccac

SEQ ID NO: 48455 - DNA, 25 bp, Homo sapien
gggtcttgaccgaccctgaggtcct

SEQ ID NO: 48456 - DNA, 25 bp, Homo sapien
gggtcttgaccgtccctgaggtcct

SEQ ID NO: 48457 - DNA, 25 bp, Homo sapien
ggtcgtggactcgtaacctgggtcc

SEQ ID NO: 48458 - DNA, 25 bp, Homo sapien
ggtcgtggactcctaacctgggtcc

SEQ ID NO: 48459 - DNA, 25 bp, Homo sapien
ggtgtggagcctcgtctgtattcct

SEQ ID NO: 48460 - DNA, 25 bp, Homo sapien
ggtgtggagcctggtctgtattcct

SEQ ID NO: 48461 - DNA, 25 bp, Homo sapien
ctgtggagcgcttcatggttgttgt

SEQ ID NO: 48462 - DNA, 25 bp, Homo sapien
ctgtggagcgctacatggttgttgt

SEQ ID NO: 48463 - DNA, 25 bp, Homo sapien
cctgcgaggcccttaagatgtgtgg

SEQ ID NO: 48464 - DNA, 25 bp, Homo sapien
cctgcgaggcccataagatgtgtgg

SEQ ID NO: 48465 - DNA, 25 bp, Homo sapien
cctgtgaaagcagttctgatttgag

SEQ ID NO: 48466 - DNA, 25 bp, Homo sapien
cctgtgaaagcacttctgatttgag

SEQ ID NO: 48467 - DNA, 25 bp, Homo sapien
gtccgaggcaactaccgcctctggt

SEQ ID NO: 48468 - DNA, 25 bp, Homo sapien
gtccgaggcaacaaccgcctctggt

SEQ ID NO: 48469 - DNA, 25 bp, Homo sapien
gacagcaaactcactcgccgtctga

SEQ ID NO: 48470 - DNA, 25 bp, Homo sapien
gacagcaaactctctcgccgtctga

SEQ ID NO: 48471 - DNA, 25 bp, Homo sapien
atcaaagtcttttacgtctgggagt

SEQ ID NO: 48472 - DNA, 25 bp, Homo sapien
atcaaagtctttaacgtctgggagt

SEQ ID NO: 48473 - DNA, 25 bp, Homo sapien
tgagagacaatcttatgtccatgat

SEQ ID NO: 48474 - DNA, 25 bp, Homo sapien
tgagagacaatcatatgtccatgat

SEQ ID NO: 48475 - DNA, 25 bp, Homo sapien
agaagaagtctattcgttcactcta

SEQ ID NO: 48476 - DNA, 25 bp, Homo sapien
agaagaagtctaatcgttcactcta

SEQ ID NO: 48477 - DNA, 25 bp, Homo sapien
cttaagggaatatcatcgtttttct

SEQ ID NO: 48478 - DNA, 25 bp, Homo sapien
cttaagggaataacatcgtttttct

SEQ ID NO: 48479 - DNA, 25 bp, Homo sapien
gtttagttccaaaccgttccttttg

SEQ ID NO: 48480 - DNA, 25 bp, Homo sapien
gtttagttccaatccgttccttttg

SEQ ID NO: 48481 - DNA, 25 bp, Homo sapien
tactaatccagttgtgttccttttg

SEQ ID NO: 48482 - DNA, 25 bp, Homo sapien
tactaatccagtagtgttccttttg

SEQ ID NO: 48483 - DNA, 25 bp, Homo sapien
cgtatccccacgagtatcccttttg

SEQ ID NO: 48484 - DNA, 25 bp, Homo sapien
cgtatccccacgtgtatcccttttg

SEQ ID NO: 48485 - DNA, 25 bp, Homo sapien
gacacgaaccgactcaagtgtttag

SEQ ID NO: 48486 - DNA, 25 bp, Homo sapien
gacacgaaccgagtcaagtgtttag

SEQ ID NO: 48487 - DNA, 25 bp, Homo sapien
gatcgtcacatcgtctttcgtgtga

SEQ ID NO: 48488 - DNA, 25 bp, Homo sapien
gatcgtcacatcctctttcgtgtga

SEQ ID NO: 48489 - DNA, 25 bp, Homo sapien
ggttactaccagaaagactttctaa

SEQ ID NO: 48490 - DNA, 25 bp, Homo sapien
ggttactaccagtaagactttctaa

SEQ ID NO: 48491 - DNA, 25 bp, Homo sapien
ggtcctgagaggctgactggttaat

SEQ ID NO: 48492 - DNA, 25 bp, Homo sapien
ggtcctgagagggtgactggttaat

SEQ ID NO: 48493 - DNA, 25 bp, Homo sapien
cgtctcgtcaggtcttggtcaccgt

SEQ ID NO: 48494 - DNA, 25 bp, Homo sapien
cgtctcgtcaggacttggtcaccgt

SEQ ID NO: 48495 - DNA, 25 bp, Homo sapien
cgacacctcggttccggggaactct

SEQ ID NO: 48496 - DNA, 25 bp, Homo sapien
cgacacctcggtaccggggaactct

SEQ ID NO: 48497 - DNA, 25 bp, Homo sapien
tagacaatcgttacaccggtaaccc

SEQ ID NO: 48498 - DNA, 25 bp, Homo sapien
tagacaatcgtttcaccggtaaccc

SEQ ID NO: 48499 - DNA, 25 bp, Homo sapien
ctcgggaccgtggacacgatttgca

SEQ ID NO: 48500 - DNA, 25 bp, Homo sapien
ctcgggaccgtgcacacgatttgca

SEQ ID NO: 48501 - DNA, 25 bp, Homo sapien
tcgtgtaggggtcaccacaatgacc

SEQ ID NO: 48502 - DNA, 25 bp, Homo sapien
tcgtgtaggggtgaccacaatgacc

SEQ ID NO: 48503 - DNA, 25 bp, Homo sapien
gacctgtgagggtcctggtctccct

SEQ ID NO: 48504 - DNA, 25 bp, Homo sapien
gacctgtgagggacctggtctccct

SEQ ID NO: 48505 - DNA, 25 bp, Homo sapien
ggcgaccggggacgtatggccaccg

SEQ ID NO: 48506 - DNA, 25 bp, Homo sapien
ggcgaccggggaggtatggccaccg

SEQ ID NO: 48507 - DNA, 25 bp, Homo sapien
accgagttcaagtgagcgtatacag

SEQ ID NO: 48508 - DNA, 25 bp, Homo sapien
accgagttcaagagagcgtatacag

SEQ ID NO: 48509 - DNA, 25 bp, Homo sapien
gccaagtctcatttgagtagtcaag

SEQ ID NO: 48510 - DNA, 25 bp, Homo sapien
gccaagtctcatatgagtagtcaag

SEQ ID NO: 48511 - DNA, 25 bp, Homo sapien
gttaaactttatcgttaagactccg

SEQ ID NO: 48512 - DNA, 25 bp, Homo sapien
gttaaactttatggttaagactccg

SEQ ID NO: 48513 - DNA, 25 bp, Homo sapien
ttacagtgactaacgttttatccag

SEQ ID NO: 48514 - DNA, 25 bp, Homo sapien
ttacagtgactatcgttttatccag

SEQ ID NO: 48515 - DNA, 25 bp, Homo sapien
agtgtgtctacttagagtcatctcc

SEQ ID NO: 48516 - DNA, 25 bp, Homo sapien
agtgtgtctactaagagtcatctcc

SEQ ID NO: 48517 - DNA, 25 bp, Homo sapien
tccttaaggtatgttagggactccc

SEQ ID NO: 48518 - DNA, 25 bp, Homo sapien
tccttaaggtatcttagggactccc

SEQ ID NO: 48519 - DNA, 25 bp, Homo sapien
tacactgatgtttcttggtcgcttt

SEQ ID NO: 48520 - DNA, 25 bp, Homo sapien
tacactgatgttacttggtcgcttt

SEQ ID NO: 48521 - DNA, 25 bp, Homo sapien
gtcctgttctctgacatcgggattt

SEQ ID NO: 48522 - DNA, 25 bp, Homo sapien
gtcctgttctctcacatcgggattt

SEQ ID NO: 48523 - DNA, 25 bp, Homo sapien
gatatcttccagacgcttacgactt

SEQ ID NO: 48524 - DNA, 25 bp, Homo sapien
gatatcttccagtcgcttacgactt

SEQ ID NO: 48525 - DNA, 25 bp, Homo sapien
caagaagtccagtcacgtctccgtt

SEQ ID NO: 48526 - DNA, 25 bp, Homo sapien
caagaagtccagacacgtctccgtt

SEQ ID NO: 48527 - DNA, 25 bp, Homo sapien
gtacatggaacgactgagtcgatgt

SEQ ID NO: 48528 - DNA, 25 bp, Homo sapien
gtacatggaacgtctgagtcgatgt

SEQ ID NO: 48529 - DNA, 25 bp, Homo sapien
cactacaggtaaaccggggtgtcgt

SEQ ID NO: 48530 - DNA, 25 bp, Homo sapien
cactacaggtaatccggggtgtcgt

SEQ ID NO: 48531 - DNA, 25 bp, Homo sapien
actcccgttagacgtcgaggctgag

SEQ ID NO: 48532 - DNA, 25 bp, Homo sapien
actcccgttagaggtcgaggctgag

SEQ ID NO: 48533 - DNA, 25 bp, Homo sapien
atctcgatggagactattctcgtcg

SEQ ID NO: 48534 - DNA, 25 bp, Homo sapien
atctcgatggagtctattctcgtcg

SEQ ID NO: 48535 - DNA, 25 bp, Homo sapien
tagtctacgaagtggtccttctcag

SEQ ID NO: 48536 - DNA, 25 bp, Homo sapien
tagtctacgaagaggtccttctcag

SEQ ID NO: 48537 - DNA, 25 bp, Homo sapien
ccaaagactaaacagccataggctt

SEQ ID NO: 48538 - DNA, 25 bp, Homo sapien
ccaaagactaaagagccataggctt

SEQ ID NO: 48539 - DNA, 25 bp, Homo sapien
aagttcaaatagaccagtgacgttt

SEQ ID NO: 48540 - DNA, 25 bp, Homo sapien
aagttcaaatagtccagtgacgttt

SEQ ID NO: 48541 - DNA, 25 bp, Homo sapien
acttgtgttgcaaataccaggattt

SEQ ID NO: 48542 - DNA, 25 bp, Homo sapien
acttgtgttgcatataccaggattt

SEQ ID NO: 48543 - DNA, 25 bp, Homo sapien
ttgaggttcaggtccctgcggctgt

SEQ ID NO: 48544 - DNA, 25 bp, Homo sapien
ttgaggttcaggaccctgcggctgt

SEQ ID NO: 48545 - DNA, 25 bp, Homo sapien
tcggacacggccagaccagacactt

SEQ ID NO: 48546 - DNA, 25 bp, Homo sapien
tcggacacggcctgaccagacactt

SEQ ID NO: 48547 - DNA, 25 bp, Homo sapien
acgtgaagtgacttcccgacaccct

SEQ ID NO: 48548 - DNA, 25 bp, Homo sapien
acgtgaagtgacatcccgacaccct

SEQ ID NO: 48549 - DNA, 25 bp, Homo sapien
ttgaggtgtgacgtcaggatctgtc

SEQ ID NO: 48550 - DNA, 25 bp, Homo sapien
ttgaggtgtgacctcaggatctgtc

SEQ ID NO: 48551 - DNA, 25 bp, Homo sapien
aataactacgtgcagcgttcgtgtc

SEQ ID NO: 48552 - DNA, 25 bp, Homo sapien
aataactacgtggagcgttcgtgtc

SEQ ID NO: 48553 - DNA, 25 bp, Homo sapien
cggcacaatctcgacaaataattgt

SEQ ID NO: 48554 - DNA, 25 bp, Homo sapien
cggcacaatctccacaaataattgt

SEQ ID NO: 48555 - DNA, 25 bp, Homo sapien
acggaataacaccaattatagattg

SEQ ID NO: 48556 - DNA, 25 bp, Homo sapien
acggaataacacgaattatagattg

SEQ ID NO: 48557 - DNA, 25 bp, Homo sapien
ccggaaagatctgaaaccagatctt

SEQ ID NO: 48558 - DNA, 25 bp, Homo sapien
ccggaaagatctcaaaccagatctt

SEQ ID NO: 48559 - DNA, 25 bp, Homo sapien
aggaaaaatagaacatcactacttg

SEQ ID NO: 48560 - DNA, 25 bp, Homo sapien
aggaaaaatagatcatcactacttg

SEQ ID NO: 48561 - DNA, 25 bp, Homo sapien
gggacattactttgactcacatcta

SEQ ID NO: 48562 - DNA, 25 bp, Homo sapien
gggacattacttagactcacatcta

SEQ ID NO: 48563 - DNA, 25 bp, Homo sapien
ggaggtaagatacgttgtccaacca

SEQ ID NO: 48564 - DNA, 25 bp, Homo sapien
ggaggtaagataggttgtccaacca

SEQ ID NO: 48565 - DNA, 25 bp, Homo sapien
aaggttgaactgtctaccctgtcta

SEQ ID NO: 48566 - DNA, 25 bp, Homo sapien
aaggttgaactgactaccctgtcta

SEQ ID NO: 48567 - DNA, 25 bp, Homo sapien
agttgaacgtctgaccttcacgtga

SEQ ID NO: 48568 - DNA, 25 bp, Homo sapien
agttgaacgtctcaccttcacgtga

SEQ ID NO: 48569 - DNA, 25 bp, Homo sapien
taaccgtgaaacttaccttgaagag

SEQ ID NO: 48570 - DNA, 25 bp, Homo sapien
taaccgtgaaacataccttgaagag

SEQ ID NO: 48571 - DNA, 25 bp, Homo sapien
agtccgttcaaatctttacagaagt

SEQ ID NO: 48572 - DNA, 25 bp, Homo sapien
agtccgttcaaaactttacagaagt

SEQ ID NO: 48573 - DNA, 25 bp, Homo sapien
accttctgttgtctgttatagctgt

SEQ ID NO: 48574 - DNA, 25 bp, Homo sapien
accttctgttgtgtgttatagctgt

SEQ ID NO: 48575 - DNA, 25 bp, Homo sapien
tacgaaatctgtatgttccacattg

SEQ ID NO: 48576 - DNA, 25 bp, Homo sapien
tacgaaatctgtttgttccacattg

SEQ ID NO: 48577 - DNA, 25 bp, Homo sapien
aaaactttaagtgtgtaacacttcg

SEQ ID NO: 48578 - DNA, 25 bp, Homo sapien
aaaactttaagtctgtaacacttcg

SEQ ID NO: 48579 - DNA, 25 bp, Homo sapien
attacaacgtgttactccaacgtcg

SEQ ID NO: 48580 - DNA, 25 bp, Homo sapien
attacaacgtgtaactccaacgtcg

SEQ ID NO: 48581 - DNA, 25 bp, Homo sapien
ttcgaagtgtaaaacccgtcctaaa

SEQ ID NO: 48582 - DNA, 25 bp, Homo sapien
ttcgaagtgtaatacccgtcctaaa

SEQ ID NO: 48583 - DNA, 25 bp, Homo sapien
ttagaggagactctcgacttccaaa

SEQ ID NO: 48584 - DNA, 25 bp, Homo sapien
ttagaggagactgtcgacttccaaa

SEQ ID NO: 48585 - DNA, 25 bp, Homo sapien
gaccgtcgagtagtgattttactga

SEQ ID NO: 48586 - DNA, 25 bp, Homo sapien
gaccgtcgagtactgattttactga

SEQ ID NO: 48587 - DNA, 25 bp, Homo sapien
ccccctggaactgaggtgtctggag

SEQ ID NO: 48588 - DNA, 25 bp, Homo sapien
ccccctggaactcaggtgtctggag

SEQ ID NO: 48589 - DNA, 25 bp, Homo sapien
accccattgacgactccattctggg

SEQ ID NO: 48590 - DNA, 25 bp, Homo sapien
accccattgacgtctccattctggg

SEQ ID NO: 48591 - DNA, 25 bp, Homo sapien
gcctagaactcgtggctcttgaggg

SEQ ID NO: 48592 - DNA, 25 bp, Homo sapien
gcctagaactcgaggctcttgaggg

SEQ ID NO: 48593 - DNA, 25 bp, Homo sapien
atagacaatcaggacctttcgatgt

SEQ ID NO: 48594 - DNA, 25 bp, Homo sapien
atagacaatcagcacctttcgatgt

SEQ ID NO: 48595 - DNA, 25 bp, Homo sapien
acctcaatcgaccatcagtcaggtt

SEQ ID NO: 48596 - DNA, 25 bp, Homo sapien
acctcaatcgacgatcagtcaggtt

SEQ ID NO: 48597 - DNA, 25 bp, Homo sapien
agtctctagagacgactgtgacact

SEQ ID NO: 48598 - DNA, 25 bp, Homo sapien
agtctctagagaggactgtgacact

SEQ ID NO: 48599 - DNA, 25 bp, Homo sapien
aaccatgcgacgaagaagtctcgtt

SEQ ID NO: 48600 - DNA, 25 bp, Homo sapien
aaccatgcgacgtagaagtctcgtt

SEQ ID NO: 48601 - DNA, 25 bp, Homo sapien
acttcaaccgaaggtagagtctctt

SEQ ID NO: 48602 - DNA, 25 bp, Homo sapien
acttcaaccgaacgtagagtctctt

SEQ ID NO: 48603 - DNA, 25 bp, Homo sapien
gcaactagttgaacaaagacttcca

SEQ ID NO: 48604 - DNA, 25 bp, Homo sapien
gcaactagttgatcaaagacttcca

SEQ ID NO: 48605 - DNA, 25 bp, Homo sapien
ccttggtcgacttaaagactttcac

SEQ ID NO: 48606 - DNA, 25 bp, Homo sapien
ccttggtcgactaaaagactttcac

SEQ ID NO: 48607 - DNA, 25 bp, Homo sapien
ctgtaaccttaatagtctgtgttat

SEQ ID NO: 48608 - DNA, 25 bp, Homo sapien
ctgtaaccttaaaagtctgtgttat

SEQ ID NO: 48609 - DNA, 25 bp, Homo sapien
gtactccaccatgacttatttgtga

SEQ ID NO: 48610 - DNA, 25 bp, Homo sapien
gtactccaccatcacttatttgtga

SEQ ID NO: 48611 - DNA, 25 bp, Homo sapien
ccagttctcgactttattagtgtat

SEQ ID NO: 48612 - DNA, 25 bp, Homo sapien
ccagttctcgacattattagtgtat

SEQ ID NO: 48613 - DNA, 25 bp, Homo sapien
cgagatgacgattgatcgatatact

SEQ ID NO: 48614 - DNA, 25 bp, Homo sapien
cgagatgacgatagatcgatatact

SEQ ID NO: 48615 - DNA, 25 bp, Homo sapien
taaacttgactcgtatactgtagaa

SEQ ID NO: 48616 - DNA, 25 bp, Homo sapien
taaacttgactcctatactgtagaa

SEQ ID NO: 48617 - DNA, 25 bp, Homo sapien
taaatttagtcgactcgttaagtac

SEQ ID NO: 48618 - DNA, 25 bp, Homo sapien
taaatttagtcgtctcgttaagtac

SEQ ID NO: 48619 - DNA, 25 bp, Homo sapien
tatgtaagtataagtttctgtaccc

SEQ ID NO: 48620 - DNA, 25 bp, Homo sapien
tatgtaagtatatgtttctgtaccc

SEQ ID NO: 48621 - DNA, 25 bp, Homo sapien
ttatcgtgacatgggtccttcctct

SEQ ID NO: 48622 - DNA, 25 bp, Homo sapien
ttatcgtgacatcggtccttcctct

SEQ ID NO: 48623 - DNA, 25 bp, Homo sapien
ggaagacccgtaggtccttcggtct

SEQ ID NO: 48624 - DNA, 25 bp, Homo sapien
ggaagacccgtacgtccttcggtct

SEQ ID NO: 48625 - DNA, 25 bp, Homo sapien
tgtcactaacggaccctgaaggtgt

SEQ ID NO: 48626 - DNA, 25 bp, Homo sapien
tgtcactaacggtccctgaaggtgt

SEQ ID NO: 48627 - DNA, 25 bp, Homo sapien
attaaatagactctgtcggaaggac

SEQ ID NO: 48628 - DNA, 25 bp, Homo sapien
attaaatagactgtgtcggaaggac

SEQ ID NO: 48629 - DNA, 25 bp, Homo sapien
tcatagagactcgtccttacagata

SEQ ID NO: 48630 - DNA, 25 bp, Homo sapien
tcatagagactcctccttacagata

SEQ ID NO: 48631 - DNA, 25 bp, Homo sapien
gtaagaagataagtccctttttgac

SEQ ID NO: 48632 - DNA, 25 bp, Homo sapien
gtaagaagataactccctttttgac

SEQ ID NO: 48633 - DNA, 25 bp, Homo sapien
actacgaggggacttcctttagggg

SEQ ID NO: 48634 - DNA, 25 bp, Homo sapien
actacgaggggagttcctttagggg

SEQ ID NO: 48635 - DNA, 25 bp, Homo sapien
accaggggcgcaactgtccacggga

SEQ ID NO: 48636 - DNA, 25 bp, Homo sapien
accaggggcgcatctgtccacggga

SEQ ID NO: 48637 - DNA, 25 bp, Homo sapien
aacaaggttcgagtcttccattgac

SEQ ID NO: 48638 - DNA, 25 bp, Homo sapien
aacaaggttcgactcttccattgac

SEQ ID NO: 48639 - DNA, 25 bp, Homo sapien
cgaatttgagttgagtcctattgac

SEQ ID NO: 48640 - DNA, 25 bp, Homo sapien
cgaatttgagttcagtcctattgac

SEQ ID NO: 48641 - DNA, 25 bp, Homo sapien
ggtttcaattcacgtacgtctcctc

SEQ ID NO: 48642 - DNA, 25 bp, Homo sapien
ggtttcaattcaggtacgtctcctc

SEQ ID NO: 48643 - DNA, 25 bp, Homo sapien
tcgactcagtttcaggtataccttc

SEQ ID NO: 48644 - DNA, 25 bp, Homo sapien
tcgactcagtttgaggtataccttc

SEQ ID NO: 48645 - DNA, 25 bp, Homo sapien
tctgtgagaatagtggtaatccacc

SEQ ID NO: 48646 - DNA, 25 bp, Homo sapien
tctgtgagaatactggtaatccacc

SEQ ID NO: 48647 - DNA, 25 bp, Homo sapien
ttcccgaattcgtgcacgaaggtcc

SEQ ID NO: 48648 - DNA, 25 bp, Homo sapien
ttcccgaattcgagcacgaaggtcc

SEQ ID NO: 48649 - DNA, 25 bp, Homo sapien
cacaccattatcgacccggtggtcc

SEQ ID NO: 48650 - DNA, 25 bp, Homo sapien
cacaccattatccacccggtggtcc

SEQ ID NO: 48651 - DNA, 25 bp, Homo sapien
tgacataaacaccatttcatgatcc

SEQ ID NO: 48652 - DNA, 25 bp, Homo sapien
tgacataaacacgatttcatgatcc

SEQ ID NO: 48653 - DNA, 25 bp, Homo sapien
gtaagatacgactttcatttgattc

SEQ ID NO: 48654 - DNA, 25 bp, Homo sapien
gtaagatacgacattcatttgattc

SEQ ID NO: 48655 - DNA, 25 bp, Homo sapien
ataaagacactgttgtgtttaaatt

SEQ ID NO: 48656 - DNA, 25 bp, Homo sapien
ataaagacactgatgtgtttaaatt

SEQ ID NO: 48657 - DNA, 25 bp, Homo sapien
gttaccccactggattttccctcgt

SEQ ID NO: 48658 - DNA, 25 bp, Homo sapien
gttaccccactgcattttccctcgt

SEQ ID NO: 48659 - DNA, 25 bp, Homo sapien
ataagtcctcacgttttgtgaatta

SEQ ID NO: 48660 - DNA, 25 bp, Homo sapien
ataagtcctcaccttttgtgaatta

SEQ ID NO: 48661 - DNA, 25 bp, Homo sapien
tgttgtggaaatcttccgtgatctc

SEQ ID NO: 48662 - DNA, 25 bp, Homo sapien
tgttgtggaaatgttccgtgatctc

SEQ ID NO: 48663 - DNA, 25 bp, Homo sapien
taattaggaaattttcagtgacatt

SEQ ID NO: 48664 - DNA, 25 bp, Homo sapien
taattaggaaatattcagtgacatt

SEQ ID NO: 48665 - DNA, 25 bp, Homo sapien
gtctcgacatagacgtccaagcatt

SEQ ID NO: 48666 - DNA, 25 bp, Homo sapien
gtctcgacatagtcgtccaagcatt

SEQ ID NO: 48667 - DNA, 25 bp, Homo sapien
aaatcaacgatataggctaagccta

SEQ ID NO: 48668 - DNA, 25 bp, Homo sapien
aaatcaacgataaaggctaagccta

SEQ ID NO: 48669 - DNA, 25 bp, Homo sapien
actgtagaactaaggtcccaccttt

SEQ ID NO: 48670 - DNA, 25 bp, Homo sapien
actgtagaactatggtcccaccttt

SEQ ID NO: 48671 - DNA, 25 bp, Homo sapien
tctcaggactgaaggtccttcctgt

SEQ ID NO: 48672 - DNA, 25 bp, Homo sapien
tctcaggactgatggtccttcctgt

SEQ ID NO: 48673 - DNA, 25 bp, Homo sapien
tcagggtaacgaggaccgtgtcccg

SEQ ID NO: 48674 - DNA, 25 bp, Homo sapien
tcagggtaacgacgaccgtgtcccg

SEQ ID NO: 48675 - DNA, 25 bp, Homo sapien
gtaacagtatacagagacattaccc

SEQ ID NO: 48676 - DNA, 25 bp, Homo sapien
gtaacagtatactgagacattaccc

SEQ ID NO: 48677 - DNA, 25 bp, Homo sapien
tgtcacctccgtggaagaggactct

SEQ ID NO: 48678 - DNA, 25 bp, Homo sapien
tgtcacctccgtcgaagaggactct

SEQ ID NO: 48679 - DNA, 25 bp, Homo sapien
ttcgttgtcctggaactcaccgaaa

SEQ ID NO: 48680 - DNA, 25 bp, Homo sapien
ttcgttgtcctgcaactcaccgaaa

SEQ ID NO: 48681 - DNA, 25 bp, Homo sapien
cgacttcaatcgactgcgtacgaaa

SEQ ID NO: 48682 - DNA, 25 bp, Homo sapien
cgacttcaatcgtctgcgtacgaaa

SEQ ID NO: 48683 - DNA, 25 bp, Homo sapien
aagtaagacaggacagacatgtcta

SEQ ID NO: 48684 - DNA, 25 bp, Homo sapien
aagtaagacaggtcagacatgtcta

SEQ ID NO: 48685 - DNA, 25 bp, Homo sapien
cgaccactccttcattgaagacgaa

SEQ ID NO: 48686 - DNA, 25 bp, Homo sapien
cgaccactccttgattgaagacgaa

SEQ ID NO: 48687 - DNA, 25 bp, Homo sapien
aacctcagagactggcccactgcgg

SEQ ID NO: 48688 - DNA, 25 bp, Homo sapien
aacctcagagacaggcccactgcgg

SEQ ID NO: 48689 - DNA, 25 bp, Homo sapien
tcgccggaaagactcactctcgcgg

SEQ ID NO: 48690 - DNA, 25 bp, Homo sapien
tcgccggaaagagtcactctcgcgg

SEQ ID NO: 48691 - DNA, 25 bp, Homo sapien
gatcccaaaagtacccagtacatcg

SEQ ID NO: 48692 - DNA, 25 bp, Homo sapien
gatcccaaaagttcccagtacatcg

SEQ ID NO: 48693 - DNA, 25 bp, Homo sapien
ataaagacactattcctttagagtg

SEQ ID NO: 48694 - DNA, 25 bp, Homo sapien
ataaagacactaatcctttagagtg

SEQ ID NO: 48695 - DNA, 25 bp, Homo sapien
cgactccttcacagccactgttctt

SEQ ID NO: 48696 - DNA, 25 bp, Homo sapien
cgactccttcactgccactgttctt

SEQ ID NO: 48697 - DNA, 25 bp, Homo sapien
caagtgtgatggatttacttattcc

SEQ ID NO: 48698 - DNA, 25 bp, Homo sapien
caagtgtgatggttttacttattcc

SEQ ID NO: 48699 - DNA, 25 bp, Homo sapien
gaaggtcttggtgctacctttcttt

SEQ ID NO: 48700 - DNA, 25 bp, Homo sapien
gaaggtcttggtcctacctttcttt

SEQ ID NO: 48701 - DNA, 25 bp, Homo sapien
gggaggtattgttgcccttactttt

SEQ ID NO: 48702 - DNA, 25 bp, Homo sapien
gggaggtattgtagcccttactttt

SEQ ID NO: 48703 - DNA, 25 bp, Homo sapien
cggttttcagttatactacttatgt

SEQ ID NO: 48704 - DNA, 25 bp, Homo sapien
cggttttcagttttactacttatgt

SEQ ID NO: 48705 - DNA, 25 bp, Homo sapien
gggtctcttcacctttctgtacttt

SEQ ID NO: 48706 - DNA, 25 bp, Homo sapien
gggtctcttcacgtttctgtacttt

SEQ ID NO: 48707 - DNA, 25 bp, Homo sapien
gttttgacgactagactatcttact

SEQ ID NO: 48708 - DNA, 25 bp, Homo sapien
gttttgacgacttgactatcttact

SEQ ID NO: 48709 - DNA, 25 bp, Homo sapien
accgaagtccccactataaaggtta

SEQ ID NO: 48710 - DNA, 25 bp, Homo sapien
accgaagtcccctctataaaggtta

SEQ ID NO: 48711 - DNA, 25 bp, Homo sapien
aacccggccacctcttggtgtttcg

SEQ ID NO: 48712 - DNA, 25 bp, Homo sapien
aacccggccaccacttggtgtttcg

SEQ ID NO: 48713 - DNA, 25 bp, Homo sapien
catggacgccctgagactttgtcgt

SEQ ID NO: 48714 - DNA, 25 bp, Homo sapien
catggacgccctcagactttgtcgt

SEQ ID NO: 48715 - DNA, 25 bp, Homo sapien
ttccatggagtccctcggatcctcc

SEQ ID NO: 48716 - DNA, 25 bp, Homo sapien
ttccatggagtcgctcggatcctcc

SEQ ID NO: 48717 - DNA, 25 bp, Homo sapien
ggtcgacgacattctggggtactct

SEQ ID NO: 48718 - DNA, 25 bp, Homo sapien
ggtcgacgacatactggggtactct

SEQ ID NO: 48719 - DNA, 25 bp, Homo sapien
cgtctgacgaacagtgaccggtcct

SEQ ID NO: 48720 - DNA, 25 bp, Homo sapien
cgtctgacgaactgtgaccggtcct

SEQ ID NO: 48721 - DNA, 25 bp, Homo sapien
cggtcggaaacttgaacgagtcgtt

SEQ ID NO: 48722 - DNA, 25 bp, Homo sapien
cggtcggaaactagaacgagtcgtt

SEQ ID NO: 48723 - DNA, 25 bp, Homo sapien
cgagggacacactgacgaggccgtc

SEQ ID NO: 48724 - DNA, 25 bp, Homo sapien
cgagggacacacagacgaggccgtc

SEQ ID NO: 48725 - DNA, 25 bp, Homo sapien
tacgggaccatcctgcggtcgtcgt

SEQ ID NO: 48726 - DNA, 25 bp, Homo sapien
tacgggaccatcgtgcggtcgtcgt

SEQ ID NO: 48727 - DNA, 25 bp, Homo sapien
atcgggtcacctcctgtcgtctcct

SEQ ID NO: 48728 - DNA, 25 bp, Homo sapien
atcgggtcacctgctgtcgtctcct

SEQ ID NO: 48729 - DNA, 25 bp, Homo sapien
ccgaggtccgacgtcaagtgtctca

SEQ ID NO: 48730 - DNA, 25 bp, Homo sapien
ccgaggtccgacctcaagtgtctca

SEQ ID NO: 48731 - DNA, 25 bp, Homo sapien
cgagagtgccgtctgttgtcgtgtc

SEQ ID NO: 48732 - DNA, 25 bp, Homo sapien
cgagagtgccgtgtgttgtcgtgtc

SEQ ID NO: 48733 - DNA, 25 bp, Homo sapien
taaaggggttccttatggagaaccg

SEQ ID NO: 48734 - DNA, 25 bp, Homo sapien
taaaggggttccatatggagaaccg

SEQ ID NO: 48735 - DNA, 25 bp, Homo sapien
aagagtggtcttattctcgtgaacc

SEQ ID NO: 48736 - DNA, 25 bp, Homo sapien
aagagtggtctttttctcgtgaacc

SEQ ID NO: 48737 - DNA, 25 bp, Homo sapien
aataaccttcgatacgtttacatct

SEQ ID NO: 48738 - DNA, 25 bp, Homo sapien
aataaccttcgaaacgtttacatct

SEQ ID NO: 48739 - DNA, 25 bp, Homo sapien
gtacatatgatcaggattctacata

SEQ ID NO: 48740 - DNA, 25 bp, Homo sapien
gtacatatgatctggattctacata

SEQ ID NO: 48741 - DNA, 25 bp, Homo sapien
tcctacatctgaatggacatccatg

SEQ ID NO: 48742 - DNA, 25 bp, Homo sapien
tcctacatctgattggacatccatg

SEQ ID NO: 48743 - DNA, 25 bp, Homo sapien
tatgtatgattacacatgacactcg

SEQ ID NO: 48744 - DNA, 25 bp, Homo sapien
tatgtatgattagacatgacactcg

SEQ ID NO: 48745 - DNA, 25 bp, Homo sapien
cttgttttcttaggaccgtataaag

SEQ ID NO: 48746 - DNA, 25 bp, Homo sapien
cttgttttcttacgaccgtataaag

SEQ ID NO: 48747 - DNA, 25 bp, Homo sapien
aaagttcttcacgacacgactataa

SEQ ID NO: 48748 - DNA, 25 bp, Homo sapien
aaagttcttcaccacacgactataa

SEQ ID NO: 48749 - DNA, 25 bp, Homo sapien
tagaaggtcctaaaacattctaaac

SEQ ID NO: 48750 - DNA, 25 bp, Homo sapien
tagaaggtcctataacattctaaac

SEQ ID NO: 48751 - DNA, 25 bp, Homo sapien
tcgcgaaagaattcgcgccggtctc

SEQ ID NO: 48752 - DNA, 25 bp, Homo sapien
tcgcgaaagaatacgcgccggtctc

SEQ ID NO: 48753 - DNA, 25 bp, Homo sapien
gacgctctaacgaggtacgttctag

SEQ ID NO: 48754 - DNA, 25 bp, Homo sapien
gacgctctaacgtggtacgttctag

SEQ ID NO: 48755 - DNA, 25 bp, Homo sapien
gcaatcgctgacgctgcaagctaga

SEQ ID NO: 48756 - DNA, 25 bp, Homo sapien
gcaatcgctgaccctgcaagctaga

SEQ ID NO: 48757 - DNA, 25 bp, Homo sapien
tttcaacctcattcggactttcagg

SEQ ID NO: 48758 - DNA, 25 bp, Homo sapien
tttcaacctcatacggactttcagg

SEQ ID NO: 48759 - DNA, 25 bp, Homo sapien
tgtccttgtcttgtttagtctcccg

SEQ ID NO: 48760 - DNA, 25 bp, Homo sapien
tgtccttgtcttctttagtctcccg

SEQ ID NO: 48761 - DNA, 25 bp, Homo sapien
cctgtgagtcgattctcgtagctcc

SEQ ID NO: 48762 - DNA, 25 bp, Homo sapien
cctgtgagtcgaatctcgtagctcc

SEQ ID NO: 48763 - DNA, 25 bp, Homo sapien
ttcgtttagttctgactcttgtcaa

SEQ ID NO: 48764 - DNA, 25 bp, Homo sapien
ttcgtttagttcagactcttgtcaa

SEQ ID NO: 48765 - DNA, 25 bp, Homo sapien
ttttgttccttcgttcagagaggat

SEQ ID NO: 48766 - DNA, 25 bp, Homo sapien
ttttgttccttccttcagagaggat

SEQ ID NO: 48767 - DNA, 25 bp, Homo sapien
tctgttttctccttcggttaacgat

SEQ ID NO: 48768 - DNA, 25 bp, Homo sapien
tctgttttctccatcggttaacgat

SEQ ID NO: 48769 - DNA, 25 bp, Homo sapien
tttttagtctaaagtgtacataccg

SEQ ID NO: 48770 - DNA, 25 bp, Homo sapien
tttttagtctaatgtgtacataccg

SEQ ID NO: 48771 - DNA, 25 bp, Homo sapien
tgtacgttaatcaatcttgttttcg

SEQ ID NO: 48772 - DNA, 25 bp, Homo sapien
tgtacgttaatctatcttgttttcg

SEQ ID NO: 48773 - DNA, 25 bp, Homo sapien
gtaccgaacttattctcctttgtcg

SEQ ID NO: 48774 - DNA, 25 bp, Homo sapien
gtaccgaacttaatctcctttgtcg

SEQ ID NO: 48775 - DNA, 25 bp, Homo sapien
tacctttggtactctcggttctact

SEQ ID NO: 48776 - DNA, 25 bp, Homo sapien
tacctttggtacactcggttctact

SEQ ID NO: 48777 - DNA, 25 bp, Homo sapien
ttctactcagggactcgttagtcct

SEQ ID NO: 48778 - DNA, 25 bp, Homo sapien
ttctactcagggtctcgttagtcct

SEQ ID NO: 48779 - DNA, 25 bp, Homo sapien
cactgtctgtgtgtagtcggtgatt

SEQ ID NO: 48780 - DNA, 25 bp, Homo sapien
cactgtctgtgtctagtcggtgatt

SEQ ID NO: 48781 - DNA, 25 bp, Homo sapien
agtatatggtattacgttccgtatc

SEQ ID NO: 48782 - DNA, 25 bp, Homo sapien
agtatatggtataacgttccgtatc

SEQ ID NO: 48783 - DNA, 25 bp, Homo sapien
tggtgtgtggtacgtgatacctacc

SEQ ID NO: 48784 - DNA, 25 bp, Homo sapien
tggtgtgtggtaggtgatacctacc

SEQ ID NO: 48785 - DNA, 25 bp, Homo sapien
ggtctgtcgtcctgaggtttctccc

SEQ ID NO: 48786 - DNA, 25 bp, Homo sapien
ggtctgtcgtccagaggtttctccc

SEQ ID NO: 48787 - DNA, 25 bp, Homo sapien
cttttatacgagtgtaggataccac

SEQ ID NO: 48788 - DNA, 25 bp, Homo sapien
cttttatacgagagtaggataccac

SEQ ID NO: 48789 - DNA, 25 bp, Homo sapien
tgtgtgtacggtgatgacgagtccc

SEQ ID NO: 48790 - DNA, 25 bp, Homo sapien
tgtgtgtacggtcatgacgagtccc

SEQ ID NO: 48791 - DNA, 25 bp, Homo sapien
ggcggtacagtggtcgaccgtccac

SEQ ID NO: 48792 - DNA, 25 bp, Homo sapien
ggcggtacagtgctcgaccgtccac

SEQ ID NO: 48793 - DNA, 25 bp, Homo sapien
agatcgagagtaaaatcggttctca

SEQ ID NO: 48794 - DNA, 25 bp, Homo sapien
agatcgagagtataatcggttctca

SEQ ID NO: 48795 - DNA, 25 bp, Homo sapien
aacgaatgttacttcgatcttatag

SEQ ID NO: 48796 - DNA, 25 bp, Homo sapien
aacgaatgttacatcgatcttatag

SEQ ID NO: 48797 - DNA, 25 bp, Homo sapien
tagtaaatgagacgttacacttacg

SEQ ID NO: 48798 - DNA, 25 bp, Homo sapien
tagtaaatgagaggttacacttacg

SEQ ID NO: 48799 - DNA, 25 bp, Homo sapien
ctataaatcaacagtccgtagtatc

SEQ ID NO: 48800 - DNA, 25 bp, Homo sapien
ctataaatcaactgtccgtagtatc

SEQ ID NO: 48801 - DNA, 25 bp, Homo sapien
cctacaagtgtatactggggtctcg

SEQ ID NO: 48802 - DNA, 25 bp, Homo sapien
cctacaagtgtaaactggggtctcg

SEQ ID NO: 48803 - DNA, 25 bp, Homo sapien
gtttgtatctaaccaacggttctct

SEQ ID NO: 48804 - DNA, 25 bp, Homo sapien
gtttgtatctaagcaacggttctct

SEQ ID NO: 48805 - DNA, 25 bp, Homo sapien
gtcgtactgttttaaacatgtttca

SEQ ID NO: 48806 - DNA, 25 bp, Homo sapien
gtcgtactgtttaaaacatgtttca

SEQ ID NO: 48807 - DNA, 25 bp, Homo sapien
ctagtgttttaaaaccttgtgttac

SEQ ID NO: 48808 - DNA, 25 bp, Homo sapien
ctagtgttttaataccttgtgttac

SEQ ID NO: 48809 - DNA, 25 bp, Homo sapien
ctttatttacaactctcatttatac

SEQ ID NO: 48810 - DNA, 25 bp, Homo sapien
ctttatttacaagtctcatttatac

SEQ ID NO: 48811 - DNA, 25 bp, Homo sapien
cacgtaggtacagttacagtttaag

SEQ ID NO: 48812 - DNA, 25 bp, Homo sapien
cacgtaggtacacttacagtttaag

SEQ ID NO: 48813 - DNA, 25 bp, Homo sapien
catctagagctttctcgtgttgaca

SEQ ID NO: 48814 - DNA, 25 bp, Homo sapien
catctagagcttactcgtgttgaca

SEQ ID NO: 48815 - DNA, 25 bp, Homo sapien
tcctgtcgctgaagacttgtgtaat

SEQ ID NO: 48816 - DNA, 25 bp, Homo sapien
tcctgtcgctgatgacttgtgtaat

SEQ ID NO: 48817 - DNA, 25 bp, Homo sapien
gtccccacggttcctgtcgtctgtg

SEQ ID NO: 48818 - DNA, 25 bp, Homo sapien
gtccccacggttgctgtcgtctgtg

SEQ ID NO: 48819 - DNA, 25 bp, Homo sapien
ttgatgcctcgtttcttagtgtgtc

SEQ ID NO: 48820 - DNA, 25 bp, Homo sapien
ttgatgcctcgtatcttagtgtgtc

SEQ ID NO: 48821 - DNA, 25 bp, Homo sapien
ttgtcttcaagtgattcctacgtgc

SEQ ID NO: 48822 - DNA, 25 bp, Homo sapien
ttgtcttcaagtcattcctacgtgc

SEQ ID NO: 48823 - DNA, 25 bp, Homo sapien
tgatttacttaagttttaccggttc

SEQ ID NO: 48824 - DNA, 25 bp, Homo sapien
tgatttacttaacttttaccggttc

SEQ ID NO: 48825 - DNA, 25 bp, Homo sapien
tgtgaataaagatctttcgtcgtcc

SEQ ID NO: 48826 - DNA, 25 bp, Homo sapien
tgtgaataaagaactttcgtcgtcc

SEQ ID NO: 48827 - DNA, 25 bp, Homo sapien
agaacagttagattattgtcaccgt

SEQ ID NO: 48828 - DNA, 25 bp, Homo sapien
agaacagttagaatattgtcaccgt

SEQ ID NO: 48829 - DNA, 25 bp, Homo sapien
gggacgtcacttatatctgtaacac

SEQ ID NO: 48830 - DNA, 25 bp, Homo sapien
gggacgtcacttttatctgtaacac

SEQ ID NO: 48831 - DNA, 25 bp, Homo sapien
tgaaataagtgtcagttcgtctcta

SEQ ID NO: 48832 - DNA, 25 bp, Homo sapien
tgaaataagtgtgagttcgtctcta

SEQ ID NO: 48833 - DNA, 25 bp, Homo sapien
tcttacaacgggacgtttgttacta

SEQ ID NO: 48834 - DNA, 25 bp, Homo sapien
tcttacaacgggtcgtttgttacta

SEQ ID NO: 48835 - DNA, 25 bp, Homo sapien
ttgtttctaccgtggttactgtccc

SEQ ID NO: 48836 - DNA, 25 bp, Homo sapien
ttgtttctaccgaggttactgtccc

SEQ ID NO: 48837 - DNA, 25 bp, Homo sapien
tttcggttacggactggtccggacc

SEQ ID NO: 48838 - DNA, 25 bp, Homo sapien
tttcggttacggtctggtccggacc

SEQ ID NO: 48839 - DNA, 25 bp, Homo sapien
atcgtttaggaactgtccgaactac

SEQ ID NO: 48840 - DNA, 25 bp, Homo sapien
atcgtttaggaagtgtccgaactac

SEQ ID NO: 48841 - DNA, 25 bp, Homo sapien
gagacggaaataaagtgccgacctc

SEQ ID NO: 48842 - DNA, 25 bp, Homo sapien
gagacggaaatatagtgccgacctc

SEQ ID NO: 48843 - DNA, 25 bp, Homo sapien
aggagaggaaagtaggaccctcgtc

SEQ ID NO: 48844 - DNA, 25 bp, Homo sapien
aggagaggaaagaaggaccctcgtc

SEQ ID NO: 48845 - DNA, 25 bp, Homo sapien
acagatcttgtcagagggtgcgaca

SEQ ID NO: 48846 - DNA, 25 bp, Homo sapien
acagatcttgtctgagggtgcgaca

SEQ ID NO: 48847 - DNA, 25 bp, Homo sapien
tcgaccaccggtagtttacgtaacg

SEQ ID NO: 48848 - DNA, 25 bp, Homo sapien
tcgaccaccggttgtttacgtaacg

SEQ ID NO: 48849 - DNA, 25 bp, Homo sapien
gatcgaatcgtttatagtacctgga

SEQ ID NO: 48850 - DNA, 25 bp, Homo sapien
gatcgaatcgttaatagtacctgga

SEQ ID NO: 48851 - DNA, 25 bp, Homo sapien
gtctcttgtagtgtaatttccgctg

SEQ ID NO: 48852 - DNA, 25 bp, Homo sapien
gtctcttgtagtctaatttccgctg

SEQ ID NO: 48853 - DNA, 25 bp, Homo sapien
cctcgtgcggctcatttcttccgtt

SEQ ID NO: 48854 - DNA, 25 bp, Homo sapien
cctcgtgcggctgatttcttccgtt

SEQ ID NO: 48855 - DNA, 25 bp, Homo sapien
acacgacggagtctactctcgagac

SEQ ID NO: 48856 - DNA, 25 bp, Homo sapien
acacgacggagtgtactctcgagac

SEQ ID NO: 48857 - DNA, 25 bp, Homo sapien
acgctacttacgtgtcttactgact

SEQ ID NO: 48858 - DNA, 25 bp, Homo sapien
acgctacttacgagtcttactgact

SEQ ID NO: 48859 - DNA, 25 bp, Homo sapien
cctccagtgtagagacctactgacg

SEQ ID NO: 48860 - DNA, 25 bp, Homo sapien
cctccagtgtagtgacctactgacg

SEQ ID NO: 48861 - DNA, 25 bp, Homo sapien
agacacaaagtgacacatacttaag

SEQ ID NO: 48862 - DNA, 25 bp, Homo sapien
agacacaaagtgtcacatacttaag

SEQ ID NO: 48863 - DNA, 25 bp, Homo sapien
aagacatcacggtcactatcttgac

SEQ ID NO: 48864 - DNA, 25 bp, Homo sapien
aagacatcacggacactatcttgac

SEQ ID NO: 48865 - DNA, 25 bp, Homo sapien
aagtcgaggcggacgcatctgtgac

SEQ ID NO: 48866 - DNA, 25 bp, Homo sapien
aagtcgaggcggtcgcatctgtgac

SEQ ID NO: 48867 - DNA, 25 bp, Homo sapien
acccttctcgacgatcggaaccgga

SEQ ID NO: 48868 - DNA, 25 bp, Homo sapien
acccttctcgaccatcggaaccgga

SEQ ID NO: 48869 - DNA, 25 bp, Homo sapien
taaccgttaccatgtctttcgtcga

SEQ ID NO: 48870 - DNA, 25 bp, Homo sapien
taaccgttaccaagtctttcgtcga

SEQ ID NO: 48871 - DNA, 25 bp, Homo sapien
aacgtaggtgaaactttcagtcgac

SEQ ID NO: 48872 - DNA, 25 bp, Homo sapien
aacgtaggtgaatctttcagtcgac

SEQ ID NO: 48873 - DNA, 25 bp, Homo sapien
agacgatgaatgatatactacaact

SEQ ID NO: 48874 - DNA, 25 bp, Homo sapien
agacgatgaatgttatactacaact

SEQ ID NO: 48875 - DNA, 25 bp, Homo sapien
aggagcagcgtaccacatctcgacc

SEQ ID NO: 48876 - DNA, 25 bp, Homo sapien
aggagcagcgtagcacatctcgacc

SEQ ID NO: 48877 - DNA, 25 bp, Homo sapien
gaagacagagagcacacacacatac

SEQ ID NO: 48878 - DNA, 25 bp, Homo sapien
gaagacagagaggacacacacatac

SEQ ID NO: 48879 - DNA, 25 bp, Homo sapien
aggcacagtagagactacgaccctt

SEQ ID NO: 48880 - DNA, 25 bp, Homo sapien
aggcacagtagacactacgaccctt

SEQ ID NO: 48881 - DNA, 25 bp, Homo sapien
ggtcgggaaagaatctccactcgaa

SEQ ID NO: 48882 - DNA, 25 bp, Homo sapien
ggtcgggaaagattctccactcgaa

SEQ ID NO: 48883 - DNA, 25 bp, Homo sapien
ttcacggcacaattctccctcggag

SEQ ID NO: 48884 - DNA, 25 bp, Homo sapien
ttcacggcacaaatctccctcggag

SEQ ID NO: 48885 - DNA, 25 bp, Homo sapien
cgtacccgatactacatatttctgg

SEQ ID NO: 48886 - DNA, 25 bp, Homo sapien
cgtacccgatacaacatatttctgg

SEQ ID NO: 48887 - DNA, 25 bp, Homo sapien
aacgaatgatctacaaagtgtccac

SEQ ID NO: 48888 - DNA, 25 bp, Homo sapien
aacgaatgatcttcaaagtgtccac

SEQ ID NO: 48889 - DNA, 25 bp, Homo sapien
gatataggtatggaagacgtccttc

SEQ ID NO: 48890 - DNA, 25 bp, Homo sapien
gatataggtatgcaagacgtccttc

SEQ ID NO: 48891 - DNA, 25 bp, Homo sapien
tgtatagtggggaaacgtcactatc

SEQ ID NO: 48892 - DNA, 25 bp, Homo sapien
tgtatagtggggtaacgtcactatc

SEQ ID NO: 48893 - DNA, 25 bp, Homo sapien
ccaccgacgtggtaggtgtgcgttc

SEQ ID NO: 48894 - DNA, 25 bp, Homo sapien
ccaccgacgtggaaggtgtgcgttc

SEQ ID NO: 48895 - DNA, 25 bp, Homo sapien
atcctggagtacctagtcgtcgttc

SEQ ID NO: 48896 - DNA, 25 bp, Homo sapien
atcctggagtacgtagtcgtcgttc

SEQ ID NO: 48897 - DNA, 25 bp, Homo sapien
gtatacgtgtccttggtttagttac

SEQ ID NO: 48898 - DNA, 25 bp, Homo sapien
gtatacgtgtccatggtttagttac

SEQ ID NO: 48899 - DNA, 25 bp, Homo sapien
gtcttctgttcgttgacttcgaatt

SEQ ID NO: 48900 - DNA, 25 bp, Homo sapien
gtcttctgttcgatgacttcgaatt

SEQ ID NO: 48901 - DNA, 25 bp, Homo sapien
catgtcgtactcactcatgtaatag

SEQ ID NO: 48902 - DNA, 25 bp, Homo sapien
catgtcgtactctctcatgtaatag

SEQ ID NO: 48903 - DNA, 25 bp, Homo sapien
ttataagtgacttccgacggcttag

SEQ ID NO: 48904 - DNA, 25 bp, Homo sapien
ttataagtgactaccgacggcttag

SEQ ID NO: 48905 - DNA, 25 bp, Homo sapien
taccaagaataagtacgtcgtcata

SEQ ID NO: 48906 - DNA, 25 bp, Homo sapien
taccaagaataactacgtcgtcata

SEQ ID NO: 48907 - DNA, 25 bp, Homo sapien
aatacaccggtagtttttctcgctc

SEQ ID NO: 48908 - DNA, 25 bp, Homo sapien
aatacaccggtactttttctcgctc

SEQ ID NO: 48909 - DNA, 25 bp, Homo sapien
cctacacttccttgtctcatcgtcc

SEQ ID NO: 48910 - DNA, 25 bp, Homo sapien
cctacacttcctagtctcatcgtcc

SEQ ID NO: 48911 - DNA, 25 bp, Homo sapien
acaacctttcgtcgtctcccgagag

SEQ ID NO: 48912 - DNA, 25 bp, Homo sapien
acaacctttcgtggtctcccgagag

SEQ ID NO: 48913 - DNA, 25 bp, Homo sapien
agacgtctctacgtatcacctcaag

SEQ ID NO: 48914 - DNA, 25 bp, Homo sapien
agacgtctctacctatcacctcaag

SEQ ID NO: 48915 - DNA, 25 bp, Homo sapien
gggggtctccgaagtcactacccat

SEQ ID NO: 48916 - DNA, 25 bp, Homo sapien
gggggtctccgatgtcactacccat

SEQ ID NO: 48917 - DNA, 25 bp, Homo sapien
gtgtggtctccagtaactctttagt

SEQ ID NO: 48918 - DNA, 25 bp, Homo sapien
gtgtggtctccactaactctttagt

SEQ ID NO: 48919 - DNA, 25 bp, Homo sapien
ggtgacctcgactcacattctcgac

SEQ ID NO: 48920 - DNA, 25 bp, Homo sapien
ggtgacctcgacacacattctcgac

SEQ ID NO: 48921 - DNA, 25 bp, Homo sapien
tatcgctatcgaacacttcgtctgc

SEQ ID NO: 48922 - DNA, 25 bp, Homo sapien
tatcgctatcgatcacttcgtctgc

SEQ ID NO: 48923 - DNA, 25 bp, Homo sapien
tactgtttgtgatgatgagactctc

SEQ ID NO: 48924 - DNA, 25 bp, Homo sapien
tactgtttgtgaagatgagactctc

SEQ ID NO: 48925 - DNA, 25 bp, Homo sapien
cgtctgtctctagagatgggacttc

SEQ ID NO: 48926 - DNA, 25 bp, Homo sapien
cgtctgtctctacagatgggacttc

SEQ ID NO: 48927 - DNA, 25 bp, Homo sapien
ctccgagtcacagactatctccttg

SEQ ID NO: 48928 - DNA, 25 bp, Homo sapien
ctccgagtcacacactatctccttg

SEQ ID NO: 48929 - DNA, 25 bp, Homo sapien
tatcagtgtatgtcttacttcttag

SEQ ID NO: 48930 - DNA, 25 bp, Homo sapien
tatcagtgtatgacttacttcttag

SEQ ID NO: 48931 - DNA, 25 bp, Homo sapien
acgtcagtttatcctatccgaggac

SEQ ID NO: 48932 - DNA, 25 bp, Homo sapien
acgtcagtttatgctatccgaggac

SEQ ID NO: 48933 - DNA, 25 bp, Homo sapien
tcacctctggctggttcggagagac

SEQ ID NO: 48934 - DNA, 25 bp, Homo sapien
tcacctctggctcgttcggagagac

SEQ ID NO: 48935 - DNA, 25 bp, Homo sapien
acaggtctcgcctcctcggagtaat

SEQ ID NO: 48936 - DNA, 25 bp, Homo sapien
acaggtctcgccacctcggagtaat

SEQ ID NO: 48937 - DNA, 25 bp, Homo sapien
gtgtacaaatgaattcctctcaaga

SEQ ID NO: 48938 - DNA, 25 bp, Homo sapien
gtgtacaaatgatttcctctcaaga

SEQ ID NO: 48939 - DNA, 25 bp, Homo sapien
gacagaacgcaaaccgcacgaggca

SEQ ID NO: 48940 - DNA, 25 bp, Homo sapien
gacagaacgcaatccgcacgaggca

SEQ ID NO: 48941 - DNA, 25 bp, Homo sapien
gcaacctccagtcacttgtggtccg

SEQ ID NO: 48942 - DNA, 25 bp, Homo sapien
gcaacctccagtgacttgtggtccg

SEQ ID NO: 48943 - DNA, 25 bp, Homo sapien
agaagtgttccgtcgtccttttctc

SEQ ID NO: 48944 - DNA, 25 bp, Homo sapien
agaagtgttccgacgtccttttctc

SEQ ID NO: 48945 - DNA, 25 bp, Homo sapien
acagagacaaccactggtggacgtc

SEQ ID NO: 48946 - DNA, 25 bp, Homo sapien
acagagacaacctctggtggacgtc

SEQ ID NO: 48947 - DNA, 25 bp, Homo sapien
ccagagcaaccgtgtagcttagaac

SEQ ID NO: 48948 - DNA, 25 bp, Homo sapien
ccagagcaaccgagtagcttagaac

SEQ ID NO: 48949 - DNA, 25 bp, Homo sapien
gaaaacgtcatttcgaacacgaact

SEQ ID NO: 48950 - DNA, 25 bp, Homo sapien
gaaaacgtcattacgaacacgaact

SEQ ID NO: 48951 - DNA, 25 bp, Homo sapien
agggtaaacagaattcaggaccaca

SEQ ID NO: 48952 - DNA, 25 bp, Homo sapien
agggtaaacagatttcaggaccaca

SEQ ID NO: 48953 - DNA, 25 bp, Homo sapien
ggactaccgacgacttcgggcccag

SEQ ID NO: 48954 - DNA, 25 bp, Homo sapien
ggactaccgacgtcttcgggcccag

SEQ ID NO: 48955 - DNA, 25 bp, Homo sapien
ggaacaccgaaaggacctcctctag

SEQ ID NO: 48956 - DNA, 25 bp, Homo sapien
ggaacaccgaaacgacctcctctag

SEQ ID NO: 48957 - DNA, 25 bp, Homo sapien
agatacactgaccaactcctttgtg

SEQ ID NO: 48958 - DNA, 25 bp, Homo sapien
agatacactgacgaactcctttgtg

SEQ ID NO: 48959 - DNA, 25 bp, Homo sapien
gtagaatgatgtcgtcactactttt

SEQ ID NO: 48960 - DNA, 25 bp, Homo sapien
gtagaatgatgtggtcactactttt

SEQ ID NO: 48961 - DNA, 25 bp, Homo sapien
ataccttaatcgtcgatactgaggt

SEQ ID NO: 48962 - DNA, 25 bp, Homo sapien
ataccttaatcgacgatactgaggt

SEQ ID NO: 48963 - DNA, 25 bp, Homo sapien
actcttagtaaagctacaacttggt

SEQ ID NO: 48964 - DNA, 25 bp, Homo sapien
actcttagtaaacctacaacttggt

SEQ ID NO: 48965 - DNA, 25 bp, Homo sapien
gacttgactcaacctctgtatcaga

SEQ ID NO: 48966 - DNA, 25 bp, Homo sapien
gacttgactcaagctctgtatcaga

SEQ ID NO: 48967 - DNA, 25 bp, Homo sapien
aaacggaatccacacgtcacgcaag

SEQ ID NO: 48968 - DNA, 25 bp, Homo sapien
aaacggaatccagacgtcacgcaag

SEQ ID NO: 48969 - DNA, 25 bp, Homo sapien
taagactcggtcactcagataacgt

SEQ ID NO: 48970 - DNA, 25 bp, Homo sapien
taagactcggtctctcagataacgt

SEQ ID NO: 48971 - DNA, 25 bp, Homo sapien
aaactatgaccgatagtagtcaagt

SEQ ID NO: 48972 - DNA, 25 bp, Homo sapien
aaactatgaccgttagtagtcaagt

SEQ ID NO: 48973 - DNA, 25 bp, Homo sapien
gaactacttcgttgtagacaacagt

SEQ ID NO: 48974 - DNA, 25 bp, Homo sapien
gaactacttcgtagtagacaacagt

SEQ ID NO: 48975 - DNA, 25 bp, Homo sapien
cgaaattctccgactaatagacggt

SEQ ID NO: 48976 - DNA, 25 bp, Homo sapien
cgaaattctccgtctaatagacggt

SEQ ID NO: 48977 - DNA, 25 bp, Homo sapien
cttaagacctcgtcgattagatggg

SEQ ID NO: 48978 - DNA, 25 bp, Homo sapien
cttaagacctcgacgattagatggg

SEQ ID NO: 48979 - DNA, 25 bp, Homo sapien
attccgtgcacgtgacaggtgtact

SEQ ID NO: 48980 - DNA, 25 bp, Homo sapien
attccgtgcacgagacaggtgtact

SEQ ID NO: 48981 - DNA, 25 bp, Homo sapien
ctgttctctgaacgtagatcttaca

SEQ ID NO: 48982 - DNA, 25 bp, Homo sapien
ctgttctctgaaggtagatcttaca

SEQ ID NO: 48983 - DNA, 25 bp, Homo sapien
ttcgttctctacttgtcgggtaaac

SEQ ID NO: 48984 - DNA, 25 bp, Homo sapien
ttcgttctctacatgtcgggtaaac

SEQ ID NO: 48985 - DNA, 25 bp, Homo sapien
ttcttagacgacagaggggtactca

SEQ ID NO: 48986 - DNA, 25 bp, Homo sapien
ttcttagacgactgaggggtactca

SEQ ID NO: 48987 - DNA, 25 bp, Homo sapien
attacttaccacgtatgcgatgtta

SEQ ID NO: 48988 - DNA, 25 bp, Homo sapien
attacttaccacctatgcgatgtta

SEQ ID NO: 48989 - DNA, 25 bp, Homo sapien
tcactatccgatttcgtcatagaag

SEQ ID NO: 48990 - DNA, 25 bp, Homo sapien
tcactatccgatatcgtcatagaag

SEQ ID NO: 48991 - DNA, 25 bp, Homo sapien
aacatatggaggtcgtcgacggacc

SEQ ID NO: 48992 - DNA, 25 bp, Homo sapien
aacatatggaggacgtcgacggacc

SEQ ID NO: 48993 - DNA, 25 bp, Homo sapien
acgttgaatatggattcctttatca

SEQ ID NO: 48994 - DNA, 25 bp, Homo sapien
acgttgaatatgcattcctttatca

SEQ ID NO: 48995 - DNA, 25 bp, Homo sapien
taatactgtacagttgttgtttcac

SEQ ID NO: 48996 - DNA, 25 bp, Homo sapien
taatactgtacacttgttgtttcac

SEQ ID NO: 48997 - DNA, 25 bp, Homo sapien
acgtgtgtacaccttcttgacctcc

SEQ ID NO: 48998 - DNA, 25 bp, Homo sapien
acgtgtgtacacgttcttgacctcc

SEQ ID NO: 48999 - DNA, 25 bp, Homo sapien
cgggggtcacgtcaaaccgagtctg

SEQ ID NO: 49000 - DNA, 25 bp, Homo sapien
cgggggtcacgtgaaaccgagtctg

SEQ ID NO: 49001 - DNA, 25 bp, Homo sapien
acataaggaccgaaggaacatatgt

SEQ ID NO: 49002 - DNA, 25 bp, Homo sapien
acataaggaccgtaggaacatatgt

SEQ ID NO: 49003 - DNA, 25 bp, Homo sapien
caagtaaaggacaacgagaaccttt

SEQ ID NO: 49004 - DNA, 25 bp, Homo sapien
caagtaaaggactacgagaaccttt

SEQ ID NO: 49005 - DNA, 25 bp, Homo sapien
aagacagaaggatcgactaggcttt

SEQ ID NO: 49006 - DNA, 25 bp, Homo sapien
aagacagaaggaacgactaggcttt

SEQ ID NO: 49007 - DNA, 25 bp, Homo sapien
agacgaagtaactccagagtccttt

SEQ ID NO: 49008 - DNA, 25 bp, Homo sapien
agacgaagtaacaccagagtccttt

SEQ ID NO: 49009 - DNA, 25 bp, Homo sapien
gacactaagactccacggttctcct

SEQ ID NO: 49010 - DNA, 25 bp, Homo sapien
gacactaagactgcacggttctcct

SEQ ID NO: 49011 - DNA, 25 bp, Homo sapien
tctcgaagaaagaagctgtctctct

SEQ ID NO: 49012 - DNA, 25 bp, Homo sapien
tctcgaagaaagtagctgtctctct

SEQ ID NO: 49013 - DNA, 25 bp, Homo sapien
gaagtctcccgagacgaagccccta

SEQ ID NO: 49014 - DNA, 25 bp, Homo sapien
gaagtctcccgacacgaagccccta

SEQ ID NO: 49015 - DNA, 25 bp, Homo sapien
acctgttcccgagatggaccgacaa

SEQ ID NO: 49016 - DNA, 25 bp, Homo sapien
acctgttcccgacatggaccgacaa

SEQ ID NO: 49017 - DNA, 25 bp, Homo sapien
gtacgtaaatgctggaacacctata

SEQ ID NO: 49018 - DNA, 25 bp, Homo sapien
gtacgtaaatgcaggaacacctata

SEQ ID NO: 49019 - DNA, 25 bp, Homo sapien
tgacaagtgaccaaataactctaag

SEQ ID NO: 49020 - DNA, 25 bp, Homo sapien
tgacaagtgacctaataactctaag

SEQ ID NO: 49021 - DNA, 25 bp, Homo sapien
aacggagtaaggaccttcggagtag

SEQ ID NO: 49022 - DNA, 25 bp, Homo sapien
aacggagtaaggtccttcggagtag

SEQ ID NO: 49023 - DNA, 25 bp, Homo sapien
cgaacgggagataaagggacctctg

SEQ ID NO: 49024 - DNA, 25 bp, Homo sapien
cgaacgggagattaagggacctctg

SEQ ID NO: 49025 - DNA, 25 bp, Homo sapien
cacgggtatgagacccgttcccgac

SEQ ID NO: 49026 - DNA, 25 bp, Homo sapien
cacgggtatgagtcccgttcccgac

SEQ ID NO: 49027 - DNA, 25 bp, Homo sapien
aacgtgtttgtgacccgtttgtcac

SEQ ID NO: 49028 - DNA, 25 bp, Homo sapien
aacgtgtttgtgtcccgtttgtcac

SEQ ID NO: 49029 - DNA, 25 bp, Homo sapien
gactcggtttttgtgcccgtctttc

SEQ ID NO: 49030 - DNA, 25 bp, Homo sapien
gactcggtttttctgcccgtctttc

SEQ ID NO: 49031 - DNA, 25 bp, Homo sapien
tgtggttcttcacagcccttcgacc

SEQ ID NO: 49032 - DNA, 25 bp, Homo sapien
tgtggttcttcagagcccttcgacc

SEQ ID NO: 49033 - DNA, 25 bp, Homo sapien
cagaactggacgagcgggttcgaac

SEQ ID NO: 49034 - DNA, 25 bp, Homo sapien
cagaactggacgtgcgggttcgaac

SEQ ID NO: 49035 - DNA, 25 bp, Homo sapien
agaaccccagagacgggtgctcgaa

SEQ ID NO: 49036 - DNA, 25 bp, Homo sapien
agaaccccagagtcgggtgctcgaa

SEQ ID NO: 49037 - DNA, 25 bp, Homo sapien
gggacaccttaggtctagaccgaga

SEQ ID NO: 49038 - DNA, 25 bp, Homo sapien
gggacaccttagctctagaccgaga

SEQ ID NO: 49039 - DNA, 25 bp, Homo sapien
ctggagtactagtgaattcaacata

SEQ ID NO: 49040 - DNA, 25 bp, Homo sapien
ctggagtactagagaattcaacata

SEQ ID NO: 49041 - DNA, 25 bp, Homo sapien
aagagatatggacctctacacaaac

SEQ ID NO: 49042 - DNA, 25 bp, Homo sapien
aagagatatggagctctacacaaac

SEQ ID NO: 49043 - DNA, 25 bp, Homo sapien
caataaagttgacttacgacgaaat

SEQ ID NO: 49044 - DNA, 25 bp, Homo sapien
caataaagttgagttacgacgaaat

SEQ ID NO: 49045 - DNA, 25 bp, Homo sapien
tcattgaagaaaatctagtcgacca

SEQ ID NO: 49046 - DNA, 25 bp, Homo sapien
tcattgaagaaattctagtcgacca

SEQ ID NO: 49047 - DNA, 25 bp, Homo sapien
aactaaagtgtggacttgtgtcccc

SEQ ID NO: 49048 - DNA, 25 bp, Homo sapien
aactaaagtgtgcacttgtgtcccc

SEQ ID NO: 49049 - DNA, 25 bp, Homo sapien
acaaacgcggcgagttacttccttc

SEQ ID NO: 49050 - DNA, 25 bp, Homo sapien
acaaacgcggcgtgttacttccttc

SEQ ID NO: 49051 - DNA, 25 bp, Homo sapien
cgtaccctgagtttgtcgacgttac

SEQ ID NO: 49052 - DNA, 25 bp, Homo sapien
cgtaccctgagtatgtcgacgttac

SEQ ID NO: 49053 - DNA, 25 bp, Homo sapien
ccgtgactgaagagtcgtgacctcg

SEQ ID NO: 49054 - DNA, 25 bp, Homo sapien
ccgtgactgaagtgtcgtgacctcg

SEQ ID NO: 49055 - DNA, 25 bp, Homo sapien
taaccaatggagatccggacacacg

SEQ ID NO: 49056 - DNA, 25 bp, Homo sapien
taaccaatggagttccggacacacg

SEQ ID NO: 49057 - DNA, 25 bp, Homo sapien
ggcttcatcctaccttcggaacgtc

SEQ ID NO: 49058 - DNA, 25 bp, Homo sapien
ggcttcatcctagcttcggaacgtc

SEQ ID NO: 49059 - DNA, 25 bp, Homo sapien
tttatgtcgtagagtcgtcacgatg

SEQ ID NO: 49060 - DNA, 25 bp, Homo sapien
tttatgtcgtagtgtcgtcacgatg

SEQ ID NO: 49061 - DNA, 25 bp, Homo sapien
gtgtgtaactctaccttttcgactc

SEQ ID NO: 49062 - DNA, 25 bp, Homo sapien
gtgtgtaactcttccttttcgactc

SEQ ID NO: 49063 - DNA, 25 bp, Homo sapien
tagtaagtagtctccggagtggtcc

SEQ ID NO: 49064 - DNA, 25 bp, Homo sapien
tagtaagtagtcaccggagtggtcc

SEQ ID NO: 49065 - DNA, 25 bp, Homo sapien
catataatgaaacggtctattatgt

SEQ ID NO: 49066 - DNA, 25 bp, Homo sapien
catataatgaaagggtctattatgt

SEQ ID NO: 49067 - DNA, 25 bp, Homo sapien
agacgattttgagaattttctcgtc

SEQ ID NO: 49068 - DNA, 25 bp, Homo sapien
agacgattttgacaattttctcgtc

SEQ ID NO: 49069 - DNA, 25 bp, Homo sapien
ctttttctcttggtacatgtcgtac

SEQ ID NO: 49070 - DNA, 25 bp, Homo sapien
ctttttctcttgctacatgtcgtac

SEQ ID NO: 49071 - DNA, 25 bp, Homo sapien
ttcctccgtcgtcgtcgtcgaggcc

SEQ ID NO: 49072 - DNA, 25 bp, Homo sapien
ttcctccgtcgtggtcgtcgaggcc

SEQ ID NO: 49073 - DNA, 25 bp, Homo sapien
cgatggttcccgtgggtgaagaacc

SEQ ID NO: 49074 - DNA, 25 bp, Homo sapien
cgatggttcccgagggtgaagaacc

SEQ ID NO: 49075 - DNA, 25 bp, Homo sapien
tgagacggtccgagttggcgaaccc

SEQ ID NO: 49076 - DNA, 25 bp, Homo sapien
tgagacggtccgtgttggcgaaccc

SEQ ID NO: 49077 - DNA, 25 bp, Homo sapien
tttctgttgtctggtcaggaccctc

SEQ ID NO: 49078 - DNA, 25 bp, Homo sapien
tttctgttgtctcgtcaggaccctc

SEQ ID NO: 49079 - DNA, 25 bp, Homo sapien
ttatttgtcccgacgttttcccgac

SEQ ID NO: 49080 - DNA, 25 bp, Homo sapien
ttatttgtcccgtcgttttcccgac

SEQ ID NO: 49081 - DNA, 25 bp, Homo sapien
ggtgggactcagtccctgtgtccac

SEQ ID NO: 49082 - DNA, 25 bp, Homo sapien
ggtgggactcagaccctgtgtccac

SEQ ID NO: 49083 - DNA, 25 bp, Homo sapien
ggactcaaggcgaccctggcgtcct

SEQ ID NO: 49084 - DNA, 25 bp, Homo sapien
ggactcaaggcgtccctggcgtcct

SEQ ID NO: 49085 - DNA, 25 bp, Homo sapien
gggtaggacgtcgtcactcagggcc

SEQ ID NO: 49086 - DNA, 25 bp, Homo sapien
gggtaggacgtcctcactcagggcc

SEQ ID NO: 49087 - DNA, 25 bp, Homo sapien
gggtggacgtcatgtacttttgtcc

SEQ ID NO: 49088 - DNA, 25 bp, Homo sapien
gggtggacgtcaagtacttttgtcc

SEQ ID NO: 49089 - DNA, 25 bp, Homo sapien
ctggtggagacttcattccgtgttg

SEQ ID NO: 49090 - DNA, 25 bp, Homo sapien
ctggtggagactacattccgtgttg

SEQ ID NO: 49091 - DNA, 25 bp, Homo sapien
aatgcgggcactataattgttactg

SEQ ID NO: 49092 - DNA, 25 bp, Homo sapien
aatgcgggcactttaattgttactg

SEQ ID NO: 49093 - DNA, 25 bp, Homo sapien
cctgggagaccacgttcaattctgg

SEQ ID NO: 49094 - DNA, 25 bp, Homo sapien
cctgggagaccaggttcaattctgg

SEQ ID NO: 49095 - DNA, 25 bp, Homo sapien
gggaccgcgaactcgcgcatctggt

SEQ ID NO: 49096 - DNA, 25 bp, Homo sapien
gggaccgcgaacacgcgcatctggt

SEQ ID NO: 49097 - DNA, 25 bp, Homo sapien
tggtacagaccgaccgccgctgagt

SEQ ID NO: 49098 - DNA, 25 bp, Homo sapien
tggtacagaccgtccgccgctgagt

SEQ ID NO: 49099 - DNA, 25 bp, Homo sapien
gaagtttaatctttgacccgggagt

SEQ ID NO: 49100 - DNA, 25 bp, Homo sapien
gaagtttaatctatgacccgggagt

SEQ ID NO: 49101 - DNA, 25 bp, Homo sapien
tggaagtaatcgtattccgactaga

SEQ ID NO: 49102 - DNA, 25 bp, Homo sapien
tggaagtaatcgaattccgactaga

SEQ ID NO: 49103 - DNA, 25 bp, Homo sapien
agataaagatcgtatgttcactcgg

SEQ ID NO: 49104 - DNA, 25 bp, Homo sapien
agataaagatcgaatgttcactcgg

SEQ ID NO: 49105 - DNA, 25 bp, Homo sapien
cttacaggaaaacattttcgtcgtt

SEQ ID NO: 49106 - DNA, 25 bp, Homo sapien
cttacaggaaaagattttcgtcgtt

SEQ ID NO: 49107 - DNA, 25 bp, Homo sapien
ttacacaacaaagagtccttagttg

SEQ ID NO: 49108 - DNA, 25 bp, Homo sapien
ttacacaacaaacagtccttagttg

SEQ ID NO: 49109 - DNA, 25 bp, Homo sapien
cactaaaccgttgtgtgtccttttg

SEQ ID NO: 49110 - DNA, 25 bp, Homo sapien
cactaaaccgttctgtgtccttttg

SEQ ID NO: 49111 - DNA, 25 bp, Homo sapien
gtatccccacgagtatcccttttgt

SEQ ID NO: 49112 - DNA, 25 bp, Homo sapien
gtatccccacgactatcccttttgt

SEQ ID NO: 49113 - DNA, 25 bp, Homo sapien
ccgactaatccgtagtctaattttg

SEQ ID NO: 49114 - DNA, 25 bp, Homo sapien
ccgactaatccgaagtctaattttg

SEQ ID NO: 49115 - DNA, 25 bp, Homo sapien
cgacagttacatgtaccatcgttga

SEQ ID NO: 49116 - DNA, 25 bp, Homo sapien
cgacagttacatctaccatcgttga

SEQ ID NO: 49117 - DNA, 25 bp, Homo sapien
ggcatagactagaaacattattaca

SEQ ID NO: 49118 - DNA, 25 bp, Homo sapien
ggcatagactagtaacattattaca

SEQ ID NO: 49119 - DNA, 25 bp, Homo sapien
gtcctgtatgaaactatgtttacat

SEQ ID NO: 49120 - DNA, 25 bp, Homo sapien
gtcctgtatgaatctatgtttacat

SEQ ID NO: 49121 - DNA, 25 bp, Homo sapien
ccctgtccgacgtctaaggacacct

SEQ ID NO: 49122 - DNA, 25 bp, Homo sapien
ccctgtccgacgactaaggacacct

SEQ ID NO: 49123 - DNA, 25 bp, Homo sapien
tgtccacctcggtccggggcagtct

SEQ ID NO: 49124 - DNA, 25 bp, Homo sapien
tgtccacctcggaccggggcagtct

SEQ ID NO: 49125 - DNA, 25 bp, Homo sapien
gtgacaacggttaccgtcagcccct

SEQ ID NO: 49126 - DNA, 25 bp, Homo sapien
gtgacaacggtttccgtcagcccct

SEQ ID NO: 49127 - DNA, 25 bp, Homo sapien
ctagggacgtcttcacagattttaa

SEQ ID NO: 49128 - DNA, 25 bp, Homo sapien
ctagggacgtctacacagattttaa

SEQ ID NO: 49129 - DNA, 25 bp, Homo sapien
tgtcgtagcgttaaccaacaattcc

SEQ ID NO: 49130 - DNA, 25 bp, Homo sapien
tgtcgtagcgtttaccaacaattcc

SEQ ID NO: 49131 - DNA, 25 bp, Homo sapien
cggtagactggttcccgatcctcct

SEQ ID NO: 49132 - DNA, 25 bp, Homo sapien
cggtagactggtacccgatcctcct

SEQ ID NO: 49133 - DNA, 25 bp, Homo sapien
atcgtgggtgtgtctatggccaccg

SEQ ID NO: 49134 - DNA, 25 bp, Homo sapien
atcgtgggtgtgactatggccaccg

SEQ ID NO: 49135 - DNA, 25 bp, Homo sapien
gagtcgtcgaacaggtggtatcacg

SEQ ID NO: 49136 - DNA, 25 bp, Homo sapien
gagtcgtcgaactggtggtatcacg

SEQ ID NO: 49137 - DNA, 25 bp, Homo sapien
acgacgtcgtcatttgtggtgatag

SEQ ID NO: 49138 - DNA, 25 bp, Homo sapien
acgacgtcgtcaattgtggtgatag

SEQ ID NO: 49139 - DNA, 25 bp, Homo sapien
tgaacgacggttagtcttaagacca

SEQ ID NO: 49140 - DNA, 25 bp, Homo sapien
tgaacgacggtttgtcttaagacca

SEQ ID NO: 49141 - DNA, 25 bp, Homo sapien
tttacaggtaacgtatcttacccag

SEQ ID NO: 49142 - DNA, 25 bp, Homo sapien
tttacaggtaacctatcttacccag

SEQ ID NO: 49143 - DNA, 25 bp, Homo sapien
tacgtatggtactatagttattcct

SEQ ID NO: 49144 - DNA, 25 bp, Homo sapien
tacgtatggtacaatagttattcct

SEQ ID NO: 49145 - DNA, 25 bp, Homo sapien
tgtaggttactgtttagggtatccc

SEQ ID NO: 49146 - DNA, 25 bp, Homo sapien
tgtaggttactgattagggtatccc

SEQ ID NO: 49147 - DNA, 25 bp, Homo sapien
agacagatttgcatggtgtactctt

SEQ ID NO: 49148 - DNA, 25 bp, Homo sapien
agacagatttgcttggtgtactctt

SEQ ID NO: 49149 - DNA, 25 bp, Homo sapien
gcacctttactacaccggtgacttt

SEQ ID NO: 49150 - DNA, 25 bp, Homo sapien
gcacctttactagaccggtgacttt

SEQ ID NO: 49151 - DNA, 25 bp, Homo sapien
gactttttcagaagagtaactacct

SEQ ID NO: 49152 - DNA, 25 bp, Homo sapien
gactttttcagatgagtaactacct

SEQ ID NO: 49153 - DNA, 25 bp, Homo sapien
aagaagtcgtcaagccgtcgccggt

SEQ ID NO: 49154 - DNA, 25 bp, Homo sapien
aagaagtcgtcatgccgtcgccggt

SEQ ID NO: 49155 - DNA, 25 bp, Homo sapien
acacaccggcactctcgagtcatgt

SEQ ID NO: 49156 - DNA, 25 bp, Homo sapien
acacaccggcacactcgagtcatgt

SEQ ID NO: 49157 - DNA, 25 bp, Homo sapien
tccaacaggacagtccaggagtcgt

SEQ ID NO: 49158 - DNA, 25 bp, Homo sapien
tccaacaggacactccaggagtcgt

SEQ ID NO: 49159 - DNA, 25 bp, Homo sapien
ccccactttacactctaggactgag

SEQ ID NO: 49160 - DNA, 25 bp, Homo sapien
ccccactttacagtctaggactgag

SEQ ID NO: 49161 - DNA, 25 bp, Homo sapien
caaatcgttgggactatcctcgtct

SEQ ID NO: 49162 - DNA, 25 bp, Homo sapien
caaatcgttgggtctatcctcgtct

SEQ ID NO: 49163 - DNA, 25 bp, Homo sapien
aatattacggtctgggtctcttcca

SEQ ID NO: 49164 - DNA, 25 bp, Homo sapien
aatattacggtcagggtctcttcca

SEQ ID NO: 49165 - DNA, 25 bp, Homo sapien
cacaagagaaactaggtcagggctt

SEQ ID NO: 49166 - DNA, 25 bp, Homo sapien
cacaagagaaacaaggtcagggctt

SEQ ID NO: 49167 - DNA, 25 bp, Homo sapien
caattgtcaatggtcgcagggttat

SEQ ID NO: 49168 - DNA, 25 bp, Homo sapien
caattgtcaatgctcgcagggttat

SEQ ID NO: 49169 - DNA, 25 bp, Homo sapien
ttcttttccaggtcgcagtgtattt

SEQ ID NO: 49170 - DNA, 25 bp, Homo sapien
ttcttttccaggacgcagtgtattt

SEQ ID NO: 49171 - DNA, 25 bp, Homo sapien
tgtcaggttctgagccccggaactt

SEQ ID NO: 49172 - DNA, 25 bp, Homo sapien
tgtcaggttctgtgccccggaactt

SEQ ID NO: 49173 - DNA, 25 bp, Homo sapien
gggacgccgtccagctccgtaactt

SEQ ID NO: 49174 - DNA, 25 bp, Homo sapien
gggacgccgtcctgctccgtaactt

SEQ ID NO: 49175 - DNA, 25 bp, Homo sapien
agtgagagcgacatcccaagcacgt

SEQ ID NO: 49176 - DNA, 25 bp, Homo sapien
agtgagagcgacttcccaagcacgt

SEQ ID NO: 49177 - DNA, 25 bp, Homo sapien
tgaagaggtgacgtcagtggtctcc

SEQ ID NO: 49178 - DNA, 25 bp, Homo sapien
tgaagaggtgacctcagtggtctcc

SEQ ID NO: 49179 - DNA, 25 bp, Homo sapien
ataactacgtgcagcgttcgtgtcg

SEQ ID NO: 49180 - DNA, 25 bp, Homo sapien
ataactacgtgctgcgttcgtgtcg

SEQ ID NO: 49181 - DNA, 25 bp, Homo sapien
tgtccaattctcgttagatccttgt

SEQ ID NO: 49182 - DNA, 25 bp, Homo sapien
tgtccaattctccttagatccttgt

SEQ ID NO: 49183 - DNA, 25 bp, Homo sapien
acggaataaacttatgtcaaacttg

SEQ ID NO: 49184 - DNA, 25 bp, Homo sapien
acggaataaactaatgtcaaacttg

SEQ ID NO: 49185 - DNA, 25 bp, Homo sapien
cgtcaaaaactctcacgcagatgtg

SEQ ID NO: 49186 - DNA, 25 bp, Homo sapien
cgtcaaaaactcacacgcagatgtg

SEQ ID NO: 49187 - DNA, 25 bp, Homo sapien
gtgaaataatcgacactctctgtgg

SEQ ID NO: 49188 - DNA, 25 bp, Homo sapien
gtgaaataatcgtcactctctgtgg

SEQ ID NO: 49189 - DNA, 25 bp, Homo sapien
gggacgtaaacctccgtctcattag

SEQ ID NO: 49190 - DNA, 25 bp, Homo sapien
gggacgtaaaccaccgtctcattag

SEQ ID NO: 49191 - DNA, 25 bp, Homo sapien
aggtcgtagacactttcgcccctag

SEQ ID NO: 49192 - DNA, 25 bp, Homo sapien
aggtcgtagacagtttcgcccctag

SEQ ID NO: 49193 - DNA, 25 bp, Homo sapien
acggttccaagtttcctctcgtctg

SEQ ID NO: 49194 - DNA, 25 bp, Homo sapien
acggttccaagtatcctctcgtctg

SEQ ID NO: 49195 - DNA, 25 bp, Homo sapien
ggttcacaccgtgacattccgacgg

SEQ ID NO: 49196 - DNA, 25 bp, Homo sapien
ggttcacaccgtcacattccgacgg

SEQ ID NO: 49197 - DNA, 25 bp, Homo sapien
cttgcctacacataaccttgtaagg

SEQ ID NO: 49198 - DNA, 25 bp, Homo sapien
cttgcctacacaaaaccttgtaagg

SEQ ID NO: 49199 - DNA, 25 bp, Homo sapien
accgccaacaacttgtacaacgagt

SEQ ID NO: 49200 - DNA, 25 bp, Homo sapien
accgccaacaacatgtacaacgagt

SEQ ID NO: 49201 - DNA, 25 bp, Homo sapien
gacccctggtgtctgttgtagtcag

SEQ ID NO: 49202 - DNA, 25 bp, Homo sapien
gacccctggtgtgtgttgtagtcag

SEQ ID NO: 49203 - DNA, 25 bp, Homo sapien
tgaacttacggtcgttttcagattg

SEQ ID NO: 49204 - DNA, 25 bp, Homo sapien
tgaacttacggtggttttcagattg

SEQ ID NO: 49205 - DNA, 25 bp, Homo sapien
acttgtgtagtgttatcacgacttg

SEQ ID NO: 49206 - DNA, 25 bp, Homo sapien
acttgtgtagtgatatcacgacttg

SEQ ID NO: 49207 - DNA, 25 bp, Homo sapien
acttaagacgtaactatccgattcg

SEQ ID NO: 49208 - DNA, 25 bp, Homo sapien
acttaagacgtatctatccgattcg

SEQ ID NO: 49209 - DNA, 25 bp, Homo sapien
cggagtgtacagtcccgtccatagg

SEQ ID NO: 49210 - DNA, 25 bp, Homo sapien
cggagtgtacagacccgtccatagg

SEQ ID NO: 49211 - DNA, 25 bp, Homo sapien
tacgagggttgttcactgtccaatc

SEQ ID NO: 49212 - DNA, 25 bp, Homo sapien
tacgagggttgtacactgtccaatc

SEQ ID NO: 49213 - DNA, 25 bp, Homo sapien
actcgtcggtagaggttcagtatga

SEQ ID NO: 49214 - DNA, 25 bp, Homo sapien
actcgtcggtagtggttcagtatga

SEQ ID NO: 49215 - DNA, 25 bp, Homo sapien
tccccctggaactgaggtgtctgga

SEQ ID NO: 49216 - DNA, 25 bp, Homo sapien
tccccctggaacagaggtgtctgga

SEQ ID NO: 49217 - DNA, 25 bp, Homo sapien
tccccattcgtcactcaataatggg

SEQ ID NO: 49218 - DNA, 25 bp, Homo sapien
tccccattcgtctctcaataatggg

SEQ ID NO: 49219 - DNA, 25 bp, Homo sapien
cccttaggatcgtggtgttttgtgg

SEQ ID NO: 49220 - DNA, 25 bp, Homo sapien
cccttaggatcgaggtgttttgtgg

SEQ ID NO: 49221 - DNA, 25 bp, Homo sapien
cttgtagacattgaggattttgttt

SEQ ID NO: 49222 - DNA, 25 bp, Homo sapien
cttgtagacattcaggattttgttt

SEQ ID NO: 49223 - DNA, 25 bp, Homo sapien
gagtctaagtcacgatacatctttt

SEQ ID NO: 49224 - DNA, 25 bp, Homo sapien
gagtctaagtcaggatacatctttt

SEQ ID NO: 49225 - DNA, 25 bp, Homo sapien
ctataccagaaccagtcgagacact

SEQ ID NO: 49226 - DNA, 25 bp, Homo sapien
ctataccagaacgagtcgagacact

SEQ ID NO: 49227 - DNA, 25 bp, Homo sapien
aagacattgacgaaggacgactaca

SEQ ID NO: 49228 - DNA, 25 bp, Homo sapien
aagacattgacgtaggacgactaca

SEQ ID NO: 49229 - DNA, 25 bp, Homo sapien
acgttcacccgaggatacggtcttt

SEQ ID NO: 49230 - DNA, 25 bp, Homo sapien
acgttcacccgacgatacggtcttt

SEQ ID NO: 49231 - DNA, 25 bp, Homo sapien
aagtcttcgtgacaaagacttacca

SEQ ID NO: 49232 - DNA, 25 bp, Homo sapien
aagtcttcgtgagaaagacttacca

SEQ ID NO: 49233 - DNA, 25 bp, Homo sapien
tcttcgtcgaaaaagtactttacga

SEQ ID NO: 49234 - DNA, 25 bp, Homo sapien
tcttcgtcgaaatagtactttacga

SEQ ID NO: 49235 - DNA, 25 bp, Homo sapien
ctatgaccttatcatagtctggtaa

SEQ ID NO: 49236 - DNA, 25 bp, Homo sapien
ctatgaccttatgatagtctggtaa

SEQ ID NO: 49237 - DNA, 25 bp, Homo sapien
gtgtatctaccatgtctttttgtaa

SEQ ID NO: 49238 - DNA, 25 bp, Homo sapien
gtgtatctaccaagtctttttgtaa

SEQ ID NO: 49239 - DNA, 25 bp, Homo sapien
taccacggtctgtgttttagtaagt

SEQ ID NO: 49240 - DNA, 25 bp, Homo sapien
taccacggtctgagttttagtaagt

SEQ ID NO: 49241 - DNA, 25 bp, Homo sapien
cgaagtcgagttggactggtacagt

SEQ ID NO: 49242 - DNA, 25 bp, Homo sapien
cgaagtcgagttcgactggtacagt

SEQ ID NO: 49243 - DNA, 25 bp, Homo sapien
aaacttgtaccgtatactgtaagta

SEQ ID NO: 49244 - DNA, 25 bp, Homo sapien
aaacttgtaccgaatactgtaagta

SEQ ID NO: 49245 - DNA, 25 bp, Homo sapien
gatgaaattatcacgtattaacgtc

SEQ ID NO: 49246 - DNA, 25 bp, Homo sapien
gatgaaattatctcgtattaacgtc

SEQ ID NO: 49247 - DNA, 25 bp, Homo sapien
cgttaagaagtgtttttactgttcc

SEQ ID NO: 49248 - DNA, 25 bp, Homo sapien
cgttaagaagtgattttactgttcc

SEQ ID NO: 49249 - DNA, 25 bp, Homo sapien
cttatcgtgacatgggtccttcctc

SEQ ID NO: 49250 - DNA, 25 bp, Homo sapien
cttatcgtgacaagggtccttcctc

SEQ ID NO: 49251 - DNA, 25 bp, Homo sapien
gatgacttagaggtccatccgtcgt

SEQ ID NO: 49252 - DNA, 25 bp, Homo sapien
gatgacttagagctccatccgtcgt

SEQ ID NO: 49253 - DNA, 25 bp, Homo sapien
tgcctacacataaccttgtaaggtt

SEQ ID NO: 49254 - DNA, 25 bp, Homo sapien
tgcctacacatatccttgtaaggtt

SEQ ID NO: 49255 - DNA, 25 bp, Homo sapien
acacaaagactacacctgacaggac

SEQ ID NO: 49256 - DNA, 25 bp, Homo sapien
acacaaagactagacctgacaggac

SEQ ID NO: 49257 - DNA, 25 bp, Homo sapien
ataaagtaatagacctaacaggtac

SEQ ID NO: 49258 - DNA, 25 bp, Homo sapien
ataaagtaatagtcctaacaggtac

SEQ ID NO: 49259 - DNA, 25 bp, Homo sapien
ggaagtgactaattcccttatttga

SEQ ID NO: 49260 - DNA, 25 bp, Homo sapien
ggaagtgactaaatcccttatttga

SEQ ID NO: 49261 - DNA, 25 bp, Homo sapien
acaaggtcggacctttttgtaggga

SEQ ID NO: 49262 - DNA, 25 bp, Homo sapien
acaaggtcggacgtttttgtaggga

SEQ ID NO: 49263 - DNA, 25 bp, Homo sapien
aacaggggtcctgtgtacctcggaa

SEQ ID NO: 49264 - DNA, 25 bp, Homo sapien
aacaggggtcctctgtacctcggaa

SEQ ID NO: 49265 - DNA, 25 bp, Homo sapien
aacaaggagtcaactttatcaatga

SEQ ID NO: 49266 - DNA, 25 bp, Homo sapien
aacaaggagtcatctttatcaatga

SEQ ID NO: 49267 - DNA, 25 bp, Homo sapien
ctgtaattatgattggtccaatgtc

SEQ ID NO: 49268 - DNA, 25 bp, Homo sapien
ctgtaattatgaatggtccaatgtc

SEQ ID NO: 49269 - DNA, 25 bp, Homo sapien
tgttttatactctgaggctcttctc

SEQ ID NO: 49270 - DNA, 25 bp, Homo sapien
tgttttatactcagaggctcttctc

SEQ ID NO: 49271 - DNA, 25 bp, Homo sapien
gctgttctgtctcgaggtctcctgc

SEQ ID NO: 49272 - DNA, 25 bp, Homo sapien
gctgttctgtctggaggtctcctgc

SEQ ID NO: 49273 - DNA, 25 bp, Homo sapien
gtcttgaacatataggaatcctaac

SEQ ID NO: 49274 - DNA, 25 bp, Homo sapien
gtcttgaacataaaggaatcctaac

SEQ ID NO: 49275 - DNA, 25 bp, Homo sapien
tcccgaaactgaagggatccgtacc

SEQ ID NO: 49276 - DNA, 25 bp, Homo sapien
tcccgaaactgatgggatccgtacc

SEQ ID NO: 49277 - DNA, 25 bp, Homo sapien
caacgaacactgtccaggtcggttc

SEQ ID NO: 49278 - DNA, 25 bp, Homo sapien
caacgaacactgaccaggtcggttc

SEQ ID NO: 49279 - DNA, 25 bp, Homo sapien
caaagacaccgaatctatgtaattc

SEQ ID NO: 49280 - DNA, 25 bp, Homo sapien
caaagacaccgattctatgtaattc

SEQ ID NO: 49281 - DNA, 25 bp, Homo sapien
gaagtagacctgtctatgtgaattc

SEQ ID NO: 49282 - DNA, 25 bp, Homo sapien
gaagtagacctgactatgtgaattc

SEQ ID NO: 49283 - DNA, 25 bp, Homo sapien
gtgacaagacctttatttcgaattt

SEQ ID NO: 49284 - DNA, 25 bp, Homo sapien
gtgacaagacctatatttcgaattt

SEQ ID NO: 49285 - DNA, 25 bp, Homo sapien
tgacaccgatcttctattttccctc

SEQ ID NO: 49286 - DNA, 25 bp, Homo sapien
tgacaccgatctactattttccctc

SEQ ID NO: 49287 - DNA, 25 bp, Homo sapien
ggtcgaactcccattttgttaatta

SEQ ID NO: 49288 - DNA, 25 bp, Homo sapien
ggtcgaactccctttttgttaatta

SEQ ID NO: 49289 - DNA, 25 bp, Homo sapien
ttgttggaacatcttgtgtgttctc

SEQ ID NO: 49290 - DNA, 25 bp, Homo sapien
ttgttggaacatgttgtgtgttctc

SEQ ID NO: 49291 - DNA, 25 bp, Homo sapien
tttattgaatattttcgaggtccct

SEQ ID NO: 49292 - DNA, 25 bp, Homo sapien
tttattgaatatattcgaggtccct

SEQ ID NO: 49293 - DNA, 25 bp, Homo sapien
gtcgaataggagtcactagacatct

SEQ ID NO: 49294 - DNA, 25 bp, Homo sapien
gtcgaataggagacactagacatct

SEQ ID NO: 49295 - DNA, 25 bp, Homo sapien
tcttaataacagacagacgtcctac

SEQ ID NO: 49296 - DNA, 25 bp, Homo sapien
tcttaataacagtcagacgtcctac

SEQ ID NO: 49297 - DNA, 25 bp, Homo sapien
ctcgaaataacgacgccgccgtctt

SEQ ID NO: 49298 - DNA, 25 bp, Homo sapien
ctcgaaataacgtcgccgccgtctt

SEQ ID NO: 49299 - DNA, 25 bp, Homo sapien
ccgggactgacttcggcaccgtctt

SEQ ID NO: 49300 - DNA, 25 bp, Homo sapien
ccgggactgactacggcaccgtctt

SEQ ID NO: 49301 - DNA, 25 bp, Homo sapien
cgtcggggaaaggtacctgtctctc

SEQ ID NO: 49302 - DNA, 25 bp, Homo sapien
cgtcggggaaagctacctgtctctc

SEQ ID NO: 49303 - DNA, 25 bp, Homo sapien
ccgtagtcggaagtagcattctctc

SEQ ID NO: 49304 - DNA, 25 bp, Homo sapien
ccgtagtcggaactagcattctctc

SEQ ID NO: 49305 - DNA, 25 bp, Homo sapien
tctcacctctcgagatagagcatct

SEQ ID NO: 49306 - DNA, 25 bp, Homo sapien
tctcacctctcgtgatagagcatct

SEQ ID NO: 49307 - DNA, 25 bp, Homo sapien
cttcctgacctggagacacagggaa

SEQ ID NO: 49308 - DNA, 25 bp, Homo sapien
cttcctgacctgcagacacagggaa

SEQ ID NO: 49309 - DNA, 25 bp, Homo sapien
gaatacaatacaactcggacgaaca

SEQ ID NO: 49310 - DNA, 25 bp, Homo sapien
gaatacaatacatctcggacgaaca

SEQ ID NO: 49311 - DNA, 25 bp, Homo sapien
aggagaagaaggacgccacgtgaca

SEQ ID NO: 49312 - DNA, 25 bp, Homo sapien
aggagaagaaggtcgccacgtgaca

SEQ ID NO: 49313 - DNA, 25 bp, Homo sapien
ccccgaatagcgacgggccctgaat

SEQ ID NO: 49314 - DNA, 25 bp, Homo sapien
ccccgaatagcgtcgggccctgaat

SEQ ID NO: 49315 - DNA, 25 bp, Homo sapien
gatcctactaggtggttccatgagg

SEQ ID NO: 49316 - DNA, 25 bp, Homo sapien
gatcctactaggaggttccatgagg

SEQ ID NO: 49317 - DNA, 25 bp, Homo sapien
ttccgcaggaagtgtcaccggtagg

SEQ ID NO: 49318 - DNA, 25 bp, Homo sapien
ttccgcaggaagagtcaccggtagg

SEQ ID NO: 49319 - DNA, 25 bp, Homo sapien
tactccccgaagaaccacagtaaag

SEQ ID NO: 49320 - DNA, 25 bp, Homo sapien
tactccccgaagtaccacagtaaag

SEQ ID NO: 49321 - DNA, 25 bp, Homo sapien
gataacgagcaattcccaacgcgtg

SEQ ID NO: 49322 - DNA, 25 bp, Homo sapien
gataacgagcaaatcccaacgcgtg

SEQ ID NO: 49323 - DNA, 25 bp, Homo sapien
tatgaccaaaaaatctctttacagg

SEQ ID NO: 49324 - DNA, 25 bp, Homo sapien
tatgaccaaaaattctctttacagg

SEQ ID NO: 49325 - DNA, 25 bp, Homo sapien
ataattgatatgatttacaataccc

SEQ ID NO: 49326 - DNA, 25 bp, Homo sapien
ataattgatatgttttacaataccc

SEQ ID NO: 49327 - DNA, 25 bp, Homo sapien
aggtcttcgtgtcctacttttccta

SEQ ID NO: 49328 - DNA, 25 bp, Homo sapien
aggtcttcgtgtgctacttttccta

SEQ ID NO: 49329 - DNA, 25 bp, Homo sapien
aagaggttatgtttcctttctgcta

SEQ ID NO: 49330 - DNA, 25 bp, Homo sapien
aagaggttatgtatcctttctgcta

SEQ ID NO: 49331 - DNA, 25 bp, Homo sapien
ggtcattcagttaatctttgtacgt

SEQ ID NO: 49332 - DNA, 25 bp, Homo sapien
ggtcattcagtttatctttgtacgt

SEQ ID NO: 49333 - DNA, 25 bp, Homo sapien
gattatcttcgactgtcctgtattt

SEQ ID NO: 49334 - DNA, 25 bp, Homo sapien
gattatcttcgagtgtcctgtattt

SEQ ID NO: 49335 - DNA, 25 bp, Homo sapien
ttgtcacgactctgactgtacttac

SEQ ID NO: 49336 - DNA, 25 bp, Homo sapien
ttgtcacgactcagactgtacttac

SEQ ID NO: 49337 - DNA, 25 bp, Homo sapien
ccgaagtccccactataaaggttat

SEQ ID NO: 49338 - DNA, 25 bp, Homo sapien
ccgaagtccccagtataaaggttat

SEQ ID NO: 49339 - DNA, 25 bp, Homo sapien
gacccagaccctatcttaggtttta

SEQ ID NO: 49340 - DNA, 25 bp, Homo sapien
gacccagaccctttcttaggtttta

SEQ ID NO: 49341 - DNA, 25 bp, Homo sapien
ccaacagacctcctgaagttatgtg

SEQ ID NO: 49342 - DNA, 25 bp, Homo sapien
ccaacagacctcgtgaagttatgtg

SEQ ID NO: 49343 - DNA, 25 bp, Homo sapien
ttccatgtgtatgtgtggatttctc

SEQ ID NO: 49344 - DNA, 25 bp, Homo sapien
ttccatgtgtatctgtggatttctc

SEQ ID NO: 49345 - DNA, 25 bp, Homo sapien
ccaccgactcattgtgtgggtactc

SEQ ID NO: 49346 - DNA, 25 bp, Homo sapien
ccaccgactcatagtgtgggtactc

SEQ ID NO: 49347 - DNA, 25 bp, Homo sapien
cgtatagaagacaggacgaggtctt

SEQ ID NO: 49348 - DNA, 25 bp, Homo sapien
cgtatagaagactggacgaggtctt

SEQ ID NO: 49349 - DNA, 25 bp, Homo sapien
gacggagagacttgtaccggtcgta

SEQ ID NO: 49350 - DNA, 25 bp, Homo sapien
gacggagagactagtaccggtcgta

SEQ ID NO: 49351 - DNA, 25 bp, Homo sapien
acccgaggggaatgacgaagccgta

SEQ ID NO: 49352 - DNA, 25 bp, Homo sapien
acccgaggggaaagacgaagccgta

SEQ ID NO: 49353 - DNA, 25 bp, Homo sapien
aaggagagaaccaagacgagtcgtg

SEQ ID NO: 49354 - DNA, 25 bp, Homo sapien
aaggagagaacctagacgagtcgtg

SEQ ID NO: 49355 - DNA, 25 bp, Homo sapien
gatgggaacctcctacgtagtcacc

SEQ ID NO: 49356 - DNA, 25 bp, Homo sapien
gatgggaacctcgtacgtagtcacc

SEQ ID NO: 49357 - DNA, 25 bp, Homo sapien
cgagcggcacactgttaaggtcacc

SEQ ID NO: 49358 - DNA, 25 bp, Homo sapien
cgagcggcacacagttaaggtcacc

SEQ ID NO: 49359 - DNA, 25 bp, Homo sapien
gacgaggaccgttacttggtactta

SEQ ID NO: 49360 - DNA, 25 bp, Homo sapien
gacgaggaccgtaacttggtactta

SEQ ID NO: 49361 - DNA, 25 bp, Homo sapien
gtaaaggggttccttatggagaacc

SEQ ID NO: 49362 - DNA, 25 bp, Homo sapien
gtaaaggggttcgttatggagaacc

SEQ ID NO: 49363 - DNA, 25 bp, Homo sapien
aaactggtcttcagatccagagacc

SEQ ID NO: 49364 - DNA, 25 bp, Homo sapien
aaactggtcttctgatccagagacc

SEQ ID NO: 49365 - DNA, 25 bp, Homo sapien
aaaagtccctggtaacgttaaatct

SEQ ID NO: 49366 - DNA, 25 bp, Homo sapien
aaaagtccctggaaacgttaaatct

SEQ ID NO: 49367 - DNA, 25 bp, Homo sapien
actgatattcggagacattcacaat

SEQ ID NO: 49368 - DNA, 25 bp, Homo sapien
actgatattcggtgacattcacaat

SEQ ID NO: 49369 - DNA, 25 bp, Homo sapien
cctatttgatggagatcctatacgt

SEQ ID NO: 49370 - DNA, 25 bp, Homo sapien
cctatttgatggtgatcctatacgt

SEQ ID NO: 49371 - DNA, 25 bp, Homo sapien
tatctaggacttctatatagacatc

SEQ ID NO: 49372 - DNA, 25 bp, Homo sapien
tatctaggacttgtatatagacatc

SEQ ID NO: 49373 - DNA, 25 bp, Homo sapien
ctttgggtctgtgtatcgttaagtc

SEQ ID NO: 49374 - DNA, 25 bp, Homo sapien
ctttgggtctgtctatcgttaagtc

SEQ ID NO: 49375 - DNA, 25 bp, Homo sapien
cgaaaggttttacgtaacgaaacta

SEQ ID NO: 49376 - DNA, 25 bp, Homo sapien
cgaaaggttttaggtaacgaaacta

SEQ ID NO: 49377 - DNA, 25 bp, Homo sapien
agacaatcactcttaaattacagaa

SEQ ID NO: 49378 - DNA, 25 bp, Homo sapien
agacaatcactcataaattacagaa

SEQ ID NO: 49379 - DNA, 25 bp, Homo sapien
cgcgaacaatattacgcggtccgcc

SEQ ID NO: 49380 - DNA, 25 bp, Homo sapien
cgcgaacaatataacgcggtccgcc

SEQ ID NO: 49381 - DNA, 25 bp, Homo sapien
tggcgtggtgacgtgacgctctaac

SEQ ID NO: 49382 - DNA, 25 bp, Homo sapien
tggcgtggtgacctgacgctctaac

SEQ ID NO: 49383 - DNA, 25 bp, Homo sapien
gctgcaagctagaacgtacctcgtt

SEQ ID NO: 49384 - DNA, 25 bp, Homo sapien
gctgcaagctagtacgtacctcgtt

SEQ ID NO: 49385 - DNA, 25 bp, Homo sapien
tgtcaacgccttttaattgtcaggt

SEQ ID NO: 49386 - DNA, 25 bp, Homo sapien
tgtcaacgccttataattgtcaggt

SEQ ID NO: 49387 - DNA, 25 bp, Homo sapien
gtccttgtcttgtttagtctcccgg

SEQ ID NO: 49388 - DNA, 25 bp, Homo sapien
gtccttgtcttgattagtctcccgg

SEQ ID NO: 49389 - DNA, 25 bp, Homo sapien
ccctttgtgataacgtccgactcac

SEQ ID NO: 49390 - DNA, 25 bp, Homo sapien
ccctttgtgatatcgtccgactcac

SEQ ID NO: 49391 - DNA, 25 bp, Homo sapien
tccgttctatgtgcactctttccag

SEQ ID NO: 49392 - DNA, 25 bp, Homo sapien
tccgttctatgtccactctttccag

SEQ ID NO: 49393 - DNA, 25 bp, Homo sapien
gtcttgttccttgttcgtgaaggac

SEQ ID NO: 49394 - DNA, 25 bp, Homo sapien
gtcttgttccttcttcgtgaaggac

SEQ ID NO: 49395 - DNA, 25 bp, Homo sapien
ttgtattgtcccttcggtagtacca

SEQ ID NO: 49396 - DNA, 25 bp, Homo sapien
ttgtattgtcccatcggtagtacca

SEQ ID NO: 49397 - DNA, 25 bp, Homo sapien
tttttttcgactatggtaactccgt

SEQ ID NO: 49398 - DNA, 25 bp, Homo sapien
tttttttcgactttggtaactccgt

SEQ ID NO: 49399 - DNA, 25 bp, Homo sapien
gtgtctttaccaatgttgtttctac

SEQ ID NO: 49400 - DNA, 25 bp, Homo sapien
gtgtctttaccattgttgtttctac

SEQ ID NO: 49401 - DNA, 25 bp, Homo sapien
tgtccgatctcatcttttgtctgtg

SEQ ID NO: 49402 - DNA, 25 bp, Homo sapien
tgtccgatctcaacttttgtctgtg

SEQ ID NO: 49403 - DNA, 25 bp, Homo sapien
acctgttcggtctatgacgtctctt

SEQ ID NO: 49404 - DNA, 25 bp, Homo sapien
acctgttcggtcaatgacgtctctt

SEQ ID NO: 49405 - DNA, 25 bp, Homo sapien
tctctctccggagtcgtctgtctct

SEQ ID NO: 49406 - DNA, 25 bp, Homo sapien
tctctctccggactcgtctgtctct

SEQ ID NO: 49407 - DNA, 25 bp, Homo sapien
gtctcgtctgtgacgggtctgatct

SEQ ID NO: 49408 - DNA, 25 bp, Homo sapien
gtctcgtctgtgtcgggtctgatct

SEQ ID NO: 49409 - DNA, 25 bp, Homo sapien
tactgtatggttcgtctccgagtct

SEQ ID NO: 49410 - DNA, 25 bp, Homo sapien
tactgtatggttggtctccgagtct

SEQ ID NO: 49411 - DNA, 25 bp, Homo sapien
ggtttgtgtcgtgaggtacctactc

SEQ ID NO: 49412 - DNA, 25 bp, Homo sapien
ggtttgtgtcgtcaggtacctactc

SEQ ID NO: 49413 - DNA, 25 bp, Homo sapien
gtcggtgttacttctgtttcctctc

SEQ ID NO: 49414 - DNA, 25 bp, Homo sapien
gtcggtgttactactgtttcctctc

SEQ ID NO: 49415 - DNA, 25 bp, Homo sapien
tctgtgaatacatgtatgtaacctc

SEQ ID NO: 49416 - DNA, 25 bp, Homo sapien
tctgtgaatacaagtatgtaacctc

SEQ ID NO: 49417 - DNA, 25 bp, Homo sapien
gtcgtgtagtgtgacgaagaactcc

SEQ ID NO: 49418 - DNA, 25 bp, Homo sapien
gtcgtgtagtgtcacgaagaactcc

SEQ ID NO: 49419 - DNA, 25 bp, Homo sapien
gtcggtcgagcatcgacgcgtcctc

SEQ ID NO: 49420 - DNA, 25 bp, Homo sapien
gtcggtcgagcaacgacgcgtcctc

SEQ ID NO: 49421 - DNA, 25 bp, Homo sapien
gaagaggaagagaaagcgggtctca

SEQ ID NO: 49422 - DNA, 25 bp, Homo sapien
gaagaggaagagtaagcgggtctca

SEQ ID NO: 49423 - DNA, 25 bp, Homo sapien
accgaaggtctcttcactcttacta

SEQ ID NO: 49424 - DNA, 25 bp, Homo sapien
accgaaggtctcatcactcttacta

SEQ ID NO: 49425 - DNA, 25 bp, Homo sapien
ctagtaaatgagacgttacacttac

SEQ ID NO: 49426 - DNA, 25 bp, Homo sapien
ctagtaaatgagtcgttacacttac

SEQ ID NO: 49427 - DNA, 25 bp, Homo sapien
ctgtacaatgtagtgtcacgagatt

SEQ ID NO: 49428 - DNA, 25 bp, Homo sapien
ctgtacaatgtactgtcacgagatt

SEQ ID NO: 49429 - DNA, 25 bp, Homo sapien
tcctcttatcgtttctgtccggttc

SEQ ID NO: 49430 - DNA, 25 bp, Homo sapien
tcctcttatcgtatctgtccggttc

SEQ ID NO: 49431 - DNA, 25 bp, Homo sapien
gtgttagtatcatttaaccgtcttc

SEQ ID NO: 49432 - DNA, 25 bp, Homo sapien
gtgttagtatcaattaaccgtcttc

SEQ ID NO: 49433 - DNA, 25 bp, Homo sapien
ggtcggtttaaaacaacttacttac

SEQ ID NO: 49434 - DNA, 25 bp, Homo sapien
ggtcggtttaaatcaacttacttac

SEQ ID NO: 49435 - DNA, 25 bp, Homo sapien
gtgtattctaagatcctctgtctaa

SEQ ID NO: 49436 - DNA, 25 bp, Homo sapien
gtgtattctaagttcctctgtctaa

SEQ ID NO: 49437 - DNA, 25 bp, Homo sapien
ttattactaatcttctaatgtatag

SEQ ID NO: 49438 - DNA, 25 bp, Homo sapien
ttattactaatcatctaatgtatag

SEQ ID NO: 49439 - DNA, 25 bp, Homo sapien
cacgtatacaagagacattctacag

SEQ ID NO: 49440 - DNA, 25 bp, Homo sapien
cacgtatacaagtgacattctacag

SEQ ID NO: 49441 - DNA, 25 bp, Homo sapien
gaaaactaagaaatctcggttgaca

SEQ ID NO: 49442 - DNA, 25 bp, Homo sapien
gaaaactaagaattctcggttgaca

SEQ ID NO: 49443 - DNA, 25 bp, Homo sapien
aagtgtcgtctcttgtactttgtaa

SEQ ID NO: 49444 - DNA, 25 bp, Homo sapien
aagtgtcgtctcatgtactttgtaa

SEQ ID NO: 49445 - DNA, 25 bp, Homo sapien
gagcccctgtctccttactctgagt

SEQ ID NO: 49446 - DNA, 25 bp, Homo sapien
gagcccctgtctgcttactctgagt

SEQ ID NO: 49447 - DNA, 25 bp, Homo sapien
tgagagcctcgttgtttacttcgac

SEQ ID NO: 49448 - DNA, 25 bp, Homo sapien
tgagagcctcgtagtttacttcgac

SEQ ID NO: 49449 - DNA, 25 bp, Homo sapien
gtcgagtccactagttcctcgtgtc

SEQ ID NO: 49450 - DNA, 25 bp, Homo sapien
gtcgagtccacttgttcctcgtgtc

SEQ ID NO: 49451 - DNA, 25 bp, Homo sapien
atggtacaactcgttttactcgggc

SEQ ID NO: 49452 - DNA, 25 bp, Homo sapien
atggtacaactccttttactcgggc

SEQ ID NO: 49453 - DNA, 25 bp, Homo sapien
ttggataagacagtcgttctcggcc

SEQ ID NO: 49454 - DNA, 25 bp, Homo sapien
ttggataagacactcgttctcggcc

SEQ ID NO: 49455 - DNA, 25 bp, Homo sapien
ggagactaggtatatatgttcacct

SEQ ID NO: 49456 - DNA, 25 bp, Homo sapien
ggagactaggtaaatatgttcacct

SEQ ID NO: 49457 - DNA, 25 bp, Homo sapien
tgttgacgtcatttagtttgtaacc

SEQ ID NO: 49458 - DNA, 25 bp, Homo sapien
tgttgacgtcatatagtttgtaacc

SEQ ID NO: 49459 - DNA, 25 bp, Homo sapien
tttagacagaagatagattctcctt

SEQ ID NO: 49460 - DNA, 25 bp, Homo sapien
tttagacagaagttagattctcctt

SEQ ID NO: 49461 - DNA, 25 bp, Homo sapien
tttaaagatcgtgtttacgtgactc

SEQ ID NO: 49462 - DNA, 25 bp, Homo sapien
tttaaagatcgtctttacgtgactc

SEQ ID NO: 49463 - DNA, 25 bp, Homo sapien
gtcttcacacagtcggttcttcacc

SEQ ID NO: 49464 - DNA, 25 bp, Homo sapien
gtcttcacacagacggttcttcacc

SEQ ID NO: 49465 - DNA, 25 bp, Homo sapien
ttttggtgtaggacccgtccggacc

SEQ ID NO: 49466 - DNA, 25 bp, Homo sapien
ttttggtgtaggtcccgtccggacc

SEQ ID NO: 49467 - DNA, 25 bp, Homo sapien
tctgtagtacggtccgtgcccctac

SEQ ID NO: 49468 - DNA, 25 bp, Homo sapien
tctgtagtacggaccgtgcccctac

SEQ ID NO: 49469 - DNA, 25 bp, Homo sapien
gtaccgagaaatcgtgtccgacacc

SEQ ID NO: 49470 - DNA, 25 bp, Homo sapien
gtaccgagaaatggtgtccgacacc

SEQ ID NO: 49471 - DNA, 25 bp, Homo sapien
aggacgggaagagacgagaccatcc

SEQ ID NO: 49472 - DNA, 25 bp, Homo sapien
aggacgggaagacacgagaccatcc

SEQ ID NO: 49473 - DNA, 25 bp, Homo sapien
aaatcgttagacgaggagttctaca

SEQ ID NO: 49474 - DNA, 25 bp, Homo sapien
aaatcgttagaccaggagttctaca

SEQ ID NO: 49475 - DNA, 25 bp, Homo sapien
ctcgtattaacgagtgtttctaagt

SEQ ID NO: 49476 - DNA, 25 bp, Homo sapien
ctcgtattaacgtgtgtttctaagt

SEQ ID NO: 49477 - DNA, 25 bp, Homo sapien
tttcgtcatgtatatgtctctgaga

SEQ ID NO: 49478 - DNA, 25 bp, Homo sapien
tttcgtcatgtaaatgtctctgaga

SEQ ID NO: 49479 - DNA, 25 bp, Homo sapien
gtcttgtgagtcatcattccggcag

SEQ ID NO: 49480 - DNA, 25 bp, Homo sapien
gtcttgtgagtcttcattccggcag

SEQ ID NO: 49481 - DNA, 25 bp, Homo sapien
ctcttggagttcaattctctctggt

SEQ ID NO: 49482 - DNA, 25 bp, Homo sapien
ctcttggagttctattctctctggt

SEQ ID NO: 49483 - DNA, 25 bp, Homo sapien
gcactacgggtgctactcgcagtac

SEQ ID NO: 49484 - DNA, 25 bp, Homo sapien
gcactacgggtggtactcgcagtac

SEQ ID NO: 49485 - DNA, 25 bp, Homo sapien
ccacgctacttacgtgtcttactga

SEQ ID NO: 49486 - DNA, 25 bp, Homo sapien
ccacgctacttaggtgtcttactga

SEQ ID NO: 49487 - DNA, 25 bp, Homo sapien
ctcctccagtgtagagacctactga

SEQ ID NO: 49488 - DNA, 25 bp, Homo sapien
ctcctccagtgttgagacctactga

SEQ ID NO: 49489 - DNA, 25 bp, Homo sapien
aacactgacaggacgtcgaaataag

SEQ ID NO: 49490 - DNA, 25 bp, Homo sapien
aacactgacaggtcgtcgaaataag

SEQ ID NO: 49491 - DNA, 25 bp, Homo sapien
aagctataacggtcgtcgatatttc

SEQ ID NO: 49492 - DNA, 25 bp, Homo sapien
aagctataacggacgtcgatatttc

SEQ ID NO: 49493 - DNA, 25 bp, Homo sapien
atactggtcgggacgagattgtgac

SEQ ID NO: 49494 - DNA, 25 bp, Homo sapien
atactggtcgggtcgagattgtgac

SEQ ID NO: 49495 - DNA, 25 bp, Homo sapien
caccatttcgacgagactgaatgga

SEQ ID NO: 49496 - DNA, 25 bp, Homo sapien
caccatttcgaccagactgaatgga

SEQ ID NO: 49497 - DNA, 25 bp, Homo sapien
tcctcgttacaggagtcgtttgtga

SEQ ID NO: 49498 - DNA, 25 bp, Homo sapien
tcctcgttacagcagtcgtttgtga

SEQ ID NO: 49499 - DNA, 25 bp, Homo sapien
cttgagtacgaaattatctgtgact

SEQ ID NO: 49500 - DNA, 25 bp, Homo sapien
cttgagtacgaatttatctgtgact

SEQ ID NO: 49501 - DNA, 25 bp, Homo sapien
tcgtcgagacgaattcttctaagac

SEQ ID NO: 49502 - DNA, 25 bp, Homo sapien
tcgtcgagacgatttcttctaagac

SEQ ID NO: 49503 - DNA, 25 bp, Homo sapien
tggacgacactacacatcttacgtc

SEQ ID NO: 49504 - DNA, 25 bp, Homo sapien
tggacgacactagacatcttacgtc

SEQ ID NO: 49505 - DNA, 25 bp, Homo sapien
aacgacagagacagtcacacatatc

SEQ ID NO: 49506 - DNA, 25 bp, Homo sapien
aacgacagagactgtcacacatatc

SEQ ID NO: 49507 - DNA, 25 bp, Homo sapien
agttccagtagcactacgactcttc

SEQ ID NO: 49508 - DNA, 25 bp, Homo sapien
agttccagtagctctacgactcttc

SEQ ID NO: 49509 - DNA, 25 bp, Homo sapien
gaggacatagaaatccgatcgtaac

SEQ ID NO: 49510 - DNA, 25 bp, Homo sapien
gaggacatagaattccgatcgtaac

SEQ ID NO: 49511 - DNA, 25 bp, Homo sapien
cagtgctaaacgtctaccatcgagg

SEQ ID NO: 49512 - DNA, 25 bp, Homo sapien
cagtgctaaacgactaccatcgagg

SEQ ID NO: 49513 - DNA, 25 bp, Homo sapien
gtctccgaaaactatcttctcgtgt

SEQ ID NO: 49514 - DNA, 25 bp, Homo sapien
gtctccgaaaacaatcttctcgtgt

SEQ ID NO: 49515 - DNA, 25 bp, Homo sapien
acgattacgattacgcaatcgtcca

SEQ ID NO: 49516 - DNA, 25 bp, Homo sapien
acgattacgatttcgcaatcgtcca

SEQ ID NO: 49517 - DNA, 25 bp, Homo sapien
aaacgtagatatggagaggtccttc

SEQ ID NO: 49518 - DNA, 25 bp, Homo sapien
aaacgtagatatcgagaggtccttc

SEQ ID NO: 49519 - DNA, 25 bp, Homo sapien
ttaagtatttgaggacgtcctgtct

SEQ ID NO: 49520 - DNA, 25 bp, Homo sapien
ttaagtatttgacgacgtcctgtct

SEQ ID NO: 49521 - DNA, 25 bp, Homo sapien
ccctgacgtgagtggttccgttact

SEQ ID NO: 49522 - DNA, 25 bp, Homo sapien
ccctgacgtgagaggttccgttact

SEQ ID NO: 49523 - DNA, 25 bp, Homo sapien
gcctcactgacaacggtagtctttt

SEQ ID NO: 49524 - DNA, 25 bp, Homo sapien
gcctcactgacatcggtagtctttt

SEQ ID NO: 49525 - DNA, 25 bp, Homo sapien
aacttacggtgcttcttttgtctac

SEQ ID NO: 49526 - DNA, 25 bp, Homo sapien
aacttacggtgcatcttttgtctac

SEQ ID NO: 49527 - DNA, 25 bp, Homo sapien
cgtattactgtttatgacttaatta

SEQ ID NO: 49528 - DNA, 25 bp, Homo sapien
cgtattactgttaatgacttaatta

SEQ ID NO: 49529 - DNA, 25 bp, Homo sapien
atcttatgtctcacgtccgtgaatg

SEQ ID NO: 49530 - DNA, 25 bp, Homo sapien
atcttatgtctctcgtccgtgaatg

SEQ ID NO: 49531 - DNA, 25 bp, Homo sapien
gttataagtgacttccgacggctta

SEQ ID NO: 49532 - DNA, 25 bp, Homo sapien
gttataagtgacatccgacggctta

SEQ ID NO: 49533 - DNA, 25 bp, Homo sapien
ttcaaaggaaacgtcggtatacgta

SEQ ID NO: 49534 - DNA, 25 bp, Homo sapien
ttcaaaggaaacctcggtatacgta

SEQ ID NO: 49535 - DNA, 25 bp, Homo sapien
attaacgacggagtatttccccgtc

SEQ ID NO: 49536 - DNA, 25 bp, Homo sapien
attaacgacggactatttccccgtc

SEQ ID NO: 49537 - DNA, 25 bp, Homo sapien
ggtcatacatgtctgtttcaccctc

SEQ ID NO: 49538 - DNA, 25 bp, Homo sapien
ggtcatacatgtgtgtttcaccctc

SEQ ID NO: 49539 - DNA, 25 bp, Homo sapien
gtcaaccttatctggtccctgagag

SEQ ID NO: 49540 - DNA, 25 bp, Homo sapien
gtcaaccttatcaggtccctgagag

SEQ ID NO: 49541 - DNA, 25 bp, Homo sapien
gtcctggttcacgtctcacctgaga

SEQ ID NO: 49542 - DNA, 25 bp, Homo sapien
gtcctggttcacctctcacctgaga

SEQ ID NO: 49543 - DNA, 25 bp, Homo sapien
ggtcgttccgagtcactctcacact

SEQ ID NO: 49544 - DNA, 25 bp, Homo sapien
ggtcgttccgagacactctcacact

SEQ ID NO: 49545 - DNA, 25 bp, Homo sapien
gtgtatgtaccagaacttatatact

SEQ ID NO: 49546 - DNA, 25 bp, Homo sapien
gtgtatgtaccacaacttatatact

SEQ ID NO: 49547 - DNA, 25 bp, Homo sapien
gtagactctcaatcagattcttacg

SEQ ID NO: 49548 - DNA, 25 bp, Homo sapien
gtagactctcaaacagattcttacg

SEQ ID NO: 49549 - DNA, 25 bp, Homo sapien
gtatcgcttgacgacgtgtgtcagg

SEQ ID NO: 49550 - DNA, 25 bp, Homo sapien
gtatcgcttgaccacgtgtgtcagg

SEQ ID NO: 49551 - DNA, 25 bp, Homo sapien
actgtttgtgatgatgagactctcg

SEQ ID NO: 49552 - DNA, 25 bp, Homo sapien
actgtttgtgatcatgagactctcg

SEQ ID NO: 49553 - DNA, 25 bp, Homo sapien
gtctgtcgtcaggagacagggtcca

SEQ ID NO: 49554 - DNA, 25 bp, Homo sapien
gtctgtcgtcagcagacagggtcca

SEQ ID NO: 49555 - DNA, 25 bp, Homo sapien
gtctcggtcacaaataatcgttcta

SEQ ID NO: 49556 - DNA, 25 bp, Homo sapien
gtctcggtcacatataatcgttcta

SEQ ID NO: 49557 - DNA, 25 bp, Homo sapien
ttagtcaggaggtcttcgtgtccta

SEQ ID NO: 49558 - DNA, 25 bp, Homo sapien
ttagtcaggaggacttcgtgtccta

SEQ ID NO: 49559 - DNA, 25 bp, Homo sapien
gagcagtctaagacttccgtagaca

SEQ ID NO: 49560 - DNA, 25 bp, Homo sapien
gagcagtctaagtcttccgtagaca

SEQ ID NO: 49561 - DNA, 25 bp, Homo sapien
cacctcttggtgtttcgagagacct

SEQ ID NO: 49562 - DNA, 25 bp, Homo sapien
cacctcttggtgattcgagagacct

SEQ ID NO: 49563 - DNA, 25 bp, Homo sapien
ccacggtccgggaccgtgaagacct

SEQ ID NO: 49564 - DNA, 25 bp, Homo sapien
ccacggtccgggtccgtgaagacct

SEQ ID NO: 49565 - DNA, 25 bp, Homo sapien
gtctacagaaaaaggtccttcgaaa

SEQ ID NO: 49566 - DNA, 25 bp, Homo sapien
gtctacagaaaatggtccttcgaaa

SEQ ID NO: 49567 - DNA, 25 bp, Homo sapien
gacagaacaatatccgtgactggaa

SEQ ID NO: 49568 - DNA, 25 bp, Homo sapien
gacagaacaataaccgtgactggaa

SEQ ID NO: 49569 - DNA, 25 bp, Homo sapien
ggaactactccaaccggcggagtcc

SEQ ID NO: 49570 - DNA, 25 bp, Homo sapien
ggaactactccatccggcggagtcc

SEQ ID NO: 49571 - DNA, 25 bp, Homo sapien
ggaaggtctcggtccggtcaatctc

SEQ ID NO: 49572 - DNA, 25 bp, Homo sapien
ggaaggtctcggaccggtcaatctc

SEQ ID NO: 49573 - DNA, 25 bp, Homo sapien
caagagtcaaccaaggtcagaggtc

SEQ ID NO: 49574 - DNA, 25 bp, Homo sapien
caagagtcaacctaggtcagaggtc

SEQ ID NO: 49575 - DNA, 25 bp, Homo sapien
cagagcaaccgtgtagcttagaacg

SEQ ID NO: 49576 - DNA, 25 bp, Homo sapien
cagagcaaccgtctagcttagaacg

SEQ ID NO: 49577 - DNA, 25 bp, Homo sapien
gaagaaacttttcagacacgtaact

SEQ ID NO: 49578 - DNA, 25 bp, Homo sapien
gaagaaacttttgagacacgtaact

SEQ ID NO: 49579 - DNA, 25 bp, Homo sapien
gggacgaaagattttgagactccag

SEQ ID NO: 49580 - DNA, 25 bp, Homo sapien
gggacgaaagatattgagactccag

SEQ ID NO: 49581 - DNA, 25 bp, Homo sapien
tgggacacagtgacttggaacccac

SEQ ID NO: 49582 - DNA, 25 bp, Homo sapien
tgggacacagtgtcttggaacccac

SEQ ID NO: 49583 - DNA, 25 bp, Homo sapien
ggaacaccgaaaggacctcctctag

SEQ ID NO: 49584 - DNA, 25 bp, Homo sapien
ggaacaccgaaacgacctcctctag

SEQ ID NO: 49585 - DNA, 25 bp, Homo sapien
agaacccctgtaacgacctttctcg

SEQ ID NO: 49586 - DNA, 25 bp, Homo sapien
agaacccctgtatcgacctttctcg

SEQ ID NO: 49587 - DNA, 25 bp, Homo sapien
gacacatcgatgttgacactttatt

SEQ ID NO: 49588 - DNA, 25 bp, Homo sapien
gacacatcgatgatgacactttatt

SEQ ID NO: 49589 - DNA, 25 bp, Homo sapien
gaactttatatctgagacttcatgt

SEQ ID NO: 49590 - DNA, 25 bp, Homo sapien
gaactttatatcagagacttcatgt

SEQ ID NO: 49591 - DNA, 25 bp, Homo sapien
gatcttttactggtactacattgtt

SEQ ID NO: 49592 - DNA, 25 bp, Homo sapien
gatcttttactgctactacattgtt

SEQ ID NO: 49593 - DNA, 25 bp, Homo sapien
gactcttttacacctctagttcggg

SEQ ID NO: 49594 - DNA, 25 bp, Homo sapien
gactcttttacagctctagttcggg

SEQ ID NO: 49595 - DNA, 25 bp, Homo sapien
aagtctcatccatactctaccggtg

SEQ ID NO: 49596 - DNA, 25 bp, Homo sapien
aagtctcatccaaactctaccggtg

SEQ ID NO: 49597 - DNA, 25 bp, Homo sapien
ggtaagactcggtcactcagataac

SEQ ID NO: 49598 - DNA, 25 bp, Homo sapien
ggtaagactcggacactcagataac

SEQ ID NO: 49599 - DNA, 25 bp, Homo sapien
tatacgacttgttacagtagatcaa

SEQ ID NO: 49600 - DNA, 25 bp, Homo sapien
tatacgacttgtaacagtagatcaa

SEQ ID NO: 49601 - DNA, 25 bp, Homo sapien
agatctacttagtgtagactttact

SEQ ID NO: 49602 - DNA, 25 bp, Homo sapien
agatctacttagagtagactttact

SEQ ID NO: 49603 - DNA, 25 bp, Homo sapien
cgagaatctccgacgtaaaacgcgt

SEQ ID NO: 49604 - DNA, 25 bp, Homo sapien
cgagaatctccgtcgtaaaacgcgt

SEQ ID NO: 49605 - DNA, 25 bp, Homo sapien
tcgagacccccgatgacgataaccg

SEQ ID NO: 49606 - DNA, 25 bp, Homo sapien
tcgagacccccgttgacgataaccg

SEQ ID NO: 49607 - DNA, 25 bp, Homo sapien
gtgtccgatccgtgactaagacgac

SEQ ID NO: 49608 - DNA, 25 bp, Homo sapien
gtgtccgatccgagactaagacgac

SEQ ID NO: 49609 - DNA, 25 bp, Homo sapien
tatgtctcttaacgagactcctaag

SEQ ID NO: 49610 - DNA, 25 bp, Homo sapien
tatgtctcttaaggagactcctaag

SEQ ID NO: 49611 - DNA, 25 bp, Homo sapien
cttatttcttactgggagttattac

SEQ ID NO: 49612 - DNA, 25 bp, Homo sapien
cttatttcttacagggagttattac

SEQ ID NO: 49613 - DNA, 25 bp, Homo sapien
tttatcggtacatgggtgtatctac

SEQ ID NO: 49614 - DNA, 25 bp, Homo sapien
tttatcggtacaagggtgtatctac

SEQ ID NO: 49615 - DNA, 25 bp, Homo sapien
tgtgtcttaaccagatccgatgtta

SEQ ID NO: 49616 - DNA, 25 bp, Homo sapien
tgtgtcttaacctgatccgatgtta

SEQ ID NO: 49617 - DNA, 25 bp, Homo sapien
accttacactatgtcgtcaagacag

SEQ ID NO: 49618 - DNA, 25 bp, Homo sapien
accttacactatctcgtcaagacag

SEQ ID NO: 49619 - DNA, 25 bp, Homo sapien
aacatcctgagtttcgtcaggcacg

SEQ ID NO: 49620 - DNA, 25 bp, Homo sapien
aacatcctgagtatcgtcaggcacg

SEQ ID NO: 49621 - DNA, 25 bp, Homo sapien
cgttgaatatggattcctttatcag

SEQ ID NO: 49622 - DNA, 25 bp, Homo sapien
cgttgaatatggtttcctttatcag

SEQ ID NO: 49623 - DNA, 25 bp, Homo sapien
taaatgtcatagacgtctttctcag

SEQ ID NO: 49624 - DNA, 25 bp, Homo sapien
taaatgtcatagtcgtctttctcag

SEQ ID NO: 49625 - DNA, 25 bp, Homo sapien
actagtgtactaatgtttcgacccc

SEQ ID NO: 49626 - DNA, 25 bp, Homo sapien
actagtgtactattgtttcgacccc

SEQ ID NO: 49627 - DNA, 25 bp, Homo sapien
gaaggagtctcttaaaactactctg

SEQ ID NO: 49628 - DNA, 25 bp, Homo sapien
gaaggagtctctaaaaactactctg

SEQ ID NO: 49629 - DNA, 25 bp, Homo sapien
tataaacgtctgaaagcacatctgt

SEQ ID NO: 49630 - DNA, 25 bp, Homo sapien
tataaacgtctgtaagcacatctgt

SEQ ID NO: 49631 - DNA, 25 bp, Homo sapien
atgttaaaggtaatactgaaccttt

SEQ ID NO: 49632 - DNA, 25 bp, Homo sapien
atgttaaaggtattactgaaccttt

SEQ ID NO: 49633 - DNA, 25 bp, Homo sapien
agaaacaaagattcgagaagctcta

SEQ ID NO: 49634 - DNA, 25 bp, Homo sapien
agaaacaaagatacgagaagctcta

SEQ ID NO: 49635 - DNA, 25 bp, Homo sapien
agtcgtaagaaatccaagttctata

SEQ ID NO: 49636 - DNA, 25 bp, Homo sapien
agtcgtaagaaaaccaagttctata

SEQ ID NO: 49637 - DNA, 25 bp, Homo sapien
gaaggaacaaacctctaagtttctc

SEQ ID NO: 49638 - DNA, 25 bp, Homo sapien
gaaggaacaaacgtctaagtttctc

SEQ ID NO: 49639 - DNA, 25 bp, Homo sapien
atcacagaagagaagacttctacac

SEQ ID NO: 49640 - DNA, 25 bp, Homo sapien
atcacagaagagtagacttctacac

SEQ ID NO: 49641 - DNA, 25 bp, Homo sapien
aagtctcccgagacgaagcccctat

SEQ ID NO: 49642 - DNA, 25 bp, Homo sapien
aagtctcccgagtcgaagcccctat

SEQ ID NO: 49643 - DNA, 25 bp, Homo sapien
tcttgtcccgagtctcggtctccaa

SEQ ID NO: 49644 - DNA, 25 bp, Homo sapien
tcttgtcccgagactcggtctccaa

SEQ ID NO: 49645 - DNA, 25 bp, Homo sapien
tacgtaaatgctggaacacctatac

SEQ ID NO: 49646 - DNA, 25 bp, Homo sapien
tacgtaaatgctcgaacacctatac

SEQ ID NO: 49647 - DNA, 25 bp, Homo sapien
gacataggactcaaaagtcttacta

SEQ ID NO: 49648 - DNA, 25 bp, Homo sapien
gacataggactctaaagtcttacta

SEQ ID NO: 49649 - DNA, 25 bp, Homo sapien
aacggtatgaccaacatatgtagaa

SEQ ID NO: 49650 - DNA, 25 bp, Homo sapien
aacggtatgacctacatatgtagaa

SEQ ID NO: 49651 - DNA, 25 bp, Homo sapien
accgaagtgggaaaagggtccttgt

SEQ ID NO: 49652 - DNA, 25 bp, Homo sapien
accgaagtgggataagggtccttgt

SEQ ID NO: 49653 - DNA, 25 bp, Homo sapien
gggacgtgtcagacccgttcccgag

SEQ ID NO: 49654 - DNA, 25 bp, Homo sapien
gggacgtgtcagtcccgttcccgag

SEQ ID NO: 49655 - DNA, 25 bp, Homo sapien
accggacttcgtgctcctgtttgca

SEQ ID NO: 49656 - DNA, 25 bp, Homo sapien
accggacttcgtcctcctgtttgca

SEQ ID NO: 49657 - DNA, 25 bp, Homo sapien
tccggttcttcctgctcgggttctc

SEQ ID NO: 49658 - DNA, 25 bp, Homo sapien
tccggttcttccagctcgggttctc

SEQ ID NO: 49659 - DNA, 25 bp, Homo sapien
gtaagtgttttacaacttttgactc

SEQ ID NO: 49660 - DNA, 25 bp, Homo sapien
gtaagtgttttagaacttttgactc

SEQ ID NO: 49661 - DNA, 25 bp, Homo sapien
cagaggtggaccattcgtttgatac

SEQ ID NO: 49662 - DNA, 25 bp, Homo sapien
cagaggtggacctttcgtttgatac

SEQ ID NO: 49663 - DNA, 25 bp, Homo sapien
agagagcctggaaagccgttccgaa

SEQ ID NO: 49664 - DNA, 25 bp, Homo sapien
agagagcctggatagccgttccgaa

SEQ ID NO: 49665 - DNA, 25 bp, Homo sapien
tgggacgacctaaggtcattcgaga

SEQ ID NO: 49666 - DNA, 25 bp, Homo sapien
tgggacgacctatggtcattcgaga

SEQ ID NO: 49667 - DNA, 25 bp, Homo sapien
tcgatagaagcaagatccaacagta

SEQ ID NO: 49668 - DNA, 25 bp, Homo sapien
tcgatagaagcatgatccaacagta

SEQ ID NO: 49669 - DNA, 25 bp, Homo sapien
acgtaaagtcgatgatctccagata

SEQ ID NO: 49670 - DNA, 25 bp, Homo sapien
acgtaaagtcgaagatctccagata

SEQ ID NO: 49671 - DNA, 25 bp, Homo sapien
caacttaaggtgagttcacgtgaat

SEQ ID NO: 49672 - DNA, 25 bp, Homo sapien
caacttaaggtgtgttcacgtgaat

SEQ ID NO: 49673 - DNA, 25 bp, Homo sapien
cattgagtagaagtttcacgttcat

SEQ ID NO: 49674 - DNA, 25 bp, Homo sapien
cattgagtagaactttcacgttcat

SEQ ID NO: 49675 - DNA, 25 bp, Homo sapien
aagaaagatggtgactttcgccacc

SEQ ID NO: 49676 - DNA, 25 bp, Homo sapien
aagaaagatggtcactttcgccacc

SEQ ID NO: 49677 - DNA, 25 bp, Homo sapien
ctaaagaggtcgacggttcccttct

SEQ ID NO: 49678 - DNA, 25 bp, Homo sapien
ctaaagaggtcgtcggttcccttct

SEQ ID NO: 49679 - DNA, 25 bp, Homo sapien
gtacccgtcgactttccactatcgt

SEQ ID NO: 49680 - DNA, 25 bp, Homo sapien
gtacccgtcgacattccactatcgt

SEQ ID NO: 49681 - DNA, 25 bp, Homo sapien
ccgtcctgtgacctgtgcgacatcg

SEQ ID NO: 49682 - DNA, 25 bp, Homo sapien
ccgtcctgtgacgtgtgcgacatcg

SEQ ID NO: 49683 - DNA, 25 bp, Homo sapien
ctgtcatgagagacgggacacgacg

SEQ ID NO: 49684 - DNA, 25 bp, Homo sapien
ctgtcatgagagtcgggacacgacg

SEQ ID NO: 49685 - DNA, 25 bp, Homo sapien
gctgtcttcccctgtgtgagacgtg

SEQ ID NO: 49686 - DNA, 25 bp, Homo sapien
gctgtcttccccagtgtgagacgtg

SEQ ID NO: 49687 - DNA, 25 bp, Homo sapien
ctttgttcgagagtgtcgacatcgt

SEQ ID NO: 49688 - DNA, 25 bp, Homo sapien
ctttgttcgagactgtcgacatcgt

SEQ ID NO: 49689 - DNA, 25 bp, Homo sapien
cggtagtgatctccacttttacctc

SEQ ID NO: 49690 - DNA, 25 bp, Homo sapien
cggtagtgatctgcacttttacctc

SEQ ID NO: 49691 - DNA, 25 bp, Homo sapien
aagtagagagtctactgggaggtcc

SEQ ID NO: 49692 - DNA, 25 bp, Homo sapien
aagtagagagtcaactgggaggtcc

SEQ ID NO: 49693 - DNA, 25 bp, Homo sapien
ccatataatgaaacggtctattatg

SEQ ID NO: 49694 - DNA, 25 bp, Homo sapien
ccatataatgaatcggtctattatg

SEQ ID NO: 49695 - DNA, 25 bp, Homo sapien
cgatttggtggagtgtcttcgtgtc

SEQ ID NO: 49696 - DNA, 25 bp, Homo sapien
cgatttggtggactgtcttcgtgtc

SEQ ID NO: 49697 - DNA, 25 bp, Homo sapien
cttttgtgtctaacagtcatgttct

SEQ ID NO: 49698 - DNA, 25 bp, Homo sapien
cttttgtgtctatcagtcatgttct

SEQ ID NO: 49699 - DNA, 25 bp, Homo sapien
tcctcccgtcgtctgtgatgtctct

SEQ ID NO: 49700 - DNA, 25 bp, Homo sapien
tcctcccgtcgtgtgtgatgtctct

SEQ ID NO: 49701 - DNA, 25 bp, Homo sapien
tatttcctcctcagggtagaaaacc

SEQ ID NO: 49702 - DNA, 25 bp, Homo sapien
tatttcctcctctgggtagaaaacc

SEQ ID NO: 49703 - DNA, 25 bp, Homo sapien
gtaaagcgtccgtgtgggagaacca

SEQ ID NO: 49704 - DNA, 25 bp, Homo sapien
gtaaagcgtccgagtgggagaacca

SEQ ID NO: 49705 - DNA, 25 bp, Homo sapien
gtatttgttcgtcctccgggacccc

SEQ ID NO: 49706 - DNA, 25 bp, Homo sapien
gtatttgttcgtgctccgggacccc

SEQ ID NO: 49707 - DNA, 25 bp, Homo sapien
tatttgtatctgagggttccgtgac

SEQ ID NO: 49708 - DNA, 25 bp, Homo sapien
tatttgtatctgtgggttccgtgac

SEQ ID NO: 49709 - DNA, 25 bp, Homo sapien
ggttgtatccctgcacttcgtccac

SEQ ID NO: 49710 - DNA, 25 bp, Homo sapien
ggttgtatccctccacttcgtccac

SEQ ID NO: 49711 - DNA, 25 bp, Homo sapien
gggtcgagatggaccctgtcgtccc

SEQ ID NO: 49712 - DNA, 25 bp, Homo sapien
gggtcgagatggtccctgtcgtccc

SEQ ID NO: 49713 - DNA, 25 bp, Homo sapien
gacggagaagtcgtccaagtgcctc

SEQ ID NO: 49714 - DNA, 25 bp, Homo sapien
gacggagaagtcctccaagtgcctc

SEQ ID NO: 49715 - DNA, 25 bp, Homo sapien
tgtggagagccttacatttgtctcg

SEQ ID NO: 49716 - DNA, 25 bp, Homo sapien
tgtggagagcctaacatttgtctcg

SEQ ID NO: 49717 - DNA, 25 bp, Homo sapien
tgtggaaagtctgattcgtctttcg

SEQ ID NO: 49718 - DNA, 25 bp, Homo sapien
tgtggaaagtctcattcgtctttcg

SEQ ID NO: 49719 - DNA, 25 bp, Homo sapien
atgggagtcactcaattgagtttcg

SEQ ID NO: 49720 - DNA, 25 bp, Homo sapien
atgggagtcactgaattgagtttcg

SEQ ID NO: 49721 - DNA, 25 bp, Homo sapien
ggacgatcacggaactagtatttga

SEQ ID NO: 49722 - DNA, 25 bp, Homo sapien
ggacgatcacggtactagtatttga

SEQ ID NO: 49723 - DNA, 25 bp, Homo sapien
gacgaccgactcctccgtcatgtgg

SEQ ID NO: 49724 - DNA, 25 bp, Homo sapien
gacgaccgactcgtccgtcatgtgg

SEQ ID NO: 49725 - DNA, 25 bp, Homo sapien
catgaagtaccgatccgcctcgtgg

SEQ ID NO: 49726 - DNA, 25 bp, Homo sapien
catgaagtaccgttccgcctcgtgg

SEQ ID NO: 49727 - DNA, 25 bp, Homo sapien
gaaataaagtcatgtgacccggggt

SEQ ID NO: 49728 - DNA, 25 bp, Homo sapien
gaaataaagtcaagtgacccggggt

SEQ ID NO: 49729 - DNA, 25 bp, Homo sapien
gtgagaagtagagaacccggacaga

SEQ ID NO: 49730 - DNA, 25 bp, Homo sapien
gtgagaagtagacaacccggacaga

SEQ ID NO: 49731 - DNA, 25 bp, Homo sapien
gaaaggatcttacctcgcacgtcgg

SEQ ID NO: 49732 - DNA, 25 bp, Homo sapien
gaaaggatcttagctcgcacgtcgg

SEQ ID NO: 49733 - DNA, 25 bp, Homo sapien
ctaaggaaaaagatcttagtctctt

SEQ ID NO: 49734 - DNA, 25 bp, Homo sapien
ctaaggaaaaagttcttagtctctt

SEQ ID NO: 49735 - DNA, 25 bp, Homo sapien
taagacgaccaagactctttgtatt

SEQ ID NO: 49736 - DNA, 25 bp, Homo sapien
taagacgaccaacactctttgtatt

SEQ ID NO: 49737 - DNA, 25 bp, Homo sapien
ccaaacctgaattgtcgtatttatg

SEQ ID NO: 49738 - DNA, 25 bp, Homo sapien
ccaaacctgaatagtcgtatttatg

SEQ ID NO: 49739 - DNA, 25 bp, Homo sapien
gatacctcccaggttcttcttttgt

SEQ ID NO: 49740 - DNA, 25 bp, Homo sapien
gatacctcccagcttcttcttttgt

SEQ ID NO: 49741 - DNA, 25 bp, Homo sapien
cacacacacccatggtctatttttg

SEQ ID NO: 49742 - DNA, 25 bp, Homo sapien
cacacacacccaaggtctatttttg

SEQ ID NO: 49743 - DNA, 25 bp, Homo sapien
accatggtacatgtaccattataga

SEQ ID NO: 49744 - DNA, 25 bp, Homo sapien
accatggtacatctaccattataga

SEQ ID NO: 49745 - DNA, 25 bp, Homo sapien
agccagtgacaatgtcactttaaca

SEQ ID NO: 49746 - DNA, 25 bp, Homo sapien
agccagtgacaaagtcactttaaca

SEQ ID NO: 49747 - DNA, 25 bp, Homo sapien
atccgtgttcaatcttttgacgact

SEQ ID NO: 49748 - DNA, 25 bp, Homo sapien
atccgtgttcaaacttttgacgact

SEQ ID NO: 49749 - DNA, 25 bp, Homo sapien
atcctgttccactgtagtgggacct

SEQ ID NO: 49750 - DNA, 25 bp, Homo sapien
atcctgttccacagtagtgggacct

SEQ ID NO: 49751 - DNA, 25 bp, Homo sapien
ggttcctctgtgtccggggtcgatc

SEQ ID NO: 49752 - DNA, 25 bp, Homo sapien
ggttcctctgtgaccggggtcgatc

SEQ ID NO: 49753 - DNA, 25 bp, Homo sapien
cggaaacgacggacccgggcgacct

SEQ ID NO: 49754 - DNA, 25 bp, Homo sapien
cggaaacgacggtcccgggcgacct

SEQ ID NO: 49755 - DNA, 25 bp, Homo sapien
agggacgtctccaagacttggaagt

SEQ ID NO: 49756 - DNA, 25 bp, Homo sapien
agggacgtctcctagacttggaagt

SEQ ID NO: 49757 - DNA, 25 bp, Homo sapien
ggtgacgttcacttgacaatcgtaa

SEQ ID NO: 49758 - DNA, 25 bp, Homo sapien
ggtgacgttcacatgacaatcgtaa

SEQ ID NO: 49759 - DNA, 25 bp, Homo sapien
ctcgagagagtgtcatccatcctcc

SEQ ID NO: 49760 - DNA, 25 bp, Homo sapien
ctcgagagagtgacatccatcctcc

SEQ ID NO: 49761 - DNA, 25 bp, Homo sapien
ttcagagaggtgtcttgaggtcccg

SEQ ID NO: 49762 - DNA, 25 bp, Homo sapien
ttcagagaggtgacttgaggtcccg

SEQ ID NO: 49763 - DNA, 25 bp, Homo sapien
ggaggtgctacatcggctaccacgt

SEQ ID NO: 49764 - DNA, 25 bp, Homo sapien
ggaggtgctacaacggctaccacgt

SEQ ID NO: 49765 - DNA, 25 bp, Homo sapien
gtcgtcgtcgagtttcaggtgaacg

SEQ ID NO: 49766 - DNA, 25 bp, Homo sapien
gtcgtcgtcgagattcaggtgaacg

SEQ ID NO: 49767 - DNA, 25 bp, Homo sapien
gaccgacgtgttggtgttaacccac

SEQ ID NO: 49768 - DNA, 25 bp, Homo sapien
gaccgacgtgttcgtgttaacccac

SEQ ID NO: 49769 - DNA, 25 bp, Homo sapien
acacgagaaacctctatacgccacg

SEQ ID NO: 49770 - DNA, 25 bp, Homo sapien
acacgagaaaccactatacgccacg

SEQ ID NO: 49771 - DNA, 25 bp, Homo sapien
agtaggaacacttagactcctcact

SEQ ID NO: 49772 - DNA, 25 bp, Homo sapien
agtaggaacactaagactcctcact

SEQ ID NO: 49773 - DNA, 25 bp, Homo sapien
tcattaggtgactcctggacttccc

SEQ ID NO: 49774 - DNA, 25 bp, Homo sapien
tcattaggtgacacctggacttccc

SEQ ID NO: 49775 - DNA, 25 bp, Homo sapien
aatatttacgtccgtggtgactctc

SEQ ID NO: 49776 - DNA, 25 bp, Homo sapien
aatatttacgtcggtggtgactctc

SEQ ID NO: 49777 - DNA, 25 bp, Homo sapien
accttttacgtcgacgggacgtgtg

SEQ ID NO: 49778 - DNA, 25 bp, Homo sapien
accttttacgtccacgggacgtgtg

SEQ ID NO: 49779 - DNA, 25 bp, Homo sapien
acgtttcttcagaagaggtactctt

SEQ ID NO: 49780 - DNA, 25 bp, Homo sapien
acgtttcttcagtagaggtactctt

SEQ ID NO: 49781 - DNA, 25 bp, Homo sapien
aaggagtgtcaatgcgtgacgtctt

SEQ ID NO: 49782 - DNA, 25 bp, Homo sapien
aaggagtgtcaaagcgtgacgtctt

SEQ ID NO: 49783 - DNA, 25 bp, Homo sapien
gaaaccggacactccgactcgatct

SEQ ID NO: 49784 - DNA, 25 bp, Homo sapien
gaaaccggacacaccgactcgatct

SEQ ID NO: 49785 - DNA, 25 bp, Homo sapien
cgaatacaggaagaccgtcggatcg

SEQ ID NO: 49786 - DNA, 25 bp, Homo sapien
cgaatacaggaacaccgtcggatcg

SEQ ID NO: 49787 - DNA, 25 bp, Homo sapien
ccaccaagtgaacctcacggacttg

SEQ ID NO: 49788 - DNA, 25 bp, Homo sapien
ccaccaagtgaagctcacggacttg

SEQ ID NO: 49789 - DNA, 25 bp, Homo sapien
ccaatggtgaagcaactaccgtctt

SEQ ID NO: 49790 - DNA, 25 bp, Homo sapien
ccaatggtgaaggaactaccgtctt

SEQ ID NO: 49791 - DNA, 25 bp, Homo sapien
aatatgaggtgagggtattgtgtca

SEQ ID NO: 49792 - DNA, 25 bp, Homo sapien
aatatgaggtgacggtattgtgtca

SEQ ID NO: 49793 - DNA, 25 bp, Homo sapien
ccaaaagttacatgtgacatggttt

SEQ ID NO: 49794 - DNA, 25 bp, Homo sapien
ccaaaagttacaagtgacatggttt

SEQ ID NO: 49795 - DNA, 25 bp, Homo sapien
tgagtcaagtagatcacagggtctt

SEQ ID NO: 49796 - DNA, 25 bp, Homo sapien
tgagtcaagtagttcacagggtctt

SEQ ID NO: 49797 - DNA, 25 bp, Homo sapien
tttttatcggggtccagaacgtctt

SEQ ID NO: 49798 - DNA, 25 bp, Homo sapien
tttttatcggggaccagaacgtctt

SEQ ID NO: 49799 - DNA, 25 bp, Homo sapien
tcagctctagtgacccccggagttt

SEQ ID NO: 49800 - DNA, 25 bp, Homo sapien
tcagctctagtgtcccccggagttt

SEQ ID NO: 49801 - DNA, 25 bp, Homo sapien
aggcgaggctcaagcccgtcgcgtt

SEQ ID NO: 49802 - DNA, 25 bp, Homo sapien
aggcgaggctcatgcccgtcgcgtt

SEQ ID NO: 49803 - DNA, 25 bp, Homo sapien
tgtacgagaggctccccgtaggact

SEQ ID NO: 49804 - DNA, 25 bp, Homo sapien
tgtacgagaggcaccccgtaggact

SEQ ID NO: 49805 - DNA, 25 bp, Homo sapien
atagagggtacttcatctcgtaccc

SEQ ID NO: 49806 - DNA, 25 bp, Homo sapien
atagagggtactacatctcgtaccc

SEQ ID NO: 49807 - DNA, 25 bp, Homo sapien
aggtagctactgatagacttgttcg

SEQ ID NO: 49808 - DNA, 25 bp, Homo sapien
aggtagctactgttagacttgttcg

SEQ ID NO: 49809 - DNA, 25 bp, Homo sapien
gtccaatatgacattgagttttcgt

SEQ ID NO: 49810 - DNA, 25 bp, Homo sapien
gtccaatatgactttgagttttcgt

SEQ ID NO: 49811 - DNA, 25 bp, Homo sapien
cgtggaaaatacattaaaacttcgt

SEQ ID NO: 49812 - DNA, 25 bp, Homo sapien
cgtggaaaatactttaaaacttcgt

SEQ ID NO: 49813 - DNA, 25 bp, Homo sapien
ctctaaagtaaccttcctcagatgg

SEQ ID NO: 49814 - DNA, 25 bp, Homo sapien
ctctaaagtaacgttcctcagatgg

SEQ ID NO: 49815 - DNA, 25 bp, Homo sapien
gtgaaataatacaccgtcagtggta

SEQ ID NO: 49816 - DNA, 25 bp, Homo sapien
gtgaaataatactccgtcagtggta

SEQ ID NO: 49817 - DNA, 25 bp, Homo sapien
cgaggagaaactctaccgtcccttt

SEQ ID NO: 49818 - DNA, 25 bp, Homo sapien
cgaggagaaactgtaccgtcccttt

SEQ ID NO: 49819 - DNA, 25 bp, Homo sapien
caggtcgtagaacttccgcaattct

SEQ ID NO: 49820 - DNA, 25 bp, Homo sapien
caggtcgtagaagttccgcaattct

SEQ ID NO: 49821 - DNA, 25 bp, Homo sapien
aggtggtgaagtttaccctatactt

SEQ ID NO: 49822 - DNA, 25 bp, Homo sapien
aggtggtgaagtataccctatactt

SEQ ID NO: 49823 - DNA, 25 bp, Homo sapien
ggtttgacacgtacgatatcaagta

SEQ ID NO: 49824 - DNA, 25 bp, Homo sapien
ggtttgacacgttcgatatcaagta

SEQ ID NO: 49825 - DNA, 25 bp, Homo sapien
ctgcctatcagtaatcctttaaggt

SEQ ID NO: 49826 - DNA, 25 bp, Homo sapien
ctgcctatcagttatcctttaaggt

SEQ ID NO: 49827 - DNA, 25 bp, Homo sapien
cgtcactaacattctgtcactcggt

SEQ ID NO: 49828 - DNA, 25 bp, Homo sapien
cgtcactaacatactgtcactcggt

SEQ ID NO: 49829 - DNA, 25 bp, Homo sapien
acccctgtcactctgtgtcgttcgg

SEQ ID NO: 49830 - DNA, 25 bp, Homo sapien
acccctgtcactgtgtgtcgttcgg

SEQ ID NO: 49831 - DNA, 25 bp, Homo sapien
agacacatacctctttgtcattgag

SEQ ID NO: 49832 - DNA, 25 bp, Homo sapien
agacacatacctgtttgtcattgag

SEQ ID NO: 49833 - DNA, 25 bp, Homo sapien
tctgtatgtcgtttcgtactagttg

SEQ ID NO: 49834 - DNA, 25 bp, Homo sapien
tctgtatgtcgtatcgtactagttg

SEQ ID NO: 49835 - DNA, 25 bp, Homo sapien
acttgagactatgacctcgttctac

SEQ ID NO: 49836 - DNA, 25 bp, Homo sapien
acttgagactatcacctcgttctac

SEQ ID NO: 49837 - DNA, 25 bp, Homo sapien
ccggtacttgagtcctgtccatacc

SEQ ID NO: 49838 - DNA, 25 bp, Homo sapien
ccggtacttgagacctgtccatacc

SEQ ID NO: 49839 - DNA, 25 bp, Homo sapien
tcagtcggtggaaccagtccaagta

SEQ ID NO: 49840 - DNA, 25 bp, Homo sapien
tcagtcggtggatccagtccaagta

SEQ ID NO: 49841 - DNA, 25 bp, Homo sapien
ccaccgttgtagtggtgtccatcga

SEQ ID NO: 49842 - DNA, 25 bp, Homo sapien
ccaccgttgtagaggtgtccatcga

SEQ ID NO: 49843 - DNA, 25 bp, Homo sapien
tccccgtggtaatggtgacctgggt

SEQ ID NO: 49844 - DNA, 25 bp, Homo sapien
tccccgtggtaaaggtgacctgggt

SEQ ID NO: 49845 - DNA, 25 bp, Homo sapien
cacacctttccgacccagaataggg

SEQ ID NO: 49846 - DNA, 25 bp, Homo sapien
cacacctttccgtcccagaataggg

SEQ ID NO: 49847 - DNA, 25 bp, Homo sapien
tcctttagtatgtcctggttcttgg

SEQ ID NO: 49848 - DNA, 25 bp, Homo sapien
tcctttagtatgacctggttcttgg

SEQ ID NO: 49849 - DNA, 25 bp, Homo sapien
tttataatgtgacacgtatttggtt

SEQ ID NO: 49850 - DNA, 25 bp, Homo sapien
tttataatgtgagacgtatttggtt

SEQ ID NO: 49851 - DNA, 25 bp, Homo sapien
gtagactaagcaggagaccttcttt

SEQ ID NO: 49852 - DNA, 25 bp, Homo sapien
gtagactaagcacgagaccttcttt

SEQ ID NO: 49853 - DNA, 25 bp, Homo sapien
gttagacacaaacagtacgtacaat

SEQ ID NO: 49854 - DNA, 25 bp, Homo sapien
gttagacacaaagagtacgtacaat

SEQ ID NO: 49855 - DNA, 25 bp, Homo sapien
gtcgtaaataagtacggacgacaca

SEQ ID NO: 49856 - DNA, 25 bp, Homo sapien
gtcgtaaataagaacggacgacaca

SEQ ID NO: 49857 - DNA, 25 bp, Homo sapien
tcgtacacccagaaagcgtcgtcct

SEQ ID NO: 49858 - DNA, 25 bp, Homo sapien
tcgtacacccagtaagcgtcgtcct

SEQ ID NO: 49859 - DNA, 25 bp, Homo sapien
atctcgtggtccagacaacctacca

SEQ ID NO: 49860 - DNA, 25 bp, Homo sapien
atctcgtggtcctgacaacctacca

SEQ ID NO: 49861 - DNA, 25 bp, Homo sapien
catttgttaaacaagaccttacgta

SEQ ID NO: 49862 - DNA, 25 bp, Homo sapien
catttgttaaactagaccttacgta

SEQ ID NO: 49863 - DNA, 25 bp, Homo sapien
tatctatcgttaacctgaccggtaa

SEQ ID NO: 49864 - DNA, 25 bp, Homo sapien
tatctatcgttatcctgaccggtaa

SEQ ID NO: 49865 - DNA, 25 bp, Homo sapien
tctcttaatcgatgtcttttggtaa

SEQ ID NO: 49866 - DNA, 25 bp, Homo sapien
tctcttaatcgaagtcttttggtaa

SEQ ID NO: 49867 - DNA, 25 bp, Homo sapien
tctccgtgttatggtttctacgtaa

SEQ ID NO: 49868 - DNA, 25 bp, Homo sapien
tctccgtgttatcgtttctacgtaa

SEQ ID NO: 49869 - DNA, 25 bp, Homo sapien
cgaagtcaggtgcacgttcgactag

SEQ ID NO: 49870 - DNA, 25 bp, Homo sapien
cgaagtcaggtggacgttcgactag

SEQ ID NO: 49871 - DNA, 25 bp, Homo sapien
aaacctttccgtttttacgacgtag

SEQ ID NO: 49872 - DNA, 25 bp, Homo sapien
aaacctttccgtatttacgacgtag

SEQ ID NO: 49873 - DNA, 25 bp, Homo sapien
ttcgaatatttcctgtttaacgtgt

SEQ ID NO: 49874 - DNA, 25 bp, Homo sapien
ttcgaatatttcgtgtttaacgtgt

SEQ ID NO: 49875 - DNA, 25 bp, Homo sapien
ttttacagaatgtactgtgatttcc

SEQ ID NO: 49876 - DNA, 25 bp, Homo sapien
ttttacagaatgaactgtgatttcc

SEQ ID NO: 49877 - DNA, 25 bp, Homo sapien
accgactcttaaggggtccttcctc

SEQ ID NO: 49878 - DNA, 25 bp, Homo sapien
accgactcttaacgggtccttcctc

SEQ ID NO: 49879 - DNA, 25 bp, Homo sapien
ggatactaacgtgtccatccgacgt

SEQ ID NO: 49880 - DNA, 25 bp, Homo sapien
ggatactaacgtctccatccgacgt

SEQ ID NO: 49881 - DNA, 25 bp, Homo sapien
actacacacttcctcagatacggtg

SEQ ID NO: 49882 - DNA, 25 bp, Homo sapien
actacacacttcgtcagatacggtg

SEQ ID NO: 49883 - DNA, 25 bp, Homo sapien
accaccgaactagacctgacgggta

SEQ ID NO: 49884 - DNA, 25 bp, Homo sapien
accaccgaactacacctgacgggta

SEQ ID NO: 49885 - DNA, 25 bp, Homo sapien
acttaaaactgtacgacttaaggta

SEQ ID NO: 49886 - DNA, 25 bp, Homo sapien
acttaaaactgttcgacttaaggta

SEQ ID NO: 49887 - DNA, 25 bp, Homo sapien
ggacatgtacaactttcgaaattta

SEQ ID NO: 49888 - DNA, 25 bp, Homo sapien
ggacatgtacaagtttcgaaattta

SEQ ID NO: 49889 - DNA, 25 bp, Homo sapien
acagagtatgaactttctcattgga

SEQ ID NO: 49890 - DNA, 25 bp, Homo sapien
acagagtatgaagtttctcattgga

SEQ ID NO: 49891 - DNA, 25 bp, Homo sapien
ccagtcggggctgtgtcctcgtcaa

SEQ ID NO: 49892 - DNA, 25 bp, Homo sapien
ccagtcggggctctgtcctcgtcaa

SEQ ID NO: 49893 - DNA, 25 bp, Homo sapien
ccataggacgccattttcatgtaca

SEQ ID NO: 49894 - DNA, 25 bp, Homo sapien
ccataggacgcctttttcatgtaca

SEQ ID NO: 49895 - DNA, 25 bp, Homo sapien
cagtaattgtgttgggtccatttac

SEQ ID NO: 49896 - DNA, 25 bp, Homo sapien
cagtaattgtgtagggtccatttac

SEQ ID NO: 49897 - DNA, 25 bp, Homo sapien
ttttatcttagacgtctctgttacg

SEQ ID NO: 49898 - DNA, 25 bp, Homo sapien
ttttatcttagaggtctctgttacg

SEQ ID NO: 49899 - DNA, 25 bp, Homo sapien
ggtcttgtctttaaggagttcttgc

SEQ ID NO: 49900 - DNA, 25 bp, Homo sapien
ggtcttgtcttttaggagttcttgc

SEQ ID NO: 49901 - DNA, 25 bp, Homo sapien
ggttgatacatcgtggagatctttc

SEQ ID NO: 49902 - DNA, 25 bp, Homo sapien
ggttgatacatcctggagatctttc

SEQ ID NO: 49903 - DNA, 25 bp, Homo sapien
gttccgaaatgaaggattcgctaac

SEQ ID NO: 49904 - DNA, 25 bp, Homo sapien
gttccgaaatgatggattcgctaac

SEQ ID NO: 49905 - DNA, 25 bp, Homo sapien
agagaacgtgactgacagttggaac

SEQ ID NO: 49906 - DNA, 25 bp, Homo sapien
agagaacgtgacagacagttggaac

SEQ ID NO: 49907 - DNA, 25 bp, Homo sapien
atacaggtaccaatctgttaagttc

SEQ ID NO: 49908 - DNA, 25 bp, Homo sapien
atacaggtaccattctgttaagttc

SEQ ID NO: 49909 - DNA, 25 bp, Homo sapien
ggaactaagctgacttgtttatatc

SEQ ID NO: 49910 - DNA, 25 bp, Homo sapien
ggaactaagctgtcttgtttatatc

SEQ ID NO: 49911 - DNA, 25 bp, Homo sapien
ggaacaactctttttgtcacataat

SEQ ID NO: 49912 - DNA, 25 bp, Homo sapien
ggaacaactcttattgtcacataat

SEQ ID NO: 49913 - DNA, 25 bp, Homo sapien
aggacccatctcgacttgttccaac

SEQ ID NO: 49914 - DNA, 25 bp, Homo sapien
aggacccatctccacttgttccaac

SEQ ID NO: 49915 - DNA, 25 bp, Homo sapien
gtcgaactccctctttagttcccga

SEQ ID NO: 49916 - DNA, 25 bp, Homo sapien
gtcgaactccctgtttagttcccga

SEQ ID NO: 49917 - DNA, 25 bp, Homo sapien
cttgaaggaacctcttgtcgttttt

SEQ ID NO: 49918 - DNA, 25 bp, Homo sapien
cttgaaggaaccacttgtcgttttt

SEQ ID NO: 49919 - DNA, 25 bp, Homo sapien
tcttatgaatacagtttgggtcctt

SEQ ID NO: 49920 - DNA, 25 bp, Homo sapien
tcttatgaatactgtttgggtcctt

SEQ ID NO: 49921 - DNA, 25 bp, Homo sapien
ctgggaactgggtcaagtacgagtt

SEQ ID NO: 49922 - DNA, 25 bp, Homo sapien
ctgggaactgggacaagtacgagtt

SEQ ID NO: 49923 - DNA, 25 bp, Homo sapien
aggactaggagaacagacgtacata

SEQ ID NO: 49924 - DNA, 25 bp, Homo sapien
aggactaggagatcagacgtacata

SEQ ID NO: 49925 - DNA, 25 bp, Homo sapien
cggaactctaagacccgacgtcttt

SEQ ID NO: 49926 - DNA, 25 bp, Homo sapien
cggaactctaagtcccgacgtcttt

SEQ ID NO: 49927 - DNA, 25 bp, Homo sapien
tgacgctagacgttcgggaccgttg

SEQ ID NO: 49928 - DNA, 25 bp, Homo sapien
tgacgctagacgatcgggaccgttg

SEQ ID NO: 49929 - DNA, 25 bp, Homo sapien
cgatgggtacgaggtcccggtcttc

SEQ ID NO: 49930 - DNA, 25 bp, Homo sapien
cgatgggtacgacgtcccggtcttc

SEQ ID NO: 49931 - DNA, 25 bp, Homo sapien
ttcactcgggaagagacgatatttc

SEQ ID NO: 49932 - DNA, 25 bp, Homo sapien
ttcactcgggaacagacgatatttc

SEQ ID NO: 49933 - DNA, 25 bp, Homo sapien
accgacctctcgtagacaggcgacc

SEQ ID NO: 49934 - DNA, 25 bp, Homo sapien
accgacctctcgaagacaggcgacc

SEQ ID NO: 49935 - DNA, 25 bp, Homo sapien
ccctgtacccggaaacagggactat

SEQ ID NO: 49936 - DNA, 25 bp, Homo sapien
ccctgtacccggtaacagggactat

SEQ ID NO: 49937 - DNA, 25 bp, Homo sapien
gacagcaagacaacgtcgagaatca

SEQ ID NO: 49938 - DNA, 25 bp, Homo sapien
gacagcaagacatcgtcgagaatca

SEQ ID NO: 49939 - DNA, 25 bp, Homo sapien
aggaagacgaagaacgcctggtgca

SEQ ID NO: 49940 - DNA, 25 bp, Homo sapien
aggaagacgaagtacgcctggtgca

SEQ ID NO: 49941 - DNA, 25 bp, Homo sapien
cccacgaatgggtcggcaccagaca

SEQ ID NO: 49942 - DNA, 25 bp, Homo sapien
cccacgaatgggacggcaccagaca

SEQ ID NO: 49943 - DNA, 25 bp, Homo sapien
tatcaccgtaggtcggtttcctggg

SEQ ID NO: 49944 - DNA, 25 bp, Homo sapien
tatcaccgtaggacggtttcctggg

SEQ ID NO: 49945 - DNA, 25 bp, Homo sapien
tttccgcaggaagtgatcggtgaga

SEQ ID NO: 49946 - DNA, 25 bp, Homo sapien
tttccgcaggaactgatcggtgaga

SEQ ID NO: 49947 - DNA, 25 bp, Homo sapien
tcgtccccgtaacaacgaggtcata

SEQ ID NO: 49948 - DNA, 25 bp, Homo sapien
tcgtccccgtaagaacgaggtcata

SEQ ID NO: 49949 - DNA, 25 bp, Homo sapien
gccacgacctaagaccgcaacggag

SEQ ID NO: 49950 - DNA, 25 bp, Homo sapien
gccacgacctaacaccgcaacggag

SEQ ID NO: 49951 - DNA, 25 bp, Homo sapien
ttgaccaaccaacactctgtgggag

SEQ ID NO: 49952 - DNA, 25 bp, Homo sapien
ttgaccaaccaagactctgtgggag

SEQ ID NO: 49953 - DNA, 25 bp, Homo sapien
tttaagttgaatacttttattaagc

SEQ ID NO: 49954 - DNA, 25 bp, Homo sapien
tttaagttgaattcttttattaagc

SEQ ID NO: 49955 - DNA, 25 bp, Homo sapien
ggaggcgttcgtctcatgtttccga

SEQ ID NO: 49956 - DNA, 25 bp, Homo sapien
ggaggcgttcgtgtcatgtttccga

SEQ ID NO: 49957 - DNA, 25 bp, Homo sapien
aaagtgttattgtgactttcgtcca

SEQ ID NO: 49958 - DNA, 25 bp, Homo sapien
aaagtgttattgagactttcgtcca

SEQ ID NO: 49959 - DNA, 25 bp, Homo sapien
ttgtcatgtcaaaatgtgtcttacg

SEQ ID NO: 49960 - DNA, 25 bp, Homo sapien
ttgtcatgtcaatatgtgtcttacg

SEQ ID NO: 49961 - DNA, 25 bp, Homo sapien
cgattaatgtcaagtctctggtttc

SEQ ID NO: 49962 - DNA, 25 bp, Homo sapien
cgattaatgtcatgtctctggtttc

SEQ ID NO: 49963 - DNA, 25 bp, Homo sapien
cttttcaactactgactgtctacct

SEQ ID NO: 49964 - DNA, 25 bp, Homo sapien
cttttcaactacagactgtctacct

SEQ ID NO: 49965 - DNA, 25 bp, Homo sapien
gaagtctccactctaaatgatgact

SEQ ID NO: 49966 - DNA, 25 bp, Homo sapien
gaagtctccactgtaaatgatgact

SEQ ID NO: 49967 - DNA, 25 bp, Homo sapien
accagagcacctatgtaaatgtttt

SEQ ID NO: 49968 - DNA, 25 bp, Homo sapien
accagagcacctttgtaaatgtttt

SEQ ID NO: 49969 - DNA, 25 bp, Homo sapien
ccaacagacctcctgaagttatgtg

SEQ ID NO: 49970 - DNA, 25 bp, Homo sapien
ccaacagacctcgtgaagttatgtg

SEQ ID NO: 49971 - DNA, 25 bp, Homo sapien
gtatccgaattactttgtgattttc

SEQ ID NO: 49972 - DNA, 25 bp, Homo sapien
gtatccgaattagtttgtgattttc

SEQ ID NO: 49973 - DNA, 25 bp, Homo sapien
tatccaacaaccttcttggggtctc

SEQ ID NO: 49974 - DNA, 25 bp, Homo sapien
tatccaacaaccatcttggggtctc

SEQ ID NO: 49975 - DNA, 25 bp, Homo sapien
acgatgaagacgatggaggtctacg

SEQ ID NO: 49976 - DNA, 25 bp, Homo sapien
acgatgaagacgttggaggtctacg

SEQ ID NO: 49977 - DNA, 25 bp, Homo sapien
ggcagagacgactcgctcggtcgac

SEQ ID NO: 49978 - DNA, 25 bp, Homo sapien
ggcagagacgacacgctcggtcgac

SEQ ID NO: 49979 - DNA, 25 bp, Homo sapien
cgcgggaagaacacgctcgcgacga

SEQ ID NO: 49980 - DNA, 25 bp, Homo sapien
cgcgggaagaactcgctcgcgacga

SEQ ID NO: 49981 - DNA, 25 bp, Homo sapien
cgagggatgaaccacacacgcggtg

SEQ ID NO: 49982 - DNA, 25 bp, Homo sapien
cgagggatgaacgacacacgcggtg

SEQ ID NO: 49983 - DNA, 25 bp, Homo sapien
ggagtagatctgctacgacgtccag

SEQ ID NO: 49984 - DNA, 25 bp, Homo sapien
ggagtagatctggtacgacgtccag

SEQ ID NO: 49985 - DNA, 25 bp, Homo sapien
ccgaggccactagtgtaggagtccc

SEQ ID NO: 49986 - DNA, 25 bp, Homo sapien
ccgaggccactactgtaggagtccc

SEQ ID NO: 49987 - DNA, 25 bp, Homo sapien
cgtagaactacgatgtgggtactca

SEQ ID NO: 49988 - DNA, 25 bp, Homo sapien
cgtagaactacgttgtgggtactca

SEQ ID NO: 49989 - DNA, 25 bp, Homo sapien
tacacggacgagtcctttggagaaa

SEQ ID NO: 49990 - DNA, 25 bp, Homo sapien
tacacggacgagacctttggagaaa

SEQ ID NO: 49991 - DNA, 25 bp, Homo sapien
aaagatggtcccctcttcaagtacc

SEQ ID NO: 49992 - DNA, 25 bp, Homo sapien
aaagatggtcccgtcttcaagtacc

SEQ ID NO: 49993 - DNA, 25 bp, Homo sapien
aaaagtccgactgtcaggttaattc

SEQ ID NO: 49994 - DNA, 25 bp, Homo sapien
aaaagtccgactctcaggttaattc

SEQ ID NO: 49995 - DNA, 25 bp, Homo sapien
actgaagttatgtcacattcatatc

SEQ ID NO: 49996 - DNA, 25 bp, Homo sapien
actgaagttatgacacattcatatc

SEQ ID NO: 49997 - DNA, 25 bp, Homo sapien
accatgtatagttgggaatcacttc

SEQ ID NO: 49998 - DNA, 25 bp, Homo sapien
accatgtatagtagggaatcacttc

SEQ ID NO: 49999 - DNA, 25 bp, Homo sapien
attgtggacgttcgtatttacgatc

SEQ ID NO: 50000 - DNA, 25 bp, Homo sapien
attgtggacgttggtatttacgatc

SEQ ID NO: 50001 - DNA, 25 bp, Homo sapien
ctttggagtactgtgatgttaaccg

SEQ ID NO: 50002 - DNA, 25 bp, Homo sapien
ctttggagtactctgatgttaaccg

SEQ ID NO: 50003 - DNA, 25 bp, Homo sapien
acttaagggactaccgtaaggaaca

SEQ ID NO: 50004 - DNA, 25 bp, Homo sapien
acttaagggacttccgtaaggaaca

SEQ ID NO: 50005 - DNA, 25 bp, Homo sapien
caaaagttaacttccatgtagagaa

SEQ ID NO: 50006 - DNA, 25 bp, Homo sapien
caaaagttaactaccatgtagagaa

SEQ ID NO: 50007 - DNA, 25 bp, Homo sapien
tccaaaacagtatggcgtgtccgcc

SEQ ID NO: 50008 - DNA, 25 bp, Homo sapien
tccaaaacagtaaggcgtgtccgcc

SEQ ID NO: 50009 - DNA, 25 bp, Homo sapien
tcgagcgcctcacggcacctattta

SEQ ID NO: 50010 - DNA, 25 bp, Homo sapien
tcgagcgcctcagggcacctattta

SEQ ID NO: 50011 - DNA, 25 bp, Homo sapien
ctagaacgtacctcgttagagcgtc

SEQ ID NO: 50012 - DNA, 25 bp, Homo sapien
ctagaacgtaccacgttagagcgtc

SEQ ID NO: 50013 - DNA, 25 bp, Homo sapien
tccagagtccttttacattcgaaag

SEQ ID NO: 50014 - DNA, 25 bp, Homo sapien
tccagagtccttatacattcgaaag

SEQ ID NO: 50015 - DNA, 25 bp, Homo sapien
tccttgtcttgtttagtctcccggt

SEQ ID NO: 50016 - DNA, 25 bp, Homo sapien
tccttgtcttgtatagtctcccggt

SEQ ID NO: 50017 - DNA, 25 bp, Homo sapien
ccctgttagtagaaacgtctcctta

SEQ ID NO: 50018 - DNA, 25 bp, Homo sapien
ccctgttagtagtaacgtctcctta

SEQ ID NO: 50019 - DNA, 25 bp, Homo sapien
tcctgtcgatgtggtaaccgttcca

SEQ ID NO: 50020 - DNA, 25 bp, Homo sapien
tcctgtcgatgtcgtaaccgttcca

SEQ ID NO: 50021 - DNA, 25 bp, Homo sapien
tcttgtctgggtgtttcgttaggac

SEQ ID NO: 50022 - DNA, 25 bp, Homo sapien
tcttgtctgggtctttcgttaggac

SEQ ID NO: 50023 - DNA, 25 bp, Homo sapien
ttgtacttgcccttacttgtccgtt

SEQ ID NO: 50024 - DNA, 25 bp, Homo sapien
ttgtacttgcccatacttgtccgtt

SEQ ID NO: 50025 - DNA, 25 bp, Homo sapien
tttatttcactggtgagtgtaccct

SEQ ID NO: 50026 - DNA, 25 bp, Homo sapien
tttatttcactgctgagtgtaccct

SEQ ID NO: 50027 - DNA, 25 bp, Homo sapien
ttcttctagcatggtctatttcacg

SEQ ID NO: 50028 - DNA, 25 bp, Homo sapien
ttcttctagcatcgtctatttcacg

SEQ ID NO: 50029 - DNA, 25 bp, Homo sapien
ttcccgtctcgattactgttttgtg

SEQ ID NO: 50030 - DNA, 25 bp, Homo sapien
ttcccgtctcgaatactgttttgtg

SEQ ID NO: 50031 - DNA, 25 bp, Homo sapien
gaaccggtgtcgactttgtgtttgt

SEQ ID NO: 50032 - DNA, 25 bp, Homo sapien
gaaccggtgtcgtctttgtgtttgt

SEQ ID NO: 50033 - DNA, 25 bp, Homo sapien
ttcctctttcgagtcgtctgtatgt

SEQ ID NO: 50034 - DNA, 25 bp, Homo sapien
ttcctctttcgactcgtctgtatgt

SEQ ID NO: 50035 - DNA, 25 bp, Homo sapien
gtactcgtatttagggtctctagct

SEQ ID NO: 50036 - DNA, 25 bp, Homo sapien
gtactcgtattttgggtctctagct

SEQ ID NO: 50037 - DNA, 25 bp, Homo sapien
actgacttgtctacttccgtagtct

SEQ ID NO: 50038 - DNA, 25 bp, Homo sapien
actgacttgtcttcttccgtagtct

SEQ ID NO: 50039 - DNA, 25 bp, Homo sapien
ggtcctggtcgtgcgtctccgtgtc

SEQ ID NO: 50040 - DNA, 25 bp, Homo sapien
ggtcctggtcgtccgtctccgtgtc

SEQ ID NO: 50041 - DNA, 25 bp, Homo sapien
gtgtgtcttacattttccctcgtac

SEQ ID NO: 50042 - DNA, 25 bp, Homo sapien
gtgtgtcttacaatttccctcgtac

SEQ ID NO: 50043 - DNA, 25 bp, Homo sapien
ttgtctacttaatgtttaaccgtcg

SEQ ID NO: 50044 - DNA, 25 bp, Homo sapien
ttgtctacttaaagtttaaccgtcg

SEQ ID NO: 50045 - DNA, 25 bp, Homo sapien
tatgttagtgtcgagaaagactctc

SEQ ID NO: 50046 - DNA, 25 bp, Homo sapien
tatgttagtgtccagaaagactctc

SEQ ID NO: 50047 - DNA, 25 bp, Homo sapien
cctcgtcgtcgagaagaacgtcctc

SEQ ID NO: 50048 - DNA, 25 bp, Homo sapien
cctcgtcgtcgacaagaacgtcctc

SEQ ID NO: 50049 - DNA, 25 bp, Homo sapien
ggaaaagacccgaaagggagtctcc

SEQ ID NO: 50050 - DNA, 25 bp, Homo sapien
ggaaaagacccgtaagggagtctcc

SEQ ID NO: 50051 - DNA, 25 bp, Homo sapien
aaagtaccggtttctcaggtctcta

SEQ ID NO: 50052 - DNA, 25 bp, Homo sapien
aaagtaccggttactcaggtctcta

SEQ ID NO: 50053 - DNA, 25 bp, Homo sapien
tctagtaaatgagacgttacactta

SEQ ID NO: 50054 - DNA, 25 bp, Homo sapien
tctagtaaatgacacgttacactta

SEQ ID NO: 50055 - DNA, 25 bp, Homo sapien
cctgtaaaagacgtctcaacgactt

SEQ ID NO: 50056 - DNA, 25 bp, Homo sapien
cctgtaaaagacctctcaacgactt

SEQ ID NO: 50057 - DNA, 25 bp, Homo sapien
ctcctcttcctgttctttcggtgtc

SEQ ID NO: 50058 - DNA, 25 bp, Homo sapien
ctcctcttcctgatctttcggtgtc

SEQ ID NO: 50059 - DNA, 25 bp, Homo sapien
tcgttagaacaatctaggacgcttc

SEQ ID NO: 50060 - DNA, 25 bp, Homo sapien
tcgttagaacaaactaggacgcttc

SEQ ID NO: 50061 - DNA, 25 bp, Homo sapien
tgtggtgtcaaacactgtgtacttc

SEQ ID NO: 50062 - DNA, 25 bp, Homo sapien
tgtggtgtcaaagactgtgtacttc

SEQ ID NO: 50063 - DNA, 25 bp, Homo sapien
aaggttctagagacctgtgtactta

SEQ ID NO: 50064 - DNA, 25 bp, Homo sapien
aaggttctagagtcctgtgtactta

SEQ ID NO: 50065 - DNA, 25 bp, Homo sapien
agatcttacatcttctattgagtag

SEQ ID NO: 50066 - DNA, 25 bp, Homo sapien
agatcttacatcatctattgagtag

SEQ ID NO: 50067 - DNA, 25 bp, Homo sapien
cacgtatagacacagaacttactgg

SEQ ID NO: 50068 - DNA, 25 bp, Homo sapien
cacgtatagacagagaacttactgg

SEQ ID NO: 50069 - DNA, 25 bp, Homo sapien
gaaccgtaagaagtcaggttctcgg

SEQ ID NO: 50070 - DNA, 25 bp, Homo sapien
gaaccgtaagaactcaggttctcgg

SEQ ID NO: 50071 - DNA, 25 bp, Homo sapien
aaagagcgtactttgtatttgaacg

SEQ ID NO: 50072 - DNA, 25 bp, Homo sapien
aaagagcgtactatgtatttgaacg

SEQ ID NO: 50073 - DNA, 25 bp, Homo sapien
aagaaccctcttcgtcttatgtggt

SEQ ID NO: 50074 - DNA, 25 bp, Homo sapien
aagaaccctcttggtcttatgtggt

SEQ ID NO: 50075 - DNA, 25 bp, Homo sapien
gagagacctctctgtttacttacct

SEQ ID NO: 50076 - DNA, 25 bp, Homo sapien
gagagacctctcagtttacttacct

SEQ ID NO: 50077 - DNA, 25 bp, Homo sapien
tacgagtccggtagtcccgtcgtcc

SEQ ID NO: 50078 - DNA, 25 bp, Homo sapien
tacgagtccggttgtcccgtcgtcc

SEQ ID NO: 50079 - DNA, 25 bp, Homo sapien
tatgtcgtaaacgttttttggtcgc

SEQ ID NO: 50080 - DNA, 25 bp, Homo sapien
tatgtcgtaaaccttttttggtcgc

SEQ ID NO: 50081 - DNA, 25 bp, Homo sapien
ttggtaatagactttaatctgttcc

SEQ ID NO: 50082 - DNA, 25 bp, Homo sapien
ttggtaatagacattaatctgttcc

SEQ ID NO: 50083 - DNA, 25 bp, Homo sapien
ggtagagtaataaacttctgtccct

SEQ ID NO: 50084 - DNA, 25 bp, Homo sapien
ggtagagtaatatacttctgtccct

SEQ ID NO: 50085 - DNA, 25 bp, Homo sapien
gttgtactcatacacgcttgtcacc

SEQ ID NO: 50086 - DNA, 25 bp, Homo sapien
gttgtactcatagacgcttgtcacc

SEQ ID NO: 50087 - DNA, 25 bp, Homo sapien
ctgtagtcagaatcgaattctccct

SEQ ID NO: 50088 - DNA, 25 bp, Homo sapien
ctgtagtcagaaacgaattctccct

SEQ ID NO: 50089 - DNA, 25 bp, Homo sapien
ccttaaagagggattgtacgtgaca

SEQ ID NO: 50090 - DNA, 25 bp, Homo sapien
ccttaaagagggtttgtacgtgaca

SEQ ID NO: 50091 - DNA, 25 bp, Homo sapien
ggtccgtcaaggtcggttcctaccc

SEQ ID NO: 50092 - DNA, 25 bp, Homo sapien
ggtccgtcaaggacggttcctaccc

SEQ ID NO: 50093 - DNA, 25 bp, Homo sapien
tttcggagagtgaggagtccagacc

SEQ ID NO: 50094 - DNA, 25 bp, Homo sapien
tttcggagagtgtggagtccagacc

SEQ ID NO: 50095 - DNA, 25 bp, Homo sapien
gatctcgaagtgtcacggtcccccg

SEQ ID NO: 50096 - DNA, 25 bp, Homo sapien
gatctcgaagtgacacggtcccccg

SEQ ID NO: 50097 - DNA, 25 bp, Homo sapien
tggtccggaagaggaggtctacccc

SEQ ID NO: 50098 - DNA, 25 bp, Homo sapien
tggtccggaagacgaggtctacccc

SEQ ID NO: 50099 - DNA, 25 bp, Homo sapien
ggtactggaaacgagaactgacccg

SEQ ID NO: 50100 - DNA, 25 bp, Homo sapien
ggtactggaaaccagaactgacccg

SEQ ID NO: 50101 - DNA, 25 bp, Homo sapien
aagaacttaagacgaggacttctcc

SEQ ID NO: 50102 - DNA, 25 bp, Homo sapien
aagaacttaagaggaggacttctcc

SEQ ID NO: 50103 - DNA, 25 bp, Homo sapien
acgtgtatcaggagttttcgtcact

SEQ ID NO: 50104 - DNA, 25 bp, Homo sapien
acgtgtatcaggtgttttcgtcact

SEQ ID NO: 50105 - DNA, 25 bp, Homo sapien
tcgtcacgtgtgtgtgttcgtgtgc

SEQ ID NO: 50106 - DNA, 25 bp, Homo sapien
tcgtcacgtgtgagtgttcgtgtgc

SEQ ID NO: 50107 - DNA, 25 bp, Homo sapien
gtcctgtggtcgtccttctcggtgc

SEQ ID NO: 50108 - DNA, 25 bp, Homo sapien
gtcctgtggtcgaccttctcggtgc

SEQ ID NO: 50109 - DNA, 25 bp, Homo sapien
tctcttggagttcaattctctctgg

SEQ ID NO: 50110 - DNA, 25 bp, Homo sapien
tctcttggagttgaattctctctgg

SEQ ID NO: 50111 - DNA, 25 bp, Homo sapien
cgaatcgtgagtcgtagtgacagac

SEQ ID NO: 50112 - DNA, 25 bp, Homo sapien
cgaatcgtgagtggtagtgacagac

SEQ ID NO: 50113 - DNA, 25 bp, Homo sapien
ccggttacgtgactcgtagttataa

SEQ ID NO: 50114 - DNA, 25 bp, Homo sapien
ccggttacgtgagtcgtagttataa

SEQ ID NO: 50115 - DNA, 25 bp, Homo sapien
cctccatcacggaagaaccgtaaga

SEQ ID NO: 50116 - DNA, 25 bp, Homo sapien
cctccatcacggtagaaccgtaaga

SEQ ID NO: 50117 - DNA, 25 bp, Homo sapien
aaccagactacgtgcgtcaagaaca

SEQ ID NO: 50118 - DNA, 25 bp, Homo sapien
aaccagactacgagcgtcaagaaca

SEQ ID NO: 50119 - DNA, 25 bp, Homo sapien
taacccaaacggtctcgatgatctc

SEQ ID NO: 50120 - DNA, 25 bp, Homo sapien
taacccaaacggactcgatgatctc

SEQ ID NO: 50121 - DNA, 25 bp, Homo sapien
atcagaaggggacgacttagtgtac

SEQ ID NO: 50122 - DNA, 25 bp, Homo sapien
atcagaaggggaggacttagtgtac

SEQ ID NO: 50123 - DNA, 25 bp, Homo sapien
ccacatgctgcgagactgatctgga

SEQ ID NO: 50124 - DNA, 25 bp, Homo sapien
ccacatgctgcgtgactgatctgga

SEQ ID NO: 50125 - DNA, 25 bp, Homo sapien
tccctttatggtgagtcttatgtga

SEQ ID NO: 50126 - DNA, 25 bp, Homo sapien
tccctttatggtcagtcttatgtga

SEQ ID NO: 50127 - DNA, 25 bp, Homo sapien
ctctggtagtgactatttctgtgta

SEQ ID NO: 50128 - DNA, 25 bp, Homo sapien
ctctggtagtgagtatttctgtgta

SEQ ID NO: 50129 - DNA, 25 bp, Homo sapien
ttcgacggacgaagttctttaggtt

SEQ ID NO: 50130 - DNA, 25 bp, Homo sapien
ttcgacggacgatgttctttaggtt

SEQ ID NO: 50131 - DNA, 25 bp, Homo sapien
ttcgtcgagaaattcttcttacgtg

SEQ ID NO: 50132 - DNA, 25 bp, Homo sapien
ttcgtcgagaaaatcttcttacgtg

SEQ ID NO: 50133 - DNA, 25 bp, Homo sapien
gaaagacggagaagtcgtccaagtg

SEQ ID NO: 50134 - DNA, 25 bp, Homo sapien
gaaagacggagatgtcgtccaagtg

SEQ ID NO: 50135 - DNA, 25 bp, Homo sapien
gagtacccggtggtgcgtccacatc

SEQ ID NO: 50136 - DNA, 25 bp, Homo sapien
gagtacccggtgctgcgtccacatc

SEQ ID NO: 50137 - DNA, 25 bp, Homo sapien
tgatagacaaagatctccgaacaac

SEQ ID NO: 50138 - DNA, 25 bp, Homo sapien
tgatagacaaagttctccgaacaac

SEQ ID NO: 50139 - DNA, 25 bp, Homo sapien
agtgtcacagagtcgaccttacggg

SEQ ID NO: 50140 - DNA, 25 bp, Homo sapien
agtgtcacagagacgaccttacggg

SEQ ID NO: 50141 - DNA, 25 bp, Homo sapien
tacttgaagaaaacttgtaccgtgt

SEQ ID NO: 50142 - DNA, 25 bp, Homo sapien
tacttgaagaaatcttgtaccgtgt

SEQ ID NO: 50143 - DNA, 25 bp, Homo sapien
gacgttacacttacggtaatttcta

SEQ ID NO: 50144 - DNA, 25 bp, Homo sapien
gacgttacactttcggtaatttcta

SEQ ID NO: 50145 - DNA, 25 bp, Homo sapien
caacgtaagtaaggaggttctcttc

SEQ ID NO: 50146 - DNA, 25 bp, Homo sapien
caacgtaagtaacgaggttctcttc

SEQ ID NO: 50147 - DNA, 25 bp, Homo sapien
ttagacatttgaagtacatctgtct

SEQ ID NO: 50148 - DNA, 25 bp, Homo sapien
ttagacatttgatgtacatctgtct

SEQ ID NO: 50149 - DNA, 25 bp, Homo sapien
ccttcgagtatactggtttcgttat

SEQ ID NO: 50150 - DNA, 25 bp, Homo sapien
ccttcgagtatagtggtttcgttat

SEQ ID NO: 50151 - DNA, 25 bp, Homo sapien
cgttacatgtaaacgtgagtttctt

SEQ ID NO: 50152 - DNA, 25 bp, Homo sapien
cgttacatgtaatcgtgagtttctt

SEQ ID NO: 50153 - DNA, 25 bp, Homo sapien
taacttacggtgcttcttttgtcta

SEQ ID NO: 50154 - DNA, 25 bp, Homo sapien
taacttacggtggttcttttgtcta

SEQ ID NO: 50155 - DNA, 25 bp, Homo sapien
gtactgacttctttgtcataagtta

SEQ ID NO: 50156 - DNA, 25 bp, Homo sapien
gtactgacttctatgtcataagtta

SEQ ID NO: 50157 - DNA, 25 bp, Homo sapien
tcttatgtctcacgtccgtgaatgt

SEQ ID NO: 50158 - DNA, 25 bp, Homo sapien
tcttatgtctcaggtccgtgaatgt

SEQ ID NO: 50159 - DNA, 25 bp, Homo sapien
gtttggtgtcgtggaccggacttac

SEQ ID NO: 50160 - DNA, 25 bp, Homo sapien
gtttggtgtcgtcgaccggacttac

SEQ ID NO: 50161 - DNA, 25 bp, Homo sapien
tgagcgggaagagcacggtctagta

SEQ ID NO: 50162 - DNA, 25 bp, Homo sapien
tgagcgggaagaccacggtctagta

SEQ ID NO: 50163 - DNA, 25 bp, Homo sapien
taacgaggagaaactctaccgtccc

SEQ ID NO: 50164 - DNA, 25 bp, Homo sapien
taacgaggagaatctctaccgtccc

SEQ ID NO: 50165 - DNA, 25 bp, Homo sapien
tcaactagtcggtatttctaccccg

SEQ ID NO: 50166 - DNA, 25 bp, Homo sapien
tcaactagtcggaatttctaccccg

SEQ ID NO: 50167 - DNA, 25 bp, Homo sapien
agctactagatctttaccctgagag

SEQ ID NO: 50168 - DNA, 25 bp, Homo sapien
agctactagatcattaccctgagag

SEQ ID NO: 50169 - DNA, 25 bp, Homo sapien
gtcctcctgtcagtcctcctggtat

SEQ ID NO: 50170 - DNA, 25 bp, Homo sapien
gtcctcctgtcactcctcctggtat

SEQ ID NO: 50171 - DNA, 25 bp, Homo sapien
cggtgcgtccggtcgtccttacgat

SEQ ID NO: 50172 - DNA, 25 bp, Homo sapien
cggtgcgtccggacgtccttacgat

SEQ ID NO: 50173 - DNA, 25 bp, Homo sapien
gtatcgtcgtcgaaaactatatatc

SEQ ID NO: 50174 - DNA, 25 bp, Homo sapien
gtatcgtcgtcgtaaactatatatc

SEQ ID NO: 50175 - DNA, 25 bp, Homo sapien
ggagtatctgagtcaatattacgtc

SEQ ID NO: 50176 - DNA, 25 bp, Homo sapien
ggagtatctgagacaatattacgtc

SEQ ID NO: 50177 - DNA, 25 bp, Homo sapien
cgataccagtgaggtacgtttccgg

SEQ ID NO: 50178 - DNA, 25 bp, Homo sapien
cgataccagtgacgtacgtttccgg

SEQ ID NO: 50179 - DNA, 25 bp, Homo sapien
ctgtttgtgatgatgagactctcgt

SEQ ID NO: 50180 - DNA, 25 bp, Homo sapien
ctgtttgtgatgttgagactctcgt

SEQ ID NO: 50181 - DNA, 25 bp, Homo sapien
tctgtgtcgacctcgtagggccagt

SEQ ID NO: 50182 - DNA, 25 bp, Homo sapien
tctgtgtcgaccacgtagggccagt

SEQ ID NO: 50183 - DNA, 25 bp, Homo sapien
tccggtcacagacacggtcgtccat

SEQ ID NO: 50184 - DNA, 25 bp, Homo sapien
tccggtcacagagacggtcgtccat

SEQ ID NO: 50185 - DNA, 25 bp, Homo sapien
atgtcaggtaggtggtatgtcctac

SEQ ID NO: 50186 - DNA, 25 bp, Homo sapien
atgtcaggtaggaggtatgtcctac

SEQ ID NO: 50187 - DNA, 25 bp, Homo sapien
gtcacgtcagagacgtcacctgacc

SEQ ID NO: 50188 - DNA, 25 bp, Homo sapien
gtcacgtcagagtcgtcacctgacc

SEQ ID NO: 50189 - DNA, 25 bp, Homo sapien
acctcggacggctttcagtagactc

SEQ ID NO: 50190 - DNA, 25 bp, Homo sapien
acctcggacggcattcagtagactc

SEQ ID NO: 50191 - DNA, 25 bp, Homo sapien
ccctacgtcgggacacaagagacct

SEQ ID NO: 50192 - DNA, 25 bp, Homo sapien
ccctacgtcgggtcacaagagacct

SEQ ID NO: 50193 - DNA, 25 bp, Homo sapien
tcaacgaacaaggttcctgagaaga

SEQ ID NO: 50194 - DNA, 25 bp, Homo sapien
tcaacgaacaagcttcctgagaaga

SEQ ID NO: 50195 - DNA, 25 bp, Homo sapien
cgacgagaaaactccccgtggtaga

SEQ ID NO: 50196 - DNA, 25 bp, Homo sapien
cgacgagaaaacaccccgtggtaga

SEQ ID NO: 50197 - DNA, 25 bp, Homo sapien
cggaacaaccgaaccccgaggagtg

SEQ ID NO: 50198 - DNA, 25 bp, Homo sapien
cggaacaaccgatccccgaggagtg

SEQ ID NO: 50199 - DNA, 25 bp, Homo sapien
agaagtaacggatccaccaactctc

SEQ ID NO: 50200 - DNA, 25 bp, Homo sapien
agaagtaacggaaccaccaactctc

SEQ ID NO: 50201 - DNA, 25 bp, Homo sapien
gacaaggtaacacagaaccaaggtc

SEQ ID NO: 50202 - DNA, 25 bp, Homo sapien
gacaaggtaacagagaaccaaggtc

SEQ ID NO: 50203 - DNA, 25 bp, Homo sapien
agctaaaccgtggtccagagagacg

SEQ ID NO: 50204 - DNA, 25 bp, Homo sapien
agctaaaccgtgctccagagagacg

SEQ ID NO: 50205 - DNA, 25 bp, Homo sapien
tacgacaactctttcaaactatacg

SEQ ID NO: 50206 - DNA, 25 bp, Homo sapien
tacgacaactctatcaaactatacg

SEQ ID NO: 50207 - DNA, 25 bp, Homo sapien
ggaagaaacacttttcgaacacctt

SEQ ID NO: 50208 - DNA, 25 bp, Homo sapien
ggaagaaacactattcgaacacctt

SEQ ID NO: 50209 - DNA, 25 bp, Homo sapien
gtgagaacccgtaaatggaacccta

SEQ ID NO: 50210 - DNA, 25 bp, Homo sapien
gtgagaacccgttaatggaacccta

SEQ ID NO: 50211 - DNA, 25 bp, Homo sapien
aggaacaccgaaaggacctcctcta

SEQ ID NO: 50212 - DNA, 25 bp, Homo sapien
aggaacaccgaatggacctcctcta

SEQ ID NO: 50213 - DNA, 25 bp, Homo sapien
gagaaccctcatagtccttctccgt

SEQ ID NO: 50214 - DNA, 25 bp, Homo sapien
gagaaccctcattgtccttctccgt

SEQ ID NO: 50215 - DNA, 25 bp, Homo sapien
gacacctgatacttgacacgatttt

SEQ ID NO: 50216 - DNA, 25 bp, Homo sapien
gacacctgatacatgacacgatttt

SEQ ID NO: 50217 - DNA, 25 bp, Homo sapien
gagattatataccacgaattcatgt

SEQ ID NO: 50218 - DNA, 25 bp, Homo sapien
gagattatatacgacgaattcatgt

SEQ ID NO: 50219 - DNA, 25 bp, Homo sapien
gagatcttttatccttaatcagtgt

SEQ ID NO: 50220 - DNA, 25 bp, Homo sapien
gagatcttttatgcttaatcagtgt

SEQ ID NO: 50221 - DNA, 25 bp, Homo sapien
agggaccctttattcttattctagg

SEQ ID NO: 50222 - DNA, 25 bp, Homo sapien
agggaccctttaatcttattctagg

SEQ ID NO: 50223 - DNA, 25 bp, Homo sapien
cgccactctagaggtctctaccggg

SEQ ID NO: 50224 - DNA, 25 bp, Homo sapien
cgccactctagacgtctctaccggg

SEQ ID NO: 50225 - DNA, 25 bp, Homo sapien
ggtgaactcggacctccgacggagc

SEQ ID NO: 50226 - DNA, 25 bp, Homo sapien
ggtgaactcggagctccgacggagc

SEQ ID NO: 50227 - DNA, 25 bp, Homo sapien
gtttagactggttctacaactacaa

SEQ ID NO: 50228 - DNA, 25 bp, Homo sapien
gtttagactggtactacaactacaa

SEQ ID NO: 50229 - DNA, 25 bp, Homo sapien
ccaagttttgactgtagacaatact

SEQ ID NO: 50230 - DNA, 25 bp, Homo sapien
ccaagttttgacagtagacaatact

SEQ ID NO: 50231 - DNA, 25 bp, Homo sapien
atcaagatttcacgtaagaacgtcg

SEQ ID NO: 50232 - DNA, 25 bp, Homo sapien
atcaagatttcaggtaagaacgtcg

SEQ ID NO: 50233 - DNA, 25 bp, Homo sapien
tgtaagacctctatgagtatatacc

SEQ ID NO: 50234 - DNA, 25 bp, Homo sapien
tgtaagacctctttgagtatatacc

SEQ ID NO: 50235 - DNA, 25 bp, Homo sapien
gactgacatccgatgcatagtacac

SEQ ID NO: 50236 - DNA, 25 bp, Homo sapien
gactgacatccgttgcatagtacac

SEQ ID NO: 50237 - DNA, 25 bp, Homo sapien
ttcgttacaaagctgactccgaact

SEQ ID NO: 50238 - DNA, 25 bp, Homo sapien
ttcgttacaaaggtgactccgaact

SEQ ID NO: 50239 - DNA, 25 bp, Homo sapien
atgttttactcttgggattcatacg

SEQ ID NO: 50240 - DNA, 25 bp, Homo sapien
atgttttactctagggattcatacg

SEQ ID NO: 50241 - DNA, 25 bp, Homo sapien
aatttcgacgtaaagggtcgtcttc

SEQ ID NO: 50242 - DNA, 25 bp, Homo sapien
aatttcgacgtatagggtcgtcttc

SEQ ID NO: 50243 - DNA, 25 bp, Homo sapien
gcgtcttcgaccaccggtagtttac

SEQ ID NO: 50244 - DNA, 25 bp, Homo sapien
gcgtcttcgacctccggtagtttac

SEQ ID NO: 50245 - DNA, 25 bp, Homo sapien
tacctttacgactccgctaagactg

SEQ ID NO: 50246 - DNA, 25 bp, Homo sapien
tacctttacgacaccgctaagactg

SEQ ID NO: 50247 - DNA, 25 bp, Homo sapien
tcctcttgacgtttcgacaggaacg

SEQ ID NO: 50248 - DNA, 25 bp, Homo sapien
tcctcttgacgtatcgacaggaacg

SEQ ID NO: 50249 - DNA, 25 bp, Homo sapien
gtgacacatggactcactcttaaag

SEQ ID NO: 50250 - DNA, 25 bp, Homo sapien
gtgacacatggagtcactcttaaag

SEQ ID NO: 50251 - DNA, 25 bp, Homo sapien
caatgactatagacgactgtttaag

SEQ ID NO: 50252 - DNA, 25 bp, Homo sapien
caatgactatagtcgactgtttaag

SEQ ID NO: 50253 - DNA, 25 bp, Homo sapien
acgagttctcatacttcgtcccacg

SEQ ID NO: 50254 - DNA, 25 bp, Homo sapien
acgagttctcattcttcgtcccacg

SEQ ID NO: 50255 - DNA, 25 bp, Homo sapien
agacaatacgtcgtaaaaactccag

SEQ ID NO: 50256 - DNA, 25 bp, Homo sapien
agacaatacgtcctaaaaactccag

SEQ ID NO: 50257 - DNA, 25 bp, Homo sapien
acttaaatcggtaaaggacccgtgt

SEQ ID NO: 50258 - DNA, 25 bp, Homo sapien
acttaaatcggttaaggacccgtgt

SEQ ID NO: 50259 - DNA, 25 bp, Homo sapien
actggaaaggtttatgacacctggt

SEQ ID NO: 50260 - DNA, 25 bp, Homo sapien
actggaaaggttaatgacacctggt

SEQ ID NO: 50261 - DNA, 25 bp, Homo sapien
gacggtaaaaaggtccagaaactca

SEQ ID NO: 50262 - DNA, 25 bp, Homo sapien
gacggtaaaaagctccagaaactca

SEQ ID NO: 50263 - DNA, 25 bp, Homo sapien
aagtctaagaggtccgaatgcttac

SEQ ID NO: 50264 - DNA, 25 bp, Homo sapien
aagtctaagaggaccgaatgcttac

SEQ ID NO: 50265 - DNA, 25 bp, Homo sapien
aaggactagtaatcctcaatggttc

SEQ ID NO: 50266 - DNA, 25 bp, Homo sapien
aaggactagtaaacctcaatggttc

SEQ ID NO: 50267 - DNA, 25 bp, Homo sapien
aagcgaagaagtggaacttctactc

SEQ ID NO: 50268 - DNA, 25 bp, Homo sapien
aagcgaagaagtcgaacttctactc

SEQ ID NO: 50269 - DNA, 25 bp, Homo sapien
gacacgcgacgaaacaggacccctt

SEQ ID NO: 50270 - DNA, 25 bp, Homo sapien
gacacgcgacgatacaggacccctt

SEQ ID NO: 50271 - DNA, 25 bp, Homo sapien
ttacctcgagtactggtactcccag

SEQ ID NO: 50272 - DNA, 25 bp, Homo sapien
ttacctcgagtagtggtactcccag

SEQ ID NO: 50273 - DNA, 25 bp, Homo sapien
tgtacgaagattggtgactccatac

SEQ ID NO: 50274 - DNA, 25 bp, Homo sapien
tgtacgaagattcgtgactccatac

SEQ ID NO: 50275 - DNA, 25 bp, Homo sapien
agactaaggaaaacagtagtccata

SEQ ID NO: 50276 - DNA, 25 bp, Homo sapien
agactaaggaaatcagtagtccata

SEQ ID NO: 50277 - DNA, 25 bp, Homo sapien
tcaaggatgaacaaatacttagaca

SEQ ID NO: 50278 - DNA, 25 bp, Homo sapien
tcaaggatgaactaatacttagaca

SEQ ID NO: 50279 - DNA, 25 bp, Homo sapien
accaaggagtcaaaagagtttcttt

SEQ ID NO: 50280 - DNA, 25 bp, Homo sapien
accaaggagtcataagagtttcttt

SEQ ID NO: 50281 - DNA, 25 bp, Homo sapien
cggaaggtcaaaaccgttcctcgtc

SEQ ID NO: 50282 - DNA, 25 bp, Homo sapien
cggaaggtcaaatccgttcctcgtc

SEQ ID NO: 50283 - DNA, 25 bp, Homo sapien
cacggattctacgagactttttcac

SEQ ID NO: 50284 - DNA, 25 bp, Homo sapien
cacggattctaccagactttttcac

SEQ ID NO: 50285 - DNA, 25 bp, Homo sapien
ccgtttcgtcccacggtggttactc

SEQ ID NO: 50286 - DNA, 25 bp, Homo sapien
ccgtttcgtccctcggtggttactc

SEQ ID NO: 50287 - DNA, 25 bp, Homo sapien
gaccggtttgtacttctttcttctc

SEQ ID NO: 50288 - DNA, 25 bp, Homo sapien
gaccggtttgtagttctttcttctc

SEQ ID NO: 50289 - DNA, 25 bp, Homo sapien
gggtcgtctacctttgtcttcatac

SEQ ID NO: 50290 - DNA, 25 bp, Homo sapien
gggtcgtctaccattgtcttcatac

SEQ ID NO: 50291 - DNA, 25 bp, Homo sapien
gtagagggcgtgcaacccctttcaa

SEQ ID NO: 50292 - DNA, 25 bp, Homo sapien
gtagagggcgtggaacccctttcaa

SEQ ID NO: 50293 - DNA, 25 bp, Homo sapien
aggtcgagggtaagttcttctcgaa

SEQ ID NO: 50294 - DNA, 25 bp, Homo sapien
aggtcgagggtatgttcttctcgaa

SEQ ID NO: 50295 - DNA, 25 bp, Homo sapien
agttaaggtctaagatcaccagaga

SEQ ID NO: 50296 - DNA, 25 bp, Homo sapien
agttaaggtctatgatcaccagaga

SEQ ID NO: 50297 - DNA, 25 bp, Homo sapien
tcaactaaagtgtgacttccggaag

SEQ ID NO: 50298 - DNA, 25 bp, Homo sapien
tcaactaaagtgagacttccggaag

SEQ ID NO: 50299 - DNA, 25 bp, Homo sapien
tgaattcagggaagttcacgacgaa

SEQ ID NO: 50300 - DNA, 25 bp, Homo sapien
tgaattcagggatgttcacgacgaa

SEQ ID NO: 50301 - DNA, 25 bp, Homo sapien
cagtttatcaagatttcacgtaaga

SEQ ID NO: 50302 - DNA, 25 bp, Homo sapien
cagtttatcaagttttcacgtaaga

SEQ ID NO: 50303 - DNA, 25 bp, Homo sapien
caaatagaatgtgttattcgcaaac

SEQ ID NO: 50304 - DNA, 25 bp, Homo sapien
caaatagaatgtcttattcgcaaac

SEQ ID NO: 50305 - DNA, 25 bp, Homo sapien
cacataagagtcttgtgttcccctt

SEQ ID NO: 50306 - DNA, 25 bp, Homo sapien
cacataagagtcatgtgttcccctt

SEQ ID NO: 50307 - DNA, 25 bp, Homo sapien
gttatctgtgactgttcccactact

SEQ ID NO: 50308 - DNA, 25 bp, Homo sapien
gttatctgtgacagttcccactact

SEQ ID NO: 50309 - DNA, 25 bp, Homo sapien
cccttctgtgcgatctggacctacg

SEQ ID NO: 50310 - DNA, 25 bp, Homo sapien
cccttctgtgcgttctggacctacg

SEQ ID NO: 50311 - DNA, 25 bp, Homo sapien
acttccgtgtcggttcgggaactac

SEQ ID NO: 50312 - DNA, 25 bp, Homo sapien
acttccgtgtcgcttcgggaactac

SEQ ID NO: 50313 - DNA, 25 bp, Homo sapien
ctgttgtctccgtgaggacgtctac

SEQ ID NO: 50314 - DNA, 25 bp, Homo sapien
ctgttgtctccgagaggacgtctac

SEQ ID NO: 50315 - DNA, 25 bp, Homo sapien
ccttcggtccggactgtgacaacgt

SEQ ID NO: 50316 - DNA, 25 bp, Homo sapien
ccttcggtccggtctgtgacaacgt

SEQ ID NO: 50317 - DNA, 25 bp, Homo sapien
gtcggtggtcgaccagttttactcc

SEQ ID NO: 50318 - DNA, 25 bp, Homo sapien
gtcggtggtcgagcagttttactcc

SEQ ID NO: 50319 - DNA, 25 bp, Homo sapien
agggaagtcatcagaagtcggtacc

SEQ ID NO: 50320 - DNA, 25 bp, Homo sapien
agggaagtcatctgaagtcggtacc

SEQ ID NO: 50321 - DNA, 25 bp, Homo sapien
acagttacatccacgggagttatcg

SEQ ID NO: 50322 - DNA, 25 bp, Homo sapien
acagttacatcctcgggagttatcg

SEQ ID NO: 50323 - DNA, 25 bp, Homo sapien
ccttaaggtggagtgtcttggacgt

SEQ ID NO: 50324 - DNA, 25 bp, Homo sapien
ccttaaggtggactgtcttggacgt

SEQ ID NO: 50325 - DNA, 25 bp, Homo sapien
ttcttgtgtgtagagactctgttct

SEQ ID NO: 50326 - DNA, 25 bp, Homo sapien
ttcttgtgtgtacagactctgttct

SEQ ID NO: 50327 - DNA, 25 bp, Homo sapien
gactccgtgtgtcgagtagatgttt

SEQ ID NO: 50328 - DNA, 25 bp, Homo sapien
gactccgtgtgtggagtagatgttt

SEQ ID NO: 50329 - DNA, 25 bp, Homo sapien
ttttccgtctgtcgtcgaatatatt

SEQ ID NO: 50330 - DNA, 25 bp, Homo sapien
ttttccgtctgtggtcgaatatatt

SEQ ID NO: 50331 - DNA, 25 bp, Homo sapien
agtcatctctcgtggaggagatcaa

SEQ ID NO: 50332 - DNA, 25 bp, Homo sapien
agtcatctctcgaggaggagatcaa

SEQ ID NO: 50333 - DNA, 25 bp, Homo sapien
tatcctcgcctggtctgggaccaca

SEQ ID NO: 50334 - DNA, 25 bp, Homo sapien
tatcctcgcctgctctgggaccaca

SEQ ID NO: 50335 - DNA, 25 bp, Homo sapien
tttttgtctctgtggggttctcgac

SEQ ID NO: 50336 - DNA, 25 bp, Homo sapien
tttttgtctctgaggggttctcgac

SEQ ID NO: 50337 - DNA, 25 bp, Homo sapien
gtgtttgattacacacctttccgac

SEQ ID NO: 50338 - DNA, 25 bp, Homo sapien
gtgtttgattactcacctttccgac

SEQ ID NO: 50339 - DNA, 25 bp, Homo sapien
gagctcgagattcctaccctgggcc

SEQ ID NO: 50340 - DNA, 25 bp, Homo sapien
gagctcgagattgctaccctgggcc

SEQ ID NO: 50341 - DNA, 25 bp, Homo sapien
cggccgacaagtgtccgagaggccc

SEQ ID NO: 50342 - DNA, 25 bp, Homo sapien
cggccgacaagtctccgagaggccc

SEQ ID NO: 50343 - DNA, 25 bp, Homo sapien
agaggggaagccttcacttttcgtc

SEQ ID NO: 50344 - DNA, 25 bp, Homo sapien
agaggggaagccatcacttttcgtc

SEQ ID NO: 50345 - DNA, 25 bp, Homo sapien
tgtaggatggtcgagttgtcctctg

SEQ ID NO: 50346 - DNA, 25 bp, Homo sapien
tgtaggatggtccagttgtcctctg

SEQ ID NO: 50347 - DNA, 25 bp, Homo sapien
ggcggtcgacgttaagtatgctttc

SEQ ID NO: 50348 - DNA, 25 bp, Homo sapien
ggcggtcgacgtaaagtatgctttc

SEQ ID NO: 50349 - DNA, 25 bp, Homo sapien
tggcgtatcaggaagaacgtcttga

SEQ ID NO: 50350 - DNA, 25 bp, Homo sapien
tggcgtatcaggtagaacgtcttga

SEQ ID NO: 50351 - DNA, 25 bp, Homo sapien
tgtgagccgatccttacggacttgg

SEQ ID NO: 50352 - DNA, 25 bp, Homo sapien
tgtgagccgatcgttacggacttgg

SEQ ID NO: 50353 - DNA, 25 bp, Homo sapien
tgacagtaccgttacccgagtgtgg

SEQ ID NO: 50354 - DNA, 25 bp, Homo sapien
tgacagtaccgtaacccgagtgtgg

SEQ ID NO: 50355 - DNA, 25 bp, Homo sapien
taaagtctactgaaccgcgagtgct

SEQ ID NO: 50356 - DNA, 25 bp, Homo sapien
taaagtctactgtaccgcgagtgct

SEQ ID NO: 50357 - DNA, 25 bp, Homo sapien
agtaagaaagataccgccggactga

SEQ ID NO: 50358 - DNA, 25 bp, Homo sapien
agtaagaaagattccgccggactga

SEQ ID NO: 50359 - DNA, 25 bp, Homo sapien
aagtagaggaacttgctgcacacga

SEQ ID NO: 50360 - DNA, 25 bp, Homo sapien
aagtagaggaacatgctgcacacga

SEQ ID NO: 50361 - DNA, 25 bp, Homo sapien
gcaaagtgtaaacattcttgtcttt

SEQ ID NO: 50362 - DNA, 25 bp, Homo sapien
gcaaagtgtaaagattcttgtcttt

SEQ ID NO: 50363 - DNA, 25 bp, Homo sapien
gtaaagtccaattatctcttgatgt

SEQ ID NO: 50364 - DNA, 25 bp, Homo sapien
gtaaagtccaataatctcttgatgt

SEQ ID NO: 50365 - DNA, 25 bp, Homo sapien
gagtaagctgaaacctctatttata

SEQ ID NO: 50366 - DNA, 25 bp, Homo sapien
gagtaagctgaatcctctatttata

SEQ ID NO: 50367 - DNA, 25 bp, Homo sapien
gatctcctcgaggttcccgttgttt

SEQ ID NO: 50368 - DNA, 25 bp, Homo sapien
gatctcctcgagcttcccgttgttt

SEQ ID NO: 50369 - DNA, 25 bp, Homo sapien
aaaacctcgaccagtcctgtgtttg

SEQ ID NO: 50370 - DNA, 25 bp, Homo sapien
aaaacctcgacctgtcctgtgtttg

SEQ ID NO: 50371 - DNA, 25 bp, Homo sapien
tcaagagacactggtaccttttgat

SEQ ID NO: 50372 - DNA, 25 bp, Homo sapien
tcaagagacactcgtaccttttgat

SEQ ID NO: 50373 - DNA, 25 bp, Homo sapien
ccagtagcactacgactcttcaaag

SEQ ID NO: 50374 - DNA, 25 bp, Homo sapien
ccagtagcactaggactcttcaaag

SEQ ID NO: 50375 - DNA, 25 bp, Homo sapien
atccgtttctaactcagttagtaga

SEQ ID NO: 50376 - DNA, 25 bp, Homo sapien
atccgtttctaagtcagttagtaga

SEQ ID NO: 50377 - DNA, 25 bp, Homo sapien
tcctctctccaggtatggcgacgtg

SEQ ID NO: 50378 - DNA, 25 bp, Homo sapien
tcctctctccagctatggcgacgtg

SEQ ID NO: 50379 - DNA, 25 bp, Homo sapien
gtttacctccgtggaccctggcatc

SEQ ID NO: 50380 - DNA, 25 bp, Homo sapien
gtttacctccgtcgaccctggcatc

SEQ ID NO: 50381 - DNA, 25 bp, Homo sapien
ctcataacgaggacccggacggacc

SEQ ID NO: 50382 - DNA, 25 bp, Homo sapien
ctcataacgaggtcccggacggacc

SEQ ID NO: 50383 - DNA, 25 bp, Homo sapien
ggcacggtccacagcgaaggacact

SEQ ID NO: 50384 - DNA, 25 bp, Homo sapien
ggcacggtccactgcgaaggacact

SEQ ID NO: 50385 - DNA, 25 bp, Homo sapien
gtgtggttaacacgactacatcgaa

SEQ ID NO: 50386 - DNA, 25 bp, Homo sapien
gtgtggttaacaggactacatcgaa

SEQ ID NO: 50387 - DNA, 25 bp, Homo sapien
cttctgaggtgacatccaccttccg

SEQ ID NO: 50388 - DNA, 25 bp, Homo sapien
cttctgaggtgagatccaccttccg

SEQ ID NO: 50389 - DNA, 25 bp, Homo sapien
atggagaaggagacttgaggtctcc

SEQ ID NO: 50390 - DNA, 25 bp, Homo sapien
atggagaaggagtcttgaggtctcc

SEQ ID NO: 50391 - DNA, 25 bp, Homo sapien
cggggtgctacttcgggactcgact

SEQ ID NO: 50392 - DNA, 25 bp, Homo sapien
cggggtgctactacgggactcgact

SEQ ID NO: 50393 - DNA, 25 bp, Homo sapien
aggagtctgacgtttacgggaacac

SEQ ID NO: 50394 - DNA, 25 bp, Homo sapien
aggagtctgacgattacgggaacac

SEQ ID NO: 50395 - DNA, 25 bp, Homo sapien
ggaccgagttcagtatctaccccac

SEQ ID NO: 50396 - DNA, 25 bp, Homo sapien
ggaccgagttcactatctaccccac

SEQ ID NO: 50397 - DNA, 25 bp, Homo sapien
acgagtaaaacattactcgtaccga

SEQ ID NO: 50398 - DNA, 25 bp, Homo sapien
acgagtaaaacaatactcgtaccga

SEQ ID NO: 50399 - DNA, 25 bp, Homo sapien
gagttaataagttaactcgctcact

SEQ ID NO: 50400 - DNA, 25 bp, Homo sapien
gagttaataagtaaactcgctcact

SEQ ID NO: 50401 - DNA, 25 bp, Homo sapien
aacttggtgtaaaatggacttccag

SEQ ID NO: 50402 - DNA, 25 bp, Homo sapien
aacttggtgtaatatggacttccag

SEQ ID NO: 50403 - DNA, 25 bp, Homo sapien
aaataatcgtagttgctgacgtctc

SEQ ID NO: 50404 - DNA, 25 bp, Homo sapien
aaataatcgtagatgctgacgtctc

SEQ ID NO: 50405 - DNA, 25 bp, Homo sapien
ctttattagtaacgtcgtgagtgtc

SEQ ID NO: 50406 - DNA, 25 bp, Homo sapien
ctttattagtaaggtcgtgagtgtc

SEQ ID NO: 50407 - DNA, 25 bp, Homo sapien
acttcttgagagagtcggatactgt

SEQ ID NO: 50408 - DNA, 25 bp, Homo sapien
acttcttgagagtgtcggatactgt

SEQ ID NO: 50409 - DNA, 25 bp, Homo sapien
ccgaaggattcattgttgacgtctt

SEQ ID NO: 50410 - DNA, 25 bp, Homo sapien
ccgaaggattcaatgttgacgtctt

SEQ ID NO: 50411 - DNA, 25 bp, Homo sapien
gaaagcgcacatactgactcgtatt

SEQ ID NO: 50412 - DNA, 25 bp, Homo sapien
gaaagcgcacattctgactcgtatt

SEQ ID NO: 50413 - DNA, 25 bp, Homo sapien
gaaaacgcgaagtcggacgcgtaag

SEQ ID NO: 50414 - DNA, 25 bp, Homo sapien
gaaaacgcgaagacggacgcgtaag

SEQ ID NO: 50415 - DNA, 25 bp, Homo sapien
ccacgacaataaacgccgcggcaag

SEQ ID NO: 50416 - DNA, 25 bp, Homo sapien
ccacgacaataatcgccgcggcaag

SEQ ID NO: 50417 - DNA, 25 bp, Homo sapien
cagaaggtgaggtcctacagtctat

SEQ ID NO: 50418 - DNA, 25 bp, Homo sapien
cagaaggtgaggacctacagtctat

SEQ ID NO: 50419 - DNA, 25 bp, Homo sapien
tgagaggtagtagggacagaggtca

SEQ ID NO: 50420 - DNA, 25 bp, Homo sapien
tgagaggtagtacggacagaggtca

SEQ ID NO: 50421 - DNA, 25 bp, Homo sapien
ccagagtaaacactgacgaaggttt

SEQ ID NO: 50422 - DNA, 25 bp, Homo sapien
ccagagtaaacagtgacgaaggttt

SEQ ID NO: 50423 - DNA, 25 bp, Homo sapien
tacatgtaacaaacttacagggttt

SEQ ID NO: 50424 - DNA, 25 bp, Homo sapien
tacatgtaacaatcttacagggttt

SEQ ID NO: 50425 - DNA, 25 bp, Homo sapien
attttacttcggtcttcagaagttt

SEQ ID NO: 50426 - DNA, 25 bp, Homo sapien
attttacttcggacttcagaagttt

SEQ ID NO: 50427 - DNA, 25 bp, Homo sapien
accttagagatactccacggagttt

SEQ ID NO: 50428 - DNA, 25 bp, Homo sapien
accttagagatagtccacggagttt

SEQ ID NO: 50429 - DNA, 25 bp, Homo sapien
cgcgaggctcaggtccttcgtcgtc

SEQ ID NO: 50430 - DNA, 25 bp, Homo sapien
cgcgaggctcagctccttcgtcgtc

SEQ ID NO: 50431 - DNA, 25 bp, Homo sapien
cttcgagaggtcgtgcccgtcgtcc

SEQ ID NO: 50432 - DNA, 25 bp, Homo sapien
cttcgagaggtcctgcccgtcgtcc

SEQ ID NO: 50433 - DNA, 25 bp, Homo sapien
aaatcggaggtctccgtctctcgcc

SEQ ID NO: 50434 - DNA, 25 bp, Homo sapien
aaatcggaggtcaccgtctctcgcc

SEQ ID NO: 50435 - DNA, 25 bp, Homo sapien
ttggtacggtacactgacttagttc

SEQ ID NO: 50436 - DNA, 25 bp, Homo sapien
ttggtacggtactctgacttagttc

SEQ ID NO: 50437 - DNA, 25 bp, Homo sapien
ttcccgttcagaatgtgagtttatc

SEQ ID NO: 50438 - DNA, 25 bp, Homo sapien
ttcccgttcagattgtgagtttatc

SEQ ID NO: 50439 - DNA, 25 bp, Homo sapien
gtccattgaatgttagactaacttc

SEQ ID NO: 50440 - DNA, 25 bp, Homo sapien
gtccattgaatgatagactaacttc

SEQ ID NO: 50441 - DNA, 25 bp, Homo sapien
tctaaaaacagtaccatagtatgta

SEQ ID NO: 50442 - DNA, 25 bp, Homo sapien
tctaaaaacagttccatagtatgta

SEQ ID NO: 50443 - DNA, 25 bp, Homo sapien
gtctcaaaatacaccgtgtatgttg

SEQ ID NO: 50444 - DNA, 25 bp, Homo sapien
gtctcaaaatactccgtgtatgttg

SEQ ID NO: 50445 - DNA, 25 bp, Homo sapien
ggaccagaaactttacctttgtatt

SEQ ID NO: 50446 - DNA, 25 bp, Homo sapien
ggaccagaaactatacctttgtatt

SEQ ID NO: 50447 - DNA, 25 bp, Homo sapien
ggggacgtgataagttcccaatatt

SEQ ID NO: 50448 - DNA, 25 bp, Homo sapien
ggggacgtgatatgttcccaatatt

SEQ ID NO: 50449 - DNA, 25 bp, Homo sapien
gaggggactagtttactcttgtctt

SEQ ID NO: 50450 - DNA, 25 bp, Homo sapien
gaggggactagtatactcttgtctt

SEQ ID NO: 50451 - DNA, 25 bp, Homo sapien
cagtgttgactcacactctcagaat

SEQ ID NO: 50452 - DNA, 25 bp, Homo sapien
cagtgttgactctcactctcagaat

SEQ ID NO: 50453 - DNA, 25 bp, Homo sapien
gaaccttcagtttctctttagatag

SEQ ID NO: 50454 - DNA, 25 bp, Homo sapien
gaaccttcagttactctttagatag

SEQ ID NO: 50455 - DNA, 25 bp, Homo sapien
cgttcgtaaagttccgttactgtgt

SEQ ID NO: 50456 - DNA, 25 bp, Homo sapien
cgttcgtaaagtaccgttactgtgt

SEQ ID NO: 50457 - DNA, 25 bp, Homo sapien
agccctgtcgacgttgagtgttggt

SEQ ID NO: 50458 - DNA, 25 bp, Homo sapien
agccctgtcgaccttgagtgttggt

SEQ ID NO: 50459 - DNA, 25 bp, Homo sapien
tgaacacaccacctcttgattgtgg

SEQ ID NO: 50460 - DNA, 25 bp, Homo sapien
tgaacacaccacgtcttgattgtgg

SEQ ID NO: 50461 - DNA, 25 bp, Homo sapien
accccgttgtcttttctacgtcgtc

SEQ ID NO: 50462 - DNA, 25 bp, Homo sapien
accccgttgtctattctacgtcgtc

SEQ ID NO: 50463 - DNA, 25 bp, Homo sapien
caacttgtgctaccaagtcttcgtc

SEQ ID NO: 50464 - DNA, 25 bp, Homo sapien
caacttgtgctagcaagtcttcgtc

SEQ ID NO: 50465 - DNA, 25 bp, Homo sapien
tcgggattcgtgtcactgtccaccc

SEQ ID NO: 50466 - DNA, 25 bp, Homo sapien
tcgggattcgtgacactgtccaccc

SEQ ID NO: 50467 - DNA, 25 bp, Homo sapien
gtacacgggcggaaccagaccagga

SEQ ID NO: 50468 - DNA, 25 bp, Homo sapien
gtacacgggcggtaccagaccagga

SEQ ID NO: 50469 - DNA, 25 bp, Homo sapien
tacctcttcgcgtgggtccagtcta

SEQ ID NO: 50470 - DNA, 25 bp, Homo sapien
tacctcttcgcgagggtccagtcta

SEQ ID NO: 50471 - DNA, 25 bp, Homo sapien
ttctcccgggtcatagggaccccgg

SEQ ID NO: 50472 - DNA, 25 bp, Homo sapien
ttctcccgggtcttagggaccccgg

SEQ ID NO: 50473 - DNA, 25 bp, Homo sapien
aaaccttccgtgacccaaaacgcgg

SEQ ID NO: 50474 - DNA, 25 bp, Homo sapien
aaaccttccgtgtcccaaaacgcgg

SEQ ID NO: 50475 - DNA, 25 bp, Homo sapien
cctgttacgatgacccctttatcgg

SEQ ID NO: 50476 - DNA, 25 bp, Homo sapien
cctgttacgatgtcccctttatcgg

SEQ ID NO: 50477 - DNA, 25 bp, Homo sapien
ttataaatgtgccatatgttcgttc

SEQ ID NO: 50478 - DNA, 25 bp, Homo sapien
ttataaatgtgcgatatgttcgttc

SEQ ID NO: 50479 - DNA, 25 bp, Homo sapien
ttgtgacacaaagagatctccgttt

SEQ ID NO: 50480 - DNA, 25 bp, Homo sapien
ttgtgacacaaacagatctccgttt

SEQ ID NO: 50481 - DNA, 25 bp, Homo sapien
ttgttaagactataaacgtgcacat

SEQ ID NO: 50482 - DNA, 25 bp, Homo sapien
ttgttaagactaaaaacgtgcacat

SEQ ID NO: 50483 - DNA, 25 bp, Homo sapien
ggtacaatcagaacggtgtaccagt

SEQ ID NO: 50484 - DNA, 25 bp, Homo sapien
ggtacaatcagatcggtgtaccagt

SEQ ID NO: 50485 - DNA, 25 bp, Homo sapien
gagtgaaccccgaaagacgtccact

SEQ ID NO: 50486 - DNA, 25 bp, Homo sapien
gagtgaaccccgtaagacgtccact

SEQ ID NO: 50487 - DNA, 25 bp, Homo sapien
tcgtgagtccagatatacaacgtca

SEQ ID NO: 50488 - DNA, 25 bp, Homo sapien
tcgtgagtccagttatacaacgtca

SEQ ID NO: 50489 - DNA, 25 bp, Homo sapien
attctggtaccctagcatagcgtag

SEQ ID NO: 50490 - DNA, 25 bp, Homo sapien
attctggtacccaagcatagcgtag

SEQ ID NO: 50491 - DNA, 25 bp, Homo sapien
aatctagtggttcctgactcggtaa

SEQ ID NO: 50492 - DNA, 25 bp, Homo sapien
aatctagtggttgctgactcggtaa

SEQ ID NO: 50493 - DNA, 25 bp, Homo sapien
tcccttagtcctccttcgttggtaa

SEQ ID NO: 50494 - DNA, 25 bp, Homo sapien
tcccttagtcctgcttcgttggtaa

SEQ ID NO: 50495 - DNA, 25 bp, Homo sapien
ccctttctttgtggtagttctagaa

SEQ ID NO: 50496 - DNA, 25 bp, Homo sapien
ccctttctttgtcgtagttctagaa

SEQ ID NO: 50497 - DNA, 25 bp, Homo sapien
acttcttgtctgtgacgacttagaa

SEQ ID NO: 50498 - DNA, 25 bp, Homo sapien
acttcttgtctgagacgacttagaa

SEQ ID NO: 50499 - DNA, 25 bp, Homo sapien
attcccgtgtctttatttacgatag

SEQ ID NO: 50500 - DNA, 25 bp, Homo sapien
attcccgtgtctatatttacgatag

SEQ ID NO: 50501 - DNA, 25 bp, Homo sapien
tttaaagtcttactcgttctaagtg

SEQ ID NO: 50502 - DNA, 25 bp, Homo sapien
tttaaagtcttagtcgttctaagtg

SEQ ID NO: 50503 - DNA, 25 bp, Homo sapien
acttttaaatgatcgtggtttatcc

SEQ ID NO: 50504 - DNA, 25 bp, Homo sapien
acttttaaatgaacgtggtttatcc

SEQ ID NO: 50505 - DNA, 25 bp, Homo sapien
atgtttatagagagtgtccatcctc

SEQ ID NO: 50506 - DNA, 25 bp, Homo sapien
atgtttatagagtgtgtccatcctc

SEQ ID NO: 50507 - DNA, 25 bp, Homo sapien
tagtatgagtaggtccatgtcgtac

SEQ ID NO: 50508 - DNA, 25 bp, Homo sapien
tagtatgagtagctccatgtcgtac

SEQ ID NO: 50509 - DNA, 25 bp, Homo sapien
cacgtagcgtatctccaacgcgtac

SEQ ID NO: 50510 - DNA, 25 bp, Homo sapien
cacgtagcgtatgtccaacgcgtac

SEQ ID NO: 50511 - DNA, 25 bp, Homo sapien
gctcacctagcagaaccgaccggta

SEQ ID NO: 50512 - DNA, 25 bp, Homo sapien
gctcacctagcacaaccgaccggta

SEQ ID NO: 50513 - DNA, 25 bp, Homo sapien
gtccaagaacttcaaccgaaggtag

SEQ ID NO: 50514 - DNA, 25 bp, Homo sapien
gtccaagaacttgaaccgaaggtag

SEQ ID NO: 50515 - DNA, 25 bp, Homo sapien
gacaagaaatctttcgagattctta

SEQ ID NO: 50516 - DNA, 25 bp, Homo sapien
gacaagaaatctatcgagattctta

SEQ ID NO: 50517 - DNA, 25 bp, Homo sapien
gaaaacatagtacttttcattcgga

SEQ ID NO: 50518 - DNA, 25 bp, Homo sapien
gaaaacatagtagttttcattcgga

SEQ ID NO: 50519 - DNA, 25 bp, Homo sapien
ccatcaagactcttttcccgacaga

SEQ ID NO: 50520 - DNA, 25 bp, Homo sapien
ccatcaagactcatttcccgacaga

SEQ ID NO: 50521 - DNA, 25 bp, Homo sapien
catcgagaccaattcttccgtgtaa

SEQ ID NO: 50522 - DNA, 25 bp, Homo sapien
catcgagaccaaatcttccgtgtaa

SEQ ID NO: 50523 - DNA, 25 bp, Homo sapien
agaacttggtaagtgtccttatgac

SEQ ID NO: 50524 - DNA, 25 bp, Homo sapien
agaacttggtaactgtccttatgac

SEQ ID NO: 50525 - DNA, 25 bp, Homo sapien
cttcatcaacgactcgttacggtac

SEQ ID NO: 50526 - DNA, 25 bp, Homo sapien
cttcatcaacgagtcgttacggtac

SEQ ID NO: 50527 - DNA, 25 bp, Homo sapien
cgttctatcttcagccgagttttgc

SEQ ID NO: 50528 - DNA, 25 bp, Homo sapien
cgttctatcttctgccgagttttgc

SEQ ID NO: 50529 - DNA, 25 bp, Homo sapien
gtgttaacatcgatgtggacttttc

SEQ ID NO: 50530 - DNA, 25 bp, Homo sapien
gtgttaacatcgttgtggacttttc

SEQ ID NO: 50531 - DNA, 25 bp, Homo sapien
ttgacaatcgtaaggataacctaca

SEQ ID NO: 50532 - DNA, 25 bp, Homo sapien
ttgacaatcgtatggataacctaca

SEQ ID NO: 50533 - DNA, 25 bp, Homo sapien
tgaatatcgtactgtggtccggata

SEQ ID NO: 50534 - DNA, 25 bp, Homo sapien
tgaatatcgtacagtggtccggata

SEQ ID NO: 50535 - DNA, 25 bp, Homo sapien
taaggtatcgtctctgtctgaggac

SEQ ID NO: 50536 - DNA, 25 bp, Homo sapien
taaggtatcgtcactgtctgaggac

SEQ ID NO: 50537 - DNA, 25 bp, Homo sapien
gaacagatctcagatcgtttatatc

SEQ ID NO: 50538 - DNA, 25 bp, Homo sapien
gaacagatctcacatcgtttatatc

SEQ ID NO: 50539 - DNA, 25 bp, Homo sapien
cgaaagatctcttttgacgttatta

SEQ ID NO: 50540 - DNA, 25 bp, Homo sapien
cgaaagatctctattgacgttatta

SEQ ID NO: 50541 - DNA, 25 bp, Homo sapien
gtcctctgtctcgattgtctcaatc

SEQ ID NO: 50542 - DNA, 25 bp, Homo sapien
gtcctctgtctccattgtctcaatc

SEQ ID NO: 50543 - DNA, 25 bp, Homo sapien
gggtaacctgttctctctttcccta

SEQ ID NO: 50544 - DNA, 25 bp, Homo sapien
gggtaacctgttgtctctttcccta

SEQ ID NO: 50545 - DNA, 25 bp, Homo sapien
caggaaagtgcctcgttgtggtttc

SEQ ID NO: 50546 - DNA, 25 bp, Homo sapien
caggaaagtgccacgttgtggtttc

SEQ ID NO: 50547 - DNA, 25 bp, Homo sapien
atcttatgaatacagtttgggtcct

SEQ ID NO: 50548 - DNA, 25 bp, Homo sapien
atcttatgaatagagtttgggtcct

SEQ ID NO: 50549 - DNA, 25 bp, Homo sapien
tcttggaatgggaaggactctgtct

SEQ ID NO: 50550 - DNA, 25 bp, Homo sapien
tcttggaatgggtaggactctgtct

SEQ ID NO: 50551 - DNA, 25 bp, Homo sapien
agaagtacggagacgcgactcggtc

SEQ ID NO: 50552 - DNA, 25 bp, Homo sapien
agaagtacggagtcgcgactcggtc

SEQ ID NO: 50553 - DNA, 25 bp, Homo sapien
ggaagtctaaggtcgacgaccatgt

SEQ ID NO: 50554 - DNA, 25 bp, Homo sapien
ggaagtctaaggacgacgaccatgt

SEQ ID NO: 50555 - DNA, 25 bp, Homo sapien
tgcgcgtgacgtgcggctccgctcg

SEQ ID NO: 50556 - DNA, 25 bp, Homo sapien
tgcgcgtgacgtccggctccgctcg

SEQ ID NO: 50557 - DNA, 25 bp, Homo sapien
acgtcgggtacggaccgccctcttc

SEQ ID NO: 50558 - DNA, 25 bp, Homo sapien
acgtcgggtacgcaccgccctcttc

SEQ ID NO: 50559 - DNA, 25 bp, Homo sapien
tcctcggagaccaccgagtatttac

SEQ ID NO: 50560 - DNA, 25 bp, Homo sapien
tcctcggagacctccgagtatttac

SEQ ID NO: 50561 - DNA, 25 bp, Homo sapien
accctcgtatcgtgtcgaggtcacc

SEQ ID NO: 50562 - DNA, 25 bp, Homo sapien
accctcgtatcgagtcgaggtcacc

SEQ ID NO: 50563 - DNA, 25 bp, Homo sapien
tctcttaccggtgaaccaggtccat

SEQ ID NO: 50564 - DNA, 25 bp, Homo sapien
tctcttaccggtcaaccaggtccat

SEQ ID NO: 50565 - DNA, 25 bp, Homo sapien
gctgcgcgaccaagtcgagcatcat

SEQ ID NO: 50566 - DNA, 25 bp, Homo sapien
gctgcgcgaccatgtcgagcatcat

SEQ ID NO: 50567 - DNA, 25 bp, Homo sapien
agcgagcgcaagagccgtagggtca

SEQ ID NO: 50568 - DNA, 25 bp, Homo sapien
agcgagcgcaagtgccgtagggtca

SEQ ID NO: 50569 - DNA, 25 bp, Homo sapien
cgacgagaagggtgcacccgagacc

SEQ ID NO: 50570 - DNA, 25 bp, Homo sapien
cgacgagaagggagcacccgagacc

SEQ ID NO: 50571 - DNA, 25 bp, Homo sapien
tatcgacgaaggtgggtcacccggc

SEQ ID NO: 50572 - DNA, 25 bp, Homo sapien
tatcgacgaaggagggtcacccggc

SEQ ID NO: 50573 - DNA, 25 bp, Homo sapien
tttgacgtcaggtaataaccctgaa

SEQ ID NO: 50574 - DNA, 25 bp, Homo sapien
tttgacgtcaggaaataaccctgaa

SEQ ID NO: 50575 - DNA, 25 bp, Homo sapien
ggactgacctaactaactaagtcaa

SEQ ID NO: 50576 - DNA, 25 bp, Homo sapien
ggactgacctaagtaactaagtcaa

SEQ ID NO: 50577 - DNA, 25 bp, Homo sapien
ggacacgaccaagaccggaccttac

SEQ ID NO: 50578 - DNA, 25 bp, Homo sapien
ggacacgaccaacaccggaccttac

SEQ ID NO: 50579 - DNA, 25 bp, Homo sapien
tgttcctaccaaacctttaggttag

SEQ ID NO: 50580 - DNA, 25 bp, Homo sapien
tgttcctaccaatcctttaggttag

SEQ ID NO: 50581 - DNA, 25 bp, Homo sapien
tttgatgtgaatctcctttgttaag

SEQ ID NO: 50582 - DNA, 25 bp, Homo sapien
tttgatgtgaatgtcctttgttaag

SEQ ID NO: 50583 - DNA, 25 bp, Homo sapien
cgtggaggtttcctctttttcctat

SEQ ID NO: 50584 - DNA, 25 bp, Homo sapien
cgtggaggtttcgtctttttcctat

SEQ ID NO: 50585 - DNA, 25 bp, Homo sapien
tggatcgttttcttagattttccat

SEQ ID NO: 50586 - DNA, 25 bp, Homo sapien
tggatcgttttcatagattttccat

SEQ ID NO: 50587 - DNA, 25 bp, Homo sapien
gaatgtcattcattattgagtctca

SEQ ID NO: 50588 - DNA, 25 bp, Homo sapien
gaatgtcattcaatattgagtctca

SEQ ID NO: 50589 - DNA, 25 bp, Homo sapien
actttatgtcaattctgagttatgt

SEQ ID NO: 50590 - DNA, 25 bp, Homo sapien
actttatgtcaaatctgagttatgt

SEQ ID NO: 50591 - DNA, 25 bp, Homo sapien
attttcagacactgttagactaccg

SEQ ID NO: 50592 - DNA, 25 bp, Homo sapien
attttcagacacagttagactaccg

SEQ ID NO: 50593 - DNA, 25 bp, Homo sapien
tatacgtccactttagattgatgac

SEQ ID NO: 50594 - DNA, 25 bp, Homo sapien
tatacgtccactatagattgatgac

SEQ ID NO: 50595 - DNA, 25 bp, Homo sapien
gaagtacaccatgtataactgttgc

SEQ ID NO: 50596 - DNA, 25 bp, Homo sapien
gaagtacaccatctataactgttgc

SEQ ID NO: 50597 - DNA, 25 bp, Homo sapien
cagacgcccgtcctcgatacttttc

SEQ ID NO: 50598 - DNA, 25 bp, Homo sapien
cagacgcccgtcgtcgatacttttc

SEQ ID NO: 50599 - DNA, 25 bp, Homo sapien
tctccgaaggacattctgaatttcc

SEQ ID NO: 50600 - DNA, 25 bp, Homo sapien
tctccgaaggactttctgaatttcc

SEQ ID NO: 50601 - DNA, 25 bp, Homo sapien
tctccctaaacccttgggttctctc

SEQ ID NO: 50602 - DNA, 25 bp, Homo sapien
tctccctaaaccgttgggttctctc

SEQ ID NO: 50603 - DNA, 25 bp, Homo sapien
gacatataagtcttcgtgaggttcg

SEQ ID NO: 50604 - DNA, 25 bp, Homo sapien
gacatataagtcatcgtgaggttcg

SEQ ID NO: 50605 - DNA, 25 bp, Homo sapien
agagcgtaagaccatggcggtgacg

SEQ ID NO: 50606 - DNA, 25 bp, Homo sapien
agagcgtaagacgatggcggtgacg

SEQ ID NO: 50607 - DNA, 25 bp, Homo sapien
accgggtaagcctacgctcagaagt

SEQ ID NO: 50608 - DNA, 25 bp, Homo sapien
accgggtaagccaacgctcagaagt

SEQ ID NO: 50609 - DNA, 25 bp, Homo sapien
gagacggaagaaccacctaccgttg

SEQ ID NO: 50610 - DNA, 25 bp, Homo sapien
gagacggaagaagcacctaccgttg

SEQ ID NO: 50611 - DNA, 25 bp, Homo sapien
ggaagagactgtcgtcgtagtcccg

SEQ ID NO: 50612 - DNA, 25 bp, Homo sapien
ggaagagactgtggtcgtagtcccg

SEQ ID NO: 50613 - DNA, 25 bp, Homo sapien
ggccagacgtacttgtggagtcctc

SEQ ID NO: 50614 - DNA, 25 bp, Homo sapien
ggccagacgtacatgtggagtcctc

SEQ ID NO: 50615 - DNA, 25 bp, Homo sapien
tcgtcggcactcaggtgggtctcac

SEQ ID NO: 50616 - DNA, 25 bp, Homo sapien
tcgtcggcactctggtgggtctcac

SEQ ID NO: 50617 - DNA, 25 bp, Homo sapien
tcactgacgaggactttgggtggat

SEQ ID NO: 50618 - DNA, 25 bp, Homo sapien
tcactgacgaggtctttgggtggat

SEQ ID NO: 50619 - DNA, 25 bp, Homo sapien
aaaaggtccccgacgtcaagactac

SEQ ID NO: 50620 - DNA, 25 bp, Homo sapien
aaaaggtccccgtcgtcaagactac

SEQ ID NO: 50621 - DNA, 25 bp, Homo sapien
acaaagggtcccagcggttaatctc

SEQ ID NO: 50622 - DNA, 25 bp, Homo sapien
acaaagggtccctgcggttaatctc

SEQ ID NO: 50623 - DNA, 25 bp, Homo sapien
gactggagtttctcggatgttattc

SEQ ID NO: 50624 - DNA, 25 bp, Homo sapien
gactggagtttcacggatgttattc

SEQ ID NO: 50625 - DNA, 25 bp, Homo sapien
ggaccgggtagatccgggatttttc

SEQ ID NO: 50626 - DNA, 25 bp, Homo sapien
ggaccgggtagaaccgggatttttc

SEQ ID NO: 50627 - DNA, 25 bp, Homo sapien
attgtgagatgtgtctgttactctc

SEQ ID NO: 50628 - DNA, 25 bp, Homo sapien
attgtgagatgtctctgttactctc

SEQ ID NO: 50629 - DNA, 25 bp, Homo sapien
tctttggagtactgtgatgttaacc

SEQ ID NO: 50630 - DNA, 25 bp, Homo sapien
tctttggagtacagtgatgttaacc

SEQ ID NO: 50631 - DNA, 25 bp, Homo sapien
ataaagtggctcagttagaggaacc

SEQ ID NO: 50632 - DNA, 25 bp, Homo sapien
ataaagtggctctgttagaggaacc

SEQ ID NO: 50633 - DNA, 25 bp, Homo sapien
tcaaaatagaactccgagaggtgaa

SEQ ID NO: 50634 - DNA, 25 bp, Homo sapien
tcaaaatagaacaccgagaggtgaa

SEQ ID NO: 50635 - DNA, 25 bp, Homo sapien
ccaggaacagtctgggtcgacccgg

SEQ ID NO: 50636 - DNA, 25 bp, Homo sapien
ccaggaacagtcagggtcgacccgg

SEQ ID NO: 50637 - DNA, 25 bp, Homo sapien
acggtgcggactactgcaagcccat

SEQ ID NO: 50638 - DNA, 25 bp, Homo sapien
acggtgcggacttctgcaagcccat

SEQ ID NO: 50639 - DNA, 25 bp, Homo sapien
gttagagcgtcacgtcaccacgcca

SEQ ID NO: 50640 - DNA, 25 bp, Homo sapien
gttagagcgtcaggtcaccacgcca

SEQ ID NO: 50641 - DNA, 25 bp, Homo sapien
tctctaaaccttttgatcgtgaaag

SEQ ID NO: 50642 - DNA, 25 bp, Homo sapien
tctctaaaccttatgatcgtgaaag

SEQ ID NO: 50643 - DNA, 25 bp, Homo sapien
gtcctttttcgttcggttcaccgag

SEQ ID NO: 50644 - DNA, 25 bp, Homo sapien
gtcctttttcgtacggttcaccgag

SEQ ID NO: 50645 - DNA, 25 bp, Homo sapien
cacgtagttgtaaacagttacccta

SEQ ID NO: 50646 - DNA, 25 bp, Homo sapien
cacgtagttgtatacagttacccta

SEQ ID NO: 50647 - DNA, 25 bp, Homo sapien
ccgtagtagtgaactaactcatcca

SEQ ID NO: 50648 - DNA, 25 bp, Homo sapien
ccgtagtagtgatctaactcatcca

SEQ ID NO: 50649 - DNA, 25 bp, Homo sapien
cttgactagggagtttcgatgtaac

SEQ ID NO: 50650 - DNA, 25 bp, Homo sapien
cttgactagggactttcgatgtaac

SEQ ID NO: 50651 - DNA, 25 bp, Homo sapien
tttaagtcgggcttctgtgtccggt

SEQ ID NO: 50652 - DNA, 25 bp, Homo sapien
tttaagtcgggcatctgtgtccggt

SEQ ID NO: 50653 - DNA, 25 bp, Homo sapien
tttctttcagtactcgttgtccggt

SEQ ID NO: 50654 - DNA, 25 bp, Homo sapien
tttctttcagtagtcgttgtccggt

SEQ ID NO: 50655 - DNA, 25 bp, Homo sapien
gtttctgtcatagtcgttatccgtc

SEQ ID NO: 50656 - DNA, 25 bp, Homo sapien
gtttctgtcatactcgttatccgtc

SEQ ID NO: 50657 - DNA, 25 bp, Homo sapien
tacccgtaccgatcttcgtgtttgg

SEQ ID NO: 50658 - DNA, 25 bp, Homo sapien
tacccgtaccgaacttcgtgtttgg

SEQ ID NO: 50659 - DNA, 25 bp, Homo sapien
ctgtgtactcgtactttggtttagt

SEQ ID NO: 50660 - DNA, 25 bp, Homo sapien
ctgtgtactcgttctttggtttagt

SEQ ID NO: 50661 - DNA, 25 bp, Homo sapien
gttcctctttcgagtcgtctgtatg

SEQ ID NO: 50662 - DNA, 25 bp, Homo sapien
gttcctctttcgtgtcgtctgtatg

SEQ ID NO: 50663 - DNA, 25 bp, Homo sapien
tactacttcttttcgggttctagct

SEQ ID NO: 50664 - DNA, 25 bp, Homo sapien
tactacttctttacgggttctagct

SEQ ID NO: 50665 - DNA, 25 bp, Homo sapien
tactgacttgtctacttccgtagtc

SEQ ID NO: 50666 - DNA, 25 bp, Homo sapien
tactgacttgtcaacttccgtagtc

SEQ ID NO: 50667 - DNA, 25 bp, Homo sapien
gtcgtccggtcactctcgctagtcg

SEQ ID NO: 50668 - DNA, 25 bp, Homo sapien
gtcgtccggtcagtctcgctagtcg

SEQ ID NO: 50669 - DNA, 25 bp, Homo sapien
taggttttcacgttttccttacgtc

SEQ ID NO: 50670 - DNA, 25 bp, Homo sapien
taggttttcacgatttccttacgtc

SEQ ID NO: 50671 - DNA, 25 bp, Homo sapien
tgtgcacttatatgtttcaactagt

SEQ ID NO: 50672 - DNA, 25 bp, Homo sapien
tgtgcacttataagtttcaactagt

SEQ ID NO: 50673 - DNA, 25 bp, Homo sapien
gtgtgctatgttgagttatgtcctc

SEQ ID NO: 50674 - DNA, 25 bp, Homo sapien
gtgtgctatgttcagttatgtcctc

SEQ ID NO: 50675 - DNA, 25 bp, Homo sapien
tgttctagtacaacaagaagtcctt

SEQ ID NO: 50676 - DNA, 25 bp, Homo sapien
tgttctagtacatcaagaagtcctt

SEQ ID NO: 50677 - DNA, 25 bp, Homo sapien
ataaagaactggaaagggatctcct

SEQ ID NO: 50678 - DNA, 25 bp, Homo sapien
ataaagaactggtaagggatctcct

SEQ ID NO: 50679 - DNA, 25 bp, Homo sapien
aagaactcggtcaccgagacctctc

SEQ ID NO: 50680 - DNA, 25 bp, Homo sapien
aagaactcggtctccgagacctctc

SEQ ID NO: 50681 - DNA, 25 bp, Homo sapien
ttaggtcattatacgtagtacctta

SEQ ID NO: 50682 - DNA, 25 bp, Homo sapien
ttaggtcattattcgtagtacctta

SEQ ID NO: 50683 - DNA, 25 bp, Homo sapien
cctgtatcataagtcgtcttgactg

SEQ ID NO: 50684 - DNA, 25 bp, Homo sapien
cctgtatcataactcgtcttgactg

SEQ ID NO: 50685 - DNA, 25 bp, Homo sapien
tcccttcttgtttgtctctgagtac

SEQ ID NO: 50686 - DNA, 25 bp, Homo sapien
tcccttcttgttagtctctgagtac

SEQ ID NO: 50687 - DNA, 25 bp, Homo sapien
ccgtctaaaccttaaggacgctctc

SEQ ID NO: 50688 - DNA, 25 bp, Homo sapien
ccgtctaaacctaaaggacgctctc

SEQ ID NO: 50689 - DNA, 25 bp, Homo sapien
gtggtgtcaaagacgtgtgttactc

SEQ ID NO: 50690 - DNA, 25 bp, Homo sapien
gtggtgtcaaagtcgtgtgttactc

SEQ ID NO: 50691 - DNA, 25 bp, Homo sapien
aggctcagacactctgtgtagttag

SEQ ID NO: 50692 - DNA, 25 bp, Homo sapien
aggctcagacacactgtgtagttag

SEQ ID NO: 50693 - DNA, 25 bp, Homo sapien
agttcttaaacgactctgagtatag

SEQ ID NO: 50694 - DNA, 25 bp, Homo sapien
agttcttaaacgtctctgagtatag

SEQ ID NO: 50695 - DNA, 25 bp, Homo sapien
ccacggtcgacacagcctgtactgg

SEQ ID NO: 50696 - DNA, 25 bp, Homo sapien
ccacggtcgacagagcctgtactgg

SEQ ID NO: 50697 - DNA, 25 bp, Homo sapien
gaaccgaagaagacgaagctacctg

SEQ ID NO: 50698 - DNA, 25 bp, Homo sapien
gaaccgaagaagtcgaagctacctg

SEQ ID NO: 50699 - DNA, 25 bp, Homo sapien
caaacgaacggttttatgttagcac

SEQ ID NO: 50700 - DNA, 25 bp, Homo sapien
caaacgaacggtattatgttagcac

SEQ ID NO: 50701 - DNA, 25 bp, Homo sapien
aagaaggacctcagttcttattgat

SEQ ID NO: 50702 - DNA, 25 bp, Homo sapien
aagaaggacctctgttcttattgat

SEQ ID NO: 50703 - DNA, 25 bp, Homo sapien
gaggacatctactgtttatagaact

SEQ ID NO: 50704 - DNA, 25 bp, Homo sapien
gaggacatctacagtttatagaact

SEQ ID NO: 50705 - DNA, 25 bp, Homo sapien
gagtagtcacgtatgttggtgtcct

SEQ ID NO: 50706 - DNA, 25 bp, Homo sapien
gagtagtcacgtttgttggtgtcct

SEQ ID NO: 50707 - DNA, 25 bp, Homo sapien
ttgaaactactttcctgtggtcgct

SEQ ID NO: 50708 - DNA, 25 bp, Homo sapien
ttgaaactacttacctgtggtcgct

SEQ ID NO: 50709 - DNA, 25 bp, Homo sapien
ctgttgataatattgactttgttcc

SEQ ID NO: 50710 - DNA, 25 bp, Homo sapien
ctgttgataataatgactttgttcc

SEQ ID NO: 50711 - DNA, 25 bp, Homo sapien
ctggagagaagaaacctctcctcct

SEQ ID NO: 50712 - DNA, 25 bp, Homo sapien
ctggagagaagatacctctcctcct

SEQ ID NO: 50713 - DNA, 25 bp, Homo sapien
ctgtatgaacaagaccctcgtccct

SEQ ID NO: 50714 - DNA, 25 bp, Homo sapien
ctgtatgaacaacaccctcgtccct

SEQ ID NO: 50715 - DNA, 25 bp, Homo sapien
ctgtagtcaagacgtttccgtccct

SEQ ID NO: 50716 - DNA, 25 bp, Homo sapien
ctgtagtcaagaggtttccgtccct

SEQ ID NO: 50717 - DNA, 25 bp, Homo sapien
ccataaagaagaatttcgtcgacga

SEQ ID NO: 50718 - DNA, 25 bp, Homo sapien
ccataaagaagattttcgtcgacga

SEQ ID NO: 50719 - DNA, 25 bp, Homo sapien
ggcgcacaagagtcgaggtcccgcc

SEQ ID NO: 50720 - DNA, 25 bp, Homo sapien
ggcgcacaagagacgaggtcccgcc

SEQ ID NO: 50721 - DNA, 25 bp, Homo sapien
cgtcgagtaggtagagagtccaccc

SEQ ID NO: 50722 - DNA, 25 bp, Homo sapien
cgtcgagtaggttgagagtccaccc

SEQ ID NO: 50723 - DNA, 25 bp, Homo sapien
aactgaagtagttcgggtccccagt

SEQ ID NO: 50724 - DNA, 25 bp, Homo sapien
aactgaagtagtacgggtccccagt

SEQ ID NO: 50725 - DNA, 25 bp, Homo sapien
ggtaccgaagactgagggtgtccca

SEQ ID NO: 50726 - DNA, 25 bp, Homo sapien
ggtaccgaagacagagggtgtccca

SEQ ID NO: 50727 - DNA, 25 bp, Homo sapien
gaaggagaacacgagaacgaccccg

SEQ ID NO: 50728 - DNA, 25 bp, Homo sapien
gaaggagaacaccagaacgaccccg

SEQ ID NO: 50729 - DNA, 25 bp, Homo sapien
caagaaaacaagcaggaatctacct

SEQ ID NO: 50730 - DNA, 25 bp, Homo sapien
caagaaaacaaggaggaatctacct

SEQ ID NO: 50731 - DNA, 25 bp, Homo sapien
acgtagacaaggagtgtttcgagtc

SEQ ID NO: 50732 - DNA, 25 bp, Homo sapien
acgtagacaaggtgtgtttcgagtc

SEQ ID NO: 50733 - DNA, 25 bp, Homo sapien
cagtccaggtgctgtctgtgtaggc

SEQ ID NO: 50734 - DNA, 25 bp, Homo sapien
cagtccaggtgcagtctgtgtaggc

SEQ ID NO: 50735 - DNA, 25 bp, Homo sapien
tgtcagtcggggacccttcgtggac

SEQ ID NO: 50736 - DNA, 25 bp, Homo sapien
tgtcagtcggggtcccttcgtggac

SEQ ID NO: 50737 - DNA, 25 bp, Homo sapien
tatcgggttcgtcattgtctctgag

SEQ ID NO: 50738 - DNA, 25 bp, Homo sapien
tatcgggttcgtgattgtctctgag

SEQ ID NO: 50739 - DNA, 25 bp, Homo sapien
ttcgaagtcgtgatcagtgttctga

SEQ ID NO: 50740 - DNA, 25 bp, Homo sapien
ttcgaagtcgtgttcagtgttctga

SEQ ID NO: 50741 - DNA, 25 bp, Homo sapien
cggttacgtgactcgtagttataat

SEQ ID NO: 50742 - DNA, 25 bp, Homo sapien
cggttacgtgacacgtagttataat

SEQ ID NO: 50743 - DNA, 25 bp, Homo sapien
ccccggtccggagacacgttagaag

SEQ ID NO: 50744 - DNA, 25 bp, Homo sapien
ccccggtccggacacacgttagaag

SEQ ID NO: 50745 - DNA, 25 bp, Homo sapien
aagcagactacgtgtccataagatc

SEQ ID NO: 50746 - DNA, 25 bp, Homo sapien
aagcagactacgagtccataagatc

SEQ ID NO: 50747 - DNA, 25 bp, Homo sapien
cggcaaagggtcgtatgtatacgtc

SEQ ID NO: 50748 - DNA, 25 bp, Homo sapien
cggcaaagggtcctatgtatacgtc

SEQ ID NO: 50749 - DNA, 25 bp, Homo sapien
ccgaaactgggtgtacctagtgtac

SEQ ID NO: 50750 - DNA, 25 bp, Homo sapien
ccgaaactgggtctacctagtgtac

SEQ ID NO: 50751 - DNA, 25 bp, Homo sapien
cacatgctgcgagactgatctggac

SEQ ID NO: 50752 - DNA, 25 bp, Homo sapien
cacatgctgcgacactgatctggac

SEQ ID NO: 50753 - DNA, 25 bp, Homo sapien
gtaccctttgtttgatcttattgac

SEQ ID NO: 50754 - DNA, 25 bp, Homo sapien
gtaccctttgttagatcttattgac

SEQ ID NO: 50755 - DNA, 25 bp, Homo sapien
cctacgtggaggtggtttctgtgac

SEQ ID NO: 50756 - DNA, 25 bp, Homo sapien
cctacgtggaggaggtttctgtgac

SEQ ID NO: 50757 - DNA, 25 bp, Homo sapien
acctcgcgcggaagctcttcttggt

SEQ ID NO: 50758 - DNA, 25 bp, Homo sapien
acctcgcgcggatgctcttcttggt

SEQ ID NO: 50759 - DNA, 25 bp, Homo sapien
ccgtcggtcctattttacttacgtg

SEQ ID NO: 50760 - DNA, 25 bp, Homo sapien
ccgtcggtcctaatttacttacgtg

SEQ ID NO: 50761 - DNA, 25 bp, Homo sapien
ccaagaggtcataagtgtccttatg

SEQ ID NO: 50762 - DNA, 25 bp, Homo sapien
ccaagaggtcattagtgtccttatg

SEQ ID NO: 50763 - DNA, 25 bp, Homo sapien
gatacctcggtcgtgtgtgccatgt

SEQ ID NO: 50764 - DNA, 25 bp, Homo sapien
gatacctcggtcctgtgtgccatgt

SEQ ID NO: 50765 - DNA, 25 bp, Homo sapien
tgagtcactaaaatcatgtaccaag

SEQ ID NO: 50766 - DNA, 25 bp, Homo sapien
tgagtcactaaattcatgtaccaag

SEQ ID NO: 50767 - DNA, 25 bp, Homo sapien
tgacgtccacaacgacccttcggag

SEQ ID NO: 50768 - DNA, 25 bp, Homo sapien
tgacgtccacaaggacccttcggag

SEQ ID NO: 50769 - DNA, 25 bp, Homo sapien
tggtcttcaagatacctttcacgtg

SEQ ID NO: 50770 - DNA, 25 bp, Homo sapien
tggtcttcaagaaacctttcacgtg

SEQ ID NO: 50771 - DNA, 25 bp, Homo sapien
gacttcgtactcaaagacagtttca

SEQ ID NO: 50772 - DNA, 25 bp, Homo sapien
gacttcgtactctaagacagtttca

SEQ ID NO: 50773 - DNA, 25 bp, Homo sapien
gacgtcgagtaagagacgtttctca

SEQ ID NO: 50774 - DNA, 25 bp, Homo sapien
gacgtcgagtaacagacgtttctca

SEQ ID NO: 50775 - DNA, 25 bp, Homo sapien
gttagacatttgaagtacatctgtc

SEQ ID NO: 50776 - DNA, 25 bp, Homo sapien
gttagacatttgtagtacatctgtc

SEQ ID NO: 50777 - DNA, 25 bp, Homo sapien
cactcttcgattgtggacatctgtt

SEQ ID NO: 50778 - DNA, 25 bp, Homo sapien
cactcttcgattctggacatctgtt

SEQ ID NO: 50779 - DNA, 25 bp, Homo sapien
acagtcttacaatatcgtggttttt

SEQ ID NO: 50780 - DNA, 25 bp, Homo sapien
acagtcttacaaaatcgtggttttt

SEQ ID NO: 50781 - DNA, 25 bp, Homo sapien
tagacttacactattttggttactt

SEQ ID NO: 50782 - DNA, 25 bp, Homo sapien
tagacttacacttttttggttactt

SEQ ID NO: 50783 - DNA, 25 bp, Homo sapien
gactgtattcactttcagatattgt

SEQ ID NO: 50784 - DNA, 25 bp, Homo sapien
gactgtattcacattcagatattgt

SEQ ID NO: 50785 - DNA, 25 bp, Homo sapien
agtcttagtttcatctccgttattg

SEQ ID NO: 50786 - DNA, 25 bp, Homo sapien
agtcttagtttcttctccgttattg

SEQ ID NO: 50787 - DNA, 25 bp, Homo sapien
cgttatggtgtgtgacgccactgtc

SEQ ID NO: 50788 - DNA, 25 bp, Homo sapien
cgttatggtgtgagacgccactgtc

SEQ ID NO: 50789 - DNA, 25 bp, Homo sapien
gagcgggaagagcacggtctagtag

SEQ ID NO: 50790 - DNA, 25 bp, Homo sapien
gagcgggaagaggacggtctagtag

SEQ ID NO: 50791 - DNA, 25 bp, Homo sapien
ctgagagaggaagtctaagtcttac

SEQ ID NO: 50792 - DNA, 25 bp, Homo sapien
ctgagagaggaactctaagtcttac

SEQ ID NO: 50793 - DNA, 25 bp, Homo sapien
catacgtatgtgtatgttcttcatc

SEQ ID NO: 50794 - DNA, 25 bp, Homo sapien
catacgtatgtgaatgttcttcatc

SEQ ID NO: 50795 - DNA, 25 bp, Homo sapien
agacttacgagtttgtactttcaga

SEQ ID NO: 50796 - DNA, 25 bp, Homo sapien
agacttacgagtatgtactttcaga

SEQ ID NO: 50797 - DNA, 25 bp, Homo sapien
gtccttctcggagtcctctactggg

SEQ ID NO: 50798 - DNA, 25 bp, Homo sapien
gtccttctcggactcctctactggg

SEQ ID NO: 50799 - DNA, 25 bp, Homo sapien
cacggctcccggtcgtacctgtggt

SEQ ID NO: 50800 - DNA, 25 bp, Homo sapien
cacggctcccggacgtacctgtggt

SEQ ID NO: 50801 - DNA, 25 bp, Homo sapien
ccgagttcaccgacaacttatagtt

SEQ ID NO: 50802 - DNA, 25 bp, Homo sapien
ccgagttcaccgtcaacttatagtt

SEQ ID NO: 50803 - DNA, 25 bp, Homo sapien
aacgttcacacgtactaattgtgtc

SEQ ID NO: 50804 - DNA, 25 bp, Homo sapien
aacgttcacacgaactaattgtgtc

SEQ ID NO: 50805 - DNA, 25 bp, Homo sapien
ccgacccagtgtcctaattccgtgt

SEQ ID NO: 50806 - DNA, 25 bp, Homo sapien
ccgacccagtgtgctaattccgtgt

SEQ ID NO: 50807 - DNA, 25 bp, Homo sapien
cgtacttcagtgtaatgtgacttct

SEQ ID NO: 50808 - DNA, 25 bp, Homo sapien
cgtacttcagtgaaatgtgacttct

SEQ ID NO: 50809 - DNA, 25 bp, Homo sapien
tcttgtcacggagtaggtgtctgtg

SEQ ID NO: 50810 - DNA, 25 bp, Homo sapien
tcttgtcacggactaggtgtctgtg

SEQ ID NO: 50811 - DNA, 25 bp, Homo sapien
agctcctagtcagacccggtgccat

SEQ ID NO: 50812 - DNA, 25 bp, Homo sapien
agctcctagtcacacccggtgccat

SEQ ID NO: 50813 - DNA, 25 bp, Homo sapien
taattcaggtaaaagggttctctac

SEQ ID NO: 50814 - DNA, 25 bp, Homo sapien
taattcaggtaatagggttctctac

SEQ ID NO: 50815 - DNA, 25 bp, Homo sapien
cctgtcctgagaatgtccactgacc

SEQ ID NO: 50816 - DNA, 25 bp, Homo sapien
cctgtcctgagattgtccactgacc

SEQ ID NO: 50817 - DNA, 25 bp, Homo sapien
acctcggacggctttcagtagactc

SEQ ID NO: 50818 - DNA, 25 bp, Homo sapien
acctcggacggcattcagtagactc

SEQ ID NO: 50819 - DNA, 25 bp, Homo sapien
ctctgtgacgggtctcgagtgacct

SEQ ID NO: 50820 - DNA, 25 bp, Homo sapien
ctctgtgacgggactcgagtgacct

SEQ ID NO: 50821 - DNA, 25 bp, Homo sapien
cgaaaagacgtaacatcgaggacga

SEQ ID NO: 50822 - DNA, 25 bp, Homo sapien
cgaaaagacgtatcatcgaggacga

SEQ ID NO: 50823 - DNA, 25 bp, Homo sapien
agacagaaaacattacatctggaac

SEQ ID NO: 50824 - DNA, 25 bp, Homo sapien
agacagaaaacaatacatctggaac

SEQ ID NO: 50825 - DNA, 25 bp, Homo sapien
acagaaaaggtaaccaacggggtcg

SEQ ID NO: 50826 - DNA, 25 bp, Homo sapien
acagaaaaggtatccaacggggtcg

SEQ ID NO: 50827 - DNA, 25 bp, Homo sapien
aaaactaaaggatccaactgattcg

SEQ ID NO: 50828 - DNA, 25 bp, Homo sapien
aaaactaaaggaaccaactgattcg

SEQ ID NO: 50829 - DNA, 25 bp, Homo sapien
aaaagtgtcaaaatagaccaagttc

SEQ ID NO: 50830 - DNA, 25 bp, Homo sapien
aaaagtgtcaaattagaccaagttc

SEQ ID NO: 50831 - DNA, 25 bp, Homo sapien
taaagctacaacttggtcaaaagta

SEQ ID NO: 50832 - DNA, 25 bp, Homo sapien
taaagctacaacatggtcaaaagta

SEQ ID NO: 50833 - DNA, 25 bp, Homo sapien
ctacgacaactctttcaaactatac

SEQ ID NO: 50834 - DNA, 25 bp, Homo sapien
ctacgacaactcattcaaactatac

SEQ ID NO: 50835 - DNA, 25 bp, Homo sapien
ggagaaaatacttttgacacctctc

SEQ ID NO: 50836 - DNA, 25 bp, Homo sapien
ggagaaaatactattgacacctctc

SEQ ID NO: 50837 - DNA, 25 bp, Homo sapien
gtcggaaaaagtaacttgaacctta

SEQ ID NO: 50838 - DNA, 25 bp, Homo sapien
gtcggaaaaagttacttgaacctta

SEQ ID NO: 50839 - DNA, 25 bp, Homo sapien
ataaatttcctcgtagagtcaatgc

SEQ ID NO: 50840 - DNA, 25 bp, Homo sapien
ataaatttcctcctagagtcaatgc

SEQ ID NO: 50841 - DNA, 25 bp, Homo sapien
aggaacaccgaaaggacctcctcta

SEQ ID NO: 50842 - DNA, 25 bp, Homo sapien
aggaacaccgaatggacctcctcta

SEQ ID NO: 50843 - DNA, 25 bp, Homo sapien
agagtcaaccgaatgtgcacatttt

SEQ ID NO: 50844 - DNA, 25 bp, Homo sapien
agagtcaaccgattgtgcacatttt

SEQ ID NO: 50845 - DNA, 25 bp, Homo sapien
aggtataatatcgagcaactcatct

SEQ ID NO: 50846 - DNA, 25 bp, Homo sapien
aggtataatatccagcaactcatct

SEQ ID NO: 50847 - DNA, 25 bp, Homo sapien
agatacttttccaagaagtctagta

SEQ ID NO: 50848 - DNA, 25 bp, Homo sapien
agatacttttcctagaagtctagta

SEQ ID NO: 50849 - DNA, 25 bp, Homo sapien
gagacctttacatccttttcagtcg

SEQ ID NO: 50850 - DNA, 25 bp, Homo sapien
gagacctttacaaccttttcagtcg

SEQ ID NO: 50851 - DNA, 25 bp, Homo sapien
cacctacacaaggtactcttaggcg

SEQ ID NO: 50852 - DNA, 25 bp, Homo sapien
cacctacacaagctactcttaggcg

SEQ ID NO: 50853 - DNA, 25 bp, Homo sapien
tcgagaccgagactcctacgtgtgc

SEQ ID NO: 50854 - DNA, 25 bp, Homo sapien
tcgagaccgagagtcctacgtgtgc

SEQ ID NO: 50855 - DNA, 25 bp, Homo sapien
agttcagaccggtccacgattagac

SEQ ID NO: 50856 - DNA, 25 bp, Homo sapien
agttcagaccggaccacgattagac

SEQ ID NO: 50857 - DNA, 25 bp, Homo sapien
caagaagttaactgtaactaacgta

SEQ ID NO: 50858 - DNA, 25 bp, Homo sapien
caagaagttaacagtaactaacgta

SEQ ID NO: 50859 - DNA, 25 bp, Homo sapien
agcaagactctttggtacaagagtc

SEQ ID NO: 50860 - DNA, 25 bp, Homo sapien
agcaagactcttaggtacaagagtc

SEQ ID NO: 50861 - DNA, 25 bp, Homo sapien
tataagaacttcagtgtaagtaacc

SEQ ID NO: 50862 - DNA, 25 bp, Homo sapien
tataagaacttctgtgtaagtaacc

SEQ ID NO: 50863 - DNA, 25 bp, Homo sapien
aaacagacagtttttcagtagtcac

SEQ ID NO: 50864 - DNA, 25 bp, Homo sapien
aaacagacagttattcagtagtcac

SEQ ID NO: 50865 - DNA, 25 bp, Homo sapien
tactgtcacaaacgtgacgttgaac

SEQ ID NO: 50866 - DNA, 25 bp, Homo sapien
tactgtcacaaaggtgacgttgaac

SEQ ID NO: 50867 - DNA, 25 bp, Homo sapien
gatgttttactcttgggattcatac

SEQ ID NO: 50868 - DNA, 25 bp, Homo sapien
gatgttttactcatgggattcatac

SEQ ID NO: 50869 - DNA, 25 bp, Homo sapien
aatgttgtacgttaagaattccgtc

SEQ ID NO: 50870 - DNA, 25 bp, Homo sapien
aatgttgtacgtaaagaattccgtc

SEQ ID NO: 50871 - DNA, 25 bp, Homo sapien
acgtcgttgtactaaaatgtcatac

SEQ ID NO: 50872 - DNA, 25 bp, Homo sapien
acgtcgttgtacaaaaatgtcatac

SEQ ID NO: 50873 - DNA, 25 bp, Homo sapien
acattgtagactaacgcctcaactg

SEQ ID NO: 50874 - DNA, 25 bp, Homo sapien
acattgtagacttacgcctcaactg

SEQ ID NO: 50875 - DNA, 25 bp, Homo sapien
tcctttgtacgtttctgtgtgagtg

SEQ ID NO: 50876 - DNA, 25 bp, Homo sapien
tcctttgtacgtatctgtgtgagtg

SEQ ID NO: 50877 - DNA, 25 bp, Homo sapien
ccgaccatctgacttctacttaagg

SEQ ID NO: 50878 - DNA, 25 bp, Homo sapien
ccgaccatctgagttctacttaagg

SEQ ID NO: 50879 - DNA, 25 bp, Homo sapien
catagacagtatacgactttgtagg

SEQ ID NO: 50880 - DNA, 25 bp, Homo sapien
catagacagtattcgactttgtagg

SEQ ID NO: 50881 - DNA, 25 bp, Homo sapien
taacgatgaaatacatagtctcccg

SEQ ID NO: 50882 - DNA, 25 bp, Homo sapien
taacgatgaaattcatagtctcccg

SEQ ID NO: 50883 - DNA, 25 bp, Homo sapien
aagtatgtagtcacataaactcctg

SEQ ID NO: 50884 - DNA, 25 bp, Homo sapien
aagtatgtagtctcataaactcctg

SEQ ID NO: 50885 - DNA, 25 bp, Homo sapien
tcaaaagtcgataaacagactcatg

SEQ ID NO: 50886 - DNA, 25 bp, Homo sapien
tcaaaagtcgattaacagactcatg

SEQ ID NO: 50887 - DNA, 25 bp, Homo sapien
gataagtacatattgaacctagtgt

SEQ ID NO: 50888 - DNA, 25 bp, Homo sapien
gataagtacataatgaacctagtgt

SEQ ID NO: 50889 - DNA, 25 bp, Homo sapien
ctggtaaaagtagtttgaacctcat

SEQ ID NO: 50890 - DNA, 25 bp, Homo sapien
ctggtaaaagtactttgaacctcat

SEQ ID NO: 50891 - DNA, 25 bp, Homo sapien
aacgtcaacaggtcctagttgccct

SEQ ID NO: 50892 - DNA, 25 bp, Homo sapien
aacgtcaacaggacctagttgccct

SEQ ID NO: 50893 - DNA, 25 bp, Homo sapien
aagtaagtaacagacataatgcttc

SEQ ID NO: 50894 - DNA, 25 bp, Homo sapien
aagtaagtaacacacataatgcttc

SEQ ID NO: 50895 - DNA, 25 bp, Homo sapien
gaaccaaaagaggtacactctcttc

SEQ ID NO: 50896 - DNA, 25 bp, Homo sapien
gaaccaaaagagctacactctcttc

SEQ ID NO: 50897 - DNA, 25 bp, Homo sapien
gacccgagaagtgagtcgacccctt

SEQ ID NO: 50898 - DNA, 25 bp, Homo sapien
gacccgagaagtcagtcgacccctt

SEQ ID NO: 50899 - DNA, 25 bp, Homo sapien
ccggtcgagacgaaggtacccacag

SEQ ID NO: 50900 - DNA, 25 bp, Homo sapien
ccggtcgagacgtaggtacccacag

SEQ ID NO: 50901 - DNA, 25 bp, Homo sapien
tcttcgagaggtgtgtgtacccgaa

SEQ ID NO: 50902 - DNA, 25 bp, Homo sapien
tcttcgagaggtctgtgtacccgaa

SEQ ID NO: 50903 - DNA, 25 bp, Homo sapien
agtaaaggaagaacgactatccgaa

SEQ ID NO: 50904 - DNA, 25 bp, Homo sapien
agtaaaggaagatcgactatccgaa

SEQ ID NO: 50905 - DNA, 25 bp, Homo sapien
tcagaaatgttcagtaatctcagaa

SEQ ID NO: 50906 - DNA, 25 bp, Homo sapien
tcagaaatgttctgtaatctcagaa

SEQ ID NO: 50907 - DNA, 25 bp, Homo sapien
ccaggagtcaaaggagtttatctat

SEQ ID NO: 50908 - DNA, 25 bp, Homo sapien
ccaggagtcaaacgagtttatctat

SEQ ID NO: 50909 - DNA, 25 bp, Homo sapien
ccaagagaaaatgagttctactctg

SEQ ID NO: 50910 - DNA, 25 bp, Homo sapien
ccaagagaaaatcagttctactctg

SEQ ID NO: 50911 - DNA, 25 bp, Homo sapien
aacggactgctagagtcgtttttca

SEQ ID NO: 50912 - DNA, 25 bp, Homo sapien
aacggactgctacagtcgtttttca

SEQ ID NO: 50913 - DNA, 25 bp, Homo sapien
ccgtttgtcccgaacggttaatctt

SEQ ID NO: 50914 - DNA, 25 bp, Homo sapien
ccgtttgtcccgtacggttaatctt

SEQ ID NO: 50915 - DNA, 25 bp, Homo sapien
aactgtgtatgacttcatgtctttt

SEQ ID NO: 50916 - DNA, 25 bp, Homo sapien
aactgtgtatgagttcatgtctttt

SEQ ID NO: 50917 - DNA, 25 bp, Homo sapien
gaagtggttcacgtcttttgtcctc

SEQ ID NO: 50918 - DNA, 25 bp, Homo sapien
gaagtggttcacctcttttgtcctc

SEQ ID NO: 50919 - DNA, 25 bp, Homo sapien
cgtcgaaggggcacgccatcttcaa

SEQ ID NO: 50920 - DNA, 25 bp, Homo sapien
cgtcgaaggggctcgccatcttcaa

SEQ ID NO: 50921 - DNA, 25 bp, Homo sapien
aaggtgagaggactgtctacctcaa

SEQ ID NO: 50922 - DNA, 25 bp, Homo sapien
aaggtgagaggagtgtctacctcaa

SEQ ID NO: 50923 - DNA, 25 bp, Homo sapien
agtttaggtcatttactcctgacac

SEQ ID NO: 50924 - DNA, 25 bp, Homo sapien
agtttaggtcatatactcctgacac

SEQ ID NO: 50925 - DNA, 25 bp, Homo sapien
cacgctaaagacctatttccggaag

SEQ ID NO: 50926 - DNA, 25 bp, Homo sapien
cacgctaaagacgtatttccggaag

SEQ ID NO: 50927 - DNA, 25 bp, Homo sapien
tatcaggcgtagcttcgcgagtaag

SEQ ID NO: 50928 - DNA, 25 bp, Homo sapien
tatcaggcgtaggttcgcgagtaag

SEQ ID NO: 50929 - DNA, 25 bp, Homo sapien
gttattacagacagtttcactgaac

SEQ ID NO: 50930 - DNA, 25 bp, Homo sapien
gttattacagactgtttcactgaac

SEQ ID NO: 50931 - DNA, 25 bp, Homo sapien
aagtataatcgtctttgtgtcaagc

SEQ ID NO: 50932 - DNA, 25 bp, Homo sapien
aagtataatcgtgtttgtgtcaagc

SEQ ID NO: 50933 - DNA, 25 bp, Homo sapien
actcaagagtcttattgtccaagtc

SEQ ID NO: 50934 - DNA, 25 bp, Homo sapien
actcaagagtctaattgtccaagtc

SEQ ID NO: 50935 - DNA, 25 bp, Homo sapien
gtctatccgtagtgatccctctact

SEQ ID NO: 50936 - DNA, 25 bp, Homo sapien
gtctatccgtagagatccctctact

SEQ ID NO: 50937 - DNA, 25 bp, Homo sapien
gccacttctgggttctgatcctact

SEQ ID NO: 50938 - DNA, 25 bp, Homo sapien
gccacttctgggatctgatcctact

SEQ ID NO: 50939 - DNA, 25 bp, Homo sapien
agactctcctgtcgatgtggtaacc

SEQ ID NO: 50940 - DNA, 25 bp, Homo sapien
agactctcctgtggatgtggtaacc

SEQ ID NO: 50941 - DNA, 25 bp, Homo sapien
cttggtcgtccgtagaaacgtctat

SEQ ID NO: 50942 - DNA, 25 bp, Homo sapien
cttggtcgtccgaagaaacgtctat

SEQ ID NO: 50943 - DNA, 25 bp, Homo sapien
cttgtgtcggagtacgtcggcaagt

SEQ ID NO: 50944 - DNA, 25 bp, Homo sapien
cttgtgtcggagaacgtcggcaagt

SEQ ID NO: 50945 - DNA, 25 bp, Homo sapien
acgcgtgtgcgaccagtaccttcca

SEQ ID NO: 50946 - DNA, 25 bp, Homo sapien
acgcgtgtgcgagcagtaccttcca

SEQ ID NO: 50947 - DNA, 25 bp, Homo sapien
ccgagagtcagaagaatccgtcgtc

SEQ ID NO: 50948 - DNA, 25 bp, Homo sapien
ccgagagtcagatgaatccgtcgtc

SEQ ID NO: 50949 - DNA, 25 bp, Homo sapien
taaggaccgtcaatcggatctttcg

SEQ ID NO: 50950 - DNA, 25 bp, Homo sapien
taaggaccgtcattcggatctttcg

SEQ ID NO: 50951 - DNA, 25 bp, Homo sapien
cttagaaaggagtctagctttgcgt

SEQ ID NO: 50952 - DNA, 25 bp, Homo sapien
cttagaaaggagactagctttgcgt

SEQ ID NO: 50953 - DNA, 25 bp, Homo sapien
tttcttgtgtgtagagactctgttc

SEQ ID NO: 50954 - DNA, 25 bp, Homo sapien
tttcttgtgtgttgagactctgttc

SEQ ID NO: 50955 - DNA, 25 bp, Homo sapien
cagtctcctgttcgaagtatgtcat

SEQ ID NO: 50956 - DNA, 25 bp, Homo sapien
cagtctcctgttggaagtatgtcat

SEQ ID NO: 50957 - DNA, 25 bp, Homo sapien
gatctcctgtgtcgtcgaagtcctt

SEQ ID NO: 50958 - DNA, 25 bp, Homo sapien
gatctcctgtgtggtcgaagtcctt

SEQ ID NO: 50959 - DNA, 25 bp, Homo sapien
tatcaccgaccgtggggtagctcaa

SEQ ID NO: 50960 - DNA, 25 bp, Homo sapien
tatcaccgaccgaggggtagctcaa

SEQ ID NO: 50961 - DNA, 25 bp, Homo sapien
tcctcgacggaagtaggagctacaa

SEQ ID NO: 50962 - DNA, 25 bp, Homo sapien
tcctcgacggaactaggagctacaa

SEQ ID NO: 50963 - DNA, 25 bp, Homo sapien
gtctctggttcgtggggtctccgac

SEQ ID NO: 50964 - DNA, 25 bp, Homo sapien
gtctctggttcgaggggtctccgac

SEQ ID NO: 50965 - DNA, 25 bp, Homo sapien
tgtcctcgattccttcggtgttccc

SEQ ID NO: 50966 - DNA, 25 bp, Homo sapien
tgtcctcgattcgttcggtgttccc

SEQ ID NO: 50967 - DNA, 25 bp, Homo sapien
tcccggattacttcccggtgtgcac

SEQ ID NO: 50968 - DNA, 25 bp, Homo sapien
tcccggattactacccggtgtgcac

SEQ ID NO: 50969 - DNA, 25 bp, Homo sapien
ttgaccgtcaagtcacccggtggcc

SEQ ID NO: 50970 - DNA, 25 bp, Homo sapien
ttgaccgtcaagacacccggtggcc

SEQ ID NO: 50971 - DNA, 25 bp, Homo sapien
tgagagaggacacaagtcctttttc

SEQ ID NO: 50972 - DNA, 25 bp, Homo sapien
tgagagaggacagaagtcctttttc

SEQ ID NO: 50973 - DNA, 25 bp, Homo sapien
tgtggtagtggtaccgttgtctttc

SEQ ID NO: 50974 - DNA, 25 bp, Homo sapien
tgtggtagtggttccgttgtctttc

SEQ ID NO: 50975 - DNA, 25 bp, Homo sapien
gcgggttcgttcagttcgctgtcgc

SEQ ID NO: 50976 - DNA, 25 bp, Homo sapien
gcgggttcgttctgttcgctgtcgc

SEQ ID NO: 50977 - DNA, 25 bp, Homo sapien
agggtcggtccgacagaacctgtga

SEQ ID NO: 50978 - DNA, 25 bp, Homo sapien
agggtcggtccgtcagaacctgtga

SEQ ID NO: 50979 - DNA, 25 bp, Homo sapien
gccgggcccgtccataaactcgtgg

SEQ ID NO: 50980 - DNA, 25 bp, Homo sapien
gccgggcccgtcgataaactcgtgg

SEQ ID NO: 50981 - DNA, 25 bp, Homo sapien
gaccgacgttgagcacgagtctgag

SEQ ID NO: 50982 - DNA, 25 bp, Homo sapien
gaccgacgttgaccacgagtctgag

SEQ ID NO: 50983 - DNA, 25 bp, Homo sapien
gacagctactgtacggacggtgtag

SEQ ID NO: 50984 - DNA, 25 bp, Homo sapien
gacagctactgttcggacggtgtag

SEQ ID NO: 50985 - DNA, 25 bp, Homo sapien
gaagagaccggtcctgtccggatga

SEQ ID NO: 50986 - DNA, 25 bp, Homo sapien
gaagagaccggtgctgtccggatga

SEQ ID NO: 50987 - DNA, 25 bp, Homo sapien
caagtagaggaagtggacagaccga

SEQ ID NO: 50988 - DNA, 25 bp, Homo sapien
caagtagaggaactggacagaccga

SEQ ID NO: 50989 - DNA, 25 bp, Homo sapien
cctaatgtaggacattcatgcttct

SEQ ID NO: 50990 - DNA, 25 bp, Homo sapien
cctaatgtaggagattcatgcttct

SEQ ID NO: 50991 - DNA, 25 bp, Homo sapien
taaagaggaactttcttgtcttact

SEQ ID NO: 50992 - DNA, 25 bp, Homo sapien
taaagaggaactatcttgtcttact

SEQ ID NO: 50993 - DNA, 25 bp, Homo sapien
atgatatgggaaacacttatttctc

SEQ ID NO: 50994 - DNA, 25 bp, Homo sapien
atgatatgggaatcacttatttctc

SEQ ID NO: 50995 - DNA, 25 bp, Homo sapien
gtcttacctcgtgtctcccttgttt

SEQ ID NO: 50996 - DNA, 25 bp, Homo sapien
gtcttacctcgtctctcccttgttt

SEQ ID NO: 50997 - DNA, 25 bp, Homo sapien
taacaaggtcccttcctcgttattg

SEQ ID NO: 50998 - DNA, 25 bp, Homo sapien
taacaaggtcccatcctcgttattg

SEQ ID NO: 50999 - DNA, 25 bp, Homo sapien
tcacagagtgctgtatcttattaat

SEQ ID NO: 51000 - DNA, 25 bp, Homo sapien
tcacagagtgctctatcttattaat

SEQ ID NO: 51001 - DNA, 25 bp, Homo sapien
ccgcgagtgcactggctctatcaaa

SEQ ID NO: 51002 - DNA, 25 bp, Homo sapien
ccgcgagtgcacaggctctatcaaa

SEQ ID NO: 51003 - DNA, 25 bp, Homo sapien
tcacgtgtttcactcgagtctcgaa

SEQ ID NO: 51004 - DNA, 25 bp, Homo sapien
tcacgtgtttcagtcgagtctcgaa

SEQ ID NO: 51005 - DNA, 25 bp, Homo sapien
tcctcgtccctggttttacgacggt

SEQ ID NO: 51006 - DNA, 25 bp, Homo sapien
tcctcgtccctgcttttacgacggt

SEQ ID NO: 51007 - DNA, 25 bp, Homo sapien
ctacctccgtcggtccgtctggccc

SEQ ID NO: 51008 - DNA, 25 bp, Homo sapien
ctacctccgtcgctccgtctggccc

SEQ ID NO: 51009 - DNA, 25 bp, Homo sapien
ttatactaagtgtcccgtgaggctc

SEQ ID NO: 51010 - DNA, 25 bp, Homo sapien
ttatactaagtgacccgtgaggctc

SEQ ID NO: 51011 - DNA, 25 bp, Homo sapien
taacagagtccaaggagcggactct

SEQ ID NO: 51012 - DNA, 25 bp, Homo sapien
taacagagtccatggagcggactct

SEQ ID NO: 51013 - DNA, 25 bp, Homo sapien
tctacagttccacgataagtgactt

SEQ ID NO: 51014 - DNA, 25 bp, Homo sapien
tctacagttccaggataagtgactt

SEQ ID NO: 51015 - DNA, 25 bp, Homo sapien
cgaacgtcgaacaaccaacttaccg

SEQ ID NO: 51016 - DNA, 25 bp, Homo sapien
cgaacgtcgaactaccaacttaccg

SEQ ID NO: 51017 - DNA, 25 bp, Homo sapien
atgagcaaggacactgtgactttcc

SEQ ID NO: 51018 - DNA, 25 bp, Homo sapien
atgagcaaggactctgtgactttcc

SEQ ID NO: 51019 - DNA, 25 bp, Homo sapien
tcggggtgctacttcgggactcgac

SEQ ID NO: 51020 - DNA, 25 bp, Homo sapien
tcggggtgctacatcgggactcgac

SEQ ID NO: 51021 - DNA, 25 bp, Homo sapien
ccgggttgactttgcggtagtacac

SEQ ID NO: 51022 - DNA, 25 bp, Homo sapien
ccgggttgacttagcggtagtacac

SEQ ID NO: 51023 - DNA, 25 bp, Homo sapien
gcgtcggagttcatctgatccttca

SEQ ID NO: 51024 - DNA, 25 bp, Homo sapien
gcgtcggagttcttctgatccttca

SEQ ID NO: 51025 - DNA, 25 bp, Homo sapien
ccgagtgattcagtctcgacctact

SEQ ID NO: 51026 - DNA, 25 bp, Homo sapien
ccgagtgattcactctcgacctact

SEQ ID NO: 51027 - DNA, 25 bp, Homo sapien
agagttaataagttaactcgctcac

SEQ ID NO: 51028 - DNA, 25 bp, Homo sapien
agagttaataagataactcgctcac

SEQ ID NO: 51029 - DNA, 25 bp, Homo sapien
actggcgtgaaagaggactttctag

SEQ ID NO: 51030 - DNA, 25 bp, Homo sapien
actggcgtgaaacaggactttctag

SEQ ID NO: 51031 - DNA, 25 bp, Homo sapien
taaataaaggtatgtgacttcgtcc

SEQ ID NO: 51032 - DNA, 25 bp, Homo sapien
taaataaaggtaagtgacttcgtcc

SEQ ID NO: 51033 - DNA, 25 bp, Homo sapien
cgtttctgttcagtcgtgagtgtct

SEQ ID NO: 51034 - DNA, 25 bp, Homo sapien
cgtttctgttcactcgtgagtgtct

SEQ ID NO: 51035 - DNA, 25 bp, Homo sapien
cttcttagacgcactcgacatcgtg

SEQ ID NO: 51036 - DNA, 25 bp, Homo sapien
cttcttagacgctctcgacatcgtg

SEQ ID NO: 51037 - DNA, 25 bp, Homo sapien
gccggggtttccttcgggagtctct

SEQ ID NO: 51038 - DNA, 25 bp, Homo sapien
gccggggtttccatcgggagtctct

SEQ ID NO: 51039 - DNA, 25 bp, Homo sapien
gaggagtccacattatgctacatgt

SEQ ID NO: 51040 - DNA, 25 bp, Homo sapien
gaggagtccacaatatgctacatgt

SEQ ID NO: 51041 - DNA, 25 bp, Homo sapien
gggaaccgagagtcacaacgtagag

SEQ ID NO: 51042 - DNA, 25 bp, Homo sapien
gggaaccgagagacacaacgtagag

SEQ ID NO: 51043 - DNA, 25 bp, Homo sapien
caccgaaactgaagccgacagaaga

SEQ ID NO: 51044 - DNA, 25 bp, Homo sapien
caccgaaactgatgccgacagaaga

SEQ ID NO: 51045 - DNA, 25 bp, Homo sapien
ggacagcgtgggtcacgtatatcat

SEQ ID NO: 51046 - DNA, 25 bp, Homo sapien
ggacagcgtgggacacgtatatcat

SEQ ID NO: 51047 - DNA, 25 bp, Homo sapien
agcggtgtacggtacaaagtctagt

SEQ ID NO: 51048 - DNA, 25 bp, Homo sapien
agcggtgtacggaacaaagtctagt

SEQ ID NO: 51049 - DNA, 25 bp, Homo sapien
ccgacgggatcactagaaagacttt

SEQ ID NO: 51050 - DNA, 25 bp, Homo sapien
ccgacgggatcagtagaaagacttt

SEQ ID NO: 51051 - DNA, 25 bp, Homo sapien
ctacatagaccaaccaaagaggttt

SEQ ID NO: 51052 - DNA, 25 bp, Homo sapien
ctacatagaccatccaaagaggttt

SEQ ID NO: 51053 - DNA, 25 bp, Homo sapien
tttgtgtcctagtcaacaagagttt

SEQ ID NO: 51054 - DNA, 25 bp, Homo sapien
tttgtgtcctagacaacaagagttt

SEQ ID NO: 51055 - DNA, 25 bp, Homo sapien
gcttagtctagtctcacaccagctt

SEQ ID NO: 51056 - DNA, 25 bp, Homo sapien
gcttagtctagtgtcacaccagctt

SEQ ID NO: 51057 - DNA, 25 bp, Homo sapien
gagtcgtctcgacctcctgtcgttc

SEQ ID NO: 51058 - DNA, 25 bp, Homo sapien
gagtcgtctcgagctcctgtcgttc

SEQ ID NO: 51059 - DNA, 25 bp, Homo sapien
ctccgaggtgtcgtagcgccggctc

SEQ ID NO: 51060 - DNA, 25 bp, Homo sapien
ctccgaggtgtcctagcgccggctc

SEQ ID NO: 51061 - DNA, 25 bp, Homo sapien
accggaggtctgtcgtctcgtgtcc

SEQ ID NO: 51062 - DNA, 25 bp, Homo sapien
accggaggtctgacgtctcgtgtcc

SEQ ID NO: 51063 - DNA, 25 bp, Homo sapien
gttcgaagtgttgtgtctgtgtctc

SEQ ID NO: 51064 - DNA, 25 bp, Homo sapien
gttcgaagtgttctgtctgtgtctc

SEQ ID NO: 51065 - DNA, 25 bp, Homo sapien
gtgacgtccttcatttgtgattttc

SEQ ID NO: 51066 - DNA, 25 bp, Homo sapien
gtgacgtccttcttttgtgattttc

SEQ ID NO: 51067 - DNA, 25 bp, Homo sapien
gtgacattcgaaagaggacttcttg

SEQ ID NO: 51068 - DNA, 25 bp, Homo sapien
gtgacattcgaatgaggacttcttg

SEQ ID NO: 51069 - DNA, 25 bp, Homo sapien
tcacagttaaagacaagtgtctgtc

SEQ ID NO: 51070 - DNA, 25 bp, Homo sapien
tcacagttaaagtcaagtgtctgtc

SEQ ID NO: 51071 - DNA, 25 bp, Homo sapien
gtcacaaagatctcacgtgacttgg

SEQ ID NO: 51072 - DNA, 25 bp, Homo sapien
gtcacaaagatcacacgtgacttgg

SEQ ID NO: 51073 - DNA, 25 bp, Homo sapien
gactacagtaaataaccgtgttttt

SEQ ID NO: 51074 - DNA, 25 bp, Homo sapien
gactacagtaaaaaaccgtgttttt

SEQ ID NO: 51075 - DNA, 25 bp, Homo sapien
caggaagtgactaattcccttattt

SEQ ID NO: 51076 - DNA, 25 bp, Homo sapien
caggaagtgacttattcccttattt

SEQ ID NO: 51077 - DNA, 25 bp, Homo sapien
caaagggtcatatttacttttcgtt

SEQ ID NO: 51078 - DNA, 25 bp, Homo sapien
caaagggtcataattacttttcgtt

SEQ ID NO: 51079 - DNA, 25 bp, Homo sapien
cgaggggactacgtaactttataat

SEQ ID NO: 51080 - DNA, 25 bp, Homo sapien
cgaggggactacctaactttataat

SEQ ID NO: 51081 - DNA, 25 bp, Homo sapien
agacctgtaacttgcctcttagaag

SEQ ID NO: 51082 - DNA, 25 bp, Homo sapien
agacctgtaactagcctcttagaag

SEQ ID NO: 51083 - DNA, 25 bp, Homo sapien
ctcgtgtagtagttgtgcctttgtg

SEQ ID NO: 51084 - DNA, 25 bp, Homo sapien
ctcgtgtagtagatgtgcctttgtg

SEQ ID NO: 51085 - DNA, 25 bp, Homo sapien
accagtgtacgagtggattcggtgt

SEQ ID NO: 51086 - DNA, 25 bp, Homo sapien
accagtgtacgactggattcggtgt

SEQ ID NO: 51087 - DNA, 25 bp, Homo sapien
acacactcgagactgagattccgtg

SEQ ID NO: 51088 - DNA, 25 bp, Homo sapien
acacactcgagagtgagattccgtg

SEQ ID NO: 51089 - DNA, 25 bp, Homo sapien
ctaccccgttgtcttttctacgtcg

SEQ ID NO: 51090 - DNA, 25 bp, Homo sapien
ctaccccgttgtgttttctacgtcg

SEQ ID NO: 51091 - DNA, 25 bp, Homo sapien
cacattgccgtcgattacctacgtg

SEQ ID NO: 51092 - DNA, 25 bp, Homo sapien
cacattgccgtccattacctacgtg

SEQ ID NO: 51093 - DNA, 25 bp, Homo sapien
gatggaattctttcaccgtaccccc

SEQ ID NO: 51094 - DNA, 25 bp, Homo sapien
gatggaattcttacaccgtaccccc

SEQ ID NO: 51095 - DNA, 25 bp, Homo sapien
acgtcgggacggacccgaacaggac

SEQ ID NO: 51096 - DNA, 25 bp, Homo sapien
acgtcgggacggtcccgaacaggac

SEQ ID NO: 51097 - DNA, 25 bp, Homo sapien
atacccgtgggttcgggtccggtca

SEQ ID NO: 51098 - DNA, 25 bp, Homo sapien
atacccgtgggtacgggtccggtca

SEQ ID NO: 51099 - DNA, 25 bp, Homo sapien
acttccgggtctctggaccgtccgg

SEQ ID NO: 51100 - DNA, 25 bp, Homo sapien
acttccgggtctgtggaccgtccgg

SEQ ID NO: 51101 - DNA, 25 bp, Homo sapien
aacccggggcgactgacaaacgcgg

SEQ ID NO: 51102 - DNA, 25 bp, Homo sapien
aacccggggcgagtgacaaacgcgg

SEQ ID NO: 51103 - DNA, 25 bp, Homo sapien
ctcctgtaacggacccatttgtcgg

SEQ ID NO: 51104 - DNA, 25 bp, Homo sapien
ctcctgtaacggtcccatttgtcgg

SEQ ID NO: 51105 - DNA, 25 bp, Homo sapien
ttaaaatcgttctcagttgtagttc

SEQ ID NO: 51106 - DNA, 25 bp, Homo sapien
ttaaaatcgttcacagttgtagttc

SEQ ID NO: 51107 - DNA, 25 bp, Homo sapien
ttctgtaaaccacagaacttggttt

SEQ ID NO: 51108 - DNA, 25 bp, Homo sapien
ttctgtaaaccagagaacttggttt

SEQ ID NO: 51109 - DNA, 25 bp, Homo sapien
tagttacgcacataacacgggtcat

SEQ ID NO: 51110 - DNA, 25 bp, Homo sapien
tagttacgcacaaaacacgggtcat

SEQ ID NO: 51111 - DNA, 25 bp, Homo sapien
cggtacaacgtccaaggttaccggt

SEQ ID NO: 51112 - DNA, 25 bp, Homo sapien
cggtacaacgtcgaaggttaccggt

SEQ ID NO: 51113 - DNA, 25 bp, Homo sapien
acggaacctccgatagtaatgacat

SEQ ID NO: 51114 - DNA, 25 bp, Homo sapien
acggaacctccgttagtaatgacat

SEQ ID NO: 51115 - DNA, 25 bp, Homo sapien
cggactcggtagtgtacgatagtca

SEQ ID NO: 51116 - DNA, 25 bp, Homo sapien
cggactcggtagagtacgatagtca

SEQ ID NO: 51117 - DNA, 25 bp, Homo sapien
atttgactccgtttcgacgataggg

SEQ ID NO: 51118 - DNA, 25 bp, Homo sapien
atttgactccgtatcgacgataggg

SEQ ID NO: 51119 - DNA, 25 bp, Homo sapien
aatatgggttgatgtacgtcagaca

SEQ ID NO: 51120 - DNA, 25 bp, Homo sapien
aatatgggttgaagtacgtcagaca

SEQ ID NO: 51121 - DNA, 25 bp, Homo sapien
gcgcttacccgtcttacttcggaca

SEQ ID NO: 51122 - DNA, 25 bp, Homo sapien
gcgcttacccgtgttacttcggaca

SEQ ID NO: 51123 - DNA, 25 bp, Homo sapien
ccttcatttgtcatgtgtctagaga

SEQ ID NO: 51124 - DNA, 25 bp, Homo sapien
ccttcatttgtcttgtgtctagaga

SEQ ID NO: 51125 - DNA, 25 bp, Homo sapien
cttttgtctcgttgagatgtaacta

SEQ ID NO: 51126 - DNA, 25 bp, Homo sapien
cttttgtctcgtagagatgtaacta

SEQ ID NO: 51127 - DNA, 25 bp, Homo sapien
gactttttctcttgacgtttacatg

SEQ ID NO: 51128 - DNA, 25 bp, Homo sapien
gactttttctctagacgtttacatg

SEQ ID NO: 51129 - DNA, 25 bp, Homo sapien
ttttaatttaccggtgtctaactgt

SEQ ID NO: 51130 - DNA, 25 bp, Homo sapien
ttttaatttacccgtgtctaactgt

SEQ ID NO: 51131 - DNA, 25 bp, Homo sapien
atgtttaaatgttccagtctttgac

SEQ ID NO: 51132 - DNA, 25 bp, Homo sapien
atgtttaaatgtaccagtctttgac

SEQ ID NO: 51133 - DNA, 25 bp, Homo sapien
gtgtctataaagaagtcccttcctt

SEQ ID NO: 51134 - DNA, 25 bp, Homo sapien
gtgtctataaagtagtcccttcctt

SEQ ID NO: 51135 - DNA, 25 bp, Homo sapien
gattatagggtatctaccacttcct

SEQ ID NO: 51136 - DNA, 25 bp, Homo sapien
gattatagggtaactaccacttcct

SEQ ID NO: 51137 - DNA, 25 bp, Homo sapien
cccactacggttctcctaacagtag

SEQ ID NO: 51138 - DNA, 25 bp, Homo sapien
cccactacggttgtcctaacagtag

SEQ ID NO: 51139 - DNA, 25 bp, Homo sapien
gaacacctccattgtccgtaccgga

SEQ ID NO: 51140 - DNA, 25 bp, Homo sapien
gaacacctccatagtccgtaccgga

SEQ ID NO: 51141 - DNA, 25 bp, Homo sapien
gttacaattctattaaccaacggtg

SEQ ID NO: 51142 - DNA, 25 bp, Homo sapien
gttacaattctaataaccaacggtg

SEQ ID NO: 51143 - DNA, 25 bp, Homo sapien
aaacgaaatacttttacacatcctt

SEQ ID NO: 51144 - DNA, 25 bp, Homo sapien
aaacgaaatactattacacatcctt

SEQ ID NO: 51145 - DNA, 25 bp, Homo sapien
aaaaaaaaacttactccttcgagag

SEQ ID NO: 51146 - DNA, 25 bp, Homo sapien
aaaaaaaaactttctccttcgagag

SEQ ID NO: 51147 - DNA, 25 bp, Homo sapien
acgtcattaagattatttcctcaaa

SEQ ID NO: 51148 - DNA, 25 bp, Homo sapien
acgtcattaagaatatttcctcaaa

SEQ ID NO: 51149 - DNA, 25 bp, Homo sapien
atcgagaccaattcttccgtgtaag

SEQ ID NO: 51150 - DNA, 25 bp, Homo sapien
atcgagaccaatacttccgtgtaag

SEQ ID NO: 51151 - DNA, 25 bp, Homo sapien
agatatcttgaagtgtcatttcgac

SEQ ID NO: 51152 - DNA, 25 bp, Homo sapien
agatatcttgaactgtcatttcgac

SEQ ID NO: 51153 - DNA, 25 bp, Homo sapien
ctttcccaacgtcgtcgttccgtag

SEQ ID NO: 51154 - DNA, 25 bp, Homo sapien
ctttcccaacgtggtcgttccgtag

SEQ ID NO: 51155 - DNA, 25 bp, Homo sapien
ttcttccgtctggtggtttgtcgtg

SEQ ID NO: 51156 - DNA, 25 bp, Homo sapien
ttcttccgtctgctggtttgtcgtg

SEQ ID NO: 51157 - DNA, 25 bp, Homo sapien
gtgtctaaatacaatacggtttttc

SEQ ID NO: 51158 - DNA, 25 bp, Homo sapien
gtgtctaaatactatacggtttttc

SEQ ID NO: 51159 - DNA, 25 bp, Homo sapien
tgtctgaaatcaaggcaagttacta

SEQ ID NO: 51160 - DNA, 25 bp, Homo sapien
tgtctgaaatcatggcaagttacta

SEQ ID NO: 51161 - DNA, 25 bp, Homo sapien
tgagatgcgactacggcagagtata

SEQ ID NO: 51162 - DNA, 25 bp, Homo sapien
tgagatgcgacttcggcagagtata

SEQ ID NO: 51163 - DNA, 25 bp, Homo sapien
aaggtatgtctgttgtcggaacgac

SEQ ID NO: 51164 - DNA, 25 bp, Homo sapien
aaggtatgtctgatgtcggaacgac

SEQ ID NO: 51165 - DNA, 25 bp, Homo sapien
gacaagatccgacatcgttcctacc

SEQ ID NO: 51166 - DNA, 25 bp, Homo sapien
gacaagatccgagatcgttcctacc

SEQ ID NO: 51167 - DNA, 25 bp, Homo sapien
tggaaagtttctaattcgagtttcc

SEQ ID NO: 51168 - DNA, 25 bp, Homo sapien
tggaaagtttcttattcgagtttcc

SEQ ID NO: 51169 - DNA, 25 bp, Homo sapien
cctagtgttcgatcttgttcaactc

SEQ ID NO: 51170 - DNA, 25 bp, Homo sapien
cctagtgttcgaacttgttcaactc

SEQ ID NO: 51171 - DNA, 25 bp, Homo sapien
gaatgacagtttcgatctttccctc

SEQ ID NO: 51172 - DNA, 25 bp, Homo sapien
gaatgacagtttggatctttccctc

SEQ ID NO: 51173 - DNA, 25 bp, Homo sapien
aggaaaggaccgttttgttctgttc

SEQ ID NO: 51174 - DNA, 25 bp, Homo sapien
aggaaaggaccgatttgttctgttc

SEQ ID NO: 51175 - DNA, 25 bp, Homo sapien
cgttatgtcataattgttgggtctc

SEQ ID NO: 51176 - DNA, 25 bp, Homo sapien
cgttatgtcatatttgttgggtctc

SEQ ID NO: 51177 - DNA, 25 bp, Homo sapien
cttcggtgatggtagaggagcttac

SEQ ID NO: 51178 - DNA, 25 bp, Homo sapien
cttcggtgatggaagaggagcttac

SEQ ID NO: 51179 - DNA, 25 bp, Homo sapien
aaggaagacggagtaggactccgac

SEQ ID NO: 51180 - DNA, 25 bp, Homo sapien
aaggaagacggactaggactccgac

SEQ ID NO: 51181 - DNA, 25 bp, Homo sapien
cggaatcagtggtaggtaccatagt

SEQ ID NO: 51182 - DNA, 25 bp, Homo sapien
cggaatcagtggaaggtaccatagt

SEQ ID NO: 51183 - DNA, 25 bp, Homo sapien
aagaggtgacgtgacgcctaccacc

SEQ ID NO: 51184 - DNA, 25 bp, Homo sapien
aagaggtgacgtcacgcctaccacc

SEQ ID NO: 51185 - DNA, 25 bp, Homo sapien
gacacgaagacgaacacccctgttc

SEQ ID NO: 51186 - DNA, 25 bp, Homo sapien
gacacgaagacgtacacccctgttc

SEQ ID NO: 51187 - DNA, 25 bp, Homo sapien
gtcaccggacccaccgagacttatg

SEQ ID NO: 51188 - DNA, 25 bp, Homo sapien
gtcaccggaccctccgagacttatg

SEQ ID NO: 51189 - DNA, 25 bp, Homo sapien
agaccctgtctgtgacgaggttaca

SEQ ID NO: 51190 - DNA, 25 bp, Homo sapien
agaccctgtctgagacgaggttaca

SEQ ID NO: 51191 - DNA, 25 bp, Homo sapien
gtgtccccggtgacgcacgagctca

SEQ ID NO: 51192 - DNA, 25 bp, Homo sapien
gtgtccccggtgtcgcacgagctca

SEQ ID NO: 51193 - DNA, 25 bp, Homo sapien
ttgtccccgactagtgtcagccgca

SEQ ID NO: 51194 - DNA, 25 bp, Homo sapien
ttgtccccgacttgtgtcagccgca

SEQ ID NO: 51195 - DNA, 25 bp, Homo sapien
aggagccacgatgtccgtgacggcc

SEQ ID NO: 51196 - DNA, 25 bp, Homo sapien
aggagccacgatctccgtgacggcc

SEQ ID NO: 51197 - DNA, 25 bp, Homo sapien
gagagacgaggttccacccggtacc

SEQ ID NO: 51198 - DNA, 25 bp, Homo sapien
gagagacgaggtaccacccggtacc

SEQ ID NO: 51199 - DNA, 25 bp, Homo sapien
tcacgacgaaggcggcgtccggggc

SEQ ID NO: 51200 - DNA, 25 bp, Homo sapien
tcacgacgaagggggcgtccggggc

SEQ ID NO: 51201 - DNA, 25 bp, Homo sapien
gttgacgacagagaaaacccaaagt

SEQ ID NO: 51202 - DNA, 25 bp, Homo sapien
gttgacgacagacaaaacccaaagt

SEQ ID NO: 51203 - DNA, 25 bp, Homo sapien
gaacgacactcacagaccacgcaac

SEQ ID NO: 51204 - DNA, 25 bp, Homo sapien
gaacgacactcagagaccacgcaac

SEQ ID NO: 51205 - DNA, 25 bp, Homo sapien
gagacaacccaaggaccctacctta

SEQ ID NO: 51206 - DNA, 25 bp, Homo sapien
gagacaacccaacgaccctacctta

SEQ ID NO: 51207 - DNA, 25 bp, Homo sapien
gtctcctccagtaccacaaggttgt

SEQ ID NO: 51208 - DNA, 25 bp, Homo sapien
gtctcctccagttccacaaggttgt

SEQ ID NO: 51209 - DNA, 25 bp, Homo sapien
tagtctggaaattcactttgttcag

SEQ ID NO: 51210 - DNA, 25 bp, Homo sapien
tagtctggaaatacactttgttcag

SEQ ID NO: 51211 - DNA, 25 bp, Homo sapien
gatatgggaaacacttatttctcta

SEQ ID NO: 51212 - DNA, 25 bp, Homo sapien
gatatgggaaactcttatttctcta

SEQ ID NO: 51213 - DNA, 25 bp, Homo sapien
tcagggtctttcttgagttgtttca

SEQ ID NO: 51214 - DNA, 25 bp, Homo sapien
tcagggtctttcatgagttgtttca

SEQ ID NO: 51215 - DNA, 25 bp, Homo sapien
ggaggtccatcctagatgtgtttca

SEQ ID NO: 51216 - DNA, 25 bp, Homo sapien
ggaggtccatccaagatgtgtttca

SEQ ID NO: 51217 - DNA, 25 bp, Homo sapien
gacgttcttctcaagatatgatttt

SEQ ID NO: 51218 - DNA, 25 bp, Homo sapien
gacgttcttctctagatatgatttt

SEQ ID NO: 51219 - DNA, 25 bp, Homo sapien
ctttttggacggtttatactactgt

SEQ ID NO: 51220 - DNA, 25 bp, Homo sapien
ctttttggacggattatactactgt

SEQ ID NO: 51221 - DNA, 25 bp, Homo sapien
atatacgtccactttagattgatga

SEQ ID NO: 51222 - DNA, 25 bp, Homo sapien
atatacgtccacattagattgatga

SEQ ID NO: 51223 - DNA, 25 bp, Homo sapien
acaaaccacatcgaacctgatgacg

SEQ ID NO: 51224 - DNA, 25 bp, Homo sapien
acaaaccacatccaacctgatgacg

SEQ ID NO: 51225 - DNA, 25 bp, Homo sapien
ggacgcgccgtcctcgtcatctttg

SEQ ID NO: 51226 - DNA, 25 bp, Homo sapien
ggacgcgccgtcgtcgtcatctttg

SEQ ID NO: 51227 - DNA, 25 bp, Homo sapien
gtccgtaaagacattttcatttctt

SEQ ID NO: 51228 - DNA, 25 bp, Homo sapien
gtccgtaaagactttttcatttctt

SEQ ID NO: 51229 - DNA, 25 bp, Homo sapien
gtcccgtaaacacttccaggttcct

SEQ ID NO: 51230 - DNA, 25 bp, Homo sapien
gtcccgtaaacagttccaggttcct

SEQ ID NO: 51231 - DNA, 25 bp, Homo sapien
cacgccaacaaggacctgaggttcg

SEQ ID NO: 51232 - DNA, 25 bp, Homo sapien
cacgccaacaagcacctgaggttcg

SEQ ID NO: 51233 - DNA, 25 bp, Homo sapien
gacgacttaggacacccgaggtgcg

SEQ ID NO: 51234 - DNA, 25 bp, Homo sapien
gacgacttaggagacccgaggtgcg

SEQ ID NO: 51235 - DNA, 25 bp, Homo sapien
atcaggagaccctaccacagtaacg

SEQ ID NO: 51236 - DNA, 25 bp, Homo sapien
atcaggagacccaaccacagtaacg

SEQ ID NO: 51237 - DNA, 25 bp, Homo sapien
gaaacgcaagagccccacggtatcg

SEQ ID NO: 51238 - DNA, 25 bp, Homo sapien
gaaacgcaagaggcccacggtatcg

SEQ ID NO: 51239 - DNA, 25 bp, Homo sapien
agcgacagtgacagcggcagtttcg

SEQ ID NO: 51240 - DNA, 25 bp, Homo sapien
agcgacagtgactgcggcagtttcg

SEQ ID NO: 51241 - DNA, 25 bp, Homo sapien
gtcacagtagtcacaggagtcttct

SEQ ID NO: 51242 - DNA, 25 bp, Homo sapien
gtcacagtagtctcaggagtcttct

SEQ ID NO: 51243 - DNA, 25 bp, Homo sapien
acctcgggactcagggggttcgtct

SEQ ID NO: 51244 - DNA, 25 bp, Homo sapien
acctcgggactctgggggttcgtct

SEQ ID NO: 51245 - DNA, 25 bp, Homo sapien
ccaggagtgcctactgggtgtcgtt

SEQ ID NO: 51246 - DNA, 25 bp, Homo sapien
ccaggagtgccttctgggtgtcgtt

SEQ ID NO: 51247 - DNA, 25 bp, Homo sapien
gagaagggtccctcagtcgaggtca

SEQ ID NO: 51248 - DNA, 25 bp, Homo sapien
gagaagggtcccacagtcgaggtca

SEQ ID NO: 51249 - DNA, 25 bp, Homo sapien
taaaagggtcccaactttttacgac

SEQ ID NO: 51250 - DNA, 25 bp, Homo sapien
taaaagggtccctactttttacgac

SEQ ID NO: 51251 - DNA, 25 bp, Homo sapien
ataggacgttttcatcgatgtttcc

SEQ ID NO: 51252 - DNA, 25 bp, Homo sapien
ataggacgttttgatcgatgtttcc

SEQ ID NO: 51253 - DNA, 25 bp, Homo sapien
gtccgtggacggaccgggatttttc

SEQ ID NO: 51254 - DNA, 25 bp, Homo sapien
gtccgtggacggtccgggatttttc

SEQ ID NO: 51255 - DNA, 25 bp, Homo sapien
agtcgggtccgtgtctgttcgtgtc

SEQ ID NO: 51256 - DNA, 25 bp, Homo sapien
agtcgggtccgtctctgttcgtgtc

SEQ ID NO: 51257 - DNA, 25 bp, Homo sapien
tctggtggtcggttgatgtgtaacc

SEQ ID NO: 51258 - DNA, 25 bp, Homo sapien
tctggtggtcggatgatgtgtaacc

SEQ ID NO: 51259 - DNA, 25 bp, Homo sapien
catcgtgtgaccattaggtaaacct

SEQ ID NO: 51260 - DNA, 25 bp, Homo sapien
catcgtgtgacctttaggtaaacct

SEQ ID NO: 51261 - DNA, 25 bp, Homo sapien
aaagctaagacttccgagggaatag

SEQ ID NO: 51262 - DNA, 25 bp, Homo sapien
aaagctaagactaccgagggaatag

SEQ ID NO: 51263 - DNA, 25 bp, Homo sapien
cctagaacacagtgtcggttcccgg

SEQ ID NO: 51264 - DNA, 25 bp, Homo sapien
cctagaacacagagtcggttcccgg

SEQ ID NO: 51265 - DNA, 25 bp, Homo sapien
taatcgtacgcctgcgagcaggtgg

SEQ ID NO: 51266 - DNA, 25 bp, Homo sapien
taatcgtacgccagcgagcaggtgg

SEQ ID NO: 51267 - DNA, 25 bp, Homo sapien
taaataggtgccgtgaggcgctcga

SEQ ID NO: 51268 - DNA, 25 bp, Homo sapien
taaataggtgccctgaggcgctcga

SEQ ID NO: 51269 - DNA, 25 bp, Homo sapien
gttgttaaccttttgagtcttaaca

SEQ ID NO: 51270 - DNA, 25 bp, Homo sapien
gttgttaaccttatgagtcttaaca

SEQ ID NO: 51271 - DNA, 25 bp, Homo sapien
cttatatcgttttctgtttaacgag

SEQ ID NO: 51272 - DNA, 25 bp, Homo sapien
cttatatcgtttactgtttaacgag

SEQ ID NO: 51273 - DNA, 25 bp, Homo sapien
aggacgtttgtcttacattaccaca

SEQ ID NO: 51274 - DNA, 25 bp, Homo sapien
aggacgtttgtcatacattaccaca

SEQ ID NO: 51275 - DNA, 25 bp, Homo sapien
gtgactatgttaaaactcaacacga

SEQ ID NO: 51276 - DNA, 25 bp, Homo sapien
gtgactatgttataactcaacacga

SEQ ID NO: 51277 - DNA, 25 bp, Homo sapien
tcgatagagtgaacgtttcatttac

SEQ ID NO: 51278 - DNA, 25 bp, Homo sapien
tcgatagagtgatcgtttcatttac

SEQ ID NO: 51279 - DNA, 25 bp, Homo sapien
taagtcgggtacacgtcgtgttctt

SEQ ID NO: 51280 - DNA, 25 bp, Homo sapien
taagtcgggtactcgtcgtgttctt

SEQ ID NO: 51281 - DNA, 25 bp, Homo sapien
ttttagacgtgtctcgttcgttcgg

SEQ ID NO: 51282 - DNA, 25 bp, Homo sapien
ttttagacgtgtgtcgttcgttcgg

SEQ ID NO: 51283 - DNA, 25 bp, Homo sapien
gtatttcgaatagtctatacccgtg

SEQ ID NO: 51284 - DNA, 25 bp, Homo sapien
gtatttcgaatactctatacccgtg

SEQ ID NO: 51285 - DNA, 25 bp, Homo sapien
gtaccatccgattccgtctttcgag

SEQ ID NO: 51286 - DNA, 25 bp, Homo sapien
gtaccatccgataccgtctttcgag

SEQ ID NO: 51287 - DNA, 25 bp, Homo sapien
gactgtgtactcgtactttggttta

SEQ ID NO: 51288 - DNA, 25 bp, Homo sapien
gactgtgtactcctactttggttta

SEQ ID NO: 51289 - DNA, 25 bp, Homo sapien
ctccgtccgttcactcgcgtgtatg

SEQ ID NO: 51290 - DNA, 25 bp, Homo sapien
ctccgtccgttctctcgcgtgtatg

SEQ ID NO: 51291 - DNA, 25 bp, Homo sapien
tactcttcgtctcttcggtttagat

SEQ ID NO: 51292 - DNA, 25 bp, Homo sapien
tactcttcgtctgttcggtttagat

SEQ ID NO: 51293 - DNA, 25 bp, Homo sapien
tactgacttggtgagtgtttacgtc

SEQ ID NO: 51294 - DNA, 25 bp, Homo sapien
tactgacttggtcagtgtttacgtc

SEQ ID NO: 51295 - DNA, 25 bp, Homo sapien
ctgtccgtagttagtgtggtgtcgt

SEQ ID NO: 51296 - DNA, 25 bp, Homo sapien
ctgtccgtagtttgtgtggtgtcgt

SEQ ID NO: 51297 - DNA, 25 bp, Homo sapien
tgtgtgtttcagagttcgtttactc

SEQ ID NO: 51298 - DNA, 25 bp, Homo sapien
tgtgtgtttcagtgttcgtttactc

SEQ ID NO: 51299 - DNA, 25 bp, Homo sapien
gtcgaccttttgttctcgtacactt

SEQ ID NO: 51300 - DNA, 25 bp, Homo sapien
gtcgaccttttgatctcgtacactt

SEQ ID NO: 51301 - DNA, 25 bp, Homo sapien
gtcgatatgtatgatatattaccct

SEQ ID NO: 51302 - DNA, 25 bp, Homo sapien
gtcgatatgtatcatatattaccct

SEQ ID NO: 51303 - DNA, 25 bp, Homo sapien
aatgttcgagaaacaagaatcccgt

SEQ ID NO: 51304 - DNA, 25 bp, Homo sapien
aatgttcgagaatcaagaatcccgt

SEQ ID NO: 51305 - DNA, 25 bp, Homo sapien
tacaagaactgaacccagggtccct

SEQ ID NO: 51306 - DNA, 25 bp, Homo sapien
tacaagaactgatcccagggtccct

SEQ ID NO: 51307 - DNA, 25 bp, Homo sapien
caagaaccgcaacagagacctctac

SEQ ID NO: 51308 - DNA, 25 bp, Homo sapien
caagaaccgcaagagagacctctac

SEQ ID NO: 51309 - DNA, 25 bp, Homo sapien
ttggtctactttagataccgtacta

SEQ ID NO: 51310 - DNA, 25 bp, Homo sapien
ttggtctacttttgataccgtacta

SEQ ID NO: 51311 - DNA, 25 bp, Homo sapien
catgagtcttatgtgtctacagaca

SEQ ID NO: 51312 - DNA, 25 bp, Homo sapien
catgagtcttatctgtctacagaca

SEQ ID NO: 51313 - DNA, 25 bp, Homo sapien
tccaagcttattggtgtctagagac

SEQ ID NO: 51314 - DNA, 25 bp, Homo sapien
tccaagcttattcgtgtctagagac

SEQ ID NO: 51315 - DNA, 25 bp, Homo sapien
acgtcagagttttaagtagaccatc

SEQ ID NO: 51316 - DNA, 25 bp, Homo sapien
acgtcagagtttaaagtagaccatc

SEQ ID NO: 51317 - DNA, 25 bp, Homo sapien
gactctcgaaaaaagtgctctactc

SEQ ID NO: 51318 - DNA, 25 bp, Homo sapien
gactctcgaaaatagtgctctactc

SEQ ID NO: 51319 - DNA, 25 bp, Homo sapien
acgttctaagaaccgttgtctgtta

SEQ ID NO: 51320 - DNA, 25 bp, Homo sapien
acgttctaagaagcgttgtctgtta

SEQ ID NO: 51321 - DNA, 25 bp, Homo sapien
aggtttacaagtcttcgacgtagta

SEQ ID NO: 51322 - DNA, 25 bp, Homo sapien
aggtttacaagtgttcgacgtagta

SEQ ID NO: 51323 - DNA, 25 bp, Homo sapien
caccggctacacaagcttcgtcggg

SEQ ID NO: 51324 - DNA, 25 bp, Homo sapien
caccggctacactagcttcgtcggg

SEQ ID NO: 51325 - DNA, 25 bp, Homo sapien
aaccggagagcgagagcctactcgg

SEQ ID NO: 51326 - DNA, 25 bp, Homo sapien
aaccggagagcgtgagcctactcgg

SEQ ID NO: 51327 - DNA, 25 bp, Homo sapien
aaaggacggtttagcgtctcgtcac

SEQ ID NO: 51328 - DNA, 25 bp, Homo sapien
aaaggacggttttgcgtctcgtcac

SEQ ID NO: 51329 - DNA, 25 bp, Homo sapien
agaatcgacggttagttttacctca

SEQ ID NO: 51330 - DNA, 25 bp, Homo sapien
agaatcgacggtaagttttacctca

SEQ ID NO: 51331 - DNA, 25 bp, Homo sapien
aaagagtgacatcacctttaccgaa

SEQ ID NO: 51332 - DNA, 25 bp, Homo sapien
aaagagtgacatgacctttaccgaa

SEQ ID NO: 51333 - DNA, 25 bp, Homo sapien
agagtagtcacgtatgttggtgtcc

SEQ ID NO: 51334 - DNA, 25 bp, Homo sapien
agagtagtcacgaatgttggtgtcc

SEQ ID NO: 51335 - DNA, 25 bp, Homo sapien
taagagtagacctttgctagggtgc

SEQ ID NO: 51336 - DNA, 25 bp, Homo sapien
taagagtagaccattgctagggtgc

SEQ ID NO: 51337 - DNA, 25 bp, Homo sapien
ctgttagaaaattcttttgtagtcc

SEQ ID NO: 51338 - DNA, 25 bp, Homo sapien
ctgttagaaaatacttttgtagtcc

SEQ ID NO: 51339 - DNA, 25 bp, Homo sapien
actggagagaagaaacctctcctcc

SEQ ID NO: 51340 - DNA, 25 bp, Homo sapien
actggagagaagtaacctctcctcc

SEQ ID NO: 51341 - DNA, 25 bp, Homo sapien
aggttaacaagagaccactccacct

SEQ ID NO: 51342 - DNA, 25 bp, Homo sapien
aggttaacaagacaccactccacct

SEQ ID NO: 51343 - DNA, 25 bp, Homo sapien
actgtagtcaagacgtttccgtccc

SEQ ID NO: 51344 - DNA, 25 bp, Homo sapien
actgtagtcaagtcgtttccgtccc

SEQ ID NO: 51345 - DNA, 25 bp, Homo sapien
cacagtaaagaagattcgcgacaca

SEQ ID NO: 51346 - DNA, 25 bp, Homo sapien
cacagtaaagaacattcgcgacaca

SEQ ID NO: 51347 - DNA, 25 bp, Homo sapien
tggcctaaaacgtcgaggtcccggg

SEQ ID NO: 51348 - DNA, 25 bp, Homo sapien
tggcctaaaacgacgaggtcccggg

SEQ ID NO: 51349 - DNA, 25 bp, Homo sapien
tcctcacggacgagaggtccctgag

SEQ ID NO: 51350 - DNA, 25 bp, Homo sapien
tcctcacggacgtgaggtccctgag

SEQ ID NO: 51351 - DNA, 25 bp, Homo sapien
gttactgaagagagggtcccaccgt

SEQ ID NO: 51352 - DNA, 25 bp, Homo sapien
gttactgaagagtgggtcccaccgt

SEQ ID NO: 51353 - DNA, 25 bp, Homo sapien
aaggaccgaaatcagggtccccgcg

SEQ ID NO: 51354 - DNA, 25 bp, Homo sapien
aaggaccgaaatgagggtccccgcg

SEQ ID NO: 51355 - DNA, 25 bp, Homo sapien
agaagggagagaggaaacactcctc

SEQ ID NO: 51356 - DNA, 25 bp, Homo sapien
agaagggagagacgaaacactcctc

SEQ ID NO: 51357 - DNA, 25 bp, Homo sapien
gagcaaagacaaacaagaactccct

SEQ ID NO: 51358 - DNA, 25 bp, Homo sapien
gagcaaagacaatcaagaactccct

SEQ ID NO: 51359 - DNA, 25 bp, Homo sapien
aaagagaaaccgagtgtttacgtgc

SEQ ID NO: 51360 - DNA, 25 bp, Homo sapien
aaagagaaaccgtgtgtttacgtgc

SEQ ID NO: 51361 - DNA, 25 bp, Homo sapien
gtgcaacgtcgctgtgtgctagtga

SEQ ID NO: 51362 - DNA, 25 bp, Homo sapien
gtgcaacgtcgcagtgtgctagtga

SEQ ID NO: 51363 - DNA, 25 bp, Homo sapien
tttccgtggaccaccggttgtagga

SEQ ID NO: 51364 - DNA, 25 bp, Homo sapien
tttccgtggacctccggttgtagga

SEQ ID NO: 51365 - DNA, 25 bp, Homo sapien
attgtgtgtctccattgttactgta

SEQ ID NO: 51366 - DNA, 25 bp, Homo sapien
attgtgtgtctcgattgttactgta

SEQ ID NO: 51367 - DNA, 25 bp, Homo sapien
tgtcatctactttgtcgttactgat

SEQ ID NO: 51368 - DNA, 25 bp, Homo sapien
tgtcatctacttagtcgttactgat

SEQ ID NO: 51369 - DNA, 25 bp, Homo sapien
acgtgttctaccttctcgtgacaat

SEQ ID NO: 51370 - DNA, 25 bp, Homo sapien
acgtgttctaccatctcgtgacaat

SEQ ID NO: 51371 - DNA, 25 bp, Homo sapien
cccgcgttcttagtcactgtcaagt

SEQ ID NO: 51372 - DNA, 25 bp, Homo sapien
cccgcgttcttactcactgtcaagt

SEQ ID NO: 51373 - DNA, 25 bp, Homo sapien
acagcgagtcagtttccactaggcc

SEQ ID NO: 51374 - DNA, 25 bp, Homo sapien
acagcgagtcagattccactaggcc

SEQ ID NO: 51375 - DNA, 25 bp, Homo sapien
gtcccaaaggttcctactgtagaac

SEQ ID NO: 51376 - DNA, 25 bp, Homo sapien
gtcccaaaggttgctactgtagaac

SEQ ID NO: 51377 - DNA, 25 bp, Homo sapien
accaaagtggagagtacctgagact

SEQ ID NO: 51378 - DNA, 25 bp, Homo sapien
accaaagtggagtgtacctgagact

SEQ ID NO: 51379 - DNA, 25 bp, Homo sapien
acctgagagtcctgtctgattggac

SEQ ID NO: 51380 - DNA, 25 bp, Homo sapien
acctgagagtccagtctgattggac

SEQ ID NO: 51381 - DNA, 25 bp, Homo sapien
gaccgattctgtctaagtttattga

SEQ ID NO: 51382 - DNA, 25 bp, Homo sapien
gaccgattctgtgtaagtttattga

SEQ ID NO: 51383 - DNA, 25 bp, Homo sapien
cccatgggggtacgttatataccga

SEQ ID NO: 51384 - DNA, 25 bp, Homo sapien
cccatgggggtaggttatataccga

SEQ ID NO: 51385 - DNA, 25 bp, Homo sapien
gacctcgcgcggaagctcttcttgg

SEQ ID NO: 51386 - DNA, 25 bp, Homo sapien
gacctcgcgcggtagctcttcttgg

SEQ ID NO: 51387 - DNA, 25 bp, Homo sapien
acccggtcgatagtacttattatgt

SEQ ID NO: 51388 - DNA, 25 bp, Homo sapien
acccggtcgatactacttattatgt

SEQ ID NO: 51389 - DNA, 25 bp, Homo sapien
caccagcgtcacatgttacatttgt

SEQ ID NO: 51390 - DNA, 25 bp, Homo sapien
caccagcgtcacttgttacatttgt

SEQ ID NO: 51391 - DNA, 25 bp, Homo sapien
gacacaacagtcgtgttaactaatg

SEQ ID NO: 51392 - DNA, 25 bp, Homo sapien
gacacaacagtcctgttaactaatg

SEQ ID NO: 51393 - DNA, 25 bp, Homo sapien
gagtcactaaaatcatgtaccaagt

SEQ ID NO: 51394 - DNA, 25 bp, Homo sapien
gagtcactaaaaacatgtaccaagt

SEQ ID NO: 51395 - DNA, 25 bp, Homo sapien
gagtccactcgaccaccttgtcggg

SEQ ID NO: 51396 - DNA, 25 bp, Homo sapien
gagtccactcgagcaccttgtcggg

SEQ ID NO: 51397 - DNA, 25 bp, Homo sapien
tggtcccaagacactttctcgactc

SEQ ID NO: 51398 - DNA, 25 bp, Homo sapien
tggtcccaagactctttctcgactc

SEQ ID NO: 51399 - DNA, 25 bp, Homo sapien
gctcctaccgactaacagtttcgtc

SEQ ID NO: 51400 - DNA, 25 bp, Homo sapien
gctcctaccgacaaacagtttcgtc

SEQ ID NO: 51401 - DNA, 25 bp, Homo sapien
actcgaacgtaggagacgtttcctc

SEQ ID NO: 51402 - DNA, 25 bp, Homo sapien
actcgaacgtagcagacgtttcctc

SEQ ID NO: 51403 - DNA, 25 bp, Homo sapien
tagtctatttcgtgtaatactgtct

SEQ ID NO: 51404 - DNA, 25 bp, Homo sapien
tagtctatttcgagtaatactgtct

SEQ ID NO: 51405 - DNA, 25 bp, Homo sapien
ctattgtcatatcttgacatgtgtt

SEQ ID NO: 51406 - DNA, 25 bp, Homo sapien
ctattgtcatatgttgacatgtgtt

SEQ ID NO: 51407 - DNA, 25 bp, Homo sapien
cgatcttcaaagttcggtggttggt

SEQ ID NO: 51408 - DNA, 25 bp, Homo sapien
cgatcttcaaagatcggtggttggt

SEQ ID NO: 51409 - DNA, 25 bp, Homo sapien
ctacgtcttcccaattccggtgttt

SEQ ID NO: 51410 - DNA, 25 bp, Homo sapien
ctacgtcttccctattccggtgttt

SEQ ID NO: 51411 - DNA, 25 bp, Homo sapien
gtacttcgttcatttcagagacttt

SEQ ID NO: 51412 - DNA, 25 bp, Homo sapien
gtacttcgttcaattcagagacttt

SEQ ID NO: 51413 - DNA, 25 bp, Homo sapien
aattcacgtttcattccgtagggtg

SEQ ID NO: 51414 - DNA, 25 bp, Homo sapien
aattcacgtttctttccgtagggtg

SEQ ID NO: 51415 - DNA, 25 bp, Homo sapien
gtttgaggtgcttccgctacagtac

SEQ ID NO: 51416 - DNA, 25 bp, Homo sapien
gtttgaggtgctaccgctacagtac

SEQ ID NO: 51417 - DNA, 25 bp, Homo sapien
agcgaaggaggtcagtctctagtac

SEQ ID NO: 51418 - DNA, 25 bp, Homo sapien
agcgaaggaggtgagtctctagtac

SEQ ID NO: 51419 - DNA, 25 bp, Homo sapien
gaagagacgaaggtcgaaccagacg

SEQ ID NO: 51420 - DNA, 25 bp, Homo sapien
gaagagacgaagctcgaaccagacg

SEQ ID NO: 51421 - DNA, 25 bp, Homo sapien
gtgactgtagaaggtaacgttcatc

SEQ ID NO: 51422 - DNA, 25 bp, Homo sapien
gtgactgtagaacgtaacgttcatc

SEQ ID NO: 51423 - DNA, 25 bp, Homo sapien
gacttacgagtttgtactttcagac

SEQ ID NO: 51424 - DNA, 25 bp, Homo sapien
gacttacgagttagtactttcagac

SEQ ID NO: 51425 - DNA, 25 bp, Homo sapien
tccgactctcgagttgacttctgga

SEQ ID NO: 51426 - DNA, 25 bp, Homo sapien
tccgactctcgacttgacttctgga

SEQ ID NO: 51427 - DNA, 25 bp, Homo sapien
agcccctcgacccggacgtcctgga

SEQ ID NO: 51428 - DNA, 25 bp, Homo sapien
agcccctcgaccgggacgtcctgga

SEQ ID NO: 51429 - DNA, 25 bp, Homo sapien
ccagtctcaccgagagacaccaggt

SEQ ID NO: 51430 - DNA, 25 bp, Homo sapien
ccagtctcaccgtgagacaccaggt

SEQ ID NO: 51431 - DNA, 25 bp, Homo sapien
gaagtctcaccgtctctacttgatt

SEQ ID NO: 51432 - DNA, 25 bp, Homo sapien
gaagtctcaccgactctacttgatt

SEQ ID NO: 51433 - DNA, 25 bp, Homo sapien
tggacctcgaggactttgtcgactt

SEQ ID NO: 51434 - DNA, 25 bp, Homo sapien
tggacctcgaggtctttgtcgactt

SEQ ID NO: 51435 - DNA, 25 bp, Homo sapien
gcgagtatcaggtcctcggactgtt

SEQ ID NO: 51436 - DNA, 25 bp, Homo sapien
gcgagtatcaggacctcggactgtt

SEQ ID NO: 51437 - DNA, 25 bp, Homo sapien
ctattctactgtataggtgtctgta

SEQ ID NO: 51438 - DNA, 25 bp, Homo sapien
ctattctactgtttaggtgtctgta

SEQ ID NO: 51439 - DNA, 25 bp, Homo sapien
acgtccaagcaggacccggagccga

SEQ ID NO: 51440 - DNA, 25 bp, Homo sapien
acgtccaagcagcacccggagccga

SEQ ID NO: 51441 - DNA, 25 bp, Homo sapien
aacgtttgataaaaggtttctctac

SEQ ID NO: 51442 - DNA, 25 bp, Homo sapien
aacgtttgataataggtttctctac

SEQ ID NO: 51443 - DNA, 25 bp, Homo sapien
cgattccgtgtaaatgtcatctccc

SEQ ID NO: 51444 - DNA, 25 bp, Homo sapien
cgattccgtgtatatgtcatctccc

SEQ ID NO: 51445 - DNA, 25 bp, Homo sapien
atctcggtggtctgttacagtgaac

SEQ ID NO: 51446 - DNA, 25 bp, Homo sapien
atctcggtggtcagttacagtgaac

SEQ ID NO: 51447 - DNA, 25 bp, Homo sapien
ttctgtagtgggtttacagtcgcct

SEQ ID NO: 51448 - DNA, 25 bp, Homo sapien
ttctgtagtgggattacagtcgcct

SEQ ID NO: 51449 - DNA, 25 bp, Homo sapien
agactaaaccgaacatcacggcgac

SEQ ID NO: 51450 - DNA, 25 bp, Homo sapien
agactaaaccgatcatcacggcgac

SEQ ID NO: 51451 - DNA, 25 bp, Homo sapien
gaagaaacatcgtcgatccgggacg

SEQ ID NO: 51452 - DNA, 25 bp, Homo sapien
gaagaaacatcgacgatccgggacg

SEQ ID NO: 51453 - DNA, 25 bp, Homo sapien
cacagaaaaggagtgaaccggcggt

SEQ ID NO: 51454 - DNA, 25 bp, Homo sapien
cacagaaaaggactgaaccggcggt

SEQ ID NO: 51455 - DNA, 25 bp, Homo sapien
gattacaaaggactcaactcggggt

SEQ ID NO: 51456 - DNA, 25 bp, Homo sapien
gattacaaaggagtcaactcggggt

SEQ ID NO: 51457 - DNA, 25 bp, Homo sapien
aaccgtaagaacataaccctgttcg

SEQ ID NO: 51458 - DNA, 25 bp, Homo sapien
aaccgtaagaacttaaccctgttcg

SEQ ID NO: 51459 - DNA, 25 bp, Homo sapien
agatctaaacttggtacacgaaatg

SEQ ID NO: 51460 - DNA, 25 bp, Homo sapien
agatctaaacttcgtacacgaaatg

SEQ ID NO: 51461 - DNA, 25 bp, Homo sapien
agactaaaacttctcgagaaacacg

SEQ ID NO: 51462 - DNA, 25 bp, Homo sapien
agactaaaacttgtcgagaaacacg

SEQ ID NO: 51463 - DNA, 25 bp, Homo sapien
ggaaataaccttctcgacacacctg

SEQ ID NO: 51464 - DNA, 25 bp, Homo sapien
ggaaataaccttgtcgacacacctg

SEQ ID NO: 51465 - DNA, 25 bp, Homo sapien
gcgacaaatagatctttgaatctta

SEQ ID NO: 51466 - DNA, 25 bp, Homo sapien
gcgacaaatagaactttgaatctta

SEQ ID NO: 51467 - DNA, 25 bp, Homo sapien
aggaacaccgaaaggacctcctcta

SEQ ID NO: 51468 - DNA, 25 bp, Homo sapien
aggaacaccgaatggacctcctcta

SEQ ID NO: 51469 - DNA, 25 bp, Homo sapien
aagaaacgtgactaggaccacctta

SEQ ID NO: 51470 - DNA, 25 bp, Homo sapien
aagaaacgtgacaaggaccacctta

SEQ ID NO: 51471 - DNA, 25 bp, Homo sapien
aaacaactcgagatggtcccttgtt

SEQ ID NO: 51472 - DNA, 25 bp, Homo sapien
aaacaactcgagttggtcccttgtt

SEQ ID NO: 51473 - DNA, 25 bp, Homo sapien
gagttaaaagacgagtcaaccttac

SEQ ID NO: 51474 - DNA, 25 bp, Homo sapien
gagttaaaagaccagtcaaccttac

SEQ ID NO: 51475 - DNA, 25 bp, Homo sapien
cagtttttatctcaagaacgttgta

SEQ ID NO: 51476 - DNA, 25 bp, Homo sapien
cagtttttatctgaagaacgttgta

SEQ ID NO: 51477 - DNA, 25 bp, Homo sapien
cgagatttgacttaccttttaagtt

SEQ ID NO: 51478 - DNA, 25 bp, Homo sapien
cgagatttgactaaccttttaagtt

SEQ ID NO: 51479 - DNA, 25 bp, Homo sapien
ccctgacgacacgtctctactaagg

SEQ ID NO: 51480 - DNA, 25 bp, Homo sapien
ccctgacgacacctctctactaagg

SEQ ID NO: 51481 - DNA, 25 bp, Homo sapien
cgagaccgagaattctactcgtgtg

SEQ ID NO: 51482 - DNA, 25 bp, Homo sapien
cgagaccgagaaatctactcgtgtg

SEQ ID NO: 51483 - DNA, 25 bp, Homo sapien
agctcagaccggtcttatatcacgg

SEQ ID NO: 51484 - DNA, 25 bp, Homo sapien
agctcagaccggacttatatcacgg

SEQ ID NO: 51485 - DNA, 25 bp, Homo sapien
ctaagaatttcttagtagtcacgtt

SEQ ID NO: 51486 - DNA, 25 bp, Homo sapien
ctaagaatttctaagtagtcacgtt

SEQ ID NO: 51487 - DNA, 25 bp, Homo sapien
gaggaagaactcttttaaaacgtct

SEQ ID NO: 51488 - DNA, 25 bp, Homo sapien
gaggaagaactcatttaaaacgtct

SEQ ID NO: 51489 - DNA, 25 bp, Homo sapien
gtaaagaacttaatgaatacgtctc

SEQ ID NO: 51490 - DNA, 25 bp, Homo sapien
gtaaagaacttattgaatacgtctc

SEQ ID NO: 51491 - DNA, 25 bp, Homo sapien
aaaatagaagttaactctgagttcc

SEQ ID NO: 51492 - DNA, 25 bp, Homo sapien
aaaatagaagtttactctgagttcc

SEQ ID NO: 51493 - DNA, 25 bp, Homo sapien
ttaacactgaaatgggtcgttgaac

SEQ ID NO: 51494 - DNA, 25 bp, Homo sapien
ttaacactgaaaagggtcgttgaac

SEQ ID NO: 51495 - DNA, 25 bp, Homo sapien
gaattttagacgagggacttcagtc

SEQ ID NO: 51496 - DNA, 25 bp, Homo sapien
gaattttagacgtgggacttcagtc

SEQ ID NO: 51497 - DNA, 25 bp, Homo sapien
tgttgtacgttaagaattccgtcgt

SEQ ID NO: 51498 - DNA, 25 bp, Homo sapien
tgttgtacgttatgaattccgtcgt

SEQ ID NO: 51499 - DNA, 25 bp, Homo sapien
cttatgtagtatcaaatgtcctact

SEQ ID NO: 51500 - DNA, 25 bp, Homo sapien
cttatgtagtatgaaatgtcctact

SEQ ID NO: 51501 - DNA, 25 bp, Homo sapien
actatattagacaatcccgagacag

SEQ ID NO: 51502 - DNA, 25 bp, Homo sapien
actatattagactatcccgagacag

SEQ ID NO: 51503 - DNA, 25 bp, Homo sapien
ccatttagtatcttctctcggactg

SEQ ID NO: 51504 - DNA, 25 bp, Homo sapien
ccatttagtatcatctctcggactg

SEQ ID NO: 51505 - DNA, 25 bp, Homo sapien
tcgcctttgctcttctacgttaatg

SEQ ID NO: 51506 - DNA, 25 bp, Homo sapien
tcgcctttgctcatctacgttaatg

SEQ ID NO: 51507 - DNA, 25 bp, Homo sapien
ccccgaatactcagtactttagtgg

SEQ ID NO: 51508 - DNA, 25 bp, Homo sapien
ccccgaatactctgtactttagtgg

SEQ ID NO: 51509 - DNA, 25 bp, Homo sapien
taaccggaaattgactacttcaagt

SEQ ID NO: 51510 - DNA, 25 bp, Homo sapien
taaccggaaattcactacttcaagt

SEQ ID NO: 51511 - DNA, 25 bp, Homo sapien
gtaagatgatacaccaagatctctt

SEQ ID NO: 51512 - DNA, 25 bp, Homo sapien
gtaagatgatactccaagatctctt

SEQ ID NO: 51513 - DNA, 25 bp, Homo sapien
gtcgaaatctacaaaaagactcatg

SEQ ID NO: 51514 - DNA, 25 bp, Homo sapien
gtcgaaatctactaaaagactcatg

SEQ ID NO: 51515 - DNA, 25 bp, Homo sapien
agacaatacgacagaggaactcatt

SEQ ID NO: 51516 - DNA, 25 bp, Homo sapien
agacaatacgactgaggaactcatt

SEQ ID NO: 51517 - DNA, 25 bp, Homo sapien
ggtgaaagtaacagttagaactcca

SEQ ID NO: 51518 - DNA, 25 bp, Homo sapien
ggtgaaagtaactgttagaactcca

SEQ ID NO: 51519 - DNA, 25 bp, Homo sapien
gaagtcaaagtgtcttttattccgt

SEQ ID NO: 51520 - DNA, 25 bp, Homo sapien
gaagtcaaagtgacttttattccgt

SEQ ID NO: 51521 - DNA, 25 bp, Homo sapien
taagttgtaacagaatcatgacatc

SEQ ID NO: 51522 - DNA, 25 bp, Homo sapien
taagttgtaacacaatcatgacatc

SEQ ID NO: 51523 - DNA, 25 bp, Homo sapien
tgatccaatggacctcctcgtcttc

SEQ ID NO: 51524 - DNA, 25 bp, Homo sapien
tgatccaatggagctcctcgtcttc

SEQ ID NO: 51525 - DNA, 25 bp, Homo sapien
tcctcgggagtaggtcaccgtccct

SEQ ID NO: 51526 - DNA, 25 bp, Homo sapien
tcctcgggagtacgtcaccgtccct

SEQ ID NO: 51527 - DNA, 25 bp, Homo sapien
ccctcggacggaggtaccacgacta

SEQ ID NO: 51528 - DNA, 25 bp, Homo sapien
ccctcggacggacgtaccacgacta

SEQ ID NO: 51529 - DNA, 25 bp, Homo sapien
atttcactggtgagtgtaccctata

SEQ ID NO: 51530 - DNA, 25 bp, Homo sapien
atttcactggtgtgtgtaccctata

SEQ ID NO: 51531 - DNA, 25 bp, Homo sapien
tcaaaaaggatgacgacgatccaat

SEQ ID NO: 51532 - DNA, 25 bp, Homo sapien
tcaaaaaggatgtcgacgatccaat

SEQ ID NO: 51533 - DNA, 25 bp, Homo sapien
caaaaatgtagtagtggcgtcaaca

SEQ ID NO: 51534 - DNA, 25 bp, Homo sapien
caaaaatgtagttgtggcgtcaaca

SEQ ID NO: 51535 - DNA, 25 bp, Homo sapien
tacaggttcaaaggagtattacctt

SEQ ID NO: 51536 - DNA, 25 bp, Homo sapien
tacaggttcaaacgagtattacctt

SEQ ID NO: 51537 - DNA, 25 bp, Homo sapien
cggtatgaagaagagtatctaccct

SEQ ID NO: 51538 - DNA, 25 bp, Homo sapien
cggtatgaagaacagtatctaccct

SEQ ID NO: 51539 - DNA, 25 bp, Homo sapien
acggcgtgctagagccgtttatcga

SEQ ID NO: 51540 - DNA, 25 bp, Homo sapien
acggcgtgctagtgccgtttatcga

SEQ ID NO: 51541 - DNA, 25 bp, Homo sapien
cacttgtagacagttggtgaatctt

SEQ ID NO: 51542 - DNA, 25 bp, Homo sapien
cacttgtagacacttggtgaatctt

SEQ ID NO: 51543 - DNA, 25 bp, Homo sapien
aacatatataaatgttttgtctttt

SEQ ID NO: 51544 - DNA, 25 bp, Homo sapien
aacatatataaaagttttgtctttt

SEQ ID NO: 51545 - DNA, 25 bp, Homo sapien
aaagtggactcagtacattttccac

SEQ ID NO: 51546 - DNA, 25 bp, Homo sapien
aaagtggactcactacattttccac

SEQ ID NO: 51547 - DNA, 25 bp, Homo sapien
gaaaccggagagaccctatcttcaa

SEQ ID NO: 51548 - DNA, 25 bp, Homo sapien
gaaaccggagagtccctatcttcaa

SEQ ID NO: 51549 - DNA, 25 bp, Homo sapien
aaaggagaggttcctactcccagac

SEQ ID NO: 51550 - DNA, 25 bp, Homo sapien
aaaggagaggttgctactcccagac

SEQ ID NO: 51551 - DNA, 25 bp, Homo sapien
aggggttcatagttatccgtgacac

SEQ ID NO: 51552 - DNA, 25 bp, Homo sapien
aggggttcatagatatccgtgacac

SEQ ID NO: 51553 - DNA, 25 bp, Homo sapien
ccgttaatcgacattttaccggatg

SEQ ID NO: 51554 - DNA, 25 bp, Homo sapien
ccgttaatcgactttttaccggatg

SEQ ID NO: 51555 - DNA, 25 bp, Homo sapien
gtatcaggcgtagcttcgcgagtaa

SEQ ID NO: 51556 - DNA, 25 bp, Homo sapien
gtatcaggcgtaccttcgcgagtaa

SEQ ID NO: 51557 - DNA, 25 bp, Homo sapien
gcgtatataagcattttaccgtgac

SEQ ID NO: 51558 - DNA, 25 bp, Homo sapien
gcgtatataagctttttaccgtgac

SEQ ID NO: 51559 - DNA, 25 bp, Homo sapien
acgtaatactgtctttgtgcagggt

SEQ ID NO: 51560 - DNA, 25 bp, Homo sapien
acgtaatactgtgtttgtgcagggt

SEQ ID NO: 51561 - DNA, 25 bp, Homo sapien
ctagaacgagtcttatttagcattg

SEQ ID NO: 51562 - DNA, 25 bp, Homo sapien
ctagaacgagtcatatttagcattg

SEQ ID NO: 51563 - DNA, 25 bp, Homo sapien
atctcgctgacgtgtatccacttct

SEQ ID NO: 51564 - DNA, 25 bp, Homo sapien
atctcgctgacgagtatccacttct

SEQ ID NO: 51565 - DNA, 25 bp, Homo sapien
cgtacttctcggtgtgtcgtcccct

SEQ ID NO: 51566 - DNA, 25 bp, Homo sapien
cgtacttctcggagtgtcgtcccct

SEQ ID NO: 51567 - DNA, 25 bp, Homo sapien
agactactttgtgtactggtgttcc

SEQ ID NO: 51568 - DNA, 25 bp, Homo sapien
agactactttgtctactggtgttcc

SEQ ID NO: 51569 - DNA, 25 bp, Homo sapien
ctcagagtgttcttagtgcactctt

SEQ ID NO: 51570 - DNA, 25 bp, Homo sapien
ctcagagtgttcatagtgcactctt

SEQ ID NO: 51571 - DNA, 25 bp, Homo sapien
tcttcgtcgaagaacgggcagacgt

SEQ ID NO: 51572 - DNA, 25 bp, Homo sapien
tcttcgtcgaagtacgggcagacgt

SEQ ID NO: 51573 - DNA, 25 bp, Homo sapien
ctctgtgtcgacctcgtagggccag

SEQ ID NO: 51574 - DNA, 25 bp, Homo sapien
ctctgtgtcgacgtcgtagggccag

SEQ ID NO: 51575 - DNA, 25 bp, Homo sapien
gagagtcagaagaatccgtcgtcgt

SEQ ID NO: 51576 - DNA, 25 bp, Homo sapien
gagagtcagaagtatccgtcgtcgt

SEQ ID NO: 51577 - DNA, 25 bp, Homo sapien
tagaggaagtcgaggaagaccttcg

SEQ ID NO: 51578 - DNA, 25 bp, Homo sapien
tagaggaagtcgtggaagaccttcg

SEQ ID NO: 51579 - DNA, 25 bp, Homo sapien
aacttagaaaggagtctagctttgc

SEQ ID NO: 51580 - DNA, 25 bp, Homo sapien
aacttagaaaggtgtctagctttgc

SEQ ID NO: 51581 - DNA, 25 bp, Homo sapien
ttgtaacgtgtgtgtgaaccttgtc

SEQ ID NO: 51582 - DNA, 25 bp, Homo sapien
ttgtaacgtgtgagtgaaccttgtc

SEQ ID NO: 51583 - DNA, 25 bp, Homo sapien
cagtacctctagagtcaacgctgga

SEQ ID NO: 51584 - DNA, 25 bp, Homo sapien
cagtacctctagtgtcaacgctgga

SEQ ID NO: 51585 - DNA, 25 bp, Homo sapien
atccgtcttcggacgagacgtcttt

SEQ ID NO: 51586 - DNA, 25 bp, Homo sapien
atccgtcttcggtcgagacgtcttt

SEQ ID NO: 51587 - DNA, 25 bp, Homo sapien
accgcgcgcacgtggaggtgcacaa

SEQ ID NO: 51588 - DNA, 25 bp, Homo sapien
accgcgcgcacgaggaggtgcacaa

SEQ ID NO: 51589 - DNA, 25 bp, Homo sapien
ctcgacgacgatggaggtcctcaag

SEQ ID NO: 51590 - DNA, 25 bp, Homo sapien
ctcgacgacgatcgaggtcctcaag

SEQ ID NO: 51591 - DNA, 25 bp, Homo sapien
cgtctctggttcgtggggtctccga

SEQ ID NO: 51592 - DNA, 25 bp, Homo sapien
cgtctctggttcctggggtctccga

SEQ ID NO: 51593 - DNA, 25 bp, Homo sapien
ttcactgcttcctgcggtacggccc

SEQ ID NO: 51594 - DNA, 25 bp, Homo sapien
ttcactgcttccagcggtacggccc

SEQ ID NO: 51595 - DNA, 25 bp, Homo sapien
tccgggatgactagaccgtgggcat

SEQ ID NO: 51596 - DNA, 25 bp, Homo sapien
tccgggatgacttgaccgtgggcat

SEQ ID NO: 51597 - DNA, 25 bp, Homo sapien
ttgtaccggatgtgttccgggagcc

SEQ ID NO: 51598 - DNA, 25 bp, Homo sapien
ttgtaccggatgagttccgggagcc

SEQ ID NO: 51599 - DNA, 25 bp, Homo sapien
ttagaggagaagaggtccttctttc

SEQ ID NO: 51600 - DNA, 25 bp, Homo sapien
ttagaggagaagtggtccttctttc

SEQ ID NO: 51601 - DNA, 25 bp, Homo sapien
tggtaatgggtccttgtcttctacg

SEQ ID NO: 51602 - DNA, 25 bp, Homo sapien
tggtaatgggtcgttgtcttctacg

SEQ ID NO: 51603 - DNA, 25 bp, Homo sapien
gaggtgtgtgtcagtctgctcagtc

SEQ ID NO: 51604 - DNA, 25 bp, Homo sapien
gaggtgtgtgtctgtctgctcagtc

SEQ ID NO: 51605 - DNA, 25 bp, Homo sapien
gagggcgcgtgcacacgatccttca

SEQ ID NO: 51606 - DNA, 25 bp, Homo sapien
gagggcgcgtgctcacgatccttca

SEQ ID NO: 51607 - DNA, 25 bp, Homo sapien
ccggtcccgtttcaaacatctgacg

SEQ ID NO: 51608 - DNA, 25 bp, Homo sapien
ccggtcccgtttgaaacatctgacg

SEQ ID NO: 51609 - DNA, 25 bp, Homo sapien
gaccgataagtagtagagtctcgta

SEQ ID NO: 51610 - DNA, 25 bp, Homo sapien
gaccgataagtactagagtctcgta

SEQ ID NO: 51611 - DNA, 25 bp, Homo sapien
agacagagacggaagagccgtcgta

SEQ ID NO: 51612 - DNA, 25 bp, Homo sapien
agacagagacggtagagccgtcgta

SEQ ID NO: 51613 - DNA, 25 bp, Homo sapien
taaagacagcgagtgcacgggtgac

SEQ ID NO: 51614 - DNA, 25 bp, Homo sapien
taaagacagcgactgcacgggtgac

SEQ ID NO: 51615 - DNA, 25 bp, Homo sapien
taacggaggatagtaggacccggac

SEQ ID NO: 51616 - DNA, 25 bp, Homo sapien
taacggaggatactaggacccggac

SEQ ID NO: 51617 - DNA, 25 bp, Homo sapien
acctaatgtaggacattcatgcttc

SEQ ID NO: 51618 - DNA, 25 bp, Homo sapien
acctaatgtaggtcattcatgcttc

SEQ ID NO: 51619 - DNA, 25 bp, Homo sapien
taaagacggatccttcgggtcgtta

SEQ ID NO: 51620 - DNA, 25 bp, Homo sapien
taaagacggatcgttcgggtcgtta

SEQ ID NO: 51621 - DNA, 25 bp, Homo sapien
attgatgggtataccttgtctttac

SEQ ID NO: 51622 - DNA, 25 bp, Homo sapien
attgatgggtattccttgtctttac

SEQ ID NO: 51623 - DNA, 25 bp, Homo sapien
ccgtcgaaacttgtctcctttgttt

SEQ ID NO: 51624 - DNA, 25 bp, Homo sapien
ccgtcgaaacttctctcctttgttt

SEQ ID NO: 51625 - DNA, 25 bp, Homo sapien
tgacagggtccctgtccttcagtgg

SEQ ID NO: 51626 - DNA, 25 bp, Homo sapien
tgacagggtcccagtccttcagtgg

SEQ ID NO: 51627 - DNA, 25 bp, Homo sapien
tgcacagagtgcttctttctcttgg

SEQ ID NO: 51628 - DNA, 25 bp, Homo sapien
tgcacagagtgcatctttctcttgg

SEQ ID NO: 51629 - DNA, 25 bp, Homo sapien
ctacgaggtgcattttatcagtaag

SEQ ID NO: 51630 - DNA, 25 bp, Homo sapien
ctacgaggtgcaatttatcagtaag

SEQ ID NO: 51631 - DNA, 25 bp, Homo sapien
tgagtcttcctattcgttctgaagt

SEQ ID NO: 51632 - DNA, 25 bp, Homo sapien
tgagtcttcctaatcgttctgaagt

SEQ ID NO: 51633 - DNA, 25 bp, Homo sapien
gtcactctctccacttaaagacgag

SEQ ID NO: 51634 - DNA, 25 bp, Homo sapien
gtcactctctcctcttaaagacgag

SEQ ID NO: 51635 - DNA, 25 bp, Homo sapien
tcactcgtcctcttcctctggaagg

SEQ ID NO: 51636 - DNA, 25 bp, Homo sapien
tcactcgtcctcatcctctggaagg

SEQ ID NO: 51637 - DNA, 25 bp, Homo sapien
cctgaaccagtgtcccgtggagctt

SEQ ID NO: 51638 - DNA, 25 bp, Homo sapien
cctgaaccagtgacccgtggagctt

SEQ ID NO: 51639 - DNA, 25 bp, Homo sapien
ataagagtaccatccgaggagccgt

SEQ ID NO: 51640 - DNA, 25 bp, Homo sapien
ataagagtaccaaccgaggagccgt

SEQ ID NO: 51641 - DNA, 25 bp, Homo sapien
ctacagagttcatctataagagctt

SEQ ID NO: 51642 - DNA, 25 bp, Homo sapien
ctacagagttcaactataagagctt

SEQ ID NO: 51643 - DNA, 25 bp, Homo sapien
ccttagtacgccaaccaacgttatg

SEQ ID NO: 51644 - DNA, 25 bp, Homo sapien
ccttagtacgcctaccaacgttatg

SEQ ID NO: 51645 - DNA, 25 bp, Homo sapien
atgtgtcttggcactctgacctttt

SEQ ID NO: 51646 - DNA, 25 bp, Homo sapien
atgtgtcttggctctctgacctttt

SEQ ID NO: 51647 - DNA, 25 bp, Homo sapien
cgagtcggtcccttggtcgtatcga

SEQ ID NO: 51648 - DNA, 25 bp, Homo sapien
cgagtcggtcccatggtcgtatcga

SEQ ID NO: 51649 - DNA, 25 bp, Homo sapien
ggcgtttactcttcgttgtagacct

SEQ ID NO: 51650 - DNA, 25 bp, Homo sapien
ggcgtttactctacgttgtagacct

SEQ ID NO: 51651 - DNA, 25 bp, Homo sapien
cctgggttctttacgtcggtgtcag

SEQ ID NO: 51652 - DNA, 25 bp, Homo sapien
cctgggttcttttcgtcggtgtcag

SEQ ID NO: 51653 - DNA, 25 bp, Homo sapien
ctcggttacttctggtccatctact

SEQ ID NO: 51654 - DNA, 25 bp, Homo sapien
ctcggttacttcaggtccatctact

SEQ ID NO: 51655 - DNA, 25 bp, Homo sapien
gagtagtttacacttagtaccgccc

SEQ ID NO: 51656 - DNA, 25 bp, Homo sapien
gagtagtttacagttagtaccgccc

SEQ ID NO: 51657 - DNA, 25 bp, Homo sapien
gacccgtggaaaagggactattctg

SEQ ID NO: 51658 - DNA, 25 bp, Homo sapien
gacccgtggaaatgggactattctg

SEQ ID NO: 51659 - DNA, 25 bp, Homo sapien
taattaaagggaacgactatactcc

SEQ ID NO: 51660 - DNA, 25 bp, Homo sapien
taattaaagggatcgactatactcc

SEQ ID NO: 51661 - DNA, 25 bp, Homo sapien
agttctgtggaagactaacgtgtct

SEQ ID NO: 51662 - DNA, 25 bp, Homo sapien
agttctgtggaacactaacgtgtct

SEQ ID NO: 51663 - DNA, 25 bp, Homo sapien
gtttgagagatacctcgtaatcgtt

SEQ ID NO: 51664 - DNA, 25 bp, Homo sapien
gtttgagagatagctcgtaatcgtt

SEQ ID NO: 51665 - DNA, 25 bp, Homo sapien
tcggggtgtcacgtcttggagtctt

SEQ ID NO: 51666 - DNA, 25 bp, Homo sapien
tcggggtgtcacctcttggagtctt

SEQ ID NO: 51667 - DNA, 25 bp, Homo sapien
gagaatgtcacattactttaatcgt

SEQ ID NO: 51668 - DNA, 25 bp, Homo sapien
gagaatgtcacaatactttaatcgt

SEQ ID NO: 51669 - DNA, 25 bp, Homo sapien
gggaactcaccgtgtacgtaatagg

SEQ ID NO: 51670 - DNA, 25 bp, Homo sapien
gggaactcaccgagtacgtaatagg

SEQ ID NO: 51671 - DNA, 25 bp, Homo sapien
aggaaactcgacgacggcaggagac

SEQ ID NO: 51672 - DNA, 25 bp, Homo sapien
aggaaactcgaccacggcaggagac

SEQ ID NO: 51673 - DNA, 25 bp, Homo sapien
cagactggtgtagactagtaccgat

SEQ ID NO: 51674 - DNA, 25 bp, Homo sapien
cagactggtgtacactagtaccgat

SEQ ID NO: 51675 - DNA, 25 bp, Homo sapien
cagatgtcgtcgacagaaggtacgt

SEQ ID NO: 51676 - DNA, 25 bp, Homo sapien
cagatgtcgtcgtcagaaggtacgt

SEQ ID NO: 51677 - DNA, 25 bp, Homo sapien
caactggagacatcggaaagattat

SEQ ID NO: 51678 - DNA, 25 bp, Homo sapien
caactggagacaacggaaagattat

SEQ ID NO: 51679 - DNA, 25 bp, Homo sapien
ctactatgccaatagaaggacttct

SEQ ID NO: 51680 - DNA, 25 bp, Homo sapien
ctactatgccaaaagaaggacttct

SEQ ID NO: 51681 - DNA, 25 bp, Homo sapien
gtttttgtcctcaaaaaagcgatct

SEQ ID NO: 51682 - DNA, 25 bp, Homo sapien
gtttttgtcctctaaaaagcgatct

SEQ ID NO: 51683 - DNA, 25 bp, Homo sapien
cattatctcgtgtcacaagagatct

SEQ ID NO: 51684 - DNA, 25 bp, Homo sapien
cattatctcgtgacacaagagatct

SEQ ID NO: 51685 - DNA, 25 bp, Homo sapien
tgagtcgtctggtctgtgtcgagtc

SEQ ID NO: 51686 - DNA, 25 bp, Homo sapien
tgagtcgtctggactgtgtcgagtc

SEQ ID NO: 51687 - DNA, 25 bp, Homo sapien
tccggagtcgtctggacgccgagcc

SEQ ID NO: 51688 - DNA, 25 bp, Homo sapien
tccggagtcgtcaggacgccgagcc

SEQ ID NO: 51689 - DNA, 25 bp, Homo sapien
tcccgagggtctcgacctaggtccg

SEQ ID NO: 51690 - DNA, 25 bp, Homo sapien
tcccgagggtctggacctaggtccg

SEQ ID NO: 51691 - DNA, 25 bp, Homo sapien
cattgaatgtatgtacttatgtcct

SEQ ID NO: 51692 - DNA, 25 bp, Homo sapien
cattgaatgtatctacttatgtcct

SEQ ID NO: 51693 - DNA, 25 bp, Homo sapien
agtccgttttatacgtaccgttttc

SEQ ID NO: 51694 - DNA, 25 bp, Homo sapien
agtccgttttattcgtaccgttttc

SEQ ID NO: 51695 - DNA, 25 bp, Homo sapien
gtgcacttcgttaaaatcttttcgt

SEQ ID NO: 51696 - DNA, 25 bp, Homo sapien
gtgcacttcgtttaaatcttttcgt

SEQ ID NO: 51697 - DNA, 25 bp, Homo sapien
tgaagttacaccaaattgtcgttcg

SEQ ID NO: 51698 - DNA, 25 bp, Homo sapien
tgaagttacacctaattgtcgttcg

SEQ ID NO: 51699 - DNA, 25 bp, Homo sapien
acaaacgtagtctcatatcgttaag

SEQ ID NO: 51700 - DNA, 25 bp, Homo sapien
acaaacgtagtcacatatcgttaag

SEQ ID NO: 51701 - DNA, 25 bp, Homo sapien
gtaaaagacgattaacctctttgtt

SEQ ID NO: 51702 - DNA, 25 bp, Homo sapien
gtaaaagacgataaacctctttgtt

SEQ ID NO: 51703 - DNA, 25 bp, Homo sapien
actggtaagtgaaatccctttaatt

SEQ ID NO: 51704 - DNA, 25 bp, Homo sapien
actggtaagtgatatccctttaatt

SEQ ID NO: 51705 - DNA, 25 bp, Homo sapien
caagtacggttttaatcctttttgt

SEQ ID NO: 51706 - DNA, 25 bp, Homo sapien
caagtacggtttaaatcctttttgt

SEQ ID NO: 51707 - DNA, 25 bp, Homo sapien
ggacgggttataataccttcgtttt

SEQ ID NO: 51708 - DNA, 25 bp, Homo sapien
ggacgggttatattaccttcgtttt

SEQ ID NO: 51709 - DNA, 25 bp, Homo sapien
agaccggactcttgcctctctaggc

SEQ ID NO: 51710 - DNA, 25 bp, Homo sapien
agaccggactctagcctctctaggc

SEQ ID NO: 51711 - DNA, 25 bp, Homo sapien
ccgagtatacgtttcaccttctgtg

SEQ ID NO: 51712 - DNA, 25 bp, Homo sapien
ccgagtatacgtatcaccttctgtg

SEQ ID NO: 51713 - DNA, 25 bp, Homo sapien
cttcacggacgagtgcgattcgggt

SEQ ID NO: 51714 - DNA, 25 bp, Homo sapien
cttcacggacgactgcgattcgggt

SEQ ID NO: 51715 - DNA, 25 bp, Homo sapien
agaccctcacgactggattcactgt

SEQ ID NO: 51716 - DNA, 25 bp, Homo sapien
agaccctcacgagtggattcactgt

SEQ ID NO: 51717 - DNA, 25 bp, Homo sapien
ccccctgtagtatctgtttctccgt

SEQ ID NO: 51718 - DNA, 25 bp, Homo sapien
ccccctgtagtaactgtttctccgt

SEQ ID NO: 51719 - DNA, 25 bp, Homo sapien
gcattcctagtagagttacaccgtc

SEQ ID NO: 51720 - DNA, 25 bp, Homo sapien
gcattcctagtacagttacaccgtc

SEQ ID NO: 51721 - DNA, 25 bp, Homo sapien
ggtgatttcctttccgtaccccgtc

SEQ ID NO: 51722 - DNA, 25 bp, Homo sapien
ggtgatttccttaccgtaccccgtc

SEQ ID NO: 51723 - DNA, 25 bp, Homo sapien
cgacggttgcggacccgacaaagac

SEQ ID NO: 51724 - DNA, 25 bp, Homo sapien
cgacggttgcggtcccgacaaagac

SEQ ID NO: 51725 - DNA, 25 bp, Homo sapien
aaagtcctggggtccggaccgccga

SEQ ID NO: 51726 - DNA, 25 bp, Homo sapien
aaagtcctggggaccggaccgccga

SEQ ID NO: 51727 - DNA, 25 bp, Homo sapien
cctccgggagttcttgactctccgg

SEQ ID NO: 51728 - DNA, 25 bp, Homo sapien
cctccgggagttgttgactctccgg

SEQ ID NO: 51729 - DNA, 25 bp, Homo sapien
taaccccgagggttttctaaaccgg

SEQ ID NO: 51730 - DNA, 25 bp, Homo sapien
taaccccgagggatttctaaaccgg

SEQ ID NO: 51731 - DNA, 25 bp, Homo sapien
cgtcctccacggaatttcttgttgg

SEQ ID NO: 51732 - DNA, 25 bp, Homo sapien
cgtcctccacggtatttcttgttgg

SEQ ID NO: 51733 - DNA, 25 bp, Homo sapien
atttccaggttaaacattgtcgttc

SEQ ID NO: 51734 - DNA, 25 bp, Homo sapien
atttccaggttatacattgtcgttc

SEQ ID NO: 51735 - DNA, 25 bp, Homo sapien
tgtttattcgtacataacttggttc

SEQ ID NO: 51736 - DNA, 25 bp, Homo sapien
tgtttattcgtagataacttggttc

SEQ ID NO: 51737 - DNA, 25 bp, Homo sapien
tttacgaccataagactgtggttat

SEQ ID NO: 51738 - DNA, 25 bp, Homo sapien
tttacgaccatatgactgtggttat

SEQ ID NO: 51739 - DNA, 25 bp, Homo sapien
atacagacgtgtttacggttccgat

SEQ ID NO: 51740 - DNA, 25 bp, Homo sapien
atacagacgtgtatacggttccgat

SEQ ID NO: 51741 - DNA, 25 bp, Homo sapien
acataaggtccgtcgagtgtgacat

SEQ ID NO: 51742 - DNA, 25 bp, Homo sapien
acataaggtccgacgagtgtgacat

SEQ ID NO: 51743 - DNA, 25 bp, Homo sapien
acgtaacagcggtagacgacagcat

SEQ ID NO: 51744 - DNA, 25 bp, Homo sapien
acgtaacagcggaagacgacagcat

SEQ ID NO: 51745 - DNA, 25 bp, Homo sapien
aatttactcgggagacgtctacggg

SEQ ID NO: 51746 - DNA, 25 bp, Homo sapien
aatttactcgggtgacgtctacggg

SEQ ID NO: 51747 - DNA, 25 bp, Homo sapien
aatatgggttgatgtacgtcagaca

SEQ ID NO: 51748 - DNA, 25 bp, Homo sapien
aatatgggttgaagtacgtcagaca

SEQ ID NO: 51749 - DNA, 25 bp, Homo sapien
ggaaaccctccgatacgtcctgaca

SEQ ID NO: 51750 - DNA, 25 bp, Homo sapien
ggaaaccctccgttacgtcctgaca

SEQ ID NO: 51751 - DNA, 25 bp, Homo sapien
ccaacaggtttcatggtccgacgat

SEQ ID NO: 51752 - DNA, 25 bp, Homo sapien
ccaacaggtttcttggtccgacgat

SEQ ID NO: 51753 - DNA, 25 bp, Homo sapien
cttcatagtttttgtagtgtaccta

SEQ ID NO: 51754 - DNA, 25 bp, Homo sapien
cttcatagttttagtagtgtaccta

SEQ ID NO: 51755 - DNA, 25 bp, Homo sapien
cttatgtgtttcctagtttaagtcg

SEQ ID NO: 51756 - DNA, 25 bp, Homo sapien
cttatgtgtttcgtagtttaagtcg

SEQ ID NO: 51757 - DNA, 25 bp, Homo sapien
tcaagtgtcttagtggtctaactgt

SEQ ID NO: 51758 - DNA, 25 bp, Homo sapien
tcaagtgtcttactggtctaactgt

SEQ ID NO: 51759 - DNA, 25 bp, Homo sapien
tgtctgaagttttccagatttcagt

SEQ ID NO: 51760 - DNA, 25 bp, Homo sapien
tgtctgaagtttaccagatttcagt

SEQ ID NO: 51761 - DNA, 25 bp, Homo sapien
gtccgaagtaaaagacaacttctca

SEQ ID NO: 51762 - DNA, 25 bp, Homo sapien
gtccgaagtaaatgacaacttctca

SEQ ID NO: 51763 - DNA, 25 bp, Homo sapien
ggacataagaggacccatctcgact

SEQ ID NO: 51764 - DNA, 25 bp, Homo sapien
ggacataagaggtcccatctcgact

SEQ ID NO: 51765 - DNA, 25 bp, Homo sapien
gtacctaaggttctctctaaaacgt

SEQ ID NO: 51766 - DNA, 25 bp, Homo sapien
gtacctaaggttgtctctaaaacgt

SEQ ID NO: 51767 - DNA, 25 bp, Homo sapien
gagccttacatttgtctcgaaccac

SEQ ID NO: 51768 - DNA, 25 bp, Homo sapien
gagccttacattagtctcgaaccac

SEQ ID NO: 51769 - DNA, 25 bp, Homo sapien
ctgaacatatttctagctgaacctg

SEQ ID NO: 51770 - DNA, 25 bp, Homo sapien
ctgaacatatttgtagctgaacctg

SEQ ID NO: 51771 - DNA, 25 bp, Homo sapien
aagacaagatcctttaagttcactt

SEQ ID NO: 51772 - DNA, 25 bp, Homo sapien
aagacaagatccattaagttcactt

SEQ ID NO: 51773 - DNA, 25 bp, Homo sapien
aaaaaactaactgacctggttcaag

SEQ ID NO: 51774 - DNA, 25 bp, Homo sapien
aaaaaactaactcacctggttcaag

SEQ ID NO: 51775 - DNA, 25 bp, Homo sapien
ccattaaagacttttcgttctaaat

SEQ ID NO: 51776 - DNA, 25 bp, Homo sapien
ccattaaagactattcgttctaaat

SEQ ID NO: 51777 - DNA, 25 bp, Homo sapien
acttagaactaaacacttctttaat

SEQ ID NO: 51778 - DNA, 25 bp, Homo sapien
acttagaactaatcacttctttaat

SEQ ID NO: 51779 - DNA, 25 bp, Homo sapien
aatgcggtagaagttcattgtcgac

SEQ ID NO: 51780 - DNA, 25 bp, Homo sapien
aatgcggtagaacttcattgtcgac

SEQ ID NO: 51781 - DNA, 25 bp, Homo sapien
ttctcctagcgtcacgtctgtccgg

SEQ ID NO: 51782 - DNA, 25 bp, Homo sapien
ttctcctagcgtgacgtctgtccgg

SEQ ID NO: 51783 - DNA, 25 bp, Homo sapien
tttcctttggggttgtacgtacgtg

SEQ ID NO: 51784 - DNA, 25 bp, Homo sapien
tttcctttggggatgtacgtacgtg

SEQ ID NO: 51785 - DNA, 25 bp, Homo sapien
cgtttacaatacaccggccgtcttc

SEQ ID NO: 51786 - DNA, 25 bp, Homo sapien
cgtttacaatactccggccgtcttc

SEQ ID NO: 51787 - DNA, 25 bp, Homo sapien
gttgacaagcaacacacacgtctaa

SEQ ID NO: 51788 - DNA, 25 bp, Homo sapien
gttgacaagcaagacacacgtctaa

SEQ ID NO: 51789 - DNA, 25 bp, Homo sapien
ctgagataagttacggacagtacaa

SEQ ID NO: 51790 - DNA, 25 bp, Homo sapien
ctgagataagtttcggacagtacaa

SEQ ID NO: 51791 - DNA, 25 bp, Homo sapien
aaggtactttaacgacgcgaacact

SEQ ID NO: 51792 - DNA, 25 bp, Homo sapien
aaggtactttaaggacgcgaacact

SEQ ID NO: 51793 - DNA, 25 bp, Homo sapien
caaagataccggaaagtatcaacct

SEQ ID NO: 51794 - DNA, 25 bp, Homo sapien
caaagataccggtaagtatcaacct

SEQ ID NO: 51795 - DNA, 25 bp, Homo sapien
aaatggtcgtctgagttcagtttcc

SEQ ID NO: 51796 - DNA, 25 bp, Homo sapien
aaatggtcgtctcagttcagtttcc

SEQ ID NO: 51797 - DNA, 25 bp, Homo sapien
ctatgtagtcgacctttagtgaacc

SEQ ID NO: 51798 - DNA, 25 bp, Homo sapien
ctatgtagtcgagctttagtgaacc

SEQ ID NO: 51799 - DNA, 25 bp, Homo sapien
tgacgtgtcgttcgatttaagaacc

SEQ ID NO: 51800 - DNA, 25 bp, Homo sapien
tgacgtgtcgttggatttaagaacc

SEQ ID NO: 51801 - DNA, 25 bp, Homo sapien
actaggtactcgaattttgtcttac

SEQ ID NO: 51802 - DNA, 25 bp, Homo sapien
actaggtactcgtattttgtcttac

SEQ ID NO: 51803 - DNA, 25 bp, Homo sapien
cttatcgtcatgtctttgattatcg

SEQ ID NO: 51804 - DNA, 25 bp, Homo sapien
cttatcgtcatgactttgattatcg

SEQ ID NO: 51805 - DNA, 25 bp, Homo sapien
cttaggtgctggtaaggtcgacttc

SEQ ID NO: 51806 - DNA, 25 bp, Homo sapien
cttaggtgctggaaaggtcgacttc

SEQ ID NO: 51807 - DNA, 25 bp, Homo sapien
aagaggagaggatcgaggtagacca

SEQ ID NO: 51808 - DNA, 25 bp, Homo sapien
aagaggagaggaacgaggtagacca

SEQ ID NO: 51809 - DNA, 25 bp, Homo sapien
gagaccgaggagcagataccgacag

SEQ ID NO: 51810 - DNA, 25 bp, Homo sapien
gagaccgaggaggagataccgacag

SEQ ID NO: 51811 - DNA, 25 bp, Homo sapien
agaagtgtaggtgacgcctcaacat

SEQ ID NO: 51812 - DNA, 25 bp, Homo sapien
agaagtgtaggtcacgcctcaacat

SEQ ID NO: 51813 - DNA, 25 bp, Homo sapien
cgcgaacaggaagacccctagtatc

SEQ ID NO: 51814 - DNA, 25 bp, Homo sapien
cgcgaacaggaacacccctagtatc

SEQ ID NO: 51815 - DNA, 25 bp, Homo sapien
cgccgtaggcgcaccgacctgagtg

SEQ ID NO: 51816 - DNA, 25 bp, Homo sapien
cgccgtaggcgctccgacctgagtg

SEQ ID NO: 51817 - DNA, 25 bp, Homo sapien
gccggtgtcttatgcgtagcttaag

SEQ ID NO: 51818 - DNA, 25 bp, Homo sapien
gccggtgtcttaagcgtagcttaag

SEQ ID NO: 51819 - DNA, 25 bp, Homo sapien
gggtccccgttgaccgtcgggacag

SEQ ID NO: 51820 - DNA, 25 bp, Homo sapien
gggtccccgttgtccgtcgggacag

SEQ ID NO: 51821 - DNA, 25 bp, Homo sapien
gtcttcgcgactagtcttagcccag

SEQ ID NO: 51822 - DNA, 25 bp, Homo sapien
gtcttcgcgacttgtcttagcccag

SEQ ID NO: 51823 - DNA, 25 bp, Homo sapien
gagtccacgatcaccgtaaacctac

SEQ ID NO: 51824 - DNA, 25 bp, Homo sapien
gagtccacgatctccgtaaacctac

SEQ ID NO: 51825 - DNA, 25 bp, Homo sapien
atgaagacaggtttcatcaggtctc

SEQ ID NO: 51826 - DNA, 25 bp, Homo sapien
atgaagacaggtatcatcaggtctc

SEQ ID NO: 51827 - DNA, 25 bp, Homo sapien
ttaaggaaagtcagtcgtccggggc

SEQ ID NO: 51828 - DNA, 25 bp, Homo sapien
ttaaggaaagtctgtcgtccggggc

SEQ ID NO: 51829 - DNA, 25 bp, Homo sapien
ttaaggtagaagttgaccccagata

SEQ ID NO: 51830 - DNA, 25 bp, Homo sapien
ttaaggtagaagatgaccccagata

SEQ ID NO: 51831 - DNA, 25 bp, Homo sapien
tagaggcactacaagaaccactgaa

SEQ ID NO: 51832 - DNA, 25 bp, Homo sapien
tagaggcactactagaaccactgaa

SEQ ID NO: 51833 - DNA, 25 bp, Homo sapien
agacaacccaaggaccctaccttag

SEQ ID NO: 51834 - DNA, 25 bp, Homo sapien
agacaacccaagcaccctaccttag

SEQ ID NO: 51835 - DNA, 25 bp, Homo sapien
ttacagactcagacccaaggtctag

SEQ ID NO: 51836 - DNA, 25 bp, Homo sapien
ttacagactcagtcccaaggtctag

SEQ ID NO: 51837 - DNA, 25 bp, Homo sapien
gttaggatcgattcattggtccagt

SEQ ID NO: 51838 - DNA, 25 bp, Homo sapien
gttaggatcgatacattggtccagt

SEQ ID NO: 51839 - DNA, 25 bp, Homo sapien
ttagaggaaaccaaagtaggtccta

SEQ ID NO: 51840 - DNA, 25 bp, Homo sapien
ttagaggaaacctaagtaggtccta

SEQ ID NO: 51841 - DNA, 25 bp, Homo sapien
agaggtataatcacgatggtttcac

SEQ ID NO: 51842 - DNA, 25 bp, Homo sapien
agaggtataatctcgatggtttcac

SEQ ID NO: 51843 - DNA, 25 bp, Homo sapien
gacggggagtcctggatttcttaca

SEQ ID NO: 51844 - DNA, 25 bp, Homo sapien
gacggggagtccaggatttcttaca

SEQ ID NO: 51845 - DNA, 25 bp, Homo sapien
gaattcgttctcatgatgtcattaa

SEQ ID NO: 51846 - DNA, 25 bp, Homo sapien
gaattcgttctcttgatgtcattaa

SEQ ID NO: 51847 - DNA, 25 bp, Homo sapien
ccgttttgaaggtttagactacgtt

SEQ ID NO: 51848 - DNA, 25 bp, Homo sapien
ccgttttgaaggattagactacgtt

SEQ ID NO: 51849 - DNA, 25 bp, Homo sapien
tatagctccttttagcttgatacga

SEQ ID NO: 51850 - DNA, 25 bp, Homo sapien
tatagctcctttaagcttgatacga

SEQ ID NO: 51851 - DNA, 25 bp, Homo sapien
tagagacccttggaactcagatcta

SEQ ID NO: 51852 - DNA, 25 bp, Homo sapien
tagagacccttgcaactcagatcta

SEQ ID NO: 51853 - DNA, 25 bp, Homo sapien
ggtccgtccgtccaccttgtcttag

SEQ ID NO: 51854 - DNA, 25 bp, Homo sapien
ggtccgtccgtcgaccttgtcttag

SEQ ID NO: 51855 - DNA, 25 bp, Homo sapien
ccttcaactgtcgtctctttgtcta

SEQ ID NO: 51856 - DNA, 25 bp, Homo sapien
ccttcaactgtcctctctttgtcta

SEQ ID NO: 51857 - DNA, 25 bp, Homo sapien
gccttcaacaactctagtggtttct

SEQ ID NO: 51858 - DNA, 25 bp, Homo sapien
gccttcaacaacactagtggtttct

SEQ ID NO: 51859 - DNA, 25 bp, Homo sapien
acgaccaagaaggactccgaggttg

SEQ ID NO: 51860 - DNA, 25 bp, Homo sapien
acgaccaagaagcactccgaggttg

SEQ ID NO: 51861 - DNA, 25 bp, Homo sapien
gtcacaagagaccacaccggatgtg

SEQ ID NO: 51862 - DNA, 25 bp, Homo sapien
gtcacaagagacgacaccggatgtg

SEQ ID NO: 51863 - DNA, 25 bp, Homo sapien
tcggcaacgactgcacccagtactg

SEQ ID NO: 51864 - DNA, 25 bp, Homo sapien
tcggcaacgactccacccagtactg

SEQ ID NO: 51865 - DNA, 25 bp, Homo sapien
agggtagcaaaacacccggtctacg

SEQ ID NO: 51866 - DNA, 25 bp, Homo sapien
agggtagcaaaagacccggtctacg

SEQ ID NO: 51867 - DNA, 25 bp, Homo sapien
ccagggactaacagggtcagtgttc

SEQ ID NO: 51868 - DNA, 25 bp, Homo sapien
ccagggactaactgggtcagtgttc

SEQ ID NO: 51869 - DNA, 25 bp, Homo sapien
ccccgtgtatcaacagttagtcttc

SEQ ID NO: 51870 - DNA, 25 bp, Homo sapien
ccccgtgtatcatcagttagtcttc

SEQ ID NO: 51871 - DNA, 25 bp, Homo sapien
accaccggacgtctcgggtttcgtc

SEQ ID NO: 51872 - DNA, 25 bp, Homo sapien
accaccggacgtgtcgggtttcgtc

SEQ ID NO: 51873 - DNA, 25 bp, Homo sapien
ctgcacggcccctgtgtgtgtctct

SEQ ID NO: 51874 - DNA, 25 bp, Homo sapien
ctgcacggccccagtgtgtgtctct

SEQ ID NO: 51875 - DNA, 25 bp, Homo sapien
agtgaaggaacctcgagtggtgtca

SEQ ID NO: 51876 - DNA, 25 bp, Homo sapien
agtgaaggaaccacgagtggtgtca

SEQ ID NO: 51877 - DNA, 25 bp, Homo sapien
gaaggggaacccatactggtttcga

SEQ ID NO: 51878 - DNA, 25 bp, Homo sapien
gaaggggaacccttactggtttcga

SEQ ID NO: 51879 - DNA, 25 bp, Homo sapien
agtaggacgttttttacaagtttgg

SEQ ID NO: 51880 - DNA, 25 bp, Homo sapien
agtaggacgtttattacaagtttgg

SEQ ID NO: 51881 - DNA, 25 bp, Homo sapien
cctggacgggtcatatgaattcttg

SEQ ID NO: 51882 - DNA, 25 bp, Homo sapien
cctggacgggtcttatgaattcttg

SEQ ID NO: 51883 - DNA, 25 bp, Homo sapien
ttgacgggtctcatcgactttcagc

SEQ ID NO: 51884 - DNA, 25 bp, Homo sapien
ttgacgggtctcttcgactttcagc

SEQ ID NO: 51885 - DNA, 25 bp, Homo sapien
tcggtggacggtaagactgttaaag

SEQ ID NO: 51886 - DNA, 25 bp, Homo sapien
tcggtggacggttagactgttaaag

SEQ ID NO: 51887 - DNA, 25 bp, Homo sapien
gtcgtcggcctttactgtgtaactt

SEQ ID NO: 51888 - DNA, 25 bp, Homo sapien
gtcgtcggccttaactgtgtaactt

SEQ ID NO: 51889 - DNA, 25 bp, Homo sapien
acgtcgaagacgtctaagtcggaaa

SEQ ID NO: 51890 - DNA, 25 bp, Homo sapien
acgtcgaagacgactaagtcggaaa

SEQ ID NO: 51891 - DNA, 25 bp, Homo sapien
cttagaacataaacaggtctcccgg

SEQ ID NO: 51892 - DNA, 25 bp, Homo sapien
cttagaacataatcaggtctcccgg

SEQ ID NO: 51893 - DNA, 25 bp, Homo sapien
catttttcgctaatcgtacgcctgc

SEQ ID NO: 51894 - DNA, 25 bp, Homo sapien
catttttcgctattcgtacgcctgc

SEQ ID NO: 51895 - DNA, 25 bp, Homo sapien
atgggcttgcagtagtccgcaccgt

SEQ ID NO: 51896 - DNA, 25 bp, Homo sapien
atgggcttgcagaagtccgcaccgt

SEQ ID NO: 51897 - DNA, 25 bp, Homo sapien
ttattccgtcttttgagtcttaaag

SEQ ID NO: 51898 - DNA, 25 bp, Homo sapien
ttattccgtcttatgagtcttaaag

SEQ ID NO: 51899 - DNA, 25 bp, Homo sapien
ctcacctcgttcatctgtttagaag

SEQ ID NO: 51900 - DNA, 25 bp, Homo sapien
ctcacctcgttcttctgtttagaag

SEQ ID NO: 51901 - DNA, 25 bp, Homo sapien
gtctctctgtctacagtgtactaaa

SEQ ID NO: 51902 - DNA, 25 bp, Homo sapien
gtctctctgtcttcagtgtactaaa

SEQ ID NO: 51903 - DNA, 25 bp, Homo sapien
gttaaccgttactacagtcagaaga

SEQ ID NO: 51904 - DNA, 25 bp, Homo sapien
gttaaccgttacaacagtcagaaga

SEQ ID NO: 51905 - DNA, 25 bp, Homo sapien
cacagagagtcaagtttccgtttac

SEQ ID NO: 51906 - DNA, 25 bp, Homo sapien
cacagagagtcatgtttccgtttac

SEQ ID NO: 51907 - DNA, 25 bp, Homo sapien
caagtcgcggtgttatctctgtctt

SEQ ID NO: 51908 - DNA, 25 bp, Homo sapien
caagtcgcggtgatatctctgtctt

SEQ ID NO: 51909 - DNA, 25 bp, Homo sapien
ctctcttgcggtgtcgtctctctgg

SEQ ID NO: 51910 - DNA, 25 bp, Homo sapien
ctctcttgcggtctcgtctctctgg

SEQ ID NO: 51911 - DNA, 25 bp, Homo sapien
cgttattcaactatatagtcctgtg

SEQ ID NO: 51912 - DNA, 25 bp, Homo sapien
cgttattcaactttatagtcctgtg

SEQ ID NO: 51913 - DNA, 25 bp, Homo sapien
tggtatttccactacacttttcgag

SEQ ID NO: 51914 - DNA, 25 bp, Homo sapien
tggtatttccacaacacttttcgag

SEQ ID NO: 51915 - DNA, 25 bp, Homo sapien
ttgtactttatcgtacctttgtgaa

SEQ ID NO: 51916 - DNA, 25 bp, Homo sapien
ttgtactttatcctacctttgtgaa

SEQ ID NO: 51917 - DNA, 25 bp, Homo sapien
gtctctcgaccgaaccccggtgaag

SEQ ID NO: 51918 - DNA, 25 bp, Homo sapien
gtctctcgaccgtaccccggtgaag

SEQ ID NO: 51919 - DNA, 25 bp, Homo sapien
tactctgaccgtttcttgtttacga

SEQ ID NO: 51920 - DNA, 25 bp, Homo sapien
tactctgaccgtatcttgtttacga

SEQ ID NO: 51921 - DNA, 25 bp, Homo sapien
acacagactctggtcactgtcttcc

SEQ ID NO: 51922 - DNA, 25 bp, Homo sapien
acacagactctgctcactgtcttcc

SEQ ID NO: 51923 - DNA, 25 bp, Homo sapien
aacagtcctagtacatgttgtcgta

SEQ ID NO: 51924 - DNA, 25 bp, Homo sapien
aacagtcctagttcatgttgtcgta

SEQ ID NO: 51925 - DNA, 25 bp, Homo sapien
tgtatgtatctccctcttctttctt

SEQ ID NO: 51926 - DNA, 25 bp, Homo sapien
tgtatgtatctcgctcttctttctt

SEQ ID NO: 51927 - DNA, 25 bp, Homo sapien
ggtaaacttttgttactcgtctcct

SEQ ID NO: 51928 - DNA, 25 bp, Homo sapien
ggtaaacttttgatactcgtctcct

SEQ ID NO: 51929 - DNA, 25 bp, Homo sapien
gtacaatagtttatatgtacgtctc

SEQ ID NO: 51930 - DNA, 25 bp, Homo sapien
gtacaatagtttttatgtacgtctc

SEQ ID NO: 51931 - DNA, 25 bp, Homo sapien
agtgaggagaataaacgattcctcg

SEQ ID NO: 51932 - DNA, 25 bp, Homo sapien
agtgaggagaattaacgattcctcg

SEQ ID NO: 51933 - DNA, 25 bp, Homo sapien
ggacaaggaccgaaatcagggtccc

SEQ ID NO: 51934 - DNA, 25 bp, Homo sapien
ggacaaggaccgtaatcagggtccc

SEQ ID NO: 51935 - DNA, 25 bp, Homo sapien
gagagacacgcgtccgaggcctctc

SEQ ID NO: 51936 - DNA, 25 bp, Homo sapien
gagagacacgcgaccgaggcctctc

SEQ ID NO: 51937 - DNA, 25 bp, Homo sapien
gggcgcgtccttgtagaacctctac

SEQ ID NO: 51938 - DNA, 25 bp, Homo sapien
gggcgcgtccttctagaacctctac

SEQ ID NO: 51939 - DNA, 25 bp, Homo sapien
aggactctgtcttttctacagacat

SEQ ID NO: 51940 - DNA, 25 bp, Homo sapien
aggactctgtctattctacagacat

SEQ ID NO: 51941 - DNA, 25 bp, Homo sapien
cagaagctcgttatctacctacaga

SEQ ID NO: 51942 - DNA, 25 bp, Homo sapien
cagaagctcgttttctacctacaga

SEQ ID NO: 51943 - DNA, 25 bp, Homo sapien
acgggagcgttattagtgaccatcg

SEQ ID NO: 51944 - DNA, 25 bp, Homo sapien
acgggagcgttaatagtgaccatcg

SEQ ID NO: 51945 - DNA, 25 bp, Homo sapien
accggtactcaactagtgactcctc

SEQ ID NO: 51946 - DNA, 25 bp, Homo sapien
accggtactcaagtagtgactcctc

SEQ ID NO: 51947 - DNA, 25 bp, Homo sapien
aagtcgtacaaaggtgaactgttac

SEQ ID NO: 51948 - DNA, 25 bp, Homo sapien
aagtcgtacaaacgtgaactgttac

SEQ ID NO: 51949 - DNA, 25 bp, Homo sapien
acggtctcgtcaaggttgcagtgta

SEQ ID NO: 51950 - DNA, 25 bp, Homo sapien
acggtctcgtcatggttgcagtgta

SEQ ID NO: 51951 - DNA, 25 bp, Homo sapien
cgaccgtgtcacttgagttgtggga

SEQ ID NO: 51952 - DNA, 25 bp, Homo sapien
cgaccgtgtcacatgagttgtggga

SEQ ID NO: 51953 - DNA, 25 bp, Homo sapien
caccgagcaggtacgatatcactga

SEQ ID NO: 51954 - DNA, 25 bp, Homo sapien
caccgagcaggttcgatatcactga

SEQ ID NO: 51955 - DNA, 25 bp, Homo sapien
aagtaggacgggtactggtcctgac

SEQ ID NO: 51956 - DNA, 25 bp, Homo sapien
aagtaggacgggaactggtcctgac

SEQ ID NO: 51957 - DNA, 25 bp, Homo sapien
aaacgacggaaggtgatccgtctac

SEQ ID NO: 51958 - DNA, 25 bp, Homo sapien
aaacgacggaagctgatccgtctac

SEQ ID NO: 51959 - DNA, 25 bp, Homo sapien
atgagtcgacacacccttaccgaga

SEQ ID NO: 51960 - DNA, 25 bp, Homo sapien
atgagtcgacactcccttaccgaga

SEQ ID NO: 51961 - DNA, 25 bp, Homo sapien
agagtgtcaccaatctcggtgagac

SEQ ID NO: 51962 - DNA, 25 bp, Homo sapien
agagtgtcaccattctcggtgagac

SEQ ID NO: 51963 - DNA, 25 bp, Homo sapien
aagatgtactctatgtctctgggtc

SEQ ID NO: 51964 - DNA, 25 bp, Homo sapien
aagatgtactctttgtctctgggtc

SEQ ID NO: 51965 - DNA, 25 bp, Homo sapien
gggtaatacacttcttttgagactc

SEQ ID NO: 51966 - DNA, 25 bp, Homo sapien
gggtaatacactacttttgagactc

SEQ ID NO: 51967 - DNA, 25 bp, Homo sapien
atggtagaaccgaaacttctcaccc

SEQ ID NO: 51968 - DNA, 25 bp, Homo sapien
atggtagaaccgtaacttctcaccc

SEQ ID NO: 51969 - DNA, 25 bp, Homo sapien
aagggtcaaagagacaactcaaact

SEQ ID NO: 51970 - DNA, 25 bp, Homo sapien
aagggtcaaagacacaactcaaact

SEQ ID NO: 51971 - DNA, 25 bp, Homo sapien
cactgttcaagagattctgtcacac

SEQ ID NO: 51972 - DNA, 25 bp, Homo sapien
cactgttcaagacattctgtcacac

SEQ ID NO: 51973 - DNA, 25 bp, Homo sapien
aacgaaggagaagattccgaactac

SEQ ID NO: 51974 - DNA, 25 bp, Homo sapien
aacgaaggagaacattccgaactac

SEQ ID NO: 51975 - DNA, 25 bp, Homo sapien
agacgcagaaactcggtccccggac

SEQ ID NO: 51976 - DNA, 25 bp, Homo sapien
agacgcagaaacacggtccccggac

SEQ ID NO: 51977 - DNA, 25 bp, Homo sapien
cctgagtgtactagagtctcccgga

SEQ ID NO: 51978 - DNA, 25 bp, Homo sapien
cctgagtgtacttgagtctcccgga

SEQ ID NO: 51979 - DNA, 25 bp, Homo sapien
gttacagaagttagggtcgccgatc

SEQ ID NO: 51980 - DNA, 25 bp, Homo sapien
gttacagaagtttgggtcgccgatc

SEQ ID NO: 51981 - DNA, 25 bp, Homo sapien
agtcgtccaaatccggcgcccgcgg

SEQ ID NO: 51982 - DNA, 25 bp, Homo sapien
agtcgtccaaatgcggcgcccgcgg

SEQ ID NO: 51983 - DNA, 25 bp, Homo sapien
agaaggagaaacgaacactcccgtt

SEQ ID NO: 51984 - DNA, 25 bp, Homo sapien
agaaggagaaaccaacactcccgtt

SEQ ID NO: 51985 - DNA, 25 bp, Homo sapien
aagagaaaggaaaaacgtaccccct

SEQ ID NO: 51986 - DNA, 25 bp, Homo sapien
aagagaaaggaataacgtaccccct

SEQ ID NO: 51987 - DNA, 25 bp, Homo sapien
agaaaaagagcaaaagttcactgct

SEQ ID NO: 51988 - DNA, 25 bp, Homo sapien
agaaaaagagcataagttcactgct

SEQ ID NO: 51989 - DNA, 25 bp, Homo sapien
agtctcatagcctggttctacgtga

SEQ ID NO: 51990 - DNA, 25 bp, Homo sapien
agtctcatagccaggttctacgtga

SEQ ID NO: 51991 - DNA, 25 bp, Homo sapien
ttctgtggtaacacaggttgacata

SEQ ID NO: 51992 - DNA, 25 bp, Homo sapien
ttctgtggtaactcaggttgacata

SEQ ID NO: 51993 - DNA, 25 bp, Homo sapien
agttggttactcctttagtgtctga

SEQ ID NO: 51994 - DNA, 25 bp, Homo sapien
agttggttactcgtttagtgtctga

SEQ ID NO: 51995 - DNA, 25 bp, Homo sapien
acgtgtcaactttattgttctgtat

SEQ ID NO: 51996 - DNA, 25 bp, Homo sapien
acgtgtcaacttaattgttctgtat

SEQ ID NO: 51997 - DNA, 25 bp, Homo sapien
cagtccactgtctttgttactaagt

SEQ ID NO: 51998 - DNA, 25 bp, Homo sapien
cagtccactgtcattgttactaagt

SEQ ID NO: 51999 - DNA, 25 bp, Homo sapien
ctccttctttacgtcttagtctaag

SEQ ID NO: 52000 - DNA, 25 bp, Homo sapien
ctccttctttacctcttagtctaag

SEQ ID NO: 52001 - DNA, 25 bp, Homo sapien
cagcgagtcagtttccactaggcct

SEQ ID NO: 52002 - DNA, 25 bp, Homo sapien
cagcgagtcagtatccactaggcct

SEQ ID NO: 52003 - DNA, 25 bp, Homo sapien
gccgcagtagggttccacttgttct

SEQ ID NO: 52004 - DNA, 25 bp, Homo sapien
gccgcagtagggatccacttgttct

SEQ ID NO: 52005 - DNA, 25 bp, Homo sapien
caccaaagtggagagtacctgagac

SEQ ID NO: 52006 - DNA, 25 bp, Homo sapien
caccaaagtggacagtacctgagac

SEQ ID NO: 52007 - DNA, 25 bp, Homo sapien
gaccaaagacctcctgtattaagac

SEQ ID NO: 52008 - DNA, 25 bp, Homo sapien
gaccaaagacctgctgtattaagac

SEQ ID NO: 52009 - DNA, 25 bp, Homo sapien
gagaattctcgtcttgtttacatta

SEQ ID NO: 52010 - DNA, 25 bp, Homo sapien
gagaattctcgtgttgtttacatta

SEQ ID NO: 52011 - DNA, 25 bp, Homo sapien
catgggggtacgttatataccgaga

SEQ ID NO: 52012 - DNA, 25 bp, Homo sapien
catgggggtacgatatataccgaga

SEQ ID NO: 52013 - DNA, 25 bp, Homo sapien
gaagtcggacggtgatttcttacgg

SEQ ID NO: 52014 - DNA, 25 bp, Homo sapien
gaagtcggacggagatttcttacgg

SEQ ID NO: 52015 - DNA, 25 bp, Homo sapien
cacccggtggtaatatttcgaccgt

SEQ ID NO: 52016 - DNA, 25 bp, Homo sapien
cacccggtggtattatttcgaccgt

SEQ ID NO: 52017 - DNA, 25 bp, Homo sapien
ccccagtgtccgttgttacttctta

SEQ ID NO: 52018 - DNA, 25 bp, Homo sapien
ccccagtgtccgatgttacttctta

SEQ ID NO: 52019 - DNA, 25 bp, Homo sapien
aacgaaagacctggtacctatatag

SEQ ID NO: 52020 - DNA, 25 bp, Homo sapien
aacgaaagacctcgtacctatatag

SEQ ID NO: 52021 - DNA, 25 bp, Homo sapien
gtcctaacacgaccatgtctcaagt

SEQ ID NO: 52022 - DNA, 25 bp, Homo sapien
gtcctaacacgagcatgtctcaagt

SEQ ID NO: 52023 - DNA, 25 bp, Homo sapien
tcggtcctgtcaccagatgttcggg

SEQ ID NO: 52024 - DNA, 25 bp, Homo sapien
tcggtcctgtcagcagatgttcggg

SEQ ID NO: 52025 - DNA, 25 bp, Homo sapien
tggtccctagggactgtctccggtg

SEQ ID NO: 52026 - DNA, 25 bp, Homo sapien
tggtccctagggtctgtctccggtg

SEQ ID NO: 52027 - DNA, 25 bp, Homo sapien
tcccgtagcgagtagggttgtgtct

SEQ ID NO: 52028 - DNA, 25 bp, Homo sapien
tcccgtagcgagaagggttgtgtct

SEQ ID NO: 52029 - DNA, 25 bp, Homo sapien
cgaccgagataggaggttagtcacc

SEQ ID NO: 52030 - DNA, 25 bp, Homo sapien
cgaccgagatagcaggttagtcacc

SEQ ID NO: 52031 - DNA, 25 bp, Homo sapien
actccattgtcgtgtgtgtatgtct

SEQ ID NO: 52032 - DNA, 25 bp, Homo sapien
actccattgtcgagtgtgtatgtct

SEQ ID NO: 52033 - DNA, 25 bp, Homo sapien
cagtgtgaatatcttcgacttattt

SEQ ID NO: 52034 - DNA, 25 bp, Homo sapien
cagtgtgaatatgttcgacttattt

SEQ ID NO: 52035 - DNA, 25 bp, Homo sapien
caacttcatattttgtcggtcttgt

SEQ ID NO: 52036 - DNA, 25 bp, Homo sapien
caacttcatattatgtcggtcttgt

SEQ ID NO: 52037 - DNA, 25 bp, Homo sapien
tcgtcttccgcttgtccgggtgttt

SEQ ID NO: 52038 - DNA, 25 bp, Homo sapien
tcgtcttccgctagtccgggtgttt

SEQ ID NO: 52039 - DNA, 25 bp, Homo sapien
gtcgttcgtctcacggtcaaggttt

SEQ ID NO: 52040 - DNA, 25 bp, Homo sapien
gtcgttcgtctctcggtcaaggttt

SEQ ID NO: 52041 - DNA, 25 bp, Homo sapien
agtatcacgtgtctttcctgggtgt

SEQ ID NO: 52042 - DNA, 25 bp, Homo sapien
agtatcacgtgtgtttcctgggtgt

SEQ ID NO: 52043 - DNA, 25 bp, Homo sapien
ttccgatgtgctcgtcctacggtac

SEQ ID NO: 52044 - DNA, 25 bp, Homo sapien
ttccgatgtgctggtcctacggtac

SEQ ID NO: 52045 - DNA, 25 bp, Homo sapien
tcgacgggtgagagagcctagtact

SEQ ID NO: 52046 - DNA, 25 bp, Homo sapien
tcgacgggtgagtgagcctagtact

SEQ ID NO: 52047 - DNA, 25 bp, Homo sapien
aaacacgaagggtgacgaccggacg

SEQ ID NO: 52048 - DNA, 25 bp, Homo sapien
aaacacgaagggagacgaccggacg

SEQ ID NO: 52049 - DNA, 25 bp, Homo sapien
ggtacttgtaaggtaactctctgac

SEQ ID NO: 52050 - DNA, 25 bp, Homo sapien
ggtacttgtaagctaactctctgac

SEQ ID NO: 52051 - DNA, 25 bp, Homo sapien
gcttacgagtcttgtttcctactac

SEQ ID NO: 52052 - DNA, 25 bp, Homo sapien
gcttacgagtctagtttcctactac

SEQ ID NO: 52053 - DNA, 25 bp, Homo sapien
attgcttagaattgtcgttctggac

SEQ ID NO: 52054 - DNA, 25 bp, Homo sapien
attgcttagaatagtcgttctggac

SEQ ID NO: 52055 - DNA, 25 bp, Homo sapien
gacccctgtgacaaggagtcctgga

SEQ ID NO: 52056 - DNA, 25 bp, Homo sapien
gacccctgtgactaggagtcctgga

SEQ ID NO: 52057 - DNA, 25 bp, Homo sapien
gccattcaccggatcgaccacgagg

SEQ ID NO: 52058 - DNA, 25 bp, Homo sapien
gccattcaccggttcgaccacgagg

SEQ ID NO: 52059 - DNA, 25 bp, Homo sapien
acgatcctaccgtcggtacttgatg

SEQ ID NO: 52060 - DNA, 25 bp, Homo sapien
acgatcctaccgacggtacttgatg

SEQ ID NO: 52061 - DNA, 25 bp, Homo sapien
tggactccggtgacagtttgacacg

SEQ ID NO: 52062 - DNA, 25 bp, Homo sapien
tggactccggtgtcagtttgacacg

SEQ ID NO: 52063 - DNA, 25 bp, Homo sapien
tgtcgtttcaggtcccggtgtcagt

SEQ ID NO: 52064 - DNA, 25 bp, Homo sapien
tgtcgtttcaggacccggtgtcagt

SEQ ID NO: 52065 - DNA, 25 bp, Homo sapien
cagtccacgtcgacgagggtctcta

SEQ ID NO: 52066 - DNA, 25 bp, Homo sapien
cagtccacgtcgtcgagggtctcta

SEQ ID NO: 52067 - DNA, 25 bp, Homo sapien
gcaacgccgcgaccgcgaggtccta

SEQ ID NO: 52068 - DNA, 25 bp, Homo sapien
gcaacgccgcgagcgcgaggtccta

SEQ ID NO: 52069 - DNA, 25 bp, Homo sapien
agatcttggacaaaagtaatctcta

SEQ ID NO: 52070 - DNA, 25 bp, Homo sapien
agatcttggacataagtaatctcta

SEQ ID NO: 52071 - DNA, 25 bp, Homo sapien
aggttccggaaattaagcgtctcac

SEQ ID NO: 52072 - DNA, 25 bp, Homo sapien
aggttccggaaaataagcgtctcac

SEQ ID NO: 52073 - DNA, 25 bp, Homo sapien
tcgtcgaggaacatctagagtcgaa

SEQ ID NO: 52074 - DNA, 25 bp, Homo sapien
tcgtcgaggaacttctagagtcgaa

SEQ ID NO: 52075 - DNA, 25 bp, Homo sapien
ttgtcgaagaggttctcctcgacct

SEQ ID NO: 52076 - DNA, 25 bp, Homo sapien
ttgtcgaagaggatctcctcgacct

SEQ ID NO: 52077 - DNA, 25 bp, Homo sapien
tgtgtcaacacgaaatcctcgactc

SEQ ID NO: 52078 - DNA, 25 bp, Homo sapien
tgtgtcaacacgtaatcctcgactc

SEQ ID NO: 52079 - DNA, 25 bp, Homo sapien
taataacaaccgtgtatccgggact

SEQ ID NO: 52080 - DNA, 25 bp, Homo sapien
taataacaaccgagtatccgggact

SEQ ID NO: 52081 - DNA, 25 bp, Homo sapien
ccagaaaagacagttgcacgggtgt

SEQ ID NO: 52082 - DNA, 25 bp, Homo sapien
ccagaaaagacacttgcacgggtgt

SEQ ID NO: 52083 - DNA, 25 bp, Homo sapien
ggattacaaaggactcaactcgggg

SEQ ID NO: 52084 - DNA, 25 bp, Homo sapien
ggattacaaaggtctcaactcgggg

SEQ ID NO: 52085 - DNA, 25 bp, Homo sapien
acagaagcactcgacctaccgttcg

SEQ ID NO: 52086 - DNA, 25 bp, Homo sapien
acagaagcactccacctaccgttcg

SEQ ID NO: 52087 - DNA, 25 bp, Homo sapien
actgtaagacatcaaacgacacatg

SEQ ID NO: 52088 - DNA, 25 bp, Homo sapien
actgtaagacatgaaacgacacatg

SEQ ID NO: 52089 - DNA, 25 bp, Homo sapien
tgactgaaacttacctaacagatag

SEQ ID NO: 52090 - DNA, 25 bp, Homo sapien
tgactgaaactttcctaacagatag

SEQ ID NO: 52091 - DNA, 25 bp, Homo sapien
atataacctgtatacgtagacattg

SEQ ID NO: 52092 - DNA, 25 bp, Homo sapien
atataacctgtaaacgtagacattg

SEQ ID NO: 52093 - DNA, 25 bp, Homo sapien
cacactgaagacttcttggacttta

SEQ ID NO: 52094 - DNA, 25 bp, Homo sapien
cacactgaagacatcttggacttta

SEQ ID NO: 52095 - DNA, 25 bp, Homo sapien
aggaacaccgaaaggacctcctcta

SEQ ID NO: 52096 - DNA, 25 bp, Homo sapien
aggaacaccgaatggacctcctcta

SEQ ID NO: 52097 - DNA, 25 bp, Homo sapien
catgaaactgaatgatcccactaag

SEQ ID NO: 52098 - DNA, 25 bp, Homo sapien
catgaaactgaaagatcccactaag

SEQ ID NO: 52099 - DNA, 25 bp, Homo sapien
gaaacgaatcggacgagtccccaga

SEQ ID NO: 52100 - DNA, 25 bp, Homo sapien
gaaacgaatcggtcgagtccccaga

SEQ ID NO: 52101 - DNA, 25 bp, Homo sapien
ggatacaaaggacacgtcaccatta

SEQ ID NO: 52102 - DNA, 25 bp, Homo sapien
ggatacaaaggagacgtcaccatta

SEQ ID NO: 52103 - DNA, 25 bp, Homo sapien
cgtgagttttgtctgaaaccttgta

SEQ ID NO: 52104 - DNA, 25 bp, Homo sapien
cgtgagttttgtgtgaaaccttgta

SEQ ID NO: 52105 - DNA, 25 bp, Homo sapien
gagatttggtatgacttctctttct

SEQ ID NO: 52106 - DNA, 25 bp, Homo sapien
gagatttggtatcacttctctttct

SEQ ID NO: 52107 - DNA, 25 bp, Homo sapien
ctctcacgagtcattctacaagagt

SEQ ID NO: 52108 - DNA, 25 bp, Homo sapien
ctctcacgagtctttctacaagagt

SEQ ID NO: 52109 - DNA, 25 bp, Homo sapien
cgtctccgagtctttctacctcgtt

SEQ ID NO: 52110 - DNA, 25 bp, Homo sapien
cgtctccgagtcattctacctcgtt

SEQ ID NO: 52111 - DNA, 25 bp, Homo sapien
gtccggacaggtcttagatcgacgg

SEQ ID NO: 52112 - DNA, 25 bp, Homo sapien
gtccggacaggtgttagatcgacgg

SEQ ID NO: 52113 - DNA, 25 bp, Homo sapien
ctgagtcagtatccttgatcacgtt

SEQ ID NO: 52114 - DNA, 25 bp, Homo sapien
ctgagtcagtatgcttgatcacgtt

SEQ ID NO: 52115 - DNA, 25 bp, Homo sapien
gaggaaggtaccttatgtcaaagtc

SEQ ID NO: 52116 - DNA, 25 bp, Homo sapien
gaggaaggtaccatatgtcaaagtc

SEQ ID NO: 52117 - DNA, 25 bp, Homo sapien
atagagcacataatgatatacgcac

SEQ ID NO: 52118 - DNA, 25 bp, Homo sapien
atagagcacatattgatatacgcac

SEQ ID NO: 52119 - DNA, 25 bp, Homo sapien
aaatgtcgaagttttcagtgtgtcc

SEQ ID NO: 52120 - DNA, 25 bp, Homo sapien
aaatgtcgaagtattcagtgtgtcc

SEQ ID NO: 52121 - DNA, 25 bp, Homo sapien
tacatgtgaagatgtgccgaggaac

SEQ ID NO: 52122 - DNA, 25 bp, Homo sapien
tacatgtgaagaagtgccgaggaac

SEQ ID NO: 52123 - DNA, 25 bp, Homo sapien
aatttgttaggaaggcaccttagac

SEQ ID NO: 52124 - DNA, 25 bp, Homo sapien
aatttgttaggatggcaccttagac

SEQ ID NO: 52125 - DNA, 25 bp, Homo sapien
catagttgtcttagaactccttcgt

SEQ ID NO: 52126 - DNA, 25 bp, Homo sapien
catagttgtctttgaactccttcgt

SEQ ID NO: 52127 - DNA, 25 bp, Homo sapien
ccctggtgtcgtccaaatgtcttac

SEQ ID NO: 52128 - DNA, 25 bp, Homo sapien
ccctggtgtcgtgcaaatgtcttac

SEQ ID NO: 52129 - DNA, 25 bp, Homo sapien
ccatgttacgaaatcccgagagagt

SEQ ID NO: 52130 - DNA, 25 bp, Homo sapien
ccatgttacgaattcccgagagagt

SEQ ID NO: 52131 - DNA, 25 bp, Homo sapien
accgactttgtagaccccgagatag

SEQ ID NO: 52132 - DNA, 25 bp, Homo sapien
accgactttgtacaccccgagatag

SEQ ID NO: 52133 - DNA, 25 bp, Homo sapien
ttctcctttgaccttcactgagttg

SEQ ID NO: 52134 - DNA, 25 bp, Homo sapien
ttctcctttgacgttcactgagttg

SEQ ID NO: 52135 - DNA, 25 bp, Homo sapien
cacccgtctttaccttactttgtgg

SEQ ID NO: 52136 - DNA, 25 bp, Homo sapien
cacccgtctttagcttactttgtgg

SEQ ID NO: 52137 - DNA, 25 bp, Homo sapien
ataaccggaaattgactacttcaag

SEQ ID NO: 52138 - DNA, 25 bp, Homo sapien
ataaccggaaatagactacttcaag

SEQ ID NO: 52139 - DNA, 25 bp, Homo sapien
tataagagaaagtcacaagatccta

SEQ ID NO: 52140 - DNA, 25 bp, Homo sapien
tataagagaaagacacaagatccta

SEQ ID NO: 52141 - DNA, 25 bp, Homo sapien
gaaaatgtacgaacaaagactctca

SEQ ID NO: 52142 - DNA, 25 bp, Homo sapien
gaaaatgtacgatcaaagactctca

SEQ ID NO: 52143 - DNA, 25 bp, Homo sapien
gtaacatcgactaggacagtctatt

SEQ ID NO: 52144 - DNA, 25 bp, Homo sapien
gtaacatcgacttggacagtctatt

SEQ ID NO: 52145 - DNA, 25 bp, Homo sapien
tgttgaaagtaaagtggaaccacct

SEQ ID NO: 52146 - DNA, 25 bp, Homo sapien
tgttgaaagtaatgtggaaccacct

SEQ ID NO: 52147 - DNA, 25 bp, Homo sapien
tatcataagtcgtcttgactgccct

SEQ ID NO: 52148 - DNA, 25 bp, Homo sapien
tatcataagtcgacttgactgccct

SEQ ID NO: 52149 - DNA, 25 bp, Homo sapien
ttattgttaccgtaagtcgatgccc

SEQ ID NO: 52150 - DNA, 25 bp, Homo sapien
ttattgttaccgaaagtcgatgccc

SEQ ID NO: 52151 - DNA, 25 bp, Homo sapien
tatgtcgaaagaacccctcgttctc

SEQ ID NO: 52152 - DNA, 25 bp, Homo sapien
tatgtcgaaagatcccctcgttctc

SEQ ID NO: 52153 - DNA, 25 bp, Homo sapien
ctgctgtaggatctctacctctcct

SEQ ID NO: 52154 - DNA, 25 bp, Homo sapien
ctgctgtaggatgtctacctctcct

SEQ ID NO: 52155 - DNA, 25 bp, Homo sapien
ttccgtcggggatcgtccctcgact

SEQ ID NO: 52156 - DNA, 25 bp, Homo sapien
ttccgtcggggaacgtccctcgact

SEQ ID NO: 52157 - DNA, 25 bp, Homo sapien
ttgtcactgaagagcgtcccacagt

SEQ ID NO: 52158 - DNA, 25 bp, Homo sapien
ttgtcactgaagtgcgtcccacagt

SEQ ID NO: 52159 - DNA, 25 bp, Homo sapien
cgaagaaaggaaggtgacggtccaa

SEQ ID NO: 52160 - DNA, 25 bp, Homo sapien
cgaagaaaggaacgtgacggtccaa

SEQ ID NO: 52161 - DNA, 25 bp, Homo sapien
gcaaaaagagagacggaggccaacg

SEQ ID NO: 52162 - DNA, 25 bp, Homo sapien
gcaaaaagagagtcggaggccaacg

SEQ ID NO: 52163 - DNA, 25 bp, Homo sapien
taagagggaagagagttccagtact

SEQ ID NO: 52164 - DNA, 25 bp, Homo sapien
taagagggaagacagttccagtact

SEQ ID NO: 52165 - DNA, 25 bp, Homo sapien
tcggagtagaaagtcagttgaccct

SEQ ID NO: 52166 - DNA, 25 bp, Homo sapien
tcggagtagaaactcagttgaccct

SEQ ID NO: 52167 - DNA, 25 bp, Homo sapien
aacgggtgctagtgcatgtggtcac

SEQ ID NO: 52168 - DNA, 25 bp, Homo sapien
aacgggtgctagagcatgtggtcac

SEQ ID NO: 52169 - DNA, 25 bp, Homo sapien
catcgatgacaagtggtcggagtcc

SEQ ID NO: 52170 - DNA, 25 bp, Homo sapien
catcgatgacaactggtcggagtcc

SEQ ID NO: 52171 - DNA, 25 bp, Homo sapien
aaaatgaaagataatgtcttgtact

SEQ ID NO: 52172 - DNA, 25 bp, Homo sapien
aaaatgaaagattatgtcttgtact

SEQ ID NO: 52173 - DNA, 25 bp, Homo sapien
tattagtactaagtaatggttccac

SEQ ID NO: 52174 - DNA, 25 bp, Homo sapien
tattagtactaactaatggttccac

SEQ ID NO: 52175 - DNA, 25 bp, Homo sapien
tactggcgacgaaccctatgtccaa

SEQ ID NO: 52176 - DNA, 25 bp, Homo sapien
tactggcgacgatccctatgtccaa

SEQ ID NO: 52177 - DNA, 25 bp, Homo sapien
atgggaggttgtgatccgtcacgac

SEQ ID NO: 52178 - DNA, 25 bp, Homo sapien
atgggaggttgtcatccgtcacgac

SEQ ID NO: 52179 - DNA, 25 bp, Homo sapien
aagggtgtataattagtcctgaccg

SEQ ID NO: 52180 - DNA, 25 bp, Homo sapien
aagggtgtataaatagtcctgaccg

SEQ ID NO: 52181 - DNA, 25 bp, Homo sapien
cgggtatattagattttcctgacag

SEQ ID NO: 52182 - DNA, 25 bp, Homo sapien
cgggtatattagtttttcctgacag

SEQ ID NO: 52183 - DNA, 25 bp, Homo sapien
gtagtatctgtgttttcccagtaag

SEQ ID NO: 52184 - DNA, 25 bp, Homo sapien
gtagtatctgtgatttcccagtaag

SEQ ID NO: 52185 - DNA, 25 bp, Homo sapien
gtgaatcgagacattcctaccgtgg

SEQ ID NO: 52186 - DNA, 25 bp, Homo sapien
gtgaatcgagactttcctaccgtgg

SEQ ID NO: 52187 - DNA, 25 bp, Homo sapien
gagtaactacttcttttgacattgt

SEQ ID NO: 52188 - DNA, 25 bp, Homo sapien
gagtaactacttgttttgacattgt

SEQ ID NO: 52189 - DNA, 25 bp, Homo sapien
cgtagaactctattatgtttctttg

SEQ ID NO: 52190 - DNA, 25 bp, Homo sapien
cgtagaactctaatatgtttctttg

SEQ ID NO: 52191 - DNA, 25 bp, Homo sapien
gtctatcctcggtgttacccttcgt

SEQ ID NO: 52192 - DNA, 25 bp, Homo sapien
gtctatcctcggagttacccttcgt

SEQ ID NO: 52193 - DNA, 25 bp, Homo sapien
tcgattcgtccgtggtagcgaccct

SEQ ID NO: 52194 - DNA, 25 bp, Homo sapien
tcgattcgtccgaggtagcgaccct

SEQ ID NO: 52195 - DNA, 25 bp, Homo sapien
taacattctgtcactcggtgtccct

SEQ ID NO: 52196 - DNA, 25 bp, Homo sapien
taacattctgtctctcggtgtccct

SEQ ID NO: 52197 - DNA, 25 bp, Homo sapien
taactaaaggttctagtgctactca

SEQ ID NO: 52198 - DNA, 25 bp, Homo sapien
taactaaaggttgtagtgctactca

SEQ ID NO: 52199 - DNA, 25 bp, Homo sapien
ctcttcagacggaacgggtcgagct

SEQ ID NO: 52200 - DNA, 25 bp, Homo sapien
ctcttcagacggtacgggtcgagct

SEQ ID NO: 52201 - DNA, 25 bp, Homo sapien
ttctctgatagactcgagtggtcca

SEQ ID NO: 52202 - DNA, 25 bp, Homo sapien
ttctctgatagagtcgagtggtcca

SEQ ID NO: 52203 - DNA, 25 bp, Homo sapien
ctggagtcgacagagttccgtcgta

SEQ ID NO: 52204 - DNA, 25 bp, Homo sapien
ctggagtcgacacagttccgtcgta

SEQ ID NO: 52205 - DNA, 25 bp, Homo sapien
aggggagtaacacagagaccgtgtc

SEQ ID NO: 52206 - DNA, 25 bp, Homo sapien
aggggagtaacagagagaccgtgtc

SEQ ID NO: 52207 - DNA, 25 bp, Homo sapien
atgtgaaacgttagatggactctgc

SEQ ID NO: 52208 - DNA, 25 bp, Homo sapien
atgtgaaacgtttgatggactctgc

SEQ ID NO: 52209 - DNA, 25 bp, Homo sapien
cttgaagagtcgtgttaagcttctt

SEQ ID NO: 52210 - DNA, 25 bp, Homo sapien
cttgaagagtcgagttaagcttctt

SEQ ID NO: 52211 - DNA, 25 bp, Homo sapien
tctgacactactccagcaaactgga

SEQ ID NO: 52212 - DNA, 25 bp, Homo sapien
tctgacactactgcagcaaactgga

SEQ ID NO: 52213 - DNA, 25 bp, Homo sapien
gtccgttcgtcgattaaacttgtat

SEQ ID NO: 52214 - DNA, 25 bp, Homo sapien
gtccgttcgtcgtttaaacttgtat

SEQ ID NO: 52215 - DNA, 25 bp, Homo sapien
gtacgtcgcacctgtgagggctcaa

SEQ ID NO: 52216 - DNA, 25 bp, Homo sapien
gtacgtcgcaccagtgagggctcaa

SEQ ID NO: 52217 - DNA, 25 bp, Homo sapien
cagcccacgcgtggaggtccgtcaa

SEQ ID NO: 52218 - DNA, 25 bp, Homo sapien
cagcccacgcgtcgaggtccgtcaa

SEQ ID NO: 52219 - DNA, 25 bp, Homo sapien
actcctccgttcgacgagggccgga

SEQ ID NO: 52220 - DNA, 25 bp, Homo sapien
actcctccgttccacgagggccgga

SEQ ID NO: 52221 - DNA, 25 bp, Homo sapien
tttatgtcgtgtcctggtgtggccc

SEQ ID NO: 52222 - DNA, 25 bp, Homo sapien
tttatgtcgtgtgctggtgtggccc

SEQ ID NO: 52223 - DNA, 25 bp, Homo sapien
tactcaggactggaagccggggacc

SEQ ID NO: 52224 - DNA, 25 bp, Homo sapien
tactcaggactgcaagccggggacc

SEQ ID NO: 52225 - DNA, 25 bp, Homo sapien
tttaaggggaacatctcggtcggcc

SEQ ID NO: 52226 - DNA, 25 bp, Homo sapien
tttaaggggaacttctcggtcggcc

SEQ ID NO: 52227 - DNA, 25 bp, Homo sapien
tcttaagggaaacgtgccgtttttc

SEQ ID NO: 52228 - DNA, 25 bp, Homo sapien
tcttaagggaaaggtgccgtttttc

SEQ ID NO: 52229 - DNA, 25 bp, Homo sapien
ctggtatagaggtcccgttttctag

SEQ ID NO: 52230 - DNA, 25 bp, Homo sapien
ctggtatagaggacccgttttctag

SEQ ID NO: 52231 - DNA, 25 bp, Homo sapien
tgagttgtcgttacgctgctctgtt

SEQ ID NO: 52232 - DNA, 25 bp, Homo sapien
tgagttgtcgtttcgctgctctgtt

SEQ ID NO: 52233 - DNA, 25 bp, Homo sapien
ggtgctcttcctacgagtccttcga

SEQ ID NO: 52234 - DNA, 25 bp, Homo sapien
ggtgctcttccttcgagtccttcga

SEQ ID NO: 52235 - DNA, 25 bp, Homo sapien
atctgtccctttgaatcctctgtag

SEQ ID NO: 52236 - DNA, 25 bp, Homo sapien
atctgtccctttcaatcctctgtag

SEQ ID NO: 52237 - DNA, 25 bp, Homo sapien
gacaccgaataaactcgagttcgac

SEQ ID NO: 52238 - DNA, 25 bp, Homo sapien
gacaccgaataatctcgagttcgac

SEQ ID NO: 52239 - DNA, 25 bp, Homo sapien
agacaaaggtataagacctcgacgt

SEQ ID NO: 52240 - DNA, 25 bp, Homo sapien
agacaaaggtattagacctcgacgt

SEQ ID NO: 52241 - DNA, 25 bp, Homo sapien
cccgtacagcaggtgcacgcggtgc

SEQ ID NO: 52242 - DNA, 25 bp, Homo sapien
cccgtacagcagctgcacgcggtgc

SEQ ID NO: 52243 - DNA, 25 bp, Homo sapien
tcacggacccgagtggaccgcgagc

SEQ ID NO: 52244 - DNA, 25 bp, Homo sapien
tcacggacccgactggaccgcgagc

SEQ ID NO: 52245 - DNA, 25 bp, Homo sapien
ctacaggagtgcagctggatttgtc

SEQ ID NO: 52246 - DNA, 25 bp, Homo sapien
ctacaggagtgctgctggatttgtc

SEQ ID NO: 52247 - DNA, 25 bp, Homo sapien
gacaaaggagacctgtgagttttac

SEQ ID NO: 52248 - DNA, 25 bp, Homo sapien
gacaaaggagacgtgtgagttttac

SEQ ID NO: 52249 - DNA, 25 bp, Homo sapien
tgtcaagaagtacatcatgttttac

SEQ ID NO: 52250 - DNA, 25 bp, Homo sapien
tgtcaagaagtagatcatgttttac

SEQ ID NO: 52251 - DNA, 25 bp, Homo sapien
cgtccacagatggtgtccgtttttt

SEQ ID NO: 52252 - DNA, 25 bp, Homo sapien
cgtccacagatgctgtccgtttttt

SEQ ID NO: 52253 - DNA, 25 bp, Homo sapien
tttctcaggcccttcctgtaatggt

SEQ ID NO: 52254 - DNA, 25 bp, Homo sapien
tttctcaggcccatcctgtaatggt

SEQ ID NO: 52255 - DNA, 25 bp, Homo sapien
ccgagacgtccttactttctcatga

SEQ ID NO: 52256 - DNA, 25 bp, Homo sapien
ccgagacgtcctaactttctcatga

SEQ ID NO: 52257 - DNA, 25 bp, Homo sapien
gccccggggctatttatgtcatatg

SEQ ID NO: 52258 - DNA, 25 bp, Homo sapien
gccccggggctaattatgtcatatg

SEQ ID NO: 52259 - DNA, 25 bp, Homo sapien
ctgagagttctttgacttctgtaag

SEQ ID NO: 52260 - DNA, 25 bp, Homo sapien
ctgagagttcttagacttctgtaag

SEQ ID NO: 52261 - DNA, 25 bp, Homo sapien
cacgacttctctaacttccagacga

SEQ ID NO: 52262 - DNA, 25 bp, Homo sapien
cacgacttctcttacttccagacga

SEQ ID NO: 52263 - DNA, 25 bp, Homo sapien
ctcagagttctcttccctggaacgg

SEQ ID NO: 52264 - DNA, 25 bp, Homo sapien
ctcagagttctcatccctggaacgg

SEQ ID NO: 52265 - DNA, 25 bp, Homo sapien
ctcgaaacgacctccctgggacggt

SEQ ID NO: 52266 - DNA, 25 bp, Homo sapien
ctcgaaacgaccaccctgggacggt

SEQ ID NO: 52267 - DNA, 25 bp, Homo sapien
aataagagtaccatccgaggagccg

SEQ ID NO: 52268 - DNA, 25 bp, Homo sapien
aataagagtaccttccgaggagccg

SEQ ID NO: 52269 - DNA, 25 bp, Homo sapien
ctagggtactcttcggtaagaactg

SEQ ID NO: 52270 - DNA, 25 bp, Homo sapien
ctagggtactctacggtaagaactg

SEQ ID NO: 52271 - DNA, 25 bp, Homo sapien
cctgtagtcggaaactgaagtcttg

SEQ ID NO: 52272 - DNA, 25 bp, Homo sapien
cctgtagtcggatactgaagtcttg

SEQ ID NO: 52273 - DNA, 25 bp, Homo sapien
tgtgtctgtggcacctgtcccagtg

SEQ ID NO: 52274 - DNA, 25 bp, Homo sapien
tgtgtctgtggctcctgtcccagtg

SEQ ID NO: 52275 - DNA, 25 bp, Homo sapien
tcggacggacccttcgttcgtgcga

SEQ ID NO: 52276 - DNA, 25 bp, Homo sapien
tcggacggacccatcgttcgtgcga

SEQ ID NO: 52277 - DNA, 25 bp, Homo sapien
tgggatacaacatcggtgtcgacct

SEQ ID NO: 52278 - DNA, 25 bp, Homo sapien
tgggatacaacaacggtgtcgacct

SEQ ID NO: 52279 - DNA, 25 bp, Homo sapien
tgtaaggtcttttcgtcggtcgtcc

SEQ ID NO: 52280 - DNA, 25 bp, Homo sapien
tgtaaggtctttacgtcggtcgtcc

SEQ ID NO: 52281 - DNA, 25 bp, Homo sapien
tgagagtacttcttgtggagtcact

SEQ ID NO: 52282 - DNA, 25 bp, Homo sapien
tgagagtacttcatgtggagtcact

SEQ ID NO: 52283 - DNA, 25 bp, Homo sapien
ggtatatgtctagatagtccgaacc

SEQ ID NO: 52284 - DNA, 25 bp, Homo sapien
ggtatatgtctacatagtccgaacc

SEQ ID NO: 52285 - DNA, 25 bp, Homo sapien
gcaggtggttgacatgactactttg

SEQ ID NO: 52286 - DNA, 25 bp, Homo sapien
gcaggtggttgagatgactactttg

SEQ ID NO: 52287 - DNA, 25 bp, Homo sapien
ataatgaagaggaaccatactctct

SEQ ID NO: 52288 - DNA, 25 bp, Homo sapien
ataatgaagaggtaccatactctct

SEQ ID NO: 52289 - DNA, 25 bp, Homo sapien
aaatttcggagagctacaactgtct

SEQ ID NO: 52290 - DNA, 25 bp, Homo sapien
aaatttcggagacctacaactgtct

SEQ ID NO: 52291 - DNA, 25 bp, Homo sapien
cgttgacgagataacttaacttact

SEQ ID NO: 52292 - DNA, 25 bp, Homo sapien
cgttgacgagattacttaacttact

SEQ ID NO: 52293 - DNA, 25 bp, Homo sapien
tccggtggtcggtcttaggactatt

SEQ ID NO: 52294 - DNA, 25 bp, Homo sapien
tccggtggtcggacttaggactatt

SEQ ID NO: 52295 - DNA, 25 bp, Homo sapien
caggaggtgtcttttattaagtcgt

SEQ ID NO: 52296 - DNA, 25 bp, Homo sapien
caggaggtgtctattattaagtcgt

SEQ ID NO: 52297 - DNA, 25 bp, Homo sapien
cggtgaacgtcatattactttaggt

SEQ ID NO: 52298 - DNA, 25 bp, Homo sapien
cggtgaacgtcaaattactttaggt

SEQ ID NO: 52299 - DNA, 25 bp, Homo sapien
ggtaaacacgaaacggtaccggaga

SEQ ID NO: 52300 - DNA, 25 bp, Homo sapien
ggtaaacacgaatcggtaccggaga

SEQ ID NO: 52301 - DNA, 25 bp, Homo sapien
tcgaacgggaacgacgagtaccggt

SEQ ID NO: 52302 - DNA, 25 bp, Homo sapien
tcgaacgggaaccacgagtaccggt

SEQ ID NO: 52303 - DNA, 25 bp, Homo sapien
ccagatgtcgtcgacagaaggtacg

SEQ ID NO: 52304 - DNA, 25 bp, Homo sapien
ccagatgtcgtccacagaaggtacg

SEQ ID NO: 52305 - DNA, 25 bp, Homo sapien
tctcggagtacttccgaagaatgtg

SEQ ID NO: 52306 - DNA, 25 bp, Homo sapien
tctcggagtactaccgaagaatgtg

SEQ ID NO: 52307 - DNA, 25 bp, Homo sapien
acttcccgactagagaagcacctcg

SEQ ID NO: 52308 - DNA, 25 bp, Homo sapien
acttcccgactacagaagcacctcg

SEQ ID NO: 52309 - DNA, 25 bp, Homo sapien
gtttattccgacctaaaagccgatt

SEQ ID NO: 52310 - DNA, 25 bp, Homo sapien
gtttattccgacgtaaaagccgatt

SEQ ID NO: 52311 - DNA, 25 bp, Homo sapien
gggatttcacggtctaaagtacatt

SEQ ID NO: 52312 - DNA, 25 bp, Homo sapien
gggatttcacggactaaagtacatt

SEQ ID NO: 52313 - DNA, 25 bp, Homo sapien
cagtcgtaccgacatagtagtcatc

SEQ ID NO: 52314 - DNA, 25 bp, Homo sapien
cagtcgtaccgagatagtagtcatc

SEQ ID NO: 52315 - DNA, 25 bp, Homo sapien
ttcagtctgtcacgactccgagacc

SEQ ID NO: 52316 - DNA, 25 bp, Homo sapien
ttcagtctgtcaggactccgagacc

SEQ ID NO: 52317 - DNA, 25 bp, Homo sapien
gtcccgagggtctcgacctaggtcc

SEQ ID NO: 52318 - DNA, 25 bp, Homo sapien
gtcccgagggtcacgacctaggtcc

SEQ ID NO: 52319 - DNA, 25 bp, Homo sapien
actatgatttatgtctagatgtacc

SEQ ID NO: 52320 - DNA, 25 bp, Homo sapien
actatgatttatctctagatgtacc

SEQ ID NO: 52321 - DNA, 25 bp, Homo sapien
ccatgggtttatcgacacgtttatc

SEQ ID NO: 52322 - DNA, 25 bp, Homo sapien
ccatgggtttatggacacgtttatc

SEQ ID NO: 52323 - DNA, 25 bp, Homo sapien
gttccagtctttgacctctttatgt

SEQ ID NO: 52324 - DNA, 25 bp, Homo sapien
gttccagtctttcacctctttatgt

SEQ ID NO: 52325 - DNA, 25 bp, Homo sapien
gaaagagtacctactaatttacttg

SEQ ID NO: 52326 - DNA, 25 bp, Homo sapien
gaaagagtaccttctaatttacttg

SEQ ID NO: 52327 - DNA, 25 bp, Homo sapien
gcacaaactgtctacttgcttactg

SEQ ID NO: 52328 - DNA, 25 bp, Homo sapien
gcacaaactgtcaacttgcttactg

SEQ ID NO: 52329 - DNA, 25 bp, Homo sapien
gcaaagacagacacccttgtgtcgt

SEQ ID NO: 52330 - DNA, 25 bp, Homo sapien
gcaaagacagactcccttgtgtcgt

SEQ ID NO: 52331 - DNA, 25 bp, Homo sapien
gaagacaaggaaattccttcttatt

SEQ ID NO: 52332 - DNA, 25 bp, Homo sapien
gaagacaaggaatttccttcttatt

SEQ ID NO: 52333 - DNA, 25 bp, Homo sapien
caaagagtggttgatccttatttct

SEQ ID NO: 52334 - DNA, 25 bp, Homo sapien
caaagagtggttcatccttatttct

SEQ ID NO: 52335 - DNA, 25 bp, Homo sapien
ggatgagggttaaaaccctctttat

SEQ ID NO: 52336 - DNA, 25 bp, Homo sapien
ggatgagggttataaccctctttat

SEQ ID NO: 52337 - DNA, 25 bp, Homo sapien
cgtggtggtccttagccctctggtc

SEQ ID NO: 52338 - DNA, 25 bp, Homo sapien
cgtggtggtcctaagccctctggtc

SEQ ID NO: 52339 - DNA, 25 bp, Homo sapien
cttccggcgtctttccctcttcgtt

SEQ ID NO: 52340 - DNA, 25 bp, Homo sapien
cttccggcgtctatccctcttcgtt

SEQ ID NO: 52341 - DNA, 25 bp, Homo sapien
catcacgagagagtcgcacttctga

SEQ ID NO: 52342 - DNA, 25 bp, Homo sapien
catcacgagagactcgcacttctga

SEQ ID NO: 52343 - DNA, 25 bp, Homo sapien
agagtccggtgactgaacttcttgt

SEQ ID NO: 52344 - DNA, 25 bp, Homo sapien
agagtccggtgagtgaacttcttgt

SEQ ID NO: 52345 - DNA, 25 bp, Homo sapien
tccccctgtagtatctgtttctccg

SEQ ID NO: 52346 - DNA, 25 bp, Homo sapien
tccccctgtagtttctgtttctccg

SEQ ID NO: 52347 - DNA, 25 bp, Homo sapien
ttgccttgataaaggtctactccgc

SEQ ID NO: 52348 - DNA, 25 bp, Homo sapien
ttgccttgataatggtctactccgc

SEQ ID NO: 52349 - DNA, 25 bp, Homo sapien
ggttttgacgtttctgtctcacacc

SEQ ID NO: 52350 - DNA, 25 bp, Homo sapien
ggttttgacgttactgtctcacacc

SEQ ID NO: 52351 - DNA, 25 bp, Homo sapien
ctgttgtcgacgacaaacaaagtac

SEQ ID NO: 52352 - DNA, 25 bp, Homo sapien
ctgttgtcgacgtcaaacaaagtac

SEQ ID NO: 52353 - DNA, 25 bp, Homo sapien
gagtgccttgggtccggacgaccca

SEQ ID NO: 52354 - DNA, 25 bp, Homo sapien
gagtgccttgggaccggacgaccca

SEQ ID NO: 52355 - DNA, 25 bp, Homo sapien
ctcactgtgagttcattgaccacca

SEQ ID NO: 52356 - DNA, 25 bp, Homo sapien
ctcactgtgagtacattgaccacca

SEQ ID NO: 52357 - DNA, 25 bp, Homo sapien
ccaccgagagagagttccacccagt

SEQ ID NO: 52358 - DNA, 25 bp, Homo sapien
ccaccgagagagtgttccacccagt

SEQ ID NO: 52359 - DNA, 25 bp, Homo sapien
gtccccgagtcgtatttcccttcga

SEQ ID NO: 52360 - DNA, 25 bp, Homo sapien
gtccccgagtcgaatttcccttcga

SEQ ID NO: 52361 - DNA, 25 bp, Homo sapien
gtttccgaggtaaaacctcctctcc

SEQ ID NO: 52362 - DNA, 25 bp, Homo sapien
gtttccgaggtataacctcctctcc

SEQ ID NO: 52363 - DNA, 25 bp, Homo sapien
ggttcgtcctctctaaattggtctc

SEQ ID NO: 52364 - DNA, 25 bp, Homo sapien
ggttcgtcctctgtaaattggtctc

SEQ ID NO: 52365 - DNA, 25 bp, Homo sapien
tgtcgcgactcacacgattggttac

SEQ ID NO: 52366 - DNA, 25 bp, Homo sapien
tgtcgcgactcagacgattggttac

SEQ ID NO: 52367 - DNA, 25 bp, Homo sapien
tgtacagacagttgtacgggttgac

SEQ ID NO: 52368 - DNA, 25 bp, Homo sapien
tgtacagacagtagtacgggttgac

SEQ ID NO: 52369 - DNA, 25 bp, Homo sapien
ctatggtcgtcgtcggtggacacgt

SEQ ID NO: 52370 - DNA, 25 bp, Homo sapien
ctatggtcgtcgacggtggacacgt

SEQ ID NO: 52371 - DNA, 25 bp, Homo sapien
gcgtatcaggcgtagcttcgcgagt

SEQ ID NO: 52372 - DNA, 25 bp, Homo sapien
gcgtatcaggcgaagcttcgcgagt

SEQ ID NO: 52373 - DNA, 25 bp, Homo sapien
cgaattccgccgacgactccggagt

SEQ ID NO: 52374 - DNA, 25 bp, Homo sapien
cgaattccgccgtcgactccggagt

SEQ ID NO: 52375 - DNA, 25 bp, Homo sapien
ataccgacggttcatgacctagaag

SEQ ID NO: 52376 - DNA, 25 bp, Homo sapien
ataccgacggttgatgacctagaag

SEQ ID NO: 52377 - DNA, 25 bp, Homo sapien
acgtgacgctctcgaagtcctgaag

SEQ ID NO: 52378 - DNA, 25 bp, Homo sapien
acgtgacgctctggaagtcctgaag

SEQ ID NO: 52379 - DNA, 25 bp, Homo sapien
ccctagaggttagcaaggtcggcga

SEQ ID NO: 52380 - DNA, 25 bp, Homo sapien
ccctagaggttaccaaggtcggcga

SEQ ID NO: 52381 - DNA, 25 bp, Homo sapien
cgatctatgttttaagtgtgtccct

SEQ ID NO: 52382 - DNA, 25 bp, Homo sapien
cgatctatgtttaaagtgtgtccct

SEQ ID NO: 52383 - DNA, 25 bp, Homo sapien
gatatatcgtttacgtgtgtgcatc

SEQ ID NO: 52384 - DNA, 25 bp, Homo sapien
gatatatcgttttcgtgtgtgcatc

SEQ ID NO: 52385 - DNA, 25 bp, Homo sapien
tcaatgtctagttttacgttacatg

SEQ ID NO: 52386 - DNA, 25 bp, Homo sapien
tcaatgtctagtattacgttacatg

SEQ ID NO: 52387 - DNA, 25 bp, Homo sapien
tatgtctgaagttttccagatttca

SEQ ID NO: 52388 - DNA, 25 bp, Homo sapien
tatgtctgaagtattccagatttca

SEQ ID NO: 52389 - DNA, 25 bp, Homo sapien
gtccgaagtgatcacaaatcttaca

SEQ ID NO: 52390 - DNA, 25 bp, Homo sapien
gtccgaagtgatgacaaatcttaca

SEQ ID NO: 52391 - DNA, 25 bp, Homo sapien
ggtcgaaagaggacccgacactcga

SEQ ID NO: 52392 - DNA, 25 bp, Homo sapien
ggtcgaaagaggtcccgacactcga

SEQ ID NO: 52393 - DNA, 25 bp, Homo sapien
ggaataaggtctcgtcgttaaatct

SEQ ID NO: 52394 - DNA, 25 bp, Homo sapien
ggaataaggtctggtcgttaaatct

SEQ ID NO: 52395 - DNA, 25 bp, Homo sapien
ggacagttacattttctagaacaac

SEQ ID NO: 52396 - DNA, 25 bp, Homo sapien
ggacagttacatattctagaacaac

SEQ ID NO: 52397 - DNA, 25 bp, Homo sapien
ttggaattctttaagtctggtcccg

SEQ ID NO: 52398 - DNA, 25 bp, Homo sapien
ttggaattcttttagtctggtcccg

SEQ ID NO: 52399 - DNA, 25 bp, Homo sapien
aggctagaatcattaaggttcactt

SEQ ID NO: 52400 - DNA, 25 bp, Homo sapien
aggctagaatcaataaggttcactt

SEQ ID NO: 52401 - DNA, 25 bp, Homo sapien
aagaaaacgtactaaagggtctcaa

SEQ ID NO: 52402 - DNA, 25 bp, Homo sapien
aagaaaacgtacaaaagggtctcaa

SEQ ID NO: 52403 - DNA, 25 bp, Homo sapien
ttaacgagactatgttttactcaag

SEQ ID NO: 52404 - DNA, 25 bp, Homo sapien
ttaacgagactaagttttactcaag

SEQ ID NO: 52405 - DNA, 25 bp, Homo sapien
atttagacttaaacttctatgtaag

SEQ ID NO: 52406 - DNA, 25 bp, Homo sapien
atttagacttaatcttctatgtaag

SEQ ID NO: 52407 - DNA, 25 bp, Homo sapien
tacatggtgacattttcatattgac

SEQ ID NO: 52408 - DNA, 25 bp, Homo sapien
tacatggtgacaatttcatattgac

SEQ ID NO: 52409 - DNA, 25 bp, Homo sapien
tcgtgccagtgttacgtcttccact

SEQ ID NO: 52410 - DNA, 25 bp, Homo sapien
tcgtgccagtgtaacgtcttccact

SEQ ID NO: 52411 - DNA, 25 bp, Homo sapien
attttcttgggatcggtactactgt

SEQ ID NO: 52412 - DNA, 25 bp, Homo sapien
attttcttgggaacggtactactgt

SEQ ID NO: 52413 - DNA, 25 bp, Homo sapien
gtttaaatacgctggtcccgtctcc

SEQ ID NO: 52414 - DNA, 25 bp, Homo sapien
gtttaaatacgcaggtcccgtctcc

SEQ ID NO: 52415 - DNA, 25 bp, Homo sapien
gctcgaccataaatgacccgtctaa

SEQ ID NO: 52416 - DNA, 25 bp, Homo sapien
gctcgaccataattgacccgtctaa

SEQ ID NO: 52417 - DNA, 25 bp, Homo sapien
ctggaagagttaacagacttctata

SEQ ID NO: 52418 - DNA, 25 bp, Homo sapien
ctggaagagttatcagacttctata

SEQ ID NO: 52419 - DNA, 25 bp, Homo sapien
gtgacgtaggttaaagaccaaacgt

SEQ ID NO: 52420 - DNA, 25 bp, Homo sapien
gtgacgtaggtttaagaccaaacgt

SEQ ID NO: 52421 - DNA, 25 bp, Homo sapien
ccaaagactaggtttattagtcaaa

SEQ ID NO: 52422 - DNA, 25 bp, Homo sapien
ccaaagactaggattattagtcaaa

SEQ ID NO: 52423 - DNA, 25 bp, Homo sapien
taatggtgattgtttacgtctgtcc

SEQ ID NO: 52424 - DNA, 25 bp, Homo sapien
taatggtgattgattacgtctgtcc

SEQ ID NO: 52425 - DNA, 25 bp, Homo sapien
tttggtcttcgtttagtcgtatacc

SEQ ID NO: 52426 - DNA, 25 bp, Homo sapien
tttggtcttcgtatagtcgtatacc

SEQ ID NO: 52427 - DNA, 25 bp, Homo sapien
agtctgtacgttctgttcatgaacc

SEQ ID NO: 52428 - DNA, 25 bp, Homo sapien
agtctgtacgttgtgttcatgaacc

SEQ ID NO: 52429 - DNA, 25 bp, Homo sapien
gaccggtactgatgttcgttttcac

SEQ ID NO: 52430 - DNA, 25 bp, Homo sapien
gaccggtactgaagttcgttttcac

SEQ ID NO: 52431 - DNA, 25 bp, Homo sapien
tatgtcgtataacctttcgatttcg

SEQ ID NO: 52432 - DNA, 25 bp, Homo sapien
tatgtcgtataagctttcgatttcg

SEQ ID NO: 52433 - DNA, 25 bp, Homo sapien
agttggtggttagtgtacactatcg

SEQ ID NO: 52434 - DNA, 25 bp, Homo sapien
agttggtggttactgtacactatcg

SEQ ID NO: 52435 - DNA, 25 bp, Homo sapien
agactggaagagtcaagtagaccta

SEQ ID NO: 52436 - DNA, 25 bp, Homo sapien
agactggaagagacaagtagaccta

SEQ ID NO: 52437 - DNA, 25 bp, Homo sapien
tgagaccgaggagcagataccgaca

SEQ ID NO: 52438 - DNA, 25 bp, Homo sapien
tgagaccgaggaccagataccgaca

SEQ ID NO: 52439 - DNA, 25 bp, Homo sapien
gaatgacgacgtagacctccgacta

SEQ ID NO: 52440 - DNA, 25 bp, Homo sapien
gaatgacgacgttgacctccgacta

SEQ ID NO: 52441 - DNA, 25 bp, Homo sapien
cgggtaaggacagagcttcgtagaa

SEQ ID NO: 52442 - DNA, 25 bp, Homo sapien
cgggtaaggacacagcttcgtagaa

SEQ ID NO: 52443 - DNA, 25 bp, Homo sapien
cgggaggacgaaaccgtcccgtagc

SEQ ID NO: 52444 - DNA, 25 bp, Homo sapien
cgggaggacgaatccgtcccgtagc

SEQ ID NO: 52445 - DNA, 25 bp, Homo sapien
tgggtcgtcgattcggtgcttacag

SEQ ID NO: 52446 - DNA, 25 bp, Homo sapien
tgggtcgtcgatacggtgcttacag

SEQ ID NO: 52447 - DNA, 25 bp, Homo sapien
tccgtccgtgtgttaccggtgtgca

SEQ ID NO: 52448 - DNA, 25 bp, Homo sapien
tccgtccgtgtgataccggtgtgca

SEQ ID NO: 52449 - DNA, 25 bp, Homo sapien
gtcgttccgattcccgagcggtctg

SEQ ID NO: 52450 - DNA, 25 bp, Homo sapien
gtcgttccgattgccgagcggtctg

SEQ ID NO: 52451 - DNA, 25 bp, Homo sapien
gtgtgtccattcaccgtagtgccta

SEQ ID NO: 52452 - DNA, 25 bp, Homo sapien
gtgtgtccattctccgtagtgccta

SEQ ID NO: 52453 - DNA, 25 bp, Homo sapien
atgaaacaggtcatttacgaagtca

SEQ ID NO: 52454 - DNA, 25 bp, Homo sapien
atgaaacaggtcttttacgaagtca

SEQ ID NO: 52455 - DNA, 25 bp, Homo sapien
ttgacaaaggtctcccggacgtgac

SEQ ID NO: 52456 - DNA, 25 bp, Homo sapien
ttgacaaaggtcacccggacgtgac

SEQ ID NO: 52457 - DNA, 25 bp, Homo sapien
tatagacgaaaggttgccccgtgga

SEQ ID NO: 52458 - DNA, 25 bp, Homo sapien
tatagacgaaagcttgccccgtgga

SEQ ID NO: 52459 - DNA, 25 bp, Homo sapien
tgtaagagccagtgaaaccgtgaca

SEQ ID NO: 52460 - DNA, 25 bp, Homo sapien
tgtaagagccagagaaaccgtgaca

SEQ ID NO: 52461 - DNA, 25 bp, Homo sapien
agaaaacacaggtcacctcggtaca

SEQ ID NO: 52462 - DNA, 25 bp, Homo sapien
agaaaacacaggacacctcggtaca

SEQ ID NO: 52463 - DNA, 25 bp, Homo sapien
tacacgactcaaaccacggggtcag

SEQ ID NO: 52464 - DNA, 25 bp, Homo sapien
tacacgactcaatccacggggtcag

SEQ ID NO: 52465 - DNA, 25 bp, Homo sapien
gataagacacagatcatgggaccat

SEQ ID NO: 52466 - DNA, 25 bp, Homo sapien
gataagacacagttcatgggaccat

SEQ ID NO: 52467 - DNA, 25 bp, Homo sapien
cagggaaagtcgagtaaggtccgta

SEQ ID NO: 52468 - DNA, 25 bp, Homo sapien
cagggaaagtcgtgtaaggtccgta

SEQ ID NO: 52469 - DNA, 25 bp, Homo sapien
acaggagaaacttttacgggtccac

SEQ ID NO: 52470 - DNA, 25 bp, Homo sapien
acaggagaaactattacgggtccac

SEQ ID NO: 52471 - DNA, 25 bp, Homo sapien
acgcgggatcctcgtagctttacaa

SEQ ID NO: 52472 - DNA, 25 bp, Homo sapien
acgcgggatcctggtagctttacaa

SEQ ID NO: 52473 - DNA, 25 bp, Homo sapien
aagttggtctcaggagtttatcgca

SEQ ID NO: 52474 - DNA, 25 bp, Homo sapien
aagttggtctcacgagtttatcgca

SEQ ID NO: 52475 - DNA, 25 bp, Homo sapien
cagctgtgtttgaaagtttaaccta

SEQ ID NO: 52476 - DNA, 25 bp, Homo sapien
cagctgtgtttgtaagtttaaccta

SEQ ID NO: 52477 - DNA, 25 bp, Homo sapien
tcacggtccttttgtcgtatgagga

SEQ ID NO: 52478 - DNA, 25 bp, Homo sapien
tcacggtcctttagtcgtatgagga

SEQ ID NO: 52479 - DNA, 25 bp, Homo sapien
tgagacgacctttcaactaaagcta

SEQ ID NO: 52480 - DNA, 25 bp, Homo sapien
tgagacgaccttacaactaaagcta

SEQ ID NO: 52481 - DNA, 25 bp, Homo sapien
cggtctctccgtctaacttgataga

SEQ ID NO: 52482 - DNA, 25 bp, Homo sapien
cggtctctccgtgtaacttgataga

SEQ ID NO: 52483 - DNA, 25 bp, Homo sapien
tacgtcccctgtgtccttgtgctac

SEQ ID NO: 52484 - DNA, 25 bp, Homo sapien
tacgtcccctgtctccttgtgctac

SEQ ID NO: 52485 - DNA, 25 bp, Homo sapien
gggcccaacaactcttgtggtagct

SEQ ID NO: 52486 - DNA, 25 bp, Homo sapien
gggcccaacaacacttgtggtagct

SEQ ID NO: 52487 - DNA, 25 bp, Homo sapien
gagaccaaaagaggtccgacggatt

SEQ ID NO: 52488 - DNA, 25 bp, Homo sapien
gagaccaaaagacgtccgacggatt

SEQ ID NO: 52489 - DNA, 25 bp, Homo sapien
gtcacacaagacacgactgacattc

SEQ ID NO: 52490 - DNA, 25 bp, Homo sapien
gtcacacaagactcgactgacattc

SEQ ID NO: 52491 - DNA, 25 bp, Homo sapien
ctcccgagacgagtcgccggatctg

SEQ ID NO: 52492 - DNA, 25 bp, Homo sapien
ctcccgagacgactcgccggatctg

SEQ ID NO: 52493 - DNA, 25 bp, Homo sapien
tatgaaactaaccgtacccggttag

SEQ ID NO: 52494 - DNA, 25 bp, Homo sapien
tatgaaactaacggtacccggttag

SEQ ID NO: 52495 - DNA, 25 bp, Homo sapien
agtgagctagtaacgaggtttgttc

SEQ ID NO: 52496 - DNA, 25 bp, Homo sapien
agtgagctagtatcgaggtttgttc

SEQ ID NO: 52497 - DNA, 25 bp, Homo sapien
catccgtcttattaagtctgtcttt

SEQ ID NO: 52498 - DNA, 25 bp, Homo sapien
catccgtcttataaagtctgtcttt

SEQ ID NO: 52499 - DNA, 25 bp, Homo sapien
aacgtcccgggtaggtggttctgtc

SEQ ID NO: 52500 - DNA, 25 bp, Homo sapien
aacgtcccgggttggtggttctgtc

SEQ ID NO: 52501 - DNA, 25 bp, Homo sapien
aactgccgagccactggacggtgct

SEQ ID NO: 52502 - DNA, 25 bp, Homo sapien
aactgccgagcctctggacggtgct

SEQ ID NO: 52503 - DNA, 25 bp, Homo sapien
acttaaccaacctaggggtacgtca

SEQ ID NO: 52504 - DNA, 25 bp, Homo sapien
acttaaccaaccaaggggtacgtca

SEQ ID NO: 52505 - DNA, 25 bp, Homo sapien
caagtagacaaaccaacaggtttca

SEQ ID NO: 52506 - DNA, 25 bp, Homo sapien
caagtagacaaagcaacaggtttca

SEQ ID NO: 52507 - DNA, 25 bp, Homo sapien
acaagtgacattgtgacaggtttcc

SEQ ID NO: 52508 - DNA, 25 bp, Homo sapien
acaagtgacattctgacaggtttcc

SEQ ID NO: 52509 - DNA, 25 bp, Homo sapien
cagaggactgttgtaggggttcttg

SEQ ID NO: 52510 - DNA, 25 bp, Homo sapien
cagaggactgttctaggggttcttg

SEQ ID NO: 52511 - DNA, 25 bp, Homo sapien
tgacgggtctcatcgactttcagcg

SEQ ID NO: 52512 - DNA, 25 bp, Homo sapien
tgacgggtctcaacgactttcagcg

SEQ ID NO: 52513 - DNA, 25 bp, Homo sapien
aggtgacgggccaagtactttagaa

SEQ ID NO: 52514 - DNA, 25 bp, Homo sapien
aggtgacgggcctagtactttagaa

SEQ ID NO: 52515 - DNA, 25 bp, Homo sapien
tgacgtcggccgttagccggtaatg

SEQ ID NO: 52516 - DNA, 25 bp, Homo sapien
tgacgtcggccgatagccggtaatg

SEQ ID NO: 52517 - DNA, 25 bp, Homo sapien
agcggagctaacagacgtcgggaca

SEQ ID NO: 52518 - DNA, 25 bp, Homo sapien
agcggagctaactgacgtcgggaca

SEQ ID NO: 52519 - DNA, 25 bp, Homo sapien
taaaagaacagaaaagtgctcccgg

SEQ ID NO: 52520 - DNA, 25 bp, Homo sapien
taaaagaacagataagtgctcccgg

SEQ ID NO: 52521 - DNA, 25 bp, Homo sapien
gacaagctaaagtagaccgccattt

SEQ ID NO: 52522 - DNA, 25 bp, Homo sapien
gacaagctaaagaagaccgccattt

SEQ ID NO: 52523 - DNA, 25 bp, Homo sapien
ccacctgctcgcaggcgtacgatta

SEQ ID NO: 52524 - DNA, 25 bp, Homo sapien
ccacctgctcgctggcgtacgatta

SEQ ID NO: 52525 - DNA, 25 bp, Homo sapien
cttgtccgtcttttacatctgaaag

SEQ ID NO: 52526 - DNA, 25 bp, Homo sapien
cttgtccgtcttatacatctgaaag

SEQ ID NO: 52527 - DNA, 25 bp, Homo sapien
actagacctttctcgtcttgagaag

SEQ ID NO: 52528 - DNA, 25 bp, Homo sapien
actagacctttcacgtcttgagaag

SEQ ID NO: 52529 - DNA, 25 bp, Homo sapien
atcgttacttcgacgatgtataata

SEQ ID NO: 52530 - DNA, 25 bp, Homo sapien
atcgttacttcgtcgatgtataata

SEQ ID NO: 52531 - DNA, 25 bp, Homo sapien
tcgtttccgttgtcagtcggtaaga

SEQ ID NO: 52532 - DNA, 25 bp, Homo sapien
tcgtttccgttgacagtcggtaaga

SEQ ID NO: 52533 - DNA, 25 bp, Homo sapien
aataaagagtcaagatgtccttgac

SEQ ID NO: 52534 - DNA, 25 bp, Homo sapien
aataaagagtcatgatgtccttgac

SEQ ID NO: 52535 - DNA, 25 bp, Homo sapien
acaagtcgcggtgttatctctgtct

SEQ ID NO: 52536 - DNA, 25 bp, Homo sapien
acaagtcgcggtcttatctctgtct

SEQ ID NO: 52537 - DNA, 25 bp, Homo sapien
cggtacatgggtgtatctacttgtg

SEQ ID NO: 52538 - DNA, 25 bp, Homo sapien
cggtacatgggtctatctacttgtg

SEQ ID NO: 52539 - DNA, 25 bp, Homo sapien
gttattcaactatatagtcctgtgt

SEQ ID NO: 52540 - DNA, 25 bp, Homo sapien
gttattcaactaaatagtcctgtgt

SEQ ID NO: 52541 - DNA, 25 bp, Homo sapien
gtatatgaccaatcactccactcgg

SEQ ID NO: 52542 - DNA, 25 bp, Homo sapien
gtatatgaccaaacactccactcgg

SEQ ID NO: 52543 - DNA, 25 bp, Homo sapien
gtttatttagtcacccttttagacg

SEQ ID NO: 52544 - DNA, 25 bp, Homo sapien
gtttatttagtctcccttttagacg

SEQ ID NO: 52545 - DNA, 25 bp, Homo sapien
tgtgtcttctcgaccccggtgacga

SEQ ID NO: 52546 - DNA, 25 bp, Homo sapien
tgtgtcttctcgtccccggtgacga

SEQ ID NO: 52547 - DNA, 25 bp, Homo sapien
tgtactgtgcccttttcgttgtaga

SEQ ID NO: 52548 - DNA, 25 bp, Homo sapien
tgtactgtgcccatttcgttgtaga

SEQ ID NO: 52549 - DNA, 25 bp, Homo sapien
aatagactacgtgttattctgtacc

SEQ ID NO: 52550 - DNA, 25 bp, Homo sapien
aatagactacgtcttattctgtacc

SEQ ID NO: 52551 - DNA, 25 bp, Homo sapien
acaatctactgtgtattgtgtcgta

SEQ ID NO: 52552 - DNA, 25 bp, Homo sapien
acaatctactgtctattgtgtcgta

SEQ ID NO: 52553 - DNA, 25 bp, Homo sapien
aggagtgattctcctttctttcgtt

SEQ ID NO: 52554 - DNA, 25 bp, Homo sapien
aggagtgattctgctttctttcgtt

SEQ ID NO: 52555 - DNA, 25 bp, Homo sapien
ggtggtaaattttccctctctctct

SEQ ID NO: 52556 - DNA, 25 bp, Homo sapien
ggtggtaaatttaccctctctctct

SEQ ID NO: 52557 - DNA, 25 bp, Homo sapien
gtggtaaaatgtcttatgtagtctt

SEQ ID NO: 52558 - DNA, 25 bp, Homo sapien
gtggtaaaatgtgttatgtagtctt

SEQ ID NO: 52559 - DNA, 25 bp, Homo sapien
cataggaggaaaggagttattcctc

SEQ ID NO: 52560 - DNA, 25 bp, Homo sapien
cataggaggaaacgagttattcctc

SEQ ID NO: 52561 - DNA, 25 bp, Homo sapien
caaaggtactcgaatctaaaggccc

SEQ ID NO: 52562 - DNA, 25 bp, Homo sapien
caaaggtactcgtatctaaaggccc

SEQ ID NO: 52563 - DNA, 25 bp, Homo sapien
cagagtaccgactccagggcgactc

SEQ ID NO: 52564 - DNA, 25 bp, Homo sapien
cagagtaccgacaccagggcgactc

SEQ ID NO: 52565 - DNA, 25 bp, Homo sapien
gggtgctactatccacggaccctac

SEQ ID NO: 52566 - DNA, 25 bp, Homo sapien
gggtgctactatgcacggaccctac

SEQ ID NO: 52567 - DNA, 25 bp, Homo sapien
gggtcctcgtccatctacacacagt

SEQ ID NO: 52568 - DNA, 25 bp, Homo sapien
gggtcctcgtccttctacacacagt

SEQ ID NO: 52569 - DNA, 25 bp, Homo sapien
agggatcgtcgtttctacctcgagg

SEQ ID NO: 52570 - DNA, 25 bp, Homo sapien
agggatcgtcgtatctacctcgagg

SEQ ID NO: 52571 - DNA, 25 bp, Homo sapien
agaggggctctacgtatgacctatg

SEQ ID NO: 52572 - DNA, 25 bp, Homo sapien
agaggggctctaggtatgacctatg

SEQ ID NO: 52573 - DNA, 25 bp, Homo sapien
caagagaccacaagagtgactccta

SEQ ID NO: 52574 - DNA, 25 bp, Homo sapien
caagagaccacatgagtgactccta

SEQ ID NO: 52575 - DNA, 25 bp, Homo sapien
catgtgtcacaagtagtagacttca

SEQ ID NO: 52576 - DNA, 25 bp, Homo sapien
catgtgtcacaactagtagacttca

SEQ ID NO: 52577 - DNA, 25 bp, Homo sapien
gaccttcgtctaaggttgtctaaga

SEQ ID NO: 52578 - DNA, 25 bp, Homo sapien
gaccttcgtctatggttgtctaaga

SEQ ID NO: 52579 - DNA, 25 bp, Homo sapien
tatcgtaccttttatggtttccaga

SEQ ID NO: 52580 - DNA, 25 bp, Homo sapien
tatcgtacctttaatggtttccaga

SEQ ID NO: 52581 - DNA, 25 bp, Homo sapien
ttcctgagttggacgtattcactta

SEQ ID NO: 52582 - DNA, 25 bp, Homo sapien
ttcctgagttggtcgtattcactta

SEQ ID NO: 52583 - DNA, 25 bp, Homo sapien
tgagtacgtcggaatgcgtcgctgc

SEQ ID NO: 52584 - DNA, 25 bp, Homo sapien
tgagtacgtcggtatgcgtcgctgc

SEQ ID NO: 52585 - DNA, 25 bp, Homo sapien
gacgtagtagaagtagcgccgcgac

SEQ ID NO: 52586 - DNA, 25 bp, Homo sapien
gacgtagtagaactagcgccgcgac

SEQ ID NO: 52587 - DNA, 25 bp, Homo sapien
acagcgacgacaaccgcttcgcggc

SEQ ID NO: 52588 - DNA, 25 bp, Homo sapien
acagcgacgacatccgcttcgcggc

SEQ ID NO: 52589 - DNA, 25 bp, Homo sapien
aaggtcaccatggtcgtagtgtaga

SEQ ID NO: 52590 - DNA, 25 bp, Homo sapien
aaggtcaccatgctcgtagtgtaga

SEQ ID NO: 52591 - DNA, 25 bp, Homo sapien
aataaatctcttatgctatggtgtc

SEQ ID NO: 52592 - DNA, 25 bp, Homo sapien
aataaatctcttttgctatggtgtc

SEQ ID NO: 52593 - DNA, 25 bp, Homo sapien
gaaggaatcacttacttcttgaatt

SEQ ID NO: 52594 - DNA, 25 bp, Homo sapien
gaaggaatcactaacttcttgaatt

SEQ ID NO: 52595 - DNA, 25 bp, Homo sapien
agtggtacaacaaaactttaaagtt

SEQ ID NO: 52596 - DNA, 25 bp, Homo sapien
agtggtacaacataactttaaagtt

SEQ ID NO: 52597 - DNA, 25 bp, Homo sapien
gaagggtcaaagagacaactcaaac

SEQ ID NO: 52598 - DNA, 25 bp, Homo sapien
gaagggtcaaagtgacaactcaaac

SEQ ID NO: 52599 - DNA, 25 bp, Homo sapien
ctcggttcaagagttctctcttcac

SEQ ID NO: 52600 - DNA, 25 bp, Homo sapien
ctcggttcaagacttctctcttcac

SEQ ID NO: 52601 - DNA, 25 bp, Homo sapien
acacgaaggaagacatctcctgtca

SEQ ID NO: 52602 - DNA, 25 bp, Homo sapien
acacgaaggaagtcatctcctgtca

SEQ ID NO: 52603 - DNA, 25 bp, Homo sapien
aggtcagagaattccgcccagagac

SEQ ID NO: 52604 - DNA, 25 bp, Homo sapien
aggtcagagaataccgcccagagac

SEQ ID NO: 52605 - DNA, 25 bp, Homo sapien
gcgcagaggtctgaagtccctgaac

SEQ ID NO: 52606 - DNA, 25 bp, Homo sapien
gcgcagaggtctcaagtccctgaac

SEQ ID NO: 52607 - DNA, 25 bp, Homo sapien
gtcacgaaggttagagggtcacgaa

SEQ ID NO: 52608 - DNA, 25 bp, Homo sapien
gtcacgaaggtttgagggtcacgaa

SEQ ID NO: 52609 - DNA, 25 bp, Homo sapien
gtcccaaattcctgactcacgcgta

SEQ ID NO: 52610 - DNA, 25 bp, Homo sapien
gtcccaaattccagactcacgcgta

SEQ ID NO: 52611 - DNA, 25 bp, Homo sapien
gttaccgagaagttacaaatccctt

SEQ ID NO: 52612 - DNA, 25 bp, Homo sapien
gttaccgagaagatacaaatccctt

SEQ ID NO: 52613 - DNA, 25 bp, Homo sapien
gaaaatggaagaaaacgaccacctt

SEQ ID NO: 52614 - DNA, 25 bp, Homo sapien
gaaaatggaagataacgaccacctt

SEQ ID NO: 52615 - DNA, 25 bp, Homo sapien
aaaacaggaggactaaatcacggtt

SEQ ID NO: 52616 - DNA, 25 bp, Homo sapien
aaaacaggaggagtaaatcacggtt

SEQ ID NO: 52617 - DNA, 25 bp, Homo sapien
aattcacggtaccaggtttagtgta

SEQ ID NO: 52618 - DNA, 25 bp, Homo sapien
aattcacggtacgaggtttagtgta

SEQ ID NO: 52619 - DNA, 25 bp, Homo sapien
ctatgtcaagttcagtgttaactta

SEQ ID NO: 52620 - DNA, 25 bp, Homo sapien
ctatgtcaagttgagtgttaactta

SEQ ID NO: 52621 - DNA, 25 bp, Homo sapien
gtaagtgtgactctatttcactgta

SEQ ID NO: 52622 - DNA, 25 bp, Homo sapien
gtaagtgtgactgtatttcactgta

SEQ ID NO: 52623 - DNA, 25 bp, Homo sapien
gagttcagtacctatatcgtcttta

SEQ ID NO: 52624 - DNA, 25 bp, Homo sapien
gagttcagtaccaatatcgtcttta

SEQ ID NO: 52625 - DNA, 25 bp, Homo sapien
gctgtcggctgctttcgtgtagtta

SEQ ID NO: 52626 - DNA, 25 bp, Homo sapien
gctgtcggctgcattcgtgtagtta

SEQ ID NO: 52627 - DNA, 25 bp, Homo sapien
cctgtctgtgttcagtttgtgttag

SEQ ID NO: 52628 - DNA, 25 bp, Homo sapien
cctgtctgtgttgagtttgtgttag

SEQ ID NO: 52629 - DNA, 25 bp, Homo sapien
gcagagttgtgttgtcgcctgtgca

SEQ ID NO: 52630 - DNA, 25 bp, Homo sapien
gcagagttgtgtagtcgcctgtgca

SEQ ID NO: 52631 - DNA, 25 bp, Homo sapien
gcagcgtgtggctgagctacttttt

SEQ ID NO: 52632 - DNA, 25 bp, Homo sapien
gcagcgtgtggcagagctacttttt

SEQ ID NO: 52633 - DNA, 25 bp, Homo sapien
acaccaaagtggagagtacctgaga

SEQ ID NO: 52634 - DNA, 25 bp, Homo sapien
acaccaaagtggtgagtacctgaga

SEQ ID NO: 52635 - DNA, 25 bp, Homo sapien
gaaaaacgaccgttcttattagaga

SEQ ID NO: 52636 - DNA, 25 bp, Homo sapien
gaaaaacgaccgatcttattagaga

SEQ ID NO: 52637 - DNA, 25 bp, Homo sapien
gtgaacctaggacttcgttttatta

SEQ ID NO: 52638 - DNA, 25 bp, Homo sapien
gtgaacctaggagttcgttttatta

SEQ ID NO: 52639 - DNA, 25 bp, Homo sapien
caccggggatagttgtatcggtaat

SEQ ID NO: 52640 - DNA, 25 bp, Homo sapien
caccggggatagatgtatcggtaat

SEQ ID NO: 52641 - DNA, 25 bp, Homo sapien
ccggagagaatatgtgtcgtctaag

SEQ ID NO: 52642 - DNA, 25 bp, Homo sapien
ccggagagaataagtgtcgtctaag

SEQ ID NO: 52643 - DNA, 25 bp, Homo sapien
ctcctcgtggaaatgttcgtcaact

SEQ ID NO: 52644 - DNA, 25 bp, Homo sapien
ctcctcgtggaattgttcgtcaact

SEQ ID NO: 52645 - DNA, 25 bp, Homo sapien
cctcccgtgtctgtgttgttaccta

SEQ ID NO: 52646 - DNA, 25 bp, Homo sapien
cctcccgtgtctctgttgttaccta

SEQ ID NO: 52647 - DNA, 25 bp, Homo sapien
aacattaacactgagtacgtttatg

SEQ ID NO: 52648 - DNA, 25 bp, Homo sapien
aacattaacactcagtacgtttatg

SEQ ID NO: 52649 - DNA, 25 bp, Homo sapien
gtacatatacacacatgtatatata

SEQ ID NO: 52650 - DNA, 25 bp, Homo sapien
gtacatatacactcatgtatatata

SEQ ID NO: 52651 - DNA, 25 bp, Homo sapien
gtcttcgtacacttcgattgtggtg

SEQ ID NO: 52652 - DNA, 25 bp, Homo sapien
gtcttcgtacacatcgattgtggtg

SEQ ID NO: 52653 - DNA, 25 bp, Homo sapien
ttgcccgtcggactggtcctcggtg

SEQ ID NO: 52654 - DNA, 25 bp, Homo sapien
ttgcccgtcggagtggtcctcggtg

SEQ ID NO: 52655 - DNA, 25 bp, Homo sapien
ctcccgtagcgagtagggttgtgtc

SEQ ID NO: 52656 - DNA, 25 bp, Homo sapien
ctcccgtagcgactagggttgtgtc

SEQ ID NO: 52657 - DNA, 25 bp, Homo sapien
ccgaccagtacagtcgagggtcagc

SEQ ID NO: 52658 - DNA, 25 bp, Homo sapien
ccgaccagtacactcgagggtcagc

SEQ ID NO: 52659 - DNA, 25 bp, Homo sapien
ctacgtccatgttcgggtttaagtt

SEQ ID NO: 52660 - DNA, 25 bp, Homo sapien
ctacgtccatgtacgggtttaagtt

SEQ ID NO: 52661 - DNA, 25 bp, Homo sapien
gtactgacaattctgtgacttcttt

SEQ ID NO: 52662 - DNA, 25 bp, Homo sapien
gtactgacaattgtgtgacttcttt

SEQ ID NO: 52663 - DNA, 25 bp, Homo sapien
acaacttcatattttgtcggtcttg

SEQ ID NO: 52664 - DNA, 25 bp, Homo sapien
acaacttcatatattgtcggtcttg

SEQ ID NO: 52665 - DNA, 25 bp, Homo sapien
tcttcgttccgtatgtccgggggtt

SEQ ID NO: 52666 - DNA, 25 bp, Homo sapien
tcttcgttccgtttgtccgggggtt

SEQ ID NO: 52667 - DNA, 25 bp, Homo sapien
gtcgttcgtcgtttgcaggggtcct

SEQ ID NO: 52668 - DNA, 25 bp, Homo sapien
gtcgttcgtcgtatgcaggggtcct

SEQ ID NO: 52669 - DNA, 25 bp, Homo sapien
atacccgtgttcttcctctgtgggt

SEQ ID NO: 52670 - DNA, 25 bp, Homo sapien
atacccgtgttcatcctctgtgggt

SEQ ID NO: 52671 - DNA, 25 bp, Homo sapien
tctcgatgaatcctctactcgtgta

SEQ ID NO: 52672 - DNA, 25 bp, Homo sapien
tctcgatgaatcgtctactcgtgta

SEQ ID NO: 52673 - DNA, 25 bp, Homo sapien
gttcgaggtaaggagtaacctagtc

SEQ ID NO: 52674 - DNA, 25 bp, Homo sapien
gttcgaggtaagcagtaacctagtc

SEQ ID NO: 52675 - DNA, 25 bp, Homo sapien
atccgacgagggtcggaccgacacg

SEQ ID NO: 52676 - DNA, 25 bp, Homo sapien
atccgacgagggacggaccgacacg

SEQ ID NO: 52677 - DNA, 25 bp, Homo sapien
cactgtgtcgaggaacatctagacg

SEQ ID NO: 52678 - DNA, 25 bp, Homo sapien
cactgtgtcgagcaacatctagacg

SEQ ID NO: 52679 - DNA, 25 bp, Homo sapien
tgtctgtgatcgatgattcttacac

SEQ ID NO: 52680 - DNA, 25 bp, Homo sapien
tgtctgtgatcgttgattcttacac

SEQ ID NO: 52681 - DNA, 25 bp, Homo sapien
atttttagacttacgtgttcgggac

SEQ ID NO: 52682 - DNA, 25 bp, Homo sapien
atttttagactttcgtgttcgggac

SEQ ID NO: 52683 - DNA, 25 bp, Homo sapien
atccgcatcgcgaagggtacctgga

SEQ ID NO: 52684 - DNA, 25 bp, Homo sapien
atccgcatcgcgtagggtacctgga

SEQ ID NO: 52685 - DNA, 25 bp, Homo sapien
cattcctcggtacgacctacgactg

SEQ ID NO: 52686 - DNA, 25 bp, Homo sapien
cattcctcggtaggacctacgactg

SEQ ID NO: 52687 - DNA, 25 bp, Homo sapien
cgagtccactcgtcggagactggtg

SEQ ID NO: 52688 - DNA, 25 bp, Homo sapien
cgagtccactcgacggagactggtg

SEQ ID NO: 52689 - DNA, 25 bp, Homo sapien
tgaccccgatcgaccgagtctgaac

SEQ ID NO: 52690 - DNA, 25 bp, Homo sapien
tgaccccgatcgtccgagtctgaac

SEQ ID NO: 52691 - DNA, 25 bp, Homo sapien
tgtcgtccccggtccgacgagtgaa

SEQ ID NO: 52692 - DNA, 25 bp, Homo sapien
tgtcgtccccggaccgacgagtgaa

SEQ ID NO: 52693 - DNA, 25 bp, Homo sapien
ccgtgtccccgaacaacggtcgata

SEQ ID NO: 52694 - DNA, 25 bp, Homo sapien
ccgtgtccccgatcaacggtcgata

SEQ ID NO: 52695 - DNA, 25 bp, Homo sapien
cggacggcgcgaaccaggcacgtac

SEQ ID NO: 52696 - DNA, 25 bp, Homo sapien
cggacggcgcgatccaggcacgtac

SEQ ID NO: 52697 - DNA, 25 bp, Homo sapien
aatatttgacgaatgacagatccta

SEQ ID NO: 52698 - DNA, 25 bp, Homo sapien
aatatttgacgattgacagatccta

SEQ ID NO: 52699 - DNA, 25 bp, Homo sapien
ggttccggaaattaagcgtctcacg

SEQ ID NO: 52700 - DNA, 25 bp, Homo sapien
ggttccggaaataaagcgtctcacg

SEQ ID NO: 52701 - DNA, 25 bp, Homo sapien
tccgagacacttaacagagactaag

SEQ ID NO: 52702 - DNA, 25 bp, Homo sapien
tccgagacactttacagagactaag

SEQ ID NO: 52703 - DNA, 25 bp, Homo sapien
tttcgacgaaagttctcgatgagtt

SEQ ID NO: 52704 - DNA, 25 bp, Homo sapien
tttcgacgaaagatctcgatgagtt

SEQ ID NO: 52705 - DNA, 25 bp, Homo sapien
gtgtcacacatgaactcatagagtc

SEQ ID NO: 52706 - DNA, 25 bp, Homo sapien
gtgtcacacatgtactcatagagtc

SEQ ID NO: 52707 - DNA, 25 bp, Homo sapien
atattgaaacagtgaacctaggact

SEQ ID NO: 52708 - DNA, 25 bp, Homo sapien
atattgaaacagagaacctaggact

SEQ ID NO: 52709 - DNA, 25 bp, Homo sapien
cagtaaaaggaggtaaccacgggta

SEQ ID NO: 52710 - DNA, 25 bp, Homo sapien
cagtaaaaggagctaaccacgggta

SEQ ID NO: 52711 - DNA, 25 bp, Homo sapien
acatcgaaacgcaccagaccgtggg

SEQ ID NO: 52712 - DNA, 25 bp, Homo sapien
acatcgaaacgctccagaccgtggg

SEQ ID NO: 52713 - DNA, 25 bp, Homo sapien
cagagacacttcagccaccgtgtcg

SEQ ID NO: 52714 - DNA, 25 bp, Homo sapien
cagagacacttctgccaccgtgtcg

SEQ ID NO: 52715 - DNA, 25 bp, Homo sapien
cattaatacatctgggacacagtcg

SEQ ID NO: 52716 - DNA, 25 bp, Homo sapien
cattaatacatcagggacacagtcg

SEQ ID NO: 52717 - DNA, 25 bp, Homo sapien
cgataaaacgtttactctaagaaag

SEQ ID NO: 52718 - DNA, 25 bp, Homo sapien
cgataaaacgttaactctaagaaag

SEQ ID NO: 52719 - DNA, 25 bp, Homo sapien
taaacgacgttagacaacgataagt

SEQ ID NO: 52720 - DNA, 25 bp, Homo sapien
taaacgacgttacacaacgataagt

SEQ ID NO: 52721 - DNA, 25 bp, Homo sapien
ctcacagagaactattgagacttta

SEQ ID NO: 52722 - DNA, 25 bp, Homo sapien
ctcacagagaacaattgagacttta

SEQ ID NO: 52723 - DNA, 25 bp, Homo sapien
aggaacaccgaaaggacctcctcga

SEQ ID NO: 52724 - DNA, 25 bp, Homo sapien
aggaacaccgaatggacctcctcga

SEQ ID NO: 52725 - DNA, 25 bp, Homo sapien
aggaagtcagaagactaccgcctga

SEQ ID NO: 52726 - DNA, 25 bp, Homo sapien
aggaagtcagaacactaccgcctga

SEQ ID NO: 52727 - DNA, 25 bp, Homo sapien
gaggaaagagaggtcatccgccaga

SEQ ID NO: 52728 - DNA, 25 bp, Homo sapien
gaggaaagagagctcatccgccaga

SEQ ID NO: 52729 - DNA, 25 bp, Homo sapien
atacaaaggacacgtcaccattagt

SEQ ID NO: 52730 - DNA, 25 bp, Homo sapien
atacaaaggacaggtcaccattagt

SEQ ID NO: 52731 - DNA, 25 bp, Homo sapien
agtactgttcgactgaaactgatta

SEQ ID NO: 52732 - DNA, 25 bp, Homo sapien
agtactgttcgagtgaaactgatta

SEQ ID NO: 52733 - DNA, 25 bp, Homo sapien
cgtagatttgaagacacatgtcttt

SEQ ID NO: 52734 - DNA, 25 bp, Homo sapien
cgtagatttgaacacacatgtcttt

SEQ ID NO: 52735 - DNA, 25 bp, Homo sapien
ccttaacgagtcatctctgattacg

SEQ ID NO: 52736 - DNA, 25 bp, Homo sapien
ccttaacgagtcttctctgattacg

SEQ ID NO: 52737 - DNA, 25 bp, Homo sapien
tccgtctgagtcttcccgttcgtct

SEQ ID NO: 52738 - DNA, 25 bp, Homo sapien
tccgtctgagtcatcccgttcgtct

SEQ ID NO: 52739 - DNA, 25 bp, Homo sapien
ctcggcgaagtcatctacatcccgt

SEQ ID NO: 52740 - DNA, 25 bp, Homo sapien
ctcggcgaagtcttctacatcccgt

SEQ ID NO: 52741 - DNA, 25 bp, Homo sapien
ctgtcgacacattttggtcacgtat

SEQ ID NO: 52742 - DNA, 25 bp, Homo sapien
ctgtcgacacatattggtcacgtat

SEQ ID NO: 52743 - DNA, 25 bp, Homo sapien
aaaggagtagacatcattcaaagtc

SEQ ID NO: 52744 - DNA, 25 bp, Homo sapien
aaaggagtagacttcattcaaagtc

SEQ ID NO: 52745 - DNA, 25 bp, Homo sapien
tagtggacgacaaataactaacggc

SEQ ID NO: 52746 - DNA, 25 bp, Homo sapien
tagtggacgacatataactaacggc

SEQ ID NO: 52747 - DNA, 25 bp, Homo sapien
aaagtaggtgaaatattcctgtgcc

SEQ ID NO: 52748 - DNA, 25 bp, Homo sapien
aaagtaggtgaattattcctgtgcc

SEQ ID NO: 52749 - DNA, 25 bp, Homo sapien
gtcatgtgaatttgtaccgggttac

SEQ ID NO: 52750 - DNA, 25 bp, Homo sapien
gtcatgtgaattagtaccgggttac

SEQ ID NO: 52751 - DNA, 25 bp, Homo sapien
tcttttaggtatacgaacccagtac

SEQ ID NO: 52752 - DNA, 25 bp, Homo sapien
tcttttaggtattcgaacccagtac

SEQ ID NO: 52753 - DNA, 25 bp, Homo sapien
taccagctgttattgaactcctatg

SEQ ID NO: 52754 - DNA, 25 bp, Homo sapien
taccagctgttaatgaactcctatg

SEQ ID NO: 52755 - DNA, 25 bp, Homo sapien
accaggtttgactaatagtcgttat

SEQ ID NO: 52756 - DNA, 25 bp, Homo sapien
accaggtttgacaaatagtcgttat

SEQ ID NO: 52757 - DNA, 25 bp, Homo sapien
aggttgacgacagtactcggagagt

SEQ ID NO: 52758 - DNA, 25 bp, Homo sapien
aggttgacgacactactcggagagt

SEQ ID NO: 52759 - DNA, 25 bp, Homo sapien
taccgactttgtagaccccgagata

SEQ ID NO: 52760 - DNA, 25 bp, Homo sapien
taccgactttgttgaccccgagata

SEQ ID NO: 52761 - DNA, 25 bp, Homo sapien
tcagctttgaccatacccgacgttc

SEQ ID NO: 52762 - DNA, 25 bp, Homo sapien
tcagctttgaccttacccgacgttc

SEQ ID NO: 52763 - DNA, 25 bp, Homo sapien
ctctccttctgactctatttagtgg

SEQ ID NO: 52764 - DNA, 25 bp, Homo sapien
ctctccttctgagtctatttagtgg

SEQ ID NO: 52765 - DNA, 25 bp, Homo sapien
aaaccaagaagttcgactttgtaga

SEQ ID NO: 52766 - DNA, 25 bp, Homo sapien
aaaccaagaagtacgactttgtaga

SEQ ID NO: 52767 - DNA, 25 bp, Homo sapien
agaaggacaagatccgtaagatccc

SEQ ID NO: 52768 - DNA, 25 bp, Homo sapien
agaaggacaagaaccgtaagatccc

SEQ ID NO: 52769 - DNA, 25 bp, Homo sapien
agatataagtagaccaagtacttca

SEQ ID NO: 52770 - DNA, 25 bp, Homo sapien
agatataagtagtccaagtacttca

SEQ ID NO: 52771 - DNA, 25 bp, Homo sapien
gtaacactcgctagagccgtgtcat

SEQ ID NO: 52772 - DNA, 25 bp, Homo sapien
gtaacactcgcttgagccgtgtcat

SEQ ID NO: 52773 - DNA, 25 bp, Homo sapien
tcggtgaaactaggatcggaacccc

SEQ ID NO: 52774 - DNA, 25 bp, Homo sapien
tcggtgaaactacgatcggaacccc

SEQ ID NO: 52775 - DNA, 25 bp, Homo sapien
gactgataacgtgttaggaccccct

SEQ ID NO: 52776 - DNA, 25 bp, Homo sapien
gactgataacgtcttaggaccccct

SEQ ID NO: 52777 - DNA, 25 bp, Homo sapien
ttgatttatgactaaggtatcaccc

SEQ ID NO: 52778 - DNA, 25 bp, Homo sapien
ttgatttatgacaaaggtatcaccc

SEQ ID NO: 52779 - DNA, 25 bp, Homo sapien
gacttgaggaaaaccctcggtctct

SEQ ID NO: 52780 - DNA, 25 bp, Homo sapien
gacttgaggaaatccctcggtctct

SEQ ID NO: 52781 - DNA, 25 bp, Homo sapien
cggttgtaggagtcctacccgtctc

SEQ ID NO: 52782 - DNA, 25 bp, Homo sapien
cggttgtaggagacctacccgtctc

SEQ ID NO: 52783 - DNA, 25 bp, Homo sapien
gttccgtcggggatcgtccctcgac

SEQ ID NO: 52784 - DNA, 25 bp, Homo sapien
gttccgtcggggttcgtccctcgac

SEQ ID NO: 52785 - DNA, 25 bp, Homo sapien
gtgtcatcgaaatcggtcccgtaag

SEQ ID NO: 52786 - DNA, 25 bp, Homo sapien
gtgtcatcgaaaacggtcccgtaag

SEQ ID NO: 52787 - DNA, 25 bp, Homo sapien
aagaggaagagaaagcgggtctcaa

SEQ ID NO: 52788 - DNA, 25 bp, Homo sapien
aagaggaagagatagcgggtctcaa

SEQ ID NO: 52789 - DNA, 25 bp, Homo sapien
gcaaaaagagagacggaggccaacg

SEQ ID NO: 52790 - DNA, 25 bp, Homo sapien
gcaaaaagagagtcggaggccaacg

SEQ ID NO: 52791 - DNA, 25 bp, Homo sapien
tacagagcggaaacaattccagtcg

SEQ ID NO: 52792 - DNA, 25 bp, Homo sapien
tacagagcggaatcaattccagtcg

SEQ ID NO: 52793 - DNA, 25 bp, Homo sapien
atcaagaacaaggtaattgacttct

SEQ ID NO: 52794 - DNA, 25 bp, Homo sapien
atcaagaacaagctaattgacttct

SEQ ID NO: 52795 - DNA, 25 bp, Homo sapien
taagggacctagtgttgtgtggtcc

SEQ ID NO: 52796 - DNA, 25 bp, Homo sapien
taagggacctagagttgtgtggtcc

SEQ ID NO: 52797 - DNA, 25 bp, Homo sapien
cctcaagaagaggtggtcgagagcc

SEQ ID NO: 52798 - DNA, 25 bp, Homo sapien
cctcaagaagagctggtcgagagcc

SEQ ID NO: 52799 - DNA, 25 bp, Homo sapien
caacagaaaggtagttctgtcgtac

SEQ ID NO: 52800 - DNA, 25 bp, Homo sapien
caacagaaaggttgttctgtcgtac

SEQ ID NO: 52801 - DNA, 25 bp, Homo sapien
gaatcagtaaatgaatgttcccact

SEQ ID NO: 52802 - DNA, 25 bp, Homo sapien
gaatcagtaaatcaatgttcccact

SEQ ID NO: 52803 - DNA, 25 bp, Homo sapien
tcagtcgacatcgacgtttcctaag

SEQ ID NO: 52804 - DNA, 25 bp, Homo sapien
tcagtcgacatccacgtttcctaag

SEQ ID NO: 52805 - DNA, 25 bp, Homo sapien
tcgggtcttcgtccttccgtcagac

SEQ ID NO: 52806 - DNA, 25 bp, Homo sapien
tcgggtcttcgtgcttccgtcagac

SEQ ID NO: 52807 - DNA, 25 bp, Homo sapien
taaggtgttatgtctatcatcactc

SEQ ID NO: 52808 - DNA, 25 bp, Homo sapien
taaggtgttatgactatcatcactc

SEQ ID NO: 52809 - DNA, 25 bp, Homo sapien
actaagttttaggttttacctcaag

SEQ ID NO: 52810 - DNA, 25 bp, Homo sapien
actaagttttagcttttacctcaag

SEQ ID NO: 52811 - DNA, 25 bp, Homo sapien
aaatatttgtgtttccctgtacagt

SEQ ID NO: 52812 - DNA, 25 bp, Homo sapien
aaatatttgtgtatccctgtacagt

SEQ ID NO: 52813 - DNA, 25 bp, Homo sapien
cgagataatcagttttctcttggag

SEQ ID NO: 52814 - DNA, 25 bp, Homo sapien
cgagataatcagatttctcttggag

SEQ ID NO: 52815 - DNA, 25 bp, Homo sapien
aggaatcacttacttcttgaattag

SEQ ID NO: 52816 - DNA, 25 bp, Homo sapien
aggaatcacttagttcttgaattag

SEQ ID NO: 52817 - DNA, 25 bp, Homo sapien
gatgactctatttattgtcctctgt

SEQ ID NO: 52818 - DNA, 25 bp, Homo sapien
gatgactctattaattgtcctctgt

SEQ ID NO: 52819 - DNA, 25 bp, Homo sapien
gtctatgctgtgaaactatccttgt

SEQ ID NO: 52820 - DNA, 25 bp, Homo sapien
gtctatgctgtgtaactatccttgt

SEQ ID NO: 52821 - DNA, 25 bp, Homo sapien
aaccttgtctactcgtcgggaccct

SEQ ID NO: 52822 - DNA, 25 bp, Homo sapien
aaccttgtctacacgtcgggaccct

SEQ ID NO: 52823 - DNA, 25 bp, Homo sapien
aactcttgtcttctcgtgcacgttt

SEQ ID NO: 52824 - DNA, 25 bp, Homo sapien
aactcttgtcttgtcgtgcacgttt

SEQ ID NO: 52825 - DNA, 25 bp, Homo sapien
ctacttggtgagaggaacgagtact

SEQ ID NO: 52826 - DNA, 25 bp, Homo sapien
ctacttggtgagtggaacgagtact

SEQ ID NO: 52827 - DNA, 25 bp, Homo sapien
ttccgtgatgtaggtggtcggaaac

SEQ ID NO: 52828 - DNA, 25 bp, Homo sapien
ttccgtgatgtacgtggtcggaaac

SEQ ID NO: 52829 - DNA, 25 bp, Homo sapien
ctcgtcggtgcaggagccactacga

SEQ ID NO: 52830 - DNA, 25 bp, Homo sapien
ctcgtcggtgcacgagccactacga

SEQ ID NO: 52831 - DNA, 25 bp, Homo sapien
agaccggcttcactgacgacctgtc

SEQ ID NO: 52832 - DNA, 25 bp, Homo sapien
agaccggcttcagtgacgacctgtc

SEQ ID NO: 52833 - DNA, 25 bp, Homo sapien
attccgaacttcagcgggtcctgcg

SEQ ID NO: 52834 - DNA, 25 bp, Homo sapien
attccgaacttctgcgggtcctgcg

SEQ ID NO: 52835 - DNA, 25 bp, Homo sapien
cttaaagagtcgattaaatctttcg

SEQ ID NO: 52836 - DNA, 25 bp, Homo sapien
cttaaagagtcgtttaaatctttcg

SEQ ID NO: 52837 - DNA, 25 bp, Homo sapien
tctgactcatcgatgcaaactgtaa

SEQ ID NO: 52838 - DNA, 25 bp, Homo sapien
tctgactcatcgttgcaaactgtaa

SEQ ID NO: 52839 - DNA, 25 bp, Homo sapien
ttatcgatcgtgtctacaactgttc

SEQ ID NO: 52840 - DNA, 25 bp, Homo sapien
ttatcgatcgtgactacaactgttc

SEQ ID NO: 52841 - DNA, 25 bp, Homo sapien
cgtaactcgactggtgggaactcaa

SEQ ID NO: 52842 - DNA, 25 bp, Homo sapien
cgtaactcgactcgtgggaactcaa

SEQ ID NO: 52843 - DNA, 25 bp, Homo sapien
cgacgtcacgggtggtacactctaa

SEQ ID NO: 52844 - DNA, 25 bp, Homo sapien
cgacgtcacgggaggtacactctaa

SEQ ID NO: 52845 - DNA, 25 bp, Homo sapien
tgtccccgtgttcaaggtgaccgga

SEQ ID NO: 52846 - DNA, 25 bp, Homo sapien
tgtccccgtgttgaaggtgaccgga

SEQ ID NO: 52847 - DNA, 25 bp, Homo sapien
tcgtccctgtgttggggtcgagccc

SEQ ID NO: 52848 - DNA, 25 bp, Homo sapien
tcgtccctgtgtaggggtcgagccc

SEQ ID NO: 52849 - DNA, 25 bp, Homo sapien
tctcaatctctggagccggaggacc

SEQ ID NO: 52850 - DNA, 25 bp, Homo sapien
tctcaatctctgcagccggaggacc

SEQ ID NO: 52851 - DNA, 25 bp, Homo sapien
ttaaggtgggtcacgtcggcgtccc

SEQ ID NO: 52852 - DNA, 25 bp, Homo sapien
ttaaggtgggtctcgtcggcgtccc

SEQ ID NO: 52853 - DNA, 25 bp, Homo sapien
tcttaagggaatatcatcgtttttc

SEQ ID NO: 52854 - DNA, 25 bp, Homo sapien
tcttaagggaatttcatcgtttttc

SEQ ID NO: 52855 - DNA, 25 bp, Homo sapien
atgcttaagtgttccgtcttttcag

SEQ ID NO: 52856 - DNA, 25 bp, Homo sapien
atgcttaagtgtaccgtcttttcag

SEQ ID NO: 52857 - DNA, 25 bp, Homo sapien
tcgtatatggttcagtctcctttgt

SEQ ID NO: 52858 - DNA, 25 bp, Homo sapien
tcgtatatggttgagtctcctttgt

SEQ ID NO: 52859 - DNA, 25 bp, Homo sapien
ggttatactcccacagtccgttaca

SEQ ID NO: 52860 - DNA, 25 bp, Homo sapien
ggttatactccctcagtccgttaca

SEQ ID NO: 52861 - DNA, 25 bp, Homo sapien
agttgtccacttttcattgttatag

SEQ ID NO: 52862 - DNA, 25 bp, Homo sapien
agttgtccacttatcattgttatag

SEQ ID NO: 52863 - DNA, 25 bp, Homo sapien
agtgcaccgataacaccttgtctca

SEQ ID NO: 52864 - DNA, 25 bp, Homo sapien
agtgcaccgatatcaccttgtctca

SEQ ID NO: 52865 - DNA, 25 bp, Homo sapien
aaaacaggagcaaagtaaccgacgt

SEQ ID NO: 52866 - DNA, 25 bp, Homo sapien
aaaacaggagcatagtaaccgacgt

SEQ ID NO: 52867 - DNA, 25 bp, Homo sapien
tccgaagacgaggatcagggttcgt

SEQ ID NO: 52868 - DNA, 25 bp, Homo sapien
tccgaagacgagcatcagggttcgt

SEQ ID NO: 52869 - DNA, 25 bp, Homo sapien
ccacggccgcgagtgtcacaggagc

SEQ ID NO: 52870 - DNA, 25 bp, Homo sapien
ccacggccgcgactgtcacaggagc

SEQ ID NO: 52871 - DNA, 25 bp, Homo sapien
tcacaggggtgacctgtgaaggttc

SEQ ID NO: 52872 - DNA, 25 bp, Homo sapien
tcacaggggtgagctgtgaaggttc

SEQ ID NO: 52873 - DNA, 25 bp, Homo sapien
cagaaagcgggactgagaggtttac

SEQ ID NO: 52874 - DNA, 25 bp, Homo sapien
cagaaagcgggagtgagaggtttac

SEQ ID NO: 52875 - DNA, 25 bp, Homo sapien
gtcaaaacgtaccaacatgtgtttc

SEQ ID NO: 52876 - DNA, 25 bp, Homo sapien
gtcaaaacgtacgaacatgtgtttc

SEQ ID NO: 52877 - DNA, 25 bp, Homo sapien
ctccatatatgtggacatgtatttt

SEQ ID NO: 52878 - DNA, 25 bp, Homo sapien
ctccatatatgtcgacatgtatttt

SEQ ID NO: 52879 - DNA, 25 bp, Homo sapien
ttcggaggcctttacattacatggt

SEQ ID NO: 52880 - DNA, 25 bp, Homo sapien
ttcggaggccttaacattacatggt

SEQ ID NO: 52881 - DNA, 25 bp, Homo sapien
tttccgggttctctcgtttctatga

SEQ ID NO: 52882 - DNA, 25 bp, Homo sapien
tttccgggttctgtcgtttctatga

SEQ ID NO: 52883 - DNA, 25 bp, Homo sapien
actccgagggccttctattcactaa

SEQ ID NO: 52884 - DNA, 25 bp, Homo sapien
actccgagggccatctattcactaa

SEQ ID NO: 52885 - DNA, 25 bp, Homo sapien
ctcagatttctgttctttcgtaacg

SEQ ID NO: 52886 - DNA, 25 bp, Homo sapien
ctcagatttctgatctttcgtaacg

SEQ ID NO: 52887 - DNA, 25 bp, Homo sapien
ctgactcttcgtaattcctacgaag

SEQ ID NO: 52888 - DNA, 25 bp, Homo sapien
ctgactcttcgttattcctacgaag

SEQ ID NO: 52889 - DNA, 25 bp, Homo sapien
catttctctactaccgtggaccgtg

SEQ ID NO: 52890 - DNA, 25 bp, Homo sapien
catttctctacttccgtggaccgtg

SEQ ID NO: 52891 - DNA, 25 bp, Homo sapien
gtcgcaaccacttccagtgggtcgg

SEQ ID NO: 52892 - DNA, 25 bp, Homo sapien
gtcgcaaccactaccagtgggtcgg

SEQ ID NO: 52893 - DNA, 25 bp, Homo sapien
agaacggtaccatcctagggtacgg

SEQ ID NO: 52894 - DNA, 25 bp, Homo sapien
agaacggtaccaacctagggtacgg

SEQ ID NO: 52895 - DNA, 25 bp, Homo sapien
gtgctcgtaccttcgctaagccgag

SEQ ID NO: 52896 - DNA, 25 bp, Homo sapien
gtgctcgtacctacgctaagccgag

SEQ ID NO: 52897 - DNA, 25 bp, Homo sapien
catgtagtggagaccgaagtcagtg

SEQ ID NO: 52898 - DNA, 25 bp, Homo sapien
catgtagtggagtccgaagtcagtg

SEQ ID NO: 52899 - DNA, 25 bp, Homo sapien
tttcttgtcggtttctcgtcccatg

SEQ ID NO: 52900 - DNA, 25 bp, Homo sapien
tttcttgtcggtatctcgtcccatg

SEQ ID NO: 52901 - DNA, 25 bp, Homo sapien
tctgagtcaccctgcgtctcgggtt

SEQ ID NO: 52902 - DNA, 25 bp, Homo sapien
tctgagtcacccagcgtctcgggtt

SEQ ID NO: 52903 - DNA, 25 bp, Homo sapien
tcgtgtgttacacaacgatgtgttt

SEQ ID NO: 52904 - DNA, 25 bp, Homo sapien
tcgtgtgttacagaacgatgtgttt

SEQ ID NO: 52905 - DNA, 25 bp, Homo sapien
gtgagagaccttaacgtcttcgtcc

SEQ ID NO: 52906 - DNA, 25 bp, Homo sapien
gtgagagacctttacgtcttcgtcc

SEQ ID NO: 52907 - DNA, 25 bp, Homo sapien
ctactcgagtactcttatgggtcac

SEQ ID NO: 52908 - DNA, 25 bp, Homo sapien
ctactcgagtacacttatgggtcac

SEQ ID NO: 52909 - DNA, 25 bp, Homo sapien
tggtactactgatacatttcgaacc

SEQ ID NO: 52910 - DNA, 25 bp, Homo sapien
tggtactactgaaacatttcgaacc

SEQ ID NO: 52911 - DNA, 25 bp, Homo sapien
ggggtgatctagtaatgctcattcg

SEQ ID NO: 52912 - DNA, 25 bp, Homo sapien
ggggtgatctagaaatgctcattcg

SEQ ID NO: 52913 - DNA, 25 bp, Homo sapien
gtaatgtgagtacgatccctattgt

SEQ ID NO: 52914 - DNA, 25 bp, Homo sapien
gtaatgtgagtaggatccctattgt

SEQ ID NO: 52915 - DNA, 25 bp, Homo sapien
atacatttacggaccagaagtgtct

SEQ ID NO: 52916 - DNA, 25 bp, Homo sapien
atacatttacggtccagaagtgtct

SEQ ID NO: 52917 - DNA, 25 bp, Homo sapien
acctgacgagataacgtttactgta

SEQ ID NO: 52918 - DNA, 25 bp, Homo sapien
acctgacgagattacgtttactgta

SEQ ID NO: 52919 - DNA, 25 bp, Homo sapien
ccgtcggtacgatcttgtaggaatt

SEQ ID NO: 52920 - DNA, 25 bp, Homo sapien
ccgtcggtacgaacttgtaggaatt

SEQ ID NO: 52921 - DNA, 25 bp, Homo sapien
caggcggtccgtttatatgtaaagt

SEQ ID NO: 52922 - DNA, 25 bp, Homo sapien
caggcggtccgtatatatgtaaagt

SEQ ID NO: 52923 - DNA, 25 bp, Homo sapien
cgggcgctcactacgttcttaagat

SEQ ID NO: 52924 - DNA, 25 bp, Homo sapien
cgggcgctcacttcgttcttaagat

SEQ ID NO: 52925 - DNA, 25 bp, Homo sapien
cggttccacacaacggtactgtaaa

SEQ ID NO: 52926 - DNA, 25 bp, Homo sapien
cggttccacacatcggtactgtaaa

SEQ ID NO: 52927 - DNA, 25 bp, Homo sapien
tcgagactagagtctcaggaccggt

SEQ ID NO: 52928 - DNA, 25 bp, Homo sapien
tcgagactagagactcaggaccggt

SEQ ID NO: 52929 - DNA, 25 bp, Homo sapien
ccacgatagctctcggaggatacgt

SEQ ID NO: 52930 - DNA, 25 bp, Homo sapien
ccacgatagctcacggaggatacgt

SEQ ID NO: 52931 - DNA, 25 bp, Homo sapien
catccgaatacttccgaaagagttt

SEQ ID NO: 52932 - DNA, 25 bp, Homo sapien
catccgaatactaccgaaagagttt

SEQ ID NO: 52933 - DNA, 25 bp, Homo sapien
gcctcaacactgaagaatcacttcg

SEQ ID NO: 52934 - DNA, 25 bp, Homo sapien
gcctcaacactgtagaatcacttcg

SEQ ID NO: 52935 - DNA, 25 bp, Homo sapien
ttcactacaccacaaaagaccgttt

SEQ ID NO: 52936 - DNA, 25 bp, Homo sapien
ttcactacaccagaaaagaccgttt

SEQ ID NO: 52937 - DNA, 25 bp, Homo sapien
gtgatttaacggtcataactacttt

SEQ ID NO: 52938 - DNA, 25 bp, Homo sapien
gtgatttaacggacataactacttt

SEQ ID NO: 52939 - DNA, 25 bp, Homo sapien
tatgtcgacgagttcatgatctatc

SEQ ID NO: 52940 - DNA, 25 bp, Homo sapien
tatgtcgacgagatcatgatctatc

SEQ ID NO: 52941 - DNA, 25 bp, Homo sapien
tgtcgtcggcgacgaccgcgtgacc

SEQ ID NO: 52942 - DNA, 25 bp, Homo sapien
tgtcgtcggcgaggaccgcgtgacc

SEQ ID NO: 52943 - DNA, 25 bp, Homo sapien
gagccgggcgcgtgacacactgacc

SEQ ID NO: 52944 - DNA, 25 bp, Homo sapien
gagccgggcgcgagacacactgacc

SEQ ID NO: 52945 - DNA, 25 bp, Homo sapien
aacttgaaatctgtacagatgatct

SEQ ID NO: 52946 - DNA, 25 bp, Homo sapien
aacttgaaatctctacagatgatct

SEQ ID NO: 52947 - DNA, 25 bp, Homo sapien
atcgtaattattcgaagtcgtgatc

SEQ ID NO: 52948 - DNA, 25 bp, Homo sapien
atcgtaattattggaagtcgtgatc

SEQ ID NO: 52949 - DNA, 25 bp, Homo sapien
tgttccagtctttgacctctttatg

SEQ ID NO: 52950 - DNA, 25 bp, Homo sapien
tgttccagtcttagacctctttatg

SEQ ID NO: 52951 - DNA, 25 bp, Homo sapien
gaaggagtcctgattcgtcgttttg

SEQ ID NO: 52952 - DNA, 25 bp, Homo sapien
gaaggagtcctgtttcgtcgttttg

SEQ ID NO: 52953 - DNA, 25 bp, Homo sapien
agaaagatcttcgcctgtcgttatg

SEQ ID NO: 52954 - DNA, 25 bp, Homo sapien
agaaagatcttcccctgtcgttatg

SEQ ID NO: 52955 - DNA, 25 bp, Homo sapien
gtcacaaacagaatacccctgtatg

SEQ ID NO: 52956 - DNA, 25 bp, Homo sapien
gtcacaaacagattacccctgtatg

SEQ ID NO: 52957 - DNA, 25 bp, Homo sapien
aagaaaccgaatgtcctctctgatc

SEQ ID NO: 52958 - DNA, 25 bp, Homo sapien
aagaaaccgaatctcctctctgatc

SEQ ID NO: 52959 - DNA, 25 bp, Homo sapien
acgaagtcgggttctccttagtttt

SEQ ID NO: 52960 - DNA, 25 bp, Homo sapien
acgaagtcgggtactccttagtttt

SEQ ID NO: 52961 - DNA, 25 bp, Homo sapien
cggggcgtcgtaaaaccctagtttt

SEQ ID NO: 52962 - DNA, 25 bp, Homo sapien
cggggcgtcgtataaccctagtttt

SEQ ID NO: 52963 - DNA, 25 bp, Homo sapien
cggggttctgtgttccctatgactc

SEQ ID NO: 52964 - DNA, 25 bp, Homo sapien
cggggttctgtgatccctatgactc

SEQ ID NO: 52965 - DNA, 25 bp, Homo sapien
acctttgtggttgacccctttactc

SEQ ID NO: 52966 - DNA, 25 bp, Homo sapien
acctttgtggttcacccctttactc

SEQ ID NO: 52967 - DNA, 25 bp, Homo sapien
tagtattcaggtaaaccccttctga

SEQ ID NO: 52968 - DNA, 25 bp, Homo sapien
tagtattcaggttaaccccttctga

SEQ ID NO: 52969 - DNA, 25 bp, Homo sapien
gatccggtgacctatctgtgtctgt

SEQ ID NO: 52970 - DNA, 25 bp, Homo sapien
gatccggtgaccaatctgtgtctgt

SEQ ID NO: 52971 - DNA, 25 bp, Homo sapien
taacccggacgtaatcttttgtcct

SEQ ID NO: 52972 - DNA, 25 bp, Homo sapien
taacccggacgttatcttttgtcct

SEQ ID NO: 52973 - DNA, 25 bp, Homo sapien
gtgccttgttaaatgtgtctgtcct

SEQ ID NO: 52974 - DNA, 25 bp, Homo sapien
gtgccttgttaattgtgtctgtcct

SEQ ID NO: 52975 - DNA, 25 bp, Homo sapien
gttcatgacgtttttcgtcactcct

SEQ ID NO: 52976 - DNA, 25 bp, Homo sapien
gttcatgacgttattcgtcactcct

SEQ ID NO: 52977 - DNA, 25 bp, Homo sapien
cctgttgtcgacgacaaacaaagta

SEQ ID NO: 52978 - DNA, 25 bp, Homo sapien
cctgttgtcgaccacaaacaaagta

SEQ ID NO: 52979 - DNA, 25 bp, Homo sapien
ttattccttgggtaccagaccaccc

SEQ ID NO: 52980 - DNA, 25 bp, Homo sapien
ttattccttgggaaccagaccaccc

SEQ ID NO: 52981 - DNA, 25 bp, Homo sapien
cttctagggttcgtgtgaccacctc

SEQ ID NO: 52982 - DNA, 25 bp, Homo sapien
cttctagggttcctgtgaccacctc

SEQ ID NO: 52983 - DNA, 25 bp, Homo sapien
cgccggaggagaagttctcaccctc

SEQ ID NO: 52984 - DNA, 25 bp, Homo sapien
cgccggaggagatgttctcaccctc

SEQ ID NO: 52985 - DNA, 25 bp, Homo sapien
gtgacccgtctgtatttctccatcc

SEQ ID NO: 52986 - DNA, 25 bp, Homo sapien
gtgacccgtctgaatttctccatcc

SEQ ID NO: 52987 - DNA, 25 bp, Homo sapien
ttttccgggtaccttacttcccttc

SEQ ID NO: 52988 - DNA, 25 bp, Homo sapien
ttttccgggtacgttacttcccttc

SEQ ID NO: 52989 - DNA, 25 bp, Homo sapien
ttcgtgcctccgaaattaccgtctc

SEQ ID NO: 52990 - DNA, 25 bp, Homo sapien
ttcgtgcctccgtaattaccgtctc

SEQ ID NO: 52991 - DNA, 25 bp, Homo sapien
tatgtccctctacgtgatcaggttc

SEQ ID NO: 52992 - DNA, 25 bp, Homo sapien
tatgtccctctaggtgatcaggttc

SEQ ID NO: 52993 - DNA, 25 bp, Homo sapien
tcgacagaaggtacgtcagaggtac

SEQ ID NO: 52994 - DNA, 25 bp, Homo sapien
tcgacagaaggttcgtcagaggtac

SEQ ID NO: 52995 - DNA, 25 bp, Homo sapien
ccgatgagtagttttgtaggacact

SEQ ID NO: 52996 - DNA, 25 bp, Homo sapien
ccgatgagtagtattgtaggacact

SEQ ID NO: 52997 - DNA, 25 bp, Homo sapien
ggaaagagtgactggtctgacgact

SEQ ID NO: 52998 - DNA, 25 bp, Homo sapien
ggaaagagtgacaggtctgacgact

SEQ ID NO: 52999 - DNA, 25 bp, Homo sapien
ccaatccgacagaaacctcggacgt

SEQ ID NO: 53000 - DNA, 25 bp, Homo sapien
ccaatccgacagtaacctcggacgt

SEQ ID NO: 53001 - DNA, 25 bp, Homo sapien
acaacagccgatttcgaccagaacg

SEQ ID NO: 53002 - DNA, 25 bp, Homo sapien
acaacagccgatatcgaccagaacg

SEQ ID NO: 53003 - DNA, 25 bp, Homo sapien
caacaacacctactaagccgtgaag

SEQ ID NO: 53004 - DNA, 25 bp, Homo sapien
caacaacacctagtaagccgtgaag

SEQ ID NO: 53005 - DNA, 25 bp, Homo sapien
cattaggtgttataagactcggaca

SEQ ID NO: 53006 - DNA, 25 bp, Homo sapien
cattaggtgttaaaagactcggaca

SEQ ID NO: 53007 - DNA, 25 bp, Homo sapien
caatttagtttagagttacgtcctc

SEQ ID NO: 53008 - DNA, 25 bp, Homo sapien
caatttagtttacagttacgtcctc

SEQ ID NO: 53009 - DNA, 25 bp, Homo sapien
gagtatcagtttggacgttatcatc

SEQ ID NO: 53010 - DNA, 25 bp, Homo sapien
gagtatcagtttcgacgttatcatc

SEQ ID NO: 53011 - DNA, 25 bp, Homo sapien
tatacgtgttgtcattcgtatcttg

SEQ ID NO: 53012 - DNA, 25 bp, Homo sapien
tatacgtgttgtgattcgtatcttg

SEQ ID NO: 53013 - DNA, 25 bp, Homo sapien
ttagagttatgtgctagagacttca

SEQ ID NO: 53014 - DNA, 25 bp, Homo sapien
ttagagttatgtcctagagacttca

SEQ ID NO: 53015 - DNA, 25 bp, Homo sapien
ggtcgtcgaaggagtctaaatttca

SEQ ID NO: 53016 - DNA, 25 bp, Homo sapien
ggtcgtcgaaggtgtctaaatttca

SEQ ID NO: 53017 - DNA, 25 bp, Homo sapien
ggtcgaaggggcacatcacgtacac

SEQ ID NO: 53018 - DNA, 25 bp, Homo sapien
ggtcgaaggggctcatcacgtacac

SEQ ID NO: 53019 - DNA, 25 bp, Homo sapien
tggaataaggtctcgtcgttaaatc

SEQ ID NO: 53020 - DNA, 25 bp, Homo sapien
tggaataaggtcacgtcgttaaatc

SEQ ID NO: 53021 - DNA, 25 bp, Homo sapien
gaaaataccgtttagtctaaacagc

SEQ ID NO: 53022 - DNA, 25 bp, Homo sapien
gaaaataccgttaagtctaaacagc

SEQ ID NO: 53023 - DNA, 25 bp, Homo sapien
ggtaagccagttagtctcgagccgc

SEQ ID NO: 53024 - DNA, 25 bp, Homo sapien
ggtaagccagtttgtctcgagccgc

SEQ ID NO: 53025 - DNA, 25 bp, Homo sapien
aagtgcagaattttaactttcagtc

SEQ ID NO: 53026 - DNA, 25 bp, Homo sapien
aagtgcagaattataactttcagtc

SEQ ID NO: 53027 - DNA, 25 bp, Homo sapien
ggtcatagacacgaaagggctcaga

SEQ ID NO: 53028 - DNA, 25 bp, Homo sapien
ggtcatagacaccaaagggctcaga

SEQ ID NO: 53029 - DNA, 25 bp, Homo sapien
tcttagacgacagaggggtactcaa

SEQ ID NO: 53030 - DNA, 25 bp, Homo sapien
tcttagacgacacaggggtactcaa

SEQ ID NO: 53031 - DNA, 25 bp, Homo sapien
attttgacttcaacgttctgttaga

SEQ ID NO: 53032 - DNA, 25 bp, Homo sapien
attttgacttcatcgttctgttaga

SEQ ID NO: 53033 - DNA, 25 bp, Homo sapien
ggtgacatttctttcgtgtagacgt

SEQ ID NO: 53034 - DNA, 25 bp, Homo sapien
ggtgacatttctatcgtgtagacgt

SEQ ID NO: 53035 - DNA, 25 bp, Homo sapien
gccggcatggtcttcgtgtcctact

SEQ ID NO: 53036 - DNA, 25 bp, Homo sapien
gccggcatggtcatcgtgtcctact

SEQ ID NO: 53037 - DNA, 25 bp, Homo sapien
gtccttttgtcgacaggtctactgt

SEQ ID NO: 53038 - DNA, 25 bp, Homo sapien
gtccttttgtcgtcaggtctactgt

SEQ ID NO: 53039 - DNA, 25 bp, Homo sapien
ggttggatcctggtccggtctcggt

SEQ ID NO: 53040 - DNA, 25 bp, Homo sapien
ggttggatcctgctccggtctcggt

SEQ ID NO: 53041 - DNA, 25 bp, Homo sapien
gggctgaaataagtcaccgtgcaag

SEQ ID NO: 53042 - DNA, 25 bp, Homo sapien
gggctgaaataactcaccgtgcaag

SEQ ID NO: 53043 - DNA, 25 bp, Homo sapien
gactctagaaggataaccacttcaa

SEQ ID NO: 53044 - DNA, 25 bp, Homo sapien
gactctagaaggttaaccacttcaa

SEQ ID NO: 53045 - DNA, 25 bp, Homo sapien
attcgaagagtcaaagacctagaca

SEQ ID NO: 53046 - DNA, 25 bp, Homo sapien
attcgaagagtctaagacctagaca

SEQ ID NO: 53047 - DNA, 25 bp, Homo sapien
tccaaagaccggttgttaagtgaaa

SEQ ID NO: 53048 - DNA, 25 bp, Homo sapien
tccaaagaccggatgttaagtgaaa

SEQ ID NO: 53049 - DNA, 25 bp, Homo sapien
actattgttgatcgtttagtttcac

SEQ ID NO: 53050 - DNA, 25 bp, Homo sapien
actattgttgatggtttagtttcac

SEQ ID NO: 53051 - DNA, 25 bp, Homo sapien
atttgtggcttttatgtagtctacc

SEQ ID NO: 53052 - DNA, 25 bp, Homo sapien
atttgtggctttaatgtagtctacc

SEQ ID NO: 53053 - DNA, 25 bp, Homo sapien
agtttagtgttgtttcgactgaacc

SEQ ID NO: 53054 - DNA, 25 bp, Homo sapien
agtttagtgttgattcgactgaacc

SEQ ID NO: 53055 - DNA, 25 bp, Homo sapien
gcggtgtattagttgtctttctacc

SEQ ID NO: 53056 - DNA, 25 bp, Homo sapien
gcggtgtattagatgtctttctacc

SEQ ID NO: 53057 - DNA, 25 bp, Homo sapien
tttgtgacacaggtttcgttttacg

SEQ ID NO: 53058 - DNA, 25 bp, Homo sapien
tttgtgacacagctttcgttttacg

SEQ ID NO: 53059 - DNA, 25 bp, Homo sapien
cctgtgaaggttgtgttaacgtacg

SEQ ID NO: 53060 - DNA, 25 bp, Homo sapien
cctgtgaaggttctgttaacgtacg

SEQ ID NO: 53061 - DNA, 25 bp, Homo sapien
tcttcgtaagagtcaagtatccgat

SEQ ID NO: 53062 - DNA, 25 bp, Homo sapien
tcttcgtaagagacaagtatccgat

SEQ ID NO: 53063 - DNA, 25 bp, Homo sapien
ggtagtctcgggtcacgatacccga

SEQ ID NO: 53064 - DNA, 25 bp, Homo sapien
ggtagtctcgggacacgatacccga

SEQ ID NO: 53065 - DNA, 25 bp, Homo sapien
cgagactcaagtacgacaaccgacc

SEQ ID NO: 53066 - DNA, 25 bp, Homo sapien
cgagactcaagttcgacaaccgacc

SEQ ID NO: 53067 - DNA, 25 bp, Homo sapien
cggtaaggacgaaagacccggaccg

SEQ ID NO: 53068 - DNA, 25 bp, Homo sapien
cggtaaggacgatagacccggaccg

SEQ ID NO: 53069 - DNA, 25 bp, Homo sapien
tcgcggacgcgtcaattccccgagc

SEQ ID NO: 53070 - DNA, 25 bp, Homo sapien
tcgcggacgcgtgaattccccgagc

SEQ ID NO: 53071 - DNA, 25 bp, Homo sapien
tagaggtcgtcgtaagggcactaga

SEQ ID NO: 53072 - DNA, 25 bp, Homo sapien
tagaggtcgtcgaaagggcactaga

SEQ ID NO: 53073 - DNA, 25 bp, Homo sapien
ctcgagtcctggtacaggtggacag

SEQ ID NO: 53074 - DNA, 25 bp, Homo sapien
ctcgagtcctggaacaggtggacag

SEQ ID NO: 53075 - DNA, 25 bp, Homo sapien
ctgtcttcctttcaccggggtcgta

SEQ ID NO: 53076 - DNA, 25 bp, Homo sapien
ctgtcttcctttgaccggggtcgta

SEQ ID NO: 53077 - DNA, 25 bp, Homo sapien
cgagtttccttcactccggacctag

SEQ ID NO: 53078 - DNA, 25 bp, Homo sapien
cgagtttccttctctccggacctag

SEQ ID NO: 53079 - DNA, 25 bp, Homo sapien
aactactgtgtcattcagggtcgta

SEQ ID NO: 53080 - DNA, 25 bp, Homo sapien
aactactgtgtctttcagggtcgta

SEQ ID NO: 53081 - DNA, 25 bp, Homo sapien
ctactatggtcttcccgtgactcac

SEQ ID NO: 53082 - DNA, 25 bp, Homo sapien
ctactatggtctacccgtgactcac

SEQ ID NO: 53083 - DNA, 25 bp, Homo sapien
aagcgtaaaggtaaccttccgtgga

SEQ ID NO: 53084 - DNA, 25 bp, Homo sapien
aagcgtaaaggttaccttccgtgga

SEQ ID NO: 53085 - DNA, 25 bp, Homo sapien
gtaacgaaataatgataaccgtcca

SEQ ID NO: 53086 - DNA, 25 bp, Homo sapien
gtaacgaaataaagataaccgtcca

SEQ ID NO: 53087 - DNA, 25 bp, Homo sapien
acaaacacaggtccaccgacggaca

SEQ ID NO: 53088 - DNA, 25 bp, Homo sapien
acaaacacaggtgcaccgacggaca

SEQ ID NO: 53089 - DNA, 25 bp, Homo sapien
acacgactcaaaccacggggtcagt

SEQ ID NO: 53090 - DNA, 25 bp, Homo sapien
acacgactcaaagcacggggtcagt

SEQ ID NO: 53091 - DNA, 25 bp, Homo sapien
atcagacacagctgctaggtcacca

SEQ ID NO: 53092 - DNA, 25 bp, Homo sapien
atcagacacagcagctaggtcacca

SEQ ID NO: 53093 - DNA, 25 bp, Homo sapien
ttgtagaaagcgaagtgggtccgac

SEQ ID NO: 53094 - DNA, 25 bp, Homo sapien
ttgtagaaagcgtagtgggtccgac

SEQ ID NO: 53095 - DNA, 25 bp, Homo sapien
ggagaagactttgacggtgtctgac

SEQ ID NO: 53096 - DNA, 25 bp, Homo sapien
ggagaagactttcacggtgtctgac

SEQ ID NO: 53097 - DNA, 25 bp, Homo sapien
ccggaatcgctttgacgtctcctga

SEQ ID NO: 53098 - DNA, 25 bp, Homo sapien
ccggaatcgcttagacgtctcctga

SEQ ID NO: 53099 - DNA, 25 bp, Homo sapien
caaggtaggttctcgggttatccgg

SEQ ID NO: 53100 - DNA, 25 bp, Homo sapien
caaggtaggttcacgggttatccgg

SEQ ID NO: 53101 - DNA, 25 bp, Homo sapien
ctaatgatttgtagaggttacacca

SEQ ID NO: 53102 - DNA, 25 bp, Homo sapien
ctaatgatttgttgaggttacacca

SEQ ID NO: 53103 - DNA, 25 bp, Homo sapien
cacactggttctttgggtgtcagga

SEQ ID NO: 53104 - DNA, 25 bp, Homo sapien
cacactggttctatgggtgtcagga

SEQ ID NO: 53105 - DNA, 25 bp, Homo sapien
aggagacgcctctaggctaaagctg

SEQ ID NO: 53106 - DNA, 25 bp, Homo sapien
aggagacgcctcaaggctaaagctg

SEQ ID NO: 53107 - DNA, 25 bp, Homo sapien
ctaacctctcgtcgttcttgaacga

SEQ ID NO: 53108 - DNA, 25 bp, Homo sapien
ctaacctctcgtggttcttgaacga

SEQ ID NO: 53109 - DNA, 25 bp, Homo sapien
acgtcccctgtgtccttgtgctact

SEQ ID NO: 53110 - DNA, 25 bp, Homo sapien
acgtcccctgtgaccttgtgctact

SEQ ID NO: 53111 - DNA, 25 bp, Homo sapien
agggcccccaggtccgtgaggtcct

SEQ ID NO: 53112 - DNA, 25 bp, Homo sapien
agggcccccaggaccgtgaggtcct

SEQ ID NO: 53113 - DNA, 25 bp, Homo sapien
caacacgcagagacgccgaggactt

SEQ ID NO: 53114 - DNA, 25 bp, Homo sapien
caacacgcagagtcgccgaggactt

SEQ ID NO: 53115 - DNA, 25 bp, Homo sapien
taaccgaccgagagctgacggctct

SEQ ID NO: 53116 - DNA, 25 bp, Homo sapien
taaccgaccgagtgctgacggctct

SEQ ID NO: 53117 - DNA, 25 bp, Homo sapien
tcacggtcacaggtcgccgaggttc

SEQ ID NO: 53118 - DNA, 25 bp, Homo sapien
tcacggtcacagctcgccgaggttc

SEQ ID NO: 53119 - DNA, 25 bp, Homo sapien
taccaaacaacgactcgtagagttg

SEQ ID NO: 53120 - DNA, 25 bp, Homo sapien
taccaaacaacgtctcgtagagttg

SEQ ID NO: 53121 - DNA, 25 bp, Homo sapien
aggagttaaagtcgtctgtcggtcg

SEQ ID NO: 53122 - DNA, 25 bp, Homo sapien
aggagttaaagtggtctgtcggtcg

SEQ ID NO: 53123 - DNA, 25 bp, Homo sapien
cattacgtttatgactgctgtgctt

SEQ ID NO: 53124 - DNA, 25 bp, Homo sapien
cattacgtttatcactgctgtgctt

SEQ ID NO: 53125 - DNA, 25 bp, Homo sapien
cgtctccgggttctcagtgtctatg

SEQ ID NO: 53126 - DNA, 25 bp, Homo sapien
cgtctccgggttgtcagtgtctatg

SEQ ID NO: 53127 - DNA, 25 bp, Homo sapien
taactgtctctgtccctggagctgc

SEQ ID NO: 53128 - DNA, 25 bp, Homo sapien
taactgtctctgaccctggagctgc

SEQ ID NO: 53129 - DNA, 25 bp, Homo sapien
gactcaatcaaatggggtgtcgtca

SEQ ID NO: 53130 - DNA, 25 bp, Homo sapien
gactcaatcaaaaggggtgtcgtca

SEQ ID NO: 53131 - DNA, 25 bp, Homo sapien
acaaagtaaaacagcaaggtttcat

SEQ ID NO: 53132 - DNA, 25 bp, Homo sapien
acaaagtaaaactgcaaggtttcat

SEQ ID NO: 53133 - DNA, 25 bp, Homo sapien
tcaaggaaataggagaatcgtttcc

SEQ ID NO: 53134 - DNA, 25 bp, Homo sapien
tcaaggaaatagcagaatcgtttcc

SEQ ID NO: 53135 - DNA, 25 bp, Homo sapien
acaaggtctctagactggggttttc

SEQ ID NO: 53136 - DNA, 25 bp, Homo sapien
acaaggtctctacactggggttttc

SEQ ID NO: 53137 - DNA, 25 bp, Homo sapien
tggtcggtcttaggactattcagct

SEQ ID NO: 53138 - DNA, 25 bp, Homo sapien
tggtcggtcttacgactattcagct

SEQ ID NO: 53139 - DNA, 25 bp, Homo sapien
ggagcgaggtccaagacttagtgga

SEQ ID NO: 53140 - DNA, 25 bp, Homo sapien
ggagcgaggtcctagacttagtgga

SEQ ID NO: 53141 - DNA, 25 bp, Homo sapien
gacgagtgtccttgcggcgtaaacg

SEQ ID NO: 53142 - DNA, 25 bp, Homo sapien
gacgagtgtcctagcggcgtaaacg

SEQ ID NO: 53143 - DNA, 25 bp, Homo sapien
agacgggacgtagaagtccggtaca

SEQ ID NO: 53144 - DNA, 25 bp, Homo sapien
agacgggacgtacaagtccggtaca

SEQ ID NO: 53145 - DNA, 25 bp, Homo sapien
aaagaacagccgtggtccaccgtgt

SEQ ID NO: 53146 - DNA, 25 bp, Homo sapien
aaagaacagccgaggtccaccgtgt

SEQ ID NO: 53147 - DNA, 25 bp, Homo sapien
gcaagtcgctgacaagctaaagtag

SEQ ID NO: 53148 - DNA, 25 bp, Homo sapien
gcaagtcgctgagaagctaaagtag

SEQ ID NO: 53149 - DNA, 25 bp, Homo sapien
gcaggcgtacgattagcgaaaaatg

SEQ ID NO: 53150 - DNA, 25 bp, Homo sapien
gcaggcgtacgaatagcgaaaaatg

SEQ ID NO: 53151 - DNA, 25 bp, Homo sapien
actttaccgtctaaataattcataa

SEQ ID NO: 53152 - DNA, 25 bp, Homo sapien
actttaccgtcttaataattcataa

SEQ ID NO: 53153 - DNA, 25 bp, Homo sapien
atagtccgtttcagtatcttggtaa

SEQ ID NO: 53154 - DNA, 25 bp, Homo sapien
atagtccgtttctgtatcttggtaa

SEQ ID NO: 53155 - DNA, 25 bp, Homo sapien
agtcttgttcgtacgaatatacatg

SEQ ID NO: 53156 - DNA, 25 bp, Homo sapien
agtcttgttcgttcgaatatacatg

SEQ ID NO: 53157 - DNA, 25 bp, Homo sapien
gtcgtcttccttatcagttgtaata

SEQ ID NO: 53158 - DNA, 25 bp, Homo sapien
gtcgtcttccttttcagttgtaata

SEQ ID NO: 53159 - DNA, 25 bp, Homo sapien
aaataaagtctcacgttgtctttga

SEQ ID NO: 53160 - DNA, 25 bp, Homo sapien
aaataaagtctctcgttgtctttga

SEQ ID NO: 53161 - DNA, 25 bp, Homo sapien
acatagtccgtttcagtatcttggt

SEQ ID NO: 53162 - DNA, 25 bp, Homo sapien
acatagtccgttacagtatcttggt

SEQ ID NO: 53163 - DNA, 25 bp, Homo sapien
agacacttgtgtcgagtactctttg

SEQ ID NO: 53164 - DNA, 25 bp, Homo sapien
agacacttgtgtggagtactctttg

SEQ ID NO: 53165 - DNA, 25 bp, Homo sapien
cgtaaattaactggagtgtctcttt

SEQ ID NO: 53166 - DNA, 25 bp, Homo sapien
cgtaaattaactcgagtgtctcttt

SEQ ID NO: 53167 - DNA, 25 bp, Homo sapien
gtgtatgactcctccgttccgtcag

SEQ ID NO: 53168 - DNA, 25 bp, Homo sapien
gtgtatgactccaccgttccgtcag

SEQ ID NO: 53169 - DNA, 25 bp, Homo sapien
ttagttatgtaaaccctttcagacg

SEQ ID NO: 53170 - DNA, 25 bp, Homo sapien
ttagttatgtaatccctttcagacg

SEQ ID NO: 53171 - DNA, 25 bp, Homo sapien
tttagtctcctgaccccgtggaccg

SEQ ID NO: 53172 - DNA, 25 bp, Homo sapien
tttagtctcctgtccccgtggaccg

SEQ ID NO: 53173 - DNA, 25 bp, Homo sapien
tctcttgtcccaagtccgttgacac

SEQ ID NO: 53174 - DNA, 25 bp, Homo sapien
tctcttgtcccatgtccgttgacac

SEQ ID NO: 53175 - DNA, 25 bp, Homo sapien
ctaatgactggagtatttagtactc

SEQ ID NO: 53176 - DNA, 25 bp, Homo sapien
ctaatgactggactatttagtactc

SEQ ID NO: 53177 - DNA, 25 bp, Homo sapien
tccggttactgtgtattgtgacgta

SEQ ID NO: 53178 - DNA, 25 bp, Homo sapien
tccggttactgtctattgtgacgta

SEQ ID NO: 53179 - DNA, 25 bp, Homo sapien
ggacggattcgtctccttttactat

SEQ ID NO: 53180 - DNA, 25 bp, Homo sapien
ggacggattcgtgtccttttactat

SEQ ID NO: 53181 - DNA, 25 bp, Homo sapien
ggggtagattgtttacctttccgtc

SEQ ID NO: 53182 - DNA, 25 bp, Homo sapien
ggggtagattgtatacctttccgtc

SEQ ID NO: 53183 - DNA, 25 bp, Homo sapien
gggtaataacttaaccttcatcgtc

SEQ ID NO: 53184 - DNA, 25 bp, Homo sapien
gggtaataactttaccttcatcgtc

SEQ ID NO: 53185 - DNA, 25 bp, Homo sapien
caaggagtcaaaagagtttctttct

SEQ ID NO: 53186 - DNA, 25 bp, Homo sapien
caaggagtcaaatgagtttctttct

SEQ ID NO: 53187 - DNA, 25 bp, Homo sapien
acaagaggatgacttatcagtcccc

SEQ ID NO: 53188 - DNA, 25 bp, Homo sapien
acaagaggatgagttatcagtcccc

SEQ ID NO: 53189 - DNA, 25 bp, Homo sapien
tgtcagagcggctccagagccgacc

SEQ ID NO: 53190 - DNA, 25 bp, Homo sapien
tgtcagagcggcaccagagccgacc

SEQ ID NO: 53191 - DNA, 25 bp, Homo sapien
gtcggaggacctaccatgactccac

SEQ ID NO: 53192 - DNA, 25 bp, Homo sapien
gtcggaggaccttccatgactccac

SEQ ID NO: 53193 - DNA, 25 bp, Homo sapien
ggtctaccttccagtcgtaccgaca

SEQ ID NO: 53194 - DNA, 25 bp, Homo sapien
ggtctaccttcctgtcgtaccgaca

SEQ ID NO: 53195 - DNA, 25 bp, Homo sapien
gtacgtcgtgtcctgtcttcgagag

SEQ ID NO: 53196 - DNA, 25 bp, Homo sapien
gtacgtcgtgtcgtgtcttcgagag

SEQ ID NO: 53197 - DNA, 25 bp, Homo sapien
gagtgtggtcttctctgcctatagt

SEQ ID NO: 53198 - DNA, 25 bp, Homo sapien
gagtgtggtcttgtctgcctatagt

SEQ ID NO: 53199 - DNA, 25 bp, Homo sapien
cggtgagaccctagggaccctacgt

SEQ ID NO: 53200 - DNA, 25 bp, Homo sapien
cggtgagacccttgggaccctacgt

SEQ ID NO: 53201 - DNA, 25 bp, Homo sapien
gatggtacacaagtgtctacccgta

SEQ ID NO: 53202 - DNA, 25 bp, Homo sapien
gatggtacacaactgtctacccgta

SEQ ID NO: 53203 - DNA, 25 bp, Homo sapien
acgtgtcctctaaggttactctaaa

SEQ ID NO: 53204 - DNA, 25 bp, Homo sapien
acgtgtcctctatggttactctaaa

SEQ ID NO: 53205 - DNA, 25 bp, Homo sapien
tttccttacgtttggtttcgtaaag

SEQ ID NO: 53206 - DNA, 25 bp, Homo sapien
tttccttacgttaggtttcgtaaag

SEQ ID NO: 53207 - DNA, 25 bp, Homo sapien
ttcctggtttgttcattcgacttac

SEQ ID NO: 53208 - DNA, 25 bp, Homo sapien
ttcctggtttgtacattcgacttac

SEQ ID NO: 53209 - DNA, 25 bp, Homo sapien
ccctgagccggaacgggtcgatcgc

SEQ ID NO: 53210 - DNA, 25 bp, Homo sapien
ccctgagccggatcgggtcgatcgc

SEQ ID NO: 53211 - DNA, 25 bp, Homo sapien
gacgtagacggagagtcgttccgac

SEQ ID NO: 53212 - DNA, 25 bp, Homo sapien
gacgtagacggacagtcgttccgac

SEQ ID NO: 53213 - DNA, 25 bp, Homo sapien
tcgagacgaggaactcctacccggc

SEQ ID NO: 53214 - DNA, 25 bp, Homo sapien
tcgagacgaggatctcctacccggc

SEQ ID NO: 53215 - DNA, 25 bp, Homo sapien
gaaagagccccttctactgtgtaga

SEQ ID NO: 53216 - DNA, 25 bp, Homo sapien
gaaagagcccctactactgtgtaga

SEQ ID NO: 53217 - DNA, 25 bp, Homo sapien
tacaaatgacttctgactattggtc

SEQ ID NO: 53218 - DNA, 25 bp, Homo sapien
tacaaatgacttgtgactattggtc

SEQ ID NO: 53219 - DNA, 25 bp, Homo sapien
gcaagaagtcttttgtcattaatct

SEQ ID NO: 53220 - DNA, 25 bp, Homo sapien
gcaagaagtcttatgtcattaatct

SEQ ID NO: 53221 - DNA, 25 bp, Homo sapien
atggtaacgtcaagaattttacatc

SEQ ID NO: 53222 - DNA, 25 bp, Homo sapien
atggtaacgtcatgaattttacatc

SEQ ID NO: 53223 - DNA, 25 bp, Homo sapien
cagggtcccaaaacaacgtgtaaac

SEQ ID NO: 53224 - DNA, 25 bp, Homo sapien
cagggtcccaaatcaacgtgtaaac

SEQ ID NO: 53225 - DNA, 25 bp, Homo sapien
atgagtgtccaagttccgtcaatac

SEQ ID NO: 53226 - DNA, 25 bp, Homo sapien
atgagtgtccaacttccgtcaatac

SEQ ID NO: 53227 - DNA, 25 bp, Homo sapien
accgaagtaggagacaccccagaca

SEQ ID NO: 53228 - DNA, 25 bp, Homo sapien
accgaagtaggacacaccccagaca

SEQ ID NO: 53229 - DNA, 25 bp, Homo sapien
gtacaggagtattctccccagtgac

SEQ ID NO: 53230 - DNA, 25 bp, Homo sapien
gtacaggagtatactccccagtgac

SEQ ID NO: 53231 - DNA, 25 bp, Homo sapien
gagacagagagagactaaacctgaa

SEQ ID NO: 53232 - DNA, 25 bp, Homo sapien
gagacagagagacactaaacctgaa

SEQ ID NO: 53233 - DNA, 25 bp, Homo sapien
gtccgaggagctcgaggacctagaa

SEQ ID NO: 53234 - DNA, 25 bp, Homo sapien
gtccgaggagctggaggacctagaa

SEQ ID NO: 53235 - DNA, 25 bp, Homo sapien
aacggtccaaagtcccagaccagga

SEQ ID NO: 53236 - DNA, 25 bp, Homo sapien
aacggtccaaagacccagaccagga

SEQ ID NO: 53237 - DNA, 25 bp, Homo sapien
ttacggagaagtacacattccgctc

SEQ ID NO: 53238 - DNA, 25 bp, Homo sapien
ttacggagaagttcacattccgctc

SEQ ID NO: 53239 - DNA, 25 bp, Homo sapien
gaaaggggaagataaggcacgtcct

SEQ ID NO: 53240 - DNA, 25 bp, Homo sapien
gaaaggggaagaaaaggcacgtcct

SEQ ID NO: 53241 - DNA, 25 bp, Homo sapien
gtacaaagggggaaaacccaggtct

SEQ ID NO: 53242 - DNA, 25 bp, Homo sapien
gtacaaagggggtaaacccaggtct

SEQ ID NO: 53243 - DNA, 25 bp, Homo sapien
aatttacggtactaggtcctaccta

SEQ ID NO: 53244 - DNA, 25 bp, Homo sapien
aatttacggtacaaggtcctaccta

SEQ ID NO: 53245 - DNA, 25 bp, Homo sapien
acatgttaagttccgtgtgaaccta

SEQ ID NO: 53246 - DNA, 25 bp, Homo sapien
acatgttaagttgcgtgtgaaccta

SEQ ID NO: 53247 - DNA, 25 bp, Homo sapien
agaagtgagactcgttgtgaatctc

SEQ ID NO: 53248 - DNA, 25 bp, Homo sapien
agaagtgagactggttgtgaatctc

SEQ ID NO: 53249 - DNA, 25 bp, Homo sapien
ttgaaaataccgtgttcgtcgttta

SEQ ID NO: 53250 - DNA, 25 bp, Homo sapien
ttgaaaataccgagttcgtcgttta

SEQ ID NO: 53251 - DNA, 25 bp, Homo sapien
aattacggattcttatcgtgtttac

SEQ ID NO: 53252 - DNA, 25 bp, Homo sapien
aattacggattcatatcgtgtttac

SEQ ID NO: 53253 - DNA, 25 bp, Homo sapien
ccctgtgtgtttgagtttggtgtcg

SEQ ID NO: 53254 - DNA, 25 bp, Homo sapien
ccctgtgtgtttcagtttggtgtcg

SEQ ID NO: 53255 - DNA, 25 bp, Homo sapien
ctaggtttggtacgtcttgtgtcac

SEQ ID NO: 53256 - DNA, 25 bp, Homo sapien
ctaggtttggtaggtcttgtgtcac

SEQ ID NO: 53257 - DNA, 25 bp, Homo sapien
cccaggtgttgcttacctatttata

SEQ ID NO: 53258 - DNA, 25 bp, Homo sapien
cccaggtgttgcatacctatttata

SEQ ID NO: 53259 - DNA, 25 bp, Homo sapien
cctccaagatggtagacactttaat

SEQ ID NO: 53260 - DNA, 25 bp, Homo sapien
cctccaagatggaagacactttaat

SEQ ID NO: 53261 - DNA, 25 bp, Homo sapien
aagaaacgacccaaacttagacgta

SEQ ID NO: 53262 - DNA, 25 bp, Homo sapien
aagaaacgaccctaacttagacgta

SEQ ID NO: 53263 - DNA, 25 bp, Homo sapien
gtgaaccactgacacttttgtattt

SEQ ID NO: 53264 - DNA, 25 bp, Homo sapien
gtgaaccactgagacttttgtattt

SEQ ID NO: 53265 - DNA, 25 bp, Homo sapien
caccgatggtgttctgagtggatat

SEQ ID NO: 53266 - DNA, 25 bp, Homo sapien
caccgatggtgtactgagtggatat

SEQ ID NO: 53267 - DNA, 25 bp, Homo sapien
acgggacattactgcgtcgtcatag

SEQ ID NO: 53268 - DNA, 25 bp, Homo sapien
acgggacattacagcgtcgtcatag

SEQ ID NO: 53269 - DNA, 25 bp, Homo sapien
cgtcaccgggaaactgctctagaag

SEQ ID NO: 53270 - DNA, 25 bp, Homo sapien
cgtcaccgggaatctgctctagaag

SEQ ID NO: 53271 - DNA, 25 bp, Homo sapien
ctcgtcccggacatttggtcagtta

SEQ ID NO: 53272 - DNA, 25 bp, Homo sapien
ctcgtcccggacttttggtcagtta

SEQ ID NO: 53273 - DNA, 25 bp, Homo sapien
taaacctaacacaggacgtgtattg

SEQ ID NO: 53274 - DNA, 25 bp, Homo sapien
taaacctaacactggacgtgtattg

SEQ ID NO: 53275 - DNA, 25 bp, Homo sapien
cgtacatgtaactactgtgtatttg

SEQ ID NO: 53276 - DNA, 25 bp, Homo sapien
cgtacatgtaacaactgtgtatttg

SEQ ID NO: 53277 - DNA, 25 bp, Homo sapien
cgtgtgttacacaacgatgtgtttg

SEQ ID NO: 53278 - DNA, 25 bp, Homo sapien
cgtgtgttacactacgatgtgtttg

SEQ ID NO: 53279 - DNA, 25 bp, Homo sapien
tctgcctgtcccacggtctctgatg

SEQ ID NO: 53280 - DNA, 25 bp, Homo sapien
tctgcctgtccctcggtctctgatg

SEQ ID NO: 53281 - DNA, 25 bp, Homo sapien
cccctgtaagactacgaattgtgta

SEQ ID NO: 53282 - DNA, 25 bp, Homo sapien
cccctgtaagacaacgaattgtgta

SEQ ID NO: 53283 - DNA, 25 bp, Homo sapien
cccccagtaccgtcagggttagtcg

SEQ ID NO: 53284 - DNA, 25 bp, Homo sapien
cccccagtaccgacagggttagtcg

SEQ ID NO: 53285 - DNA, 25 bp, Homo sapien
cgtccagtgtgacgtggtgtcatgt

SEQ ID NO: 53286 - DNA, 25 bp, Homo sapien
cgtccagtgtgaggtggtgtcatgt

SEQ ID NO: 53287 - DNA, 25 bp, Homo sapien
cgttgaaagtcttcgggtgttcttt

SEQ ID NO: 53288 - DNA, 25 bp, Homo sapien
cgttgaaagtctacgggtgttcttt

SEQ ID NO: 53289 - DNA, 25 bp, Homo sapien
catcttcaactcgtgcgtcgccttg

SEQ ID NO: 53290 - DNA, 25 bp, Homo sapien
catcttcaactcctgcgtcgccttg

SEQ ID NO: 53291 - DNA, 25 bp, Homo sapien
gtcttcctcctcgttccacggggtt

SEQ ID NO: 53292 - DNA, 25 bp, Homo sapien
gtcttcctcctccttccacggggtt

SEQ ID NO: 53293 - DNA, 25 bp, Homo sapien
gcccttccgttttcacagggtcact

SEQ ID NO: 53294 - DNA, 25 bp, Homo sapien
gcccttccgtttacacagggtcact

SEQ ID NO: 53295 - DNA, 25 bp, Homo sapien
ccccgtcgtcttacacctggtgagt

SEQ ID NO: 53296 - DNA, 25 bp, Homo sapien
ccccgtcgtctttcacctggtgagt

SEQ ID NO: 53297 - DNA, 25 bp, Homo sapien
cgtcgtatgagacatcgttgtcgta

SEQ ID NO: 53298 - DNA, 25 bp, Homo sapien
cgtcgtatgagagatcgttgtcgta

SEQ ID NO: 53299 - DNA, 25 bp, Homo sapien
ttacggtagaaggtagtaacctaac

SEQ ID NO: 53300 - DNA, 25 bp, Homo sapien
ttacggtagaagctagtaacctaac

SEQ ID NO: 53301 - DNA, 25 bp, Homo sapien
tcaccggtagggtcgagacgcgacc

SEQ ID NO: 53302 - DNA, 25 bp, Homo sapien
tcaccggtagggacgagacgcgacc

SEQ ID NO: 53303 - DNA, 25 bp, Homo sapien
ttccttcgcgagaacacgactctgg

SEQ ID NO: 53304 - DNA, 25 bp, Homo sapien
ttccttcgcgagtacacgactctgg

SEQ ID NO: 53305 - DNA, 25 bp, Homo sapien
ttccgagactcgaagactgcccacg

SEQ ID NO: 53306 - DNA, 25 bp, Homo sapien
ttccgagactcgtagactgcccacg

SEQ ID NO: 53307 - DNA, 25 bp, Homo sapien
aatttgagacttatcgttgtctaac

SEQ ID NO: 53308 - DNA, 25 bp, Homo sapien
aatttgagacttttcgttgtctaac

SEQ ID NO: 53309 - DNA, 25 bp, Homo sapien
attgtacatgctagggttcgtgatc

SEQ ID NO: 53310 - DNA, 25 bp, Homo sapien
attgtacatgcttgggttcgtgatc

SEQ ID NO: 53311 - DNA, 25 bp, Homo sapien
tcgtctcgtcgtcgactcgtcgcag

SEQ ID NO: 53312 - DNA, 25 bp, Homo sapien
tcgtctcgtcgtggactcgtcgcag

SEQ ID NO: 53313 - DNA, 25 bp, Homo sapien
gtgctcgactccaggagctcgctcg

SEQ ID NO: 53314 - DNA, 25 bp, Homo sapien
gtgctcgactcctggagctcgctcg

SEQ ID NO: 53315 - DNA, 25 bp, Homo sapien
gtgaccccgatcgaccgagtctgaa

SEQ ID NO: 53316 - DNA, 25 bp, Homo sapien
gtgaccccgatccaccgagtctgaa

SEQ ID NO: 53317 - DNA, 25 bp, Homo sapien
gactcaccaccgactcgacggtgaa

SEQ ID NO: 53318 - DNA, 25 bp, Homo sapien
gactcaccaccgtctcgacggtgaa

SEQ ID NO: 53319 - DNA, 25 bp, Homo sapien
ccttccagacgaaccgagtgtctta

SEQ ID NO: 53320 - DNA, 25 bp, Homo sapien
ccttccagacgatccgagtgtctta

SEQ ID NO: 53321 - DNA, 25 bp, Homo sapien
tcgtgtccgggaaccagtcacactc

SEQ ID NO: 53322 - DNA, 25 bp, Homo sapien
tcgtgtccgggatccagtcacactc

SEQ ID NO: 53323 - DNA, 25 bp, Homo sapien
aaatttacgagtatcgaagttcctt

SEQ ID NO: 53324 - DNA, 25 bp, Homo sapien
aaatttacgagtttcgaagttcctt

SEQ ID NO: 53325 - DNA, 25 bp, Homo sapien
tgtctcgacgactatggagctcccg

SEQ ID NO: 53326 - DNA, 25 bp, Homo sapien
tgtctcgacgacaatggagctcccg

SEQ ID NO: 53327 - DNA, 25 bp, Homo sapien
tcagacactattacagatctcgagt

SEQ ID NO: 53328 - DNA, 25 bp, Homo sapien
tcagacactatttcagatctcgagt

SEQ ID NO: 53329 - DNA, 25 bp, Homo sapien
tttcgacgataattacggtttcgtt

SEQ ID NO: 53330 - DNA, 25 bp, Homo sapien
tttcgacgataaatacggtttcgtt

SEQ ID NO: 53331 - DNA, 25 bp, Homo sapien
gggtcacggaggaactcatagacga

SEQ ID NO: 53332 - DNA, 25 bp, Homo sapien
gggtcacggaggtactcatagacga

SEQ ID NO: 53333 - DNA, 25 bp, Homo sapien
atgatgtaaacagagacacttgaac

SEQ ID NO: 53334 - DNA, 25 bp, Homo sapien
atgatgtaaacacagacacttgaac

SEQ ID NO: 53335 - DNA, 25 bp, Homo sapien
acggaaaaggagtagcctcgaggtc

SEQ ID NO: 53336 - DNA, 25 bp, Homo sapien
acggaaaaggagaagcctcgaggtc

SEQ ID NO: 53337 - DNA, 25 bp, Homo sapien
ccacaaacggaagcaactctagggt

SEQ ID NO: 53338 - DNA, 25 bp, Homo sapien
ccacaaacggaaccaactctagggt

SEQ ID NO: 53339 - DNA, 25 bp, Homo sapien
cgacaagacagtactgcaccagtga

SEQ ID NO: 53340 - DNA, 25 bp, Homo sapien
cgacaagacagttctgcaccagtga

SEQ ID NO: 53341 - DNA, 25 bp, Homo sapien
tacaagttctgtcagacacgtgtcg

SEQ ID NO: 53342 - DNA, 25 bp, Homo sapien
tacaagttctgtgagacacgtgtcg

SEQ ID NO: 53343 - DNA, 25 bp, Homo sapien
tcataaagaccttccagagactaag

SEQ ID NO: 53344 - DNA, 25 bp, Homo sapien
tcataaagacctaccagagactaag

SEQ ID NO: 53345 - DNA, 25 bp, Homo sapien
atctaaacgagttcccaagtctaag

SEQ ID NO: 53346 - DNA, 25 bp, Homo sapien
atctaaacgagtacccaagtctaag

SEQ ID NO: 53347 - DNA, 25 bp, Homo sapien
ccacagaacccgattgtagatataa

SEQ ID NO: 53348 - DNA, 25 bp, Homo sapien
ccacagaacccgtttgtagatataa

SEQ ID NO: 53349 - DNA, 25 bp, Homo sapien
gcaaaccgtaccatgcttactccga

SEQ ID NO: 53350 - DNA, 25 bp, Homo sapien
gcaaaccgtaccttgcttactccga

SEQ ID NO: 53351 - DNA, 25 bp, Homo sapien
ggaatctgacttttactaacccgac

SEQ ID NO: 53352 - DNA, 25 bp, Homo sapien
ggaatctgacttatactaacccgac

SEQ ID NO: 53353 - DNA, 25 bp, Homo sapien
gagagaatacaagtcattcccaact

SEQ ID NO: 53354 - DNA, 25 bp, Homo sapien
gagagaatacaactcattcccaact

SEQ ID NO: 53355 - DNA, 25 bp, Homo sapien
ggaaaaacggtcttttccatctact

SEQ ID NO: 53356 - DNA, 25 bp, Homo sapien
ggaaaaacggtcatttccatctact

SEQ ID NO: 53357 - DNA, 25 bp, Homo sapien
gagatagttcgtctgaatctcccta

SEQ ID NO: 53358 - DNA, 25 bp, Homo sapien
gagatagttcgtgtgaatctcccta

SEQ ID NO: 53359 - DNA, 25 bp, Homo sapien
cgagattctgtttgaccattcttgt

SEQ ID NO: 53360 - DNA, 25 bp, Homo sapien
cgagattctgttagaccattcttgt

SEQ ID NO: 53361 - DNA, 25 bp, Homo sapien
gatctttatgatacgtccttttagt

SEQ ID NO: 53362 - DNA, 25 bp, Homo sapien
gatctttatgattcgtccttttagt

SEQ ID NO: 53363 - DNA, 25 bp, Homo sapien
tgagtatgacgtcctctctcttctt

SEQ ID NO: 53364 - DNA, 25 bp, Homo sapien
tgagtatgacgtgctctctcttctt

SEQ ID NO: 53365 - DNA, 25 bp, Homo sapien
gtcgggtcgaggtctcactgtccgt

SEQ ID NO: 53366 - DNA, 25 bp, Homo sapien
gtcgggtcgaggactcactgtccgt

SEQ ID NO: 53367 - DNA, 25 bp, Homo sapien
cttcgagccgtgtttgcgtgcgtgt

SEQ ID NO: 53368 - DNA, 25 bp, Homo sapien
cttcgagccgtgattgcgtgcgtgt

SEQ ID NO: 53369 - DNA, 25 bp, Homo sapien
aacggagtaaccatatttacaatac

SEQ ID NO: 53370 - DNA, 25 bp, Homo sapien
aacggagtaaccttatttacaatac

SEQ ID NO: 53371 - DNA, 25 bp, Homo sapien
gtgcgacgacagtattctgaccgtc

SEQ ID NO: 53372 - DNA, 25 bp, Homo sapien
gtgcgacgacagaattctgaccgtc

SEQ ID NO: 53373 - DNA, 25 bp, Homo sapien
gagggagacaacataacgtgtgccg

SEQ ID NO: 53374 - DNA, 25 bp, Homo sapien
gagggagacaacttaacgtgtgccg

SEQ ID NO: 53375 - DNA, 25 bp, Homo sapien
tgggtgaattatcaccggtctctcg

SEQ ID NO: 53376 - DNA, 25 bp, Homo sapien
tgggtgaattatgaccggtctctcg

SEQ ID NO: 53377 - DNA, 25 bp, Homo sapien
ttcttttaggtatacgaacccagta

SEQ ID NO: 53378 - DNA, 25 bp, Homo sapien
ttcttttaggtaaacgaacccagta

SEQ ID NO: 53379 - DNA, 25 bp, Homo sapien
tcccgttattaggtgaacccgtgtg

SEQ ID NO: 53380 - DNA, 25 bp, Homo sapien
tcccgttattagctgaacccgtgtg

SEQ ID NO: 53381 - DNA, 25 bp, Homo sapien
gtccgattcttgtaaatgtctctat

SEQ ID NO: 53382 - DNA, 25 bp, Homo sapien
gtccgattcttgaaaatgtctctat

SEQ ID NO: 53383 - DNA, 25 bp, Homo sapien
caggtttacaagtcttcgacgtagt

SEQ ID NO: 53384 - DNA, 25 bp, Homo sapien
caggtttacaagacttcgacgtagt

SEQ ID NO: 53385 - DNA, 25 bp, Homo sapien
gaccacgtttctagactccagtaaa

SEQ ID NO: 53386 - DNA, 25 bp, Homo sapien
gaccacgtttcttgactccagtaaa

SEQ ID NO: 53387 - DNA, 25 bp, Homo sapien
ttccttttgatcatccagtagaacg

SEQ ID NO: 53388 - DNA, 25 bp, Homo sapien
ttccttttgatcttccagtagaacg

SEQ ID NO: 53389 - DNA, 25 bp, Homo sapien
tctccttctgactctatttagtggt

SEQ ID NO: 53390 - DNA, 25 bp, Homo sapien
tctccttctgacactatttagtggt

SEQ ID NO: 53391 - DNA, 25 bp, Homo sapien
ttatccaaagaacgacttctgtaag

SEQ ID NO: 53392 - DNA, 25 bp, Homo sapien
ttatccaaagaaggacttctgtaag

SEQ ID NO: 53393 - DNA, 25 bp, Homo sapien
agaatagacaaggaggaaacttctc

SEQ ID NO: 53394 - DNA, 25 bp, Homo sapien
agaatagacaagcaggaaacttctc

SEQ ID NO: 53395 - DNA, 25 bp, Homo sapien
gaaagtaaagagaccaagtctcttt

SEQ ID NO: 53396 - DNA, 25 bp, Homo sapien
gaaagtaaagagtccaagtctcttt

SEQ ID NO: 53397 - DNA, 25 bp, Homo sapien
gacaacgtgcacagaatgtgtctat

SEQ ID NO: 53398 - DNA, 25 bp, Homo sapien
gacaacgtgcactgaatgtgtctat

SEQ ID NO: 53399 - DNA, 25 bp, Homo sapien
agtgaaacagtgatgatatcgttcc

SEQ ID NO: 53400 - DNA, 25 bp, Homo sapien
agtgaaacagtgttgatatcgttcc

SEQ ID NO: 53401 - DNA, 25 bp, Homo sapien
agactgataacgtgttaggaccccc

SEQ ID NO: 53402 - DNA, 25 bp, Homo sapien
agactgataacgagttaggaccccc

SEQ ID NO: 53403 - DNA, 25 bp, Homo sapien
gtcttttatgactcagagtctcccc

SEQ ID NO: 53404 - DNA, 25 bp, Homo sapien
gtcttttatgacacagagtctcccc

SEQ ID NO: 53405 - DNA, 25 bp, Homo sapien
ctttgtggaagaacacctcctacct

SEQ ID NO: 53406 - DNA, 25 bp, Homo sapien
ctttgtggaagatcacctcctacct

SEQ ID NO: 53407 - DNA, 25 bp, Homo sapien
acggtctgagggtcgacctaccttt

SEQ ID NO: 53408 - DNA, 25 bp, Homo sapien
acggtctgagggacgacctaccttt

SEQ ID NO: 53409 - DNA, 25 bp, Homo sapien
agttctcgtgggacttcctcagtct

SEQ ID NO: 53410 - DNA, 25 bp, Homo sapien
agttctcgtgggtcttcctcagtct

SEQ ID NO: 53411 - DNA, 25 bp, Homo sapien
cgtgtcatgaaaggttctgtcgatg

SEQ ID NO: 53412 - DNA, 25 bp, Homo sapien
cgtgtcatgaaacgttctgtcgatg

SEQ ID NO: 53413 - DNA, 25 bp, Homo sapien
aaggacatgtagagacgggtccata

SEQ ID NO: 53414 - DNA, 25 bp, Homo sapien
aaggacatgtagtgacgggtccata

SEQ ID NO: 53415 - DNA, 25 bp, Homo sapien
ggcaaaaagagagacggaggccaac

SEQ ID NO: 53416 - DNA, 25 bp, Homo sapien
ggcaaaaagagacacggaggccaac

SEQ ID NO: 53417 - DNA, 25 bp, Homo sapien
gaagagtcggaaacaagctcaaccg

SEQ ID NO: 53418 - DNA, 25 bp, Homo sapien
gaagagtcggaatcaagctcaaccg

SEQ ID NO: 53419 - DNA, 25 bp, Homo sapien
acgaacgaacaagttattgactctt

SEQ ID NO: 53420 - DNA, 25 bp, Homo sapien
acgaacgaacaacttattgactctt

SEQ ID NO: 53421 - DNA, 25 bp, Homo sapien
ataaagacctaatttggtacggtca

SEQ ID NO: 53422 - DNA, 25 bp, Homo sapien
ataaagacctaaattggtacggtca

SEQ ID NO: 53423 - DNA, 25 bp, Homo sapien
acccagacaagagtctttgagacct

SEQ ID NO: 53424 - DNA, 25 bp, Homo sapien
acccagacaagactctttgagacct

SEQ ID NO: 53425 - DNA, 25 bp, Homo sapien
caagtaaagggttgttctcgtctct

SEQ ID NO: 53426 - DNA, 25 bp, Homo sapien
caagtaaagggtagttctcgtctct

SEQ ID NO: 53427 - DNA, 25 bp, Homo sapien
agaatcagtaaatgaatgttcccac

SEQ ID NO: 53428 - DNA, 25 bp, Homo sapien
agaatcagtaaaagaatgttcccac

SEQ ID NO: 53429 - DNA, 25 bp, Homo sapien
ttcagtcgacatcgacgtttcctaa

SEQ ID NO: 53430 - DNA, 25 bp, Homo sapien
ttcagtcgacatggacgtttcctaa

SEQ ID NO: 53431 - DNA, 25 bp, Homo sapien
tcgacggttgttcctgtaccacaac

SEQ ID NO: 53432 - DNA, 25 bp, Homo sapien
tcgacggttgttgctgtaccacaac

SEQ ID NO: 53433 - DNA, 25 bp, Homo sapien
tatgcagtctattttatcatatatc

SEQ ID NO: 53434 - DNA, 25 bp, Homo sapien
tatgcagtctatattatcatatatc

SEQ ID NO: 53435 - DNA, 25 bp, Homo sapien
gaaggttttaacatttacctgatac

SEQ ID NO: 53436 - DNA, 25 bp, Homo sapien
gaaggttttaacttttacctgatac

SEQ ID NO: 53437 - DNA, 25 bp, Homo sapien
aagaatgtctatttccctgctacgt

SEQ ID NO: 53438 - DNA, 25 bp, Homo sapien
aagaatgtctatatccctgctacgt

SEQ ID NO: 53439 - DNA, 25 bp, Homo sapien
cgaggtgatgaatgttccctggtat

SEQ ID NO: 53440 - DNA, 25 bp, Homo sapien
cgaggtgatgaaagttccctggtat

SEQ ID NO: 53441 - DNA, 25 bp, Homo sapien
ggtattctacttatttctcgaatga

SEQ ID NO: 53442 - DNA, 25 bp, Homo sapien
ggtattctacttttttctcgaatga

SEQ ID NO: 53443 - DNA, 25 bp, Homo sapien
tgctgttgatcttttattgcattgt

SEQ ID NO: 53444 - DNA, 25 bp, Homo sapien
tgctgttgatctattattgcattgt

SEQ ID NO: 53445 - DNA, 25 bp, Homo sapien
ggtctatgctgtgaaactatccttg

SEQ ID NO: 53446 - DNA, 25 bp, Homo sapien
ggtctatgctgtcaaactatccttg

SEQ ID NO: 53447 - DNA, 25 bp, Homo sapien
tcgaatgctcttgacctaggacttc

SEQ ID NO: 53448 - DNA, 25 bp, Homo sapien
tcgaatgctcttcacctaggacttc

SEQ ID NO: 53449 - DNA, 25 bp, Homo sapien
tgactctttctatcctgtggacctc

SEQ ID NO: 53450 - DNA, 25 bp, Homo sapien
tgactctttctaacctgtggacctc

SEQ ID NO: 53451 - DNA, 25 bp, Homo sapien
aacgttttctgtcctgtgaactcag

SEQ ID NO: 53452 - DNA, 25 bp, Homo sapien
aacgttttctgtgctgtgaactcag

SEQ ID NO: 53453 - DNA, 25 bp, Homo sapien
ctacttgtgtgaacgtgtgatcatt

SEQ ID NO: 53454 - DNA, 25 bp, Homo sapien
ctacttgtgtgatcgtgtgatcatt

SEQ ID NO: 53455 - DNA, 25 bp, Homo sapien
ttgtaccgggttactgtgtcggaaa

SEQ ID NO: 53456 - DNA, 25 bp, Homo sapien
ttgtaccgggtttctgtgtcggaaa

SEQ ID NO: 53457 - DNA, 25 bp, Homo sapien
ttcgcgtgcgtgtccgtacccctaa

SEQ ID NO: 53458 - DNA, 25 bp, Homo sapien
ttcgcgtgcgtgaccgtacccctaa

SEQ ID NO: 53459 - DNA, 25 bp, Homo sapien
ggaccgtccttcaggtgcgacttcc

SEQ ID NO: 53460 - DNA, 25 bp, Homo sapien
ggaccgtccttctggtgcgacttcc

SEQ ID NO: 53461 - DNA, 25 bp, Homo sapien
aggtccgtgcctcaggggtcctgac

SEQ ID NO: 53462 - DNA, 25 bp, Homo sapien
aggtccgtgcctgaggggtcctgac

SEQ ID NO: 53463 - DNA, 25 bp, Homo sapien
cttggatgtcttaaaagtcctatcg

SEQ ID NO: 53464 - DNA, 25 bp, Homo sapien
cttggatgtctttaaagtcctatcg

SEQ ID NO: 53465 - DNA, 25 bp, Homo sapien
tttgaccgatcgacgtcaaatgtaa

SEQ ID NO: 53466 - DNA, 25 bp, Homo sapien
tttgaccgatcgtcgtcaaatgtaa

SEQ ID NO: 53467 - DNA, 25 bp, Homo sapien
tcatcgactgtgttgacgaagtttc

SEQ ID NO: 53468 - DNA, 25 bp, Homo sapien
tcatcgactgtgatgacgaagtttc

SEQ ID NO: 53469 - DNA, 25 bp, Homo sapien
ttgacgagactctgggcgaactcaa

SEQ ID NO: 53470 - DNA, 25 bp, Homo sapien
ttgacgagactcagggcgaactcaa

SEQ ID NO: 53471 - DNA, 25 bp, Homo sapien
actggacgtcaaaggggaacctaga

SEQ ID NO: 53472 - DNA, 25 bp, Homo sapien
actggacgtcaatggggaacctaga

SEQ ID NO: 53473 - DNA, 25 bp, Homo sapien
ggtgtccctacgtcgaagggaccaa

SEQ ID NO: 53474 - DNA, 25 bp, Homo sapien
ggtgtccctacgacgaagggaccaa

SEQ ID NO: 53475 - DNA, 25 bp, Homo sapien
tgtgcctgtcggtcgggtcgacccc

SEQ ID NO: 53476 - DNA, 25 bp, Homo sapien
tgtgcctgtcggacgggtcgacccc

SEQ ID NO: 53477 - DNA, 25 bp, Homo sapien
tcgcgcatctggtgcaggtaccgcc

SEQ ID NO: 53478 - DNA, 25 bp, Homo sapien
tcgcgcatctggagcaggtaccgcc

SEQ ID NO: 53479 - DNA, 25 bp, Homo sapien
tctaccactgggagacgggaccccg

SEQ ID NO: 53480 - DNA, 25 bp, Homo sapien
tctaccactgggtgacgggaccccg

SEQ ID NO: 53481 - DNA, 25 bp, Homo sapien
tcttttggtgttatcacggtttccc

SEQ ID NO: 53482 - DNA, 25 bp, Homo sapien
tcttttggtgttttcacggtttccc

SEQ ID NO: 53483 - DNA, 25 bp, Homo sapien
gttccttcagtgtccgtatttttag

SEQ ID NO: 53484 - DNA, 25 bp, Homo sapien
gttccttcagtgaccgtatttttag

SEQ ID NO: 53485 - DNA, 25 bp, Homo sapien
ctcgtatatggttcagtctcctttg

SEQ ID NO: 53486 - DNA, 25 bp, Homo sapien
ctcgtatatggtacagtctcctttg

SEQ ID NO: 53487 - DNA, 25 bp, Homo sapien
gggactatcgacacacatccttcac

SEQ ID NO: 53488 - DNA, 25 bp, Homo sapien
gggactatcgactcacatccttcac

SEQ ID NO: 53489 - DNA, 25 bp, Homo sapien
ggtgtcaacatatacatatgttcta

SEQ ID NO: 53490 - DNA, 25 bp, Homo sapien
ggtgtcaacataaacatatgttcta

SEQ ID NO: 53491 - DNA, 25 bp, Homo sapien
ccggtgcccgaagactctttcacga

SEQ ID NO: 53492 - DNA, 25 bp, Homo sapien
ccggtgcccgaacactctttcacga

SEQ ID NO: 53493 - DNA, 25 bp, Homo sapien
agaaacgggagcaacatgtctcgac

SEQ ID NO: 53494 - DNA, 25 bp, Homo sapien
agaaacgggagctacatgtctcgac

SEQ ID NO: 53495 - DNA, 25 bp, Homo sapien
ataagtaggcgacgaccaggtttct

SEQ ID NO: 53496 - DNA, 25 bp, Homo sapien
ataagtaggcgaggaccaggtttct

SEQ ID NO: 53497 - DNA, 25 bp, Homo sapien
ccactggtgcgagagttacgggtcc

SEQ ID NO: 53498 - DNA, 25 bp, Homo sapien
ccactggtgcgacagttacgggtcc

SEQ ID NO: 53499 - DNA, 25 bp, Homo sapien
acgcagggcttagtgtaagaggttc

SEQ ID NO: 53500 - DNA, 25 bp, Homo sapien
acgcagggcttactgtaagaggttc

SEQ ID NO: 53501 - DNA, 25 bp, Homo sapien
cgaagaacgggtcctgaagtggtta

SEQ ID NO: 53502 - DNA, 25 bp, Homo sapien
cgaagaacgggtgctgaagtggtta

SEQ ID NO: 53503 - DNA, 25 bp, Homo sapien
cgtcaccaccgctcagaagtgtttc

SEQ ID NO: 53504 - DNA, 25 bp, Homo sapien
cgtcaccaccgcacagaagtgtttc

SEQ ID NO: 53505 - DNA, 25 bp, Homo sapien
cctaccttctgtagcgaatttgttt

SEQ ID NO: 53506 - DNA, 25 bp, Homo sapien
cctaccttctgttgcgaatttgttt

SEQ ID NO: 53507 - DNA, 25 bp, Homo sapien
ttcgggtcttttaaatgtctctggt

SEQ ID NO: 53508 - DNA, 25 bp, Homo sapien
ttcgggtctttttaatgtctctggt

SEQ ID NO: 53509 - DNA, 25 bp, Homo sapien
ttctccgggattgtctgttcctgtt

SEQ ID NO: 53510 - DNA, 25 bp, Homo sapien
ttctccgggattctctgttcctgtt

SEQ ID NO: 53511 - DNA, 25 bp, Homo sapien
ggctaccgggggtcttatgtcctta

SEQ ID NO: 53512 - DNA, 25 bp, Homo sapien
ggctaccgggggacttatgtcctta

SEQ ID NO: 53513 - DNA, 25 bp, Homo sapien
gtaccacgatttactgtctttttag

SEQ ID NO: 53514 - DNA, 25 bp, Homo sapien
gtaccacgattttctgtctttttag

SEQ ID NO: 53515 - DNA, 25 bp, Homo sapien
gctgatacttttcttgtactatagt

SEQ ID NO: 53516 - DNA, 25 bp, Homo sapien
gctgatacttttgttgtactatagt

SEQ ID NO: 53517 - DNA, 25 bp, Homo sapien
ttcgtttcttattccgtggacgata

SEQ ID NO: 53518 - DNA, 25 bp, Homo sapien
ttcgtttcttataccgtggacgata

SEQ ID NO: 53519 - DNA, 25 bp, Homo sapien
ctcacttcccttacagtgaggactc

SEQ ID NO: 53520 - DNA, 25 bp, Homo sapien
ctcacttccctttcagtgaggactc

SEQ ID NO: 53521 - DNA, 25 bp, Homo sapien
cacacggggtctaaacctgggacgg

SEQ ID NO: 53522 - DNA, 25 bp, Homo sapien
cacacggggtcttaacctgggacgg

SEQ ID NO: 53523 - DNA, 25 bp, Homo sapien
ctcacgtcaccgcgctagagccgag

SEQ ID NO: 53524 - DNA, 25 bp, Homo sapien
ctcacgtcaccgggctagagccgag

SEQ ID NO: 53525 - DNA, 25 bp, Homo sapien
cgatctatcgaggaaccaacgccgg

SEQ ID NO: 53526 - DNA, 25 bp, Homo sapien
cgatctatcgagcaaccaacgccgg

SEQ ID NO: 53527 - DNA, 25 bp, Homo sapien
ggcttcttcggtcatttcgtccatg

SEQ ID NO: 53528 - DNA, 25 bp, Homo sapien
ggcttcttcggtgatttcgtccatg

SEQ ID NO: 53529 - DNA, 25 bp, Homo sapien
tccgagtcactctcacactcgggtt

SEQ ID NO: 53530 - DNA, 25 bp, Homo sapien
tccgagtcactcacacactcgggtt

SEQ ID NO: 53531 - DNA, 25 bp, Homo sapien
gtcgggtcgacacacacctctgttg

SEQ ID NO: 53532 - DNA, 25 bp, Homo sapien
gtcgggtcgacagacacctctgttg

SEQ ID NO: 53533 - DNA, 25 bp, Homo sapien
gtggagaaactgaagtctactgtgc

SEQ ID NO: 53534 - DNA, 25 bp, Homo sapien
gtggagaaactgtagtctactgtgc

SEQ ID NO: 53535 - DNA, 25 bp, Homo sapien
gagacgtgtgactcttaagggtgac

SEQ ID NO: 53536 - DNA, 25 bp, Homo sapien
gagacgtgtgacacttaagggtgac

SEQ ID NO: 53537 - DNA, 25 bp, Homo sapien
ttggtagttcgataccttatgggac

SEQ ID NO: 53538 - DNA, 25 bp, Homo sapien
ttggtagttcgaaaccttatgggac

SEQ ID NO: 53539 - DNA, 25 bp, Homo sapien
gggtgtatctaaacctatcttggac

SEQ ID NO: 53540 - DNA, 25 bp, Homo sapien
gggtgtatctaatcctatcttggac

SEQ ID NO: 53541 - DNA, 25 bp, Homo sapien
gtagaatcgacacttcctctttcgt

SEQ ID NO: 53542 - DNA, 25 bp, Homo sapien
gtagaatcgacagttcctctttcgt

SEQ ID NO: 53543 - DNA, 25 bp, Homo sapien
ataatttacgggttcacgtacatga

SEQ ID NO: 53544 - DNA, 25 bp, Homo sapien
ataatttacgggatcacgtacatga

SEQ ID NO: 53545 - DNA, 25 bp, Homo sapien
taacctcacgagtaagtgtacttca

SEQ ID NO: 53546 - DNA, 25 bp, Homo sapien
taacctcacgagaaagtgtacttca

SEQ ID NO: 53547 - DNA, 25 bp, Homo sapien
gacgtcgctacgtctttatctataa

SEQ ID NO: 53548 - DNA, 25 bp, Homo sapien
gacgtcgctacgactttatctataa

SEQ ID NO: 53549 - DNA, 25 bp, Homo sapien
gcgtatcgtcggttcttatgtataa

SEQ ID NO: 53550 - DNA, 25 bp, Homo sapien
gcgtatcgtcggatcttatgtataa

SEQ ID NO: 53551 - DNA, 25 bp, Homo sapien
ccggaggacgtgaatcgtttttaga

SEQ ID NO: 53552 - DNA, 25 bp, Homo sapien
ccggaggacgtgtatcgtttttaga

SEQ ID NO: 53553 - DNA, 25 bp, Homo sapien
ctgccgcacgacttcggacttaaat

SEQ ID NO: 53554 - DNA, 25 bp, Homo sapien
ctgccgcacgacatcggacttaaat

SEQ ID NO: 53555 - DNA, 25 bp, Homo sapien
tcgagactgagattccgtgttccgt

SEQ ID NO: 53556 - DNA, 25 bp, Homo sapien
tcgagactgagaatccgtgttccgt

SEQ ID NO: 53557 - DNA, 25 bp, Homo sapien
ttccgaagaccgtcgggtcgagacg

SEQ ID NO: 53558 - DNA, 25 bp, Homo sapien
ttccgaagaccgacgggtcgagacg

SEQ ID NO: 53559 - DNA, 25 bp, Homo sapien
catccagtagacacaaaagacttgt

SEQ ID NO: 53560 - DNA, 25 bp, Homo sapien
catccagtagactcaaaagacttgt

SEQ ID NO: 53561 - DNA, 25 bp, Homo sapien
cctactcgacgtccaaaggacttcg

SEQ ID NO: 53562 - DNA, 25 bp, Homo sapien
cctactcgacgtgcaaaggacttcg

SEQ ID NO: 53563 - DNA, 25 bp, Homo sapien
ttacacatcaggttagaggaccttt

SEQ ID NO: 53564 - DNA, 25 bp, Homo sapien
ttacacatcaggatagaggaccttt

SEQ ID NO: 53565 - DNA, 25 bp, Homo sapien
gtgagtttccggataggaaactctt

SEQ ID NO: 53566 - DNA, 25 bp, Homo sapien
gtgagtttccggttaggaaactctt

SEQ ID NO: 53567 - DNA, 25 bp, Homo sapien
tttttcaggttcaagtagtactatc

SEQ ID NO: 53568 - DNA, 25 bp, Homo sapien
tttttcaggttctagtagtactatc

SEQ ID NO: 53569 - DNA, 25 bp, Homo sapien
ccctgtctgaggttgatgcgtgatc

SEQ ID NO: 53570 - DNA, 25 bp, Homo sapien
ccctgtctgaggatgatgcgtgatc

SEQ ID NO: 53571 - DNA, 25 bp, Homo sapien
ggactcgggggaacgaacaccgatc

SEQ ID NO: 53572 - DNA, 25 bp, Homo sapien
ggactcgggggatcgaacaccgatc

SEQ ID NO: 53573 - DNA, 25 bp, Homo sapien
caattgagaaagatgcaactgatct

SEQ ID NO: 53574 - DNA, 25 bp, Homo sapien
caattgagaaagttgcaactgatct

SEQ ID NO: 53575 - DNA, 25 bp, Homo sapien
gtctaattattgacatcgtacgatt

SEQ ID NO: 53576 - DNA, 25 bp, Homo sapien
gtctaattattgtcatcgtacgatt

SEQ ID NO: 53577 - DNA, 25 bp, Homo sapien
ttcgttcatttatgaccattatgtg

SEQ ID NO: 53578 - DNA, 25 bp, Homo sapien
ttcgttcatttaagaccattatgtg

SEQ ID NO: 53579 - DNA, 25 bp, Homo sapien
aagtggtcctggaccgtcgtgtctg

SEQ ID NO: 53580 - DNA, 25 bp, Homo sapien
aagtggtcctggtccgtcgtgtctg

SEQ ID NO: 53581 - DNA, 25 bp, Homo sapien
agaagtaggtttgttcgcgtttcag

SEQ ID NO: 53582 - DNA, 25 bp, Homo sapien
agaagtaggtttcttcgcgtttcag

SEQ ID NO: 53583 - DNA, 25 bp, Homo sapien
gtaaaatccagaactcctatgtatg

SEQ ID NO: 53584 - DNA, 25 bp, Homo sapien
gtaaaatccagatctcctatgtatg

SEQ ID NO: 53585 - DNA, 25 bp, Homo sapien
agaaaccgaatgtcctctctgatct

SEQ ID NO: 53586 - DNA, 25 bp, Homo sapien
agaaaccgaatgacctctctgatct

SEQ ID NO: 53587 - DNA, 25 bp, Homo sapien
taaatatcggatgatacatttgttt

SEQ ID NO: 53588 - DNA, 25 bp, Homo sapien
taaatatcggatcatacatttgttt

SEQ ID NO: 53589 - DNA, 25 bp, Homo sapien
tcaaatcgtgtagagaccatgtttt

SEQ ID NO: 53590 - DNA, 25 bp, Homo sapien
tcaaatcgtgtacagaccatgtttt

SEQ ID NO: 53591 - DNA, 25 bp, Homo sapien
aagagtctcttgacccgtatcggtc

SEQ ID NO: 53592 - DNA, 25 bp, Homo sapien
aagagtctcttgtcccgtatcggtc

SEQ ID NO: 53593 - DNA, 25 bp, Homo sapien
cgccttagtggttcctccctttcta

SEQ ID NO: 53594 - DNA, 25 bp, Homo sapien
cgccttagtggtacctccctttcta

SEQ ID NO: 53595 - DNA, 25 bp, Homo sapien
tgtcttgacggtaccgccctatcaa

SEQ ID NO: 53596 - DNA, 25 bp, Homo sapien
tgtcttgacggttccgccctatcaa

SEQ ID NO: 53597 - DNA, 25 bp, Homo sapien
gatctcggtgttaaatcttcactgt

SEQ ID NO: 53598 - DNA, 25 bp, Homo sapien
gatctcggtgtttaatcttcactgt

SEQ ID NO: 53599 - DNA, 25 bp, Homo sapien
tttgctccggattttgttctcccgt

SEQ ID NO: 53600 - DNA, 25 bp, Homo sapien
tttgctccggatattgttctcccgt

SEQ ID NO: 53601 - DNA, 25 bp, Homo sapien
tcgggccccgttgacttgttttcct

SEQ ID NO: 53602 - DNA, 25 bp, Homo sapien
tcgggccccgttcacttgttttcct

SEQ ID NO: 53603 - DNA, 25 bp, Homo sapien
ggtcccttttcgttctagtcactcc

SEQ ID NO: 53604 - DNA, 25 bp, Homo sapien
ggtcccttttcgatctagtcactcc

SEQ ID NO: 53605 - DNA, 25 bp, Homo sapien
ggtgtccgtgatgacaacaaatata

SEQ ID NO: 53606 - DNA, 25 bp, Homo sapien
ggtgtccgtgatcacaacaaatata

SEQ ID NO: 53607 - DNA, 25 bp, Homo sapien
ttgtcgctggtgacaaagacccctc

SEQ ID NO: 53608 - DNA, 25 bp, Homo sapien
ttgtcgctggtgtcaaagacccctc

SEQ ID NO: 53609 - DNA, 25 bp, Homo sapien
ttctggtggtccagtcacctcacct

SEQ ID NO: 53610 - DNA, 25 bp, Homo sapien
ttctggtggtcctgtcacctcacct

SEQ ID NO: 53611 - DNA, 25 bp, Homo sapien
gtacatctggggaacttctcccctc

SEQ ID NO: 53612 - DNA, 25 bp, Homo sapien
gtacatctggggtacttctcccctc

SEQ ID NO: 53613 - DNA, 25 bp, Homo sapien
gtaatcgcacaggatactttccccc

SEQ ID NO: 53614 - DNA, 25 bp, Homo sapien
gtaatcgcacagcatactttccccc

SEQ ID NO: 53615 - DNA, 25 bp, Homo sapien
tcttaccgtggaagttttccccgct

SEQ ID NO: 53616 - DNA, 25 bp, Homo sapien
tcttaccgtggatgttttccccgct

SEQ ID NO: 53617 - DNA, 25 bp, Homo sapien
cctttcgtggtgtcaaattacctcc

SEQ ID NO: 53618 - DNA, 25 bp, Homo sapien
cctttcgtggtgacaaattacctcc

SEQ ID NO: 53619 - DNA, 25 bp, Homo sapien
tatgtcaccttacgattcacggatg

SEQ ID NO: 53620 - DNA, 25 bp, Homo sapien
tatgtcaccttaggattcacggatg

SEQ ID NO: 53621 - DNA, 25 bp, Homo sapien
accaagataggtacgtcagtaagtc

SEQ ID NO: 53622 - DNA, 25 bp, Homo sapien
accaagataggttcgtcagtaagtc

SEQ ID NO: 53623 - DNA, 25 bp, Homo sapien
ccgttgactgtcttgttgtagacct

SEQ ID NO: 53624 - DNA, 25 bp, Homo sapien
ccgttgactgtcatgttgtagacct

SEQ ID NO: 53625 - DNA, 25 bp, Homo sapien
cggatcaaggactggtgtcgtagac

SEQ ID NO: 53626 - DNA, 25 bp, Homo sapien
cggatcaaggacaggtgtcgtagac

SEQ ID NO: 53627 - DNA, 25 bp, Homo sapien
ccatatccgtcactaacccgagagt

SEQ ID NO: 53628 - DNA, 25 bp, Homo sapien
ccatatccgtcagtaacccgagagt

SEQ ID NO: 53629 - DNA, 25 bp, Homo sapien
accaaaccactaggtgacccacagt

SEQ ID NO: 53630 - DNA, 25 bp, Homo sapien
accaaaccactacgtgacccacagt

SEQ ID NO: 53631 - DNA, 25 bp, Homo sapien
gacacaagactcatcttgcccacag

SEQ ID NO: 53632 - DNA, 25 bp, Homo sapien
gacacaagactcttcttgcccacag

SEQ ID NO: 53633 - DNA, 25 bp, Homo sapien
cattaagacttacatgagtagcaca

SEQ ID NO: 53634 - DNA, 25 bp, Homo sapien
cattaagacttagatgagtagcaca

SEQ ID NO: 53635 - DNA, 25 bp, Homo sapien
acattaatcttgtgttacgttactg

SEQ ID NO: 53636 - DNA, 25 bp, Homo sapien
acattaatcttgagttacgttactg

SEQ ID NO: 53637 - DNA, 25 bp, Homo sapien
cgttatttcttggagatagtcactc

SEQ ID NO: 53638 - DNA, 25 bp, Homo sapien
cgttatttcttgcagatagtcactc

SEQ ID NO: 53639 - DNA, 25 bp, Homo sapien
gtccgtgtacttccatacgtatttg

SEQ ID NO: 53640 - DNA, 25 bp, Homo sapien
gtccgtgtacttgcatacgtatttg

SEQ ID NO: 53641 - DNA, 25 bp, Homo sapien
cgttgatcttgtactaagtctttag

SEQ ID NO: 53642 - DNA, 25 bp, Homo sapien
cgttgatcttgttctaagtctttag

SEQ ID NO: 53643 - DNA, 25 bp, Homo sapien
tgtcaagggtctttatatcttcgag

SEQ ID NO: 53644 - DNA, 25 bp, Homo sapien
tgtcaagggtctatatatcttcgag

SEQ ID NO: 53645 - DNA, 25 bp, Homo sapien
gttcaagaaggaaacacttgtacac

SEQ ID NO: 53646 - DNA, 25 bp, Homo sapien
gttcaagaaggatacacttgtacac

SEQ ID NO: 53647 - DNA, 25 bp, Homo sapien
tggacaaattgtctacgctagaaac

SEQ ID NO: 53648 - DNA, 25 bp, Homo sapien
tggacaaattgtgtacgctagaaac

SEQ ID NO: 53649 - DNA, 25 bp, Homo sapien
cgaaaattgtacttgtctaaagaac

SEQ ID NO: 53650 - DNA, 25 bp, Homo sapien
cgaaaattgtacatgtctaaagaac

SEQ ID NO: 53651 - DNA, 25 bp, Homo sapien
ggtaagccagttagtctcgagccgc

SEQ ID NO: 53652 - DNA, 25 bp, Homo sapien
ggtaagccagtttgtctcgagccgc

SEQ ID NO: 53653 - DNA, 25 bp, Homo sapien
agtgcagaattttaactttcagtcg

SEQ ID NO: 53654 - DNA, 25 bp, Homo sapien
agtgcagaatttaaactttcagtcg

SEQ ID NO: 53655 - DNA, 25 bp, Homo sapien
ggtcaagaaggacaagagctcagtc

SEQ ID NO: 53656 - DNA, 25 bp, Homo sapien
ggtcaagaaggagaagagctcagtc

SEQ ID NO: 53657 - DNA, 25 bp, Homo sapien
gactctaaacagaggggtcgtcaac

SEQ ID NO: 53658 - DNA, 25 bp, Homo sapien
gactctaaacagtggggtcgtcaac

SEQ ID NO: 53659 - DNA, 25 bp, Homo sapien
tttaaacccgtagtccgtgtataac

SEQ ID NO: 53660 - DNA, 25 bp, Homo sapien
tttaaacccgtactccgtgtataac

SEQ ID NO: 53661 - DNA, 25 bp, Homo sapien
tttatgacattctccggtatagact

SEQ ID NO: 53662 - DNA, 25 bp, Homo sapien
tttatgacattcaccggtatagact

SEQ ID NO: 53663 - DNA, 25 bp, Homo sapien
ccggcacgtgtgacgtctgtcttct

SEQ ID NO: 53664 - DNA, 25 bp, Homo sapien
ccggcacgtgtgtcgtctgtcttct

SEQ ID NO: 53665 - DNA, 25 bp, Homo sapien
gtacactttttctcagtgtacctgt

SEQ ID NO: 53666 - DNA, 25 bp, Homo sapien
gtacactttttcacagtgtacctgt

SEQ ID NO: 53667 - DNA, 25 bp, Homo sapien
gtgattgttcctcctcacggccgtg

SEQ ID NO: 53668 - DNA, 25 bp, Homo sapien
gtgattgttcctgctcacggccgtg

SEQ ID NO: 53669 - DNA, 25 bp, Homo sapien
gaaataacacgtccacggcgacgag

SEQ ID NO: 53670 - DNA, 25 bp, Homo sapien
gaaataacacgtgcacggcgacgag

SEQ ID NO: 53671 - DNA, 25 bp, Homo sapien
gcgcctagaagaactgcaccttcca

SEQ ID NO: 53672 - DNA, 25 bp, Homo sapien
gcgcctagaagatctgcaccttcca

SEQ ID NO: 53673 - DNA, 25 bp, Homo sapien
agagacgccttgtcgaagggtcagg

SEQ ID NO: 53674 - DNA, 25 bp, Homo sapien
agagacgccttgacgaagggtcagg

SEQ ID NO: 53675 - DNA, 25 bp, Homo sapien
cacaaacgacggtcggagatgaaca

SEQ ID NO: 53676 - DNA, 25 bp, Homo sapien
cacaaacgacggacggagatgaaca

SEQ ID NO: 53677 - DNA, 25 bp, Homo sapien
acaatttacgatgtttggttacact

SEQ ID NO: 53678 - DNA, 25 bp, Homo sapien
acaatttacgatctttggttacact

SEQ ID NO: 53679 - DNA, 25 bp, Homo sapien
tttgtcgatgttttaggtactcgtc

SEQ ID NO: 53680 - DNA, 25 bp, Homo sapien
tttgtcgatgttataggtactcgtc

SEQ ID NO: 53681 - DNA, 25 bp, Homo sapien
tgttcgtcgttgtttaacgaagcac

SEQ ID NO: 53682 - DNA, 25 bp, Homo sapien
tgttcgtcgttgattaacgaagcac

SEQ ID NO: 53683 - DNA, 25 bp, Homo sapien
acgtctgtactttatcgtttgtccc

SEQ ID NO: 53684 - DNA, 25 bp, Homo sapien
acgtctgtacttaatcgtttgtccc

SEQ ID NO: 53685 - DNA, 25 bp, Homo sapien
tttatacgtccaggtttgttacttc

SEQ ID NO: 53686 - DNA, 25 bp, Homo sapien
tttatacgtccacgtttgttacttc

SEQ ID NO: 53687 - DNA, 25 bp, Homo sapien
ccgttacaaccgttttgttacagac

SEQ ID NO: 53688 - DNA, 25 bp, Homo sapien
ccgttacaaccgatttgttacagac

SEQ ID NO: 53689 - DNA, 25 bp, Homo sapien
ccgtgtctcaagctcaggttcacga

SEQ ID NO: 53690 - DNA, 25 bp, Homo sapien
ccgtgtctcaaggtcaggttcacga

SEQ ID NO: 53691 - DNA, 25 bp, Homo sapien
ccgtgtctcagctcagagccgacat

SEQ ID NO: 53692 - DNA, 25 bp, Homo sapien
ccgtgtctcagcacagagccgacat

SEQ ID NO: 53693 - DNA, 25 bp, Homo sapien
caggactcagaggtaccgaacaccc

SEQ ID NO: 53694 - DNA, 25 bp, Homo sapien
caggactcagagctaccgaacaccc

SEQ ID NO: 53695 - DNA, 25 bp, Homo sapien
cggtatcggcggaacactcctgacc

SEQ ID NO: 53696 - DNA, 25 bp, Homo sapien
cggtatcggcggtacactcctgacc

SEQ ID NO: 53697 - DNA, 25 bp, Homo sapien
cggtgtacaggaacttcccctagac

SEQ ID NO: 53698 - DNA, 25 bp, Homo sapien
cggtgtacaggatcttcccctagac

SEQ ID NO: 53699 - DNA, 25 bp, Homo sapien
tatagctgtgactgaggcccacgag

SEQ ID NO: 53700 - DNA, 25 bp, Homo sapien
tatagctgtgacagaggcccacgag

SEQ ID NO: 53701 - DNA, 25 bp, Homo sapien
tactcgagcttgtgacgggcggaat

SEQ ID NO: 53702 - DNA, 25 bp, Homo sapien
tactcgagcttgagacgggcggaat

SEQ ID NO: 53703 - DNA, 25 bp, Homo sapien
actatggctgttcgaccgggtggta

SEQ ID NO: 53704 - DNA, 25 bp, Homo sapien
actatggctgttggaccgggtggta

SEQ ID NO: 53705 - DNA, 25 bp, Homo sapien
gagtttccttcactccggacctagt

SEQ ID NO: 53706 - DNA, 25 bp, Homo sapien
gagtttccttcagtccggacctagt

SEQ ID NO: 53707 - DNA, 25 bp, Homo sapien
tactccgtgtccagtccggatcgac

SEQ ID NO: 53708 - DNA, 25 bp, Homo sapien
tactccgtgtcctgtccggatcgac

SEQ ID NO: 53709 - DNA, 25 bp, Homo sapien
ttactaccggtctccgtagtggtcc

SEQ ID NO: 53710 - DNA, 25 bp, Homo sapien
ttactaccggtcaccgtagtggtcc

SEQ ID NO: 53711 - DNA, 25 bp, Homo sapien
aaactaaaggttccttcagtgtccg

SEQ ID NO: 53712 - DNA, 25 bp, Homo sapien
aaactaaaggttgcttcagtgtccg

SEQ ID NO: 53713 - DNA, 25 bp, Homo sapien
agaaacaaatgttcggtaatgtcca

SEQ ID NO: 53714 - DNA, 25 bp, Homo sapien
agaaacaaatgtacggtaatgtcca

SEQ ID NO: 53715 - DNA, 25 bp, Homo sapien
gaaaaccatggtcctccagtgacta

SEQ ID NO: 53716 - DNA, 25 bp, Homo sapien
gaaaaccatggtgctccagtgacta

SEQ ID NO: 53717 - DNA, 25 bp, Homo sapien
cagaccaagtagacgtcggcgtaca

SEQ ID NO: 53718 - DNA, 25 bp, Homo sapien
cagaccaagtagtcgtcggcgtaca

SEQ ID NO: 53719 - DNA, 25 bp, Homo sapien
atcgcgacctgcaggaggtcgacca

SEQ ID NO: 53720 - DNA, 25 bp, Homo sapien
atcgcgacctgctggaggtcgacca

SEQ ID NO: 53721 - DNA, 25 bp, Homo sapien
gtctgtaaaaggagggacgtccgta

SEQ ID NO: 53722 - DNA, 25 bp, Homo sapien
gtctgtaaaaggtgggacgtccgta

SEQ ID NO: 53723 - DNA, 25 bp, Homo sapien
cggagatgaccgcgacggttccgac

SEQ ID NO: 53724 - DNA, 25 bp, Homo sapien
cggagatgaccgggacggttccgac

SEQ ID NO: 53725 - DNA, 25 bp, Homo sapien
ggaactcgtttaggacggtcttgta

SEQ ID NO: 53726 - DNA, 25 bp, Homo sapien
ggaactcgtttacgacggtcttgta

SEQ ID NO: 53727 - DNA, 25 bp, Homo sapien
taaggaggttcttaggggtcttacc

SEQ ID NO: 53728 - DNA, 25 bp, Homo sapien
taaggaggttctaaggggtcttacc

SEQ ID NO: 53729 - DNA, 25 bp, Homo sapien
ataagagggctgaggggtcactaca

SEQ ID NO: 53730 - DNA, 25 bp, Homo sapien
ataagagggctgtggggtcactaca

SEQ ID NO: 53731 - DNA, 25 bp, Homo sapien
acactggttctttgggtgtcaggac

SEQ ID NO: 53732 - DNA, 25 bp, Homo sapien
acactggttcttagggtgtcaggac

SEQ ID NO: 53733 - DNA, 25 bp, Homo sapien
aggagacgcctctaggctaaagctg

SEQ ID NO: 53734 - DNA, 25 bp, Homo sapien
aggagacgcctcaaggctaaagctg

SEQ ID NO: 53735 - DNA, 25 bp, Homo sapien
taacctctcgtcgttcttgaacgac

SEQ ID NO: 53736 - DNA, 25 bp, Homo sapien
taacctctcgtccttcttgaacgac

SEQ ID NO: 53737 - DNA, 25 bp, Homo sapien
gtacgtcccctgtgtccttgtgcta

SEQ ID NO: 53738 - DNA, 25 bp, Homo sapien
gtacgtcccctgagtccttgtgcta

SEQ ID NO: 53739 - DNA, 25 bp, Homo sapien
ggcacccccatgtcctcgggtctgt

SEQ ID NO: 53740 - DNA, 25 bp, Homo sapien
ggcacccccatgacctcgggtctgt

SEQ ID NO: 53741 - DNA, 25 bp, Homo sapien
gcaacccactatacgccgagggtgt

SEQ ID NO: 53742 - DNA, 25 bp, Homo sapien
gcaacccactattcgccgagggtgt

SEQ ID NO: 53743 - DNA, 25 bp, Homo sapien
tcagaccgaccacacctggtgctgt

SEQ ID NO: 53744 - DNA, 25 bp, Homo sapien
tcagaccgaccagacctggtgctgt

SEQ ID NO: 53745 - DNA, 25 bp, Homo sapien
ctgtcgagaccagacgctgaggtgg

SEQ ID NO: 53746 - DNA, 25 bp, Homo sapien
ctgtcgagaccacacgctgaggtgg

SEQ ID NO: 53747 - DNA, 25 bp, Homo sapien
cactcaaacccgactacgtggtgtt

SEQ ID NO: 53748 - DNA, 25 bp, Homo sapien
cactcaaacccgtctacgtggtgtt

SEQ ID NO: 53749 - DNA, 25 bp, Homo sapien
accataaaccgtgctactgtgtagg

SEQ ID NO: 53750 - DNA, 25 bp, Homo sapien
accataaaccgtcctactgtgtagg

SEQ ID NO: 53751 - DNA, 25 bp, Homo sapien
ctctcgtcttattactgatgtgacc

SEQ ID NO: 53752 - DNA, 25 bp, Homo sapien
ctctcgtcttataactgatgtgacc

SEQ ID NO: 53753 - DNA, 25 bp, Homo sapien
cgttcctgttctgtcgaggtcacgg

SEQ ID NO: 53754 - DNA, 25 bp, Homo sapien
cgttcctgttctctcgaggtcacgg

SEQ ID NO: 53755 - DNA, 25 bp, Homo sapien
gtctcggttctcctgcgagccgtac

SEQ ID NO: 53756 - DNA, 25 bp, Homo sapien
gtctcggttctcgtgcgagccgtac

SEQ ID NO: 53757 - DNA, 25 bp, Homo sapien
ctcatgtcacgactggggtgtctaa

SEQ ID NO: 53758 - DNA, 25 bp, Homo sapien
ctcatgtcacgagtggggtgtctaa

SEQ ID NO: 53759 - DNA, 25 bp, Homo sapien
acataaagacgtccaagagtttcac

SEQ ID NO: 53760 - DNA, 25 bp, Homo sapien
acataaagacgtgcaagagtttcac

SEQ ID NO: 53761 - DNA, 25 bp, Homo sapien
tcaacgaaaaagaggatgttctcat

SEQ ID NO: 53762 - DNA, 25 bp, Homo sapien
tcaacgaaaaagtggatgttctcat

SEQ ID NO: 53763 - DNA, 25 bp, Homo sapien
tcgtaatgtcaaacctggggtttta

SEQ ID NO: 53764 - DNA, 25 bp, Homo sapien
tcgtaatgtcaatcctggggtttta

SEQ ID NO: 53765 - DNA, 25 bp, Homo sapien
tggtgttacttacacgactttatct

SEQ ID NO: 53766 - DNA, 25 bp, Homo sapien
tggtgttacttagacgactttatct

SEQ ID NO: 53767 - DNA, 25 bp, Homo sapien
gtgtaggtaggtctctgactttggc

SEQ ID NO: 53768 - DNA, 25 bp, Homo sapien
gtgtaggtaggtgtctgactttggc

SEQ ID NO: 53769 - DNA, 25 bp, Homo sapien
atagaggtacctttcggcgaagtac

SEQ ID NO: 53770 - DNA, 25 bp, Homo sapien
atagaggtacctatcggcgaagtac

SEQ ID NO: 53771 - DNA, 25 bp, Homo sapien
ctaacgtaggaagagagaccgttaa

SEQ ID NO: 53772 - DNA, 25 bp, Homo sapien
ctaacgtaggaacagagaccgttaa

SEQ ID NO: 53773 - DNA, 25 bp, Homo sapien
acgaaatcgccgtcggtcccgaggt

SEQ ID NO: 53774 - DNA, 25 bp, Homo sapien
acgaaatcgccgacggtcccgaggt

SEQ ID NO: 53775 - DNA, 25 bp, Homo sapien
attacgtgcggcaagtcgctgacaa

SEQ ID NO: 53776 - DNA, 25 bp, Homo sapien
attacgtgcggctagtcgctgacaa

SEQ ID NO: 53777 - DNA, 25 bp, Homo sapien
aaatggcggtctactttagcttgtc

SEQ ID NO: 53778 - DNA, 25 bp, Homo sapien
aaatggcggtcttctttagcttgtc

SEQ ID NO: 53779 - DNA, 25 bp, Homo sapien
gttttacctctatctaaacttcaaa

SEQ ID NO: 53780 - DNA, 25 bp, Homo sapien
gttttacctctaactaaacttcaaa

SEQ ID NO: 53781 - DNA, 25 bp, Homo sapien
tgtcgtcgtgtacctaatcttccaa

SEQ ID NO: 53782 - DNA, 25 bp, Homo sapien
tgtcgtcgtgtagctaatcttccaa

SEQ ID NO: 53783 - DNA, 25 bp, Homo sapien
gtcattatacgtagtaccttacttg

SEQ ID NO: 53784 - DNA, 25 bp, Homo sapien
gtcattatacgttgtaccttacttg

SEQ ID NO: 53785 - DNA, 25 bp, Homo sapien
gtccgtcgttttatgactctgtaaa

SEQ ID NO: 53786 - DNA, 25 bp, Homo sapien
gtccgtcgttttttgactctgtaaa

SEQ ID NO: 53787 - DNA, 25 bp, Homo sapien
aaatatctctctgtctttctgttaa

SEQ ID NO: 53788 - DNA, 25 bp, Homo sapien
aaatatctctctctctttctgttaa

SEQ ID NO: 53789 - DNA, 25 bp, Homo sapien
gacatagtccgtttcagtatcttgg

SEQ ID NO: 53790 - DNA, 25 bp, Homo sapien
gacatagtccgtatcagtatcttgg

SEQ ID NO: 53791 - DNA, 25 bp, Homo sapien
aaagtcattgtttcgagtctctttg

SEQ ID NO: 53792 - DNA, 25 bp, Homo sapien
aaagtcattgttacgagtctctttg

SEQ ID NO: 53793 - DNA, 25 bp, Homo sapien
aagacatgtattcgagttcactgtt

SEQ ID NO: 53794 - DNA, 25 bp, Homo sapien
aagacatgtattggagttcactgtt

SEQ ID NO: 53795 - DNA, 25 bp, Homo sapien
ggagatggtccttcggtctccggat

SEQ ID NO: 53796 - DNA, 25 bp, Homo sapien
ggagatggtcctacggtctccggat

SEQ ID NO: 53797 - DNA, 25 bp, Homo sapien
ttagttactgaaacccgttctggac

SEQ ID NO: 53798 - DNA, 25 bp, Homo sapien
ttagttactgaatcccgttctggac

SEQ ID NO: 53799 - DNA, 25 bp, Homo sapien
tatatctccagaacccctggtaccg

SEQ ID NO: 53800 - DNA, 25 bp, Homo sapien
tatatctccagatcccctggtaccg

SEQ ID NO: 53801 - DNA, 25 bp, Homo sapien
tgtctgcacaccagtacctggaccg

SEQ ID NO: 53802 - DNA, 25 bp, Homo sapien
tgtctgcacacctgtacctggaccg

SEQ ID NO: 53803 - DNA, 25 bp, Homo sapien
aagtgtactggagactctgtgacgg

SEQ ID NO: 53804 - DNA, 25 bp, Homo sapien
aagtgtactggacactctgtgacgg

SEQ ID NO: 53805 - DNA, 25 bp, Homo sapien
ggtcgtagtcgacacttgtagacga

SEQ ID NO: 53806 - DNA, 25 bp, Homo sapien
ggtcgtagtcgagacttgtagacga

SEQ ID NO: 53807 - DNA, 25 bp, Homo sapien
ggtacatattgtgacccttttatat

SEQ ID NO: 53808 - DNA, 25 bp, Homo sapien
ggtacatattgtcacccttttatat

SEQ ID NO: 53809 - DNA, 25 bp, Homo sapien
ggggtatctctcttacctttcctct

SEQ ID NO: 53810 - DNA, 25 bp, Homo sapien
ggggtatctctcatacctttcctct

SEQ ID NO: 53811 - DNA, 25 bp, Homo sapien
ggggagttacgtgtccttacacctc

SEQ ID NO: 53812 - DNA, 25 bp, Homo sapien
ggggagttacgtctccttacacctc

SEQ ID NO: 53813 - DNA, 25 bp, Homo sapien
aaagggtcaagacatgttcgtctcc

SEQ ID NO: 53814 - DNA, 25 bp, Homo sapien
aaagggtcaagagatgttcgtctcc

SEQ ID NO: 53815 - DNA, 25 bp, Homo sapien
gatagggagacacttatttcacccg

SEQ ID NO: 53816 - DNA, 25 bp, Homo sapien
gatagggagacagttatttcacccg

SEQ ID NO: 53817 - DNA, 25 bp, Homo sapien
gcgtcaggcggattaccaggcccgc

SEQ ID NO: 53818 - DNA, 25 bp, Homo sapien
gcgtcaggcggaataccaggcccgc

SEQ ID NO: 53819 - DNA, 25 bp, Homo sapien
gtcgcagagataaaccagagcctcc

SEQ ID NO: 53820 - DNA, 25 bp, Homo sapien
gtcgcagagatataccagagcctcc

SEQ ID NO: 53821 - DNA, 25 bp, Homo sapien
agggaggtaccttccgtggtccgcc

SEQ ID NO: 53822 - DNA, 25 bp, Homo sapien
agggaggtacctaccgtggtccgcc

SEQ ID NO: 53823 - DNA, 25 bp, Homo sapien
gaggtcgttgtatctgctgtcgaag

SEQ ID NO: 53824 - DNA, 25 bp, Homo sapien
gaggtcgttgtaactgctgtcgaag

SEQ ID NO: 53825 - DNA, 25 bp, Homo sapien
ggtgtggttttacctgtactctaac

SEQ ID NO: 53826 - DNA, 25 bp, Homo sapien
ggtgtggttttagctgtactctaac

SEQ ID NO: 53827 - DNA, 25 bp, Homo sapien
cgggagagacctacggtaaccaact

SEQ ID NO: 53828 - DNA, 25 bp, Homo sapien
cgggagagaccttcggtaaccaact

SEQ ID NO: 53829 - DNA, 25 bp, Homo sapien
aagatggtacactcctgtcacaaat

SEQ ID NO: 53830 - DNA, 25 bp, Homo sapien
aagatggtacacacctgtcacaaat

SEQ ID NO: 53831 - DNA, 25 bp, Homo sapien
actgtgtcatataacgttcacagaa

SEQ ID NO: 53832 - DNA, 25 bp, Homo sapien
actgtgtcatattacgttcacagaa

SEQ ID NO: 53833 - DNA, 25 bp, Homo sapien
cgattcctgtactttggcttcaaag

SEQ ID NO: 53834 - DNA, 25 bp, Homo sapien
cgattcctgtacattggcttcaaag

SEQ ID NO: 53835 - DNA, 25 bp, Homo sapien
tcggggtctttcgactgtcgacttc

SEQ ID NO: 53836 - DNA, 25 bp, Homo sapien
tcggggtctttccactgtcgacttc

SEQ ID NO: 53837 - DNA, 25 bp, Homo sapien
ctcatgagctcgtccgcgaggaacc

SEQ ID NO: 53838 - DNA, 25 bp, Homo sapien
ctcatgagctcgaccgcgaggaacc

SEQ ID NO: 53839 - DNA, 25 bp, Homo sapien
cctgagttcggagttcgttcgaact

SEQ ID NO: 53840 - DNA, 25 bp, Homo sapien
cctgagttcggacttcgttcgaact

SEQ ID NO: 53841 - DNA, 25 bp, Homo sapien
ttcagagtctgaactcctccagaga

SEQ ID NO: 53842 - DNA, 25 bp, Homo sapien
ttcagagtctgatctcctccagaga

SEQ ID NO: 53843 - DNA, 25 bp, Homo sapien
gcaacggtcccctctactagttaga

SEQ ID NO: 53844 - DNA, 25 bp, Homo sapien
gcaacggtccccactactagttaga

SEQ ID NO: 53845 - DNA, 25 bp, Homo sapien
tgaccaatgattctgactttaagta

SEQ ID NO: 53846 - DNA, 25 bp, Homo sapien
tgaccaatgattgtgactttaagta

SEQ ID NO: 53847 - DNA, 25 bp, Homo sapien
ggcaagaagtcttttgtcattaatc

SEQ ID NO: 53848 - DNA, 25 bp, Homo sapien
ggcaagaagtctattgtcattaatc

SEQ ID NO: 53849 - DNA, 25 bp, Homo sapien
ttgaagtacattttcgtgttcatac

SEQ ID NO: 53850 - DNA, 25 bp, Homo sapien
ttgaagtacattatcgtgttcatac

SEQ ID NO: 53851 - DNA, 25 bp, Homo sapien
gggtcccagacatcccgtgtagata

SEQ ID NO: 53852 - DNA, 25 bp, Homo sapien
gggtcccagacaacccgtgtagata

SEQ ID NO: 53853 - DNA, 25 bp, Homo sapien
atgagtgtccaagttccgtcaatac

SEQ ID NO: 53854 - DNA, 25 bp, Homo sapien
atgagtgtccaacttccgtcaatac

SEQ ID NO: 53855 - DNA, 25 bp, Homo sapien
cggagagaggacgactccccgaaca

SEQ ID NO: 53856 - DNA, 25 bp, Homo sapien
cggagagaggaccactccccgaaca

SEQ ID NO: 53857 - DNA, 25 bp, Homo sapien
gtactagtcaagtacgtccccaaac

SEQ ID NO: 53858 - DNA, 25 bp, Homo sapien
gtactagtcaagaacgtccccaaac

SEQ ID NO: 53859 - DNA, 25 bp, Homo sapien
caagtaaggagagttccacctagaa

SEQ ID NO: 53860 - DNA, 25 bp, Homo sapien
caagtaaggagacttccacctagaa

SEQ ID NO: 53861 - DNA, 25 bp, Homo sapien
tgtcgtcaggagacagggtccagaa

SEQ ID NO: 53862 - DNA, 25 bp, Homo sapien
tgtcgtcaggagtcagggtccagaa

SEQ ID NO: 53863 - DNA, 25 bp, Homo sapien
gtgtcacgagggtcccatccagcga

SEQ ID NO: 53864 - DNA, 25 bp, Homo sapien
gtgtcacgagggacccatccagcga

SEQ ID NO: 53865 - DNA, 25 bp, Homo sapien
gccgcgagaagtacaacttccgcat

SEQ ID NO: 53866 - DNA, 25 bp, Homo sapien
gccgcgagaagttcaacttccgcat

SEQ ID NO: 53867 - DNA, 25 bp, Homo sapien
gcggccgaagaaaccgtgacctcct

SEQ ID NO: 53868 - DNA, 25 bp, Homo sapien
gcggccgaagaatccgtgacctcct

SEQ ID NO: 53869 - DNA, 25 bp, Homo sapien
gagaggaaggattccgtccaggtct

SEQ ID NO: 53870 - DNA, 25 bp, Homo sapien
gagaggaaggataccgtccaggtct

SEQ ID NO: 53871 - DNA, 25 bp, Homo sapien
gaagatcacggacaccgtccgtcca

SEQ ID NO: 53872 - DNA, 25 bp, Homo sapien
gaagatcacggagaccgtccgtcca

SEQ ID NO: 53873 - DNA, 25 bp, Homo sapien
gacagcttaatgttccgttaaccta

SEQ ID NO: 53874 - DNA, 25 bp, Homo sapien
gacagcttaatgatccgttaaccta

SEQ ID NO: 53875 - DNA, 25 bp, Homo sapien
tagaagacaatggttagttaacctc

SEQ ID NO: 53876 - DNA, 25 bp, Homo sapien
tagaagacaatgcttagttaacctc

SEQ ID NO: 53877 - DNA, 25 bp, Homo sapien
tgaagaagtccgtacgttttctgtc

SEQ ID NO: 53878 - DNA, 25 bp, Homo sapien
tgaagaagtccgaacgttttctgtc

SEQ ID NO: 53879 - DNA, 25 bp, Homo sapien
attacggattcttatcgtgtttacg

SEQ ID NO: 53880 - DNA, 25 bp, Homo sapien
attacggattctaatcgtgtttacg

SEQ ID NO: 53881 - DNA, 25 bp, Homo sapien
catgtagtgtcatcttttgatgtcg

SEQ ID NO: 53882 - DNA, 25 bp, Homo sapien
catgtagtgtcaacttttgatgtcg

SEQ ID NO: 53883 - DNA, 25 bp, Homo sapien
ctagactattggtttctgtgtattc

SEQ ID NO: 53884 - DNA, 25 bp, Homo sapien
ctagactattggattctgtgtattc

SEQ ID NO: 53885 - DNA, 25 bp, Homo sapien
ctagggtcagactactcttctttac

SEQ ID NO: 53886 - DNA, 25 bp, Homo sapien
ctagggtcagacaactcttctttac

SEQ ID NO: 53887 - DNA, 25 bp, Homo sapien
cctccgggaccgaaaggtctttaca

SEQ ID NO: 53888 - DNA, 25 bp, Homo sapien
cctccgggaccgtaaggtctttaca

SEQ ID NO: 53889 - DNA, 25 bp, Homo sapien
cgaagagacctcaagcgtgtgactg

SEQ ID NO: 53890 - DNA, 25 bp, Homo sapien
cgaagagacctctagcgtgtgactg

SEQ ID NO: 53891 - DNA, 25 bp, Homo sapien
gtgtacccagaacactatttgatta

SEQ ID NO: 53892 - DNA, 25 bp, Homo sapien
gtgtacccagaagactatttgatta

SEQ ID NO: 53893 - DNA, 25 bp, Homo sapien
tcaacgatgatttcttgtcgtaata

SEQ ID NO: 53894 - DNA, 25 bp, Homo sapien
tcaacgatgattacttgtcgtaata

SEQ ID NO: 53895 - DNA, 25 bp, Homo sapien
accgtaggacttgaaggtcgtcaag

SEQ ID NO: 53896 - DNA, 25 bp, Homo sapien
accgtaggacttcaaggtcgtcaag

SEQ ID NO: 53897 - DNA, 25 bp, Homo sapien
cgtcaccgggtttctgtgtcagcag

SEQ ID NO: 53898 - DNA, 25 bp, Homo sapien
cgtcaccgggttactgtgtcagcag

SEQ ID NO: 53899 - DNA, 25 bp, Homo sapien
tcgtcccggacatttggtcagttac

SEQ ID NO: 53900 - DNA, 25 bp, Homo sapien
tcgtcccggacaattggtcagttac

SEQ ID NO: 53901 - DNA, 25 bp, Homo sapien
tctaaaccctcaagaggttacgttg

SEQ ID NO: 53902 - DNA, 25 bp, Homo sapien
tctaaaccctcatgaggttacgttg

SEQ ID NO: 53903 - DNA, 25 bp, Homo sapien
aaactgtacgacttaaggtatttcg

SEQ ID NO: 53904 - DNA, 25 bp, Homo sapien
aaactgtacgacataaggtatttcg

SEQ ID NO: 53905 - DNA, 25 bp, Homo sapien
cgggtactactcaacgtgtggtttg

SEQ ID NO: 53906 - DNA, 25 bp, Homo sapien
cgggtactactctacgtgtggtttg

SEQ ID NO: 53907 - DNA, 25 bp, Homo sapien
tgtgcctgtccttctgtttgtggtg

SEQ ID NO: 53908 - DNA, 25 bp, Homo sapien
tgtgcctgtcctactgtttgtggtg

SEQ ID NO: 53909 - DNA, 25 bp, Homo sapien
cctccctgtccacctgaattaggag

SEQ ID NO: 53910 - DNA, 25 bp, Homo sapien
cctccctgtccagctgaattaggag

SEQ ID NO: 53911 - DNA, 25 bp, Homo sapien
cctcccggaccgtcagagatgtcag

SEQ ID NO: 53912 - DNA, 25 bp, Homo sapien
cctcccggaccgacagagatgtcag

SEQ ID NO: 53913 - DNA, 25 bp, Homo sapien
acgtccagtgtgacgtggtgtcatg

SEQ ID NO: 53914 - DNA, 25 bp, Homo sapien
acgtccagtgtgtcgtggtgtcatg

SEQ ID NO: 53915 - DNA, 25 bp, Homo sapien
cttaacaagtctatggtgtttcgtg

SEQ ID NO: 53916 - DNA, 25 bp, Homo sapien
cttaacaagtctttggtgtttcgtg

SEQ ID NO: 53917 - DNA, 25 bp, Homo sapien
atcttcaactcgtgcgtcgccttgt

SEQ ID NO: 53918 - DNA, 25 bp, Homo sapien
atcttcaactcgagcgtcgccttgt

SEQ ID NO: 53919 - DNA, 25 bp, Homo sapien
ttcgtttcctctcatcctcggggtt

SEQ ID NO: 53920 - DNA, 25 bp, Homo sapien
ttcgtttcctctgatcctcggggtt

SEQ ID NO: 53921 - DNA, 25 bp, Homo sapien
ttgtttccttcttcacgagggtaat

SEQ ID NO: 53922 - DNA, 25 bp, Homo sapien
ttgtttccttctacacgagggtaat

SEQ ID NO: 53923 - DNA, 25 bp, Homo sapien
gccctcgtcttcaccgacgtggggt

SEQ ID NO: 53924 - DNA, 25 bp, Homo sapien
gccctcgtcttctccgacgtggggt

SEQ ID NO: 53925 - DNA, 25 bp, Homo sapien
cccctcatggtacatcgtgtagttt

SEQ ID NO: 53926 - DNA, 25 bp, Homo sapien
cccctcatggtagatcgtgtagttt

SEQ ID NO: 53927 - DNA, 25 bp, Homo sapien
gttcggtacgaaaagacactataag

SEQ ID NO: 53928 - DNA, 25 bp, Homo sapien
gttcggtacgaatagacactataag

SEQ ID NO: 53929 - DNA, 25 bp, Homo sapien
ttccgtgacgggtacgacacagaga

SEQ ID NO: 53930 - DNA, 25 bp, Homo sapien
ttccgtgacgggaacgacacagaga

SEQ ID NO: 53931 - DNA, 25 bp, Homo sapien
ctaccttcgcggactacagtatcgg

SEQ ID NO: 53932 - DNA, 25 bp, Homo sapien
ctaccttcgcggtctacagtatcgg

SEQ ID NO: 53933 - DNA, 25 bp, Homo sapien
tctcggacggaatcgtaggtaccgg

SEQ ID NO: 53934 - DNA, 25 bp, Homo sapien
tctcggacggaaacgtaggtaccgg

SEQ ID NO: 53935 - DNA, 25 bp, Homo sapien
aatttgacacgttcatgtttacaga

SEQ ID NO: 53936 - DNA, 25 bp, Homo sapien
aatttgacacgtacatgtttacaga

SEQ ID NO: 53937 - DNA, 25 bp, Homo sapien
atttcaaaccgtatgttctagagtc

SEQ ID NO: 53938 - DNA, 25 bp, Homo sapien
atttcaaaccgtttgttctagagtc

SEQ ID NO: 53939 - DNA, 25 bp, Homo sapien
cgccgccgtctagagtcgtcgaacg

SEQ ID NO: 53940 - DNA, 25 bp, Homo sapien
cgccgccgtctacagtcgtcgaacg

SEQ ID NO: 53941 - DNA, 25 bp, Homo sapien
ttctcctctctacgtagctcgtcag

SEQ ID NO: 53942 - DNA, 25 bp, Homo sapien
ttctcctctctaggtagctcgtcag

SEQ ID NO: 53943 - DNA, 25 bp, Homo sapien
cgagccctcatcgtaggagtcctca

SEQ ID NO: 53944 - DNA, 25 bp, Homo sapien
cgagccctcatcctaggagtcctca

SEQ ID NO: 53945 - DNA, 25 bp, Homo sapien
agactcccacgcaggtgacggtgaa

SEQ ID NO: 53946 - DNA, 25 bp, Homo sapien
agactcccacgctggtgacggtgaa

SEQ ID NO: 53947 - DNA, 25 bp, Homo sapien
actccccgactacctggtgttgtat

SEQ ID NO: 53948 - DNA, 25 bp, Homo sapien
actccccgactagctggtgttgtat

SEQ ID NO: 53949 - DNA, 25 bp, Homo sapien
tctgtgacgggtctcgagtgacctc

SEQ ID NO: 53950 - DNA, 25 bp, Homo sapien
tctgtgacgggtgtcgagtgacctc

SEQ ID NO: 53951 - DNA, 25 bp, Homo sapien
actttgaggtattacgatgtctctc

SEQ ID NO: 53952 - DNA, 25 bp, Homo sapien
actttgaggtataacgatgtctctc

SEQ ID NO: 53953 - DNA, 25 bp, Homo sapien
acgtgcgagacgactcggagctccc

SEQ ID NO: 53954 - DNA, 25 bp, Homo sapien
acgtgcgagacgtctcggagctccc

SEQ ID NO: 53955 - DNA, 25 bp, Homo sapien
gtcggatctttcaagatcgtgtagt

SEQ ID NO: 53956 - DNA, 25 bp, Homo sapien
gtcggatctttctagatcgtgtagt

SEQ ID NO: 53957 - DNA, 25 bp, Homo sapien
ctttcagatgcttctgtatgtcgtt

SEQ ID NO: 53958 - DNA, 25 bp, Homo sapien
ctttcagatgctactgtatgtcgtt

SEQ ID NO: 53959 - DNA, 25 bp, Homo sapien
cttgtcacagggaactttacgtgtt

SEQ ID NO: 53960 - DNA, 25 bp, Homo sapien
cttgtcacagggtactttacgtgtt

SEQ ID NO: 53961 - DNA, 25 bp, Homo sapien
gtatagtacaaacatcattagaacg

SEQ ID NO: 53962 - DNA, 25 bp, Homo sapien
gtatagtacaaagatcattagaacg

SEQ ID NO: 53963 - DNA, 25 bp, Homo sapien
agaaagaggaggtctcgtacaggtc

SEQ ID NO: 53964 - DNA, 25 bp, Homo sapien
agaaagaggaggactcgtacaggtc

SEQ ID NO: 53965 - DNA, 25 bp, Homo sapien
aacaaaggagtgacacacaagacgt

SEQ ID NO: 53966 - DNA, 25 bp, Homo sapien
aacaaaggagtgtcacacaagacgt

SEQ ID NO: 53967 - DNA, 25 bp, Homo sapien
caagagacatgtggtcaccgaagac

SEQ ID NO: 53968 - DNA, 25 bp, Homo sapien
caagagacatgtcgtcaccgaagac

SEQ ID NO: 53969 - DNA, 25 bp, Homo sapien
actacattcgttacgaccgtcgtcg

SEQ ID NO: 53970 - DNA, 25 bp, Homo sapien
actacattcgtttcgaccgtcgtcg

SEQ ID NO: 53971 - DNA, 25 bp, Homo sapien
gacaaaaatttcacgagactgtacg

SEQ ID NO: 53972 - DNA, 25 bp, Homo sapien
gacaaaaatttctcgagactgtacg

SEQ ID NO: 53973 - DNA, 25 bp, Homo sapien
agcaactgcttcctcaagtactaag

SEQ ID NO: 53974 - DNA, 25 bp, Homo sapien
agcaactgcttcgtcaagtactaag

SEQ ID NO: 53975 - DNA, 25 bp, Homo sapien
cacagaactcgtccttcggttaaag

SEQ ID NO: 53976 - DNA, 25 bp, Homo sapien
cacagaactcgtgcttcggttaaag

SEQ ID NO: 53977 - DNA, 25 bp, Homo sapien
ccaacatctcgctgacgtgtatcca

SEQ ID NO: 53978 - DNA, 25 bp, Homo sapien
ccaacatctcgcagacgtgtatcca

SEQ ID NO: 53979 - DNA, 25 bp, Homo sapien
gtctacgacgttcagctaacaccac

SEQ ID NO: 53980 - DNA, 25 bp, Homo sapien
gtctacgacgttgagctaacaccac

SEQ ID NO: 53981 - DNA, 25 bp, Homo sapien
gagaaatacaatgacagtttctcaa

SEQ ID NO: 53982 - DNA, 25 bp, Homo sapien
gagaaatacaatcacagtttctcaa

SEQ ID NO: 53983 - DNA, 25 bp, Homo sapien
ggaaaaagatcttagtctcttaaac

SEQ ID NO: 53984 - DNA, 25 bp, Homo sapien
ggaaaaagatctaagtctcttaaac

SEQ ID NO: 53985 - DNA, 25 bp, Homo sapien
acggaaataagtcttagtattccca

SEQ ID NO: 53986 - DNA, 25 bp, Homo sapien
acggaaataagtgttagtattccca

SEQ ID NO: 53987 - DNA, 25 bp, Homo sapien
cgaacatctgtgtgacaatcccgtc

SEQ ID NO: 53988 - DNA, 25 bp, Homo sapien
cgaacatctgtgagacaatcccgtc

SEQ ID NO: 53989 - DNA, 25 bp, Homo sapien
gatctacttttaagggctctttcgt

SEQ ID NO: 53990 - DNA, 25 bp, Homo sapien
gatctacttttatgggctctttcgt

SEQ ID NO: 53991 - DNA, 25 bp, Homo sapien
gtctatgtgtctctctccttactgt

SEQ ID NO: 53992 - DNA, 25 bp, Homo sapien
gtctatgtgtctgtctccttactgt

SEQ ID NO: 53993 - DNA, 25 bp, Homo sapien
gtgtcggtgtgatgttctcccgctt

SEQ ID NO: 53994 - DNA, 25 bp, Homo sapien
gtgtcggtgtgaagttctcccgctt

SEQ ID NO: 53995 - DNA, 25 bp, Homo sapien
ttctggtgtccgattttacgggtgt

SEQ ID NO: 53996 - DNA, 25 bp, Homo sapien
ttctggtgtccgtttttacgggtgt

SEQ ID NO: 53997 - DNA, 25 bp, Homo sapien
cagctagaccgtcatttacaaacgt

SEQ ID NO: 53998 - DNA, 25 bp, Homo sapien
cagctagaccgtgatttacaaacgt

SEQ ID NO: 53999 - DNA, 25 bp, Homo sapien
ttcgtagtacagtacatctaaagtc

SEQ ID NO: 54000 - DNA, 25 bp, Homo sapien
ttcgtagtacagaacatctaaagtc

SEQ ID NO: 54001 - DNA, 25 bp, Homo sapien
ggctgaagaacctacgtaggactcg

SEQ ID NO: 54002 - DNA, 25 bp, Homo sapien
ggctgaagaaccaacgtaggactcg

SEQ ID NO: 54003 - DNA, 25 bp, Homo sapien
tttggggaatttccacgctacttac

SEQ ID NO: 54004 - DNA, 25 bp, Homo sapien
tttggggaatttgcacgctacttac

SEQ ID NO: 54005 - DNA, 25 bp, Homo sapien
ttgttttgagttcctgaacctcata

SEQ ID NO: 54006 - DNA, 25 bp, Homo sapien
ttgttttgagttgctgaacctcata

SEQ ID NO: 54007 - DNA, 25 bp, Homo sapien
gtcttttattagtgtaacatcttac

SEQ ID NO: 54008 - DNA, 25 bp, Homo sapien
gtcttttattagagtaacatcttac

SEQ ID NO: 54009 - DNA, 25 bp, Homo sapien
gactttgacttgtcaactgtcttat

SEQ ID NO: 54010 - DNA, 25 bp, Homo sapien
gactttgacttgacaactgtcttat

SEQ ID NO: 54011 - DNA, 25 bp, Homo sapien
ccgcttgtttaaaccctgtcatagt

SEQ ID NO: 54012 - DNA, 25 bp, Homo sapien
ccgcttgtttaatccctgtcatagt

SEQ ID NO: 54013 - DNA, 25 bp, Homo sapien
gaacacgtttctgagactttatcaa

SEQ ID NO: 54014 - DNA, 25 bp, Homo sapien
gaacacgtttctcagactttatcaa

SEQ ID NO: 54015 - DNA, 25 bp, Homo sapien
agttccttttgatcatccagtagaa

SEQ ID NO: 54016 - DNA, 25 bp, Homo sapien
agttccttttgaacatccagtagaa

SEQ ID NO: 54017 - DNA, 25 bp, Homo sapien
taccttcgtgtccacttttagtgat

SEQ ID NO: 54018 - DNA, 25 bp, Homo sapien
taccttcgtgtcgacttttagtgat

SEQ ID NO: 54019 - DNA, 25 bp, Homo sapien
tatcccacgagatacgtgttttaat

SEQ ID NO: 54020 - DNA, 25 bp, Homo sapien
tatcccacgagaaacgtgttttaat

SEQ ID NO: 54021 - DNA, 25 bp, Homo sapien
aacgtcaacgcacgagatcttacta

SEQ ID NO: 54022 - DNA, 25 bp, Homo sapien
aacgtcaacgcaggagatcttacta

SEQ ID NO: 54023 - DNA, 25 bp, Homo sapien
tcatctatagagacggaagtctttt

SEQ ID NO: 54024 - DNA, 25 bp, Homo sapien
tcatctatagagtcggaagtctttt

SEQ ID NO: 54025 - DNA, 25 bp, Homo sapien
taaacgtgtcacagaatgtgtacac

SEQ ID NO: 54026 - DNA, 25 bp, Homo sapien
taaacgtgtcactgaatgtgtacac

SEQ ID NO: 54027 - DNA, 25 bp, Homo sapien
tgaaacgtactaatgatatcaaccg

SEQ ID NO: 54028 - DNA, 25 bp, Homo sapien
tgaaacgtactattgatatcaaccg

SEQ ID NO: 54029 - DNA, 25 bp, Homo sapien
agtgtgaaggtcgttaggaccaccc

SEQ ID NO: 54030 - DNA, 25 bp, Homo sapien
agtgtgaaggtccttaggaccaccc

SEQ ID NO: 54031 - DNA, 25 bp, Homo sapien
gttatttatgactaccggtccgccc

SEQ ID NO: 54032 - DNA, 25 bp, Homo sapien
gttatttatgacaaccggtccgccc

SEQ ID NO: 54033 - DNA, 25 bp, Homo sapien
ttcttggtgtgtaaaaagccctcct

SEQ ID NO: 54034 - DNA, 25 bp, Homo sapien
ttcttggtgtgttaaaagccctcct

SEQ ID NO: 54035 - DNA, 25 bp, Homo sapien
gtaggagtgtgaagaagaccccttt

SEQ ID NO: 54036 - DNA, 25 bp, Homo sapien
gtaggagtgtgatgaagaccccttt

SEQ ID NO: 54037 - DNA, 25 bp, Homo sapien
aggtcctggagtcacgttcccttct

SEQ ID NO: 54038 - DNA, 25 bp, Homo sapien
aggtcctggagtgacgttcccttct

SEQ ID NO: 54039 - DNA, 25 bp, Homo sapien
atgtacatgaaacgtaacttcctcg

SEQ ID NO: 54040 - DNA, 25 bp, Homo sapien
atgtacatgaaaggtaacttcctcg

SEQ ID NO: 54041 - DNA, 25 bp, Homo sapien
aagtgacgattataccgggaccatc

SEQ ID NO: 54042 - DNA, 25 bp, Homo sapien
aagtgacgattaaaccgggaccatc

SEQ ID NO: 54043 - DNA, 25 bp, Homo sapien
ggcaaaaagagagacggaggccaac

SEQ ID NO: 54044 - DNA, 25 bp, Homo sapien
ggcaaaaagagacacggaggccaac

SEQ ID NO: 54045 - DNA, 25 bp, Homo sapien
ggcgaacaggagaaacaagcccaag

SEQ ID NO: 54046 - DNA, 25 bp, Homo sapien
ggcgaacaggagtaacaagcccaag

SEQ ID NO: 54047 - DNA, 25 bp, Homo sapien
gtcaaagagaaaacgttaatccatt

SEQ ID NO: 54048 - DNA, 25 bp, Homo sapien
gtcaaagagaaatcgttaatccatt

SEQ ID NO: 54049 - DNA, 25 bp, Homo sapien
aaaagacgacaactctgaagtgaca

SEQ ID NO: 54050 - DNA, 25 bp, Homo sapien
aaaagacgacaagtctgaagtgaca

SEQ ID NO: 54051 - DNA, 25 bp, Homo sapien
aacccagacaagagtctttgagacc

SEQ ID NO: 54052 - DNA, 25 bp, Homo sapien
aacccagacaagtgtctttgagacc

SEQ ID NO: 54053 - DNA, 25 bp, Homo sapien
gcaagtaaagggttgttctcgtctc

SEQ ID NO: 54054 - DNA, 25 bp, Homo sapien
gcaagtaaagggatgttctcgtctc

SEQ ID NO: 54055 - DNA, 25 bp, Homo sapien
gaaacagtagatagaagttttccct

SEQ ID NO: 54056 - DNA, 25 bp, Homo sapien
gaaacagtagattgaagttttccct

SEQ ID NO: 54057 - DNA, 25 bp, Homo sapien
gacatgacgtctacgagtctttcaa

SEQ ID NO: 54058 - DNA, 25 bp, Homo sapien
gacatgacgtcttcgagtctttcaa

SEQ ID NO: 54059 - DNA, 25 bp, Homo sapien
ttcgaagctctttctgactccagac

SEQ ID NO: 54060 - DNA, 25 bp, Homo sapien
ttcgaagctcttactgactccagac

SEQ ID NO: 54061 - DNA, 25 bp, Homo sapien
gtttgagacttctttatcaatgtac

SEQ ID NO: 54062 - DNA, 25 bp, Homo sapien
gtttgagacttcattatcaatgtac

SEQ ID NO: 54063 - DNA, 25 bp, Homo sapien
gaggtgtgtctatattatccataac

SEQ ID NO: 54064 - DNA, 25 bp, Homo sapien
gaggtgtgtctaaattatccataac

SEQ ID NO: 54065 - DNA, 25 bp, Homo sapien
aagattctaagatttacctgttacg

SEQ ID NO: 54066 - DNA, 25 bp, Homo sapien
aagattctaagaattacctgttacg

SEQ ID NO: 54067 - DNA, 25 bp, Homo sapien
gaggtcatcagaaagtcccttgact

SEQ ID NO: 54068 - DNA, 25 bp, Homo sapien
gaggtcatcagatagtcccttgact

SEQ ID NO: 54069 - DNA, 25 bp, Homo sapien
atgtttctactgattttctcatgga

SEQ ID NO: 54070 - DNA, 25 bp, Homo sapien
atgtttctactgtttttctcatgga

SEQ ID NO: 54071 - DNA, 25 bp, Homo sapien
gttgtttgtttatttacttttttgt

SEQ ID NO: 54072 - DNA, 25 bp, Homo sapien
gttgtttgtttaattacttttttgt

SEQ ID NO: 54073 - DNA, 25 bp, Homo sapien
ggtatttagtcttcaaattccttgt

SEQ ID NO: 54074 - DNA, 25 bp, Homo sapien
ggtatttagtctacaaattccttgt

SEQ ID NO: 54075 - DNA, 25 bp, Homo sapien
tcggaagtcttaccaatggtattgt

SEQ ID NO: 54076 - DNA, 25 bp, Homo sapien
tcggaagtcttagcaatggtattgt

SEQ ID NO: 54077 - DNA, 25 bp, Homo sapien
tgctctgttttaccagaggacctcg

SEQ ID NO: 54078 - DNA, 25 bp, Homo sapien
tgctctgttttagcagaggacctcg

SEQ ID NO: 54079 - DNA, 25 bp, Homo sapien
cgtctttcgtgtcctgtgacgaggg

SEQ ID NO: 54080 - DNA, 25 bp, Homo sapien
cgtctttcgtgtgctgtgacgaggg

SEQ ID NO: 54081 - DNA, 25 bp, Homo sapien
cacgtatgtgtgttcttcataatgt

SEQ ID NO: 54082 - DNA, 25 bp, Homo sapien
cacgtatgtgtgatcttcataatgt

SEQ ID NO: 54083 - DNA, 25 bp, Homo sapien
gaccggtgtctacttgtcggaggag

SEQ ID NO: 54084 - DNA, 25 bp, Homo sapien
gaccggtgtctagttgtcggaggag

SEQ ID NO: 54085 - DNA, 25 bp, Homo sapien
tccgtggttatctctcgtctgtaag

SEQ ID NO: 54086 - DNA, 25 bp, Homo sapien
tccgtggttatcactcgtctgtaag

SEQ ID NO: 54087 - DNA, 25 bp, Homo sapien
gtccacactttgtgcgacgttctcg

SEQ ID NO: 54088 - DNA, 25 bp, Homo sapien
gtccacactttgagcgacgttctcg

SEQ ID NO: 54089 - DNA, 25 bp, Homo sapien
agtccctacctctggggtccgtccg

SEQ ID NO: 54090 - DNA, 25 bp, Homo sapien
agtccctacctcaggggtccgtccg

SEQ ID NO: 54091 - DNA, 25 bp, Homo sapien
ccttgtccttcttaaagagcacttg

SEQ ID NO: 54092 - DNA, 25 bp, Homo sapien
ccttgtccttctaaaagagcacttg

SEQ ID NO: 54093 - DNA, 25 bp, Homo sapien
tatgaccgactcaaaacaacctgag

SEQ ID NO: 54094 - DNA, 25 bp, Homo sapien
tatgaccgactctaaacaacctgag

SEQ ID NO: 54095 - DNA, 25 bp, Homo sapien
ctcctccgacttttgacgatgttcc

SEQ ID NO: 54096 - DNA, 25 bp, Homo sapien
ctcctccgacttatgacgatgttcc

SEQ ID NO: 54097 - DNA, 25 bp, Homo sapien
ttgtactgtacttcggggatctgaa

SEQ ID NO: 54098 - DNA, 25 bp, Homo sapien
ttgtactgtactacggggatctgaa

SEQ ID NO: 54099 - DNA, 25 bp, Homo sapien
aactgtcctccgacggggaaccgaa

SEQ ID NO: 54100 - DNA, 25 bp, Homo sapien
aactgtcctccgtcggggaaccgaa

SEQ ID NO: 54101 - DNA, 25 bp, Homo sapien
aggtctcaccagtcggggaatcaga

SEQ ID NO: 54102 - DNA, 25 bp, Homo sapien
aggtctcaccagacggggaatcaga

SEQ ID NO: 54103 - DNA, 25 bp, Homo sapien
ttgtcctggtcgtgggtagagctcc

SEQ ID NO: 54104 - DNA, 25 bp, Homo sapien
ttgtcctggtcgagggtagagctcc

SEQ ID NO: 54105 - DNA, 25 bp, Homo sapien
gcgcatttggtgcaggtaccgacac

SEQ ID NO: 54106 - DNA, 25 bp, Homo sapien
gcgcatttggtggaggtaccgacac

SEQ ID NO: 54107 - DNA, 25 bp, Homo sapien
acaacggggagtcacgggacacccg

SEQ ID NO: 54108 - DNA, 25 bp, Homo sapien
acaacggggagtgacgggacacccg

SEQ ID NO: 54109 - DNA, 25 bp, Homo sapien
gtttctgcgattttccggtcttccc

SEQ ID NO: 54110 - DNA, 25 bp, Homo sapien
gtttctgcgattatccggtcttccc

SEQ ID NO: 54111 - DNA, 25 bp, Homo sapien
gttcatccgatgtctcttctttaga

SEQ ID NO: 54112 - DNA, 25 bp, Homo sapien
gttcatccgatgactcttctttaga

SEQ ID NO: 54113 - DNA, 25 bp, Homo sapien
tccgtctgtatgtctatcctttaag

SEQ ID NO: 54114 - DNA, 25 bp, Homo sapien
tccgtctgtatgactatcctttaag

SEQ ID NO: 54115 - DNA, 25 bp, Homo sapien
ggtcgacttcacactcatccttgta

SEQ ID NO: 54116 - DNA, 25 bp, Homo sapien
ggtcgacttcactctcatccttgta

SEQ ID NO: 54117 - DNA, 25 bp, Homo sapien
ggtgtacctcacgtctcgattttta

SEQ ID NO: 54118 - DNA, 25 bp, Homo sapien
ggtgtacctcacctctcgattttta

SEQ ID NO: 54119 - DNA, 25 bp, Homo sapien
gccggtgtcccaactcctttttcgg

SEQ ID NO: 54120 - DNA, 25 bp, Homo sapien
gccggtgtcccatctcctttttcgg

SEQ ID NO: 54121 - DNA, 25 bp, Homo sapien
gatcccgttgtcatacatgtccgct

SEQ ID NO: 54122 - DNA, 25 bp, Homo sapien
gatcccgttgtcttacatgtccgct

SEQ ID NO: 54123 - DNA, 25 bp, Homo sapien
agtaatggtgtacataaggtccgtc

SEQ ID NO: 54124 - DNA, 25 bp, Homo sapien
agtaatggtgtagataaggtccgtc

SEQ ID NO: 54125 - DNA, 25 bp, Homo sapien
ccacccgtgttagattcggtgcgac

SEQ ID NO: 54126 - DNA, 25 bp, Homo sapien
ccacccgtgttacattcggtgcgac

SEQ ID NO: 54127 - DNA, 25 bp, Homo sapien
acctagagctctattttggtagttc

SEQ ID NO: 54128 - DNA, 25 bp, Homo sapien
acctagagctcttttttggtagttc

SEQ ID NO: 54129 - DNA, 25 bp, Homo sapien
tcaccgaacgggttcttttcggttc

SEQ ID NO: 54130 - DNA, 25 bp, Homo sapien
tcaccgaacgggatcttttcggttc

SEQ ID NO: 54131 - DNA, 25 bp, Homo sapien
caccacagtccgtcagaggttttac

SEQ ID NO: 54132 - DNA, 25 bp, Homo sapien
caccacagtccgacagaggttttac

SEQ ID NO: 54133 - DNA, 25 bp, Homo sapien
ctctatatctgtacggagatttttg

SEQ ID NO: 54134 - DNA, 25 bp, Homo sapien
ctctatatctgttcggagatttttg

SEQ ID NO: 54135 - DNA, 25 bp, Homo sapien
tcggatctttcgaaacttatctgtt

SEQ ID NO: 54136 - DNA, 25 bp, Homo sapien
tcggatctttcgtaacttatctgtt

SEQ ID NO: 54137 - DNA, 25 bp, Homo sapien
tccgagtcatctttggtcttctgtt

SEQ ID NO: 54138 - DNA, 25 bp, Homo sapien
tccgagtcatctatggtcttctgtt

SEQ ID NO: 54139 - DNA, 25 bp, Homo sapien
tccgggaccaacttagtgtaactta

SEQ ID NO: 54140 - DNA, 25 bp, Homo sapien
tccgggaccaacatagtgtaactta

SEQ ID NO: 54141 - DNA, 25 bp, Homo sapien
gtaccgtgaatttctgacgtttttt

SEQ ID NO: 54142 - DNA, 25 bp, Homo sapien
gtaccgtgaattactgacgtttttt

SEQ ID NO: 54143 - DNA, 25 bp, Homo sapien
actgaactttatgagtcttccacgt

SEQ ID NO: 54144 - DNA, 25 bp, Homo sapien
actgaactttatcagtcttccacgt

SEQ ID NO: 54145 - DNA, 25 bp, Homo sapien
cttaccttagttcactgtgaaacgt

SEQ ID NO: 54146 - DNA, 25 bp, Homo sapien
cttaccttagttgactgtgaaacgt

SEQ ID NO: 54147 - DNA, 25 bp, Homo sapien
ccaattacccatggtacgtgggacc

SEQ ID NO: 54148 - DNA, 25 bp, Homo sapien
ccaattacccatcgtacgtgggacc

SEQ ID NO: 54149 - DNA, 25 bp, Homo sapien
ccaactgaggcaaccctaggcgcgg

SEQ ID NO: 54150 - DNA, 25 bp, Homo sapien
ccaactgaggcatccctaggcgcgg

SEQ ID NO: 54151 - DNA, 25 bp, Homo sapien
ctcaggtcacgttgctagggacggt

SEQ ID NO: 54152 - DNA, 25 bp, Homo sapien
ctcaggtcacgtagctagggacggt

SEQ ID NO: 54153 - DNA, 25 bp, Homo sapien
gatctatcgaggaaccaacgccggt

SEQ ID NO: 54154 - DNA, 25 bp, Homo sapien
gatctatcgaggtaccaacgccggt

SEQ ID NO: 54155 - DNA, 25 bp, Homo sapien
ctctcgagtcggtttcgtctcaagt

SEQ ID NO: 54156 - DNA, 25 bp, Homo sapien
ctctcgagtcggattcgtctcaagt

SEQ ID NO: 54157 - DNA, 25 bp, Homo sapien
ccggtcgactcttatctaccctgtt

SEQ ID NO: 54158 - DNA, 25 bp, Homo sapien
ccggtcgactctaatctaccctgtt

SEQ ID NO: 54159 - DNA, 25 bp, Homo sapien
gtcggccgacaaccaccttaggtgt

SEQ ID NO: 54160 - DNA, 25 bp, Homo sapien
gtcggccgacaagcaccttaggtgt

SEQ ID NO: 54161 - DNA, 25 bp, Homo sapien
gtcggacctacaacccgtcttgtgg

SEQ ID NO: 54162 - DNA, 25 bp, Homo sapien
gtcggacctacatcccgtcttgtgg

SEQ ID NO: 54163 - DNA, 25 bp, Homo sapien
gagactgcgaccttctagaagagga

SEQ ID NO: 54164 - DNA, 25 bp, Homo sapien
gagactgcgaccatctagaagagga

SEQ ID NO: 54165 - DNA, 25 bp, Homo sapien
tcgggtggtcagactttatgacgga

SEQ ID NO: 54166 - DNA, 25 bp, Homo sapien
tcgggtggtcagtctttatgacgga

SEQ ID NO: 54167 - DNA, 25 bp, Homo sapien
tgggtggtctaaccttaccgggaga

SEQ ID NO: 54168 - DNA, 25 bp, Homo sapien
tgggtggtctaagcttaccgggaga

SEQ ID NO: 54169 - DNA, 25 bp, Homo sapien
ggtgttctactacgttaccctttac

SEQ ID NO: 54170 - DNA, 25 bp, Homo sapien
ggtgttctactaggttaccctttac

SEQ ID NO: 54171 - DNA, 25 bp, Homo sapien
taattgtacagtttcctagatgtac

SEQ ID NO: 54172 - DNA, 25 bp, Homo sapien
taattgtacagtatcctagatgtac

SEQ ID NO: 54173 - DNA, 25 bp, Homo sapien
taacctaagaggatgtcgtcttctt

SEQ ID NO: 54174 - DNA, 25 bp, Homo sapien
taacctaagaggttgtcgtcttctt

SEQ ID NO: 54175 - DNA, 25 bp, Homo sapien
catgaacctagaggttttctagtaa

SEQ ID NO: 54176 - DNA, 25 bp, Homo sapien
catgaacctagacgttttctagtaa

SEQ ID NO: 54177 - DNA, 25 bp, Homo sapien
acgtaacgacgatgtacttttgtaa

SEQ ID NO: 54178 - DNA, 25 bp, Homo sapien
acgtaacgacgaagtacttttgtaa

SEQ ID NO: 54179 - DNA, 25 bp, Homo sapien
accgtcatggataatctttttacga

SEQ ID NO: 54180 - DNA, 25 bp, Homo sapien
accgtcatggattatctttttacga

SEQ ID NO: 54181 - DNA, 25 bp, Homo sapien
ctcagacgcatattcggacctaaag

SEQ ID NO: 54182 - DNA, 25 bp, Homo sapien
ctcagacgcataatcggacctaaag

SEQ ID NO: 54183 - DNA, 25 bp, Homo sapien
ggacttagaatacctgtactctcgt

SEQ ID NO: 54184 - DNA, 25 bp, Homo sapien
ggacttagaatagctgtactctcgt

SEQ ID NO: 54185 - DNA, 25 bp, Homo sapien
tccgatcgcgaccagggtcagacgt

SEQ ID NO: 54186 - DNA, 25 bp, Homo sapien
tccgatcgcgacgagggtcagacgt

SEQ ID NO: 54187 - DNA, 25 bp, Homo sapien
caggtctgtatcaccgaaggattgt

SEQ ID NO: 54188 - DNA, 25 bp, Homo sapien
caggtctgtatctccgaaggattgt

SEQ ID NO: 54189 - DNA, 25 bp, Homo sapien
tactatactttccagtaggactgtg

SEQ ID NO: 54190 - DNA, 25 bp, Homo sapien
tactatactttcgagtaggactgtg

SEQ ID NO: 54191 - DNA, 25 bp, Homo sapien
ttactaactctttcgtgaggaattt

SEQ ID NO: 54192 - DNA, 25 bp, Homo sapien
ttactaactcttacgtgaggaattt

SEQ ID NO: 54193 - DNA, 25 bp, Homo sapien
ttcaattaccggtagagaaacttct

SEQ ID NO: 54194 - DNA, 25 bp, Homo sapien
ttcaattaccggaagagaaacttct

SEQ ID NO: 54195 - DNA, 25 bp, Homo sapien
ttaattcagtgtacacgatgtattc

SEQ ID NO: 54196 - DNA, 25 bp, Homo sapien
ttaattcagtgttcacgatgtattc

SEQ ID NO: 54197 - DNA, 25 bp, Homo sapien
cgttgtaagtcgttgaggtctggtc

SEQ ID NO: 54198 - DNA, 25 bp, Homo sapien
cgttgtaagtcgatgaggtctggtc

SEQ ID NO: 54199 - DNA, 25 bp, Homo sapien
tggatgtcgaaggaacaaactgatc

SEQ ID NO: 54200 - DNA, 25 bp, Homo sapien
tggatgtcgaagcaacaaactgatc

SEQ ID NO: 54201 - DNA, 25 bp, Homo sapien
gtaatatgtaagtaatcccctgatc

SEQ ID NO: 54202 - DNA, 25 bp, Homo sapien
gtaatatgtaagaaatcccctgatc

SEQ ID NO: 54203 - DNA, 25 bp, Homo sapien
gtcagtattattctctctgtcgctt

SEQ ID NO: 54204 - DNA, 25 bp, Homo sapien
gtcagtattattgtctctgtcgctt

SEQ ID NO: 54205 - DNA, 25 bp, Homo sapien
ttgtcacatttggtcgtcatatttg

SEQ ID NO: 54206 - DNA, 25 bp, Homo sapien
ttgtcacatttgctcgtcatatttg

SEQ ID NO: 54207 - DNA, 25 bp, Homo sapien
ttgtggtttgcgaacctatcgttgt

SEQ ID NO: 54208 - DNA, 25 bp, Homo sapien
ttgtggtttgcgtacctatcgttgt

SEQ ID NO: 54209 - DNA, 25 bp, Homo sapien
aacaaaggttttgttcctttcgtac

SEQ ID NO: 54210 - DNA, 25 bp, Homo sapien
aacaaaggttttcttcctttcgtac

SEQ ID NO: 54211 - DNA, 25 bp, Homo sapien
gaagtctgtccattatcctatgatc

SEQ ID NO: 54212 - DNA, 25 bp, Homo sapien
gaagtctgtccaatatcctatgatc

SEQ ID NO: 54213 - DNA, 25 bp, Homo sapien
gaaatccacgatttcccgttgatct

SEQ ID NO: 54214 - DNA, 25 bp, Homo sapien
gaaatccacgatatcccgttgatct

SEQ ID NO: 54215 - DNA, 25 bp, Homo sapien
gaatccggatcgtctcttagtggtt

SEQ ID NO: 54216 - DNA, 25 bp, Homo sapien
gaatccggatcgactcttagtggtt

SEQ ID NO: 54217 - DNA, 25 bp, Homo sapien
tcgtgtgtcataccatgtgtagtgt

SEQ ID NO: 54218 - DNA, 25 bp, Homo sapien
tcgtgtgtcatagcatgtgtagtgt

SEQ ID NO: 54219 - DNA, 25 bp, Homo sapien
tggtcgtcttcgacgtcaggtgtgc

SEQ ID NO: 54220 - DNA, 25 bp, Homo sapien
tggtcgtcttcgtcgtcaggtgtgc

SEQ ID NO: 54221 - DNA, 25 bp, Homo sapien
cgtatatggttcagtctcctttgtt

SEQ ID NO: 54222 - DNA, 25 bp, Homo sapien
cgtatatggttctgtctcctttgtt

SEQ ID NO: 54223 - DNA, 25 bp, Homo sapien
taattgtggttctgtccctgtctga

SEQ ID NO: 54224 - DNA, 25 bp, Homo sapien
taattgtggttcagtccctgtctga

SEQ ID NO: 54225 - DNA, 25 bp, Homo sapien
tatctgggtcagtactcgtgttctg

SEQ ID NO: 54226 - DNA, 25 bp, Homo sapien
tatctgggtcagaactcgtgttctg

SEQ ID NO: 54227 - DNA, 25 bp, Homo sapien
ctgtgttccggctattgtttctccg

SEQ ID NO: 54228 - DNA, 25 bp, Homo sapien
ctgtgttccggcaattgtttctccg

SEQ ID NO: 54229 - DNA, 25 bp, Homo sapien
cgtagaggccccaacttgtttgcct

SEQ ID NO: 54230 - DNA, 25 bp, Homo sapien
cgtagaggcccctacttgtttgcct

SEQ ID NO: 54231 - DNA, 25 bp, Homo sapien
gggtccctttctttcgacgcgtgcc

SEQ ID NO: 54232 - DNA, 25 bp, Homo sapien
gggtccctttctatcgacgcgtgcc

SEQ ID NO: 54233 - DNA, 25 bp, Homo sapien
ggtgtctccatttcaacacggtaaa

SEQ ID NO: 54234 - DNA, 25 bp, Homo sapien
ggtgtctccattacaacacggtaaa

SEQ ID NO: 54235 - DNA, 25 bp, Homo sapien
ttgtgacaggtcacaaagaccagcc

SEQ ID NO: 54236 - DNA, 25 bp, Homo sapien
ttgtgacaggtctcaaagaccagcc

SEQ ID NO: 54237 - DNA, 25 bp, Homo sapien
gacatatctggtgtcaataaccccc

SEQ ID NO: 54238 - DNA, 25 bp, Homo sapien
gacatatctggtctcaataaccccc

SEQ ID NO: 54239 - DNA, 25 bp, Homo sapien
ttatagtcagggtagttattccccc

SEQ ID NO: 54240 - DNA, 25 bp, Homo sapien
ttatagtcagggaagttattccccc

SEQ ID NO: 54241 - DNA, 25 bp, Homo sapien
taagtcccggactctttcccgacag

SEQ ID NO: 54242 - DNA, 25 bp, Homo sapien
taagtcccggacactttcccgacag

SEQ ID NO: 54243 - DNA, 25 bp, Homo sapien
gtttctccggtaagttttcttccct

SEQ ID NO: 54244 - DNA, 25 bp, Homo sapien
gtttctccggtatgttttcttccct

SEQ ID NO: 54245 - DNA, 25 bp, Homo sapien
gttatcgaagtgtcaaattgactcc

SEQ ID NO: 54246 - DNA, 25 bp, Homo sapien
gttatcgaagtgacaaattgactcc

SEQ ID NO: 54247 - DNA, 25 bp, Homo sapien
tttcgaatcttacgaacttaggtaa

SEQ ID NO: 54248 - DNA, 25 bp, Homo sapien
tttcgaatcttaggaacttaggtaa

SEQ ID NO: 54249 - DNA, 25 bp, Homo sapien
ttccaattaggtgacgaagtcgaac

SEQ ID NO: 54250 - DNA, 25 bp, Homo sapien
ttccaattaggtcacgaagtcgaac

SEQ ID NO: 54251 - DNA, 25 bp, Homo sapien
ccttagctctctcgtttacgtcgct

SEQ ID NO: 54252 - DNA, 25 bp, Homo sapien
ccttagctctctggtttacgtcgct

SEQ ID NO: 54253 - DNA, 25 bp, Homo sapien
ccctacaccggattcttcgtagact

SEQ ID NO: 54254 - DNA, 25 bp, Homo sapien
ccctacaccggaatcttcgtagact

SEQ ID NO: 54255 - DNA, 25 bp, Homo sapien
cattcgacggagacgcaccgtaggt

SEQ ID NO: 54256 - DNA, 25 bp, Homo sapien
cattcgacggagtcgcaccgtaggt

SEQ ID NO: 54257 - DNA, 25 bp, Homo sapien
cccatagaccgaagggaccctcgag

SEQ ID NO: 54258 - DNA, 25 bp, Homo sapien
cccatagaccgatgggaccctcgag

SEQ ID NO: 54259 - DNA, 25 bp, Homo sapien
actccaaggactcattgttccccag

SEQ ID NO: 54260 - DNA, 25 bp, Homo sapien
actccaaggactgattgttccccag

SEQ ID NO: 54261 - DNA, 25 bp, Homo sapien
atacaggatgtactgggtgcacacg

SEQ ID NO: 54262 - DNA, 25 bp, Homo sapien
atacaggatgtagtgggtgcacacg

SEQ ID NO: 54263 - DNA, 25 bp, Homo sapien
tttacgcgtttgttgttcgtcactg

SEQ ID NO: 54264 - DNA, 25 bp, Homo sapien
tttacgcgtttgatgttcgtcactg

SEQ ID NO: 54265 - DNA, 25 bp, Homo sapien
atctttatgtttgtagttacgtcca

SEQ ID NO: 54266 - DNA, 25 bp, Homo sapien
atctttatgtttctagttacgtcca

SEQ ID NO: 54267 - DNA, 25 bp, Homo sapien
gtcacggtactttcctagtctcttc

SEQ ID NO: 54268 - DNA, 25 bp, Homo sapien
gtcacggtacttacctagtctcttc

SEQ ID NO: 54269 - DNA, 25 bp, Homo sapien
gtataatcgcctgactaagtcttta

SEQ ID NO: 54270 - DNA, 25 bp, Homo sapien
gtataatcgcctcactaagtcttta

SEQ ID NO: 54271 - DNA, 25 bp, Homo sapien
tgtcaagtgccgagtatacgtttca

SEQ ID NO: 54272 - DNA, 25 bp, Homo sapien
tgtcaagtgccgtgtatacgtttca

SEQ ID NO: 54273 - DNA, 25 bp, Homo sapien
gtgcaagttggagagatgtcgtcac

SEQ ID NO: 54274 - DNA, 25 bp, Homo sapien
gtgcaagttggacagatgtcgtcac

SEQ ID NO: 54275 - DNA, 25 bp, Homo sapien
gaagaagtaggtctacgactgaaac

SEQ ID NO: 54276 - DNA, 25 bp, Homo sapien
gaagaagtaggtgtacgactgaaac

SEQ ID NO: 54277 - DNA, 25 bp, Homo sapien
gacaaattgtctacgctagaaacac

SEQ ID NO: 54278 - DNA, 25 bp, Homo sapien
gacaaattgtcttcgctagaaacac

SEQ ID NO: 54279 - DNA, 25 bp, Homo sapien
gggaagtactttcttctacggccgc

SEQ ID NO: 54280 - DNA, 25 bp, Homo sapien
gggaagtactttgttctacggccgc

SEQ ID NO: 54281 - DNA, 25 bp, Homo sapien
gggcaaaactgttaactttacagta

SEQ ID NO: 54282 - DNA, 25 bp, Homo sapien
gggcaaaactgtaaactttacagta

SEQ ID NO: 54283 - DNA, 25 bp, Homo sapien
gagcaagaacgagtcgaaggccagc

SEQ ID NO: 54284 - DNA, 25 bp, Homo sapien
gagcaagaacgactcgaaggccagc

SEQ ID NO: 54285 - DNA, 25 bp, Homo sapien
cagcttgaagagacggaggttcaat

SEQ ID NO: 54286 - DNA, 25 bp, Homo sapien
cagcttgaagagtcggaggttcaat

SEQ ID NO: 54287 - DNA, 25 bp, Homo sapien
ctttgaaccatcgttacgttaacag

SEQ ID NO: 54288 - DNA, 25 bp, Homo sapien
ctttgaaccatccttacgttaacag

SEQ ID NO: 54289 - DNA, 25 bp, Homo sapien
tttggacttccgtccgttacgtaat

SEQ ID NO: 54290 - DNA, 25 bp, Homo sapien
tttggacttccgaccgttacgtaat

SEQ ID NO: 54291 - DNA, 25 bp, Homo sapien
tatccgggccggacctagtctctct

SEQ ID NO: 54292 - DNA, 25 bp, Homo sapien
tatccgggccggtcctagtctctct

SEQ ID NO: 54293 - DNA, 25 bp, Homo sapien
gtaagacctttctcagtacgtcttt

SEQ ID NO: 54294 - DNA, 25 bp, Homo sapien
gtaagacctttcacagtacgtcttt

SEQ ID NO: 54295 - DNA, 25 bp, Homo sapien
agaggaatgtctgtccaccggccgg

SEQ ID NO: 54296 - DNA, 25 bp, Homo sapien
agaggaatgtctctccaccggccgg

SEQ ID NO: 54297 - DNA, 25 bp, Homo sapien
ataacgtatactcctccggccgtac

SEQ ID NO: 54298 - DNA, 25 bp, Homo sapien
ataacgtatactgctccggccgtac

SEQ ID NO: 54299 - DNA, 25 bp, Homo sapien
cggaaaaatctgtactctctccgac

SEQ ID NO: 54300 - DNA, 25 bp, Homo sapien
cggaaaaatctgaactctctccgac

SEQ ID NO: 54301 - DNA, 25 bp, Homo sapien
gtccctgaaagtggagacgaccaaa

SEQ ID NO: 54302 - DNA, 25 bp, Homo sapien
gtccctgaaagtcgagacgaccaaa

SEQ ID NO: 54303 - DNA, 25 bp, Homo sapien
ctcaaagactgaggagcgagtgaaa

SEQ ID NO: 54304 - DNA, 25 bp, Homo sapien
ctcaaagactgacgagcgagtgaaa

SEQ ID NO: 54305 - DNA, 25 bp, Homo sapien
acgaatttcgattgatcagggcact

SEQ ID NO: 54306 - DNA, 25 bp, Homo sapien
acgaatttcgatagatcagggcact

SEQ ID NO: 54307 - DNA, 25 bp, Homo sapien
tttatcgatcggatacatgtcgttc

SEQ ID NO: 54308 - DNA, 25 bp, Homo sapien
tttatcgatcggttacatgtcgttc

SEQ ID NO: 54309 - DNA, 25 bp, Homo sapien
tcttccgtatgtcataacttgtcac

SEQ ID NO: 54310 - DNA, 25 bp, Homo sapien
tcttccgtatgtgataacttgtcac

SEQ ID NO: 54311 - DNA, 25 bp, Homo sapien
gaacgtcttactgtccgttttccct

SEQ ID NO: 54312 - DNA, 25 bp, Homo sapien
gaacgtcttactctccgttttccct

SEQ ID NO: 54313 - DNA, 25 bp, Homo sapien
cttgttctccacgtgtttcttcgtc

SEQ ID NO: 54314 - DNA, 25 bp, Homo sapien
cttgttctccacctgtttcttcgtc

SEQ ID NO: 54315 - DNA, 25 bp, Homo sapien
gtttacacacacttgtttcgtcagc

SEQ ID NO: 54316 - DNA, 25 bp, Homo sapien
gtttacacacacatgtttcgtcagc

SEQ ID NO: 54317 - DNA, 25 bp, Homo sapien
ctcgtgttcgaacctgaggttccac

SEQ ID NO: 54318 - DNA, 25 bp, Homo sapien
ctcgtgttcgaagctgaggttccac

SEQ ID NO: 54319 - DNA, 25 bp, Homo sapien
cgtaggttcaggtgtaggtctgacc

SEQ ID NO: 54320 - DNA, 25 bp, Homo sapien
cgtaggttcaggagtaggtctgacc

SEQ ID NO: 54321 - DNA, 25 bp, Homo sapien
accgggttcagaggtccgagcccct

SEQ ID NO: 54322 - DNA, 25 bp, Homo sapien
accgggttcagacgtccgagcccct

SEQ ID NO: 54323 - DNA, 25 bp, Homo sapien
gtcggtggccggagaccctgactct

SEQ ID NO: 54324 - DNA, 25 bp, Homo sapien
gtcggtggccggtgaccctgactct

SEQ ID NO: 54325 - DNA, 25 bp, Homo sapien
gtcgaaggaactcaccgctctagac

SEQ ID NO: 54326 - DNA, 25 bp, Homo sapien
gtcgaaggaactgaccgctctagac

SEQ ID NO: 54327 - DNA, 25 bp, Homo sapien
agacgagggacatgaccacctacag

SEQ ID NO: 54328 - DNA, 25 bp, Homo sapien
agacgagggacaagaccacctacag

SEQ ID NO: 54329 - DNA, 25 bp, Homo sapien
acaacgaagttgagacgggcagaga

SEQ ID NO: 54330 - DNA, 25 bp, Homo sapien
acaacgaagttgtgacgggcagaga

SEQ ID NO: 54331 - DNA, 25 bp, Homo sapien
aaatagtgcctgttgcacgggggta

SEQ ID NO: 54332 - DNA, 25 bp, Homo sapien
aaatagtgcctgatgcacgggggta

SEQ ID NO: 54333 - DNA, 25 bp, Homo sapien
aaatttttgcatcaccggtcactgt

SEQ ID NO: 54334 - DNA, 25 bp, Homo sapien
aaatttttgcatgaccggtcactgt

SEQ ID NO: 54335 - DNA, 25 bp, Homo sapien
ctactccgtgtccagtccggatcga

SEQ ID NO: 54336 - DNA, 25 bp, Homo sapien
ctactccgtgtcgagtccggatcga

SEQ ID NO: 54337 - DNA, 25 bp, Homo sapien
ttgcacgtagtctacgaagtggtcc

SEQ ID NO: 54338 - DNA, 25 bp, Homo sapien
ttgcacgtagtcaacgaagtggtcc

SEQ ID NO: 54339 - DNA, 25 bp, Homo sapien
acgtcacgagtggtgcttcgggtcc

SEQ ID NO: 54340 - DNA, 25 bp, Homo sapien
acgtcacgagtgctgcttcgggtcc

SEQ ID NO: 54341 - DNA, 25 bp, Homo sapien
tacaccaggtagtggtaacgttgca

SEQ ID NO: 54342 - DNA, 25 bp, Homo sapien
tacaccaggtagaggtaacgttgca

SEQ ID NO: 54343 - DNA, 25 bp, Homo sapien
aaaaaccactcgaagacccaggaca

SEQ ID NO: 54344 - DNA, 25 bp, Homo sapien
aaaaaccactcgtagacccaggaca

SEQ ID NO: 54345 - DNA, 25 bp, Homo sapien
caaccgtgttagaccgagacgacta

SEQ ID NO: 54346 - DNA, 25 bp, Homo sapien
caaccgtgttagtccgagacgacta

SEQ ID NO: 54347 - DNA, 25 bp, Homo sapien
cgaaccgtagggtcggtcgactcat

SEQ ID NO: 54348 - DNA, 25 bp, Homo sapien
cgaaccgtagggacggtcgactcat

SEQ ID NO: 54349 - DNA, 25 bp, Homo sapien
ttgtagaaaccgaagggacgatcta

SEQ ID NO: 54350 - DNA, 25 bp, Homo sapien
ttgtagaaaccgtagggacgatcta

SEQ ID NO: 54351 - DNA, 25 bp, Homo sapien
ctgagactgctgctgcggtagccac

SEQ ID NO: 54352 - DNA, 25 bp, Homo sapien
ctgagactgctggtgcggtagccac

SEQ ID NO: 54353 - DNA, 25 bp, Homo sapien
gggcactcgtctatgaggtgccgag

SEQ ID NO: 54354 - DNA, 25 bp, Homo sapien
gggcactcgtctttgaggtgccgag

SEQ ID NO: 54355 - DNA, 25 bp, Homo sapien
catagggttcgtttagggatttacc

SEQ ID NO: 54356 - DNA, 25 bp, Homo sapien
catagggttcgtatagggatttacc

SEQ ID NO: 54357 - DNA, 25 bp, Homo sapien
tatacagggctgagggtgcccacgt

SEQ ID NO: 54358 - DNA, 25 bp, Homo sapien
tatacagggctgtgggtgcccacgt

SEQ ID NO: 54359 - DNA, 25 bp, Homo sapien
aaacggtttagatgggttccggact

SEQ ID NO: 54360 - DNA, 25 bp, Homo sapien
aaacggtttagaagggttccggact

SEQ ID NO: 54361 - DNA, 25 bp, Homo sapien
aggacgaccattagtgtcaaggccg

SEQ ID NO: 54362 - DNA, 25 bp, Homo sapien
aggacgaccatttgtgtcaaggccg

SEQ ID NO: 54363 - DNA, 25 bp, Homo sapien
agaaccctctgtgtgcctagagcgc

SEQ ID NO: 54364 - DNA, 25 bp, Homo sapien
agaaccctctgtctgcctagagcgc

SEQ ID NO: 54365 - DNA, 25 bp, Homo sapien
tactcccctgttccacgtctgggtg

SEQ ID NO: 54366 - DNA, 25 bp, Homo sapien
tactcccctgttgcacgtctgggtg

SEQ ID NO: 54367 - DNA, 25 bp, Homo sapien
aggacccccgtgtgcatcgggttcg

SEQ ID NO: 54368 - DNA, 25 bp, Homo sapien
aggacccccgtgagcatcgggttcg

SEQ ID NO: 54369 - DNA, 25 bp, Homo sapien
tagcccccggaacaccgagtcgggt

SEQ ID NO: 54370 - DNA, 25 bp, Homo sapien
tagcccccggaagaccgagtcgggt

SEQ ID NO: 54371 - DNA, 25 bp, Homo sapien
aaggacctacacaccctggtcgggt

SEQ ID NO: 54372 - DNA, 25 bp, Homo sapien
aaggacctacactccctggtcgggt

SEQ ID NO: 54373 - DNA, 25 bp, Homo sapien
acttagacgacctaaccagaggggt

SEQ ID NO: 54374 - DNA, 25 bp, Homo sapien
acttagacgaccaaaccagaggggt

SEQ ID NO: 54375 - DNA, 25 bp, Homo sapien
tcctccgaaaccacacgtcgggtgt

SEQ ID NO: 54376 - DNA, 25 bp, Homo sapien
tcctccgaaacctcacgtcgggtgt

SEQ ID NO: 54377 - DNA, 25 bp, Homo sapien
gtcataaactcttcacggtagtggt

SEQ ID NO: 54378 - DNA, 25 bp, Homo sapien
gtcataaactctacacggtagtggt

SEQ ID NO: 54379 - DNA, 25 bp, Homo sapien
cctctgtcgtttcctcgagggtcct

SEQ ID NO: 54380 - DNA, 25 bp, Homo sapien
cctctgtcgtttgctcgagggtcct

SEQ ID NO: 54381 - DNA, 25 bp, Homo sapien
cgtctctttctcgtctgggacacgg

SEQ ID NO: 54382 - DNA, 25 bp, Homo sapien
cgtctctttctcctctgggacacgg

SEQ ID NO: 54383 - DNA, 25 bp, Homo sapien
gtctgagttcgtctgacgaacagtg

SEQ ID NO: 54384 - DNA, 25 bp, Homo sapien
gtctgagttcgtgtgacgaacagtg

SEQ ID NO: 54385 - DNA, 25 bp, Homo sapien
acgagtgtgactctggtcaggtcaa

SEQ ID NO: 54386 - DNA, 25 bp, Homo sapien
acgagtgtgactgtggtcaggtcaa

SEQ ID NO: 54387 - DNA, 25 bp, Homo sapien
catggaacgtcctacgagtagtcaa

SEQ ID NO: 54388 - DNA, 25 bp, Homo sapien
catggaacgtccaacgagtagtcaa

SEQ ID NO: 54389 - DNA, 25 bp, Homo sapien
cagacaaaagacaacgatatttcca

SEQ ID NO: 54390 - DNA, 25 bp, Homo sapien
cagacaaaagactacgatatttcca

SEQ ID NO: 54391 - DNA, 25 bp, Homo sapien
cactagcaatcctgagggtatatta

SEQ ID NO: 54392 - DNA, 25 bp, Homo sapien
cactagcaatccagagggtatatta

SEQ ID NO: 54393 - DNA, 25 bp, Homo sapien
gagtggtttctccggagctatttat

SEQ ID NO: 54394 - DNA, 25 bp, Homo sapien
gagtggtttctcgggagctatttat

SEQ ID NO: 54395 - DNA, 25 bp, Homo sapien
gagttggagctcctgtggcttgttc

SEQ ID NO: 54396 - DNA, 25 bp, Homo sapien
gagttggagctcgtgtggcttgttc

SEQ ID NO: 54397 - DNA, 25 bp, Homo sapien
gagagatacagtttgaccgaagtcg

SEQ ID NO: 54398 - DNA, 25 bp, Homo sapien
gagagatacagtatgaccgaagtcg

SEQ ID NO: 54399 - DNA, 25 bp, Homo sapien
cagtaggaatattaagaccgcaacg

SEQ ID NO: 54400 - DNA, 25 bp, Homo sapien
cagtaggaatataaagaccgcaacg

SEQ ID NO: 54401 - DNA, 25 bp, Homo sapien
gaagagtcgccgtcagcctcgactg

SEQ ID NO: 54402 - DNA, 25 bp, Homo sapien
gaagagtcgccgacagcctcgactg

SEQ ID NO: 54403 - DNA, 25 bp, Homo sapien
gtcgcactacccgacttatactaca

SEQ ID NO: 54404 - DNA, 25 bp, Homo sapien
gtcgcactaccccacttatactaca

SEQ ID NO: 54405 - DNA, 25 bp, Homo sapien
ctactttagcttgtcagcgacttgc

SEQ ID NO: 54406 - DNA, 25 bp, Homo sapien
ctactttagcttctcagcgacttgc

SEQ ID NO: 54407 - DNA, 25 bp, Homo sapien
ggttttaccctatattttcagtaga

SEQ ID NO: 54408 - DNA, 25 bp, Homo sapien
ggttttaccctaaattttcagtaga

SEQ ID NO: 54409 - DNA, 25 bp, Homo sapien
gtagtccgtgtataacttctcctaa

SEQ ID NO: 54410 - DNA, 25 bp, Homo sapien
gtagtccgtgtaaaacttctcctaa

SEQ ID NO: 54411 - DNA, 25 bp, Homo sapien
ggcgctataacaactatcttctctg

SEQ ID NO: 54412 - DNA, 25 bp, Homo sapien
ggcgctataacatctatcttctctg

SEQ ID NO: 54413 - DNA, 25 bp, Homo sapien
gccgctcctttatgtcgtcttataa

SEQ ID NO: 54414 - DNA, 25 bp, Homo sapien
gccgctcctttaagtcgtcttataa

SEQ ID NO: 54415 - DNA, 25 bp, Homo sapien
actagctactttgctttcgttgtaa

SEQ ID NO: 54416 - DNA, 25 bp, Homo sapien
actagctactttcctttcgttgtaa

SEQ ID NO: 54417 - DNA, 25 bp, Homo sapien
gaagtcgtcttatacagttacttgg

SEQ ID NO: 54418 - DNA, 25 bp, Homo sapien
gaagtcgtcttaaacagttacttgg

SEQ ID NO: 54419 - DNA, 25 bp, Homo sapien
gaaacagtcttatacagtcttttgt

SEQ ID NO: 54420 - DNA, 25 bp, Homo sapien
gaaacagtcttaaacagtcttttgt

SEQ ID NO: 54421 - DNA, 25 bp, Homo sapien
accgaaggtatttcgagctcatctt

SEQ ID NO: 54422 - DNA, 25 bp, Homo sapien
accgaaggtattacgagctcatctt

SEQ ID NO: 54423 - DNA, 25 bp, Homo sapien
aagaaggtactctcggtctctccac

SEQ ID NO: 54424 - DNA, 25 bp, Homo sapien
aagaaggtactcacggtctctccac

SEQ ID NO: 54425 - DNA, 25 bp, Homo sapien
taggtcactgaaaccggttgtgcat

SEQ ID NO: 54426 - DNA, 25 bp, Homo sapien
taggtcactgaatccggttgtgcat

SEQ ID NO: 54427 - DNA, 25 bp, Homo sapien
tcatattccgaaacccctggttcgt

SEQ ID NO: 54428 - DNA, 25 bp, Homo sapien
tcatattccgaatcccctggttcgt

SEQ ID NO: 54429 - DNA, 25 bp, Homo sapien
atgtctgcacaccagtacctggacc

SEQ ID NO: 54430 - DNA, 25 bp, Homo sapien
atgtctgcacacgagtacctggacc

SEQ ID NO: 54431 - DNA, 25 bp, Homo sapien
aaagaggatggagacacgtgtgacc

SEQ ID NO: 54432 - DNA, 25 bp, Homo sapien
aaagaggatggacacacgtgtgacc

SEQ ID NO: 54433 - DNA, 25 bp, Homo sapien
ataaagttaggacaccgtgtgtgac

SEQ ID NO: 54434 - DNA, 25 bp, Homo sapien
ataaagttaggagaccgtgtgtgac

SEQ ID NO: 54435 - DNA, 25 bp, Homo sapien
tacgatactggtcaccacgttttaa

SEQ ID NO: 54436 - DNA, 25 bp, Homo sapien
tacgatactggtgaccacgttttaa

SEQ ID NO: 54437 - DNA, 25 bp, Homo sapien
ggacgtctctgtgatcacgtttccc

SEQ ID NO: 54438 - DNA, 25 bp, Homo sapien
ggacgtctctgtcatcacgtttccc

SEQ ID NO: 54439 - DNA, 25 bp, Homo sapien
gggtctatcgtcactcttaccccgt

SEQ ID NO: 54440 - DNA, 25 bp, Homo sapien
gggtctatcgtctctcttaccccgt

SEQ ID NO: 54441 - DNA, 25 bp, Homo sapien
agaagggtcaagtagactttcctcc

SEQ ID NO: 54442 - DNA, 25 bp, Homo sapien
agaagggtcaagaagactttcctcc

SEQ ID NO: 54443 - DNA, 25 bp, Homo sapien
ggtaaggtgaaaacctgtttccccg

SEQ ID NO: 54444 - DNA, 25 bp, Homo sapien
ggtaaggtgaaatcctgtttccccg

SEQ ID NO: 54445 - DNA, 25 bp, Homo sapien
gtctcgaggaaagtccagagcctcc

SEQ ID NO: 54446 - DNA, 25 bp, Homo sapien
gtctcgaggaaactccagagcctcc

SEQ ID NO: 54447 - DNA, 25 bp, Homo sapien
tcgcagagataaaccagagcctccg

SEQ ID NO: 54448 - DNA, 25 bp, Homo sapien
tcgcagagataatccagagcctccg

SEQ ID NO: 54449 - DNA, 25 bp, Homo sapien
atgcagagactctccggagcccacg

SEQ ID NO: 54450 - DNA, 25 bp, Homo sapien
atgcagagactcaccggagcccacg

SEQ ID NO: 54451 - DNA, 25 bp, Homo sapien
aggaggcgtttacctgactctgccg

SEQ ID NO: 54452 - DNA, 25 bp, Homo sapien
aggaggcgtttagctgactctgccg

SEQ ID NO: 54453 - DNA, 25 bp, Homo sapien
ggtgtgtctgtttacctgacgtccc

SEQ ID NO: 54454 - DNA, 25 bp, Homo sapien
ggtgtgtctgttaacctgacgtccc

SEQ ID NO: 54455 - DNA, 25 bp, Homo sapien
acgggagagacctacggtaaccaac

SEQ ID NO: 54456 - DNA, 25 bp, Homo sapien
acgggagagaccaacggtaaccaac

SEQ ID NO: 54457 - DNA, 25 bp, Homo sapien
acagtgcgtctctccagtgacaata

SEQ ID NO: 54458 - DNA, 25 bp, Homo sapien
acagtgcgtctcaccagtgacaata

SEQ ID NO: 54459 - DNA, 25 bp, Homo sapien
cctatgttcttgaacgtttacagaa

SEQ ID NO: 54460 - DNA, 25 bp, Homo sapien
cctatgttcttgtacgtttacagaa

SEQ ID NO: 54461 - DNA, 25 bp, Homo sapien
cgacttctcttcgtgttttccaaag

SEQ ID NO: 54462 - DNA, 25 bp, Homo sapien
cgacttctcttcctgttttccaaag

SEQ ID NO: 54463 - DNA, 25 bp, Homo sapien
cggggtcattgtcaccgtcgacttc

SEQ ID NO: 54464 - DNA, 25 bp, Homo sapien
cggggtcattgtgaccgtcgacttc

SEQ ID NO: 54465 - DNA, 25 bp, Homo sapien
tcgggacgtcggtccacatcgaacc

SEQ ID NO: 54466 - DNA, 25 bp, Homo sapien
tcgggacgtcggaccacatcgaacc

SEQ ID NO: 54467 - DNA, 25 bp, Homo sapien
tcctgatccacagttatgacgacct

SEQ ID NO: 54468 - DNA, 25 bp, Homo sapien
tcctgatccacacttatgacgacct

SEQ ID NO: 54469 - DNA, 25 bp, Homo sapien
ttcgacggtcgctatcctccagaac

SEQ ID NO: 54470 - DNA, 25 bp, Homo sapien
ttcgacggtcgcaatcctccagaac

SEQ ID NO: 54471 - DNA, 25 bp, Homo sapien
cttggtcgccctctcggtatagacg

SEQ ID NO: 54472 - DNA, 25 bp, Homo sapien
cttggtcgccctgtcggtatagacg

SEQ ID NO: 54473 - DNA, 25 bp, Homo sapien
ggcctagggattctgacattgtaga

SEQ ID NO: 54474 - DNA, 25 bp, Homo sapien
ggcctagggattgtgacattgtaga

SEQ ID NO: 54475 - DNA, 25 bp, Homo sapien
ccgaggagattatatacatttatac

SEQ ID NO: 54476 - DNA, 25 bp, Homo sapien
ccgaggagattaaatacatttatac

SEQ ID NO: 54477 - DNA, 25 bp, Homo sapien
atgggaacactttatctttaagtac

SEQ ID NO: 54478 - DNA, 25 bp, Homo sapien
atgggaacacttaatctttaagtac

SEQ ID NO: 54479 - DNA, 25 bp, Homo sapien
ggggacacgaacataaccttcgata

SEQ ID NO: 54480 - DNA, 25 bp, Homo sapien
ggggacacgaacttaaccttcgata

SEQ ID NO: 54481 - DNA, 25 bp, Homo sapien
gtcgggccgagatcttccgtgacaa

SEQ ID NO: 54482 - DNA, 25 bp, Homo sapien
gtcgggccgagaacttccgtgacaa

SEQ ID NO: 54483 - DNA, 25 bp, Homo sapien
gggagactcgagactctaccccaac

SEQ ID NO: 54484 - DNA, 25 bp, Homo sapien
gggagactcgagtctctaccccaac

SEQ ID NO: 54485 - DNA, 25 bp, Homo sapien
aggactcagagttcgactccccaac

SEQ ID NO: 54486 - DNA, 25 bp, Homo sapien
aggactcagagtacgactccccaac

SEQ ID NO: 54487 - DNA, 25 bp, Homo sapien
aagaatcgagacattccttcacgaa

SEQ ID NO: 54488 - DNA, 25 bp, Homo sapien
aagaatcgagactttccttcacgaa

SEQ ID NO: 54489 - DNA, 25 bp, Homo sapien
aggacatgtagagacgggtccataa

SEQ ID NO: 54490 - DNA, 25 bp, Homo sapien
aggacatgtagacacgggtccataa

SEQ ID NO: 54491 - DNA, 25 bp, Homo sapien
tgtcacggtgcatcccagcagagaa

SEQ ID NO: 54492 - DNA, 25 bp, Homo sapien
tgtcacggtgcaacccagcagagaa

SEQ ID NO: 54493 - DNA, 25 bp, Homo sapien
gcacacgaaacgacaactatcagaa

SEQ ID NO: 54494 - DNA, 25 bp, Homo sapien
gcacacgaaacgtcaactatcagaa

SEQ ID NO: 54495 - DNA, 25 bp, Homo sapien
ggccaacgataatcgtatctactcc

SEQ ID NO: 54496 - DNA, 25 bp, Homo sapien
ggccaacgataaacgtatctactcc

SEQ ID NO: 54497 - DNA, 25 bp, Homo sapien
ggagatgacaaaaacacttcatgtc

SEQ ID NO: 54498 - DNA, 25 bp, Homo sapien
ggagatgacaaatacacttcatgtc

SEQ ID NO: 54499 - DNA, 25 bp, Homo sapien
acgaacagagaccacacgtccctta

SEQ ID NO: 54500 - DNA, 25 bp, Homo sapien
acgaacagagacgacacgtccctta

SEQ ID NO: 54501 - DNA, 25 bp, Homo sapien
gaacgccaggtgttcctcaaccgtg

SEQ ID NO: 54502 - DNA, 25 bp, Homo sapien
gaacgccaggtgatcctcaaccgtg

SEQ ID NO: 54503 - DNA, 25 bp, Homo sapien
cgaaaacagaaggtaagtcttaccc

SEQ ID NO: 54504 - DNA, 25 bp, Homo sapien
cgaaaacagaagctaagtcttaccc

SEQ ID NO: 54505 - DNA, 25 bp, Homo sapien
taaagaagttagatacctcttatgc

SEQ ID NO: 54506 - DNA, 25 bp, Homo sapien
taaagaagttagttacctcttatgc

SEQ ID NO: 54507 - DNA, 25 bp, Homo sapien
aagtgacggactgtacattttgtac

SEQ ID NO: 54508 - DNA, 25 bp, Homo sapien
aagtgacggactctacattttgtac

SEQ ID NO: 54509 - DNA, 25 bp, Homo sapien
cagtcgggtatactgtattaatgtc

SEQ ID NO: 54510 - DNA, 25 bp, Homo sapien
cagtcgggtatagtgtattaatgtc

SEQ ID NO: 54511 - DNA, 25 bp, Homo sapien
cgacgattatatcgtttgtgttatc

SEQ ID NO: 54512 - DNA, 25 bp, Homo sapien
cgacgattatatggtttgtgttatc

SEQ ID NO: 54513 - DNA, 25 bp, Homo sapien
ctaggatcaacttgtatgtctttat

SEQ ID NO: 54514 - DNA, 25 bp, Homo sapien
ctaggatcaactagtatgtctttat

SEQ ID NO: 54515 - DNA, 25 bp, Homo sapien
tcgcggtaacagaagactgttttaa

SEQ ID NO: 54516 - DNA, 25 bp, Homo sapien
tcgcggtaacagtagactgttttaa

SEQ ID NO: 54517 - DNA, 25 bp, Homo sapien
ccgacaagtcctgtaggtgttacag

SEQ ID NO: 54518 - DNA, 25 bp, Homo sapien
ccgacaagtcctctaggtgttacag

SEQ ID NO: 54519 - DNA, 25 bp, Homo sapien
ttcccgaagacctagtgtgtgtttg

SEQ ID NO: 54520 - DNA, 25 bp, Homo sapien
ttcccgaagaccaagtgtgtgtttg

SEQ ID NO: 54521 - DNA, 25 bp, Homo sapien
ctcaaatgacatactgctcgtaaag

SEQ ID NO: 54522 - DNA, 25 bp, Homo sapien
ctcaaatgacattctgctcgtaaag

SEQ ID NO: 54523 - DNA, 25 bp, Homo sapien
ccaccgtaggacactaccggggaag

SEQ ID NO: 54524 - DNA, 25 bp, Homo sapien
ccaccgtaggactctaccggggaag

SEQ ID NO: 54525 - DNA, 25 bp, Homo sapien
tcctgcgcgtgtgcttgtcggacag

SEQ ID NO: 54526 - DNA, 25 bp, Homo sapien
tcctgcgcgtgtccttgtcggacag

SEQ ID NO: 54527 - DNA, 25 bp, Homo sapien
tcgacccagagatctttgtcggtcc

SEQ ID NO: 54528 - DNA, 25 bp, Homo sapien
tcgacccagagaactttgtcggtcc

SEQ ID NO: 54529 - DNA, 25 bp, Homo sapien
tcacacgaccctcgagaggtaattg

SEQ ID NO: 54530 - DNA, 25 bp, Homo sapien
tcacacgaccctggagaggtaattg

SEQ ID NO: 54531 - DNA, 25 bp, Homo sapien
cacacgttctacaagagttatttgt

SEQ ID NO: 54532 - DNA, 25 bp, Homo sapien
cacacgttctactagagttatttgt

SEQ ID NO: 54533 - DNA, 25 bp, Homo sapien
cgaattactacttgactgtgtttgt

SEQ ID NO: 54534 - DNA, 25 bp, Homo sapien
cgaattactactagactgtgtttgt

SEQ ID NO: 54535 - DNA, 25 bp, Homo sapien
gaccctgtctccttgtttgtgtcgg

SEQ ID NO: 54536 - DNA, 25 bp, Homo sapien
gaccctgtctccatgtttgtgtcgg

SEQ ID NO: 54537 - DNA, 25 bp, Homo sapien
ctcccttccgtcctagagattgggt

SEQ ID NO: 54538 - DNA, 25 bp, Homo sapien
ctcccttccgtcgtagagattgggt

SEQ ID NO: 54539 - DNA, 25 bp, Homo sapien
ccccgctgtccgtgtcggatgtcgg

SEQ ID NO: 54540 - DNA, 25 bp, Homo sapien
ccccgctgtccgagtcggatgtcgg

SEQ ID NO: 54541 - DNA, 25 bp, Homo sapien
actccaggagtggtcggtgtcactg

SEQ ID NO: 54542 - DNA, 25 bp, Homo sapien
actccaggagtgctcggtgtcactg

SEQ ID NO: 54543 - DNA, 25 bp, Homo sapien
tctaacacatgttatctggtttccg

SEQ ID NO: 54544 - DNA, 25 bp, Homo sapien
tctaacacatgtaatctggtttccg

SEQ ID NO: 54545 - DNA, 25 bp, Homo sapien
tttctcatctcgattgagtcattgt

SEQ ID NO: 54546 - DNA, 25 bp, Homo sapien
tttctcatctcgtttgagtcattgt

SEQ ID NO: 54547 - DNA, 25 bp, Homo sapien
gtcgtcttctttcgtcctggggtgt

SEQ ID NO: 54548 - DNA, 25 bp, Homo sapien
gtcgtcttctttggtcctggggtgt

SEQ ID NO: 54549 - DNA, 25 bp, Homo sapien
ttgtgtcttcttgttacagtggttt

SEQ ID NO: 54550 - DNA, 25 bp, Homo sapien
ttgtgtcttcttcttacagtggttt

SEQ ID NO: 54551 - DNA, 25 bp, Homo sapien
gtcaccacctatcctccgatggggt

SEQ ID NO: 54552 - DNA, 25 bp, Homo sapien
gtcaccacctatgctccgatggggt

SEQ ID NO: 54553 - DNA, 25 bp, Homo sapien
cgcacccttaggatcgtggtgtttt

SEQ ID NO: 54554 - DNA, 25 bp, Homo sapien
cgcacccttaggttcgtggtgtttt

SEQ ID NO: 54555 - DNA, 25 bp, Homo sapien
attcggtacagagagacttacatgt

SEQ ID NO: 54556 - DNA, 25 bp, Homo sapien
attcggtacagacagacttacatgt

SEQ ID NO: 54557 - DNA, 25 bp, Homo sapien
gttacggtacagcagagacaacaga

SEQ ID NO: 54558 - DNA, 25 bp, Homo sapien
gttacggtacaggagagacaacaga

SEQ ID NO: 54559 - DNA, 25 bp, Homo sapien
actaccctccaggactcagtatcga

SEQ ID NO: 54560 - DNA, 25 bp, Homo sapien
actaccctccagcactcagtatcga

SEQ ID NO: 54561 - DNA, 25 bp, Homo sapien
tactggcggacactagagagtcggt

SEQ ID NO: 54562 - DNA, 25 bp, Homo sapien
tactggcggacagtagagagtcggt

SEQ ID NO: 54563 - DNA, 25 bp, Homo sapien
gtgacgacggcatgtgcgtactaga

SEQ ID NO: 54564 - DNA, 25 bp, Homo sapien
gtgacgacggcaagtgcgtactaga

SEQ ID NO: 54565 - DNA, 25 bp, Homo sapien
tacgaccgtgtaatgtctacgagtt

SEQ ID NO: 54566 - DNA, 25 bp, Homo sapien
tacgaccgtgtattgtctacgagtt

SEQ ID NO: 54567 - DNA, 25 bp, Homo sapien
cgtctcgacctcttcggtgtcggtt

SEQ ID NO: 54568 - DNA, 25 bp, Homo sapien
cgtctcgacctcatcggtgtcggtt

SEQ ID NO: 54569 - DNA, 25 bp, Homo sapien
gtctcgccgtgacgtgctacgcgtc

SEQ ID NO: 54570 - DNA, 25 bp, Homo sapien
gtctcgccgtgaggtgctacgcgtc

SEQ ID NO: 54571 - DNA, 25 bp, Homo sapien
gagccctcatcgtaggagtcctcat

SEQ ID NO: 54572 - DNA, 25 bp, Homo sapien
gagccctcatcgaaggagtcctcat

SEQ ID NO: 54573 - DNA, 25 bp, Homo sapien
agacgtcccacagagggtgttcagt

SEQ ID NO: 54574 - DNA, 25 bp, Homo sapien
agacgtcccacacagggtgttcagt

SEQ ID NO: 54575 - DNA, 25 bp, Homo sapien
gacccaacactagtcgaggttgact

SEQ ID NO: 54576 - DNA, 25 bp, Homo sapien
gacccaacactactcgaggttgact

SEQ ID NO: 54577 - DNA, 25 bp, Homo sapien
tttgtagagactctcgagtcacctc

SEQ ID NO: 54578 - DNA, 25 bp, Homo sapien
tttgtagagactgtcgagtcacctc

SEQ ID NO: 54579 - DNA, 25 bp, Homo sapien
catgtgagatacatgtatgtatctc

SEQ ID NO: 54580 - DNA, 25 bp, Homo sapien
catgtgagatacttgtatgtatctc

SEQ ID NO: 54581 - DNA, 25 bp, Homo sapien
aaagtggagagtacctgagactgcc

SEQ ID NO: 54582 - DNA, 25 bp, Homo sapien
aaagtggagagttcctgagactgcc

SEQ ID NO: 54583 - DNA, 25 bp, Homo sapien
aggtagatctttcctagacgtcgga

SEQ ID NO: 54584 - DNA, 25 bp, Homo sapien
aggtagatctttgctagacgtcgga

SEQ ID NO: 54585 - DNA, 25 bp, Homo sapien
acgttaagtatgctttcggtgcgta

SEQ ID NO: 54586 - DNA, 25 bp, Homo sapien
acgttaagtatggtttcggtgcgta

SEQ ID NO: 54587 - DNA, 25 bp, Homo sapien
gttcgaccagggactcggtgtgtat

SEQ ID NO: 54588 - DNA, 25 bp, Homo sapien
gttcgaccagggtctcggtgtgtat

SEQ ID NO: 54589 - DNA, 25 bp, Homo sapien
agttagacataacagcctagagaga

SEQ ID NO: 54590 - DNA, 25 bp, Homo sapien
agttagacataagagcctagagaga

SEQ ID NO: 54591 - DNA, 25 bp, Homo sapien
gaaacagggaggaccgtcacgagtc

SEQ ID NO: 54592 - DNA, 25 bp, Homo sapien
gaaacagggaggtccgtcacgagtc

SEQ ID NO: 54593 - DNA, 25 bp, Homo sapien
aaataaagtgggttcacgcagatac

SEQ ID NO: 54594 - DNA, 25 bp, Homo sapien
aaataaagtgggatcacgcagatac

SEQ ID NO: 54595 - DNA, 25 bp, Homo sapien
tataagtctgtggttcagcaagtac

SEQ ID NO: 54596 - DNA, 25 bp, Homo sapien
tataagtctgtgcttcagcaagtac

SEQ ID NO: 54597 - DNA, 25 bp, Homo sapien
caactctatgtctttgacagttacg

SEQ ID NO: 54598 - DNA, 25 bp, Homo sapien
caactctatgtcattgacagttacg

SEQ ID NO: 54599 - DNA, 25 bp, Homo sapien
ggacaaaaatttcacgagactgtac

SEQ ID NO: 54600 - DNA, 25 bp, Homo sapien
ggacaaaaatttgacgagactgtac

SEQ ID NO: 54601 - DNA, 25 bp, Homo sapien
agcaactgcttcctcaagtactaag

SEQ ID NO: 54602 - DNA, 25 bp, Homo sapien
agcaactgcttcgtcaagtactaag

SEQ ID NO: 54603 - DNA, 25 bp, Homo sapien
ctcagactcctctttcggctaaagt

SEQ ID NO: 54604 - DNA, 25 bp, Homo sapien
ctcagactcctcattcggctaaagt

SEQ ID NO: 54605 - DNA, 25 bp, Homo sapien
caacatctcgctgacgtgtatccac

SEQ ID NO: 54606 - DNA, 25 bp, Homo sapien
caacatctcgctcacgtgtatccac

SEQ ID NO: 54607 - DNA, 25 bp, Homo sapien
tgtctacgactccacgcggaagaac

SEQ ID NO: 54608 - DNA, 25 bp, Homo sapien
tgtctacgactcgacgcggaagaac

SEQ ID NO: 54609 - DNA, 25 bp, Homo sapien
cagaagaccaatgaagtggtctaaa

SEQ ID NO: 54610 - DNA, 25 bp, Homo sapien
cagaagaccaatcaagtggtctaaa

SEQ ID NO: 54611 - DNA, 25 bp, Homo sapien
gaaaaaggttacagtaccttaaact

SEQ ID NO: 54612 - DNA, 25 bp, Homo sapien
gaaaaaggttactgtaccttaaact

SEQ ID NO: 54613 - DNA, 25 bp, Homo sapien
aggaaaaagagtcctcacttcccga

SEQ ID NO: 54614 - DNA, 25 bp, Homo sapien
aggaaaaagagtgctcacttcccga

SEQ ID NO: 54615 - DNA, 25 bp, Homo sapien
atgaaatcgtggtaagaatcacctc

SEQ ID NO: 54616 - DNA, 25 bp, Homo sapien
atgaaatcgtggaaagaatcacctc

SEQ ID NO: 54617 - DNA, 25 bp, Homo sapien
gatatattacgaaagggtctctttc

SEQ ID NO: 54618 - DNA, 25 bp, Homo sapien
gatatattacgatagggtctctttc

SEQ ID NO: 54619 - DNA, 25 bp, Homo sapien
cttagtgacgtccttctttactagt

SEQ ID NO: 54620 - DNA, 25 bp, Homo sapien
cttagtgacgtcgttctttactagt

SEQ ID NO: 54621 - DNA, 25 bp, Homo sapien
gtgtcggttgtatgcctcgtcccta

SEQ ID NO: 54622 - DNA, 25 bp, Homo sapien
gtgtcggttgtaagcctcgtcccta

SEQ ID NO: 54623 - DNA, 25 bp, Homo sapien
tctggtgtaccgaacccactggtag

SEQ ID NO: 54624 - DNA, 25 bp, Homo sapien
tctggtgtaccgtacccactggtag

SEQ ID NO: 54625 - DNA, 25 bp, Homo sapien
gggctagaccgttatgtcctggtat

SEQ ID NO: 54626 - DNA, 25 bp, Homo sapien
gggctagaccgtaatgtcctggtat

SEQ ID NO: 54627 - DNA, 25 bp, Homo sapien
gtcagtaccgattagtctctgatct

SEQ ID NO: 54628 - DNA, 25 bp, Homo sapien
gtcagtaccgataagtctctgatct

SEQ ID NO: 54629 - DNA, 25 bp, Homo sapien
ctaaccggtactcaactagtgactc

SEQ ID NO: 54630 - DNA, 25 bp, Homo sapien
ctaaccggtactgaactagtgactc

SEQ ID NO: 54631 - DNA, 25 bp, Homo sapien
tcttggaggaatttccacagtatcc

SEQ ID NO: 54632 - DNA, 25 bp, Homo sapien
tcttggaggaatatccacagtatcc

SEQ ID NO: 54633 - DNA, 25 bp, Homo sapien
tctttgatgattgtagaaatcactc

SEQ ID NO: 54634 - DNA, 25 bp, Homo sapien
tctttgatgattctagaaatcactc

SEQ ID NO: 54635 - DNA, 25 bp, Homo sapien
tcttttattagtgtaacatcttacg

SEQ ID NO: 54636 - DNA, 25 bp, Homo sapien
tcttttattagtctaacatcttacg

SEQ ID NO: 54637 - DNA, 25 bp, Homo sapien
ctatttatagtgtcaacggtgtgtc

SEQ ID NO: 54638 - DNA, 25 bp, Homo sapien
ctatttatagtgacaacggtgtgtc

SEQ ID NO: 54639 - DNA, 25 bp, Homo sapien
cccgcttgtttaaaccctgtcatag

SEQ ID NO: 54640 - DNA, 25 bp, Homo sapien
cccgcttgtttataccctgtcatag

SEQ ID NO: 54641 - DNA, 25 bp, Homo sapien
aactcgtgtcctatacttgtccaag

SEQ ID NO: 54642 - DNA, 25 bp, Homo sapien
aactcgtgtcctttacttgtccaag

SEQ ID NO: 54643 - DNA, 25 bp, Homo sapien
agttcctttctgttaatctcaggaa

SEQ ID NO: 54644 - DNA, 25 bp, Homo sapien
agttcctttctgataatctcaggaa

SEQ ID NO: 54645 - DNA, 25 bp, Homo sapien
cactatacgtgtctactttcaggag

SEQ ID NO: 54646 - DNA, 25 bp, Homo sapien
cactatacgtgtgtactttcaggag

SEQ ID NO: 54647 - DNA, 25 bp, Homo sapien
cccccagagtactcgttttagaagt

SEQ ID NO: 54648 - DNA, 25 bp, Homo sapien
cccccagagtacacgttttagaagt

SEQ ID NO: 54649 - DNA, 25 bp, Homo sapien
acgtcaacgcacgagatcttactat

SEQ ID NO: 54650 - DNA, 25 bp, Homo sapien
acgtcaacgcaccagatcttactat

SEQ ID NO: 54651 - DNA, 25 bp, Homo sapien
cgtcttctaaggaccggattttagt

SEQ ID NO: 54652 - DNA, 25 bp, Homo sapien
cgtcttctaaggtccggattttagt

SEQ ID NO: 54653 - DNA, 25 bp, Homo sapien
atttttaacgtgtccgcattgtaat

SEQ ID NO: 54654 - DNA, 25 bp, Homo sapien
atttttaacgtgaccgcattgtaat

SEQ ID NO: 54655 - DNA, 25 bp, Homo sapien
ttttgaacgtacaccgtgttttacc

SEQ ID NO: 54656 - DNA, 25 bp, Homo sapien
ttttgaacgtactccgtgttttacc

SEQ ID NO: 54657 - DNA, 25 bp, Homo sapien
gtggtcaaggtcctctggtcccgcc

SEQ ID NO: 54658 - DNA, 25 bp, Homo sapien
gtggtcaaggtcgtctggtcccgcc

SEQ ID NO: 54659 - DNA, 25 bp, Homo sapien
tgtgtttatgtcgactggtcttcca

SEQ ID NO: 54660 - DNA, 25 bp, Homo sapien
tgtgtttatgtccactggtcttcca

SEQ ID NO: 54661 - DNA, 25 bp, Homo sapien
gttcctgtttgtaaatgaaccctcc

SEQ ID NO: 54662 - DNA, 25 bp, Homo sapien
gttcctgtttgttaatgaaccctcc

SEQ ID NO: 54663 - DNA, 25 bp, Homo sapien
gtggagagtgtaggaagaaccccat

SEQ ID NO: 54664 - DNA, 25 bp, Homo sapien
gtggagagtgtacgaagaaccccat

SEQ ID NO: 54665 - DNA, 25 bp, Homo sapien
ggcgcgacgtgttcgcaggcccttt

SEQ ID NO: 54666 - DNA, 25 bp, Homo sapien
ggcgcgacgtgtacgcaggcccttt

SEQ ID NO: 54667 - DNA, 25 bp, Homo sapien
gggactgacacgagtcactgtcctg

SEQ ID NO: 54668 - DNA, 25 bp, Homo sapien
gggactgacacgtgtcactgtcctg

SEQ ID NO: 54669 - DNA, 25 bp, Homo sapien
acgactgtacccagagataccactc

SEQ ID NO: 54670 - DNA, 25 bp, Homo sapien
acgactgtaccctgagataccactc

SEQ ID NO: 54671 - DNA, 25 bp, Homo sapien
caccagtaagaagaggaggtccacc

SEQ ID NO: 54672 - DNA, 25 bp, Homo sapien
caccagtaagaacaggaggtccacc

SEQ ID NO: 54673 - DNA, 25 bp, Homo sapien
tcgacaaggggaaccggagcccaag

SEQ ID NO: 54674 - DNA, 25 bp, Homo sapien
tcgacaaggggatccggagcccaag

SEQ ID NO: 54675 - DNA, 25 bp, Homo sapien
gacaagggaaacctataagtcaaga

SEQ ID NO: 54676 - DNA, 25 bp, Homo sapien
gacaagggaaacgtataagtcaaga

SEQ ID NO: 54677 - DNA, 25 bp, Homo sapien
gaacgaagcacacttctaaagtaaa

SEQ ID NO: 54678 - DNA, 25 bp, Homo sapien
gaacgaagcacagttctaaagtaaa

SEQ ID NO: 54679 - DNA, 25 bp, Homo sapien
actcctgtcaagacctttaagaacg

SEQ ID NO: 54680 - DNA, 25 bp, Homo sapien
actcctgtcaagtcctttaagaacg

SEQ ID NO: 54681 - DNA, 25 bp, Homo sapien
tgtcaataaaggtgtcgtatcccac

SEQ ID NO: 54682 - DNA, 25 bp, Homo sapien
tgtcaataaaggagtcgtatcccac

SEQ ID NO: 54683 - DNA, 25 bp, Homo sapien
gttaaagtaatcgaatgtttctacc

SEQ ID NO: 54684 - DNA, 25 bp, Homo sapien
gttaaagtaatccaatgtttctacc

SEQ ID NO: 54685 - DNA, 25 bp, Homo sapien
acatagacgtccaagcattcgtatc

SEQ ID NO: 54686 - DNA, 25 bp, Homo sapien
acatagacgtcctagcattcgtatc

SEQ ID NO: 54687 - DNA, 25 bp, Homo sapien
attgaagatcttttgatcactgtac

SEQ ID NO: 54688 - DNA, 25 bp, Homo sapien
attgaagatcttatgatcactgtac

SEQ ID NO: 54689 - DNA, 25 bp, Homo sapien
ttccagatcgtcttatcaaagtgta

SEQ ID NO: 54690 - DNA, 25 bp, Homo sapien
ttccagatcgtcatatcaaagtgta

SEQ ID NO: 54691 - DNA, 25 bp, Homo sapien
gtcgggtgctcaaataacaagagac

SEQ ID NO: 54692 - DNA, 25 bp, Homo sapien
gtcgggtgctcatataacaagagac

SEQ ID NO: 54693 - DNA, 25 bp, Homo sapien
gagtagttccaggtatgcctgttac

SEQ ID NO: 54694 - DNA, 25 bp, Homo sapien
gagtagttccagctatgcctgttac

SEQ ID NO: 54695 - DNA, 25 bp, Homo sapien
aggagactccggtagtccctgaact

SEQ ID NO: 54696 - DNA, 25 bp, Homo sapien
aggagactccggaagtccctgaact

SEQ ID NO: 54697 - DNA, 25 bp, Homo sapien
gtttctactgattttctcatggact

SEQ ID NO: 54698 - DNA, 25 bp, Homo sapien
gtttctactgatattctcatggact

SEQ ID NO: 54699 - DNA, 25 bp, Homo sapien
ttgtttacgttttatttttttcgac

SEQ ID NO: 54700 - DNA, 25 bp, Homo sapien
ttgtttacgtttaatttttttcgac

SEQ ID NO: 54701 - DNA, 25 bp, Homo sapien
tgtttacgtatttaagaattcccag

SEQ ID NO: 54702 - DNA, 25 bp, Homo sapien
tgtttacgtattaaagaattcccag

SEQ ID NO: 54703 - DNA, 25 bp, Homo sapien
tattaagtgttacgaactgagcctg

SEQ ID NO: 54704 - DNA, 25 bp, Homo sapien
tattaagtgttaggaactgagcctg

SEQ ID NO: 54705 - DNA, 25 bp, Homo sapien
tgtgtctcattttgaaattacctcg

SEQ ID NO: 54706 - DNA, 25 bp, Homo sapien
tgtgtctcatttagaaattacctcg

SEQ ID NO: 54707 - DNA, 25 bp, Homo sapien
ttctttgtgttcgtcgacgtaggtg

SEQ ID NO: 54708 - DNA, 25 bp, Homo sapien
ttctttgtgttcctcgacgtaggtg

SEQ ID NO: 54709 - DNA, 25 bp, Homo sapien
cgatacttcgttttcatcgataatg

SEQ ID NO: 54710 - DNA, 25 bp, Homo sapien
cgatacttcgttatcatcgataatg

SEQ ID NO: 54711 - DNA, 25 bp, Homo sapien
gacacggtgtctattgtaccaggtt

SEQ ID NO: 54712 - DNA, 25 bp, Homo sapien
gacacggtgtcttttgtaccaggtt

SEQ ID NO: 54713 - DNA, 25 bp, Homo sapien
gtccgggtcacctctcgtctaaact

SEQ ID NO: 54714 - DNA, 25 bp, Homo sapien
gtccgggtcaccactcgtctaaact

SEQ ID NO: 54715 - DNA, 25 bp, Homo sapien
cgtccagatcatggagacggttccg

SEQ ID NO: 54716 - DNA, 25 bp, Homo sapien
cgtccagatcatcgagacggttccg

SEQ ID NO: 54717 - DNA, 25 bp, Homo sapien
gtcccgacctactgagtgccctgag

SEQ ID NO: 54718 - DNA, 25 bp, Homo sapien
gtcccgacctacagagtgccctgag

SEQ ID NO: 54719 - DNA, 25 bp, Homo sapien
caggttccactccaaggactcattg

SEQ ID NO: 54720 - DNA, 25 bp, Homo sapien
caggttccactcgaaggactcattg

SEQ ID NO: 54721 - DNA, 25 bp, Homo sapien
tcttccgactcgaaggacacccggg

SEQ ID NO: 54722 - DNA, 25 bp, Homo sapien
tcttccgactcgtaggacacccggg

SEQ ID NO: 54723 - DNA, 25 bp, Homo sapien
gtcttccgtcggtggacagtgtcca

SEQ ID NO: 54724 - DNA, 25 bp, Homo sapien
gtcttccgtcggaggacagtgtcca

SEQ ID NO: 54725 - DNA, 25 bp, Homo sapien
tagttatcgacttcggttgatccaa

SEQ ID NO: 54726 - DNA, 25 bp, Homo sapien
tagttatcgactacggttgatccaa

SEQ ID NO: 54727 - DNA, 25 bp, Homo sapien
ctctctagtccaaggggatcgacaa

SEQ ID NO: 54728 - DNA, 25 bp, Homo sapien
ctctctagtccatggggatcgacaa

SEQ ID NO: 54729 - DNA, 25 bp, Homo sapien
ggccaacattactgggaactactaa

SEQ ID NO: 54730 - DNA, 25 bp, Homo sapien
ggccaacattacagggaactactaa

SEQ ID NO: 54731 - DNA, 25 bp, Homo sapien
gttgtcggggtctcggtgaacctcc

SEQ ID NO: 54732 - DNA, 25 bp, Homo sapien
gttgtcggggtcacggtgaacctcc

SEQ ID NO: 54733 - DNA, 25 bp, Homo sapien
ccatagtctgtaaggaggaccgcac

SEQ ID NO: 54734 - DNA, 25 bp, Homo sapien
ccatagtctgtatggaggaccgcac

SEQ ID NO: 54735 - DNA, 25 bp, Homo sapien
ccacgagtcggacgtagggtccccg

SEQ ID NO: 54736 - DNA, 25 bp, Homo sapien
ccacgagtcggaggtagggtccccg

SEQ ID NO: 54737 - DNA, 25 bp, Homo sapien
tctcgtcgaggtgatgaatgttccc

SEQ ID NO: 54738 - DNA, 25 bp, Homo sapien
tctcgtcgaggtcatgaatgttccc

SEQ ID NO: 54739 - DNA, 25 bp, Homo sapien
tccttcacggtgtctacttcccaga

SEQ ID NO: 54740 - DNA, 25 bp, Homo sapien
tccttcacggtgactacttcccaga

SEQ ID NO: 54741 - DNA, 25 bp, Homo sapien
aacgcctcgatgtcttcctctctga

SEQ ID NO: 54742 - DNA, 25 bp, Homo sapien
aacgcctcgatgacttcctctctga

SEQ ID NO: 54743 - DNA, 25 bp, Homo sapien
aggtccttcgaaactcgatccctaa

SEQ ID NO: 54744 - DNA, 25 bp, Homo sapien
aggtccttcgaatctcgatccctaa

SEQ ID NO: 54745 - DNA, 25 bp, Homo sapien
gggtacctctacgttaatcttttac

SEQ ID NO: 54746 - DNA, 25 bp, Homo sapien
gggtacctctaccttaatcttttac

SEQ ID NO: 54747 - DNA, 25 bp, Homo sapien
cggacgaccctactcctatttttag

SEQ ID NO: 54748 - DNA, 25 bp, Homo sapien
cggacgaccctagtcctatttttag

SEQ ID NO: 54749 - DNA, 25 bp, Homo sapien
cgatcccgttgtcatacatgtccgc

SEQ ID NO: 54750 - DNA, 25 bp, Homo sapien
cgatcccgttgtgatacatgtccgc

SEQ ID NO: 54751 - DNA, 25 bp, Homo sapien
actatgcgttgtggataaggtccct

SEQ ID NO: 54752 - DNA, 25 bp, Homo sapien
actatgcgttgtcgataaggtccct

SEQ ID NO: 54753 - DNA, 25 bp, Homo sapien
ccgtccataggtggattggtccgac

SEQ ID NO: 54754 - DNA, 25 bp, Homo sapien
ccgtccataggtcgattggtccgac

SEQ ID NO: 54755 - DNA, 25 bp, Homo sapien
gacctaccctttgtatgtgatatta

SEQ ID NO: 54756 - DNA, 25 bp, Homo sapien
gacctaccctttctatgtgatatta

SEQ ID NO: 54757 - DNA, 25 bp, Homo sapien
accactacgggtggtttgcggtgta

SEQ ID NO: 54758 - DNA, 25 bp, Homo sapien
accactacgggtcgtttgcggtgta

SEQ ID NO: 54759 - DNA, 25 bp, Homo sapien
cctcactctcggtcgaaggttcttt

SEQ ID NO: 54760 - DNA, 25 bp, Homo sapien
cctcactctcggacgaaggttcttt

SEQ ID NO: 54761 - DNA, 25 bp, Homo sapien
ctcttctctggtgaaattcttcgtg

SEQ ID NO: 54762 - DNA, 25 bp, Homo sapien
ctcttctctggtcaaattcttcgtg

SEQ ID NO: 54763 - DNA, 25 bp, Homo sapien
ctcggttgtttgacatgtactggtt

SEQ ID NO: 54764 - DNA, 25 bp, Homo sapien
ctcggttgtttgtcatgtactggtt

SEQ ID NO: 54765 - DNA, 25 bp, Homo sapien
cgagtctttttaagtcgtcttgtat

SEQ ID NO: 54766 - DNA, 25 bp, Homo sapien
cgagtctttttatgtcgtcttgtat

SEQ ID NO: 54767 - DNA, 25 bp, Homo sapien
atctcaggactctattgttccttag

SEQ ID NO: 54768 - DNA, 25 bp, Homo sapien
atctcaggactcaattgttccttag

SEQ ID NO: 54769 - DNA, 25 bp, Homo sapien
tcctgacatatatcgggtctatttt

SEQ ID NO: 54770 - DNA, 25 bp, Homo sapien
tcctgacatataacgggtctatttt

SEQ ID NO: 54771 - DNA, 25 bp, Homo sapien
actgacaatcgatggtttccgacgt

SEQ ID NO: 54772 - DNA, 25 bp, Homo sapien
actgacaatcgaaggtttccgacgt

SEQ ID NO: 54773 - DNA, 25 bp, Homo sapien
tctagacacttctttatggacaagt

SEQ ID NO: 54774 - DNA, 25 bp, Homo sapien
tctagacacttcattatggacaagt

SEQ ID NO: 54775 - DNA, 25 bp, Homo sapien
atagttaccccgtctacgggacacc

SEQ ID NO: 54776 - DNA, 25 bp, Homo sapien
atagttaccccgactacgggacacc

SEQ ID NO: 54777 - DNA, 25 bp, Homo sapien
taaactgttgacaaccctaggcccg

SEQ ID NO: 54778 - DNA, 25 bp, Homo sapien
taaactgttgactaccctaggcccg

SEQ ID NO: 54779 - DNA, 25 bp, Homo sapien
taagtcaggtcaagtcctaggggcg

SEQ ID NO: 54780 - DNA, 25 bp, Homo sapien
taagtcaggtcatgtcctaggggcg

SEQ ID NO: 54781 - DNA, 25 bp, Homo sapien
atacttgacgagtctcagaggaggt

SEQ ID NO: 54782 - DNA, 25 bp, Homo sapien
atacttgacgagactcagaggaggt

SEQ ID NO: 54783 - DNA, 25 bp, Homo sapien
gccttcggcgaagacgtctcgaagt

SEQ ID NO: 54784 - DNA, 25 bp, Homo sapien
gccttcggcgaacacgtctcgaagt

SEQ ID NO: 54785 - DNA, 25 bp, Homo sapien
aggtcgactcacaacagttctagtt

SEQ ID NO: 54786 - DNA, 25 bp, Homo sapien
aggtcgactcactacagttctagtt

SEQ ID NO: 54787 - DNA, 25 bp, Homo sapien
tcggtctgcacaccaagtccggtct

SEQ ID NO: 54788 - DNA, 25 bp, Homo sapien
tcggtctgcacagcaagtccggtct

SEQ ID NO: 54789 - DNA, 25 bp, Homo sapien
tacggacttacactaacctgtcggg

SEQ ID NO: 54790 - DNA, 25 bp, Homo sapien
tacggacttacagtaacctgtcggg

SEQ ID NO: 54791 - DNA, 25 bp, Homo sapien
gctcgtcgacgttgtcaaagtgtga

SEQ ID NO: 54792 - DNA, 25 bp, Homo sapien
gctcgtcgacgtagtcaaagtgtga

SEQ ID NO: 54793 - DNA, 25 bp, Homo sapien
cagtggtgtgagactttattgcgac

SEQ ID NO: 54794 - DNA, 25 bp, Homo sapien
cagtggtgtgagtctttattgcgac

SEQ ID NO: 54795 - DNA, 25 bp, Homo sapien
aggagtggtcgtctttcctgagaca

SEQ ID NO: 54796 - DNA, 25 bp, Homo sapien
aggagtggtcgtgtttcctgagaca

SEQ ID NO: 54797 - DNA, 25 bp, Homo sapien
aggatgtttctacttacacacggga

SEQ ID NO: 54798 - DNA, 25 bp, Homo sapien
aggatgtttctagttacacacggga

SEQ ID NO: 54799 - DNA, 25 bp, Homo sapien
tatttcgtaggttctcagacgtgta

SEQ ID NO: 54800 - DNA, 25 bp, Homo sapien
tatttcgtaggtactcagacgtgta

SEQ ID NO: 54801 - DNA, 25 bp, Homo sapien
actctaagaggtaagttactactcc

SEQ ID NO: 54802 - DNA, 25 bp, Homo sapien
actctaagaggttagttactactcc

SEQ ID NO: 54803 - DNA, 25 bp, Homo sapien
cagtaaaacagagagtttctactaa

SEQ ID NO: 54804 - DNA, 25 bp, Homo sapien
cagtaaaacagacagtttctactaa

SEQ ID NO: 54805 - DNA, 25 bp, Homo sapien
gtgtcgtaaacagactttagtctaa

SEQ ID NO: 54806 - DNA, 25 bp, Homo sapien
gtgtcgtaaacacactttagtctaa

SEQ ID NO: 54807 - DNA, 25 bp, Homo sapien
actgttcttgataccttttgtagag

SEQ ID NO: 54808 - DNA, 25 bp, Homo sapien
actgttcttgattccttttgtagag

SEQ ID NO: 54809 - DNA, 25 bp, Homo sapien
catctgtagtgatttcagatctaaa

SEQ ID NO: 54810 - DNA, 25 bp, Homo sapien
catctgtagtgaattcagatctaaa

SEQ ID NO: 54811 - DNA, 25 bp, Homo sapien
ttgtgtattcagatacgctgactcc

SEQ ID NO: 54812 - DNA, 25 bp, Homo sapien
ttgtgtattcagttacgctgactcc

SEQ ID NO: 54813 - DNA, 25 bp, Homo sapien
gactctctacgtcacgggtcggagt

SEQ ID NO: 54814 - DNA, 25 bp, Homo sapien
gactctctacgtgacgggtcggagt

SEQ ID NO: 54815 - DNA, 25 bp, Homo sapien
tacgtgtactaaaccgaaggtattt

SEQ ID NO: 54816 - DNA, 25 bp, Homo sapien
tacgtgtactaatccgaaggtattt

SEQ ID NO: 54817 - DNA, 25 bp, Homo sapien
actatactttccagtaggactgtgt

SEQ ID NO: 54818 - DNA, 25 bp, Homo sapien
actatactttcctgtaggactgtgt

SEQ ID NO: 54819 - DNA, 25 bp, Homo sapien
caaacttacgtttcggggaactgtt

SEQ ID NO: 54820 - DNA, 25 bp, Homo sapien
caaacttacgttacggggaactgtt

SEQ ID NO: 54821 - DNA, 25 bp, Homo sapien
tctacaattggtgtgagaaacctac

SEQ ID NO: 54822 - DNA, 25 bp, Homo sapien
tctacaattggtctgagaaacctac

SEQ ID NO: 54823 - DNA, 25 bp, Homo sapien
ccgttaattggtgtcaatgtataac

SEQ ID NO: 54824 - DNA, 25 bp, Homo sapien
ccgttaattggtctcaatgtataac

SEQ ID NO: 54825 - DNA, 25 bp, Homo sapien
acagttgtccgtttgaggttgttac

SEQ ID NO: 54826 - DNA, 25 bp, Homo sapien
acagttgtccgtatgaggttgttac

SEQ ID NO: 54827 - DNA, 25 bp, Homo sapien
tcgcaggtgtaaggatcaggccatc

SEQ ID NO: 54828 - DNA, 25 bp, Homo sapien
tcgcaggtgtaacgatcaggccatc

SEQ ID NO: 54829 - DNA, 25 bp, Homo sapien
gttttatgaagaggatcccctcatg

SEQ ID NO: 54830 - DNA, 25 bp, Homo sapien
gttttatgaagacgatcccctcatg

SEQ ID NO: 54831 - DNA, 25 bp, Homo sapien
tcatatgaacgtcttactgtccgtt

SEQ ID NO: 54832 - DNA, 25 bp, Homo sapien
tcatatgaacgtgttactgtccgtt

SEQ ID NO: 54833 - DNA, 25 bp, Homo sapien
cttgtccattggtcgtacattttag

SEQ ID NO: 54834 - DNA, 25 bp, Homo sapien
cttgtccattggacgtacattttag

SEQ ID NO: 54835 - DNA, 25 bp, Homo sapien
tttgggtctggttcaccttctctgt

SEQ ID NO: 54836 - DNA, 25 bp, Homo sapien
tttgggtctggtacaccttctctgt

SEQ ID NO: 54837 - DNA, 25 bp, Homo sapien
agtgaaggtttgctttcatttcgtc

SEQ ID NO: 54838 - DNA, 25 bp, Homo sapien
agtgaaggtttggtttcatttcgtc

SEQ ID NO: 54839 - DNA, 25 bp, Homo sapien
gacagtcctatgtgttcctgttatc

SEQ ID NO: 54840 - DNA, 25 bp, Homo sapien
gacagtcctatgagttcctgttatc

SEQ ID NO: 54841 - DNA, 25 bp, Homo sapien
caaagtcctggttgtcccttaaact

SEQ ID NO: 54842 - DNA, 25 bp, Homo sapien
caaagtcctggtagtcccttaaact

SEQ ID NO: 54843 - DNA, 25 bp, Homo sapien
tccgcgagtcgatgcactagtgggt

SEQ ID NO: 54844 - DNA, 25 bp, Homo sapien
tccgcgagtcgaagcactagtgggt

SEQ ID NO: 54845 - DNA, 25 bp, Homo sapien
tggtgacgactaccagtgtgtgtat

SEQ ID NO: 54846 - DNA, 25 bp, Homo sapien
tggtgacgactagcagtgtgtgtat

SEQ ID NO: 54847 - DNA, 25 bp, Homo sapien
ggtagtctacggaccacggtgttcg

SEQ ID NO: 54848 - DNA, 25 bp, Homo sapien
ggtagtctacggtccacggtgttcg

SEQ ID NO: 54849 - DNA, 25 bp, Homo sapien
actaggtgttctagtctaccattta

SEQ ID NO: 54850 - DNA, 25 bp, Homo sapien
actaggtgttcttgtctaccattta

SEQ ID NO: 54851 - DNA, 25 bp, Homo sapien
actaaagtgtgtcctgtccctttga

SEQ ID NO: 54852 - DNA, 25 bp, Homo sapien
actaaagtgtgtgctgtccctttga

SEQ ID NO: 54853 - DNA, 25 bp, Homo sapien
aactacttggtcacacgtcgtttgg

SEQ ID NO: 54854 - DNA, 25 bp, Homo sapien
aactacttggtctcacgtcgtttgg

SEQ ID NO: 54855 - DNA, 25 bp, Homo sapien
cgtgaaccggattatatgttttctg

SEQ ID NO: 54856 - DNA, 25 bp, Homo sapien
cgtgaaccggataatatgttttctg

SEQ ID NO: 54857 - DNA, 25 bp, Homo sapien
ggtcggacccccattttatcgaccg

SEQ ID NO: 54858 - DNA, 25 bp, Homo sapien
ggtcggaccccctttttatcgaccg

SEQ ID NO: 54859 - DNA, 25 bp, Homo sapien
gggtggccaccctttcaacggacac

SEQ ID NO: 54860 - DNA, 25 bp, Homo sapien
gggtggccacccattcaacggacac

SEQ ID NO: 54861 - DNA, 25 bp, Homo sapien
tgtgttaccaccacatcaggtgtaa

SEQ ID NO: 54862 - DNA, 25 bp, Homo sapien
tgtgttaccacctcatcaggtgtaa

SEQ ID NO: 54863 - DNA, 25 bp, Homo sapien
tacgtgcaggacgaccaagagggcc

SEQ ID NO: 54864 - DNA, 25 bp, Homo sapien
tacgtgcaggaccaccaagagggcc

SEQ ID NO: 54865 - DNA, 25 bp, Homo sapien
gaattcaggtccagagaatccccct

SEQ ID NO: 54866 - DNA, 25 bp, Homo sapien
gaattcaggtcctgagaatccccct

SEQ ID NO: 54867 - DNA, 25 bp, Homo sapien
gtaattcagggatgattctcccgca

SEQ ID NO: 54868 - DNA, 25 bp, Homo sapien
gtaattcagggaagattctcccgca

SEQ ID NO: 54869 - DNA, 25 bp, Homo sapien
gtccagtcgactcttatcctcgaca

SEQ ID NO: 54870 - DNA, 25 bp, Homo sapien
gtccagtcgactgttatcctcgaca

SEQ ID NO: 54871 - DNA, 25 bp, Homo sapien
tgatctcactctattttcctctcat

SEQ ID NO: 54872 - DNA, 25 bp, Homo sapien
tgatctcactcttttttcctctcat

SEQ ID NO: 54873 - DNA, 25 bp, Homo sapien
gtcttcgaacttgtcatcttgatcc

SEQ ID NO: 54874 - DNA, 25 bp, Homo sapien
gtcttcgaacttctcatcttgatcc

SEQ ID NO: 54875 - DNA, 25 bp, Homo sapien
ttttcgaaacttccaagttcggtcc

SEQ ID NO: 54876 - DNA, 25 bp, Homo sapien
ttttcgaaacttgcaagttcggtcc

SEQ ID NO: 54877 - DNA, 25 bp, Homo sapien
ttcaaatccggtaacggacctacac

SEQ ID NO: 54878 - DNA, 25 bp, Homo sapien
ttcaaatccggttacggacctacac

SEQ ID NO: 54879 - DNA, 25 bp, Homo sapien
ttccatagtccgatttgtcacgacc

SEQ ID NO: 54880 - DNA, 25 bp, Homo sapien
ttccatagtccgttttgtcacgacc

SEQ ID NO: 54881 - DNA, 25 bp, Homo sapien
cctctataaggatctcgttcgtaca

SEQ ID NO: 54882 - DNA, 25 bp, Homo sapien
cctctataaggaactcgttcgtaca

SEQ ID NO: 54883 - DNA, 25 bp, Homo sapien
cacttcacgaagagtcgacccgagt

SEQ ID NO: 54884 - DNA, 25 bp, Homo sapien
cacttcacgaagtgtcgacccgagt

SEQ ID NO: 54885 - DNA, 25 bp, Homo sapien
cgcccaagaacgaagtcgggcccga

SEQ ID NO: 54886 - DNA, 25 bp, Homo sapien
cgcccaagaacgtagtcgggcccga

SEQ ID NO: 54887 - DNA, 25 bp, Homo sapien
ccacaggagacgatggtccacccgg

SEQ ID NO: 54888 - DNA, 25 bp, Homo sapien
ccacaggagacgttggtccacccgg

SEQ ID NO: 54889 - DNA, 25 bp, Homo sapien
tcgaggagtctacaggcacgcgacc

SEQ ID NO: 54890 - DNA, 25 bp, Homo sapien
tcgaggagtctagaggcacgcgacc

SEQ ID NO: 54891 - DNA, 25 bp, Homo sapien
ttctcggtcttgtttcacgtaacct

SEQ ID NO: 54892 - DNA, 25 bp, Homo sapien
ttctcggtcttgattcacgtaacct

SEQ ID NO: 54893 - DNA, 25 bp, Homo sapien
atttttagctatggtacgtcatccc

SEQ ID NO: 54894 - DNA, 25 bp, Homo sapien
atttttagctatcgtacgtcatccc

SEQ ID NO: 54895 - DNA, 25 bp, Homo sapien
ttttcggtagtttcctagtgtcctc

SEQ ID NO: 54896 - DNA, 25 bp, Homo sapien
ttttcggtagttacctagtgtcctc

SEQ ID NO: 54897 - DNA, 25 bp, Homo sapien
taatgtacgagttcactaagttcca

SEQ ID NO: 54898 - DNA, 25 bp, Homo sapien
taatgtacgagtacactaagttcca

SEQ ID NO: 54899 - DNA, 25 bp, Homo sapien
cttaagtcggcgtactatgtctcca

SEQ ID NO: 54900 - DNA, 25 bp, Homo sapien
cttaagtcggcgaactatgtctcca

SEQ ID NO: 54901 - DNA, 25 bp, Homo sapien
agtttggttgaacagttgtcgtcac

SEQ ID NO: 54902 - DNA, 25 bp, Homo sapien
agtttggttgaagagttgtcgtcac

SEQ ID NO: 54903 - DNA, 25 bp, Homo sapien
aagaggaaaggtccacgctggtgac

SEQ ID NO: 54904 - DNA, 25 bp, Homo sapien
aagaggaaaggtgcacgctggtgac

SEQ ID NO: 54905 - DNA, 25 bp, Homo sapien
aaaggattcgttgacctagttaaac

SEQ ID NO: 54906 - DNA, 25 bp, Homo sapien
aaaggattcgttcacctagttaaac

SEQ ID NO: 54907 - DNA, 25 bp, Homo sapien
aggaggtcttgttttccgtgactgc

SEQ ID NO: 54908 - DNA, 25 bp, Homo sapien
aggaggtcttgtattccgtgactgc

SEQ ID NO: 54909 - DNA, 25 bp, Homo sapien
aaaaaccgtgtttactttacagtag

SEQ ID NO: 54910 - DNA, 25 bp, Homo sapien
aaaaaccgtgttaactttacagtag

SEQ ID NO: 54911 - DNA, 25 bp, Homo sapien
gaaaacaaccgaggaagccacagac

SEQ ID NO: 54912 - DNA, 25 bp, Homo sapien
gaaaacaaccgacgaagccacagac

SEQ ID NO: 54913 - DNA, 25 bp, Homo sapien
tctgtttaaaagttcgagggccaat

SEQ ID NO: 54914 - DNA, 25 bp, Homo sapien
tctgtttaaaagatcgagggccaat

SEQ ID NO: 54915 - DNA, 25 bp, Homo sapien
tttatagagatcatcagggttcaca

SEQ ID NO: 54916 - DNA, 25 bp, Homo sapien
tttatagagatcttcagggttcaca

SEQ ID NO: 54917 - DNA, 25 bp, Homo sapien
cttttgcattgtgaccggttactaa

SEQ ID NO: 54918 - DNA, 25 bp, Homo sapien
cttttgcattgtcaccggttactaa

SEQ ID NO: 54919 - DNA, 25 bp, Homo sapien
ttcgcgaggcggtcgtcgttctcct

SEQ ID NO: 54920 - DNA, 25 bp, Homo sapien
ttcgcgaggcggacgtcgttctcct

SEQ ID NO: 54921 - DNA, 25 bp, Homo sapien
cgaggtccttcctctcgtctacttt

SEQ ID NO: 54922 - DNA, 25 bp, Homo sapien
cgaggtccttccactcgtctacttt

SEQ ID NO: 54923 - DNA, 25 bp, Homo sapien
acccgaattctcacggacgggccgg

SEQ ID NO: 54924 - DNA, 25 bp, Homo sapien
acccgaattctctcggacgggccgg

SEQ ID NO: 54925 - DNA, 25 bp, Homo sapien
tagtgtaccactgtcgacggccgta

SEQ ID NO: 54926 - DNA, 25 bp, Homo sapien
tagtgtaccactctcgacggccgta

SEQ ID NO: 54927 - DNA, 25 bp, Homo sapien
gttaagtcaattctcgtcctccgac

SEQ ID NO: 54928 - DNA, 25 bp, Homo sapien
gttaagtcaattgtcgtcctccgac

SEQ ID NO: 54929 - DNA, 25 bp, Homo sapien
gctcctgaaataacgtgcacaccaa

SEQ ID NO: 54930 - DNA, 25 bp, Homo sapien
gctcctgaaatatcgtgcacaccaa

SEQ ID NO: 54931 - DNA, 25 bp, Homo sapien
ctccaggtataatcgaccagtcaaa

SEQ ID NO: 54932 - DNA, 25 bp, Homo sapien
ctccaggtataaacgaccagtcaaa

SEQ ID NO: 54933 - DNA, 25 bp, Homo sapien
cttttgcgagtaagaccagggtcac

SEQ ID NO: 54934 - DNA, 25 bp, Homo sapien
cttttgcgagtatgaccagggtcac

SEQ ID NO: 54935 - DNA, 25 bp, Homo sapien
gttttgtcgataagactcattttac

SEQ ID NO: 54936 - DNA, 25 bp, Homo sapien
gttttgtcgatatgactcattttac

SEQ ID NO: 54937 - DNA, 25 bp, Homo sapien
attgtccgttatgtgacggtgtcac

SEQ ID NO: 54938 - DNA, 25 bp, Homo sapien
attgtccgttatctgacggtgtcac

SEQ ID NO: 54939 - DNA, 25 bp, Homo sapien
ataagtttactgtccgtccttcgcc

SEQ ID NO: 54940 - DNA, 25 bp, Homo sapien
ataagtttactgaccgtccttcgcc

SEQ ID NO: 54941 - DNA, 25 bp, Homo sapien
gaggtcgaccgagtgttctcttcgc

SEQ ID NO: 54942 - DNA, 25 bp, Homo sapien
gaggtcgaccgactgttctcttcgc

SEQ ID NO: 54943 - DNA, 25 bp, Homo sapien
gtttcaaacatgttctacttgtcgt

SEQ ID NO: 54944 - DNA, 25 bp, Homo sapien
gtttcaaacatgatctacttgtcgt

SEQ ID NO: 54945 - DNA, 25 bp, Homo sapien
gtgtgttgtaaccgtgatttgctct

SEQ ID NO: 54946 - DNA, 25 bp, Homo sapien
gtgtgttgtaacggtgatttgctct

SEQ ID NO: 54947 - DNA, 25 bp, Homo sapien
cctagtttggggtagtgtctgacgc

SEQ ID NO: 54948 - DNA, 25 bp, Homo sapien
cctagtttggggaagtgtctgacgc

SEQ ID NO: 54949 - DNA, 25 bp, Homo sapien
cagggtctccgaggacggtgcaccc

SEQ ID NO: 54950 - DNA, 25 bp, Homo sapien
cagggtctccgacgacggtgcaccc

SEQ ID NO: 54951 - DNA, 25 bp, Homo sapien
cctgggtgccggacggaccgaacct

SEQ ID NO: 54952 - DNA, 25 bp, Homo sapien
cctgggtgccggtcggaccgaacct

SEQ ID NO: 54953 - DNA, 25 bp, Homo sapien
gtcgaatgacatcaccactgtcgac

SEQ ID NO: 54954 - DNA, 25 bp, Homo sapien
gtcgaatgacatgaccactgtcgac

SEQ ID NO: 54955 - DNA, 25 bp, Homo sapien
tgcgacggtgacaaacgcccgcacg

SEQ ID NO: 54956 - DNA, 25 bp, Homo sapien
tgcgacggtgactaacgcccgcacg

SEQ ID NO: 54957 - DNA, 25 bp, Homo sapien
aagcacatgtagagccggcacggag

SEQ ID NO: 54958 - DNA, 25 bp, Homo sapien
aagcacatgtagtgccggcacggag

SEQ ID NO: 54959 - DNA, 25 bp, Homo sapien
tcaggtcgcttctagtccgggggta

SEQ ID NO: 54960 - DNA, 25 bp, Homo sapien
tcaggtcgcttcaagtccgggggta

SEQ ID NO: 54961 - DNA, 25 bp, Homo sapien
aaatttttgcatcaccggtcactgt

SEQ ID NO: 54962 - DNA, 25 bp, Homo sapien
aaatttttgcatgaccggtcactgt

SEQ ID NO: 54963 - DNA, 25 bp, Homo sapien
gttactggtcactgtaccggttcta

SEQ ID NO: 54964 - DNA, 25 bp, Homo sapien
gttactggtcacagtaccggttcta

SEQ ID NO: 54965 - DNA, 25 bp, Homo sapien
tgttacagtcgaacgtaacgggttt

SEQ ID NO: 54966 - DNA, 25 bp, Homo sapien
tgttacagtcgatcgtaacgggttt

SEQ ID NO: 54967 - DNA, 25 bp, Homo sapien
tcgtcgaaccgctgcttcgggtgcg

SEQ ID NO: 54968 - DNA, 25 bp, Homo sapien
tcgtcgaaccgcagcttcgggtgcg

SEQ ID NO: 54969 - DNA, 25 bp, Homo sapien
ctccaggagcgagagacgtggtaca

SEQ ID NO: 54970 - DNA, 25 bp, Homo sapien
ctccaggagcgacagacgtggtaca

SEQ ID NO: 54971 - DNA, 25 bp, Homo sapien
ataacacccaagagaccacgggtta

SEQ ID NO: 54972 - DNA, 25 bp, Homo sapien
ataacacccaagtgaccacgggtta

SEQ ID NO: 54973 - DNA, 25 bp, Homo sapien
gaccagatgtggacacagacgacta

SEQ ID NO: 54974 - DNA, 25 bp, Homo sapien
gaccagatgtggtcacagacgacta

SEQ ID NO: 54975 - DNA, 25 bp, Homo sapien
gcgacagctaggtccggcgtatcga

SEQ ID NO: 54976 - DNA, 25 bp, Homo sapien
gcgacagctaggaccggcgtatcga

SEQ ID NO: 54977 - DNA, 25 bp, Homo sapien
ttgagataaccgatcgggtggtcag

SEQ ID NO: 54978 - DNA, 25 bp, Homo sapien
ttgagataaccgttcgggtggtcag

SEQ ID NO: 54979 - DNA, 25 bp, Homo sapien
tcggaaactgcttcgagtacgccta

SEQ ID NO: 54980 - DNA, 25 bp, Homo sapien
tcggaaactgctacgagtacgccta

SEQ ID NO: 54981 - DNA, 25 bp, Homo sapien
cggtggaccctctttgggtgaccag

SEQ ID NO: 54982 - DNA, 25 bp, Homo sapien
cggtggaccctcattgggtgaccag

SEQ ID NO: 54983 - DNA, 25 bp, Homo sapien
tcgaaggttctttggggattacacc

SEQ ID NO: 54984 - DNA, 25 bp, Homo sapien
tcgaaggttcttaggggattacacc

SEQ ID NO: 54985 - DNA, 25 bp, Homo sapien
tttacagaggctttgggtcctccct

SEQ ID NO: 54986 - DNA, 25 bp, Homo sapien
tttacagaggctatgggtcctccct

SEQ ID NO: 54987 - DNA, 25 bp, Homo sapien
taaaaggttacatggatacccggtt

SEQ ID NO: 54988 - DNA, 25 bp, Homo sapien
taaaaggttacaaggatacccggtt

SEQ ID NO: 54989 - DNA, 25 bp, Homo sapien
gagaatatactcatgtcaagggtct

SEQ ID NO: 54990 - DNA, 25 bp, Homo sapien
gagaatatactcttgtcaagggtct

SEQ ID NO: 54991 - DNA, 25 bp, Homo sapien
agaacgtccattgtcccagtgtcgc

SEQ ID NO: 54992 - DNA, 25 bp, Homo sapien
agaacgtccattctcccagtgtcgc

SEQ ID NO: 54993 - DNA, 25 bp, Homo sapien
agaccatattttccacgctagggtc

SEQ ID NO: 54994 - DNA, 25 bp, Homo sapien
agaccatattttgcacgctagggtc

SEQ ID NO: 54995 - DNA, 25 bp, Homo sapien
ggccacacacgtctgcctgaggtgc

SEQ ID NO: 54996 - DNA, 25 bp, Homo sapien
ggccacacacgtgtgcctgaggtgc

SEQ ID NO: 54997 - DNA, 25 bp, Homo sapien
agtccccagggactctcgggacggt

SEQ ID NO: 54998 - DNA, 25 bp, Homo sapien
agtccccagggagtctcgggacggt

SEQ ID NO: 54999 - DNA, 25 bp, Homo sapien
gacggacccgtcaatccaggtgggt

SEQ ID NO: 55000 - DNA, 25 bp, Homo sapien
gacggacccgtctatccaggtgggt

SEQ ID NO: 55001 - DNA, 25 bp, Homo sapien
cggaacgaccacttccgaaggagtt

SEQ ID NO: 55002 - DNA, 25 bp, Homo sapien
cggaacgaccacatccgaaggagtt

SEQ ID NO: 55003 - DNA, 25 bp, Homo sapien
tccaccgggcacgaccgtggagtgt

SEQ ID NO: 55004 - DNA, 25 bp, Homo sapien
tccaccgggcaccaccgtggagtgt

SEQ ID NO: 55005 - DNA, 25 bp, Homo sapien
taactgaacgtcaactcgtggtggt

SEQ ID NO: 55006 - DNA, 25 bp, Homo sapien
taactgaacgtctactcgtggtggt

SEQ ID NO: 55007 - DNA, 25 bp, Homo sapien
ttgtcgttctactctgtggtaccgt

SEQ ID NO: 55008 - DNA, 25 bp, Homo sapien
ttgtcgttctacactgtggtaccgt

SEQ ID NO: 55009 - DNA, 25 bp, Homo sapien
agtcccttttccacgggtcgacggt

SEQ ID NO: 55010 - DNA, 25 bp, Homo sapien
agtcccttttcctcgggtcgacggt

SEQ ID NO: 55011 - DNA, 25 bp, Homo sapien
cgtctctattgtgtgacagttatgt

SEQ ID NO: 55012 - DNA, 25 bp, Homo sapien
cgtctctattgtctgacagttatgt

SEQ ID NO: 55013 - DNA, 25 bp, Homo sapien
gtggatatcgtggtcgaggtctacc

SEQ ID NO: 55014 - DNA, 25 bp, Homo sapien
gtggatatcgtgctcgaggtctacc

SEQ ID NO: 55015 - DNA, 25 bp, Homo sapien
ttcggaacgtctgtcgagtctcaac

SEQ ID NO: 55016 - DNA, 25 bp, Homo sapien
ttcggaacgtctctcgagtctcaac

SEQ ID NO: 55017 - DNA, 25 bp, Homo sapien
tgcctacggaacaagttatttccat

SEQ ID NO: 55018 - DNA, 25 bp, Homo sapien
tgcctacggaactagttatttccat

SEQ ID NO: 55019 - DNA, 25 bp, Homo sapien
ccgacgaatcgttggtggtagttta

SEQ ID NO: 55020 - DNA, 25 bp, Homo sapien
ccgacgaatcgtaggtggtagttta

SEQ ID NO: 55021 - DNA, 25 bp, Homo sapien
gagggaagtctcgagacgtttttct

SEQ ID NO: 55022 - DNA, 25 bp, Homo sapien
gagggaagtctccagacgtttttct

SEQ ID NO: 55023 - DNA, 25 bp, Homo sapien
acattcggattcctggtgcgttttc

SEQ ID NO: 55024 - DNA, 25 bp, Homo sapien
acattcggattcgtggtgcgttttc

SEQ ID NO: 55025 - DNA, 25 bp, Homo sapien
agagagatacagtttgaccgaagtc

SEQ ID NO: 55026 - DNA, 25 bp, Homo sapien
agagagatacagattgaccgaagtc

SEQ ID NO: 55027 - DNA, 25 bp, Homo sapien
cagaggacatctttagactcaatac

SEQ ID NO: 55028 - DNA, 25 bp, Homo sapien
cagaggacatctatagactcaatac

SEQ ID NO: 55029 - DNA, 25 bp, Homo sapien
cagagtcgaggtccagcctgtaccg

SEQ ID NO: 55030 - DNA, 25 bp, Homo sapien
cagagtcgaggtgcagcctgtaccg

SEQ ID NO: 55031 - DNA, 25 bp, Homo sapien
agtttggtgtcgcactacccgactt

SEQ ID NO: 55032 - DNA, 25 bp, Homo sapien
agtttggtgtcggactacccgactt

SEQ ID NO: 55033 - DNA, 25 bp, Homo sapien
ttgtcagcgacttgccgcacgtaat

SEQ ID NO: 55034 - DNA, 25 bp, Homo sapien
ttgtcagcgactagccgcacgtaat

SEQ ID NO: 55035 - DNA, 25 bp, Homo sapien
aggtttaccctatatgaatcaagta

SEQ ID NO: 55036 - DNA, 25 bp, Homo sapien
aggtttaccctaaatgaatcaagta

SEQ ID NO: 55037 - DNA, 25 bp, Homo sapien
tgtccgtcgaaattctccgactaat

SEQ ID NO: 55038 - DNA, 25 bp, Homo sapien
tgtccgtcgaaaatctccgactaat

SEQ ID NO: 55039 - DNA, 25 bp, Homo sapien
tgtcctacgaacactctacccgtgg

SEQ ID NO: 55040 - DNA, 25 bp, Homo sapien
tgtcctacgaactctctacccgtgg

SEQ ID NO: 55041 - DNA, 25 bp, Homo sapien
tgctgctacatagttgtctctttga

SEQ ID NO: 55042 - DNA, 25 bp, Homo sapien
tgctgctacatacttgtctctttga

SEQ ID NO: 55043 - DNA, 25 bp, Homo sapien
cctatctcttatggtctgtttgtaa

SEQ ID NO: 55044 - DNA, 25 bp, Homo sapien
cctatctcttatcgtctgtttgtaa

SEQ ID NO: 55045 - DNA, 25 bp, Homo sapien
aagtcgtcttatacagttacttggt

SEQ ID NO: 55046 - DNA, 25 bp, Homo sapien
aagtcgtcttattcagttacttggt

SEQ ID NO: 55047 - DNA, 25 bp, Homo sapien
ggaaaagtttactactattctcttg

SEQ ID NO: 55048 - DNA, 25 bp, Homo sapien
ggaaaagtttacaactattctcttg

SEQ ID NO: 55049 - DNA, 25 bp, Homo sapien
accatagttatttcgggtctataag

SEQ ID NO: 55050 - DNA, 25 bp, Homo sapien
accatagttattacgggtctataag

SEQ ID NO: 55051 - DNA, 25 bp, Homo sapien
atgagaggactttccgttcttcacg

SEQ ID NO: 55052 - DNA, 25 bp, Homo sapien
atgagaggacttaccgttcttcacg

SEQ ID NO: 55053 - DNA, 25 bp, Homo sapien
gtaggcgaagacaccgtttatgcag

SEQ ID NO: 55054 - DNA, 25 bp, Homo sapien
gtaggcgaagactccgtttatgcag

SEQ ID NO: 55055 - DNA, 25 bp, Homo sapien
tcttcgtccgacacccctgagtgtg

SEQ ID NO: 55056 - DNA, 25 bp, Homo sapien
tcttcgtccgactcccctgagtgtg

SEQ ID NO: 55057 - DNA, 25 bp, Homo sapien
actggtgcgacgtccacctgagcag

SEQ ID NO: 55058 - DNA, 25 bp, Homo sapien
actggtgcgacgaccacctgagcag

SEQ ID NO: 55059 - DNA, 25 bp, Homo sapien
aacggttcgagagacactgtgatac

SEQ ID NO: 55060 - DNA, 25 bp, Homo sapien
aacggttcgagacacactgtgatac

SEQ ID NO: 55061 - DNA, 25 bp, Homo sapien
taaagttaggacaccgtgtgtgact

SEQ ID NO: 55062 - DNA, 25 bp, Homo sapien
taaagttaggactccgtgtgtgact

SEQ ID NO: 55063 - DNA, 25 bp, Homo sapien
tagatacgttatactccgtgttttt

SEQ ID NO: 55064 - DNA, 25 bp, Homo sapien
tagatacgttattctccgtgttttt

SEQ ID NO: 55065 - DNA, 25 bp, Homo sapien
ggtgagtacgtttggccgtttcttt

SEQ ID NO: 55066 - DNA, 25 bp, Homo sapien
ggtgagtacgttaggccgtttcttt

SEQ ID NO: 55067 - DNA, 25 bp, Homo sapien
ggggactttaccagtcttacctccg

SEQ ID NO: 55068 - DNA, 25 bp, Homo sapien
ggggactttacctgtcttacctccg

SEQ ID NO: 55069 - DNA, 25 bp, Homo sapien
gggcacagagtacgtagtttcctcc

SEQ ID NO: 55070 - DNA, 25 bp, Homo sapien
gggcacagagtaggtagtttcctcc

SEQ ID NO: 55071 - DNA, 25 bp, Homo sapien
agaaggcgcagaacctgggtcgccc

SEQ ID NO: 55072 - DNA, 25 bp, Homo sapien
agaaggcgcagatcctgggtcgccc

SEQ ID NO: 55073 - DNA, 25 bp, Homo sapien
cgctgtggcagatccgaaggacccc

SEQ ID NO: 55074 - DNA, 25 bp, Homo sapien
cgctgtggcagaaccgaaggacccc

SEQ ID NO: 55075 - DNA, 25 bp, Homo sapien
tccacaaataacgtagagtctcccg

SEQ ID NO: 55076 - DNA, 25 bp, Homo sapien
tccacaaataacctagagtctcccg

SEQ ID NO: 55077 - DNA, 25 bp, Homo sapien
accagagactcttatcgcagtccca

SEQ ID NO: 55078 - DNA, 25 bp, Homo sapien
accagagactctaatcgcagtccca

SEQ ID NO: 55079 - DNA, 25 bp, Homo sapien
agacaggacgttttactgtctcccc

SEQ ID NO: 55080 - DNA, 25 bp, Homo sapien
agacaggacgttatactgtctcccc

SEQ ID NO: 55081 - DNA, 25 bp, Homo sapien
agatagtgtcttgtacttgcgaccc

SEQ ID NO: 55082 - DNA, 25 bp, Homo sapien
agatagtgtcttctacttgcgaccc

SEQ ID NO: 55083 - DNA, 25 bp, Homo sapien
aggcgacgtgcctctgagaccacac

SEQ ID NO: 55084 - DNA, 25 bp, Homo sapien
aggcgacgtgccactgagaccacac

SEQ ID NO: 55085 - DNA, 25 bp, Homo sapien
accgtgacgtcctcttaagtcaaac

SEQ ID NO: 55086 - DNA, 25 bp, Homo sapien
accgtgacgtccacttaagtcaaac

SEQ ID NO: 55087 - DNA, 25 bp, Homo sapien
cgtgtttcgtctattatctacagaa

SEQ ID NO: 55088 - DNA, 25 bp, Homo sapien
cgtgtttcgtcttttatctacagaa

SEQ ID NO: 55089 - DNA, 25 bp, Homo sapien
aatctgttcggttctttatacaaag

SEQ ID NO: 55090 - DNA, 25 bp, Homo sapien
aatctgttcggtactttatacaaag

SEQ ID NO: 55091 - DNA, 25 bp, Homo sapien
ggggtgacttgtcctagtgacgtta

SEQ ID NO: 55092 - DNA, 25 bp, Homo sapien
ggggtgacttgtgctagtgacgtta

SEQ ID NO: 55093 - DNA, 25 bp, Homo sapien
tagaggtgtgagtgtcattcgagcc

SEQ ID NO: 55094 - DNA, 25 bp, Homo sapien
tagaggtgtgagagtcattcgagcc

SEQ ID NO: 55095 - DNA, 25 bp, Homo sapien
gtcccgatcaacaggtttacgaacc

SEQ ID NO: 55096 - DNA, 25 bp, Homo sapien
gtcccgatcaactggtttacgaacc

SEQ ID NO: 55097 - DNA, 25 bp, Homo sapien
ccacggtcacagtttctaaccgaac

SEQ ID NO: 55098 - DNA, 25 bp, Homo sapien
ccacggtcacagattctaaccgaac

SEQ ID NO: 55099 - DNA, 25 bp, Homo sapien
ccctggtccatatcctcgatatgac

SEQ ID NO: 55100 - DNA, 25 bp, Homo sapien
ccctggtccataacctcgatatgac

SEQ ID NO: 55101 - DNA, 25 bp, Homo sapien
ccatcggattaaagaccgtatgtta

SEQ ID NO: 55102 - DNA, 25 bp, Homo sapien
ccatcggattaatgaccgtatgtta

SEQ ID NO: 55103 - DNA, 25 bp, Homo sapien
cgaactacgtttgtatacattgtta

SEQ ID NO: 55104 - DNA, 25 bp, Homo sapien
cgaactacgtttctatacattgtta

SEQ ID NO: 55105 - DNA, 25 bp, Homo sapien
tgggaacactttatctttaagtact

SEQ ID NO: 55106 - DNA, 25 bp, Homo sapien
tgggaacactttttctttaagtact

SEQ ID NO: 55107 - DNA, 25 bp, Homo sapien
gagagagacagagtttccttgtgtc

SEQ ID NO: 55108 - DNA, 25 bp, Homo sapien
gagagagacagactttccttgtgtc

SEQ ID NO: 55109 - DNA, 25 bp, Homo sapien
gtggctcgagactttcactgtcaca

SEQ ID NO: 55110 - DNA, 25 bp, Homo sapien
gtggctcgagacattcactgtcaca

SEQ ID NO: 55111 - DNA, 25 bp, Homo sapien
gagggctgagaaactacacgcaaac

SEQ ID NO: 55112 - DNA, 25 bp, Homo sapien
gagggctgagaatctacacgcaaac

SEQ ID NO: 55113 - DNA, 25 bp, Homo sapien
aggtcacaggtgtctactaccccac

SEQ ID NO: 55114 - DNA, 25 bp, Homo sapien
aggtcacaggtgactactaccccac

SEQ ID NO: 55115 - DNA, 25 bp, Homo sapien
aaatgagacgttacacttacggtaa

SEQ ID NO: 55116 - DNA, 25 bp, Homo sapien
aaatgagacgtttcacttacggtaa

SEQ ID NO: 55117 - DNA, 25 bp, Homo sapien
gaagagcattaagtacgggccgaaa

SEQ ID NO: 55118 - DNA, 25 bp, Homo sapien
gaagagcattaactacgggccgaaa

SEQ ID NO: 55119 - DNA, 25 bp, Homo sapien
tacttccgggcatcagggcagaaac

SEQ ID NO: 55120 - DNA, 25 bp, Homo sapien
tacttccgggcaacagggcagaaac

SEQ ID NO: 55121 - DNA, 25 bp, Homo sapien
tcacgaagaactacgagaatcaaca

SEQ ID NO: 55122 - DNA, 25 bp, Homo sapien
tcacgaagaacttcgagaatcaaca

SEQ ID NO: 55123 - DNA, 25 bp, Homo sapien
cgtgacagaacgataaacttttacc

SEQ ID NO: 55124 - DNA, 25 bp, Homo sapien
cgtgacagaacgttaaacttttacc

SEQ ID NO: 55125 - DNA, 25 bp, Homo sapien
gggatgtataaatcacattcatgtg

SEQ ID NO: 55126 - DNA, 25 bp, Homo sapien
gggatgtataaaacacattcatgtg

SEQ ID NO: 55127 - DNA, 25 bp, Homo sapien
tatgacgaagactacacttcctctg

SEQ ID NO: 55128 - DNA, 25 bp, Homo sapien
tatgacgaagacaacacttcctctg

SEQ ID NO: 55129 - DNA, 25 bp, Homo sapien
atagaacgagggtaatcaacgtctg

SEQ ID NO: 55130 - DNA, 25 bp, Homo sapien
atagaacgagggaaatcaacgtctg

SEQ ID NO: 55131 - DNA, 25 bp, Homo sapien
tgacaaaagaagttcagtctcagcc

SEQ ID NO: 55132 - DNA, 25 bp, Homo sapien
tgacaaaagaagatcagtctcagcc

SEQ ID NO: 55133 - DNA, 25 bp, Homo sapien
gaaatacttagatctgtcttatgac

SEQ ID NO: 55134 - DNA, 25 bp, Homo sapien
gaaatacttagaactgtcttatgac

SEQ ID NO: 55135 - DNA, 25 bp, Homo sapien
acgagagacgtcgagacctttttac

SEQ ID NO: 55136 - DNA, 25 bp, Homo sapien
acgagagacgtccagacctttttac

SEQ ID NO: 55137 - DNA, 25 bp, Homo sapien
tcagtcgagagtaatgtttttcttt

SEQ ID NO: 55138 - DNA, 25 bp, Homo sapien
tcagtcgagagttatgtttttcttt

SEQ ID NO: 55139 - DNA, 25 bp, Homo sapien
cacgagggtaatcgtttattctatt

SEQ ID NO: 55140 - DNA, 25 bp, Homo sapien
cacgagggtaatggtttattctatt

SEQ ID NO: 55141 - DNA, 25 bp, Homo sapien
ctaggaccaccttattatgtttagt

SEQ ID NO: 55142 - DNA, 25 bp, Homo sapien
ctaggaccacctaattatgtttagt

SEQ ID NO: 55143 - DNA, 25 bp, Homo sapien
ccgtgttcagtacactgttatataa

SEQ ID NO: 55144 - DNA, 25 bp, Homo sapien
ccgtgttcagtagactgttatataa

SEQ ID NO: 55145 - DNA, 25 bp, Homo sapien
cgaaggacgactgtcggtgttacga

SEQ ID NO: 55146 - DNA, 25 bp, Homo sapien
cgaaggacgactctcggtgttacga

SEQ ID NO: 55147 - DNA, 25 bp, Homo sapien
ttcgacgaagactaagggtcgtttc

SEQ ID NO: 55148 - DNA, 25 bp, Homo sapien
ttcgacgaagacaaagggtcgtttc

SEQ ID NO: 55149 - DNA, 25 bp, Homo sapien
tttagatgaactagtcctcgtgtaa

SEQ ID NO: 55150 - DNA, 25 bp, Homo sapien
tttagatgaacttgtcctcgtgtaa

SEQ ID NO: 55151 - DNA, 25 bp, Homo sapien
cccaccgtaggacactaccggggaa

SEQ ID NO: 55152 - DNA, 25 bp, Homo sapien
cccaccgtaggagactaccggggaa

SEQ ID NO: 55153 - DNA, 25 bp, Homo sapien
gtagcgtcgtgtcctctgtgtgaac

SEQ ID NO: 55154 - DNA, 25 bp, Homo sapien
gtagcgtcgtgtgctctgtgtgaac

SEQ ID NO: 55155 - DNA, 25 bp, Homo sapien
gaacgtatgagattttgcgtgtcac

SEQ ID NO: 55156 - DNA, 25 bp, Homo sapien
gaacgtatgagaatttgcgtgtcac

SEQ ID NO: 55157 - DNA, 25 bp, Homo sapien
ctctacgaccctagggcgaattact

SEQ ID NO: 55158 - DNA, 25 bp, Homo sapien
ctctacgacccttgggcgaattact

SEQ ID NO: 55159 - DNA, 25 bp, Homo sapien
tccaccgtctcaaggtcctttacgt

SEQ ID NO: 55160 - DNA, 25 bp, Homo sapien
tccaccgtctcatggtcctttacgt

SEQ ID NO: 55161 - DNA, 25 bp, Homo sapien
cctcactcctacttgactggtttcg

SEQ ID NO: 55162 - DNA, 25 bp, Homo sapien
cctcactcctacatgactggtttcg

SEQ ID NO: 55163 - DNA, 25 bp, Homo sapien
caaatctgtcctcatttggtgtcgg

SEQ ID NO: 55164 - DNA, 25 bp, Homo sapien
caaatctgtcctgatttggtgtcgg

SEQ ID NO: 55165 - DNA, 25 bp, Homo sapien
ttcacttccttctgtatagtttcgg

SEQ ID NO: 55166 - DNA, 25 bp, Homo sapien
ttcacttccttcagtatagtttcgg

SEQ ID NO: 55167 - DNA, 25 bp, Homo sapien
ctctcttcaccgtgtgcgtttcggt

SEQ ID NO: 55168 - DNA, 25 bp, Homo sapien
ctctcttcaccgagtgcgtttcggt

SEQ ID NO: 55169 - DNA, 25 bp, Homo sapien
gacttaagaagtatgacgtgtcctg

SEQ ID NO: 55170 - DNA, 25 bp, Homo sapien
gacttaagaagtttgacgtgtcctg

SEQ ID NO: 55171 - DNA, 25 bp, Homo sapien
tctagacacatcaatgtcggtttcc

SEQ ID NO: 55172 - DNA, 25 bp, Homo sapien
tctagacacatctatgtcggtttcc

SEQ ID NO: 55173 - DNA, 25 bp, Homo sapien
gtttccatcagtaattgtcagtcct

SEQ ID NO: 55174 - DNA, 25 bp, Homo sapien
gtttccatcagttattgtcagtcct

SEQ ID NO: 55175 - DNA, 25 bp, Homo sapien
gtcttcctattcgttctgaagtctt

SEQ ID NO: 55176 - DNA, 25 bp, Homo sapien
gtcttcctattccttctgaagtctt

SEQ ID NO: 55177 - DNA, 25 bp, Homo sapien
cttcttacccttgttgtagggtgtt

SEQ ID NO: 55178 - DNA, 25 bp, Homo sapien
cttcttacccttcttgtagggtgtt

SEQ ID NO: 55179 - DNA, 25 bp, Homo sapien
ctagtccactgtgctccatgggtgt

SEQ ID NO: 55180 - DNA, 25 bp, Homo sapien
ctagtccactgtcctccatgggtgt

SEQ ID NO: 55181 - DNA, 25 bp, Homo sapien
accacccttaggtccggttatgtct

SEQ ID NO: 55182 - DNA, 25 bp, Homo sapien
accacccttaggaccggttatgtct

SEQ ID NO: 55183 - DNA, 25 bp, Homo sapien
ttcgtgtacagatcgaagtctcatc

SEQ ID NO: 55184 - DNA, 25 bp, Homo sapien
ttcgtgtacagaacgaagtctcatc

SEQ ID NO: 55185 - DNA, 25 bp, Homo sapien
gtctacggtctggagtaacacaaac

SEQ ID NO: 55186 - DNA, 25 bp, Homo sapien
gtctacggtctgcagtaacacaaac

SEQ ID NO: 55187 - DNA, 25 bp, Homo sapien
gcagacctcctggacgtcacagcga

SEQ ID NO: 55188 - DNA, 25 bp, Homo sapien
gcagacctcctgcacgtcacagcga

SEQ ID NO: 55189 - DNA, 25 bp, Homo sapien
gacaggtcgatcgactgacatcggt

SEQ ID NO: 55190 - DNA, 25 bp, Homo sapien
gacaggtcgatccactgacatcggt

SEQ ID NO: 55191 - DNA, 25 bp, Homo sapien
gagaactcgtgcaactgcgtctaga

SEQ ID NO: 55192 - DNA, 25 bp, Homo sapien
gagaactcgtgctactgcgtctaga

SEQ ID NO: 55193 - DNA, 25 bp, Homo sapien
gaccgtctgtctaagtcgactagtt

SEQ ID NO: 55194 - DNA, 25 bp, Homo sapien
gaccgtctgtcttagtcgactagtt

SEQ ID NO: 55195 - DNA, 25 bp, Homo sapien
tctcctacacccttagggtcgagtt

SEQ ID NO: 55196 - DNA, 25 bp, Homo sapien
tctcctacacccatagggtcgagtt

SEQ ID NO: 55197 - DNA, 25 bp, Homo sapien
cgccgccgacgacgtgtcacggtgt

SEQ ID NO: 55198 - DNA, 25 bp, Homo sapien
cgccgccgacgaggtgtcacggtgt

SEQ ID NO: 55199 - DNA, 25 bp, Homo sapien
agccctcgaccgagaagtcccgagt

SEQ ID NO: 55200 - DNA, 25 bp, Homo sapien
agccctcgaccgtgaagtcccgagt

SEQ ID NO: 55201 - DNA, 25 bp, Homo sapien
aagcccgacgtaccaggggccgagt

SEQ ID NO: 55202 - DNA, 25 bp, Homo sapien
aagcccgacgtagcaggggccgagt

SEQ ID NO: 55203 - DNA, 25 bp, Homo sapien
cggacccaacactagtcgaggttga

SEQ ID NO: 55204 - DNA, 25 bp, Homo sapien
cggacccaacacaagtcgaggttga

SEQ ID NO: 55205 - DNA, 25 bp, Homo sapien
gtcttgaacgatggtcggactcctc

SEQ ID NO: 55206 - DNA, 25 bp, Homo sapien
gtcttgaacgatcgtcggactcctc

SEQ ID NO: 55207 - DNA, 25 bp, Homo sapien
tgtctatgggattgtgacggttctc

SEQ ID NO: 55208 - DNA, 25 bp, Homo sapien
tgtctatgggatagtgacggttctc

SEQ ID NO: 55209 - DNA, 25 bp, Homo sapien
aaggtagacaggacctagagcggcc

SEQ ID NO: 55210 - DNA, 25 bp, Homo sapien
aaggtagacaggtcctagagcggcc

SEQ ID NO: 55211 - DNA, 25 bp, Homo sapien
gagacatatagtctcaacgtcggat

SEQ ID NO: 55212 - DNA, 25 bp, Homo sapien
gagacatatagtgtcaacgtcggat

SEQ ID NO: 55213 - DNA, 25 bp, Homo sapien
gcacagtatgttataggtcgtgtct

SEQ ID NO: 55214 - DNA, 25 bp, Homo sapien
gcacagtatgttttaggtcgtgtct

SEQ ID NO: 55215 - DNA, 25 bp, Homo sapien
gggtccaccgggtttcgttgtgtct

SEQ ID NO: 55216 - DNA, 25 bp, Homo sapien
gggtccaccgggattcgttgtgtct

SEQ ID NO: 55217 - DNA, 25 bp, Homo sapien
gttatacactaacaactcagggact

SEQ ID NO: 55218 - DNA, 25 bp, Homo sapien
gttatacactaagaactcagggact

SEQ ID NO: 55219 - DNA, 25 bp, Homo sapien
ctaccgagatgaacacgacagagtc

SEQ ID NO: 55220 - DNA, 25 bp, Homo sapien
ctaccgagatgatcacgacagagtc

SEQ ID NO: 55221 - DNA, 25 bp, Homo sapien
aaaccaccggggttcgaccgagatg

SEQ ID NO: 55222 - DNA, 25 bp, Homo sapien
aaaccaccggggatcgaccgagatg

SEQ ID NO: 55223 - DNA, 25 bp, Homo sapien
aataaaggtgtcgtatcccacgaga

SEQ ID NO: 55224 - DNA, 25 bp, Homo sapien
aataaaggtgtcctatcccacgaga

SEQ ID NO: 55225 - DNA, 25 bp, Homo sapien
cgaactaatatcttgtaacacggac

SEQ ID NO: 55226 - DNA, 25 bp, Homo sapien
cgaactaatatcatgtaacacggac

SEQ ID NO: 55227 - DNA, 25 bp, Homo sapien
cacaaataataggtgacagactctc

SEQ ID NO: 55228 - DNA, 25 bp, Homo sapien
cacaaataatagctgacagactctc

SEQ ID NO: 55229 - DNA, 25 bp, Homo sapien
agcaactgtttccttaagtactagg

SEQ ID NO: 55230 - DNA, 25 bp, Homo sapien
agcaactgtttcgttaagtactagg

SEQ ID NO: 55231 - DNA, 25 bp, Homo sapien
gtctcaaccctctttcggactaaga

SEQ ID NO: 55232 - DNA, 25 bp, Homo sapien
gtctcaaccctcattcggactaaga

SEQ ID NO: 55233 - DNA, 25 bp, Homo sapien
caacaccgtcctggagtaatcgacg

SEQ ID NO: 55234 - DNA, 25 bp, Homo sapien
caacaccgtcctcgagtaatcgacg

SEQ ID NO: 55235 - DNA, 25 bp, Homo sapien
tttgttacagtcctacgggacaaac

SEQ ID NO: 55236 - DNA, 25 bp, Homo sapien
tttgttacagtcgtacgggacaaac

SEQ ID NO: 55237 - DNA, 25 bp, Homo sapien
aaagaccactatcgaggacggtaaa

SEQ ID NO: 55238 - DNA, 25 bp, Homo sapien
aaagaccactatggaggacggtaaa

SEQ ID NO: 55239 - DNA, 25 bp, Homo sapien
ggaaaaaggttacagtaccttaaac

SEQ ID NO: 55240 - DNA, 25 bp, Homo sapien
ggaaaaaggttagagtaccttaaac

SEQ ID NO: 55241 - DNA, 25 bp, Homo sapien
gaaaaaggagactttacttcctgat

SEQ ID NO: 55242 - DNA, 25 bp, Homo sapien
gaaaaaggagacattacttcctgat

SEQ ID NO: 55243 - DNA, 25 bp, Homo sapien
agtagaagatggtaaaataccaccc

SEQ ID NO: 55244 - DNA, 25 bp, Homo sapien
agtagaagatggaaaaataccaccc

SEQ ID NO: 55245 - DNA, 25 bp, Homo sapien
agtgataattaacatgctccgtttc

SEQ ID NO: 55246 - DNA, 25 bp, Homo sapien
agtgataattaagatgctccgtttc

SEQ ID NO: 55247 - DNA, 25 bp, Homo sapien
acttagtcgacacgttctcttatag

SEQ ID NO: 55248 - DNA, 25 bp, Homo sapien
acttagtcgacaggttctcttatag

SEQ ID NO: 55249 - DNA, 25 bp, Homo sapien
gtgttttgaacgatctcgtctcata

SEQ ID NO: 55250 - DNA, 25 bp, Homo sapien
gtgttttgaacgttctcgtctcata

SEQ ID NO: 55251 - DNA, 25 bp, Homo sapien
atctgtgtgacaatcccgtctggtt

SEQ ID NO: 55252 - DNA, 25 bp, Homo sapien
atctgtgtgacattcccgtctggtt

SEQ ID NO: 55253 - DNA, 25 bp, Homo sapien
ggtggtagacctacctctatgttat

SEQ ID NO: 55254 - DNA, 25 bp, Homo sapien
ggtggtagaccttcctctatgttat

SEQ ID NO: 55255 - DNA, 25 bp, Homo sapien
gtctgtacacgaaagtctctcttat

SEQ ID NO: 55256 - DNA, 25 bp, Homo sapien
gtctgtacacgatagtctctcttat

SEQ ID NO: 55257 - DNA, 25 bp, Homo sapien
gtcatcggacgtatctacgttacta

SEQ ID NO: 55258 - DNA, 25 bp, Homo sapien
gtcatcggacgtttctacgttacta

SEQ ID NO: 55259 - DNA, 25 bp, Homo sapien
agacggatcgtcttcctcagtgtcc

SEQ ID NO: 55260 - DNA, 25 bp, Homo sapien
agacggatcgtcatcctcagtgtcc

SEQ ID NO: 55261 - DNA, 25 bp, Homo sapien
ctttgatgattgtagaaatcactct

SEQ ID NO: 55262 - DNA, 25 bp, Homo sapien
ctttgatgattgaagaaatcactct

SEQ ID NO: 55263 - DNA, 25 bp, Homo sapien
ctcttgattgtggaactagtacaac

SEQ ID NO: 55264 - DNA, 25 bp, Homo sapien
ctcttgattgtgcaactagtacaac

SEQ ID NO: 55265 - DNA, 25 bp, Homo sapien
taatctagtatgaaaacggtcgctc

SEQ ID NO: 55266 - DNA, 25 bp, Homo sapien
taatctagtatgtaaacggtcgctc

SEQ ID NO: 55267 - DNA, 25 bp, Homo sapien
cccttcgtattgaaagtcttcagta

SEQ ID NO: 55268 - DNA, 25 bp, Homo sapien
cccttcgtattgtaagtcttcagta

SEQ ID NO: 55269 - DNA, 25 bp, Homo sapien
caactcgtgtcctatacttgtccaa

SEQ ID NO: 55270 - DNA, 25 bp, Homo sapien
caactcgtgtccaatacttgtccaa

SEQ ID NO: 55271 - DNA, 25 bp, Homo sapien
tttctgttaccgttattctgggaga

SEQ ID NO: 55272 - DNA, 25 bp, Homo sapien
tttctgttaccgatattctgggaga

SEQ ID NO: 55273 - DNA, 25 bp, Homo sapien
tttcacgttcggtcgtttttgcgag

SEQ ID NO: 55274 - DNA, 25 bp, Homo sapien
tttcacgttcggacgtttttgcgag

SEQ ID NO: 55275 - DNA, 25 bp, Homo sapien
ctcccagagagttctctcttgcggt

SEQ ID NO: 55276 - DNA, 25 bp, Homo sapien
ctcccagagagtactctcttgcggt

SEQ ID NO: 55277 - DNA, 25 bp, Homo sapien
taccgagaccgagaattctactcgt

SEQ ID NO: 55278 - DNA, 25 bp, Homo sapien
taccgagaccgacaattctactcgt

SEQ ID NO: 55279 - DNA, 25 bp, Homo sapien
ggacttcaagtgaccgaatgttggt

SEQ ID NO: 55280 - DNA, 25 bp, Homo sapien
ggacttcaagtgtccgaatgttggt

SEQ ID NO: 55281 - DNA, 25 bp, Homo sapien
ccgtttaaagtgtccggatggtggt

SEQ ID NO: 55282 - DNA, 25 bp, Homo sapien
ccgtttaaagtgaccggatggtggt

SEQ ID NO: 55283 - DNA, 25 bp, Homo sapien
ggtttgagataaacacgttgtttcc

SEQ ID NO: 55284 - DNA, 25 bp, Homo sapien
ggtttgagataatcacgttgtttcc

SEQ ID NO: 55285 - DNA, 25 bp, Homo sapien
tgggtcacgggcatctcggccttcc

SEQ ID NO: 55286 - DNA, 25 bp, Homo sapien
tgggtcacgggcttctcggccttcc

SEQ ID NO: 55287 - DNA, 25 bp, Homo sapien
gtgtttatgtcgactggtcttccag

SEQ ID NO: 55288 - DNA, 25 bp, Homo sapien
gtgtttatgtcgtctggtcttccag

SEQ ID NO: 55289 - DNA, 25 bp, Homo sapien
ttctgtttgtcatagccgtctcccg

SEQ ID NO: 55290 - DNA, 25 bp, Homo sapien
ttctgtttgtcaaagccgtctcccg

SEQ ID NO: 55291 - DNA, 25 bp, Homo sapien
tcgtggagtggaaaagaatctcctc

SEQ ID NO: 55292 - DNA, 25 bp, Homo sapien
tcgtggagtggataagaatctcctc

SEQ ID NO: 55293 - DNA, 25 bp, Homo sapien
gcgacgtggcacaggactcctctgt

SEQ ID NO: 55294 - DNA, 25 bp, Homo sapien
gcgacgtggcactggactcctctgt

SEQ ID NO: 55295 - DNA, 25 bp, Homo sapien
ggtggttaccgtaaggacctcctgt

SEQ ID NO: 55296 - DNA, 25 bp, Homo sapien
ggtggttaccgttaggacctcctgt

SEQ ID NO: 55297 - DNA, 25 bp, Homo sapien
tagaccgactccaggaactacctgt

SEQ ID NO: 55298 - DNA, 25 bp, Homo sapien
tagaccgactcctggaactacctgt

SEQ ID NO: 55299 - DNA, 25 bp, Homo sapien
ccctcgagagaagaggaggtccttt

SEQ ID NO: 55300 - DNA, 25 bp, Homo sapien
ccctcgagagaacaggaggtccttt

SEQ ID NO: 55301 - DNA, 25 bp, Homo sapien
cacctcagagagtcagggccgcaag

SEQ ID NO: 55302 - DNA, 25 bp, Homo sapien
cacctcagagagacagggccgcaag

SEQ ID NO: 55303 - DNA, 25 bp, Homo sapien
acaggggaaacacctggtcgaaggt

SEQ ID NO: 55304 - DNA, 25 bp, Homo sapien
acaggggaaacagctggtcgaaggt

SEQ ID NO: 55305 - DNA, 25 bp, Homo sapien
gcacctggaaacctctaatagaaga

SEQ ID NO: 55306 - DNA, 25 bp, Homo sapien
gcacctggaaacgtctaatagaaga

SEQ ID NO: 55307 - DNA, 25 bp, Homo sapien
actctgtacgaaacccttatgaggg

SEQ ID NO: 55308 - DNA, 25 bp, Homo sapien
actctgtacgaatcccttatgaggg

SEQ ID NO: 55309 - DNA, 25 bp, Homo sapien
taaaatcaaggtctcttccgtcacg

SEQ ID NO: 55310 - DNA, 25 bp, Homo sapien
taaaatcaaggtgtcttccgtcacg

SEQ ID NO: 55311 - DNA, 25 bp, Homo sapien
tcactaagtgaagaattttcaccgt

SEQ ID NO: 55312 - DNA, 25 bp, Homo sapien
tcactaagtgaacaattttcaccgt

SEQ ID NO: 55313 - DNA, 25 bp, Homo sapien
ccttgagtaccgaagtgttttatcg

SEQ ID NO: 55314 - DNA, 25 bp, Homo sapien
ccttgagtaccgtagtgttttatcg

SEQ ID NO: 55315 - DNA, 25 bp, Homo sapien
attaaagagtctcttgtttctgact

SEQ ID NO: 55316 - DNA, 25 bp, Homo sapien
attaaagagtctgttgtttctgact

SEQ ID NO: 55317 - DNA, 25 bp, Homo sapien
tttcgggtcgtttatcttaaggtac

SEQ ID NO: 55318 - DNA, 25 bp, Homo sapien
tttcgggtcgttaatcttaaggtac

SEQ ID NO: 55319 - DNA, 25 bp, Homo sapien
gtggtgattctacatcataagagtc

SEQ ID NO: 55320 - DNA, 25 bp, Homo sapien
gtggtgattctagatcataagagtc

SEQ ID NO: 55321 - DNA, 25 bp, Homo sapien
aggtagtatattcgatccttgttac

SEQ ID NO: 55322 - DNA, 25 bp, Homo sapien
aggtagtatattggatccttgttac

SEQ ID NO: 55323 - DNA, 25 bp, Homo sapien
agggactcactcctgtcctcagaac

SEQ ID NO: 55324 - DNA, 25 bp, Homo sapien
agggactcactcgtgtcctcagaac

SEQ ID NO: 55325 - DNA, 25 bp, Homo sapien
gtaatgacaacttttcttagtggac

SEQ ID NO: 55326 - DNA, 25 bp, Homo sapien
gtaatgacaactattcttagtggac

SEQ ID NO: 55327 - DNA, 25 bp, Homo sapien
atggttgactatagtttttttcgac

SEQ ID NO: 55328 - DNA, 25 bp, Homo sapien
atggttgactattgtttttttcgac

SEQ ID NO: 55329 - DNA, 25 bp, Homo sapien
atttacgtttactggaacttcccga

SEQ ID NO: 55330 - DNA, 25 bp, Homo sapien
atttacgtttacaggaacttcccga

SEQ ID NO: 55331 - DNA, 25 bp, Homo sapien
atttagggtctagaactacgacccc

SEQ ID NO: 55332 - DNA, 25 bp, Homo sapien
atttagggtctacaactacgacccc

SEQ ID NO: 55333 - DNA, 25 bp, Homo sapien
ttgttgatgttgaatatcatacctc

SEQ ID NO: 55334 - DNA, 25 bp, Homo sapien
ttgttgatgttgtatatcatacctc

SEQ ID NO: 55335 - DNA, 25 bp, Homo sapien
tttctatggtttacgcctacggtag

SEQ ID NO: 55336 - DNA, 25 bp, Homo sapien
tttctatggttttcgcctacggtag

SEQ ID NO: 55337 - DNA, 25 bp, Homo sapien
cgtgcgttcgttttacatgctaagg

SEQ ID NO: 55338 - DNA, 25 bp, Homo sapien
cgtgcgttcgttatacatgctaagg

SEQ ID NO: 55339 - DNA, 25 bp, Homo sapien
gacatttctatatctaacctaggtg

SEQ ID NO: 55340 - DNA, 25 bp, Homo sapien
gacatttctataactaacctaggtg

SEQ ID NO: 55341 - DNA, 25 bp, Homo sapien
gtccggagcaactactctactataa

SEQ ID NO: 55342 - DNA, 25 bp, Homo sapien
gtccggagcaacaactctactataa

SEQ ID NO: 55343 - DNA, 25 bp, Homo sapien
ccctagatcataacgatcttctcgg

SEQ ID NO: 55344 - DNA, 25 bp, Homo sapien
ccctagatcatatcgatcttctcgg

SEQ ID NO: 55345 - DNA, 25 bp, Homo sapien
cgtcaccactcaggaggcctcgggt

SEQ ID NO: 55346 - DNA, 25 bp, Homo sapien
cgtcaccactcacgaggcctcgggt

SEQ ID NO: 55347 - DNA, 25 bp, Homo sapien
aaataaccactacaaggaccatagg

SEQ ID NO: 55348 - DNA, 25 bp, Homo sapien
aaataaccactagaaggaccatagg

SEQ ID NO: 55349 - DNA, 25 bp, Homo sapien
ctgactcgactgaggtcccaccggt

SEQ ID NO: 55350 - DNA, 25 bp, Homo sapien
ctgactcgactgtggtcccaccggt

SEQ ID NO: 55351 - DNA, 25 bp, Homo sapien
tcgtttcgtaggtggtcttctccga

SEQ ID NO: 55352 - DNA, 25 bp, Homo sapien
tcgtttcgtaggaggtcttctccga

SEQ ID NO: 55353 - DNA, 25 bp, Homo sapien
tgttatattccgtcgggtttccaga

SEQ ID NO: 55354 - DNA, 25 bp, Homo sapien
tgttatattccgacgggtttccaga

SEQ ID NO: 55355 - DNA, 25 bp, Homo sapien
atttgtgtcacgagggtgatgacca

SEQ ID NO: 55356 - DNA, 25 bp, Homo sapien
atttgtgtcacgtgggtgatgacca

SEQ ID NO: 55357 - DNA, 25 bp, Homo sapien
tgtccgaactttttgtgaaactata

SEQ ID NO: 55358 - DNA, 25 bp, Homo sapien
tgtccgaactttatgtgaaactata

SEQ ID NO: 55359 - DNA, 25 bp, Homo sapien
gttgtcggaggttcccagaacctcc

SEQ ID NO: 55360 - DNA, 25 bp, Homo sapien
gttgtcggaggtacccagaacctcc

SEQ ID NO: 55361 - DNA, 25 bp, Homo sapien
ccgaacgttcgaacggaaaccgtcc

SEQ ID NO: 55362 - DNA, 25 bp, Homo sapien
ccgaacgttcgatcggaaaccgtcc

SEQ ID NO: 55363 - DNA, 25 bp, Homo sapien
cacgagtcggacgtagggtccccgt

SEQ ID NO: 55364 - DNA, 25 bp, Homo sapien
cacgagtcggacctagggtccccgt

SEQ ID NO: 55365 - DNA, 25 bp, Homo sapien
ctcgagcgtagaggagatacgcccc

SEQ ID NO: 55366 - DNA, 25 bp, Homo sapien
ctcgagcgtagacgagatacgcccc

SEQ ID NO: 55367 - DNA, 25 bp, Homo sapien
gttctcacggtgtacacttccaaca

SEQ ID NO: 55368 - DNA, 25 bp, Homo sapien
gttctcacggtgaacacttccaaca

SEQ ID NO: 55369 - DNA, 25 bp, Homo sapien
gaaacccgataggtccttctctcca

SEQ ID NO: 55370 - DNA, 25 bp, Homo sapien
gaaacccgatagctccttctctcca

SEQ ID NO: 55371 - DNA, 25 bp, Homo sapien
gaatacctgcgtcttcatcgtccaa

SEQ ID NO: 55372 - DNA, 25 bp, Homo sapien
gaatacctgcgtgttcatcgtccaa

SEQ ID NO: 55373 - DNA, 25 bp, Homo sapien
aggaggacctctgcttaaactccaa

SEQ ID NO: 55374 - DNA, 25 bp, Homo sapien
aggaggacctctccttaaactccaa

SEQ ID NO: 55375 - DNA, 25 bp, Homo sapien
ggacgaccctactcctatttttagt

SEQ ID NO: 55376 - DNA, 25 bp, Homo sapien
ggacgaccctacacctatttttagt

SEQ ID NO: 55377 - DNA, 25 bp, Homo sapien
ggaccctcatatcaatatgtctcgg

SEQ ID NO: 55378 - DNA, 25 bp, Homo sapien
ggaccctcatatgaatatgtctcgg

SEQ ID NO: 55379 - DNA, 25 bp, Homo sapien
gtacagtggtttttaagaggtccct

SEQ ID NO: 55380 - DNA, 25 bp, Homo sapien
gtacagtggtttataagaggtccct

SEQ ID NO: 55381 - DNA, 25 bp, Homo sapien
cgtccataggtggattggtccgacg

SEQ ID NO: 55382 - DNA, 25 bp, Homo sapien
cgtccataggtgcattggtccgacg

SEQ ID NO: 55383 - DNA, 25 bp, Homo sapien
cctccgacatgtacattgaacttag

SEQ ID NO: 55384 - DNA, 25 bp, Homo sapien
cctccgacatgttcattgaacttag

SEQ ID NO: 55385 - DNA, 25 bp, Homo sapien
gacccacgaggtggtttcgcgaaag

SEQ ID NO: 55386 - DNA, 25 bp, Homo sapien
gacccacgaggtcgtttcgcgaaag

SEQ ID NO: 55387 - DNA, 25 bp, Homo sapien
cctccggtcggtcgatagttccttc

SEQ ID NO: 55388 - DNA, 25 bp, Homo sapien
cctccggtcggtggatagttccttc

SEQ ID NO: 55389 - DNA, 25 bp, Homo sapien
ctctttcccgtggacagctcttctg

SEQ ID NO: 55390 - DNA, 25 bp, Homo sapien
ctctttcccgtgcacagctcttctg

SEQ ID NO: 55391 - DNA, 25 bp, Homo sapien
cctgtatttctgagatacgtctttg

SEQ ID NO: 55392 - DNA, 25 bp, Homo sapien
cctgtatttctgtgatacgtctttg

SEQ ID NO: 55393 - DNA, 25 bp, Homo sapien
cactgatgtttcttggtcgctttat

SEQ ID NO: 55394 - DNA, 25 bp, Homo sapien
cactgatgtttcatggtcgctttat

SEQ ID NO: 55395 - DNA, 25 bp, Homo sapien
ctccaggacacactggtcgtccttg

SEQ ID NO: 55396 - DNA, 25 bp, Homo sapien
ctccaggacacagtggtcgtccttg

SEQ ID NO: 55397 - DNA, 25 bp, Homo sapien
ttctttgacagtaaagggtcttttc

SEQ ID NO: 55398 - DNA, 25 bp, Homo sapien
ttctttgacagttaagggtcttttc

SEQ ID NO: 55399 - DNA, 25 bp, Homo sapien
tttattactatagcatggtttccac

SEQ ID NO: 55400 - DNA, 25 bp, Homo sapien
tttattactataccatggtttccac

SEQ ID NO: 55401 - DNA, 25 bp, Homo sapien
gttttcatactcctttagtggtcaa

SEQ ID NO: 55402 - DNA, 25 bp, Homo sapien
gttttcatactcgtttagtggtcaa

SEQ ID NO: 55403 - DNA, 25 bp, Homo sapien
aagtttccgccgtactagggaaccg

SEQ ID NO: 55404 - DNA, 25 bp, Homo sapien
aagtttccgccgaactagggaaccg

SEQ ID NO: 55405 - DNA, 25 bp, Homo sapien
aaactgtcactctcctatggcctcg

SEQ ID NO: 55406 - DNA, 25 bp, Homo sapien
aaactgtcactcacctatggcctcg

SEQ ID NO: 55407 - DNA, 25 bp, Homo sapien
atagatgggtcgacgcactggaatc

SEQ ID NO: 55408 - DNA, 25 bp, Homo sapien
atagatgggtcgtcgcactggaatc

SEQ ID NO: 55409 - DNA, 25 bp, Homo sapien
aattttgtcgaggacctcgaggggt

SEQ ID NO: 55410 - DNA, 25 bp, Homo sapien
aattttgtcgagcacctcgaggggt

SEQ ID NO: 55411 - DNA, 25 bp, Homo sapien
ctctacttcgggagccggtggacgt

SEQ ID NO: 55412 - DNA, 25 bp, Homo sapien
ctctacttcgggtgccggtggacgt

SEQ ID NO: 55413 - DNA, 25 bp, Homo sapien
tcaggtgacccaactaggtgacggt

SEQ ID NO: 55414 - DNA, 25 bp, Homo sapien
tcaggtgacccatctaggtgacggt

SEQ ID NO: 55415 - DNA, 25 bp, Homo sapien
tgaggtcgaccacctaggtcaggct

SEQ ID NO: 55416 - DNA, 25 bp, Homo sapien
tgaggtcgaccagctaggtcaggct

SEQ ID NO: 55417 - DNA, 25 bp, Homo sapien
taggtacgtccaacaaccgtagggg

SEQ ID NO: 55418 - DNA, 25 bp, Homo sapien
taggtacgtccatcaaccgtagggg

SEQ ID NO: 55419 - DNA, 25 bp, Homo sapien
gagatagtcactaaccaagagttga

SEQ ID NO: 55420 - DNA, 25 bp, Homo sapien
gagatagtcacttaccaagagttga

SEQ ID NO: 55421 - DNA, 25 bp, Homo sapien
gtggttacagtctttaagtttcgac

SEQ ID NO: 55422 - DNA, 25 bp, Homo sapien
gtggttacagtcattaagtttcgac

SEQ ID NO: 55423 - DNA, 25 bp, Homo sapien
aaggggttacgactcctcctggacc

SEQ ID NO: 55424 - DNA, 25 bp, Homo sapien
aaggggttacgagtcctcctggacc

SEQ ID NO: 55425 - DNA, 25 bp, Homo sapien
aggagtgttttacatcagatgcgac

SEQ ID NO: 55426 - DNA, 25 bp, Homo sapien
aggagtgttttagatcagatgcgac

SEQ ID NO: 55427 - DNA, 25 bp, Homo sapien
tacttctgtaccagccgagcgtcga

SEQ ID NO: 55428 - DNA, 25 bp, Homo sapien
tacttctgtacctgccgagcgtcga

SEQ ID NO: 55429 - DNA, 25 bp, Homo sapien
aactctctagactcagttactcaca

SEQ ID NO: 55430 - DNA, 25 bp, Homo sapien
aactctctagacacagttactcaca

SEQ ID NO: 55431 - DNA, 25 bp, Homo sapien
tgagaacacagaaaattctcgtaga

SEQ ID NO: 55432 - DNA, 25 bp, Homo sapien
tgagaacacagataattctcgtaga

SEQ ID NO: 55433 - DNA, 25 bp, Homo sapien
gtggtcacaacctttgtcgtctgta

SEQ ID NO: 55434 - DNA, 25 bp, Homo sapien
gtggtcacaaccattgtcgtctgta

SEQ ID NO: 55435 - DNA, 25 bp, Homo sapien
ggactgtttcggaccctttaggtga

SEQ ID NO: 55436 - DNA, 25 bp, Homo sapien
ggactgtttcggtccctttaggtga

SEQ ID NO: 55437 - DNA, 25 bp, Homo sapien
acgtatcttggtttcctttctgaat

SEQ ID NO: 55438 - DNA, 25 bp, Homo sapien
acgtatcttggtatcctttctgaat

SEQ ID NO: 55439 - DNA, 25 bp, Homo sapien
atatggattaagatctctgacgcat

SEQ ID NO: 55440 - DNA, 25 bp, Homo sapien
atatggattaagttctctgacgcat

SEQ ID NO: 55441 - DNA, 25 bp, Homo sapien
gacgtccacgtatcgggacgtatgt

SEQ ID NO: 55442 - DNA, 25 bp, Homo sapien
gacgtccacgtaacgggacgtatgt

SEQ ID NO: 55443 - DNA, 25 bp, Homo sapien
ttacgtatcttacaacgggacgttt

SEQ ID NO: 55444 - DNA, 25 bp, Homo sapien
ttacgtatcttagaacgggacgttt

SEQ ID NO: 55445 - DNA, 25 bp, Homo sapien
aacaacttgtacaacgagtgatctt

SEQ ID NO: 55446 - DNA, 25 bp, Homo sapien
aacaacttgtactacgagtgatctt

SEQ ID NO: 55447 - DNA, 25 bp, Homo sapien
acacaatgactttccggatagattt

SEQ ID NO: 55448 - DNA, 25 bp, Homo sapien
acacaatgacttaccggatagattt

SEQ ID NO: 55449 - DNA, 25 bp, Homo sapien
gctaaattagttcctggtaaatgtc

SEQ ID NO: 55450 - DNA, 25 bp, Homo sapien
gctaaattagttgctggtaaatgtc

SEQ ID NO: 55451 - DNA, 25 bp, Homo sapien
ttacacttcggtgtacatatgaata

SEQ ID NO: 55452 - DNA, 25 bp, Homo sapien
ttacacttcggtctacatatgaata

SEQ ID NO: 55453 - DNA, 25 bp, Homo sapien
agacatttcagtttgaaggttctac

SEQ ID NO: 55454 - DNA, 25 bp, Homo sapien
agacatttcagtatgaaggttctac

SEQ ID NO: 55455 - DNA, 25 bp, Homo sapien
cgcaggtgtaaggatcaggccatcg

SEQ ID NO: 55456 - DNA, 25 bp, Homo sapien
cgcaggtgtaagcatcaggccatcg

SEQ ID NO: 55457 - DNA, 25 bp, Homo sapien
tttcagcaagaggaaccggaccatg

SEQ ID NO: 55458 - DNA, 25 bp, Homo sapien
tttcagcaagagcaaccggaccatg

SEQ ID NO: 55459 - DNA, 25 bp, Homo sapien
catatgacactaagtttgctgtagt

SEQ ID NO: 55460 - DNA, 25 bp, Homo sapien
catatgacactatgtttgctgtagt

SEQ ID NO: 55461 - DNA, 25 bp, Homo sapien
ttcctaggtccgtgtcaggttgtag

SEQ ID NO: 55462 - DNA, 25 bp, Homo sapien
ttcctaggtccgagtcaggttgtag

SEQ ID NO: 55463 - DNA, 25 bp, Homo sapien
atttcgggtcttttaaatgtctctg

SEQ ID NO: 55464 - DNA, 25 bp, Homo sapien
atttcgggtcttataaatgtctctg

SEQ ID NO: 55465 - DNA, 25 bp, Homo sapien
agttaaggtttgtatgtcatgtccc

SEQ ID NO: 55466 - DNA, 25 bp, Homo sapien
agttaaggtttgaatgtcatgtccc

SEQ ID NO: 55467 - DNA, 25 bp, Homo sapien
tgacggaagttgtgttcctgtcctc

SEQ ID NO: 55468 - DNA, 25 bp, Homo sapien
tgacggaagttgagttcctgtcctc

SEQ ID NO: 55469 - DNA, 25 bp, Homo sapien
tcaaagtcctggttgtcccttaaac

SEQ ID NO: 55470 - DNA, 25 bp, Homo sapien
tcaaagtcctggatgtcccttaaac

SEQ ID NO: 55471 - DNA, 25 bp, Homo sapien
agatcccgagtctaccactgtgaca

SEQ ID NO: 55472 - DNA, 25 bp, Homo sapien
agatcccgagtcaaccactgtgaca

SEQ ID NO: 55473 - DNA, 25 bp, Homo sapien
ctacctgacggaccacgtgtctgag

SEQ ID NO: 55474 - DNA, 25 bp, Homo sapien
ctacctgacggagcacgtgtctgag

SEQ ID NO: 55475 - DNA, 25 bp, Homo sapien
tgtgcgatctggacctacgtgttgc

SEQ ID NO: 55476 - DNA, 25 bp, Homo sapien
tgtgcgatctggtcctacgtgttgc

SEQ ID NO: 55477 - DNA, 25 bp, Homo sapien
tagtagttgtctaaagtccaatttc

SEQ ID NO: 55478 - DNA, 25 bp, Homo sapien
tagtagttgtcttaagtccaatttc

SEQ ID NO: 55479 - DNA, 25 bp, Homo sapien
agaagtggtcgctgtacgccattgg

SEQ ID NO: 55480 - DNA, 25 bp, Homo sapien
agaagtggtcgcagtacgccattgg

SEQ ID NO: 55481 - DNA, 25 bp, Homo sapien
ggcagttggtcatccgtccgtgtgg

SEQ ID NO: 55482 - DNA, 25 bp, Homo sapien
ggcagttggtcaaccgtccgtgtgg

SEQ ID NO: 55483 - DNA, 25 bp, Homo sapien
acggaaccaacttatcttcagtttg

SEQ ID NO: 55484 - DNA, 25 bp, Homo sapien
acggaaccaactaatcttcagtttg

SEQ ID NO: 55485 - DNA, 25 bp, Homo sapien
ggtggatcgcccattccagtgtatg

SEQ ID NO: 55486 - DNA, 25 bp, Homo sapien
ggtggatcgccctttccagtgtatg

SEQ ID NO: 55487 - DNA, 25 bp, Homo sapien
gaggggaaaccctatcaacggactg

SEQ ID NO: 55488 - DNA, 25 bp, Homo sapien
gaggggaaacccaatcaacggactg

SEQ ID NO: 55489 - DNA, 25 bp, Homo sapien
gtgttaccaccacatcaggtgtaag

SEQ ID NO: 55490 - DNA, 25 bp, Homo sapien
gtgttaccaccagatcaggtgtaag

SEQ ID NO: 55491 - DNA, 25 bp, Homo sapien
tgtgaaacccaccaataggtcgaac

SEQ ID NO: 55492 - DNA, 25 bp, Homo sapien
tgtgaaacccacgaataggtcgaac

SEQ ID NO: 55493 - DNA, 25 bp, Homo sapien
atgtgaaccccgaaagtcccgacct

SEQ ID NO: 55494 - DNA, 25 bp, Homo sapien
atgtgaaccccgtaagtcccgacct

SEQ ID NO: 55495 - DNA, 25 bp, Homo sapien
cggcttcacggacaggtttcccgca

SEQ ID NO: 55496 - DNA, 25 bp, Homo sapien
cggcttcacggagaggtttcccgca

SEQ ID NO: 55497 - DNA, 25 bp, Homo sapien
gacttcaggtgcatgtttcccacag

SEQ ID NO: 55498 - DNA, 25 bp, Homo sapien
gacttcaggtgcttgtttcccacag

SEQ ID NO: 55499 - DNA, 25 bp, Homo sapien
catatccgacttgtgtttccttcag

SEQ ID NO: 55500 - DNA, 25 bp, Homo sapien
catatccgacttctgtttccttcag

SEQ ID NO: 55501 - DNA, 25 bp, Homo sapien
gtctccgagtttttcatttcttccg

SEQ ID NO: 55502 - DNA, 25 bp, Homo sapien
gtctccgagtttatcatttcttccg

SEQ ID NO: 55503 - DNA, 25 bp, Homo sapien
ttttcaaatctagaagtctctattc

SEQ ID NO: 55504 - DNA, 25 bp, Homo sapien
ttttcaaatctacaagtctctattc

SEQ ID NO: 55505 - DNA, 25 bp, Homo sapien
aacctcacgagtaagtgtacttcac

SEQ ID NO: 55506 - DNA, 25 bp, Homo sapien
aacctcacgagttagtgtacttcac

SEQ ID NO: 55507 - DNA, 25 bp, Homo sapien
ttttattccgttgtcgttctacacg

SEQ ID NO: 55508 - DNA, 25 bp, Homo sapien
ttttattccgttctcgttctacacg

SEQ ID NO: 55509 - DNA, 25 bp, Homo sapien
ctccttgtcaggtcgtcggtcaccg

SEQ ID NO: 55510 - DNA, 25 bp, Homo sapien
ctccttgtcaggacgtcggtcaccg

SEQ ID NO: 55511 - DNA, 25 bp, Homo sapien
ccgttcacgatacagtacacgcaag

SEQ ID NO: 55512 - DNA, 25 bp, Homo sapien
ccgttcacgatagagtacacgcaag

SEQ ID NO: 55513 - DNA, 25 bp, Homo sapien
gaccctggaacgaaggatgctccga

SEQ ID NO: 55514 - DNA, 25 bp, Homo sapien
gaccctggaacgtaggatgctccga

SEQ ID NO: 55515 - DNA, 25 bp, Homo sapien
ccgagagtacgtaaggaacacccgg

SEQ ID NO: 55516 - DNA, 25 bp, Homo sapien
ccgagagtacgttaggaacacccgg

SEQ ID NO: 55517 - DNA, 25 bp, Homo sapien
cgaggagtctacaggcacgcgaccc

SEQ ID NO: 55518 - DNA, 25 bp, Homo sapien
cgaggagtctactggcacgcgaccc

SEQ ID NO: 55519 - DNA, 25 bp, Homo sapien
ttctcgttctcaggttcacgaaact

SEQ ID NO: 55520 - DNA, 25 bp, Homo sapien
ttctcgttctcacgttcacgaaact

SEQ ID NO: 55521 - DNA, 25 bp, Homo sapien
ttgtcttttctacgtcgtccgtccc

SEQ ID NO: 55522 - DNA, 25 bp, Homo sapien
ttgtcttttctaggtcgtccgtccc

SEQ ID NO: 55523 - DNA, 25 bp, Homo sapien
ttcttttggattatactacggtccc

SEQ ID NO: 55524 - DNA, 25 bp, Homo sapien
ttcttttggattttactacggtccc

SEQ ID NO: 55525 - DNA, 25 bp, Homo sapien
cgttaaatcgagagatacagttcca

SEQ ID NO: 55526 - DNA, 25 bp, Homo sapien
cgttaaatcgagtgatacagttcca

SEQ ID NO: 55527 - DNA, 25 bp, Homo sapien
ccgtttatcgagcagatggctccga

SEQ ID NO: 55528 - DNA, 25 bp, Homo sapien
ccgtttatcgaggagatggctccga

SEQ ID NO: 55529 - DNA, 25 bp, Homo sapien
actttgattcaacgtacgttgtcca

SEQ ID NO: 55530 - DNA, 25 bp, Homo sapien
actttgattcaaggtacgttgtcca

SEQ ID NO: 55531 - DNA, 25 bp, Homo sapien
tggaaacgagtgacgatgatcgtac

SEQ ID NO: 55532 - DNA, 25 bp, Homo sapien
tggaaacgagtgtcgatgatcgtac

SEQ ID NO: 55533 - DNA, 25 bp, Homo sapien
aaagggtttcgttccgagtcatgac

SEQ ID NO: 55534 - DNA, 25 bp, Homo sapien
aaagggtttcgtaccgagtcatgac

SEQ ID NO: 55535 - DNA, 25 bp, Homo sapien
acaaggttttctcctcttgactccg

SEQ ID NO: 55536 - DNA, 25 bp, Homo sapien
acaaggttttctgctcttgactccg

SEQ ID NO: 55537 - DNA, 25 bp, Homo sapien
aagatatcaccttcgtctttaagag

SEQ ID NO: 55538 - DNA, 25 bp, Homo sapien
aagatatcacctacgtctttaagag

SEQ ID NO: 55539 - DNA, 25 bp, Homo sapien
ggaaaataaccaagatctgtcaaac

SEQ ID NO: 55540 - DNA, 25 bp, Homo sapien
ggaaaataaccatgatctgtcaaac

SEQ ID NO: 55541 - DNA, 25 bp, Homo sapien
gaaatgaaaacgatcgagggaccaa

SEQ ID NO: 55542 - DNA, 25 bp, Homo sapien
gaaatgaaaacgttcgagggaccaa

SEQ ID NO: 55543 - DNA, 25 bp, Homo sapien
ctataacgactaattcagggaccca

SEQ ID NO: 55544 - DNA, 25 bp, Homo sapien
ctataacgactatttcagggaccca

SEQ ID NO: 55545 - DNA, 25 bp, Homo sapien
gacctttgtctttgtccaggtgcaa

SEQ ID NO: 55546 - DNA, 25 bp, Homo sapien
gacctttgtcttagtccaggtgcaa

SEQ ID NO: 55547 - DNA, 25 bp, Homo sapien
ttacccggagtgcagtgtcctccgt

SEQ ID NO: 55548 - DNA, 25 bp, Homo sapien
ttacccggagtggagtgtcctccgt

SEQ ID NO: 55549 - DNA, 25 bp, Homo sapien
aggctcttctcagtctactacctgt

SEQ ID NO: 55550 - DNA, 25 bp, Homo sapien
aggctcttctcactctactacctgt

SEQ ID NO: 55551 - DNA, 25 bp, Homo sapien
accaaatttttcagtcaggacacgg

SEQ ID NO: 55552 - DNA, 25 bp, Homo sapien
accaaatttttctgtcaggacacgg

SEQ ID NO: 55553 - DNA, 25 bp, Homo sapien
agagtgacatgtgtcgacggaccga

SEQ ID NO: 55554 - DNA, 25 bp, Homo sapien
agagtgacatgtctcgacggaccga

SEQ ID NO: 55555 - DNA, 25 bp, Homo sapien
gttattcaatccttcgtcgtcccga

SEQ ID NO: 55556 - DNA, 25 bp, Homo sapien
gttattcaatccatcgtcgtcccga

SEQ ID NO: 55557 - DNA, 25 bp, Homo sapien
gacccttcagaaaggctacgaccaa

SEQ ID NO: 55558 - DNA, 25 bp, Homo sapien
gacccttcagaatggctacgaccaa

SEQ ID NO: 55559 - DNA, 25 bp, Homo sapien
accccatgaagatcctcagtcaaga

SEQ ID NO: 55560 - DNA, 25 bp, Homo sapien
accccatgaagaacctcagtcaaga

SEQ ID NO: 55561 - DNA, 25 bp, Homo sapien
accctctttgggtgaccagggtaac

SEQ ID NO: 55562 - DNA, 25 bp, Homo sapien
accctctttgggagaccagggtaac

SEQ ID NO: 55563 - DNA, 25 bp, Homo sapien
atttgtcggtaaaaccatttgtacg

SEQ ID NO: 55564 - DNA, 25 bp, Homo sapien
atttgtcggtaataccatttgtacg

SEQ ID NO: 55565 - DNA, 25 bp, Homo sapien
aattatccgtttggtagatctttac

SEQ ID NO: 55566 - DNA, 25 bp, Homo sapien
aattatccgtttcgtagatctttac

SEQ ID NO: 55567 - DNA, 25 bp, Homo sapien
aaatgtttctgttaagtcctttcta

SEQ ID NO: 55568 - DNA, 25 bp, Homo sapien
aaatgtttctgtaaagtcctttcta

SEQ ID NO: 55569 - DNA, 25 bp, Homo sapien
ttgggtcgtccgtggttctcttcgg

SEQ ID NO: 55570 - DNA, 25 bp, Homo sapien
ttgggtcgtccgaggttctcttcgg

SEQ ID NO: 55571 - DNA, 25 bp, Homo sapien
tgtctgtctcccttgatctttaggt

SEQ ID NO: 55572 - DNA, 25 bp, Homo sapien
tgtctgtctcccatgatctttaggt

SEQ ID NO: 55573 - DNA, 25 bp, Homo sapien
gtcattgtaccctgaatttactcgt

SEQ ID NO: 55574 - DNA, 25 bp, Homo sapien
gtcattgtacccagaatttactcgt

SEQ ID NO: 55575 - DNA, 25 bp, Homo sapien
ctagtcattgggaatgtctgtacct

SEQ ID NO: 55576 - DNA, 25 bp, Homo sapien
ctagtcattgggtatgtctgtacct

SEQ ID NO: 55577 - DNA, 25 bp, Homo sapien
ctagtggctccgagattgttcacct

SEQ ID NO: 55578 - DNA, 25 bp, Homo sapien
ctagtggctccgtgattgttcacct

SEQ ID NO: 55579 - DNA, 25 bp, Homo sapien
tcggagatccggactgacggtccct

SEQ ID NO: 55580 - DNA, 25 bp, Homo sapien
tcggagatccggtctgacggtccct

SEQ ID NO: 55581 - DNA, 25 bp, Homo sapien
tggtgaagtgtctactaacatgtcc

SEQ ID NO: 55582 - DNA, 25 bp, Homo sapien
tggtgaagtgtcaactaacatgtcc

SEQ ID NO: 55583 - DNA, 25 bp, Homo sapien
tctgggaagtgaccaacacctgcag

SEQ ID NO: 55584 - DNA, 25 bp, Homo sapien
tctgggaagtgagcaacacctgcag

SEQ ID NO: 55585 - DNA, 25 bp, Homo sapien
aaccacaatgacacgcggcacgtgg

SEQ ID NO: 55586 - DNA, 25 bp, Homo sapien
aaccacaatgactcgcggcacgtgg

SEQ ID NO: 55587 - DNA, 25 bp, Homo sapien
acaggaccttccttcgcagaaggtg

SEQ ID NO: 55588 - DNA, 25 bp, Homo sapien
acaggaccttccatcgcagaaggtg

SEQ ID NO: 55589 - DNA, 25 bp, Homo sapien
acaagctttctcctcaccgggctgt

SEQ ID NO: 55590 - DNA, 25 bp, Homo sapien
acaagctttctcgtcaccgggctgt

SEQ ID NO: 55591 - DNA, 25 bp, Homo sapien
cgtttactggtcctgaccagttcta

SEQ ID NO: 55592 - DNA, 25 bp, Homo sapien
cgtttactggtcgtgaccagttcta

SEQ ID NO: 55593 - DNA, 25 bp, Homo sapien
ggaacaccgaaaggacctcctcgag

SEQ ID NO: 55594 - DNA, 25 bp, Homo sapien
ggaacaccgaaacgacctcctcgag

SEQ ID NO: 55595 - DNA, 25 bp, Homo sapien
tccgtctaacagtgttccgggtcgg

SEQ ID NO: 55596 - DNA, 25 bp, Homo sapien
tccgtctaacagagttccgggtcgg

SEQ ID NO: 55597 - DNA, 25 bp, Homo sapien
ccaggagcgagagacgtggtacact

SEQ ID NO: 55598 - DNA, 25 bp, Homo sapien
ccaggagcgagacacgtggtacact

SEQ ID NO: 55599 - DNA, 25 bp, Homo sapien
cctacaccaagaagacccgggtcat

SEQ ID NO: 55600 - DNA, 25 bp, Homo sapien
cctacaccaagatgacccgggtcat

SEQ ID NO: 55601 - DNA, 25 bp, Homo sapien
agaccaattagtatcccggtactac

SEQ ID NO: 55602 - DNA, 25 bp, Homo sapien
agaccaattagtttcccggtactac

SEQ ID NO: 55603 - DNA, 25 bp, Homo sapien
cgactacaggagttccccgatcgac

SEQ ID NO: 55604 - DNA, 25 bp, Homo sapien
cgactacaggagatccccgatcgac

SEQ ID NO: 55605 - DNA, 25 bp, Homo sapien
ttcgaataaaatcctagtgttcacg

SEQ ID NO: 55606 - DNA, 25 bp, Homo sapien
ttcgaataaaatgctagtgttcacg

SEQ ID NO: 55607 - DNA, 25 bp, Homo sapien
tctcggaattcctcgagtaccctag

SEQ ID NO: 55608 - DNA, 25 bp, Homo sapien
tctcggaattccacgagtaccctag

SEQ ID NO: 55609 - DNA, 25 bp, Homo sapien
gtggacgacctcttttgtggcactg

SEQ ID NO: 55610 - DNA, 25 bp, Homo sapien
gtggacgacctcatttgtggcactg

SEQ ID NO: 55611 - DNA, 25 bp, Homo sapien
cggaagctcttcttggtgatgcacc

SEQ ID NO: 55612 - DNA, 25 bp, Homo sapien
cggaagctcttcatggtgatgcacc

SEQ ID NO: 55613 - DNA, 25 bp, Homo sapien
gtggctgagacctttgggtttccct

SEQ ID NO: 55614 - DNA, 25 bp, Homo sapien
gtggctgagaccattgggtttccct

SEQ ID NO: 55615 - DNA, 25 bp, Homo sapien
acaaggaggaaaaggtacctcggtt

SEQ ID NO: 55616 - DNA, 25 bp, Homo sapien
acaaggaggaaatggtacctcggtt

SEQ ID NO: 55617 - DNA, 25 bp, Homo sapien
tgagaatatactcatgtcaagggtc

SEQ ID NO: 55618 - DNA, 25 bp, Homo sapien
tgagaatatactgatgtcaagggtc

SEQ ID NO: 55619 - DNA, 25 bp, Homo sapien
gaacgaatattggtgctccggtgac

SEQ ID NO: 55620 - DNA, 25 bp, Homo sapien
gaacgaatattgctgctccggtgac

SEQ ID NO: 55621 - DNA, 25 bp, Homo sapien
acgaccaggtttctcacccagcgtc

SEQ ID NO: 55622 - DNA, 25 bp, Homo sapien
acgaccaggtttgtcacccagcgtc

SEQ ID NO: 55623 - DNA, 25 bp, Homo sapien
tggacccaacgatgtgcctcgggga

SEQ ID NO: 55624 - DNA, 25 bp, Homo sapien
tggacccaacgaagtgcctcgggga

SEQ ID NO: 55625 - DNA, 25 bp, Homo sapien
gtcccacaagggtctggagcgacgt

SEQ ID NO: 55626 - DNA, 25 bp, Homo sapien
gtcccacaagggactggagcgacgt

SEQ ID NO: 55627 - DNA, 25 bp, Homo sapien
tgacggccctcatcgtcccgggggt

SEQ ID NO: 55628 - DNA, 25 bp, Homo sapien
tgacggccctcaacgtcccgggggt

SEQ ID NO: 55629 - DNA, 25 bp, Homo sapien
ctccggaacccagtcctaagcgtgg

SEQ ID NO: 55630 - DNA, 25 bp, Homo sapien
ctccggaacccactcctaagcgtgg

SEQ ID NO: 55631 - DNA, 25 bp, Homo sapien
ccgacccgggacgaacggcgtgtcg

SEQ ID NO: 55632 - DNA, 25 bp, Homo sapien
ccgacccgggaccaacggcgtgtcg

SEQ ID NO: 55633 - DNA, 25 bp, Homo sapien
atactgagagtcaactgtgtatgac

SEQ ID NO: 55634 - DNA, 25 bp, Homo sapien
atactgagagtctactgtgtatgac

SEQ ID NO: 55635 - DNA, 25 bp, Homo sapien
atttcgggtctcttgtgtgtagacg

SEQ ID NO: 55636 - DNA, 25 bp, Homo sapien
atttcgggtctcatgtgtgtagacg

SEQ ID NO: 55637 - DNA, 25 bp, Homo sapien
gtcccttcattccacggttggacgt

SEQ ID NO: 55638 - DNA, 25 bp, Homo sapien
gtcccttcattcgacggttggacgt

SEQ ID NO: 55639 - DNA, 25 bp, Homo sapien
cgtcttacatgtgtacccgtgacgg

SEQ ID NO: 55640 - DNA, 25 bp, Homo sapien
cgtcttacatgtctacccgtgacgg

SEQ ID NO: 55641 - DNA, 25 bp, Homo sapien
ccgggtacatcactcgggtcgtacc

SEQ ID NO: 55642 - DNA, 25 bp, Homo sapien
ccgggtacatcagtcgggtcgtacc

SEQ ID NO: 55643 - DNA, 25 bp, Homo sapien
tcgaggaactctctcggtctcaact

SEQ ID NO: 55644 - DNA, 25 bp, Homo sapien
tcgaggaactctgtcggtctcaact

SEQ ID NO: 55645 - DNA, 25 bp, Homo sapien
cccgtgccctaggtcgtgtctccat

SEQ ID NO: 55646 - DNA, 25 bp, Homo sapien
cccgtgccctagctcgtgtctccat

SEQ ID NO: 55647 - DNA, 25 bp, Homo sapien
tcgacgacattctggggtactcttt

SEQ ID NO: 55648 - DNA, 25 bp, Homo sapien
tcgacgacattcaggggtactcttt

SEQ ID NO: 55649 - DNA, 25 bp, Homo sapien
gaggtcgagatccaaggttccttgt

SEQ ID NO: 55650 - DNA, 25 bp, Homo sapien
gaggtcgagatcgaaggttccttgt

SEQ ID NO: 55651 - DNA, 25 bp, Homo sapien
gtctcggatatcaagtgggtctttc

SEQ ID NO: 55652 - DNA, 25 bp, Homo sapien
gtctcggatatctagtgggtctttc

SEQ ID NO: 55653 - DNA, 25 bp, Homo sapien
gaagtagtcgaactgagacgaagtc

SEQ ID NO: 55654 - DNA, 25 bp, Homo sapien
gaagtagtcgaagtgagacgaagtc

SEQ ID NO: 55655 - DNA, 25 bp, Homo sapien
ggaggacacttctgtggtacggatc

SEQ ID NO: 55656 - DNA, 25 bp, Homo sapien
ggaggacacttcagtggtacggatc

SEQ ID NO: 55657 - DNA, 25 bp, Homo sapien
caaagtgacgggtagacactgtacc

SEQ ID NO: 55658 - DNA, 25 bp, Homo sapien
caaagtgacgggaagacactgtacc

SEQ ID NO: 55659 - DNA, 25 bp, Homo sapien
cgcgtagtagtttggtgtcgcacta

SEQ ID NO: 55660 - DNA, 25 bp, Homo sapien
cgcgtagtagttaggtgtcgcacta

SEQ ID NO: 55661 - DNA, 25 bp, Homo sapien
tgtagtataagtcgggtagtgcgac

SEQ ID NO: 55662 - DNA, 25 bp, Homo sapien
tgtagtataagtggggtagtgcgac

SEQ ID NO: 55663 - DNA, 25 bp, Homo sapien
ggttttcccctaatcgaatcaggta

SEQ ID NO: 55664 - DNA, 25 bp, Homo sapien
ggttttcccctattcgaatcaggta

SEQ ID NO: 55665 - DNA, 25 bp, Homo sapien
tttccgtcaatctgttccggagagt

SEQ ID NO: 55666 - DNA, 25 bp, Homo sapien
tttccgtcaatcagttccggagagt

SEQ ID NO: 55667 - DNA, 25 bp, Homo sapien
tgtcgtctcagacatctccgccggt

SEQ ID NO: 55668 - DNA, 25 bp, Homo sapien
tgtcgtctcagagatctccgccggt

SEQ ID NO: 55669 - DNA, 25 bp, Homo sapien
tactgccctaggagtctttctcggt

SEQ ID NO: 55670 - DNA, 25 bp, Homo sapien
tactgccctaggtgtctttctcggt

SEQ ID NO: 55671 - DNA, 25 bp, Homo sapien
ctagtacccataggtgcttctgtaa

SEQ ID NO: 55672 - DNA, 25 bp, Homo sapien
ctagtacccatacgtgcttctgtaa

SEQ ID NO: 55673 - DNA, 25 bp, Homo sapien
aataagtcctatttcacgttattgg

SEQ ID NO: 55674 - DNA, 25 bp, Homo sapien
aataagtcctatatcacgttattgg

SEQ ID NO: 55675 - DNA, 25 bp, Homo sapien
gaaagatcttacatcttctattgag

SEQ ID NO: 55676 - DNA, 25 bp, Homo sapien
gaaagatcttacttcttctattgag

SEQ ID NO: 55677 - DNA, 25 bp, Homo sapien
gacaattgtgtctcgggtctataca

SEQ ID NO: 55678 - DNA, 25 bp, Homo sapien
gacaattgtgtcacgggtctataca

SEQ ID NO: 55679 - DNA, 25 bp, Homo sapien
acgcataggttttccgtatctttac

SEQ ID NO: 55680 - DNA, 25 bp, Homo sapien
acgcataggtttaccgtatctttac

SEQ ID NO: 55681 - DNA, 25 bp, Homo sapien
ctaggagaagaaatcgtcttatttc

SEQ ID NO: 55682 - DNA, 25 bp, Homo sapien
ctaggagaagaattcgtcttatttc

SEQ ID NO: 55683 - DNA, 25 bp, Homo sapien
ttaggtcgcagagtcccctgagtgg

SEQ ID NO: 55684 - DNA, 25 bp, Homo sapien
ttaggtcgcagactcccctgagtgg

SEQ ID NO: 55685 - DNA, 25 bp, Homo sapien
agtagggacacgtctcgcccgagca

SEQ ID NO: 55686 - DNA, 25 bp, Homo sapien
agtagggacacgactcgcccgagca

SEQ ID NO: 55687 - DNA, 25 bp, Homo sapien
aaaggttctagagacctgtgtactt

SEQ ID NO: 55688 - DNA, 25 bp, Homo sapien
aaaggttctagacacctgtgtactt

SEQ ID NO: 55689 - DNA, 25 bp, Homo sapien
attagtgacctacgtacgtgttact

SEQ ID NO: 55690 - DNA, 25 bp, Homo sapien
attagtgacctaggtacgtgttact

SEQ ID NO: 55691 - DNA, 25 bp, Homo sapien
cgaatagtctatacccgtgttcttc

SEQ ID NO: 55692 - DNA, 25 bp, Homo sapien
cgaatagtctattcccgtgttcttc

SEQ ID NO: 55693 - DNA, 25 bp, Homo sapien
gcgtgagtagttttcccggtccgcc

SEQ ID NO: 55694 - DNA, 25 bp, Homo sapien
gcgtgagtagttatcccggtccgcc

SEQ ID NO: 55695 - DNA, 25 bp, Homo sapien
ggtagtttacgtaacggttcctccg

SEQ ID NO: 55696 - DNA, 25 bp, Homo sapien
ggtagtttacgttacggttcctccg

SEQ ID NO: 55697 - DNA, 25 bp, Homo sapien
tcgaaacgacgactagtcttcctcc

SEQ ID NO: 55698 - DNA, 25 bp, Homo sapien
tcgaaacgacgagtagtcttcctcc

SEQ ID NO: 55699 - DNA, 25 bp, Homo sapien
gaaacgcaccagaccgtggggcctc

SEQ ID NO: 55700 - DNA, 25 bp, Homo sapien
gaaacgcaccagtccgtggggcctc

SEQ ID NO: 55701 - DNA, 25 bp, Homo sapien
gcgacgaggcagtccatggacaacc

SEQ ID NO: 55702 - DNA, 25 bp, Homo sapien
gcgacgaggcagaccatggacaacc

SEQ ID NO: 55703 - DNA, 25 bp, Homo sapien
ggaccaaagtaaacatggtctccgg

SEQ ID NO: 55704 - DNA, 25 bp, Homo sapien
ggaccaaagtaatcatggtctccgg

SEQ ID NO: 55705 - DNA, 25 bp, Homo sapien
gacacaaagtaactcgaggtcccac

SEQ ID NO: 55706 - DNA, 25 bp, Homo sapien
gacacaaagtaagtcgaggtcccac

SEQ ID NO: 55707 - DNA, 25 bp, Homo sapien
ttgaagggacgtacttctgtccccc

SEQ ID NO: 55708 - DNA, 25 bp, Homo sapien
ttgaagggacgttcttctgtccccc

SEQ ID NO: 55709 - DNA, 25 bp, Homo sapien
tgaagtgagtcttctcttcgacccc

SEQ ID NO: 55710 - DNA, 25 bp, Homo sapien
tgaagtgagtctactcttcgacccc

SEQ ID NO: 55711 - DNA, 25 bp, Homo sapien
gtatgtcgtgcctcgtgactccacc

SEQ ID NO: 55712 - DNA, 25 bp, Homo sapien
gtatgtcgtgccacgtgactccacc

SEQ ID NO: 55713 - DNA, 25 bp, Homo sapien
atgtgtacgcccacaggtcgtgaac

SEQ ID NO: 55714 - DNA, 25 bp, Homo sapien
atgtgtacgccctcaggtcgtgaac

SEQ ID NO: 55715 - DNA, 25 bp, Homo sapien
ctgttatcgtccattgtgtacgaaa

SEQ ID NO: 55716 - DNA, 25 bp, Homo sapien
ctgttatcgtcctttgtgtacgaaa

SEQ ID NO: 55717 - DNA, 25 bp, Homo sapien
tcttgttcgtctttttagactaaag

SEQ ID NO: 55718 - DNA, 25 bp, Homo sapien
tcttgttcgtctatttagactaaag

SEQ ID NO: 55719 - DNA, 25 bp, Homo sapien
ttttgtgacttttctagttacggac

SEQ ID NO: 55720 - DNA, 25 bp, Homo sapien
ttttgtgactttactagttacggac

SEQ ID NO: 55721 - DNA, 25 bp, Homo sapien
agagtatgtggaagtccttgagctc

SEQ ID NO: 55722 - DNA, 25 bp, Homo sapien
agagtatgtggatgtccttgagctc

SEQ ID NO: 55723 - DNA, 25 bp, Homo sapien
actgttcagaccttatgtacgaacc

SEQ ID NO: 55724 - DNA, 25 bp, Homo sapien
actgttcagaccatatgtacgaacc

SEQ ID NO: 55725 - DNA, 25 bp, Homo sapien
cacggtcactatcttgactagactc

SEQ ID NO: 55726 - DNA, 25 bp, Homo sapien
cacggtcactatgttgactagactc

SEQ ID NO: 55727 - DNA, 25 bp, Homo sapien
acctggtctcataaacgtgactgga

SEQ ID NO: 55728 - DNA, 25 bp, Homo sapien
acctggtctcattaacgtgactgga

SEQ ID NO: 55729 - DNA, 25 bp, Homo sapien
ccataggacttatttactcttgaga

SEQ ID NO: 55730 - DNA, 25 bp, Homo sapien
ccataggacttaattactcttgaga

SEQ ID NO: 55731 - DNA, 25 bp, Homo sapien
cgagatgtcttatttcacttgttat

SEQ ID NO: 55732 - DNA, 25 bp, Homo sapien
cgagatgtcttaattcacttgttat

SEQ ID NO: 55733 - DNA, 25 bp, Homo sapien
ggagaaaccttttcgtattgagact

SEQ ID NO: 55734 - DNA, 25 bp, Homo sapien
ggagaaacctttacgtattgagact

SEQ ID NO: 55735 - DNA, 25 bp, Homo sapien
ggaaaacgacattttccttgtgtct

SEQ ID NO: 55736 - DNA, 25 bp, Homo sapien
ggaaaacgacatattccttgtgtct

SEQ ID NO: 55737 - DNA, 25 bp, Homo sapien
tggatccgacactttctctgtctcc

SEQ ID NO: 55738 - DNA, 25 bp, Homo sapien
tggatccgacacattctctgtctcc

SEQ ID NO: 55739 - DNA, 25 bp, Homo sapien
aggagtctgtgaagtccccgacaac

SEQ ID NO: 55740 - DNA, 25 bp, Homo sapien
aggagtctgtgatgtccccgacaac

SEQ ID NO: 55741 - DNA, 25 bp, Homo sapien
gaggtcacaggtgtctactacccca

SEQ ID NO: 55742 - DNA, 25 bp, Homo sapien
gaggtcacaggtctctactacccca

SEQ ID NO: 55743 - DNA, 25 bp, Homo sapien
aatgagacgttacacttacggtaat

SEQ ID NO: 55744 - DNA, 25 bp, Homo sapien
aatgagacgttagacttacggtaat

SEQ ID NO: 55745 - DNA, 25 bp, Homo sapien
aagagcattaagtacgggccgaaag

SEQ ID NO: 55746 - DNA, 25 bp, Homo sapien
aagagcattaagaacgggccgaaag

SEQ ID NO: 55747 - DNA, 25 bp, Homo sapien
actcccgttgacaacagggggcaca

SEQ ID NO: 55748 - DNA, 25 bp, Homo sapien
actcccgttgactacagggggcaca

SEQ ID NO: 55749 - DNA, 25 bp, Homo sapien
tcgcgaagacctcgaggacgtggca

SEQ ID NO: 55750 - DNA, 25 bp, Homo sapien
tcgcgaagacctggaggacgtggca

SEQ ID NO: 55751 - DNA, 25 bp, Homo sapien
tcgtgacagaacgataaacttttac

SEQ ID NO: 55752 - DNA, 25 bp, Homo sapien
tcgtgacagaaccataaacttttac

SEQ ID NO: 55753 - DNA, 25 bp, Homo sapien
ggatcgtcgaaaccaaatcgtattg

SEQ ID NO: 55754 - DNA, 25 bp, Homo sapien
ggatcgtcgaaagcaaatcgtattg

SEQ ID NO: 55755 - DNA, 25 bp, Homo sapien
ttactgacgggacacactgttttgt

SEQ ID NO: 55756 - DNA, 25 bp, Homo sapien
ttactgacgggagacactgttttgt

SEQ ID NO: 55757 - DNA, 25 bp, Homo sapien
gatagaagccggtaacctatcttgt

SEQ ID NO: 55758 - DNA, 25 bp, Homo sapien
gatagaagccggaaacctatcttgt

SEQ ID NO: 55759 - DNA, 25 bp, Homo sapien
gtacaaaataagacgatcttagtca

SEQ ID NO: 55760 - DNA, 25 bp, Homo sapien
gtacaaaataagtcgatcttagtca

SEQ ID NO: 55761 - DNA, 25 bp, Homo sapien
taaaaactctagtagttcttccgag

SEQ ID NO: 55762 - DNA, 25 bp, Homo sapien
taaaaactctagaagttcttccgag

SEQ ID NO: 55763 - DNA, 25 bp, Homo sapien
cacgagagacgtcgagaccttttta

SEQ ID NO: 55764 - DNA, 25 bp, Homo sapien
cacgagagacgtggagaccttttta

SEQ ID NO: 55765 - DNA, 25 bp, Homo sapien
cgtctctgagagagttttgttctta

SEQ ID NO: 55766 - DNA, 25 bp, Homo sapien
cgtctctgagagtgttttgttctta

SEQ ID NO: 55767 - DNA, 25 bp, Homo sapien
cactatggtgaactttacgttttgt

SEQ ID NO: 55768 - DNA, 25 bp, Homo sapien
cactatggtgaagtttacgttttgt

SEQ ID NO: 55769 - DNA, 25 bp, Homo sapien
actaggaccaccttattatgtttag

SEQ ID NO: 55770 - DNA, 25 bp, Homo sapien
actaggaccaccatattatgtttag

SEQ ID NO: 55771 - DNA, 25 bp, Homo sapien
aagtgtcctatacactagttatttg

SEQ ID NO: 55772 - DNA, 25 bp, Homo sapien
aagtgtcctatagactagttatttg

SEQ ID NO: 55773 - DNA, 25 bp, Homo sapien
tcggggtactaagctgtggttctag

SEQ ID NO: 55774 - DNA, 25 bp, Homo sapien
tcggggtactaacctgtggttctag

SEQ ID NO: 55775 - DNA, 25 bp, Homo sapien
ccgacgggacaaaggactcgtttgt

SEQ ID NO: 55776 - DNA, 25 bp, Homo sapien
ccgacgggacaatggactcgtttgt

SEQ ID NO: 55777 - DNA, 25 bp, Homo sapien
tttcgagtagaaaggcctcgtctca

SEQ ID NO: 55778 - DNA, 25 bp, Homo sapien
tttcgagtagaatggcctcgtctca

SEQ ID NO: 55779 - DNA, 25 bp, Homo sapien
gggaccgagagaaaacccggtgaat

SEQ ID NO: 55780 - DNA, 25 bp, Homo sapien
gggaccgagagataacccggtgaat

SEQ ID NO: 55781 - DNA, 25 bp, Homo sapien
gtggagctgtctgtctgtgtagaac

SEQ ID NO: 55782 - DNA, 25 bp, Homo sapien
gtggagctgtctctctgtgtagaac

SEQ ID NO: 55783 - DNA, 25 bp, Homo sapien
gtttgtaagtactttctggtgtacc

SEQ ID NO: 55784 - DNA, 25 bp, Homo sapien
gtttgtaagtacattctggtgtacc

SEQ ID NO: 55785 - DNA, 25 bp, Homo sapien
actctacgaccctagggcgaattac

SEQ ID NO: 55786 - DNA, 25 bp, Homo sapien
actctacgacccaagggcgaattac

SEQ ID NO: 55787 - DNA, 25 bp, Homo sapien
actcctccgtcatgtggtccttcta

SEQ ID NO: 55788 - DNA, 25 bp, Homo sapien
actcctccgtcaagtggtccttcta

SEQ ID NO: 55789 - DNA, 25 bp, Homo sapien
cctctaccgcatggagtcgagattg

SEQ ID NO: 55790 - DNA, 25 bp, Homo sapien
cctctaccgcatcgagtcgagattg

SEQ ID NO: 55791 - DNA, 25 bp, Homo sapien
aatagtgtcctgtctatgagttctg

SEQ ID NO: 55792 - DNA, 25 bp, Homo sapien
aatagtgtcctgactatgagttctg

SEQ ID NO: 55793 - DNA, 25 bp, Homo sapien
cattaattcctggagttgtattctg

SEQ ID NO: 55794 - DNA, 25 bp, Homo sapien
cattaattcctgcagttgtattctg

SEQ ID NO: 55795 - DNA, 25 bp, Homo sapien
ttttattcacacgagtccgattcgg

SEQ ID NO: 55796 - DNA, 25 bp, Homo sapien
ttttattcacaccagtccgattcgg

SEQ ID NO: 55797 - DNA, 25 bp, Homo sapien
gttctaacgaatagatcgcgtcctg

SEQ ID NO: 55798 - DNA, 25 bp, Homo sapien
gttctaacgaattgatcgcgtcctg

SEQ ID NO: 55799 - DNA, 25 bp, Homo sapien
cgtaatacagtgaatgtcagttttc

SEQ ID NO: 55800 - DNA, 25 bp, Homo sapien
cgtaatacagtgtatgtcagttttc

SEQ ID NO: 55801 - DNA, 25 bp, Homo sapien
cgtgtctcactcagtttttcagttt

SEQ ID NO: 55802 - DNA, 25 bp, Homo sapien
cgtgtctcactctgtttttcagttt

SEQ ID NO: 55803 - DNA, 25 bp, Homo sapien
cgttaccatgtctttcgtcgaattt

SEQ ID NO: 55804 - DNA, 25 bp, Homo sapien
cgttaccatgtcattcgtcgaattt

SEQ ID NO: 55805 - DNA, 25 bp, Homo sapien
tgttttccctatgtctgaggtggtt

SEQ ID NO: 55806 - DNA, 25 bp, Homo sapien
tgttttccctatctctgaggtggtt

SEQ ID NO: 55807 - DNA, 25 bp, Homo sapien
cttcctctgtcatccgagtcgggtc

SEQ ID NO: 55808 - DNA, 25 bp, Homo sapien
cttcctctgtcaaccgagtcgggtc

SEQ ID NO: 55809 - DNA, 25 bp, Homo sapien
acccttctgtatcgtccggtctttc

SEQ ID NO: 55810 - DNA, 25 bp, Homo sapien
acccttctgtatggtccggtctttc

SEQ ID NO: 55811 - DNA, 25 bp, Homo sapien
gtcgtctgtatgtacctgtccatct

SEQ ID NO: 55812 - DNA, 25 bp, Homo sapien
gtcgtctgtatgaacctgtccatct

SEQ ID NO: 55813 - DNA, 25 bp, Homo sapien
ctctctgtcggaagttactacaaat

SEQ ID NO: 55814 - DNA, 25 bp, Homo sapien
ctctctgtcggatgttactacaaat

SEQ ID NO: 55815 - DNA, 25 bp, Homo sapien
agggggacctccagtgtccacagga

SEQ ID NO: 55816 - DNA, 25 bp, Homo sapien
agggggacctcctgtgtccacagga

SEQ ID NO: 55817 - DNA, 25 bp, Homo sapien
gacatgtagatttccgtacttcgtg

SEQ ID NO: 55818 - DNA, 25 bp, Homo sapien
gacatgtagattaccgtacttcgtg

SEQ ID NO: 55819 - DNA, 25 bp, Homo sapien
ttagtaatcgggaactgactcgtga

SEQ ID NO: 55820 - DNA, 25 bp, Homo sapien
ttagtaatcgggtactgactcgtga

SEQ ID NO: 55821 - DNA, 25 bp, Homo sapien
ggaccgatgtcgaagtaccgtgtag

SEQ ID NO: 55822 - DNA, 25 bp, Homo sapien
ggaccgatgtcgtagtaccgtgtag

SEQ ID NO: 55823 - DNA, 25 bp, Homo sapien
ctcgctacacgacctggggtcgcgg

SEQ ID NO: 55824 - DNA, 25 bp, Homo sapien
ctcgctacacgagctggggtcgcgg

SEQ ID NO: 55825 - DNA, 25 bp, Homo sapien
accccggacgaggttcagtagtcgt

SEQ ID NO: 55826 - DNA, 25 bp, Homo sapien
accccggacgagcttcagtagtcgt

SEQ ID NO: 55827 - DNA, 25 bp, Homo sapien
acggccccgacgaggaagtcccagt

SEQ ID NO: 55828 - DNA, 25 bp, Homo sapien
acggccccgacgtggaagtcccagt

SEQ ID NO: 55829 - DNA, 25 bp, Homo sapien
caaccccacgtggtaggagggccgt

SEQ ID NO: 55830 - DNA, 25 bp, Homo sapien
caaccccacgtgctaggagggccgt

SEQ ID NO: 55831 - DNA, 25 bp, Homo sapien
ccggacccaacctagtcgaggttga

SEQ ID NO: 55832 - DNA, 25 bp, Homo sapien
ccggacccaaccaagtcgaggttga

SEQ ID NO: 55833 - DNA, 25 bp, Homo sapien
ggtcctgaacctaccgagttccgac

SEQ ID NO: 55834 - DNA, 25 bp, Homo sapien
ggtcctgaaccttccgagttccgac

SEQ ID NO: 55835 - DNA, 25 bp, Homo sapien
cggtacttagggtcaccgaggttcc

SEQ ID NO: 55836 - DNA, 25 bp, Homo sapien
cggtacttagggacaccgaggttcc

SEQ ID NO: 55837 - DNA, 25 bp, Homo sapien
aaggaacaggaccacagggtcgtcc

SEQ ID NO: 55838 - DNA, 25 bp, Homo sapien
aaggaacaggacgacagggtcgtcc

SEQ ID NO: 55839 - DNA, 25 bp, Homo sapien
ggacacgttattccatactcgtaat

SEQ ID NO: 55840 - DNA, 25 bp, Homo sapien
ggacacgttattgcatactcgtaat

SEQ ID NO: 55841 - DNA, 25 bp, Homo sapien
gagcaacgtattttacaggtcgagc

SEQ ID NO: 55842 - DNA, 25 bp, Homo sapien
gagcaacgtattatacaggtcgagc

SEQ ID NO: 55843 - DNA, 25 bp, Homo sapien
ggtcccgtgggtcctttgtagtcgt

SEQ ID NO: 55844 - DNA, 25 bp, Homo sapien
ggtcccgtgggtgctttgtagtcgt

SEQ ID NO: 55845 - DNA, 25 bp, Homo sapien
ggttccacataggaactggcgtgct

SEQ ID NO: 55846 - DNA, 25 bp, Homo sapien
ggttccacatagcaactggcgtgct

SEQ ID NO: 55847 - DNA, 25 bp, Homo sapien
cgcacccggaggacacgacgaggtc

SEQ ID NO: 55848 - DNA, 25 bp, Homo sapien
cgcacccggaggtcacgacgaggtc

SEQ ID NO: 55849 - DNA, 25 bp, Homo sapien
agcagcagtgggtcgaccgacatcg

SEQ ID NO: 55850 - DNA, 25 bp, Homo sapien
agcagcagtgggacgaccgacatcg

SEQ ID NO: 55851 - DNA, 25 bp, Homo sapien
taaagagtcgtccgagtcccagagg

SEQ ID NO: 55852 - DNA, 25 bp, Homo sapien
taaagagtcgtcggagtcccagagg

SEQ ID NO: 55853 - DNA, 25 bp, Homo sapien
gaaatacgtggaagtacacgacgga

SEQ ID NO: 55854 - DNA, 25 bp, Homo sapien
gaaatacgtggatgtacacgacgga

SEQ ID NO: 55855 - DNA, 25 bp, Homo sapien
ctcgaaaaggtagtgacgagacaca

SEQ ID NO: 55856 - DNA, 25 bp, Homo sapien
ctcgaaaaggtactgacgagacaca

SEQ ID NO: 55857 - DNA, 25 bp, Homo sapien
cgcacactgggtctcgggactacgg

SEQ ID NO: 55858 - DNA, 25 bp, Homo sapien
cgcacactgggtgtcgggactacgg

SEQ ID NO: 55859 - DNA, 25 bp, Homo sapien
tccataccaccgttgtgaaatacga

SEQ ID NO: 55860 - DNA, 25 bp, Homo sapien
tccataccaccgatgtgaaatacga

SEQ ID NO: 55861 - DNA, 25 bp, Homo sapien
ccactacgtgtggagacactacgag

SEQ ID NO: 55862 - DNA, 25 bp, Homo sapien
ccactacgtgtgcagacactacgag

SEQ ID NO: 55863 - DNA, 25 bp, Homo sapien
atttttacactctgcggagacaaag

SEQ ID NO: 55864 - DNA, 25 bp, Homo sapien
atttttacactcagcggagacaaag

SEQ ID NO: 55865 - DNA, 25 bp, Homo sapien
agaatctactatcagggaccaaact

SEQ ID NO: 55866 - DNA, 25 bp, Homo sapien
agaatctactatgagggaccaaact

SEQ ID NO: 55867 - DNA, 25 bp, Homo sapien
aagaaatgtttaacggtcatcaaac

SEQ ID NO: 55868 - DNA, 25 bp, Homo sapien
aagaaatgtttatcggtcatcaaac

SEQ ID NO: 55869 - DNA, 25 bp, Homo sapien
aaaaaaggatacacgtatccactga

SEQ ID NO: 55870 - DNA, 25 bp, Homo sapien
aaaaaaggatactcgtatccactga

SEQ ID NO: 55871 - DNA, 25 bp, Homo sapien
tagagaaagtggagaaagcccctac

SEQ ID NO: 55872 - DNA, 25 bp, Homo sapien
tagagaaagtggtgaaagcccctac

SEQ ID NO: 55873 - DNA, 25 bp, Homo sapien
aggaaaggaaagtgtcgtccttctc

SEQ ID NO: 55874 - DNA, 25 bp, Homo sapien
aggaaaggaaagagtcgtccttctc

SEQ ID NO: 55875 - DNA, 25 bp, Homo sapien
atgatcgtactaattctattcgtag

SEQ ID NO: 55876 - DNA, 25 bp, Homo sapien
atgatcgtactatttctattcgtag

SEQ ID NO: 55877 - DNA, 25 bp, Homo sapien
gattttgaacgttcactatgtacta

SEQ ID NO: 55878 - DNA, 25 bp, Homo sapien
gattttgaacgtacactatgtacta

SEQ ID NO: 55879 - DNA, 25 bp, Homo sapien
ttatctgtgtccaatcccttaggat

SEQ ID NO: 55880 - DNA, 25 bp, Homo sapien
ttatctgtgtcctatcccttaggat

SEQ ID NO: 55881 - DNA, 25 bp, Homo sapien
ttttggggacctaccgtcttggagt

SEQ ID NO: 55882 - DNA, 25 bp, Homo sapien
ttttggggaccttccgtcttggagt

SEQ ID NO: 55883 - DNA, 25 bp, Homo sapien
cggtgtgtagaaacagtcgttcaat

SEQ ID NO: 55884 - DNA, 25 bp, Homo sapien
cggtgtgtagaatcagtcgttcaat

SEQ ID NO: 55885 - DNA, 25 bp, Homo sapien
gtctgtaaacgtagtctgtcactcg

SEQ ID NO: 55886 - DNA, 25 bp, Homo sapien
gtctgtaaacgttgtctgtcactcg

SEQ ID NO: 55887 - DNA, 25 bp, Homo sapien
aggagtctacgtatgttccgtgtcc

SEQ ID NO: 55888 - DNA, 25 bp, Homo sapien
aggagtctacgtttgttccgtgtcc

SEQ ID NO: 55889 - DNA, 25 bp, Homo sapien
ttaggtgttatataacaactgacct

SEQ ID NO: 55890 - DNA, 25 bp, Homo sapien
ttaggtgttataaaacaactgacct

SEQ ID NO: 55891 - DNA, 25 bp, Homo sapien
cctcttgattgtggaactagtacaa

SEQ ID NO: 55892 - DNA, 25 bp, Homo sapien
cctcttgattgtcgaactagtacaa

SEQ ID NO: 55893 - DNA, 25 bp, Homo sapien
ttgatcatatgtcgaacggactctt

SEQ ID NO: 55894 - DNA, 25 bp, Homo sapien
ttgatcatatgtggaacggactctt

SEQ ID NO: 55895 - DNA, 25 bp, Homo sapien
ccacttcgattgcaactccccgtag

SEQ ID NO: 55896 - DNA, 25 bp, Homo sapien
ccacttcgattggaactccccgtag

SEQ ID NO: 55897 - DNA, 25 bp, Homo sapien
atctgtgtctcattacgtattgcca

SEQ ID NO: 55898 - DNA, 25 bp, Homo sapien
atctgtgtctcaatacgtattgcca

SEQ ID NO: 55899 - DNA, 25 bp, Homo sapien
gtcgtctgtgactgaatctttggaa

SEQ ID NO: 55900 - DNA, 25 bp, Homo sapien
gtcgtctgtgacagaatctttggaa

SEQ ID NO: 55901 - DNA, 25 bp, Homo sapien
ttatccttacggtgtgtttatgtca

SEQ ID NO: 55902 - DNA, 25 bp, Homo sapien
ttatccttacggagtgtttatgtca

SEQ ID NO: 55903 - DNA, 25 bp, Homo sapien
tacccgtagaggtttctcatgctat

SEQ ID NO: 55904 - DNA, 25 bp, Homo sapien
tacccgtagaggattctcatgctat

SEQ ID NO: 55905 - DNA, 25 bp, Homo sapien
accgagtaccgttggattctaccgt

SEQ ID NO: 55906 - DNA, 25 bp, Homo sapien
accgagtaccgtaggattctaccgt

SEQ ID NO: 55907 - DNA, 25 bp, Homo sapien
cacagacggtacagtagatgttcct

SEQ ID NO: 55908 - DNA, 25 bp, Homo sapien
cacagacggtactgtagatgttcct

SEQ ID NO: 55909 - DNA, 25 bp, Homo sapien
gttttacagtcgtcaggatgataac

SEQ ID NO: 55910 - DNA, 25 bp, Homo sapien
gttttacagtcgacaggatgataac

SEQ ID NO: 55911 - DNA, 25 bp, Homo sapien
aggttttatatgaccgtctttattc

SEQ ID NO: 55912 - DNA, 25 bp, Homo sapien
aggttttatatgtccgtctttattc

SEQ ID NO: 55913 - DNA, 25 bp, Homo sapien
ggtgtcgaggagtgtctccccatcc

SEQ ID NO: 55914 - DNA, 25 bp, Homo sapien
ggtgtcgaggagagtctccccatcc

SEQ ID NO: 55915 - DNA, 25 bp, Homo sapien
tgtgtctgatgtcgtgggtcctcca

SEQ ID NO: 55916 - DNA, 25 bp, Homo sapien
tgtgtctgatgtggtgggtcctcca

SEQ ID NO: 55917 - DNA, 25 bp, Homo sapien
ttttttggtctatggacctactccc

SEQ ID NO: 55918 - DNA, 25 bp, Homo sapien
ttttttggtctaaggacctactccc

SEQ ID NO: 55919 - DNA, 25 bp, Homo sapien
tggtgggtagaaagacaactcctcg

SEQ ID NO: 55920 - DNA, 25 bp, Homo sapien
tggtgggtagaatgacaactcctcg

SEQ ID NO: 55921 - DNA, 25 bp, Homo sapien
agtcgtgcatgacctaccgtcgtgt

SEQ ID NO: 55922 - DNA, 25 bp, Homo sapien
agtcgtgcatgagctaccgtcgtgt

SEQ ID NO: 55923 - DNA, 25 bp, Homo sapien
aggtgtcgctgtcgactctcggtgt

SEQ ID NO: 55924 - DNA, 25 bp, Homo sapien
aggtgtcgctgtggactctcggtgt

SEQ ID NO: 55925 - DNA, 25 bp, Homo sapien
gtagaccgactccaggaactacctg

SEQ ID NO: 55926 - DNA, 25 bp, Homo sapien
gtagaccgactcgaggaactacctg

SEQ ID NO: 55927 - DNA, 25 bp, Homo sapien
cctcgagaagactggaagggacttt

SEQ ID NO: 55928 - DNA, 25 bp, Homo sapien
cctcgagaagacaggaagggacttt

SEQ ID NO: 55929 - DNA, 25 bp, Homo sapien
tccccctgagaactggagccgacaa

SEQ ID NO: 55930 - DNA, 25 bp, Homo sapien
tccccctgagaagtggagccgacaa

SEQ ID NO: 55931 - DNA, 25 bp, Homo sapien
cacctggacacaggagtggcgaaag

SEQ ID NO: 55932 - DNA, 25 bp, Homo sapien
cacctggacacacgagtggcgaaag

SEQ ID NO: 55933 - DNA, 25 bp, Homo sapien
tcccctggaaccactcgaacgtaaa

SEQ ID NO: 55934 - DNA, 25 bp, Homo sapien
tcccctggaacctctcgaacgtaaa

SEQ ID NO: 55935 - DNA, 25 bp, Homo sapien
ctgtccgacgaaaccctcgaaaggg

SEQ ID NO: 55936 - DNA, 25 bp, Homo sapien
ctgtccgacgaatccctcgaaaggg

SEQ ID NO: 55937 - DNA, 25 bp, Homo sapien
gtaaacaagaagtcctgttccgcac

SEQ ID NO: 55938 - DNA, 25 bp, Homo sapien
gtaaacaagaagacctgttccgcac

SEQ ID NO: 55939 - DNA, 25 bp, Homo sapien
tcacaagtgtaaaaggtttactcaa

SEQ ID NO: 55940 - DNA, 25 bp, Homo sapien
tcacaagtgtaataggtttactcaa

SEQ ID NO: 55941 - DNA, 25 bp, Homo sapien
cacattcaagcgaagggtcttaacg

SEQ ID NO: 55942 - DNA, 25 bp, Homo sapien
cacattcaagcgtagggtcttaacg

SEQ ID NO: 55943 - DNA, 25 bp, Homo sapien
tattaaagagtctcttgtttctgac

SEQ ID NO: 55944 - DNA, 25 bp, Homo sapien
tattaaagagtcacttgtttctgac

SEQ ID NO: 55945 - DNA, 25 bp, Homo sapien
cgttccggggttttcgatataggac

SEQ ID NO: 55946 - DNA, 25 bp, Homo sapien
cgttccggggttatcgatataggac

SEQ ID NO: 55947 - DNA, 25 bp, Homo sapien
tgtggaccctgtatcataagtcgtc

SEQ ID NO: 55948 - DNA, 25 bp, Homo sapien
tgtggaccctgtttcataagtcgtc

SEQ ID NO: 55949 - DNA, 25 bp, Homo sapien
cgggtgttttggttacctaatgtac

SEQ ID NO: 55950 - DNA, 25 bp, Homo sapien
cgggtgttttggatacctaatgtac

SEQ ID NO: 55951 - DNA, 25 bp, Homo sapien
caggaatcacgtgcttactctcaaa

SEQ ID NO: 55952 - DNA, 25 bp, Homo sapien
caggaatcacgtccttactctcaaa

SEQ ID NO: 55953 - DNA, 25 bp, Homo sapien
gtacaaaccacttagtttctgagaa

SEQ ID NO: 55954 - DNA, 25 bp, Homo sapien
gtacaaaccactaagtttctgagaa

SEQ ID NO: 55955 - DNA, 25 bp, Homo sapien
tgtccgtgacatagtatttcttaaa

SEQ ID NO: 55956 - DNA, 25 bp, Homo sapien
tgtccgtgacattgtatttcttaaa

SEQ ID NO: 55957 - DNA, 25 bp, Homo sapien
acatgtctattttgaaattacacca

SEQ ID NO: 55958 - DNA, 25 bp, Homo sapien
acatgtctatttagaaattacacca

SEQ ID NO: 55959 - DNA, 25 bp, Homo sapien
acattctgtgtgtgcaatcacaccc

SEQ ID NO: 55960 - DNA, 25 bp, Homo sapien
acattctgtgtgagcaatcacaccc

SEQ ID NO: 55961 - DNA, 25 bp, Homo sapien
ttttgactttgaaagtcagacgcta

SEQ ID NO: 55962 - DNA, 25 bp, Homo sapien
ttttgactttgatagtcagacgcta

SEQ ID NO: 55963 - DNA, 25 bp, Homo sapien
tgttttactttgtttccatacggag

SEQ ID NO: 55964 - DNA, 25 bp, Homo sapien
tgttttactttgattccatacggag

SEQ ID NO: 55965 - DNA, 25 bp, Homo sapien
tgttcttacttgttacccgataaga

SEQ ID NO: 55966 - DNA, 25 bp, Homo sapien
tgttcttacttgatacccgataaga

SEQ ID NO: 55967 - DNA, 25 bp, Homo sapien
gtacattttgtacacgacgttggta

SEQ ID NO: 55968 - DNA, 25 bp, Homo sapien
gtacattttgtagacgacgttggta

SEQ ID NO: 55969 - DNA, 25 bp, Homo sapien
gacaggagacaatgagtctatgtca

SEQ ID NO: 55970 - DNA, 25 bp, Homo sapien
gacaggagacaaagagtctatgtca

SEQ ID NO: 55971 - DNA, 25 bp, Homo sapien
ctcctaacacaaagtgtctctctgg

SEQ ID NO: 55972 - DNA, 25 bp, Homo sapien
ctcctaacacaatgtgtctctctgg

SEQ ID NO: 55973 - DNA, 25 bp, Homo sapien
tctaccatcgaggagtccctctggt

SEQ ID NO: 55974 - DNA, 25 bp, Homo sapien
tctaccatcgagcagtccctctggt

SEQ ID NO: 55975 - DNA, 25 bp, Homo sapien
gaaactccactaaaagcccctagag

SEQ ID NO: 55976 - DNA, 25 bp, Homo sapien
gaaactccactataagcccctagag

SEQ ID NO: 55977 - DNA, 25 bp, Homo sapien
cacgaccctaatgtccgcactcggt

SEQ ID NO: 55978 - DNA, 25 bp, Homo sapien
cacgaccctaatctccgcactcggt

SEQ ID NO: 55979 - DNA, 25 bp, Homo sapien
atcttcttacagtggcttctcccgt

SEQ ID NO: 55980 - DNA, 25 bp, Homo sapien
atcttcttacagaggcttctcccgt

SEQ ID NO: 55981 - DNA, 25 bp, Homo sapien
tttatcattcggtgtggtttccggg

SEQ ID NO: 55982 - DNA, 25 bp, Homo sapien
tttatcattcggagtggtttccggg

SEQ ID NO: 55983 - DNA, 25 bp, Homo sapien
gctttatcgtccaagtggttttcca

SEQ ID NO: 55984 - DNA, 25 bp, Homo sapien
gctttatcgtcctagtggttttcca

SEQ ID NO: 55985 - DNA, 25 bp, Homo sapien
tatcgggaccttttcgtcaaactta

SEQ ID NO: 55986 - DNA, 25 bp, Homo sapien
tatcgggaccttatcgtcaaactta

SEQ ID NO: 55987 - DNA, 25 bp, Homo sapien
ttgtggtaccttacccagaacgtta

SEQ ID NO: 55988 - DNA, 25 bp, Homo sapien
ttgtggtacctttcccagaacgtta

SEQ ID NO: 55989 - DNA, 25 bp, Homo sapien
gtagactccgactggaaacactcct

SEQ ID NO: 55990 - DNA, 25 bp, Homo sapien
gtagactccgacaggaaacactcct

SEQ ID NO: 55991 - DNA, 25 bp, Homo sapien
ggccagtgttacgtaaggtcctcct

SEQ ID NO: 55992 - DNA, 25 bp, Homo sapien
ggccagtgttacctaaggtcctcct

SEQ ID NO: 55993 - DNA, 25 bp, Homo sapien
accagctagtacgtgaacgtgtccc

SEQ ID NO: 55994 - DNA, 25 bp, Homo sapien
accagctagtacctgaacgtgtccc

SEQ ID NO: 55995 - DNA, 25 bp, Homo sapien
cttccacggtcacagtttctaaccg

SEQ ID NO: 55996 - DNA, 25 bp, Homo sapien
cttccacggtcagagtttctaaccg

SEQ ID NO: 55997 - DNA, 25 bp, Homo sapien
tcctcatacctcagtgtgtctccga

SEQ ID NO: 55998 - DNA, 25 bp, Homo sapien
tcctcatacctctgtgtgtctccga

SEQ ID NO: 55999 - DNA, 25 bp, Homo sapien
gaagtaactggagttgatgtaccaa

SEQ ID NO: 56000 - DNA, 25 bp, Homo sapien
gaagtaactggacttgatgtaccaa

SEQ ID NO: 56001 - DNA, 25 bp, Homo sapien
aagagaaccgttcttagaacgggaa

SEQ ID NO: 56002 - DNA, 25 bp, Homo sapien
aagagaaccgttgttagaacgggaa

SEQ ID NO: 56003 - DNA, 25 bp, Homo sapien
gcagaccctacctgttatcatgttt

SEQ ID NO: 56004 - DNA, 25 bp, Homo sapien
gcagaccctaccagttatcatgttt

SEQ ID NO: 56005 - DNA, 25 bp, Homo sapien
ggaaacctaaacactactttcgtgt

SEQ ID NO: 56006 - DNA, 25 bp, Homo sapien
ggaaacctaaactctactttcgtgt

SEQ ID NO: 56007 - DNA, 25 bp, Homo sapien
cgtacagtggtttttaagaggtccc

SEQ ID NO: 56008 - DNA, 25 bp, Homo sapien
cgtacagtggttattaagaggtccc

SEQ ID NO: 56009 - DNA, 25 bp, Homo sapien
tcgttgaacttagtttggtctcgac

SEQ ID NO: 56010 - DNA, 25 bp, Homo sapien
tcgttgaacttactttggtctcgac

SEQ ID NO: 56011 - DNA, 25 bp, Homo sapien
gtctcgacaatatagttgacctgta

SEQ ID NO: 56012 - DNA, 25 bp, Homo sapien
gtctcgacaataaagttgacctgta

SEQ ID NO: 56013 - DNA, 25 bp, Homo sapien
cgacccgacgggagtattcccggag

SEQ ID NO: 56014 - DNA, 25 bp, Homo sapien
cgacccgacgggtgtattcccggag

SEQ ID NO: 56015 - DNA, 25 bp, Homo sapien
tcccgggtcggacgatttcctacct

SEQ ID NO: 56016 - DNA, 25 bp, Homo sapien
tcccgggtcggaggatttcctacct

SEQ ID NO: 56017 - DNA, 25 bp, Homo sapien
ccgcttcgccggcatggtcttcgtg

SEQ ID NO: 56018 - DNA, 25 bp, Homo sapien
ccgcttcgccgggatggtcttcgtg

SEQ ID NO: 56019 - DNA, 25 bp, Homo sapien
cccgtttcccgaggtccgtctttag

SEQ ID NO: 56020 - DNA, 25 bp, Homo sapien
cccgtttcccgacgtccgtctttag

SEQ ID NO: 56021 - DNA, 25 bp, Homo sapien
catagatgtgtttatgtctccttta

SEQ ID NO: 56022 - DNA, 25 bp, Homo sapien
catagatgtgttaatgtctccttta

SEQ ID NO: 56023 - DNA, 25 bp, Homo sapien
caccaggtccaaagacgtgtcctta

SEQ ID NO: 56024 - DNA, 25 bp, Homo sapien
caccaggtccaatgacgtgtcctta

SEQ ID NO: 56025 - DNA, 25 bp, Homo sapien
ggtcttttcagtaaagggtcttttc

SEQ ID NO: 56026 - DNA, 25 bp, Homo sapien
ggtcttttcagttaagggtcttttc

SEQ ID NO: 56027 - DNA, 25 bp, Homo sapien
ggttttatcacgtttatgggtttcc

SEQ ID NO: 56028 - DNA, 25 bp, Homo sapien
ggttttatcacgattatgggtttcc

SEQ ID NO: 56029 - DNA, 25 bp, Homo sapien
ctttactgtcgtgtttaggtgtcaa

SEQ ID NO: 56030 - DNA, 25 bp, Homo sapien
ctttactgtcgtctttaggtgtcaa

SEQ ID NO: 56031 - DNA, 25 bp, Homo sapien
ttattttccacttaagggactaccg

SEQ ID NO: 56032 - DNA, 25 bp, Homo sapien
ttattttccactaaagggactaccg

SEQ ID NO: 56033 - DNA, 25 bp, Homo sapien
catctttccatccatgcgagtctcg

SEQ ID NO: 56034 - DNA, 25 bp, Homo sapien
catctttccatcgatgcgagtctcg

SEQ ID NO: 56035 - DNA, 25 bp, Homo sapien
atataggtggcgtcgcatatgaatc

SEQ ID NO: 56036 - DNA, 25 bp, Homo sapien
atataggtggcgacgcatatgaatc

SEQ ID NO: 56037 - DNA, 25 bp, Homo sapien
aagttctgtgtctagacccaggggt

SEQ ID NO: 56038 - DNA, 25 bp, Homo sapien
aagttctgtgtcaagacccaggggt

SEQ ID NO: 56039 - DNA, 25 bp, Homo sapien
ctacttcgtgtaaacgccgatgagc

SEQ ID NO: 56040 - DNA, 25 bp, Homo sapien
ctacttcgtgtatacgccgatgagc

SEQ ID NO: 56041 - DNA, 25 bp, Homo sapien
gtcgtgttgtaacaccaggtgaggt

SEQ ID NO: 56042 - DNA, 25 bp, Homo sapien
gtcgtgttgtaagaccaggtgaggt

SEQ ID NO: 56043 - DNA, 25 bp, Homo sapien
atacggtggaccaccggtcgggtct

SEQ ID NO: 56044 - DNA, 25 bp, Homo sapien
atacggtggacctccggtcgggtct

SEQ ID NO: 56045 - DNA, 25 bp, Homo sapien
tgtgtgtccattcaccgtagtgcct

SEQ ID NO: 56046 - DNA, 25 bp, Homo sapien
tgtgtgtccattgaccgtagtgcct

SEQ ID NO: 56047 - DNA, 25 bp, Homo sapien
aatatgtcattagaccgtgttcgat

SEQ ID NO: 56048 - DNA, 25 bp, Homo sapien
aatatgtcattacaccgtgttcgat

SEQ ID NO: 56049 - DNA, 25 bp, Homo sapien
gagatgtcattaataccgttccgag

SEQ ID NO: 56050 - DNA, 25 bp, Homo sapien
gagatgtcattattaccgttccgag

SEQ ID NO: 56051 - DNA, 25 bp, Homo sapien
aaggggttacgactcctcctggacc

SEQ ID NO: 56052 - DNA, 25 bp, Homo sapien
aaggggttacgagtcctcctggacc

SEQ ID NO: 56053 - DNA, 25 bp, Homo sapien
tagggtgttttacgatcatagatcc

SEQ ID NO: 56054 - DNA, 25 bp, Homo sapien
tagggtgttttaggatcatagatcc

SEQ ID NO: 56055 - DNA, 25 bp, Homo sapien
gtctgtctgtaccttcgacagctcc

SEQ ID NO: 56056 - DNA, 25 bp, Homo sapien
gtctgtctgtacgttcgacagctcc

SEQ ID NO: 56057 - DNA, 25 bp, Homo sapien
actgtctacgactcgattacgaccc

SEQ ID NO: 56058 - DNA, 25 bp, Homo sapien
actgtctacgacacgattacgaccc

SEQ ID NO: 56059 - DNA, 25 bp, Homo sapien
gagatgtcagacactagtttacgca

SEQ ID NO: 56060 - DNA, 25 bp, Homo sapien
gagatgtcagactctagtttacgca

SEQ ID NO: 56061 - DNA, 25 bp, Homo sapien
gtggtgcacctctgggtcgtactga

SEQ ID NO: 56062 - DNA, 25 bp, Homo sapien
gtggtgcacctcagggtcgtactga

SEQ ID NO: 56063 - DNA, 25 bp, Homo sapien
ggaggtcttcgcaccctttggtgtc

SEQ ID NO: 56064 - DNA, 25 bp, Homo sapien
ggaggtcttcgctccctttggtgtc

SEQ ID NO: 56065 - DNA, 25 bp, Homo sapien
ggaactcttgattgccttttcggat

SEQ ID NO: 56066 - DNA, 25 bp, Homo sapien
ggaactcttgatagccttttcggat

SEQ ID NO: 56067 - DNA, 25 bp, Homo sapien
ccactcttctataggcttctgcgga

SEQ ID NO: 56068 - DNA, 25 bp, Homo sapien
ccactcttctattggcttctgcgga

SEQ ID NO: 56069 - DNA, 25 bp, Homo sapien
ggactgacgacgatggagacgtgat

SEQ ID NO: 56070 - DNA, 25 bp, Homo sapien
ggactgacgacgttggagacgtgat

SEQ ID NO: 56071 - DNA, 25 bp, Homo sapien
acctgtcgatcttcggatgggattt

SEQ ID NO: 56072 - DNA, 25 bp, Homo sapien
acctgtcgatctacggatgggattt

SEQ ID NO: 56073 - DNA, 25 bp, Homo sapien
cccttcaattgtatctgtgagtctt

SEQ ID NO: 56074 - DNA, 25 bp, Homo sapien
cccttcaattgtttctgtgagtctt

SEQ ID NO: 56075 - DNA, 25 bp, Homo sapien
ctacatatcatttgggtaagttctt

SEQ ID NO: 56076 - DNA, 25 bp, Homo sapien
ctacatatcattagggtaagttctt

SEQ ID NO: 56077 - DNA, 25 bp, Homo sapien
tacaaggtcttcaggagtaaatgtc

SEQ ID NO: 56078 - DNA, 25 bp, Homo sapien
tacaaggtcttctggagtaaatgtc

SEQ ID NO: 56079 - DNA, 25 bp, Homo sapien
cactagtccgtcgtaattagaagtc

SEQ ID NO: 56080 - DNA, 25 bp, Homo sapien
cactagtccgtcctaattagaagtc

SEQ ID NO: 56081 - DNA, 25 bp, Homo sapien
cgaagtatcagtctgaagagttcac

SEQ ID NO: 56082 - DNA, 25 bp, Homo sapien
cgaagtatcagtgtgaagagttcac

SEQ ID NO: 56083 - DNA, 25 bp, Homo sapien
gcgggtgaaggacacggactcctct

SEQ ID NO: 56084 - DNA, 25 bp, Homo sapien
gcgggtgaaggagacggactcctct

SEQ ID NO: 56085 - DNA, 25 bp, Homo sapien
ctgtaggccgaagaacgggaccatg

SEQ ID NO: 56086 - DNA, 25 bp, Homo sapien
ctgtaggccgaacaacgggaccatg

SEQ ID NO: 56087 - DNA, 25 bp, Homo sapien
cctactcccgtacgtttgctatacg

SEQ ID NO: 56088 - DNA, 25 bp, Homo sapien
cctactcccgtaggtttgctatacg

SEQ ID NO: 56089 - DNA, 25 bp, Homo sapien
tctctaccctcgtctccgtgttatg

SEQ ID NO: 56090 - DNA, 25 bp, Homo sapien
tctctaccctcgactccgtgttatg

SEQ ID NO: 56091 - DNA, 25 bp, Homo sapien
ttcccttatgtttaagtgtcgtctg

SEQ ID NO: 56092 - DNA, 25 bp, Homo sapien
ttcccttatgttaaagtgtcgtctg

SEQ ID NO: 56093 - DNA, 25 bp, Homo sapien
gtttatctttaggtactgatttccc

SEQ ID NO: 56094 - DNA, 25 bp, Homo sapien
gtttatctttagctactgatttccc

SEQ ID NO: 56095 - DNA, 25 bp, Homo sapien
gttaagaggatgtctttcgttcctc

SEQ ID NO: 56096 - DNA, 25 bp, Homo sapien
gttaagaggatgactttcgttcctc

SEQ ID NO: 56097 - DNA, 25 bp, Homo sapien
ctaaagccagtgacccatctaagac

SEQ ID NO: 56098 - DNA, 25 bp, Homo sapien
ctaaagccagtgtcccatctaagac

SEQ ID NO: 56099 - DNA, 25 bp, Homo sapien
ttcagatccagagacccactggaac

SEQ ID NO: 56100 - DNA, 25 bp, Homo sapien
ttcagatccagacacccactggaac

SEQ ID NO: 56101 - DNA, 25 bp, Homo sapien
aatctcactgactccgaagtgtaag

SEQ ID NO: 56102 - DNA, 25 bp, Homo sapien
aatctcactgacaccgaagtgtaag

SEQ ID NO: 56103 - DNA, 25 bp, Homo sapien
acgggcatctgcaccacgacgggcg

SEQ ID NO: 56104 - DNA, 25 bp, Homo sapien
acgggcatctgctccacgacgggcg

SEQ ID NO: 56105 - DNA, 25 bp, Homo sapien
agtcgacttcttcatccaccttgcg

SEQ ID NO: 56106 - DNA, 25 bp, Homo sapien
agtcgacttcttgatccaccttgcg

SEQ ID NO: 56107 - DNA, 25 bp, Homo sapien
cgaagtggtccaggaccatactgag

SEQ ID NO: 56108 - DNA, 25 bp, Homo sapien
cgaagtggtccacgaccatactgag

SEQ ID NO: 56109 - DNA, 25 bp, Homo sapien
gcgaagttcgcgaccctcacgttgg

SEQ ID NO: 56110 - DNA, 25 bp, Homo sapien
gcgaagttcgcgtccctcacgttgg

SEQ ID NO: 56111 - DNA, 25 bp, Homo sapien
gagaaaccgaactccctcatagtgg

SEQ ID NO: 56112 - DNA, 25 bp, Homo sapien
gagaaaccgaacaccctcatagtgg

SEQ ID NO: 56113 - DNA, 25 bp, Homo sapien
gggagaccgaacgagtcccaagtaa

SEQ ID NO: 56114 - DNA, 25 bp, Homo sapien
gggagaccgaaccagtcccaagtaa

SEQ ID NO: 56115 - DNA, 25 bp, Homo sapien
gatgggaatccctctcagaagatgt

SEQ ID NO: 56116 - DNA, 25 bp, Homo sapien
gatgggaatcccactcagaagatgt

SEQ ID NO: 56117 - DNA, 25 bp, Homo sapien
ggtttacccagatcatcaaagtaat

SEQ ID NO: 56118 - DNA, 25 bp, Homo sapien
ggtttacccagaacatcaaagtaat

SEQ ID NO: 56119 - DNA, 25 bp, Homo sapien
ggtgaaaccgaacatataacagatc

SEQ ID NO: 56120 - DNA, 25 bp, Homo sapien
ggtgaaaccgaagatataacagatc

SEQ ID NO: 56121 - DNA, 25 bp, Homo sapien
gaattaaaccaagaagtttcgacct

SEQ ID NO: 56122 - DNA, 25 bp, Homo sapien
gaattaaaccaacaagtttcgacct

SEQ ID NO: 56123 - DNA, 25 bp, Homo sapien
ggatgaacacagaaggttgtttcca

SEQ ID NO: 56124 - DNA, 25 bp, Homo sapien
ggatgaacacagtaggttgtttcca

SEQ ID NO: 56125 - DNA, 25 bp, Homo sapien
gtattaaggtaattgtttaacccac

SEQ ID NO: 56126 - DNA, 25 bp, Homo sapien
gtattaaggtaaatgtttaacccac

SEQ ID NO: 56127 - DNA, 25 bp, Homo sapien
catattgtatatgtgtcttcaggca

SEQ ID NO: 56128 - DNA, 25 bp, Homo sapien
catattgtatatctgtcttcaggca

SEQ ID NO: 56129 - DNA, 25 bp, Homo sapien
ctctctgatctgtcctttcggtccg

SEQ ID NO: 56130 - DNA, 25 bp, Homo sapien
ctctctgatctgacctttcggtccg

SEQ ID NO: 56131 - DNA, 25 bp, Homo sapien
ttctaaatgttcttagtcgtcattg

SEQ ID NO: 56132 - DNA, 25 bp, Homo sapien
ttctaaatgttcatagtcgtcattg

SEQ ID NO: 56133 - DNA, 25 bp, Homo sapien
taagacctgagtcctagtgtttccg

SEQ ID NO: 56134 - DNA, 25 bp, Homo sapien
taagacctgagtgctagtgtttccg

SEQ ID NO: 56135 - DNA, 25 bp, Homo sapien
ttattttcacttgtgtatacgtccg

SEQ ID NO: 56136 - DNA, 25 bp, Homo sapien
ttattttcacttctgtatacgtccg

SEQ ID NO: 56137 - DNA, 25 bp, Homo sapien
taccttagtcacgtagtatttcccg

SEQ ID NO: 56138 - DNA, 25 bp, Homo sapien
taccttagtcacctagtatttcccg

SEQ ID NO: 56139 - DNA, 25 bp, Homo sapien
taccgtttcgtatagtatgccaagt

SEQ ID NO: 56140 - DNA, 25 bp, Homo sapien
taccgtttcgtaaagtatgccaagt

SEQ ID NO: 56141 - DNA, 25 bp, Homo sapien
gacagtgatcaagtatgtctccgag

SEQ ID NO: 56142 - DNA, 25 bp, Homo sapien
gacagtgatcaactatgtctccgag

SEQ ID NO: 56143 - DNA, 25 bp, Homo sapien
gtagtagtagatcgaggtcgtccgg

SEQ ID NO: 56144 - DNA, 25 bp, Homo sapien
gtagtagtagatggaggtcgtccgg

SEQ ID NO: 56145 - DNA, 25 bp, Homo sapien
acgaagtactgaaggccgacgaccc

SEQ ID NO: 56146 - DNA, 25 bp, Homo sapien
acgaagtactgatggccgacgaccc

SEQ ID NO: 56147 - DNA, 25 bp, Homo sapien
gaccgtcttctagtacgtcaaacct

SEQ ID NO: 56148 - DNA, 25 bp, Homo sapien
gaccgtcttctactacgtcaaacct

SEQ ID NO: 56149 - DNA, 25 bp, Homo sapien
gtcgtctttttaggtctccctactc

SEQ ID NO: 56150 - DNA, 25 bp, Homo sapien
gtcgtctttttacgtctccctactc

SEQ ID NO: 56151 - DNA, 25 bp, Homo sapien
ttccttggtttcagtcccgtctctc

SEQ ID NO: 56152 - DNA, 25 bp, Homo sapien
ttccttggtttctgtcccgtctctc

SEQ ID NO: 56153 - DNA, 25 bp, Homo sapien
agttaaaccgagaggacaggtcttc

SEQ ID NO: 56154 - DNA, 25 bp, Homo sapien
agttaaaccgagtggacaggtcttc

SEQ ID NO: 56155 - DNA, 25 bp, Homo sapien
ggtttaccgacgtgaccggctaaga

SEQ ID NO: 56156 - DNA, 25 bp, Homo sapien
ggtttaccgacgagaccggctaaga

SEQ ID NO: 56157 - DNA, 25 bp, Homo sapien
gactttggtcactagctctttacaa

SEQ ID NO: 56158 - DNA, 25 bp, Homo sapien
gactttggtcacaagctctttacaa

SEQ ID NO: 56159 - DNA, 25 bp, Homo sapien
atggtaatcatgacgttagatcgtc

SEQ ID NO: 56160 - DNA, 25 bp, Homo sapien
atggtaatcatgtcgttagatcgtc

SEQ ID NO: 56161 - DNA, 25 bp, Homo sapien
gaaaggagtttgtcctatgacggac

SEQ ID NO: 56162 - DNA, 25 bp, Homo sapien
gaaaggagtttgacctatgacggac

SEQ ID NO: 56163 - DNA, 25 bp, Homo sapien
gtaaaggatttccaccttccgctac

SEQ ID NO: 56164 - DNA, 25 bp, Homo sapien
gtaaaggatttcgaccttccgctac

SEQ ID NO: 56165 - DNA, 25 bp, Homo sapien
taaggtatcaccacgctattggact

SEQ ID NO: 56166 - DNA, 25 bp, Homo sapien
taaggtatcacctcgctattggact

SEQ ID NO: 56167 - DNA, 25 bp, Homo sapien
ggaaagattaaaacaccttcgaaga

SEQ ID NO: 56168 - DNA, 25 bp, Homo sapien
ggaaagattaaatcaccttcgaaga

SEQ ID NO: 56169 - DNA, 25 bp, Homo sapien
aaagacaaacgagaccggaccaagt

SEQ ID NO: 56170 - DNA, 25 bp, Homo sapien
aaagacaaacgacaccggaccaagt

SEQ ID NO: 56171 - DNA, 25 bp, Homo sapien
acaaacaagtcactacgggactcca

SEQ ID NO: 56172 - DNA, 25 bp, Homo sapien
acaaacaagtcagtacgggactcca

SEQ ID NO: 56173 - DNA, 25 bp, Homo sapien
ctcttatgacttttatcaggctgaa

SEQ ID NO: 56174 - DNA, 25 bp, Homo sapien
ctcttatgacttatatcaggctgaa

SEQ ID NO: 56175 - DNA, 25 bp, Homo sapien
cttacctggagtacacgtgcaccat

SEQ ID NO: 56176 - DNA, 25 bp, Homo sapien
cttacctggagttcacgtgcaccat

SEQ ID NO: 56177 - DNA, 25 bp, Homo sapien
ttgcttcttcacgtcacgtacgcag

SEQ ID NO: 56178 - DNA, 25 bp, Homo sapien
ttgcttcttcacctcacgtacgcag

SEQ ID NO: 56179 - DNA, 25 bp, Homo sapien
ccgttaattttcattacggtacaag

SEQ ID NO: 56180 - DNA, 25 bp, Homo sapien
ccgttaattttctttacggtacaag

SEQ ID NO: 56181 - DNA, 25 bp, Homo sapien
gtaatactatttgagacggacacga

SEQ ID NO: 56182 - DNA, 25 bp, Homo sapien
gtaatactatttcagacggacacga

SEQ ID NO: 56183 - DNA, 25 bp, Homo sapien
gattatgacatacctcactgcccga

SEQ ID NO: 56184 - DNA, 25 bp, Homo sapien
gattatgacatagctcactgcccga

SEQ ID NO: 56185 - DNA, 25 bp, Homo sapien
acgccttcggaaacgccttcacgaa

SEQ ID NO: 56186 - DNA, 25 bp, Homo sapien
acgccttcggaatcgccttcacgaa

SEQ ID NO: 56187 - DNA, 25 bp, Homo sapien
gacgccctgaactcgtccttcatga

SEQ ID NO: 56188 - DNA, 25 bp, Homo sapien
gacgccctgaacacgtccttcatga

SEQ ID NO: 56189 - DNA, 25 bp, Homo sapien
ccctcatgggcgtcgaacaggggta

SEQ ID NO: 56190 - DNA, 25 bp, Homo sapien
ccctcatgggcgacgaacaggggta

SEQ ID NO: 56191 - DNA, 25 bp, Homo sapien
gttttgcggataccaccatttatac

SEQ ID NO: 56192 - DNA, 25 bp, Homo sapien
gttttgcggatagcaccatttatac

SEQ ID NO: 56193 - DNA, 25 bp, Homo sapien
acttattcgactacacaatcttatc

SEQ ID NO: 56194 - DNA, 25 bp, Homo sapien
acttattcgacttcacaatcttatc

SEQ ID NO: 56195 - DNA, 25 bp, Homo sapien
taaacggttttttggtcctcttctg

SEQ ID NO: 56196 - DNA, 25 bp, Homo sapien
taaacggtttttaggtcctcttctg

SEQ ID NO: 56197 - DNA, 25 bp, Homo sapien
gagtgtgtgtcgtcggcctttactg

SEQ ID NO: 56198 - DNA, 25 bp, Homo sapien
gagtgtgtgtcgacggcctttactg

SEQ ID NO: 56199 - DNA, 25 bp, Homo sapien
gtacttttaccaagaactgttacgg

SEQ ID NO: 56200 - DNA, 25 bp, Homo sapien
gtacttttaccatgaactgttacgg

SEQ ID NO: 56201 - DNA, 25 bp, Homo sapien
tgaagtttaccctatactttacggt

SEQ ID NO: 56202 - DNA, 25 bp, Homo sapien
tgaagtttacccaatactttacggt

SEQ ID NO: 56203 - DNA, 25 bp, Homo sapien
agtcagttatggttagttctgacct

SEQ ID NO: 56204 - DNA, 25 bp, Homo sapien
agtcagttatggatagttctgacct

SEQ ID NO: 56205 - DNA, 25 bp, Homo sapien
ccggcgcgtccgagatgctgttacc

SEQ ID NO: 56206 - DNA, 25 bp, Homo sapien
ccggcgcgtccgtgatgctgttacc

SEQ ID NO: 56207 - DNA, 25 bp, Homo sapien
ggggtgtaccggtctgtctgtccct

SEQ ID NO: 56208 - DNA, 25 bp, Homo sapien
ggggtgtaccggactgtctgtccct

SEQ ID NO: 56209 - DNA, 25 bp, Homo sapien
gtggaatcgtactctaggttgtccg

SEQ ID NO: 56210 - DNA, 25 bp, Homo sapien
gtggaatcgtacactaggttgtccg

SEQ ID NO: 56211 - DNA, 25 bp, Homo sapien
gttggcaatcgaaaactcctcgtca

SEQ ID NO: 56212 - DNA, 25 bp, Homo sapien
gttggcaatcgataactcctcgtca

SEQ ID NO: 56213 - DNA, 25 bp, Homo sapien
acgtccaagaggacccgcgcgtgag

SEQ ID NO: 56214 - DNA, 25 bp, Homo sapien
acgtccaagaggtcccgcgcgtgag

SEQ ID NO: 56215 - DNA, 25 bp, Homo sapien
cagtaccagttctcccagtaaggtg

SEQ ID NO: 56216 - DNA, 25 bp, Homo sapien
cagtaccagttcacccagtaaggtg

SEQ ID NO: 56217 - DNA, 25 bp, Homo sapien
tcagactctttctctgaccggcctg

SEQ ID NO: 56218 - DNA, 25 bp, Homo sapien
tcagactctttcactgaccggcctg

SEQ ID NO: 56219 - DNA, 25 bp, Homo sapien
cgtctttaggtactgatgggtctgt

SEQ ID NO: 56220 - DNA, 25 bp, Homo sapien
cgtctttaggtagtgatgggtctgt

SEQ ID NO: 56221 - DNA, 25 bp, Homo sapien
gtcctgttcgaaaggatgggtactt

SEQ ID NO: 56222 - DNA, 25 bp, Homo sapien
gtcctgttcgaatggatgggtactt

SEQ ID NO: 56223 - DNA, 25 bp, Homo sapien
cttatcgacgagtgtgatcgggtcc

SEQ ID NO: 56224 - DNA, 25 bp, Homo sapien
cttatcgacgagagtgatcgggtcc

SEQ ID NO: 56225 - DNA, 25 bp, Homo sapien
cacgcgaggtagtacaggagtacac

SEQ ID NO: 56226 - DNA, 25 bp, Homo sapien
cacgcgaggtagaacaggagtacac

SEQ ID NO: 56227 - DNA, 25 bp, Homo sapien
tcaaccacaatgacacgcggcacgt

SEQ ID NO: 56228 - DNA, 25 bp, Homo sapien
tcaaccacaatgtcacgcggcacgt

SEQ ID NO: 56229 - DNA, 25 bp, Homo sapien
gaccaattagtatcccggtactacg

SEQ ID NO: 56230 - DNA, 25 bp, Homo sapien
gaccaattagtaacccggtactacg

SEQ ID NO: 56231 - DNA, 25 bp, Homo sapien
caacagtggacgaacccgaacgacg

SEQ ID NO: 56232 - DNA, 25 bp, Homo sapien
caacagtggacgtacccgaacgacg

SEQ ID NO: 56233 - DNA, 25 bp, Homo sapien
tagaagataaacctacagtcgttcc

SEQ ID NO: 56234 - DNA, 25 bp, Homo sapien
tagaagataaacgtacagtcgttcc

SEQ ID NO: 56235 - DNA, 25 bp, Homo sapien
tctggaatctccttagatcgcgcag

SEQ ID NO: 56236 - DNA, 25 bp, Homo sapien
tctggaatctccatagatcgcgcag

SEQ ID NO: 56237 - DNA, 25 bp, Homo sapien
ttggaacctctttgtgagagcctcg

SEQ ID NO: 56238 - DNA, 25 bp, Homo sapien
ttggaacctcttagtgagagcctcg

SEQ ID NO: 56239 - DNA, 25 bp, Homo sapien
ctcgaggccctcttagggaagtttc

SEQ ID NO: 56240 - DNA, 25 bp, Homo sapien
ctcgaggccctcatagggaagtttc

SEQ ID NO: 56241 - DNA, 25 bp, Homo sapien
aggctggacattagggtagtgcttc

SEQ ID NO: 56242 - DNA, 25 bp, Homo sapien
aggctggacatttgggtagtgcttc

SEQ ID NO: 56243 - DNA, 25 bp, Homo sapien
ggaaggaagaatgaggtaccttctc

SEQ ID NO: 56244 - DNA, 25 bp, Homo sapien
ggaaggaagaatcaggtaccttctc

SEQ ID NO: 56245 - DNA, 25 bp, Homo sapien
tgaaatactactcctgccacgggtg

SEQ ID NO: 56246 - DNA, 25 bp, Homo sapien
tgaaatactactgctgccacgggtg

SEQ ID NO: 56247 - DNA, 25 bp, Homo sapien
tgaacagagttggtgctaccgtgga

SEQ ID NO: 56248 - DNA, 25 bp, Homo sapien
tgaacagagttgctgctaccgtgga

SEQ ID NO: 56249 - DNA, 25 bp, Homo sapien
gaccgaaggtgtctcccgtcagtgc

SEQ ID NO: 56250 - DNA, 25 bp, Homo sapien
gaccgaaggtgtgtcccgtcagtgc

SEQ ID NO: 56251 - DNA, 25 bp, Homo sapien
acggccgaaccgtgccaccggagga

SEQ ID NO: 56252 - DNA, 25 bp, Homo sapien
acggccgaaccgagccaccggagga

SEQ ID NO: 56253 - DNA, 25 bp, Homo sapien
gaccccagcaggtccgcgtaggcgt

SEQ ID NO: 56254 - DNA, 25 bp, Homo sapien
gaccccagcaggaccgcgtaggcgt

SEQ ID NO: 56255 - DNA, 25 bp, Homo sapien
ttgacggtcatccatgcccgggatg

SEQ ID NO: 56256 - DNA, 25 bp, Homo sapien
ttgacggtcatcgatgcccgggatg

SEQ ID NO: 56257 - DNA, 25 bp, Homo sapien
ttacggcaaccagtcttagggcgtg

SEQ ID NO: 56258 - DNA, 25 bp, Homo sapien
ttacggcaaccactcttagggcgtg

SEQ ID NO: 56259 - DNA, 25 bp, Homo sapien
accgacccgggacgaacggcgtgtc

SEQ ID NO: 56260 - DNA, 25 bp, Homo sapien
accgacccgggaggaacggcgtgtc

SEQ ID NO: 56261 - DNA, 25 bp, Homo sapien
taactggagtcttctacgtgataga

SEQ ID NO: 56262 - DNA, 25 bp, Homo sapien
taactggagtctactacgtgataga

SEQ ID NO: 56263 - DNA, 25 bp, Homo sapien
tattctggtcgtcatagggtatact

SEQ ID NO: 56264 - DNA, 25 bp, Homo sapien
tattctggtcgtgatagggtatact

SEQ ID NO: 56265 - DNA, 25 bp, Homo sapien
tatccattcttttcgaggggtagac

SEQ ID NO: 56266 - DNA, 25 bp, Homo sapien
tatccattctttacgaggggtagac

SEQ ID NO: 56267 - DNA, 25 bp, Homo sapien
cgtttctaggtggtaaccgtgtgtg

SEQ ID NO: 56268 - DNA, 25 bp, Homo sapien
cgtttctaggtgctaaccgtgtgtg

SEQ ID NO: 56269 - DNA, 25 bp, Homo sapien
ttcggttcttgtctcgggtcgtagg

SEQ ID NO: 56270 - DNA, 25 bp, Homo sapien
ttcggttcttgtgtcgggtcgtagg

SEQ ID NO: 56271 - DNA, 25 bp, Homo sapien
tggggtactctgctacgggtaaact

SEQ ID NO: 56272 - DNA, 25 bp, Homo sapien
tggggtactctggtacgggtaaact

SEQ ID NO: 56273 - DNA, 25 bp, Homo sapien
cctcggcgtctctgcgtgttgaaat

SEQ ID NO: 56274 - DNA, 25 bp, Homo sapien
cctcggcgtctcagcgtgttgaaat

SEQ ID NO: 56275 - DNA, 25 bp, Homo sapien
ctccgacctctctttcggtgtttgt

SEQ ID NO: 56276 - DNA, 25 bp, Homo sapien
ctccgacctctcattcggtgtttgt

SEQ ID NO: 56277 - DNA, 25 bp, Homo sapien
ggtgcagactcctcggctccttcgt

SEQ ID NO: 56278 - DNA, 25 bp, Homo sapien
ggtgcagactccacggctccttcgt

SEQ ID NO: 56279 - DNA, 25 bp, Homo sapien
gtcccgaagtccaggggtctctgtg

SEQ ID NO: 56280 - DNA, 25 bp, Homo sapien
gtcccgaagtcctggggtctctgtg

SEQ ID NO: 56281 - DNA, 25 bp, Homo sapien
gtgagtagtcaaggagacgcctagg

SEQ ID NO: 56282 - DNA, 25 bp, Homo sapien
gtgagtagtcaacgagacgcctagg

SEQ ID NO: 56283 - DNA, 25 bp, Homo sapien
cagtgacacttagtcggtcgggtcg

SEQ ID NO: 56284 - DNA, 25 bp, Homo sapien
cagtgacacttactcggtcgggtcg

SEQ ID NO: 56285 - DNA, 25 bp, Homo sapien
ggcaaaggatagagagacactgacc

SEQ ID NO: 56286 - DNA, 25 bp, Homo sapien
ggcaaaggatagtgagacactgacc

SEQ ID NO: 56287 - DNA, 25 bp, Homo sapien
taccgtgactcgcgtagtagtttgg

SEQ ID NO: 56288 - DNA, 25 bp, Homo sapien
taccgtgactcgggtagtagtttgg

SEQ ID NO: 56289 - DNA, 25 bp, Homo sapien
aagtcgggtagtgcgacaccaaact

SEQ ID NO: 56290 - DNA, 25 bp, Homo sapien
aagtcgggtagtccgacaccaaact

SEQ ID NO: 56291 - DNA, 25 bp, Homo sapien
gttttctgtcctgtgaactcaggag

SEQ ID NO: 56292 - DNA, 25 bp, Homo sapien
gttttctgtcctctgaactcaggag

SEQ ID NO: 56293 - DNA, 25 bp, Homo sapien
caccgtcactcttcggtccgggagt

SEQ ID NO: 56294 - DNA, 25 bp, Homo sapien
caccgtcactctacggtccgggagt

SEQ ID NO: 56295 - DNA, 25 bp, Homo sapien
agacgtcgcagactactacccgggg

SEQ ID NO: 56296 - DNA, 25 bp, Homo sapien
agacgtcgcagagtactacccgggg

SEQ ID NO: 56297 - DNA, 25 bp, Homo sapien
ctgacgccagggatcgttccgtccg

SEQ ID NO: 56298 - DNA, 25 bp, Homo sapien
ctgacgccagggttcgttccgtccg

SEQ ID NO: 56299 - DNA, 25 bp, Homo sapien
cgtctacccaggtcgtcctctgtaa

SEQ ID NO: 56300 - DNA, 25 bp, Homo sapien
cgtctacccaggacgtcctctgtaa

SEQ ID NO: 56301 - DNA, 25 bp, Homo sapien
aagaacgtccttttaacttataagg

SEQ ID NO: 56302 - DNA, 25 bp, Homo sapien
aagaacgtccttataacttataagg

SEQ ID NO: 56303 - DNA, 25 bp, Homo sapien
cagaaagaactcattcatcacttgg

SEQ ID NO: 56304 - DNA, 25 bp, Homo sapien
cagaaagaactctttcatcacttgg

SEQ ID NO: 56305 - DNA, 25 bp, Homo sapien
gtaaaaggtatctcaacactataga

SEQ ID NO: 56306 - DNA, 25 bp, Homo sapien
gtaaaaggtatcacaacactataga

SEQ ID NO: 56307 - DNA, 25 bp, Homo sapien
aagtacaaggtacttcgaatcttta

SEQ ID NO: 56308 - DNA, 25 bp, Homo sapien
aagtacaaggtagttcgaatcttta

SEQ ID NO: 56309 - DNA, 25 bp, Homo sapien
tagagaaatacaatgacagtttctc

SEQ ID NO: 56310 - DNA, 25 bp, Homo sapien
tagagaaatacattgacagtttctc

SEQ ID NO: 56311 - DNA, 25 bp, Homo sapien
ctagaggccgacgtcccggtgttgc

SEQ ID NO: 56312 - DNA, 25 bp, Homo sapien
ctagaggccgacctcccggtgttgc

SEQ ID NO: 56313 - DNA, 25 bp, Homo sapien
ctgtagtggccgactccctgaggac

SEQ ID NO: 56314 - DNA, 25 bp, Homo sapien
ctgtagtggccgtctccctgaggac

SEQ ID NO: 56315 - DNA, 25 bp, Homo sapien
taggggtcctgtgacctgtatactt

SEQ ID NO: 56316 - DNA, 25 bp, Homo sapien
taggggtcctgtcacctgtatactt

SEQ ID NO: 56317 - DNA, 25 bp, Homo sapien
tattagtgacctacgtacgtgttac

SEQ ID NO: 56318 - DNA, 25 bp, Homo sapien
tattagtgaccttcgtacgtgttac

SEQ ID NO: 56319 - DNA, 25 bp, Homo sapien
cacataataagtacccgtgtttgac

SEQ ID NO: 56320 - DNA, 25 bp, Homo sapien
cacataataagttcccgtgtttgac

SEQ ID NO: 56321 - DNA, 25 bp, Homo sapien
gaggatagtaggacccggaccgtcc

SEQ ID NO: 56322 - DNA, 25 bp, Homo sapien
gaggatagtaggtcccggaccgtcc

SEQ ID NO: 56323 - DNA, 25 bp, Homo sapien
aggagtcggacttcgggtcactacc

SEQ ID NO: 56324 - DNA, 25 bp, Homo sapien
aggagtcggactacgggtcactacc

SEQ ID NO: 56325 - DNA, 25 bp, Homo sapien
aagagacgtaaccagtcgttccacc

SEQ ID NO: 56326 - DNA, 25 bp, Homo sapien
aagagacgtaacgagtcgttccacc

SEQ ID NO: 56327 - DNA, 25 bp, Homo sapien
agaacccacgaggaccggggtgccc

SEQ ID NO: 56328 - DNA, 25 bp, Homo sapien
agaacccacgagcaccggggtgccc

SEQ ID NO: 56329 - DNA, 25 bp, Homo sapien
ggacgggcagctacatgacccactc

SEQ ID NO: 56330 - DNA, 25 bp, Homo sapien
ggacgggcagcttcatgacccactc

SEQ ID NO: 56331 - DNA, 25 bp, Homo sapien
gaccaaagtaacaatgtgatccgtc

SEQ ID NO: 56332 - DNA, 25 bp, Homo sapien
gaccaaagtaactatgtgatccgtc

SEQ ID NO: 56333 - DNA, 25 bp, Homo sapien
gtaccgaaaaagacggagtacccag

SEQ ID NO: 56334 - DNA, 25 bp, Homo sapien
gtaccgaaaaagtcggagtacccag

SEQ ID NO: 56335 - DNA, 25 bp, Homo sapien
ctgaactgaagtagttcgggtcccc

SEQ ID NO: 56336 - DNA, 25 bp, Homo sapien
ctgaactgaagttgttcgggtcccc

SEQ ID NO: 56337 - DNA, 25 bp, Homo sapien
gtagttaagttcctctgtgtacccc

SEQ ID NO: 56338 - DNA, 25 bp, Homo sapien
gtagttaagttcgtctgtgtacccc

SEQ ID NO: 56339 - DNA, 25 bp, Homo sapien
agttcgtgttactactgtcccaccg

SEQ ID NO: 56340 - DNA, 25 bp, Homo sapien
agttcgtgttacaactgtcccaccg

SEQ ID NO: 56341 - DNA, 25 bp, Homo sapien
atctacgccctaagggtcgcgagac

SEQ ID NO: 56342 - DNA, 25 bp, Homo sapien
atctacgccctatgggtcgcgagac

SEQ ID NO: 56343 - DNA, 25 bp, Homo sapien
gtctgctccatctgtgtacatacga

SEQ ID NO: 56344 - DNA, 25 bp, Homo sapien
gtctgctccatcagtgtacatacga

SEQ ID NO: 56345 - DNA, 25 bp, Homo sapien
tgtgttacttcgtttatgacataac

SEQ ID NO: 56346 - DNA, 25 bp, Homo sapien
tgtgttacttcgattatgacataac

SEQ ID NO: 56347 - DNA, 25 bp, Homo sapien
ttcttgtagatcatgttgtcaggac

SEQ ID NO: 56348 - DNA, 25 bp, Homo sapien
ttcttgtagatcttgttgtcaggac

SEQ ID NO: 56349 - DNA, 25 bp, Homo sapien
agatatggagaggtccttcgtggac

SEQ ID NO: 56350 - DNA, 25 bp, Homo sapien
agatatggagagctccttcgtggac

SEQ ID NO: 56351 - DNA, 25 bp, Homo sapien
aatgtgtcaatccagtgtgtagaac

SEQ ID NO: 56352 - DNA, 25 bp, Homo sapien
aatgtgtcaatcgagtgtgtagaac

SEQ ID NO: 56353 - DNA, 25 bp, Homo sapien
tcagtgtctaaatcgatgtataatc

SEQ ID NO: 56354 - DNA, 25 bp, Homo sapien
tcagtgtctaaaacgatgtataatc

SEQ ID NO: 56355 - DNA, 25 bp, Homo sapien
actatggccataacagtgtatatta

SEQ ID NO: 56356 - DNA, 25 bp, Homo sapien
actatggccatatcagtgtatatta

SEQ ID NO: 56357 - DNA, 25 bp, Homo sapien
cataggacttatttactcttgagat

SEQ ID NO: 56358 - DNA, 25 bp, Homo sapien
cataggacttatatactcttgagat

SEQ ID NO: 56359 - DNA, 25 bp, Homo sapien
cggaaacgttactttactttgatat

SEQ ID NO: 56360 - DNA, 25 bp, Homo sapien
cggaaacgttacattactttgatat

SEQ ID NO: 56361 - DNA, 25 bp, Homo sapien
cgaaacaccttgtcgtttgtacgtc

SEQ ID NO: 56362 - DNA, 25 bp, Homo sapien
cgaaacaccttgacgtttgtacgtc

SEQ ID NO: 56363 - DNA, 25 bp, Homo sapien
agagagacagagtttccttgtgtct

SEQ ID NO: 56364 - DNA, 25 bp, Homo sapien
agagagacagagattccttgtgtct

SEQ ID NO: 56365 - DNA, 25 bp, Homo sapien
ctgataccgtaagttcctgtcgtta

SEQ ID NO: 56366 - DNA, 25 bp, Homo sapien
ctgataccgtaacttcctgtcgtta

SEQ ID NO: 56367 - DNA, 25 bp, Homo sapien
aggtagatctgagttcccgtattac

SEQ ID NO: 56368 - DNA, 25 bp, Homo sapien
aggtagatctgacttcccgtattac

SEQ ID NO: 56369 - DNA, 25 bp, Homo sapien
gaggtacgactttatttcctcctca

SEQ ID NO: 56370 - DNA, 25 bp, Homo sapien
gaggtacgacttaatttcctcctca

SEQ ID NO: 56371 - DNA, 25 bp, Homo sapien
taaaatgattatcattacggtaact

SEQ ID NO: 56372 - DNA, 25 bp, Homo sapien
taaaatgattatgattacggtaact

SEQ ID NO: 56373 - DNA, 25 bp, Homo sapien
agacgtgataaatacgggtcctaaa

SEQ ID NO: 56374 - DNA, 25 bp, Homo sapien
agacgtgataaaaacgggtcctaaa

SEQ ID NO: 56375 - DNA, 25 bp, Homo sapien
cccggtgacagaagaggtgccacga

SEQ ID NO: 56376 - DNA, 25 bp, Homo sapien
cccggtgacagatgaggtgccacga

SEQ ID NO: 56377 - DNA, 25 bp, Homo sapien
cgcgaagacctcgaggacgtggcac

SEQ ID NO: 56378 - DNA, 25 bp, Homo sapien
cgcgaagacctccaggacgtggcac

SEQ ID NO: 56379 - DNA, 25 bp, Homo sapien
ttcgtgacagaacgataaactttta

SEQ ID NO: 56380 - DNA, 25 bp, Homo sapien
ttcgtgacagaaggataaactttta

SEQ ID NO: 56381 - DNA, 25 bp, Homo sapien
gatacgtaaacaccgtaaatgtttt

SEQ ID NO: 56382 - DNA, 25 bp, Homo sapien
gatacgtaaacagcgtaaatgtttt

SEQ ID NO: 56383 - DNA, 25 bp, Homo sapien
tttctgaaagatcacatgttctgtg

SEQ ID NO: 56384 - DNA, 25 bp, Homo sapien
tttctgaaagatgacatgttctgtg

SEQ ID NO: 56385 - DNA, 25 bp, Homo sapien
ctactgagccggtagaccctcttgt

SEQ ID NO: 56386 - DNA, 25 bp, Homo sapien
ctactgagccggaagaccctcttgt

SEQ ID NO: 56387 - DNA, 25 bp, Homo sapien
gtctaccaaagaaacggtctttcta

SEQ ID NO: 56388 - DNA, 25 bp, Homo sapien
gtctaccaaagatacggtctttcta

SEQ ID NO: 56389 - DNA, 25 bp, Homo sapien
gtaagaaacggagacgatcttccag

SEQ ID NO: 56390 - DNA, 25 bp, Homo sapien
gtaagaaacggacacgatcttccag

SEQ ID NO: 56391 - DNA, 25 bp, Homo sapien
cgacagaaggggtacctcttttact

SEQ ID NO: 56392 - DNA, 25 bp, Homo sapien
cgacagaaggggaacctcttttact

SEQ ID NO: 56393 - DNA, 25 bp, Homo sapien
ttcgtggacgggaagttctgtctta

SEQ ID NO: 56394 - DNA, 25 bp, Homo sapien
ttcgtggacgggtagttctgtctta

SEQ ID NO: 56395 - DNA, 25 bp, Homo sapien
ccactttgaagacttctcgtctttg

SEQ ID NO: 56396 - DNA, 25 bp, Homo sapien
ccactttgaagagttctcgtctttg

SEQ ID NO: 56397 - DNA, 25 bp, Homo sapien
ctaggtcaatagttttactttcgtg

SEQ ID NO: 56398 - DNA, 25 bp, Homo sapien
ctaggtcaatagatttactttcgtg

SEQ ID NO: 56399 - DNA, 25 bp, Homo sapien
atagttcctaagtttcgtctttatg

SEQ ID NO: 56400 - DNA, 25 bp, Homo sapien
atagttcctaagattcgtctttatg

SEQ ID NO: 56401 - DNA, 25 bp, Homo sapien
tcgtagtggcagtctgtggtttcgt

SEQ ID NO: 56402 - DNA, 25 bp, Homo sapien
tcgtagtggcagactgtggtttcgt

SEQ ID NO: 56403 - DNA, 25 bp, Homo sapien
accgacgggacaaaggactcgtttg

SEQ ID NO: 56404 - DNA, 25 bp, Homo sapien
accgacgggacataggactcgtttg

SEQ ID NO: 56405 - DNA, 25 bp, Homo sapien
atgtcggtagaaggagaactcatca

SEQ ID NO: 56406 - DNA, 25 bp, Homo sapien
atgtcggtagaacgagaactcatca

SEQ ID NO: 56407 - DNA, 25 bp, Homo sapien
tggacggaagaacacccggcgtaga

SEQ ID NO: 56408 - DNA, 25 bp, Homo sapien
tggacggaagaagacccggcgtaga

SEQ ID NO: 56409 - DNA, 25 bp, Homo sapien
agtccgggatgtgtctcggtagaac

SEQ ID NO: 56410 - DNA, 25 bp, Homo sapien
agtccgggatgtctctcggtagaac

SEQ ID NO: 56411 - DNA, 25 bp, Homo sapien
gttgtcgacagtttttggtcgacct

SEQ ID NO: 56412 - DNA, 25 bp, Homo sapien
gttgtcgacagtatttggtcgacct

SEQ ID NO: 56413 - DNA, 25 bp, Homo sapien
ctccgccactggtgcgagagttacg

SEQ ID NO: 56414 - DNA, 25 bp, Homo sapien
ctccgccactggagcgagagttacg

SEQ ID NO: 56415 - DNA, 25 bp, Homo sapien
ccactcctaaggttagtcctgtcag

SEQ ID NO: 56416 - DNA, 25 bp, Homo sapien
ccactcctaaggatagtcctgtcag

SEQ ID NO: 56417 - DNA, 25 bp, Homo sapien
ctcttccacagtggaggaactctat

SEQ ID NO: 56418 - DNA, 25 bp, Homo sapien
ctcttccacagtcgaggaactctat

SEQ ID NO: 56419 - DNA, 25 bp, Homo sapien
atagtgtcctgtctatgagttctgt

SEQ ID NO: 56420 - DNA, 25 bp, Homo sapien
atagtgtcctgtgtatgagttctgt

SEQ ID NO: 56421 - DNA, 25 bp, Homo sapien
taatatccttcaggtctagtatctg

SEQ ID NO: 56422 - DNA, 25 bp, Homo sapien
taatatccttcacgtctagtatctg

SEQ ID NO: 56423 - DNA, 25 bp, Homo sapien
tttatactgtccacagtcccctcgg

SEQ ID NO: 56424 - DNA, 25 bp, Homo sapien
tttatactgtcctcagtcccctcgg

SEQ ID NO: 56425 - DNA, 25 bp, Homo sapien
cgtctaggatatagtagtccacctg

SEQ ID NO: 56426 - DNA, 25 bp, Homo sapien
cgtctaggatattgtagtccacctg

SEQ ID NO: 56427 - DNA, 25 bp, Homo sapien
ctatataaggtaatcgtttcatgtc

SEQ ID NO: 56428 - DNA, 25 bp, Homo sapien
ctatataaggtattcgtttcatgtc

SEQ ID NO: 56429 - DNA, 25 bp, Homo sapien
agacatgtaactatttttcagttcg

SEQ ID NO: 56430 - DNA, 25 bp, Homo sapien
agacatgtaactttttttcagttcg

SEQ ID NO: 56431 - DNA, 25 bp, Homo sapien
agcctttgatgtttttcacagttct

SEQ ID NO: 56432 - DNA, 25 bp, Homo sapien
agcctttgatgtatttcacagttct

SEQ ID NO: 56433 - DNA, 25 bp, Homo sapien
agattgtcccttgtacttaggggtt

SEQ ID NO: 56434 - DNA, 25 bp, Homo sapien
agattgtcccttctacttaggggtt

SEQ ID NO: 56435 - DNA, 25 bp, Homo sapien
gtcttccctagtaccctgcgggtct

SEQ ID NO: 56436 - DNA, 25 bp, Homo sapien
gtcttccctagttccctgcgggtct

SEQ ID NO: 56437 - DNA, 25 bp, Homo sapien
cctcgtctgtagtccctgctctgtt

SEQ ID NO: 56438 - DNA, 25 bp, Homo sapien
cctcgtctgtagaccctgctctgtt

SEQ ID NO: 56439 - DNA, 25 bp, Homo sapien
cgtcgtttactgttacctgtctgaa

SEQ ID NO: 56440 - DNA, 25 bp, Homo sapien
cgtcgtttactgatacctgtctgaa

SEQ ID NO: 56441 - DNA, 25 bp, Homo sapien
gtgtctctcgtgttatttatcaaat

SEQ ID NO: 56442 - DNA, 25 bp, Homo sapien
gtgtctctcgtgatatttatcaaat

SEQ ID NO: 56443 - DNA, 25 bp, Homo sapien
agaggggcctcaagggacactagaa

SEQ ID NO: 56444 - DNA, 25 bp, Homo sapien
agaggggcctcatgggacactagaa

SEQ ID NO: 56445 - DNA, 25 bp, Homo sapien
gacattagagtgtcactactctcct

SEQ ID NO: 56446 - DNA, 25 bp, Homo sapien
gacattagagtgacactactctcct

SEQ ID NO: 56447 - DNA, 25 bp, Homo sapien
ttgtaatggagatctcgactccgat

SEQ ID NO: 56448 - DNA, 25 bp, Homo sapien
ttgtaatggagaactcgactccgat

SEQ ID NO: 56449 - DNA, 25 bp, Homo sapien
gagtccgaggcgaagtacctcgacg

SEQ ID NO: 56450 - DNA, 25 bp, Homo sapien
gagtccgaggcgtagtacctcgacg

SEQ ID NO: 56451 - DNA, 25 bp, Homo sapien
ccgactaccggacgtcgtaggccgg

SEQ ID NO: 56452 - DNA, 25 bp, Homo sapien
ccgactaccggaggtcgtaggccgg

SEQ ID NO: 56453 - DNA, 25 bp, Homo sapien
acgcctccgggacgttgactcgtcg

SEQ ID NO: 56454 - DNA, 25 bp, Homo sapien
acgcctccgggaggttgactcgtcg

SEQ ID NO: 56455 - DNA, 25 bp, Homo sapien
gggacacgtcacacgagaatcccag

SEQ ID NO: 56456 - DNA, 25 bp, Homo sapien
gggacacgtcactcgagaatcccag

SEQ ID NO: 56457 - DNA, 25 bp, Homo sapien
caacggcctcttgagcgagggtccg

SEQ ID NO: 56458 - DNA, 25 bp, Homo sapien
caacggcctcttcagcgagggtccg

SEQ ID NO: 56459 - DNA, 25 bp, Homo sapien
cggacccaacctagtcgaggttgac

SEQ ID NO: 56460 - DNA, 25 bp, Homo sapien
cggacccaaccttgtcgaggttgac

SEQ ID NO: 56461 - DNA, 25 bp, Homo sapien
gtccggatacagtttgagttctcac

SEQ ID NO: 56462 - DNA, 25 bp, Homo sapien
gtccggatacagattgagttctcac

SEQ ID NO: 56463 - DNA, 25 bp, Homo sapien
gactacctggtctcccgaggttcct

SEQ ID NO: 56464 - DNA, 25 bp, Homo sapien
gactacctggtcacccgaggttcct

SEQ ID NO: 56465 - DNA, 25 bp, Homo sapien
aggaacggtcaaagagggtcgtcct

SEQ ID NO: 56466 - DNA, 25 bp, Homo sapien
aggaacggtcaatgagggtcgtcct

SEQ ID NO: 56467 - DNA, 25 bp, Homo sapien
gagaacgtactaaaaaacctacagt

SEQ ID NO: 56468 - DNA, 25 bp, Homo sapien
gagaacgtactataaaacctacagt

SEQ ID NO: 56469 - DNA, 25 bp, Homo sapien
gagtaaccatatttacaatacagac

SEQ ID NO: 56470 - DNA, 25 bp, Homo sapien
gagtaaccatatatacaatacagac

SEQ ID NO: 56471 - DNA, 25 bp, Homo sapien
ggacaccgtgtgtgacttatattgt

SEQ ID NO: 56472 - DNA, 25 bp, Homo sapien
ggacaccgtgtgagacttatattgt

SEQ ID NO: 56473 - DNA, 25 bp, Homo sapien
tggtgtcccggagacgatggctcct

SEQ ID NO: 56474 - DNA, 25 bp, Homo sapien
tggtgtcccggacacgatggctcct

SEQ ID NO: 56475 - DNA, 25 bp, Homo sapien
cggacccggaggaaccgacggactc

SEQ ID NO: 56476 - DNA, 25 bp, Homo sapien
cggacccggaggtaccgacggactc

SEQ ID NO: 56477 - DNA, 25 bp, Homo sapien
cccctagtggtggtcccgagagtcg

SEQ ID NO: 56478 - DNA, 25 bp, Homo sapien
cccctagtggtgctcccgagagtcg

SEQ ID NO: 56479 - DNA, 25 bp, Homo sapien
taacagtgtcgtcgactgccgaagg

SEQ ID NO: 56480 - DNA, 25 bp, Homo sapien
taacagtgtcgtggactgccgaagg

SEQ ID NO: 56481 - DNA, 25 bp, Homo sapien
cagaagatcgggatgtaccgaaagt

SEQ ID NO: 56482 - DNA, 25 bp, Homo sapien
cagaagatcgggttgtaccgaaagt

SEQ ID NO: 56483 - DNA, 25 bp, Homo sapien
tcgtgaaaagatgtcgacgtgaaca

SEQ ID NO: 56484 - DNA, 25 bp, Homo sapien
tcgtgaaaagatctcgacgtgaaca

SEQ ID NO: 56485 - DNA, 25 bp, Homo sapien
cgccagtggagtctcggcgattcgt

SEQ ID NO: 56486 - DNA, 25 bp, Homo sapien
cgccagtggagtgtcggcgattcgt

SEQ ID NO: 56487 - DNA, 25 bp, Homo sapien
ccactagtcatgttgacgaaactga

SEQ ID NO: 56488 - DNA, 25 bp, Homo sapien
ccactagtcatgatgacgaaactga

SEQ ID NO: 56489 - DNA, 25 bp, Homo sapien
tccactacgtgtggagacactacga

SEQ ID NO: 56490 - DNA, 25 bp, Homo sapien
tccactacgtgtcgagacactacga

SEQ ID NO: 56491 - DNA, 25 bp, Homo sapien
tcctttcgactctgcggacgaacca

SEQ ID NO: 56492 - DNA, 25 bp, Homo sapien
tcctttcgactcagcggacgaacca

SEQ ID NO: 56493 - DNA, 25 bp, Homo sapien
ttagaatctactatcagggaccaaa

SEQ ID NO: 56494 - DNA, 25 bp, Homo sapien
ttagaatctactttcagggaccaaa

SEQ ID NO: 56495 - DNA, 25 bp, Homo sapien
agaaactggtgtacgttaatcaatc

SEQ ID NO: 56496 - DNA, 25 bp, Homo sapien
agaaactggtgttcgttaatcaatc

SEQ ID NO: 56497 - DNA, 25 bp, Homo sapien
caaataaggattgagtagaccacaa

SEQ ID NO: 56498 - DNA, 25 bp, Homo sapien
caaataaggattcagtagaccacaa

SEQ ID NO: 56499 - DNA, 25 bp, Homo sapien
ctgaaagagggactaagagcccaac

SEQ ID NO: 56500 - DNA, 25 bp, Homo sapien
ctgaaagagggagtaagagcccaac

SEQ ID NO: 56501 - DNA, 25 bp, Homo sapien
aggaaaggaaaagtcccgtagctac

SEQ ID NO: 56502 - DNA, 25 bp, Homo sapien
aggaaaggaaaactcccgtagctac

SEQ ID NO: 56503 - DNA, 25 bp, Homo sapien
gttatactacgaattcttgtcacgt

SEQ ID NO: 56504 - DNA, 25 bp, Homo sapien
gttatactacgatttcttgtcacgt

SEQ ID NO: 56505 - DNA, 25 bp, Homo sapien
gttctaagacgttctgtgtgactat

SEQ ID NO: 56506 - DNA, 25 bp, Homo sapien
gttctaagacgtactgtgtgactat

SEQ ID NO: 56507 - DNA, 25 bp, Homo sapien
tttatctgtgtccaatcccttagga

SEQ ID NO: 56508 - DNA, 25 bp, Homo sapien
tttatctgtgtcgaatcccttagga

SEQ ID NO: 56509 - DNA, 25 bp, Homo sapien
tttttgatgtcaagacccttggagt

SEQ ID NO: 56510 - DNA, 25 bp, Homo sapien
tttttgatgtcatgacccttggagt

SEQ ID NO: 56511 - DNA, 25 bp, Homo sapien
gacgtgattgatcaagtcttacaat

SEQ ID NO: 56512 - DNA, 25 bp, Homo sapien
gacgtgattgatgaagtcttacaat

SEQ ID NO: 56513 - DNA, 25 bp, Homo sapien
aactgatggaggagtctcgtacacc

SEQ ID NO: 56514 - DNA, 25 bp, Homo sapien
aactgatggaggtgtctcgtacacc

SEQ ID NO: 56515 - DNA, 25 bp, Homo sapien
aacgtcactccgagtttaccgttca

SEQ ID NO: 56516 - DNA, 25 bp, Homo sapien
aacgtcactccgtgtttaccgttca

SEQ ID NO: 56517 - DNA, 25 bp, Homo sapien
ttgtttcattgatcagactgtactt

SEQ ID NO: 56518 - DNA, 25 bp, Homo sapien
ttgtttcattgaacagactgtactt

SEQ ID NO: 56519 - DNA, 25 bp, Homo sapien
cctttgtgtcttggttactacagaa

SEQ ID NO: 56520 - DNA, 25 bp, Homo sapien
cctttgtgtcttcgttactacagaa

SEQ ID NO: 56521 - DNA, 25 bp, Homo sapien
gtttccgttgggaacgagacgtctt

SEQ ID NO: 56522 - DNA, 25 bp, Homo sapien
gtttccgttgggtacgagacgtctt

SEQ ID NO: 56523 - DNA, 25 bp, Homo sapien
ctcttgatctagacagtccccgtac

SEQ ID NO: 56524 - DNA, 25 bp, Homo sapien
ctcttgatctagtcagtccccgtac

SEQ ID NO: 56525 - DNA, 25 bp, Homo sapien
tctgtgtctcattacgtattgccac

SEQ ID NO: 56526 - DNA, 25 bp, Homo sapien
tctgtgtctcataacgtattgccac

SEQ ID NO: 56527 - DNA, 25 bp, Homo sapien
acgtgtcttgcaaaatctctggtaa

SEQ ID NO: 56528 - DNA, 25 bp, Homo sapien
acgtgtcttgcataatctctggtaa

SEQ ID NO: 56529 - DNA, 25 bp, Homo sapien
aaagtccttccgtaggtgtttgtcc

SEQ ID NO: 56530 - DNA, 25 bp, Homo sapien
aaagtccttccgaaggtgtttgtcc

SEQ ID NO: 56531 - DNA, 25 bp, Homo sapien
tccccacgagaggactcgatgtctt

SEQ ID NO: 56532 - DNA, 25 bp, Homo sapien
tccccacgagagcactcgatgtctt

SEQ ID NO: 56533 - DNA, 25 bp, Homo sapien
tgccagtcacgacacgatatcttgt

SEQ ID NO: 56534 - DNA, 25 bp, Homo sapien
tgccagtcacgagacgatatcttgt

SEQ ID NO: 56535 - DNA, 25 bp, Homo sapien
gttcacgacgacaatgaacttttct

SEQ ID NO: 56536 - DNA, 25 bp, Homo sapien
gttcacgacgactatgaacttttct

SEQ ID NO: 56537 - DNA, 25 bp, Homo sapien
tgttccgacgactcgggactgacaa

SEQ ID NO: 56538 - DNA, 25 bp, Homo sapien
tgttccgacgacacgggactgacaa

SEQ ID NO: 56539 - DNA, 25 bp, Homo sapien
actttttgactgaggtctttaatac

SEQ ID NO: 56540 - DNA, 25 bp, Homo sapien
actttttgactgtggtctttaatac

SEQ ID NO: 56541 - DNA, 25 bp, Homo sapien
ggtgtcaggggtgtctccatagtcc

SEQ ID NO: 56542 - DNA, 25 bp, Homo sapien
ggtgtcaggggtctctccatagtcc

SEQ ID NO: 56543 - DNA, 25 bp, Homo sapien
gtgtgtccatgtcgtgggaatcaca

SEQ ID NO: 56544 - DNA, 25 bp, Homo sapien
gtgtgtccatgtggtgggaatcaca

SEQ ID NO: 56545 - DNA, 25 bp, Homo sapien
tttcttgtgtattgtagatcatccc

SEQ ID NO: 56546 - DNA, 25 bp, Homo sapien
tttcttgtgtatagtagatcatccc

SEQ ID NO: 56547 - DNA, 25 bp, Homo sapien
ttgtttttaacaagagaactccgtc

SEQ ID NO: 56548 - DNA, 25 bp, Homo sapien
ttgtttttaacatgagaactccgtc

SEQ ID NO: 56549 - DNA, 25 bp, Homo sapien
gagatagtttcatggactccgtctt

SEQ ID NO: 56550 - DNA, 25 bp, Homo sapien
gagatagtttcaaggactccgtctt

SEQ ID NO: 56551 - DNA, 25 bp, Homo sapien
ggtgtctcgtagagtatctcgttgt

SEQ ID NO: 56552 - DNA, 25 bp, Homo sapien
ggtgtctcgtagtgtatctcgttgt

SEQ ID NO: 56553 - DNA, 25 bp, Homo sapien
gtgaagtctctgaagtaacgtcctt

SEQ ID NO: 56554 - DNA, 25 bp, Homo sapien
gtgaagtctctgtagtaacgtcctt

SEQ ID NO: 56555 - DNA, 25 bp, Homo sapien
cctcggtaccgagagaagggtcttt

SEQ ID NO: 56556 - DNA, 25 bp, Homo sapien
cctcggtaccgacagaagggtcttt

SEQ ID NO: 56557 - DNA, 25 bp, Homo sapien
acccgatgtaaacaggaggcctata

SEQ ID NO: 56558 - DNA, 25 bp, Homo sapien
acccgatgtaaagaggaggcctata

SEQ ID NO: 56559 - DNA, 25 bp, Homo sapien
cacctggacgaaatcgtggaacatg

SEQ ID NO: 56560 - DNA, 25 bp, Homo sapien
cacctggacgaattcgtggaacatg

SEQ ID NO: 56561 - DNA, 25 bp, Homo sapien
gtcctagggacctctcgagaaagag

SEQ ID NO: 56562 - DNA, 25 bp, Homo sapien
gtcctagggaccactcgagaaagag

SEQ ID NO: 56563 - DNA, 25 bp, Homo sapien
cggccgaaacgaccactgaagaagg

SEQ ID NO: 56564 - DNA, 25 bp, Homo sapien
cggccgaaacgagcactgaagaagg

SEQ ID NO: 56565 - DNA, 25 bp, Homo sapien
gacaacaagaagtcccgagcctgac

SEQ ID NO: 56566 - DNA, 25 bp, Homo sapien
gacaacaagaagacccgagcctgac

SEQ ID NO: 56567 - DNA, 25 bp, Homo sapien
accaaaggtaaaacctgagaccaga

SEQ ID NO: 56568 - DNA, 25 bp, Homo sapien
accaaaggtaaatcctgagaccaga

SEQ ID NO: 56569 - DNA, 25 bp, Homo sapien
aatcacattcatgtggggtctataa

SEQ ID NO: 56570 - DNA, 25 bp, Homo sapien
aatcacattcatctggggtctataa

SEQ ID NO: 56571 - DNA, 25 bp, Homo sapien
ttaatgcagtactcttgtgttgaac

SEQ ID NO: 56572 - DNA, 25 bp, Homo sapien
ttaatgcagtacacttgtgttgaac

SEQ ID NO: 56573 - DNA, 25 bp, Homo sapien
ctaacaggggtgtttcgtgttgaac

SEQ ID NO: 56574 - DNA, 25 bp, Homo sapien
ctaacaggggtgattcgtgttgaac

SEQ ID NO: 56575 - DNA, 25 bp, Homo sapien
atgttgaccctgatcctgttacgcc

SEQ ID NO: 56576 - DNA, 25 bp, Homo sapien
atgttgaccctgttcctgttacgcc

SEQ ID NO: 56577 - DNA, 25 bp, Homo sapien
cggggtcttgtgtctccgcagtgac

SEQ ID NO: 56578 - DNA, 25 bp, Homo sapien
cggggtcttgtgactccgcagtgac

SEQ ID NO: 56579 - DNA, 25 bp, Homo sapien
tctcggaatcctctctcgtccgaaa

SEQ ID NO: 56580 - DNA, 25 bp, Homo sapien
tctcggaatcctgtctcgtccgaaa

SEQ ID NO: 56581 - DNA, 25 bp, Homo sapien
gtaaaaacctaaccttctcgagtaa

SEQ ID NO: 56582 - DNA, 25 bp, Homo sapien
gtaaaaacctaagcttctcgagtaa

SEQ ID NO: 56583 - DNA, 25 bp, Homo sapien
tgtcttgaccgttaagtttctgaaa

SEQ ID NO: 56584 - DNA, 25 bp, Homo sapien
tgtcttgaccgtaaagtttctgaaa

SEQ ID NO: 56585 - DNA, 25 bp, Homo sapien
tattctcttctctaatcttaacaca

SEQ ID NO: 56586 - DNA, 25 bp, Homo sapien
tattctcttctcaaatcttaacaca

SEQ ID NO: 56587 - DNA, 25 bp, Homo sapien
atcctcgtcgtgcagcaaaaccttc

SEQ ID NO: 56588 - DNA, 25 bp, Homo sapien
atcctcgtcgtggagcaaaaccttc

SEQ ID NO: 56589 - DNA, 25 bp, Homo sapien
cttagactgaagaaaacacgaccta

SEQ ID NO: 56590 - DNA, 25 bp, Homo sapien
cttagactgaagtaaacacgaccta

SEQ ID NO: 56591 - DNA, 25 bp, Homo sapien
gtttcacgttggttgtaccaagata

SEQ ID NO: 56592 - DNA, 25 bp, Homo sapien
gtttcacgttggatgtaccaagata

SEQ ID NO: 56593 - DNA, 25 bp, Homo sapien
ttttactgtcgttagacctaagtaa

SEQ ID NO: 56594 - DNA, 25 bp, Homo sapien
ttttactgtcgtaagacctaagtaa

SEQ ID NO: 56595 - DNA, 25 bp, Homo sapien
gtctatattgttaacacacctgaga

SEQ ID NO: 56596 - DNA, 25 bp, Homo sapien
gtctatattgtttacacacctgaga

SEQ ID NO: 56597 - DNA, 25 bp, Homo sapien
gacgatgtacactaaagtctattta

SEQ ID NO: 56598 - DNA, 25 bp, Homo sapien
gacgatgtacacaaaagtctattta

SEQ ID NO: 56599 - DNA, 25 bp, Homo sapien
ccgtatggacaaagtagtttctgta

SEQ ID NO: 56600 - DNA, 25 bp, Homo sapien
ccgtatggacaatgtagtttctgta

SEQ ID NO: 56601 - DNA, 25 bp, Homo sapien
tgtaccttcggatgtcttatctgtt

SEQ ID NO: 56602 - DNA, 25 bp, Homo sapien
tgtaccttcggaagtcttatctgtt

SEQ ID NO: 56603 - DNA, 25 bp, Homo sapien
agactctcaccgaaagccatctcga

SEQ ID NO: 56604 - DNA, 25 bp, Homo sapien
agactctcaccgtaagccatctcga

SEQ ID NO: 56605 - DNA, 25 bp, Homo sapien
ggacaccacaattacctcctatggt

SEQ ID NO: 56606 - DNA, 25 bp, Homo sapien
ggacaccacaataacctcctatggt

SEQ ID NO: 56607 - DNA, 25 bp, Homo sapien
ttatctctagagtggtttctgctgt

SEQ ID NO: 56608 - DNA, 25 bp, Homo sapien
ttatctctagagaggtttctgctgt

SEQ ID NO: 56609 - DNA, 25 bp, Homo sapien
ttttttactcagtgaagtttccgcc

SEQ ID NO: 56610 - DNA, 25 bp, Homo sapien
ttttttactcagagaagtttccgcc

SEQ ID NO: 56611 - DNA, 25 bp, Homo sapien
ttatatcgtcctagggtattttccg

SEQ ID NO: 56612 - DNA, 25 bp, Homo sapien
ttatatcgtccttgggtattttccg

SEQ ID NO: 56613 - DNA, 25 bp, Homo sapien
atcgggaccttttcgtcaaacttac

SEQ ID NO: 56614 - DNA, 25 bp, Homo sapien
atcgggacctttacgtcaaacttac

SEQ ID NO: 56615 - DNA, 25 bp, Homo sapien
gtcgtacctcttcaccaaacgtgac

SEQ ID NO: 56616 - DNA, 25 bp, Homo sapien
gtcgtacctcttgaccaaacgtgac

SEQ ID NO: 56617 - DNA, 25 bp, Homo sapien
gaactcctaccgtcagacagtcact

SEQ ID NO: 56618 - DNA, 25 bp, Homo sapien
gaactcctaccgacagacagtcact

SEQ ID NO: 56619 - DNA, 25 bp, Homo sapien
ggttcatgttaccaacagatctcct

SEQ ID NO: 56620 - DNA, 25 bp, Homo sapien
ggttcatgttacgaacagatctcct

SEQ ID NO: 56621 - DNA, 25 bp, Homo sapien
actcagacggtaccaaacgatgacc

SEQ ID NO: 56622 - DNA, 25 bp, Homo sapien
actcagacggtagcaaacgatgacc

SEQ ID NO: 56623 - DNA, 25 bp, Homo sapien
ctttcgaggtttcgttattagaccg

SEQ ID NO: 56624 - DNA, 25 bp, Homo sapien
ctttcgaggtttggttattagaccg

SEQ ID NO: 56625 - DNA, 25 bp, Homo sapien
tcgactcacaccagacactcgtaga

SEQ ID NO: 56626 - DNA, 25 bp, Homo sapien
tcgactcacacctgacactcgtaga

SEQ ID NO: 56627 - DNA, 25 bp, Homo sapien
gaaactggaggttagactgtccaga

SEQ ID NO: 56628 - DNA, 25 bp, Homo sapien
gaaactggaggtaagactgtccaga

SEQ ID NO: 56629 - DNA, 25 bp, Homo sapien
aaaaactctactctctagagggaaa

SEQ ID NO: 56630 - DNA, 25 bp, Homo sapien
aaaaactctactgtctagagggaaa

SEQ ID NO: 56631 - DNA, 25 bp, Homo sapien
agaacgacttcctgtttcatgtatt

SEQ ID NO: 56632 - DNA, 25 bp, Homo sapien
agaacgacttccagtttcatgtatt

SEQ ID NO: 56633 - DNA, 25 bp, Homo sapien
gaaatcgtgatataacttctcgtgt

SEQ ID NO: 56634 - DNA, 25 bp, Homo sapien
gaaatcgtgataaaacttctcgtgt

SEQ ID NO: 56635 - DNA, 25 bp, Homo sapien
gcaagaattggtaacaagtgtcctc

SEQ ID NO: 56636 - DNA, 25 bp, Homo sapien
gcaagaattggttacaagtgtcctc

SEQ ID NO: 56637 - DNA, 25 bp, Homo sapien
aacaagaacttagtcatgtgtgtgc

SEQ ID NO: 56638 - DNA, 25 bp, Homo sapien
aacaagaacttactcatgtgtgtgc

SEQ ID NO: 56639 - DNA, 25 bp, Homo sapien
atgtcacgacaatatatgtcctgtc

SEQ ID NO: 56640 - DNA, 25 bp, Homo sapien
atgtcacgacaaaatatgtcctgtc

SEQ ID NO: 56641 - DNA, 25 bp, Homo sapien
cgacaaccggagagaagtctcctga

SEQ ID NO: 56642 - DNA, 25 bp, Homo sapien
cgacaaccggagtgaagtctcctga

SEQ ID NO: 56643 - DNA, 25 bp, Homo sapien
gtcccccgtgaacaattaccgtaac

SEQ ID NO: 56644 - DNA, 25 bp, Homo sapien
gtcccccgtgaagaattaccgtaac

SEQ ID NO: 56645 - DNA, 25 bp, Homo sapien
cgcttcgccggcatggtcttcgtgt

SEQ ID NO: 56646 - DNA, 25 bp, Homo sapien
cgcttcgccggcttggtcttcgtgt

SEQ ID NO: 56647 - DNA, 25 bp, Homo sapien
tccctgttcccgtgtcccgtgtgtg

SEQ ID NO: 56648 - DNA, 25 bp, Homo sapien
tccctgttcccgagtcccgtgtgtg

SEQ ID NO: 56649 - DNA, 25 bp, Homo sapien
gactgtaatgtttcatgtccctttt

SEQ ID NO: 56650 - DNA, 25 bp, Homo sapien
gactgtaatgttacatgtccctttt

SEQ ID NO: 56651 - DNA, 25 bp, Homo sapien
cgacaggtcagattagctgtcctaa

SEQ ID NO: 56652 - DNA, 25 bp, Homo sapien
cgacaggtcagaatagctgtcctaa

SEQ ID NO: 56653 - DNA, 25 bp, Homo sapien
gtctgattcagtaaagggcctctaa

SEQ ID NO: 56654 - DNA, 25 bp, Homo sapien
gtctgattcagttaagggcctctaa

SEQ ID NO: 56655 - DNA, 25 bp, Homo sapien
gtctttgtcattaaagtggtcatcc

SEQ ID NO: 56656 - DNA, 25 bp, Homo sapien
gtctttgtcatttaagtggtcatcc

SEQ ID NO: 56657 - DNA, 25 bp, Homo sapien
ccgacttttggtgtttatggtacaa

SEQ ID NO: 56658 - DNA, 25 bp, Homo sapien
ccgacttttggtctttatggtacaa

SEQ ID NO: 56659 - DNA, 25 bp, Homo sapien
ggattttttcacttctatggtcaac

SEQ ID NO: 56660 - DNA, 25 bp, Homo sapien
ggattttttcacatctatggtcaac

SEQ ID NO: 56661 - DNA, 25 bp, Homo sapien
catgttttacacgtcatggtccacg

SEQ ID NO: 56662 - DNA, 25 bp, Homo sapien
catgttttacacctcatggtccacg

SEQ ID NO: 56663 - DNA, 25 bp, Homo sapien
cttggtcggtgaaccaatgtcatcg

SEQ ID NO: 56664 - DNA, 25 bp, Homo sapien
cttggtcggtgatccaatgtcatcg

SEQ ID NO: 56665 - DNA, 25 bp, Homo sapien
agatgttcggtctccacaagggacg

SEQ ID NO: 56666 - DNA, 25 bp, Homo sapien
agatgttcggtcaccacaagggacg

SEQ ID NO: 56667 - DNA, 25 bp, Homo sapien
cgtctggtctagcacccgagagaga

SEQ ID NO: 56668 - DNA, 25 bp, Homo sapien
cgtctggtctaggacccgagagaga

SEQ ID NO: 56669 - DNA, 25 bp, Homo sapien
gacgtggtgttacaccagtgaggct

SEQ ID NO: 56670 - DNA, 25 bp, Homo sapien
gacgtggtgttagaccagtgaggct

SEQ ID NO: 56671 - DNA, 25 bp, Homo sapien
cgtcggtcggacacacaagtgggtt

SEQ ID NO: 56672 - DNA, 25 bp, Homo sapien
cgtcggtcggactcacaagtgggtt

SEQ ID NO: 56673 - DNA, 25 bp, Homo sapien
acctgtctccttacacagaggcgtt

SEQ ID NO: 56674 - DNA, 25 bp, Homo sapien
acctgtctcctttcacagaggcgtt

SEQ ID NO: 56675 - DNA, 25 bp, Homo sapien
ggaatgtcattaacacatgtatcat

SEQ ID NO: 56676 - DNA, 25 bp, Homo sapien
ggaatgtcattatcacatgtatcat

SEQ ID NO: 56677 - DNA, 25 bp, Homo sapien
gagagtattacaatatcaattccga

SEQ ID NO: 56678 - DNA, 25 bp, Homo sapien
gagagtattacattatcaattccga

SEQ ID NO: 56679 - DNA, 25 bp, Homo sapien
aaggggttacgactcctcctggacc

SEQ ID NO: 56680 - DNA, 25 bp, Homo sapien
aaggggttacgagtcctcctggacc

SEQ ID NO: 56681 - DNA, 25 bp, Homo sapien
gaaggtttattaagatcaacgttcc

SEQ ID NO: 56682 - DNA, 25 bp, Homo sapien
gaaggtttattatgatcaacgttcc

SEQ ID NO: 56683 - DNA, 25 bp, Homo sapien
atgtcggtctgtctctcgcattctc

SEQ ID NO: 56684 - DNA, 25 bp, Homo sapien
atgtcggtctgtgtctcgcattctc

SEQ ID NO: 56685 - DNA, 25 bp, Homo sapien
acgtgttacgaaacgctcacctcct

SEQ ID NO: 56686 - DNA, 25 bp, Homo sapien
acgtgttacgaatcgctcacctcct

SEQ ID NO: 56687 - DNA, 25 bp, Homo sapien
gaaggttagacaatcgttacaccgg

SEQ ID NO: 56688 - DNA, 25 bp, Homo sapien
gaaggttagacattcgttacaccgg

SEQ ID NO: 56689 - DNA, 25 bp, Homo sapien
aagggcacccgacgttactcgtgag

SEQ ID NO: 56690 - DNA, 25 bp, Homo sapien
aagggcacccgaggttactcgtgag

SEQ ID NO: 56691 - DNA, 25 bp, Homo sapien
agatagttgacctcctcttggtgtt

SEQ ID NO: 56692 - DNA, 25 bp, Homo sapien
agatagttgaccacctcttggtgtt

SEQ ID NO: 56693 - DNA, 25 bp, Homo sapien
ggagatttaagtcttcttttcgggt

SEQ ID NO: 56694 - DNA, 25 bp, Homo sapien
ggagatttaagtgttcttttcgggt

SEQ ID NO: 56695 - DNA, 25 bp, Homo sapien
ttacccttcttttatgttctgcgga

SEQ ID NO: 56696 - DNA, 25 bp, Homo sapien
ttacccttctttaatgttctgcgga

SEQ ID NO: 56697 - DNA, 25 bp, Homo sapien
acggggttgaacattcgagacgtga

SEQ ID NO: 56698 - DNA, 25 bp, Homo sapien
acggggttgaactttcgagacgtga

SEQ ID NO: 56699 - DNA, 25 bp, Homo sapien
acaagggtcttacgagtggaactgg

SEQ ID NO: 56700 - DNA, 25 bp, Homo sapien
acaagggtcttaggagtggaactgg

SEQ ID NO: 56701 - DNA, 25 bp, Homo sapien
cttaagacttgtgatctcggatcag

SEQ ID NO: 56702 - DNA, 25 bp, Homo sapien
cttaagacttgtcatctcggatcag

SEQ ID NO: 56703 - DNA, 25 bp, Homo sapien
tctcctatcatttccggagaggttg

SEQ ID NO: 56704 - DNA, 25 bp, Homo sapien
tctcctatcattaccggagaggttg

SEQ ID NO: 56705 - DNA, 25 bp, Homo sapien
gtacgacattcttctgggaaacttc

SEQ ID NO: 56706 - DNA, 25 bp, Homo sapien
gtacgacattctactgggaaacttc

SEQ ID NO: 56707 - DNA, 25 bp, Homo sapien
tccatagtctcttagaacataaatc

SEQ ID NO: 56708 - DNA, 25 bp, Homo sapien
tccatagtctctaagaacataaatc

SEQ ID NO: 56709 - DNA, 25 bp, Homo sapien
acgaagtatcagtctgaagagttca

SEQ ID NO: 56710 - DNA, 25 bp, Homo sapien
acgaagtatcagactgaagagttca

SEQ ID NO: 56711 - DNA, 25 bp, Homo sapien
cgggatcaggaccacggacctatac

SEQ ID NO: 56712 - DNA, 25 bp, Homo sapien
cgggatcaggacgacggacctatac

SEQ ID NO: 56713 - DNA, 25 bp, Homo sapien
tcgcgggaatcagacagggctcatg

SEQ ID NO: 56714 - DNA, 25 bp, Homo sapien
tcgcgggaatcacacagggctcatg

SEQ ID NO: 56715 - DNA, 25 bp, Homo sapien
ctactcccgtacgtttgctatacgt

SEQ ID NO: 56716 - DNA, 25 bp, Homo sapien
ctactcccgtacctttgctatacgt

SEQ ID NO: 56717 - DNA, 25 bp, Homo sapien
ctctactcctactactgtttgtgtg

SEQ ID NO: 56718 - DNA, 25 bp, Homo sapien
ctctactcctacaactgtttgtgtg

SEQ ID NO: 56719 - DNA, 25 bp, Homo sapien
attcgcccttgtacgggtgtcgttg

SEQ ID NO: 56720 - DNA, 25 bp, Homo sapien
attcgcccttgttcgggtgtcgttg

SEQ ID NO: 56721 - DNA, 25 bp, Homo sapien
ttctcgtccttagttttgtgtaccc

SEQ ID NO: 56722 - DNA, 25 bp, Homo sapien
ttctcgtccttacttttgtgtaccc

SEQ ID NO: 56723 - DNA, 25 bp, Homo sapien
taagaccgatgttctcctcttcctg

SEQ ID NO: 56724 - DNA, 25 bp, Homo sapien
taagaccgatgtactcctcttcctg

SEQ ID NO: 56725 - DNA, 25 bp, Homo sapien
atgagaccagtggtcccactcaaag

SEQ ID NO: 56726 - DNA, 25 bp, Homo sapien
atgagaccagtgctcccactcaaag

SEQ ID NO: 56727 - DNA, 25 bp, Homo sapien
ccggacccagtggaccctctggata

SEQ ID NO: 56728 - DNA, 25 bp, Homo sapien
ccggacccagtgcaccctctggata

SEQ ID NO: 56729 - DNA, 25 bp, Homo sapien
aaatctcactgactccgaagtgtaa

SEQ ID NO: 56730 - DNA, 25 bp, Homo sapien
aaatctcactgagtccgaagtgtaa

SEQ ID NO: 56731 - DNA, 25 bp, Homo sapien
agagacccactggaaccacaggcac

SEQ ID NO: 56732 - DNA, 25 bp, Homo sapien
agagacccactgcaaccacaggcac

SEQ ID NO: 56733 - DNA, 25 bp, Homo sapien
agtcactcgactggactccccgggg

SEQ ID NO: 56734 - DNA, 25 bp, Homo sapien
agtcactcgactcgactccccgggg

SEQ ID NO: 56735 - DNA, 25 bp, Homo sapien
cgacaggcgccaggacttaactgtg

SEQ ID NO: 56736 - DNA, 25 bp, Homo sapien
cgacaggcgccacgacttaactgtg

SEQ ID NO: 56737 - DNA, 25 bp, Homo sapien
gcaatgtcgtcgacccttgatatcg

SEQ ID NO: 56738 - DNA, 25 bp, Homo sapien
gcaatgtcgtcgtcccttgatatcg

SEQ ID NO: 56739 - DNA, 25 bp, Homo sapien
ggaaaggaccgattcgctcataatg

SEQ ID NO: 56740 - DNA, 25 bp, Homo sapien
ggaaaggaccgaatcgctcataatg

SEQ ID NO: 56741 - DNA, 25 bp, Homo sapien
agtagaccgaacaacgtccccaatc

SEQ ID NO: 56742 - DNA, 25 bp, Homo sapien
agtagaccgaactacgtccccaatc

SEQ ID NO: 56743 - DNA, 25 bp, Homo sapien
aggattcctcggttcacgacagata

SEQ ID NO: 56744 - DNA, 25 bp, Homo sapien
aggattcctcggatcacgacagata

SEQ ID NO: 56745 - DNA, 25 bp, Homo sapien
gggtctgactcctccatcaacaaat

SEQ ID NO: 56746 - DNA, 25 bp, Homo sapien
gggtctgactccaccatcaacaaat

SEQ ID NO: 56747 - DNA, 25 bp, Homo sapien
gtcaataccagacatgtagcgaacc

SEQ ID NO: 56748 - DNA, 25 bp, Homo sapien
gtcaataccagagatgtagcgaacc

SEQ ID NO: 56749 - DNA, 25 bp, Homo sapien
ttcgaataccatagaagtgcaacct

SEQ ID NO: 56750 - DNA, 25 bp, Homo sapien
ttcgaataccattgaagtgcaacct

SEQ ID NO: 56751 - DNA, 25 bp, Homo sapien
gtttccatacagaaggttgtttcca

SEQ ID NO: 56752 - DNA, 25 bp, Homo sapien
gtttccatacagtaggttgtttcca

SEQ ID NO: 56753 - DNA, 25 bp, Homo sapien
gagatgtaaaaatgtttgtgcccac

SEQ ID NO: 56754 - DNA, 25 bp, Homo sapien
gagatgtaaaaaagtttgtgcccac

SEQ ID NO: 56755 - DNA, 25 bp, Homo sapien
cactttgtataaatgtggccggctc

SEQ ID NO: 56756 - DNA, 25 bp, Homo sapien
cactttgtataattgtggccggctc

SEQ ID NO: 56757 - DNA, 25 bp, Homo sapien
ctatagataagttcttttcggtctc

SEQ ID NO: 56758 - DNA, 25 bp, Homo sapien
ctatagataagtacttttcggtctc

SEQ ID NO: 56759 - DNA, 25 bp, Homo sapien
attaaataggtctatcgtcactgta

SEQ ID NO: 56760 - DNA, 25 bp, Homo sapien
attaaataggtcaatcgtcactgta

SEQ ID NO: 56761 - DNA, 25 bp, Homo sapien
caaatactgtgtcatgtgtcctccg

SEQ ID NO: 56762 - DNA, 25 bp, Homo sapien
caaatactgtgtgatgtgtcctccg

SEQ ID NO: 56763 - DNA, 25 bp, Homo sapien
aaaatttcatgttctgtaagtcacg

SEQ ID NO: 56764 - DNA, 25 bp, Homo sapien
aaaatttcatgtactgtaagtcacg

SEQ ID NO: 56765 - DNA, 25 bp, Homo sapien
aaagtacatttcatgtgttttccag

SEQ ID NO: 56766 - DNA, 25 bp, Homo sapien
aaagtacatttcttgtgttttccag

SEQ ID NO: 56767 - DNA, 25 bp, Homo sapien
atacctttgtcctgtattgtcgaag

SEQ ID NO: 56768 - DNA, 25 bp, Homo sapien
atacctttgtccagtattgtcgaag

SEQ ID NO: 56769 - DNA, 25 bp, Homo sapien
agacgtgtataacagtattctcctg

SEQ ID NO: 56770 - DNA, 25 bp, Homo sapien
agacgtgtataagagtattctcctg

SEQ ID NO: 56771 - DNA, 25 bp, Homo sapien
agtcgagatgtctggtctctcgtcg

SEQ ID NO: 56772 - DNA, 25 bp, Homo sapien
agtcgagatgtcaggtctctcgtcg

SEQ ID NO: 56773 - DNA, 25 bp, Homo sapien
agacaagttgtaatgccgaactcct

SEQ ID NO: 56774 - DNA, 25 bp, Homo sapien
agacaagttgtattgccgaactcct

SEQ ID NO: 56775 - DNA, 25 bp, Homo sapien
cgtagtcctttggactctaacacct

SEQ ID NO: 56776 - DNA, 25 bp, Homo sapien
cgtagtcctttgcactctaacacct

SEQ ID NO: 56777 - DNA, 25 bp, Homo sapien
cgtgttctgtgtccgtcccacgacc

SEQ ID NO: 56778 - DNA, 25 bp, Homo sapien
cgtgttctgtgtgcgtcccacgacc

SEQ ID NO: 56779 - DNA, 25 bp, Homo sapien
tctcttgttctttgtcgcgctcctc

SEQ ID NO: 56780 - DNA, 25 bp, Homo sapien
tctcttgttcttagtcgcgctcctc

SEQ ID NO: 56781 - DNA, 25 bp, Homo sapien
gttttacgtgacctggggctcttcg

SEQ ID NO: 56782 - DNA, 25 bp, Homo sapien
gttttacgtgacgtggggctcttcg

SEQ ID NO: 56783 - DNA, 25 bp, Homo sapien
ggtcttagcgggaccgtgcacagtc

SEQ ID NO: 56784 - DNA, 25 bp, Homo sapien
ggtcttagcgggtccgtgcacagtc

SEQ ID NO: 56785 - DNA, 25 bp, Homo sapien
gtgtcggagtcctccactgttacaa

SEQ ID NO: 56786 - DNA, 25 bp, Homo sapien
gtgtcggagtccaccactgttacaa

SEQ ID NO: 56787 - DNA, 25 bp, Homo sapien
aaggtagatcaacacctagaacgta

SEQ ID NO: 56788 - DNA, 25 bp, Homo sapien
aaggtagatcaagacctagaacgta

SEQ ID NO: 56789 - DNA, 25 bp, Homo sapien
gaaaggtttctctccctagactcga

SEQ ID NO: 56790 - DNA, 25 bp, Homo sapien
gaaaggtttctcaccctagactcga

SEQ ID NO: 56791 - DNA, 25 bp, Homo sapien
cgtaaaggatttccaccttccgcta

SEQ ID NO: 56792 - DNA, 25 bp, Homo sapien
cgtaaaggatttgcaccttccgcta

SEQ ID NO: 56793 - DNA, 25 bp, Homo sapien
aacggattcttcagcgtatgggagt

SEQ ID NO: 56794 - DNA, 25 bp, Homo sapien
aacggattcttctgcgtatgggagt

SEQ ID NO: 56795 - DNA, 25 bp, Homo sapien
gatgacgataaatacaccatgaaga

SEQ ID NO: 56796 - DNA, 25 bp, Homo sapien
gatgacgataaaaacaccatgaaga

SEQ ID NO: 56797 - DNA, 25 bp, Homo sapien
tagacaactacagaccgaataaagt

SEQ ID NO: 56798 - DNA, 25 bp, Homo sapien
tagacaactacacaccgaataaagt

SEQ ID NO: 56799 - DNA, 25 bp, Homo sapien
gcaacgaagtcactagtggatctaa

SEQ ID NO: 56800 - DNA, 25 bp, Homo sapien
gcaacgaagtcagtagtggatctaa

SEQ ID NO: 56801 - DNA, 25 bp, Homo sapien
accgttttattctcgtaaggttgaa

SEQ ID NO: 56802 - DNA, 25 bp, Homo sapien
accgttttattcacgtaaggttgaa

SEQ ID NO: 56803 - DNA, 25 bp, Homo sapien
tgtgacctgggtacaccgtcccagt

SEQ ID NO: 56804 - DNA, 25 bp, Homo sapien
tgtgacctgggttcaccgtcccagt

SEQ ID NO: 56805 - DNA, 25 bp, Homo sapien
gtgtgtctggttttcgtcacccagt

SEQ ID NO: 56806 - DNA, 25 bp, Homo sapien
gtgtgtctggttatcgtcacccagt

SEQ ID NO: 56807 - DNA, 25 bp, Homo sapien
ctttataggtctattcgaactaacg

SEQ ID NO: 56808 - DNA, 25 bp, Homo sapien
ctttataggtcttttcgaactaacg

SEQ ID NO: 56809 - DNA, 25 bp, Homo sapien
actgtgatttctttaggagacacga

SEQ ID NO: 56810 - DNA, 25 bp, Homo sapien
actgtgatttctataggagacacga

SEQ ID NO: 56811 - DNA, 25 bp, Homo sapien
ggatctggtacaacccaggacccag

SEQ ID NO: 56812 - DNA, 25 bp, Homo sapien
ggatctggtacatcccaggacccag

SEQ ID NO: 56813 - DNA, 25 bp, Homo sapien
aactctgggaacagtctttccgcag

SEQ ID NO: 56814 - DNA, 25 bp, Homo sapien
aactctgggaactgtctttccgcag

SEQ ID NO: 56815 - DNA, 25 bp, Homo sapien
agccacagaactcgtccttcggtta

SEQ ID NO: 56816 - DNA, 25 bp, Homo sapien
agccacagaactggtccttcggtta

SEQ ID NO: 56817 - DNA, 25 bp, Homo sapien
cctccaggcactggtgacaggcgga

SEQ ID NO: 56818 - DNA, 25 bp, Homo sapien
cctccaggcactcgtgacaggcgga

SEQ ID NO: 56819 - DNA, 25 bp, Homo sapien
gttacctggtttaccacagtttata

SEQ ID NO: 56820 - DNA, 25 bp, Homo sapien
gttacctggttttccacagtttata

SEQ ID NO: 56821 - DNA, 25 bp, Homo sapien
gacctagatgattaacaagttctta

SEQ ID NO: 56822 - DNA, 25 bp, Homo sapien
gacctagatgataaacaagttctta

SEQ ID NO: 56823 - DNA, 25 bp, Homo sapien
ggaaacctttttagaacccgttcta

SEQ ID NO: 56824 - DNA, 25 bp, Homo sapien
ggaaaccttttttgaacccgttcta

SEQ ID NO: 56825 - DNA, 25 bp, Homo sapien
aatctgtgttcctggctctgtttat

SEQ ID NO: 56826 - DNA, 25 bp, Homo sapien
aatctgtgttccaggctctgtttat

SEQ ID NO: 56827 - DNA, 25 bp, Homo sapien
gtttgtctaccaaaacgtgtccgat

SEQ ID NO: 56828 - DNA, 25 bp, Homo sapien
gtttgtctaccataacgtgtccgat

SEQ ID NO: 56829 - DNA, 25 bp, Homo sapien
aaggtgtacccttactcttctacga

SEQ ID NO: 56830 - DNA, 25 bp, Homo sapien
aaggtgtaccctaactcttctacga

SEQ ID NO: 56831 - DNA, 25 bp, Homo sapien
agtccgttagtcattagtgttgatt

SEQ ID NO: 56832 - DNA, 25 bp, Homo sapien
agtccgttagtctttagtgttgatt

SEQ ID NO: 56833 - DNA, 25 bp, Homo sapien
ccggcgcgtccgagatgctgttacc

SEQ ID NO: 56834 - DNA, 25 bp, Homo sapien
ccggcgcgtccgtgatgctgttacc

SEQ ID NO: 56835 - DNA, 25 bp, Homo sapien
ggtgggtaacggagtgtccctacct

SEQ ID NO: 56836 - DNA, 25 bp, Homo sapien
ggtgggtaacggtgtgtccctacct

SEQ ID NO: 56837 - DNA, 25 bp, Homo sapien
tgtggagatcagtcgggtaagaccg

SEQ ID NO: 56838 - DNA, 25 bp, Homo sapien
tgtggagatcagacgggtaagaccg

SEQ ID NO: 56839 - DNA, 25 bp, Homo sapien
ttgggtacatcgtcaaccctctaca

SEQ ID NO: 56840 - DNA, 25 bp, Homo sapien
ttgggtacatcgacaaccctctaca

SEQ ID NO: 56841 - DNA, 25 bp, Homo sapien
acggcatcgagcaacccgggtgagt

SEQ ID NO: 56842 - DNA, 25 bp, Homo sapien
acggcatcgagctacccgggtgagt

SEQ ID NO: 56843 - DNA, 25 bp, Homo sapien
ctacgacatgaccactcacaaaggg

SEQ ID NO: 56844 - DNA, 25 bp, Homo sapien
ctacgacatgacgactcacaaaggg

SEQ ID NO: 56845 - DNA, 25 bp, Homo sapien
ctggatcgtttcgacccaggtcctg

SEQ ID NO: 56846 - DNA, 25 bp, Homo sapien
ctggatcgtttccacccaggtcctg

SEQ ID NO: 56847 - DNA, 25 bp, Homo sapien
tcgtctttaggtactgatgggtctg

SEQ ID NO: 56848 - DNA, 25 bp, Homo sapien
tcgtctttaggttctgatgggtctg

SEQ ID NO: 56849 - DNA, 25 bp, Homo sapien
tcactgttgacacgttatggtgaat

SEQ ID NO: 56850 - DNA, 25 bp, Homo sapien
tcactgttgacaggttatggtgaat

SEQ ID NO: 56851 - DNA, 25 bp, Homo sapien
cctttagtcaagagtgactcgggcc

SEQ ID NO: 56852 - DNA, 25 bp, Homo sapien
cctttagtcaagtgtgactcgggcc

SEQ ID NO: 56853 - DNA, 25 bp, Homo sapien
accgaagacgtagactggagacgac

SEQ ID NO: 56854 - DNA, 25 bp, Homo sapien
accgaagacgtacactggagacgac

SEQ ID NO: 56855 - DNA, 25 bp, Homo sapien
cagtcgaaagtgaccggaggtacgt

SEQ ID NO: 56856 - DNA, 25 bp, Homo sapien
cagtcgaaagtgtccggaggtacgt

SEQ ID NO: 56857 - DNA, 25 bp, Homo sapien
tgtaccgaattgtcaccgacgtgtc

SEQ ID NO: 56858 - DNA, 25 bp, Homo sapien
tgtaccgaattgacaccgacgtgtc

SEQ ID NO: 56859 - DNA, 25 bp, Homo sapien
ccgaacagtggaggacccacgcgtc

SEQ ID NO: 56860 - DNA, 25 bp, Homo sapien
ccgaacagtggacgacccacgcgtc

SEQ ID NO: 56861 - DNA, 25 bp, Homo sapien
tcaaagagttaatacagtctatgtc

SEQ ID NO: 56862 - DNA, 25 bp, Homo sapien
tcaaagagttaaaacagtctatgtc

SEQ ID NO: 56863 - DNA, 25 bp, Homo sapien
tctaacaatctacttcgttcggcag

SEQ ID NO: 56864 - DNA, 25 bp, Homo sapien
tctaacaatctagttcgttcggcag

SEQ ID NO: 56865 - DNA, 25 bp, Homo sapien
tcggaccacccttgtcggagaaccg

SEQ ID NO: 56866 - DNA, 25 bp, Homo sapien
tcggaccaccctagtcggagaaccg

SEQ ID NO: 56867 - DNA, 25 bp, Homo sapien
ttaggactcccatcgggaaggatct

SEQ ID NO: 56868 - DNA, 25 bp, Homo sapien
ttaggactcccaacgggaaggatct

SEQ ID NO: 56869 - DNA, 25 bp, Homo sapien
ggccgggtaattcagggatgattct

SEQ ID NO: 56870 - DNA, 25 bp, Homo sapien
ggccgggtaattgagggatgattct

SEQ ID NO: 56871 - DNA, 25 bp, Homo sapien
ccagagaagtacaaaggtaccattc

SEQ ID NO: 56872 - DNA, 25 bp, Homo sapien
ccagagaagtactaaggtaccattc

SEQ ID NO: 56873 - DNA, 25 bp, Homo sapien
gacaaacgacaaaggacacggcgtg

SEQ ID NO: 56874 - DNA, 25 bp, Homo sapien
gacaaacgacaatggacacggcgtg

SEQ ID NO: 56875 - DNA, 25 bp, Homo sapien
tgaccgagtgctgtgctccgacgga

SEQ ID NO: 56876 - DNA, 25 bp, Homo sapien
tgaccgagtgctctgctccgacgga

SEQ ID NO: 56877 - DNA, 25 bp, Homo sapien
aacacaaggtgacttctgtaatgac

SEQ ID NO: 56878 - DNA, 25 bp, Homo sapien
aacacaaggtgagttctgtaatgac

SEQ ID NO: 56879 - DNA, 25 bp, Homo sapien
agtgccagacggtgcacccgcaggg

SEQ ID NO: 56880 - DNA, 25 bp, Homo sapien
agtgccagacggagcacccgcaggg

SEQ ID NO: 56881 - DNA, 25 bp, Homo sapien
tgtcccctagcttaaccccgagggt

SEQ ID NO: 56882 - DNA, 25 bp, Homo sapien
tgtcccctagctaaaccccgagggt

SEQ ID NO: 56883 - DNA, 25 bp, Homo sapien
tcaggtcacaccaaacgccgcgggg

SEQ ID NO: 56884 - DNA, 25 bp, Homo sapien
tcaggtcacacctaacgccgcgggg

SEQ ID NO: 56885 - DNA, 25 bp, Homo sapien
tcacagactacacaaacacaggggg

SEQ ID NO: 56886 - DNA, 25 bp, Homo sapien
tcacagactacagaaacacaggggg

SEQ ID NO: 56887 - DNA, 25 bp, Homo sapien
aacaactacgagtggaaggcgtcgc

SEQ ID NO: 56888 - DNA, 25 bp, Homo sapien
aacaactacgagaggaaggcgtcgc

SEQ ID NO: 56889 - DNA, 25 bp, Homo sapien
ataaaggactataaccgtgatagac

SEQ ID NO: 56890 - DNA, 25 bp, Homo sapien
ataaaggactattaccgtgatagac

SEQ ID NO: 56891 - DNA, 25 bp, Homo sapien
tatcccggtcgtcatgtgcgagtgt

SEQ ID NO: 56892 - DNA, 25 bp, Homo sapien
tatcccggtcgtgatgtgcgagtgt

SEQ ID NO: 56893 - DNA, 25 bp, Homo sapien
tttccatttgtttcgtctgggagtc

SEQ ID NO: 56894 - DNA, 25 bp, Homo sapien
tttccatttgttacgtctgggagtc

SEQ ID NO: 56895 - DNA, 25 bp, Homo sapien
atcgttttggttaaaccgtcgtgtt

SEQ ID NO: 56896 - DNA, 25 bp, Homo sapien
atcgttttggtttaaccgtcgtgtt

SEQ ID NO: 56897 - DNA, 25 bp, Homo sapien
tcggtgttggttccacgatcggtag

SEQ ID NO: 56898 - DNA, 25 bp, Homo sapien
tcggtgttggttgcacgatcggtag

SEQ ID NO: 56899 - DNA, 25 bp, Homo sapien
ctggtgcagtatctacgggtaaagt

SEQ ID NO: 56900 - DNA, 25 bp, Homo sapien
ctggtgcagtatgtacgggtaaagt

SEQ ID NO: 56901 - DNA, 25 bp, Homo sapien
cttatgtcttctgtacgtggaagat

SEQ ID NO: 56902 - DNA, 25 bp, Homo sapien
cttatgtcttctctacgtggaagat

SEQ ID NO: 56903 - DNA, 25 bp, Homo sapien
ggcttgagtttcttccggtgttagg

SEQ ID NO: 56904 - DNA, 25 bp, Homo sapien
ggcttgagtttcatccggtgttagg

SEQ ID NO: 56905 - DNA, 25 bp, Homo sapien
aagttcaagtcctcggcgtctctgc

SEQ ID NO: 56906 - DNA, 25 bp, Homo sapien
aagttcaagtccacggcgtctctgc

SEQ ID NO: 56907 - DNA, 25 bp, Homo sapien
gacccgaagcagaagggtcactagg

SEQ ID NO: 56908 - DNA, 25 bp, Homo sapien
gacccgaagcagtagggtcactagg

SEQ ID NO: 56909 - DNA, 25 bp, Homo sapien
acgtgacgtagtccccgaggcctgg

SEQ ID NO: 56910 - DNA, 25 bp, Homo sapien
acgtgacgtagtgcccgaggcctgg

SEQ ID NO: 56911 - DNA, 25 bp, Homo sapien
caagagtagaacgtcggtcagttcg

SEQ ID NO: 56912 - DNA, 25 bp, Homo sapien
caagagtagaacctcggtcagttcg

SEQ ID NO: 56913 - DNA, 25 bp, Homo sapien
aagacgagagtaaacgaaccggacc

SEQ ID NO: 56914 - DNA, 25 bp, Homo sapien
aagacgagagtatacgaaccggacc

SEQ ID NO: 56915 - DNA, 25 bp, Homo sapien
cttgcgtaccgtgactcgcgtagta

SEQ ID NO: 56916 - DNA, 25 bp, Homo sapien
cttgcgtaccgtcactcgcgtagta

SEQ ID NO: 56917 - DNA, 25 bp, Homo sapien
tagtgcgacaccaaactactacgcg

SEQ ID NO: 56918 - DNA, 25 bp, Homo sapien
tagtgcgacacctaactactacgcg

SEQ ID NO: 56919 - DNA, 25 bp, Homo sapien
ttttcggtccttggaactccgacag

SEQ ID NO: 56920 - DNA, 25 bp, Homo sapien
ttttcggtccttcgaactccgacag

SEQ ID NO: 56921 - DNA, 25 bp, Homo sapien
gtcacagtcctttcgtgtcccagcg

SEQ ID NO: 56922 - DNA, 25 bp, Homo sapien
gtcacagtccttacgtgtcccagcg

SEQ ID NO: 56923 - DNA, 25 bp, Homo sapien
agaccgtccgtcgactcctcgggag

SEQ ID NO: 56924 - DNA, 25 bp, Homo sapien
agaccgtccgtccactcctcgggag

SEQ ID NO: 56925 - DNA, 25 bp, Homo sapien
tcggaccccgggatcttccgagtgt

SEQ ID NO: 56926 - DNA, 25 bp, Homo sapien
tcggaccccgggttcttccgagtgt

SEQ ID NO: 56927 - DNA, 25 bp, Homo sapien
cgtctccccggtgtctccggagagt

SEQ ID NO: 56928 - DNA, 25 bp, Homo sapien
cgtctccccggtctctccggagagt

SEQ ID NO: 56929 - DNA, 25 bp, Homo sapien
tacgtccccttgttaccgtttgagg

SEQ ID NO: 56930 - DNA, 25 bp, Homo sapien
tacgtccccttgataccgtttgagg

SEQ ID NO: 56931 - DNA, 25 bp, Homo sapien
agaaagaactcattcatcacttggt

SEQ ID NO: 56932 - DNA, 25 bp, Homo sapien
agaaagaactcaatcatcacttggt

SEQ ID NO: 56933 - DNA, 25 bp, Homo sapien
gcaacagagacctctaccacttagc

SEQ ID NO: 56934 - DNA, 25 bp, Homo sapien
gcaacagagaccactaccacttagc

SEQ ID NO: 56935 - DNA, 25 bp, Homo sapien
taggtcaaggtacttccttctttac

SEQ ID NO: 56936 - DNA, 25 bp, Homo sapien
taggtcaaggtagttccttctttac

SEQ ID NO: 56937 - DNA, 25 bp, Homo sapien
gacgaaacacaaagactgtatttct

SEQ ID NO: 56938 - DNA, 25 bp, Homo sapien
gacgaaacacaatgactgtatttct

SEQ ID NO: 56939 - DNA, 25 bp, Homo sapien
tgaggtacctactcctgagttttct

SEQ ID NO: 56940 - DNA, 25 bp, Homo sapien
tgaggtacctacacctgagttttct

SEQ ID NO: 56941 - DNA, 25 bp, Homo sapien
tgagtgtgactgacccgagtttgta

SEQ ID NO: 56942 - DNA, 25 bp, Homo sapien
tgagtgtgactgtcccgagtttgta

SEQ ID NO: 56943 - DNA, 25 bp, Homo sapien
tgggacgtccttcacagttactatg

SEQ ID NO: 56944 - DNA, 25 bp, Homo sapien
tgggacgtccttgacagttactatg

SEQ ID NO: 56945 - DNA, 25 bp, Homo sapien
ttgtcgcgtggtaagtactctatac

SEQ ID NO: 56946 - DNA, 25 bp, Homo sapien
ttgtcgcgtggttagtactctatac

SEQ ID NO: 56947 - DNA, 25 bp, Homo sapien
ccgaaatatgttcgttgttgtatac

SEQ ID NO: 56948 - DNA, 25 bp, Homo sapien
ccgaaatatgttggttgttgtatac

SEQ ID NO: 56949 - DNA, 25 bp, Homo sapien
gagaataggaacgtacggtccgtga

SEQ ID NO: 56950 - DNA, 25 bp, Homo sapien
gagaataggaacctacggtccgtga

SEQ ID NO: 56951 - DNA, 25 bp, Homo sapien
gaagagagagactcgaggcactcag

SEQ ID NO: 56952 - DNA, 25 bp, Homo sapien
gaagagagagacacgaggcactcag

SEQ ID NO: 56953 - DNA, 25 bp, Homo sapien
aaagaagtaacagtaggtaccacac

SEQ ID NO: 56954 - DNA, 25 bp, Homo sapien
aaagaagtaacactaggtaccacac

SEQ ID NO: 56955 - DNA, 25 bp, Homo sapien
gaaccccaggacaatgtgtcccact

SEQ ID NO: 56956 - DNA, 25 bp, Homo sapien
gaaccccaggactatgtgtcccact

SEQ ID NO: 56957 - DNA, 25 bp, Homo sapien
acgcggcacgtggtgatgaccccct

SEQ ID NO: 56958 - DNA, 25 bp, Homo sapien
acgcggcacgtgctgatgaccccct

SEQ ID NO: 56959 - DNA, 25 bp, Homo sapien
accaaagtaaacgagaataccgtct

SEQ ID NO: 56960 - DNA, 25 bp, Homo sapien
accaaagtaaaccagaataccgtct

SEQ ID NO: 56961 - DNA, 25 bp, Homo sapien
gtccaaagcgagacggacccctact

SEQ ID NO: 56962 - DNA, 25 bp, Homo sapien
gtccaaagcgagtcggacccctact

SEQ ID NO: 56963 - DNA, 25 bp, Homo sapien
gtaactgatatcagttggatccttt

SEQ ID NO: 56964 - DNA, 25 bp, Homo sapien
gtaactgatatctgttggatccttt

SEQ ID NO: 56965 - DNA, 25 bp, Homo sapien
gaagattaattcttctcggtcaccc

SEQ ID NO: 56966 - DNA, 25 bp, Homo sapien
gaagattaattcatctcggtcaccc

SEQ ID NO: 56967 - DNA, 25 bp, Homo sapien
gagttcgtgttactactgtcccacc

SEQ ID NO: 56968 - DNA, 25 bp, Homo sapien
gagttcgtgttagtactgtcccacc

SEQ ID NO: 56969 - DNA, 25 bp, Homo sapien
agtctccgactttaggctcgacaca

SEQ ID NO: 56970 - DNA, 25 bp, Homo sapien
agtctccgacttaaggctcgacaca

SEQ ID NO: 56971 - DNA, 25 bp, Homo sapien
ggtactcccctttgtgtgtatacga

SEQ ID NO: 56972 - DNA, 25 bp, Homo sapien
ggtactccccttagtgtgtatacga

SEQ ID NO: 56973 - DNA, 25 bp, Homo sapien
tgtagtccgttctttaatcgataag

SEQ ID NO: 56974 - DNA, 25 bp, Homo sapien
tgtagtccgttcattaatcgataag

SEQ ID NO: 56975 - DNA, 25 bp, Homo sapien
ttcctatgcgatcacttttcagaag

SEQ ID NO: 56976 - DNA, 25 bp, Homo sapien
ttcctatgcgatgacttttcagaag

SEQ ID NO: 56977 - DNA, 25 bp, Homo sapien
aatatgtgtgaccttttcggagacg

SEQ ID NO: 56978 - DNA, 25 bp, Homo sapien
aatatgtgtgacgttttcggagacg

SEQ ID NO: 56979 - DNA, 25 bp, Homo sapien
caatggtcaaggagtgtgacgacga

SEQ ID NO: 56980 - DNA, 25 bp, Homo sapien
caatggtcaaggtgtgtgacgacga

SEQ ID NO: 56981 - DNA, 25 bp, Homo sapien
ttagagctctaatacatgttaatcg

SEQ ID NO: 56982 - DNA, 25 bp, Homo sapien
ttagagctctaaaacatgttaatcg

SEQ ID NO: 56983 - DNA, 25 bp, Homo sapien
actagtaagccaaacatcgttatga

SEQ ID NO: 56984 - DNA, 25 bp, Homo sapien
actagtaagccatacatcgttatga

SEQ ID NO: 56985 - DNA, 25 bp, Homo sapien
cagtaggagctatattactgtgaac

SEQ ID NO: 56986 - DNA, 25 bp, Homo sapien
cagtaggagctaaattactgtgaac

SEQ ID NO: 56987 - DNA, 25 bp, Homo sapien
cggagcacttacagtattttcgttt

SEQ ID NO: 56988 - DNA, 25 bp, Homo sapien
cggagcacttactgtattttcgttt

SEQ ID NO: 56989 - DNA, 25 bp, Homo sapien
cgaagacaccttggtaccttcttct

SEQ ID NO: 56990 - DNA, 25 bp, Homo sapien
cgaagacaccttcgtaccttcttct

SEQ ID NO: 56991 - DNA, 25 bp, Homo sapien
gtaaggaccggatctactcttttct

SEQ ID NO: 56992 - DNA, 25 bp, Homo sapien
gtaaggaccggaactactcttttct

SEQ ID NO: 56993 - DNA, 25 bp, Homo sapien
gtcaaccgaaataacacgttcttag

SEQ ID NO: 56994 - DNA, 25 bp, Homo sapien
gtcaaccgaaattacacgttcttag

SEQ ID NO: 56995 - DNA, 25 bp, Homo sapien
agaaaccgtgactttcgacctctta

SEQ ID NO: 56996 - DNA, 25 bp, Homo sapien
agaaaccgtgacattcgacctctta

SEQ ID NO: 56997 - DNA, 25 bp, Homo sapien
gggacgctcggagtgtgcctctcac

SEQ ID NO: 56998 - DNA, 25 bp, Homo sapien
gggacgctcggactgtgcctctcac

SEQ ID NO: 56999 - DNA, 25 bp, Homo sapien
gtaaaatgattatcattacggtaac

SEQ ID NO: 57000 - DNA, 25 bp, Homo sapien
gtaaaatgattaacattacggtaac

SEQ ID NO: 57001 - DNA, 25 bp, Homo sapien
agtaaaatacagtagatgtccaaac

SEQ ID NO: 57002 - DNA, 25 bp, Homo sapien
agtaaaatacagaagatgtccaaac

SEQ ID NO: 57003 - DNA, 25 bp, Homo sapien
cccggtgacagaagaggtgccacga

SEQ ID NO: 57004 - DNA, 25 bp, Homo sapien
cccggtgacagatgaggtgccacga

SEQ ID NO: 57005 - DNA, 25 bp, Homo sapien
cccggagaaactgagagtggtccac

SEQ ID NO: 57006 - DNA, 25 bp, Homo sapien
cccggagaaactcagagtggtccac

SEQ ID NO: 57007 - DNA, 25 bp, Homo sapien
ctcctggagacacataaacagttaa

SEQ ID NO: 57008 - DNA, 25 bp, Homo sapien
ctcctggagacagataaacagttaa

SEQ ID NO: 57009 - DNA, 25 bp, Homo sapien
atgtagacacccaataagtatatgt

SEQ ID NO: 57010 - DNA, 25 bp, Homo sapien
atgtagacaccctataagtatatgt

SEQ ID NO: 57011 - DNA, 25 bp, Homo sapien
tctgtaataagtgacatagttcttc

SEQ ID NO: 57012 - DNA, 25 bp, Homo sapien
tctgtaataagtcacatagttcttc

SEQ ID NO: 57013 - DNA, 25 bp, Homo sapien
tctgaggtcacgtcactgatcttgt

SEQ ID NO: 57014 - DNA, 25 bp, Homo sapien
tctgaggtcacgacactgatcttgt

SEQ ID NO: 57015 - DNA, 25 bp, Homo sapien
tggtccgaaaggacagtacgtttta

SEQ ID NO: 57016 - DNA, 25 bp, Homo sapien
tggtccgaaaggtcagtacgtttta

SEQ ID NO: 57017 - DNA, 25 bp, Homo sapien
ggtaagaaacggagacgatcttcca

SEQ ID NO: 57018 - DNA, 25 bp, Homo sapien
ggtaagaaacggtgacgatcttcca

SEQ ID NO: 57019 - DNA, 25 bp, Homo sapien
gcgacaagagagagaacatgttttc

SEQ ID NO: 57020 - DNA, 25 bp, Homo sapien
gcgacaagagagtgaacatgttttc

SEQ ID NO: 57021 - DNA, 25 bp, Homo sapien
tcgtggacgggaagttctgtcttac

SEQ ID NO: 57022 - DNA, 25 bp, Homo sapien
tcgtggacgggatgttctgtcttac

SEQ ID NO: 57023 - DNA, 25 bp, Homo sapien
tttgtacagccgttctcttcttagt

SEQ ID NO: 57024 - DNA, 25 bp, Homo sapien
tttgtacagccgatctcttcttagt

SEQ ID NO: 57025 - DNA, 25 bp, Homo sapien
cttggtacagaatgtttcttgtctg

SEQ ID NO: 57026 - DNA, 25 bp, Homo sapien
cttggtacagaaagtttcttgtctg

SEQ ID NO: 57027 - DNA, 25 bp, Homo sapien
cttagttacacaaagttgcctgttg

SEQ ID NO: 57028 - DNA, 25 bp, Homo sapien
cttagttacacatagttgcctgttg

SEQ ID NO: 57029 - DNA, 25 bp, Homo sapien
tcgtggaggacgtccgtccgtttgt

SEQ ID NO: 57030 - DNA, 25 bp, Homo sapien
tcgtggaggacgaccgtccgtttgt

SEQ ID NO: 57031 - DNA, 25 bp, Homo sapien
ccgacggagacactcggtctttatt

SEQ ID NO: 57032 - DNA, 25 bp, Homo sapien
ccgacggagacagtcggtctttatt

SEQ ID NO: 57033 - DNA, 25 bp, Homo sapien
acggtcagtaaaggagaacccgtca

SEQ ID NO: 57034 - DNA, 25 bp, Homo sapien
acggtcagtaaacgagaacccgtca

SEQ ID NO: 57035 - DNA, 25 bp, Homo sapien
acgaccagaaataaccccgctacga

SEQ ID NO: 57036 - DNA, 25 bp, Homo sapien
acgaccagaaattaccccgctacga

SEQ ID NO: 57037 - DNA, 25 bp, Homo sapien
gtccgggatgtgtctcggtagaact

SEQ ID NO: 57038 - DNA, 25 bp, Homo sapien
gtccgggatgtgactcggtagaact

SEQ ID NO: 57039 - DNA, 25 bp, Homo sapien
gtatttcggagttgtcttggtgacc

SEQ ID NO: 57040 - DNA, 25 bp, Homo sapien
gtatttcggagtagtcttggtgacc

SEQ ID NO: 57041 - DNA, 25 bp, Homo sapien
tcccgtagtgtgtgtcggtgtatcg

SEQ ID NO: 57042 - DNA, 25 bp, Homo sapien
tcccgtagtgtgagtcggtgtatcg

SEQ ID NO: 57043 - DNA, 25 bp, Homo sapien
ccctccgaggtggagtccgtgtcag

SEQ ID NO: 57044 - DNA, 25 bp, Homo sapien
ccctccgaggtgcagtccgtgtcag

SEQ ID NO: 57045 - DNA, 25 bp, Homo sapien
ctcccgacgagtgacgggacctaca

SEQ ID NO: 57046 - DNA, 25 bp, Homo sapien
ctcccgacgagtcacgggacctaca

SEQ ID NO: 57047 - DNA, 25 bp, Homo sapien
tcggtcgctgtacctctaggttcag

SEQ ID NO: 57048 - DNA, 25 bp, Homo sapien
tcggtcgctgtagctctaggttcag

SEQ ID NO: 57049 - DNA, 25 bp, Homo sapien
aaagtgtcttccttcgagtatactg

SEQ ID NO: 57050 - DNA, 25 bp, Homo sapien
aaagtgtcttccatcgagtatactg

SEQ ID NO: 57051 - DNA, 25 bp, Homo sapien
ttgaactttcataacttcccgtcgg

SEQ ID NO: 57052 - DNA, 25 bp, Homo sapien
ttgaactttcattacttcccgtcgg

SEQ ID NO: 57053 - DNA, 25 bp, Homo sapien
acagtgtctagtagtgtccgtccgg

SEQ ID NO: 57054 - DNA, 25 bp, Homo sapien
acagtgtctagttgtgtccgtccgg

SEQ ID NO: 57055 - DNA, 25 bp, Homo sapien
cttctaaggtgaggtgttctatgtc

SEQ ID NO: 57056 - DNA, 25 bp, Homo sapien
cttctaaggtgacgtgttctatgtc

SEQ ID NO: 57057 - DNA, 25 bp, Homo sapien
agtctctgtaatttgcattcatgtc

SEQ ID NO: 57058 - DNA, 25 bp, Homo sapien
agtctctgtaatatgcattcatgtc

SEQ ID NO: 57059 - DNA, 25 bp, Homo sapien
cttgtaattgtgacttcagagtact

SEQ ID NO: 57060 - DNA, 25 bp, Homo sapien
cttgtaattgtgtcttcagagtact

SEQ ID NO: 57061 - DNA, 25 bp, Homo sapien
gaatgtccttatgtctttataggtc

SEQ ID NO: 57062 - DNA, 25 bp, Homo sapien
gaatgtccttatctctttataggtc

SEQ ID NO: 57063 - DNA, 25 bp, Homo sapien
tgtcttccctagtaccctgcgggtc

SEQ ID NO: 57064 - DNA, 25 bp, Homo sapien
tgtcttccctagaaccctgcgggtc

SEQ ID NO: 57065 - DNA, 25 bp, Homo sapien
cttctacgacagtcccgtgctggtg

SEQ ID NO: 57066 - DNA, 25 bp, Homo sapien
cttctacgacagacccgtgctggtg

SEQ ID NO: 57067 - DNA, 25 bp, Homo sapien
gtcttatagatattactagtccaag

SEQ ID NO: 57068 - DNA, 25 bp, Homo sapien
gtcttatagataatactagtccaag

SEQ ID NO: 57069 - DNA, 25 bp, Homo sapien
aggggctctacgtatgacctatgaa

SEQ ID NO: 57070 - DNA, 25 bp, Homo sapien
aggggctctacgaatgacctatgaa

SEQ ID NO: 57071 - DNA, 25 bp, Homo sapien
gtagatctgagttcccgtattacat

SEQ ID NO: 57072 - DNA, 25 bp, Homo sapien
gtagatctgagtacccgtattacat

SEQ ID NO: 57073 - DNA, 25 bp, Homo sapien
tttgtaatggagatctcgactccga

SEQ ID NO: 57074 - DNA, 25 bp, Homo sapien
tttgtaatggagttctcgactccga

SEQ ID NO: 57075 - DNA, 25 bp, Homo sapien
gagactagagggtcgtacctgtcgt

SEQ ID NO: 57076 - DNA, 25 bp, Homo sapien
gagactagagggacgtacctgtcgt

SEQ ID NO: 57077 - DNA, 25 bp, Homo sapien
ccgcactgagagacacgcgtccgag

SEQ ID NO: 57078 - DNA, 25 bp, Homo sapien
ccgcactgagagtcacgcgtccgag

SEQ ID NO: 57079 - DNA, 25 bp, Homo sapien
gacgcctccgggacgttgactcgtc

SEQ ID NO: 57080 - DNA, 25 bp, Homo sapien
gacgcctccgggtcgttgactcgtc

SEQ ID NO: 57081 - DNA, 25 bp, Homo sapien
aagagtcctcactcggtcatcccag

SEQ ID NO: 57082 - DNA, 25 bp, Homo sapien
aagagtcctcacacggtcatcccag

SEQ ID NO: 57083 - DNA, 25 bp, Homo sapien
ggagaccctccgacagtcagggcag

SEQ ID NO: 57084 - DNA, 25 bp, Homo sapien
ggagaccctccgtcagtcagggcag

SEQ ID NO: 57085 - DNA, 25 bp, Homo sapien
tggaccccagacgtcgcaggtggac

SEQ ID NO: 57086 - DNA, 25 bp, Homo sapien
tggaccccagacctcgcaggtggac

SEQ ID NO: 57087 - DNA, 25 bp, Homo sapien
gtctcacaagcgttgtgatctctgc

SEQ ID NO: 57088 - DNA, 25 bp, Homo sapien
gtctcacaagcgatgtgatctctgc

SEQ ID NO: 57089 - DNA, 25 bp, Homo sapien
aagtcttcagcgacccgagtcttcc

SEQ ID NO: 57090 - DNA, 25 bp, Homo sapien
aagtcttcagcgtcccgagtcttcc

SEQ ID NO: 57091 - DNA, 25 bp, Homo sapien
aggtatgtagcagacagggtctcac

SEQ ID NO: 57092 - DNA, 25 bp, Homo sapien
aggtatgtagcacacagggtctcac

SEQ ID NO: 57093 - DNA, 25 bp, Homo sapien
aggaatcgtacaaaattcttactag

SEQ ID NO: 57094 - DNA, 25 bp, Homo sapien
aggaatcgtacataattcttactag

SEQ ID NO: 57095 - DNA, 25 bp, Homo sapien
ggaacctatttcagaactactagag

SEQ ID NO: 57096 - DNA, 25 bp, Homo sapien
ggaacctatttctgaactactagag

SEQ ID NO: 57097 - DNA, 25 bp, Homo sapien
cagaactcgtggtcgacttaactgg

SEQ ID NO: 57098 - DNA, 25 bp, Homo sapien
cagaactcgtggacgacttaactgg

SEQ ID NO: 57099 - DNA, 25 bp, Homo sapien
taggaaccggtagacgaggaaccct

SEQ ID NO: 57100 - DNA, 25 bp, Homo sapien
taggaaccggtacacgaggaaccct

SEQ ID NO: 57101 - DNA, 25 bp, Homo sapien
cggacccgagtggaccgcgagcaac

SEQ ID NO: 57102 - DNA, 25 bp, Homo sapien
cggacccgagtgcaccgcgagcaac

SEQ ID NO: 57103 - DNA, 25 bp, Homo sapien
ccactcaggagtgtgaccagagtac

SEQ ID NO: 57104 - DNA, 25 bp, Homo sapien
ccactcaggagtctgaccagagtac

SEQ ID NO: 57105 - DNA, 25 bp, Homo sapien
atacagttcgtggatgatctacagg

SEQ ID NO: 57106 - DNA, 25 bp, Homo sapien
atacagttcgtgcatgatctacagg

SEQ ID NO: 57107 - DNA, 25 bp, Homo sapien
aaagaagacgtcaagaccgacaagt

SEQ ID NO: 57108 - DNA, 25 bp, Homo sapien
aaagaagacgtctagaccgacaagt

SEQ ID NO: 57109 - DNA, 25 bp, Homo sapien
ggaaaagacgtctctactgaccacg

SEQ ID NO: 57110 - DNA, 25 bp, Homo sapien
ggaaaagacgtcactactgaccacg

SEQ ID NO: 57111 - DNA, 25 bp, Homo sapien
gtcacaggagccaccgcgtacttcg

SEQ ID NO: 57112 - DNA, 25 bp, Homo sapien
gtcacaggagcctccgcgtacttcg

SEQ ID NO: 57113 - DNA, 25 bp, Homo sapien
cccagtgacgtgacgacccacgtga

SEQ ID NO: 57114 - DNA, 25 bp, Homo sapien
cccagtgacgtgtcgacccacgtga

SEQ ID NO: 57115 - DNA, 25 bp, Homo sapien
tcgagactaggtggacgacctaggt

SEQ ID NO: 57116 - DNA, 25 bp, Homo sapien
tcgagactaggtcgacgacctaggt

SEQ ID NO: 57117 - DNA, 25 bp, Homo sapien
tgtgtcgccggcagacgaactacga

SEQ ID NO: 57118 - DNA, 25 bp, Homo sapien
tgtgtcgccggctgacgaactacga

SEQ ID NO: 57119 - DNA, 25 bp, Homo sapien
tcagaatgtttaggggtgaccagaa

SEQ ID NO: 57120 - DNA, 25 bp, Homo sapien
tcagaatgtttacgggtgaccagaa

SEQ ID NO: 57121 - DNA, 25 bp, Homo sapien
agaaacgtatgtgctcataatcaaa

SEQ ID NO: 57122 - DNA, 25 bp, Homo sapien
agaaacgtatgtcctcataatcaaa

SEQ ID NO: 57123 - DNA, 25 bp, Homo sapien
gaaaagtcggttatagtactaccaa

SEQ ID NO: 57124 - DNA, 25 bp, Homo sapien
gaaaagtcggttttagtactaccaa

SEQ ID NO: 57125 - DNA, 25 bp, Homo sapien
cagaaagaagggtgaacctccgaac

SEQ ID NO: 57126 - DNA, 25 bp, Homo sapien
cagaaagaagggagaacctccgaac

SEQ ID NO: 57127 - DNA, 25 bp, Homo sapien
gaaaggaaacgaggtcgctcaggtc

SEQ ID NO: 57128 - DNA, 25 bp, Homo sapien
gaaaggaaacgacgtcgctcaggtc

SEQ ID NO: 57129 - DNA, 25 bp, Homo sapien
cagttacatcgaaacctttcgacgt

SEQ ID NO: 57130 - DNA, 25 bp, Homo sapien
cagttacatcgatacctttcgacgt

SEQ ID NO: 57131 - DNA, 25 bp, Homo sapien
agtatcaggtagactgtgttctagt

SEQ ID NO: 57132 - DNA, 25 bp, Homo sapien
agtatcaggtagtctgtgttctagt

SEQ ID NO: 57133 - DNA, 25 bp, Homo sapien
tctccgtgtccctagtcccttgtga

SEQ ID NO: 57134 - DNA, 25 bp, Homo sapien
tctccgtgtcccaagtcccttgtga

SEQ ID NO: 57135 - DNA, 25 bp, Homo sapien
tctttgactcacacgtccccgggat

SEQ ID NO: 57136 - DNA, 25 bp, Homo sapien
tctttgactcactcgtccccgggat

SEQ ID NO: 57137 - DNA, 25 bp, Homo sapien
cccgtgataaatgattcgttacaat

SEQ ID NO: 57138 - DNA, 25 bp, Homo sapien
cccgtgataaatcattcgttacaat

SEQ ID NO: 57139 - DNA, 25 bp, Homo sapien
atgactcgagaggtttctgacccgt

SEQ ID NO: 57140 - DNA, 25 bp, Homo sapien
atgactcgagagctttctgacccgt

SEQ ID NO: 57141 - DNA, 25 bp, Homo sapien
cagtacactcagagtttcccgtctt

SEQ ID NO: 57142 - DNA, 25 bp, Homo sapien
cagtacactcagtgtttcccgtctt

SEQ ID NO: 57143 - DNA, 25 bp, Homo sapien
ttcgatcccttgtcccgtgtactgt

SEQ ID NO: 57144 - DNA, 25 bp, Homo sapien
ttcgatcccttgacccgtgtactgt

SEQ ID NO: 57145 - DNA, 25 bp, Homo sapien
agatcggtctctggtctaccgagaa

SEQ ID NO: 57146 - DNA, 25 bp, Homo sapien
agatcggtctctcgtctaccgagaa

SEQ ID NO: 57147 - DNA, 25 bp, Homo sapien
ggttccggtcgtggatcacgacgga

SEQ ID NO: 57148 - DNA, 25 bp, Homo sapien
ggttccggtcgtcgatcacgacgga

SEQ ID NO: 57149 - DNA, 25 bp, Homo sapien
ggtttcatgtgtcgagttcaccgtc

SEQ ID NO: 57150 - DNA, 25 bp, Homo sapien
ggtttcatgtgtggagttcaccgtc

SEQ ID NO: 57151 - DNA, 25 bp, Homo sapien
cgtgtgtgtgtatgcgtattgaacc

SEQ ID NO: 57152 - DNA, 25 bp, Homo sapien
cgtgtgtgtgtaagcgtattgaacc

SEQ ID NO: 57153 - DNA, 25 bp, Homo sapien
acttttagttaatactcttgagaca

SEQ ID NO: 57154 - DNA, 25 bp, Homo sapien
acttttagttaaaactcttgagaca

SEQ ID NO: 57155 - DNA, 25 bp, Homo sapien
aatagtcttttgtatccgtgtggcc

SEQ ID NO: 57156 - DNA, 25 bp, Homo sapien
aatagtcttttgaatccgtgtggcc

SEQ ID NO: 57157 - DNA, 25 bp, Homo sapien
gtccctcagacatgtactgtttctt

SEQ ID NO: 57158 - DNA, 25 bp, Homo sapien
gtccctcagacaagtactgtttctt

SEQ ID NO: 57159 - DNA, 25 bp, Homo sapien
tgacccgcacgaggacgaggtttcg

SEQ ID NO: 57160 - DNA, 25 bp, Homo sapien
tgacccgcacgacgacgaggtttcg

SEQ ID NO: 57161 - DNA, 25 bp, Homo sapien
ttcacgaacagtaacgaagtttctc

SEQ ID NO: 57162 - DNA, 25 bp, Homo sapien
ttcacgaacagttacgaagtttctc

SEQ ID NO: 57163 - DNA, 25 bp, Homo sapien
tgtgtccgcgacatcgggagcgcca

SEQ ID NO: 57164 - DNA, 25 bp, Homo sapien
tgtgtccgcgacttcgggagcgcca

SEQ ID NO: 57165 - DNA, 25 bp, Homo sapien
cttgtgccgccgttggcagtccatc

SEQ ID NO: 57166 - DNA, 25 bp, Homo sapien
cttgtgccgccgatggcagtccatc

SEQ ID NO: 57167 - DNA, 25 bp, Homo sapien
tggtccaggggtgtcccacagtctc

SEQ ID NO: 57168 - DNA, 25 bp, Homo sapien
tggtccaggggtctcccacagtctc

SEQ ID NO: 57169 - DNA, 25 bp, Homo sapien
tgtgtccatgtcgtgggaatcacag

SEQ ID NO: 57170 - DNA, 25 bp, Homo sapien
tgtgtccatgtcctgggaatcacag

SEQ ID NO: 57171 - DNA, 25 bp, Homo sapien
ttcgactgtgttttgatcaacctcg

SEQ ID NO: 57172 - DNA, 25 bp, Homo sapien
ttcgactgtgttatgatcaacctcg

SEQ ID NO: 57173 - DNA, 25 bp, Homo sapien
gtgtccttcataaagaaactctgtc

SEQ ID NO: 57174 - DNA, 25 bp, Homo sapien
gtgtccttcatatagaaactctgtc

SEQ ID NO: 57175 - DNA, 25 bp, Homo sapien
aactattttagacactactcgtctt

SEQ ID NO: 57176 - DNA, 25 bp, Homo sapien
aactattttagagactactcgtctt

SEQ ID NO: 57177 - DNA, 25 bp, Homo sapien
agggtatctcgcagaactgtctcgt

SEQ ID NO: 57178 - DNA, 25 bp, Homo sapien
agggtatctcgctgaactgtctcgt

SEQ ID NO: 57179 - DNA, 25 bp, Homo sapien
ttagaggtccggaagaacgtctcat

SEQ ID NO: 57180 - DNA, 25 bp, Homo sapien
ttagaggtccggtagaacgtctcat

SEQ ID NO: 57181 - DNA, 25 bp, Homo sapien
cctctagatcacgaataggatctta

SEQ ID NO: 57182 - DNA, 25 bp, Homo sapien
cctctagatcaccaataggatctta

SEQ ID NO: 57183 - DNA, 25 bp, Homo sapien
cccggtgtattacaatagtccttta

SEQ ID NO: 57184 - DNA, 25 bp, Homo sapien
cccggtgtattagaatagtccttta

SEQ ID NO: 57185 - DNA, 25 bp, Homo sapien
acactgtgtaaaaacgggaccgatt

SEQ ID NO: 57186 - DNA, 25 bp, Homo sapien
acactgtgtaaatacgggaccgatt

SEQ ID NO: 57187 - DNA, 25 bp, Homo sapien
catagggtaccgtcgggaacgacga

SEQ ID NO: 57188 - DNA, 25 bp, Homo sapien
catagggtaccgacgggaacgacga

SEQ ID NO: 57189 - DNA, 25 bp, Homo sapien
aaccgaggactccacagaaacacgg

SEQ ID NO: 57190 - DNA, 25 bp, Homo sapien
aaccgaggactcgacagaaacacgg

SEQ ID NO: 57191 - DNA, 25 bp, Homo sapien
aaaataagttccagtagcactacga

SEQ ID NO: 57192 - DNA, 25 bp, Homo sapien
aaaataagttcctgtagcactacga

SEQ ID NO: 57193 - DNA, 25 bp, Homo sapien
accagaaaagtatccccgagccagc

SEQ ID NO: 57194 - DNA, 25 bp, Homo sapien
accagaaaagtaaccccgagccagc

SEQ ID NO: 57195 - DNA, 25 bp, Homo sapien
atcagaaacatagagttggcactga

SEQ ID NO: 57196 - DNA, 25 bp, Homo sapien
atcagaaacatacagttggcactga

SEQ ID NO: 57197 - DNA, 25 bp, Homo sapien
ttaagaccatactcttggtatggat

SEQ ID NO: 57198 - DNA, 25 bp, Homo sapien
ttaagaccatacacttggtatggat

SEQ ID NO: 57199 - DNA, 25 bp, Homo sapien
catcacgacatttgttcgtgttgaa

SEQ ID NO: 57200 - DNA, 25 bp, Homo sapien
catcacgacattagttcgtgttgaa

SEQ ID NO: 57201 - DNA, 25 bp, Homo sapien
agtggactccgtagtccgtgaaccc

SEQ ID NO: 57202 - DNA, 25 bp, Homo sapien
agtggactccgttgtccgtgaaccc

SEQ ID NO: 57203 - DNA, 25 bp, Homo sapien
agtggtcctgtgtcgttgcactctc

SEQ ID NO: 57204 - DNA, 25 bp, Homo sapien
agtggtcctgtgacgttgcactctc

SEQ ID NO: 57205 - DNA, 25 bp, Homo sapien
tcttgagatcttttagttccaaagt

SEQ ID NO: 57206 - DNA, 25 bp, Homo sapien
tcttgagatcttatagttccaaagt

SEQ ID NO: 57207 - DNA, 25 bp, Homo sapien
taaaaacctaaccttctcgagtaac

SEQ ID NO: 57208 - DNA, 25 bp, Homo sapien
taaaaacctaacgttctcgagtaac

SEQ ID NO: 57209 - DNA, 25 bp, Homo sapien
tgtcttaactgaaaggttccataga

SEQ ID NO: 57210 - DNA, 25 bp, Homo sapien
tgtcttaactgataggttccataga

SEQ ID NO: 57211 - DNA, 25 bp, Homo sapien
gttgtcacttctgaaatcttgataa

SEQ ID NO: 57212 - DNA, 25 bp, Homo sapien
gttgtcacttctcaaatcttgataa

SEQ ID NO: 57213 - DNA, 25 bp, Homo sapien
tcctcgtcgtgcagcaaaaccttcg

SEQ ID NO: 57214 - DNA, 25 bp, Homo sapien
tcctcgtcgtgctgcaaaaccttcg

SEQ ID NO: 57215 - DNA, 25 bp, Homo sapien
atacttgactcctgacaaaagctta

SEQ ID NO: 57216 - DNA, 25 bp, Homo sapien
atacttgactccagacaaaagctta

SEQ ID NO: 57217 - DNA, 25 bp, Homo sapien
ttctgacttcgacttaccgagaaac

SEQ ID NO: 57218 - DNA, 25 bp, Homo sapien
ttctgacttcgagttaccgagaaac

SEQ ID NO: 57219 - DNA, 25 bp, Homo sapien
tgtgtctcgtctcagccgtaagtca

SEQ ID NO: 57220 - DNA, 25 bp, Homo sapien
tgtgtctcgtctgagccgtaagtca

SEQ ID NO: 57221 - DNA, 25 bp, Homo sapien
ttctgtggtgttaagccgacttaga

SEQ ID NO: 57222 - DNA, 25 bp, Homo sapien
ttctgtggtgtttagccgacttaga

SEQ ID NO: 57223 - DNA, 25 bp, Homo sapien
actacgtgaccgtaaacgttatcaa

SEQ ID NO: 57224 - DNA, 25 bp, Homo sapien
actacgtgaccgaaaacgttatcaa

SEQ ID NO: 57225 - DNA, 25 bp, Homo sapien
gtcacatgtcgctatagatttctta

SEQ ID NO: 57226 - DNA, 25 bp, Homo sapien
gtcacatgtcgcaatagatttctta

SEQ ID NO: 57227 - DNA, 25 bp, Homo sapien
tgtgagcctcagtagtctatatttt

SEQ ID NO: 57228 - DNA, 25 bp, Homo sapien
tgtgagcctcagaagtctatatttt

SEQ ID NO: 57229 - DNA, 25 bp, Homo sapien
gaaggtccccgtaaatctattctca

SEQ ID NO: 57230 - DNA, 25 bp, Homo sapien
gaaggtccccgttaatctattctca

SEQ ID NO: 57231 - DNA, 25 bp, Homo sapien
gtgaccaacacttatccctctcggt

SEQ ID NO: 57232 - DNA, 25 bp, Homo sapien
gtgaccaacactaatccctctcggt

SEQ ID NO: 57233 - DNA, 25 bp, Homo sapien
gttgacatagcgaggtttctgctgt

SEQ ID NO: 57234 - DNA, 25 bp, Homo sapien
gttgacatagcgtggtttctgctgt

SEQ ID NO: 57235 - DNA, 25 bp, Homo sapien
attactatagcatggtttccactac

SEQ ID NO: 57236 - DNA, 25 bp, Homo sapien
attactatagcaaggtttccactac

SEQ ID NO: 57237 - DNA, 25 bp, Homo sapien
tcatatacattttggttgtttaccg

SEQ ID NO: 57238 - DNA, 25 bp, Homo sapien
tcatatacatttaggttgtttaccg

SEQ ID NO: 57239 - DNA, 25 bp, Homo sapien
actcccatctttcgtctaaacttac

SEQ ID NO: 57240 - DNA, 25 bp, Homo sapien
actcccatctttggtctaaacttac

SEQ ID NO: 57241 - DNA, 25 bp, Homo sapien
cgtcgtacctcttcaccaaacgtga

SEQ ID NO: 57242 - DNA, 25 bp, Homo sapien
cgtcgtacctctacaccaaacgtga

SEQ ID NO: 57243 - DNA, 25 bp, Homo sapien
gaactctcaccgaacaactgacgac

SEQ ID NO: 57244 - DNA, 25 bp, Homo sapien
gaactctcaccgtacaactgacgac

SEQ ID NO: 57245 - DNA, 25 bp, Homo sapien
gggttttgtccctcaatactcgact

SEQ ID NO: 57246 - DNA, 25 bp, Homo sapien
gggttttgtcccacaatactcgact

SEQ ID NO: 57247 - DNA, 25 bp, Homo sapien
cgtgtgacgtcaccaaaaggacgtc

SEQ ID NO: 57248 - DNA, 25 bp, Homo sapien
cgtgtgacgtcagcaaaaggacgtc

SEQ ID NO: 57249 - DNA, 25 bp, Homo sapien
ccgagacgtcctacgatttagacct

SEQ ID NO: 57250 - DNA, 25 bp, Homo sapien
ccgagacgtccttcgatttagacct

SEQ ID NO: 57251 - DNA, 25 bp, Homo sapien
attcaggtgctcagaggtccgacgg

SEQ ID NO: 57252 - DNA, 25 bp, Homo sapien
attcaggtgctctgaggtccgacgg

SEQ ID NO: 57253 - DNA, 25 bp, Homo sapien
acaactgggctatcgttgtcggagg

SEQ ID NO: 57254 - DNA, 25 bp, Homo sapien
acaactgggctaacgttgtcggagg

SEQ ID NO: 57255 - DNA, 25 bp, Homo sapien
taccaactcgttgtcagagggaaac

SEQ ID NO: 57256 - DNA, 25 bp, Homo sapien
taccaactcgttctcagagggaaac

SEQ ID NO: 57257 - DNA, 25 bp, Homo sapien
gacttacttccttagttcaggatct

SEQ ID NO: 57258 - DNA, 25 bp, Homo sapien
gacttacttcctaagttcaggatct

SEQ ID NO: 57259 - DNA, 25 bp, Homo sapien
caaatgtcggtaatctactatttgt

SEQ ID NO: 57260 - DNA, 25 bp, Homo sapien
caaatgtcggtattctactatttgt

SEQ ID NO: 57261 - DNA, 25 bp, Homo sapien
aaaatgtcgagtgtatgtcgtcctt

SEQ ID NO: 57262 - DNA, 25 bp, Homo sapien
aaaatgtcgagtctatgtcgtcctt

SEQ ID NO: 57263 - DNA, 25 bp, Homo sapien
aaatagccttaggtcctgtgttgtt

SEQ ID NO: 57264 - DNA, 25 bp, Homo sapien
aaatagccttagctcctgtgttgtt

SEQ ID NO: 57265 - DNA, 25 bp, Homo sapien
aaaagtcggaaataactctcatgtc

SEQ ID NO: 57266 - DNA, 25 bp, Homo sapien
aaaagtcggaaaaaactctcatgtc

SEQ ID NO: 57267 - DNA, 25 bp, Homo sapien
caaaccacagacaggagttcctgtc

SEQ ID NO: 57268 - DNA, 25 bp, Homo sapien
caaaccacagactggagttcctgtc

SEQ ID NO: 57269 - DNA, 25 bp, Homo sapien
tccctaccagagaggattcactgac

SEQ ID NO: 57270 - DNA, 25 bp, Homo sapien
tccctaccagagtggattcactgac

SEQ ID NO: 57271 - DNA, 25 bp, Homo sapien
gccttccggccgtagcgtcttcgag

SEQ ID NO: 57272 - DNA, 25 bp, Homo sapien
gccttccggccgaagcgtcttcgag

SEQ ID NO: 57273 - DNA, 25 bp, Homo sapien
tcgacctttcctccagaaccttagg

SEQ ID NO: 57274 - DNA, 25 bp, Homo sapien
tcgacctttcctgcagaaccttagg

SEQ ID NO: 57275 - DNA, 25 bp, Homo sapien
cgactggttgtttcatgcaattatt

SEQ ID NO: 57276 - DNA, 25 bp, Homo sapien
cgactggttgttacatgcaattatt

SEQ ID NO: 57277 - DNA, 25 bp, Homo sapien
tcccaggtcagatctagaagtgcaa

SEQ ID NO: 57278 - DNA, 25 bp, Homo sapien
tcccaggtcagaactagaagtgcaa

SEQ ID NO: 57279 - DNA, 25 bp, Homo sapien
ttattgttcgtaaagagagcctcaa

SEQ ID NO: 57280 - DNA, 25 bp, Homo sapien
ttattgttcgtatagagagcctcaa

SEQ ID NO: 57281 - DNA, 25 bp, Homo sapien
gttttgtcgattaaaacagtcttca

SEQ ID NO: 57282 - DNA, 25 bp, Homo sapien
gttttgtcgatttaaacagtcttca

SEQ ID NO: 57283 - DNA, 25 bp, Homo sapien
ctcgatgtttggactttaggcgaaa

SEQ ID NO: 57284 - DNA, 25 bp, Homo sapien
ctcgatgtttggtctttaggcgaaa

SEQ ID NO: 57285 - DNA, 25 bp, Homo sapien
attgctggtcacagtcatgcgcaac

SEQ ID NO: 57286 - DNA, 25 bp, Homo sapien
attgctggtcactgtcatgcgcaac

SEQ ID NO: 57287 - DNA, 25 bp, Homo sapien
cattttgtacacgacgttggtaaat

SEQ ID NO: 57288 - DNA, 25 bp, Homo sapien
cattttgtacaccacgttggtaaat

SEQ ID NO: 57289 - DNA, 25 bp, Homo sapien
tgttacgtgtgaaccgggtgtgaac

SEQ ID NO: 57290 - DNA, 25 bp, Homo sapien
tgttacgtgtgatccgggtgtgaac

SEQ ID NO: 57291 - DNA, 25 bp, Homo sapien
aagatgttcggtctccacaagggac

SEQ ID NO: 57292 - DNA, 25 bp, Homo sapien
aagatgttcggtgtccacaagggac

SEQ ID NO: 57293 - DNA, 25 bp, Homo sapien
gtacgcttgtctcgacccgaggtga

SEQ ID NO: 57294 - DNA, 25 bp, Homo sapien
gtacgcttgtctggacccgaggtga

SEQ ID NO: 57295 - DNA, 25 bp, Homo sapien
gactttacgttccaccctgaggact

SEQ ID NO: 57296 - DNA, 25 bp, Homo sapien
gactttacgttcgaccctgaggact

SEQ ID NO: 57297 - DNA, 25 bp, Homo sapien
cggtcggtggttctacaatggttat

SEQ ID NO: 57298 - DNA, 25 bp, Homo sapien
cggtcggtggttgtacaatggttat

SEQ ID NO: 57299 - DNA, 25 bp, Homo sapien
actctgtgttttactaagaacgatt

SEQ ID NO: 57300 - DNA, 25 bp, Homo sapien
actctgtgtttttctaagaacgatt

SEQ ID NO: 57301 - DNA, 25 bp, Homo sapien
ccaggtcacttttaagtcgtattat

SEQ ID NO: 57302 - DNA, 25 bp, Homo sapien
ccaggtcactttaaagtcgtattat

SEQ ID NO: 57303 - DNA, 25 bp, Homo sapien
ggaagacgttatattcaattctgac

SEQ ID NO: 57304 - DNA, 25 bp, Homo sapien
ggaagacgttattttcaattctgac

SEQ ID NO: 57305 - DNA, 25 bp, Homo sapien
gaagagttagacaccgtcctgccac

SEQ ID NO: 57306 - DNA, 25 bp, Homo sapien
gaagagttagactccgtcctgccac

SEQ ID NO: 57307 - DNA, 25 bp, Homo sapien
gaaggttttataacgccatgatcat

SEQ ID NO: 57308 - DNA, 25 bp, Homo sapien
gaaggttttatatcgccatgatcat

SEQ ID NO: 57309 - DNA, 25 bp, Homo sapien
ggaggtctgtctactcccatttcct

SEQ ID NO: 57310 - DNA, 25 bp, Homo sapien
ggaggtctgtcttctcccatttcct

SEQ ID NO: 57311 - DNA, 25 bp, Homo sapien
agggtgttacattacccacacttct

SEQ ID NO: 57312 - DNA, 25 bp, Homo sapien
agggtgttacataacccacacttct

SEQ ID NO: 57313 - DNA, 25 bp, Homo sapien
ataagtgttaagttatcgttcaccc

SEQ ID NO: 57314 - DNA, 25 bp, Homo sapien
ataagtgttaagatatcgttcaccc

SEQ ID NO: 57315 - DNA, 25 bp, Homo sapien
caagggcacccgacgttactcgtga

SEQ ID NO: 57316 - DNA, 25 bp, Homo sapien
caagggcacccgtcgttactcgtga

SEQ ID NO: 57317 - DNA, 25 bp, Homo sapien
agtagttgaccgacgatcttaaggc

SEQ ID NO: 57318 - DNA, 25 bp, Homo sapien
agtagttgaccgtcgatcttaaggc

SEQ ID NO: 57319 - DNA, 25 bp, Homo sapien
gcgaatttaggtgctgtttttccgg

SEQ ID NO: 57320 - DNA, 25 bp, Homo sapien
gcgaatttaggtcctgtttttccgg

SEQ ID NO: 57321 - DNA, 25 bp, Homo sapien
gctcttctcctctatgttctgggag

SEQ ID NO: 57322 - DNA, 25 bp, Homo sapien
gctcttctcctcaatgttctgggag

SEQ ID NO: 57323 - DNA, 25 bp, Homo sapien
tacgggtcgttctatttcaggtggt

SEQ ID NO: 57324 - DNA, 25 bp, Homo sapien
tacgggtcgttcaatttcaggtggt

SEQ ID NO: 57325 - DNA, 25 bp, Homo sapien
aacaggcgctaagagtgcgaattct

SEQ ID NO: 57326 - DNA, 25 bp, Homo sapien
aacaggcgctaacagtgcgaattct

SEQ ID NO: 57327 - DNA, 25 bp, Homo sapien
cttaagacgtagatgatccgggtaa

SEQ ID NO: 57328 - DNA, 25 bp, Homo sapien
cttaagacgtagttgatccgggtaa

SEQ ID NO: 57329 - DNA, 25 bp, Homo sapien
acccagtaatcttcggggaagttag

SEQ ID NO: 57330 - DNA, 25 bp, Homo sapien
acccagtaatctacggggaagttag

SEQ ID NO: 57331 - DNA, 25 bp, Homo sapien
atagagagttcatctgggaaacttc

SEQ ID NO: 57332 - DNA, 25 bp, Homo sapien
atagagagttcaactgggaaacttc

SEQ ID NO: 57333 - DNA, 25 bp, Homo sapien
tcgctagtattgtcagaaatacatc

SEQ ID NO: 57334 - DNA, 25 bp, Homo sapien
tcgctagtattgacagaaatacatc

SEQ ID NO: 57335 - DNA, 25 bp, Homo sapien
gaaaagtgtcggtcagaaggtctcc

SEQ ID NO: 57336 - DNA, 25 bp, Homo sapien
gaaaagtgtcggacagaaggtctcc

SEQ ID NO: 57337 - DNA, 25 bp, Homo sapien
atcgggttcggtccagagggacttc

SEQ ID NO: 57338 - DNA, 25 bp, Homo sapien
atcgggttcggtgcagagggacttc

SEQ ID NO: 57339 - DNA, 25 bp, Homo sapien
cgggagacatcagaggaggtctcaa

SEQ ID NO: 57340 - DNA, 25 bp, Homo sapien
cgggagacatcacaggaggtctcaa

SEQ ID NO: 57341 - DNA, 25 bp, Homo sapien
catactatcccgatgttgttgtaat

SEQ ID NO: 57342 - DNA, 25 bp, Homo sapien
catactatcccgttgttgttgtaat

SEQ ID NO: 57343 - DNA, 25 bp, Homo sapien
actcgtcacctctttgtgttgaagt

SEQ ID NO: 57344 - DNA, 25 bp, Homo sapien
actcgtcacctcattgtgttgaagt

SEQ ID NO: 57345 - DNA, 25 bp, Homo sapien
catgcgcccgttatggtagtggtta

SEQ ID NO: 57346 - DNA, 25 bp, Homo sapien
catgcgcccgttttggtagtggtta

SEQ ID NO: 57347 - DNA, 25 bp, Homo sapien
tctaccgtccctgtttgattccgac

SEQ ID NO: 57348 - DNA, 25 bp, Homo sapien
tctaccgtccctctttgattccgac

SEQ ID NO: 57349 - DNA, 25 bp, Homo sapien
taagttcgtaagtctcttttcggtg

SEQ ID NO: 57350 - DNA, 25 bp, Homo sapien
taagttcgtaagactcttttcggtg

SEQ ID NO: 57351 - DNA, 25 bp, Homo sapien
ttggaccaggcaccacacctgagag

SEQ ID NO: 57352 - DNA, 25 bp, Homo sapien
ttggaccaggcagcacacctgagag

SEQ ID NO: 57353 - DNA, 25 bp, Homo sapien
ctgagccggtagaccctcttgttac

SEQ ID NO: 57354 - DNA, 25 bp, Homo sapien
ctgagccggtagtccctcttgttac

SEQ ID NO: 57355 - DNA, 25 bp, Homo sapien
atcatccctgacctcgcagatgttc

SEQ ID NO: 57356 - DNA, 25 bp, Homo sapien
atcatccctgacgtcgcagatgttc

SEQ ID NO: 57357 - DNA, 25 bp, Homo sapien
cagagacccactggaaccacaggca

SEQ ID NO: 57358 - DNA, 25 bp, Homo sapien
cagagacccactcgaaccacaggca

SEQ ID NO: 57359 - DNA, 25 bp, Homo sapien
ctgagtcccagtacaaccctcgggg

SEQ ID NO: 57360 - DNA, 25 bp, Homo sapien
ctgagtcccagttcaaccctcgggg

SEQ ID NO: 57361 - DNA, 25 bp, Homo sapien
gcaggcgtctcagcgacccggttgt

SEQ ID NO: 57362 - DNA, 25 bp, Homo sapien
gcaggcgtctcaccgacccggttgt

SEQ ID NO: 57363 - DNA, 25 bp, Homo sapien
aagaagacgtcgaccgccttttcgt

SEQ ID NO: 57364 - DNA, 25 bp, Homo sapien
aagaagacgtcgtccgccttttcgt

SEQ ID NO: 57365 - DNA, 25 bp, Homo sapien
tcaaggagaccgtgtacccttcatg

SEQ ID NO: 57366 - DNA, 25 bp, Homo sapien
tcaaggagaccgagtacccttcatg

SEQ ID NO: 57367 - DNA, 25 bp, Homo sapien
agaggacgaacagtctccactcagg

SEQ ID NO: 57368 - DNA, 25 bp, Homo sapien
agaggacgaacactctccactcagg

SEQ ID NO: 57369 - DNA, 25 bp, Homo sapien
aggataccgacctgttccatagatg

SEQ ID NO: 57370 - DNA, 25 bp, Homo sapien
aggataccgaccagttccatagatg

SEQ ID NO: 57371 - DNA, 25 bp, Homo sapien
gttcagaaccgttcaatgaacaaat

SEQ ID NO: 57372 - DNA, 25 bp, Homo sapien
gttcagaaccgtacaatgaacaaat

SEQ ID NO: 57373 - DNA, 25 bp, Homo sapien
tcaataccaaaaagtacgacatatt

SEQ ID NO: 57374 - DNA, 25 bp, Homo sapien
tcaataccaaaatgtacgacatatt

SEQ ID NO: 57375 - DNA, 25 bp, Homo sapien
tcgtacatccatcgatgtgacatta

SEQ ID NO: 57376 - DNA, 25 bp, Homo sapien
tcgtacatccatggatgtgacatta

SEQ ID NO: 57377 - DNA, 25 bp, Homo sapien
tttccatacagaaggttgtttccat

SEQ ID NO: 57378 - DNA, 25 bp, Homo sapien
tttccatacagatggttgtttccat

SEQ ID NO: 57379 - DNA, 25 bp, Homo sapien
acgtcaaaagagtttattgtcccac

SEQ ID NO: 57380 - DNA, 25 bp, Homo sapien
acgtcaaaagagattattgtcccac

SEQ ID NO: 57381 - DNA, 25 bp, Homo sapien
cacgttaaaagatatctttcggctc

SEQ ID NO: 57382 - DNA, 25 bp, Homo sapien
cacgttaaaagaaatctttcggctc

SEQ ID NO: 57383 - DNA, 25 bp, Homo sapien
gtcttaaacgatcttacttcggttc

SEQ ID NO: 57384 - DNA, 25 bp, Homo sapien
gtcttaaacgatgttacttcggttc

SEQ ID NO: 57385 - DNA, 25 bp, Homo sapien
acttatcaaggtttagttcactgtg

SEQ ID NO: 57386 - DNA, 25 bp, Homo sapien
acttatcaaggtatagttcactgtg

SEQ ID NO: 57387 - DNA, 25 bp, Homo sapien
atttacaagtgtcatgtatcctctt

SEQ ID NO: 57388 - DNA, 25 bp, Homo sapien
atttacaagtgtgatgtatcctctt

SEQ ID NO: 57389 - DNA, 25 bp, Homo sapien
taaaaatttgattatcttaagtcta

SEQ ID NO: 57390 - DNA, 25 bp, Homo sapien
taaaaatttgataatcttaagtcta

SEQ ID NO: 57391 - DNA, 25 bp, Homo sapien
aaaacaattcgaaggtcttcataag

SEQ ID NO: 57392 - DNA, 25 bp, Homo sapien
aaaacaattcgatggtcttcataag

SEQ ID NO: 57393 - DNA, 25 bp, Homo sapien
tacatttgtctcagtctatgtaaag

SEQ ID NO: 57394 - DNA, 25 bp, Homo sapien
tacatttgtctctgtctatgtaaag

SEQ ID NO: 57395 - DNA, 25 bp, Homo sapien
cgatcttcacgtcagtatttcctcg

SEQ ID NO: 57396 - DNA, 25 bp, Homo sapien
cgatcttcacgtgagtatttcctcg

SEQ ID NO: 57397 - DNA, 25 bp, Homo sapien
cgcttcggaggctagtcgtctcgtc

SEQ ID NO: 57398 - DNA, 25 bp, Homo sapien
cgcttcggaggcaagtcgtctcgtc

SEQ ID NO: 57399 - DNA, 25 bp, Homo sapien
gcgacagtggacgtgccacaccgac

SEQ ID NO: 57400 - DNA, 25 bp, Homo sapien
gcgacagtggacctgccacaccgac

SEQ ID NO: 57401 - DNA, 25 bp, Homo sapien
gcgagtttgtgaaactctagaccct

SEQ ID NO: 57402 - DNA, 25 bp, Homo sapien
gcgagtttgtgatactctagaccct

SEQ ID NO: 57403 - DNA, 25 bp, Homo sapien
gtttactcgtgacgtcccggacact

SEQ ID NO: 57404 - DNA, 25 bp, Homo sapien
gtttactcgtgaggtcccggacact

SEQ ID NO: 57405 - DNA, 25 bp, Homo sapien
tctttgtttagttatccgcgcgctc

SEQ ID NO: 57406 - DNA, 25 bp, Homo sapien
tctttgtttagtaatccgcgcgctc

SEQ ID NO: 57407 - DNA, 25 bp, Homo sapien
tgttttcgtgataggtgtcggtccc

SEQ ID NO: 57408 - DNA, 25 bp, Homo sapien
tgttttcgtgattggtgtcggtccc

SEQ ID NO: 57409 - DNA, 25 bp, Homo sapien
gttttcgtcgggacggtctcctacc

SEQ ID NO: 57410 - DNA, 25 bp, Homo sapien
gttttcgtcgggtcggtctcctacc

SEQ ID NO: 57411 - DNA, 25 bp, Homo sapien
ttttcggtgttcaccacgtttacaa

SEQ ID NO: 57412 - DNA, 25 bp, Homo sapien
ttttcggtgttctccacgtttacaa

SEQ ID NO: 57413 - DNA, 25 bp, Homo sapien
aaggacgttcttctaactgaagtag

SEQ ID NO: 57414 - DNA, 25 bp, Homo sapien
aaggacgttcttgtaactgaagtag

SEQ ID NO: 57415 - DNA, 25 bp, Homo sapien
agaaaggttttctaaactgatcgtc

SEQ ID NO: 57416 - DNA, 25 bp, Homo sapien
agaaaggttttcaaaactgatcgtc

SEQ ID NO: 57417 - DNA, 25 bp, Homo sapien
ggtaaaggatttacacatactccca

SEQ ID NO: 57418 - DNA, 25 bp, Homo sapien
ggtaaaggattttcacatactccca

SEQ ID NO: 57419 - DNA, 25 bp, Homo sapien
gggaacgaattttcccttcgcgggt

SEQ ID NO: 57420 - DNA, 25 bp, Homo sapien
gggaacgaatttacccttcgcgggt

SEQ ID NO: 57421 - DNA, 25 bp, Homo sapien
aaaacgaaagaacccacatgtcaga

SEQ ID NO: 57422 - DNA, 25 bp, Homo sapien
aaaacgaaagaagccacatgtcaga

SEQ ID NO: 57423 - DNA, 25 bp, Homo sapien
ctccgacaaaaggccgaagtccagt

SEQ ID NO: 57424 - DNA, 25 bp, Homo sapien
ctccgacaaaagcccgaagtccagt

SEQ ID NO: 57425 - DNA, 25 bp, Homo sapien
tccggacgaagtatcttgaactcca

SEQ ID NO: 57426 - DNA, 25 bp, Homo sapien
tccggacgaagtttcttgaactcca

SEQ ID NO: 57427 - DNA, 25 bp, Homo sapien
actgctgttattttgttagattcca

SEQ ID NO: 57428 - DNA, 25 bp, Homo sapien
actgctgttattatgttagattcca

SEQ ID NO: 57429 - DNA, 25 bp, Homo sapien
ttgttcttgaagaacacagtcccat

SEQ ID NO: 57430 - DNA, 25 bp, Homo sapien
ttgttcttgaagtacacagtcccat

SEQ ID NO: 57431 - DNA, 25 bp, Homo sapien
aaagtctttgggtatacgtaaccca

SEQ ID NO: 57432 - DNA, 25 bp, Homo sapien
aaagtctttgggaatacgtaaccca

SEQ ID NO: 57433 - DNA, 25 bp, Homo sapien
actatattgggtagtgtcgacctaa

SEQ ID NO: 57434 - DNA, 25 bp, Homo sapien
actatattgggttgtgtcgacctaa

SEQ ID NO: 57435 - DNA, 25 bp, Homo sapien
gctgagtatttcattagtagaccaa

SEQ ID NO: 57436 - DNA, 25 bp, Homo sapien
gctgagtatttctttagtagaccaa

SEQ ID NO: 57437 - DNA, 25 bp, Homo sapien
gtagattggttaaacctaagaccaa

SEQ ID NO: 57438 - DNA, 25 bp, Homo sapien
gtagattggttatacctaagaccaa

SEQ ID NO: 57439 - DNA, 25 bp, Homo sapien
aagacttgggaaaccttctctgaac

SEQ ID NO: 57440 - DNA, 25 bp, Homo sapien
aagacttgggaatccttctctgaac

SEQ ID NO: 57441 - DNA, 25 bp, Homo sapien
accactacgcctctcttctggtaac

SEQ ID NO: 57442 - DNA, 25 bp, Homo sapien
accactacgcctgtcttctggtaac

SEQ ID NO: 57443 - DNA, 25 bp, Homo sapien
taccataggacttcgtggacgggaa

SEQ ID NO: 57444 - DNA, 25 bp, Homo sapien
taccataggactacgtggacgggaa

SEQ ID NO: 57445 - DNA, 25 bp, Homo sapien
gttacctggtgtccaccaatatttt

SEQ ID NO: 57446 - DNA, 25 bp, Homo sapien
gttacctggtgtgcaccaatatttt

SEQ ID NO: 57447 - DNA, 25 bp, Homo sapien
tccgtgatgccgtacaagtatttgt

SEQ ID NO: 57448 - DNA, 25 bp, Homo sapien
tccgtgatgccgaacaagtatttgt

SEQ ID NO: 57449 - DNA, 25 bp, Homo sapien
gaaacctttattcgaacagacattg

SEQ ID NO: 57450 - DNA, 25 bp, Homo sapien
gaaacctttattggaacagacattg

SEQ ID NO: 57451 - DNA, 25 bp, Homo sapien
ggatcttttacctgccacgtgtttc

SEQ ID NO: 57452 - DNA, 25 bp, Homo sapien
ggatcttttaccagccacgtgtttc

SEQ ID NO: 57453 - DNA, 25 bp, Homo sapien
gagttgtctaccacttaggtctcct

SEQ ID NO: 57454 - DNA, 25 bp, Homo sapien
gagttgtctacctcttaggtctcct

SEQ ID NO: 57455 - DNA, 25 bp, Homo sapien
ctagatgtgactgtttattctacct

SEQ ID NO: 57456 - DNA, 25 bp, Homo sapien
ctagatgtgactctttattctacct

SEQ ID NO: 57457 - DNA, 25 bp, Homo sapien
aacgttctgatctttagtgttaatc

SEQ ID NO: 57458 - DNA, 25 bp, Homo sapien
aacgttctgatcattagtgttaatc

SEQ ID NO: 57459 - DNA, 25 bp, Homo sapien
ccggcacgcggacgatgtgtgttcc

SEQ ID NO: 57460 - DNA, 25 bp, Homo sapien
ccggcacgcggaggatgtgtgttcc

SEQ ID NO: 57461 - DNA, 25 bp, Homo sapien
cgccgcgagtggagtcgtcccgtcc

SEQ ID NO: 57462 - DNA, 25 bp, Homo sapien
cgccgcgagtggtgtcgtcccgtcc

SEQ ID NO: 57463 - DNA, 25 bp, Homo sapien
cggtcggactggtccgtgcacaccg

SEQ ID NO: 57464 - DNA, 25 bp, Homo sapien
cggtcggactggaccgtgcacaccg

SEQ ID NO: 57465 - DNA, 25 bp, Homo sapien
tgcgtatacactggtcagaccccca

SEQ ID NO: 57466 - DNA, 25 bp, Homo sapien
tgcgtatacactcgtcagaccccca

SEQ ID NO: 57467 - DNA, 25 bp, Homo sapien
gtgacatcgtccacgacccctgagt

SEQ ID NO: 57468 - DNA, 25 bp, Homo sapien
gtgacatcgtcctcgacccctgagt

SEQ ID NO: 57469 - DNA, 25 bp, Homo sapien
gtcacggtcgaccatcaccagatgg

SEQ ID NO: 57470 - DNA, 25 bp, Homo sapien
gtcacggtcgacgatcaccagatgg

SEQ ID NO: 57471 - DNA, 25 bp, Homo sapien
ggtctccgtgacgacccgggtaatg

SEQ ID NO: 57472 - DNA, 25 bp, Homo sapien
ggtctccgtgaccacccgggtaatg

SEQ ID NO: 57473 - DNA, 25 bp, Homo sapien
tctctttacgatctctacaggaatg

SEQ ID NO: 57474 - DNA, 25 bp, Homo sapien
tctctttacgatgtctacaggaatg

SEQ ID NO: 57475 - DNA, 25 bp, Homo sapien
tcactgttgacgaatcagggtgacc

SEQ ID NO: 57476 - DNA, 25 bp, Homo sapien
tcactgttgacgtatcagggtgacc

SEQ ID NO: 57477 - DNA, 25 bp, Homo sapien
cttcagtcggaacgtcgctcgggcc

SEQ ID NO: 57478 - DNA, 25 bp, Homo sapien
cttcagtcggaaggtcgctcgggcc

SEQ ID NO: 57479 - DNA, 25 bp, Homo sapien
tctcgaagtcgacactcgagagaga

SEQ ID NO: 57480 - DNA, 25 bp, Homo sapien
tctcgaagtcgagactcgagagaga

SEQ ID NO: 57481 - DNA, 25 bp, Homo sapien
tgtcgatacctgactacgtagggta

SEQ ID NO: 57482 - DNA, 25 bp, Homo sapien
tgtcgatacctgtctacgtagggta

SEQ ID NO: 57483 - DNA, 25 bp, Homo sapien
tctatgactctctggcaccgaggtc

SEQ ID NO: 57484 - DNA, 25 bp, Homo sapien
tctatgactctcaggcaccgaggtc

SEQ ID NO: 57485 - DNA, 25 bp, Homo sapien
aacataagtcgtcaggacccagtcc

SEQ ID NO: 57486 - DNA, 25 bp, Homo sapien
aacataagtcgtgaggacccagtcc

SEQ ID NO: 57487 - DNA, 25 bp, Homo sapien
caaagagttaatacagtctatgtct

SEQ ID NO: 57488 - DNA, 25 bp, Homo sapien
caaagagttaattcagtctatgtct

SEQ ID NO: 57489 - DNA, 25 bp, Homo sapien
accgtaaaagctcttcttgggtagt

SEQ ID NO: 57490 - DNA, 25 bp, Homo sapien
accgtaaaagctgttcttgggtagt

SEQ ID NO: 57491 - DNA, 25 bp, Homo sapien
ctcaccaacatgttcgggacacggt

SEQ ID NO: 57492 - DNA, 25 bp, Homo sapien
ctcaccaacatgatcgggacacggt

SEQ ID NO: 57493 - DNA, 25 bp, Homo sapien
gagactactccctcgggaaagactt

SEQ ID NO: 57494 - DNA, 25 bp, Homo sapien
gagactactcccacgggaaagactt

SEQ ID NO: 57495 - DNA, 25 bp, Homo sapien
gcctagtaattcctggaagagtctt

SEQ ID NO: 57496 - DNA, 25 bp, Homo sapien
gcctagtaattcgtggaagagtctt

SEQ ID NO: 57497 - DNA, 25 bp, Homo sapien
ggccaagaaaattaggaccggttct

SEQ ID NO: 57498 - DNA, 25 bp, Homo sapien
ggccaagaaaataaggaccggttct

SEQ ID NO: 57499 - DNA, 25 bp, Homo sapien
acgagataccccaggaccggctacg

SEQ ID NO: 57500 - DNA, 25 bp, Homo sapien
acgagatacccctggaccggctacg

SEQ ID NO: 57501 - DNA, 25 bp, Homo sapien
taagacggtcctcctttcacgcgga

SEQ ID NO: 57502 - DNA, 25 bp, Homo sapien
taagacggtcctgctttcacgcgga

SEQ ID NO: 57503 - DNA, 25 bp, Homo sapien
caaccacgagggacttctgcatgta

SEQ ID NO: 57504 - DNA, 25 bp, Homo sapien
caaccacgagggtcttctgcatgta

SEQ ID NO: 57505 - DNA, 25 bp, Homo sapien
gtacgccacgggagccctgtctgga

SEQ ID NO: 57506 - DNA, 25 bp, Homo sapien
gtacgccacgggtgccctgtctgga

SEQ ID NO: 57507 - DNA, 25 bp, Homo sapien
tctgcccctgtttcaccctcgaggg

SEQ ID NO: 57508 - DNA, 25 bp, Homo sapien
tctgcccctgttacaccctcgaggg

SEQ ID NO: 57509 - DNA, 25 bp, Homo sapien
tcgaggtttcacgaaccaccgaggg

SEQ ID NO: 57510 - DNA, 25 bp, Homo sapien
tcgaggtttcaccaaccaccgaggg

SEQ ID NO: 57511 - DNA, 25 bp, Homo sapien
tacactcctacacaaacacagggga

SEQ ID NO: 57512 - DNA, 25 bp, Homo sapien
tacactcctacagaaacacagggga

SEQ ID NO: 57513 - DNA, 25 bp, Homo sapien
gacacaagtaggatggaccggctga

SEQ ID NO: 57514 - DNA, 25 bp, Homo sapien
gacacaagtaggttggaccggctga

SEQ ID NO: 57515 - DNA, 25 bp, Homo sapien
atattaggtgtcaataccgtgaagc

SEQ ID NO: 57516 - DNA, 25 bp, Homo sapien
atattaggtgtctataccgtgaagc

SEQ ID NO: 57517 - DNA, 25 bp, Homo sapien
tcgagtcgtcttactgtagcgaggt

SEQ ID NO: 57518 - DNA, 25 bp, Homo sapien
tcgagtcgtctttctgtagcgaggt

SEQ ID NO: 57519 - DNA, 25 bp, Homo sapien
tccatgtgtgtctctcgtgcgtggg

SEQ ID NO: 57520 - DNA, 25 bp, Homo sapien
tccatgtgtgtcactcgtgcgtggg

SEQ ID NO: 57521 - DNA, 25 bp, Homo sapien
ttcttttggactaaactcgttagat

SEQ ID NO: 57522 - DNA, 25 bp, Homo sapien
ttcttttggacttaactcgttagat

SEQ ID NO: 57523 - DNA, 25 bp, Homo sapien
tgtcgtagttggaatccgagttgag

SEQ ID NO: 57524 - DNA, 25 bp, Homo sapien
tgtcgtagttggtatccgagttgag

SEQ ID NO: 57525 - DNA, 25 bp, Homo sapien
tggagggtctcttacaggtaaacgt

SEQ ID NO: 57526 - DNA, 25 bp, Homo sapien
tggagggtctctaacaggtaaacgt

SEQ ID NO: 57527 - DNA, 25 bp, Homo sapien
agtcgtgtctctgacgacggaatac

SEQ ID NO: 57528 - DNA, 25 bp, Homo sapien
agtcgtgtctctcacgacggaatac

SEQ ID NO: 57529 - DNA, 25 bp, Homo sapien
cgttagattgtcttaccgttgtaaa

SEQ ID NO: 57530 - DNA, 25 bp, Homo sapien
cgttagattgtcataccgttgtaaa

SEQ ID NO: 57531 - DNA, 25 bp, Homo sapien
agtctagaattctcccgtcgtcttg

SEQ ID NO: 57532 - DNA, 25 bp, Homo sapien
agtctagaattcacccgtcgtcttg

SEQ ID NO: 57533 - DNA, 25 bp, Homo sapien
acgctcaagaagaagctgtccgtgg

SEQ ID NO: 57534 - DNA, 25 bp, Homo sapien
acgctcaagaagtagctgtccgtgg

SEQ ID NO: 57535 - DNA, 25 bp, Homo sapien
cgtcagtggcaccactgtccgtggt

SEQ ID NO: 57536 - DNA, 25 bp, Homo sapien
cgtcagtggcacgactgtccgtggt

SEQ ID NO: 57537 - DNA, 25 bp, Homo sapien
gcaggtagacaggtctcgcgattcg

SEQ ID NO: 57538 - DNA, 25 bp, Homo sapien
gcaggtagacagctctcgcgattcg

SEQ ID NO: 57539 - DNA, 25 bp, Homo sapien
caaaacagagaattaactcggactc

SEQ ID NO: 57540 - DNA, 25 bp, Homo sapien
caaaacagagaaataactcggactc

SEQ ID NO: 57541 - DNA, 25 bp, Homo sapien
gaaagtcgcttgcgtaccgtgactc

SEQ ID NO: 57542 - DNA, 25 bp, Homo sapien
gaaagtcgcttgggtaccgtgactc

SEQ ID NO: 57543 - DNA, 25 bp, Homo sapien
ccaaactactacgcgagtcacggta

SEQ ID NO: 57544 - DNA, 25 bp, Homo sapien
ccaaactactacccgagtcacggta

SEQ ID NO: 57545 - DNA, 25 bp, Homo sapien
ttctgtcgtcctttcgaactcccgg

SEQ ID NO: 57546 - DNA, 25 bp, Homo sapien
ttctgtcgtcctatcgaactcccgg

SEQ ID NO: 57547 - DNA, 25 bp, Homo sapien
gtcctgtccgtttcgtcccacggtg

SEQ ID NO: 57548 - DNA, 25 bp, Homo sapien
gtcctgtccgttacgtcccacggtg

SEQ ID NO: 57549 - DNA, 25 bp, Homo sapien
agccgtactgttactcctccggtac

SEQ ID NO: 57550 - DNA, 25 bp, Homo sapien
agccgtactgtttctcctccggtac

SEQ ID NO: 57551 - DNA, 25 bp, Homo sapien
gtccgtctcgaggtctcctccgatg

SEQ ID NO: 57552 - DNA, 25 bp, Homo sapien
gtccgtctcgagctctcctccgatg

SEQ ID NO: 57553 - DNA, 25 bp, Homo sapien
aggtcgctccggactcccgaagagt

SEQ ID NO: 57554 - DNA, 25 bp, Homo sapien
aggtcgctccggtctcccgaagagt

SEQ ID NO: 57555 - DNA, 25 bp, Homo sapien
ctctacctttgttacacctcagagg

SEQ ID NO: 57556 - DNA, 25 bp, Homo sapien
ctctacctttgtaacacctcagagg

SEQ ID NO: 57557 - DNA, 25 bp, Homo sapien
ccctagatactctttccgtccttgg

SEQ ID NO: 57558 - DNA, 25 bp, Homo sapien
ccctagatactcattccgtccttgg

SEQ ID NO: 57559 - DNA, 25 bp, Homo sapien
cactaccagacctctaacatcgtgg

SEQ ID NO: 57560 - DNA, 25 bp, Homo sapien
cactaccagaccactaacatcgtgg

SEQ ID NO: 57561 - DNA, 25 bp, Homo sapien
aggtcaaaaccgttcctcgtccttt

SEQ ID NO: 57562 - DNA, 25 bp, Homo sapien
aggtcaaaaccgatcctcgtccttt

SEQ ID NO: 57563 - DNA, 25 bp, Homo sapien
gaaactaaagaccactgtttcgtct

SEQ ID NO: 57564 - DNA, 25 bp, Homo sapien
gaaactaaagacgactgtttcgtct

SEQ ID NO: 57565 - DNA, 25 bp, Homo sapien
tgtaagactcaaacccggttttact

SEQ ID NO: 57566 - DNA, 25 bp, Homo sapien
tgtaagactcaatcccggttttact

SEQ ID NO: 57567 - DNA, 25 bp, Homo sapien
tggatgtactttcacacggttttat

SEQ ID NO: 57568 - DNA, 25 bp, Homo sapien
tggatgtactttgacacggttttat

SEQ ID NO: 57569 - DNA, 25 bp, Homo sapien
agaagtcgtcttatacagttacttg

SEQ ID NO: 57570 - DNA, 25 bp, Homo sapien
agaagtcgtcttttacagttacttg

SEQ ID NO: 57571 - DNA, 25 bp, Homo sapien
agacatagtccgtttcagtatcttg

SEQ ID NO: 57572 - DNA, 25 bp, Homo sapien
agacatagtccgattcagtatcttg

SEQ ID NO: 57573 - DNA, 25 bp, Homo sapien
ccaaatatgtgagttatacgttctc

SEQ ID NO: 57574 - DNA, 25 bp, Homo sapien
ccaaatatgtgacttatacgttctc

SEQ ID NO: 57575 - DNA, 25 bp, Homo sapien
agaataggaacgtacggtccgtgag

SEQ ID NO: 57576 - DNA, 25 bp, Homo sapien
agaataggaacgaacggtccgtgag

SEQ ID NO: 57577 - DNA, 25 bp, Homo sapien
aaaggtaaagacacaggtcactgag

SEQ ID NO: 57578 - DNA, 25 bp, Homo sapien
aaaggtaaagactcaggtcactgag

SEQ ID NO: 57579 - DNA, 25 bp, Homo sapien
aaagaatacgatttaggacacgaac

SEQ ID NO: 57580 - DNA, 25 bp, Homo sapien
aaagaatacgatataggacacgaac

SEQ ID NO: 57581 - DNA, 25 bp, Homo sapien
gaacccaagaaaagtcgtcacaact

SEQ ID NO: 57582 - DNA, 25 bp, Homo sapien
gaacccaagaaatgtcgtcacaact

SEQ ID NO: 57583 - DNA, 25 bp, Homo sapien
gaacgggcagtgaggagtcccacct

SEQ ID NO: 57584 - DNA, 25 bp, Homo sapien
gaacgggcagtgtggagtcccacct

SEQ ID NO: 57585 - DNA, 25 bp, Homo sapien
gaccagagagtagactgaaatccgc

SEQ ID NO: 57586 - DNA, 25 bp, Homo sapien
gaccagagagtacactgaaatccgc

SEQ ID NO: 57587 - DNA, 25 bp, Homo sapien
tcgtccaaagcgagacggaccccta

SEQ ID NO: 57588 - DNA, 25 bp, Homo sapien
tcgtccaaagcgtgacggaccccta

SEQ ID NO: 57589 - DNA, 25 bp, Homo sapien
ggtcctttatcgtctagggtcctta

SEQ ID NO: 57590 - DNA, 25 bp, Homo sapien
ggtcctttatcgactagggtcctta

SEQ ID NO: 57591 - DNA, 25 bp, Homo sapien
gaagatgacagtgtttcgctcctcc

SEQ ID NO: 57592 - DNA, 25 bp, Homo sapien
gaagatgacagtctttcgctcctcc

SEQ ID NO: 57593 - DNA, 25 bp, Homo sapien
gagttcgtttactccgacctcgacc

SEQ ID NO: 57594 - DNA, 25 bp, Homo sapien
gagttcgtttacaccgacctcgacc

SEQ ID NO: 57595 - DNA, 25 bp, Homo sapien
gagtctctgctctcggacttataga

SEQ ID NO: 57596 - DNA, 25 bp, Homo sapien
gagtctctgctcacggacttataga

SEQ ID NO: 57597 - DNA, 25 bp, Homo sapien
acggtcccacctaaggtttcgtaga

SEQ ID NO: 57598 - DNA, 25 bp, Homo sapien
acggtcccaccttaggtttcgtaga

SEQ ID NO: 57599 - DNA, 25 bp, Homo sapien
atgtcgtctccctgtggatcttaag

SEQ ID NO: 57600 - DNA, 25 bp, Homo sapien
atgtcgtctcccagtggatcttaag

SEQ ID NO: 57601 - DNA, 25 bp, Homo sapien
gaccttcgcatacgtttatacaaag

SEQ ID NO: 57602 - DNA, 25 bp, Homo sapien
gaccttcgcataggtttatacaaag

SEQ ID NO: 57603 - DNA, 25 bp, Homo sapien
ccatgtggtgacattgttcgagagg

SEQ ID NO: 57604 - DNA, 25 bp, Homo sapien
ccatgtggtgactttgttcgagagg

SEQ ID NO: 57605 - DNA, 25 bp, Homo sapien
tcaataggtaaacatttgacgacta

SEQ ID NO: 57606 - DNA, 25 bp, Homo sapien
tcaataggtaaagatttgacgacta

SEQ ID NO: 57607 - DNA, 25 bp, Homo sapien
gagacgtcttaatactctttatatg

SEQ ID NO: 57608 - DNA, 25 bp, Homo sapien
gagacgtcttaaaactctttatatg

SEQ ID NO: 57609 - DNA, 25 bp, Homo sapien
actagagtcccattcttcttaagag

SEQ ID NO: 57610 - DNA, 25 bp, Homo sapien
actagagtcccaatcttcttaagag

SEQ ID NO: 57611 - DNA, 25 bp, Homo sapien
agaagagcaataatacttatacacg

SEQ ID NO: 57612 - DNA, 25 bp, Homo sapien
agaagagcaatattacttatacacg

SEQ ID NO: 57613 - DNA, 25 bp, Homo sapien
aagacacgttacatgtttgtgttcg

SEQ ID NO: 57614 - DNA, 25 bp, Homo sapien
aagacacgttacttgtttgtgttcg

SEQ ID NO: 57615 - DNA, 25 bp, Homo sapien
tcgaagacaccttggtaccttcttc

SEQ ID NO: 57616 - DNA, 25 bp, Homo sapien
tcgaagacacctaggtaccttcttc

SEQ ID NO: 57617 - DNA, 25 bp, Homo sapien
gtacagtctccgaggtatcttcttc

SEQ ID NO: 57618 - DNA, 25 bp, Homo sapien
gtacagtctccgtggtatcttcttc

SEQ ID NO: 57619 - DNA, 25 bp, Homo sapien
gaagtactctaaattactgttcttg

SEQ ID NO: 57620 - DNA, 25 bp, Homo sapien
gaagtactctaatttactgttcttg

SEQ ID NO: 57621 - DNA, 25 bp, Homo sapien
agacaacctgtatcttcggatttag

SEQ ID NO: 57622 - DNA, 25 bp, Homo sapien
agacaacctgtaacttcggatttag

SEQ ID NO: 57623 - DNA, 25 bp, Homo sapien
ggagcggcccgacttgacctctaca

SEQ ID NO: 57624 - DNA, 25 bp, Homo sapien
ggagcggcccgagttgacctctaca

SEQ ID NO: 57625 - DNA, 25 bp, Homo sapien
gaacattgagaagagttacgtcaac

SEQ ID NO: 57626 - DNA, 25 bp, Homo sapien
gaacattgagaacagttacgtcaac

SEQ ID NO: 57627 - DNA, 25 bp, Homo sapien
cagtaaaaacagtcaccggtcaaac

SEQ ID NO: 57628 - DNA, 25 bp, Homo sapien
cagtaaaaacagacaccggtcaaac

SEQ ID NO: 57629 - DNA, 25 bp, Homo sapien
cggtggacgagaacaggtgccactc

SEQ ID NO: 57630 - DNA, 25 bp, Homo sapien
cggtggacgagatcaggtgccactc

SEQ ID NO: 57631 - DNA, 25 bp, Homo sapien
gcgggacgaactgacagtgaacaca

SEQ ID NO: 57632 - DNA, 25 bp, Homo sapien
gcgggacgaactcacagtgaacaca

SEQ ID NO: 57633 - DNA, 25 bp, Homo sapien
tacctggagatgtaaatacacttaa

SEQ ID NO: 57634 - DNA, 25 bp, Homo sapien
tacctggagatgaaaatacacttaa

SEQ ID NO: 57635 - DNA, 25 bp, Homo sapien
aagcggacaccaaatatacgaatgt

SEQ ID NO: 57636 - DNA, 25 bp, Homo sapien
aagcggacaccatatatacgaatgt

SEQ ID NO: 57637 - DNA, 25 bp, Homo sapien
ctcgtcgaatagatgacattctttt

SEQ ID NO: 57638 - DNA, 25 bp, Homo sapien
ctcgtcgaatagttgacattctttt

SEQ ID NO: 57639 - DNA, 25 bp, Homo sapien
tctgaacgtgacttcacgtattttt

SEQ ID NO: 57640 - DNA, 25 bp, Homo sapien
tctgaacgtgacatcacgtattttt

SEQ ID NO: 57641 - DNA, 25 bp, Homo sapien
ttccgataagctacggtatgttcta

SEQ ID NO: 57642 - DNA, 25 bp, Homo sapien
ttccgataagcttcggtatgttcta

SEQ ID NO: 57643 - DNA, 25 bp, Homo sapien
tgagaagtagagagagaacttccac

SEQ ID NO: 57644 - DNA, 25 bp, Homo sapien
tgagaagtagagtgagaacttccac

SEQ ID NO: 57645 - DNA, 25 bp, Homo sapien
gcgtaagaaaaggttacatgtttcc

SEQ ID NO: 57646 - DNA, 25 bp, Homo sapien
gcgtaagaaaagcttacatgtttcc

SEQ ID NO: 57647 - DNA, 25 bp, Homo sapien
ttcgggaaggtactagtcttcctac

SEQ ID NO: 57648 - DNA, 25 bp, Homo sapien
ttcgggaaggtagtagtcttcctac

SEQ ID NO: 57649 - DNA, 25 bp, Homo sapien
attttgtagaggtcgtgtcttcttc

SEQ ID NO: 57650 - DNA, 25 bp, Homo sapien
attttgtagaggacgtgtcttcttc

SEQ ID NO: 57651 - DNA, 25 bp, Homo sapien
ttaggtagagagtccttctatgtca

SEQ ID NO: 57652 - DNA, 25 bp, Homo sapien
ttaggtagagagaccttctatgtca

SEQ ID NO: 57653 - DNA, 25 bp, Homo sapien
tctatgattacaaattgtccttgtg

SEQ ID NO: 57654 - DNA, 25 bp, Homo sapien
tctatgattacatattgtccttgtg

SEQ ID NO: 57655 - DNA, 25 bp, Homo sapien
taggtgtagaagtctcgtccttatg

SEQ ID NO: 57656 - DNA, 25 bp, Homo sapien
taggtgtagaagactcgtccttatg

SEQ ID NO: 57657 - DNA, 25 bp, Homo sapien
gacgtgagagatacgtatttatata

SEQ ID NO: 57658 - DNA, 25 bp, Homo sapien
gacgtgagagattcgtatttatata

SEQ ID NO: 57659 - DNA, 25 bp, Homo sapien
ggtcggagagaatcattaccgtcag

SEQ ID NO: 57660 - DNA, 25 bp, Homo sapien
ggtcggagagaaacattaccgtcag

SEQ ID NO: 57661 - DNA, 25 bp, Homo sapien
cgacgtcagaagagacttccttcga

SEQ ID NO: 57662 - DNA, 25 bp, Homo sapien
cgacgtcagaagtgacttccttcga

SEQ ID NO: 57663 - DNA, 25 bp, Homo sapien
cacccgtggttgttccggtgacact

SEQ ID NO: 57664 - DNA, 25 bp, Homo sapien
cacccgtggttgatccggtgacact

SEQ ID NO: 57665 - DNA, 25 bp, Homo sapien
gattctgtgttttacttagggactc

SEQ ID NO: 57666 - DNA, 25 bp, Homo sapien
gattctgtgtttaacttagggactc

SEQ ID NO: 57667 - DNA, 25 bp, Homo sapien
ttatccgtagggtagtcggagtaac

SEQ ID NO: 57668 - DNA, 25 bp, Homo sapien
ttatccgtagggaagtcggagtaac

SEQ ID NO: 57669 - DNA, 25 bp, Homo sapien
cacctccgggtcgagtccggtacag

SEQ ID NO: 57670 - DNA, 25 bp, Homo sapien
cacctccgggtccagtccggtacag

SEQ ID NO: 57671 - DNA, 25 bp, Homo sapien
ctactcctacgagaggcacgactca

SEQ ID NO: 57672 - DNA, 25 bp, Homo sapien
ctactcctacgacaggcacgactca

SEQ ID NO: 57673 - DNA, 25 bp, Homo sapien
ctgagtcgtcgacgactcgggtcca

SEQ ID NO: 57674 - DNA, 25 bp, Homo sapien
ctgagtcgtcgaggactcgggtcca

SEQ ID NO: 57675 - DNA, 25 bp, Homo sapien
aacgtttgtcacctcgatactaccg

SEQ ID NO: 57676 - DNA, 25 bp, Homo sapien
aacgtttgtcacgtcgatactaccg

SEQ ID NO: 57677 - DNA, 25 bp, Homo sapien
aaacgtctccttattacaacgtcgg

SEQ ID NO: 57678 - DNA, 25 bp, Homo sapien
aaacgtctcctttttacaacgtcgg

SEQ ID NO: 57679 - DNA, 25 bp, Homo sapien
cagtgtctagtagtgtccgtccggt

SEQ ID NO: 57680 - DNA, 25 bp, Homo sapien
cagtgtctagtactgtccgtccggt

SEQ ID NO: 57681 - DNA, 25 bp, Homo sapien
tctcaggtggacgtgtctcgtaagc

SEQ ID NO: 57682 - DNA, 25 bp, Homo sapien
tctcaggtggacctgtctcgtaagc

SEQ ID NO: 57683 - DNA, 25 bp, Homo sapien
gtctctgtaatttgcattcatgtct

SEQ ID NO: 57684 - DNA, 25 bp, Homo sapien
gtctctgtaattagcattcatgtct

SEQ ID NO: 57685 - DNA, 25 bp, Homo sapien
tcttgaatgtggactactccgtggt

SEQ ID NO: 57686 - DNA, 25 bp, Homo sapien
tcttgaatgtggtctactccgtggt

SEQ ID NO: 57687 - DNA, 25 bp, Homo sapien
gagattcccagtctctctttggtct

SEQ ID NO: 57688 - DNA, 25 bp, Homo sapien
gagattcccagtgtctctttggtct

SEQ ID NO: 57689 - DNA, 25 bp, Homo sapien
atcccagtctacctctgtcgggtct

SEQ ID NO: 57690 - DNA, 25 bp, Homo sapien
atcccagtctacgtctgtcgggtct

SEQ ID NO: 57691 - DNA, 25 bp, Homo sapien
tagtcacgacaggtccggtttgggt

SEQ ID NO: 57692 - DNA, 25 bp, Homo sapien
tagtcacgacagctccggtttgggt

SEQ ID NO: 57693 - DNA, 25 bp, Homo sapien
tctgttcgagactcgctttgacgtg

SEQ ID NO: 57694 - DNA, 25 bp, Homo sapien
tctgttcgagacacgctttgacgtg

SEQ ID NO: 57695 - DNA, 25 bp, Homo sapien
actttttgactaaacttccgtagag

SEQ ID NO: 57696 - DNA, 25 bp, Homo sapien
actttttgactatacttccgtagag

SEQ ID NO: 57697 - DNA, 25 bp, Homo sapien
ggggctctacgtatgacctatgaag

SEQ ID NO: 57698 - DNA, 25 bp, Homo sapien
ggggctctacgtttgacctatgaag

SEQ ID NO: 57699 - DNA, 25 bp, Homo sapien
gtagttctcagtttaccatagaggt

SEQ ID NO: 57700 - DNA, 25 bp, Homo sapien
gtagttctcagtataccatagaggt

SEQ ID NO: 57701 - DNA, 25 bp, Homo sapien
ttttaagtcgggatccgataactgt

SEQ ID NO: 57702 - DNA, 25 bp, Homo sapien
ttttaagtcgggttccgataactgt

SEQ ID NO: 57703 - DNA, 25 bp, Homo sapien
ctaacgtaagggacgtaagtcgtct

SEQ ID NO: 57704 - DNA, 25 bp, Homo sapien
ctaacgtaagggtcgtaagtcgtct

SEQ ID NO: 57705 - DNA, 25 bp, Homo sapien
gccctacctgggacacggtcgcgag

SEQ ID NO: 57706 - DNA, 25 bp, Homo sapien
gccctacctgggtcacggtcgcgag

SEQ ID NO: 57707 - DNA, 25 bp, Homo sapien
tcgtgcccggggactttcgtcgtcg

SEQ ID NO: 57708 - DNA, 25 bp, Homo sapien
tcgtgcccggggtctttcgtcgtcg

SEQ ID NO: 57709 - DNA, 25 bp, Homo sapien
ggtgagcccacttcttcagtcccgg

SEQ ID NO: 57710 - DNA, 25 bp, Homo sapien
ggtgagcccactacttcagtcccgg

SEQ ID NO: 57711 - DNA, 25 bp, Homo sapien
ccaggaccccagacagtcaggaagg

SEQ ID NO: 57712 - DNA, 25 bp, Homo sapien
ccaggaccccagtcagtcaggaagg

SEQ ID NO: 57713 - DNA, 25 bp, Homo sapien
ggggacctccagtgtccacaggagc

SEQ ID NO: 57714 - DNA, 25 bp, Homo sapien
ggggacctccagagtccacaggagc

SEQ ID NO: 57715 - DNA, 25 bp, Homo sapien
ctacgtaaggtactgatactctgtc

SEQ ID NO: 57716 - DNA, 25 bp, Homo sapien
ctacgtaaggtagtgatactctgtc

SEQ ID NO: 57717 - DNA, 25 bp, Homo sapien
gtctctctaggatcacggatccttc

SEQ ID NO: 57718 - DNA, 25 bp, Homo sapien
gtctctctaggaacacggatccttc

SEQ ID NO: 57719 - DNA, 25 bp, Homo sapien
ggtatgtagcagacagggtctcact

SEQ ID NO: 57720 - DNA, 25 bp, Homo sapien
ggtatgtagcagtcagggtctcact

SEQ ID NO: 57721 - DNA, 25 bp, Homo sapien
aggtatgtgcagttacatgtctgaa

SEQ ID NO: 57722 - DNA, 25 bp, Homo sapien
aggtatgtgcagatacatgtctgaa

SEQ ID NO: 57723 - DNA, 25 bp, Homo sapien
aggtctattatgtacaggactcgaa

SEQ ID NO: 57724 - DNA, 25 bp, Homo sapien
aggtctattatgaacaggactcgaa

SEQ ID NO: 57725 - DNA, 25 bp, Homo sapien
cagttacttgtttcattaacagtgt

SEQ ID NO: 57726 - DNA, 25 bp, Homo sapien
cagttacttgttacattaacagtgt

SEQ ID NO: 57727 - DNA, 25 bp, Homo sapien
ggttccgtgtatgacaattaaccgt

SEQ ID NO: 57728 - DNA, 25 bp, Homo sapien
ggttccgtgtatcacaattaaccgt

SEQ ID NO: 57729 - DNA, 25 bp, Homo sapien
ggatctctcgaggacccgtgtcacc

SEQ ID NO: 57730 - DNA, 25 bp, Homo sapien
ggatctctcgagcacccgtgtcacc

SEQ ID NO: 57731 - DNA, 25 bp, Homo sapien
ccaacaggagtagtcgtctgagaac

SEQ ID NO: 57732 - DNA, 25 bp, Homo sapien
ccaacaggagtactcgtctgagaac

SEQ ID NO: 57733 - DNA, 25 bp, Homo sapien
atcagttgttaacactcacgagtag

SEQ ID NO: 57734 - DNA, 25 bp, Homo sapien
atcagttgttaagactcacgagtag

SEQ ID NO: 57735 - DNA, 25 bp, Homo sapien
agatagtctacaagtaactacaagt

SEQ ID NO: 57736 - DNA, 25 bp, Homo sapien
agatagtctacatgtaactacaagt

SEQ ID NO: 57737 - DNA, 25 bp, Homo sapien
gtaaatccgtactctatgtcacgag

SEQ ID NO: 57738 - DNA, 25 bp, Homo sapien
gtaaatccgtacactatgtcacgag

SEQ ID NO: 57739 - DNA, 25 bp, Homo sapien
actaaggatcactactgtctctgtg

SEQ ID NO: 57740 - DNA, 25 bp, Homo sapien
actaaggatcacaactgtctctgtg

SEQ ID NO: 57741 - DNA, 25 bp, Homo sapien
ctaagtgtagtctccgtcctactga

SEQ ID NO: 57742 - DNA, 25 bp, Homo sapien
ctaagtgtagtcaccgtcctactga

SEQ ID NO: 57743 - DNA, 25 bp, Homo sapien
acgtagacccgacgacgactctagc

SEQ ID NO: 57744 - DNA, 25 bp, Homo sapien
acgtagacccgaggacgactctagc

SEQ ID NO: 57745 - DNA, 25 bp, Homo sapien
tctacgcgcgcgaggacaacgacga

SEQ ID NO: 57746 - DNA, 25 bp, Homo sapien
tctacgcgcgcgtggacaacgacga

SEQ ID NO: 57747 - DNA, 25 bp, Homo sapien
tgttagtacgcgatgtgtaacagca

SEQ ID NO: 57748 - DNA, 25 bp, Homo sapien
tgttagtacgcgttgtgtaacagca

SEQ ID NO: 57749 - DNA, 25 bp, Homo sapien
gacaacgacatcggtttaagcaaca

SEQ ID NO: 57750 - DNA, 25 bp, Homo sapien
gacaacgacatccgtttaagcaaca

SEQ ID NO: 57751 - DNA, 25 bp, Homo sapien
aaaagtcggttatagtactaccaag

SEQ ID NO: 57752 - DNA, 25 bp, Homo sapien
aaaagtcggttaaagtactaccaag

SEQ ID NO: 57753 - DNA, 25 bp, Homo sapien
gaaaaagggccgtaacccgacgacg

SEQ ID NO: 57754 - DNA, 25 bp, Homo sapien
gaaaaagggccgaaacccgacgacg

SEQ ID NO: 57755 - DNA, 25 bp, Homo sapien
gtaaaggggctgacgacgcacgatc

SEQ ID NO: 57756 - DNA, 25 bp, Homo sapien
gtaaaggggctgtcgacgcacgatc

SEQ ID NO: 57757 - DNA, 25 bp, Homo sapien
gcagttacatcgaaacctttcgacg

SEQ ID NO: 57758 - DNA, 25 bp, Homo sapien
gcagttacatcgtaacctttcgacg

SEQ ID NO: 57759 - DNA, 25 bp, Homo sapien
ctgttcaagtcgaccgtttctacgt

SEQ ID NO: 57760 - DNA, 25 bp, Homo sapien
ctgttcaagtcgtccgtttctacgt

SEQ ID NO: 57761 - DNA, 25 bp, Homo sapien
cgtctctgtgccagagccggtttga

SEQ ID NO: 57762 - DNA, 25 bp, Homo sapien
cgtctctgtgcctgagccggtttga

SEQ ID NO: 57763 - DNA, 25 bp, Homo sapien
ctttatgtaactagtccttcttgat

SEQ ID NO: 57764 - DNA, 25 bp, Homo sapien
ctttatgtaacttgtccttcttgat

SEQ ID NO: 57765 - DNA, 25 bp, Homo sapien
cctttagataaatactgtcttcaga

SEQ ID NO: 57766 - DNA, 25 bp, Homo sapien
cctttagataaaaactgtcttcaga

SEQ ID NO: 57767 - DNA, 25 bp, Homo sapien
tagacgagtgaaggtttctcgacca

SEQ ID NO: 57768 - DNA, 25 bp, Homo sapien
tagacgagtgaacgtttctcgacca

SEQ ID NO: 57769 - DNA, 25 bp, Homo sapien
cactagaaccagagtttctccgcct

SEQ ID NO: 57770 - DNA, 25 bp, Homo sapien
cactagaaccagtgtttctccgcct

SEQ ID NO: 57771 - DNA, 25 bp, Homo sapien
gactccctctaggtccctagtccgt

SEQ ID NO: 57772 - DNA, 25 bp, Homo sapien
gactccctctagctccctagtccgt

SEQ ID NO: 57773 - DNA, 25 bp, Homo sapien
gtaccggatcgtggtcctcagtaag

SEQ ID NO: 57774 - DNA, 25 bp, Homo sapien
gtaccggatcgtcgtcctcagtaag

SEQ ID NO: 57775 - DNA, 25 bp, Homo sapien
gttccggtcgtggatcacgacggag

SEQ ID NO: 57776 - DNA, 25 bp, Homo sapien
gttccggtcgtgcatcacgacggag

SEQ ID NO: 57777 - DNA, 25 bp, Homo sapien
ggttcagtatgacgtattcaagtac

SEQ ID NO: 57778 - DNA, 25 bp, Homo sapien
ggttcagtatgaggtattcaagtac

SEQ ID NO: 57779 - DNA, 25 bp, Homo sapien
agtttagtgtcaggtttcgtaacac

SEQ ID NO: 57780 - DNA, 25 bp, Homo sapien
agtttagtgtcacgtttcgtaacac

SEQ ID NO: 57781 - DNA, 25 bp, Homo sapien
actgttttctgaaactcgttgaata

SEQ ID NO: 57782 - DNA, 25 bp, Homo sapien
actgttttctgatactcgttgaata

SEQ ID NO: 57783 - DNA, 25 bp, Homo sapien
attcttttgtacttcctgtagaatg

SEQ ID NO: 57784 - DNA, 25 bp, Homo sapien
attcttttgtacatcctgtagaatg

SEQ ID NO: 57785 - DNA, 25 bp, Homo sapien
tccctgtagacttgtacgttatttt

SEQ ID NO: 57786 - DNA, 25 bp, Homo sapien
tccctgtagactagtacgttatttt

SEQ ID NO: 57787 - DNA, 25 bp, Homo sapien
gaccaggacgtaagacgggttatag

SEQ ID NO: 57788 - DNA, 25 bp, Homo sapien
gaccaggacgtatgacgggttatag

SEQ ID NO: 57789 - DNA, 25 bp, Homo sapien
ttccgagacaactgaagtcgtgctg

SEQ ID NO: 57790 - DNA, 25 bp, Homo sapien
ttccgagacaacagaagtcgtgctg

SEQ ID NO: 57791 - DNA, 25 bp, Homo sapien
gtgtccgcgacatcgggagcgccat

SEQ ID NO: 57792 - DNA, 25 bp, Homo sapien
gtgtccgcgacaacgggagcgccat

SEQ ID NO: 57793 - DNA, 25 bp, Homo sapien
tctggtccccgaaggcttcgacctt

SEQ ID NO: 57794 - DNA, 25 bp, Homo sapien
tctggtccccgatggcttcgacctt

SEQ ID NO: 57795 - DNA, 25 bp, Homo sapien
ggtccgacggggacccctagagcct

SEQ ID NO: 57796 - DNA, 25 bp, Homo sapien
ggtccgacggggtcccctagagcct

SEQ ID NO: 57797 - DNA, 25 bp, Homo sapien
gtatcacctgtcgtgtcggaatccc

SEQ ID NO: 57798 - DNA, 25 bp, Homo sapien
gtatcacctgtcctgtcggaatccc

SEQ ID NO: 57799 - DNA, 25 bp, Homo sapien
tcgactgtgttttgatcaacctcgt

SEQ ID NO: 57800 - DNA, 25 bp, Homo sapien
tcgactgtgtttagatcaacctcgt

SEQ ID NO: 57801 - DNA, 25 bp, Homo sapien
gtgcttcagtatgagagaacctcac

SEQ ID NO: 57802 - DNA, 25 bp, Homo sapien
gtgcttcagtatcagagaacctcac

SEQ ID NO: 57803 - DNA, 25 bp, Homo sapien
tcacttttgtgtagactatcgtctt

SEQ ID NO: 57804 - DNA, 25 bp, Homo sapien
tcacttttgtgttgactatcgtctt

SEQ ID NO: 57805 - DNA, 25 bp, Homo sapien
caatttagtacgttgacagtgtctt

SEQ ID NO: 57806 - DNA, 25 bp, Homo sapien
caatttagtacgatgacagtgtctt

SEQ ID NO: 57807 - DNA, 25 bp, Homo sapien
ttgattcgagtgaagaagtacctct

SEQ ID NO: 57808 - DNA, 25 bp, Homo sapien
ttgattcgagtgtagaagtacctct

SEQ ID NO: 57809 - DNA, 25 bp, Homo sapien
aaccttcgatcaggtttgaatcttt

SEQ ID NO: 57810 - DNA, 25 bp, Homo sapien
aaccttcgatcacgtttgaatcttt

SEQ ID NO: 57811 - DNA, 25 bp, Homo sapien
aatcggtgatctaaaaagtcctttt

SEQ ID NO: 57812 - DNA, 25 bp, Homo sapien
aatcggtgatcttaaaagtcctttt

SEQ ID NO: 57813 - DNA, 25 bp, Homo sapien
ctgatgtgtaaaagacaggaccctt

SEQ ID NO: 57814 - DNA, 25 bp, Homo sapien
ctgatgtgtaaatgacaggaccctt

SEQ ID NO: 57815 - DNA, 25 bp, Homo sapien
cactgaagtccttcgaggaacacct

SEQ ID NO: 57816 - DNA, 25 bp, Homo sapien
cactgaagtcctacgaggaacacct

SEQ ID NO: 57817 - DNA, 25 bp, Homo sapien
tactcagcgacctctagagaaaggt

SEQ ID NO: 57818 - DNA, 25 bp, Homo sapien
tactcagcgaccactagagaaaggt

SEQ ID NO: 57819 - DNA, 25 bp, Homo sapien
acaaaagtcgccatgtacgaacgag

SEQ ID NO: 57820 - DNA, 25 bp, Homo sapien
acaaaagtcgccttgtacgaacgag

SEQ ID NO: 57821 - DNA, 25 bp, Homo sapien
aaataagttccagtagcactacgac

SEQ ID NO: 57822 - DNA, 25 bp, Homo sapien
aaataagttccactagcactacgac

SEQ ID NO: 57823 - DNA, 25 bp, Homo sapien
caaaaatgtctttcggtcatagact

SEQ ID NO: 57824 - DNA, 25 bp, Homo sapien
caaaaatgtcttacggtcatagact

SEQ ID NO: 57825 - DNA, 25 bp, Homo sapien
ggaaaccactaatcgttaggtttaa

SEQ ID NO: 57826 - DNA, 25 bp, Homo sapien
ggaaaccactaaacgttaggtttaa

SEQ ID NO: 57827 - DNA, 25 bp, Homo sapien
taagacatcccgttcgtgttagtaa

SEQ ID NO: 57828 - DNA, 25 bp, Homo sapien
taagacatcccgatcgtgttagtaa

SEQ ID NO: 57829 - DNA, 25 bp, Homo sapien
taaggacacctctgtccggaacacc

SEQ ID NO: 57830 - DNA, 25 bp, Homo sapien
taaggacacctcagtccggaacacc

SEQ ID NO: 57831 - DNA, 25 bp, Homo sapien
agaggtcccggagactgcgaccgtc

SEQ ID NO: 57832 - DNA, 25 bp, Homo sapien
agaggtcccggacactgcgaccgtc

SEQ ID NO: 57833 - DNA, 25 bp, Homo sapien
ctgagagaactcaaacatccaaggt

SEQ ID NO: 57834 - DNA, 25 bp, Homo sapien
ctgagagaactctaacatccaaggt

SEQ ID NO: 57835 - DNA, 25 bp, Homo sapien
aatgaagaagcaaacgttccaagac

SEQ ID NO: 57836 - DNA, 25 bp, Homo sapien
aatgaagaagcatacgttccaagac

SEQ ID NO: 57837 - DNA, 25 bp, Homo sapien
tactatttaaagactatgttccaaa

SEQ ID NO: 57838 - DNA, 25 bp, Homo sapien
tactatttaaagtctatgttccaaa

SEQ ID NO: 57839 - DNA, 25 bp, Homo sapien
acgtgatcattcgaaatttcataga

SEQ ID NO: 57840 - DNA, 25 bp, Homo sapien
acgtgatcattccaaatttcataga

SEQ ID NO: 57841 - DNA, 25 bp, Homo sapien
tttcccgtgtgcaaaattctatgta

SEQ ID NO: 57842 - DNA, 25 bp, Homo sapien
tttcccgtgtgctaaattctatgta

SEQ ID NO: 57843 - DNA, 25 bp, Homo sapien
ctttgactcgtcagaataaaacttg

SEQ ID NO: 57844 - DNA, 25 bp, Homo sapien
ctttgactcgtctgaataaaacttg

SEQ ID NO: 57845 - DNA, 25 bp, Homo sapien
ttttgacttacacactaaataatac

SEQ ID NO: 57846 - DNA, 25 bp, Homo sapien
ttttgacttacagactaaataatac

SEQ ID NO: 57847 - DNA, 25 bp, Homo sapien
cgtcgtagtctcacaaccgatatca

SEQ ID NO: 57848 - DNA, 25 bp, Homo sapien
cgtcgtagtctctcaaccgatatca

SEQ ID NO: 57849 - DNA, 25 bp, Homo sapien
cattggtgtattaaaccgatgtcga

SEQ ID NO: 57850 - DNA, 25 bp, Homo sapien
cattggtgtatttaaccgatgtcga

SEQ ID NO: 57851 - DNA, 25 bp, Homo sapien
ctcgtgtagaattaaccacgtgata

SEQ ID NO: 57852 - DNA, 25 bp, Homo sapien
ctcgtgtagaataaaccacgtgata

SEQ ID NO: 57853 - DNA, 25 bp, Homo sapien
atccgttgagccttagacttcctta

SEQ ID NO: 57854 - DNA, 25 bp, Homo sapien
atccgttgagccatagacttcctta

SEQ ID NO: 57855 - DNA, 25 bp, Homo sapien
ctttttgctcagtagtcttagtttt

SEQ ID NO: 57856 - DNA, 25 bp, Homo sapien
ctttttgctcagaagtcttagtttt

SEQ ID NO: 57857 - DNA, 25 bp, Homo sapien
taaggtctattgaaatcttgtctca

SEQ ID NO: 57858 - DNA, 25 bp, Homo sapien
taaggtctattgtaatcttgtctca

SEQ ID NO: 57859 - DNA, 25 bp, Homo sapien
cggcgactcataaaatctccctcga

SEQ ID NO: 57860 - DNA, 25 bp, Homo sapien
cggcgactcatataatctccctcga

SEQ ID NO: 57861 - DNA, 25 bp, Homo sapien
ttgaatgacctacttctctcgactg

SEQ ID NO: 57862 - DNA, 25 bp, Homo sapien
ttgaatgacctagttctctcgactg

SEQ ID NO: 57863 - DNA, 25 bp, Homo sapien
gtagttattgacataggttttcctc

SEQ ID NO: 57864 - DNA, 25 bp, Homo sapien
gtagttattgacttaggttttcctc

SEQ ID NO: 57865 - DNA, 25 bp, Homo sapien
cgtaatactttgtgagtttttctac

SEQ ID NO: 57866 - DNA, 25 bp, Homo sapien
cgtaatactttgagagtttttctac

SEQ ID NO: 57867 - DNA, 25 bp, Homo sapien
cgtccacatcttaggactgaaactc

SEQ ID NO: 57868 - DNA, 25 bp, Homo sapien
cgtccacatctttggactgaaactc

SEQ ID NO: 57869 - DNA, 25 bp, Homo sapien
ggccttctctcttcgaacaaaccga

SEQ ID NO: 57870 - DNA, 25 bp, Homo sapien
ggccttctctctacgaacaaaccga

SEQ ID NO: 57871 - DNA, 25 bp, Homo sapien
aggactcgtcccttaaactacgaac

SEQ ID NO: 57872 - DNA, 25 bp, Homo sapien
aggactcgtcccataaactacgaac

SEQ ID NO: 57873 - DNA, 25 bp, Homo sapien
ggttttgtccctcaatactcgactc

SEQ ID NO: 57874 - DNA, 25 bp, Homo sapien
ggttttgtccctgaatactcgactc

SEQ ID NO: 57875 - DNA, 25 bp, Homo sapien
ctactgttacgtctcaaatggagtc

SEQ ID NO: 57876 - DNA, 25 bp, Homo sapien
ctactgttacgtgtcaaatggagtc

SEQ ID NO: 57877 - DNA, 25 bp, Homo sapien
gccgagagtccgacaagtaaacgtc

SEQ ID NO: 57878 - DNA, 25 bp, Homo sapien
gccgagagtccgtcaagtaaacgtc

SEQ ID NO: 57879 - DNA, 25 bp, Homo sapien
aaacacgtgtgcagagaggtcccgg

SEQ ID NO: 57880 - DNA, 25 bp, Homo sapien
aaacacgtgtgctgagaggtcccgg

SEQ ID NO: 57881 - DNA, 25 bp, Homo sapien
acaacaggtgtcagttcctccacgg

SEQ ID NO: 57882 - DNA, 25 bp, Homo sapien
acaacaggtgtctgttcctccacgg

SEQ ID NO: 57883 - DNA, 25 bp, Homo sapien
ttgaactcgttggtcaaagcgaaac

SEQ ID NO: 57884 - DNA, 25 bp, Homo sapien
ttgaactcgttgctcaaagcgaaac

SEQ ID NO: 57885 - DNA, 25 bp, Homo sapien
catttgtcctaattcgacgagaact

SEQ ID NO: 57886 - DNA, 25 bp, Homo sapien
catttgtcctaaatcgacgagaact

SEQ ID NO: 57887 - DNA, 25 bp, Homo sapien
cgatactctgtggtattttacattt

SEQ ID NO: 57888 - DNA, 25 bp, Homo sapien
cgatactctgtgctattttacattt

SEQ ID NO: 57889 - DNA, 25 bp, Homo sapien
caacactagtcgaggttgactcctt

SEQ ID NO: 57890 - DNA, 25 bp, Homo sapien
caacactagtcgtggttgactcctt

SEQ ID NO: 57891 - DNA, 25 bp, Homo sapien
aatctttagtgtcgtcgtcttcgtt

SEQ ID NO: 57892 - DNA, 25 bp, Homo sapien
aatctttagtgtggtcgtcttcgtt

SEQ ID NO: 57893 - DNA, 25 bp, Homo sapien
acaaaggctaaatagaactcctgtc

SEQ ID NO: 57894 - DNA, 25 bp, Homo sapien
acaaaggctaaaaagaactcctgtc

SEQ ID NO: 57895 - DNA, 25 bp, Homo sapien
acctaccaagacatggttcctgtgt

SEQ ID NO: 57896 - DNA, 25 bp, Homo sapien
acctaccaagacttggttcctgtgt

SEQ ID NO: 57897 - DNA, 25 bp, Homo sapien
gcccaccagggtggtttccgtcgag

SEQ ID NO: 57898 - DNA, 25 bp, Homo sapien
gcccaccagggtcgtttccgtcgag

SEQ ID NO: 57899 - DNA, 25 bp, Homo sapien
cacatgagggtctagtcgtcccgag

SEQ ID NO: 57900 - DNA, 25 bp, Homo sapien
cacatgagggtcaagtcgtcccgag

SEQ ID NO: 57901 - DNA, 25 bp, Homo sapien
gactactttcctctgaacacctgtg

SEQ ID NO: 57902 - DNA, 25 bp, Homo sapien
gactactttcctgtgaacacctgtg

SEQ ID NO: 57903 - DNA, 25 bp, Homo sapien
catgtgctgtattccggaaaatatt

SEQ ID NO: 57904 - DNA, 25 bp, Homo sapien
catgtgctgtataccggaaaatatt

SEQ ID NO: 57905 - DNA, 25 bp, Homo sapien
tccggaggtccgtcgtgaatcctta

SEQ ID NO: 57906 - DNA, 25 bp, Homo sapien
tccggaggtccgacgtgaatcctta

SEQ ID NO: 57907 - DNA, 25 bp, Homo sapien
tcgtgtttcgacaaggagaccggaa

SEQ ID NO: 57908 - DNA, 25 bp, Homo sapien
tcgtgtttcgactaggagaccggaa

SEQ ID NO: 57909 - DNA, 25 bp, Homo sapien
gtttttcgacttatatacatcggaa

SEQ ID NO: 57910 - DNA, 25 bp, Homo sapien
gtttttcgacttttatacatcggaa

SEQ ID NO: 57911 - DNA, 25 bp, Homo sapien
gatctttgaatcttaacgccagaat

SEQ ID NO: 57912 - DNA, 25 bp, Homo sapien
gatctttgaatcataacgccagaat

SEQ ID NO: 57913 - DNA, 25 bp, Homo sapien
tgttgttaaaccagtcatccggaac

SEQ ID NO: 57914 - DNA, 25 bp, Homo sapien
tgttgttaaacctgtcatccggaac

SEQ ID NO: 57915 - DNA, 25 bp, Homo sapien
acattttgtacacgacgttggtaaa

SEQ ID NO: 57916 - DNA, 25 bp, Homo sapien
acattttgtacaggacgttggtaaa

SEQ ID NO: 57917 - DNA, 25 bp, Homo sapien
tgctagtgtagaaccggaacgtgga

SEQ ID NO: 57918 - DNA, 25 bp, Homo sapien
tgctagtgtagatccggaacgtgga

SEQ ID NO: 57919 - DNA, 25 bp, Homo sapien
ccgttcttcggtggaccaaagtggc

SEQ ID NO: 57920 - DNA, 25 bp, Homo sapien
ccgttcttcggtcgaccaaagtggc

SEQ ID NO: 57921 - DNA, 25 bp, Homo sapien
ggaccggtgtcacgacccgagggac

SEQ ID NO: 57922 - DNA, 25 bp, Homo sapien
ggaccggtgtcaggacccgagggac

SEQ ID NO: 57923 - DNA, 25 bp, Homo sapien
gacgatgtctggaccctgtgagact

SEQ ID NO: 57924 - DNA, 25 bp, Homo sapien
gacgatgtctggtccctgtgagact

SEQ ID NO: 57925 - DNA, 25 bp, Homo sapien
gtctcatcgtttctaaagtggtcat

SEQ ID NO: 57926 - DNA, 25 bp, Homo sapien
gtctcatcgtttgtaaagtggtcat

SEQ ID NO: 57927 - DNA, 25 bp, Homo sapien
tttcagttcttcgtaaagagacatt

SEQ ID NO: 57928 - DNA, 25 bp, Homo sapien
tttcagttcttcctaaagagacatt

SEQ ID NO: 57929 - DNA, 25 bp, Homo sapien
tccaggtcacttttaagtcgtatta

SEQ ID NO: 57930 - DNA, 25 bp, Homo sapien
tccaggtcacttataagtcgtatta

SEQ ID NO: 57931 - DNA, 25 bp, Homo sapien
ggaacactgtttatcaaattctgac

SEQ ID NO: 57932 - DNA, 25 bp, Homo sapien
ggaacactgtttttcaaattctgac

SEQ ID NO: 57933 - DNA, 25 bp, Homo sapien
aaagtctgtagtacggtccgtgccc

SEQ ID NO: 57934 - DNA, 25 bp, Homo sapien
aaagtctgtagttcggtccgtgccc

SEQ ID NO: 57935 - DNA, 25 bp, Homo sapien
aggagttctagaaccgcctgacaat

SEQ ID NO: 57936 - DNA, 25 bp, Homo sapien
aggagttctagatccgcctgacaat

SEQ ID NO: 57937 - DNA, 25 bp, Homo sapien
gggaggtctgtctactcccatttcc

SEQ ID NO: 57938 - DNA, 25 bp, Homo sapien
gggaggtctgtcaactcccatttcc

SEQ ID NO: 57939 - DNA, 25 bp, Homo sapien
cggagggtttcacgaccctaatgtc

SEQ ID NO: 57940 - DNA, 25 bp, Homo sapien
cggagggtttcaggaccctaatgtc

SEQ ID NO: 57941 - DNA, 25 bp, Homo sapien
aaaacgtttcagactcgttttcgtc

SEQ ID NO: 57942 - DNA, 25 bp, Homo sapien
aaaacgtttcagtctcgttttcgtc

SEQ ID NO: 57943 - DNA, 25 bp, Homo sapien
agatggaaccggacgtcgttgtgtc

SEQ ID NO: 57944 - DNA, 25 bp, Homo sapien
agatggaaccggtcgtcgttgtgtc

SEQ ID NO: 57945 - DNA, 25 bp, Homo sapien
agagtttgaagacgtccttaaggtc

SEQ ID NO: 57946 - DNA, 25 bp, Homo sapien
agagtttgaagaggtccttaaggtc

SEQ ID NO: 57947 - DNA, 25 bp, Homo sapien
caattgacggtgatgtcctttcttg

SEQ ID NO: 57948 - DNA, 25 bp, Homo sapien
caattgacggtgttgtcctttcttg

SEQ ID NO: 57949 - DNA, 25 bp, Homo sapien
gcttctccctcgtttgttatggtga

SEQ ID NO: 57950 - DNA, 25 bp, Homo sapien
gcttctccctcgattgttatggtga

SEQ ID NO: 57951 - DNA, 25 bp, Homo sapien
cggagtcgttacaatttccggtagg

SEQ ID NO: 57952 - DNA, 25 bp, Homo sapien
cggagtcgttactatttccggtagg

SEQ ID NO: 57953 - DNA, 25 bp, Homo sapien
actagggtgtaaaactgcacagttt

SEQ ID NO: 57954 - DNA, 25 bp, Homo sapien
actagggtgtaatactgcacagttt

SEQ ID NO: 57955 - DNA, 25 bp, Homo sapien
cgatacggataacgatccagtgtaa

SEQ ID NO: 57956 - DNA, 25 bp, Homo sapien
cgatacggataaggatccagtgtaa

SEQ ID NO: 57957 - DNA, 25 bp, Homo sapien
gacccagtaatcttcggggaagtta

SEQ ID NO: 57958 - DNA, 25 bp, Homo sapien
gacccagtaatcatcggggaagtta

SEQ ID NO: 57959 - DNA, 25 bp, Homo sapien
aacgacaaccacttccgggaacttc

SEQ ID NO: 57960 - DNA, 25 bp, Homo sapien
aacgacaaccacatccgggaacttc

SEQ ID NO: 57961 - DNA, 25 bp, Homo sapien
gtcctgaacgtgtgaaaatacttac

SEQ ID NO: 57962 - DNA, 25 bp, Homo sapien
gtcctgaacgtgagaaaatacttac

SEQ ID NO: 57963 - DNA, 25 bp, Homo sapien
gaataagttcggaacaaacctatcc

SEQ ID NO: 57964 - DNA, 25 bp, Homo sapien
gaataagttcggtacaaacctatcc

SEQ ID NO: 57965 - DNA, 25 bp, Homo sapien
aaagtgtgcgtgacgaagggatctc

SEQ ID NO: 57966 - DNA, 25 bp, Homo sapien
aaagtgtgcgtgtcgaagggatctc

SEQ ID NO: 57967 - DNA, 25 bp, Homo sapien
aggagaaaagtctggaggtccaacg

SEQ ID NO: 57968 - DNA, 25 bp, Homo sapien
aggagaaaagtcaggaggtccaacg

SEQ ID NO: 57969 - DNA, 25 bp, Homo sapien
caacacacaccgagatgtcgttaat

SEQ ID NO: 57970 - DNA, 25 bp, Homo sapien
caacacacaccgtgatgtcgttaat

SEQ ID NO: 57971 - DNA, 25 bp, Homo sapien
ggtcacccagtgatgtctacgaagt

SEQ ID NO: 57972 - DNA, 25 bp, Homo sapien
ggtcacccagtgttgtctacgaagt

SEQ ID NO: 57973 - DNA, 25 bp, Homo sapien
gcggcacacgctatggtggtgtatc

SEQ ID NO: 57974 - DNA, 25 bp, Homo sapien
gcggcacacgctttggtggtgtatc

SEQ ID NO: 57975 - DNA, 25 bp, Homo sapien
ttcacgacccctgttgagaagtccc

SEQ ID NO: 57976 - DNA, 25 bp, Homo sapien
ttcacgacccctcttgagaagtccc

SEQ ID NO: 57977 - DNA, 25 bp, Homo sapien
cacgacggtgggtcttatttcggtg

SEQ ID NO: 57978 - DNA, 25 bp, Homo sapien
cacgacggtgggacttatttcggtg

SEQ ID NO: 57979 - DNA, 25 bp, Homo sapien
tcaacatctggaaccacatctgagg

SEQ ID NO: 57980 - DNA, 25 bp, Homo sapien
tcaacatctggatccacatctgagg

SEQ ID NO: 57981 - DNA, 25 bp, Homo sapien
actgagccggtagaccctcttgtta

SEQ ID NO: 57982 - DNA, 25 bp, Homo sapien
actgagccggtacaccctcttgtta

SEQ ID NO: 57983 - DNA, 25 bp, Homo sapien
atcagtccacgtgtacccaatgtcc

SEQ ID NO: 57984 - DNA, 25 bp, Homo sapien
atcagtccacgtctacccaatgtcc

SEQ ID NO: 57985 - DNA, 25 bp, Homo sapien
cagaccccatgctccgagtgtgtca

SEQ ID NO: 57986 - DNA, 25 bp, Homo sapien
cagaccccatgcaccgagtgtgtca

SEQ ID NO: 57987 - DNA, 25 bp, Homo sapien
ttaccccaatacacctctcgggtag

SEQ ID NO: 57988 - DNA, 25 bp, Homo sapien
ttaccccaatactcctctcgggtag

SEQ ID NO: 57989 - DNA, 25 bp, Homo sapien
acacgcacgcacgtgtcccggttag

SEQ ID NO: 57990 - DNA, 25 bp, Homo sapien
acacgcacgcacctgtcccggttag

SEQ ID NO: 57991 - DNA, 25 bp, Homo sapien
tataaacacgtcactggacttgttg

SEQ ID NO: 57992 - DNA, 25 bp, Homo sapien
tataaacacgtctctggacttgttg

SEQ ID NO: 57993 - DNA, 25 bp, Homo sapien
ttatgagagacctatccacttttag

SEQ ID NO: 57994 - DNA, 25 bp, Homo sapien
ttatgagagaccaatccacttttag

SEQ ID NO: 57995 - DNA, 25 bp, Homo sapien
tggagacgaacaggtccccggagtg

SEQ ID NO: 57996 - DNA, 25 bp, Homo sapien
tggagacgaacacgtccccggagtg

SEQ ID NO: 57997 - DNA, 25 bp, Homo sapien
ggagaccaacagatccactcactgt

SEQ ID NO: 57998 - DNA, 25 bp, Homo sapien
ggagaccaacagttccactcactgt

SEQ ID NO: 57999 - DNA, 25 bp, Homo sapien
ttcggaaccaaattgactccactag

SEQ ID NO: 58000 - DNA, 25 bp, Homo sapien
ttcggaaccaaaatgactccactag

SEQ ID NO: 58001 - DNA, 25 bp, Homo sapien
acaaaccatacttaatacacattat

SEQ ID NO: 58002 - DNA, 25 bp, Homo sapien
acaaaccatactaaatacacattat

SEQ ID NO: 58003 - DNA, 25 bp, Homo sapien
tcacaagcgtacaaatgtgcattat

SEQ ID NO: 58004 - DNA, 25 bp, Homo sapien
tcacaagcgtactaatgtgcattat

SEQ ID NO: 58005 - DNA, 25 bp, Homo sapien
tgtccaaagagtggttgatccttat

SEQ ID NO: 58006 - DNA, 25 bp, Homo sapien
tgtccaaagagtcgttgatccttat

SEQ ID NO: 58007 - DNA, 25 bp, Homo sapien
ccgaaagacgttgatgtgtcaccac

SEQ ID NO: 58008 - DNA, 25 bp, Homo sapien
ccgaaagacgttcatgtgtcaccac

SEQ ID NO: 58009 - DNA, 25 bp, Homo sapien
catctagaaggacatgtttcggttc

SEQ ID NO: 58010 - DNA, 25 bp, Homo sapien
catctagaaggagatgtttcggttc

SEQ ID NO: 58011 - DNA, 25 bp, Homo sapien
tagctaaaagttgtttctacggttc

SEQ ID NO: 58012 - DNA, 25 bp, Homo sapien
tagctaaaagttctttctacggttc

SEQ ID NO: 58013 - DNA, 25 bp, Homo sapien
cttatcaaggtttagttcactgtgt

SEQ ID NO: 58014 - DNA, 25 bp, Homo sapien
cttatcaaggttaagttcactgtgt

SEQ ID NO: 58015 - DNA, 25 bp, Homo sapien
gtgatacatagtttatcgttccttt

SEQ ID NO: 58016 - DNA, 25 bp, Homo sapien
gtgatacatagtatatcgttccttt

SEQ ID NO: 58017 - DNA, 25 bp, Homo sapien
aaaaatctgtttcatctgaagtctt

SEQ ID NO: 58018 - DNA, 25 bp, Homo sapien
aaaaatctgtttgatctgaagtctt

SEQ ID NO: 58019 - DNA, 25 bp, Homo sapien
actaaacaatggttggtcatcttta

SEQ ID NO: 58020 - DNA, 25 bp, Homo sapien
actaaacaatggatggtcatcttta

SEQ ID NO: 58021 - DNA, 25 bp, Homo sapien
aaatttctatacagtcagtcgagaa

SEQ ID NO: 58022 - DNA, 25 bp, Homo sapien
aaatttctatactgtcagtcgagaa

SEQ ID NO: 58023 - DNA, 25 bp, Homo sapien
aagtcttacagttgttttgtcgacg

SEQ ID NO: 58024 - DNA, 25 bp, Homo sapien
aagtcttacagtagttttgtcgacg

SEQ ID NO: 58025 - DNA, 25 bp, Homo sapien
ctctgcagtgagttcgtcgtgtcgg

SEQ ID NO: 58026 - DNA, 25 bp, Homo sapien
ctctgcagtgagatcgtcgtgtcgg

SEQ ID NO: 58027 - DNA, 25 bp, Homo sapien
accggctacgggtcgtacgagtcgc

SEQ ID NO: 58028 - DNA, 25 bp, Homo sapien
accggctacgggacgtacgagtcgc

SEQ ID NO: 58029 - DNA, 25 bp, Homo sapien
tgcgagtttgtgaaactctagaccc

SEQ ID NO: 58030 - DNA, 25 bp, Homo sapien
tgcgagtttgtgtaactctagaccc

SEQ ID NO: 58031 - DNA, 25 bp, Homo sapien
tgcggttatgtccttccacgcacgc

SEQ ID NO: 58032 - DNA, 25 bp, Homo sapien
tgcggttatgtcgttccacgcacgc

SEQ ID NO: 58033 - DNA, 25 bp, Homo sapien
ctgttctgtcgtttccaccgagtcg

SEQ ID NO: 58034 - DNA, 25 bp, Homo sapien
ctgttctgtcgtatccaccgagtcg

SEQ ID NO: 58035 - DNA, 25 bp, Homo sapien
ttcttctcttgtcgtagtcaccccg

SEQ ID NO: 58036 - DNA, 25 bp, Homo sapien
ttcttctcttgtggtagtcaccccg

SEQ ID NO: 58037 - DNA, 25 bp, Homo sapien
ttgttatcgtggacgtgtcaccctg

SEQ ID NO: 58038 - DNA, 25 bp, Homo sapien
ttgttatcgtggtcgtgtcaccctg

SEQ ID NO: 58039 - DNA, 25 bp, Homo sapien
tcttttcgtttgaccggttcactaa

SEQ ID NO: 58040 - DNA, 25 bp, Homo sapien
tcttttcgtttgtccggttcactaa

SEQ ID NO: 58041 - DNA, 25 bp, Homo sapien
acacagattgttctagacgtgacaa

SEQ ID NO: 58042 - DNA, 25 bp, Homo sapien
acacagattgttgtagacgtgacaa

SEQ ID NO: 58043 - DNA, 25 bp, Homo sapien
ggacaagtttctcattaatgatgtc

SEQ ID NO: 58044 - DNA, 25 bp, Homo sapien
ggacaagtttctgattaatgatgtc

SEQ ID NO: 58045 - DNA, 25 bp, Homo sapien
gaaaaggatcgtatcgaactcccga

SEQ ID NO: 58046 - DNA, 25 bp, Homo sapien
gaaaaggatcgtttcgaactcccga

SEQ ID NO: 58047 - DNA, 25 bp, Homo sapien
gaacaagtgtttcgtacatccggat

SEQ ID NO: 58048 - DNA, 25 bp, Homo sapien
gaacaagtgtttggtacatccggat

SEQ ID NO: 58049 - DNA, 25 bp, Homo sapien
aagaaaatagtacaccctttcagag

SEQ ID NO: 58050 - DNA, 25 bp, Homo sapien
aagaaaatagtagaccctttcagag

SEQ ID NO: 58051 - DNA, 25 bp, Homo sapien
tctccgacaaaaggccgaagtccag

SEQ ID NO: 58052 - DNA, 25 bp, Homo sapien
tctccgacaaaacgccgaagtccag

SEQ ID NO: 58053 - DNA, 25 bp, Homo sapien
cggacgggtactcttgaactcacac

SEQ ID NO: 58054 - DNA, 25 bp, Homo sapien
cggacgggtactgttgaactcacac

SEQ ID NO: 58055 - DNA, 25 bp, Homo sapien
tcgtttggtgtcttgtataattcca

SEQ ID NO: 58056 - DNA, 25 bp, Homo sapien
tcgtttggtgtcatgtataattcca

SEQ ID NO: 58057 - DNA, 25 bp, Homo sapien
atttctttcgaaggaaatcgaccta

SEQ ID NO: 58058 - DNA, 25 bp, Homo sapien
atttctttcgaacgaaatcgaccta

SEQ ID NO: 58059 - DNA, 25 bp, Homo sapien
atcatcttctcgacagagaaaccca

SEQ ID NO: 58060 - DNA, 25 bp, Homo sapien
atcatcttctcgtcagagaaaccca

SEQ ID NO: 58061 - DNA, 25 bp, Homo sapien
aactgtttgaggagtgtcgactccc

SEQ ID NO: 58062 - DNA, 25 bp, Homo sapien
aactgtttgaggtgtgtcgactccc

SEQ ID NO: 58063 - DNA, 25 bp, Homo sapien
gcgtgtattcatagtattgactccc

SEQ ID NO: 58064 - DNA, 25 bp, Homo sapien
gcgtgtattcattgtattgactccc

SEQ ID NO: 58065 - DNA, 25 bp, Homo sapien
gtaagttacggttttacaaacccaa

SEQ ID NO: 58066 - DNA, 25 bp, Homo sapien
gtaagttacggtattacaaacccaa

SEQ ID NO: 58067 - DNA, 25 bp, Homo sapien
agtttgagagacaccaacctcgaac

SEQ ID NO: 58068 - DNA, 25 bp, Homo sapien
agtttgagagactccaacctcgaac

SEQ ID NO: 58069 - DNA, 25 bp, Homo sapien
taccacagtcctagttaccctgaac

SEQ ID NO: 58070 - DNA, 25 bp, Homo sapien
taccacagtccttgttaccctgaac

SEQ ID NO: 58071 - DNA, 25 bp, Homo sapien
atccctacgccttcgggacatgaag

SEQ ID NO: 58072 - DNA, 25 bp, Homo sapien
atccctacgcctacgggacatgaag

SEQ ID NO: 58073 - DNA, 25 bp, Homo sapien
ttcacgggtccgactcaaatgtatt

SEQ ID NO: 58074 - DNA, 25 bp, Homo sapien
ttcacgggtccgtctcaaatgtatt

SEQ ID NO: 58075 - DNA, 25 bp, Homo sapien
tccggagggtcgtcagattacttgt

SEQ ID NO: 58076 - DNA, 25 bp, Homo sapien
tccggagggtcgacagattacttgt

SEQ ID NO: 58077 - DNA, 25 bp, Homo sapien
caacctctctgtacggcaaaacttg

SEQ ID NO: 58078 - DNA, 25 bp, Homo sapien
caacctctctgttcggcaaaacttg

SEQ ID NO: 58079 - DNA, 25 bp, Homo sapien
ggatccttgtcctccactttactgt

SEQ ID NO: 58080 - DNA, 25 bp, Homo sapien
ggatccttgtccaccactttactgt

SEQ ID NO: 58081 - DNA, 25 bp, Homo sapien
gggctgttctgtctcgaggtctcct

SEQ ID NO: 58082 - DNA, 25 bp, Homo sapien
gggctgttctgtgtcgaggtctcct

SEQ ID NO: 58083 - DNA, 25 bp, Homo sapien
actcatgtgtctgtttaaatacgct

SEQ ID NO: 58084 - DNA, 25 bp, Homo sapien
actcatgtgtctctttaaatacgct

SEQ ID NO: 58085 - DNA, 25 bp, Homo sapien
taatcttccgtttttgtagtaaacc

SEQ ID NO: 58086 - DNA, 25 bp, Homo sapien
taatcttccgttattgtagtaaacc

SEQ ID NO: 58087 - DNA, 25 bp, Homo sapien
ccttacccggagtatagtgtgctcc

SEQ ID NO: 58088 - DNA, 25 bp, Homo sapien
ccttacccggagaatagtgtgctcc

SEQ ID NO: 58089 - DNA, 25 bp, Homo sapien
gctccgacgtggagacgcccgtcga

SEQ ID NO: 58090 - DNA, 25 bp, Homo sapien
gctccgacgtggtgacgcccgtcga

SEQ ID NO: 58091 - DNA, 25 bp, Homo sapien
acgttggactggtctactgagaccc

SEQ ID NO: 58092 - DNA, 25 bp, Homo sapien
acgttggactggactactgagaccc

SEQ ID NO: 58093 - DNA, 25 bp, Homo sapien
aggttcatgagtcatcgccgctcac

SEQ ID NO: 58094 - DNA, 25 bp, Homo sapien
aggttcatgagtgatcgccgctcac

SEQ ID NO: 58095 - DNA, 25 bp, Homo sapien
gtgtgtaattccaaacaccctaagt

SEQ ID NO: 58096 - DNA, 25 bp, Homo sapien
gtgtgtaattcctaacaccctaagt

SEQ ID NO: 58097 - DNA, 25 bp, Homo sapien
ctcgaggcacccagacacacatagg

SEQ ID NO: 58098 - DNA, 25 bp, Homo sapien
ctcgaggcaccctgacacacatagg

SEQ ID NO: 58099 - DNA, 25 bp, Homo sapien
tactacgccgacaacagcccgaatg

SEQ ID NO: 58100 - DNA, 25 bp, Homo sapien
tactacgccgactacagcccgaatg

SEQ ID NO: 58101 - DNA, 25 bp, Homo sapien
ggtgtcttccattacctcagaaatg

SEQ ID NO: 58102 - DNA, 25 bp, Homo sapien
ggtgtcttccataacctcagaaatg

SEQ ID NO: 58103 - DNA, 25 bp, Homo sapien
tttgctgagaacgacaggtgtatcg

SEQ ID NO: 58104 - DNA, 25 bp, Homo sapien
tttgctgagaaccacaggtgtatcg

SEQ ID NO: 58105 - DNA, 25 bp, Homo sapien
agttgtagctgaaaccgctcgggcc

SEQ ID NO: 58106 - DNA, 25 bp, Homo sapien
agttgtagctgataccgctcgggcc

SEQ ID NO: 58107 - DNA, 25 bp, Homo sapien
cgcgaagtcgtccctcacgacgaag

SEQ ID NO: 58108 - DNA, 25 bp, Homo sapien
cgcgaagtcgtcgctcacgacgaag

SEQ ID NO: 58109 - DNA, 25 bp, Homo sapien
gtcaactcgtcaactacacgtttag

SEQ ID NO: 58110 - DNA, 25 bp, Homo sapien
gtcaactcgtcatctacacgtttag

SEQ ID NO: 58111 - DNA, 25 bp, Homo sapien
tggactctccggtactacaggtacg

SEQ ID NO: 58112 - DNA, 25 bp, Homo sapien
tggactctccggaactacaggtacg

SEQ ID NO: 58113 - DNA, 25 bp, Homo sapien
ctggagtagtcaggacccacgaacg

SEQ ID NO: 58114 - DNA, 25 bp, Homo sapien
ctggagtagtcacgacccacgaacg

SEQ ID NO: 58115 - DNA, 25 bp, Homo sapien
agaaagatatcatacactcatgtgt

SEQ ID NO: 58116 - DNA, 25 bp, Homo sapien
agaaagatatcaaacactcatgtgt

SEQ ID NO: 58117 - DNA, 25 bp, Homo sapien
cagtgtaaatctctatttcgagttt

SEQ ID NO: 58118 - DNA, 25 bp, Homo sapien
cagtgtaaatctgtatttcgagttt

SEQ ID NO: 58119 - DNA, 25 bp, Homo sapien
tctcgaaatcatcaagtggacctgt

SEQ ID NO: 58120 - DNA, 25 bp, Homo sapien
tctcgaaatcatgaagtggacctgt

SEQ ID NO: 58121 - DNA, 25 bp, Homo sapien
ggggattctccatgggtgaagacct

SEQ ID NO: 58122 - DNA, 25 bp, Homo sapien
ggggattctccaagggtgaagacct

SEQ ID NO: 58123 - DNA, 25 bp, Homo sapien
tgagtcgttatcaccgggaaagttt

SEQ ID NO: 58124 - DNA, 25 bp, Homo sapien
tgagtcgttatctccgggaaagttt

SEQ ID NO: 58125 - DNA, 25 bp, Homo sapien
acaaaattacgtcgacacgagtctt

SEQ ID NO: 58126 - DNA, 25 bp, Homo sapien
acaaaattacgtggacacgagtctt

SEQ ID NO: 58127 - DNA, 25 bp, Homo sapien
cacaagaccccgggaccggagtacg

SEQ ID NO: 58128 - DNA, 25 bp, Homo sapien
cacaagaccccgcgaccggagtacg

SEQ ID NO: 58129 - DNA, 25 bp, Homo sapien
acagtcgtcacatcgtttccgggag

SEQ ID NO: 58130 - DNA, 25 bp, Homo sapien
acagtcgtcacaacgtttccgggag

SEQ ID NO: 58131 - DNA, 25 bp, Homo sapien
gtcaacccgtggtccttcccgatga

SEQ ID NO: 58132 - DNA, 25 bp, Homo sapien
gtcaacccgtggaccttcccgatga

SEQ ID NO: 58133 - DNA, 25 bp, Homo sapien
cggaaccacgggagcctgtgccgca

SEQ ID NO: 58134 - DNA, 25 bp, Homo sapien
cggaaccacgggtgcctgtgccgca

SEQ ID NO: 58135 - DNA, 25 bp, Homo sapien
ttgccaggtagttgcgccctcagga

SEQ ID NO: 58136 - DNA, 25 bp, Homo sapien
ttgccaggtagtagcgccctcagga

SEQ ID NO: 58137 - DNA, 25 bp, Homo sapien
gttagggattccagaaccccagaga

SEQ ID NO: 58138 - DNA, 25 bp, Homo sapien
gttagggattcctgaaccccagaga

SEQ ID NO: 58139 - DNA, 25 bp, Homo sapien
gtccgttaccaccaaacaaagagga

SEQ ID NO: 58140 - DNA, 25 bp, Homo sapien
gtccgttaccacgaaacaaagagga

SEQ ID NO: 58141 - DNA, 25 bp, Homo sapien
cgaaaaggaagtcaacgagtatcga

SEQ ID NO: 58142 - DNA, 25 bp, Homo sapien
cgaaaaggaagtgaacgagtatcga

SEQ ID NO: 58143 - DNA, 25 bp, Homo sapien
ttatctgagttcaataccggacagc

SEQ ID NO: 58144 - DNA, 25 bp, Homo sapien
ttatctgagttctataccggacagc

SEQ ID NO: 58145 - DNA, 25 bp, Homo sapien
atacgatctcttgactgtaaagtct

SEQ ID NO: 58146 - DNA, 25 bp, Homo sapien
atacgatctcttcactgtaaagtct

SEQ ID NO: 58147 - DNA, 25 bp, Homo sapien
tcatcgtaggtcctctgtggttgcg

SEQ ID NO: 58148 - DNA, 25 bp, Homo sapien
tcatcgtaggtcgtctgtggttgcg

SEQ ID NO: 58149 - DNA, 25 bp, Homo sapien
tcttttcggtgtaaggcgttcgact

SEQ ID NO: 58150 - DNA, 25 bp, Homo sapien
tcttttcggtgttaggcgttcgact

SEQ ID NO: 58151 - DNA, 25 bp, Homo sapien
tcgtgtttcaggacgcacgttgtag

SEQ ID NO: 58152 - DNA, 25 bp, Homo sapien
tcgtgtttcaggtcgcacgttgtag

SEQ ID NO: 58153 - DNA, 25 bp, Homo sapien
atggcggctctctcaacttcgacgt

SEQ ID NO: 58154 - DNA, 25 bp, Homo sapien
atggcggctctcacaacttcgacgt

SEQ ID NO: 58155 - DNA, 25 bp, Homo sapien
aggtacgtttctgacacggtcagtc

SEQ ID NO: 58156 - DNA, 25 bp, Homo sapien
aggtacgtttctcacacggtcagtc

SEQ ID NO: 58157 - DNA, 25 bp, Homo sapien
cgttaatgtatcgtccttcgtacaa

SEQ ID NO: 58158 - DNA, 25 bp, Homo sapien
cgttaatgtatcctccttcgtacaa

SEQ ID NO: 58159 - DNA, 25 bp, Homo sapien
tatgtagatttcacccgtgtcctgt

SEQ ID NO: 58160 - DNA, 25 bp, Homo sapien
tatgtagatttctcccgtgtcctgt

SEQ ID NO: 58161 - DNA, 25 bp, Homo sapien
agtctaccaaagaacactggctggt

SEQ ID NO: 58162 - DNA, 25 bp, Homo sapien
agtctaccaaagtacactggctggt

SEQ ID NO: 58163 - DNA, 25 bp, Homo sapien
aagtcgtccaggtccatgcctcgct

SEQ ID NO: 58164 - DNA, 25 bp, Homo sapien
aagtcgtccaggaccatgcctcgct

SEQ ID NO: 58165 - DNA, 25 bp, Homo sapien
catcgtcgactaggctcggatctcg

SEQ ID NO: 58166 - DNA, 25 bp, Homo sapien
catcgtcgactacgctcggatctcg

SEQ ID NO: 58167 - DNA, 25 bp, Homo sapien
aaaaggtactagaatactcagactc

SEQ ID NO: 58168 - DNA, 25 bp, Homo sapien
aaaaggtactagtatactcagactc

SEQ ID NO: 58169 - DNA, 25 bp, Homo sapien
tggctacggaaagtcgcttgcgtac

SEQ ID NO: 58170 - DNA, 25 bp, Homo sapien
tggctacggaaactcgcttgcgtac

SEQ ID NO: 58171 - DNA, 25 bp, Homo sapien
tactacgcgagtcacggtacgcaag

SEQ ID NO: 58172 - DNA, 25 bp, Homo sapien
tactacgcgagtgacggtacgcaag

SEQ ID NO: 58173 - DNA, 25 bp, Homo sapien
ttctgtcaccacacgacagtccagg

SEQ ID NO: 58174 - DNA, 25 bp, Homo sapien
ttctgtcaccactcgacagtccagg

SEQ ID NO: 58175 - DNA, 25 bp, Homo sapien
ttccgtgtcctgtctcggcgacggg

SEQ ID NO: 58176 - DNA, 25 bp, Homo sapien
ttccgtgtcctgactcggcgacggg

SEQ ID NO: 58177 - DNA, 25 bp, Homo sapien
ctttacgtcgttactccctcgagtc

SEQ ID NO: 58178 - DNA, 25 bp, Homo sapien
ctttacgtcgtttctccctcgagtc

SEQ ID NO: 58179 - DNA, 25 bp, Homo sapien
actctgtacgtccttcaccctgatg

SEQ ID NO: 58180 - DNA, 25 bp, Homo sapien
actctgtacgtcgttcaccctgatg

SEQ ID NO: 58181 - DNA, 25 bp, Homo sapien
cctctgactcggttctacccaagag

SEQ ID NO: 58182 - DNA, 25 bp, Homo sapien
cctctgactcggatctacccaagag

SEQ ID NO: 58183 - DNA, 25 bp, Homo sapien
acatcctctcggataacctctaggg

SEQ ID NO: 58184 - DNA, 25 bp, Homo sapien
acatcctctcggttaacctctaggg

SEQ ID NO: 58185 - DNA, 25 bp, Homo sapien
cactacaatctcttgatgtctttgg

SEQ ID NO: 58186 - DNA, 25 bp, Homo sapien
cactacaatctcatgatgtctttgg

SEQ ID NO: 58187 - DNA, 25 bp, Homo sapien
cacactaaggcctataccatatggt

SEQ ID NO: 58188 - DNA, 25 bp, Homo sapien
cacactaaggccaataccatatggt

SEQ ID NO: 58189 - DNA, 25 bp, Homo sapien
tcaaagacacgttacatgtttgtgt

SEQ ID NO: 58190 - DNA, 25 bp, Homo sapien
tcaaagacacgtaacatgtttgtgt

SEQ ID NO: 58191 - DNA, 25 bp, Homo sapien
gctagacaaagacactgtgctacgc

SEQ ID NO: 58192 - DNA, 25 bp, Homo sapien
gctagacaaagagactgtgctacgc

SEQ ID NO: 58193 - DNA, 25 bp, Homo sapien
cgtaagaacataaccctgttcgttt

SEQ ID NO: 58194 - DNA, 25 bp, Homo sapien
cgtaagaacatatccctgttcgttt

SEQ ID NO: 58195 - DNA, 25 bp, Homo sapien
tcgacgaggtcaaaacaggttttat

SEQ ID NO: 58196 - DNA, 25 bp, Homo sapien
tcgacgaggtcataacaggttttat

SEQ ID NO: 58197 - DNA, 25 bp, Homo sapien
aacgaacgttctttcaggtatatta

SEQ ID NO: 58198 - DNA, 25 bp, Homo sapien
aacgaacgttctatcaggtatatta

SEQ ID NO: 58199 - DNA, 25 bp, Homo sapien
gaaaaagtccgttctcagatactgg

SEQ ID NO: 58200 - DNA, 25 bp, Homo sapien
gaaaaagtccgtactcagatactgg

SEQ ID NO: 58201 - DNA, 25 bp, Homo sapien
acaagattgaattagactatctacg

SEQ ID NO: 58202 - DNA, 25 bp, Homo sapien
acaagattgaataagactatctacg

SEQ ID NO: 58203 - DNA, 25 bp, Homo sapien
acaatagttaaggtagagtctccac

SEQ ID NO: 58204 - DNA, 25 bp, Homo sapien
acaatagttaagctagagtctccac

SEQ ID NO: 58205 - DNA, 25 bp, Homo sapien
aacacgggaaaaacagtgtccgtga

SEQ ID NO: 58206 - DNA, 25 bp, Homo sapien
aacacgggaaaatcagtgtccgtga

SEQ ID NO: 58207 - DNA, 25 bp, Homo sapien
aagacgtaacatcgaggacgacgga

SEQ ID NO: 58208 - DNA, 25 bp, Homo sapien
aagacgtaacatggaggacgacgga

SEQ ID NO: 58209 - DNA, 25 bp, Homo sapien
gacaggcaaaagacgtcgtctataa

SEQ ID NO: 58210 - DNA, 25 bp, Homo sapien
gacaggcaaaagtcgtcgtctataa

SEQ ID NO: 58211 - DNA, 25 bp, Homo sapien
aacgggaagtagaaggagtccacaa

SEQ ID NO: 58212 - DNA, 25 bp, Homo sapien
aacgggaagtagtaggagtccacaa

SEQ ID NO: 58213 - DNA, 25 bp, Homo sapien
gaccaacatatgtagaacgactccc

SEQ ID NO: 58214 - DNA, 25 bp, Homo sapien
gaccaacatatgaagaacgactccc

SEQ ID NO: 58215 - DNA, 25 bp, Homo sapien
accaaagacgtttcggaccccgacg

SEQ ID NO: 58216 - DNA, 25 bp, Homo sapien
accaaagacgttacggaccccgacg

SEQ ID NO: 58217 - DNA, 25 bp, Homo sapien
caccagtagtatttctgggtcctta

SEQ ID NO: 58218 - DNA, 25 bp, Homo sapien
caccagtagtatatctgggtcctta

SEQ ID NO: 58219 - DNA, 25 bp, Homo sapien
tttataaagaatatttgttcctcac

SEQ ID NO: 58220 - DNA, 25 bp, Homo sapien
tttataaagaatttttgttcctcac

SEQ ID NO: 58221 - DNA, 25 bp, Homo sapien
gtcattcgtttattccgtccgtccc

SEQ ID NO: 58222 - DNA, 25 bp, Homo sapien
gtcattcgtttaatccgtccgtccc

SEQ ID NO: 58223 - DNA, 25 bp, Homo sapien
tgttgtctcttcagacttactacga

SEQ ID NO: 58224 - DNA, 25 bp, Homo sapien
tgttgtctcttctgacttactacga

SEQ ID NO: 58225 - DNA, 25 bp, Homo sapien
cgagtcccctcttcggataacgaga

SEQ ID NO: 58226 - DNA, 25 bp, Homo sapien
cgagtcccctctacggataacgaga

SEQ ID NO: 58227 - DNA, 25 bp, Homo sapien
accgtcgtcccctttgaacacagat

SEQ ID NO: 58228 - DNA, 25 bp, Homo sapien
accgtcgtccccattgaacacagat

SEQ ID NO: 58229 - DNA, 25 bp, Homo sapien
gacctctgtcatcgtatgaaccggg

SEQ ID NO: 58230 - DNA, 25 bp, Homo sapien
gacctctgtcatggtatgaaccggg

SEQ ID NO: 58231 - DNA, 25 bp, Homo sapien
cacgtctctggtacttttccacggg

SEQ ID NO: 58232 - DNA, 25 bp, Homo sapien
cacgtctctggttcttttccacggg

SEQ ID NO: 58233 - DNA, 25 bp, Homo sapien
cattgagagatatcatacttgacaa

SEQ ID NO: 58234 - DNA, 25 bp, Homo sapien
cattgagagataacatacttgacaa

SEQ ID NO: 58235 - DNA, 25 bp, Homo sapien
gacagtctacaactctttagatatg

SEQ ID NO: 58236 - DNA, 25 bp, Homo sapien
gacagtctacaagtctttagatatg

SEQ ID NO: 58237 - DNA, 25 bp, Homo sapien
agacgagtcccctcttcggataacg

SEQ ID NO: 58238 - DNA, 25 bp, Homo sapien
agacgagtccccacttcggataacg

SEQ ID NO: 58239 - DNA, 25 bp, Homo sapien
gatgataggacaaattcgttacaac

SEQ ID NO: 58240 - DNA, 25 bp, Homo sapien
gatgataggacatattcgttacaac

SEQ ID NO: 58241 - DNA, 25 bp, Homo sapien
agacagtcgacctttcttagtatct

SEQ ID NO: 58242 - DNA, 25 bp, Homo sapien
agacagtcgaccattcttagtatct

SEQ ID NO: 58243 - DNA, 25 bp, Homo sapien
aacgaagaagtctcggttttctatt

SEQ ID NO: 58244 - DNA, 25 bp, Homo sapien
aacgaagaagtcacggttttctatt

SEQ ID NO: 58245 - DNA, 25 bp, Homo sapien
agacaagaacgtaggtatcttccct

SEQ ID NO: 58246 - DNA, 25 bp, Homo sapien
agacaagaacgttggtatcttccct

SEQ ID NO: 58247 - DNA, 25 bp, Homo sapien
ggtcagtactttatgtatgttcctt

SEQ ID NO: 58248 - DNA, 25 bp, Homo sapien
ggtcagtactttttgtatgttcctt

SEQ ID NO: 58249 - DNA, 25 bp, Homo sapien
agtcaattgtacttctgtttcttag

SEQ ID NO: 58250 - DNA, 25 bp, Homo sapien
agtcaattgtacatctgtttcttag

SEQ ID NO: 58251 - DNA, 25 bp, Homo sapien
ggagctttcggaacttgtcactcaa

SEQ ID NO: 58252 - DNA, 25 bp, Homo sapien
ggagctttcggatcttgtcactcaa

SEQ ID NO: 58253 - DNA, 25 bp, Homo sapien
aaattgaggtaccagaacgtacaac

SEQ ID NO: 58254 - DNA, 25 bp, Homo sapien
aaattgaggtacgagaacgtacaac

SEQ ID NO: 58255 - DNA, 25 bp, Homo sapien
ccagtaaaaacagtcaccggtcaaa

SEQ ID NO: 58256 - DNA, 25 bp, Homo sapien
ccagtaaaaacactcaccggtcaaa

SEQ ID NO: 58257 - DNA, 25 bp, Homo sapien
cggtgcgcgacgtcaacgtgcccta

SEQ ID NO: 58258 - DNA, 25 bp, Homo sapien
cggtgcgcgacgacaacgtgcccta

SEQ ID NO: 58259 - DNA, 25 bp, Homo sapien
tggcgtgagcgaccagaagagccca

SEQ ID NO: 58260 - DNA, 25 bp, Homo sapien
tggcgtgagcgagcagaagagccca

SEQ ID NO: 58261 - DNA, 25 bp, Homo sapien
ccggtggagaagtataaacgccaga

SEQ ID NO: 58262 - DNA, 25 bp, Homo sapien
ccggtggagaagaataaacgccaga

SEQ ID NO: 58263 - DNA, 25 bp, Homo sapien
gagggacactcacagtagtaccatg

SEQ ID NO: 58264 - DNA, 25 bp, Homo sapien
gagggacactcagagtagtaccatg

SEQ ID NO: 58265 - DNA, 25 bp, Homo sapien
ccgtgagaagttcaagtgtcatggt

SEQ ID NO: 58266 - DNA, 25 bp, Homo sapien
ccgtgagaagttgaagtgtcatggt

SEQ ID NO: 58267 - DNA, 25 bp, Homo sapien
atctagagagccacagtgtcttctt

SEQ ID NO: 58268 - DNA, 25 bp, Homo sapien
atctagagagcctcagtgtcttctt

SEQ ID NO: 58269 - DNA, 25 bp, Homo sapien
atgtagatgaccacggtattgtcta

SEQ ID NO: 58270 - DNA, 25 bp, Homo sapien
atgtagatgacctcggtattgtcta

SEQ ID NO: 58271 - DNA, 25 bp, Homo sapien
gaaactagacttgagaactgtccac

SEQ ID NO: 58272 - DNA, 25 bp, Homo sapien
gaaactagacttcagaactgtccac

SEQ ID NO: 58273 - DNA, 25 bp, Homo sapien
cggaagaaagcattaatgtgtcctc

SEQ ID NO: 58274 - DNA, 25 bp, Homo sapien
cggaagaaagcaataatgtgtcctc

SEQ ID NO: 58275 - DNA, 25 bp, Homo sapien
ccgttcgaagaagaacttcttccta

SEQ ID NO: 58276 - DNA, 25 bp, Homo sapien
ccgttcgaagaacaacttcttccta

SEQ ID NO: 58277 - DNA, 25 bp, Homo sapien
tcttagtaagtgaacttcttcgctg

SEQ ID NO: 58278 - DNA, 25 bp, Homo sapien
tcttagtaagtgtacttcttcgctg

SEQ ID NO: 58279 - DNA, 25 bp, Homo sapien
ttttagaagagaccttctatgtaac

SEQ ID NO: 58280 - DNA, 25 bp, Homo sapien
ttttagaagagagcttctatgtaac

SEQ ID NO: 58281 - DNA, 25 bp, Homo sapien
gtatgtaagtaaaatcctctctttg

SEQ ID NO: 58282 - DNA, 25 bp, Homo sapien
gtatgtaagtaatatcctctctttg

SEQ ID NO: 58283 - DNA, 25 bp, Homo sapien
ttgtgtctgaagtccgtgtctgatg

SEQ ID NO: 58284 - DNA, 25 bp, Homo sapien
ttgtgtctgaagaccgtgtctgatg

SEQ ID NO: 58285 - DNA, 25 bp, Homo sapien
cgctcgagagagaacgaggtctttg

SEQ ID NO: 58286 - DNA, 25 bp, Homo sapien
cgctcgagagagtacgaggtctttg

SEQ ID NO: 58287 - DNA, 25 bp, Homo sapien
atggctgcgaggaacgattacctca

SEQ ID NO: 58288 - DNA, 25 bp, Homo sapien
atggctgcgaggtacgattacctca

SEQ ID NO: 58289 - DNA, 25 bp, Homo sapien
agcctagtaaggtaccgtcacttca

SEQ ID NO: 58290 - DNA, 25 bp, Homo sapien
agcctagtaaggaaccgtcacttca

SEQ ID NO: 58291 - DNA, 25 bp, Homo sapien
aacaccacggggtctccgtggtaca

SEQ ID NO: 58292 - DNA, 25 bp, Homo sapien
aacaccacggggactccgtggtaca

SEQ ID NO: 58293 - DNA, 25 bp, Homo sapien
ggactcctcggtgcaattgggtacc

SEQ ID NO: 58294 - DNA, 25 bp, Homo sapien
ggactcctcggtccaattgggtacc

SEQ ID NO: 58295 - DNA, 25 bp, Homo sapien
tatccgtagggtagtcggagtaacg

SEQ ID NO: 58296 - DNA, 25 bp, Homo sapien
tatccgtagggttgtcggagtaacg

SEQ ID NO: 58297 - DNA, 25 bp, Homo sapien
cccttcggtggtgactcgggtacag

SEQ ID NO: 58298 - DNA, 25 bp, Homo sapien
cccttcggtggtcactcgggtacag

SEQ ID NO: 58299 - DNA, 25 bp, Homo sapien
acctctagagagttgcacgagtcac

SEQ ID NO: 58300 - DNA, 25 bp, Homo sapien
acctctagagagatgcacgagtcac

SEQ ID NO: 58301 - DNA, 25 bp, Homo sapien
ttgagtcgtcgagactaggttccat

SEQ ID NO: 58302 - DNA, 25 bp, Homo sapien
ttgagtcgtcgacactaggttccat

SEQ ID NO: 58303 - DNA, 25 bp, Homo sapien
tcgacgttctaggaagtgaactccg

SEQ ID NO: 58304 - DNA, 25 bp, Homo sapien
tcgacgttctagcaagtgaactccg

SEQ ID NO: 58305 - DNA, 25 bp, Homo sapien
gtcttactacgtattcgacatcggt

SEQ ID NO: 58306 - DNA, 25 bp, Homo sapien
gtcttactacgttttcgacatcggt

SEQ ID NO: 58307 - DNA, 25 bp, Homo sapien
cgttctagtccgtcgtacgtccggt

SEQ ID NO: 58308 - DNA, 25 bp, Homo sapien
cgttctagtccgacgtacgtccggt

SEQ ID NO: 58309 - DNA, 25 bp, Homo sapien
cctccaggtttcgttactcgaccgg

SEQ ID NO: 58310 - DNA, 25 bp, Homo sapien
cctccaggtttccttactcgaccgg

SEQ ID NO: 58311 - DNA, 25 bp, Homo sapien
tctgttatttgtcgattcgatgact

SEQ ID NO: 58312 - DNA, 25 bp, Homo sapien
tctgttatttgtggattcgatgact

SEQ ID NO: 58313 - DNA, 25 bp, Homo sapien
ttcttgaatgtggactactccgtgg

SEQ ID NO: 58314 - DNA, 25 bp, Homo sapien
ttcttgaatgtgcactactccgtgg

SEQ ID NO: 58315 - DNA, 25 bp, Homo sapien
cgagattcccagtctctctttggtc

SEQ ID NO: 58316 - DNA, 25 bp, Homo sapien
cgagattcccagactctctttggtc

SEQ ID NO: 58317 - DNA, 25 bp, Homo sapien
ttgttcgccagtactttgtcggtgc

SEQ ID NO: 58318 - DNA, 25 bp, Homo sapien
ttgttcgccagttctttgtcggtgc

SEQ ID NO: 58319 - DNA, 25 bp, Homo sapien
agcacactgttcagcgtttcgtggt

SEQ ID NO: 58320 - DNA, 25 bp, Homo sapien
agcacactgttctgcgtttcgtggt

SEQ ID NO: 58321 - DNA, 25 bp, Homo sapien
gtcgacgttaagtatgctttcggtg

SEQ ID NO: 58322 - DNA, 25 bp, Homo sapien
gtcgacgttaagaatgctttcggtg

SEQ ID NO: 58323 - DNA, 25 bp, Homo sapien
acgattttgactcgtactttagaga

SEQ ID NO: 58324 - DNA, 25 bp, Homo sapien
acgattttgactggtactttagaga

SEQ ID NO: 58325 - DNA, 25 bp, Homo sapien
gtggggttttctggtccttagacag

SEQ ID NO: 58326 - DNA, 25 bp, Homo sapien
gtggggttttctcgtccttagacag

SEQ ID NO: 58327 - DNA, 25 bp, Homo sapien
aagttttcatcttacccgtagaggt

SEQ ID NO: 58328 - DNA, 25 bp, Homo sapien
aagttttcatctaacccgtagaggt

SEQ ID NO: 58329 - DNA, 25 bp, Homo sapien
tattagagtcaggtactcccacatt

SEQ ID NO: 58330 - DNA, 25 bp, Homo sapien
tattagagtcagctactcccacatt

SEQ ID NO: 58331 - DNA, 25 bp, Homo sapien
gattgaagtaagacccgaaacgtct

SEQ ID NO: 58332 - DNA, 25 bp, Homo sapien
gattgaagtaagtcccgaaacgtct

SEQ ID NO: 58333 - DNA, 25 bp, Homo sapien
tcctaagtgtggaccggactcgtgt

SEQ ID NO: 58334 - DNA, 25 bp, Homo sapien
tcctaagtgtggtccggactcgtgt

SEQ ID NO: 58335 - DNA, 25 bp, Homo sapien
tctgcccggtgacgtccagcgtcgg

SEQ ID NO: 58336 - DNA, 25 bp, Homo sapien
tctgcccggtgaggtccagcgtcgg

SEQ ID NO: 58337 - DNA, 25 bp, Homo sapien
tcagtcctcctggtatccggtccgg

SEQ ID NO: 58338 - DNA, 25 bp, Homo sapien
tcagtcctcctgctatccggtccgg

SEQ ID NO: 58339 - DNA, 25 bp, Homo sapien
catgacccgcttgtgtcggagcagg

SEQ ID NO: 58340 - DNA, 25 bp, Homo sapien
catgacccgcttctgtcggagcagg

SEQ ID NO: 58341 - DNA, 25 bp, Homo sapien
ggtgacccacagtcctaaagaagac

SEQ ID NO: 58342 - DNA, 25 bp, Homo sapien
ggtgacccacagacctaaagaagac

SEQ ID NO: 58343 - DNA, 25 bp, Homo sapien
ttcctcaagtgacgtaaacctatcg

SEQ ID NO: 58344 - DNA, 25 bp, Homo sapien
ttcctcaagtgaggtaaacctatcg

SEQ ID NO: 58345 - DNA, 25 bp, Homo sapien
tctccgtcaggtaaaggaacactcc

SEQ ID NO: 58346 - DNA, 25 bp, Homo sapien
tctccgtcaggttaaggaacactcc

SEQ ID NO: 58347 - DNA, 25 bp, Homo sapien
ggtctgagaagaacgggtacttcac

SEQ ID NO: 58348 - DNA, 25 bp, Homo sapien
ggtctgagaagatcgggtacttcac

SEQ ID NO: 58349 - DNA, 25 bp, Homo sapien
gttgcgacagttcatgtgtgacgac

SEQ ID NO: 58350 - DNA, 25 bp, Homo sapien
gttgcgacagttgatgtgtgacgac

SEQ ID NO: 58351 - DNA, 25 bp, Homo sapien
aagtctaggatgtcggtgcacacga

SEQ ID NO: 58352 - DNA, 25 bp, Homo sapien
aagtctaggatgacggtgcacacga

SEQ ID NO: 58353 - DNA, 25 bp, Homo sapien
acagttacttgtttcattaacagtg

SEQ ID NO: 58354 - DNA, 25 bp, Homo sapien
acagttacttgtatcattaacagtg

SEQ ID NO: 58355 - DNA, 25 bp, Homo sapien
cgtattcgtcttgacataaaactcg

SEQ ID NO: 58356 - DNA, 25 bp, Homo sapien
cgtattcgtcttcacataaaactcg

SEQ ID NO: 58357 - DNA, 25 bp, Homo sapien
cgacttctcgaggaacatctcacct

SEQ ID NO: 58358 - DNA, 25 bp, Homo sapien
cgacttctcgagcaacatctcacct

SEQ ID NO: 58359 - DNA, 25 bp, Homo sapien
acaacaagagtaactcatcgacgaa

SEQ ID NO: 58360 - DNA, 25 bp, Homo sapien
acaacaagagtatctcatcgacgaa

SEQ ID NO: 58361 - DNA, 25 bp, Homo sapien
gttacgtcgtcatcaccacgagtag

SEQ ID NO: 58362 - DNA, 25 bp, Homo sapien
gttacgtcgtcaacaccacgagtag

SEQ ID NO: 58363 - DNA, 25 bp, Homo sapien
gtcaatgtcgtcacgtatcacaagt

SEQ ID NO: 58364 - DNA, 25 bp, Homo sapien
gtcaatgtcgtctcgtatcacaagt

SEQ ID NO: 58365 - DNA, 25 bp, Homo sapien
ggaactcgagactctcttacacagt

SEQ ID NO: 58366 - DNA, 25 bp, Homo sapien
ggaactcgagacactcttacacagt

SEQ ID NO: 58367 - DNA, 25 bp, Homo sapien
actaaagacccgttaccgtcctggt

SEQ ID NO: 58368 - DNA, 25 bp, Homo sapien
actaaagacccgataccgtcctggt

SEQ ID NO: 58369 - DNA, 25 bp, Homo sapien
tacaagttcgtctttcgcgcactga

SEQ ID NO: 58370 - DNA, 25 bp, Homo sapien
tacaagttcgtcattcgcgcactga

SEQ ID NO: 58371 - DNA, 25 bp, Homo sapien
aataacgtaacaaatcgcgcctgac

SEQ ID NO: 58372 - DNA, 25 bp, Homo sapien
aataacgtaacatatcgcgcctgac

SEQ ID NO: 58373 - DNA, 25 bp, Homo sapien
cacagaccgatagacgtcacgacga

SEQ ID NO: 58374 - DNA, 25 bp, Homo sapien
cacagaccgatacacgtcacgacga

SEQ ID NO: 58375 - DNA, 25 bp, Homo sapien
tgtctagacgagtagttgagaccga

SEQ ID NO: 58376 - DNA, 25 bp, Homo sapien
tgtctagacgagaagttgagaccga

SEQ ID NO: 58377 - DNA, 25 bp, Homo sapien
tgaaacgaacacgttctaaacaaga

SEQ ID NO: 58378 - DNA, 25 bp, Homo sapien
tgaaacgaacaccttctaaacaaga

SEQ ID NO: 58379 - DNA, 25 bp, Homo sapien
aaagtcggttatagtactaccaagt

SEQ ID NO: 58380 - DNA, 25 bp, Homo sapien
aaagtcggttattgtactaccaagt

SEQ ID NO: 58381 - DNA, 25 bp, Homo sapien
taaagaaaagggactctaacccaag

SEQ ID NO: 58382 - DNA, 25 bp, Homo sapien
taaagaaaagggtctctaacccaag

SEQ ID NO: 58383 - DNA, 25 bp, Homo sapien
aagagacggccgaactacccgatcg

SEQ ID NO: 58384 - DNA, 25 bp, Homo sapien
aagagacggccgtactacccgatcg

SEQ ID NO: 58385 - DNA, 25 bp, Homo sapien
catgtacactggtactcttcttacg

SEQ ID NO: 58386 - DNA, 25 bp, Homo sapien
catgtacactggaactcttcttacg

SEQ ID NO: 58387 - DNA, 25 bp, Homo sapien
acgttccatcgaaccgatctgtcgt

SEQ ID NO: 58388 - DNA, 25 bp, Homo sapien
acgttccatcgatccgatctgtcgt

SEQ ID NO: 58389 - DNA, 25 bp, Homo sapien
cgtttcagaccgagaccggtttgta

SEQ ID NO: 58390 - DNA, 25 bp, Homo sapien
cgtttcagaccgtgaccggtttgta

SEQ ID NO: 58391 - DNA, 25 bp, Homo sapien
ttttgacgtcggttccgttcttgag

SEQ ID NO: 58392 - DNA, 25 bp, Homo sapien
ttttgacgtcggatccgttcttgag

SEQ ID NO: 58393 - DNA, 25 bp, Homo sapien
ctttagaacgaaagtccgttcccga

SEQ ID NO: 58394 - DNA, 25 bp, Homo sapien
ctttagaacgaatgtccgttcccga

SEQ ID NO: 58395 - DNA, 25 bp, Homo sapien
ttacgatagtgtaggtttctcacca

SEQ ID NO: 58396 - DNA, 25 bp, Homo sapien
ttacgatagtgttggtttctcacca

SEQ ID NO: 58397 - DNA, 25 bp, Homo sapien
ccgtagaaaccaaggtttcttcgcc

SEQ ID NO: 58398 - DNA, 25 bp, Homo sapien
ccgtagaaaccatggtttcttcgcc

SEQ ID NO: 58399 - DNA, 25 bp, Homo sapien
tagaactccatgacgtcccgtgccg

SEQ ID NO: 58400 - DNA, 25 bp, Homo sapien
tagaactccatgtcgtcccgtgccg

SEQ ID NO: 58401 - DNA, 25 bp, Homo sapien
acactggatgtacgtcccagagacg

SEQ ID NO: 58402 - DNA, 25 bp, Homo sapien
acactggatgtaggtcccagagacg

SEQ ID NO: 58403 - DNA, 25 bp, Homo sapien
gtcagggtatagtctccgtacggag

SEQ ID NO: 58404 - DNA, 25 bp, Homo sapien
gtcagggtatagactccgtacggag

SEQ ID NO: 58405 - DNA, 25 bp, Homo sapien
ggtgcggttcagtcttcgacgagta

SEQ ID NO: 58406 - DNA, 25 bp, Homo sapien
ggtgcggttcagacttcgacgagta

SEQ ID NO: 58407 - DNA, 25 bp, Homo sapien
gttcggtgtcattcttactcgacat

SEQ ID NO: 58408 - DNA, 25 bp, Homo sapien
gttcggtgtcatacttactcgacat

SEQ ID NO: 58409 - DNA, 25 bp, Homo sapien
tgacttgttttgacatcgtttccta

SEQ ID NO: 58410 - DNA, 25 bp, Homo sapien
tgacttgttttgtcatcgtttccta

SEQ ID NO: 58411 - DNA, 25 bp, Homo sapien
agtgttttctctttccttgaacgtg

SEQ ID NO: 58412 - DNA, 25 bp, Homo sapien
agtgttttctctatccttgaacgtg

SEQ ID NO: 58413 - DNA, 25 bp, Homo sapien
ctgctgtactttcagttatatgtgt

SEQ ID NO: 58414 - DNA, 25 bp, Homo sapien
ctgctgtactttgagttatatgtgt

SEQ ID NO: 58415 - DNA, 25 bp, Homo sapien
ggaccaggacgtaagacgggttata

SEQ ID NO: 58416 - DNA, 25 bp, Homo sapien
ggaccaggacgttagacgggttata

SEQ ID NO: 58417 - DNA, 25 bp, Homo sapien
ttccggtgacactgaagtgtgctgt

SEQ ID NO: 58418 - DNA, 25 bp, Homo sapien
ttccggtgacacagaagtgtgctgt

SEQ ID NO: 58419 - DNA, 25 bp, Homo sapien
tgcccgtcacgatggagacgcccgt

SEQ ID NO: 58420 - DNA, 25 bp, Homo sapien
tgcccgtcacgaaggagacgcccgt

SEQ ID NO: 58421 - DNA, 25 bp, Homo sapien
tgtcgggccccgcaggggtccctgt

SEQ ID NO: 58422 - DNA, 25 bp, Homo sapien
tgtcgggccccggaggggtccctgt

SEQ ID NO: 58423 - DNA, 25 bp, Homo sapien
ggtccgggggccgtccgtggtctcg

SEQ ID NO: 58424 - DNA, 25 bp, Homo sapien
ggtccgggggccctccgtggtctcg

SEQ ID NO: 58425 - DNA, 25 bp, Homo sapien
ggaccaccttgactcggttagtccc

SEQ ID NO: 58426 - DNA, 25 bp, Homo sapien
ggaccaccttgagtcggttagtccc

SEQ ID NO: 58427 - DNA, 25 bp, Homo sapien
tacgttttatgtgtcagtaccgtct

SEQ ID NO: 58428 - DNA, 25 bp, Homo sapien
tacgttttatgtctcagtaccgtct

SEQ ID NO: 58429 - DNA, 25 bp, Homo sapien
cgtatctagtatgaatcactctccg

SEQ ID NO: 58430 - DNA, 25 bp, Homo sapien
cgtatctagtatcaatcactctccg

SEQ ID NO: 58431 - DNA, 25 bp, Homo sapien
tcctttagtgtctgagaatgtactc

SEQ ID NO: 58432 - DNA, 25 bp, Homo sapien
tcctttagtgtcagagaatgtactc

SEQ ID NO: 58433 - DNA, 25 bp, Homo sapien
tctaatttagtagagactgtgtacc

SEQ ID NO: 58434 - DNA, 25 bp, Homo sapien
tctaatttagtacagactgtgtacc

SEQ ID NO: 58435 - DNA, 25 bp, Homo sapien
cggacttgtagtgtagaagtctctt

SEQ ID NO: 58436 - DNA, 25 bp, Homo sapien
cggacttgtagtctagaagtctctt

SEQ ID NO: 58437 - DNA, 25 bp, Homo sapien
cctgtcgacgaaggtttggattgtt

SEQ ID NO: 58438 - DNA, 25 bp, Homo sapien
cctgtcgacgaacgtttggattgtt

SEQ ID NO: 58439 - DNA, 25 bp, Homo sapien
atttgactcaaggtaatctcttgtt

SEQ ID NO: 58440 - DNA, 25 bp, Homo sapien
atttgactcaagctaatctcttgtt

SEQ ID NO: 58441 - DNA, 25 bp, Homo sapien
tgttgtcgtcaaggaatcctcggtt

SEQ ID NO: 58442 - DNA, 25 bp, Homo sapien
tgttgtcgtcaacgaatcctcggtt

SEQ ID NO: 58443 - DNA, 25 bp, Homo sapien
catgactcgtcctaatggtaccgtt

SEQ ID NO: 58444 - DNA, 25 bp, Homo sapien
catgactcgtccaaatggtaccgtt

SEQ ID NO: 58445 - DNA, 25 bp, Homo sapien
gatggacgaccgtcaagaaagtcgt

SEQ ID NO: 58446 - DNA, 25 bp, Homo sapien
gatggacgaccgacaagaaagtcgt

SEQ ID NO: 58447 - DNA, 25 bp, Homo sapien
acttaatcgtcgtacataacaacgg

SEQ ID NO: 58448 - DNA, 25 bp, Homo sapien
acttaatcgtcgaacataacaacgg

SEQ ID NO: 58449 - DNA, 25 bp, Homo sapien
aataagttccagtagcactacgact

SEQ ID NO: 58450 - DNA, 25 bp, Homo sapien
aataagttccagaagcactacgact

SEQ ID NO: 58451 - DNA, 25 bp, Homo sapien
aatatatgtttggacgtcacagact

SEQ ID NO: 58452 - DNA, 25 bp, Homo sapien
aatatatgtttgcacgtcacagact

SEQ ID NO: 58453 - DNA, 25 bp, Homo sapien
gtgaaacctttattgtgacttaaac

SEQ ID NO: 58454 - DNA, 25 bp, Homo sapien
gtgaaacctttaatgtgacttaaac

SEQ ID NO: 58455 - DNA, 25 bp, Homo sapien
aagtctgtccagttgtatatactaa

SEQ ID NO: 58456 - DNA, 25 bp, Homo sapien
aagtctgtccagatgtatatactaa

SEQ ID NO: 58457 - DNA, 25 bp, Homo sapien
gaaggtactccttcttgtgaaacac

SEQ ID NO: 58458 - DNA, 25 bp, Homo sapien
gaaggtactcctacttgtgaaacac

SEQ ID NO: 58459 - DNA, 25 bp, Homo sapien
gacggtccccaggtctaggacggtc

SEQ ID NO: 58460 - DNA, 25 bp, Homo sapien
gacggtccccagctctaggacggtc

SEQ ID NO: 58461 - DNA, 25 bp, Homo sapien
tgagagtacatacaacacccacagc

SEQ ID NO: 58462 - DNA, 25 bp, Homo sapien
tgagagtacatagaacacccacagc

SEQ ID NO: 58463 - DNA, 25 bp, Homo sapien
gaaggagtataagaaactgccaaac

SEQ ID NO: 58464 - DNA, 25 bp, Homo sapien
gaaggagtataacaaactgccaaac

SEQ ID NO: 58465 - DNA, 25 bp, Homo sapien
gtttgttaagaaacatgtcaccaaa

SEQ ID NO: 58466 - DNA, 25 bp, Homo sapien
gtttgttaagaatcatgtcaccaaa

SEQ ID NO: 58467 - DNA, 25 bp, Homo sapien
tcgtgtaaattcgtaagatcccaaa

SEQ ID NO: 58468 - DNA, 25 bp, Homo sapien
tcgtgtaaattcctaagatcccaaa

SEQ ID NO: 58469 - DNA, 25 bp, Homo sapien
tgaaccttacctaaaactccgttta

SEQ ID NO: 58470 - DNA, 25 bp, Homo sapien
tgaaccttaccttaaactccgttta

SEQ ID NO: 58471 - DNA, 25 bp, Homo sapien
cgtttttcctagactagaacgattg

SEQ ID NO: 58472 - DNA, 25 bp, Homo sapien
cgtttttcctagtctagaacgattg

SEQ ID NO: 58473 - DNA, 25 bp, Homo sapien
ttttgactctgaaccgaaataatgt

SEQ ID NO: 58474 - DNA, 25 bp, Homo sapien
ttttgactctgatccgaaataatgt

SEQ ID NO: 58475 - DNA, 25 bp, Homo sapien
ttgtcgtgacgtaccaaagatataa

SEQ ID NO: 58476 - DNA, 25 bp, Homo sapien
ttgtcgtgacgttccaaagatataa

SEQ ID NO: 58477 - DNA, 25 bp, Homo sapien
cgatgtgggataacgaaccgggtaa

SEQ ID NO: 58478 - DNA, 25 bp, Homo sapien
cgatgtgggatatcgaaccgggtaa

SEQ ID NO: 58479 - DNA, 25 bp, Homo sapien
cgttgtcggaaatgtaacccgggac

SEQ ID NO: 58480 - DNA, 25 bp, Homo sapien
cgttgtcggaaaagtaacccgggac

SEQ ID NO: 58481 - DNA, 25 bp, Homo sapien
ctggtgggccactgacatcggtata

SEQ ID NO: 58482 - DNA, 25 bp, Homo sapien
ctggtgggccacagacatcggtata

SEQ ID NO: 58483 - DNA, 25 bp, Homo sapien
ctgttgagatccaaacttagttatt

SEQ ID NO: 58484 - DNA, 25 bp, Homo sapien
ctgttgagatcctaacttagttatt

SEQ ID NO: 58485 - DNA, 25 bp, Homo sapien
gtgtcgattccatgtcgttgtgtca

SEQ ID NO: 58486 - DNA, 25 bp, Homo sapien
gtgtcgattccaagtcgttgtgtca

SEQ ID NO: 58487 - DNA, 25 bp, Homo sapien
ggcgactcataaaatctccctcgac

SEQ ID NO: 58488 - DNA, 25 bp, Homo sapien
ggcgactcataatatctccctcgac

SEQ ID NO: 58489 - DNA, 25 bp, Homo sapien
tcgatatgacctttcctcgtagcta

SEQ ID NO: 58490 - DNA, 25 bp, Homo sapien
tcgatatgacctatcctcgtagcta

SEQ ID NO: 58491 - DNA, 25 bp, Homo sapien
ctgtattttaacatgattttccgtg

SEQ ID NO: 58492 - DNA, 25 bp, Homo sapien
ctgtattttaacttgattttccgtg

SEQ ID NO: 58493 - DNA, 25 bp, Homo sapien
cctagatttatgaaggtttgtcctc

SEQ ID NO: 58494 - DNA, 25 bp, Homo sapien
cctagatttatgtaggtttgtcctc

SEQ ID NO: 58495 - DNA, 25 bp, Homo sapien
ccctacatctttcgatgtgacctcg

SEQ ID NO: 58496 - DNA, 25 bp, Homo sapien
ccctacatctttggatgtgacctcg

SEQ ID NO: 58497 - DNA, 25 bp, Homo sapien
gatcctcctctttgtccaagactga

SEQ ID NO: 58498 - DNA, 25 bp, Homo sapien
gatcctcctcttagtccaagactga

SEQ ID NO: 58499 - DNA, 25 bp, Homo sapien
ggacctcctcgttactgagactaac

SEQ ID NO: 58500 - DNA, 25 bp, Homo sapien
ggacctcctcgtaactgagactaac

SEQ ID NO: 58501 - DNA, 25 bp, Homo sapien
ggtccgtctcctctgtagtcgactc

SEQ ID NO: 58502 - DNA, 25 bp, Homo sapien
ggtccgtctcctgtgtagtcgactc

SEQ ID NO: 58503 - DNA, 25 bp, Homo sapien
tatactctcctcccaaatgtcactc

SEQ ID NO: 58504 - DNA, 25 bp, Homo sapien
tatactctcctcgcaaatgtcactc

SEQ ID NO: 58505 - DNA, 25 bp, Homo sapien
atccgcagtaccacaatagcacgac

SEQ ID NO: 58506 - DNA, 25 bp, Homo sapien
atccgcagtacctcaatagcacgac

SEQ ID NO: 58507 - DNA, 25 bp, Homo sapien
agcccggtacgcagagaggacctgc

SEQ ID NO: 58508 - DNA, 25 bp, Homo sapien
agcccggtacgctgagaggacctgc

SEQ ID NO: 58509 - DNA, 25 bp, Homo sapien
agacacgacggaccttggcccacgg

SEQ ID NO: 58510 - DNA, 25 bp, Homo sapien
agacacgacggagcttggcccacgg

SEQ ID NO: 58511 - DNA, 25 bp, Homo sapien
gttgaactcgttggtcaaagcgaaa

SEQ ID NO: 58512 - DNA, 25 bp, Homo sapien
gttgaactcgttcgtcaaagcgaaa

SEQ ID NO: 58513 - DNA, 25 bp, Homo sapien
agttcattctgtgtcgaaagcaaat

SEQ ID NO: 58514 - DNA, 25 bp, Homo sapien
agttcattctgtctcgaaagcaaat

SEQ ID NO: 58515 - DNA, 25 bp, Homo sapien
cagttcggtgtctgatccacattat

SEQ ID NO: 58516 - DNA, 25 bp, Homo sapien
cagttcggtgtcagatccacattat

SEQ ID NO: 58517 - DNA, 25 bp, Homo sapien
gtcagtcaatgtcaggtttaccctt

SEQ ID NO: 58518 - DNA, 25 bp, Homo sapien
gtcagtcaatgtgaggtttaccctt

SEQ ID NO: 58519 - DNA, 25 bp, Homo sapien
agtttgtgtcggtacttacttcgtt

SEQ ID NO: 58520 - DNA, 25 bp, Homo sapien
agtttgtgtcggaacttacttcgtt

SEQ ID NO: 58521 - DNA, 25 bp, Homo sapien
aaaagtgttacataaaactcttcga

SEQ ID NO: 58522 - DNA, 25 bp, Homo sapien
aaaagtgttacaaaaaactcttcga

SEQ ID NO: 58523 - DNA, 25 bp, Homo sapien
atgtctcaatacatgtgtccatgtg

SEQ ID NO: 58524 - DNA, 25 bp, Homo sapien
atgtctcaatacttgtgtccatgtg

SEQ ID NO: 58525 - DNA, 25 bp, Homo sapien
tacagacagggtggttctccggtag

SEQ ID NO: 58526 - DNA, 25 bp, Homo sapien
tacagacagggtcgttctccggtag

SEQ ID NO: 58527 - DNA, 25 bp, Homo sapien
tctcaggagggtccagtagtccagg

SEQ ID NO: 58528 - DNA, 25 bp, Homo sapien
tctcaggagggtgcagtagtccagg

SEQ ID NO: 58529 - DNA, 25 bp, Homo sapien
tctctctgtggtcgttaaaccgtgg

SEQ ID NO: 58530 - DNA, 25 bp, Homo sapien
tctctctgtggtggttaaaccgtgg

SEQ ID NO: 58531 - DNA, 25 bp, Homo sapien
tgtagactctatctcggaaaaagtt

SEQ ID NO: 58532 - DNA, 25 bp, Homo sapien
tgtagactctatgtcggaaaaagtt

SEQ ID NO: 58533 - DNA, 25 bp, Homo sapien
tccttgaatccgtcggaactccatc

SEQ ID NO: 58534 - DNA, 25 bp, Homo sapien
tccttgaatccgacggaactccatc

SEQ ID NO: 58535 - DNA, 25 bp, Homo sapien
gtgtctttcgaaagagaacacataa

SEQ ID NO: 58536 - DNA, 25 bp, Homo sapien
gtgtctttcgaatgagaacacataa

SEQ ID NO: 58537 - DNA, 25 bp, Homo sapien
gattttaccaataataaccggtcag

SEQ ID NO: 58538 - DNA, 25 bp, Homo sapien
gattttaccaattataaccggtcag

SEQ ID NO: 58539 - DNA, 25 bp, Homo sapien
tcgtattagaaattaacaccatgag

SEQ ID NO: 58540 - DNA, 25 bp, Homo sapien
tcgtattagaaaataacaccatgag

SEQ ID NO: 58541 - DNA, 25 bp, Homo sapien
tactattgaaccagaaaccagaagt

SEQ ID NO: 58542 - DNA, 25 bp, Homo sapien
tactattgaacctgaaaccagaagt

SEQ ID NO: 58543 - DNA, 25 bp, Homo sapien
ctatgttttaccgacttgaagtaga

SEQ ID NO: 58544 - DNA, 25 bp, Homo sapien
ctatgttttacccacttgaagtaga

SEQ ID NO: 58545 - DNA, 25 bp, Homo sapien
aaatctattagacacgggactgtga

SEQ ID NO: 58546 - DNA, 25 bp, Homo sapien
aaatctattagagacgggactgtga

SEQ ID NO: 58547 - DNA, 25 bp, Homo sapien
tcgtttccggcgaaccagaggtgga

SEQ ID NO: 58548 - DNA, 25 bp, Homo sapien
tcgtttccggcgtaccagaggtgga

SEQ ID NO: 58549 - DNA, 25 bp, Homo sapien
ggacacgggcgacgaccagccgcga

SEQ ID NO: 58550 - DNA, 25 bp, Homo sapien
ggacacgggcgaggaccagccgcga

SEQ ID NO: 58551 - DNA, 25 bp, Homo sapien
aggaacggttgacgtccctgtggac

SEQ ID NO: 58552 - DNA, 25 bp, Homo sapien
aggaacggttgaggtccctgtggac

SEQ ID NO: 58553 - DNA, 25 bp, Homo sapien
gtcttactcgtttccgaattggaga

SEQ ID NO: 58554 - DNA, 25 bp, Homo sapien
gtcttactcgttaccgaattggaga

SEQ ID NO: 58555 - DNA, 25 bp, Homo sapien
ttgctggtgttcgtaaaggacagtc

SEQ ID NO: 58556 - DNA, 25 bp, Homo sapien
ttgctggtgttcctaaaggacagtc

SEQ ID NO: 58557 - DNA, 25 bp, Homo sapien
tacctggacatgttaaagttatcta

SEQ ID NO: 58558 - DNA, 25 bp, Homo sapien
tacctggacatgataaagttatcta

SEQ ID NO: 58559 - DNA, 25 bp, Homo sapien
gaaccttatgtgtcaaatgtctaac

SEQ ID NO: 58560 - DNA, 25 bp, Homo sapien
gaaccttatgtgacaaatgtctaac

SEQ ID NO: 58561 - DNA, 25 bp, Homo sapien
aaatgtcttgtcagttaatgtcaac

SEQ ID NO: 58562 - DNA, 25 bp, Homo sapien
aaatgtcttgtctgttaatgtcaac

SEQ ID NO: 58563 - DNA, 25 bp, Homo sapien
aactgtgtttgtacctaatgaaact

SEQ ID NO: 58564 - DNA, 25 bp, Homo sapien
aactgtgtttgttcctaatgaaact

SEQ ID NO: 58565 - DNA, 25 bp, Homo sapien
tggagggttctactacccagtttcc

SEQ ID NO: 58566 - DNA, 25 bp, Homo sapien
tggagggttctagtacccagtttcc

SEQ ID NO: 58567 - DNA, 25 bp, Homo sapien
cggagggctcatcgaccctaatgtc

SEQ ID NO: 58568 - DNA, 25 bp, Homo sapien
cggagggctcatggaccctaatgtc

SEQ ID NO: 58569 - DNA, 25 bp, Homo sapien
gaaattttagtgactcgttcttgtc

SEQ ID NO: 58570 - DNA, 25 bp, Homo sapien
gaaattttagtgtctcgttcttgtc

SEQ ID NO: 58571 - DNA, 25 bp, Homo sapien
aagtgtgaagggtcgttagtgagtt

SEQ ID NO: 58572 - DNA, 25 bp, Homo sapien
aagtgtgaagggacgttagtgagtt

SEQ ID NO: 58573 - DNA, 25 bp, Homo sapien
agaattcgagactggccgttgggtt

SEQ ID NO: 58574 - DNA, 25 bp, Homo sapien
agaattcgagacaggccgttgggtt

SEQ ID NO: 58575 - DNA, 25 bp, Homo sapien
aattcacagactgtccgtgtttgtg

SEQ ID NO: 58576 - DNA, 25 bp, Homo sapien
aattcacagactctccgtgtttgtg

SEQ ID NO: 58577 - DNA, 25 bp, Homo sapien
agacattccctatttggtctgttca

SEQ ID NO: 58578 - DNA, 25 bp, Homo sapien
agacattccctaattggtctgttca

SEQ ID NO: 58579 - DNA, 25 bp, Homo sapien
caggtgtcttaacttttcggtaagt

SEQ ID NO: 58580 - DNA, 25 bp, Homo sapien
caggtgtcttaagttttcggtaagt

SEQ ID NO: 58581 - DNA, 25 bp, Homo sapien
gacacggtgtgaatcctgttcattt

SEQ ID NO: 58582 - DNA, 25 bp, Homo sapien
gacacggtgtgattcctgttcattt

SEQ ID NO: 58583 - DNA, 25 bp, Homo sapien
cgaatgtaagattctcgtcatgtta

SEQ ID NO: 58584 - DNA, 25 bp, Homo sapien
cgaatgtaagatactcgtcatgtta

SEQ ID NO: 58585 - DNA, 25 bp, Homo sapien
ccggagtaatacttttcgagaatta

SEQ ID NO: 58586 - DNA, 25 bp, Homo sapien
ccggagtaatacatttcgagaatta

SEQ ID NO: 58587 - DNA, 25 bp, Homo sapien
acgatgagacacgtcccggacattc

SEQ ID NO: 58588 - DNA, 25 bp, Homo sapien
acgatgagacacctcccggacattc

SEQ ID NO: 58589 - DNA, 25 bp, Homo sapien
ccctaagtacggtgacaaaagtctc

SEQ ID NO: 58590 - DNA, 25 bp, Homo sapien
ccctaagtacggagacaaaagtctc

SEQ ID NO: 58591 - DNA, 25 bp, Homo sapien
agccagtgtcggacgtcaagcatcc

SEQ ID NO: 58592 - DNA, 25 bp, Homo sapien
agccagtgtcggtcgtcaagcatcc

SEQ ID NO: 58593 - DNA, 25 bp, Homo sapien
aaaggggtctgtacgacaggaattc

SEQ ID NO: 58594 - DNA, 25 bp, Homo sapien
aaaggggtctgttcgacaggaattc

SEQ ID NO: 58595 - DNA, 25 bp, Homo sapien
gaacgaggaaacgttggaggccatc

SEQ ID NO: 58596 - DNA, 25 bp, Homo sapien
gaacgaggaaaccttggaggccatc

SEQ ID NO: 58597 - DNA, 25 bp, Homo sapien
cgagacacgaaccatgtatgtgcaa

SEQ ID NO: 58598 - DNA, 25 bp, Homo sapien
cgagacacgaacgatgtatgtgcaa

SEQ ID NO: 58599 - DNA, 25 bp, Homo sapien
ggtactcacccaagtatgtctagga

SEQ ID NO: 58600 - DNA, 25 bp, Homo sapien
ggtactcacccatgtatgtctagga

SEQ ID NO: 58601 - DNA, 25 bp, Homo sapien
cggcgacgaccagtagcggttgttc

SEQ ID NO: 58602 - DNA, 25 bp, Homo sapien
cggcgacgaccactagcggttgttc

SEQ ID NO: 58603 - DNA, 25 bp, Homo sapien
ccgccgtctctggttcgattgtccc

SEQ ID NO: 58604 - DNA, 25 bp, Homo sapien
ccgccgtctctgcttcgattgtccc

SEQ ID NO: 58605 - DNA, 25 bp, Homo sapien
ccgcagtagggttccacttgttctg

SEQ ID NO: 58606 - DNA, 25 bp, Homo sapien
ccgcagtagggtaccacttgttctg

SEQ ID NO: 58607 - DNA, 25 bp, Homo sapien
ataaagtctcggaaccagattgagg

SEQ ID NO: 58608 - DNA, 25 bp, Homo sapien
ataaagtctcggtaccagattgagg

SEQ ID NO: 58609 - DNA, 25 bp, Homo sapien
ggaccagccggtactccctttgtta

SEQ ID NO: 58610 - DNA, 25 bp, Homo sapien
ggaccagccggttctccctttgtta

SEQ ID NO: 58611 - DNA, 25 bp, Homo sapien
accttctcagtcaacttcaatgttc

SEQ ID NO: 58612 - DNA, 25 bp, Homo sapien
accttctcagtctacttcaatgttc

SEQ ID NO: 58613 - DNA, 25 bp, Homo sapien
cacccttcatttgtcatgtgtctag

SEQ ID NO: 58614 - DNA, 25 bp, Homo sapien
cacccttcatttctcatgtgtctag

SEQ ID NO: 58615 - DNA, 25 bp, Homo sapien
tcctcagacgtcttcctctcgggtg

SEQ ID NO: 58616 - DNA, 25 bp, Homo sapien
tcctcagacgtcatcctctcgggtg

SEQ ID NO: 58617 - DNA, 25 bp, Homo sapien
gagccgcgacccttgcctcggtaag

SEQ ID NO: 58618 - DNA, 25 bp, Homo sapien
gagccgcgacccatgcctcggtaag

SEQ ID NO: 58619 - DNA, 25 bp, Homo sapien
atcaccacgctattggacttcttcg

SEQ ID NO: 58620 - DNA, 25 bp, Homo sapien
atcaccacgctaatggacttcttcg

SEQ ID NO: 58621 - DNA, 25 bp, Homo sapien
cttatgggacccacacacgtttatg

SEQ ID NO: 58622 - DNA, 25 bp, Homo sapien
cttatgggaccctcacacgtttatg

SEQ ID NO: 58623 - DNA, 25 bp, Homo sapien
tgggagatacagtccaccatgtacg

SEQ ID NO: 58624 - DNA, 25 bp, Homo sapien
tgggagatacagaccaccatgtacg

SEQ ID NO: 58625 - DNA, 25 bp, Homo sapien
ttgggattaaaatccctatacgtgt

SEQ ID NO: 58626 - DNA, 25 bp, Homo sapien
ttgggattaaaaaccctatacgtgt

SEQ ID NO: 58627 - DNA, 25 bp, Homo sapien
tcttcggaattaaaaggaccctata

SEQ ID NO: 58628 - DNA, 25 bp, Homo sapien
tcttcggaattataaggaccctata

SEQ ID NO: 58629 - DNA, 25 bp, Homo sapien
cgtaatcgtgattaaataccattgt

SEQ ID NO: 58630 - DNA, 25 bp, Homo sapien
cgtaatcgtgataaaataccattgt

SEQ ID NO: 58631 - DNA, 25 bp, Homo sapien
aaagtgacacaaactgcagtagtgt

SEQ ID NO: 58632 - DNA, 25 bp, Homo sapien
aaagtgacacaatctgcagtagtgt

SEQ ID NO: 58633 - DNA, 25 bp, Homo sapien
tcacaagacgtctatgatccgtctt

SEQ ID NO: 58634 - DNA, 25 bp, Homo sapien
tcacaagacgtcaatgatccgtctt

SEQ ID NO: 58635 - DNA, 25 bp, Homo sapien
ctccacggacttaatgtatcacccg

SEQ ID NO: 58636 - DNA, 25 bp, Homo sapien
ctccacggactttatgtatcacccg

SEQ ID NO: 58637 - DNA, 25 bp, Homo sapien
atctccagtgaccatatttgtttgt

SEQ ID NO: 58638 - DNA, 25 bp, Homo sapien
atctccagtgacgatatttgtttgt

SEQ ID NO: 58639 - DNA, 25 bp, Homo sapien
tttacacatgttgttttaggtactc

SEQ ID NO: 58640 - DNA, 25 bp, Homo sapien
tttacacatgttcttttaggtactc

SEQ ID NO: 58641 - DNA, 25 bp, Homo sapien
caacaatgtgtttatgtcgactggt

SEQ ID NO: 58642 - DNA, 25 bp, Homo sapien
caacaatgtgttaatgtcgactggt

SEQ ID NO: 58643 - DNA, 25 bp, Homo sapien
cgaagaagtaggtttgttcgcgttt

SEQ ID NO: 58644 - DNA, 25 bp, Homo sapien
cgaagaagtaggattgttcgcgttt

SEQ ID NO: 58645 - DNA, 25 bp, Homo sapien
gacattgtattgtgtcatacgtctt

SEQ ID NO: 58646 - DNA, 25 bp, Homo sapien
gacattgtattgagtcatacgtctt

SEQ ID NO: 58647 - DNA, 25 bp, Homo sapien
cataacgagggtttggtaatcctta

SEQ ID NO: 58648 - DNA, 25 bp, Homo sapien
cataacgagggtatggtaatcctta

SEQ ID NO: 58649 - DNA, 25 bp, Homo sapien
gacagagtttcattggacgtcgaaa

SEQ ID NO: 58650 - DNA, 25 bp, Homo sapien
gacagagtttcaatggacgtcgaaa

SEQ ID NO: 58651 - DNA, 25 bp, Homo sapien
aaaagtcttcattaccttcgagaag

SEQ ID NO: 58652 - DNA, 25 bp, Homo sapien
aaaagtcttcataaccttcgagaag

SEQ ID NO: 58653 - DNA, 25 bp, Homo sapien
cagtaatctgcagagctgtcggtgg

SEQ ID NO: 58654 - DNA, 25 bp, Homo sapien
cagtaatctgcacagctgtcggtgg

SEQ ID NO: 58655 - DNA, 25 bp, Homo sapien
cgaccggccggactcgtaggtacga

SEQ ID NO: 58656 - DNA, 25 bp, Homo sapien
cgaccggccggagtcgtaggtacga

SEQ ID NO: 58657 - DNA, 25 bp, Homo sapien
gggagttctggtacacctaggtcga

SEQ ID NO: 58658 - DNA, 25 bp, Homo sapien
gggagttctggttcacctaggtcga

SEQ ID NO: 58659 - DNA, 25 bp, Homo sapien
gagattgtgtctcgtctcagccgta

SEQ ID NO: 58660 - DNA, 25 bp, Homo sapien
gagattgtgtctggtctcagccgta

SEQ ID NO: 58661 - DNA, 25 bp, Homo sapien
cttttgcttcttcacgtcacgtacg

SEQ ID NO: 58662 - DNA, 25 bp, Homo sapien
cttttgcttcttgacgtcacgtacg

SEQ ID NO: 58663 - DNA, 25 bp, Homo sapien
ttacgtttttgtcgtctcagacccg

SEQ ID NO: 58664 - DNA, 25 bp, Homo sapien
ttacgtttttgtggtctcagacccg

SEQ ID NO: 58665 - DNA, 25 bp, Homo sapien
atctatcgtggtactgtctcgaccc

SEQ ID NO: 58666 - DNA, 25 bp, Homo sapien
atctatcgtggttctgtctcgaccc

SEQ ID NO: 58667 - DNA, 25 bp, Homo sapien
gaattttctctgattggttcacaac

SEQ ID NO: 58668 - DNA, 25 bp, Homo sapien
gaattttctctgtttggttcacaac

SEQ ID NO: 58669 - DNA, 25 bp, Homo sapien
agacctacattttgggtcgtcacaa

SEQ ID NO: 58670 - DNA, 25 bp, Homo sapien
agacctacatttagggtcgtcacaa

SEQ ID NO: 58671 - DNA, 25 bp, Homo sapien
gacgaagtattccattccggagttt

SEQ ID NO: 58672 - DNA, 25 bp, Homo sapien
gacgaagtattcgattccggagttt

SEQ ID NO: 58673 - DNA, 25 bp, Homo sapien
aaagattcatctgatactccgtgat

SEQ ID NO: 58674 - DNA, 25 bp, Homo sapien
aaagattcatctcatactccgtgat

SEQ ID NO: 58675 - DNA, 25 bp, Homo sapien
atcaagttgttactaactaacggat

SEQ ID NO: 58676 - DNA, 25 bp, Homo sapien
atcaagttgttagtaactaacggat

SEQ ID NO: 58677 - DNA, 25 bp, Homo sapien
agaaaatagtacaccctttcagagt

SEQ ID NO: 58678 - DNA, 25 bp, Homo sapien
agaaaatagtactccctttcagagt

SEQ ID NO: 58679 - DNA, 25 bp, Homo sapien
gtctccgacaaaaggccgaagtcca

SEQ ID NO: 58680 - DNA, 25 bp, Homo sapien
gtctccgacaaatggccgaagtcca

SEQ ID NO: 58681 - DNA, 25 bp, Homo sapien
gagacaagactggtgagaagtccag

SEQ ID NO: 58682 - DNA, 25 bp, Homo sapien
gagacaagactgctgagaagtccag

SEQ ID NO: 58683 - DNA, 25 bp, Homo sapien
cgtttggtgtcttgtataattccat

SEQ ID NO: 58684 - DNA, 25 bp, Homo sapien
cgtttggtgtctagtataattccat

SEQ ID NO: 58685 - DNA, 25 bp, Homo sapien
gatttgtttgacatcaaatagacca

SEQ ID NO: 58686 - DNA, 25 bp, Homo sapien
gatttgtttgacttcaaatagacca

SEQ ID NO: 58687 - DNA, 25 bp, Homo sapien
tataattgttgaaactgaaacccga

SEQ ID NO: 58688 - DNA, 25 bp, Homo sapien
tataattgttgatactgaaacccga

SEQ ID NO: 58689 - DNA, 25 bp, Homo sapien
agatgtgttgtggtttgtgacctcc

SEQ ID NO: 58690 - DNA, 25 bp, Homo sapien
agatgtgttgtgctttgtgacctcc

SEQ ID NO: 58691 - DNA, 25 bp, Homo sapien
agtcttttgtagtgtttgatcgtcc

SEQ ID NO: 58692 - DNA, 25 bp, Homo sapien
agtcttttgtagagtttgatcgtcc

SEQ ID NO: 58693 - DNA, 25 bp, Homo sapien
gtatttcggtgactattaactccaa

SEQ ID NO: 58694 - DNA, 25 bp, Homo sapien
gtatttcggtgagtattaactccaa

SEQ ID NO: 58695 - DNA, 25 bp, Homo sapien
gagatttagggactccaaactaaac

SEQ ID NO: 58696 - DNA, 25 bp, Homo sapien
gagatttagggagtccaaactaaac

SEQ ID NO: 58697 - DNA, 25 bp, Homo sapien
actcaacatcatatagaccctgaac

SEQ ID NO: 58698 - DNA, 25 bp, Homo sapien
actcaacatcatttagaccctgaac

SEQ ID NO: 58699 - DNA, 25 bp, Homo sapien
aactaacaccatctgcgctatgaag

SEQ ID NO: 58700 - DNA, 25 bp, Homo sapien
aactaacaccatgtgcgctatgaag

SEQ ID NO: 58701 - DNA, 25 bp, Homo sapien
ttaaagccggtttcagaatgtactt

SEQ ID NO: 58702 - DNA, 25 bp, Homo sapien
ttaaagccggttacagaatgtactt

SEQ ID NO: 58703 - DNA, 25 bp, Homo sapien
tcactggggtcgtcagacacctgtt

SEQ ID NO: 58704 - DNA, 25 bp, Homo sapien
tcactggggtcgacagacacctgtt

SEQ ID NO: 58705 - DNA, 25 bp, Homo sapien
tccttactggtcctcaaaagtagtg

SEQ ID NO: 58706 - DNA, 25 bp, Homo sapien
tccttactggtcgtcaaaagtagtg

SEQ ID NO: 58707 - DNA, 25 bp, Homo sapien
ctcgacttgatctctacacatgttg

SEQ ID NO: 58708 - DNA, 25 bp, Homo sapien
ctcgacttgatcactacacatgttg

SEQ ID NO: 58709 - DNA, 25 bp, Homo sapien
ggggctgttctgtctcgaggtctcc

SEQ ID NO: 58710 - DNA, 25 bp, Homo sapien
ggggctgttctgactcgaggtctcc

SEQ ID NO: 58711 - DNA, 25 bp, Homo sapien
gatcatggtctgttcctaactccct

SEQ ID NO: 58712 - DNA, 25 bp, Homo sapien
gatcatggtctgatcctaactccct

SEQ ID NO: 58713 - DNA, 25 bp, Homo sapien
tcatcttggttcttcgaataaccgc

SEQ ID NO: 58714 - DNA, 25 bp, Homo sapien
tcatcttggttcatcgaataaccgc

SEQ ID NO: 58715 - DNA, 25 bp, Homo sapien
ccgtcccgggagagtatgtgacctc

SEQ ID NO: 58716 - DNA, 25 bp, Homo sapien
ccgtcccgggagtgtatgtgacctc

SEQ ID NO: 58717 - DNA, 25 bp, Homo sapien
ctctccgacgggagttgtcacgcga

SEQ ID NO: 58718 - DNA, 25 bp, Homo sapien
ctctccgacgggtgttgtcacgcga

SEQ ID NO: 58719 - DNA, 25 bp, Homo sapien
tacttggacttgttgacttacaacc

SEQ ID NO: 58720 - DNA, 25 bp, Homo sapien
tacttggacttgatgacttacaacc

SEQ ID NO: 58721 - DNA, 25 bp, Homo sapien
aggttccttagtttcgtcatctacc

SEQ ID NO: 58722 - DNA, 25 bp, Homo sapien
aggttccttagtatcgtcatctacc

SEQ ID NO: 58723 - DNA, 25 bp, Homo sapien
tgtgtgtaattccaaacaccctaag

SEQ ID NO: 58724 - DNA, 25 bp, Homo sapien
tgtgtgtaattcgaaacaccctaag

SEQ ID NO: 58725 - DNA, 25 bp, Homo sapien
acgtgaatccccaacacgacatgac

SEQ ID NO: 58726 - DNA, 25 bp, Homo sapien
acgtgaatcccctacacgacatgac

SEQ ID NO: 58727 - DNA, 25 bp, Homo sapien
gatagtacccgcaaatctcaatatg

SEQ ID NO: 58728 - DNA, 25 bp, Homo sapien
gatagtacccgctaatctcaatatg

SEQ ID NO: 58729 - DNA, 25 bp, Homo sapien
gggtttccctctgactccaacagtg

SEQ ID NO: 58730 - DNA, 25 bp, Homo sapien
gggtttccctctcactccaacagtg

SEQ ID NO: 58731 - DNA, 25 bp, Homo sapien
ttttgtctagtgtcctacaggtttc

SEQ ID NO: 58732 - DNA, 25 bp, Homo sapien
ttttgtctagtgacctacaggtttc

SEQ ID NO: 58733 - DNA, 25 bp, Homo sapien
tgtttctctgaggaccgcccggcac

SEQ ID NO: 58734 - DNA, 25 bp, Homo sapien
tgtttctctgagcaccgcccggcac

SEQ ID NO: 58735 - DNA, 25 bp, Homo sapien
tatccgcaggaccgactccgcgaag

SEQ ID NO: 58736 - DNA, 25 bp, Homo sapien
tatccgcaggacggactccgcgaag

SEQ ID NO: 58737 - DNA, 25 bp, Homo sapien
cgacgaactccaacagtacgtctta

SEQ ID NO: 58738 - DNA, 25 bp, Homo sapien
cgacgaactccatcagtacgtctta

SEQ ID NO: 58739 - DNA, 25 bp, Homo sapien
tagtgtcctccgtcactaaggtacg

SEQ ID NO: 58740 - DNA, 25 bp, Homo sapien
tagtgtcctccgacactaaggtacg

SEQ ID NO: 58741 - DNA, 25 bp, Homo sapien
ctgtaggacgtctgcgaaaaggtcg

SEQ ID NO: 58742 - DNA, 25 bp, Homo sapien
ctgtaggacgtcagcgaaaaggtcg

SEQ ID NO: 58743 - DNA, 25 bp, Homo sapien
ccaaaagataaagtaaccatcgtag

SEQ ID NO: 58744 - DNA, 25 bp, Homo sapien
ccaaaagataaactaaccatcgtag

SEQ ID NO: 58745 - DNA, 25 bp, Homo sapien
gcagtgaaattacaggtccatagtt

SEQ ID NO: 58746 - DNA, 25 bp, Homo sapien
gcagtgaaattagaggtccatagtt

SEQ ID NO: 58747 - DNA, 25 bp, Homo sapien
tgtcgaaataatcaagtctcatctt

SEQ ID NO: 58748 - DNA, 25 bp, Homo sapien
tgtcgaaataatgaagtctcatctt

SEQ ID NO: 58749 - DNA, 25 bp, Homo sapien
gtaaacccatgtcagtgtcaacagt

SEQ ID NO: 58750 - DNA, 25 bp, Homo sapien
gtaaacccatgtgagtgtcaacagt

SEQ ID NO: 58751 - DNA, 25 bp, Homo sapien
atttatcctaccaggttaagtgtct

SEQ ID NO: 58752 - DNA, 25 bp, Homo sapien
atttatcctacctggttaagtgtct

SEQ ID NO: 58753 - DNA, 25 bp, Homo sapien
gaatacatacatcgactcagtcgtt

SEQ ID NO: 58754 - DNA, 25 bp, Homo sapien
gaatacatacatggactcagtcgtt

SEQ ID NO: 58755 - DNA, 25 bp, Homo sapien
gactaagacccctgacaccggagct

SEQ ID NO: 58756 - DNA, 25 bp, Homo sapien
gactaagaccccagacaccggagct

SEQ ID NO: 58757 - DNA, 25 bp, Homo sapien
gacatcacacactgccctcggagag

SEQ ID NO: 58758 - DNA, 25 bp, Homo sapien
gacatcacacacagccctcggagag

SEQ ID NO: 58759 - DNA, 25 bp, Homo sapien
aaacaggtccacgttcctcactgta

SEQ ID NO: 58760 - DNA, 25 bp, Homo sapien
aaacaggtccaccttcctcactgta

SEQ ID NO: 58761 - DNA, 25 bp, Homo sapien
gtcgaacccgggttgcttgtgccaa

SEQ ID NO: 58762 - DNA, 25 bp, Homo sapien
gtcgaacccgggatgcttgtgccaa

SEQ ID NO: 58763 - DNA, 25 bp, Homo sapien
cggacctggtcgtggcccgtctgca

SEQ ID NO: 58764 - DNA, 25 bp, Homo sapien
cggacctggtcgaggcccgtctgca

SEQ ID NO: 58765 - DNA, 25 bp, Homo sapien
tcttggtaggtcacaaccccggaga

SEQ ID NO: 58766 - DNA, 25 bp, Homo sapien
tcttggtaggtctcaaccccggaga

SEQ ID NO: 58767 - DNA, 25 bp, Homo sapien
ctccggtaccccgaaccaagaggtg

SEQ ID NO: 58768 - DNA, 25 bp, Homo sapien
ctccggtacccccaaccaagaggtg

SEQ ID NO: 58769 - DNA, 25 bp, Homo sapien
cgtaaaagtcactacaagataccga

SEQ ID NO: 58770 - DNA, 25 bp, Homo sapien
cgtaaaagtcacaacaagataccga

SEQ ID NO: 58771 - DNA, 25 bp, Homo sapien
ttatatgttcacacgtcacggaagc

SEQ ID NO: 58772 - DNA, 25 bp, Homo sapien
ttatatgttcactcgtcacggaagc

SEQ ID NO: 58773 - DNA, 25 bp, Homo sapien
cttaggatccgtcgaccgaagagtc

SEQ ID NO: 58774 - DNA, 25 bp, Homo sapien
cttaggatccgtggaccgaagagtc

SEQ ID NO: 58775 - DNA, 25 bp, Homo sapien
atcatcgtaggtcctctgtggttgc

SEQ ID NO: 58776 - DNA, 25 bp, Homo sapien
atcatcgtaggtgctctgtggttgc

SEQ ID NO: 58777 - DNA, 25 bp, Homo sapien
actcctctggggttacggacttgct

SEQ ID NO: 58778 - DNA, 25 bp, Homo sapien
actcctctggggatacggacttgct

SEQ ID NO: 58779 - DNA, 25 bp, Homo sapien
ctcctgttcaggttcaacgttgact

SEQ ID NO: 58780 - DNA, 25 bp, Homo sapien
ctcctgttcaggatcaacgttgact

SEQ ID NO: 58781 - DNA, 25 bp, Homo sapien
gatctatgttttcatcaattcgacg

SEQ ID NO: 58782 - DNA, 25 bp, Homo sapien
gatctatgttttgatcaattcgacg

SEQ ID NO: 58783 - DNA, 25 bp, Homo sapien
tcaggagtttacagtagaggtcttc

SEQ ID NO: 58784 - DNA, 25 bp, Homo sapien
tcaggagtttactgtagaggtcttc

SEQ ID NO: 58785 - DNA, 25 bp, Homo sapien
gtctaaagtaacgtgtcttgtcacc

SEQ ID NO: 58786 - DNA, 25 bp, Homo sapien
gtctaaagtaacctgtcttgtcacc

SEQ ID NO: 58787 - DNA, 25 bp, Homo sapien
atatgttaaagtacccctgttcccg

SEQ ID NO: 58788 - DNA, 25 bp, Homo sapien
atatgttaaagttcccctgttcccg

SEQ ID NO: 58789 - DNA, 25 bp, Homo sapien
acctaccagaacacactggttcacg

SEQ ID NO: 58790 - DNA, 25 bp, Homo sapien
acctaccagaactcactggttcacg

SEQ ID NO: 58791 - DNA, 25 bp, Homo sapien
agactcccgagggtccagtgcctgc

SEQ ID NO: 58792 - DNA, 25 bp, Homo sapien
agactcccgaggctccagtgcctgc

SEQ ID NO: 58793 - DNA, 25 bp, Homo sapien
gttcatcgccttcctcggactgacg

SEQ ID NO: 58794 - DNA, 25 bp, Homo sapien
gttcatcgccttgctcggactgacg

SEQ ID NO: 58795 - DNA, 25 bp, Homo sapien
gtacaagtctagaagtactcggacc

SEQ ID NO: 58796 - DNA, 25 bp, Homo sapien
gtacaagtctagtagtactcggacc

SEQ ID NO: 58797 - DNA, 25 bp, Homo sapien
ctacgcaccgtggctacggaaagtc

SEQ ID NO: 58798 - DNA, 25 bp, Homo sapien
ctacgcaccgtgcctacggaaagtc

SEQ ID NO: 58799 - DNA, 25 bp, Homo sapien
gagtcacggtacgcaagcgactttc

SEQ ID NO: 58800 - DNA, 25 bp, Homo sapien
gagtcacggtacccaagcgactttc

SEQ ID NO: 58801 - DNA, 25 bp, Homo sapien
gccgtgtcacccacacgtgttctgg

SEQ ID NO: 58802 - DNA, 25 bp, Homo sapien
gccgtgtcaccctcacgtgttctgg

SEQ ID NO: 58803 - DNA, 25 bp, Homo sapien
tctccgtgtctctcccgggacggtg

SEQ ID NO: 58804 - DNA, 25 bp, Homo sapien
tctccgtgtctcacccgggacggtg

SEQ ID NO: 58805 - DNA, 25 bp, Homo sapien
actgtgtatcttaccctcgacgttc

SEQ ID NO: 58806 - DNA, 25 bp, Homo sapien
actgtgtatctttccctcgacgttc

SEQ ID NO: 58807 - DNA, 25 bp, Homo sapien
acctgtattgttaactcttagatag

SEQ ID NO: 58808 - DNA, 25 bp, Homo sapien
acctgtattgtttactcttagatag

SEQ ID NO: 58809 - DNA, 25 bp, Homo sapien
ctacctcacttgtctcctcgagaag

SEQ ID NO: 58810 - DNA, 25 bp, Homo sapien
ctacctcacttgactcctcgagaag

SEQ ID NO: 58811 - DNA, 25 bp, Homo sapien
acatctcctacctttacccgtaggg

SEQ ID NO: 58812 - DNA, 25 bp, Homo sapien
acatctcctaccattacccgtaggg

SEQ ID NO: 58813 - DNA, 25 bp, Homo sapien
acacttacttctagactgcctgggt

SEQ ID NO: 58814 - DNA, 25 bp, Homo sapien
acacttacttcttgactgcctgggt

SEQ ID NO: 58815 - DNA, 25 bp, Homo sapien
ccctcgggtccttagtccctatagg

SEQ ID NO: 58816 - DNA, 25 bp, Homo sapien
ccctcgggtcctaagtccctatagg

SEQ ID NO: 58817 - DNA, 25 bp, Homo sapien
taaagtacctacagacttctatgtg

SEQ ID NO: 58818 - DNA, 25 bp, Homo sapien
taaagtacctactgacttctatgtg

SEQ ID NO: 58819 - DNA, 25 bp, Homo sapien
gctgaagaacctacgtaggactcgg

SEQ ID NO: 58820 - DNA, 25 bp, Homo sapien
gctgaagaaccttcgtaggactcgg

SEQ ID NO: 58821 - DNA, 25 bp, Homo sapien
gaaagagaacactgctgtgtcgttc

SEQ ID NO: 58822 - DNA, 25 bp, Homo sapien
gaaagagaacacagctgtgtcgttc

SEQ ID NO: 58823 - DNA, 25 bp, Homo sapien
cgacgggacaaaggactcgtttgtt

SEQ ID NO: 58824 - DNA, 25 bp, Homo sapien
cgacgggacaaacgactcgtttgtt

SEQ ID NO: 58825 - DNA, 25 bp, Homo sapien
aaacgaatgtaacgtcaggtatttt

SEQ ID NO: 58826 - DNA, 25 bp, Homo sapien
aaacgaatgtaaggtcaggtatttt

SEQ ID NO: 58827 - DNA, 25 bp, Homo sapien
aataaggtccgttcacgaataatgt

SEQ ID NO: 58828 - DNA, 25 bp, Homo sapien
aataaggtccgtacacgaataatgt

SEQ ID NO: 58829 - DNA, 25 bp, Homo sapien
aagatcgtgaatcagtactatcggt

SEQ ID NO: 58830 - DNA, 25 bp, Homo sapien
aagatcgtgaatgagtactatcggt

SEQ ID NO: 58831 - DNA, 25 bp, Homo sapien
tacaatagttaaggtagagtctcca

SEQ ID NO: 58832 - DNA, 25 bp, Homo sapien
tacaatagttaacgtagagtctcca

SEQ ID NO: 58833 - DNA, 25 bp, Homo sapien
acacgggaaaaacagtgtccgtgat

SEQ ID NO: 58834 - DNA, 25 bp, Homo sapien
acacgggaaaaagagtgtccgtgat

SEQ ID NO: 58835 - DNA, 25 bp, Homo sapien
ggagactaagatcgacgaggtccga

SEQ ID NO: 58836 - DNA, 25 bp, Homo sapien
ggagactaagatggacgaggtccga

SEQ ID NO: 58837 - DNA, 25 bp, Homo sapien
agggactaaaagtacgtgtctcatg

SEQ ID NO: 58838 - DNA, 25 bp, Homo sapien
agggactaaaagaacgtgtctcatg

SEQ ID NO: 58839 - DNA, 25 bp, Homo sapien
gtgtagataagaacgaagtacccaa

SEQ ID NO: 58840 - DNA, 25 bp, Homo sapien
gtgtagataagatcgaagtacccaa

SEQ ID NO: 58841 - DNA, 25 bp, Homo sapien
cgacgtcaacaagtataaaccccac

SEQ ID NO: 58842 - DNA, 25 bp, Homo sapien
cgacgtcaacaactataaaccccac

SEQ ID NO: 58843 - DNA, 25 bp, Homo sapien
agaaagagaccttcgcactcaccga

SEQ ID NO: 58844 - DNA, 25 bp, Homo sapien
agaaagagacctacgcactcaccga

SEQ ID NO: 58845 - DNA, 25 bp, Homo sapien
acgaagttatttagcgtgtccttat

SEQ ID NO: 58846 - DNA, 25 bp, Homo sapien
acgaagttattttgcgtgtccttat

SEQ ID NO: 58847 - DNA, 25 bp, Homo sapien
gtttataaagaatatttgttcctca

SEQ ID NO: 58848 - DNA, 25 bp, Homo sapien
gtttataaagaaaatttgttcctca

SEQ ID NO: 58849 - DNA, 25 bp, Homo sapien
gttattgtttaattagtctgactcc

SEQ ID NO: 58850 - DNA, 25 bp, Homo sapien
gttattgtttaaatagtctgactcc

SEQ ID NO: 58851 - DNA, 25 bp, Homo sapien
gttgtctcttcagacttactacgat

SEQ ID NO: 58852 - DNA, 25 bp, Homo sapien
gttgtctcttcacacttactacgat

SEQ ID NO: 58853 - DNA, 25 bp, Homo sapien
gggtcttcctatagctagtaacaga

SEQ ID NO: 58854 - DNA, 25 bp, Homo sapien
gggtcttcctattgctagtaacaga

SEQ ID NO: 58855 - DNA, 25 bp, Homo sapien
gccggtactccctttgttactcaat

SEQ ID NO: 58856 - DNA, 25 bp, Homo sapien
gccggtactcccattgttactcaat

SEQ ID NO: 58857 - DNA, 25 bp, Homo sapien
gccttactctctctcttatccgagg

SEQ ID NO: 58858 - DNA, 25 bp, Homo sapien
gccttactctctgtcttatccgagg

SEQ ID NO: 58859 - DNA, 25 bp, Homo sapien
ccacgtcttggtctgttcctcctgg

SEQ ID NO: 58860 - DNA, 25 bp, Homo sapien
ccacgtcttggtgtgttcctcctgg

SEQ ID NO: 58861 - DNA, 25 bp, Homo sapien
attggacaatcttacgttcactaga

SEQ ID NO: 58862 - DNA, 25 bp, Homo sapien
attggacaatctaacgttcactaga

SEQ ID NO: 58863 - DNA, 25 bp, Homo sapien
ataccgtactaactttctgatagag

SEQ ID NO: 58864 - DNA, 25 bp, Homo sapien
ataccgtactaagtttctgatagag

SEQ ID NO: 58865 - DNA, 25 bp, Homo sapien
gagtagaccccctttctcgagtaat

SEQ ID NO: 58866 - DNA, 25 bp, Homo sapien
gagtagacccccattctcgagtaat

SEQ ID NO: 58867 - DNA, 25 bp, Homo sapien
gacagagacccattgtctactagac

SEQ ID NO: 58868 - DNA, 25 bp, Homo sapien
gacagagacccaatgtctactagac

SEQ ID NO: 58869 - DNA, 25 bp, Homo sapien
agaagacgtacaaatttactacgtt

SEQ ID NO: 58870 - DNA, 25 bp, Homo sapien
agaagacgtacatatttactacgtt

SEQ ID NO: 58871 - DNA, 25 bp, Homo sapien
tggtagacgtcttcggttttctatt

SEQ ID NO: 58872 - DNA, 25 bp, Homo sapien
tggtagacgtctacggttttctatt

SEQ ID NO: 58873 - DNA, 25 bp, Homo sapien
ggagaagacagtgacgtttttccct

SEQ ID NO: 58874 - DNA, 25 bp, Homo sapien
ggagaagacagtcacgtttttccct

SEQ ID NO: 58875 - DNA, 25 bp, Homo sapien
gacaagtatattgtgtactttcctt

SEQ ID NO: 58876 - DNA, 25 bp, Homo sapien
gacaagtatattctgtactttcctt

SEQ ID NO: 58877 - DNA, 25 bp, Homo sapien
cggatcagattgtctttttacttag

SEQ ID NO: 58878 - DNA, 25 bp, Homo sapien
cggatcagattgactttttacttag

SEQ ID NO: 58879 - DNA, 25 bp, Homo sapien
gtcggggttcggactttgtaccaca

SEQ ID NO: 58880 - DNA, 25 bp, Homo sapien
gtcggggttcggtctttgtaccaca

SEQ ID NO: 58881 - DNA, 25 bp, Homo sapien
agatttagggtctagaactacgacc

SEQ ID NO: 58882 - DNA, 25 bp, Homo sapien
agatttagggtcaagaactacgacc

SEQ ID NO: 58883 - DNA, 25 bp, Homo sapien
cggaaaacacattcaaggtacaata

SEQ ID NO: 58884 - DNA, 25 bp, Homo sapien
cggaaaacacatacaaggtacaata

SEQ ID NO: 58885 - DNA, 25 bp, Homo sapien
cggtccgacaactgacgtgacccta

SEQ ID NO: 58886 - DNA, 25 bp, Homo sapien
cggtccgacaacagacgtgacccta

SEQ ID NO: 58887 - DNA, 25 bp, Homo sapien
gagggtgcgagaccacaccagccca

SEQ ID NO: 58888 - DNA, 25 bp, Homo sapien
gagggtgcgagagcacaccagccca

SEQ ID NO: 58889 - DNA, 25 bp, Homo sapien
ctggtgtaaagaaacaaagtccaca

SEQ ID NO: 58890 - DNA, 25 bp, Homo sapien
ctggtgtaaagatacaaagtccaca

SEQ ID NO: 58891 - DNA, 25 bp, Homo sapien
gaaagaagtcacagagtatccacta

SEQ ID NO: 58892 - DNA, 25 bp, Homo sapien
gaaagaagtcactgagtatccacta

SEQ ID NO: 58893 - DNA, 25 bp, Homo sapien
cgcgaagaggtacaagagtcccagt

SEQ ID NO: 58894 - DNA, 25 bp, Homo sapien
cgcgaagaggtagaagagtcccagt

SEQ ID NO: 58895 - DNA, 25 bp, Homo sapien
tctaaggacacgacgagagtccttt

SEQ ID NO: 58896 - DNA, 25 bp, Homo sapien
tctaaggacacgtcgagagtccttt

SEQ ID NO: 58897 - DNA, 25 bp, Homo sapien
ttcgactcgacctcggtcttctgta

SEQ ID NO: 58898 - DNA, 25 bp, Homo sapien
ttcgactcgaccacggtcttctgta

SEQ ID NO: 58899 - DNA, 25 bp, Homo sapien
aatactacgactgtaggagtatccc

SEQ ID NO: 58900 - DNA, 25 bp, Homo sapien
aatactacgactctaggagtatccc

SEQ ID NO: 58901 - DNA, 25 bp, Homo sapien
aacgaagatcgataaggtgtctctc

SEQ ID NO: 58902 - DNA, 25 bp, Homo sapien
aacgaagatcgaaaaggtgtctctc

SEQ ID NO: 58903 - DNA, 25 bp, Homo sapien
cctgtcgtaagaaagaatttccctc

SEQ ID NO: 58904 - DNA, 25 bp, Homo sapien
cctgtcgtaagatagaatttccctc

SEQ ID NO: 58905 - DNA, 25 bp, Homo sapien
tcaagtaatcgaagtgttgtccgtg

SEQ ID NO: 58906 - DNA, 25 bp, Homo sapien
tcaagtaatcgatgtgttgtccgtg

SEQ ID NO: 58907 - DNA, 25 bp, Homo sapien
tttagaagagaccttctatgtaacg

SEQ ID NO: 58908 - DNA, 25 bp, Homo sapien
tttagaagagacgttctatgtaacg

SEQ ID NO: 58909 - DNA, 25 bp, Homo sapien
gtattgagtacagaccacttttcag

SEQ ID NO: 58910 - DNA, 25 bp, Homo sapien
gtattgagtacacaccacttttcag

SEQ ID NO: 58911 - DNA, 25 bp, Homo sapien
tcttttcaagtaaccgtgtttatag

SEQ ID NO: 58912 - DNA, 25 bp, Homo sapien
tcttttcaagtatccgtgtttatag

SEQ ID NO: 58913 - DNA, 25 bp, Homo sapien
tcccttaagtagagacggcttatat

SEQ ID NO: 58914 - DNA, 25 bp, Homo sapien
tcccttaagtagtgacggcttatat

SEQ ID NO: 58915 - DNA, 25 bp, Homo sapien
gagacttcgaggagtaagactctaa

SEQ ID NO: 58916 - DNA, 25 bp, Homo sapien
gagacttcgaggtgtaagactctaa

SEQ ID NO: 58917 - DNA, 25 bp, Homo sapien
cgaccacttgggtaccggacttcta

SEQ ID NO: 58918 - DNA, 25 bp, Homo sapien
cgaccacttgggaaccggacttcta

SEQ ID NO: 58919 - DNA, 25 bp, Homo sapien
caaccctcaggagacccgtaggtaa

SEQ ID NO: 58920 - DNA, 25 bp, Homo sapien
caaccctcaggacacccgtaggtaa

SEQ ID NO: 58921 - DNA, 25 bp, Homo sapien
atcccggtcaacctgtggagtaact

SEQ ID NO: 58922 - DNA, 25 bp, Homo sapien
atcccggtcaacgtgtggagtaact

SEQ ID NO: 58923 - DNA, 25 bp, Homo sapien
cttccgaggacgtgtcggtatgacg

SEQ ID NO: 58924 - DNA, 25 bp, Homo sapien
cttccgaggacgagtcggtatgacg

SEQ ID NO: 58925 - DNA, 25 bp, Homo sapien
ccttcggtagagactccagacacgt

SEQ ID NO: 58926 - DNA, 25 bp, Homo sapien
ccttcggtagagtctccagacacgt

SEQ ID NO: 58927 - DNA, 25 bp, Homo sapien
gagtacctgagactgccgacgacac

SEQ ID NO: 58928 - DNA, 25 bp, Homo sapien
gagtacctgagagtgccgacgacac

SEQ ID NO: 58929 - DNA, 25 bp, Homo sapien
tgtagtcgtgtgtgtgtgtgtccct

SEQ ID NO: 58930 - DNA, 25 bp, Homo sapien
tgtagtcgtgtgagtgtgtgtccct

SEQ ID NO: 58931 - DNA, 25 bp, Homo sapien
ttcctcgtctagcaaggacgacccg

SEQ ID NO: 58932 - DNA, 25 bp, Homo sapien
ttcctcgtctaggaaggacgacccg

SEQ ID NO: 58933 - DNA, 25 bp, Homo sapien
tcttctcgtagtaccgacacgtcct

SEQ ID NO: 58934 - DNA, 25 bp, Homo sapien
tcttctcgtagttccgacacgtcct

SEQ ID NO: 58935 - DNA, 25 bp, Homo sapien
tcttccgtctcgtctctacgacggt

SEQ ID NO: 58936 - DNA, 25 bp, Homo sapien
tcttccgtctcgactctacgacggt

SEQ ID NO: 58937 - DNA, 25 bp, Homo sapien
gtccggtttccgtactcgactccgt

SEQ ID NO: 58938 - DNA, 25 bp, Homo sapien
gtccggtttccgaactcgactccgt

SEQ ID NO: 58939 - DNA, 25 bp, Homo sapien
ttctgttatttgtcgattcgatgac

SEQ ID NO: 58940 - DNA, 25 bp, Homo sapien
ttctgttatttgacgattcgatgac

SEQ ID NO: 58941 - DNA, 25 bp, Homo sapien
cattttagattgacatactcatcgg

SEQ ID NO: 58942 - DNA, 25 bp, Homo sapien
cattttagattgtcatactcatcgg

SEQ ID NO: 58943 - DNA, 25 bp, Homo sapien
caattctcacagttcttattggcga

SEQ ID NO: 58944 - DNA, 25 bp, Homo sapien
caattctcacagatcttattggcga

SEQ ID NO: 58945 - DNA, 25 bp, Homo sapien
tttttacctacgacgttttcgagga

SEQ ID NO: 58946 - DNA, 25 bp, Homo sapien
tttttacctacgtcgttttcgagga

SEQ ID NO: 58947 - DNA, 25 bp, Homo sapien
cgacactcctcgatgttcgtagggt

SEQ ID NO: 58948 - DNA, 25 bp, Homo sapien
cgacactcctcgttgttcgtagggt

SEQ ID NO: 58949 - DNA, 25 bp, Homo sapien
gtcgacgtcaagtactttgtatttg

SEQ ID NO: 58950 - DNA, 25 bp, Homo sapien
gtcgacgtcaagaactttgtatttg

SEQ ID NO: 58951 - DNA, 25 bp, Homo sapien
acgtttcctgataacgactttagga

SEQ ID NO: 58952 - DNA, 25 bp, Homo sapien
acgtttcctgattacgactttagga

SEQ ID NO: 58953 - DNA, 25 bp, Homo sapien
cggggttcggatgacgttttagaca

SEQ ID NO: 58954 - DNA, 25 bp, Homo sapien
cggggttcggatcacgttttagaca

SEQ ID NO: 58955 - DNA, 25 bp, Homo sapien
agagtgtgtccgtcaacccaggtgt

SEQ ID NO: 58956 - DNA, 25 bp, Homo sapien
agagtgtgtccgacaacccaggtgt

SEQ ID NO: 58957 - DNA, 25 bp, Homo sapien
agatttagacacaacaccccggtgt

SEQ ID NO: 58958 - DNA, 25 bp, Homo sapien
agatttagacactacaccccggtgt

SEQ ID NO: 58959 - DNA, 25 bp, Homo sapien
agttgttgagtgacccgaagtactt

SEQ ID NO: 58960 - DNA, 25 bp, Homo sapien
agttgttgagtgtcccgaagtactt

SEQ ID NO: 58961 - DNA, 25 bp, Homo sapien
gtctcgaagggcaccgcgactcagt

SEQ ID NO: 58962 - DNA, 25 bp, Homo sapien
gtctcgaagggctccgcgactcagt

SEQ ID NO: 58963 - DNA, 25 bp, Homo sapien
ggtccacggtgaggtccaacgtcgc

SEQ ID NO: 58964 - DNA, 25 bp, Homo sapien
ggtccacggtgacgtccaacgtcgc

SEQ ID NO: 58965 - DNA, 25 bp, Homo sapien
aaagtcctacctcaatccggacctg

SEQ ID NO: 58966 - DNA, 25 bp, Homo sapien
aaagtcctacctgaatccggacctg

SEQ ID NO: 58967 - DNA, 25 bp, Homo sapien
cgtgctcccttggatcgtggcacag

SEQ ID NO: 58968 - DNA, 25 bp, Homo sapien
cgtgctcccttgcatcgtggcacag

SEQ ID NO: 58969 - DNA, 25 bp, Homo sapien
catgacccacagtccagactgaagg

SEQ ID NO: 58970 - DNA, 25 bp, Homo sapien
catgacccacagaccagactgaagg

SEQ ID NO: 58971 - DNA, 25 bp, Homo sapien
gtcccagaggagttacgacagcatg

SEQ ID NO: 58972 - DNA, 25 bp, Homo sapien
gtcccagaggagatacgacagcatg

SEQ ID NO: 58973 - DNA, 25 bp, Homo sapien
tactctgacaggaaatgacacctcc

SEQ ID NO: 58974 - DNA, 25 bp, Homo sapien
tactctgacaggtaatgacacctcc

SEQ ID NO: 58975 - DNA, 25 bp, Homo sapien
aggtctgagaagaacgggtacttca

SEQ ID NO: 58976 - DNA, 25 bp, Homo sapien
aggtctgagaagtacgggtacttca

SEQ ID NO: 58977 - DNA, 25 bp, Homo sapien
agtggcgtagagttcagtgttcgca

SEQ ID NO: 58978 - DNA, 25 bp, Homo sapien
agtggcgtagagatcagtgttcgca

SEQ ID NO: 58979 - DNA, 25 bp, Homo sapien
acatctaggccgtcggtgtgacaag

SEQ ID NO: 58980 - DNA, 25 bp, Homo sapien
acatctaggccgacggtgtgacaag

SEQ ID NO: 58981 - DNA, 25 bp, Homo sapien
acacgtacatttctcgtttcacagg

SEQ ID NO: 58982 - DNA, 25 bp, Homo sapien
acacgtacatttgtcgtttcacagg

SEQ ID NO: 58983 - DNA, 25 bp, Homo sapien
ttcgtaatcctgtacgataaaaccg

SEQ ID NO: 58984 - DNA, 25 bp, Homo sapien
ttcgtaatcctgaacgataaaaccg

SEQ ID NO: 58985 - DNA, 25 bp, Homo sapien
ttgactgtcttggaacaggtcacct

SEQ ID NO: 58986 - DNA, 25 bp, Homo sapien
ttgactgtcttgcaacaggtcacct

SEQ ID NO: 58987 - DNA, 25 bp, Homo sapien
cgatgaagatacaacttcgtacgaa

SEQ ID NO: 58988 - DNA, 25 bp, Homo sapien
cgatgaagatactacttcgtacgaa

SEQ ID NO: 58989 - DNA, 25 bp, Homo sapien
tgttacgtcgtcatcaccacgagta

SEQ ID NO: 58990 - DNA, 25 bp, Homo sapien
tgttacgtcgtcttcaccacgagta

SEQ ID NO: 58991 - DNA, 25 bp, Homo sapien
tatctacgtcgtactaaacgatagt

SEQ ID NO: 58992 - DNA, 25 bp, Homo sapien
tatctacgtcgttctaaacgatagt

SEQ ID NO: 58993 - DNA, 25 bp, Homo sapien
agctactcgtgctacgttaagaagt

SEQ ID NO: 58994 - DNA, 25 bp, Homo sapien
agctactcgtgcaacgttaagaagt

SEQ ID NO: 58995 - DNA, 25 bp, Homo sapien
aacgagtcaccgttaccttctcggt

SEQ ID NO: 58996 - DNA, 25 bp, Homo sapien
aacgagtcaccgataccttctcggt

SEQ ID NO: 58997 - DNA, 25 bp, Homo sapien
ttctaattcgagtttccacactgag

SEQ ID NO: 58998 - DNA, 25 bp, Homo sapien
ttctaattcgagattccacactgag

SEQ ID NO: 58999 - DNA, 25 bp, Homo sapien
taacgtatataatcgtccccagacg

SEQ ID NO: 59000 - DNA, 25 bp, Homo sapien
taacgtatataaacgtccccagacg

SEQ ID NO: 59001 - DNA, 25 bp, Homo sapien
ccagaactctaacgaccacgacgat

SEQ ID NO: 59002 - DNA, 25 bp, Homo sapien
ccagaactctaaggaccacgacgat

SEQ ID NO: 59003 - DNA, 25 bp, Homo sapien
tcgtcgatagtgaggagacgaccga

SEQ ID NO: 59004 - DNA, 25 bp, Homo sapien
tcgtcgatagtgtggagacgaccga

SEQ ID NO: 59005 - DNA, 25 bp, Homo sapien
gaaacggactacgatttaacaccta

SEQ ID NO: 59006 - DNA, 25 bp, Homo sapien
gaaacggactaccatttaacaccta

SEQ ID NO: 59007 - DNA, 25 bp, Homo sapien
gaaatcgatttaagtctcctatagt

SEQ ID NO: 59008 - DNA, 25 bp, Homo sapien
gaaatcgatttatgtctcctatagt

SEQ ID NO: 59009 - DNA, 25 bp, Homo sapien
aggaaaggaatctgtatacccgaat

SEQ ID NO: 59010 - DNA, 25 bp, Homo sapien
aggaaaggaatcagtatacccgaat

SEQ ID NO: 59011 - DNA, 25 bp, Homo sapien
aaggagagtccgaactcacggagtt

SEQ ID NO: 59012 - DNA, 25 bp, Homo sapien
aaggagagtccgtactcacggagtt

SEQ ID NO: 59013 - DNA, 25 bp, Homo sapien
tctgtacctccgtactcttgtgtac

SEQ ID NO: 59014 - DNA, 25 bp, Homo sapien
tctgtacctccgaactcttgtgtac

SEQ ID NO: 59015 - DNA, 25 bp, Homo sapien
cggacttactctacatcctttgtcg

SEQ ID NO: 59016 - DNA, 25 bp, Homo sapien
cggacttactcttcatcctttgtcg

SEQ ID NO: 59017 - DNA, 25 bp, Homo sapien
tttcagaccgagaccggtttgtact

SEQ ID NO: 59018 - DNA, 25 bp, Homo sapien
tttcagaccgagtccggtttgtact

SEQ ID NO: 59019 - DNA, 25 bp, Homo sapien
tttttcagaccgtctcctgtcctga

SEQ ID NO: 59020 - DNA, 25 bp, Homo sapien
tttttcagaccgactcctgtcctga

SEQ ID NO: 59021 - DNA, 25 bp, Homo sapien
tcttctgatagatatctgttccgca

SEQ ID NO: 59022 - DNA, 25 bp, Homo sapien
tcttctgatagaaatctgttccgca

SEQ ID NO: 59023 - DNA, 25 bp, Homo sapien
cttaggagtgtaaggcatgtcacca

SEQ ID NO: 59024 - DNA, 25 bp, Homo sapien
cttaggagtgtatggcatgtcacca

SEQ ID NO: 59025 - DNA, 25 bp, Homo sapien
cgtagaggtggaagatgttttaccc

SEQ ID NO: 59026 - DNA, 25 bp, Homo sapien
cgtagaggtggatgatgttttaccc

SEQ ID NO: 59027 - DNA, 25 bp, Homo sapien
taagatcctatgacgctcgtttacc

SEQ ID NO: 59028 - DNA, 25 bp, Homo sapien
taagatcctatgtcgctcgtttacc

SEQ ID NO: 59029 - DNA, 25 bp, Homo sapien
agaactgcactgtcaccctagatcg

SEQ ID NO: 59030 - DNA, 25 bp, Homo sapien
agaactgcactgacaccctagatcg

SEQ ID NO: 59031 - DNA, 25 bp, Homo sapien
aagggggtactgtctccgtacttcg

SEQ ID NO: 59032 - DNA, 25 bp, Homo sapien
aagggggtactgactccgtacttcg

SEQ ID NO: 59033 - DNA, 25 bp, Homo sapien
aggaggtctacagactaacagagta

SEQ ID NO: 59034 - DNA, 25 bp, Homo sapien
aggaggtctacacactaacagagta

SEQ ID NO: 59035 - DNA, 25 bp, Homo sapien
cgttgggtacattctgtacaagtac

SEQ ID NO: 59036 - DNA, 25 bp, Homo sapien
cgttgggtacatactgtacaagtac

SEQ ID NO: 59037 - DNA, 25 bp, Homo sapien
gattgtttggtaacttctgtgcctc

SEQ ID NO: 59038 - DNA, 25 bp, Homo sapien
gattgtttggtatcttctgtgcctc

SEQ ID NO: 59039 - DNA, 25 bp, Homo sapien
gatctttgtcggtcccttgacatcg

SEQ ID NO: 59040 - DNA, 25 bp, Homo sapien
gatctttgtcggacccttgacatcg

SEQ ID NO: 59041 - DNA, 25 bp, Homo sapien
tttagtcggactatccttgtatgtt

SEQ ID NO: 59042 - DNA, 25 bp, Homo sapien
tttagtcggactttccttgtatgtt

SEQ ID NO: 59043 - DNA, 25 bp, Homo sapien
tgactccaccgtcgacgggtcttag

SEQ ID NO: 59044 - DNA, 25 bp, Homo sapien
tgactccaccgtggacgggtcttag

SEQ ID NO: 59045 - DNA, 25 bp, Homo sapien
tcgtgctggacatcgagaggtcctg

SEQ ID NO: 59046 - DNA, 25 bp, Homo sapien
tcgtgctggacaacgagaggtcctg

SEQ ID NO: 59047 - DNA, 25 bp, Homo sapien
tctcaccgtgacaggggagacctgt

SEQ ID NO: 59048 - DNA, 25 bp, Homo sapien
tctcaccgtgactggggagacctgt

SEQ ID NO: 59049 - DNA, 25 bp, Homo sapien
tggagcacaccctgcggatccctgt

SEQ ID NO: 59050 - DNA, 25 bp, Homo sapien
tggagcacacccagcggatccctgt

SEQ ID NO: 59051 - DNA, 25 bp, Homo sapien
gtccggggagccatcctctgtcgcg

SEQ ID NO: 59052 - DNA, 25 bp, Homo sapien
gtccggggagccttcctctgtcgcg

SEQ ID NO: 59053 - DNA, 25 bp, Homo sapien
gaccatcgggctcaggtctcgtgcc

SEQ ID NO: 59054 - DNA, 25 bp, Homo sapien
gaccatcgggctgaggtctcgtgcc

SEQ ID NO: 59055 - DNA, 25 bp, Homo sapien
tagtgtatttgtaagtaacgtcctc

SEQ ID NO: 59056 - DNA, 25 bp, Homo sapien
tagtgtatttgttagtaacgtcctc

SEQ ID NO: 59057 - DNA, 25 bp, Homo sapien
ttcgtgttagattgatatacctccg

SEQ ID NO: 59058 - DNA, 25 bp, Homo sapien
ttcgtgttagatagatatacctccg

SEQ ID NO: 59059 - DNA, 25 bp, Homo sapien
gccttctagtgttgattacttacct

SEQ ID NO: 59060 - DNA, 25 bp, Homo sapien
gccttctagtgtagattacttacct

SEQ ID NO: 59061 - DNA, 25 bp, Homo sapien
catcttagtgacagaggtggtacct

SEQ ID NO: 59062 - DNA, 25 bp, Homo sapien
catcttagtgactgaggtggtacct

SEQ ID NO: 59063 - DNA, 25 bp, Homo sapien
gtgacttgtactaaggaagtctctt

SEQ ID NO: 59064 - DNA, 25 bp, Homo sapien
gtgacttgtacttaggaagtctctt

SEQ ID NO: 59065 - DNA, 25 bp, Homo sapien
acatgtccgatcgtttcgggttctt

SEQ ID NO: 59066 - DNA, 25 bp, Homo sapien
acatgtccgatcctttcgggttctt

SEQ ID NO: 59067 - DNA, 25 bp, Homo sapien
cagtttgacgtccaagaattttgtt

SEQ ID NO: 59068 - DNA, 25 bp, Homo sapien
cagtttgacgtcgaagaattttgtt

SEQ ID NO: 59069 - DNA, 25 bp, Homo sapien
ccgtttgtttaagaactcctcgttt

SEQ ID NO: 59070 - DNA, 25 bp, Homo sapien
ccgtttgtttaacaactcctcgttt

SEQ ID NO: 59071 - DNA, 25 bp, Homo sapien
cctcatgtcccctaactagagggtt

SEQ ID NO: 59072 - DNA, 25 bp, Homo sapien
cctcatgtccccaaactagagggtt

SEQ ID NO: 59073 - DNA, 25 bp, Homo sapien
cgtatcgcggcctccagagagagtt

SEQ ID NO: 59074 - DNA, 25 bp, Homo sapien
cgtatcgcggccaccagagagagtt

SEQ ID NO: 59075 - DNA, 25 bp, Homo sapien
agattcggtgcgacaacacagacgg

SEQ ID NO: 59076 - DNA, 25 bp, Homo sapien
agattcggtgcgtcaacacagacgg

SEQ ID NO: 59077 - DNA, 25 bp, Homo sapien
ttatagtgtccaaagacatgtacgt

SEQ ID NO: 59078 - DNA, 25 bp, Homo sapien
ttatagtgtccatagacatgtacgt

SEQ ID NO: 59079 - DNA, 25 bp, Homo sapien
aataaggtcaaggagtctacaccgt

SEQ ID NO: 59080 - DNA, 25 bp, Homo sapien
aataaggtcaagcagtctacaccgt

SEQ ID NO: 59081 - DNA, 25 bp, Homo sapien
ggaaaccattgacgtcatcataact

SEQ ID NO: 59082 - DNA, 25 bp, Homo sapien
ggaaaccattgaggtcatcataact

SEQ ID NO: 59083 - DNA, 25 bp, Homo sapien
gaatatgtcctgtttgtaactatac

SEQ ID NO: 59084 - DNA, 25 bp, Homo sapien
gaatatgtcctgattgtaactatac

SEQ ID NO: 59085 - DNA, 25 bp, Homo sapien
gtcatgtatgtctctatggaataac

SEQ ID NO: 59086 - DNA, 25 bp, Homo sapien
gtcatgtatgtcactatggaataac

SEQ ID NO: 59087 - DNA, 25 bp, Homo sapien
cgaggtccctacaacgtcgggattc

SEQ ID NO: 59088 - DNA, 25 bp, Homo sapien
cgaggtccctactacgtcgggattc

SEQ ID NO: 59089 - DNA, 25 bp, Homo sapien
tcaggtaaaggaacactccacatcg

SEQ ID NO: 59090 - DNA, 25 bp, Homo sapien
tcaggtaaaggatcactccacatcg

SEQ ID NO: 59091 - DNA, 25 bp, Homo sapien
tcgaatggagaagaagacacccaaa

SEQ ID NO: 59092 - DNA, 25 bp, Homo sapien
tcgaatggagaacaagacacccaaa

SEQ ID NO: 59093 - DNA, 25 bp, Homo sapien
gagatttcaagaaatagacccacaa

SEQ ID NO: 59094 - DNA, 25 bp, Homo sapien
gagatttcaagatatagacccacaa

SEQ ID NO: 59095 - DNA, 25 bp, Homo sapien
ggaactgattcttaagatcccaata

SEQ ID NO: 59096 - DNA, 25 bp, Homo sapien
ggaactgattctaaagatcccaata

SEQ ID NO: 59097 - DNA, 25 bp, Homo sapien
ggtaagattccatacctccgtttac

SEQ ID NO: 59098 - DNA, 25 bp, Homo sapien
ggtaagattccaaacctccgtttac

SEQ ID NO: 59099 - DNA, 25 bp, Homo sapien
ggaagtttccggactcgaagatgag

SEQ ID NO: 59100 - DNA, 25 bp, Homo sapien
ggaagtttccggtctcgaagatgag

SEQ ID NO: 59101 - DNA, 25 bp, Homo sapien
cttttgactctgaaccgaaataatg

SEQ ID NO: 59102 - DNA, 25 bp, Homo sapien
cttttgactctgtaccgaaataatg

SEQ ID NO: 59103 - DNA, 25 bp, Homo sapien
ttttcaagtgaccaaaactaagtag

SEQ ID NO: 59104 - DNA, 25 bp, Homo sapien
ttttcaagtgacgaaaactaagtag

SEQ ID NO: 59105 - DNA, 25 bp, Homo sapien
accgtcggcggaagaaccggaaacg

SEQ ID NO: 59106 - DNA, 25 bp, Homo sapien
accgtcggcggatgaaccggaaacg

SEQ ID NO: 59107 - DNA, 25 bp, Homo sapien
cgggtcggcaactgcacgcgcatgc

SEQ ID NO: 59108 - DNA, 25 bp, Homo sapien
cgggtcggcaacagcacgcgcatgc

SEQ ID NO: 59109 - DNA, 25 bp, Homo sapien
actggggtcccatgaggtcgaagtc

SEQ ID NO: 59110 - DNA, 25 bp, Homo sapien
actggggtcccaagaggtcgaagtc

SEQ ID NO: 59111 - DNA, 25 bp, Homo sapien
ggtgggacaccaagacgttacaatt

SEQ ID NO: 59112 - DNA, 25 bp, Homo sapien
ggtgggacaccatgacgttacaatt

SEQ ID NO: 59113 - DNA, 25 bp, Homo sapien
gagtgggtagccttgtcttcggtaa

SEQ ID NO: 59114 - DNA, 25 bp, Homo sapien
gagtgggtagccatgtcttcggtaa

SEQ ID NO: 59115 - DNA, 25 bp, Homo sapien
tggagaccaaggaaaccccgtcgac

SEQ ID NO: 59116 - DNA, 25 bp, Homo sapien
tggagaccaaggtaaccccgtcgac

SEQ ID NO: 59117 - DNA, 25 bp, Homo sapien
tcatactgagcatcacccgtggtac

SEQ ID NO: 59118 - DNA, 25 bp, Homo sapien
tcatactgagcaacacccgtggtac

SEQ ID NO: 59119 - DNA, 25 bp, Homo sapien
ttcatctaacactgacattgtgcta

SEQ ID NO: 59120 - DNA, 25 bp, Homo sapien
ttcatctaacacagacattgtgcta

SEQ ID NO: 59121 - DNA, 25 bp, Homo sapien
tagttctcagaggaggattgtcctg

SEQ ID NO: 59122 - DNA, 25 bp, Homo sapien
tagttctcagagcaggattgtcctg

SEQ ID NO: 59123 - DNA, 25 bp, Homo sapien
aaaatcatcgtgaggtattgacctg

SEQ ID NO: 59124 - DNA, 25 bp, Homo sapien
aaaatcatcgtgtggtattgacctg

SEQ ID NO: 59125 - DNA, 25 bp, Homo sapien
gatcctcctcgtatgaacatgttta

SEQ ID NO: 59126 - DNA, 25 bp, Homo sapien
gatcctcctcgtttgaacatgttta

SEQ ID NO: 59127 - DNA, 25 bp, Homo sapien
ggacctcctcgttactgagactaac

SEQ ID NO: 59128 - DNA, 25 bp, Homo sapien
ggacctcctcgtaactgagactaac

SEQ ID NO: 59129 - DNA, 25 bp, Homo sapien
tatcgtcgtcctctatagacactac

SEQ ID NO: 59130 - DNA, 25 bp, Homo sapien
tatcgtcgtcctgtatagacactac

SEQ ID NO: 59131 - DNA, 25 bp, Homo sapien
atctacctgccttacgaatacactc

SEQ ID NO: 59132 - DNA, 25 bp, Homo sapien
atctacctgcctaacgaatacactc

SEQ ID NO: 59133 - DNA, 25 bp, Homo sapien
tcctcgagaccgatcataagacatc

SEQ ID NO: 59134 - DNA, 25 bp, Homo sapien
tcctcgagaccgttcataagacatc

SEQ ID NO: 59135 - DNA, 25 bp, Homo sapien
atacccggtactaggggcgacggtc

SEQ ID NO: 59136 - DNA, 25 bp, Homo sapien
atacccggtacttggggcgacggtc

SEQ ID NO: 59137 - DNA, 25 bp, Homo sapien
aggacacgagatccttgtgcccatg

SEQ ID NO: 59138 - DNA, 25 bp, Homo sapien
aggacacgagatgcttgtgcccatg

SEQ ID NO: 59139 - DNA, 25 bp, Homo sapien
ctgaagtcgaaggtcaaagacaaac

SEQ ID NO: 59140 - DNA, 25 bp, Homo sapien
ctgaagtcgaagctcaaagacaaac

SEQ ID NO: 59141 - DNA, 25 bp, Homo sapien
tagttcattctgtgtcgaaagcaaa

SEQ ID NO: 59142 - DNA, 25 bp, Homo sapien
tagttcattctgagtcgaaagcaaa

SEQ ID NO: 59143 - DNA, 25 bp, Homo sapien
ctagttcagtagtgtattcaattac

SEQ ID NO: 59144 - DNA, 25 bp, Homo sapien
ctagttcagtagagtattcaattac

SEQ ID NO: 59145 - DNA, 25 bp, Homo sapien
actcgagccatgaggttcaccacct

SEQ ID NO: 59146 - DNA, 25 bp, Homo sapien
actcgagccatgtggttcaccacct

SEQ ID NO: 59147 - DNA, 25 bp, Homo sapien
cagccgggtcggtcctacgtacctt

SEQ ID NO: 59148 - DNA, 25 bp, Homo sapien
cagccgggtcggacctacgtacctt

SEQ ID NO: 59149 - DNA, 25 bp, Homo sapien
aaaaacggttcgtaaaaatctccga

SEQ ID NO: 59150 - DNA, 25 bp, Homo sapien
aaaaacggttcgaaaaaatctccga

SEQ ID NO: 59151 - DNA, 25 bp, Homo sapien
atttactaaacagtgatctaccgtg

SEQ ID NO: 59152 - DNA, 25 bp, Homo sapien
atttactaaacactgatctaccgtg

SEQ ID NO: 59153 - DNA, 25 bp, Homo sapien
tcactacaataaccttctctcggtg

SEQ ID NO: 59154 - DNA, 25 bp, Homo sapien
tcactacaataagcttctctcggtg

SEQ ID NO: 59155 - DNA, 25 bp, Homo sapien
ttacaggggtgacctaggtctctgg

SEQ ID NO: 59156 - DNA, 25 bp, Homo sapien
ttacaggggtgagctaggtctctgg

SEQ ID NO: 59157 - DNA, 25 bp, Homo sapien
tctctcggtcggttgaagcacctgg

SEQ ID NO: 59158 - DNA, 25 bp, Homo sapien
tctctcggtcggatgaagcacctgg

SEQ ID NO: 59159 - DNA, 25 bp, Homo sapien
cgctatgaccttctggaggaaagtt

SEQ ID NO: 59160 - DNA, 25 bp, Homo sapien
cgctatgaccttgtggaggaaagtt

SEQ ID NO: 59161 - DNA, 25 bp, Homo sapien
accttgagattgtggatcacattgt

SEQ ID NO: 59162 - DNA, 25 bp, Homo sapien
accttgagattgaggatcacattgt

SEQ ID NO: 59163 - DNA, 25 bp, Homo sapien
tcgtcattgataagtcgacccatta

SEQ ID NO: 59164 - DNA, 25 bp, Homo sapien
tcgtcattgatatgtcgacccatta

SEQ ID NO: 59165 - DNA, 25 bp, Homo sapien
acctcttcttaaaagacaccggtga

SEQ ID NO: 59166 - DNA, 25 bp, Homo sapien
acctcttcttaatagacaccggtga

SEQ ID NO: 59167 - DNA, 25 bp, Homo sapien
tcgttagaggaattagaaccctagg

SEQ ID NO: 59168 - DNA, 25 bp, Homo sapien
tcgttagaggaaatagaaccctagg

SEQ ID NO: 59169 - DNA, 25 bp, Homo sapien
ctactattgaaccagaaaccagaag

SEQ ID NO: 59170 - DNA, 25 bp, Homo sapien
ctactattgaacgagaaaccagaag

SEQ ID NO: 59171 - DNA, 25 bp, Homo sapien
cacagtttgaacgacatccagacga

SEQ ID NO: 59172 - DNA, 25 bp, Homo sapien
cacagtttgaaccacatccagacga

SEQ ID NO: 59173 - DNA, 25 bp, Homo sapien
caaatattgtaatcgaatccagtga

SEQ ID NO: 59174 - DNA, 25 bp, Homo sapien
caaatattgtaaacgaatccagtga

SEQ ID NO: 59175 - DNA, 25 bp, Homo sapien
tctaaactggacaaccactttcgga

SEQ ID NO: 59176 - DNA, 25 bp, Homo sapien
tctaaactggactaccactttcgga

SEQ ID NO: 59177 - DNA, 25 bp, Homo sapien
gacacgggcgacgaccagccgcgac

SEQ ID NO: 59178 - DNA, 25 bp, Homo sapien
gacacgggcgaccaccagccgcgac

SEQ ID NO: 59179 - DNA, 25 bp, Homo sapien
cggaagtcgggacgtaccattcgga

SEQ ID NO: 59180 - DNA, 25 bp, Homo sapien
cggaagtcgggaggtaccattcgga

SEQ ID NO: 59181 - DNA, 25 bp, Homo sapien
aggttctcgttttcaattctgagag

SEQ ID NO: 59182 - DNA, 25 bp, Homo sapien
aggttctcgtttacaattctgagag

SEQ ID NO: 59183 - DNA, 25 bp, Homo sapien
ttactctggtttccaagtttaagta

SEQ ID NO: 59184 - DNA, 25 bp, Homo sapien
ttactctggtttgcaagtttaagta

SEQ ID NO: 59185 - DNA, 25 bp, Homo sapien
acttggacatgtcataggtcagtga

SEQ ID NO: 59186 - DNA, 25 bp, Homo sapien
acttggacatgtgataggtcagtga

SEQ ID NO: 59187 - DNA, 25 bp, Homo sapien
tactcttgagtgtcaaatcgttccg

SEQ ID NO: 59188 - DNA, 25 bp, Homo sapien
tactcttgagtgacaaatcgttccg

SEQ ID NO: 59189 - DNA, 25 bp, Homo sapien
cgaatgtcttcgacgcaatgtctaa

SEQ ID NO: 59190 - DNA, 25 bp, Homo sapien
cgaatgtcttcgtcgcaatgtctaa

SEQ ID NO: 59191 - DNA, 25 bp, Homo sapien
aaactgtgtttgtacctaatgaaac

SEQ ID NO: 59192 - DNA, 25 bp, Homo sapien
aaactgtgtttgaacctaatgaaac

SEQ ID NO: 59193 - DNA, 25 bp, Homo sapien
tggtcgggtttgtcccacgtccccg

SEQ ID NO: 59194 - DNA, 25 bp, Homo sapien
tggtcgggtttgacccacgtccccg

SEQ ID NO: 59195 - DNA, 25 bp, Homo sapien
tggtgggaatagagacccgtaattc

SEQ ID NO: 59196 - DNA, 25 bp, Homo sapien
tggtgggaatagtgacccgtaattc

SEQ ID NO: 59197 - DNA, 25 bp, Homo sapien
ggtaagttttaacaccttatgttac

SEQ ID NO: 59198 - DNA, 25 bp, Homo sapien
ggtaagttttaagaccttatgttac

SEQ ID NO: 59199 - DNA, 25 bp, Homo sapien
tatagatcgaaagacacttatggtc

SEQ ID NO: 59200 - DNA, 25 bp, Homo sapien
tatagatcgaaacacacttatggtc

SEQ ID NO: 59201 - DNA, 25 bp, Homo sapien
aatgtacgaagtacccgtcttggtt

SEQ ID NO: 59202 - DNA, 25 bp, Homo sapien
aatgtacgaagttcccgtcttggtt

SEQ ID NO: 59203 - DNA, 25 bp, Homo sapien
cattattcaataatccgtgtttggt

SEQ ID NO: 59204 - DNA, 25 bp, Homo sapien
cattattcaatattccgtgtttggt

SEQ ID NO: 59205 - DNA, 25 bp, Homo sapien
aaacttttcttacttggtgttgtca

SEQ ID NO: 59206 - DNA, 25 bp, Homo sapien
aaacttttcttagttggtgttgtca

SEQ ID NO: 59207 - DNA, 25 bp, Homo sapien
ctagtgtcctctattttgtggttag

SEQ ID NO: 59208 - DNA, 25 bp, Homo sapien
ctagtgtcctcttttttgtggttag

SEQ ID NO: 59209 - DNA, 25 bp, Homo sapien
taacgtgtcgtcaccccgttcattt

SEQ ID NO: 59210 - DNA, 25 bp, Homo sapien
taacgtgtcgtctccccgttcattt

SEQ ID NO: 59211 - DNA, 25 bp, Homo sapien
atccatgtaaattccgtcatgtgtc

SEQ ID NO: 59212 - DNA, 25 bp, Homo sapien
atccatgtaaataccgtcatgtgtc

SEQ ID NO: 59213 - DNA, 25 bp, Homo sapien
ccgtcaaatcttaagtcggaactta

SEQ ID NO: 59214 - DNA, 25 bp, Homo sapien
ccgtcaaatctttagtcggaactta

SEQ ID NO: 59215 - DNA, 25 bp, Homo sapien
acgatgagacacgtcccggacattc

SEQ ID NO: 59216 - DNA, 25 bp, Homo sapien
acgatgagacacctcccggacattc

SEQ ID NO: 59217 - DNA, 25 bp, Homo sapien
ccctaagactcgtcgaaggaagatt

SEQ ID NO: 59218 - DNA, 25 bp, Homo sapien
ccctaagactcgacgaaggaagatt

SEQ ID NO: 59219 - DNA, 25 bp, Homo sapien
gggccagagcggagtcaaaattacg

SEQ ID NO: 59220 - DNA, 25 bp, Homo sapien
gggccagagcggtgtcaaaattacg

SEQ ID NO: 59221 - DNA, 25 bp, Homo sapien
tagaaggggttgaaccagaaacttc

SEQ ID NO: 59222 - DNA, 25 bp, Homo sapien
tagaaggggttgtaccagaaacttc

SEQ ID NO: 59223 - DNA, 25 bp, Homo sapien
gtgaagagaggagttggaccccttc

SEQ ID NO: 59224 - DNA, 25 bp, Homo sapien
gtgaagagaggacttggaccccttc

SEQ ID NO: 59225 - DNA, 25 bp, Homo sapien
acgagacagaattttatcagctcct

SEQ ID NO: 59226 - DNA, 25 bp, Homo sapien
acgagacagaatattatcagctcct

SEQ ID NO: 59227 - DNA, 25 bp, Homo sapien
cggtactcaactagtgactcctcca

SEQ ID NO: 59228 - DNA, 25 bp, Homo sapien
cggtactcaacttgtgactcctcca

SEQ ID NO: 59229 - DNA, 25 bp, Homo sapien
cgcaccgacacagtgacttgtgtga

SEQ ID NO: 59230 - DNA, 25 bp, Homo sapien
cgcaccgacacactgacttgtgtga

SEQ ID NO: 59231 - DNA, 25 bp, Homo sapien
gtacggagtactgttgtattgtccc

SEQ ID NO: 59232 - DNA, 25 bp, Homo sapien
gtacggagtactcttgtattgtccc

SEQ ID NO: 59233 - DNA, 25 bp, Homo sapien
gtccgaagaaggtccgactggtccc

SEQ ID NO: 59234 - DNA, 25 bp, Homo sapien
gtccgaagaaggaccgactggtccc

SEQ ID NO: 59235 - DNA, 25 bp, Homo sapien
tcacaagctcggaccaggtggtgag

SEQ ID NO: 59236 - DNA, 25 bp, Homo sapien
tcacaagctcggtccaggtggtgag

SEQ ID NO: 59237 - DNA, 25 bp, Homo sapien
gggccctccgggtccctcgtggtta

SEQ ID NO: 59238 - DNA, 25 bp, Homo sapien
gggccctccgggaccctcgtggtta

SEQ ID NO: 59239 - DNA, 25 bp, Homo sapien
cgacttctgcggaaccccttgtgtc

SEQ ID NO: 59240 - DNA, 25 bp, Homo sapien
cgacttctgcggtaccccttgtgtc

SEQ ID NO: 59241 - DNA, 25 bp, Homo sapien
acccctttctttgtggtagttctag

SEQ ID NO: 59242 - DNA, 25 bp, Homo sapien
acccctttctttctggtagttctag

SEQ ID NO: 59243 - DNA, 25 bp, Homo sapien
cccgtttcaggttgcccgtagggtg

SEQ ID NO: 59244 - DNA, 25 bp, Homo sapien
cccgtttcaggtagcccgtagggtg

SEQ ID NO: 59245 - DNA, 25 bp, Homo sapien
gagtcccgaccgtcggcctaggacc

SEQ ID NO: 59246 - DNA, 25 bp, Homo sapien
gagtcccgaccgacggcctaggacc

SEQ ID NO: 59247 - DNA, 25 bp, Homo sapien
atccctcctaaaggtacagtcgatc

SEQ ID NO: 59248 - DNA, 25 bp, Homo sapien
atccctcctaaacgtacagtcgatc

SEQ ID NO: 59249 - DNA, 25 bp, Homo sapien
ttatgggccgataacttctttatgt

SEQ ID NO: 59250 - DNA, 25 bp, Homo sapien
ttatgggccgattacttctttatgt

SEQ ID NO: 59251 - DNA, 25 bp, Homo sapien
gtgtgggaatcgtcaccactcatta

SEQ ID NO: 59252 - DNA, 25 bp, Homo sapien
gtgtgggaatcgacaccactcatta

SEQ ID NO: 59253 - DNA, 25 bp, Homo sapien
tggggacatgaaccaccagatagtg

SEQ ID NO: 59254 - DNA, 25 bp, Homo sapien
tggggacatgaagcaccagatagtg

SEQ ID NO: 59255 - DNA, 25 bp, Homo sapien
tctggaaattaaagagactccttac

SEQ ID NO: 59256 - DNA, 25 bp, Homo sapien
tctggaaattaatgagactccttac

SEQ ID NO: 59257 - DNA, 25 bp, Homo sapien
tcgaaagtgagttcaaaccataagt

SEQ ID NO: 59258 - DNA, 25 bp, Homo sapien
tcgaaagtgagtacaaaccataagt

SEQ ID NO: 59259 - DNA, 25 bp, Homo sapien
aacaaaagacaagtctgcagagtgt

SEQ ID NO: 59260 - DNA, 25 bp, Homo sapien
aacaaaagacaactctgcagagtgt

SEQ ID NO: 59261 - DNA, 25 bp, Homo sapien
gtccaaaggtcatttatccgtacct

SEQ ID NO: 59262 - DNA, 25 bp, Homo sapien
gtccaaaggtcaattatccgtacct

SEQ ID NO: 59263 - DNA, 25 bp, Homo sapien
ctcaccagtactatattagtcctta

SEQ ID NO: 59264 - DNA, 25 bp, Homo sapien
ctcaccagtactttattagtcctta

SEQ ID NO: 59265 - DNA, 25 bp, Homo sapien
gcctcccttccattgttcgtcttgt

SEQ ID NO: 59266 - DNA, 25 bp, Homo sapien
gcctcccttccaatgttcgtcttgt

SEQ ID NO: 59267 - DNA, 25 bp, Homo sapien
ctacactatcttgtatctgtggatc

SEQ ID NO: 59268 - DNA, 25 bp, Homo sapien
ctacactatcttctatctgtggatc

SEQ ID NO: 59269 - DNA, 25 bp, Homo sapien
agacgtaatgtgttttgtcacgttc

SEQ ID NO: 59270 - DNA, 25 bp, Homo sapien
agacgtaatgtgatttgtcacgttc

SEQ ID NO: 59271 - DNA, 25 bp, Homo sapien
caagatcgtcggtttgtatcctctt

SEQ ID NO: 59272 - DNA, 25 bp, Homo sapien
caagatcgtcggattgtatcctctt

SEQ ID NO: 59273 - DNA, 25 bp, Homo sapien
caggttcgtttgtcgtcttacgttg

SEQ ID NO: 59274 - DNA, 25 bp, Homo sapien
caggttcgtttgacgtcttacgttg

SEQ ID NO: 59275 - DNA, 25 bp, Homo sapien
ataagagtgtgtttttagtggcttt

SEQ ID NO: 59276 - DNA, 25 bp, Homo sapien
ataagagtgtgtatttagtggcttt

SEQ ID NO: 59277 - DNA, 25 bp, Homo sapien
cacctagatttctattggtgtacaa

SEQ ID NO: 59278 - DNA, 25 bp, Homo sapien
cacctagatttcaattggtgtacaa

SEQ ID NO: 59279 - DNA, 25 bp, Homo sapien
gaaagatcttcaatatttagaccta

SEQ ID NO: 59280 - DNA, 25 bp, Homo sapien
gaaagatcttcattatttagaccta

SEQ ID NO: 59281 - DNA, 25 bp, Homo sapien
tgaatacttcatcattgtgatcggt

SEQ ID NO: 59282 - DNA, 25 bp, Homo sapien
tgaatacttcatgattgtgatcggt

SEQ ID NO: 59283 - DNA, 25 bp, Homo sapien
cgaccggtccggaagtcgtttcgac

SEQ ID NO: 59284 - DNA, 25 bp, Homo sapien
cgaccggtccggtagtcgtttcgac

SEQ ID NO: 59285 - DNA, 25 bp, Homo sapien
gatctgtgcgtcgaccgtaatcgag

SEQ ID NO: 59286 - DNA, 25 bp, Homo sapien
gatctgtgcgtccaccgtaatcgag

SEQ ID NO: 59287 - DNA, 25 bp, Homo sapien
aggtatgtgacttcgtcctaaagta

SEQ ID NO: 59288 - DNA, 25 bp, Homo sapien
aggtatgtgactacgtcctaaagta

SEQ ID NO: 59289 - DNA, 25 bp, Homo sapien
tgttgtacttcgacgacgacagtgt

SEQ ID NO: 59290 - DNA, 25 bp, Homo sapien
tgttgtacttcgtcgacgacagtgt

SEQ ID NO: 59291 - DNA, 25 bp, Homo sapien
cagtttcagtgttgttcagacatgt

SEQ ID NO: 59292 - DNA, 25 bp, Homo sapien
cagtttcagtgtagttcagacatgt

SEQ ID NO: 59293 - DNA, 25 bp, Homo sapien
gacctatcgttgcatgtaccgaccc

SEQ ID NO: 59294 - DNA, 25 bp, Homo sapien
gacctatcgttggatgtaccgaccc

SEQ ID NO: 59295 - DNA, 25 bp, Homo sapien
agatctttgtttgtggtaccaccac

SEQ ID NO: 59296 - DNA, 25 bp, Homo sapien
agatctttgtttctggtaccaccac

SEQ ID NO: 59297 - DNA, 25 bp, Homo sapien
aacgctccatttgagttgtctccaa

SEQ ID NO: 59298 - DNA, 25 bp, Homo sapien
aacgctccatttcagttgtctccaa

SEQ ID NO: 59299 - DNA, 25 bp, Homo sapien
gactctaattccattaccgggtcct

SEQ ID NO: 59300 - DNA, 25 bp, Homo sapien
gactctaattcctttaccgggtcct

SEQ ID NO: 59301 - DNA, 25 bp, Homo sapien
aaagatatcatacactcatgtgtat

SEQ ID NO: 59302 - DNA, 25 bp, Homo sapien
aaagatatcatagactcatgtgtat

SEQ ID NO: 59303 - DNA, 25 bp, Homo sapien
aaaagtttactacgtcctgagtgtt

SEQ ID NO: 59304 - DNA, 25 bp, Homo sapien
aaaagtttactaggtcctgagtgtt

SEQ ID NO: 59305 - DNA, 25 bp, Homo sapien
aaacaaacgtatatcccttgtaggt

SEQ ID NO: 59306 - DNA, 25 bp, Homo sapien
aaacaaacgtatttcccttgtaggt

SEQ ID NO: 59307 - DNA, 25 bp, Homo sapien
gatcacaaaatttccgggtccgtag

SEQ ID NO: 59308 - DNA, 25 bp, Homo sapien
gatcacaaaattaccgggtccgtag

SEQ ID NO: 59309 - DNA, 25 bp, Homo sapien
aacagaaaaatcttcagaagtccga

SEQ ID NO: 59310 - DNA, 25 bp, Homo sapien
aacagaaaaatcatcagaagtccga

SEQ ID NO: 59311 - DNA, 25 bp, Homo sapien
tttagggtatcgtactgacttccga

SEQ ID NO: 59312 - DNA, 25 bp, Homo sapien
tttagggtatcgaactgacttccga

SEQ ID NO: 59313 - DNA, 25 bp, Homo sapien
tttggtgtactaaacaaacgaccag

SEQ ID NO: 59314 - DNA, 25 bp, Homo sapien
tttggtgtactatacaaacgaccag

SEQ ID NO: 59315 - DNA, 25 bp, Homo sapien
ttttatcgttgaatggaaacccgat

SEQ ID NO: 59316 - DNA, 25 bp, Homo sapien
ttttatcgttgattggaaacccgat

SEQ ID NO: 59317 - DNA, 25 bp, Homo sapien
tatgatggttgtattgaaacctcgc

SEQ ID NO: 59318 - DNA, 25 bp, Homo sapien
tatgatggttgttttgaaacctcgc

SEQ ID NO: 59319 - DNA, 25 bp, Homo sapien
ctatgtatgtagtgtcttttcgtcc

SEQ ID NO: 59320 - DNA, 25 bp, Homo sapien
ctatgtatgtagagtcttttcgtcc

SEQ ID NO: 59321 - DNA, 25 bp, Homo sapien
gatttgatgtccttttacgtccaat

SEQ ID NO: 59322 - DNA, 25 bp, Homo sapien
gatttgatgtccatttacgtccaat

SEQ ID NO: 59323 - DNA, 25 bp, Homo sapien
ggactttagggttcacttttatcaa

SEQ ID NO: 59324 - DNA, 25 bp, Homo sapien
ggactttagggtacacttttatcaa

SEQ ID NO: 59325 - DNA, 25 bp, Homo sapien
actcaaagtcgtctctaatttgtaa

SEQ ID NO: 59326 - DNA, 25 bp, Homo sapien
actcaaagtcgtgtctaatttgtaa

SEQ ID NO: 59327 - DNA, 25 bp, Homo sapien
acacaaaccattccgaactcttaag

SEQ ID NO: 59328 - DNA, 25 bp, Homo sapien
acacaaaccattgcgaactcttaag

SEQ ID NO: 59329 - DNA, 25 bp, Homo sapien
taaaacctactttctaatgttatgt

SEQ ID NO: 59330 - DNA, 25 bp, Homo sapien
taaaacctacttactaatgttatgt

SEQ ID NO: 59331 - DNA, 25 bp, Homo sapien
cacgggaggtcgtcgaaccgctgct

SEQ ID NO: 59332 - DNA, 25 bp, Homo sapien
cacgggaggtcgacgaaccgctgct

SEQ ID NO: 59333 - DNA, 25 bp, Homo sapien
ttctcggtggtcctaaaagagtatt

SEQ ID NO: 59334 - DNA, 25 bp, Homo sapien
ttctcggtggtcgtaaaagagtatt

SEQ ID NO: 59335 - DNA, 25 bp, Homo sapien
ttacgatgtataccttaacaggttg

SEQ ID NO: 59336 - DNA, 25 bp, Homo sapien
ttacgatgtatagcttaacaggttg

SEQ ID NO: 59337 - DNA, 25 bp, Homo sapien
aaggggcttcttcgtcccggtctcc

SEQ ID NO: 59338 - DNA, 25 bp, Homo sapien
aaggggcttcttggtcccggtctcc

SEQ ID NO: 59339 - DNA, 25 bp, Homo sapien
gagtcacggattggtcccgacctcc

SEQ ID NO: 59340 - DNA, 25 bp, Homo sapien
gagtcacggattcgtcccgacctcc

SEQ ID NO: 59341 - DNA, 25 bp, Homo sapien
atcttaggttttaaacgtacacctg

SEQ ID NO: 59342 - DNA, 25 bp, Homo sapien
atcttaggtttttaacgtacacctg

SEQ ID NO: 59343 - DNA, 25 bp, Homo sapien
agtcccagacgagtagtttaacctc

SEQ ID NO: 59344 - DNA, 25 bp, Homo sapien
agtcccagacgactagtttaacctc

SEQ ID NO: 59345 - DNA, 25 bp, Homo sapien
tcttcacggtcgtgtcttcacggtc

SEQ ID NO: 59346 - DNA, 25 bp, Homo sapien
tcttcacggtcgagtcttcacggtc

SEQ ID NO: 59347 - DNA, 25 bp, Homo sapien
catataggagtttttcgttcaagtc

SEQ ID NO: 59348 - DNA, 25 bp, Homo sapien
catataggagttattcgttcaagtc

SEQ ID NO: 59349 - DNA, 25 bp, Homo sapien
ggtgtggtccgtttcgtcataacct

SEQ ID NO: 59350 - DNA, 25 bp, Homo sapien
ggtgtggtccgtatcgtcataacct

SEQ ID NO: 59351 - DNA, 25 bp, Homo sapien
gtggaattcactgaaccctcacact

SEQ ID NO: 59352 - DNA, 25 bp, Homo sapien
gtggaattcactcaaccctcacact

SEQ ID NO: 59353 - DNA, 25 bp, Homo sapien
cacggaaccgcctgaaaccacggac

SEQ ID NO: 59354 - DNA, 25 bp, Homo sapien
cacggaaccgccagaaaccacggac

SEQ ID NO: 59355 - DNA, 25 bp, Homo sapien
ggactgcacccgaaaactcaagggt

SEQ ID NO: 59356 - DNA, 25 bp, Homo sapien
ggactgcacccgtaaactcaagggt

SEQ ID NO: 59357 - DNA, 25 bp, Homo sapien
gggatttcccctgagaccagagggt

SEQ ID NO: 59358 - DNA, 25 bp, Homo sapien
gggatttcccctcagaccagagggt

SEQ ID NO: 59359 - DNA, 25 bp, Homo sapien
cttttgtgacggtcttagaggtttc

SEQ ID NO: 59360 - DNA, 25 bp, Homo sapien
cttttgtgacggacttagaggtttc

SEQ ID NO: 59361 - DNA, 25 bp, Homo sapien
ctgtttccgcggtatgaaccggacc

SEQ ID NO: 59362 - DNA, 25 bp, Homo sapien
ctgtttccgcggaatgaaccggacc

SEQ ID NO: 59363 - DNA, 25 bp, Homo sapien
tctccggtcgaacgatccgtcgatc

SEQ ID NO: 59364 - DNA, 25 bp, Homo sapien
tctccggtcgaaggatccgtcgatc

SEQ ID NO: 59365 - DNA, 25 bp, Homo sapien
gacggactctagaccactcgtctac

SEQ ID NO: 59366 - DNA, 25 bp, Homo sapien
gacggactctagtccactcgtctac

SEQ ID NO: 59367 - DNA, 25 bp, Homo sapien
aggcgactcgcgtcgtactaccgga

SEQ ID NO: 59368 - DNA, 25 bp, Homo sapien
aggcgactcgcgacgtactaccgga

SEQ ID NO: 59369 - DNA, 25 bp, Homo sapien
cgtgtaggacgtcgaagaatgcgtc

SEQ ID NO: 59370 - DNA, 25 bp, Homo sapien
cgtgtaggacgtggaagaatgcgtc

SEQ ID NO: 59371 - DNA, 25 bp, Homo sapien
attatagaactagttaaacactgta

SEQ ID NO: 59372 - DNA, 25 bp, Homo sapien
attatagaactacttaaacactgta

SEQ ID NO: 59373 - DNA, 25 bp, Homo sapien
ccatcaacaaatcagtgtccatgtg

SEQ ID NO: 59374 - DNA, 25 bp, Homo sapien
ccatcaacaaatgagtgtccatgtg

SEQ ID NO: 59375 - DNA, 25 bp, Homo sapien
ataagtcgaacaattgattccattg

SEQ ID NO: 59376 - DNA, 25 bp, Homo sapien
ataagtcgaacatttgattccattg

SEQ ID NO: 59377 - DNA, 25 bp, Homo sapien
gtaaacccatgtcagtgtcaacagt

SEQ ID NO: 59378 - DNA, 25 bp, Homo sapien
gtaaacccatgtgagtgtcaacagt

SEQ ID NO: 59379 - DNA, 25 bp, Homo sapien
tgaattttcctcttgagttaaggtc

SEQ ID NO: 59380 - DNA, 25 bp, Homo sapien
tgaattttcctcatgagttaaggtc

SEQ ID NO: 59381 - DNA, 25 bp, Homo sapien
actgtacatacacagataacgtgtc

SEQ ID NO: 59382 - DNA, 25 bp, Homo sapien
actgtacatacagagataacgtgtc

SEQ ID NO: 59383 - DNA, 25 bp, Homo sapien
ctaaaccgacctgacaccggacgac

SEQ ID NO: 59384 - DNA, 25 bp, Homo sapien
ctaaaccgacctcacaccggacgac

SEQ ID NO: 59385 - DNA, 25 bp, Homo sapien
acatcagaccggcacaccggcgtac

SEQ ID NO: 59386 - DNA, 25 bp, Homo sapien
acatcagaccgggacaccggcgtac

SEQ ID NO: 59387 - DNA, 25 bp, Homo sapien
aaaactattccaggtccaccctgag

SEQ ID NO: 59388 - DNA, 25 bp, Homo sapien
aaaactattccacgtccaccctgag

SEQ ID NO: 59389 - DNA, 25 bp, Homo sapien
gtcaatcagggtagaccttcccagg

SEQ ID NO: 59390 - DNA, 25 bp, Homo sapien
gtcaatcagggttgaccttcccagg

SEQ ID NO: 59391 - DNA, 25 bp, Homo sapien
tcaacctgggtctgccctttgtccg

SEQ ID NO: 59392 - DNA, 25 bp, Homo sapien
tcaacctgggtcagccctttgtccg

SEQ ID NO: 59393 - DNA, 25 bp, Homo sapien
gtccagggcgctacaaccccggaat

SEQ ID NO: 59394 - DNA, 25 bp, Homo sapien
gtccagggcgcttcaaccccggaat

SEQ ID NO: 59395 - DNA, 25 bp, Homo sapien
cccgaggactcacaaccaagaaggt

SEQ ID NO: 59396 - DNA, 25 bp, Homo sapien
cccgaggactcagaaccaagaaggt

SEQ ID NO: 59397 - DNA, 25 bp, Homo sapien
gtaaaagtcactacaagataccgac

SEQ ID NO: 59398 - DNA, 25 bp, Homo sapien
gtaaaagtcacttcaagataccgac

SEQ ID NO: 59399 - DNA, 25 bp, Homo sapien
ggtacaggttcagtctcaggaacga

SEQ ID NO: 59400 - DNA, 25 bp, Homo sapien
ggtacaggttcactctcaggaacga

SEQ ID NO: 59401 - DNA, 25 bp, Homo sapien
gcccggtacccgtgaccgagaggtc

SEQ ID NO: 59402 - DNA, 25 bp, Homo sapien
gcccggtacccgagaccgagaggtc

SEQ ID NO: 59403 - DNA, 25 bp, Homo sapien
catcatgaggtctaccgcggtttct

SEQ ID NO: 59404 - DNA, 25 bp, Homo sapien
catcatgaggtcaaccgcggtttct

SEQ ID NO: 59405 - DNA, 25 bp, Homo sapien
ctttcctctgggtcgtcggagtttt

SEQ ID NO: 59406 - DNA, 25 bp, Homo sapien
ctttcctctgggacgtcggagtttt

SEQ ID NO: 59407 - DNA, 25 bp, Homo sapien
ttcagtgttcagtcgtccagtttct

SEQ ID NO: 59408 - DNA, 25 bp, Homo sapien
ttcagtgttcagacgtccagtttct

SEQ ID NO: 59409 - DNA, 25 bp, Homo sapien
taatcagtgtccaaaccaattgacg

SEQ ID NO: 59410 - DNA, 25 bp, Homo sapien
taatcagtgtcctaaccaattgacg

SEQ ID NO: 59411 - DNA, 25 bp, Homo sapien
actcgaggacgtctacacaaattcc

SEQ ID NO: 59412 - DNA, 25 bp, Homo sapien
actcgaggacgtgtacacaaattcc

SEQ ID NO: 59413 - DNA, 25 bp, Homo sapien
gtcaatatctaggtttatgtctacc

SEQ ID NO: 59414 - DNA, 25 bp, Homo sapien
gtcaatatctagctttatgtctacc

SEQ ID NO: 59415 - DNA, 25 bp, Homo sapien
tatttgttaaagtacccccgttccc

SEQ ID NO: 59416 - DNA, 25 bp, Homo sapien
tatttgttaaagaacccccgttccc

SEQ ID NO: 59417 - DNA, 25 bp, Homo sapien
cctaccagaacacactggttcacgt

SEQ ID NO: 59418 - DNA, 25 bp, Homo sapien
cctaccagaacagactggttcacgt

SEQ ID NO: 59419 - DNA, 25 bp, Homo sapien
tgtaccccggcgaccactggctgag

SEQ ID NO: 59420 - DNA, 25 bp, Homo sapien
tgtaccccggcgtccactggctgag

SEQ ID NO: 59421 - DNA, 25 bp, Homo sapien
gtggtcctgcatacctcggtcagag

SEQ ID NO: 59422 - DNA, 25 bp, Homo sapien
gtggtcctgcattcctcggtcagag

SEQ ID NO: 59423 - DNA, 25 bp, Homo sapien
gaaagtcgtacgaagtctcttctct

SEQ ID NO: 59424 - DNA, 25 bp, Homo sapien
gaaagtcgtacgtagtctcttctct

SEQ ID NO: 59425 - DNA, 25 bp, Homo sapien
gtacttctacgcaccgtggctacgg

SEQ ID NO: 59426 - DNA, 25 bp, Homo sapien
gtacttctacgctccgtggctacgg

SEQ ID NO: 59427 - DNA, 25 bp, Homo sapien
gtacgcaagcgactttccgtagcca

SEQ ID NO: 59428 - DNA, 25 bp, Homo sapien
gtacgcaagcgagtttccgtagcca

SEQ ID NO: 59429 - DNA, 25 bp, Homo sapien
gtcgtcaccgacatcattgtctcgg

SEQ ID NO: 59430 - DNA, 25 bp, Homo sapien
gtcgtcaccgacttcattgtctcgg

SEQ ID NO: 59431 - DNA, 25 bp, Homo sapien
tcctcgtgtccctgccgggagttag

SEQ ID NO: 59432 - DNA, 25 bp, Homo sapien
tcctcgtgtcccagccgggagttag

SEQ ID NO: 59433 - DNA, 25 bp, Homo sapien
ttacgtgtccttacacctcgatgtc

SEQ ID NO: 59434 - DNA, 25 bp, Homo sapien
ttacgtgtcctttcacctcgatgtc

SEQ ID NO: 59435 - DNA, 25 bp, Homo sapien
accgtgttcagtacactgttatata

SEQ ID NO: 59436 - DNA, 25 bp, Homo sapien
accgtgttcagttcactgttatata

SEQ ID NO: 59437 - DNA, 25 bp, Homo sapien
taccgggtcgagtccctcgatagag

SEQ ID NO: 59438 - DNA, 25 bp, Homo sapien
taccgggtcgagaccctcgatagag

SEQ ID NO: 59439 - DNA, 25 bp, Homo sapien
aatctcgtcttctttacctccgtgg

SEQ ID NO: 59440 - DNA, 25 bp, Homo sapien
aatctcgtcttcattacctccgtgg

SEQ ID NO: 59441 - DNA, 25 bp, Homo sapien
acaccactttacaatgtctctcggg

SEQ ID NO: 59442 - DNA, 25 bp, Homo sapien
acaccactttactatgtctctcggg

SEQ ID NO: 59443 - DNA, 25 bp, Homo sapien
cctacgggtcattagttcatgtgag

SEQ ID NO: 59444 - DNA, 25 bp, Homo sapien
cctacgggtcataagttcatgtgag

SEQ ID NO: 59445 - DNA, 25 bp, Homo sapien
actaagacgaccaagactctttgta

SEQ ID NO: 59446 - DNA, 25 bp, Homo sapien
actaagacgacctagactctttgta

SEQ ID NO: 59447 - DNA, 25 bp, Homo sapien
ctcgagagaccctgacctcgactga

SEQ ID NO: 59448 - DNA, 25 bp, Homo sapien
ctcgagagacccagacctcgactga

SEQ ID NO: 59449 - DNA, 25 bp, Homo sapien
gaagacacgacagctactgtacgga

SEQ ID NO: 59450 - DNA, 25 bp, Homo sapien
gaagacacgacacctactgtacgga

SEQ ID NO: 59451 - DNA, 25 bp, Homo sapien
tccggaacagaggtgctgttgtgtt

SEQ ID NO: 59452 - DNA, 25 bp, Homo sapien
tccggaacagagctgctgttgtgtt

SEQ ID NO: 59453 - DNA, 25 bp, Homo sapien
agaaggaaacgtcacggtactttat

SEQ ID NO: 59454 - DNA, 25 bp, Homo sapien
agaaggaaacgtgacggtactttat

SEQ ID NO: 59455 - DNA, 25 bp, Homo sapien
aaataaggtccgttcacgaataatg

SEQ ID NO: 59456 - DNA, 25 bp, Homo sapien
aaataaggtccgatcacgaataatg

SEQ ID NO: 59457 - DNA, 25 bp, Homo sapien
atacgttactgattcagacacttgt

SEQ ID NO: 59458 - DNA, 25 bp, Homo sapien
atacgttactgaatcagacacttgt

SEQ ID NO: 59459 - DNA, 25 bp, Homo sapien
ccaacgtgataaggtgtagttcctt

SEQ ID NO: 59460 - DNA, 25 bp, Homo sapien
ccaacgtgataacgtgtagttcctt

SEQ ID NO: 59461 - DNA, 25 bp, Homo sapien
gaaccggaaaaactagtatccgacc

SEQ ID NO: 59462 - DNA, 25 bp, Homo sapien
gaaccggaaaaagtagtatccgacc

SEQ ID NO: 59463 - DNA, 25 bp, Homo sapien
agactaagatcgacgaggtccgact

SEQ ID NO: 59464 - DNA, 25 bp, Homo sapien
agactaagatcgtcgaggtccgact

SEQ ID NO: 59465 - DNA, 25 bp, Homo sapien
ggtgtaaatacgtcggttcacgtac

SEQ ID NO: 59466 - DNA, 25 bp, Homo sapien
ggtgtaaatacgacggttcacgtac

SEQ ID NO: 59467 - DNA, 25 bp, Homo sapien
agtggtgtctaaaagaagtcaccaa

SEQ ID NO: 59468 - DNA, 25 bp, Homo sapien
agtggtgtctaatagaagtcaccaa

SEQ ID NO: 59469 - DNA, 25 bp, Homo sapien
acgacgtcaacaagtataaacccca

SEQ ID NO: 59470 - DNA, 25 bp, Homo sapien
acgacgtcaacatgtataaacccca

SEQ ID NO: 59471 - DNA, 25 bp, Homo sapien
acaacaggagtctccgactcacaca

SEQ ID NO: 59472 - DNA, 25 bp, Homo sapien
acaacaggagtcaccgactcacaca

SEQ ID NO: 59473 - DNA, 25 bp, Homo sapien
agacaagattttaccgagtccctct

SEQ ID NO: 59474 - DNA, 25 bp, Homo sapien
agacaagatttttccgagtccctct

SEQ ID NO: 59475 - DNA, 25 bp, Homo sapien
catagaaagaagtatttgtttctcc

SEQ ID NO: 59476 - DNA, 25 bp, Homo sapien
catagaaagaagaatttgtttctcc

SEQ ID NO: 59477 - DNA, 25 bp, Homo sapien
ggttgttggtatttgtactgacacc

SEQ ID NO: 59478 - DNA, 25 bp, Homo sapien
ggttgttggtatatgtactgacacc

SEQ ID NO: 59479 - DNA, 25 bp, Homo sapien
ttttcgtacgttgaagtacttctaa

SEQ ID NO: 59480 - DNA, 25 bp, Homo sapien
ttttcgtacgttcaagtacttctaa

SEQ ID NO: 59481 - DNA, 25 bp, Homo sapien
cgatttctcttaagtttacacagag

SEQ ID NO: 59482 - DNA, 25 bp, Homo sapien
cgatttctcttatgtttacacagag

SEQ ID NO: 59483 - DNA, 25 bp, Homo sapien
gatggtatctcctttttactgatac

SEQ ID NO: 59484 - DNA, 25 bp, Homo sapien
gatggtatctccattttactgatac

SEQ ID NO: 59485 - DNA, 25 bp, Homo sapien
tatcttatcctgatctttccgtagg

SEQ ID NO: 59486 - DNA, 25 bp, Homo sapien
tatcttatcctgttctttccgtagg

SEQ ID NO: 59487 - DNA, 25 bp, Homo sapien
acctcttaagtcgtgtttttcgtgg

SEQ ID NO: 59488 - DNA, 25 bp, Homo sapien
acctcttaagtcctgtttttcgtgg

SEQ ID NO: 59489 - DNA, 25 bp, Homo sapien
ctcggaaccgtcttacgtgtcctga

SEQ ID NO: 59490 - DNA, 25 bp, Homo sapien
ctcggaaccgtcatacgtgtcctga

SEQ ID NO: 59491 - DNA, 25 bp, Homo sapien
tcctacaagttaagtccgactacgg

SEQ ID NO: 59492 - DNA, 25 bp, Homo sapien
tcctacaagttatgtccgactacgg

SEQ ID NO: 59493 - DNA, 25 bp, Homo sapien
ttacctgactcctgttctcgagtaa

SEQ ID NO: 59494 - DNA, 25 bp, Homo sapien
ttacctgactccagttctcgagtaa

SEQ ID NO: 59495 - DNA, 25 bp, Homo sapien
gaactgtacacctcgtgtcgacaac

SEQ ID NO: 59496 - DNA, 25 bp, Homo sapien
gaactgtacaccacgtgtcgacaac

SEQ ID NO: 59497 - DNA, 25 bp, Homo sapien
agtagtaacagtaagttctactagc

SEQ ID NO: 59498 - DNA, 25 bp, Homo sapien
agtagtaacagttagttctactagc

SEQ ID NO: 59499 - DNA, 25 bp, Homo sapien
atagggtacgtttcctttatctata

SEQ ID NO: 59500 - DNA, 25 bp, Homo sapien
atagggtacgttacctttatctata

SEQ ID NO: 59501 - DNA, 25 bp, Homo sapien
tggagggtctattcgtcttttcaac

SEQ ID NO: 59502 - DNA, 25 bp, Homo sapien
tggagggtctatacgtcttttcaac

SEQ ID NO: 59503 - DNA, 25 bp, Homo sapien
cgataactgtttgtctagtttcatt

SEQ ID NO: 59504 - DNA, 25 bp, Homo sapien
cgataactgtttctctagtttcatt

SEQ ID NO: 59505 - DNA, 25 bp, Homo sapien
ggaactagatttccttttatacaag

SEQ ID NO: 59506 - DNA, 25 bp, Homo sapien
ggaactagatttgcttttatacaag

SEQ ID NO: 59507 - DNA, 25 bp, Homo sapien
gtcggagtttggtctttagccacga

SEQ ID NO: 59508 - DNA, 25 bp, Homo sapien
gtcggagtttggactttagccacga

SEQ ID NO: 59509 - DNA, 25 bp, Homo sapien
atcctagggtactagatcacgactg

SEQ ID NO: 59510 - DNA, 25 bp, Homo sapien
atcctagggtacaagatcacgactg

SEQ ID NO: 59511 - DNA, 25 bp, Homo sapien
aaacacgatgacaatctactatata

SEQ ID NO: 59512 - DNA, 25 bp, Homo sapien
aaacacgatgactatctactatata

SEQ ID NO: 59513 - DNA, 25 bp, Homo sapien
gagttcacgaaaggactgacaccga

SEQ ID NO: 59514 - DNA, 25 bp, Homo sapien
gagttcacgaaacgactgacaccga

SEQ ID NO: 59515 - DNA, 25 bp, Homo sapien
gaaggaggagcgacaccagacccga

SEQ ID NO: 59516 - DNA, 25 bp, Homo sapien
gaaggaggagcgtcaccagacccga

SEQ ID NO: 59517 - DNA, 25 bp, Homo sapien
taaggtaaaacgaaagaacccacat

SEQ ID NO: 59518 - DNA, 25 bp, Homo sapien
taaggtaaaacgtaagaacccacat

SEQ ID NO: 59519 - DNA, 25 bp, Homo sapien
aagtaagtctctgagtctcacacat

SEQ ID NO: 59520 - DNA, 25 bp, Homo sapien
aagtaagtctctcagtctcacacat

SEQ ID NO: 59521 - DNA, 25 bp, Homo sapien
gcgaagaggacttaccgactcctca

SEQ ID NO: 59522 - DNA, 25 bp, Homo sapien
gcgaagaggactaaccgactcctca

SEQ ID NO: 59523 - DNA, 25 bp, Homo sapien
tctacaggacaaaacggtacctgtt

SEQ ID NO: 59524 - DNA, 25 bp, Homo sapien
tctacaggacaatacggtacctgtt

SEQ ID NO: 59525 - DNA, 25 bp, Homo sapien
tcaactcgagactcggtgacctgta

SEQ ID NO: 59526 - DNA, 25 bp, Homo sapien
tcaactcgagacacggtgacctgta

SEQ ID NO: 59527 - DNA, 25 bp, Homo sapien
atactacgactgtaggagtatcccg

SEQ ID NO: 59528 - DNA, 25 bp, Homo sapien
atactacgactgaaggagtatcccg

SEQ ID NO: 59529 - DNA, 25 bp, Homo sapien
tctgaagaaggtcaaaaggttcctc

SEQ ID NO: 59530 - DNA, 25 bp, Homo sapien
tctgaagaaggtgaaaaggttcctc

SEQ ID NO: 59531 - DNA, 25 bp, Homo sapien
cctgtcagagaagaatcttagccct

SEQ ID NO: 59532 - DNA, 25 bp, Homo sapien
cctgtcagagaacaatcttagccct

SEQ ID NO: 59533 - DNA, 25 bp, Homo sapien
cttcagacgaaaccaggtttcctgt

SEQ ID NO: 59534 - DNA, 25 bp, Homo sapien
cttcagacgaaagcaggtttcctgt

SEQ ID NO: 59535 - DNA, 25 bp, Homo sapien
catcttagaagaaccggtcttttct

SEQ ID NO: 59536 - DNA, 25 bp, Homo sapien
catcttagaagatccggtcttttct

SEQ ID NO: 59537 - DNA, 25 bp, Homo sapien
gagtgttgtcacgtaccgattttta

SEQ ID NO: 59538 - DNA, 25 bp, Homo sapien
gagtgttgtcacctaccgattttta

SEQ ID NO: 59539 - DNA, 25 bp, Homo sapien
atttgtcaatcaacgtatttcgtag

SEQ ID NO: 59540 - DNA, 25 bp, Homo sapien
atttgtcaatcatcgtatttcgtag

SEQ ID NO: 59541 - DNA, 25 bp, Homo sapien
acccttgtatataggtatcgttatt

SEQ ID NO: 59542 - DNA, 25 bp, Homo sapien
acccttgtatattggtatcgttatt

SEQ ID NO: 59543 - DNA, 25 bp, Homo sapien
acattcgagtagacggagtctaaat

SEQ ID NO: 59544 - DNA, 25 bp, Homo sapien
acattcgagtagtcggagtctaaat

SEQ ID NO: 59545 - DNA, 25 bp, Homo sapien
gacccttacgggtccgagtgtgtca

SEQ ID NO: 59546 - DNA, 25 bp, Homo sapien
gacccttacgggaccgagtgtgtca

SEQ ID NO: 59547 - DNA, 25 bp, Homo sapien
accctcaaaggaccactagtgtcta

SEQ ID NO: 59548 - DNA, 25 bp, Homo sapien
accctcaaaggagcactagtgtcta

SEQ ID NO: 59549 - DNA, 25 bp, Homo sapien
tcccgtatacatgtttagtgtcact

SEQ ID NO: 59550 - DNA, 25 bp, Homo sapien
tcccgtatacatctttagtgtcact

SEQ ID NO: 59551 - DNA, 25 bp, Homo sapien
acttccgaggacgtgtcggtatgac

SEQ ID NO: 59552 - DNA, 25 bp, Homo sapien
acttccgaggacctgtcggtatgac

SEQ ID NO: 59553 - DNA, 25 bp, Homo sapien
tcatctcgagaacctccgacaagac

SEQ ID NO: 59554 - DNA, 25 bp, Homo sapien
tcatctcgagaagctccgacaagac

SEQ ID NO: 59555 - DNA, 25 bp, Homo sapien
agagtacctgagactgccgacgaca

SEQ ID NO: 59556 - DNA, 25 bp, Homo sapien
agagtacctgagtctgccgacgaca

SEQ ID NO: 59557 - DNA, 25 bp, Homo sapien
taggtgtagttatcgtgtgcacact

SEQ ID NO: 59558 - DNA, 25 bp, Homo sapien
taggtgtagttaacgtgtgcacact

SEQ ID NO: 59559 - DNA, 25 bp, Homo sapien
attttcgtctgtcacgaggtgaccc

SEQ ID NO: 59560 - DNA, 25 bp, Homo sapien
attttcgtctgtgacgaggtgaccc

SEQ ID NO: 59561 - DNA, 25 bp, Homo sapien
tttatatcgtgtaagagagacctct

SEQ ID NO: 59562 - DNA, 25 bp, Homo sapien
tttatatcgtgttagagagacctct

SEQ ID NO: 59563 - DNA, 25 bp, Homo sapien
tttcgtgtccaggacgacacgtcgt

SEQ ID NO: 59564 - DNA, 25 bp, Homo sapien
tttcgtgtccagcacgacacgtcgt

SEQ ID NO: 59565 - DNA, 25 bp, Homo sapien
ggggtctcgtcctgagacgacaccg

SEQ ID NO: 59566 - DNA, 25 bp, Homo sapien
ggggtctcgtccagagacgacaccg

SEQ ID NO: 59567 - DNA, 25 bp, Homo sapien
tcttatttcggtgagtgtgactgac

SEQ ID NO: 59568 - DNA, 25 bp, Homo sapien
tcttatttcggtcagtgtgactgac

SEQ ID NO: 59569 - DNA, 25 bp, Homo sapien
acttttgtgtttcatcatcctatgg

SEQ ID NO: 59570 - DNA, 25 bp, Homo sapien
acttttgtgtttgatcatcctatgg

SEQ ID NO: 59571 - DNA, 25 bp, Homo sapien
caatgtctcaatggttattcggtaa

SEQ ID NO: 59572 - DNA, 25 bp, Homo sapien
caatgtctcaatcgttattcggtaa

SEQ ID NO: 59573 - DNA, 25 bp, Homo sapien
ttatgtctcaagaagtctttcagaa

SEQ ID NO: 59574 - DNA, 25 bp, Homo sapien
ttatgtctcaagtagtctttcagaa

SEQ ID NO: 59575 - DNA, 25 bp, Homo sapien
ctacattacgtgttttcgtaacggt

SEQ ID NO: 59576 - DNA, 25 bp, Homo sapien
ctacattacgtgatttcgtaacggt

SEQ ID NO: 59577 - DNA, 25 bp, Homo sapien
gtcggtcagagttacttttcgtttg

SEQ ID NO: 59578 - DNA, 25 bp, Homo sapien
gtcggtcagagtaacttttcgtttg

SEQ ID NO: 59579 - DNA, 25 bp, Homo sapien
gttctacgatgaaacctttacgtta

SEQ ID NO: 59580 - DNA, 25 bp, Homo sapien
gttctacgatgatacctttacgtta

SEQ ID NO: 59581 - DNA, 25 bp, Homo sapien
gtcggttcgtcgatcagttttataa

SEQ ID NO: 59582 - DNA, 25 bp, Homo sapien
gtcggttcgtcgttcagttttataa

SEQ ID NO: 59583 - DNA, 25 bp, Homo sapien
ggagaggttccgtccatccaagtgt

SEQ ID NO: 59584 - DNA, 25 bp, Homo sapien
ggagaggttccgaccatccaagtgt

SEQ ID NO: 59585 - DNA, 25 bp, Homo sapien
gggaatctttcaaacatccatatgt

SEQ ID NO: 59586 - DNA, 25 bp, Homo sapien
gggaatctttcatacatccatatgt

SEQ ID NO: 59587 - DNA, 25 bp, Homo sapien
gaactcgtttagacctccgaagatt

SEQ ID NO: 59588 - DNA, 25 bp, Homo sapien
gaactcgtttagtcctccgaagatt

SEQ ID NO: 59589 - DNA, 25 bp, Homo sapien
cgacggaggtgcaccggtacgacat

SEQ ID NO: 59590 - DNA, 25 bp, Homo sapien
cgacggaggtgctccggtacgacat

SEQ ID NO: 59591 - DNA, 25 bp, Homo sapien
cgggacgcgtgactccatcgacgta

SEQ ID NO: 59592 - DNA, 25 bp, Homo sapien
cgggacgcgtgagtccatcgacgta

SEQ ID NO: 59593 - DNA, 25 bp, Homo sapien
agtcggtcctgaagtaccttaactg

SEQ ID NO: 59594 - DNA, 25 bp, Homo sapien
agtcggtcctgatgtaccttaactg

SEQ ID NO: 59595 - DNA, 25 bp, Homo sapien
tggtcgccgttggagtcggttcatt

SEQ ID NO: 59596 - DNA, 25 bp, Homo sapien
tggtcgccgttgcagtcggttcatt

SEQ ID NO: 59597 - DNA, 25 bp, Homo sapien
agtgaccccggtaccctttaagtgt

SEQ ID NO: 59598 - DNA, 25 bp, Homo sapien
agtgaccccggttccctttaagtgt

SEQ ID NO: 59599 - DNA, 25 bp, Homo sapien
gaccccgggacgttctacagccggt

SEQ ID NO: 59600 - DNA, 25 bp, Homo sapien
gaccccgggacgatctacagccggt

SEQ ID NO: 59601 - DNA, 25 bp, Homo sapien
acccacagcgacaacttcagtctcc

SEQ ID NO: 59602 - DNA, 25 bp, Homo sapien
acccacagcgactacttcagtctcc

SEQ ID NO: 59603 - DNA, 25 bp, Homo sapien
agcttcgagaagaacggtaccatcc

SEQ ID NO: 59604 - DNA, 25 bp, Homo sapien
agcttcgagaagtacggtaccatcc

SEQ ID NO: 59605 - DNA, 25 bp, Homo sapien
gagtcgggagagctcagacctcctc

SEQ ID NO: 59606 - DNA, 25 bp, Homo sapien
gagtcgggagaggtcagacctcctc

SEQ ID NO: 59607 - DNA, 25 bp, Homo sapien
gtcaggtcgacgtcggtgttcatgt

SEQ ID NO: 59608 - DNA, 25 bp, Homo sapien
gtcaggtcgacgacggtgttcatgt

SEQ ID NO: 59609 - DNA, 25 bp, Homo sapien
ccacagtatgtcctccttcacagtg

SEQ ID NO: 59610 - DNA, 25 bp, Homo sapien
ccacagtatgtcgtccttcacagtg

SEQ ID NO: 59611 - DNA, 25 bp, Homo sapien
tcgtacaatttgtcttagaacactg

SEQ ID NO: 59612 - DNA, 25 bp, Homo sapien
tcgtacaatttgacttagaacactg

SEQ ID NO: 59613 - DNA, 25 bp, Homo sapien
attcacttttagcaacacggcatcg

SEQ ID NO: 59614 - DNA, 25 bp, Homo sapien
attcacttttaggaacacggcatcg

SEQ ID NO: 59615 - DNA, 25 bp, Homo sapien
cactgtaggtatgagtatctgtcaa

SEQ ID NO: 59616 - DNA, 25 bp, Homo sapien
cactgtaggtatcagtatctgtcaa

SEQ ID NO: 59617 - DNA, 25 bp, Homo sapien
tgtcgacgtactgttacctacggtc

SEQ ID NO: 59618 - DNA, 25 bp, Homo sapien
tgtcgacgtactcttacctacggtc

SEQ ID NO: 59619 - DNA, 25 bp, Homo sapien
atatctacgtcgtactaaacgatag

SEQ ID NO: 59620 - DNA, 25 bp, Homo sapien
atatctacgtcgaactaaacgatag

SEQ ID NO: 59621 - DNA, 25 bp, Homo sapien
gactgtgacgacttacttacaaagt

SEQ ID NO: 59622 - DNA, 25 bp, Homo sapien
gactgtgacgacatacttacaaagt

SEQ ID NO: 59623 - DNA, 25 bp, Homo sapien
tagactgaaccgttacattctgtgt

SEQ ID NO: 59624 - DNA, 25 bp, Homo sapien
tagactgaaccgatacattctgtgt

SEQ ID NO: 59625 - DNA, 25 bp, Homo sapien
tttaattccgtttcctctatctacg

SEQ ID NO: 59626 - DNA, 25 bp, Homo sapien
tttaattccgttacctctatctacg

SEQ ID NO: 59627 - DNA, 25 bp, Homo sapien
gtttaacatacaatgtcccgttaag

SEQ ID NO: 59628 - DNA, 25 bp, Homo sapien
gtttaacatacattgtcccgttaag

SEQ ID NO: 59629 - DNA, 25 bp, Homo sapien
gacgactctagacgaccgacggagt

SEQ ID NO: 59630 - DNA, 25 bp, Homo sapien
gacgactctagaggaccgacggagt

SEQ ID NO: 59631 - DNA, 25 bp, Homo sapien
cgtcgatagtgaggagacgaccgaa

SEQ ID NO: 59632 - DNA, 25 bp, Homo sapien
cgtcgatagtgacgagacgaccgaa

SEQ ID NO: 59633 - DNA, 25 bp, Homo sapien
ctgactctagatataacacgttacg

SEQ ID NO: 59634 - DNA, 25 bp, Homo sapien
ctgactctagatttaacacgttacg

SEQ ID NO: 59635 - DNA, 25 bp, Homo sapien
agaatcgtattacttaccacgtatg

SEQ ID NO: 59636 - DNA, 25 bp, Homo sapien
agaatcgtattagttaccacgtatg

SEQ ID NO: 59637 - DNA, 25 bp, Homo sapien
acctaaaggctttgttacctcgaac

SEQ ID NO: 59638 - DNA, 25 bp, Homo sapien
acctaaaggcttagttacctcgaac

SEQ ID NO: 59639 - DNA, 25 bp, Homo sapien
aaatgtaatccgaataccgacgaga

SEQ ID NO: 59640 - DNA, 25 bp, Homo sapien
aaatgtaatccgtataccgacgaga

SEQ ID NO: 59641 - DNA, 25 bp, Homo sapien
atcgacacgtcctacgtttgtagac

SEQ ID NO: 59642 - DNA, 25 bp, Homo sapien
atcgacacgtccaacgtttgtagac

SEQ ID NO: 59643 - DNA, 25 bp, Homo sapien
cgcaccgtctctacatcattatgag

SEQ ID NO: 59644 - DNA, 25 bp, Homo sapien
cgcaccgtctcttcatcattatgag

SEQ ID NO: 59645 - DNA, 25 bp, Homo sapien
gacacacccggtacctttatgtacg

SEQ ID NO: 59646 - DNA, 25 bp, Homo sapien
gacacacccggttcctttatgtacg

SEQ ID NO: 59647 - DNA, 25 bp, Homo sapien
tatttacaaccgtcatctgtgttgg

SEQ ID NO: 59648 - DNA, 25 bp, Homo sapien
tatttacaaccgacatctgtgttgg

SEQ ID NO: 59649 - DNA, 25 bp, Homo sapien
cttctgatagatatctgttccgcag

SEQ ID NO: 59650 - DNA, 25 bp, Homo sapien
cttctgatagatttctgttccgcag

SEQ ID NO: 59651 - DNA, 25 bp, Homo sapien
cttacgtggtagatttttgcacaga

SEQ ID NO: 59652 - DNA, 25 bp, Homo sapien
cttacgtggtagttttttgcacaga

SEQ ID NO: 59653 - DNA, 25 bp, Homo sapien
agtaaggtgagtagtttctttcacc

SEQ ID NO: 59654 - DNA, 25 bp, Homo sapien
agtaaggtgagttgtttctttcacc

SEQ ID NO: 59655 - DNA, 25 bp, Homo sapien
aaggtcctttctcgtcgtctctcgc

SEQ ID NO: 59656 - DNA, 25 bp, Homo sapien
aaggtcctttctggtcgtctctcgc

SEQ ID NO: 59657 - DNA, 25 bp, Homo sapien
acacctgcactgtcactctttacag

SEQ ID NO: 59658 - DNA, 25 bp, Homo sapien
acacctgcactgacactctttacag

SEQ ID NO: 59659 - DNA, 25 bp, Homo sapien
tgtcgtcgtatgtctcgtgtcttcg

SEQ ID NO: 59660 - DNA, 25 bp, Homo sapien
tgtcgtcgtatgactcgtgtcttcg

SEQ ID NO: 59661 - DNA, 25 bp, Homo sapien
aagtcggttatagtactaccaagta

SEQ ID NO: 59662 - DNA, 25 bp, Homo sapien
aagtcggttatactactaccaagta

SEQ ID NO: 59663 - DNA, 25 bp, Homo sapien
atagtggtgacatcgtactgcaata

SEQ ID NO: 59664 - DNA, 25 bp, Homo sapien
atagtggtgacaacgtactgcaata

SEQ ID NO: 59665 - DNA, 25 bp, Homo sapien
aggttttgttgaatatattccctac

SEQ ID NO: 59666 - DNA, 25 bp, Homo sapien
aggttttgttgattatattccctac

SEQ ID NO: 59667 - DNA, 25 bp, Homo sapien
tctttgtcgagattatttggctcgt

SEQ ID NO: 59668 - DNA, 25 bp, Homo sapien
tctttgtcgagaatatttggctcgt

SEQ ID NO: 59669 - DNA, 25 bp, Homo sapien
ctttcgtgaccgattttcgtttcgt

SEQ ID NO: 59670 - DNA, 25 bp, Homo sapien
ctttcgtgaccgtttttcgtttcgt

SEQ ID NO: 59671 - DNA, 25 bp, Homo sapien
ctgttggtcctctgacgggtcttag

SEQ ID NO: 59672 - DNA, 25 bp, Homo sapien
ctgttggtcctcagacgggtcttag

SEQ ID NO: 59673 - DNA, 25 bp, Homo sapien
attgaagtgctagacgtaggtccag

SEQ ID NO: 59674 - DNA, 25 bp, Homo sapien
attgaagtgctacacgtaggtccag

SEQ ID NO: 59675 - DNA, 25 bp, Homo sapien
cgacgtcgtgacagggcggactcag

SEQ ID NO: 59676 - DNA, 25 bp, Homo sapien
cgacgtcgtgactgggcggactcag

SEQ ID NO: 59677 - DNA, 25 bp, Homo sapien
aagagcaggtcctgggactcccacg

SEQ ID NO: 59678 - DNA, 25 bp, Homo sapien
aagagcaggtccagggactcccacg

SEQ ID NO: 59679 - DNA, 25 bp, Homo sapien
acttcggggaccagtgtcccttccg

SEQ ID NO: 59680 - DNA, 25 bp, Homo sapien
acttcggggacctgtgtcccttccg

SEQ ID NO: 59681 - DNA, 25 bp, Homo sapien
ttccaagggtctcaggtcacgtttc

SEQ ID NO: 59682 - DNA, 25 bp, Homo sapien
ttccaagggtctgaggtcacgtttc

SEQ ID NO: 59683 - DNA, 25 bp, Homo sapien
tgtgactgttgaagtagacgttcct

SEQ ID NO: 59684 - DNA, 25 bp, Homo sapien
tgtgactgttgatgtagacgttcct

SEQ ID NO: 59685 - DNA, 25 bp, Homo sapien
ggtgttctgagtggatatagtctcc

SEQ ID NO: 59686 - DNA, 25 bp, Homo sapien
ggtgttctgagtcgatatagtctcc

SEQ ID NO: 59687 - DNA, 25 bp, Homo sapien
ccgtgtccttgttcatcagtctacc

SEQ ID NO: 59688 - DNA, 25 bp, Homo sapien
ccgtgtccttgtacatcagtctacc

SEQ ID NO: 59689 - DNA, 25 bp, Homo sapien
tgagtcttatgtgagggagtctacc

SEQ ID NO: 59690 - DNA, 25 bp, Homo sapien
tgagtcttatgtcagggagtctacc

SEQ ID NO: 59691 - DNA, 25 bp, Homo sapien
gaggtctatacttgaaagtcgtctt

SEQ ID NO: 59692 - DNA, 25 bp, Homo sapien
gaggtctatactagaaagtcgtctt

SEQ ID NO: 59693 - DNA, 25 bp, Homo sapien
ttccgatcctaggtcggagtctcct

SEQ ID NO: 59694 - DNA, 25 bp, Homo sapien
ttccgatcctagctcggagtctcct

SEQ ID NO: 59695 - DNA, 25 bp, Homo sapien
acatttgtagtacaggtcatttttc

SEQ ID NO: 59696 - DNA, 25 bp, Homo sapien
acatttgtagtagaggtcatttttc

SEQ ID NO: 59697 - DNA, 25 bp, Homo sapien
acttgtttaaaggaacgcatcgttt

SEQ ID NO: 59698 - DNA, 25 bp, Homo sapien
acttgtttaaagcaacgcatcgttt

SEQ ID NO: 59699 - DNA, 25 bp, Homo sapien
cctcctgtcccctaactagagggtt

SEQ ID NO: 59700 - DNA, 25 bp, Homo sapien
cctcctgtccccaaactagagggtt

SEQ ID NO: 59701 - DNA, 25 bp, Homo sapien
cctcgacggacgtgccaggacggtt

SEQ ID NO: 59702 - DNA, 25 bp, Homo sapien
cctcgacggacgagccaggacggtt

SEQ ID NO: 59703 - DNA, 25 bp, Homo sapien
tacatccgcgggaaccacgggcgtg

SEQ ID NO: 59704 - DNA, 25 bp, Homo sapien
tacatccgcgggtaccacgggcgtg

SEQ ID NO: 59705 - DNA, 25 bp, Homo sapien
catccatggcagaacgacaggacgt

SEQ ID NO: 59706 - DNA, 25 bp, Homo sapien
catccatggcagtacgacaggacgt

SEQ ID NO: 59707 - DNA, 25 bp, Homo sapien
aaatcaaggcaagttactataccgt

SEQ ID NO: 59708 - DNA, 25 bp, Homo sapien
aaatcaaggcaacttactataccgt

SEQ ID NO: 59709 - DNA, 25 bp, Homo sapien
ggaaacccgcaacacgtaaataact

SEQ ID NO: 59710 - DNA, 25 bp, Homo sapien
ggaaacccgcaagacgtaaataact

SEQ ID NO: 59711 - DNA, 25 bp, Homo sapien
tagtgtcaccgactgtacactatac

SEQ ID NO: 59712 - DNA, 25 bp, Homo sapien
tagtgtcaccgagtgtacactatac

SEQ ID NO: 59713 - DNA, 25 bp, Homo sapien
tttcaagttgtttcagggaatctac

SEQ ID NO: 59714 - DNA, 25 bp, Homo sapien
tttcaagttgttacagggaatctac

SEQ ID NO: 59715 - DNA, 25 bp, Homo sapien
caggtccggtagactggagactcac

SEQ ID NO: 59716 - DNA, 25 bp, Homo sapien
caggtccggtagtctggagactcac

SEQ ID NO: 59717 - DNA, 25 bp, Homo sapien
taggtacacaggactgtccctgtcg

SEQ ID NO: 59718 - DNA, 25 bp, Homo sapien
taggtacacaggtctgtccctgtcg

SEQ ID NO: 59719 - DNA, 25 bp, Homo sapien
agatggataaaatgacacctcaata

SEQ ID NO: 59720 - DNA, 25 bp, Homo sapien
agatggataaaaagacacctcaata

SEQ ID NO: 59721 - DNA, 25 bp, Homo sapien
agaatcgtctacaaaaagaaccaaa

SEQ ID NO: 59722 - DNA, 25 bp, Homo sapien
agaatcgtctactaaaagaaccaaa

SEQ ID NO: 59723 - DNA, 25 bp, Homo sapien
gaatgagtgtacaaaaacccaacta

SEQ ID NO: 59724 - DNA, 25 bp, Homo sapien
gaatgagtgtactaaaacccaacta

SEQ ID NO: 59725 - DNA, 25 bp, Homo sapien
gagaacatagtctaaattccgtttc

SEQ ID NO: 59726 - DNA, 25 bp, Homo sapien
gagaacatagtcaaaattccgtttc

SEQ ID NO: 59727 - DNA, 25 bp, Homo sapien
gaaattccgtaggtatcaagacttg

SEQ ID NO: 59728 - DNA, 25 bp, Homo sapien
gaaattccgtagctatcaagacttg

SEQ ID NO: 59729 - DNA, 25 bp, Homo sapien
atttttgatcctaccgaaagaatag

SEQ ID NO: 59730 - DNA, 25 bp, Homo sapien
atttttgatccttccgaaagaatag

SEQ ID NO: 59731 - DNA, 25 bp, Homo sapien
ctttcactagtgttccgaaataaga

SEQ ID NO: 59732 - DNA, 25 bp, Homo sapien
ctttcactagtgatccgaaataaga

SEQ ID NO: 59733 - DNA, 25 bp, Homo sapien
tcttggaggaaggaccagacagacg

SEQ ID NO: 59734 - DNA, 25 bp, Homo sapien
tcttggaggaagcaccagacagacg

SEQ ID NO: 59735 - DNA, 25 bp, Homo sapien
tcgcggggactgtgcccctacagcg

SEQ ID NO: 59736 - DNA, 25 bp, Homo sapien
tcgcggggactgagcccctacagcg

SEQ ID NO: 59737 - DNA, 25 bp, Homo sapien
tacaggggttgcttgggtctcagtc

SEQ ID NO: 59738 - DNA, 25 bp, Homo sapien
tacaggggttgcatgggtctcagtc

SEQ ID NO: 59739 - DNA, 25 bp, Homo sapien
ggggtcgaccacaggtgtccgatct

SEQ ID NO: 59740 - DNA, 25 bp, Homo sapien
ggggtcgaccactggtgtccgatct

SEQ ID NO: 59741 - DNA, 25 bp, Homo sapien
ccagtgggagacctatgtttgatta

SEQ ID NO: 59742 - DNA, 25 bp, Homo sapien
ccagtgggagacgtatgtttgatta

SEQ ID NO: 59743 - DNA, 25 bp, Homo sapien
gtggagaccaaggaaaccccgtcga

SEQ ID NO: 59744 - DNA, 25 bp, Homo sapien
gtggagaccaagcaaaccccgtcga

SEQ ID NO: 59745 - DNA, 25 bp, Homo sapien
gcctaaaccagcataacccgcggac

SEQ ID NO: 59746 - DNA, 25 bp, Homo sapien
gcctaaaccagcttaacccgcggac

SEQ ID NO: 59747 - DNA, 25 bp, Homo sapien
cttgatgtaaattcattcgtgactt

SEQ ID NO: 59748 - DNA, 25 bp, Homo sapien
cttgatgtaaatacattcgtgactt

SEQ ID NO: 59749 - DNA, 25 bp, Homo sapien
tttctcttggtacatgtcgtacctt

SEQ ID NO: 59750 - DNA, 25 bp, Homo sapien
tttctcttggtagatgtcgtacctt

SEQ ID NO: 59751 - DNA, 25 bp, Homo sapien
acatcatttcgtgtgttttgacctg

SEQ ID NO: 59752 - DNA, 25 bp, Homo sapien
acatcatttcgtctgttttgacctg

SEQ ID NO: 59753 - DNA, 25 bp, Homo sapien
cttccgtcccgtcctgaaagttttg

SEQ ID NO: 59754 - DNA, 25 bp, Homo sapien
cttccgtcccgtgctgaaagttttg

SEQ ID NO: 59755 - DNA, 25 bp, Homo sapien
ggtctctccgcgtatgtgtcgtatc

SEQ ID NO: 59756 - DNA, 25 bp, Homo sapien
ggtctctccgcgaatgtgtcgtatc

SEQ ID NO: 59757 - DNA, 25 bp, Homo sapien
ggtatccgtcactcttagtcttact

SEQ ID NO: 59758 - DNA, 25 bp, Homo sapien
ggtatccgtcacacttagtcttact

SEQ ID NO: 59759 - DNA, 25 bp, Homo sapien
tttactcggaccttagaagtattat

SEQ ID NO: 59760 - DNA, 25 bp, Homo sapien
tttactcggaccatagaagtattat

SEQ ID NO: 59761 - DNA, 25 bp, Homo sapien
tatttacgaccgacagaaactagtc

SEQ ID NO: 59762 - DNA, 25 bp, Homo sapien
tatttacgaccgtcagaaactagtc

SEQ ID NO: 59763 - DNA, 25 bp, Homo sapien
aaccgcggaccgtactggagacggc

SEQ ID NO: 59764 - DNA, 25 bp, Homo sapien
aaccgcggaccgaactggagacggc

SEQ ID NO: 59765 - DNA, 25 bp, Homo sapien
aagaaggcccgtacgtgcaagactg

SEQ ID NO: 59766 - DNA, 25 bp, Homo sapien
aagaaggcccgttcgtgcaagactg

SEQ ID NO: 59767 - DNA, 25 bp, Homo sapien
tcgaagtcgaacgtttaggaacccg

SEQ ID NO: 59768 - DNA, 25 bp, Homo sapien
tcgaagtcgaacctttaggaacccg

SEQ ID NO: 59769 - DNA, 25 bp, Homo sapien
attcatgttgtcctaaaggcacaag

SEQ ID NO: 59770 - DNA, 25 bp, Homo sapien
attcatgttgtcgtaaaggcacaag

SEQ ID NO: 59771 - DNA, 25 bp, Homo sapien
catcgtaggtcatgtattgacatta

SEQ ID NO: 59772 - DNA, 25 bp, Homo sapien
catcgtaggtcaagtattgacatta

SEQ ID NO: 59773 - DNA, 25 bp, Homo sapien
actggcgcatgaaggcgtcgcccat

SEQ ID NO: 59774 - DNA, 25 bp, Homo sapien
actggcgcatgatggcgtcgcccat

SEQ ID NO: 59775 - DNA, 25 bp, Homo sapien
cgtagactcgagagggtcccgacca

SEQ ID NO: 59776 - DNA, 25 bp, Homo sapien
cgtagactcgagtgggtcccgacca

SEQ ID NO: 59777 - DNA, 25 bp, Homo sapien
aaaacggttcgtaaaaatctccgaa

SEQ ID NO: 59778 - DNA, 25 bp, Homo sapien
aaaacggttcgttaaaatctccgaa

SEQ ID NO: 59779 - DNA, 25 bp, Homo sapien
aagtgtgaaacaattatccgactag

SEQ ID NO: 59780 - DNA, 25 bp, Homo sapien
aagtgtgaaacatttatccgactag

SEQ ID NO: 59781 - DNA, 25 bp, Homo sapien
tcctcgatatgacctttcctcgtag

SEQ ID NO: 59782 - DNA, 25 bp, Homo sapien
tcctcgatatgagctttcctcgtag

SEQ ID NO: 59783 - DNA, 25 bp, Homo sapien
ttgatgaggtcactggtcgtctcgg

SEQ ID NO: 59784 - DNA, 25 bp, Homo sapien
ttgatgaggtcagtggtcgtctcgg

SEQ ID NO: 59785 - DNA, 25 bp, Homo sapien
tgtcacagtggagagtgtcacctgg

SEQ ID NO: 59786 - DNA, 25 bp, Homo sapien
tgtcacagtggacagtgtcacctgg

SEQ ID NO: 59787 - DNA, 25 bp, Homo sapien
cacttcaccttgctgcgcgcaatgg

SEQ ID NO: 59788 - DNA, 25 bp, Homo sapien
cacttcaccttggtgcgcgcaatgg

SEQ ID NO: 59789 - DNA, 25 bp, Homo sapien
acctatcatttgtcggtatccctgg

SEQ ID NO: 59790 - DNA, 25 bp, Homo sapien
acctatcatttgacggtatccctgg

SEQ ID NO: 59791 - DNA, 25 bp, Homo sapien
ctagttattgaaaggtacgccttta

SEQ ID NO: 59792 - DNA, 25 bp, Homo sapien
ctagttattgaatggtacgccttta

SEQ ID NO: 59793 - DNA, 25 bp, Homo sapien
ccttcctcttacaaaacaccggtga

SEQ ID NO: 59794 - DNA, 25 bp, Homo sapien
ccttcctcttactaaacaccggtga

SEQ ID NO: 59795 - DNA, 25 bp, Homo sapien
tcgtctagaatatacaatccctagg

SEQ ID NO: 59796 - DNA, 25 bp, Homo sapien
tcgtctagaataaacaatccctagg

SEQ ID NO: 59797 - DNA, 25 bp, Homo sapien
actacttgaaccttaaaaccaggag

SEQ ID NO: 59798 - DNA, 25 bp, Homo sapien
actacttgaaccataaaaccaggag

SEQ ID NO: 59799 - DNA, 25 bp, Homo sapien
ctactatatgtccaaaaaccgagga

SEQ ID NO: 59800 - DNA, 25 bp, Homo sapien
ctactatatgtcgaaaaaccgagga

SEQ ID NO: 59801 - DNA, 25 bp, Homo sapien
cttaatatgttgacgagatccatta

SEQ ID NO: 59802 - DNA, 25 bp, Homo sapien
cttaatatgttgtcgagatccatta

SEQ ID NO: 59803 - DNA, 25 bp, Homo sapien
cataaacaggagtactcctttggta

SEQ ID NO: 59804 - DNA, 25 bp, Homo sapien
cataaacaggagaactcctttggta

SEQ ID NO: 59805 - DNA, 25 bp, Homo sapien
agcacgggacgacctcctgtctccc

SEQ ID NO: 59806 - DNA, 25 bp, Homo sapien
agcacgggacgagctcctgtctccc

SEQ ID NO: 59807 - DNA, 25 bp, Homo sapien
gaggaaccgggactccttccgacta

SEQ ID NO: 59808 - DNA, 25 bp, Homo sapien
gaggaaccgggagtccttccgacta

SEQ ID NO: 59809 - DNA, 25 bp, Homo sapien
gtgttccgtcttttcagttccagta

SEQ ID NO: 59810 - DNA, 25 bp, Homo sapien
gtgttccgtcttatcagttccagta

SEQ ID NO: 59811 - DNA, 25 bp, Homo sapien
ttctcggtctctcgtctgtttcata

SEQ ID NO: 59812 - DNA, 25 bp, Homo sapien
ttctcggtctctggtctgtttcata

SEQ ID NO: 59813 - DNA, 25 bp, Homo sapien
cttggactctagtatcctcagtgta

SEQ ID NO: 59814 - DNA, 25 bp, Homo sapien
cttggactctagaatcctcagtgta

SEQ ID NO: 59815 - DNA, 25 bp, Homo sapien
atttcgagtctttaaatcgacttag

SEQ ID NO: 59816 - DNA, 25 bp, Homo sapien
atttcgagtcttaaaatcgacttag

SEQ ID NO: 59817 - DNA, 25 bp, Homo sapien
gaagttcggtacactacaatcataa

SEQ ID NO: 59818 - DNA, 25 bp, Homo sapien
gaagttcggtactctacaatcataa

SEQ ID NO: 59819 - DNA, 25 bp, Homo sapien
aagtccttgttgtacctaaagacaa

SEQ ID NO: 59820 - DNA, 25 bp, Homo sapien
aagtccttgttgaacctaaagacaa

SEQ ID NO: 59821 - DNA, 25 bp, Homo sapien
agtgtggagttgtcccataccactc

SEQ ID NO: 59822 - DNA, 25 bp, Homo sapien
agtgtggagttgacccataccactc

SEQ ID NO: 59823 - DNA, 25 bp, Homo sapien
agttgagattatataccacgaattc

SEQ ID NO: 59824 - DNA, 25 bp, Homo sapien
agttgagattatttaccacgaattc

SEQ ID NO: 59825 - DNA, 25 bp, Homo sapien
atggtttataactcccgatgttact

SEQ ID NO: 59826 - DNA, 25 bp, Homo sapien
atggtttataacacccgatgttact

SEQ ID NO: 59827 - DNA, 25 bp, Homo sapien
ttattgtgaaaggacacctatttac

SEQ ID NO: 59828 - DNA, 25 bp, Homo sapien
ttattgtgaaagcacacctatttac

SEQ ID NO: 59829 - DNA, 25 bp, Homo sapien
aactcgtgaaaccacatcttcggta

SEQ ID NO: 59830 - DNA, 25 bp, Homo sapien
aactcgtgaaacgacatcttcggta

SEQ ID NO: 59831 - DNA, 25 bp, Homo sapien
acattattcaataatccgtgtttgg

SEQ ID NO: 59832 - DNA, 25 bp, Homo sapien
acattattcaattatccgtgtttgg

SEQ ID NO: 59833 - DNA, 25 bp, Homo sapien
aactttctcttctgttgctttcgga

SEQ ID NO: 59834 - DNA, 25 bp, Homo sapien
aactttctcttcagttgctttcgga

SEQ ID NO: 59835 - DNA, 25 bp, Homo sapien
cctagtgtcctctattttgtggtta

SEQ ID NO: 59836 - DNA, 25 bp, Homo sapien
cctagtgtcctcaattttgtggtta

SEQ ID NO: 59837 - DNA, 25 bp, Homo sapien
agtattcgtcactcccgttgatctc

SEQ ID NO: 59838 - DNA, 25 bp, Homo sapien
agtattcgtcacacccgttgatctc

SEQ ID NO: 59839 - DNA, 25 bp, Homo sapien
cgtgtttaagataaccgttttgtac

SEQ ID NO: 59840 - DNA, 25 bp, Homo sapien
cgtgtttaagattaccgttttgtac

SEQ ID NO: 59841 - DNA, 25 bp, Homo sapien
tcgaaatacgggatacggtaattac

SEQ ID NO: 59842 - DNA, 25 bp, Homo sapien
tcgaaatacgggttacggtaattac

SEQ ID NO: 59843 - DNA, 25 bp, Homo sapien
cgatgagacacgtcccggacattct

SEQ ID NO: 59844 - DNA, 25 bp, Homo sapien
cgatgagacacgacccggacattct

SEQ ID NO: 59845 - DNA, 25 bp, Homo sapien
gcgctaagatactcgaccgggggtt

SEQ ID NO: 59846 - DNA, 25 bp, Homo sapien
gcgctaagatacacgaccgggggtt

SEQ ID NO: 59847 - DNA, 25 bp, Homo sapien
gctagaagaccaagtccaaattacg

SEQ ID NO: 59848 - DNA, 25 bp, Homo sapien
gctagaagaccatgtccaaattacg

SEQ ID NO: 59849 - DNA, 25 bp, Homo sapien
agagtcggagttcagcccgaatttc

SEQ ID NO: 59850 - DNA, 25 bp, Homo sapien
agagtcggagttgagcccgaatttc

SEQ ID NO: 59851 - DNA, 25 bp, Homo sapien
cagagacgggtagaaggaccctttg

SEQ ID NO: 59852 - DNA, 25 bp, Homo sapien
cagagacgggtacaaggaccctttg

SEQ ID NO: 59853 - DNA, 25 bp, Homo sapien
agacagagacccttgtatcccttct

SEQ ID NO: 59854 - DNA, 25 bp, Homo sapien
agacagagacccatgtatcccttct

SEQ ID NO: 59855 - DNA, 25 bp, Homo sapien
gagagaagtctcctgacgtccccac

SEQ ID NO: 59856 - DNA, 25 bp, Homo sapien
gagagaagtctcgtgacgtccccac

SEQ ID NO: 59857 - DNA, 25 bp, Homo sapien
cgcagaagtcgtagtgcttgtagga

SEQ ID NO: 59858 - DNA, 25 bp, Homo sapien
cgcagaagtcgttgtgcttgtagga

SEQ ID NO: 59859 - DNA, 25 bp, Homo sapien
ggggaagatactgttgtttgccgac

SEQ ID NO: 59860 - DNA, 25 bp, Homo sapien
ggggaagatactcttgtttgccgac

SEQ ID NO: 59861 - DNA, 25 bp, Homo sapien
gtccataaatgttcttccgagtccc

SEQ ID NO: 59862 - DNA, 25 bp, Homo sapien
gtccataaatgtacttccgagtccc

SEQ ID NO: 59863 - DNA, 25 bp, Homo sapien
tcacaaaacgttacacactggggag

SEQ ID NO: 59864 - DNA, 25 bp, Homo sapien
tcacaaaacgtttcacactggggag

SEQ ID NO: 59865 - DNA, 25 bp, Homo sapien
tctcacccagcgtcccagtgagtga

SEQ ID NO: 59866 - DNA, 25 bp, Homo sapien
tctcacccagcgacccagtgagtga

SEQ ID NO: 59867 - DNA, 25 bp, Homo sapien
tcactttgagcgacccctgcgtcgg

SEQ ID NO: 59868 - DNA, 25 bp, Homo sapien
tcactttgagcgtcccctgcgtcgg

SEQ ID NO: 59869 - DNA, 25 bp, Homo sapien
cgtcttttatcttcccggtgtcctg

SEQ ID NO: 59870 - DNA, 25 bp, Homo sapien
cgtcttttatctacccggtgtcctg

SEQ ID NO: 59871 - DNA, 25 bp, Homo sapien
agccggttcaggtgcccgtctgctg

SEQ ID NO: 59872 - DNA, 25 bp, Homo sapien
agccggttcaggagcccgtctgctg

SEQ ID NO: 59873 - DNA, 25 bp, Homo sapien
cgcgcgccgccggggtctcgggacc

SEQ ID NO: 59874 - DNA, 25 bp, Homo sapien
cgcgcgccgccgcggtctcgggacc

SEQ ID NO: 59875 - DNA, 25 bp, Homo sapien
cgtcccctcgtagagtcacagtgaa

SEQ ID NO: 59876 - DNA, 25 bp, Homo sapien
cgtcccctcgtacagtcacagtgaa

SEQ ID NO: 59877 - DNA, 25 bp, Homo sapien
ttttgccacgtagagtctctggaat

SEQ ID NO: 59878 - DNA, 25 bp, Homo sapien
ttttgccacgtacagtctctggaat

SEQ ID NO: 59879 - DNA, 25 bp, Homo sapien
tgtgatgcactgtcaccacaattgt

SEQ ID NO: 59880 - DNA, 25 bp, Homo sapien
tgtgatgcactgacaccacaattgt

SEQ ID NO: 59881 - DNA, 25 bp, Homo sapien
tcgtggtgcttgtacaacaagtttg

SEQ ID NO: 59882 - DNA, 25 bp, Homo sapien
tcgtggtgcttgaacaacaagtttg

SEQ ID NO: 59883 - DNA, 25 bp, Homo sapien
atctggaaattaaagagactcctta

SEQ ID NO: 59884 - DNA, 25 bp, Homo sapien
atctggaaattatagagactcctta

SEQ ID NO: 59885 - DNA, 25 bp, Homo sapien
acaagacagttggtgctcgtcaaag

SEQ ID NO: 59886 - DNA, 25 bp, Homo sapien
acaagacagttgctgctcgtcaaag

SEQ ID NO: 59887 - DNA, 25 bp, Homo sapien
aacagaaggtaaaaccccacagtat

SEQ ID NO: 59888 - DNA, 25 bp, Homo sapien
aacagaaggtaataccccacagtat

SEQ ID NO: 59889 - DNA, 25 bp, Homo sapien
gtcagtaaaggtttattctacctaa

SEQ ID NO: 59890 - DNA, 25 bp, Homo sapien
gtcagtaaaggtatattctacctaa

SEQ ID NO: 59891 - DNA, 25 bp, Homo sapien
ttacaccagtctagagttgtcttca

SEQ ID NO: 59892 - DNA, 25 bp, Homo sapien
ttacaccagtcttgagttgtcttca

SEQ ID NO: 59893 - DNA, 25 bp, Homo sapien
tgcctcccttccattgttcgtcttg

SEQ ID NO: 59894 - DNA, 25 bp, Homo sapien
tgcctcccttcctttgttcgtcttg

SEQ ID NO: 59895 - DNA, 25 bp, Homo sapien
ctagacttcctctattagttgttcg

SEQ ID NO: 59896 - DNA, 25 bp, Homo sapien
ctagacttcctcaattagttgttcg

SEQ ID NO: 59897 - DNA, 25 bp, Homo sapien
gacgtaatgtgttttgtcacgttct

SEQ ID NO: 59898 - DNA, 25 bp, Homo sapien
gacgtaatgtgtattgtcacgttct

SEQ ID NO: 59899 - DNA, 25 bp, Homo sapien
cccagtcgtctgtttgtgcacttgt

SEQ ID NO: 59900 - DNA, 25 bp, Homo sapien
cccagtcgtctgattgtgcacttgt

SEQ ID NO: 59901 - DNA, 25 bp, Homo sapien
cagtcgttgttggttcgtccattgt

SEQ ID NO: 59902 - DNA, 25 bp, Homo sapien
cagtcgttgttgcttcgtccattgt

SEQ ID NO: 59903 - DNA, 25 bp, Homo sapien
aacaggttgtgtctgtgtggctgtc

SEQ ID NO: 59904 - DNA, 25 bp, Homo sapien
aacaggttgtgtgtgtgtggctgtc

SEQ ID NO: 59905 - DNA, 25 bp, Homo sapien
gccctaggtttgaggtgcggctaac

SEQ ID NO: 59906 - DNA, 25 bp, Homo sapien
gccctaggtttgtggtgcggctaac

SEQ ID NO: 59907 - DNA, 25 bp, Homo sapien
aagacgtctttagtatctaagccac

SEQ ID NO: 59908 - DNA, 25 bp, Homo sapien
aagacgtctttactatctaagccac

SEQ ID NO: 59909 - DNA, 25 bp, Homo sapien
taggactctctcaagatctggctgg

SEQ ID NO: 59910 - DNA, 25 bp, Homo sapien
taggactctctctagatctggctgg

SEQ ID NO: 59911 - DNA, 25 bp, Homo sapien
cgtctcctccggtagtcggtctggt

SEQ ID NO: 59912 - DNA, 25 bp, Homo sapien
cgtctcctccggaagtcggtctggt

SEQ ID NO: 59913 - DNA, 25 bp, Homo sapien
aagtttgtggacgaccagtatcagt

SEQ ID NO: 59914 - DNA, 25 bp, Homo sapien
aagtttgtggaccaccagtatcagt

SEQ ID NO: 59915 - DNA, 25 bp, Homo sapien
aacgcgttgtcctcccgtaaggtag

SEQ ID NO: 59916 - DNA, 25 bp, Homo sapien
aacgcgttgtccacccgtaaggtag

SEQ ID NO: 59917 - DNA, 25 bp, Homo sapien
acctgtttatattccgtacaagtgt

SEQ ID NO: 59918 - DNA, 25 bp, Homo sapien
acctgtttatataccgtacaagtgt

SEQ ID NO: 59919 - DNA, 25 bp, Homo sapien
gttgtctactttttacgaacgatgt

SEQ ID NO: 59920 - DNA, 25 bp, Homo sapien
gttgtctactttatacgaacgatgt

SEQ ID NO: 59921 - DNA, 25 bp, Homo sapien
agcatcgtatgttacagtcctaccc

SEQ ID NO: 59922 - DNA, 25 bp, Homo sapien
agcatcgtatgtaacagtcctaccc

SEQ ID NO: 59923 - DNA, 25 bp, Homo sapien
agattttgttatgaaggtcccgtcc

SEQ ID NO: 59924 - DNA, 25 bp, Homo sapien
agattttgttatcaaggtcccgtcc

SEQ ID NO: 59925 - DNA, 25 bp, Homo sapien
agatccgatgttacattgttccaac

SEQ ID NO: 59926 - DNA, 25 bp, Homo sapien
agatccgatgtttcattgttccaac

SEQ ID NO: 59927 - DNA, 25 bp, Homo sapien
gaatctatgatttcatttgggtcct

SEQ ID NO: 59928 - DNA, 25 bp, Homo sapien
gaatctatgattacatttgggtcct

SEQ ID NO: 59929 - DNA, 25 bp, Homo sapien
ccaaagaatcaacgatcaagtcgtt

SEQ ID NO: 59930 - DNA, 25 bp, Homo sapien
ccaaagaatcaaggatcaagtcgtt

SEQ ID NO: 59931 - DNA, 25 bp, Homo sapien
gaaaggttataggtcagacagtgtt

SEQ ID NO: 59932 - DNA, 25 bp, Homo sapien
gaaaggttatagctcagacagtgtt

SEQ ID NO: 59933 - DNA, 25 bp, Homo sapien
taatacaaagatacccctagtgttg

SEQ ID NO: 59934 - DNA, 25 bp, Homo sapien
taatacaaagattcccctagtgttg

SEQ ID NO: 59935 - DNA, 25 bp, Homo sapien
ttatcaaaaattccacgccggtctg

SEQ ID NO: 59936 - DNA, 25 bp, Homo sapien
ttatcaaaaattgcacgccggtctg

SEQ ID NO: 59937 - DNA, 25 bp, Homo sapien
acaaagatactatttcagggtctga

SEQ ID NO: 59938 - DNA, 25 bp, Homo sapien
acaaagatactaattcagggtctga

SEQ ID NO: 59939 - DNA, 25 bp, Homo sapien
gattaggtcatctctgacttcgacc

SEQ ID NO: 59940 - DNA, 25 bp, Homo sapien
gattaggtcatcactgacttcgacc

SEQ ID NO: 59941 - DNA, 25 bp, Homo sapien
gattgatcgatatactaaaaccgat

SEQ ID NO: 59942 - DNA, 25 bp, Homo sapien
gattgatcgataaactaaaaccgat

SEQ ID NO: 59943 - DNA, 25 bp, Homo sapien
tttatttgttgcaccgaaaaccgat

SEQ ID NO: 59944 - DNA, 25 bp, Homo sapien
tttatttgttgctccgaaaaccgat

SEQ ID NO: 59945 - DNA, 25 bp, Homo sapien
ctgtaatggtttgttaaaatctcac

SEQ ID NO: 59946 - DNA, 25 bp, Homo sapien
ctgtaatggtttcttaaaatctcac

SEQ ID NO: 59947 - DNA, 25 bp, Homo sapien
tatgtatgtagtgtcttttcgtccg

SEQ ID NO: 59948 - DNA, 25 bp, Homo sapien
tatgtatgtagtctcttttcgtccg

SEQ ID NO: 59949 - DNA, 25 bp, Homo sapien
gtatgtatgttttacttgcctaact

SEQ ID NO: 59950 - DNA, 25 bp, Homo sapien
gtatgtatgtttaacttgcctaact

SEQ ID NO: 59951 - DNA, 25 bp, Homo sapien
tcacgtttggtttaattgttctcaa

SEQ ID NO: 59952 - DNA, 25 bp, Homo sapien
tcacgtttggttaaattgttctcaa

SEQ ID NO: 59953 - DNA, 25 bp, Homo sapien
caccagtaggtgagacatatttgaa

SEQ ID NO: 59954 - DNA, 25 bp, Homo sapien
caccagtaggtgtgacatatttgaa

SEQ ID NO: 59955 - DNA, 25 bp, Homo sapien
acaccaagatcattcctaattacaa

SEQ ID NO: 59956 - DNA, 25 bp, Homo sapien
acaccaagatcaatcctaattacaa

SEQ ID NO: 59957 - DNA, 25 bp, Homo sapien
ctcgaaaattctttctaagtgtttt

SEQ ID NO: 59958 - DNA, 25 bp, Homo sapien
ctcgaaaattctatctaagtgtttt

SEQ ID NO: 59959 - DNA, 25 bp, Homo sapien
ccgacggaggtctaccactcttgct

SEQ ID NO: 59960 - DNA, 25 bp, Homo sapien
ccgacggaggtcaaccactcttgct

SEQ ID NO: 59961 - DNA, 25 bp, Homo sapien
ctccgacgggtcacaagtcgtgttt

SEQ ID NO: 59962 - DNA, 25 bp, Homo sapien
ctccgacgggtctcaagtcgtgttt

SEQ ID NO: 59963 - DNA, 25 bp, Homo sapien
ttcgtctcatacgtcgaacaggttg

SEQ ID NO: 59964 - DNA, 25 bp, Homo sapien
ttcgtctcatacctcgaacaggttg

SEQ ID NO: 59965 - DNA, 25 bp, Homo sapien
ggggtgttcttactaccctggttac

SEQ ID NO: 59966 - DNA, 25 bp, Homo sapien
ggggtgttcttagtaccctggttac

SEQ ID NO: 59967 - DNA, 25 bp, Homo sapien
agtgtcgggcttggtcgacccctgc

SEQ ID NO: 59968 - DNA, 25 bp, Homo sapien
agtgtcgggcttcgtcgacccctgc

SEQ ID NO: 59969 - DNA, 25 bp, Homo sapien
tcttcgcgttcttcgaacgacctta

SEQ ID NO: 59970 - DNA, 25 bp, Homo sapien
tcttcgcgttctacgaacgacctta

SEQ ID NO: 59971 - DNA, 25 bp, Homo sapien
tctccagtcagaacgtttaagctac

SEQ ID NO: 59972 - DNA, 25 bp, Homo sapien
tctccagtcagatcgtttaagctac

SEQ ID NO: 59973 - DNA, 25 bp, Homo sapien
tcctcagttgggtttaagacgtcgt

SEQ ID NO: 59974 - DNA, 25 bp, Homo sapien
tcctcagttgggattaagacgtcgt

SEQ ID NO: 59975 - DNA, 25 bp, Homo sapien
ctttttagttggtcgttctaagtcg

SEQ ID NO: 59976 - DNA, 25 bp, Homo sapien
ctttttagttggacgttctaagtcg

SEQ ID NO: 59977 - DNA, 25 bp, Homo sapien
cggttgtcgcccttcgtcaaacgcg

SEQ ID NO: 59978 - DNA, 25 bp, Homo sapien
cggttgtcgcccatcgtcaaacgcg

SEQ ID NO: 59979 - DNA, 25 bp, Homo sapien
gtgagatttcacttaaccaagacat

SEQ ID NO: 59980 - DNA, 25 bp, Homo sapien
gtgagatttcacataaccaagacat

SEQ ID NO: 59981 - DNA, 25 bp, Homo sapien
tgttagaccctcttaaacccggact

SEQ ID NO: 59982 - DNA, 25 bp, Homo sapien
tgttagaccctcataaacccggact

SEQ ID NO: 59983 - DNA, 25 bp, Homo sapien
cgatgtccctcgaaagaaccaggat

SEQ ID NO: 59984 - DNA, 25 bp, Homo sapien
cgatgtccctcgtaagaaccaggat

SEQ ID NO: 59985 - DNA, 25 bp, Homo sapien
cgtattacctccacagtaaaagggt

SEQ ID NO: 59986 - DNA, 25 bp, Homo sapien
cgtattacctcctcagtaaaagggt

SEQ ID NO: 59987 - DNA, 25 bp, Homo sapien
tttgtctacgagatctgtgaattcc

SEQ ID NO: 59988 - DNA, 25 bp, Homo sapien
tttgtctacgagttctgtgaattcc

SEQ ID NO: 59989 - DNA, 25 bp, Homo sapien
cgtggttccggagatgaaccagacc

SEQ ID NO: 59990 - DNA, 25 bp, Homo sapien
cgtggttccggacatgaaccagacc

SEQ ID NO: 59991 - DNA, 25 bp, Homo sapien
gttccggtcaaggacgtctgaggct

SEQ ID NO: 59992 - DNA, 25 bp, Homo sapien
gttccggtcaagcacgtctgaggct

SEQ ID NO: 59993 - DNA, 25 bp, Homo sapien
agtggggctcagactccgcgtgtct

SEQ ID NO: 59994 - DNA, 25 bp, Homo sapien
agtggggctcagtctccgcgtgtct

SEQ ID NO: 59995 - DNA, 25 bp, Homo sapien
caggggtcgtcgttcctacacggta

SEQ ID NO: 59996 - DNA, 25 bp, Homo sapien
caggggtcgtcgatcctacacggta

SEQ ID NO: 59997 - DNA, 25 bp, Homo sapien
cggtcggtcgttcaacaatcgacgg

SEQ ID NO: 59998 - DNA, 25 bp, Homo sapien
cggtcggtcgttgaacaatcgacgg

SEQ ID NO: 59999 - DNA, 25 bp, Homo sapien
ttgtgatcctgtaacagacactgta

SEQ ID NO: 60000 - DNA, 25 bp, Homo sapien
ttgtgatcctgttacagacactgta

SEQ ID NO: 60001 - DNA, 25 bp, Homo sapien
taagagaagacttgttccactcgta

SEQ ID NO: 60002 - DNA, 25 bp, Homo sapien
taagagaagactagttccactcgta

SEQ ID NO: 60003 - DNA, 25 bp, Homo sapien
gtcgtagactacgtatgattccaaa

SEQ ID NO: 60004 - DNA, 25 bp, Homo sapien
gtcgtagactacctatgattccaaa

SEQ ID NO: 60005 - DNA, 25 bp, Homo sapien
tctaaccgacatcgatctcaagact

SEQ ID NO: 60006 - DNA, 25 bp, Homo sapien
tctaaccgacatggatctcaagact

SEQ ID NO: 60007 - DNA, 25 bp, Homo sapien
aatacaaccctatggattacaggta

SEQ ID NO: 60008 - DNA, 25 bp, Homo sapien
aatacaaccctaaggattacaggta

SEQ ID NO: 60009 - DNA, 25 bp, Homo sapien
actgtacatacacagataacgtgtc

SEQ ID NO: 60010 - DNA, 25 bp, Homo sapien
actgtacatacagagataacgtgtc

SEQ ID NO: 60011 - DNA, 25 bp, Homo sapien
aagacacgtcgaacaaacggtcgac

SEQ ID NO: 60012 - DNA, 25 bp, Homo sapien
aagacacgtcgatcaaacggtcgac

SEQ ID NO: 60013 - DNA, 25 bp, Homo sapien
caaggaccgtgtaacaacggtagta

SEQ ID NO: 60014 - DNA, 25 bp, Homo sapien
caaggaccgtgttacaacggtagta

SEQ ID NO: 60015 - DNA, 25 bp, Homo sapien
aagactattcaagtcacaaagtgac

SEQ ID NO: 60016 - DNA, 25 bp, Homo sapien
aagactattcaactcacaaagtgac

SEQ ID NO: 60017 - DNA, 25 bp, Homo sapien
aatacagcggcaactcaagccagtg

SEQ ID NO: 60018 - DNA, 25 bp, Homo sapien
aatacagcggcatctcaagccagtg

SEQ ID NO: 60019 - DNA, 25 bp, Homo sapien
aatctggacgtctgccaatttctct

SEQ ID NO: 60020 - DNA, 25 bp, Homo sapien
aatctggacgtcagccaatttctct

SEQ ID NO: 60021 - DNA, 25 bp, Homo sapien
tccagtggcgagaccccgaggtgca

SEQ ID NO: 60022 - DNA, 25 bp, Homo sapien
tccagtggcgagtccccgaggtgca

SEQ ID NO: 60023 - DNA, 25 bp, Homo sapien
cccgggtgctcacaaacgaaaacga

SEQ ID NO: 60024 - DNA, 25 bp, Homo sapien
cccgggtgctcagaaacgaaaacga

SEQ ID NO: 60025 - DNA, 25 bp, Homo sapien
ttataactgacacctcaaaaccgac

SEQ ID NO: 60026 - DNA, 25 bp, Homo sapien
ttataactgacagctcaaaaccgac

SEQ ID NO: 60027 - DNA, 25 bp, Homo sapien
gtcacagcttcatctcaaggaatac

SEQ ID NO: 60028 - DNA, 25 bp, Homo sapien
gtcacagcttcaactcaaggaatac

SEQ ID NO: 60029 - DNA, 25 bp, Homo sapien
gttcaggacccctggacggaggtac

SEQ ID NO: 60030 - DNA, 25 bp, Homo sapien
gttcaggaccccaggacggaggtac

SEQ ID NO: 60031 - DNA, 25 bp, Homo sapien
tggacatgaggcaccgacggctgtc

SEQ ID NO: 60032 - DNA, 25 bp, Homo sapien
tggacatgaggctccgacggctgtc

SEQ ID NO: 60033 - DNA, 25 bp, Homo sapien
gtccgctacaggtcgtcgaggcttt

SEQ ID NO: 60034 - DNA, 25 bp, Homo sapien
gtccgctacaggacgtcgaggcttt

SEQ ID NO: 60035 - DNA, 25 bp, Homo sapien
tccgggtacgagatgtcgacatttt

SEQ ID NO: 60036 - DNA, 25 bp, Homo sapien
tccgggtacgagttgtcgacatttt

SEQ ID NO: 60037 - DNA, 25 bp, Homo sapien
tactccggtctctaggcgaattgcg

SEQ ID NO: 60038 - DNA, 25 bp, Homo sapien
tactccggtctcaaggcgaattgcg

SEQ ID NO: 60039 - DNA, 25 bp, Homo sapien
ctcagttacgtcaaccggaattacc

SEQ ID NO: 60040 - DNA, 25 bp, Homo sapien
ctcagttacgtctaccggaattacc

SEQ ID NO: 60041 - DNA, 25 bp, Homo sapien
cgtcataagtctcgtctctattccc

SEQ ID NO: 60042 - DNA, 25 bp, Homo sapien
cgtcataagtctggtctctattccc

SEQ ID NO: 60043 - DNA, 25 bp, Homo sapien
ttcgggagagagttcccccggtccc

SEQ ID NO: 60044 - DNA, 25 bp, Homo sapien
ttcgggagagagatcccccggtccc

SEQ ID NO: 60045 - DNA, 25 bp, Homo sapien
acaaagatcgaccactcggatacat

SEQ ID NO: 60046 - DNA, 25 bp, Homo sapien
acaaagatcgacgactcggatacat

SEQ ID NO: 60047 - DNA, 25 bp, Homo sapien
tttccccggacgaacctagtggaaa

SEQ ID NO: 60048 - DNA, 25 bp, Homo sapien
tttccccggacgtacctagtggaaa

SEQ ID NO: 60049 - DNA, 25 bp, Homo sapien
cttgggaccggctccctggactaag

SEQ ID NO: 60050 - DNA, 25 bp, Homo sapien
cttgggaccggcaccctggactaag

SEQ ID NO: 60051 - DNA, 25 bp, Homo sapien
gctaaactgtagaagtctctctctc

SEQ ID NO: 60052 - DNA, 25 bp, Homo sapien
gctaaactgtagtagtctctctctc

SEQ ID NO: 60053 - DNA, 25 bp, Homo sapien
cgcgggaagtacttctacgcaccgt

SEQ ID NO: 60054 - DNA, 25 bp, Homo sapien
cgcgggaagtacatctacgcaccgt

SEQ ID NO: 60055 - DNA, 25 bp, Homo sapien
gactttccgtagccacggtgcgtag

SEQ ID NO: 60056 - DNA, 25 bp, Homo sapien
gactttccgtaggcacggtgcgtag

SEQ ID NO: 60057 - DNA, 25 bp, Homo sapien
tcgtcaccgacatcattgtctcggt

SEQ ID NO: 60058 - DNA, 25 bp, Homo sapien
tcgtcaccgacaacattgtctcggt

SEQ ID NO: 60059 - DNA, 25 bp, Homo sapien
tccgtcttccgctcacgggagcgta

SEQ ID NO: 60060 - DNA, 25 bp, Homo sapien
tccgtcttccgcacacgggagcgta

SEQ ID NO: 60061 - DNA, 25 bp, Homo sapien
gtacgtttcgttacaccggagtctt

SEQ ID NO: 60062 - DNA, 25 bp, Homo sapien
gtacgtttcgtttcaccggagtctt

SEQ ID NO: 60063 - DNA, 25 bp, Homo sapien
cgtgtgtcgcgtacaagtgtattcg

SEQ ID NO: 60064 - DNA, 25 bp, Homo sapien
cgtgtgtcgcgttcaagtgtattcg

SEQ ID NO: 60065 - DNA, 25 bp, Homo sapien
gtaccggtgtcctcgccgtcttgtg

SEQ ID NO: 60066 - DNA, 25 bp, Homo sapien
gtaccggtgtccacgccgtcttgtg

SEQ ID NO: 60067 - DNA, 25 bp, Homo sapien
tcacttcgtcttcatccctctggtg

SEQ ID NO: 60068 - DNA, 25 bp, Homo sapien
tcacttcgtcttgatccctctggtg

SEQ ID NO: 60069 - DNA, 25 bp, Homo sapien
actaccaattactctagtcttgcgg

SEQ ID NO: 60070 - DNA, 25 bp, Homo sapien
actaccaattacactagtcttgcgg

SEQ ID NO: 60071 - DNA, 25 bp, Homo sapien
cgttaaagtcacaattctattgtag

SEQ ID NO: 60072 - DNA, 25 bp, Homo sapien
cgttaaagtcactattctattgtag

SEQ ID NO: 60073 - DNA, 25 bp, Homo sapien
ccgaagacgaccatggttattcgta

SEQ ID NO: 60074 - DNA, 25 bp, Homo sapien
ccgaagacgaccttggttattcgta

SEQ ID NO: 60075 - DNA, 25 bp, Homo sapien
gcacaagacctctgtcatcgtatga

SEQ ID NO: 60076 - DNA, 25 bp, Homo sapien
gcacaagacctcagtcatcgtatga

SEQ ID NO: 60077 - DNA, 25 bp, Homo sapien
tgacagacacgaatctaagtgtcga

SEQ ID NO: 60078 - DNA, 25 bp, Homo sapien
tgacagacacgattctaagtgtcga

SEQ ID NO: 60079 - DNA, 25 bp, Homo sapien
ctcgacaacgaatgtctatattgct

SEQ ID NO: 60080 - DNA, 25 bp, Homo sapien
ctcgacaacgaaagtctatattgct

SEQ ID NO: 60081 - DNA, 25 bp, Homo sapien
gcaggagacgattcgcgtcttgtat

SEQ ID NO: 60082 - DNA, 25 bp, Homo sapien
gcaggagacgatacgcgtcttgtat

SEQ ID NO: 60083 - DNA, 25 bp, Homo sapien
aaacaaggtccgaccgacctcggtg

SEQ ID NO: 60084 - DNA, 25 bp, Homo sapien
aaacaaggtccgtccgacctcggtg

SEQ ID NO: 60085 - DNA, 25 bp, Homo sapien
acatgtataccgagtcgaacacttg

SEQ ID NO: 60086 - DNA, 25 bp, Homo sapien
acatgtataccgtgtcgaacacttg

SEQ ID NO: 60087 - DNA, 25 bp, Homo sapien
ccaacgtaagtaaggaggttctctt

SEQ ID NO: 60088 - DNA, 25 bp, Homo sapien
ccaacgtaagtatggaggttctctt

SEQ ID NO: 60089 - DNA, 25 bp, Homo sapien
aaccaactaagttccgagtgttccc

SEQ ID NO: 60090 - DNA, 25 bp, Homo sapien
aaccaactaagtaccgagtgttccc

SEQ ID NO: 60091 - DNA, 25 bp, Homo sapien
cagacaaggtagactagagtacctc

SEQ ID NO: 60092 - DNA, 25 bp, Homo sapien
cagacaaggtagtctagagtacctc

SEQ ID NO: 60093 - DNA, 25 bp, Homo sapien
gatctaaggtgttcgttgtcacgtc

SEQ ID NO: 60094 - DNA, 25 bp, Homo sapien
gatctaaggtgtacgttgtcacgtc

SEQ ID NO: 60095 - DNA, 25 bp, Homo sapien
agggatcttaaaggagttaccttac

SEQ ID NO: 60096 - DNA, 25 bp, Homo sapien
agggatcttaaacgagttaccttac

SEQ ID NO: 60097 - DNA, 25 bp, Homo sapien
gagagacagaaaggtagagtcccca

SEQ ID NO: 60098 - DNA, 25 bp, Homo sapien
gagagacagaaacgtagagtcccca

SEQ ID NO: 60099 - DNA, 25 bp, Homo sapien
aaaagacaggagattcggaccccac

SEQ ID NO: 60100 - DNA, 25 bp, Homo sapien
aaaagacaggagtttcggaccccac

SEQ ID NO: 60101 - DNA, 25 bp, Homo sapien
taaagagatttgaccgacaccctac

SEQ ID NO: 60102 - DNA, 25 bp, Homo sapien
taaagagatttgtccgacaccctac

SEQ ID NO: 60103 - DNA, 25 bp, Homo sapien
agagaaaaagattttgtcgtccctc

SEQ ID NO: 60104 - DNA, 25 bp, Homo sapien
agagaaaaagatattgtcgtccctc

SEQ ID NO: 60105 - DNA, 25 bp, Homo sapien
aggaattgttaattgtacgtccggc

SEQ ID NO: 60106 - DNA, 25 bp, Homo sapien
aggaattgttaaatgtacgtccggc

SEQ ID NO: 60107 - DNA, 25 bp, Homo sapien
ctattcgttctgaagtcttacgaac

SEQ ID NO: 60108 - DNA, 25 bp, Homo sapien
ctattcgttctgtagtcttacgaac

SEQ ID NO: 60109 - DNA, 25 bp, Homo sapien
cctcgtttcttagtgtgtcacaacg

SEQ ID NO: 60110 - DNA, 25 bp, Homo sapien
cctcgtttcttactgtgtcacaacg

SEQ ID NO: 60111 - DNA, 25 bp, Homo sapien
gaagttttcctagttactctagatc

SEQ ID NO: 60112 - DNA, 25 bp, Homo sapien
gaagttttcctacttactctagatc

SEQ ID NO: 60113 - DNA, 25 bp, Homo sapien
tcgtcttcccgaacttgtccgtgtc

SEQ ID NO: 60114 - DNA, 25 bp, Homo sapien
tcgtcttcccgatcttgtccgtgtc

SEQ ID NO: 60115 - DNA, 25 bp, Homo sapien
actctacatgtcaagttttccggtg

SEQ ID NO: 60116 - DNA, 25 bp, Homo sapien
actctacatgtctagttttccggtg

SEQ ID NO: 60117 - DNA, 25 bp, Homo sapien
ctctcggacgacgtttggtccgtgg

SEQ ID NO: 60118 - DNA, 25 bp, Homo sapien
ctctcggacgacctttggtccgtgg

SEQ ID NO: 60119 - DNA, 25 bp, Homo sapien
ctgtcataaattagcactcgtacgg

SEQ ID NO: 60120 - DNA, 25 bp, Homo sapien
ctgtcataaatttgcactcgtacgg

SEQ ID NO: 60121 - DNA, 25 bp, Homo sapien
ttacctagacttttggtactgtata

SEQ ID NO: 60122 - DNA, 25 bp, Homo sapien
ttacctagacttatggtactgtata

SEQ ID NO: 60123 - DNA, 25 bp, Homo sapien
gtacactgaaaatcgtgtcacatat

SEQ ID NO: 60124 - DNA, 25 bp, Homo sapien
gtacactgaaaaacgtgtcacatat

SEQ ID NO: 60125 - DNA, 25 bp, Homo sapien
aactgataccgtaagttcctgtcgt

SEQ ID NO: 60126 - DNA, 25 bp, Homo sapien
aactgataccgttagttcctgtcgt

SEQ ID NO: 60127 - DNA, 25 bp, Homo sapien
ggggtcgtctacttctttattgtct

SEQ ID NO: 60128 - DNA, 25 bp, Homo sapien
ggggtcgtctacatctttattgtct

SEQ ID NO: 60129 - DNA, 25 bp, Homo sapien
tcgagggtcgtttgtccttgtcaga

SEQ ID NO: 60130 - DNA, 25 bp, Homo sapien
tcgagggtcgttagtccttgtcaga

SEQ ID NO: 60131 - DNA, 25 bp, Homo sapien
cgagggtcgtttgtccttgtcagat

SEQ ID NO: 60132 - DNA, 25 bp, Homo sapien
cgagggtcgtttctccttgtcagat

SEQ ID NO: 60133 - DNA, 25 bp, Homo sapien
gtaaagagttctcatttctagacaa

SEQ ID NO: 60134 - DNA, 25 bp, Homo sapien
gtaaagagttctgatttctagacaa

SEQ ID NO: 60135 - DNA, 25 bp, Homo sapien
gtcggtagttatctttcttctgcaa

SEQ ID NO: 60136 - DNA, 25 bp, Homo sapien
gtcggtagttatgtttcttctgcaa

SEQ ID NO: 60137 - DNA, 25 bp, Homo sapien
gatatcataggtcgatttcgacatg

SEQ ID NO: 60138 - DNA, 25 bp, Homo sapien
gatatcataggtggatttcgacatg

SEQ ID NO: 60139 - DNA, 25 bp, Homo sapien
gaagaactacatgacgtatttcaaa

SEQ ID NO: 60140 - DNA, 25 bp, Homo sapien
gaagaactacatcacgtatttcaaa

SEQ ID NO: 60141 - DNA, 25 bp, Homo sapien
agaagtctacaaacggatttaccga

SEQ ID NO: 60142 - DNA, 25 bp, Homo sapien
agaagtctacaatcggatttaccga

SEQ ID NO: 60143 - DNA, 25 bp, Homo sapien
gaagaaggccatcacctagaaccga

SEQ ID NO: 60144 - DNA, 25 bp, Homo sapien
gaagaaggccatgacctagaaccga

SEQ ID NO: 60145 - DNA, 25 bp, Homo sapien
tatggaaatcatagaagacactaca

SEQ ID NO: 60146 - DNA, 25 bp, Homo sapien
tatggaaatcattgaagacactaca

SEQ ID NO: 60147 - DNA, 25 bp, Homo sapien
gaagaagctctcctactctcacagt

SEQ ID NO: 60148 - DNA, 25 bp, Homo sapien
gaagaagctctcgtactctcacagt

SEQ ID NO: 60149 - DNA, 25 bp, Homo sapien
aggaagtgacactgccactactcca

SEQ ID NO: 60150 - DNA, 25 bp, Homo sapien
aggaagtgacacagccactactcca

SEQ ID NO: 60151 - DNA, 25 bp, Homo sapien
tcacaggacaccacatacctagagt

SEQ ID NO: 60152 - DNA, 25 bp, Homo sapien
tcacaggacacctcatacctagagt

SEQ ID NO: 60153 - DNA, 25 bp, Homo sapien
tcgacagtcagaaaggaacctacga

SEQ ID NO: 60154 - DNA, 25 bp, Homo sapien
tcgacagtcagataggaacctacga

SEQ ID NO: 60155 - DNA, 25 bp, Homo sapien
tcaactacagcgtcgggaccacgcg

SEQ ID NO: 60156 - DNA, 25 bp, Homo sapien
tcaactacagcgacgggaccacgcg

SEQ ID NO: 60157 - DNA, 25 bp, Homo sapien
ttagaagaattccaatggaccctcg

SEQ ID NO: 60158 - DNA, 25 bp, Homo sapien
ttagaagaattcgaatggaccctcg

SEQ ID NO: 60159 - DNA, 25 bp, Homo sapien
cctgtaagaaatgaactttaccttg

SEQ ID NO: 60160 - DNA, 25 bp, Homo sapien
cctgtaagaaatcaactttaccttg

SEQ ID NO: 60161 - DNA, 25 bp, Homo sapien
tcttcagacgaaaccaggtttcctg

SEQ ID NO: 60162 - DNA, 25 bp, Homo sapien
tcttcagacgaatccaggtttcctg

SEQ ID NO: 60163 - DNA, 25 bp, Homo sapien
acatctgagtaggaacccgtttttt

SEQ ID NO: 60164 - DNA, 25 bp, Homo sapien
acatctgagtagcaacccgtttttt

SEQ ID NO: 60165 - DNA, 25 bp, Homo sapien
caggtgtcgtccaccgtgtttatta

SEQ ID NO: 60166 - DNA, 25 bp, Homo sapien
caggtgtcgtcctccgtgtttatta

SEQ ID NO: 60167 - DNA, 25 bp, Homo sapien
ataggttgtcaacgatcttttcgta

SEQ ID NO: 60168 - DNA, 25 bp, Homo sapien
ataggttgtcaaggatcttttcgta

SEQ ID NO: 60169 - DNA, 25 bp, Homo sapien
cgcgtggtaagtactctatactttt

SEQ ID NO: 60170 - DNA, 25 bp, Homo sapien
cgcgtggtaagttctctatactttt

SEQ ID NO: 60171 - DNA, 25 bp, Homo sapien
acacttcgagtgttcagacataaac

SEQ ID NO: 60172 - DNA, 25 bp, Homo sapien
acacttcgagtgatcagacataaac

SEQ ID NO: 60173 - DNA, 25 bp, Homo sapien
aacctctcgaggtccaggagctagt

SEQ ID NO: 60174 - DNA, 25 bp, Homo sapien
aacctctcgaggaccaggagctagt

SEQ ID NO: 60175 - DNA, 25 bp, Homo sapien
aaccctagagagacgacctgagtca

SEQ ID NO: 60176 - DNA, 25 bp, Homo sapien
aaccctagagagtcgacctgagtca

SEQ ID NO: 60177 - DNA, 25 bp, Homo sapien
ttgacctgacattgtattgtgtcat

SEQ ID NO: 60178 - DNA, 25 bp, Homo sapien
ttgacctgacatagtattgtgtcat

SEQ ID NO: 60179 - DNA, 25 bp, Homo sapien
tacttccgaggacgtgtcggtatga

SEQ ID NO: 60180 - DNA, 25 bp, Homo sapien
tacttccgaggaggtgtcggtatga

SEQ ID NO: 60181 - DNA, 25 bp, Homo sapien
tctttacgaaaggtgtgacttgact

SEQ ID NO: 60182 - DNA, 25 bp, Homo sapien
tctttacgaaagctgtgacttgact

SEQ ID NO: 60183 - DNA, 25 bp, Homo sapien
ggtacactgataagtgacacacgaa

SEQ ID NO: 60184 - DNA, 25 bp, Homo sapien
ggtacactgatatgtgacacacgaa

SEQ ID NO: 60185 - DNA, 25 bp, Homo sapien
tagatcgagtgatcgagtccgactt

SEQ ID NO: 60186 - DNA, 25 bp, Homo sapien
tagatcgagtgaacgagtccgactt

SEQ ID NO: 60187 - DNA, 25 bp, Homo sapien
aaattctgtcttcacgagagtggca

SEQ ID NO: 60188 - DNA, 25 bp, Homo sapien
aaattctgtcttgacgagagtggca

SEQ ID NO: 60189 - DNA, 25 bp, Homo sapien
tgtctacgattgaagagtcgaccct

SEQ ID NO: 60190 - DNA, 25 bp, Homo sapien
tgtctacgattgtagagtcgaccct

SEQ ID NO: 60191 - DNA, 25 bp, Homo sapien
tgtacgacgtgtgcaggtccacggt

SEQ ID NO: 60192 - DNA, 25 bp, Homo sapien
tgtacgacgtgtccaggtccacggt

SEQ ID NO: 60193 - DNA, 25 bp, Homo sapien
tcgtcgtggtcctggtcgtcaccgt

SEQ ID NO: 60194 - DNA, 25 bp, Homo sapien
tcgtcgtggtccaggtcgtcaccgt

SEQ ID NO: 60195 - DNA, 25 bp, Homo sapien
tttacttgtcggtagttacgattac

SEQ ID NO: 60196 - DNA, 25 bp, Homo sapien
tttacttgtcggaagttacgattac

SEQ ID NO: 60197 - DNA, 25 bp, Homo sapien
tatgttcgtttcacactcatatgtg

SEQ ID NO: 60198 - DNA, 25 bp, Homo sapien
tatgttcgtttctcactcatatgtg

SEQ ID NO: 60199 - DNA, 25 bp, Homo sapien
cattttcgaactggtcttttgagag

SEQ ID NO: 60200 - DNA, 25 bp, Homo sapien
cattttcgaactcgtcttttgagag

SEQ ID NO: 60201 - DNA, 25 bp, Homo sapien
ttacttctacgacaactctttcaaa

SEQ ID NO: 60202 - DNA, 25 bp, Homo sapien
ttacttctacgagaactctttcaaa

SEQ ID NO: 60203 - DNA, 25 bp, Homo sapien
tcccatctaccgtttatcgacgagg

SEQ ID NO: 60204 - DNA, 25 bp, Homo sapien
tcccatctaccgattatcgacgagg

SEQ ID NO: 60205 - DNA, 25 bp, Homo sapien
gaagtcagtgtacatattcgacttg

SEQ ID NO: 60206 - DNA, 25 bp, Homo sapien
gaagtcagtgtagatattcgacttg

SEQ ID NO: 60207 - DNA, 25 bp, Homo sapien
tatatcggtgaaacctatagtcttg

SEQ ID NO: 60208 - DNA, 25 bp, Homo sapien
tatatcggtgaatcctatagtcttg

SEQ ID NO: 60209 - DNA, 25 bp, Homo sapien
tatttcgtcatcgtctatgtagtta

SEQ ID NO: 60210 - DNA, 25 bp, Homo sapien
tatttcgtcatcctctatgtagtta

SEQ ID NO: 60211 - DNA, 25 bp, Homo sapien
agagtttcagaaccatccgtaagct

SEQ ID NO: 60212 - DNA, 25 bp, Homo sapien
agagtttcagaagcatccgtaagct

SEQ ID NO: 60213 - DNA, 25 bp, Homo sapien
gatatgttacactacgatccgaatt

SEQ ID NO: 60214 - DNA, 25 bp, Homo sapien
gatatgttacacaacgatccgaatt

SEQ ID NO: 60215 - DNA, 25 bp, Homo sapien
gtagactctttcaccccgtaaatcg

SEQ ID NO: 60216 - DNA, 25 bp, Homo sapien
gtagactctttctccccgtaaatcg

SEQ ID NO: 60217 - DNA, 25 bp, Homo sapien
cgaacgggtcgcaccgtagtagaca

SEQ ID NO: 60218 - DNA, 25 bp, Homo sapien
cgaacgggtcgctccgtagtagaca

SEQ ID NO: 60219 - DNA, 25 bp, Homo sapien
gggacgcgtgactccatcgacgtag

SEQ ID NO: 60220 - DNA, 25 bp, Homo sapien
gggacgcgtgacaccatcgacgtag

SEQ ID NO: 60221 - DNA, 25 bp, Homo sapien
gtaggtccggtagacgcttagatgt

SEQ ID NO: 60222 - DNA, 25 bp, Homo sapien
gtaggtccggtacacgcttagatgt

SEQ ID NO: 60223 - DNA, 25 bp, Homo sapien
tggtgaccgggtctcgtttagacta

SEQ ID NO: 60224 - DNA, 25 bp, Homo sapien
tggtgaccgggtgtcgtttagacta

SEQ ID NO: 60225 - DNA, 25 bp, Homo sapien
gatgccaccgggatccgtctttagg

SEQ ID NO: 60226 - DNA, 25 bp, Homo sapien
gatgccaccgggttccgtctttagg

SEQ ID NO: 60227 - DNA, 25 bp, Homo sapien
cgctccggaggaactactacctcgg

SEQ ID NO: 60228 - DNA, 25 bp, Homo sapien
cgctccggaggatctactacctcgg

SEQ ID NO: 60229 - DNA, 25 bp, Homo sapien
acccgccgacgaagattaacttccg

SEQ ID NO: 60230 - DNA, 25 bp, Homo sapien
acccgccgacgatgattaacttccg

SEQ ID NO: 60231 - DNA, 25 bp, Homo sapien
agctactccaagaacagcgacatcc

SEQ ID NO: 60232 - DNA, 25 bp, Homo sapien
agctactccaagtacagcgacatcc

SEQ ID NO: 60233 - DNA, 25 bp, Homo sapien
gggtcggaagaggtaccaccacttc

SEQ ID NO: 60234 - DNA, 25 bp, Homo sapien
gggtcggaagagctaccaccacttc

SEQ ID NO: 60235 - DNA, 25 bp, Homo sapien
cgtaccggtgagtctgtgttcaggt

SEQ ID NO: 60236 - DNA, 25 bp, Homo sapien
cgtaccggtgagactgtgttcaggt

SEQ ID NO: 60237 - DNA, 25 bp, Homo sapien
tccgtccggtggacctaccacagtg

SEQ ID NO: 60238 - DNA, 25 bp, Homo sapien
tccgtccggtggtcctaccacagtg

SEQ ID NO: 60239 - DNA, 25 bp, Homo sapien
tccgggactgtgtcctacaaactag

SEQ ID NO: 60240 - DNA, 25 bp, Homo sapien
tccgggactgtgacctacaaactag

SEQ ID NO: 60241 - DNA, 25 bp, Homo sapien
atatgtccttttcgaacacgaaagg

SEQ ID NO: 60242 - DNA, 25 bp, Homo sapien
atatgtccttttggaacacgaaagg

SEQ ID NO: 60243 - DNA, 25 bp, Homo sapien
acctgactgtatgagactatattaa

SEQ ID NO: 60244 - DNA, 25 bp, Homo sapien
acctgactgtatcagactatattaa

SEQ ID NO: 60245 - DNA, 25 bp, Homo sapien
gcctgtaacgacttgtccctcggtc

SEQ ID NO: 60246 - DNA, 25 bp, Homo sapien
gcctgtaacgacatgtccctcggtc

SEQ ID NO: 60247 - DNA, 25 bp, Homo sapien
agatactacgcgttacttcacgcta

SEQ ID NO: 60248 - DNA, 25 bp, Homo sapien
agatactacgcgatacttcacgcta

SEQ ID NO: 60249 - DNA, 25 bp, Homo sapien
gacggtgacgacttacttacaagtg

SEQ ID NO: 60250 - DNA, 25 bp, Homo sapien
gacggtgacgacatacttacaagtg

SEQ ID NO: 60251 - DNA, 25 bp, Homo sapien
acgacggacgacgagtactttcggg

SEQ ID NO: 60252 - DNA, 25 bp, Homo sapien
acgacggacgaccagtactttcggg

SEQ ID NO: 60253 - DNA, 25 bp, Homo sapien
ttaaggtcacttgatttacgtcgag

SEQ ID NO: 60254 - DNA, 25 bp, Homo sapien
ttaaggtcacttcatttacgtcgag

SEQ ID NO: 60255 - DNA, 25 bp, Homo sapien
tttaacgtatcaagtgcaccgtgaa

SEQ ID NO: 60256 - DNA, 25 bp, Homo sapien
tttaacgtatcatgtgcaccgtgaa

SEQ ID NO: 60257 - DNA, 25 bp, Homo sapien
agactcgttgtgcaccgcgtgtcgt

SEQ ID NO: 60258 - DNA, 25 bp, Homo sapien
agactcgttgtggaccgcgtgtcgt

SEQ ID NO: 60259 - DNA, 25 bp, Homo sapien
ggtcgagttcgagctgacaccgatg

SEQ ID NO: 60260 - DNA, 25 bp, Homo sapien
ggtcgagttcgacctgacaccgatg

SEQ ID NO: 60261 - DNA, 25 bp, Homo sapien
gtcgaactagagtttccgacgtaag

SEQ ID NO: 60262 - DNA, 25 bp, Homo sapien
gtcgaactagagattccgacgtaag

SEQ ID NO: 60263 - DNA, 25 bp, Homo sapien
gaagaatacgttatgttccacgtaa

SEQ ID NO: 60264 - DNA, 25 bp, Homo sapien
gaagaatacgttttgttccacgtaa

SEQ ID NO: 60265 - DNA, 25 bp, Homo sapien
ataatagtaggcttgttctctgaac

SEQ ID NO: 60266 - DNA, 25 bp, Homo sapien
ataatagtaggcatgttctctgaac

SEQ ID NO: 60267 - DNA, 25 bp, Homo sapien
aatttaagtcagattaccgtcacga

SEQ ID NO: 60268 - DNA, 25 bp, Homo sapien
aatttaagtcagtttaccgtcacga

SEQ ID NO: 60269 - DNA, 25 bp, Homo sapien
atgacatcgagttctctctgtacga

SEQ ID NO: 60270 - DNA, 25 bp, Homo sapien
atgacatcgagtactctctgtacga

SEQ ID NO: 60271 - DNA, 25 bp, Homo sapien
tagtcgtctttatcacatttacgag

SEQ ID NO: 60272 - DNA, 25 bp, Homo sapien
tagtcgtctttaacacatttacgag

SEQ ID NO: 60273 - DNA, 25 bp, Homo sapien
gaatacccctgtactcttaatgacg

SEQ ID NO: 60274 - DNA, 25 bp, Homo sapien
gaatacccctgttctcttaatgacg

SEQ ID NO: 60275 - DNA, 25 bp, Homo sapien
attctacaaccttcgatcaggtttg

SEQ ID NO: 60276 - DNA, 25 bp, Homo sapien
attctacaacctacgatcaggtttg

SEQ ID NO: 60277 - DNA, 25 bp, Homo sapien
actttagaagttacctgtccacaag

SEQ ID NO: 60278 - DNA, 25 bp, Homo sapien
actttagaagtttcctgtccacaag

SEQ ID NO: 60279 - DNA, 25 bp, Homo sapien
ctgtcttgagtatttttgccggtat

SEQ ID NO: 60280 - DNA, 25 bp, Homo sapien
ctgtcttgagtaattttgccggtat

SEQ ID NO: 60281 - DNA, 25 bp, Homo sapien
agagaaggagagagtttctatgccc

SEQ ID NO: 60282 - DNA, 25 bp, Homo sapien
agagaaggagagtgtttctatgccc

SEQ ID NO: 60283 - DNA, 25 bp, Homo sapien
caagagcacttttagtttcccgtcg

SEQ ID NO: 60284 - DNA, 25 bp, Homo sapien
caagagcactttaagtttcccgtcg

SEQ ID NO: 60285 - DNA, 25 bp, Homo sapien
gacacctgcactgtcactctttaca

SEQ ID NO: 60286 - DNA, 25 bp, Homo sapien
gacacctgcactctcactctttaca

SEQ ID NO: 60287 - DNA, 25 bp, Homo sapien
cgtgcgtacgattcctcgtccttcg

SEQ ID NO: 60288 - DNA, 25 bp, Homo sapien
cgtgcgtacgatacctcgtccttcg

SEQ ID NO: 60289 - DNA, 25 bp, Homo sapien
atcgtggtgtaaccttccctagtag

SEQ ID NO: 60290 - DNA, 25 bp, Homo sapien
atcgtggtgtaagcttccctagtag

SEQ ID NO: 60291 - DNA, 25 bp, Homo sapien
tacatggtgtcacttacctacatag

SEQ ID NO: 60292 - DNA, 25 bp, Homo sapien
tacatggtgtcagttacctacatag

SEQ ID NO: 60293 - DNA, 25 bp, Homo sapien
taatttggttgtgtatttccactac

SEQ ID NO: 60294 - DNA, 25 bp, Homo sapien
taatttggttgtctatttccactac

SEQ ID NO: 60295 - DNA, 25 bp, Homo sapien
actttgtgtcattcgtttatggctc

SEQ ID NO: 60296 - DNA, 25 bp, Homo sapien
actttgtgtcatacgtttatggctc

SEQ ID NO: 60297 - DNA, 25 bp, Homo sapien
gaattccgtgacaatatttgttctt

SEQ ID NO: 60298 - DNA, 25 bp, Homo sapien
gaattccgtgactatatttgttctt

SEQ ID NO: 60299 - DNA, 25 bp, Homo sapien
cgtgtgggtctttgtaatctcttag

SEQ ID NO: 60300 - DNA, 25 bp, Homo sapien
cgtgtgggtcttagtaatctcttag

SEQ ID NO: 60301 - DNA, 25 bp, Homo sapien
ttgacagtcgcagactaagtcgagg

SEQ ID NO: 60302 - DNA, 25 bp, Homo sapien
ttgacagtcgcacactaagtcgagg

SEQ ID NO: 60303 - DNA, 25 bp, Homo sapien
gtgacctgcaccagtacggactctg

SEQ ID NO: 60304 - DNA, 25 bp, Homo sapien
gtgacctgcacctgtacggactctg

SEQ ID NO: 60305 - DNA, 25 bp, Homo sapien
aggtgaggttcaaggacaacgtcag

SEQ ID NO: 60306 - DNA, 25 bp, Homo sapien
aggtgaggttcatggacaacgtcag

SEQ ID NO: 60307 - DNA, 25 bp, Homo sapien
cttggggactctctctactaatccg

SEQ ID NO: 60308 - DNA, 25 bp, Homo sapien
cttggggactctgtctactaatccg

SEQ ID NO: 60309 - DNA, 25 bp, Homo sapien
ttcttgagggctcagtgtgtctttc

SEQ ID NO: 60310 - DNA, 25 bp, Homo sapien
ttcttgagggctgagtgtgtctttc

SEQ ID NO: 60311 - DNA, 25 bp, Homo sapien
tagttctttagaagacgacgtttct

SEQ ID NO: 60312 - DNA, 25 bp, Homo sapien
tagttctttagatgacgacgtttct

SEQ ID NO: 60313 - DNA, 25 bp, Homo sapien
ctcgttactgagactaacagttcct

SEQ ID NO: 60314 - DNA, 25 bp, Homo sapien
ctcgttactgagtctaacagttcct

SEQ ID NO: 60315 - DNA, 25 bp, Homo sapien
gtcgtcctccgttcaaacgtatctt

SEQ ID NO: 60316 - DNA, 25 bp, Homo sapien
gtcgtcctccgtacaaacgtatctt

SEQ ID NO: 60317 - DNA, 25 bp, Homo sapien
taagttgtactgaagatgacgttcc

SEQ ID NO: 60318 - DNA, 25 bp, Homo sapien
taagttgtactgtagatgacgttcc

SEQ ID NO: 60319 - DNA, 25 bp, Homo sapien
acgttgtatacaagacaactcgttt

SEQ ID NO: 60320 - DNA, 25 bp, Homo sapien
acgttgtatacatgacaactcgttt

SEQ ID NO: 60321 - DNA, 25 bp, Homo sapien
cgtccggtcctggtcgtgcgtctcc

SEQ ID NO: 60322 - DNA, 25 bp, Homo sapien
cgtccggtcctgctcgtgcgtctcc

SEQ ID NO: 60323 - DNA, 25 bp, Homo sapien
acatggttagttaggttctatttcc

SEQ ID NO: 60324 - DNA, 25 bp, Homo sapien
acatggttagtttggttctatttcc

SEQ ID NO: 60325 - DNA, 25 bp, Homo sapien
attggttaactggaacaagtcactt

SEQ ID NO: 60326 - DNA, 25 bp, Homo sapien
attggttaactgcaacaagtcactt

SEQ ID NO: 60327 - DNA, 25 bp, Homo sapien
ctacctgtccccaaatagtgcggtt

SEQ ID NO: 60328 - DNA, 25 bp, Homo sapien
ctacctgtcccctaatagtgcggtt

SEQ ID NO: 60329 - DNA, 25 bp, Homo sapien
acttgacgcgccagccgaggcggta

SEQ ID NO: 60330 - DNA, 25 bp, Homo sapien
acttgacgcgcctgccgaggcggta

SEQ ID NO: 60331 - DNA, 25 bp, Homo sapien
gattccggggaaccacggcgacgac

SEQ ID NO: 60332 - DNA, 25 bp, Homo sapien
gattccggggaagcacggcgacgac

SEQ ID NO: 60333 - DNA, 25 bp, Homo sapien
ctccctggcgtcacgtcagagacgt

SEQ ID NO: 60334 - DNA, 25 bp, Homo sapien
ctccctggcgtctcgtcagagacgt

SEQ ID NO: 60335 - DNA, 25 bp, Homo sapien
aaaccccgtagctcggtttgaccgt

SEQ ID NO: 60336 - DNA, 25 bp, Homo sapien
aaaccccgtagcacggtttgaccgt

SEQ ID NO: 60337 - DNA, 25 bp, Homo sapien
taagacccgaaacgtctaataaagt

SEQ ID NO: 60338 - DNA, 25 bp, Homo sapien
taagacccgaaaggtctaataaagt

SEQ ID NO: 60339 - DNA, 25 bp, Homo sapien
agtgtcaccgactgtacactataca

SEQ ID NO: 60340 - DNA, 25 bp, Homo sapien
agtgtcaccgacagtacactataca

SEQ ID NO: 60341 - DNA, 25 bp, Homo sapien
ttcaagttgtttcagggaatctacg

SEQ ID NO: 60342 - DNA, 25 bp, Homo sapien
ttcaagttgtttgagggaatctacg

SEQ ID NO: 60343 - DNA, 25 bp, Homo sapien
aggtccggtagactggagactcacg

SEQ ID NO: 60344 - DNA, 25 bp, Homo sapien
aggtccggtagagtggagactcacg

SEQ ID NO: 60345 - DNA, 25 bp, Homo sapien
taggtacacccgatgccacactgtc

SEQ ID NO: 60346 - DNA, 25 bp, Homo sapien
taggtacacccgttgccacactgtc

SEQ ID NO: 60347 - DNA, 25 bp, Homo sapien
gggagactaaaagaactctacgaaa

SEQ ID NO: 60348 - DNA, 25 bp, Homo sapien
gggagactaaaacaactctacgaaa

SEQ ID NO: 60349 - DNA, 25 bp, Homo sapien
gaatcgtctacaaaaagaaccaaac

SEQ ID NO: 60350 - DNA, 25 bp, Homo sapien
gaatcgtctacataaagaaccaaac

SEQ ID NO: 60351 - DNA, 25 bp, Homo sapien
gagatcttctatgaaagacccaaca

SEQ ID NO: 60352 - DNA, 25 bp, Homo sapien
gagatcttctatcaaagacccaaca

SEQ ID NO: 60353 - DNA, 25 bp, Homo sapien
ggaacatgtgagaaatctccttctt

SEQ ID NO: 60354 - DNA, 25 bp, Homo sapien
ggaacatgtgagtaatctccttctt

SEQ ID NO: 60355 - DNA, 25 bp, Homo sapien
gaaagttcatagacttacactattt

SEQ ID NO: 60356 - DNA, 25 bp, Homo sapien
gaaagttcatagtcttacactattt

SEQ ID NO: 60357 - DNA, 25 bp, Homo sapien
tttccagatcacaaccgaaaagaag

SEQ ID NO: 60358 - DNA, 25 bp, Homo sapien
tttccagatcactaccgaaaagaag

SEQ ID NO: 60359 - DNA, 25 bp, Homo sapien
ttcctcctcgagaccgatcataaga

SEQ ID NO: 60360 - DNA, 25 bp, Homo sapien
ttcctcctcgagtccgatcataaga

SEQ ID NO: 60361 - DNA, 25 bp, Homo sapien
atcttggaggaaggaccagacagac

SEQ ID NO: 60362 - DNA, 25 bp, Homo sapien
atcttggaggaacgaccagacagac

SEQ ID NO: 60363 - DNA, 25 bp, Homo sapien
tccgggagaagagaacccgacagac

SEQ ID NO: 60364 - DNA, 25 bp, Homo sapien
tccgggagaagacaacccgacagac

SEQ ID NO: 60365 - DNA, 25 bp, Homo sapien
tccggggtatgagtgccgacaagta

SEQ ID NO: 60366 - DNA, 25 bp, Homo sapien
tccggggtatgactgccgacaagta

SEQ ID NO: 60367 - DNA, 25 bp, Homo sapien
ggtgggtaacccaggttcgacgttc

SEQ ID NO: 60368 - DNA, 25 bp, Homo sapien
ggtgggtaaccctggttcgacgttc

SEQ ID NO: 60369 - DNA, 25 bp, Homo sapien
cagtcgggagaccttgaaacgtttc

SEQ ID NO: 60370 - DNA, 25 bp, Homo sapien
cagtcgggagacgttgaaacgtttc

SEQ ID NO: 60371 - DNA, 25 bp, Homo sapien
tgagagtcagaagaacccctcgtca

SEQ ID NO: 60372 - DNA, 25 bp, Homo sapien
tgagagtcagaacaacccctcgtca

SEQ ID NO: 60373 - DNA, 25 bp, Homo sapien
cagataccagacatataccagggta

SEQ ID NO: 60374 - DNA, 25 bp, Homo sapien
cagataccagacttataccagggta

SEQ ID NO: 60375 - DNA, 25 bp, Homo sapien
acgatgacaatttctctaggacgtg

SEQ ID NO: 60376 - DNA, 25 bp, Homo sapien
acgatgacaattactctaggacgtg

SEQ ID NO: 60377 - DNA, 25 bp, Homo sapien
ctattctcgctgtccatgtgtcctc

SEQ ID NO: 60378 - DNA, 25 bp, Homo sapien
ctattctcgctgaccatgtgtcctc

SEQ ID NO: 60379 - DNA, 25 bp, Homo sapien
catatttttcgtcgatttgtgacca

SEQ ID NO: 60380 - DNA, 25 bp, Homo sapien
catatttttcgtggatttgtgacca

SEQ ID NO: 60381 - DNA, 25 bp, Homo sapien
ccctcttctctggtgaaattcttcg

SEQ ID NO: 60382 - DNA, 25 bp, Homo sapien
ccctcttctctgctgaaattcttcg

SEQ ID NO: 60383 - DNA, 25 bp, Homo sapien
atggcttcgcgtgaatatgtttact

SEQ ID NO: 60384 - DNA, 25 bp, Homo sapien
atggcttcgcgtcaatatgtttact

SEQ ID NO: 60385 - DNA, 25 bp, Homo sapien
aaggattccgactctcgagttgact

SEQ ID NO: 60386 - DNA, 25 bp, Homo sapien
aaggattccgacactcgagttgact

SEQ ID NO: 60387 - DNA, 25 bp, Homo sapien
catgaccgcacctaagacgtattac

SEQ ID NO: 60388 - DNA, 25 bp, Homo sapien
catgaccgcaccaaagacgtattac

SEQ ID NO: 60389 - DNA, 25 bp, Homo sapien
tattaccgtacaccacaaggaatcg

SEQ ID NO: 60390 - DNA, 25 bp, Homo sapien
tattaccgtacagcacaaggaatcg

SEQ ID NO: 60391 - DNA, 25 bp, Homo sapien
gatccgaccgtaaccactgggggtc

SEQ ID NO: 60392 - DNA, 25 bp, Homo sapien
gatccgaccgtatccactgggggtc

SEQ ID NO: 60393 - DNA, 25 bp, Homo sapien
gaaacaggtcccacggggtagatcg

SEQ ID NO: 60394 - DNA, 25 bp, Homo sapien
gaaacaggtccctcggggtagatcg

SEQ ID NO: 60395 - DNA, 25 bp, Homo sapien
acgacaggacccattggaacgacgg

SEQ ID NO: 60396 - DNA, 25 bp, Homo sapien
acgacaggaccctttggaacgacgg

SEQ ID NO: 60397 - DNA, 25 bp, Homo sapien
aacatgttcgttaaacaggcacaag

SEQ ID NO: 60398 - DNA, 25 bp, Homo sapien
aacatgttcgtttaacaggcacaag

SEQ ID NO: 60399 - DNA, 25 bp, Homo sapien
atgtgtgtctgttctgtcgacaaat

SEQ ID NO: 60400 - DNA, 25 bp, Homo sapien
atgtgtgtctgtactgtcgacaaat

SEQ ID NO: 60401 - DNA, 25 bp, Homo sapien
aactggcgcatgaaggcgtcgccca

SEQ ID NO: 60402 - DNA, 25 bp, Homo sapien
aactggcgcatgtaggcgtcgccca

SEQ ID NO: 60403 - DNA, 25 bp, Homo sapien
ctgactacgagtcgagttcccctca

SEQ ID NO: 60404 - DNA, 25 bp, Homo sapien
ctgactacgagtggagttcccctca

SEQ ID NO: 60405 - DNA, 25 bp, Homo sapien
aaacggttcgtaaaaatctccgaat

SEQ ID NO: 60406 - DNA, 25 bp, Homo sapien
aaacggttcgtataaatctccgaat

SEQ ID NO: 60407 - DNA, 25 bp, Homo sapien
aagttgtcatcaatcttaccggtag

SEQ ID NO: 60408 - DNA, 25 bp, Homo sapien
aagttgtcatcattcttaccggtag

SEQ ID NO: 60409 - DNA, 25 bp, Homo sapien
ctactgatatcactgtatagcctag

SEQ ID NO: 60410 - DNA, 25 bp, Homo sapien
ctactgatatcagtgtatagcctag

SEQ ID NO: 60411 - DNA, 25 bp, Homo sapien
gttgggagttgactttcgtccgtag

SEQ ID NO: 60412 - DNA, 25 bp, Homo sapien
gttgggagttgagtttcgtccgtag

SEQ ID NO: 60413 - DNA, 25 bp, Homo sapien
aagtccggtagtcgtggttccctgg

SEQ ID NO: 60414 - DNA, 25 bp, Homo sapien
aagtccggtagtggtggttccctgg

SEQ ID NO: 60415 - DNA, 25 bp, Homo sapien
cgtggacccttggtggaccacatgg

SEQ ID NO: 60416 - DNA, 25 bp, Homo sapien
cgtggacccttgctggaccacatgg

SEQ ID NO: 60417 - DNA, 25 bp, Homo sapien
accaccttttgatggttcacatcag

SEQ ID NO: 60418 - DNA, 25 bp, Homo sapien
accaccttttgaaggttcacatcag

SEQ ID NO: 60419 - DNA, 25 bp, Homo sapien
ctactgtttgataagagagccatta

SEQ ID NO: 60420 - DNA, 25 bp, Homo sapien
ctactgtttgattagagagccatta

SEQ ID NO: 60421 - DNA, 25 bp, Homo sapien
tccccttcgactcagaaaccgatga

SEQ ID NO: 60422 - DNA, 25 bp, Homo sapien
tccccttcgactgagaaaccgatga

SEQ ID NO: 60423 - DNA, 25 bp, Homo sapien
ccgtgtagaaatacgaatcccttcg

SEQ ID NO: 60424 - DNA, 25 bp, Homo sapien
ccgtgtagaaattcgaatcccttcg

SEQ ID NO: 60425 - DNA, 25 bp, Homo sapien
ctttgaaattacaagaccgactgat

SEQ ID NO: 60426 - DNA, 25 bp, Homo sapien
ctttgaaattactagaccgactgat

SEQ ID NO: 60427 - DNA, 25 bp, Homo sapien
gttaagttcaaatagaccagtgacg

SEQ ID NO: 60428 - DNA, 25 bp, Homo sapien
gttaagttcaaaaagaccagtgacg

SEQ ID NO: 60429 - DNA, 25 bp, Homo sapien
ctgttatagtttgttaagtccctta

SEQ ID NO: 60430 - DNA, 25 bp, Homo sapien
ctgttatagtttcttaagtccctta

SEQ ID NO: 60431 - DNA, 25 bp, Homo sapien
ccgtaaaaaagttctcctttgtaga

SEQ ID NO: 60432 - DNA, 25 bp, Homo sapien
ccgtaaaaaagtactcctttgtaga

SEQ ID NO: 60433 - DNA, 25 bp, Homo sapien
gagcacgggacgacctcctgtctcc

SEQ ID NO: 60434 - DNA, 25 bp, Homo sapien
gagcacgggacgtcctcctgtctcc

SEQ ID NO: 60435 - DNA, 25 bp, Homo sapien
aggaaccgggactccttccgactac

SEQ ID NO: 60436 - DNA, 25 bp, Homo sapien
aggaaccgggacaccttccgactac

SEQ ID NO: 60437 - DNA, 25 bp, Homo sapien
gggatccgtttacctcattccttat

SEQ ID NO: 60438 - DNA, 25 bp, Homo sapien
gggatccgtttagctcattccttat

SEQ ID NO: 60439 - DNA, 25 bp, Homo sapien
ttctgtgtctgtcgtctgcttgtca

SEQ ID NO: 60440 - DNA, 25 bp, Homo sapien
ttctgtgtctgtggtctgcttgtca

SEQ ID NO: 60441 - DNA, 25 bp, Homo sapien
tctgagactcggttttcgtctgaga

SEQ ID NO: 60442 - DNA, 25 bp, Homo sapien
tctgagactcggatttcgtctgaga

SEQ ID NO: 60443 - DNA, 25 bp, Homo sapien
tctgaatcttaatacgtcacgtcga

SEQ ID NO: 60444 - DNA, 25 bp, Homo sapien
tctgaatcttaaaacgtcacgtcga

SEQ ID NO: 60445 - DNA, 25 bp, Homo sapien
gtatgttgacactccgaagtcataa

SEQ ID NO: 60446 - DNA, 25 bp, Homo sapien
gtatgttgacacaccgaagtcataa

SEQ ID NO: 60447 - DNA, 25 bp, Homo sapien
aagtctgttgggacaccgaacgaaa

SEQ ID NO: 60448 - DNA, 25 bp, Homo sapien
aagtctgttgggtcaccgaacgaaa

SEQ ID NO: 60449 - DNA, 25 bp, Homo sapien
acaggtcaagggtcccttccactac

SEQ ID NO: 60450 - DNA, 25 bp, Homo sapien
acaggtcaagggacccttccactac

SEQ ID NO: 60451 - DNA, 25 bp, Homo sapien
tagtatgaattatttccggacaatc

SEQ ID NO: 60452 - DNA, 25 bp, Homo sapien
tagtatgaattaattccggacaatc

SEQ ID NO: 60453 - DNA, 25 bp, Homo sapien
taatggtttataactcccgatgtta

SEQ ID NO: 60454 - DNA, 25 bp, Homo sapien
taatggtttatatctcccgatgtta

SEQ ID NO: 60455 - DNA, 25 bp, Homo sapien
ttttaggtaaagtacatcatcgttc

SEQ ID NO: 60456 - DNA, 25 bp, Homo sapien
ttttaggtaaagaacatcatcgttc

SEQ ID NO: 60457 - DNA, 25 bp, Homo sapien
atggacctacggaagtcttcgagta

SEQ ID NO: 60458 - DNA, 25 bp, Homo sapien
atggacctacggtagtcttcgagta

SEQ ID NO: 60459 - DNA, 25 bp, Homo sapien
gaaatattcaatgtccggtccgagg

SEQ ID NO: 60460 - DNA, 25 bp, Homo sapien
gaaatattcaatctccggtccgagg

SEQ ID NO: 60461 - DNA, 25 bp, Homo sapien
aatttacgatcttatcctttcggag

SEQ ID NO: 60462 - DNA, 25 bp, Homo sapien
aatttacgatctaatcctttcggag

SEQ ID NO: 60463 - DNA, 25 bp, Homo sapien
ctaggtcacgttttattactttggg

SEQ ID NO: 60464 - DNA, 25 bp, Homo sapien
ctaggtcacgttatattactttggg

SEQ ID NO: 60465 - DNA, 25 bp, Homo sapien
agagtccgactagacccttgtaccc

SEQ ID NO: 60466 - DNA, 25 bp, Homo sapien
agagtccgactacacccttgtaccc

SEQ ID NO: 60467 - DNA, 25 bp, Homo sapien
attgagtttcagtcccttttcgtct

SEQ ID NO: 60468 - DNA, 25 bp, Homo sapien
attgagtttcagacccttttcgtct

SEQ ID NO: 60469 - DNA, 25 bp, Homo sapien
agtaactaagggaaccgtaagtcta

SEQ ID NO: 60470 - DNA, 25 bp, Homo sapien
agtaactaagggtaccgtaagtcta

SEQ ID NO: 60471 - DNA, 25 bp, Homo sapien
ccatggtcgacgtccacggcagttg

SEQ ID NO: 60472 - DNA, 25 bp, Homo sapien
ccatggtcgacgaccacggcagttg

SEQ ID NO: 60473 - DNA, 25 bp, Homo sapien
ccttagagatactccacggagtttt

SEQ ID NO: 60474 - DNA, 25 bp, Homo sapien
ccttagagatacaccacggagtttt

SEQ ID NO: 60475 - DNA, 25 bp, Homo sapien
ctacaagaacgacacacgaaacttg

SEQ ID NO: 60476 - DNA, 25 bp, Homo sapien
ctacaagaacgagacacgaaacttg

SEQ ID NO: 60477 - DNA, 25 bp, Homo sapien
acctcgtcgggacaaacagaatttc

SEQ ID NO: 60478 - DNA, 25 bp, Homo sapien
acctcgtcgggagaaacagaatttc

SEQ ID NO: 60479 - DNA, 25 bp, Homo sapien
catgcgggtgccaagaccctttacg

SEQ ID NO: 60480 - DNA, 25 bp, Homo sapien
catgcgggtgcctagaccctttacg

SEQ ID NO: 60481 - DNA, 25 bp, Homo sapien
gacgactggcccttataacccttat

SEQ ID NO: 60482 - DNA, 25 bp, Homo sapien
gacgactggcccatataacccttat

SEQ ID NO: 60483 - DNA, 25 bp, Homo sapien
cgaagggttctcatacgtaccccac

SEQ ID NO: 60484 - DNA, 25 bp, Homo sapien
cgaagggttctcttacgtaccccac

SEQ ID NO: 60485 - DNA, 25 bp, Homo sapien
cgaagatagtgtctggtcagtggtc

SEQ ID NO: 60486 - DNA, 25 bp, Homo sapien
cgaagatagtgtgtggtcagtggtc

SEQ ID NO: 60487 - DNA, 25 bp, Homo sapien
taacgaagaactgtatttctgccac

SEQ ID NO: 60488 - DNA, 25 bp, Homo sapien
taacgaagaactctatttctgccac

SEQ ID NO: 60489 - DNA, 25 bp, Homo sapien
ggtccaaaattactgttcagtcaac

SEQ ID NO: 60490 - DNA, 25 bp, Homo sapien
ggtccaaaattagtgttcagtcaac

SEQ ID NO: 60491 - DNA, 25 bp, Homo sapien
gtccaaaaggtcctctcttaggtga

SEQ ID NO: 60492 - DNA, 25 bp, Homo sapien
gtccaaaaggtcgtctcttaggtga

SEQ ID NO: 60493 - DNA, 25 bp, Homo sapien
gtctcagtctcacttgtccttggga

SEQ ID NO: 60494 - DNA, 25 bp, Homo sapien
gtctcagtctcagttgtccttggga

SEQ ID NO: 60495 - DNA, 25 bp, Homo sapien
tcactttttcgctctcctgtgtcgg

SEQ ID NO: 60496 - DNA, 25 bp, Homo sapien
tcactttttcgcactcctgtgtcgg

SEQ ID NO: 60497 - DNA, 25 bp, Homo sapien
gtcgacattttctcccttgtgtctc

SEQ ID NO: 60498 - DNA, 25 bp, Homo sapien
gtcgacattttcacccttgtgtctc

SEQ ID NO: 60499 - DNA, 25 bp, Homo sapien
gagccctttgtctagacccttgcac

SEQ ID NO: 60500 - DNA, 25 bp, Homo sapien
gagccctttgtcaagacccttgcac

SEQ ID NO: 60501 - DNA, 25 bp, Homo sapien
cgcgtccgctcgaggctctggtcta

SEQ ID NO: 60502 - DNA, 25 bp, Homo sapien
cgcgtccgctcgtggctctggtcta

SEQ ID NO: 60503 - DNA, 25 bp, Homo sapien
cgacccgactactgggtcgaaggaa

SEQ ID NO: 60504 - DNA, 25 bp, Homo sapien
cgacccgactacagggtcgaaggaa

SEQ ID NO: 60505 - DNA, 25 bp, Homo sapien
gtatttacccgagagtcctaagaat

SEQ ID NO: 60506 - DNA, 25 bp, Homo sapien
gtatttacccgacagtcctaagaat

SEQ ID NO: 60507 - DNA, 25 bp, Homo sapien
gtaaagccgtagtcaggacaatggt

SEQ ID NO: 60508 - DNA, 25 bp, Homo sapien
gtaaagccgtagacaggacaatggt

SEQ ID NO: 60509 - DNA, 25 bp, Homo sapien
cggtgaggcatgtcaacaaacttag

SEQ ID NO: 60510 - DNA, 25 bp, Homo sapien
cggtgaggcatgacaacaaacttag

SEQ ID NO: 60511 - DNA, 25 bp, Homo sapien
tcgttgagacatttaagaacccttt

SEQ ID NO: 60512 - DNA, 25 bp, Homo sapien
tcgttgagacatataagaacccttt

SEQ ID NO: 60513 - DNA, 25 bp, Homo sapien
tgtgagaaggctagacaaccctgat

SEQ ID NO: 60514 - DNA, 25 bp, Homo sapien
tgtgagaaggcttgacaaccctgat

SEQ ID NO: 60515 - DNA, 25 bp, Homo sapien
taggaagcgtccagaccccacaggt

SEQ ID NO: 60516 - DNA, 25 bp, Homo sapien
taggaagcgtcctgaccccacaggt

SEQ ID NO: 60517 - DNA, 25 bp, Homo sapien
gtgagaatagtggtaatccacctga

SEQ ID NO: 60518 - DNA, 25 bp, Homo sapien
gtgagaatagtgctaatccacctga

SEQ ID NO: 60519 - DNA, 25 bp, Homo sapien
taaaccgagtgacgatcttctgtca

SEQ ID NO: 60520 - DNA, 25 bp, Homo sapien
taaaccgagtgaggatcttctgtca

SEQ ID NO: 60521 - DNA, 25 bp, Homo sapien
tcccctctacgtcgttgttctttcg

SEQ ID NO: 60522 - DNA, 25 bp, Homo sapien
tcccctctacgtggttgttctttcg

SEQ ID NO: 60523 - DNA, 25 bp, Homo sapien
ccgactctctctgtgtgtgtcttta

SEQ ID NO: 60524 - DNA, 25 bp, Homo sapien
ccgactctctctctgtgtgtcttta

SEQ ID NO: 60525 - DNA, 25 bp, Homo sapien
cgagtaacatcgatgtttcagttat

SEQ ID NO: 60526 - DNA, 25 bp, Homo sapien
cgagtaacatcgttgtttcagttat

SEQ ID NO: 60527 - DNA, 25 bp, Homo sapien
tactacgactgttatctgtcattag

SEQ ID NO: 60528 - DNA, 25 bp, Homo sapien
tactacgactgtaatctgtcattag

SEQ ID NO: 60529 - DNA, 25 bp, Homo sapien
atgtcttgacttttcgtcagattgt

SEQ ID NO: 60530 - DNA, 25 bp, Homo sapien
atgtcttgacttatcgtcagattgt

SEQ ID NO: 60531 - DNA, 25 bp, Homo sapien
gtacgttgagttctgttgctcgtcg

SEQ ID NO: 60532 - DNA, 25 bp, Homo sapien
gtacgttgagttgtgttgctcgtcg

SEQ ID NO: 60533 - DNA, 25 bp, Homo sapien
tcccagtgttttacggtcgggccac

SEQ ID NO: 60534 - DNA, 25 bp, Homo sapien
tcccagtgtttttcggtcgggccac

SEQ ID NO: 60535 - DNA, 25 bp, Homo sapien
ccaaggtctcttgttcggtacccct

SEQ ID NO: 60536 - DNA, 25 bp, Homo sapien
ccaaggtctcttcttcggtacccct

SEQ ID NO: 60537 - DNA, 25 bp, Homo sapien
gcataggctcccaagttggagctcc

SEQ ID NO: 60538 - DNA, 25 bp, Homo sapien
gcataggctccctagttggagctcc

SEQ ID NO: 60539 - DNA, 25 bp, Homo sapien
acgtcccgcctgtcgtggtcgaggt

SEQ ID NO: 60540 - DNA, 25 bp, Homo sapien
acgtcccgcctgacgtggtcgaggt

SEQ ID NO: 60541 - DNA, 25 bp, Homo sapien
aaagccagtggagacgcctgcgagt

SEQ ID NO: 60542 - DNA, 25 bp, Homo sapien
aaagccagtggacacgcctgcgagt

SEQ ID NO: 60543 - DNA, 25 bp, Homo sapien
aagtcgaggccgtcctgtaacggag

SEQ ID NO: 60544 - DNA, 25 bp, Homo sapien
aagtcgaggccgacctgtaacggag

SEQ ID NO: 60545 - DNA, 25 bp, Homo sapien
taacctttttattcactcactgagt

SEQ ID NO: 60546 - DNA, 25 bp, Homo sapien
taacctttttatacactcactgagt

SEQ ID NO: 60547 - DNA, 25 bp, Homo sapien
cgttgtctcattcaactgagatcgt

SEQ ID NO: 60548 - DNA, 25 bp, Homo sapien
cgttgtctcattgaactgagatcgt

SEQ ID NO: 60549 - DNA, 25 bp, Homo sapien
agcggctacagatcattctagactc

SEQ ID NO: 60550 - DNA, 25 bp, Homo sapien
agcggctacagaacattctagactc

SEQ ID NO: 60551 - DNA, 25 bp, Homo sapien
aagtgtcggtcagaaggtctccacc

SEQ ID NO: 60552 - DNA, 25 bp, Homo sapien
aagtgtcggtcacaaggtctccacc

SEQ ID NO: 60553 - DNA, 25 bp, Homo sapien
agatccatgttacattggtccctac

SEQ ID NO: 60554 - DNA, 25 bp, Homo sapien
agatccatgttagattggtccctac

SEQ ID NO: 60555 - DNA, 25 bp, Homo sapien
gagatcttaatctcaattcaggtcc

SEQ ID NO: 60556 - DNA, 25 bp, Homo sapien
gagatcttaatcacaattcaggtcc

SEQ ID NO: 60557 - DNA, 25 bp, Homo sapien
cgacaagaactcttaattcaagtca

SEQ ID NO: 60558 - DNA, 25 bp, Homo sapien
cgacaagaactcataattcaagtca

SEQ ID NO: 60559 - DNA, 25 bp, Homo sapien
gagaacaatgatcattacacagttt

SEQ ID NO: 60560 - DNA, 25 bp, Homo sapien
gagaacaatgatgattacacagttt

SEQ ID NO: 60561 - DNA, 25 bp, Homo sapien
tgaataaacattaatcctaggtctg

SEQ ID NO: 60562 - DNA, 25 bp, Homo sapien
tgaataaacatttatcctaggtctg

SEQ ID NO: 60563 - DNA, 25 bp, Homo sapien
tatcaaaaattccacgccggtctgt

SEQ ID NO: 60564 - DNA, 25 bp, Homo sapien
tatcaaaaattcgacgccggtctgt

SEQ ID NO: 60565 - DNA, 25 bp, Homo sapien
tataaagttgtatttcaggggtatt

SEQ ID NO: 60566 - DNA, 25 bp, Homo sapien
tataaagttgtaattcaggggtatt

SEQ ID NO: 60567 - DNA, 25 bp, Homo sapien
tataaggtcatcactgaatgtctac

SEQ ID NO: 60568 - DNA, 25 bp, Homo sapien
tataaggtcatctctgaatgtctac

SEQ ID NO: 60569 - DNA, 25 bp, Homo sapien
agaattttcatttcagagaaccgat

SEQ ID NO: 60570 - DNA, 25 bp, Homo sapien
agaattttcattacagagaaccgat

SEQ ID NO: 60571 - DNA, 25 bp, Homo sapien
gtacattattgactccaaatccggt

SEQ ID NO: 60572 - DNA, 25 bp, Homo sapien
gtacattattgagtccaaatccggt

SEQ ID NO: 60573 - DNA, 25 bp, Homo sapien
gtcaagtttcgagtgaaaatactcc

SEQ ID NO: 60574 - DNA, 25 bp, Homo sapien
gtcaagtttcgactgaaaatactcc

SEQ ID NO: 60575 - DNA, 25 bp, Homo sapien
tagaaatttgatcagtcttttgtcc

SEQ ID NO: 60576 - DNA, 25 bp, Homo sapien
tagaaatttgatgagtcttttgtcc

SEQ ID NO: 60577 - DNA, 25 bp, Homo sapien
tcgtatgtatgttttacttgcctaa

SEQ ID NO: 60578 - DNA, 25 bp, Homo sapien
tcgtatgtatgtattacttgcctaa

SEQ ID NO: 60579 - DNA, 25 bp, Homo sapien
gtcagtttggcgttattttcaccaa

SEQ ID NO: 60580 - DNA, 25 bp, Homo sapien
gtcagtttggcgatattttcaccaa

SEQ ID NO: 60581 - DNA, 25 bp, Homo sapien
cagtaatcggtgactttgttctgaa

SEQ ID NO: 60582 - DNA, 25 bp, Homo sapien
cagtaatcggtgtctttgttctgaa

SEQ ID NO: 60583 - DNA, 25 bp, Homo sapien
ccgaacaagaggtacccaacttcaa

SEQ ID NO: 60584 - DNA, 25 bp, Homo sapien
ccgaacaagaggaacccaacttcaa

SEQ ID NO: 60585 - DNA, 25 bp, Homo sapien
ttcttaaagattctccaagtgttta

SEQ ID NO: 60586 - DNA, 25 bp, Homo sapien
ttcttaaagattgtccaagtgttta

SEQ ID NO: 60587 - DNA, 25 bp, Homo sapien
acagacgattcttccgatcttcgtt

SEQ ID NO: 60588 - DNA, 25 bp, Homo sapien
acagacgattctaccgatcttcgtt

SEQ ID NO: 60589 - DNA, 25 bp, Homo sapien
cacgggaggtctatcatcttctact

SEQ ID NO: 60590 - DNA, 25 bp, Homo sapien
cacgggaggtctttcatcttctact

SEQ ID NO: 60591 - DNA, 25 bp, Homo sapien
cttgtctgagtcgtcccaccgtctt

SEQ ID NO: 60592 - DNA, 25 bp, Homo sapien
cttgtctgagtcctcccaccgtctt

SEQ ID NO: 60593 - DNA, 25 bp, Homo sapien
gaggtgttacttctgccagagtcac

SEQ ID NO: 60594 - DNA, 25 bp, Homo sapien
gaggtgttacttgtgccagagtcac

SEQ ID NO: 60595 - DNA, 25 bp, Homo sapien
gcgcgtgtgcttgtcggacagctcc

SEQ ID NO: 60596 - DNA, 25 bp, Homo sapien
gcgcgtgtgcttctcggacagctcc

SEQ ID NO: 60597 - DNA, 25 bp, Homo sapien
tccgttaggttctcgcgcgccttcg

SEQ ID NO: 60598 - DNA, 25 bp, Homo sapien
tccgttaggttcacgcgcgccttcg

SEQ ID NO: 60599 - DNA, 25 bp, Homo sapien
tctccgaggagaacggcgccggtac

SEQ ID NO: 60600 - DNA, 25 bp, Homo sapien
tctccgaggagatcggcgccggtac

SEQ ID NO: 60601 - DNA, 25 bp, Homo sapien
tattcatcggggtttaagtcgtcgt

SEQ ID NO: 60602 - DNA, 25 bp, Homo sapien
tattcatcggggattaagtcgtcgt

SEQ ID NO: 60603 - DNA, 25 bp, Homo sapien
tttacagttgagactcaatagtacg

SEQ ID NO: 60604 - DNA, 25 bp, Homo sapien
tttacagttgagtctcaatagtacg

SEQ ID NO: 60605 - DNA, 25 bp, Homo sapien
agtttagtgtcctccgtcactaagg

SEQ ID NO: 60606 - DNA, 25 bp, Homo sapien
agtttagtgtccaccgtcactaagg

SEQ ID NO: 60607 - DNA, 25 bp, Homo sapien
gtcggtagttcctgaaccaaagact

SEQ ID NO: 60608 - DNA, 25 bp, Homo sapien
gtcggtagttccagaaccaaagact

SEQ ID NO: 60609 - DNA, 25 bp, Homo sapien
ggtgactcccaatccgactccgact

SEQ ID NO: 60610 - DNA, 25 bp, Homo sapien
ggtgactcccaaaccgactccgact

SEQ ID NO: 60611 - DNA, 25 bp, Homo sapien
gaggtccgactccaaacgaacagga

SEQ ID NO: 60612 - DNA, 25 bp, Homo sapien
gaggtccgactcgaaacgaacagga

SEQ ID NO: 60613 - DNA, 25 bp, Homo sapien
cgtttaaccgacacaaaacgaggtg

SEQ ID NO: 60614 - DNA, 25 bp, Homo sapien
cgtttaaccgactcaaaacgaggtg

SEQ ID NO: 60615 - DNA, 25 bp, Homo sapien
tgttagacagagtacttgtaaatcc

SEQ ID NO: 60616 - DNA, 25 bp, Homo sapien
tgttagacagagaacttgtaaatcc

SEQ ID NO: 60617 - DNA, 25 bp, Homo sapien
gtggtcccgatacatgtgccagtcc

SEQ ID NO: 60618 - DNA, 25 bp, Homo sapien
gtggtcccgatagatgtgccagtcc

SEQ ID NO: 60619 - DNA, 25 bp, Homo sapien
cgtcccggagaagacgactctatgc

SEQ ID NO: 60620 - DNA, 25 bp, Homo sapien
cgtcccggagaacacgactctatgc

SEQ ID NO: 60621 - DNA, 25 bp, Homo sapien
agggacggaccatttccgtagttct

SEQ ID NO: 60622 - DNA, 25 bp, Homo sapien
agggacggaccaattccgtagttct

SEQ ID NO: 60623 - DNA, 25 bp, Homo sapien
agaggacgtccgataccaagtagta

SEQ ID NO: 60624 - DNA, 25 bp, Homo sapien
agaggacgtccgttaccaagtagta

SEQ ID NO: 60625 - DNA, 25 bp, Homo sapien
tggtcggtagtgcatacgaagcaga

SEQ ID NO: 60626 - DNA, 25 bp, Homo sapien
tggtcggtagtggatacgaagcaga

SEQ ID NO: 60627 - DNA, 25 bp, Homo sapien
tgtagcatcgactgaacaaatgtat

SEQ ID NO: 60628 - DNA, 25 bp, Homo sapien
tgtagcatcgacagaacaaatgtat

SEQ ID NO: 60629 - DNA, 25 bp, Homo sapien
tcttgggaagacatagtctccatca

SEQ ID NO: 60630 - DNA, 25 bp, Homo sapien
tcttgggaagacttagtctccatca

SEQ ID NO: 60631 - DNA, 25 bp, Homo sapien
ttgtgtgacagttatgtttctaaaa

SEQ ID NO: 60632 - DNA, 25 bp, Homo sapien
ttgtgtgacagtaatgtttctaaaa

SEQ ID NO: 60633 - DNA, 25 bp, Homo sapien
cgtatatctaatcgttctaaagagt

SEQ ID NO: 60634 - DNA, 25 bp, Homo sapien
cgtatatctaatggttctaaagagt

SEQ ID NO: 60635 - DNA, 25 bp, Homo sapien
tcaacatatccatgggtgtcaacat

SEQ ID NO: 60636 - DNA, 25 bp, Homo sapien
tcaacatatccaagggtgtcaacat

SEQ ID NO: 60637 - DNA, 25 bp, Homo sapien
gacttcaacagtgagaccactatac

SEQ ID NO: 60638 - DNA, 25 bp, Homo sapien
gacttcaacagtcagaccactatac

SEQ ID NO: 60639 - DNA, 25 bp, Homo sapien
acagtcgacgaatcgacgagtagac

SEQ ID NO: 60640 - DNA, 25 bp, Homo sapien
acagtcgacgaaacgacgagtagac

SEQ ID NO: 60641 - DNA, 25 bp, Homo sapien
taaaggactctgaacgaccggagag

SEQ ID NO: 60642 - DNA, 25 bp, Homo sapien
taaaggactctgtacgaccggagag

SEQ ID NO: 60643 - DNA, 25 bp, Homo sapien
caaatgttacaagtgacatcaggac

SEQ ID NO: 60644 - DNA, 25 bp, Homo sapien
caaatgttacaactgacatcaggac

SEQ ID NO: 60645 - DNA, 25 bp, Homo sapien
caaaagatcggaactcaacccctgt

SEQ ID NO: 60646 - DNA, 25 bp, Homo sapien
caaaagatcggatctcaacccctgt

SEQ ID NO: 60647 - DNA, 25 bp, Homo sapien
ttgagacgtactacggaacttcctt

SEQ ID NO: 60648 - DNA, 25 bp, Homo sapien
ttgagacgtacttcggaacttcctt

SEQ ID NO: 60649 - DNA, 25 bp, Homo sapien
tccatggtcgatttccccgttcctt

SEQ ID NO: 60650 - DNA, 25 bp, Homo sapien
tccatggtcgatatccccgttcctt

SEQ ID NO: 60651 - DNA, 25 bp, Homo sapien
accagagtggcacagccgacaacca

SEQ ID NO: 60652 - DNA, 25 bp, Homo sapien
accagagtggcagagccgacaacca

SEQ ID NO: 60653 - DNA, 25 bp, Homo sapien
cctgtaaaccgaaggccaaacacac

SEQ ID NO: 60654 - DNA, 25 bp, Homo sapien
cctgtaaaccgatggccaaacacac

SEQ ID NO: 60655 - DNA, 25 bp, Homo sapien
ccgcagagcttattgcaagagattc

SEQ ID NO: 60656 - DNA, 25 bp, Homo sapien
ccgcagagcttaatgcaagagattc

SEQ ID NO: 60657 - DNA, 25 bp, Homo sapien
tccgaggacccggtgcgagaagttc

SEQ ID NO: 60658 - DNA, 25 bp, Homo sapien
tccgaggacccgctgcgagaagttc

SEQ ID NO: 60659 - DNA, 25 bp, Homo sapien
cacagtgacgccacgtcagagaatc

SEQ ID NO: 60660 - DNA, 25 bp, Homo sapien
cacagtgacgcctcgtcagagaatc

SEQ ID NO: 60661 - DNA, 25 bp, Homo sapien
ccgagtccggcctgtcgaggtcttt

SEQ ID NO: 60662 - DNA, 25 bp, Homo sapien
ccgagtccggccagtcgaggtcttt

SEQ ID NO: 60663 - DNA, 25 bp, Homo sapien
cgtcactggggcagtgacatattct

SEQ ID NO: 60664 - DNA, 25 bp, Homo sapien
cgtcactggggctgtgacatattct

SEQ ID NO: 60665 - DNA, 25 bp, Homo sapien
tacttcggtgcactgtcacatattt

SEQ ID NO: 60666 - DNA, 25 bp, Homo sapien
tacttcggtgcagtgtcacatattt

SEQ ID NO: 60667 - DNA, 25 bp, Homo sapien
tcagttacgtcaaccggaattacct

SEQ ID NO: 60668 - DNA, 25 bp, Homo sapien
tcagttacgtcatccggaattacct

SEQ ID NO: 60669 - DNA, 25 bp, Homo sapien
cccagtaagtccccgtaattatacc

SEQ ID NO: 60670 - DNA, 25 bp, Homo sapien
cccagtaagtccgcgtaattatacc

SEQ ID NO: 60671 - DNA, 25 bp, Homo sapien
ccgagacgagagtcccctgggttcc

SEQ ID NO: 60672 - DNA, 25 bp, Homo sapien
ccgagacgagagacccctgggttcc

SEQ ID NO: 60673 - DNA, 25 bp, Homo sapien
tacaaagatcgaccactcggataca

SEQ ID NO: 60674 - DNA, 25 bp, Homo sapien
tacaaagatcgagcactcggataca

SEQ ID NO: 60675 - DNA, 25 bp, Homo sapien
ttctgaccggattacctacccgaaa

SEQ ID NO: 60676 - DNA, 25 bp, Homo sapien
ttctgaccggataacctacccgaaa

SEQ ID NO: 60677 - DNA, 25 bp, Homo sapien
tcttgggccggacgtccccgtgaaa

SEQ ID NO: 60678 - DNA, 25 bp, Homo sapien
tcttgggccggaggtccccgtgaaa

SEQ ID NO: 60679 - DNA, 25 bp, Homo sapien
agtaaaactccgagtactcgttctc

SEQ ID NO: 60680 - DNA, 25 bp, Homo sapien
agtaaaactccgtgtactcgttctc

SEQ ID NO: 60681 - DNA, 25 bp, Homo sapien
gcgcccagcgcgggaagtacttcta

SEQ ID NO: 60682 - DNA, 25 bp, Homo sapien
gcgcccagcgcgcgaagtacttcta

SEQ ID NO: 60683 - DNA, 25 bp, Homo sapien
ccgtagccacggtgcgtagaagtac

SEQ ID NO: 60684 - DNA, 25 bp, Homo sapien
ccgtagccacggagcgtagaagtac

SEQ ID NO: 60685 - DNA, 25 bp, Homo sapien
ttagacacgacatcactttcacggt

SEQ ID NO: 60686 - DNA, 25 bp, Homo sapien
ttagacacgacaacactttcacggt

SEQ ID NO: 60687 - DNA, 25 bp, Homo sapien
tcctcatcggcatcgacggaagaga

SEQ ID NO: 60688 - DNA, 25 bp, Homo sapien
tcctcatcggcaacgacggaagaga

SEQ ID NO: 60689 - DNA, 25 bp, Homo sapien
cctcttgtgtgttgccggagtctgt

SEQ ID NO: 60690 - DNA, 25 bp, Homo sapien
cctcttgtgtgtagccggagtctgt

SEQ ID NO: 60691 - DNA, 25 bp, Homo sapien
ctgtcgtcggtcgtaccggatcgtg

SEQ ID NO: 60692 - DNA, 25 bp, Homo sapien
ctgtcgtcggtcctaccggatcgtg

SEQ ID NO: 60693 - DNA, 25 bp, Homo sapien
acgcgggtcctatcccgtacatcgg

SEQ ID NO: 60694 - DNA, 25 bp, Homo sapien
acgcgggtcctaacccgtacatcgg

SEQ ID NO: 60695 - DNA, 25 bp, Homo sapien
aacgactcggtgtatacccctggtg

SEQ ID NO: 60696 - DNA, 25 bp, Homo sapien
aacgactcggtgaatacccctggtg

SEQ ID NO: 60697 - DNA, 25 bp, Homo sapien
ctacacaagtcacactgttcttcgg

SEQ ID NO: 60698 - DNA, 25 bp, Homo sapien
ctacacaagtcagactgttcttcgg

SEQ ID NO: 60699 - DNA, 25 bp, Homo sapien
tccgaaagagtcaaacttcattgtg

SEQ ID NO: 60700 - DNA, 25 bp, Homo sapien
tccgaaagagtctaacttcattgtg

SEQ ID NO: 60701 - DNA, 25 bp, Homo sapien
ccgtcaagagacgatccgtaatttg

SEQ ID NO: 60702 - DNA, 25 bp, Homo sapien
ccgtcaagagaccatccgtaatttg

SEQ ID NO: 60703 - DNA, 25 bp, Homo sapien
gtcacagagaccatgacttatctca

SEQ ID NO: 60704 - DNA, 25 bp, Homo sapien
gtcacagagaccttgacttatctca

SEQ ID NO: 60705 - DNA, 25 bp, Homo sapien
catagactacgactctcatgtcgta

SEQ ID NO: 60706 - DNA, 25 bp, Homo sapien
catagactacgagtctcatgtcgta

SEQ ID NO: 60707 - DNA, 25 bp, Homo sapien
ggaccgataaaatgtctatattcat

SEQ ID NO: 60708 - DNA, 25 bp, Homo sapien
ggaccgataaaaagtctatattcat

SEQ ID NO: 60709 - DNA, 25 bp, Homo sapien
ccatggtacgattctgttgtagtgt

SEQ ID NO: 60710 - DNA, 25 bp, Homo sapien
ccatggtacgatactgttgtagtgt

SEQ ID NO: 60711 - DNA, 25 bp, Homo sapien
cgagaggtctcgaaccctccagtcg

SEQ ID NO: 60712 - DNA, 25 bp, Homo sapien
cgagaggtctcgtaccctccagtcg

SEQ ID NO: 60713 - DNA, 25 bp, Homo sapien
acatgtcacctcagtggacctctcg

SEQ ID NO: 60714 - DNA, 25 bp, Homo sapien
acatgtcacctctgtggacctctcg

SEQ ID NO: 60715 - DNA, 25 bp, Homo sapien
ccagacgtccgcagagagattcttt

SEQ ID NO: 60716 - DNA, 25 bp, Homo sapien
ccagacgtccgctgagagattcttt

SEQ ID NO: 60717 - DNA, 25 bp, Homo sapien
gtccgaactaagataccagtttcca

SEQ ID NO: 60718 - DNA, 25 bp, Homo sapien
gtccgaactaagttaccagtttcca

SEQ ID NO: 60719 - DNA, 25 bp, Homo sapien
caagtaaggagaatagtactacctt

SEQ ID NO: 60720 - DNA, 25 bp, Homo sapien
caagtaaggagattagtactacctt

SEQ ID NO: 60721 - DNA, 25 bp, Homo sapien
gagactataggtttacttcgtccgc

SEQ ID NO: 60722 - DNA, 25 bp, Homo sapien
gagactataggtatacttcgtccgc

SEQ ID NO: 60723 - DNA, 25 bp, Homo sapien
agaggatcgttggagggtttcctac

SEQ ID NO: 60724 - DNA, 25 bp, Homo sapien
agaggatcgttgcagggtttcctac

SEQ ID NO: 60725 - DNA, 25 bp, Homo sapien
gacgagtctgtgtgggagtctccca

SEQ ID NO: 60726 - DNA, 25 bp, Homo sapien
gacgagtctgtgagggagtctccca

SEQ ID NO: 60727 - DNA, 25 bp, Homo sapien
agaagagataggaggtcagcccgcc

SEQ ID NO: 60728 - DNA, 25 bp, Homo sapien
agaagagataggtggtcagcccgcc

SEQ ID NO: 60729 - DNA, 25 bp, Homo sapien
gaaaagatttgacacgatatcgcct

SEQ ID NO: 60730 - DNA, 25 bp, Homo sapien
gaaaagatttgagacgatatcgcct

SEQ ID NO: 60731 - DNA, 25 bp, Homo sapien
ggaaaaagagtttctgtagccgctc

SEQ ID NO: 60732 - DNA, 25 bp, Homo sapien
ggaaaaagagttactgtagccgctc

SEQ ID NO: 60733 - DNA, 25 bp, Homo sapien
aggacatgtttagatgtagccgcta

SEQ ID NO: 60734 - DNA, 25 bp, Homo sapien
aggacatgtttacatgtagccgcta

SEQ ID NO: 60735 - DNA, 25 bp, Homo sapien
gtcgatttctttatagtcttacgga

SEQ ID NO: 60736 - DNA, 25 bp, Homo sapien
gtcgatttctttttagtcttacgga

SEQ ID NO: 60737 - DNA, 25 bp, Homo sapien
catgtaatacttgtgttacacgaag

SEQ ID NO: 60738 - DNA, 25 bp, Homo sapien
catgtaatacttctgttacacgaag

SEQ ID NO: 60739 - DNA, 25 bp, Homo sapien
cagttagttccagttagactagtaa

SEQ ID NO: 60740 - DNA, 25 bp, Homo sapien
cagttagttccacttagactagtaa

SEQ ID NO: 60741 - DNA, 25 bp, Homo sapien
gcgtatttcacgaacttgtctcggc

SEQ ID NO: 60742 - DNA, 25 bp, Homo sapien
gcgtatttcacgtacttgtctcggc

SEQ ID NO: 60743 - DNA, 25 bp, Homo sapien
gacctacattcacttttaccggtgt

SEQ ID NO: 60744 - DNA, 25 bp, Homo sapien
gacctacattcagttttaccggtgt

SEQ ID NO: 60745 - DNA, 25 bp, Homo sapien
ctcggtactccttcggttaccggtg

SEQ ID NO: 60746 - DNA, 25 bp, Homo sapien
ctcggtactcctacggttaccggtg

SEQ ID NO: 60747 - DNA, 25 bp, Homo sapien
tctcgaacaacaactgctaccagag

SEQ ID NO: 60748 - DNA, 25 bp, Homo sapien
tctcgaacaacatctgctaccagag

SEQ ID NO: 60749 - DNA, 25 bp, Homo sapien
tctccacgaacttctcgaaccgaag

SEQ ID NO: 60750 - DNA, 25 bp, Homo sapien
tctccacgaactactcgaaccgaag

SEQ ID NO: 60751 - DNA, 25 bp, Homo sapien
tgtcctaaagaatcgtagtctccag

SEQ ID NO: 60752 - DNA, 25 bp, Homo sapien
tgtcctaaagaaacgtagtctccag

SEQ ID NO: 60753 - DNA, 25 bp, Homo sapien
agaacttaaggtaacgttctcgagg

SEQ ID NO: 60754 - DNA, 25 bp, Homo sapien
agaacttaaggttacgttctcgagg

SEQ ID NO: 60755 - DNA, 25 bp, Homo sapien
ggtcgagttcgatgtttgtactttc

SEQ ID NO: 60756 - DNA, 25 bp, Homo sapien
ggtcgagttcgaagtttgtactttc

SEQ ID NO: 60757 - DNA, 25 bp, Homo sapien
gagtcgatccgttgttcttctccga

SEQ ID NO: 60758 - DNA, 25 bp, Homo sapien
gagtcgatccgtagttcttctccga

SEQ ID NO: 60759 - DNA, 25 bp, Homo sapien
gagtgtctttgtgtccgttccacga

SEQ ID NO: 60760 - DNA, 25 bp, Homo sapien
gagtgtctttgtctccgttccacga

SEQ ID NO: 60761 - DNA, 25 bp, Homo sapien
gtaaacgatttgtctagtccacaca

SEQ ID NO: 60762 - DNA, 25 bp, Homo sapien
gtaaacgatttgactagtccacaca

SEQ ID NO: 60763 - DNA, 25 bp, Homo sapien
gtttacgtgactccttttttgcaag

SEQ ID NO: 60764 - DNA, 25 bp, Homo sapien
gtttacgtgactgcttttttgcaag

SEQ ID NO: 60765 - DNA, 25 bp, Homo sapien
tgataccctggtcgattctacggaa

SEQ ID NO: 60766 - DNA, 25 bp, Homo sapien
tgataccctggtggattctacggaa

SEQ ID NO: 60767 - DNA, 25 bp, Homo sapien
tgaccacctacaggagttttctgaa

SEQ ID NO: 60768 - DNA, 25 bp, Homo sapien
tgaccacctacacgagttttctgaa

SEQ ID NO: 60769 - DNA, 25 bp, Homo sapien
acgtggttacataggtattcacaga

SEQ ID NO: 60770 - DNA, 25 bp, Homo sapien
acgtggttacattggtattcacaga

SEQ ID NO: 60771 - DNA, 25 bp, Homo sapien
agggggcactgtcacttgaaccgac

SEQ ID NO: 60772 - DNA, 25 bp, Homo sapien
agggggcactgtgacttgaaccgac

SEQ ID NO: 60773 - DNA, 25 bp, Homo sapien
aaggggactgatctatgacacacgc

SEQ ID NO: 60774 - DNA, 25 bp, Homo sapien
aaggggactgatgtatgacacacgc

SEQ ID NO: 60775 - DNA, 25 bp, Homo sapien
gagagagagttctccgtctaccagt

SEQ ID NO: 60776 - DNA, 25 bp, Homo sapien
gagagagagttcaccgtctaccagt

SEQ ID NO: 60777 - DNA, 25 bp, Homo sapien
gttggaagtggctgcgcaccgtcca

SEQ ID NO: 60778 - DNA, 25 bp, Homo sapien
gttggaagtggcagcgcaccgtcca

SEQ ID NO: 60779 - DNA, 25 bp, Homo sapien
tcacaggaacgtcacaccaccagag

SEQ ID NO: 60780 - DNA, 25 bp, Homo sapien
tcacaggaacgtgacaccaccagag

SEQ ID NO: 60781 - DNA, 25 bp, Homo sapien
gacagtcagaaaggaacctacgact

SEQ ID NO: 60782 - DNA, 25 bp, Homo sapien
gacagtcagaaacgaacctacgact

SEQ ID NO: 60783 - DNA, 25 bp, Homo sapien
aatgagacgaacagagaccacacgt

SEQ ID NO: 60784 - DNA, 25 bp, Homo sapien
aatgagacgaactgagaccacacgt

SEQ ID NO: 60785 - DNA, 25 bp, Homo sapien
gtaataagaattctttggaccctct

SEQ ID NO: 60786 - DNA, 25 bp, Homo sapien
gtaataagaattgtttggaccctct

SEQ ID NO: 60787 - DNA, 25 bp, Homo sapien
ctgtaagaaatgaactttaccttgt

SEQ ID NO: 60788 - DNA, 25 bp, Homo sapien
ctgtaagaaatgtactttaccttgt

SEQ ID NO: 60789 - DNA, 25 bp, Homo sapien
tcttaaatacatacagtttttcgtg

SEQ ID NO: 60790 - DNA, 25 bp, Homo sapien
tcttaaatacattcagtttttcgtg

SEQ ID NO: 60791 - DNA, 25 bp, Homo sapien
tcacttacaaggtaccttattttat

SEQ ID NO: 60792 - DNA, 25 bp, Homo sapien
tcacttacaaggaaccttattttat

SEQ ID NO: 60793 - DNA, 25 bp, Homo sapien
cgaggacgctccacctgttgatgtg

SEQ ID NO: 60794 - DNA, 25 bp, Homo sapien
cgaggacgctcctcctgttgatgtg

SEQ ID NO: 60795 - DNA, 25 bp, Homo sapien
tggtccgtccttcatcgttatttat

SEQ ID NO: 60796 - DNA, 25 bp, Homo sapien
tggtccgtccttgatcgttatttat

SEQ ID NO: 60797 - DNA, 25 bp, Homo sapien
cgtgtcggtaatatacttacacctt

SEQ ID NO: 60798 - DNA, 25 bp, Homo sapien
cgtgtcggtaatttacttacacctt

SEQ ID NO: 60799 - DNA, 25 bp, Homo sapien
tccgttgacgagttcacataaccct

SEQ ID NO: 60800 - DNA, 25 bp, Homo sapien
tccgttgacgagatcacataaccct

SEQ ID NO: 60801 - DNA, 25 bp, Homo sapien
taaggtctgaggtcacaggtgtcta

SEQ ID NO: 60802 - DNA, 25 bp, Homo sapien
taaggtctgaggacacaggtgtcta

SEQ ID NO: 60803 - DNA, 25 bp, Homo sapien
acggacatggagtcgaccggagtca

SEQ ID NO: 60804 - DNA, 25 bp, Homo sapien
acggacatggagacgaccggagtca

SEQ ID NO: 60805 - DNA, 25 bp, Homo sapien
tcgtgacccaatttgttgtagtcta

SEQ ID NO: 60806 - DNA, 25 bp, Homo sapien
tcgtgacccaatatgttgtagtcta

SEQ ID NO: 60807 - DNA, 25 bp, Homo sapien
ccgtttccggacattgtggtatgta

SEQ ID NO: 60808 - DNA, 25 bp, Homo sapien
ccgtttccggactttgtggtatgta

SEQ ID NO: 60809 - DNA, 25 bp, Homo sapien
gtccttcgaaaagtcgagttcgact

SEQ ID NO: 60810 - DNA, 25 bp, Homo sapien
gtccttcgaaaactcgagttcgact

SEQ ID NO: 60811 - DNA, 25 bp, Homo sapien
ggtactctgaaaactcgaacactat

SEQ ID NO: 60812 - DNA, 25 bp, Homo sapien
ggtactctgaaatctcgaacactat

SEQ ID NO: 60813 - DNA, 25 bp, Homo sapien
ggacttcagagttcggtaccactct

SEQ ID NO: 60814 - DNA, 25 bp, Homo sapien
ggacttcagagtacggtaccactct

SEQ ID NO: 60815 - DNA, 25 bp, Homo sapien
atgttagtttactgtacagtggcac

SEQ ID NO: 60816 - DNA, 25 bp, Homo sapien
atgttagtttacagtacagtggcac

SEQ ID NO: 60817 - DNA, 25 bp, Homo sapien
tagttactcttgagagtcgacgaac

SEQ ID NO: 60818 - DNA, 25 bp, Homo sapien
tagttactcttgtgagtcgacgaac

SEQ ID NO: 60819 - DNA, 25 bp, Homo sapien
atgttacgtcgttcctgatccacag

SEQ ID NO: 60820 - DNA, 25 bp, Homo sapien
atgttacgtcgtacctgatccacag

SEQ ID NO: 60821 - DNA, 25 bp, Homo sapien
cgtcgtcgggtcgaggtctcactgt

SEQ ID NO: 60822 - DNA, 25 bp, Homo sapien
cgtcgtcgggtccaggtctcactgt

SEQ ID NO: 60823 - DNA, 25 bp, Homo sapien
tttcgttgtcggtatgtatacttcg

SEQ ID NO: 60824 - DNA, 25 bp, Homo sapien
tttcgttgtcggaatgtatacttcg

SEQ ID NO: 60825 - DNA, 25 bp, Homo sapien
aatcttcggttgacatcatttacgt

SEQ ID NO: 60826 - DNA, 25 bp, Homo sapien
aatcttcggttgtcatcatttacgt

SEQ ID NO: 60827 - DNA, 25 bp, Homo sapien
gtctttggacgtttctttctgtgag

SEQ ID NO: 60828 - DNA, 25 bp, Homo sapien
gtctttggacgtatctttctgtgag

SEQ ID NO: 60829 - DNA, 25 bp, Homo sapien
gtctttaggacgtatcttccctaca

SEQ ID NO: 60830 - DNA, 25 bp, Homo sapien
gtctttaggacgaatcttccctaca

SEQ ID NO: 60831 - DNA, 25 bp, Homo sapien
gtttctgatctactatttcagtaag

SEQ ID NO: 60832 - DNA, 25 bp, Homo sapien
gtttctgatctagtatttcagtaag

SEQ ID NO: 60833 - DNA, 25 bp, Homo sapien
ttgtacattaccatgttagacttag

SEQ ID NO: 60834 - DNA, 25 bp, Homo sapien
ttgtacattaccttgttagacttag

SEQ ID NO: 60835 - DNA, 25 bp, Homo sapien
ttactccgtagattcctaagttgtt

SEQ ID NO: 60836 - DNA, 25 bp, Homo sapien
ttactccgtagaatcctaagttgtt

SEQ ID NO: 60837 - DNA, 25 bp, Homo sapien
tattgtcgttatatctgtagtgtta

SEQ ID NO: 60838 - DNA, 25 bp, Homo sapien
tattgtcgttatttctgtagtgtta

SEQ ID NO: 60839 - DNA, 25 bp, Homo sapien
gagtcgtttaatccataagttgact

SEQ ID NO: 60840 - DNA, 25 bp, Homo sapien
gagtcgtttaatgcataagttgact

SEQ ID NO: 60841 - DNA, 25 bp, Homo sapien
gtactgttaaccagatcagaagtgt

SEQ ID NO: 60842 - DNA, 25 bp, Homo sapien
gtactgttaacctgatcagaagtgt

SEQ ID NO: 60843 - DNA, 25 bp, Homo sapien
ttgtgtccttcgaccccgaggatcg

SEQ ID NO: 60844 - DNA, 25 bp, Homo sapien
ttgtgtccttcgtccccgaggatcg

SEQ ID NO: 60845 - DNA, 25 bp, Homo sapien
cggacccggtgcactcggagacgac

SEQ ID NO: 60846 - DNA, 25 bp, Homo sapien
cggacccggtgctctcggagacgac

SEQ ID NO: 60847 - DNA, 25 bp, Homo sapien
gactgcctcgacgaccaagacgacg

SEQ ID NO: 60848 - DNA, 25 bp, Homo sapien
gactgcctcgaccaccaagacgacg

SEQ ID NO: 60849 - DNA, 25 bp, Homo sapien
tgcgtccggtcgtccttacgatagt

SEQ ID NO: 60850 - DNA, 25 bp, Homo sapien
tgcgtccggtcgaccttacgatagt

SEQ ID NO: 60851 - DNA, 25 bp, Homo sapien
ggtgtcaccggtgtcgattgtagta

SEQ ID NO: 60852 - DNA, 25 bp, Homo sapien
ggtgtcaccggtctcgattgtagta

SEQ ID NO: 60853 - DNA, 25 bp, Homo sapien
cgtcaccgaggagtcgtctctgtga

SEQ ID NO: 60854 - DNA, 25 bp, Homo sapien
cgtcaccgaggactcgtctctgtga

SEQ ID NO: 60855 - DNA, 25 bp, Homo sapien
ccctaccagaggtcgtctatctaca

SEQ ID NO: 60856 - DNA, 25 bp, Homo sapien
ccctaccagaggacgtctatctaca

SEQ ID NO: 60857 - DNA, 25 bp, Homo sapien
gaccctaccacagacgtccctctcc

SEQ ID NO: 60858 - DNA, 25 bp, Homo sapien
gaccctaccacacacgtccctctcc

SEQ ID NO: 60859 - DNA, 25 bp, Homo sapien
ctctcgtcacagacgcggatatcac

SEQ ID NO: 60860 - DNA, 25 bp, Homo sapien
ctctcgtcacagtcgcggatatcac

SEQ ID NO: 60861 - DNA, 25 bp, Homo sapien
aggggtccgaaaggtccaggtcttc

SEQ ID NO: 60862 - DNA, 25 bp, Homo sapien
aggggtccgaaacgtccaggtcttc

SEQ ID NO: 60863 - DNA, 25 bp, Homo sapien
gtactcgatcggtcgtggagtcaag

SEQ ID NO: 60864 - DNA, 25 bp, Homo sapien
gtactcgatcggacgtggagtcaag

SEQ ID NO: 60865 - DNA, 25 bp, Homo sapien
ctcccggtcggtgtcgtaccacagg

SEQ ID NO: 60866 - DNA, 25 bp, Homo sapien
ctcccggtcggtctcgtaccacagg

SEQ ID NO: 60867 - DNA, 25 bp, Homo sapien
tctgggatcgtcgtccgtcaacagg

SEQ ID NO: 60868 - DNA, 25 bp, Homo sapien
tctgggatcgtcctccgtcaacagg

SEQ ID NO: 60869 - DNA, 25 bp, Homo sapien
atcgtcccatctcgttacacaaagg

SEQ ID NO: 60870 - DNA, 25 bp, Homo sapien
atcgtcccatctggttacacaaagg

SEQ ID NO: 60871 - DNA, 25 bp, Homo sapien
tctctgtatttctgacagactataa

SEQ ID NO: 60872 - DNA, 25 bp, Homo sapien
tctctgtatttcagacagactataa

SEQ ID NO: 60873 - DNA, 25 bp, Homo sapien
agtcctgttagttggtccacagatc

SEQ ID NO: 60874 - DNA, 25 bp, Homo sapien
agtcctgttagtaggtccacagatc

SEQ ID NO: 60875 - DNA, 25 bp, Homo sapien
ggttatcgacgttctcgacactcta

SEQ ID NO: 60876 - DNA, 25 bp, Homo sapien
ggttatcgacgtactcgacactcta

SEQ ID NO: 60877 - DNA, 25 bp, Homo sapien
cgtggtgacgtaggtctgacatatg

SEQ ID NO: 60878 - DNA, 25 bp, Homo sapien
cgtggtgacgtacgtctgacatatg

SEQ ID NO: 60879 - DNA, 25 bp, Homo sapien
actggacgacacagctcttataggt

SEQ ID NO: 60880 - DNA, 25 bp, Homo sapien
actggacgacactgctcttataggt

SEQ ID NO: 60881 - DNA, 25 bp, Homo sapien
ttactgaatcttgattctaacgagt

SEQ ID NO: 60882 - DNA, 25 bp, Homo sapien
ttactgaatcttcattctaacgagt

SEQ ID NO: 60883 - DNA, 25 bp, Homo sapien
tatagagtcattaactatcgtgaac

SEQ ID NO: 60884 - DNA, 25 bp, Homo sapien
tatagagtcatttactatcgtgaac

SEQ ID NO: 60885 - DNA, 25 bp, Homo sapien
taacttttcgtacctgtcgtactcg

SEQ ID NO: 60886 - DNA, 25 bp, Homo sapien
taacttttcgtagctgtcgtactcg

SEQ ID NO: 60887 - DNA, 25 bp, Homo sapien
tcagttcgtccttctactagactag

SEQ ID NO: 60888 - DNA, 25 bp, Homo sapien
tcagttcgtcctactactagactag

SEQ ID NO: 60889 - DNA, 25 bp, Homo sapien
aacccgaactagtatcccgacgaag

SEQ ID NO: 60890 - DNA, 25 bp, Homo sapien
aacccgaactagaatcccgacgaag

SEQ ID NO: 60891 - DNA, 25 bp, Homo sapien
gaagagacagtctatctcccactaa

SEQ ID NO: 60892 - DNA, 25 bp, Homo sapien
gaagagacagtcaatctcccactaa

SEQ ID NO: 60893 - DNA, 25 bp, Homo sapien
agagagtaatgcttgtatccaaact

SEQ ID NO: 60894 - DNA, 25 bp, Homo sapien
agagagtaatgcatgtatccaaact

SEQ ID NO: 60895 - DNA, 25 bp, Homo sapien
atattagagtcaggtactcccacat

SEQ ID NO: 60896 - DNA, 25 bp, Homo sapien
atattagagtcacgtactcccacat

SEQ ID NO: 60897 - DNA, 25 bp, Homo sapien
tgtacaccgagtcctcctacgacgg

SEQ ID NO: 60898 - DNA, 25 bp, Homo sapien
tgtacaccgagtgctcctacgacgg

SEQ ID NO: 60899 - DNA, 25 bp, Homo sapien
tactcgtctgtgtcgccgtcttcga

SEQ ID NO: 60900 - DNA, 25 bp, Homo sapien
tactcgtctgtgacgccgtcttcga

SEQ ID NO: 60901 - DNA, 25 bp, Homo sapien
gatatccttgtgatcctatatatga

SEQ ID NO: 60902 - DNA, 25 bp, Homo sapien
gatatccttgtgttcctatatatga

SEQ ID NO: 60903 - DNA, 25 bp, Homo sapien
aaatgtaatctttcttcaggttctg

SEQ ID NO: 60904 - DNA, 25 bp, Homo sapien
aaatgtaatcttacttcaggttctg

SEQ ID NO: 60905 - DNA, 25 bp, Homo sapien
ccttagatgttaacgtttcaccaag

SEQ ID NO: 60906 - DNA, 25 bp, Homo sapien
ccttagatgttatcgtttcaccaag

SEQ ID NO: 60907 - DNA, 25 bp, Homo sapien
gtttgatgtatctttcgctcgtgat

SEQ ID NO: 60908 - DNA, 25 bp, Homo sapien
gtttgatgtatcattcgctcgtgat

SEQ ID NO: 60909 - DNA, 25 bp, Homo sapien
ggaagtgagaagatatttcttccct

SEQ ID NO: 60910 - DNA, 25 bp, Homo sapien
ggaagtgagaagttatttcttccct

SEQ ID NO: 60911 - DNA, 25 bp, Homo sapien
aagaccactgtttcgtctctccctg

SEQ ID NO: 60912 - DNA, 25 bp, Homo sapien
aagaccactgttacgtctctccctg

SEQ ID NO: 60913 - DNA, 25 bp, Homo sapien
gaagacaccttggtaccttcttcta

SEQ ID NO: 60914 - DNA, 25 bp, Homo sapien
gaagacaccttgctaccttcttcta

SEQ ID NO: 60915 - DNA, 25 bp, Homo sapien
acgtagacgtaagtttcgtctttac

SEQ ID NO: 60916 - DNA, 25 bp, Homo sapien
acgtagacgtaactttcgtctttac

SEQ ID NO: 60917 - DNA, 25 bp, Homo sapien
catcgtaggtgacacttcccctacg

SEQ ID NO: 60918 - DNA, 25 bp, Homo sapien
catcgtaggtgagacttcccctacg

SEQ ID NO: 60919 - DNA, 25 bp, Homo sapien
caacgtggtgtctaaaccgtcaacg

SEQ ID NO: 60920 - DNA, 25 bp, Homo sapien
caacgtggtgtcaaaaccgtcaacg

SEQ ID NO: 60921 - DNA, 25 bp, Homo sapien
ttaggtgtagttatcgtgtgcacac

SEQ ID NO: 60922 - DNA, 25 bp, Homo sapien
ttaggtgtagttttcgtgtgcacac

SEQ ID NO: 60923 - DNA, 25 bp, Homo sapien
gtctctgtcagttgttcactggcac

SEQ ID NO: 60924 - DNA, 25 bp, Homo sapien
gtctctgtcagtagttcactggcac

SEQ ID NO: 60925 - DNA, 25 bp, Homo sapien
ggaattccgtgacaatatttgttct

SEQ ID NO: 60926 - DNA, 25 bp, Homo sapien
ggaattccgtgagaatatttgttct

SEQ ID NO: 60927 - DNA, 25 bp, Homo sapien
acgtgtgggtctttgtaatctctta

SEQ ID NO: 60928 - DNA, 25 bp, Homo sapien
acgtgtgggtctatgtaatctctta

SEQ ID NO: 60929 - DNA, 25 bp, Homo sapien
tgacagtcgcagactaagtcgaggt

SEQ ID NO: 60930 - DNA, 25 bp, Homo sapien
tgacagtcgcagtctaagtcgaggt

SEQ ID NO: 60931 - DNA, 25 bp, Homo sapien
atagccgtcccaagtacggtaccgg

SEQ ID NO: 60932 - DNA, 25 bp, Homo sapien
atagccgtcccatgtacggtaccgg

SEQ ID NO: 60933 - DNA, 25 bp, Homo sapien
gaggtgaggttcaaggacaacgtca

SEQ ID NO: 60934 - DNA, 25 bp, Homo sapien
gaggtgaggttctaggacaacgtca

SEQ ID NO: 60935 - DNA, 25 bp, Homo sapien
gtgacggacgttgtcgactaattag

SEQ ID NO: 60936 - DNA, 25 bp, Homo sapien
gtgacggacgttctcgactaattag

SEQ ID NO: 60937 - DNA, 25 bp, Homo sapien
gtagtaaggactcaggtgtctattc

SEQ ID NO: 60938 - DNA, 25 bp, Homo sapien
gtagtaaggactgaggtgtctattc

SEQ ID NO: 60939 - DNA, 25 bp, Homo sapien
tctcgtgactaaagtcgtcgattct

SEQ ID NO: 60940 - DNA, 25 bp, Homo sapien
tctcgtgactaatgtcgtcgattct

SEQ ID NO: 60941 - DNA, 25 bp, Homo sapien
cctcgttactgagactaacagttcc

SEQ ID NO: 60942 - DNA, 25 bp, Homo sapien
cctcgttactgacactaacagttcc

SEQ ID NO: 60943 - DNA, 25 bp, Homo sapien
ccgttccgtctaccaaacgtttcgt

SEQ ID NO: 60944 - DNA, 25 bp, Homo sapien
ccgttccgtctagcaaacgtttcgt

SEQ ID NO: 60945 - DNA, 25 bp, Homo sapien
agtctcgtctaacatgactctcacg

SEQ ID NO: 60946 - DNA, 25 bp, Homo sapien
agtctcgtctaagatgactctcacg

SEQ ID NO: 60947 - DNA, 25 bp, Homo sapien
tctacttgtaaaggatgactcttgt

SEQ ID NO: 60948 - DNA, 25 bp, Homo sapien
tctacttgtaaacgatgactcttgt

SEQ ID NO: 60949 - DNA, 25 bp, Homo sapien
ctactgagacctaccgtgcgtgtcc

SEQ ID NO: 60950 - DNA, 25 bp, Homo sapien
ctactgagaccttccgtgcgtgtcc

SEQ ID NO: 60951 - DNA, 25 bp, Homo sapien
aatgagtgttgtcctgcctgtttcc

SEQ ID NO: 60952 - DNA, 25 bp, Homo sapien
aatgagtgttgtgctgcctgtttcc

SEQ ID NO: 60953 - DNA, 25 bp, Homo sapien
attggtgtatgagaactatatcctc

SEQ ID NO: 60954 - DNA, 25 bp, Homo sapien
attggtgtatgacaactatatcctc

SEQ ID NO: 60955 - DNA, 25 bp, Homo sapien
ctcctttaccacacagtattggtgt

SEQ ID NO: 60956 - DNA, 25 bp, Homo sapien
ctcctttaccactcagtattggtgt

SEQ ID NO: 60957 - DNA, 25 bp, Homo sapien
catgactacaccatcgagagggttt

SEQ ID NO: 60958 - DNA, 25 bp, Homo sapien
catgactacaccttcgagagggttt

SEQ ID NO: 60959 - DNA, 25 bp, Homo sapien
ttccggtgtgagacgacggtcgacc

SEQ ID NO: 60960 - DNA, 25 bp, Homo sapien
ttccggtgtgagtcgacggtcgacc

SEQ ID NO: 60961 - DNA, 25 bp, Homo sapien
taccggtggtcgtcgacgttgaacg

SEQ ID NO: 60962 - DNA, 25 bp, Homo sapien
taccggtggtcgacgacgttgaacg

SEQ ID NO: 60963 - DNA, 25 bp, Homo sapien
accacggtgcgtacgcgtcttgaag

SEQ ID NO: 60964 - DNA, 25 bp, Homo sapien
accacggtgcgttcgcgtcttgaag

SEQ ID NO: 60965 - DNA, 25 bp, Homo sapien
aacgaccgcgattttcctaaagagt

SEQ ID NO: 60966 - DNA, 25 bp, Homo sapien
aacgaccgcgatattcctaaagagt

SEQ ID NO: 60967 - DNA, 25 bp, Homo sapien
tacgtcgtcatatagtcactataag

SEQ ID NO: 60968 - DNA, 25 bp, Homo sapien
tacgtcgtcataaagtcactataag

SEQ ID NO: 60969 - DNA, 25 bp, Homo sapien
tcaagttgtttcagggaatctacgt

SEQ ID NO: 60970 - DNA, 25 bp, Homo sapien
tcaagttgtttctgggaatctacgt

SEQ ID NO: 60971 - DNA, 25 bp, Homo sapien
tcagggagtttcttggagactacag

SEQ ID NO: 60972 - DNA, 25 bp, Homo sapien
tcagggagtttcatggagactacag

SEQ ID NO: 60973 - DNA, 25 bp, Homo sapien
taacggacccttaggcgacacttat

SEQ ID NO: 60974 - DNA, 25 bp, Homo sapien
taacggaccctttggcgacacttat

SEQ ID NO: 60975 - DNA, 25 bp, Homo sapien
acgtgtacacaagaactcgacgaaa

SEQ ID NO: 60976 - DNA, 25 bp, Homo sapien
acgtgtacacaacaactcgacgaaa

SEQ ID NO: 60977 - DNA, 25 bp, Homo sapien
atctacgtacacaaaacaagaaata

SEQ ID NO: 60978 - DNA, 25 bp, Homo sapien
atctacgtacactaaacaagaaata

SEQ ID NO: 60979 - DNA, 25 bp, Homo sapien
gatttacatgaaagactcacataag

SEQ ID NO: 60980 - DNA, 25 bp, Homo sapien
gatttacatgaatgactcacataag

SEQ ID NO: 60981 - DNA, 25 bp, Homo sapien
gttcattagagaaatacgtcctttt

SEQ ID NO: 60982 - DNA, 25 bp, Homo sapien
gttcattagagatatacgtcctttt

SEQ ID NO: 60983 - DNA, 25 bp, Homo sapien
gcgaaagttcaattttacagtcttt

SEQ ID NO: 60984 - DNA, 25 bp, Homo sapien
gcgaaagttcaaatttacagtcttt

SEQ ID NO: 60985 - DNA, 25 bp, Homo sapien
gtccaagatgtcaccgaacagcgaa

SEQ ID NO: 60986 - DNA, 25 bp, Homo sapien
gtccaagatgtctccgaacagcgaa

SEQ ID NO: 60987 - DNA, 25 bp, Homo sapien
ttccgaggtgagtccatacttagaa

SEQ ID NO: 60988 - DNA, 25 bp, Homo sapien
ttccgaggtgagaccatacttagaa

SEQ ID NO: 60989 - DNA, 25 bp, Homo sapien
tatcttggaggaaggaccagacaga

SEQ ID NO: 60990 - DNA, 25 bp, Homo sapien
tatcttggaggatggaccagacaga

SEQ ID NO: 60991 - DNA, 25 bp, Homo sapien
tcggcggatgagagacaacgacaga

SEQ ID NO: 60992 - DNA, 25 bp, Homo sapien
tcggcggatgagtgacaacgacaga

SEQ ID NO: 60993 - DNA, 25 bp, Homo sapien
tccggggtgtcaacgtccccgacaa

SEQ ID NO: 60994 - DNA, 25 bp, Homo sapien
tccggggtgtcatcgtccccgacaa

SEQ ID NO: 60995 - DNA, 25 bp, Homo sapien
ggaaggtagcccagcggtcgctcac

SEQ ID NO: 60996 - DNA, 25 bp, Homo sapien
ggaaggtagccctgcggtcgctcac

SEQ ID NO: 60997 - DNA, 25 bp, Homo sapien
cagtgggagcacgtagaagagcacc

SEQ ID NO: 60998 - DNA, 25 bp, Homo sapien
cagtgggagcacctagaagagcacc

SEQ ID NO: 60999 - DNA, 25 bp, Homo sapien
gagaggagaaactaccactggacct

SEQ ID NO: 61000 - DNA, 25 bp, Homo sapien
gagaggagaaacaaccactggacct

SEQ ID NO: 61001 - DNA, 25 bp, Homo sapien
gcatgaccaacaacacctaggacct

SEQ ID NO: 61002 - DNA, 25 bp, Homo sapien
gcatgaccaacatcacctaggacct

SEQ ID NO: 61003 - DNA, 25 bp, Homo sapien
agtacgcaaatctctctggacgtag

SEQ ID NO: 61004 - DNA, 25 bp, Homo sapien
agtacgcaaatcactctggacgtag

SEQ ID NO: 61005 - DNA, 25 bp, Homo sapien
acagtttacgcctccattgtccgag

SEQ ID NO: 61006 - DNA, 25 bp, Homo sapien
acagtttacgccaccattgtccgag

SEQ ID NO: 61007 - DNA, 25 bp, Homo sapien
gagtattttccaaactttgtgacca

SEQ ID NO: 61008 - DNA, 25 bp, Homo sapien
gagtattttccatactttgtgacca

SEQ ID NO: 61009 - DNA, 25 bp, Homo sapien
ccctttgtcccgagaaagttctgtc

SEQ ID NO: 61010 - DNA, 25 bp, Homo sapien
ccctttgtcccgtgaaagttctgtc

SEQ ID NO: 61011 - DNA, 25 bp, Homo sapien
tcatggcctcggaaaagtttactac

SEQ ID NO: 61012 - DNA, 25 bp, Homo sapien
tcatggcctcggtaaagtttactac

SEQ ID NO: 61013 - DNA, 25 bp, Homo sapien
aaaaggatcccgtatacatgtttag

SEQ ID NO: 61014 - DNA, 25 bp, Homo sapien
aaaaggatcccgaatacatgtttag

SEQ ID NO: 61015 - DNA, 25 bp, Homo sapien
acgatgacccaaatgagtagttcac

SEQ ID NO: 61016 - DNA, 25 bp, Homo sapien
acgatgacccaattgagtagttcac

SEQ ID NO: 61017 - DNA, 25 bp, Homo sapien
gacttactccgaccactaaggagcc

SEQ ID NO: 61018 - DNA, 25 bp, Homo sapien
gacttactccgagcactaaggagcc

SEQ ID NO: 61019 - DNA, 25 bp, Homo sapien
taccaccgttacgatggcgaagtct

SEQ ID NO: 61020 - DNA, 25 bp, Homo sapien
taccaccgttaccatggcgaagtct

SEQ ID NO: 61021 - DNA, 25 bp, Homo sapien
caaagagttccgacggaggacgatc

SEQ ID NO: 61022 - DNA, 25 bp, Homo sapien
caaagagttccgtcggaggacgatc

SEQ ID NO: 61023 - DNA, 25 bp, Homo sapien
agtactagcccctgtggaacgacgg

SEQ ID NO: 61024 - DNA, 25 bp, Homo sapien
agtactagccccagtggaacgacgg

SEQ ID NO: 61025 - DNA, 25 bp, Homo sapien
taacatgttcgttaaacaggcacaa

SEQ ID NO: 61026 - DNA, 25 bp, Homo sapien
taacatgttcgtaaaacaggcacaa

SEQ ID NO: 61027 - DNA, 25 bp, Homo sapien
ctgttgtctttcgtcgacactaggt

SEQ ID NO: 61028 - DNA, 25 bp, Homo sapien
ctgttgtctttcctcgacactaggt

SEQ ID NO: 61029 - DNA, 25 bp, Homo sapien
cgaggagcatcgaggcgtcctacca

SEQ ID NO: 61030 - DNA, 25 bp, Homo sapien
cgaggagcatcgtggcgtcctacca

SEQ ID NO: 61031 - DNA, 25 bp, Homo sapien
actgagcagtcgtggccgactctcc

SEQ ID NO: 61032 - DNA, 25 bp, Homo sapien
actgagcagtcgaggccgactctcc

SEQ ID NO: 61033 - DNA, 25 bp, Homo sapien
agcacggcttaaaaactcccgagac

SEQ ID NO: 61034 - DNA, 25 bp, Homo sapien
agcacggcttaataactcccgagac

SEQ ID NO: 61035 - DNA, 25 bp, Homo sapien
attcgtcaggacactcaccgcgtac

SEQ ID NO: 61036 - DNA, 25 bp, Homo sapien
attcgtcaggactctcaccgcgtac

SEQ ID NO: 61037 - DNA, 25 bp, Homo sapien
ccttgtaagtcacgtgtactgaccc

SEQ ID NO: 61038 - DNA, 25 bp, Homo sapien
ccttgtaagtcaggtgtactgaccc

SEQ ID NO: 61039 - DNA, 25 bp, Homo sapien
ggttgggagttgactttcgtccgta

SEQ ID NO: 61040 - DNA, 25 bp, Homo sapien
ggttgggagttgtctttcgtccgta

SEQ ID NO: 61041 - DNA, 25 bp, Homo sapien
aagatgggagtgtcgtttccctagg

SEQ ID NO: 61042 - DNA, 25 bp, Homo sapien
aagatgggagtgacgtttccctagg

SEQ ID NO: 61043 - DNA, 25 bp, Homo sapien
ggggtcctttagtaggacccatgag

SEQ ID NO: 61044 - DNA, 25 bp, Homo sapien
ggggtcctttagaaggacccatgag

SEQ ID NO: 61045 - DNA, 25 bp, Homo sapien
aaccacccttttagggtccatgacg

SEQ ID NO: 61046 - DNA, 25 bp, Homo sapien
aaccaccctttttgggtccatgacg

SEQ ID NO: 61047 - DNA, 25 bp, Homo sapien
aactctttgtggaagaagtccaata

SEQ ID NO: 61048 - DNA, 25 bp, Homo sapien
aactctttgtggtagaagtccaata

SEQ ID NO: 61049 - DNA, 25 bp, Homo sapien
tgtcctttttctcagtaaaacatga

SEQ ID NO: 61050 - DNA, 25 bp, Homo sapien
tgtcctttttctgagtaaaacatga

SEQ ID NO: 61051 - DNA, 25 bp, Homo sapien
gttatagtaatcagtaatccctgtt

SEQ ID NO: 61052 - DNA, 25 bp, Homo sapien
gttatagtaatctgtaatccctgtt

SEQ ID NO: 61053 - DNA, 25 bp, Homo sapien
tcttcgtgaaattcctgctcctgct

SEQ ID NO: 61054 - DNA, 25 bp, Homo sapien
tcttcgtgaaatacctgctcctgct

SEQ ID NO: 61055 - DNA, 25 bp, Homo sapien
tatatatacgaacatgacccggacg

SEQ ID NO: 61056 - DNA, 25 bp, Homo sapien
tatatatacgaagatgacccggacg

SEQ ID NO: 61057 - DNA, 25 bp, Homo sapien
tcgttagatttgtgtaatccctgtg

SEQ ID NO: 61058 - DNA, 25 bp, Homo sapien
tcgttagatttgagtaatccctgtg

SEQ ID NO: 61059 - DNA, 25 bp, Homo sapien
cgtaagtacttctgtttcattttgg

SEQ ID NO: 61060 - DNA, 25 bp, Homo sapien
cgtaagtacttcagtttcattttgg

SEQ ID NO: 61061 - DNA, 25 bp, Homo sapien
cgtatcagggagagactccattccg

SEQ ID NO: 61062 - DNA, 25 bp, Homo sapien
cgtatcagggagtgactccattccg

SEQ ID NO: 61063 - DNA, 25 bp, Homo sapien
tgatcaccggggtctcttaggacac

SEQ ID NO: 61064 - DNA, 25 bp, Homo sapien
tgatcaccggggactcttaggacac

SEQ ID NO: 61065 - DNA, 25 bp, Homo sapien
gggttcctttacagtctttccgttt

SEQ ID NO: 61066 - DNA, 25 bp, Homo sapien
gggttcctttactgtctttccgttt

SEQ ID NO: 61067 - DNA, 25 bp, Homo sapien
ggttcgtttgtcgtcttacgttgaa

SEQ ID NO: 61068 - DNA, 25 bp, Homo sapien
ggttcgtttgtcctcttacgttgaa

SEQ ID NO: 61069 - DNA, 25 bp, Homo sapien
gccggatctcttgtcgtactgtaga

SEQ ID NO: 61070 - DNA, 25 bp, Homo sapien
gccggatctcttctcgtactgtaga

SEQ ID NO: 61071 - DNA, 25 bp, Homo sapien
ccgaagactccactagtccgtcgta

SEQ ID NO: 61072 - DNA, 25 bp, Homo sapien
ccgaagactccagtagtccgtcgta

SEQ ID NO: 61073 - DNA, 25 bp, Homo sapien
gtcccagacacttccgaagtggtca

SEQ ID NO: 61074 - DNA, 25 bp, Homo sapien
gtcccagacactaccgaagtggtca

SEQ ID NO: 61075 - DNA, 25 bp, Homo sapien
agtctttgacagacacactaagccc

SEQ ID NO: 61076 - DNA, 25 bp, Homo sapien
agtctttgacagtcacactaagccc

SEQ ID NO: 61077 - DNA, 25 bp, Homo sapien
acagatcatgggaccattcacgacc

SEQ ID NO: 61078 - DNA, 25 bp, Homo sapien
acagatcatgggtccattcacgacc

SEQ ID NO: 61079 - DNA, 25 bp, Homo sapien
aagatgacgggatttcccgaaacac

SEQ ID NO: 61080 - DNA, 25 bp, Homo sapien
aagatgacgggaattcccgaaacac

SEQ ID NO: 61081 - DNA, 25 bp, Homo sapien
gtaatgggttatacccctagtatta

SEQ ID NO: 61082 - DNA, 25 bp, Homo sapien
gtaatgggttattcccctagtatta

SEQ ID NO: 61083 - DNA, 25 bp, Homo sapien
ttatttggaatgtctctaagtcttc

SEQ ID NO: 61084 - DNA, 25 bp, Homo sapien
ttatttggaatgactctaagtcttc

SEQ ID NO: 61085 - DNA, 25 bp, Homo sapien
actgtgacccggtatactcctagta

SEQ ID NO: 61086 - DNA, 25 bp, Homo sapien
actgtgacccggaatactcctagta

SEQ ID NO: 61087 - DNA, 25 bp, Homo sapien
aataccgcgaaagacaggtcctaga

SEQ ID NO: 61088 - DNA, 25 bp, Homo sapien
aataccgcgaaacacaggtcctaga

SEQ ID NO: 61089 - DNA, 25 bp, Homo sapien
aaagtctacaaattcagtttctgag

SEQ ID NO: 61090 - DNA, 25 bp, Homo sapien
aaagtctacaaaatcagtttctgag

SEQ ID NO: 61091 - DNA, 25 bp, Homo sapien
caggtctagtgatattcctatcggc

SEQ ID NO: 61092 - DNA, 25 bp, Homo sapien
caggtctagtgaaattcctatcggc

SEQ ID NO: 61093 - DNA, 25 bp, Homo sapien
caggtcagagtaaaacccggtctcc

SEQ ID NO: 61094 - DNA, 25 bp, Homo sapien
caggtcagagtataacccggtctcc

SEQ ID NO: 61095 - DNA, 25 bp, Homo sapien
atccagtttaagtcccagtttctcg

SEQ ID NO: 61096 - DNA, 25 bp, Homo sapien
atccagtttaagacccagtttctcg

SEQ ID NO: 61097 - DNA, 25 bp, Homo sapien
aggtatacaggtccaagtatatccg

SEQ ID NO: 61098 - DNA, 25 bp, Homo sapien
aggtatacaggtgcaagtatatccg

SEQ ID NO: 61099 - DNA, 25 bp, Homo sapien
cccatgtgtcactccgtggaatatc

SEQ ID NO: 61100 - DNA, 25 bp, Homo sapien
cccatgtgtcacaccgtggaatatc

SEQ ID NO: 61101 - DNA, 25 bp, Homo sapien
acttcgagttactcccggacttaac

SEQ ID NO: 61102 - DNA, 25 bp, Homo sapien
acttcgagttacacccggacttaac

SEQ ID NO: 61103 - DNA, 25 bp, Homo sapien
tacaagaacgacacacgaaacttgt

SEQ ID NO: 61104 - DNA, 25 bp, Homo sapien
tacaagaacgactcacgaaacttgt

SEQ ID NO: 61105 - DNA, 25 bp, Homo sapien
actctcggagtgaaaaccaaaattc

SEQ ID NO: 61106 - DNA, 25 bp, Homo sapien
actctcggagtgtaaaccaaaattc

SEQ ID NO: 61107 - DNA, 25 bp, Homo sapien
aaggagaagaactgtcagactaccc

SEQ ID NO: 61108 - DNA, 25 bp, Homo sapien
aaggagaagaacagtcagactaccc

SEQ ID NO: 61109 - DNA, 25 bp, Homo sapien
ggaaggtacccctaacacgctctat

SEQ ID NO: 61110 - DNA, 25 bp, Homo sapien
ggaaggtaccccaaacacgctctat

SEQ ID NO: 61111 - DNA, 25 bp, Homo sapien
acgaagggttctcatacgtacccca

SEQ ID NO: 61112 - DNA, 25 bp, Homo sapien
acgaagggttctgatacgtacccca

SEQ ID NO: 61113 - DNA, 25 bp, Homo sapien
ggacaggagtgtctaacgcaggctc

SEQ ID NO: 61114 - DNA, 25 bp, Homo sapien
ggacaggagtgtgtaacgcaggctc

SEQ ID NO: 61115 - DNA, 25 bp, Homo sapien
accacagaacttggtttatgaccac

SEQ ID NO: 61116 - DNA, 25 bp, Homo sapien
accacagaacttcgtttatgaccac

SEQ ID NO: 61117 - DNA, 25 bp, Homo sapien
tggacaaaaattcttttgtacaacg

SEQ ID NO: 61118 - DNA, 25 bp, Homo sapien
tggacaaaaattgttttgtacaacg

SEQ ID NO: 61119 - DNA, 25 bp, Homo sapien
gtccaaatattccttctgagtgttt

SEQ ID NO: 61120 - DNA, 25 bp, Homo sapien
gtccaaatattcgttctgagtgttt

SEQ ID NO: 61121 - DNA, 25 bp, Homo sapien
ttcagccactctcatctttggtgat

SEQ ID NO: 61122 - DNA, 25 bp, Homo sapien
ttcagccactctgatctttggtgat

SEQ ID NO: 61123 - DNA, 25 bp, Homo sapien
cctaccttttcctcgtctactgggg

SEQ ID NO: 61124 - DNA, 25 bp, Homo sapien
cctaccttttccacgtctactgggg

SEQ ID NO: 61125 - DNA, 25 bp, Homo sapien
cgacctcctgtctccccgtggagtc

SEQ ID NO: 61126 - DNA, 25 bp, Homo sapien
cgacctcctgtcaccccgtggagtc

SEQ ID NO: 61127 - DNA, 25 bp, Homo sapien
cccttttcgatacgtcctctgtacc

SEQ ID NO: 61128 - DNA, 25 bp, Homo sapien
cccttttcgataggtcctctgtacc

SEQ ID NO: 61129 - DNA, 25 bp, Homo sapien
ctccgtccttcgaggcacgggtgcg

SEQ ID NO: 61130 - DNA, 25 bp, Homo sapien
ctccgtccttcgtggcacgggtgcg

SEQ ID NO: 61131 - DNA, 25 bp, Homo sapien
cgcccgagacctggtcagagacgga

SEQ ID NO: 61132 - DNA, 25 bp, Homo sapien
cgcccgagacctcgtcagagacgga

SEQ ID NO: 61133 - DNA, 25 bp, Homo sapien
ctttaacgacatcgtcataagtgat

SEQ ID NO: 61134 - DNA, 25 bp, Homo sapien
ctttaacgacatggtcataagtgat

SEQ ID NO: 61135 - DNA, 25 bp, Homo sapien
gtcaggttcgagtgtgccaatagat

SEQ ID NO: 61136 - DNA, 25 bp, Homo sapien
gtcaggttcgagagtgccaatagat

SEQ ID NO: 61137 - DNA, 25 bp, Homo sapien
ggtcgggcatagactccataaggtg

SEQ ID NO: 61138 - DNA, 25 bp, Homo sapien
ggtcgggcatagtctccataaggtg

SEQ ID NO: 61139 - DNA, 25 bp, Homo sapien
gttggcagtgttagacctacctctt

SEQ ID NO: 61140 - DNA, 25 bp, Homo sapien
gttggcagtgtttgacctacctctt

SEQ ID NO: 61141 - DNA, 25 bp, Homo sapien
gtgaaaggtttgacctccgtagtat

SEQ ID NO: 61142 - DNA, 25 bp, Homo sapien
gtgaaaggtttgtcctccgtagtat

SEQ ID NO: 61143 - DNA, 25 bp, Homo sapien
tggacaccgtcttgacctcccaggt

SEQ ID NO: 61144 - DNA, 25 bp, Homo sapien
tggacaccgtctagacctcccaggt

SEQ ID NO: 61145 - DNA, 25 bp, Homo sapien
gtgaacatttagatactatcccaga

SEQ ID NO: 61146 - DNA, 25 bp, Homo sapien
gtgaacatttagttactatcccaga

SEQ ID NO: 61147 - DNA, 25 bp, Homo sapien
aaacctctgagtcagtatccttgat

SEQ ID NO: 61148 - DNA, 25 bp, Homo sapien
aaacctctgagtgagtatccttgat

SEQ ID NO: 61149 - DNA, 25 bp, Homo sapien
tccccttagtagacgagttctttct

SEQ ID NO: 61150 - DNA, 25 bp, Homo sapien
tccccttagtagtcgagttctttct

SEQ ID NO: 61151 - DNA, 25 bp, Homo sapien
accgggtcttctggtgtggtctttg

SEQ ID NO: 61152 - DNA, 25 bp, Homo sapien
accgggtcttctcgtgtggtctttg

SEQ ID NO: 61153 - DNA, 25 bp, Homo sapien
ccgagtacccacagtgttattgtta

SEQ ID NO: 61154 - DNA, 25 bp, Homo sapien
ccgagtacccactgtgttattgtta

SEQ ID NO: 61155 - DNA, 25 bp, Homo sapien
gtatcactcgtttctactcatcgtg

SEQ ID NO: 61156 - DNA, 25 bp, Homo sapien
gtatcactcgttactactcatcgtg

SEQ ID NO: 61157 - DNA, 25 bp, Homo sapien
ggtttatgactttcctctgattcgt

SEQ ID NO: 61158 - DNA, 25 bp, Homo sapien
ggtttatgacttacctctgattcgt

SEQ ID NO: 61159 - DNA, 25 bp, Homo sapien
cggacatggttgtgtctgatgtcgt

SEQ ID NO: 61160 - DNA, 25 bp, Homo sapien
cggacatggttgagtctgatgtcgt

SEQ ID NO: 61161 - DNA, 25 bp, Homo sapien
ccgctgcttcataggtcgggtcccg

SEQ ID NO: 61162 - DNA, 25 bp, Homo sapien
ccgctgcttcattggtcgggtcccg

SEQ ID NO: 61163 - DNA, 25 bp, Homo sapien
tccaaggtctcttgttcggtacccc

SEQ ID NO: 61164 - DNA, 25 bp, Homo sapien
tccaaggtctctagttcggtacccc

SEQ ID NO: 61165 - DNA, 25 bp, Homo sapien
ttcgaaacttccaagttcggtcccc

SEQ ID NO: 61166 - DNA, 25 bp, Homo sapien
ttcgaaacttcctagttcggtcccc

SEQ ID NO: 61167 - DNA, 25 bp, Homo sapien
gactccggcctgtcggacgtaggtt

SEQ ID NO: 61168 - DNA, 25 bp, Homo sapien
gactccggcctgacggacgtaggtt

SEQ ID NO: 61169 - DNA, 25 bp, Homo sapien
atctcagtcgggacggacgtctggt

SEQ ID NO: 61170 - DNA, 25 bp, Homo sapien
atctcagtcgggtcggacgtctggt

SEQ ID NO: 61171 - DNA, 25 bp, Homo sapien
tcgtagatcggttcctagtaagagg

SEQ ID NO: 61172 - DNA, 25 bp, Homo sapien
tcgtagatcggtacctagtaagagg

SEQ ID NO: 61173 - DNA, 25 bp, Homo sapien
aactctttttgtcacataatacgag

SEQ ID NO: 61174 - DNA, 25 bp, Homo sapien
aactctttttgtgacataatacgag

SEQ ID NO: 61175 - DNA, 25 bp, Homo sapien
cgtctatctgagctgaactgaagta

SEQ ID NO: 61176 - DNA, 25 bp, Homo sapien
cgtctatctgaggtgaactgaagta

SEQ ID NO: 61177 - DNA, 25 bp, Homo sapien
ttctacacgagttacttcagtactc

SEQ ID NO: 61178 - DNA, 25 bp, Homo sapien
ttctacacgagtaacttcagtactc

SEQ ID NO: 61179 - DNA, 25 bp, Homo sapien
gctggtggtacagagaagttccatc

SEQ ID NO: 61180 - DNA, 25 bp, Homo sapien
gctggtggtacacagaagttccatc

SEQ ID NO: 61181 - DNA, 25 bp, Homo sapien
agagtcctttcacaaggttgacctc

SEQ ID NO: 61182 - DNA, 25 bp, Homo sapien
agagtcctttcagaaggttgacctc

SEQ ID NO: 61183 - DNA, 25 bp, Homo sapien
gaggttttattagacattttctacc

SEQ ID NO: 61184 - DNA, 25 bp, Homo sapien
gaggttttattacacattttctacc

SEQ ID NO: 61185 - DNA, 25 bp, Homo sapien
cagacgaactacaacatccatatcc

SEQ ID NO: 61186 - DNA, 25 bp, Homo sapien
cagacgaactactacatccatatcc

SEQ ID NO: 61187 - DNA, 25 bp, Homo sapien
cgagataaaacgacgattcaagttc

SEQ ID NO: 61188 - DNA, 25 bp, Homo sapien
cgagataaaacgtcgattcaagttc

SEQ ID NO: 61189 - DNA, 25 bp, Homo sapien
ttgaaatacaaggaatcctaggatc

SEQ ID NO: 61190 - DNA, 25 bp, Homo sapien
ttgaaatacaagcaatcctaggatc

SEQ ID NO: 61191 - DNA, 25 bp, Homo sapien
tagactaataaagtgagcccggttc

SEQ ID NO: 61192 - DNA, 25 bp, Homo sapien
tagactaataaactgagcccggttc

SEQ ID NO: 61193 - DNA, 25 bp, Homo sapien
ttacaaagttaatgccaagggtctt

SEQ ID NO: 61194 - DNA, 25 bp, Homo sapien
ttacaaagttaaagccaagggtctt

SEQ ID NO: 61195 - DNA, 25 bp, Homo sapien
ataaggtcatcactgaatgtctact

SEQ ID NO: 61196 - DNA, 25 bp, Homo sapien
ataaggtcatcagtgaatgtctact

SEQ ID NO: 61197 - DNA, 25 bp, Homo sapien
gaaattgttcacattccgaatggat

SEQ ID NO: 61198 - DNA, 25 bp, Homo sapien
gaaattgttcactttccgaatggat

SEQ ID NO: 61199 - DNA, 25 bp, Homo sapien
tgtaatcttttgtcctgaatccggt

SEQ ID NO: 61200 - DNA, 25 bp, Homo sapien
tgtaatcttttgacctgaatccggt

SEQ ID NO: 61201 - DNA, 25 bp, Homo sapien
gacaacgtttaagagtaccaaaccc

SEQ ID NO: 61202 - DNA, 25 bp, Homo sapien
gacaacgtttaacagtaccaaaccc

SEQ ID NO: 61203 - DNA, 25 bp, Homo sapien
agacaattctcacagttcttattgg

SEQ ID NO: 61204 - DNA, 25 bp, Homo sapien
agacaattctcagagttcttattgg

SEQ ID NO: 61205 - DNA, 25 bp, Homo sapien
aacgagtatttttttatgtgatcaa

SEQ ID NO: 61206 - DNA, 25 bp, Homo sapien
aacgagtattttattatgtgatcaa

SEQ ID NO: 61207 - DNA, 25 bp, Homo sapien
ggacgttttggaatttctgaccaat

SEQ ID NO: 61208 - DNA, 25 bp, Homo sapien
ggacgttttggattttctgaccaat

SEQ ID NO: 61209 - DNA, 25 bp, Homo sapien
agtacattggacattgtattcgcaa

SEQ ID NO: 61210 - DNA, 25 bp, Homo sapien
agtacattggactttgtattcgcaa

SEQ ID NO: 61211 - DNA, 25 bp, Homo sapien
cagaacaagggtctccagacctcaa

SEQ ID NO: 61212 - DNA, 25 bp, Homo sapien
cagaacaagggtgtccagacctcaa

SEQ ID NO: 61213 - DNA, 25 bp, Homo sapien
cttaagacgatgtgtcctgatttta

SEQ ID NO: 61214 - DNA, 25 bp, Homo sapien
cttaagacgatgagtcctgatttta

SEQ ID NO: 61215 - DNA, 25 bp, Homo sapien
agtgacgtcttcaccgatgttgtat

SEQ ID NO: 61216 - DNA, 25 bp, Homo sapien
agtgacgtcttctccgatgttgtat

SEQ ID NO: 61217 - DNA, 25 bp, Homo sapien
cacggaaagttttgtatcgttaact

SEQ ID NO: 61218 - DNA, 25 bp, Homo sapien
cacggaaagtttagtatcgttaact

SEQ ID NO: 61219 - DNA, 25 bp, Homo sapien
ctggtctgattttaactctgttcgt

SEQ ID NO: 61220 - DNA, 25 bp, Homo sapien
ctggtctgatttaaactctgttcgt

SEQ ID NO: 61221 - DNA, 25 bp, Homo sapien
tgaaggtctcttttgaccagagata

SEQ ID NO: 61222 - DNA, 25 bp, Homo sapien
tgaaggtctcttatgaccagagata

SEQ ID NO: 61223 - DNA, 25 bp, Homo sapien
gttcagtgtcttgtcggcaggtccg

SEQ ID NO: 61224 - DNA, 25 bp, Homo sapien
gttcagtgtcttctcggcaggtccg

SEQ ID NO: 61225 - DNA, 25 bp, Homo sapien
gtccgttaggttctcgcgcgccttc

SEQ ID NO: 61226 - DNA, 25 bp, Homo sapien
gtccgttaggttgtcgcgcgccttc

SEQ ID NO: 61227 - DNA, 25 bp, Homo sapien
gctacttcatggagcgcgtccggtc

SEQ ID NO: 61228 - DNA, 25 bp, Homo sapien
gctacttcatggtgcgcgtccggtc

SEQ ID NO: 61229 - DNA, 25 bp, Homo sapien
tttcatctgagtcctctccgtgtct

SEQ ID NO: 61230 - DNA, 25 bp, Homo sapien
tttcatctgagtgctctccgtgtct

SEQ ID NO: 61231 - DNA, 25 bp, Homo sapien
ttttaagtctgagactcctatgacg

SEQ ID NO: 61232 - DNA, 25 bp, Homo sapien
ttttaagtctgacactcctatgacg

SEQ ID NO: 61233 - DNA, 25 bp, Homo sapien
attcggtgtacctcgtcttctaagg

SEQ ID NO: 61234 - DNA, 25 bp, Homo sapien
attcggtgtaccacgtcttctaagg

SEQ ID NO: 61235 - DNA, 25 bp, Homo sapien
ctcgtggtctacaagaaccacaaac

SEQ ID NO: 61236 - DNA, 25 bp, Homo sapien
ctcgtggtctactagaaccacaaac

SEQ ID NO: 61237 - DNA, 25 bp, Homo sapien
gtcgtgaccgtcgattccgacaacc

SEQ ID NO: 61238 - DNA, 25 bp, Homo sapien
gtcgtgaccgtccattccgacaacc

SEQ ID NO: 61239 - DNA, 25 bp, Homo sapien
aggtccgactccaaacgaacaggac

SEQ ID NO: 61240 - DNA, 25 bp, Homo sapien
aggtccgactcctaacgaacaggac

SEQ ID NO: 61241 - DNA, 25 bp, Homo sapien
tagtatccgtacacaatacaaggtc

SEQ ID NO: 61242 - DNA, 25 bp, Homo sapien
tagtatccgtactcaatacaaggtc

SEQ ID NO: 61243 - DNA, 25 bp, Homo sapien
agtctgaggtacatgtacagagccg

SEQ ID NO: 61244 - DNA, 25 bp, Homo sapien
agtctgaggtacttgtacagagccg

SEQ ID NO: 61245 - DNA, 25 bp, Homo sapien
ggtccaccaaggtctgccgagtccg

SEQ ID NO: 61246 - DNA, 25 bp, Homo sapien
ggtccaccaaggactgccgagtccg

SEQ ID NO: 61247 - DNA, 25 bp, Homo sapien
atgccaccggaatacgagaccatgg

SEQ ID NO: 61248 - DNA, 25 bp, Homo sapien
atgccaccggaaaacgagaccatgg

SEQ ID NO: 61249 - DNA, 25 bp, Homo sapien
tgggaacggaaattctccgtttact

SEQ ID NO: 61250 - DNA, 25 bp, Homo sapien
tgggaacggaaaatctccgtttact

SEQ ID NO: 61251 - DNA, 25 bp, Homo sapien
gaagaggccacgattcgaaggtagt

SEQ ID NO: 61252 - DNA, 25 bp, Homo sapien
gaagaggccacgtttcgaaggtagt

SEQ ID NO: 61253 - DNA, 25 bp, Homo sapien
taagcgcgacgtcgttcgaagaaca

SEQ ID NO: 61254 - DNA, 25 bp, Homo sapien
taagcgcgacgtggttcgaagaaca

SEQ ID NO: 61255 - DNA, 25 bp, Homo sapien
gtcgcccgtcagtacaacacctagt

SEQ ID NO: 61256 - DNA, 25 bp, Homo sapien
gtcgcccgtcagaacaacacctagt

SEQ ID NO: 61257 - DNA, 25 bp, Homo sapien
ccataggaagacaagtcccgactcc

SEQ ID NO: 61258 - DNA, 25 bp, Homo sapien
ccataggaagactagtcccgactcc

SEQ ID NO: 61259 - DNA, 25 bp, Homo sapien
tttatgacaaacatgttcagtaatg

SEQ ID NO: 61260 - DNA, 25 bp, Homo sapien
tttatgacaaacttgttcagtaatg

SEQ ID NO: 61261 - DNA, 25 bp, Homo sapien
gttctgttcaaagtctctagaagat

SEQ ID NO: 61262 - DNA, 25 bp, Homo sapien
gttctgttcaaactctctagaagat

SEQ ID NO: 61263 - DNA, 25 bp, Homo sapien
ctaatgatcatattggtgtcaactt

SEQ ID NO: 61264 - DNA, 25 bp, Homo sapien
ctaatgatcataatggtgtcaactt

SEQ ID NO: 61265 - DNA, 25 bp, Homo sapien
gagatcgaacttaaacgcacactac

SEQ ID NO: 61266 - DNA, 25 bp, Homo sapien
gagatcgaactttaacgcacactac

SEQ ID NO: 61267 - DNA, 25 bp, Homo sapien
tcggtcgtacgtaaccacggtagac

SEQ ID NO: 61268 - DNA, 25 bp, Homo sapien
tcggtcgtacgttaccacggtagac

SEQ ID NO: 61269 - DNA, 25 bp, Homo sapien
aaccgtatctgtcagcacggagagt

SEQ ID NO: 61270 - DNA, 25 bp, Homo sapien
aaccgtatctgtgagcacggagagt

SEQ ID NO: 61271 - DNA, 25 bp, Homo sapien
ttaaaagttcaactgattcagagtc

SEQ ID NO: 61272 - DNA, 25 bp, Homo sapien
ttaaaagttcaagtgattcagagtc

SEQ ID NO: 61273 - DNA, 25 bp, Homo sapien
taaaaaggtccagaaactcaacgtg

SEQ ID NO: 61274 - DNA, 25 bp, Homo sapien
taaaaaggtccacaaactcaacgtg

SEQ ID NO: 61275 - DNA, 25 bp, Homo sapien
tgtaagtagaccacgaaaccccggt

SEQ ID NO: 61276 - DNA, 25 bp, Homo sapien
tgtaagtagacctcgaaaccccggt

SEQ ID NO: 61277 - DNA, 25 bp, Homo sapien
tccatgtgcactttgtcattccctt

SEQ ID NO: 61278 - DNA, 25 bp, Homo sapien
tccatgtgcactatgtcattccctt

SEQ ID NO: 61279 - DNA, 25 bp, Homo sapien
accaaggggaactgacgcatccctt

SEQ ID NO: 61280 - DNA, 25 bp, Homo sapien
accaaggggaacagacgcatccctt

SEQ ID NO: 61281 - DNA, 25 bp, Homo sapien
acctcaacaggaaggccctaacaac

SEQ ID NO: 61282 - DNA, 25 bp, Homo sapien
acctcaacaggatggccctaacaac

SEQ ID NO: 61283 - DNA, 25 bp, Homo sapien
cccgagtaataattgtccaaatgtg

SEQ ID NO: 61284 - DNA, 25 bp, Homo sapien
cccgagtaataaatgtccaaatgtg

SEQ ID NO: 61285 - DNA, 25 bp, Homo sapien
ccgacgtgccacgtgcgaaatagtg

SEQ ID NO: 61286 - DNA, 25 bp, Homo sapien
ccgacgtgccacctgcgaaatagtg

SEQ ID NO: 61287 - DNA, 25 bp, Homo sapien
agtgtcgctaccgtcgagagaatct

SEQ ID NO: 61288 - DNA, 25 bp, Homo sapien
agtgtcgctaccctcgagagaatct

SEQ ID NO: 61289 - DNA, 25 bp, Homo sapien
aacgtatcgggcttcgggtctctct

SEQ ID NO: 61290 - DNA, 25 bp, Homo sapien
aacgtatcgggcatcgggtctctct

SEQ ID NO: 61291 - DNA, 25 bp, Homo sapien
cgtaaccggggtagtatacatgttt

SEQ ID NO: 61292 - DNA, 25 bp, Homo sapien
cgtaaccggggttgtatacatgttt

SEQ ID NO: 61293 - DNA, 25 bp, Homo sapien
tacgtatctgaggaatgtgcatttc

SEQ ID NO: 61294 - DNA, 25 bp, Homo sapien
tacgtatctgagcaatgtgcatttc

SEQ ID NO: 61295 - DNA, 25 bp, Homo sapien
atcttatcgtaactcggaacttcac

SEQ ID NO: 61296 - DNA, 25 bp, Homo sapien
atcttatcgtaagtcggaacttcac

SEQ ID NO: 61297 - DNA, 25 bp, Homo sapien
ccaccctagtgtgtccgtattttcc

SEQ ID NO: 61298 - DNA, 25 bp, Homo sapien
ccaccctagtgtctccgtattttcc

SEQ ID NO: 61299 - DNA, 25 bp, Homo sapien
ccggtaccaggtcgtcctggggtcc

SEQ ID NO: 61300 - DNA, 25 bp, Homo sapien
ccggtaccaggtggtcctggggtcc

SEQ ID NO: 61301 - DNA, 25 bp, Homo sapien
gtcaatcaccgaccagaggatacac

SEQ ID NO: 61302 - DNA, 25 bp, Homo sapien
gtcaatcaccgagcagaggatacac

SEQ ID NO: 61303 - DNA, 25 bp, Homo sapien
tgttgaaggacttcgcaccttaaat

SEQ ID NO: 61304 - DNA, 25 bp, Homo sapien
tgttgaaggactacgcaccttaaat

SEQ ID NO: 61305 - DNA, 25 bp, Homo sapien
tagggctggaggaacctctgaagat

SEQ ID NO: 61306 - DNA, 25 bp, Homo sapien
tagggctggaggtacctctgaagat

SEQ ID NO: 61307 - DNA, 25 bp, Homo sapien
gagtcaagacccacgacgtctgtcc

SEQ ID NO: 61308 - DNA, 25 bp, Homo sapien
gagtcaagaccctcgacgtctgtcc

SEQ ID NO: 61309 - DNA, 25 bp, Homo sapien
agcgacgttgacgcttgcgcaatta

SEQ ID NO: 61310 - DNA, 25 bp, Homo sapien
agcgacgttgacccttgcgcaatta

SEQ ID NO: 61311 - DNA, 25 bp, Homo sapien
acggtgcgtagaagtacttcccgcg

SEQ ID NO: 61312 - DNA, 25 bp, Homo sapien
acggtgcgtagatgtacttcccgcg

SEQ ID NO: 61313 - DNA, 25 bp, Homo sapien
taaactacgacgtcgacattcagtt

SEQ ID NO: 61314 - DNA, 25 bp, Homo sapien
taaactacgacgacgacattcagtt

SEQ ID NO: 61315 - DNA, 25 bp, Homo sapien
ccagaacagacgtcgacctaaagat

SEQ ID NO: 61316 - DNA, 25 bp, Homo sapien
ccagaacagacgacgacctaaagat

SEQ ID NO: 61317 - DNA, 25 bp, Homo sapien
cctcttgggacgtgccgtcagttgt

SEQ ID NO: 61318 - DNA, 25 bp, Homo sapien
cctcttgggacgagccgtcagttgt

SEQ ID NO: 61319 - DNA, 25 bp, Homo sapien
ctttgggagtactccgagagtctgt

SEQ ID NO: 61320 - DNA, 25 bp, Homo sapien
ctttgggagtacaccgagagtctgt

SEQ ID NO: 61321 - DNA, 25 bp, Homo sapien
acgacgggacctccacctaagtcag

SEQ ID NO: 61322 - DNA, 25 bp, Homo sapien
acgacgggacctgcacctaagtcag

SEQ ID NO: 61323 - DNA, 25 bp, Homo sapien
gtaacatcgggcttagccgcaggtg

SEQ ID NO: 61324 - DNA, 25 bp, Homo sapien
gtaacatcgggcatagccgcaggtg

SEQ ID NO: 61325 - DNA, 25 bp, Homo sapien
atacaaagtcaaccagttttacgag

SEQ ID NO: 61326 - DNA, 25 bp, Homo sapien
atacaaagtcaagcagttttacgag

SEQ ID NO: 61327 - DNA, 25 bp, Homo sapien
cgacagagagtcataactttgttgg

SEQ ID NO: 61328 - DNA, 25 bp, Homo sapien
cgacagagagtcttaactttgttgg

SEQ ID NO: 61329 - DNA, 25 bp, Homo sapien
cgacaagaatagaacttacaacttg

SEQ ID NO: 61330 - DNA, 25 bp, Homo sapien
cgacaagaatagtacttacaacttg

SEQ ID NO: 61331 - DNA, 25 bp, Homo sapien
ggtccagacaccatagttttagtca

SEQ ID NO: 61332 - DNA, 25 bp, Homo sapien
ggtccagacaccttagttttagtca

SEQ ID NO: 61333 - DNA, 25 bp, Homo sapien
ccacaagaccggtttctgtagtcga

SEQ ID NO: 61334 - DNA, 25 bp, Homo sapien
ccacaagaccggattctgtagtcga

SEQ ID NO: 61335 - DNA, 25 bp, Homo sapien
aacatagaagacttcagtagtgtca

SEQ ID NO: 61336 - DNA, 25 bp, Homo sapien
aacatagaagacatcagtagtgtca

SEQ ID NO: 61337 - DNA, 25 bp, Homo sapien
cgtcatgaggtttcagtttacgagt

SEQ ID NO: 61338 - DNA, 25 bp, Homo sapien
cgtcatgaggttacagtttacgagt

SEQ ID NO: 61339 - DNA, 25 bp, Homo sapien
ggtcgagactcgaaaccgtccagtg

SEQ ID NO: 61340 - DNA, 25 bp, Homo sapien
ggtcgagactcgtaaccgtccagtg

SEQ ID NO: 61341 - DNA, 25 bp, Homo sapien
acgatgaatcgtagaggactcttac

SEQ ID NO: 61342 - DNA, 25 bp, Homo sapien
acgatgaatcgttgaggactcttac

SEQ ID NO: 61343 - DNA, 25 bp, Homo sapien
cgaagtaccgtgtaggaactctcta

SEQ ID NO: 61344 - DNA, 25 bp, Homo sapien
cgaagtaccgtgaaggaactctcta

SEQ ID NO: 61345 - DNA, 25 bp, Homo sapien
agaagagacgtaaccagtcgttcca

SEQ ID NO: 61346 - DNA, 25 bp, Homo sapien
agaagagacgtatccagtcgttcca

SEQ ID NO: 61347 - DNA, 25 bp, Homo sapien
acaagagggagaagacgaccgacat

SEQ ID NO: 61348 - DNA, 25 bp, Homo sapien
acaagagggagatgacgaccgacat

SEQ ID NO: 61349 - DNA, 25 bp, Homo sapien
gacacttaggtcttaggtctccacg

SEQ ID NO: 61350 - DNA, 25 bp, Homo sapien
gacacttaggtcataggtctccacg

SEQ ID NO: 61351 - DNA, 25 bp, Homo sapien
cgaggatacttgtaaattactccga

SEQ ID NO: 61352 - DNA, 25 bp, Homo sapien
cgaggatacttgaaaattactccga

SEQ ID NO: 61353 - DNA, 25 bp, Homo sapien
gtggtactagtgtcggggtccccta

SEQ ID NO: 61354 - DNA, 25 bp, Homo sapien
gtggtactagtgacggggtccccta

SEQ ID NO: 61355 - DNA, 25 bp, Homo sapien
tgagagagaaggaatgggacacccc

SEQ ID NO: 61356 - DNA, 25 bp, Homo sapien
tgagagagaaggtatgggacacccc

SEQ ID NO: 61357 - DNA, 25 bp, Homo sapien
gtaaaagaggtttatgtcacttgcc

SEQ ID NO: 61358 - DNA, 25 bp, Homo sapien
gtaaaagaggttaatgtcacttgcc

SEQ ID NO: 61359 - DNA, 25 bp, Homo sapien
ttgaaaggggttttgtagactcgcc

SEQ ID NO: 61360 - DNA, 25 bp, Homo sapien
ttgaaaggggttatgtagactcgcc

SEQ ID NO: 61361 - DNA, 25 bp, Homo sapien
tacagtgttttgatgtgctacgcct

SEQ ID NO: 61362 - DNA, 25 bp, Homo sapien
tacagtgttttgttgtgctacgcct

SEQ ID NO: 61363 - DNA, 25 bp, Homo sapien
ttgatatcctttatgtcttcgaggt

SEQ ID NO: 61364 - DNA, 25 bp, Homo sapien
ttgatatcctttttgtcttcgaggt

SEQ ID NO: 61365 - DNA, 25 bp, Homo sapien
ctatgtttcatagtgtttcgtacag

SEQ ID NO: 61366 - DNA, 25 bp, Homo sapien
ctatgtttcatactgtttcgtacag

SEQ ID NO: 61367 - DNA, 25 bp, Homo sapien
cactggttcctagtgatatatacag

SEQ ID NO: 61368 - DNA, 25 bp, Homo sapien
cactggttcctactgatatatacag

SEQ ID NO: 61369 - DNA, 25 bp, Homo sapien
tgacttgttccgaatgactcctgcg

SEQ ID NO: 61370 - DNA, 25 bp, Homo sapien
tgacttgttccgtatgactcctgcg

SEQ ID NO: 61371 - DNA, 25 bp, Homo sapien
cgacctacattcacttttaccggtg

SEQ ID NO: 61372 - DNA, 25 bp, Homo sapien
cgacctacattctcttttaccggtg

SEQ ID NO: 61373 - DNA, 25 bp, Homo sapien
ctttcttacccttgcgttccgcgtg

SEQ ID NO: 61374 - DNA, 25 bp, Homo sapien
ctttcttaccctagcgttccgcgtg

SEQ ID NO: 61375 - DNA, 25 bp, Homo sapien
cttacgttccaaagtgttcacagag

SEQ ID NO: 61376 - DNA, 25 bp, Homo sapien
cttacgttccaatgtgttcacagag

SEQ ID NO: 61377 - DNA, 25 bp, Homo sapien
tctctcccgaagatccgatcctaag

SEQ ID NO: 61378 - DNA, 25 bp, Homo sapien
tctctcccgaagttccgatcctaag

SEQ ID NO: 61379 - DNA, 25 bp, Homo sapien
ctgtcctaaagaatcgtagtctcca

SEQ ID NO: 61380 - DNA, 25 bp, Homo sapien
ctgtcctaaagattcgtagtctcca

SEQ ID NO: 61381 - DNA, 25 bp, Homo sapien
tgaacttaagatgagtctccgatct

SEQ ID NO: 61382 - DNA, 25 bp, Homo sapien
tgaacttaagatcagtctccgatct

SEQ ID NO: 61383 - DNA, 25 bp, Homo sapien
tagtgattacggttttcgtcttgac

SEQ ID NO: 61384 - DNA, 25 bp, Homo sapien
tagtgattacggatttcgtcttgac

SEQ ID NO: 61385 - DNA, 25 bp, Homo sapien
ggtgtagggtcttttctgtctccga

SEQ ID NO: 61386 - DNA, 25 bp, Homo sapien
ggtgtagggtctattctgtctccga

SEQ ID NO: 61387 - DNA, 25 bp, Homo sapien
agtgtctttgtgtccgttccacgac

SEQ ID NO: 61388 - DNA, 25 bp, Homo sapien
agtgtctttgtgaccgttccacgac

SEQ ID NO: 61389 - DNA, 25 bp, Homo sapien
taatatttgtagtcgacgccaagac

SEQ ID NO: 61390 - DNA, 25 bp, Homo sapien
taatatttgtagacgacgccaagac

SEQ ID NO: 61391 - DNA, 25 bp, Homo sapien
ggttcgttctcctttttgtccgaac

SEQ ID NO: 61392 - DNA, 25 bp, Homo sapien
ggttcgttctccattttgtccgaac

SEQ ID NO: 61393 - DNA, 25 bp, Homo sapien
ggccctcgctgtccttctcggagta

SEQ ID NO: 61394 - DNA, 25 bp, Homo sapien
ggccctcgctgtgcttctcggagta

SEQ ID NO: 61395 - DNA, 25 bp, Homo sapien
gaacgacatcattagtcttttgaac

SEQ ID NO: 61396 - DNA, 25 bp, Homo sapien
gaacgacatcataagtcttttgaac

SEQ ID NO: 61397 - DNA, 25 bp, Homo sapien
agtcagtatcctagttttcctagta

SEQ ID NO: 61398 - DNA, 25 bp, Homo sapien
agtcagtatccttgttttcctagta

SEQ ID NO: 61399 - DNA, 25 bp, Homo sapien
ggtggtgcaccgtctttacacactc

SEQ ID NO: 61400 - DNA, 25 bp, Homo sapien
ggtggtgcaccgactttacacactc

SEQ ID NO: 61401 - DNA, 25 bp, Homo sapien
cggtgacacggaaatgtacacacct

SEQ ID NO: 61402 - DNA, 25 bp, Homo sapien
cggtgacacggatatgtacacacct

SEQ ID NO: 61403 - DNA, 25 bp, Homo sapien
gtagagatagtgaaaccgtatacca

SEQ ID NO: 61404 - DNA, 25 bp, Homo sapien
gtagagatagtgtaaccgtatacca

SEQ ID NO: 61405 - DNA, 25 bp, Homo sapien
ggataggttgtctgacacacgtcca

SEQ ID NO: 61406 - DNA, 25 bp, Homo sapien
ggataggttgtcagacacacgtcca

SEQ ID NO: 61407 - DNA, 25 bp, Homo sapien
caaggtccgtacagacacgacccga

SEQ ID NO: 61408 - DNA, 25 bp, Homo sapien
caaggtccgtactgacacgacccga

SEQ ID NO: 61409 - DNA, 25 bp, Homo sapien
caagtcgaataagagacaccgtagt

SEQ ID NO: 61410 - DNA, 25 bp, Homo sapien
caagtcgaataacagacaccgtagt

SEQ ID NO: 61411 - DNA, 25 bp, Homo sapien
aatacgaacgaaagagactcgactg

SEQ ID NO: 61412 - DNA, 25 bp, Homo sapien
aatacgaacgaatgagactcgactg

SEQ ID NO: 61413 - DNA, 25 bp, Homo sapien
gaaattagactaactgtgactcctt

SEQ ID NO: 61414 - DNA, 25 bp, Homo sapien
gaaattagactatctgtgactcctt

SEQ ID NO: 61415 - DNA, 25 bp, Homo sapien
gagaaaaattctttacactacgtgt

SEQ ID NO: 61416 - DNA, 25 bp, Homo sapien
gagaaaaattctatacactacgtgt

SEQ ID NO: 61417 - DNA, 25 bp, Homo sapien
ttaaatacatacagtttttcgtggt

SEQ ID NO: 61418 - DNA, 25 bp, Homo sapien
ttaaatacatactgtttttcgtggt

SEQ ID NO: 61419 - DNA, 25 bp, Homo sapien
cattacgaaggatcggtgtttttac

SEQ ID NO: 61420 - DNA, 25 bp, Homo sapien
cattacgaaggaacggtgtttttac

SEQ ID NO: 61421 - DNA, 25 bp, Homo sapien
gaggactctccgacatgttgttagg

SEQ ID NO: 61422 - DNA, 25 bp, Homo sapien
gaggactctccgtcatgttgttagg

SEQ ID NO: 61423 - DNA, 25 bp, Homo sapien
ctggtccgtccttcatcgttattta

SEQ ID NO: 61424 - DNA, 25 bp, Homo sapien
ctggtccgtcctacatcgttattta

SEQ ID NO: 61425 - DNA, 25 bp, Homo sapien
cgtctcgtgttcatagtttccctgt

SEQ ID NO: 61426 - DNA, 25 bp, Homo sapien
cgtctcgtgttcttagtttccctgt

SEQ ID NO: 61427 - DNA, 25 bp, Homo sapien
ttcttgtcgagttcatagaacactt

SEQ ID NO: 61428 - DNA, 25 bp, Homo sapien
ttcttgtcgagtacatagaacactt

SEQ ID NO: 61429 - DNA, 25 bp, Homo sapien
cagttacttggttcaagagtatctt

SEQ ID NO: 61430 - DNA, 25 bp, Homo sapien
cagttacttggtacaagagtatctt

SEQ ID NO: 61431 - DNA, 25 bp, Homo sapien
cagagactggagtcgacacggtgcc

SEQ ID NO: 61432 - DNA, 25 bp, Homo sapien
cagagactggagacgacacggtgcc

SEQ ID NO: 61433 - DNA, 25 bp, Homo sapien
tcgaacctccagaatctatgtgtta

SEQ ID NO: 61434 - DNA, 25 bp, Homo sapien
tcgaacctccagtatctatgtgtta

SEQ ID NO: 61435 - DNA, 25 bp, Homo sapien
ttacactcccacattgtgtgtatga

SEQ ID NO: 61436 - DNA, 25 bp, Homo sapien
ttacactcccactttgtgtgtatga

SEQ ID NO: 61437 - DNA, 25 bp, Homo sapien
gtcctccgaccttctgtaggatcat

SEQ ID NO: 61438 - DNA, 25 bp, Homo sapien
gtcctccgacctactgtaggatcat

SEQ ID NO: 61439 - DNA, 25 bp, Homo sapien
tttacccggaatacgagacactact

SEQ ID NO: 61440 - DNA, 25 bp, Homo sapien
tttacccggaattcgagacactact

SEQ ID NO: 61441 - DNA, 25 bp, Homo sapien
ggtcgtctccggtcgtgacacctct

SEQ ID NO: 61442 - DNA, 25 bp, Homo sapien
ggtcgtctccggacgtgacacctct

SEQ ID NO: 61443 - DNA, 25 bp, Homo sapien
tgttagttgtcgttctactcgatcc

SEQ ID NO: 61444 - DNA, 25 bp, Homo sapien
tgttagttgtcgatctactcgatcc

SEQ ID NO: 61445 - DNA, 25 bp, Homo sapien
tagtaatattgtcgaggacgactac

SEQ ID NO: 61446 - DNA, 25 bp, Homo sapien
tagtaatattgtggaggacgactac

SEQ ID NO: 61447 - DNA, 25 bp, Homo sapien
aagtaacgtcgtccttagaaccacc

SEQ ID NO: 61448 - DNA, 25 bp, Homo sapien
aagtaacgtcgtgcttagaaccacc

SEQ ID NO: 61449 - DNA, 25 bp, Homo sapien
gtacgtggtgacgtaggtctgacat

SEQ ID NO: 61450 - DNA, 25 bp, Homo sapien
gtacgtggtgacctaggtctgacat

SEQ ID NO: 61451 - DNA, 25 bp, Homo sapien
tttagtgtgtcatcgaagttcatcg

SEQ ID NO: 61452 - DNA, 25 bp, Homo sapien
tttagtgtgtcaacgaagttcatcg

SEQ ID NO: 61453 - DNA, 25 bp, Homo sapien
aactcttgtgttcaaagtgttcttt

SEQ ID NO: 61454 - DNA, 25 bp, Homo sapien
aactcttgtgttgaaagtgttcttt

SEQ ID NO: 61455 - DNA, 25 bp, Homo sapien
ctttgtgactaattttactactggt

SEQ ID NO: 61456 - DNA, 25 bp, Homo sapien
ctttgtgactaaatttactactggt

SEQ ID NO: 61457 - DNA, 25 bp, Homo sapien
ttattgttacggttacttcctctaa

SEQ ID NO: 61458 - DNA, 25 bp, Homo sapien
ttattgttacggatacttcctctaa

SEQ ID NO: 61459 - DNA, 25 bp, Homo sapien
gtattctgttcaaactttcgttcag

SEQ ID NO: 61460 - DNA, 25 bp, Homo sapien
gtattctgttcatactttcgttcag

SEQ ID NO: 61461 - DNA, 25 bp, Homo sapien
ttgttattacgtatgtcgtcactta

SEQ ID NO: 61462 - DNA, 25 bp, Homo sapien
ttgttattacgtttgtcgtcactta

SEQ ID NO: 61463 - DNA, 25 bp, Homo sapien
tatcactgagatagtgacgtctgtt

SEQ ID NO: 61464 - DNA, 25 bp, Homo sapien
tatcactgagattgtgacgtctgtt

SEQ ID NO: 61465 - DNA, 25 bp, Homo sapien
acgtttcgttacaccggagtcttat

SEQ ID NO: 61466 - DNA, 25 bp, Homo sapien
acgtttcgttactccggagtcttat

SEQ ID NO: 61467 - DNA, 25 bp, Homo sapien
cagagtcgtttaatccataagttga

SEQ ID NO: 61468 - DNA, 25 bp, Homo sapien
cagagtcgtttattccataagttga

SEQ ID NO: 61469 - DNA, 25 bp, Homo sapien
gggtatgtttccagatcagactaca

SEQ ID NO: 61470 - DNA, 25 bp, Homo sapien
gggtatgtttcctgatcagactaca

SEQ ID NO: 61471 - DNA, 25 bp, Homo sapien
tttgtgtccttcgaccccgaggatc

SEQ ID NO: 61472 - DNA, 25 bp, Homo sapien
tttgtgtccttccaccccgaggatc

SEQ ID NO: 61473 - DNA, 25 bp, Homo sapien
agtgaccacggtgaccccgaggacc

SEQ ID NO: 61474 - DNA, 25 bp, Homo sapien
agtgaccacggtcaccccgaggacc

SEQ ID NO: 61475 - DNA, 25 bp, Homo sapien
tgtagctcctgtcaccaccaagaag

SEQ ID NO: 61476 - DNA, 25 bp, Homo sapien
tgtagctcctgtgaccaccaagaag

SEQ ID NO: 61477 - DNA, 25 bp, Homo sapien
gatcctcaagtgtcctatacactag

SEQ ID NO: 61478 - DNA, 25 bp, Homo sapien
gatcctcaagtgacctatacactag

SEQ ID NO: 61479 - DNA, 25 bp, Homo sapien
gggtcgtccatggtacgattctgtt

SEQ ID NO: 61480 - DNA, 25 bp, Homo sapien
gggtcgtccatgctacgattctgtt

SEQ ID NO: 61481 - DNA, 25 bp, Homo sapien
gtccgacaagtagtcgtgtctcgga

SEQ ID NO: 61482 - DNA, 25 bp, Homo sapien
gtccgacaagtactcgtgtctcgga

SEQ ID NO: 61483 - DNA, 25 bp, Homo sapien
atccgtagacggtacgtcgtctcaa

SEQ ID NO: 61484 - DNA, 25 bp, Homo sapien
atccgtagacggaacgtcgtctcaa

SEQ ID NO: 61485 - DNA, 25 bp, Homo sapien
gagccaccgacagaggctcggtcac

SEQ ID NO: 61486 - DNA, 25 bp, Homo sapien
gagccaccgacacaggctcggtcac

SEQ ID NO: 61487 - DNA, 25 bp, Homo sapien
gctctcgtcacagacgcggatatca

SEQ ID NO: 61488 - DNA, 25 bp, Homo sapien
gctctcgtcacacacgcggatatca

SEQ ID NO: 61489 - DNA, 25 bp, Homo sapien
cgtctccgtcaagtccggggtctcg

SEQ ID NO: 61490 - DNA, 25 bp, Homo sapien
cgtctccgtcaactccggggtctcg

SEQ ID NO: 61491 - DNA, 25 bp, Homo sapien
tgtactctatgtctctgggtctata

SEQ ID NO: 61492 - DNA, 25 bp, Homo sapien
tgtactctatgtgtctgggtctata

SEQ ID NO: 61493 - DNA, 25 bp, Homo sapien
ccgtcctgtgctcgtcgacggcagg

SEQ ID NO: 61494 - DNA, 25 bp, Homo sapien
ccgtcctgtgctggtcgacggcagg

SEQ ID NO: 61495 - DNA, 25 bp, Homo sapien
ctcccgtctgtcgtcaggagacagg

SEQ ID NO: 61496 - DNA, 25 bp, Homo sapien
ctcccgtctgtcctcaggagacagg

SEQ ID NO: 61497 - DNA, 25 bp, Homo sapien
tcgtcccatctcgttacacaaaggt

SEQ ID NO: 61498 - DNA, 25 bp, Homo sapien
tcgtcccatctccttacacaaaggt

SEQ ID NO: 61499 - DNA, 25 bp, Homo sapien
tcgtccaatccttacacgaagtagg

SEQ ID NO: 61500 - DNA, 25 bp, Homo sapien
tcgtccaatcctaacacgaagtagg

SEQ ID NO: 61501 - DNA, 25 bp, Homo sapien
tcctacgtaattggtcgcagaagtc

SEQ ID NO: 61502 - DNA, 25 bp, Homo sapien
tcctacgtaattcgtcgcagaagtc

SEQ ID NO: 61503 - DNA, 25 bp, Homo sapien
gagttatacgtcagaccgacaccta

SEQ ID NO: 61504 - DNA, 25 bp, Homo sapien
gagttatacgtctgaccgacaccta

SEQ ID NO: 61505 - DNA, 25 bp, Homo sapien
ggtgtgtgacgaccttcgacatcta

SEQ ID NO: 61506 - DNA, 25 bp, Homo sapien
ggtgtgtgacgagcttcgacatcta

SEQ ID NO: 61507 - DNA, 25 bp, Homo sapien
cacggtcgacacagcctgtactggt

SEQ ID NO: 61508 - DNA, 25 bp, Homo sapien
cacggtcgacactgcctgtactggt

SEQ ID NO: 61509 - DNA, 25 bp, Homo sapien
actacagaccgttcgatttacagag

SEQ ID NO: 61510 - DNA, 25 bp, Homo sapien
actacagaccgtacgatttacagag

SEQ ID NO: 61511 - DNA, 25 bp, Homo sapien
ttatagagtcatcgattatacaacg

SEQ ID NO: 61512 - DNA, 25 bp, Homo sapien
ttatagagtcatggattatacaacg

SEQ ID NO: 61513 - DNA, 25 bp, Homo sapien
tatcgattcgtatcgtgtagtctcg

SEQ ID NO: 61514 - DNA, 25 bp, Homo sapien
tatcgattcgtaacgtgtagtctcg

SEQ ID NO: 61515 - DNA, 25 bp, Homo sapien
gtatacgtcacgtacgtcgtgactg

SEQ ID NO: 61516 - DNA, 25 bp, Homo sapien
gtatacgtcacgaacgtcgtgactg

SEQ ID NO: 61517 - DNA, 25 bp, Homo sapien
gtcccgattttaacccgtacgatag

SEQ ID NO: 61518 - DNA, 25 bp, Homo sapien
gtcccgattttatcccgtacgatag

SEQ ID NO: 61519 - DNA, 25 bp, Homo sapien
atgggagacatttttctcctctaca

SEQ ID NO: 61520 - DNA, 25 bp, Homo sapien
atgggagacattattctcctctaca

SEQ ID NO: 61521 - DNA, 25 bp, Homo sapien
tagagagtaatgcttgtatccaaac

SEQ ID NO: 61522 - DNA, 25 bp, Homo sapien
tagagagtaatggttgtatccaaac

SEQ ID NO: 61523 - DNA, 25 bp, Homo sapien
gtatttagattagtatacccgaact

SEQ ID NO: 61524 - DNA, 25 bp, Homo sapien
gtatttagattactatacccgaact

SEQ ID NO: 61525 - DNA, 25 bp, Homo sapien
atgtctgtaaccagcctacctcgga

SEQ ID NO: 61526 - DNA, 25 bp, Homo sapien
atgtctgtaacctgcctacctcgga

SEQ ID NO: 61527 - DNA, 25 bp, Homo sapien
agatccgctggttcccgtcgtccga

SEQ ID NO: 61528 - DNA, 25 bp, Homo sapien
agatccgctggtacccgtcgtccga

SEQ ID NO: 61529 - DNA, 25 bp, Homo sapien
tggatccctgtgacctgtgtataca

SEQ ID NO: 61530 - DNA, 25 bp, Homo sapien
tggatccctgtgtcctgtgtataca

SEQ ID NO: 61531 - DNA, 25 bp, Homo sapien
aatttagaactttctgaaggttcag

SEQ ID NO: 61532 - DNA, 25 bp, Homo sapien
aatttagaacttactgaaggttcag

SEQ ID NO: 61533 - DNA, 25 bp, Homo sapien
tcctataatgttctttctactcgaa

SEQ ID NO: 61534 - DNA, 25 bp, Homo sapien
tcctataatgttgtttctactcgaa

SEQ ID NO: 61535 - DNA, 25 bp, Homo sapien
cctttacattgtggttcactgtaat

SEQ ID NO: 61536 - DNA, 25 bp, Homo sapien
cctttacattgtcgttcactgtaat

SEQ ID NO: 61537 - DNA, 25 bp, Homo sapien
gattgtacgaagtattccctcactt

SEQ ID NO: 61538 - DNA, 25 bp, Homo sapien
gattgtacgaagaattccctcactt

SEQ ID NO: 61539 - DNA, 25 bp, Homo sapien
aaacaccactttggtaccgaccctg

SEQ ID NO: 61540 - DNA, 25 bp, Homo sapien
aaacaccactttcgtaccgaccctg

SEQ ID NO: 61541 - DNA, 25 bp, Homo sapien
gatgaacctgttgacgactttcctt

SEQ ID NO: 61542 - DNA, 25 bp, Homo sapien
gatgaacctgttcacgactttcctt

SEQ ID NO: 61543 - DNA, 25 bp, Homo sapien
ctgagtagacatcttctgtctttct

SEQ ID NO: 61544 - DNA, 25 bp, Homo sapien
ctgagtagacatgttctgtctttct

SEQ ID NO: 61545 - DNA, 25 bp, Homo sapien
aatgtagagtgtggactttacccct

SEQ ID NO: 61546 - DNA, 25 bp, Homo sapien
aatgtagagtgtcgactttacccct

SEQ ID NO: 61547 - DNA, 25 bp, Homo sapien
ccagacgtggttgttttacgtcaac

SEQ ID NO: 61548 - DNA, 25 bp, Homo sapien
ccagacgtggttcttttacgtcaac

SEQ ID NO: 61549 - DNA, 25 bp, Homo sapien
gtatggtgtgtttctgttcgaacac

SEQ ID NO: 61550 - DNA, 25 bp, Homo sapien
gtatggtgtgttactgttcgaacac

SEQ ID NO: 61551 - DNA, 25 bp, Homo sapien
ttcgtgtccgtatgtccctccgaca

SEQ ID NO: 61552 - DNA, 25 bp, Homo sapien
ttcgtgtccgtaagtccctccgaca

SEQ ID NO: 61553 - DNA, 25 bp, Homo sapien
tggaattccgtgacaatatttgttc

SEQ ID NO: 61554 - DNA, 25 bp, Homo sapien
tggaattccgtgtcaatatttgttc

SEQ ID NO: 61555 - DNA, 25 bp, Homo sapien
tcacgtgtttttatgtattctcttc

SEQ ID NO: 61556 - DNA, 25 bp, Homo sapien
tcacgtgtttttttgtattctcttc

SEQ ID NO: 61557 - DNA, 25 bp, Homo sapien
tgttaggtcacgactatagtctatg

SEQ ID NO: 61558 - DNA, 25 bp, Homo sapien
tgttaggtcacgtctatagtctatg

SEQ ID NO: 61559 - DNA, 25 bp, Homo sapien
tgttagtgtccgaactacaacacgg

SEQ ID NO: 61560 - DNA, 25 bp, Homo sapien
tgttagtgtccgtactacaacacgg

SEQ ID NO: 61561 - DNA, 25 bp, Homo sapien
ggtcggcgttctctgacaaccgacg

SEQ ID NO: 61562 - DNA, 25 bp, Homo sapien
ggtcggcgttctgtgacaaccgacg

SEQ ID NO: 61563 - DNA, 25 bp, Homo sapien
ggtaggtggtatgtcctacactcag

SEQ ID NO: 61564 - DNA, 25 bp, Homo sapien
ggtaggtggtatctcctacactcag

SEQ ID NO: 61565 - DNA, 25 bp, Homo sapien
aggttaggacgacagttctcatctc

SEQ ID NO: 61566 - DNA, 25 bp, Homo sapien
aggttaggacgagagttctcatctc

SEQ ID NO: 61567 - DNA, 25 bp, Homo sapien
gtcgtactgacgtggtctcgatctt

SEQ ID NO: 61568 - DNA, 25 bp, Homo sapien
gtcgtactgacgaggtctcgatctt

SEQ ID NO: 61569 - DNA, 25 bp, Homo sapien
cctcgttactgagactaacagttcc

SEQ ID NO: 61570 - DNA, 25 bp, Homo sapien
cctcgttactgacactaacagttcc

SEQ ID NO: 61571 - DNA, 25 bp, Homo sapien
cgatatccgtcagaaacgtctctcg

SEQ ID NO: 61572 - DNA, 25 bp, Homo sapien
cgatatccgtcacaaacgtctctcg

SEQ ID NO: 61573 - DNA, 25 bp, Homo sapien
agatctagtgaagaagacgtctctc

SEQ ID NO: 61574 - DNA, 25 bp, Homo sapien
agatctagtgaacaagacgtctctc

SEQ ID NO: 61575 - DNA, 25 bp, Homo sapien
tacatccgaagagagtgtaccttcg

SEQ ID NO: 61576 - DNA, 25 bp, Homo sapien
tacatccgaagacagtgtaccttcg

SEQ ID NO: 61577 - DNA, 25 bp, Homo sapien
acgttcggacaaagacgtgcggccg

SEQ ID NO: 61578 - DNA, 25 bp, Homo sapien
acgttcggacaatgacgtgcggccg

SEQ ID NO: 61579 - DNA, 25 bp, Homo sapien
atgagtgttgtcctgcctgtttcct

SEQ ID NO: 61580 - DNA, 25 bp, Homo sapien
atgagtgttgtcgtgcctgtttcct

SEQ ID NO: 61581 - DNA, 25 bp, Homo sapien
gggtgatgaggtgactattaccgtc

SEQ ID NO: 61582 - DNA, 25 bp, Homo sapien
gggtgatgaggtcactattaccgtc

SEQ ID NO: 61583 - DNA, 25 bp, Homo sapien
actcctttaccacacagtattggtg

SEQ ID NO: 61584 - DNA, 25 bp, Homo sapien
actcctttaccagacagtattggtg

SEQ ID NO: 61585 - DNA, 25 bp, Homo sapien
cccggaacccctgagaggtagttgt

SEQ ID NO: 61586 - DNA, 25 bp, Homo sapien
cccggaacccctcagaggtagttgt

SEQ ID NO: 61587 - DNA, 25 bp, Homo sapien
ttcacacggttcacgagtgtgactc

SEQ ID NO: 61588 - DNA, 25 bp, Homo sapien
ttcacacggttctcgagtgtgactc

SEQ ID NO: 61589 - DNA, 25 bp, Homo sapien
atatcgtaggggtcgcggtgactac

SEQ ID NO: 61590 - DNA, 25 bp, Homo sapien
atatcgtaggggacgcggtgactac

SEQ ID NO: 61591 - DNA, 25 bp, Homo sapien
taccacggtgcgtacgcgtcttgaa

SEQ ID NO: 61592 - DNA, 25 bp, Homo sapien
taccacggtgcgaacgcgtcttgaa

SEQ ID NO: 61593 - DNA, 25 bp, Homo sapien
agccgcgttgacagcgtctatcaac

SEQ ID NO: 61594 - DNA, 25 bp, Homo sapien
agccgcgttgactgcgtctatcaac

SEQ ID NO: 61595 - DNA, 25 bp, Homo sapien
tagacgaatactaagtcacagtaag

SEQ ID NO: 61596 - DNA, 25 bp, Homo sapien
tagacgaatacttagtcacagtaag

SEQ ID NO: 61597 - DNA, 25 bp, Homo sapien
tcaattgaatctggtcatagaccgt

SEQ ID NO: 61598 - DNA, 25 bp, Homo sapien
tcaattgaatctcgtcatagaccgt

SEQ ID NO: 61599 - DNA, 25 bp, Homo sapien
tcgaggtctgtttttcgaagacagg

SEQ ID NO: 61600 - DNA, 25 bp, Homo sapien
tcgaggtctgttattcgaagacagg

SEQ ID NO: 61601 - DNA, 25 bp, Homo sapien
gaggtacctctagtgggcacatact

SEQ ID NO: 61602 - DNA, 25 bp, Homo sapien
gaggtacctctactgggcacatact

SEQ ID NO: 61603 - DNA, 25 bp, Homo sapien
ctacgtgtcccagaaccgacgaaac

SEQ ID NO: 61604 - DNA, 25 bp, Homo sapien
ctacgtgtcccacaaccgacgaaac

SEQ ID NO: 61605 - DNA, 25 bp, Homo sapien
gtcgtcgacccacacaaccagagta

SEQ ID NO: 61606 - DNA, 25 bp, Homo sapien
gtcgtcgacccagacaaccagagta

SEQ ID NO: 61607 - DNA, 25 bp, Homo sapien
ttgagtaccgaaagatctacgataa

SEQ ID NO: 61608 - DNA, 25 bp, Homo sapien
ttgagtaccgaatgatctacgataa

SEQ ID NO: 61609 - DNA, 25 bp, Homo sapien
cgtatgtagaacaaactctagattt

SEQ ID NO: 61610 - DNA, 25 bp, Homo sapien
cgtatgtagaactaactctagattt

SEQ ID NO: 61611 - DNA, 25 bp, Homo sapien
tcgtaaatttaaatcttacgatttt

SEQ ID NO: 61612 - DNA, 25 bp, Homo sapien
tcgtaaatttaattcttacgatttt

SEQ ID NO: 61613 - DNA, 25 bp, Homo sapien
gacaaagtattctctgaaatcgata

SEQ ID NO: 61614 - DNA, 25 bp, Homo sapien
gacaaagtattcactgaaatcgata

SEQ ID NO: 61615 - DNA, 25 bp, Homo sapien
ttctcgattgcgtcctaacttggac

SEQ ID NO: 61616 - DNA, 25 bp, Homo sapien
ttctcgattgcgacctaacttggac

SEQ ID NO: 61617 - DNA, 25 bp, Homo sapien
tttaaagggatacgtaacaaacgac

SEQ ID NO: 61618 - DNA, 25 bp, Homo sapien
tttaaagggataggtaacaaacgac

SEQ ID NO: 61619 - DNA, 25 bp, Homo sapien
tccgagggtagaaggacaaactcga

SEQ ID NO: 61620 - DNA, 25 bp, Homo sapien
tccgagggtagatggacaaactcga

SEQ ID NO: 61621 - DNA, 25 bp, Homo sapien
tcccggggacacagtcacagtcaaa

SEQ ID NO: 61622 - DNA, 25 bp, Homo sapien
tcccggggacactgtcacagtcaaa

SEQ ID NO: 61623 - DNA, 25 bp, Homo sapien
gggcgtgtgcctgagcggtcctcat

SEQ ID NO: 61624 - DNA, 25 bp, Homo sapien
gggcgtgtgcctcagcggtcctcat

SEQ ID NO: 61625 - DNA, 25 bp, Homo sapien
cagtggtcggcctgtggttagccac

SEQ ID NO: 61626 - DNA, 25 bp, Homo sapien
cagtggtcggccagtggttagccac

SEQ ID NO: 61627 - DNA, 25 bp, Homo sapien
cgacggggaaagtccgtctcaacct

SEQ ID NO: 61628 - DNA, 25 bp, Homo sapien
cgacggggaaagaccgtctcaacct

SEQ ID NO: 61629 - DNA, 25 bp, Homo sapien
acggtgaagatcaacacctgaacct

SEQ ID NO: 61630 - DNA, 25 bp, Homo sapien
acggtgaagatctacacctgaacct

SEQ ID NO: 61631 - DNA, 25 bp, Homo sapien
gtaccgaagatctccgaggtacgag

SEQ ID NO: 61632 - DNA, 25 bp, Homo sapien
gtaccgaagatcaccgaggtacgag

SEQ ID NO: 61633 - DNA, 25 bp, Homo sapien
caagttatcccttccatggtcgccg

SEQ ID NO: 61634 - DNA, 25 bp, Homo sapien
caagttatccctaccatggtcgccg

SEQ ID NO: 61635 - DNA, 25 bp, Homo sapien
tggaagtttccagattttgtctcat

SEQ ID NO: 61636 - DNA, 25 bp, Homo sapien
tggaagtttccacattttgtctcat

SEQ ID NO: 61637 - DNA, 25 bp, Homo sapien
tcattgtccgcgtgataattctgtc

SEQ ID NO: 61638 - DNA, 25 bp, Homo sapien
tcattgtccgcgagataattctgtc

SEQ ID NO: 61639 - DNA, 25 bp, Homo sapien
catggctgcgaggaacgattacctc

SEQ ID NO: 61640 - DNA, 25 bp, Homo sapien
catggctgcgagcaacgattacctc

SEQ ID NO: 61641 - DNA, 25 bp, Homo sapien
cggtactcctgttaacatgttgtac

SEQ ID NO: 61642 - DNA, 25 bp, Homo sapien
cggtactcctgtaaacatgttgtac

SEQ ID NO: 61643 - DNA, 25 bp, Homo sapien
aacgggaccctaaagggtgtctacc

SEQ ID NO: 61644 - DNA, 25 bp, Homo sapien
aacgggaccctatagggtgtctacc

SEQ ID NO: 61645 - DNA, 25 bp, Homo sapien
acttactccgaccactaaggagcct

SEQ ID NO: 61646 - DNA, 25 bp, Homo sapien
acttactccgacgactaaggagcct

SEQ ID NO: 61647 - DNA, 25 bp, Homo sapien
tacactgactctacagattggaatt

SEQ ID NO: 61648 - DNA, 25 bp, Homo sapien
tacactgactcttcagattggaatt

SEQ ID NO: 61649 - DNA, 25 bp, Homo sapien
aacgagtcccgtggtcgtcggaatc

SEQ ID NO: 61650 - DNA, 25 bp, Homo sapien
aacgagtcccgtcgtcgtcggaatc

SEQ ID NO: 61651 - DNA, 25 bp, Homo sapien
ggtaccgccctacctgggacacggt

SEQ ID NO: 61652 - DNA, 25 bp, Homo sapien
ggtaccgccctagctgggacacggt

SEQ ID NO: 61653 - DNA, 25 bp, Homo sapien
tagaaatacctaaaaccggcacaag

SEQ ID NO: 61654 - DNA, 25 bp, Homo sapien
tagaaatacctataaccggcacaag

SEQ ID NO: 61655 - DNA, 25 bp, Homo sapien
ccttcgtctcatacgtcgaacaggt

SEQ ID NO: 61656 - DNA, 25 bp, Homo sapien
ccttcgtctcattcgtcgaacaggt

SEQ ID NO: 61657 - DNA, 25 bp, Homo sapien
cggggccctcagctcgtcactaaga

SEQ ID NO: 61658 - DNA, 25 bp, Homo sapien
cggggccctcaggtcgtcactaaga

SEQ ID NO: 61659 - DNA, 25 bp, Homo sapien
acgggcgacgaccagccgcgacccc

SEQ ID NO: 61660 - DNA, 25 bp, Homo sapien
acgggcgacgacgagccgcgacccc

SEQ ID NO: 61661 - DNA, 25 bp, Homo sapien
acggctctaaggtgtcacgcacgtc

SEQ ID NO: 61662 - DNA, 25 bp, Homo sapien
acggctctaaggagtcacgcacgtc

SEQ ID NO: 61663 - DNA, 25 bp, Homo sapien
cattcgtcaggacactcaccgcgta

SEQ ID NO: 61664 - DNA, 25 bp, Homo sapien
cattcgtcaggagactcaccgcgta

SEQ ID NO: 61665 - DNA, 25 bp, Homo sapien
ttcacttgaatcgtgtctctgaccc

SEQ ID NO: 61666 - DNA, 25 bp, Homo sapien
ttcacttgaatcctgtctctgaccc

SEQ ID NO: 61667 - DNA, 25 bp, Homo sapien
atgtttgtgaatccatctttccgta

SEQ ID NO: 61668 - DNA, 25 bp, Homo sapien
atgtttgtgaatgcatctttccgta

SEQ ID NO: 61669 - DNA, 25 bp, Homo sapien
acagatgggggtgctttacctcccg

SEQ ID NO: 61670 - DNA, 25 bp, Homo sapien
acagatgggggtcctttacctcccg

SEQ ID NO: 61671 - DNA, 25 bp, Homo sapien
ggagtttctgttgtggacccatggt

SEQ ID NO: 61672 - DNA, 25 bp, Homo sapien
ggagtttctgttctggacccatggt

SEQ ID NO: 61673 - DNA, 25 bp, Homo sapien
taaccacccttttagggtccatgac

SEQ ID NO: 61674 - DNA, 25 bp, Homo sapien
taaccaccctttaagggtccatgac

SEQ ID NO: 61675 - DNA, 25 bp, Homo sapien
aactccccgtggtagagtcaccaaa

SEQ ID NO: 61676 - DNA, 25 bp, Homo sapien
aactccccgtggaagagtcaccaaa

SEQ ID NO: 61677 - DNA, 25 bp, Homo sapien
gtcctttttctcagtaaaacatgag

SEQ ID NO: 61678 - DNA, 25 bp, Homo sapien
gtcctttttctctgtaaaacatgag

SEQ ID NO: 61679 - DNA, 25 bp, Homo sapien
tttactatattgaagtccatgtacg

SEQ ID NO: 61680 - DNA, 25 bp, Homo sapien
tttactatattgtagtccatgtacg

SEQ ID NO: 61681 - DNA, 25 bp, Homo sapien
cttcgtgaaattggtattcattcgt

SEQ ID NO: 61682 - DNA, 25 bp, Homo sapien
cttcgtgaaattcgtattcattcgt

SEQ ID NO: 61683 - DNA, 25 bp, Homo sapien
tgtttaaacagtgtaacccggacgt

SEQ ID NO: 61684 - DNA, 25 bp, Homo sapien
tgtttaaacagtctaacccggacgt

SEQ ID NO: 61685 - DNA, 25 bp, Homo sapien
cgttaatgttgttaaatcctctgtt

SEQ ID NO: 61686 - DNA, 25 bp, Homo sapien
cgttaatgttgtaaaatcctctgtt

SEQ ID NO: 61687 - DNA, 25 bp, Homo sapien
cgtatgatgccgattcctctttgtt

SEQ ID NO: 61688 - DNA, 25 bp, Homo sapien
cgtatgatgccgtttcctctttgtt

SEQ ID NO: 61689 - DNA, 25 bp, Homo sapien
gtatcgagggtagaccgtccattgc

SEQ ID NO: 61690 - DNA, 25 bp, Homo sapien
gtatcgagggtacaccgtccattgc

SEQ ID NO: 61691 - DNA, 25 bp, Homo sapien
cgagtcaaggggtctactttgtaac

SEQ ID NO: 61692 - DNA, 25 bp, Homo sapien
cgagtcaaggggactactttgtaac

SEQ ID NO: 61693 - DNA, 25 bp, Homo sapien
ggtctccttgagtctctctccttcg

SEQ ID NO: 61694 - DNA, 25 bp, Homo sapien
ggtctccttgagactctctccttcg

SEQ ID NO: 61695 - DNA, 25 bp, Homo sapien
gaggtccttcgctcttacgtctcaa

SEQ ID NO: 61696 - DNA, 25 bp, Homo sapien
gaggtccttcgcacttacgtctcaa

SEQ ID NO: 61697 - DNA, 25 bp, Homo sapien
ctcgctctctctctccgttgtagac

SEQ ID NO: 61698 - DNA, 25 bp, Homo sapien
ctcgctctctctgtccgttgtagac

SEQ ID NO: 61699 - DNA, 25 bp, Homo sapien
cccgacaacctctgtgtcttcggta

SEQ ID NO: 61700 - DNA, 25 bp, Homo sapien
cccgacaacctcagtgtcttcggta

SEQ ID NO: 61701 - DNA, 25 bp, Homo sapien
acccacagaacttcgggtctggcta

SEQ ID NO: 61702 - DNA, 25 bp, Homo sapien
acccacagaactacgggtctggcta

SEQ ID NO: 61703 - DNA, 25 bp, Homo sapien
agtcttggaccgaccctctcggtcc

SEQ ID NO: 61704 - DNA, 25 bp, Homo sapien
agtcttggaccgtccctctcggtcc

SEQ ID NO: 61705 - DNA, 25 bp, Homo sapien
aacggttatgggacccgttactgca

SEQ ID NO: 61706 - DNA, 25 bp, Homo sapien
aacggttatgggtcccgttactgca

SEQ ID NO: 61707 - DNA, 25 bp, Homo sapien
aagatgagggagacccacagtgaca

SEQ ID NO: 61708 - DNA, 25 bp, Homo sapien
aagatgagggagtcccacagtgaca

SEQ ID NO: 61709 - DNA, 25 bp, Homo sapien
gtaaagggtaagaccgaccttatta

SEQ ID NO: 61710 - DNA, 25 bp, Homo sapien
gtaaagggtaagtccgaccttatta

SEQ ID NO: 61711 - DNA, 25 bp, Homo sapien
atttcggtagatttcgtcatccttc

SEQ ID NO: 61712 - DNA, 25 bp, Homo sapien
atttcggtagatatcgtcatccttc

SEQ ID NO: 61713 - DNA, 25 bp, Homo sapien
tcggtgacagaggttctcctagtag

SEQ ID NO: 61714 - DNA, 25 bp, Homo sapien
tcggtgacagagcttctcctagtag

SEQ ID NO: 61715 - DNA, 25 bp, Homo sapien
aatccgtctcacaagcagagccaga

SEQ ID NO: 61716 - DNA, 25 bp, Homo sapien
aatccgtctcactagcagagccaga

SEQ ID NO: 61717 - DNA, 25 bp, Homo sapien
gaaatctacttctctcagtgtttgc

SEQ ID NO: 61718 - DNA, 25 bp, Homo sapien
gaaatctacttcactcagtgtttgc

SEQ ID NO: 61719 - DNA, 25 bp, Homo sapien
aaaggtctgtgttgtttaccatggc

SEQ ID NO: 61720 - DNA, 25 bp, Homo sapien
aaaggtctgtgtagtttaccatggc

SEQ ID NO: 61721 - DNA, 25 bp, Homo sapien
taggtgtaggaagacccgtaggtcc

SEQ ID NO: 61722 - DNA, 25 bp, Homo sapien
taggtgtaggaacacccgtaggtcc

SEQ ID NO: 61723 - DNA, 25 bp, Homo sapien
agcaagtttagactgcccgtttcgg

SEQ ID NO: 61724 - DNA, 25 bp, Homo sapien
agcaagtttagagtgcccgtttcgg

SEQ ID NO: 61725 - DNA, 25 bp, Homo sapien
gaaattacaggtccatagttcggcg

SEQ ID NO: 61726 - DNA, 25 bp, Homo sapien
gaaattacaggtgcatagttcggcg

SEQ ID NO: 61727 - DNA, 25 bp, Homo sapien
ctccatgtctggtcctaggaacttc

SEQ ID NO: 61728 - DNA, 25 bp, Homo sapien
ctccatgtctggacctaggaacttc

SEQ ID NO: 61729 - DNA, 25 bp, Homo sapien
cggattggtctcactctggattaac

SEQ ID NO: 61730 - DNA, 25 bp, Homo sapien
cggattggtctctctctggattaac

SEQ ID NO: 61731 - DNA, 25 bp, Homo sapien
aattaaggacgaccacagaatcttt

SEQ ID NO: 61732 - DNA, 25 bp, Homo sapien
aattaaggacgagcacagaatcttt

SEQ ID NO: 61733 - DNA, 25 bp, Homo sapien
cgtcgggatggagactctaaaattc

SEQ ID NO: 61734 - DNA, 25 bp, Homo sapien
cgtcgggatggacactctaaaattc

SEQ ID NO: 61735 - DNA, 25 bp, Homo sapien
cttgagacatgcttcaaacaatgtc

SEQ ID NO: 61736 - DNA, 25 bp, Homo sapien
cttgagacatgcatcaaacaatgtc

SEQ ID NO: 61737 - DNA, 25 bp, Homo sapien
gggaatgtgtcatcataaagacctt

SEQ ID NO: 61738 - DNA, 25 bp, Homo sapien
gggaatgtgtcaacataaagacctt

SEQ ID NO: 61739 - DNA, 25 bp, Homo sapien
gaagctgtctctctacgacaacctt

SEQ ID NO: 61740 - DNA, 25 bp, Homo sapien
gaagctgtctctgtacgacaacctt

SEQ ID NO: 61741 - DNA, 25 bp, Homo sapien
gacaggagtgtctaacgcaggctcg

SEQ ID NO: 61742 - DNA, 25 bp, Homo sapien
gacaggagtgtcaaacgcaggctcg

SEQ ID NO: 61743 - DNA, 25 bp, Homo sapien
ccaagtaacgtgtctttaaaccacg

SEQ ID NO: 61744 - DNA, 25 bp, Homo sapien
ccaagtaacgtgactttaaaccacg

SEQ ID NO: 61745 - DNA, 25 bp, Homo sapien
ggacaaataatgtgtactttccacc

SEQ ID NO: 61746 - DNA, 25 bp, Homo sapien
ggacaaataatgagtactttccacc

SEQ ID NO: 61747 - DNA, 25 bp, Homo sapien
gtcaaaatagtctctttgtttcgtt

SEQ ID NO: 61748 - DNA, 25 bp, Homo sapien
gtcaaaatagtcactttgtttcgtt

SEQ ID NO: 61749 - DNA, 25 bp, Homo sapien
tcgtaataaaaccacttttagggtt

SEQ ID NO: 61750 - DNA, 25 bp, Homo sapien
tcgtaataaaacgacttttagggtt

SEQ ID NO: 61751 - DNA, 25 bp, Homo sapien
tcaacttttggatctctctgaggtt

SEQ ID NO: 61752 - DNA, 25 bp, Homo sapien
tcaacttttggaactctctgaggtt

SEQ ID NO: 61753 - DNA, 25 bp, Homo sapien
acacctcttgtttcctccggacggg

SEQ ID NO: 61754 - DNA, 25 bp, Homo sapien
acacctcttgttacctccggacggg

SEQ ID NO: 61755 - DNA, 25 bp, Homo sapien
tccgcttctgcaaggtcttctgccg

SEQ ID NO: 61756 - DNA, 25 bp, Homo sapien
tccgcttctgcatggtcttctgccg

SEQ ID NO: 61757 - DNA, 25 bp, Homo sapien
tctccgtccttcgaggcacgggtgc

SEQ ID NO: 61758 - DNA, 25 bp, Homo sapien
tctccgtccttccaggcacgggtgc

SEQ ID NO: 61759 - DNA, 25 bp, Homo sapien
ctcgtccactcctggtcagagctga

SEQ ID NO: 61760 - DNA, 25 bp, Homo sapien
ctcgtccactccaggtcagagctga

SEQ ID NO: 61761 - DNA, 25 bp, Homo sapien
tttatacctcgtgtcggacagtgat

SEQ ID NO: 61762 - DNA, 25 bp, Homo sapien
tttatacctcgtctcggacagtgat

SEQ ID NO: 61763 - DNA, 25 bp, Homo sapien
ctaacgttcgagtcttcggattgat

SEQ ID NO: 61764 - DNA, 25 bp, Homo sapien
ctaacgttcgagacttcggattgat

SEQ ID NO: 61765 - DNA, 25 bp, Homo sapien
ccgcaggtcaagacccaacaggtcg

SEQ ID NO: 61766 - DNA, 25 bp, Homo sapien
ccgcaggtcaagtcccaacaggtcg

SEQ ID NO: 61767 - DNA, 25 bp, Homo sapien
gtaaaccatgttagacttcacgttt

SEQ ID NO: 61768 - DNA, 25 bp, Homo sapien
gtaaaccatgtttgacttcacgttt

SEQ ID NO: 61769 - DNA, 25 bp, Homo sapien
gtaacaagaattttcttaccgtgtt

SEQ ID NO: 61770 - DNA, 25 bp, Homo sapien
gtaacaagaattatcttaccgtgtt

SEQ ID NO: 61771 - DNA, 25 bp, Homo sapien
taaaggacttgaactctactctggt

SEQ ID NO: 61772 - DNA, 25 bp, Homo sapien
taaaggacttgatctctactctggt

SEQ ID NO: 61773 - DNA, 25 bp, Homo sapien
gtctaaatgttattaaccctctagg

SEQ ID NO: 61774 - DNA, 25 bp, Homo sapien
gtctaaatgttaataaccctctagg

SEQ ID NO: 61775 - DNA, 25 bp, Homo sapien
gaaaccctgtagtgactgtctctgg

SEQ ID NO: 61776 - DNA, 25 bp, Homo sapien
gaaaccctgtagagactgtctctgg

SEQ ID NO: 61777 - DNA, 25 bp, Homo sapien
caccctatacgagatctcttcgtcg

SEQ ID NO: 61778 - DNA, 25 bp, Homo sapien
caccctatacgacatctcttcgtcg

SEQ ID NO: 61779 - DNA, 25 bp, Homo sapien
atggcgcttctacctcagctctttc

SEQ ID NO: 61780 - DNA, 25 bp, Homo sapien
atggcgcttctagctcagctctttc

SEQ ID NO: 61781 - DNA, 25 bp, Homo sapien
caccggacccgaggtaggattgtta

SEQ ID NO: 61782 - DNA, 25 bp, Homo sapien
caccggacccgacgtaggattgtta

SEQ ID NO: 61783 - DNA, 25 bp, Homo sapien
acccgatcccgttgtcatacatgtc

SEQ ID NO: 61784 - DNA, 25 bp, Homo sapien
acccgatcccgtagtcatacatgtc

SEQ ID NO: 61785 - DNA, 25 bp, Homo sapien
gactcatcactttgtcactgtttcg

SEQ ID NO: 61786 - DNA, 25 bp, Homo sapien
gactcatcacttagtcactgtttcg

SEQ ID NO: 61787 - DNA, 25 bp, Homo sapien
ccccatgtgttttcgtctttagcgt

SEQ ID NO: 61788 - DNA, 25 bp, Homo sapien
ccccatgtgtttacgtctttagcgt

SEQ ID NO: 61789 - DNA, 25 bp, Homo sapien
gccctccatttttatcgaggccggt

SEQ ID NO: 61790 - DNA, 25 bp, Homo sapien
gccctccattttaatcgaggccggt

SEQ ID NO: 61791 - DNA, 25 bp, Homo sapien
cctatagtgtcttttatgaacccgg

SEQ ID NO: 61792 - DNA, 25 bp, Homo sapien
cctatagtgtctattatgaacccgg

SEQ ID NO: 61793 - DNA, 25 bp, Homo sapien
tgagtagattttaattggtcccgtg

SEQ ID NO: 61794 - DNA, 25 bp, Homo sapien
tgagtagatttttattggtcccgtg

SEQ ID NO: 61795 - DNA, 25 bp, Homo sapien
gccacgtgcacttctggacaccgtt

SEQ ID NO: 61796 - DNA, 25 bp, Homo sapien
gccacgtgcactactggacaccgtt

SEQ ID NO: 61797 - DNA, 25 bp, Homo sapien
acttacaacgggaggacgactcgag

SEQ ID NO: 61798 - DNA, 25 bp, Homo sapien
acttacaacgggtggacgactcgag

SEQ ID NO: 61799 - DNA, 25 bp, Homo sapien
actctcttacggtcctagacaagag

SEQ ID NO: 61800 - DNA, 25 bp, Homo sapien
actctcttacggacctagacaagag

SEQ ID NO: 61801 - DNA, 25 bp, Homo sapien
aaatctattgtgacctatcaagacg

SEQ ID NO: 61802 - DNA, 25 bp, Homo sapien
aaatctattgtgtcctatcaagacg

SEQ ID NO: 61803 - DNA, 25 bp, Homo sapien
cgttatggggtacatacgtaagtac

SEQ ID NO: 61804 - DNA, 25 bp, Homo sapien
cgttatggggtagatacgtaagtac

SEQ ID NO: 61805 - DNA, 25 bp, Homo sapien
tctacgaggtaaaccgacgtacgtc

SEQ ID NO: 61806 - DNA, 25 bp, Homo sapien
tctacgaggtaatccgacgtacgtc

SEQ ID NO: 61807 - DNA, 25 bp, Homo sapien
gatgatgtaaacgaggattccgatc

SEQ ID NO: 61808 - DNA, 25 bp, Homo sapien
gatgatgtaaaccaggattccgatc

SEQ ID NO: 61809 - DNA, 25 bp, Homo sapien
gaggggtttctaccaaggtggaccc

SEQ ID NO: 61810 - DNA, 25 bp, Homo sapien
gaggggtttctagcaaggtggaccc

SEQ ID NO: 61811 - DNA, 25 bp, Homo sapien
gtgagttgttgttaccaaattttcc

SEQ ID NO: 61812 - DNA, 25 bp, Homo sapien
gtgagttgttgtaaccaaattttcc

SEQ ID NO: 61813 - DNA, 25 bp, Homo sapien
gatcgatatactaaaaccgattccg

SEQ ID NO: 61814 - DNA, 25 bp, Homo sapien
gatcgatatacttaaaccgattccg

SEQ ID NO: 61815 - DNA, 25 bp, Homo sapien
gacgattaaacgagactttatattc

SEQ ID NO: 61816 - DNA, 25 bp, Homo sapien
gacgattaaacgtgactttatattc

SEQ ID NO: 61817 - DNA, 25 bp, Homo sapien
ttgaaataaagagaccttcttcgtc

SEQ ID NO: 61818 - DNA, 25 bp, Homo sapien
ttgaaataaagacaccttcttcgtc

SEQ ID NO: 61819 - DNA, 25 bp, Homo sapien
ttgacgaaaacactggctccagttg

SEQ ID NO: 61820 - DNA, 25 bp, Homo sapien
ttgacgaaaacagtggctccagttg

SEQ ID NO: 61821 - DNA, 25 bp, Homo sapien
taaagagaaattccactgaagtctg

SEQ ID NO: 61822 - DNA, 25 bp, Homo sapien
taaagagaaattgcactgaagtctg

SEQ ID NO: 61823 - DNA, 25 bp, Homo sapien
accaaggtcaaactatagatgttct

SEQ ID NO: 61824 - DNA, 25 bp, Homo sapien
accaaggtcaaagtatagatgttct

SEQ ID NO: 61825 - DNA, 25 bp, Homo sapien
tcgtaagtgtcaatatccaatggac

SEQ ID NO: 61826 - DNA, 25 bp, Homo sapien
tcgtaagtgtcattatccaatggac

SEQ ID NO: 61827 - DNA, 25 bp, Homo sapien
atgtaatcttttgtcctgaatccgg

SEQ ID NO: 61828 - DNA, 25 bp, Homo sapien
atgtaatcttttctcctgaatccgg

SEQ ID NO: 61829 - DNA, 25 bp, Homo sapien
atacgttaggtagagtctgaaaccc

SEQ ID NO: 61830 - DNA, 25 bp, Homo sapien
atacgttaggtacagtctgaaaccc

SEQ ID NO: 61831 - DNA, 25 bp, Homo sapien
acaaaagtgccacacgcttatttgg

SEQ ID NO: 61832 - DNA, 25 bp, Homo sapien
acaaaagtgccagacgcttatttgg

SEQ ID NO: 61833 - DNA, 25 bp, Homo sapien
aaaacttttcgacgtcttgattaag

SEQ ID NO: 61834 - DNA, 25 bp, Homo sapien
aaaacttttcgaggtcttgattaag

SEQ ID NO: 61835 - DNA, 25 bp, Homo sapien
acgttcattgaaggtttgaccgtga

SEQ ID NO: 61836 - DNA, 25 bp, Homo sapien
acgttcattgaacgtttgaccgtga

SEQ ID NO: 61837 - DNA, 25 bp, Homo sapien
tatattgtgacttgttttagtcaga

SEQ ID NO: 61838 - DNA, 25 bp, Homo sapien
tatattgtgactagttttagtcaga

SEQ ID NO: 61839 - DNA, 25 bp, Homo sapien
aaaataagggctacgccctgtctaa

SEQ ID NO: 61840 - DNA, 25 bp, Homo sapien
aaaataagggcttcgccctgtctaa

SEQ ID NO: 61841 - DNA, 25 bp, Homo sapien
ttataaagaaggacctcagttctta

SEQ ID NO: 61842 - DNA, 25 bp, Homo sapien
ttataaagaaggtcctcagttctta

SEQ ID NO: 61843 - DNA, 25 bp, Homo sapien
gtagatgagacttccccagtgttga

SEQ ID NO: 61844 - DNA, 25 bp, Homo sapien
gtagatgagactaccccagtgttga

SEQ ID NO: 61845 - DNA, 25 bp, Homo sapien
aggaaccgtctttatactagttaat

SEQ ID NO: 61846 - DNA, 25 bp, Homo sapien
aggaaccgtcttaatactagttaat

SEQ ID NO: 61847 - DNA, 25 bp, Homo sapien
tctggtctgattttaactctgttcg

SEQ ID NO: 61848 - DNA, 25 bp, Homo sapien
tctggtctgattataactctgttcg

SEQ ID NO: 61849 - DNA, 25 bp, Homo sapien
cgaaggtctttcgacacctgagaag

SEQ ID NO: 61850 - DNA, 25 bp, Homo sapien
cgaaggtctttccacacctgagaag

SEQ ID NO: 61851 - DNA, 25 bp, Homo sapien
gttcggttcctcacgccagagtaat

SEQ ID NO: 61852 - DNA, 25 bp, Homo sapien
gttcggttcctctcgccagagtaat

SEQ ID NO: 61853 - DNA, 25 bp, Homo sapien
tctcgttggtgtcgtcgtcccctgg

SEQ ID NO: 61854 - DNA, 25 bp, Homo sapien
tctcgttggtgtggtcgtcccctgg

SEQ ID NO: 61855 - DNA, 25 bp, Homo sapien
cccgtatcagttggtgcgcccggcg

SEQ ID NO: 61856 - DNA, 25 bp, Homo sapien
cccgtatcagttcgtgcgcccggcg

SEQ ID NO: 61857 - DNA, 25 bp, Homo sapien
ttatctatctgttgtcgtccatgct

SEQ ID NO: 61858 - DNA, 25 bp, Homo sapien
ttatctatctgtagtcgtccatgct

SEQ ID NO: 61859 - DNA, 25 bp, Homo sapien
gttttacatggagtcttcgttgagt

SEQ ID NO: 61860 - DNA, 25 bp, Homo sapien
gttttacatggactcttcgttgagt

SEQ ID NO: 61861 - DNA, 25 bp, Homo sapien
attaccgttgtctcactctcgaagg

SEQ ID NO: 61862 - DNA, 25 bp, Homo sapien
attaccgttgtcacactctcgaagg

SEQ ID NO: 61863 - DNA, 25 bp, Homo sapien
actggagctacttgaaccctagaac

SEQ ID NO: 61864 - DNA, 25 bp, Homo sapien
actggagctactagaaccctagaac

SEQ ID NO: 61865 - DNA, 25 bp, Homo sapien
tctgaggtccgagaccgtctacacc

SEQ ID NO: 61866 - DNA, 25 bp, Homo sapien
tctgaggtccgacaccgtctacacc

SEQ ID NO: 61867 - DNA, 25 bp, Homo sapien
aggtcctgtccgaatctccacggac

SEQ ID NO: 61868 - DNA, 25 bp, Homo sapien
aggtcctgtccgtatctccacggac

SEQ ID NO: 61869 - DNA, 25 bp, Homo sapien
aagatccgtactacactaaaaggtt

SEQ ID NO: 61870 - DNA, 25 bp, Homo sapien
aagatccgtacttcactaaaaggtt

SEQ ID NO: 61871 - DNA, 25 bp, Homo sapien
acgtctgggttatgacgaagactcg

SEQ ID NO: 61872 - DNA, 25 bp, Homo sapien
acgtctgggttaagacgaagactcg

SEQ ID NO: 61873 - DNA, 25 bp, Homo sapien
agccacctgggcgagtcgcggtacc

SEQ ID NO: 61874 - DNA, 25 bp, Homo sapien
agccacctgggccagtcgcggtacc

SEQ ID NO: 61875 - DNA, 25 bp, Homo sapien
tgccaccggaatacgagaccatggt

SEQ ID NO: 61876 - DNA, 25 bp, Homo sapien
tgccaccggaattcgagaccatggt

SEQ ID NO: 61877 - DNA, 25 bp, Homo sapien
gtgggaccagaaactttacctttgt

SEQ ID NO: 61878 - DNA, 25 bp, Homo sapien
gtgggaccagaatctttacctttgt

SEQ ID NO: 61879 - DNA, 25 bp, Homo sapien
gaggaggacccgattaccgtcgttg

SEQ ID NO: 61880 - DNA, 25 bp, Homo sapien
gaggaggacccgtttaccgtcgttg

SEQ ID NO: 61881 - DNA, 25 bp, Homo sapien
cgtataggtcagacgttcaagagaa

SEQ ID NO: 61882 - DNA, 25 bp, Homo sapien
cgtataggtcagtcgttcaagagaa

SEQ ID NO: 61883 - DNA, 25 bp, Homo sapien
ggtagctcctcaggaacacatcagt

SEQ ID NO: 61884 - DNA, 25 bp, Homo sapien
ggtagctcctcacgaacacatcagt

SEQ ID NO: 61885 - DNA, 25 bp, Homo sapien
ctagtaggcagaagaggaccggtcc

SEQ ID NO: 61886 - DNA, 25 bp, Homo sapien
ctagtaggcagatgaggaccggtcc

SEQ ID NO: 61887 - DNA, 25 bp, Homo sapien
tttaggaataacacgttactgaaag

SEQ ID NO: 61888 - DNA, 25 bp, Homo sapien
tttaggaataactcgttactgaaag

SEQ ID NO: 61889 - DNA, 25 bp, Homo sapien
gttcttatcaaatgttcagtcgaga

SEQ ID NO: 61890 - DNA, 25 bp, Homo sapien
gttcttatcaaaagttcagtcgaga

SEQ ID NO: 61891 - DNA, 25 bp, Homo sapien
actgtatcgaattggtctgagactt

SEQ ID NO: 61892 - DNA, 25 bp, Homo sapien
actgtatcgaataggtctgagactt

SEQ ID NO: 61893 - DNA, 25 bp, Homo sapien
ttagtatcaacttgtacattaactc

SEQ ID NO: 61894 - DNA, 25 bp, Homo sapien
ttagtatcaactagtacattaactc

SEQ ID NO: 61895 - DNA, 25 bp, Homo sapien
tcgacgtcgtgtaaaccgtctaact

SEQ ID NO: 61896 - DNA, 25 bp, Homo sapien
tcgacgtcgtgttaaccgtctaact

SEQ ID NO: 61897 - DNA, 25 bp, Homo sapien
tgaaccgtacgttgtcaacaggatt

SEQ ID NO: 61898 - DNA, 25 bp, Homo sapien
tgaaccgtacgtagtcaacaggatt

SEQ ID NO: 61899 - DNA, 25 bp, Homo sapien
gtaaaattcataatcaaataagtct

SEQ ID NO: 61900 - DNA, 25 bp, Homo sapien
gtaaaattcatattcaaataagtct

SEQ ID NO: 61901 - DNA, 25 bp, Homo sapien
aaacaggtcatttacgaagtcaagg

SEQ ID NO: 61902 - DNA, 25 bp, Homo sapien
aaacaggtcattaacgaagtcaagg

SEQ ID NO: 61903 - DNA, 25 bp, Homo sapien
tgtaagtagaccacgaaaccccggt

SEQ ID NO: 61904 - DNA, 25 bp, Homo sapien
tgtaagtagacctcgaaaccccggt

SEQ ID NO: 61905 - DNA, 25 bp, Homo sapien
ccatgtggatcctgtttctcccagt

SEQ ID NO: 61906 - DNA, 25 bp, Homo sapien
ccatgtggatccagtttctcccagt

SEQ ID NO: 61907 - DNA, 25 bp, Homo sapien
ctacaaggaggagaggtcatcccag

SEQ ID NO: 61908 - DNA, 25 bp, Homo sapien
ctacaaggaggacaggtcatcccag

SEQ ID NO: 61909 - DNA, 25 bp, Homo sapien
cctgaaagggaggatcctacacaat

SEQ ID NO: 61910 - DNA, 25 bp, Homo sapien
cctgaaagggagcatcctacacaat

SEQ ID NO: 61911 - DNA, 25 bp, Homo sapien
ccagaggaagaggagtccaaaatgt

SEQ ID NO: 61912 - DNA, 25 bp, Homo sapien
ccagaggaagagcagtccaaaatgt

SEQ ID NO: 61913 - DNA, 25 bp, Homo sapien
cgacggccccgttcacagaagtact

SEQ ID NO: 61914 - DNA, 25 bp, Homo sapien
cgacggccccgtacacagaagtact

SEQ ID NO: 61915 - DNA, 25 bp, Homo sapien
acgtgtccaccgtccgagaactcgt

SEQ ID NO: 61916 - DNA, 25 bp, Homo sapien
acgtgtccaccgaccgagaactcgt

SEQ ID NO: 61917 - DNA, 25 bp, Homo sapien
acgtgtcagggtaaccggtctcgtc

SEQ ID NO: 61918 - DNA, 25 bp, Homo sapien
acgtgtcagggttaccggtctcgtc

SEQ ID NO: 61919 - DNA, 25 bp, Homo sapien
tactctcggggtagtatacatataa

SEQ ID NO: 61920 - DNA, 25 bp, Homo sapien
tactctcggggttgtatacatataa

SEQ ID NO: 61921 - DNA, 25 bp, Homo sapien
tcacttcgacggtatgtcaatatta

SEQ ID NO: 61922 - DNA, 25 bp, Homo sapien
tcacttcgacggaatgtcaatatta

SEQ ID NO: 61923 - DNA, 25 bp, Homo sapien
aattttcgtacactggaatatctag

SEQ ID NO: 61924 - DNA, 25 bp, Homo sapien
aattttcgtacagtggaatatctag

SEQ ID NO: 61925 - DNA, 25 bp, Homo sapien
cgactttatcgtagggtttcttctc

SEQ ID NO: 61926 - DNA, 25 bp, Homo sapien
cgactttatcgttgggtttcttctc

SEQ ID NO: 61927 - DNA, 25 bp, Homo sapien
ccctaccagtgtctcctttcgggtc

SEQ ID NO: 61928 - DNA, 25 bp, Homo sapien
ccctaccagtgtgtcctttcgggtc

SEQ ID NO: 61929 - DNA, 25 bp, Homo sapien
gtccgaaacagaccttgtaatacac

SEQ ID NO: 61930 - DNA, 25 bp, Homo sapien
gtccgaaacagagcttgtaatacac

SEQ ID NO: 61931 - DNA, 25 bp, Homo sapien
gttgataggacaagacactttcaac

SEQ ID NO: 61932 - DNA, 25 bp, Homo sapien
gttgataggacatgacactttcaac

SEQ ID NO: 61933 - DNA, 25 bp, Homo sapien
gaagggatagggtgcctttacagac

SEQ ID NO: 61934 - DNA, 25 bp, Homo sapien
gaagggatagggagcctttacagac

SEQ ID NO: 61935 - DNA, 25 bp, Homo sapien
gtcaaggtaccgacggtctcgtcct

SEQ ID NO: 61936 - DNA, 25 bp, Homo sapien
gtcaaggtaccgtcggtctcgtcct

SEQ ID NO: 61937 - DNA, 25 bp, Homo sapien
aacgttagcgacgttgacgcttgcg

SEQ ID NO: 61938 - DNA, 25 bp, Homo sapien
aacgttagcgaccttgacgcttgcg

SEQ ID NO: 61939 - DNA, 25 bp, Homo sapien
tagaagtacttcccgcgctgggcgc

SEQ ID NO: 61940 - DNA, 25 bp, Homo sapien
tagaagtacttcgcgcgctgggcgc

SEQ ID NO: 61941 - DNA, 25 bp, Homo sapien
cttttaattcagtcgtaattcagtt

SEQ ID NO: 61942 - DNA, 25 bp, Homo sapien
cttttaattcagacgtaattcagtt

SEQ ID NO: 61943 - DNA, 25 bp, Homo sapien
ctagaagtactggtcaactaaagat

SEQ ID NO: 61944 - DNA, 25 bp, Homo sapien
ctagaagtactgctcaactaaagat

SEQ ID NO: 61945 - DNA, 25 bp, Homo sapien
ctgttagggacgtcacagtaagatg

SEQ ID NO: 61946 - DNA, 25 bp, Homo sapien
ctgttagggacgacacagtaagatg

SEQ ID NO: 61947 - DNA, 25 bp, Homo sapien
tattgtgggtaccacgacgaacatt

SEQ ID NO: 61948 - DNA, 25 bp, Homo sapien
tattgtgggtacgacgacgaacatt

SEQ ID NO: 61949 - DNA, 25 bp, Homo sapien
acgtctggactctggacctcactca

SEQ ID NO: 61950 - DNA, 25 bp, Homo sapien
acgtctggactcaggacctcactca

SEQ ID NO: 61951 - DNA, 25 bp, Homo sapien
actacttggtccttagacctcaaga

SEQ ID NO: 61952 - DNA, 25 bp, Homo sapien
actacttggtccatagacctcaaga

SEQ ID NO: 61953 - DNA, 25 bp, Homo sapien
gtaccatgtgaaacactctttacga

SEQ ID NO: 61954 - DNA, 25 bp, Homo sapien
gtaccatgtgaatcactctttacga

SEQ ID NO: 61955 - DNA, 25 bp, Homo sapien
tcgaaagagttaataccctgttgtt

SEQ ID NO: 61956 - DNA, 25 bp, Homo sapien
tcgaaagagttattaccctgttgtt

SEQ ID NO: 61957 - DNA, 25 bp, Homo sapien
cgacaaacttagaactaaacacttc

SEQ ID NO: 61958 - DNA, 25 bp, Homo sapien
cgacaaacttagtactaaacacttc

SEQ ID NO: 61959 - DNA, 25 bp, Homo sapien
ggaccaaccacttgttcagacgtta

SEQ ID NO: 61960 - DNA, 25 bp, Homo sapien
ggaccaaccactagttcagacgtta

SEQ ID NO: 61961 - DNA, 25 bp, Homo sapien
cacaagaccggtttctgtagtcgat

SEQ ID NO: 61962 - DNA, 25 bp, Homo sapien
cacaagaccggtatctgtagtcgat

SEQ ID NO: 61963 - DNA, 25 bp, Homo sapien
acatagaagacttcagtagtgtcat

SEQ ID NO: 61964 - DNA, 25 bp, Homo sapien
acatagaagactacagtagtgtcat

SEQ ID NO: 61965 - DNA, 25 bp, Homo sapien
cgtcgatataggtgacagtgtctga

SEQ ID NO: 61966 - DNA, 25 bp, Homo sapien
cgtcgatataggagacagtgtctga

SEQ ID NO: 61967 - DNA, 25 bp, Homo sapien
tggggatactagagtaccgtccctg

SEQ ID NO: 61968 - DNA, 25 bp, Homo sapien
tggggatactagtgtaccgtccctg

SEQ ID NO: 61969 - DNA, 25 bp, Homo sapien
cgatagaatgtcagtaagactcttg

SEQ ID NO: 61970 - DNA, 25 bp, Homo sapien
cgatagaatgtctgtaagactcttg

SEQ ID NO: 61971 - DNA, 25 bp, Homo sapien
gatagtctatgttacggacatcttt

SEQ ID NO: 61972 - DNA, 25 bp, Homo sapien
gatagtctatgtaacggacatcttt

SEQ ID NO: 61973 - DNA, 25 bp, Homo sapien
gatagaagtactacatcgtcgtcca

SEQ ID NO: 61974 - DNA, 25 bp, Homo sapien
gatagaagtacttcatcgtcgtcca

SEQ ID NO: 61975 - DNA, 25 bp, Homo sapien
gaagagaaatacagagactcgacac

SEQ ID NO: 61976 - DNA, 25 bp, Homo sapien
gaagagaaatactgagactcgacac

SEQ ID NO: 61977 - DNA, 25 bp, Homo sapien
gcgacaggaggttataggtgtccct

SEQ ID NO: 61978 - DNA, 25 bp, Homo sapien
gcgacaggaggtaataggtgtccct

SEQ ID NO: 61979 - DNA, 25 bp, Homo sapien
caggagatatggtaaaggttccact

SEQ ID NO: 61980 - DNA, 25 bp, Homo sapien
caggagatatggaaaaggttccact

SEQ ID NO: 61981 - DNA, 25 bp, Homo sapien
ctcgaagtagtgtcggggtccccga

SEQ ID NO: 61982 - DNA, 25 bp, Homo sapien
ctcgaagtagtgacggggtccccga

SEQ ID NO: 61983 - DNA, 25 bp, Homo sapien
gtcgaaaaagagagagggaccccgc

SEQ ID NO: 61984 - DNA, 25 bp, Homo sapien
gtcgaaaaagagtgagggaccccgc

SEQ ID NO: 61985 - DNA, 25 bp, Homo sapien
gaaataatcgtttaagtcattgtcc

SEQ ID NO: 61986 - DNA, 25 bp, Homo sapien
gaaataatcgttaaagtcattgtcc

SEQ ID NO: 61987 - DNA, 25 bp, Homo sapien
cgaaatggtagtaacatcaatgtcc

SEQ ID NO: 61988 - DNA, 25 bp, Homo sapien
cgaaatggtagttacatcaatgtcc

SEQ ID NO: 61989 - DNA, 25 bp, Homo sapien
tatatgttttcgactgtctcgtcat

SEQ ID NO: 61990 - DNA, 25 bp, Homo sapien
tatatgttttcgtctgtctcgtcat

SEQ ID NO: 61991 - DNA, 25 bp, Homo sapien
agacttgtctttacagtgttcaggt

SEQ ID NO: 61992 - DNA, 25 bp, Homo sapien
agacttgtcttttcagtgttcaggt

SEQ ID NO: 61993 - DNA, 25 bp, Homo sapien
ctcttttactcttagtgtttacagg

SEQ ID NO: 61994 - DNA, 25 bp, Homo sapien
ctcttttactctaagtgtttacagg

SEQ ID NO: 61995 - DNA, 25 bp, Homo sapien
tcactggttcctagtgatatataca

SEQ ID NO: 61996 - DNA, 25 bp, Homo sapien
tcactggttccttgtgatatataca

SEQ ID NO: 61997 - DNA, 25 bp, Homo sapien
gtactctttcccagtagactcctgg

SEQ ID NO: 61998 - DNA, 25 bp, Homo sapien
gtactctttccctgtagactcctgg

SEQ ID NO: 61999 - DNA, 25 bp, Homo sapien
accacggtctcaaccttataccggg

SEQ ID NO: 62000 - DNA, 25 bp, Homo sapien
accacggtctcatccttataccggg

SEQ ID NO: 62001 - DNA, 25 bp, Homo sapien
catttgtccacttggtcccggtcgt

SEQ ID NO: 62002 - DNA, 25 bp, Homo sapien
catttgtccactaggtcccggtcgt

SEQ ID NO: 62003 - DNA, 25 bp, Homo sapien
gtctcttcctagaactttcacggag

SEQ ID NO: 62004 - DNA, 25 bp, Homo sapien
gtctcttcctagtactttcacggag

SEQ ID NO: 62005 - DNA, 25 bp, Homo sapien
cctcctcggtagtcaatcactacag

SEQ ID NO: 62006 - DNA, 25 bp, Homo sapien
cctcctcggtagacaatcactacag

SEQ ID NO: 62007 - DNA, 25 bp, Homo sapien
cttcgtctaaagaagacagacccag

SEQ ID NO: 62008 - DNA, 25 bp, Homo sapien
cttcgtctaaagtagacagacccag

SEQ ID NO: 62009 - DNA, 25 bp, Homo sapien
atatataagtataacggtccgctat

SEQ ID NO: 62010 - DNA, 25 bp, Homo sapien
atatataagtattacggtccgctat

SEQ ID NO: 62011 - DNA, 25 bp, Homo sapien
gtacgatatccgtttaagtctccac

SEQ ID NO: 62012 - DNA, 25 bp, Homo sapien
gtacgatatccgattaagtctccac

SEQ ID NO: 62013 - DNA, 25 bp, Homo sapien
gtgtggagtctctttcggttgtcga

SEQ ID NO: 62014 - DNA, 25 bp, Homo sapien
gtgtggagtctcattcggttgtcga

SEQ ID NO: 62015 - DNA, 25 bp, Homo sapien
tgtgtcatgtgtcctccgtttcaca

SEQ ID NO: 62016 - DNA, 25 bp, Homo sapien
tgtgtcatgtgtgctccgtttcaca

SEQ ID NO: 62017 - DNA, 25 bp, Homo sapien
tctttttgtacgtcgcggtaacaga

SEQ ID NO: 62018 - DNA, 25 bp, Homo sapien
tctttttgtacgacgcggtaacaga

SEQ ID NO: 62019 - DNA, 25 bp, Homo sapien
ggttctttctcaaatcttaggtaac

SEQ ID NO: 62020 - DNA, 25 bp, Homo sapien
ggttctttctcatatcttaggtaac

SEQ ID NO: 62021 - DNA, 25 bp, Homo sapien
tcccgtcgtccgttcgttctgggta

SEQ ID NO: 62022 - DNA, 25 bp, Homo sapien
tcccgtcgtccgatcgttctgggta

SEQ ID NO: 62023 - DNA, 25 bp, Homo sapien
tgagagaagtcctatgttcttgaac

SEQ ID NO: 62024 - DNA, 25 bp, Homo sapien
tgagagaagtccaatgttcttgaac

SEQ ID NO: 62025 - DNA, 25 bp, Homo sapien
gtcagacgtctcatgtttttgtatt

SEQ ID NO: 62026 - DNA, 25 bp, Homo sapien
gtcagacgtctcttgtttttgtatt

SEQ ID NO: 62027 - DNA, 25 bp, Homo sapien
gtgtctgcgtcctctttactcactc

SEQ ID NO: 62028 - DNA, 25 bp, Homo sapien
gtgtctgcgtccactttactcactc

SEQ ID NO: 62029 - DNA, 25 bp, Homo sapien
ggtgaccgcgagatttacgtcgacc

SEQ ID NO: 62030 - DNA, 25 bp, Homo sapien
ggtgaccgcgagttttacgtcgacc

SEQ ID NO: 62031 - DNA, 25 bp, Homo sapien
gtggaccggacttacgtcgtacccc

SEQ ID NO: 62032 - DNA, 25 bp, Homo sapien
gtggaccggactaacgtcgtacccc

SEQ ID NO: 62033 - DNA, 25 bp, Homo sapien
aggttgtagttgtgacactacttca

SEQ ID NO: 62034 - DNA, 25 bp, Homo sapien
aggttgtagttgagacactacttca

SEQ ID NO: 62035 - DNA, 25 bp, Homo sapien
aacaagatccgaagacacgctgcta

SEQ ID NO: 62036 - DNA, 25 bp, Homo sapien
aacaagatccgatgacacgctgcta

SEQ ID NO: 62037 - DNA, 25 bp, Homo sapien
acaagaatacaagagtctacgacga

SEQ ID NO: 62038 - DNA, 25 bp, Homo sapien
acaagaatacaacagtctacgacga

SEQ ID NO: 62039 - DNA, 25 bp, Homo sapien
aactacgaacaaagacgtctccacg

SEQ ID NO: 62040 - DNA, 25 bp, Homo sapien
aactacgaacaatgacgtctccacg

SEQ ID NO: 62041 - DNA, 25 bp, Homo sapien
tgaaagttatctagcgtcgctccct

SEQ ID NO: 62042 - DNA, 25 bp, Homo sapien
tgaaagttatcttgcgtcgctccct

SEQ ID NO: 62043 - DNA, 25 bp, Homo sapien
tcgagaagacgacttcttaaaccgg

SEQ ID NO: 62044 - DNA, 25 bp, Homo sapien
tcgagaagacgagttcttaaaccgg

SEQ ID NO: 62045 - DNA, 25 bp, Homo sapien
tcgaacaacgaacgttctttcaggt

SEQ ID NO: 62046 - DNA, 25 bp, Homo sapien
tcgaacaacgaaggttctttcaggt

SEQ ID NO: 62047 - DNA, 25 bp, Homo sapien
gataacgataaatggtcttcttaac

SEQ ID NO: 62048 - DNA, 25 bp, Homo sapien
gataacgataaaaggtcttcttaac

SEQ ID NO: 62049 - DNA, 25 bp, Homo sapien
gatatacctccgaaagtttgttaat

SEQ ID NO: 62050 - DNA, 25 bp, Homo sapien
gatatacctccgtaagtttgttaat

SEQ ID NO: 62051 - DNA, 25 bp, Homo sapien
ggtagacctacctctatgttattaa

SEQ ID NO: 62052 - DNA, 25 bp, Homo sapien
ggtagacctaccactatgttattaa

SEQ ID NO: 62053 - DNA, 25 bp, Homo sapien
tcgtctcgtgttcatagtttccctg

SEQ ID NO: 62054 - DNA, 25 bp, Homo sapien
tcgtctcgtgttgatagtttccctg

SEQ ID NO: 62055 - DNA, 25 bp, Homo sapien
tatctgtgtcagatgcagtcacatc

SEQ ID NO: 62056 - DNA, 25 bp, Homo sapien
tatctgtgtcagttgcagtcacatc

SEQ ID NO: 62057 - DNA, 25 bp, Homo sapien
cattatctcgtgtcacaagagatct

SEQ ID NO: 62058 - DNA, 25 bp, Homo sapien
cattatctcgtgacacaagagatct

SEQ ID NO: 62059 - DNA, 25 bp, Homo sapien
tcaagactcgggtgactaagggact

SEQ ID NO: 62060 - DNA, 25 bp, Homo sapien
tcaagactcgggagactaagggact

SEQ ID NO: 62061 - DNA, 25 bp, Homo sapien
tcaacatacgggtatactttggtac

SEQ ID NO: 62062 - DNA, 25 bp, Homo sapien
tcaacatacgggaatactttggtac

SEQ ID NO: 62063 - DNA, 25 bp, Homo sapien
tttactcacgacacttagtggttga

SEQ ID NO: 62064 - DNA, 25 bp, Homo sapien
tttactcacgactcttagtggttga

SEQ ID NO: 62065 - DNA, 25 bp, Homo sapien
atcctcggcacttttagttatcgag

SEQ ID NO: 62066 - DNA, 25 bp, Homo sapien
atcctcggcactattagttatcgag

SEQ ID NO: 62067 - DNA, 25 bp, Homo sapien
gtttaccccgtaagttcaacactcg

SEQ ID NO: 62068 - DNA, 25 bp, Homo sapien
gtttaccccgtatgttcaacactcg

SEQ ID NO: 62069 - DNA, 25 bp, Homo sapien
gaagtcctaccgattgtaaacctct

SEQ ID NO: 62070 - DNA, 25 bp, Homo sapien
gaagtcctaccgtttgtaaacctct

SEQ ID NO: 62071 - DNA, 25 bp, Homo sapien
aattcacttgtttagtagtcgatcc

SEQ ID NO: 62072 - DNA, 25 bp, Homo sapien
aattcacttgttaagtagtcgatcc

SEQ ID NO: 62073 - DNA, 25 bp, Homo sapien
tataactatgtttggacgagacgtc

SEQ ID NO: 62074 - DNA, 25 bp, Homo sapien
tataactatgttaggacgagacgtc

SEQ ID NO: 62075 - DNA, 25 bp, Homo sapien
caagtaacagtgattgtagaccaca

SEQ ID NO: 62076 - DNA, 25 bp, Homo sapien
caagtaacagtgtttgtagaccaca

SEQ ID NO: 62077 - DNA, 25 bp, Homo sapien
cgtacgtggtgacgtaggtctgaca

SEQ ID NO: 62078 - DNA, 25 bp, Homo sapien
cgtacgtggtgaggtaggtctgaca

SEQ ID NO: 62079 - DNA, 25 bp, Homo sapien
tacttgtgtacagatgtctctacta

SEQ ID NO: 62080 - DNA, 25 bp, Homo sapien
tacttgtgtacacatgtctctacta

SEQ ID NO: 62081 - DNA, 25 bp, Homo sapien
taactctttcgtgaggaatttcttt

SEQ ID NO: 62082 - DNA, 25 bp, Homo sapien
taactctttcgtcaggaatttcttt

SEQ ID NO: 62083 - DNA, 25 bp, Homo sapien
cttttcgacatatatgttctgtcgt

SEQ ID NO: 62084 - DNA, 25 bp, Homo sapien
cttttcgacataaatgttctgtcgt

SEQ ID NO: 62085 - DNA, 25 bp, Homo sapien
ttctgttgtcacagagattccctaa

SEQ ID NO: 62086 - DNA, 25 bp, Homo sapien
ttctgttgtcactgagattccctaa

SEQ ID NO: 62087 - DNA, 25 bp, Homo sapien
gtattcatgtcagatatatcgttca

SEQ ID NO: 62088 - DNA, 25 bp, Homo sapien
gtattcatgtcacatatatcgttca

SEQ ID NO: 62089 - DNA, 25 bp, Homo sapien
ttacaagttacgatatgactcatga

SEQ ID NO: 62090 - DNA, 25 bp, Homo sapien
ttacaagttacgttatgactcatga

SEQ ID NO: 62091 - DNA, 25 bp, Homo sapien
ctctaactgagatttagtcgttgtt

SEQ ID NO: 62092 - DNA, 25 bp, Homo sapien
ctctaactgagaattagtcgttgtt

SEQ ID NO: 62093 - DNA, 25 bp, Homo sapien
tacgtttcgttacaccggagtctta

SEQ ID NO: 62094 - DNA, 25 bp, Homo sapien
tacgtttcgttagaccggagtctta

SEQ ID NO: 62095 - DNA, 25 bp, Homo sapien
taatctttatgtcacatcagtgtga

SEQ ID NO: 62096 - DNA, 25 bp, Homo sapien
taatctttatgtgacatcagtgtga

SEQ ID NO: 62097 - DNA, 25 bp, Homo sapien
gaagatttagtcaagttctaactca

SEQ ID NO: 62098 - DNA, 25 bp, Homo sapien
gaagatttagtctagttctaactca

SEQ ID NO: 62099 - DNA, 25 bp, Homo sapien
gttagtgcacctgcacacccaaatc

SEQ ID NO: 62100 - DNA, 25 bp, Homo sapien
gttagtgcacctccacacccaaatc

SEQ ID NO: 62101 - DNA, 25 bp, Homo sapien
agaaacgacgttaccccaggacgac

SEQ ID NO: 62102 - DNA, 25 bp, Homo sapien
agaaacgacgtttccccaggacgac

SEQ ID NO: 62103 - DNA, 25 bp, Homo sapien
tgagcacacttgacccagagacact

SEQ ID NO: 62104 - DNA, 25 bp, Homo sapien
tgagcacacttgtcccagagacact

SEQ ID NO: 62105 - DNA, 25 bp, Homo sapien
gaacatcaatgtcacacatagaagt

SEQ ID NO: 62106 - DNA, 25 bp, Homo sapien
gaacatcaatgtgacacatagaagt

SEQ ID NO: 62107 - DNA, 25 bp, Homo sapien
gagcggcaactggtacatgtcgtgc

SEQ ID NO: 62108 - DNA, 25 bp, Homo sapien
gagcggcaactgctacatgtcgtgc

SEQ ID NO: 62109 - DNA, 25 bp, Homo sapien
tggtcaacagatcatcgtgtctgga

SEQ ID NO: 62110 - DNA, 25 bp, Homo sapien
tggtcaacagatgatcgtgtctgga

SEQ ID NO: 62111 - DNA, 25 bp, Homo sapien
acgccgagaggtccgcgtcgtcaag

SEQ ID NO: 62112 - DNA, 25 bp, Homo sapien
acgccgagaggtgcgcgtcgtcaag

SEQ ID NO: 62113 - DNA, 25 bp, Homo sapien
gatcacgaccgaagggtgtctccca

SEQ ID NO: 62114 - DNA, 25 bp, Homo sapien
gatcacgaccgatgggtgtctccca

SEQ ID NO: 62115 - DNA, 25 bp, Homo sapien
ggactctccgactcggggactacca

SEQ ID NO: 62116 - DNA, 25 bp, Homo sapien
ggactctccgacacggggactacca

SEQ ID NO: 62117 - DNA, 25 bp, Homo sapien
gcctccgtcaaggtcgggtactgcc

SEQ ID NO: 62118 - DNA, 25 bp, Homo sapien
gcctccgtcaagctcgggtactgcc

SEQ ID NO: 62119 - DNA, 25 bp, Homo sapien
ctgctctatcttcctggatctagat

SEQ ID NO: 62120 - DNA, 25 bp, Homo sapien
ctgctctatcttgctggatctagat

SEQ ID NO: 62121 - DNA, 25 bp, Homo sapien
cccgccttgactggtcacgggagtg

SEQ ID NO: 62122 - DNA, 25 bp, Homo sapien
cccgccttgactcgtcacgggagtg

SEQ ID NO: 62123 - DNA, 25 bp, Homo sapien
tcctcccgggtctcgaaggacacgg

SEQ ID NO: 62124 - DNA, 25 bp, Homo sapien
tcctcccgggtcacgaaggacacgg

SEQ ID NO: 62125 - DNA, 25 bp, Homo sapien
ccccggagtctctaaactaaagtgt

SEQ ID NO: 62126 - DNA, 25 bp, Homo sapien
ccccggagtctcaaaactaaagtgt

SEQ ID NO: 62127 - DNA, 25 bp, Homo sapien
ccgtcggattcctgacacgaggggt

SEQ ID NO: 62128 - DNA, 25 bp, Homo sapien
ccgtcggattccagacacgaggggt

SEQ ID NO: 62129 - DNA, 25 bp, Homo sapien
taccgttatattctcgacagaaggt

SEQ ID NO: 62130 - DNA, 25 bp, Homo sapien
taccgttatattgtcgacagaaggt

SEQ ID NO: 62131 - DNA, 25 bp, Homo sapien
ttctggaatgtcagacgacgaaatg

SEQ ID NO: 62132 - DNA, 25 bp, Homo sapien
ttctggaatgtctgacgacgaaatg

SEQ ID NO: 62133 - DNA, 25 bp, Homo sapien
tgtgggtgcgctcagtcacatacta

SEQ ID NO: 62134 - DNA, 25 bp, Homo sapien
tgtgggtgcgctgagtcacatacta

SEQ ID NO: 62135 - DNA, 25 bp, Homo sapien
cgggtgtactacaggactgatgact

SEQ ID NO: 62136 - DNA, 25 bp, Homo sapien
cgggtgtactactggactgatgact

SEQ ID NO: 62137 - DNA, 25 bp, Homo sapien
gactacagaccgttcgatttacaga

SEQ ID NO: 62138 - DNA, 25 bp, Homo sapien
gactacagaccgatcgatttacaga

SEQ ID NO: 62139 - DNA, 25 bp, Homo sapien
tattagagtacaacggattccacag

SEQ ID NO: 62140 - DNA, 25 bp, Homo sapien
tattagagtacatcggattccacag

SEQ ID NO: 62141 - DNA, 25 bp, Homo sapien
attatcgacctctctcgtcgacacg

SEQ ID NO: 62142 - DNA, 25 bp, Homo sapien
attatcgacctcactcgtcgacacg

SEQ ID NO: 62143 - DNA, 25 bp, Homo sapien
attgttgtctcgtacgtcgtcggac

SEQ ID NO: 62144 - DNA, 25 bp, Homo sapien
attgttgtctcgaacgtcgtcggac

SEQ ID NO: 62145 - DNA, 25 bp, Homo sapien
gtgcaggttttatccggtcgagtcg

SEQ ID NO: 62146 - DNA, 25 bp, Homo sapien
gtgcaggttttaaccggtcgagtcg

SEQ ID NO: 62147 - DNA, 25 bp, Homo sapien
ggagacatttgtaccgtccacgtcg

SEQ ID NO: 62148 - DNA, 25 bp, Homo sapien
ggagacatttgttccgtccacgtcg

SEQ ID NO: 62149 - DNA, 25 bp, Homo sapien
tctcgagtaatgtttagttccaaac

SEQ ID NO: 62150 - DNA, 25 bp, Homo sapien
tctcgagtaatgattagttccaaac

SEQ ID NO: 62151 - DNA, 25 bp, Homo sapien
ggatatttacctgtatacccgtaat

SEQ ID NO: 62152 - DNA, 25 bp, Homo sapien
ggatatttacctctatacccgtaat

SEQ ID NO: 62153 - DNA, 25 bp, Homo sapien
ttctcgacacctactctaccgagga

SEQ ID NO: 62154 - DNA, 25 bp, Homo sapien
ttctcgacaccttctctaccgagga

SEQ ID NO: 62155 - DNA, 25 bp, Homo sapien
ttaccgactctgtcccggtctacga

SEQ ID NO: 62156 - DNA, 25 bp, Homo sapien
ttaccgactctgacccggtctacga

SEQ ID NO: 62157 - DNA, 25 bp, Homo sapien
gatctcgtcttgagactgttataga

SEQ ID NO: 62158 - DNA, 25 bp, Homo sapien
gatctcgtcttgtgactgttataga

SEQ ID NO: 62159 - DNA, 25 bp, Homo sapien
tttaacgaacttttgtacattctaa

SEQ ID NO: 62160 - DNA, 25 bp, Homo sapien
tttaacgaacttatgtacattctaa

SEQ ID NO: 62161 - DNA, 25 bp, Homo sapien
tgtcctataatttggtttttcgatc

SEQ ID NO: 62162 - DNA, 25 bp, Homo sapien
tgtcctataattaggtttttcgatc

SEQ ID NO: 62163 - DNA, 25 bp, Homo sapien
cccgaactttgtggttccgtgaggt

SEQ ID NO: 62164 - DNA, 25 bp, Homo sapien
cccgaactttgtcgttccgtgaggt

SEQ ID NO: 62165 - DNA, 25 bp, Homo sapien
gtagtagaagaaatctctctaactt

SEQ ID NO: 62166 - DNA, 25 bp, Homo sapien
gtagtagaagaattctctctaactt

SEQ ID NO: 62167 - DNA, 25 bp, Homo sapien
aaacatgcatctgtctgaccactcg

SEQ ID NO: 62168 - DNA, 25 bp, Homo sapien
aaacatgcatctctctgaccactcg

SEQ ID NO: 62169 - DNA, 25 bp, Homo sapien
gatgaacatctcagtcgatttcctt

SEQ ID NO: 62170 - DNA, 25 bp, Homo sapien
gatgaacatctctgtcgatttcctt

SEQ ID NO: 62171 - DNA, 25 bp, Homo sapien
ctgagtaggactctgtcttttctac

SEQ ID NO: 62172 - DNA, 25 bp, Homo sapien
ctgagtaggactgtgtcttttctac

SEQ ID NO: 62173 - DNA, 25 bp, Homo sapien
accttaggacgtcgtactctttccc

SEQ ID NO: 62174 - DNA, 25 bp, Homo sapien
accttaggacgtggtactctttccc

SEQ ID NO: 62175 - DNA, 25 bp, Homo sapien
caacaagtggttgttttaacagtac

SEQ ID NO: 62176 - DNA, 25 bp, Homo sapien
caacaagtggttcttttaacagtac

SEQ ID NO: 62177 - DNA, 25 bp, Homo sapien
caaagggtcgtttctagttggagac

SEQ ID NO: 62178 - DNA, 25 bp, Homo sapien
caaagggtcgttactagttggagac

SEQ ID NO: 62179 - DNA, 25 bp, Homo sapien
aagtgtcgctgaacctctccgacct

SEQ ID NO: 62180 - DNA, 25 bp, Homo sapien
aagtgtcgctgatcctctccgacct

SEQ ID NO: 62181 - DNA, 25 bp, Homo sapien
aggaacgtttggactaatttctttc

SEQ ID NO: 62182 - DNA, 25 bp, Homo sapien
aggaacgtttggtctaatttctttc

SEQ ID NO: 62183 - DNA, 25 bp, Homo sapien
cacgttattggtactgacttctttg

SEQ ID NO: 62184 - DNA, 25 bp, Homo sapien
cacgttattggttctgacttctttg

SEQ ID NO: 62185 - DNA, 25 bp, Homo sapien
gttgttaggccgttttcgtgagtcg

SEQ ID NO: 62186 - DNA, 25 bp, Homo sapien
gttgttaggccgatttcgtgagtcg

SEQ ID NO: 62187 - DNA, 25 bp, Homo sapien
gtcgaggtccgaatcgaacgagtcg

SEQ ID NO: 62188 - DNA, 25 bp, Homo sapien
gtcgaggtccgattcgaacgagtcg

SEQ ID NO: 62189 - DNA, 25 bp, Homo sapien
cggtcggcgttctctgacaaccgac

SEQ ID NO: 62190 - DNA, 25 bp, Homo sapien
cggtcggcgttcactgacaaccgac

SEQ ID NO: 62191 - DNA, 25 bp, Homo sapien
ggtgggtcgattgtctccgactcag

SEQ ID NO: 62192 - DNA, 25 bp, Homo sapien
ggtgggtcgattctctccgactcag

SEQ ID NO: 62193 - DNA, 25 bp, Homo sapien
agggagagactccattccgttctct

SEQ ID NO: 62194 - DNA, 25 bp, Homo sapien
agggagagactcgattccgttctct

SEQ ID NO: 62195 - DNA, 25 bp, Homo sapien
cactactagtcgtagttccgtttgt

SEQ ID NO: 62196 - DNA, 25 bp, Homo sapien
cactactagtcgaagttccgtttgt

SEQ ID NO: 62197 - DNA, 25 bp, Homo sapien
gtccttctcgagcactgacattctc

SEQ ID NO: 62198 - DNA, 25 bp, Homo sapien
gtccttctcgaggactgacattctc

SEQ ID NO: 62199 - DNA, 25 bp, Homo sapien
gcatacccgtacgaaaagtacttac

SEQ ID NO: 62200 - DNA, 25 bp, Homo sapien
gcatacccgtaccaaaagtacttac

SEQ ID NO: 62201 - DNA, 25 bp, Homo sapien
gagtacctgcacgacgagacgcttc

SEQ ID NO: 62202 - DNA, 25 bp, Homo sapien
gagtacctgcaccacgagacgcttc

SEQ ID NO: 62203 - DNA, 25 bp, Homo sapien
aagatccgaagacacgctgctatcg

SEQ ID NO: 62204 - DNA, 25 bp, Homo sapien
aagatccgaagagacgctgctatcg

SEQ ID NO: 62205 - DNA, 25 bp, Homo sapien
gtataagaagacagacgaggtcccg

SEQ ID NO: 62206 - DNA, 25 bp, Homo sapien
gtataagaagactgacgaggtcccg

SEQ ID NO: 62207 - DNA, 25 bp, Homo sapien
tatgaggtggtaaaaccgttttcct

SEQ ID NO: 62208 - DNA, 25 bp, Homo sapien
tatgaggtggtataaccgttttcct

SEQ ID NO: 62209 - DNA, 25 bp, Homo sapien
ggtagaggtgagaaccttttacgtc

SEQ ID NO: 62210 - DNA, 25 bp, Homo sapien
ggtagaggtgagtaccttttacgtc

SEQ ID NO: 62211 - DNA, 25 bp, Homo sapien
tatttttcgcagacctttgtcgtcg

SEQ ID NO: 62212 - DNA, 25 bp, Homo sapien
tatttttcgcagtcctttgtcgtcg

SEQ ID NO: 62213 - DNA, 25 bp, Homo sapien
ccccggaacccctgagaggtagttg

SEQ ID NO: 62214 - DNA, 25 bp, Homo sapien
ccccggaaccccagagaggtagttg

SEQ ID NO: 62215 - DNA, 25 bp, Homo sapien
tccaagtttcgaacgtgtgtgcgtg

SEQ ID NO: 62216 - DNA, 25 bp, Homo sapien
tccaagtttcgatcgtgtgtgcgtg

SEQ ID NO: 62217 - DNA, 25 bp, Homo sapien
ttcgtaggtggactcggtaccgtac

SEQ ID NO: 62218 - DNA, 25 bp, Homo sapien
ttcgtaggtggagtcggtaccgtac

SEQ ID NO: 62219 - DNA, 25 bp, Homo sapien
gactcacggtggaagactttacgga

SEQ ID NO: 62220 - DNA, 25 bp, Homo sapien
gactcacggtggtagactttacgga

SEQ ID NO: 62221 - DNA, 25 bp, Homo sapien
aaacctcgggtgtaggtctatcggg

SEQ ID NO: 62222 - DNA, 25 bp, Homo sapien
aaacctcgggtgaaggtctatcggg

SEQ ID NO: 62223 - DNA, 25 bp, Homo sapien
aacaagagaaccaggttaacgtaga

SEQ ID NO: 62224 - DNA, 25 bp, Homo sapien
aacaagagaacctggttaacgtaga

SEQ ID NO: 62225 - DNA, 25 bp, Homo sapien
aactttatattggtgacagtacacg

SEQ ID NO: 62226 - DNA, 25 bp, Homo sapien
aactttatattgctgacagtacacg

SEQ ID NO: 62227 - DNA, 25 bp, Homo sapien
caagatgtgtactttacaacaagag

SEQ ID NO: 62228 - DNA, 25 bp, Homo sapien
caagatgtgtacattacaacaagag

SEQ ID NO: 62229 - DNA, 25 bp, Homo sapien
aggagagttctttgtgcgagcacaa

SEQ ID NO: 62230 - DNA, 25 bp, Homo sapien
aggagagttcttagtgcgagcacaa

SEQ ID NO: 62231 - DNA, 25 bp, Homo sapien
ctcctcgtcccagaagacgacaaag

SEQ ID NO: 62232 - DNA, 25 bp, Homo sapien
ctcctcgtcccacaagacgacaaag

SEQ ID NO: 62233 - DNA, 25 bp, Homo sapien
cgtctcctcgcacacaaaagagacg

SEQ ID NO: 62234 - DNA, 25 bp, Homo sapien
cgtctcctcgcagacaaaagagacg

SEQ ID NO: 62235 - DNA, 25 bp, Homo sapien
cttggtaacgaagatccgacgtaac

SEQ ID NO: 62236 - DNA, 25 bp, Homo sapien
cttggtaacgaacatccgacgtaac

SEQ ID NO: 62237 - DNA, 25 bp, Homo sapien
ctagagtaggaacacttagactcct

SEQ ID NO: 62238 - DNA, 25 bp, Homo sapien
ctagagtaggaagacttagactcct

SEQ ID NO: 62239 - DNA, 25 bp, Homo sapien
cagacattgtaaatgacgtcatttc

SEQ ID NO: 62240 - DNA, 25 bp, Homo sapien
cagacattgtaattgacgtcatttc

SEQ ID NO: 62241 - DNA, 25 bp, Homo sapien
acagagatttactcgcgaaatgatt

SEQ ID NO: 62242 - DNA, 25 bp, Homo sapien
acagagatttacacgcgaaatgatt

SEQ ID NO: 62243 - DNA, 25 bp, Homo sapien
cgtttgattaggtccgaagatgaac

SEQ ID NO: 62244 - DNA, 25 bp, Homo sapien
cgtttgattaggaccgaagatgaac

SEQ ID NO: 62245 - DNA, 25 bp, Homo sapien
ttcagaaggtgaaccgtaaaagctc

SEQ ID NO: 62246 - DNA, 25 bp, Homo sapien
ttcagaaggtgatccgtaaaagctc

SEQ ID NO: 62247 - DNA, 25 bp, Homo sapien
gggtccaggggaatcgacaatacca

SEQ ID NO: 62248 - DNA, 25 bp, Homo sapien
gggtccaggggattcgacaatacca

SEQ ID NO: 62249 - DNA, 25 bp, Homo sapien
gtaccctgggagagtcacttcaaga

SEQ ID NO: 62250 - DNA, 25 bp, Homo sapien
gtaccctgggagtgtcacttcaaga

SEQ ID NO: 62251 - DNA, 25 bp, Homo sapien
acccctgtgccttccggtacggtca

SEQ ID NO: 62252 - DNA, 25 bp, Homo sapien
acccctgtgcctaccggtacggtca

SEQ ID NO: 62253 - DNA, 25 bp, Homo sapien
ctccagtcggccagtggtatcgcca

SEQ ID NO: 62254 - DNA, 25 bp, Homo sapien
ctccagtcggcctgtggtatcgcca

SEQ ID NO: 62255 - DNA, 25 bp, Homo sapien
tcgacggggaaagtccgtctcaacc

SEQ ID NO: 62256 - DNA, 25 bp, Homo sapien
tcgacggggaaactccgtctcaacc

SEQ ID NO: 62257 - DNA, 25 bp, Homo sapien
tactggaggcacaaactctcaacct

SEQ ID NO: 62258 - DNA, 25 bp, Homo sapien
tactggaggcactaactctcaacct

SEQ ID NO: 62259 - DNA, 25 bp, Homo sapien
gtcagaaatacatccgacatagtgt

SEQ ID NO: 62260 - DNA, 25 bp, Homo sapien
gtcagaaatacaaccgacatagtgt

SEQ ID NO: 62261 - DNA, 25 bp, Homo sapien
acaagttattccacacatgaagccg

SEQ ID NO: 62262 - DNA, 25 bp, Homo sapien
acaagttattcctcacatgaagccg

SEQ ID NO: 62263 - DNA, 25 bp, Homo sapien
aaagtttcccctttgttcgttcagt

SEQ ID NO: 62264 - DNA, 25 bp, Homo sapien
aaagtttcccctatgttcgttcagt

SEQ ID NO: 62265 - DNA, 25 bp, Homo sapien
tcatcttacccgtagaggtttctca

SEQ ID NO: 62266 - DNA, 25 bp, Homo sapien
tcatcttacccgaagaggtttctca

SEQ ID NO: 62267 - DNA, 25 bp, Homo sapien
ctataggatggagatcgactcccac

SEQ ID NO: 62268 - DNA, 25 bp, Homo sapien
ctataggatggacatcgactcccac

SEQ ID NO: 62269 - DNA, 25 bp, Homo sapien
cggttgagtcgtgaagactttcgac

SEQ ID NO: 62270 - DNA, 25 bp, Homo sapien
cggttgagtcgtcaagactttcgac

SEQ ID NO: 62271 - DNA, 25 bp, Homo sapien
cagagggacgcgaatcagggtttcc

SEQ ID NO: 62272 - DNA, 25 bp, Homo sapien
cagagggacgcgtatcagggtttcc

SEQ ID NO: 62273 - DNA, 25 bp, Homo sapien
cacttcgtccgatcggtaaggccct

SEQ ID NO: 62274 - DNA, 25 bp, Homo sapien
cacttcgtccgaacggtaaggccct

SEQ ID NO: 62275 - DNA, 25 bp, Homo sapien
aatgacgtctcgaggttagacgaaa

SEQ ID NO: 62276 - DNA, 25 bp, Homo sapien
aatgacgtctcgtggttagacgaaa

SEQ ID NO: 62277 - DNA, 25 bp, Homo sapien
ccgacccgtcgtggtcgcggaactc

SEQ ID NO: 62278 - DNA, 25 bp, Homo sapien
ccgacccgtcgtcgtcgcggaactc

SEQ ID NO: 62279 - DNA, 25 bp, Homo sapien
gactcacccgacttgtgggacccgt

SEQ ID NO: 62280 - DNA, 25 bp, Homo sapien
gactcacccgacatgtgggacccgt

SEQ ID NO: 62281 - DNA, 25 bp, Homo sapien
agaagtatccataaccccggacaca

SEQ ID NO: 62282 - DNA, 25 bp, Homo sapien
agaagtatccattaccccggacaca

SEQ ID NO: 62283 - DNA, 25 bp, Homo sapien
ctccgctagactcgtcggtacaggt

SEQ ID NO: 62284 - DNA, 25 bp, Homo sapien
ctccgctagactggtcggtacaggt

SEQ ID NO: 62285 - DNA, 25 bp, Homo sapien
ggcgtccgcccgacgtacgacaagg

SEQ ID NO: 62286 - DNA, 25 bp, Homo sapien
ggcgtccgcccgtcgtacgacaagg

SEQ ID NO: 62287 - DNA, 25 bp, Homo sapien
cacggcgacgaccagccgcgacccc

SEQ ID NO: 62288 - DNA, 25 bp, Homo sapien
cacggcgacgacgagccgcgacccc

SEQ ID NO: 62289 - DNA, 25 bp, Homo sapien
acggccggaggtcgtgacgcgacac

SEQ ID NO: 62290 - DNA, 25 bp, Homo sapien
acggccggaggtggtgacgcgacac

SEQ ID NO: 62291 - DNA, 25 bp, Homo sapien
gatttcgagtggtcgctaccgacga

SEQ ID NO: 62292 - DNA, 25 bp, Homo sapien
gatttcgagtggacgctaccgacga

SEQ ID NO: 62293 - DNA, 25 bp, Homo sapien
ttcacttgatatgtttcagacagat

SEQ ID NO: 62294 - DNA, 25 bp, Homo sapien
ttcacttgatatctttcagacagat

SEQ ID NO: 62295 - DNA, 25 bp, Homo sapien
tattttgtggatcattcctgtacaa

SEQ ID NO: 62296 - DNA, 25 bp, Homo sapien
tattttgtggatgattcctgtacaa

SEQ ID NO: 62297 - DNA, 25 bp, Homo sapien
gaaaacgggggtcctttccgtcccg

SEQ ID NO: 62298 - DNA, 25 bp, Homo sapien
gaaaacgggggtgctttccgtcccg

SEQ ID NO: 62299 - DNA, 25 bp, Homo sapien
caatttcagtgtgtcggcccggtgg

SEQ ID NO: 62300 - DNA, 25 bp, Homo sapien
caatttcagtgtctcggcccggtgg

SEQ ID NO: 62301 - DNA, 25 bp, Homo sapien
aatgcccttctctgggtccgtagga

SEQ ID NO: 62302 - DNA, 25 bp, Homo sapien
aatgcccttctcagggtccgtagga

SEQ ID NO: 62303 - DNA, 25 bp, Homo sapien
acgtccctcgtctctaagcctgaaa

SEQ ID NO: 62304 - DNA, 25 bp, Homo sapien
acgtccctcgtcactaagcctgaaa

SEQ ID NO: 62305 - DNA, 25 bp, Homo sapien
tctctttcttgatgaacatcagtga

SEQ ID NO: 62306 - DNA, 25 bp, Homo sapien
tctctttcttgaagaacatcagtga

SEQ ID NO: 62307 - DNA, 25 bp, Homo sapien
tgttttcattgtgaagtccatgtac

SEQ ID NO: 62308 - DNA, 25 bp, Homo sapien
tgttttcattgtcaagtccatgtac

SEQ ID NO: 62309 - DNA, 25 bp, Homo sapien
ttcttcgtgaaattggtattcattc

SEQ ID NO: 62310 - DNA, 25 bp, Homo sapien
ttcttcgtgaaaatggtattcattc

SEQ ID NO: 62311 - DNA, 25 bp, Homo sapien
ttgtttaaacagtgtaacccggacg

SEQ ID NO: 62312 - DNA, 25 bp, Homo sapien
ttgtttaaacagagtaacccggacg

SEQ ID NO: 62313 - DNA, 25 bp, Homo sapien
cgtttatgtttgtcatccacgtgtg

SEQ ID NO: 62314 - DNA, 25 bp, Homo sapien
cgtttatgtttgacatccacgtgtg

SEQ ID NO: 62315 - DNA, 25 bp, Homo sapien
ggtttagtcgcacttacctcttttt

SEQ ID NO: 62316 - DNA, 25 bp, Homo sapien
ggtttagtcgcagttacctcttttt

SEQ ID NO: 62317 - DNA, 25 bp, Homo sapien
gagtatgggtgacgattccgatttc

SEQ ID NO: 62318 - DNA, 25 bp, Homo sapien
gagtatgggtgaggattccgatttc

SEQ ID NO: 62319 - DNA, 25 bp, Homo sapien
ggtcaagaagggttctctatcaact

SEQ ID NO: 62320 - DNA, 25 bp, Homo sapien
ggtcaagaagggatctctatcaact

SEQ ID NO: 62321 - DNA, 25 bp, Homo sapien
atcgtcctcagggctctcttcttcg

SEQ ID NO: 62322 - DNA, 25 bp, Homo sapien
atcgtcctcaggcctctcttcttcg

SEQ ID NO: 62323 - DNA, 25 bp, Homo sapien
tggttcctgtccttcttcgttcacc

SEQ ID NO: 62324 - DNA, 25 bp, Homo sapien
tggttcctgtccatcttcgttcacc

SEQ ID NO: 62325 - DNA, 25 bp, Homo sapien
tctcctctgtctcttacgatgtcga

SEQ ID NO: 62326 - DNA, 25 bp, Homo sapien
tctcctctgtctgttacgatgtcga

SEQ ID NO: 62327 - DNA, 25 bp, Homo sapien
ccacgacaaccatggtcctctgtat

SEQ ID NO: 62328 - DNA, 25 bp, Homo sapien
ccacgacaaccaaggtcctctgtat

SEQ ID NO: 62329 - DNA, 25 bp, Homo sapien
cccagacaactcttggtccagtcta

SEQ ID NO: 62330 - DNA, 25 bp, Homo sapien
cccagacaactcatggtccagtcta

SEQ ID NO: 62331 - DNA, 25 bp, Homo sapien
gttctggaacgtaccatctcatcct

SEQ ID NO: 62332 - DNA, 25 bp, Homo sapien
gttctggaacgttccatctcatcct

SEQ ID NO: 62333 - DNA, 25 bp, Homo sapien
cgggttgaggcgaaccactttatca

SEQ ID NO: 62334 - DNA, 25 bp, Homo sapien
cgggttgaggcgtaccactttatca

SEQ ID NO: 62335 - DNA, 25 bp, Homo sapien
agtctgaggtcgaccacctaggtca

SEQ ID NO: 62336 - DNA, 25 bp, Homo sapien
agtctgaggtcgtccacctaggtca

SEQ ID NO: 62337 - DNA, 25 bp, Homo sapien
gaaggagttcgtaccgtccttatca

SEQ ID NO: 62338 - DNA, 25 bp, Homo sapien
gaaggagttcgttccgtccttatca

SEQ ID NO: 62339 - DNA, 25 bp, Homo sapien
gtttaccgtgctctcgtcatgttta

SEQ ID NO: 62340 - DNA, 25 bp, Homo sapien
gtttaccgtgctgtcgtcatgttta

SEQ ID NO: 62341 - DNA, 25 bp, Homo sapien
taggttacagaggtagactcccgta

SEQ ID NO: 62342 - DNA, 25 bp, Homo sapien
taggttacagagctagactcccgta

SEQ ID NO: 62343 - DNA, 25 bp, Homo sapien
ccgtctcgaagacggacgcctagac

SEQ ID NO: 62344 - DNA, 25 bp, Homo sapien
ccgtctcgaagagggacgcctagac

SEQ ID NO: 62345 - DNA, 25 bp, Homo sapien
agacgtctattttccgagattctgc

SEQ ID NO: 62346 - DNA, 25 bp, Homo sapien
agacgtctatttaccgagattctgc

SEQ ID NO: 62347 - DNA, 25 bp, Homo sapien
aaaggtcaggtcgtttacctttaga

SEQ ID NO: 62348 - DNA, 25 bp, Homo sapien
aaaggtcaggtcctttacctttaga

SEQ ID NO: 62349 - DNA, 25 bp, Homo sapien
taggtactggaaccacgcctaaacc

SEQ ID NO: 62350 - DNA, 25 bp, Homo sapien
taggtactggaagcacgcctaaacc

SEQ ID NO: 62351 - DNA, 25 bp, Homo sapien
gtgagtttaaatacgccgtaaacgc

SEQ ID NO: 62352 - DNA, 25 bp, Homo sapien
gtgagtttaaattcgccgtaaacgc

SEQ ID NO: 62353 - DNA, 25 bp, Homo sapien
gtgagacttaagtccctattctccg

SEQ ID NO: 62354 - DNA, 25 bp, Homo sapien
gtgagacttaagaccctattctccg

SEQ ID NO: 62355 - DNA, 25 bp, Homo sapien
cgtttgttagagtcctgtgaacttg

SEQ ID NO: 62356 - DNA, 25 bp, Homo sapien
cgtttgttagagacctgtgaacttg

SEQ ID NO: 62357 - DNA, 25 bp, Homo sapien
tgttcgtgtaccaccttgactcaag

SEQ ID NO: 62358 - DNA, 25 bp, Homo sapien
tgttcgtgtacctccttgactcaag

SEQ ID NO: 62359 - DNA, 25 bp, Homo sapien
aaattaagtgaatacaagactcttt

SEQ ID NO: 62360 - DNA, 25 bp, Homo sapien
aaattaagtgaaaacaagactcttt

SEQ ID NO: 62361 - DNA, 25 bp, Homo sapien
aatagaggaggacacctaaatattc

SEQ ID NO: 62362 - DNA, 25 bp, Homo sapien
aatagaggaggagacctaaatattc

SEQ ID NO: 62363 - DNA, 25 bp, Homo sapien
ttgaaagtgatacactaacggattc

SEQ ID NO: 62364 - DNA, 25 bp, Homo sapien
ttgaaagtgatagactaacggattc

SEQ ID NO: 62365 - DNA, 25 bp, Homo sapien
ggatagtctttatcataatgacctt

SEQ ID NO: 62366 - DNA, 25 bp, Homo sapien
ggatagtctttaacataatgacctt

SEQ ID NO: 62367 - DNA, 25 bp, Homo sapien
tacatctgtcctactaaaactctgt

SEQ ID NO: 62368 - DNA, 25 bp, Homo sapien
tacatctgtccttctaaaactctgt

SEQ ID NO: 62369 - DNA, 25 bp, Homo sapien
agaagaaaacagaacctcttagtac

SEQ ID NO: 62370 - DNA, 25 bp, Homo sapien
agaagaaaacagtacctcttagtac

SEQ ID NO: 62371 - DNA, 25 bp, Homo sapien
gacacattaagtggtctttaaaacc

SEQ ID NO: 62372 - DNA, 25 bp, Homo sapien
gacacattaagtcgtctttaaaacc

SEQ ID NO: 62373 - DNA, 25 bp, Homo sapien
gtgaaccttaatggtgtctttccca

SEQ ID NO: 62374 - DNA, 25 bp, Homo sapien
gtgaaccttaatcgtgtctttccca

SEQ ID NO: 62375 - DNA, 25 bp, Homo sapien
gagcaaaatatctttttgtccgggt

SEQ ID NO: 62376 - DNA, 25 bp, Homo sapien
gagcaaaatatcattttgtccgggt

SEQ ID NO: 62377 - DNA, 25 bp, Homo sapien
cgtaaaataactttttcggagtgtc

SEQ ID NO: 62378 - DNA, 25 bp, Homo sapien
cgtaaaataactatttcggagtgtc

SEQ ID NO: 62379 - DNA, 25 bp, Homo sapien
gtgaatttataccaattctgagctt

SEQ ID NO: 62380 - DNA, 25 bp, Homo sapien
gtgaatttatacgaattctgagctt

SEQ ID NO: 62381 - DNA, 25 bp, Homo sapien
acaccctgactcgaccttcggaggg

SEQ ID NO: 62382 - DNA, 25 bp, Homo sapien
acaccctgactccaccttcggaggg

SEQ ID NO: 62383 - DNA, 25 bp, Homo sapien
agccccttcgacacggtctgcaggg

SEQ ID NO: 62384 - DNA, 25 bp, Homo sapien
agccccttcgactcggtctgcaggg

SEQ ID NO: 62385 - DNA, 25 bp, Homo sapien
gtcccgtcttcacaggctcaggttc

SEQ ID NO: 62386 - DNA, 25 bp, Homo sapien
gtcccgtcttcagaggctcaggttc

SEQ ID NO: 62387 - DNA, 25 bp, Homo sapien
aaacggacgttcttaaaagactatt

SEQ ID NO: 62388 - DNA, 25 bp, Homo sapien
aaacggacgttcataaaagactatt

SEQ ID NO: 62389 - DNA, 25 bp, Homo sapien
tgtcttagtcggttgtggccgtgat

SEQ ID NO: 62390 - DNA, 25 bp, Homo sapien
tgtcttagtcggatgtggccgtgat

SEQ ID NO: 62391 - DNA, 25 bp, Homo sapien
tcgttatttcggacttggactgtga

SEQ ID NO: 62392 - DNA, 25 bp, Homo sapien
tcgttatttcggtcttggactgtga

SEQ ID NO: 62393 - DNA, 25 bp, Homo sapien
gcaggtcgacgcaccgcaacgaggc

SEQ ID NO: 62394 - DNA, 25 bp, Homo sapien
gcaggtcgacgctccgcaacgaggc

SEQ ID NO: 62395 - DNA, 25 bp, Homo sapien
gacataaagtttacacaacgagatt

SEQ ID NO: 62396 - DNA, 25 bp, Homo sapien
gacataaagttttcacaacgagatt

SEQ ID NO: 62397 - DNA, 25 bp, Homo sapien
gaaaagacctttactcgaacgagtt

SEQ ID NO: 62398 - DNA, 25 bp, Homo sapien
gaaaagaccttttctcgaacgagtt

SEQ ID NO: 62399 - DNA, 25 bp, Homo sapien
tactatggatgtttctcatctagtt

SEQ ID NO: 62400 - DNA, 25 bp, Homo sapien
tactatggatgtatctcatctagtt

SEQ ID NO: 62401 - DNA, 25 bp, Homo sapien
agatacaatgtttatagaccccatg

SEQ ID NO: 62402 - DNA, 25 bp, Homo sapien
agatacaatgttaatagaccccatg

SEQ ID NO: 62403 - DNA, 25 bp, Homo sapien
aaactcaacttgtgaccgtccgttg

SEQ ID NO: 62404 - DNA, 25 bp, Homo sapien
aaactcaacttgagaccgtccgttg

SEQ ID NO: 62405 - DNA, 25 bp, Homo sapien
gccgcccttaacgagtctcttgacg

SEQ ID NO: 62406 - DNA, 25 bp, Homo sapien
gccgcccttaaccagtctcttgacg

SEQ ID NO: 62407 - DNA, 25 bp, Homo sapien
ggcagtgttagacctacctctttcg

SEQ ID NO: 62408 - DNA, 25 bp, Homo sapien
ggcagtgttagagctacctctttcg

SEQ ID NO: 62409 - DNA, 25 bp, Homo sapien
ccccgtgatctgagtcggatctttc

SEQ ID NO: 62410 - DNA, 25 bp, Homo sapien
ccccgtgatctgtgtcggatctttc

SEQ ID NO: 62411 - DNA, 25 bp, Homo sapien
accgtttcttgttacgtcctcattc

SEQ ID NO: 62412 - DNA, 25 bp, Homo sapien
accgtttcttgtaacgtcctcattc

SEQ ID NO: 62413 - DNA, 25 bp, Homo sapien
ggacgtcataacttaagtccctttc

SEQ ID NO: 62414 - DNA, 25 bp, Homo sapien
ggacgtcataacataagtccctttc

SEQ ID NO: 62415 - DNA, 25 bp, Homo sapien
accccatgtgttttcgtctttagcg

SEQ ID NO: 62416 - DNA, 25 bp, Homo sapien
accccatgtgttatcgtctttagcg

SEQ ID NO: 62417 - DNA, 25 bp, Homo sapien
acctccacttttactacggaatcgg

SEQ ID NO: 62418 - DNA, 25 bp, Homo sapien
acctccactttttctacggaatcgg

SEQ ID NO: 62419 - DNA, 25 bp, Homo sapien
ctatctgtctttttctagacatggt

SEQ ID NO: 62420 - DNA, 25 bp, Homo sapien
ctatctgtctttatctagacatggt

SEQ ID NO: 62421 - DNA, 25 bp, Homo sapien
gggacaatctctatttggctccgtg

SEQ ID NO: 62422 - DNA, 25 bp, Homo sapien
gggacaatctctttttggctccgtg

SEQ ID NO: 62423 - DNA, 25 bp, Homo sapien
gaacgactcctacatttggacccgg

SEQ ID NO: 62424 - DNA, 25 bp, Homo sapien
gaacgactcctagatttggacccgg

SEQ ID NO: 62425 - DNA, 25 bp, Homo sapien
gactctaaaatttgcacgagtcgag

SEQ ID NO: 62426 - DNA, 25 bp, Homo sapien
gactctaaaattagcacgagtcgag

SEQ ID NO: 62427 - DNA, 25 bp, Homo sapien
tgacctttacagaccaacagtacga

SEQ ID NO: 62428 - DNA, 25 bp, Homo sapien
tgacctttacagtccaacagtacga

SEQ ID NO: 62429 - DNA, 25 bp, Homo sapien
aagattttgtagacgtttacaacac

SEQ ID NO: 62430 - DNA, 25 bp, Homo sapien
aagattttgtagtcgtttacaacac

SEQ ID NO: 62431 - DNA, 25 bp, Homo sapien
agacgtttagggtgtcagacaagct

SEQ ID NO: 62432 - DNA, 25 bp, Homo sapien
agacgtttagggagtcagacaagct

SEQ ID NO: 62433 - DNA, 25 bp, Homo sapien
cgtcagggtcgtacgtcacgtcgtc

SEQ ID NO: 62434 - DNA, 25 bp, Homo sapien
cgtcagggtcgttcgtcacgtcgtc

SEQ ID NO: 62435 - DNA, 25 bp, Homo sapien
gttacgtaagacgagggttcggttc

SEQ ID NO: 62436 - DNA, 25 bp, Homo sapien
gttacgtaagaccagggttcggttc

SEQ ID NO: 62437 - DNA, 25 bp, Homo sapien
tcggggtttcgacaagggacgttcc

SEQ ID NO: 62438 - DNA, 25 bp, Homo sapien
tcggggtttcgagaagggacgttcc

SEQ ID NO: 62439 - DNA, 25 bp, Homo sapien
tcatttcttatacaagatctttcac

SEQ ID NO: 62440 - DNA, 25 bp, Homo sapien
tcatttcttatagaagatctttcac

SEQ ID NO: 62441 - DNA, 25 bp, Homo sapien
tatgggaatacatagaccgattccg

SEQ ID NO: 62442 - DNA, 25 bp, Homo sapien
tatgggaatacaaagaccgattccg

SEQ ID NO: 62443 - DNA, 25 bp, Homo sapien
aattaagacgagaactatcagtttc

SEQ ID NO: 62444 - DNA, 25 bp, Homo sapien
aattaagacgagtactatcagtttc

SEQ ID NO: 62445 - DNA, 25 bp, Homo sapien
ctaagaaaagaggtacacttatttc

SEQ ID NO: 62446 - DNA, 25 bp, Homo sapien
ctaagaaaagagctacacttatttc

SEQ ID NO: 62447 - DNA, 25 bp, Homo sapien
tttgaaacgaagaggccacgattcg

SEQ ID NO: 62448 - DNA, 25 bp, Homo sapien
tttgaaacgaagtggccacgattcg

SEQ ID NO: 62449 - DNA, 25 bp, Homo sapien
ttaagaaaacagaccaccgaaactg

SEQ ID NO: 62450 - DNA, 25 bp, Homo sapien
ttaagaaaacagtccaccgaaactg

SEQ ID NO: 62451 - DNA, 25 bp, Homo sapien
gaaagtacaaacctgacgtaagttg

SEQ ID NO: 62452 - DNA, 25 bp, Homo sapien
gaaagtacaaacgtgacgtaagttg

SEQ ID NO: 62453 - DNA, 25 bp, Homo sapien
gaaggcaagactccagatatgtact

SEQ ID NO: 62454 - DNA, 25 bp, Homo sapien
gaaggcaagactgcagatatgtact

SEQ ID NO: 62455 - DNA, 25 bp, Homo sapien
gaaattgttactaaccttaattcgg

SEQ ID NO: 62456 - DNA, 25 bp, Homo sapien
gaaattgttacttaccttaattcgg

SEQ ID NO: 62457 - DNA, 25 bp, Homo sapien
agattataggtagatctgagttccc

SEQ ID NO: 62458 - DNA, 25 bp, Homo sapien
agattataggtacatctgagttccc

SEQ ID NO: 62459 - DNA, 25 bp, Homo sapien
acaaattaccgttaagcatatttgg

SEQ ID NO: 62460 - DNA, 25 bp, Homo sapien
acaaattaccgtaaagcatatttgg

SEQ ID NO: 62461 - DNA, 25 bp, Homo sapien
acaaattccgcgtgtctttttcagt

SEQ ID NO: 62462 - DNA, 25 bp, Homo sapien
acaaattccgcgagtctttttcagt

SEQ ID NO: 62463 - DNA, 25 bp, Homo sapien
agatattttccagtcttgtaagtca

SEQ ID NO: 62464 - DNA, 25 bp, Homo sapien
agatattttccactcttgtaagtca

SEQ ID NO: 62465 - DNA, 25 bp, Homo sapien
tttttgtgacgtcgtttggacgaca

SEQ ID NO: 62466 - DNA, 25 bp, Homo sapien
tttttgtgacgtggtttggacgaca

SEQ ID NO: 62467 - DNA, 25 bp, Homo sapien
atttgggacttcctctcagactaga

SEQ ID NO: 62468 - DNA, 25 bp, Homo sapien
atttgggacttcgtctcagactaga

SEQ ID NO: 62469 - DNA, 25 bp, Homo sapien
ttctaaggagggacccatagtctta

SEQ ID NO: 62470 - DNA, 25 bp, Homo sapien
ttctaaggagggtcccatagtctta

SEQ ID NO: 62471 - DNA, 25 bp, Homo sapien
tgagtacaccggaggcccatgttga

SEQ ID NO: 62472 - DNA, 25 bp, Homo sapien
tgagtacaccggtggcccatgttga

SEQ ID NO: 62473 - DNA, 25 bp, Homo sapien
gtaaaggacttcatctaacagttaa

SEQ ID NO: 62474 - DNA, 25 bp, Homo sapien
gtaaaggacttcttctaacagttaa

SEQ ID NO: 62475 - DNA, 25 bp, Homo sapien
tctggttacattttacaagtcgtcc

SEQ ID NO: 62476 - DNA, 25 bp, Homo sapien
tctggttacattatacaagtcgtcc

SEQ ID NO: 62477 - DNA, 25 bp, Homo sapien
agtaggtctttcgacaaacgttaag

SEQ ID NO: 62478 - DNA, 25 bp, Homo sapien
agtaggtctttccacaaacgttaag

SEQ ID NO: 62479 - DNA, 25 bp, Homo sapien
gatgggttccacacaacagtgtaag

SEQ ID NO: 62480 - DNA, 25 bp, Homo sapien
gatgggttccactcaacagtgtaag

SEQ ID NO: 62481 - DNA, 25 bp, Homo sapien
ggtcgttcgggacgtcaccctctgg

SEQ ID NO: 62482 - DNA, 25 bp, Homo sapien
ggtcgttcgggaggtcaccctctgg

SEQ ID NO: 62483 - DNA, 25 bp, Homo sapien
ggcccttcagtttgtgtcctcccgg

SEQ ID NO: 62484 - DNA, 25 bp, Homo sapien
ggcccttcagttagtgtcctcccgg

SEQ ID NO: 62485 - DNA, 25 bp, Homo sapien
ttctttcagtttgtgacgcatgcgt

SEQ ID NO: 62486 - DNA, 25 bp, Homo sapien
ttctttcagtttctgacgcatgcgt

SEQ ID NO: 62487 - DNA, 25 bp, Homo sapien
agttttacatggagtcttcgttgag

SEQ ID NO: 62488 - DNA, 25 bp, Homo sapien
agttttacatggtgtcttcgttgag

SEQ ID NO: 62489 - DNA, 25 bp, Homo sapien
actttacttgtgtcccgtcgaactg

SEQ ID NO: 62490 - DNA, 25 bp, Homo sapien
actttacttgtgacccgtcgaactg

SEQ ID NO: 62491 - DNA, 25 bp, Homo sapien
acgggtatcgtcataaacctcagaa

SEQ ID NO: 62492 - DNA, 25 bp, Homo sapien
acgggtatcgtcttaaacctcagaa

SEQ ID NO: 62493 - DNA, 25 bp, Homo sapien
ctgaggtccgagaccgtctacaccg

SEQ ID NO: 62494 - DNA, 25 bp, Homo sapien
ctgaggtccgagtccgtctacaccg

SEQ ID NO: 62495 - DNA, 25 bp, Homo sapien
aatgtgtctgtcctttctcccggcg

SEQ ID NO: 62496 - DNA, 25 bp, Homo sapien
aatgtgtctgtcgtttctcccggcg

SEQ ID NO: 62497 - DNA, 25 bp, Homo sapien
aacgatctgtttctcgtcacaggtt

SEQ ID NO: 62498 - DNA, 25 bp, Homo sapien
aacgatctgtttgtcgtcacaggtt

SEQ ID NO: 62499 - DNA, 25 bp, Homo sapien
agcctgtgtttctgcgaggcgtcgt

SEQ ID NO: 62500 - DNA, 25 bp, Homo sapien
agcctgtgtttcagcgaggcgtcgt

SEQ ID NO: 62501 - DNA, 25 bp, Homo sapien
cgaccggtggacgagtcacgtgcct

SEQ ID NO: 62502 - DNA, 25 bp, Homo sapien
cgaccggtggaccagtcacgtgcct

SEQ ID NO: 62503 - DNA, 25 bp, Homo sapien
cgcaccggtttgagtacctgtcggt

SEQ ID NO: 62504 - DNA, 25 bp, Homo sapien
cgcaccggtttgtgtacctgtcggt

SEQ ID NO: 62505 - DNA, 25 bp, Homo sapien
tggtggccaaacatttaaccgttgt

SEQ ID NO: 62506 - DNA, 25 bp, Homo sapien
tggtggccaaacttttaaccgttgt

SEQ ID NO: 62507 - DNA, 25 bp, Homo sapien
gtaaggcaagatcctttaaccgttg

SEQ ID NO: 62508 - DNA, 25 bp, Homo sapien
gtaaggcaagatgctttaaccgttg

SEQ ID NO: 62509 - DNA, 25 bp, Homo sapien
aacgagtacagtcttctaaagatgt

SEQ ID NO: 62510 - DNA, 25 bp, Homo sapien
aacgagtacagtgttctaaagatgt

SEQ ID NO: 62511 - DNA, 25 bp, Homo sapien
cgaacggtcgctcgagaaaatctgt

SEQ ID NO: 62512 - DNA, 25 bp, Homo sapien
cgaacggtcgctggagaaaatctgt

SEQ ID NO: 62513 - DNA, 25 bp, Homo sapien
cctaaggacgagagggactattcct

SEQ ID NO: 62514 - DNA, 25 bp, Homo sapien
cctaaggacgagtgggactattcct

SEQ ID NO: 62515 - DNA, 25 bp, Homo sapien
ttaggaataacacgttactgaaagt

SEQ ID NO: 62516 - DNA, 25 bp, Homo sapien
ttaggaataacaggttactgaaagt

SEQ ID NO: 62517 - DNA, 25 bp, Homo sapien
tcttatcaaatgttcagtcgagact

SEQ ID NO: 62518 - DNA, 25 bp, Homo sapien
tcttatcaaatgatcagtcgagact

SEQ ID NO: 62519 - DNA, 25 bp, Homo sapien
tttctttgaatctggtctggaccgt

SEQ ID NO: 62520 - DNA, 25 bp, Homo sapien
tttctttgaatcaggtctggaccgt

SEQ ID NO: 62521 - DNA, 25 bp, Homo sapien
ttatatcaattcatactttacgtct

SEQ ID NO: 62522 - DNA, 25 bp, Homo sapien
ttatatcaattcttactttacgtct

SEQ ID NO: 62523 - DNA, 25 bp, Homo sapien
tatccgtagtgatccctctactact

SEQ ID NO: 62524 - DNA, 25 bp, Homo sapien
tatccgtagtgaaccctctactact

SEQ ID NO: 62525 - DNA, 25 bp, Homo sapien
atatcgtacttgatagactcgtttt

SEQ ID NO: 62526 - DNA, 25 bp, Homo sapien
atatcgtacttgttagactcgtttt

SEQ ID NO: 62527 - DNA, 25 bp, Homo sapien
gtaaaatatcctttctattcaagtc

SEQ ID NO: 62528 - DNA, 25 bp, Homo sapien
gtaaaatatcctatctattcaagtc

SEQ ID NO: 62529 - DNA, 25 bp, Homo sapien
acacaagtgatttaaatctacacgg

SEQ ID NO: 62530 - DNA, 25 bp, Homo sapien
acacaagtgattaaaatctacacgg

SEQ ID NO: 62531 - DNA, 25 bp, Homo sapien
tgtcagacggtcacaaattacaggt

SEQ ID NO: 62532 - DNA, 25 bp, Homo sapien
tgtcagacggtctcaaattacaggt

SEQ ID NO: 62533 - DNA, 25 bp, Homo sapien
gcctttgaggtttattctctcccat

SEQ ID NO: 62534 - DNA, 25 bp, Homo sapien
gcctttgaggttaattctctcccat

SEQ ID NO: 62535 - DNA, 25 bp, Homo sapien
cccgaaggaggagaagtcatttcag

SEQ ID NO: 62536 - DNA, 25 bp, Homo sapien
cccgaaggaggacaagtcatttcag

SEQ ID NO: 62537 - DNA, 25 bp, Homo sapien
tgcgaagaggaggactccaccaagt

SEQ ID NO: 62538 - DNA, 25 bp, Homo sapien
tgcgaagaggagcactccaccaagt

SEQ ID NO: 62539 - DNA, 25 bp, Homo sapien
cgaaggagaagtcaatcacaaaatg

SEQ ID NO: 62540 - DNA, 25 bp, Homo sapien
cgaaggagaagtgaatcacaaaatg

SEQ ID NO: 62541 - DNA, 25 bp, Homo sapien
ccgaagtccccttcacgataagtgt

SEQ ID NO: 62542 - DNA, 25 bp, Homo sapien
ccgaagtcccctacacgataagtgt

SEQ ID NO: 62543 - DNA, 25 bp, Homo sapien
tcatgtccactctccgagtcgaggt

SEQ ID NO: 62544 - DNA, 25 bp, Homo sapien
tcatgtccactcaccgagtcgaggt

SEQ ID NO: 62545 - DNA, 25 bp, Homo sapien
ccggcgggtcgtaaccggtcgagac

SEQ ID NO: 62546 - DNA, 25 bp, Homo sapien
ccggcgggtcgttaccggtcgagac

SEQ ID NO: 62547 - DNA, 25 bp, Homo sapien
atccgagtggtttagtacattacac

SEQ ID NO: 62548 - DNA, 25 bp, Homo sapien
atccgagtggttaagtacattacac

SEQ ID NO: 62549 - DNA, 25 bp, Homo sapien
tcatggacgaacttcggtaatttat

SEQ ID NO: 62550 - DNA, 25 bp, Homo sapien
tcatggacgaacatcggtaatttat

SEQ ID NO: 62551 - DNA, 25 bp, Homo sapien
atattggtacagagtgaagttcagt

SEQ ID NO: 62552 - DNA, 25 bp, Homo sapien
atattggtacagtgtgaagttcagt

SEQ ID NO: 62553 - DNA, 25 bp, Homo sapien
gatattgtgtcaggatcatttctac

SEQ ID NO: 62554 - DNA, 25 bp, Homo sapien
gatattgtgtcacgatcatttctac

SEQ ID NO: 62555 - DNA, 25 bp, Homo sapien
gtctacagtgttccattctgggtct

SEQ ID NO: 62556 - DNA, 25 bp, Homo sapien
gtctacagtgttgcattctgggtct

SEQ ID NO: 62557 - DNA, 25 bp, Homo sapien
gtaccgaaaggcctgtcgtagaaac

SEQ ID NO: 62558 - DNA, 25 bp, Homo sapien
gtaccgaaaggcgtgtcgtagaaac

SEQ ID NO: 62559 - DNA, 25 bp, Homo sapien
gttcggaggcaggttttgtacagac

SEQ ID NO: 62560 - DNA, 25 bp, Homo sapien
gttcggaggcagcttttgtacagac

SEQ ID NO: 62561 - DNA, 25 bp, Homo sapien
ggaagggataggtcccattgaagac

SEQ ID NO: 62562 - DNA, 25 bp, Homo sapien
ggaagggataggacccattgaagac

SEQ ID NO: 62563 - DNA, 25 bp, Homo sapien
ctaagatcgacgaggtccgactcgt

SEQ ID NO: 62564 - DNA, 25 bp, Homo sapien
ctaagatcgacgtggtccgactcgt

SEQ ID NO: 62565 - DNA, 25 bp, Homo sapien
gtccggtcaacgttagcgacgttga

SEQ ID NO: 62566 - DNA, 25 bp, Homo sapien
gtccggtcaacgatagcgacgttga

SEQ ID NO: 62567 - DNA, 25 bp, Homo sapien
taattgcgcaagcgtcaacgtcgct

SEQ ID NO: 62568 - DNA, 25 bp, Homo sapien
taattgcgcaagggtcaacgtcgct

SEQ ID NO: 62569 - DNA, 25 bp, Homo sapien
ctattgtaatttgtctaattcggtc

SEQ ID NO: 62570 - DNA, 25 bp, Homo sapien
ctattgtaatttctctaattcggtc

SEQ ID NO: 62571 - DNA, 25 bp, Homo sapien
atagaacgagtgtcaacataggact

SEQ ID NO: 62572 - DNA, 25 bp, Homo sapien
atagaacgagtgacaacataggact

SEQ ID NO: 62573 - DNA, 25 bp, Homo sapien
ttatatgagacgtcaatgacgatac

SEQ ID NO: 62574 - DNA, 25 bp, Homo sapien
ttatatgagacgacaatgacgatac

SEQ ID NO: 62575 - DNA, 25 bp, Homo sapien
tttttaggggaccactaaccatact

SEQ ID NO: 62576 - DNA, 25 bp, Homo sapien
tttttaggggacgactaaccatact

SEQ ID NO: 62577 - DNA, 25 bp, Homo sapien
gactcacggtatgaggacctccttc

SEQ ID NO: 62578 - DNA, 25 bp, Homo sapien
gactcacggtatcaggacctccttc

SEQ ID NO: 62579 - DNA, 25 bp, Homo sapien
acactctcgtgtgttgacctccggc

SEQ ID NO: 62580 - DNA, 25 bp, Homo sapien
acactctcgtgtcttgacctccggc

SEQ ID NO: 62581 - DNA, 25 bp, Homo sapien
aaccactgtaacttcaccggtcaga

SEQ ID NO: 62582 - DNA, 25 bp, Homo sapien
aaccactgtaacatcaccggtcaga

SEQ ID NO: 62583 - DNA, 25 bp, Homo sapien
tcagtcaggtaaagtcacccttgtt

SEQ ID NO: 62584 - DNA, 25 bp, Homo sapien
tcagtcaggtaatgtcacccttgtt

SEQ ID NO: 62585 - DNA, 25 bp, Homo sapien
cgacgaaataagacaacaccgtcct

SEQ ID NO: 62586 - DNA, 25 bp, Homo sapien
cgacgaaataagtcaacaccgtcct

SEQ ID NO: 62587 - DNA, 25 bp, Homo sapien
gtacaaactctcttttgagacgtta

SEQ ID NO: 62588 - DNA, 25 bp, Homo sapien
gtacaaactctcatttgagacgtta

SEQ ID NO: 62589 - DNA, 25 bp, Homo sapien
ctaccactccggtttcggtgtgact

SEQ ID NO: 62590 - DNA, 25 bp, Homo sapien
ctaccactccggattcggtgtgact

SEQ ID NO: 62591 - DNA, 25 bp, Homo sapien
aatcaacgtatttcgtagtgtcacg

SEQ ID NO: 62592 - DNA, 25 bp, Homo sapien
aatcaacgtattacgtagtgtcacg

SEQ ID NO: 62593 - DNA, 25 bp, Homo sapien
gtgacaagagttcagagtgttcacg

SEQ ID NO: 62594 - DNA, 25 bp, Homo sapien
gtgacaagagttgagagtgttcacg

SEQ ID NO: 62595 - DNA, 25 bp, Homo sapien
gtaggaactagttgaggtcgaccag

SEQ ID NO: 62596 - DNA, 25 bp, Homo sapien
gtaggaactagtagaggtcgaccag

SEQ ID NO: 62597 - DNA, 25 bp, Homo sapien
gacatcaatgtcagggacgcttagt

SEQ ID NO: 62598 - DNA, 25 bp, Homo sapien
gacatcaatgtctgggacgcttagt

SEQ ID NO: 62599 - DNA, 25 bp, Homo sapien
atacgtctaagttggttatcgttac

SEQ ID NO: 62600 - DNA, 25 bp, Homo sapien
atacgtctaagtaggttatcgttac

SEQ ID NO: 62601 - DNA, 25 bp, Homo sapien
gtagacgaaggtacgaggtagtcca

SEQ ID NO: 62602 - DNA, 25 bp, Homo sapien
gtagacgaaggttcgaggtagtcca

SEQ ID NO: 62603 - DNA, 25 bp, Homo sapien
gtagacggagatacacgagacccac

SEQ ID NO: 62604 - DNA, 25 bp, Homo sapien
gtagacggagattcacgagacccac

SEQ ID NO: 62605 - DNA, 25 bp, Homo sapien
gtacgaccgaggtaccggtctccct

SEQ ID NO: 62606 - DNA, 25 bp, Homo sapien
gtacgaccgaggaaccggtctccct

SEQ ID NO: 62607 - DNA, 25 bp, Homo sapien
cagagaggatggtaccgggtcccct

SEQ ID NO: 62608 - DNA, 25 bp, Homo sapien
cagagaggatggaaccgggtcccct

SEQ ID NO: 62609 - DNA, 25 bp, Homo sapien
tacagaaactgaaccgggtctccca

SEQ ID NO: 62610 - DNA, 25 bp, Homo sapien
tacagaaactgatccgggtctccca

SEQ ID NO: 62611 - DNA, 25 bp, Homo sapien
cacgaataaagagagggtctcgcca

SEQ ID NO: 62612 - DNA, 25 bp, Homo sapien
cacgaataaagacagggtctcgcca

SEQ ID NO: 62613 - DNA, 25 bp, Homo sapien
aaatttcgtgtgtgtcatgtgtcac

SEQ ID NO: 62614 - DNA, 25 bp, Homo sapien
aaatttcgtgtgagtcatgtgtcac

SEQ ID NO: 62615 - DNA, 25 bp, Homo sapien
cgaaattgtagacagtcaattcgac

SEQ ID NO: 62616 - DNA, 25 bp, Homo sapien
cgaaattgtagagagtcaattcgac

SEQ ID NO: 62617 - DNA, 25 bp, Homo sapien
gtcgtaagttttagatcttcttcga

SEQ ID NO: 62618 - DNA, 25 bp, Homo sapien
gtcgtaagtttttgatcttcttcga

SEQ ID NO: 62619 - DNA, 25 bp, Homo sapien
agatttttactaaccgtctgtcagg

SEQ ID NO: 62620 - DNA, 25 bp, Homo sapien
agatttttactatccgtctgtcagg

SEQ ID NO: 62621 - DNA, 25 bp, Homo sapien
tcctttttactactgctcgtctagg

SEQ ID NO: 62622 - DNA, 25 bp, Homo sapien
tcctttttactagtgctcgtctagg

SEQ ID NO: 62623 - DNA, 25 bp, Homo sapien
cactgttcccgtagtcgattagaca

SEQ ID NO: 62624 - DNA, 25 bp, Homo sapien
cactgttcccgttgtcgattagaca

SEQ ID NO: 62625 - DNA, 25 bp, Homo sapien
gtcttttacactagtgctcgatgta

SEQ ID NO: 62626 - DNA, 25 bp, Homo sapien
gtcttttacacttgtgctcgatgta

SEQ ID NO: 62627 - DNA, 25 bp, Homo sapien
gcaccgtccatctttaccactgtag

SEQ ID NO: 62628 - DNA, 25 bp, Homo sapien
gcaccgtccatcattaccactgtag

SEQ ID NO: 62629 - DNA, 25 bp, Homo sapien
tcatttgtccacttggtcccggtcg

SEQ ID NO: 62630 - DNA, 25 bp, Homo sapien
tcatttgtccacatggtcccggtcg

SEQ ID NO: 62631 - DNA, 25 bp, Homo sapien
ttctttcagtactcgttgtccggtg

SEQ ID NO: 62632 - DNA, 25 bp, Homo sapien
ttctttcagtacacgttgtccggtg

SEQ ID NO: 62633 - DNA, 25 bp, Homo sapien
gcctcctcggtagtcaatcactaca

SEQ ID NO: 62634 - DNA, 25 bp, Homo sapien
gcctcctcggtactcaatcactaca

SEQ ID NO: 62635 - DNA, 25 bp, Homo sapien
gcttcgccaacatgaacgcctacat

SEQ ID NO: 62636 - DNA, 25 bp, Homo sapien
gcttcgccaacaagaacgcctacat

SEQ ID NO: 62637 - DNA, 25 bp, Homo sapien
tcctgccaagtaaacgagccgatat

SEQ ID NO: 62638 - DNA, 25 bp, Homo sapien
tcctgccaagtatacgagccgatat

SEQ ID NO: 62639 - DNA, 25 bp, Homo sapien
gtagactaaccgacgaagctctcga

SEQ ID NO: 62640 - DNA, 25 bp, Homo sapien
gtagactaaccgtcgaagctctcga

SEQ ID NO: 62641 - DNA, 25 bp, Homo sapien
tgaaaagtactctttcattcgtcga

SEQ ID NO: 62642 - DNA, 25 bp, Homo sapien
tgaaaagtactcattcattcgtcga

SEQ ID NO: 62643 - DNA, 25 bp, Homo sapien
gtctcgaggtctcctccgatgtgaa

SEQ ID NO: 62644 - DNA, 25 bp, Homo sapien
gtctcgaggtctgctccgatgtgaa

SEQ ID NO: 62645 - DNA, 25 bp, Homo sapien
tttgtgtcgtcgtacacggttgaga

SEQ ID NO: 62646 - DNA, 25 bp, Homo sapien
tttgtgtcgtcgaacacggttgaga

SEQ ID NO: 62647 - DNA, 25 bp, Homo sapien
gaggtttttccaatccttagtgata

SEQ ID NO: 62648 - DNA, 25 bp, Homo sapien
gaggtttttccattccttagtgata

SEQ ID NO: 62649 - DNA, 25 bp, Homo sapien
tccctgtcaccgttccttcgggtat

SEQ ID NO: 62650 - DNA, 25 bp, Homo sapien
tccctgtcaccgatccttcgggtat

SEQ ID NO: 62651 - DNA, 25 bp, Homo sapien
tttgagtcttcctattcgttctgaa

SEQ ID NO: 62652 - DNA, 25 bp, Homo sapien
tttgagtcttccaattcgttctgaa

SEQ ID NO: 62653 - DNA, 25 bp, Homo sapien
cacgaacgtcctaagtttttgactt

SEQ ID NO: 62654 - DNA, 25 bp, Homo sapien
cacgaacgtccttagtttttgactt

SEQ ID NO: 62655 - DNA, 25 bp, Homo sapien
gtttgacgtcctttgttatctacac

SEQ ID NO: 62656 - DNA, 25 bp, Homo sapien
gtttgacgtcctatgttatctacac

SEQ ID NO: 62657 - DNA, 25 bp, Homo sapien
aggtcgacagggatctttcgacgac

SEQ ID NO: 62658 - DNA, 25 bp, Homo sapien
aggtcgacagggttctttcgacgac

SEQ ID NO: 62659 - DNA, 25 bp, Homo sapien
tcggtgctgagctactcgtcgtccc

SEQ ID NO: 62660 - DNA, 25 bp, Homo sapien
tcggtgctgagcaactcgtcgtccc

SEQ ID NO: 62661 - DNA, 25 bp, Homo sapien
ggtgtgtcgtgtgattacactccca

SEQ ID NO: 62662 - DNA, 25 bp, Homo sapien
ggtgtgtcgtgtcattacactccca

SEQ ID NO: 62663 - DNA, 25 bp, Homo sapien
aataggagtcactagacatctctca

SEQ ID NO: 62664 - DNA, 25 bp, Homo sapien
aataggagtcacaagacatctctca

SEQ ID NO: 62665 - DNA, 25 bp, Homo sapien
aatccgaaaatagtagtctacacga

SEQ ID NO: 62666 - DNA, 25 bp, Homo sapien
aatccgaaaatactagtctacacga

SEQ ID NO: 62667 - DNA, 25 bp, Homo sapien
ttacccgctacaaagagtcccgacg

SEQ ID NO: 62668 - DNA, 25 bp, Homo sapien
ttacccgctacatagagtcccgacg

SEQ ID NO: 62669 - DNA, 25 bp, Homo sapien
ctgaaagttatctagcgtcgctccc

SEQ ID NO: 62670 - DNA, 25 bp, Homo sapien
ctgaaagttatcaagcgtcgctccc

SEQ ID NO: 62671 - DNA, 25 bp, Homo sapien
actgaaaacccgactatagaacccg

SEQ ID NO: 62672 - DNA, 25 bp, Homo sapien
actgaaaacccgtctatagaacccg

SEQ ID NO: 62673 - DNA, 25 bp, Homo sapien
ctgacgtcaaaatgtttttacccgt

SEQ ID NO: 62674 - DNA, 25 bp, Homo sapien
ctgacgtcaaaaagtttttacccgt

SEQ ID NO: 62675 - DNA, 25 bp, Homo sapien
tagacacggtaaaagttttcattac

SEQ ID NO: 62676 - DNA, 25 bp, Homo sapien
tagacacggtaatagttttcattac

SEQ ID NO: 62677 - DNA, 25 bp, Homo sapien
cgagagactctcgttaagttttgaa

SEQ ID NO: 62678 - DNA, 25 bp, Homo sapien
cgagagactctccttaagttttgaa

SEQ ID NO: 62679 - DNA, 25 bp, Homo sapien
gactgtccaccttcattgtactgaa

SEQ ID NO: 62680 - DNA, 25 bp, Homo sapien
gactgtccacctacattgtactgaa

SEQ ID NO: 62681 - DNA, 25 bp, Homo sapien
gatcgtccgtcgtcaactttcctta

SEQ ID NO: 62682 - DNA, 25 bp, Homo sapien
gatcgtccgtcgacaactttcctta

SEQ ID NO: 62683 - DNA, 25 bp, Homo sapien
tagtactcttcaatgggtcactctc

SEQ ID NO: 62684 - DNA, 25 bp, Homo sapien
tagtactcttcattgggtcactctc

SEQ ID NO: 62685 - DNA, 25 bp, Homo sapien
attactctgacttcagagggtatac

SEQ ID NO: 62686 - DNA, 25 bp, Homo sapien
attactctgactacagagggtatac

SEQ ID NO: 62687 - DNA, 25 bp, Homo sapien
taacgactcgggtggtaccggtcac

SEQ ID NO: 62688 - DNA, 25 bp, Homo sapien
taacgactcgggaggtaccggtcac

SEQ ID NO: 62689 - DNA, 25 bp, Homo sapien
ctacaggtagggtagactatgggac

SEQ ID NO: 62690 - DNA, 25 bp, Homo sapien
ctacaggtagggaagactatgggac

SEQ ID NO: 62691 - DNA, 25 bp, Homo sapien
gattttacagacacctatggtgtga

SEQ ID NO: 62692 - DNA, 25 bp, Homo sapien
gattttacagactcctatggtgtga

SEQ ID NO: 62693 - DNA, 25 bp, Homo sapien
tacgtccggccttgtaaggtgtcag

SEQ ID NO: 62694 - DNA, 25 bp, Homo sapien
tacgtccggcctagtaaggtgtcag

SEQ ID NO: 62695 - DNA, 25 bp, Homo sapien
gtgttaccccatttacgagactacc

SEQ ID NO: 62696 - DNA, 25 bp, Homo sapien
gtgttaccccatatacgagactacc

SEQ ID NO: 62697 - DNA, 25 bp, Homo sapien
ggagtcactcaacataacacgctct

SEQ ID NO: 62698 - DNA, 25 bp, Homo sapien
ggagtcactcaagataacacgctct

SEQ ID NO: 62699 - DNA, 25 bp, Homo sapien
aagtcctactgttcggtagtcctcc

SEQ ID NO: 62700 - DNA, 25 bp, Homo sapien
aagtcctactgtacggtagtcctcc

SEQ ID NO: 62701 - DNA, 25 bp, Homo sapien
atatacactgtgtcggtacactccg

SEQ ID NO: 62702 - DNA, 25 bp, Homo sapien
atatacactgtgacggtacactccg

SEQ ID NO: 62703 - DNA, 25 bp, Homo sapien
ccgtatacatgtttagtgtcactaa

SEQ ID NO: 62704 - DNA, 25 bp, Homo sapien
ccgtatacatgtatagtgtcactaa

SEQ ID NO: 62705 - DNA, 25 bp, Homo sapien
ctcgaccttgtactggtctagacag

SEQ ID NO: 62706 - DNA, 25 bp, Homo sapien
ctcgaccttgtagtggtctagacag

SEQ ID NO: 62707 - DNA, 25 bp, Homo sapien
ctcttctgtctacgagtttcgtctg

SEQ ID NO: 62708 - DNA, 25 bp, Homo sapien
ctcttctgtctaggagtttcgtctg

SEQ ID NO: 62709 - DNA, 25 bp, Homo sapien
ctaactctttcgtgaggaatttctt

SEQ ID NO: 62710 - DNA, 25 bp, Homo sapien
ctaactctttcgagaggaatttctt

SEQ ID NO: 62711 - DNA, 25 bp, Homo sapien
ctgtatctcgaaagcgttgttcttc

SEQ ID NO: 62712 - DNA, 25 bp, Homo sapien
ctgtatctcgaatgcgttgttcttc

SEQ ID NO: 62713 - DNA, 25 bp, Homo sapien
tcttcgtttgaagacttcctctatg

SEQ ID NO: 62714 - DNA, 25 bp, Homo sapien
tcttcgtttgaacacttcctctatg

SEQ ID NO: 62715 - DNA, 25 bp, Homo sapien
agttcatgtgatcacttatcgttca

SEQ ID NO: 62716 - DNA, 25 bp, Homo sapien
agttcatgtgatgacttatcgttca

SEQ ID NO: 62717 - DNA, 25 bp, Homo sapien
ggtacaagttctcagtgactcaaga

SEQ ID NO: 62718 - DNA, 25 bp, Homo sapien
ggtacaagttctgagtgactcaaga

SEQ ID NO: 62719 - DNA, 25 bp, Homo sapien
tttaactagagtcttagtcttagtc

SEQ ID NO: 62720 - DNA, 25 bp, Homo sapien
tttaactagagtgttagtcttagtc

SEQ ID NO: 62721 - DNA, 25 bp, Homo sapien
taggttactaatgatcgtgatcttc

SEQ ID NO: 62722 - DNA, 25 bp, Homo sapien
taggttactaatcatcgtgatcttc

SEQ ID NO: 62723 - DNA, 25 bp, Homo sapien
ccaggtttatgtcacggtcacttta

SEQ ID NO: 62724 - DNA, 25 bp, Homo sapien
ccaggtttatgtgacggtcacttta

SEQ ID NO: 62725 - DNA, 25 bp, Homo sapien
caaatttagtcgtcgttcgtaatcc

SEQ ID NO: 62726 - DNA, 25 bp, Homo sapien
caaatttagtcgacgttcgtaatcc

SEQ ID NO: 62727 - DNA, 25 bp, Homo sapien
gtaagttctaattcagacccaataa

SEQ ID NO: 62728 - DNA, 25 bp, Homo sapien
gtaagttctaatacagacccaataa

SEQ ID NO: 62729 - DNA, 25 bp, Homo sapien
agagaaaagttaacccccagtagac

SEQ ID NO: 62730 - DNA, 25 bp, Homo sapien
agagaaaagttatcccccagtagac

SEQ ID NO: 62731 - DNA, 25 bp, Homo sapien
ttgatccatctggtcccaagacact

SEQ ID NO: 62732 - DNA, 25 bp, Homo sapien
ttgatccatctgctcccaagacact

SEQ ID NO: 62733 - DNA, 25 bp, Homo sapien
gaacgactacacctttccaagatag

SEQ ID NO: 62734 - DNA, 25 bp, Homo sapien
gaacgactacacgtttccaagatag

SEQ ID NO: 62735 - DNA, 25 bp, Homo sapien
agaagtacaactgtcacttctgtac

SEQ ID NO: 62736 - DNA, 25 bp, Homo sapien
agaagtacaactctcacttctgtac

SEQ ID NO: 62737 - DNA, 25 bp, Homo sapien
agacagacagatatgacgtcgggta

SEQ ID NO: 62738 - DNA, 25 bp, Homo sapien
agacagacagatttgacgtcgggta

SEQ ID NO: 62739 - DNA, 25 bp, Homo sapien
aaccacgtagagtcggatcgacagg

SEQ ID NO: 62740 - DNA, 25 bp, Homo sapien
aaccacgtagagacggatcgacagg

SEQ ID NO: 62741 - DNA, 25 bp, Homo sapien
tgactgacactgaggggctacccga

SEQ ID NO: 62742 - DNA, 25 bp, Homo sapien
tgactgacactgtggggctacccga

SEQ ID NO: 62743 - DNA, 25 bp, Homo sapien
gacactccgacttgtgagagaccaa

SEQ ID NO: 62744 - DNA, 25 bp, Homo sapien
gacactccgactagtgagagaccaa

SEQ ID NO: 62745 - DNA, 25 bp, Homo sapien
gacgaccccgaaggtggtgtcaaca

SEQ ID NO: 62746 - DNA, 25 bp, Homo sapien
gacgaccccgaacgtggtgtcaaca

SEQ ID NO: 62747 - DNA, 25 bp, Homo sapien
gacgcctctctcatcggggtttagg

SEQ ID NO: 62748 - DNA, 25 bp, Homo sapien
gacgcctctctcttcggggtttagg

SEQ ID NO: 62749 - DNA, 25 bp, Homo sapien
aacccctttcgtggtaccgtgcagg

SEQ ID NO: 62750 - DNA, 25 bp, Homo sapien
aacccctttcgtcgtaccgtgcagg

SEQ ID NO: 62751 - DNA, 25 bp, Homo sapien
gactcccggtttcgaagtagaccgc

SEQ ID NO: 62752 - DNA, 25 bp, Homo sapien
gactcccggtttggaagtagaccgc

SEQ ID NO: 62753 - DNA, 25 bp, Homo sapien
ccgagacgttcacgagacaaagtgt

SEQ ID NO: 62754 - DNA, 25 bp, Homo sapien
ccgagacgttcaggagacaaagtgt

SEQ ID NO: 62755 - DNA, 25 bp, Homo sapien
cccgtgaaaccctgaacgacggagg

SEQ ID NO: 62756 - DNA, 25 bp, Homo sapien
cccgtgaaacccagaacgacggagg

SEQ ID NO: 62757 - DNA, 25 bp, Homo sapien
tctgtatgtcttcgtcacgaaagag

SEQ ID NO: 62758 - DNA, 25 bp, Homo sapien
tctgtatgtcttggtcacgaaagag

SEQ ID NO: 62759 - DNA, 25 bp, Homo sapien
tctggtaattcgtcgacgtagaaga

SEQ ID NO: 62760 - DNA, 25 bp, Homo sapien
tctggtaattcgacgacgtagaaga

SEQ ID NO: 62761 - DNA, 25 bp, Homo sapien
tcgggtggtccgaacgtccagacga

SEQ ID NO: 62762 - DNA, 25 bp, Homo sapien
tcgggtggtccgtacgtccagacga

SEQ ID NO: 62763 - DNA, 25 bp, Homo sapien
cggagtcgtccctcgtcgagtgact

SEQ ID NO: 62764 - DNA, 25 bp, Homo sapien
cggagtcgtcccacgtcgagtgact

SEQ ID NO: 62765 - DNA, 25 bp, Homo sapien
gtcaccgactcaccaagtgtacaga

SEQ ID NO: 62766 - DNA, 25 bp, Homo sapien
gtcaccgactcagcaagtgtacaga

SEQ ID NO: 62767 - DNA, 25 bp, Homo sapien
cacttacgagactgggtatatcaaa

SEQ ID NO: 62768 - DNA, 25 bp, Homo sapien
cacttacgagacagggtatatcaaa

SEQ ID NO: 62769 - DNA, 25 bp, Homo sapien
ccaaatcgacctgtactacacgaag

SEQ ID NO: 62770 - DNA, 25 bp, Homo sapien
ccaaatcgacctctactacacgaag

SEQ ID NO: 62771 - DNA, 25 bp, Homo sapien
tatatctgtctctaccgtacgatag

SEQ ID NO: 62772 - DNA, 25 bp, Homo sapien
tatatctgtctcaaccgtacgatag

SEQ ID NO: 62773 - DNA, 25 bp, Homo sapien
gcgcttttcgtctagcgcgtcggtc

SEQ ID NO: 62774 - DNA, 25 bp, Homo sapien
gcgcttttcgtcaagcgcgtcggtc

SEQ ID NO: 62775 - DNA, 25 bp, Homo sapien
aggcattgttgtgtcgtaccagtcg

SEQ ID NO: 62776 - DNA, 25 bp, Homo sapien
aggcattgttgtctcgtaccagtcg

SEQ ID NO: 62777 - DNA, 25 bp, Homo sapien
tcgtgcattgtttcatacacgaaac

SEQ ID NO: 62778 - DNA, 25 bp, Homo sapien
tcgtgcattgttacatacacgaaac

SEQ ID NO: 62779 - DNA, 25 bp, Homo sapien
aggaattctacctgacgatatcaaa

SEQ ID NO: 62780 - DNA, 25 bp, Homo sapien
aggaattctaccagacgatatcaaa

SEQ ID NO: 62781 - DNA, 25 bp, Homo sapien
tctctccaccgaagtctaccgagaa

SEQ ID NO: 62782 - DNA, 25 bp, Homo sapien
tctctccaccgatgtctaccgagaa

SEQ ID NO: 62783 - DNA, 25 bp, Homo sapien
ttccgtccaggttccgtgtcgtaca

SEQ ID NO: 62784 - DNA, 25 bp, Homo sapien
ttccgtccaggtaccgtgtcgtaca

SEQ ID NO: 62785 - DNA, 25 bp, Homo sapien
ggtacgtctccattgactgttatga

SEQ ID NO: 62786 - DNA, 25 bp, Homo sapien
ggtacgtctccaatgactgttatga

SEQ ID NO: 62787 - DNA, 25 bp, Homo sapien
tacgataactgtttgtctagtttca

SEQ ID NO: 62788 - DNA, 25 bp, Homo sapien
tacgataactgtatgtctagtttca

SEQ ID NO: 62789 - DNA, 25 bp, Homo sapien
tctttaaattgattttgtcgacgtc

SEQ ID NO: 62790 - DNA, 25 bp, Homo sapien
tctttaaattgaatttgtcgacgtc

SEQ ID NO: 62791 - DNA, 25 bp, Homo sapien
ctttctaaatttggtttcggagtct

SEQ ID NO: 62792 - DNA, 25 bp, Homo sapien
ctttctaaatttcgtttcggagtct

SEQ ID NO: 62793 - DNA, 25 bp, Homo sapien
taagatagaaaaacgtgttcaacct

SEQ ID NO: 62794 - DNA, 25 bp, Homo sapien
taagatagaaaatcgtgttcaacct

SEQ ID NO: 62795 - DNA, 25 bp, Homo sapien
gaaacatgaaaagtcgtatcaacgc

SEQ ID NO: 62796 - DNA, 25 bp, Homo sapien
gaaacatgaaaactcgtatcaacgc

SEQ ID NO: 62797 - DNA, 25 bp, Homo sapien
gataataggtctatcactgtttctt

SEQ ID NO: 62798 - DNA, 25 bp, Homo sapien
gataataggtctttcactgtttctt

SEQ ID NO: 62799 - DNA, 25 bp, Homo sapien
cgtagactggattttgtgttatctc

SEQ ID NO: 62800 - DNA, 25 bp, Homo sapien
cgtagactggatattgtgttatctc

SEQ ID NO: 62801 - DNA, 25 bp, Homo sapien
atcttggtacgtggttgttcccgtc

SEQ ID NO: 62802 - DNA, 25 bp, Homo sapien
atcttggtacgtcgttgttcccgtc

SEQ ID NO: 62803 - DNA, 25 bp, Homo sapien
aatctatgacttgttttgacatcgt

SEQ ID NO: 62804 - DNA, 25 bp, Homo sapien
aatctatgacttcttttgacatcgt

SEQ ID NO: 62805 - DNA, 25 bp, Homo sapien
aaggtgacgtcgatctctttgaggc

SEQ ID NO: 62806 - DNA, 25 bp, Homo sapien
aaggtgacgtcgttctctttgaggc

SEQ ID NO: 62807 - DNA, 25 bp, Homo sapien
aaaggtacgtgtaccctgcacggct

SEQ ID NO: 62808 - DNA, 25 bp, Homo sapien
aaaggtacgtgttccctgcacggct

SEQ ID NO: 62809 - DNA, 25 bp, Homo sapien
tacttgtcgggtaaacttttgttac

SEQ ID NO: 62810 - DNA, 25 bp, Homo sapien
tacttgtcgggttaacttttgttac

SEQ ID NO: 62811 - DNA, 25 bp, Homo sapien
acttgtcaggtcaatgttactttag

SEQ ID NO: 62812 - DNA, 25 bp, Homo sapien
acttgtcaggtctatgttactttag

SEQ ID NO: 62813 - DNA, 25 bp, Homo sapien
ggttgtactaggacattctgtcggg

SEQ ID NO: 62814 - DNA, 25 bp, Homo sapien
ggttgtactaggtcattctgtcggg

SEQ ID NO: 62815 - DNA, 25 bp, Homo sapien
gtcgagtgtccaatcgctcgtcggt

SEQ ID NO: 62816 - DNA, 25 bp, Homo sapien
gtcgagtgtccattcgctcgtcggt

SEQ ID NO: 62817 - DNA, 25 bp, Homo sapien
acggtcggcgttctctgacaaccga

SEQ ID NO: 62818 - DNA, 25 bp, Homo sapien
acggtcggcgttgtctgacaaccga

SEQ ID NO: 62819 - DNA, 25 bp, Homo sapien
cggggtcgtcttcgtcccgagtcag

SEQ ID NO: 62820 - DNA, 25 bp, Homo sapien
cggggtcgtcttggtcccgagtcag

SEQ ID NO: 62821 - DNA, 25 bp, Homo sapien
cgaggaagactccaggtccggtcct

SEQ ID NO: 62822 - DNA, 25 bp, Homo sapien
cgaggaagactcgaggtccggtcct

SEQ ID NO: 62823 - DNA, 25 bp, Homo sapien
acatagtagtcatcggtcacgtttt

SEQ ID NO: 62824 - DNA, 25 bp, Homo sapien
acatagtagtcaacggtcacgtttt

SEQ ID NO: 62825 - DNA, 25 bp, Homo sapien
tcgactgtttaccgactgtcctttt

SEQ ID NO: 62826 - DNA, 25 bp, Homo sapien
tcgactgtttacggactgtcctttt

SEQ ID NO: 62827 - DNA, 25 bp, Homo sapien
ctatataagtacgacgaaagtcttt

SEQ ID NO: 62828 - DNA, 25 bp, Homo sapien
ctatataagtaccacgaaagtcttt

SEQ ID NO: 62829 - DNA, 25 bp, Homo sapien
cattctagactcgagagacgtttcg

SEQ ID NO: 62830 - DNA, 25 bp, Homo sapien
cattctagactccagagacgtttcg

SEQ ID NO: 62831 - DNA, 25 bp, Homo sapien
aaagaccgcaaaccaggtgctgtag

SEQ ID NO: 62832 - DNA, 25 bp, Homo sapien
aaagaccgcaaagcaggtgctgtag

SEQ ID NO: 62833 - DNA, 25 bp, Homo sapien
tgtataagaacaacaagtgtctccg

SEQ ID NO: 62834 - DNA, 25 bp, Homo sapien
tgtataagaacatcaagtgtctccg

SEQ ID NO: 62835 - DNA, 25 bp, Homo sapien
gtatgaggtggtaaaaccgttttcc

SEQ ID NO: 62836 - DNA, 25 bp, Homo sapien
gtatgaggtggttaaaccgttttcc

SEQ ID NO: 62837 - DNA, 25 bp, Homo sapien
ggagtggtggagaccttatctctcg

SEQ ID NO: 62838 - DNA, 25 bp, Homo sapien
ggagtggtggagtccttatctctcg

SEQ ID NO: 62839 - DNA, 25 bp, Homo sapien
cgaacttttgggaacctttgactcg

SEQ ID NO: 62840 - DNA, 25 bp, Homo sapien
cgaacttttgggtacctttgactcg

SEQ ID NO: 62841 - DNA, 25 bp, Homo sapien
cccgtggtcccctgtgggtagacag

SEQ ID NO: 62842 - DNA, 25 bp, Homo sapien
cccgtggtccccagtgggtagacag

SEQ ID NO: 62843 - DNA, 25 bp, Homo sapien
ctgaagtttctactgtgtcgtcggt

SEQ ID NO: 62844 - DNA, 25 bp, Homo sapien
ctgaagtttctagtgtgtcgtcggt

SEQ ID NO: 62845 - DNA, 25 bp, Homo sapien
ctccagatgcgactcgagcgcgtcg

SEQ ID NO: 62846 - DNA, 25 bp, Homo sapien
ctccagatgcgagtcgagcgcgtcg

SEQ ID NO: 62847 - DNA, 25 bp, Homo sapien
tgacccgggtgaatatcactacggc

SEQ ID NO: 62848 - DNA, 25 bp, Homo sapien
tgacccgggtgattatcactacggc

SEQ ID NO: 62849 - DNA, 25 bp, Homo sapien
ataacactccctttatgtttacggg

SEQ ID NO: 62850 - DNA, 25 bp, Homo sapien
ataacactccctatatgtttacggg

SEQ ID NO: 62851 - DNA, 25 bp, Homo sapien
aacgtcgggaacacggtcaacgaga

SEQ ID NO: 62852 - DNA, 25 bp, Homo sapien
aacgtcgggaactcggtcaacgaga

SEQ ID NO: 62853 - DNA, 25 bp, Homo sapien
aacttcagtttcgtctacagactag

SEQ ID NO: 62854 - DNA, 25 bp, Homo sapien
aacttcagtttcctctacagactag

SEQ ID NO: 62855 - DNA, 25 bp, Homo sapien
gcagaaggttgtttccatacagaag

SEQ ID NO: 62856 - DNA, 25 bp, Homo sapien
gcagaaggttgtatccatacagaag

SEQ ID NO: 62857 - DNA, 25 bp, Homo sapien
aacgaacggttttatgttagcacaa

SEQ ID NO: 62858 - DNA, 25 bp, Homo sapien
aacgaacggtttaatgttagcacaa

SEQ ID NO: 62859 - DNA, 25 bp, Homo sapien
ccttcgcccaaaggacgctaagacg

SEQ ID NO: 62860 - DNA, 25 bp, Homo sapien
ccttcgcccaaacgacgctaagacg

SEQ ID NO: 62861 - DNA, 25 bp, Homo sapien
gtagtccgtccacacaaatgagacg

SEQ ID NO: 62862 - DNA, 25 bp, Homo sapien
gtagtccgtccagacaaatgagacg

SEQ ID NO: 62863 - DNA, 25 bp, Homo sapien
tgggtagacggagatacacgagacc

SEQ ID NO: 62864 - DNA, 25 bp, Homo sapien
tgggtagacggacatacacgagacc

SEQ ID NO: 62865 - DNA, 25 bp, Homo sapien
tgtgtcgaggaacatctagacggct

SEQ ID NO: 62866 - DNA, 25 bp, Homo sapien
tgtgtcgaggaagatctagacggct

SEQ ID NO: 62867 - DNA, 25 bp, Homo sapien
cgagtttcttaaaagatcgtatttc

SEQ ID NO: 62868 - DNA, 25 bp, Homo sapien
cgagtttcttaatagatcgtatttc

SEQ ID NO: 62869 - DNA, 25 bp, Homo sapien
caggtatcatcatgacgaatattaa

SEQ ID NO: 62870 - DNA, 25 bp, Homo sapien
caggtatcatcaagacgaatattaa

SEQ ID NO: 62871 - DNA, 25 bp, Homo sapien
tctctgttaatggaccaagatgaat

SEQ ID NO: 62872 - DNA, 25 bp, Homo sapien
tctctgttaatgcaccaagatgaat

SEQ ID NO: 62873 - DNA, 25 bp, Homo sapien
tgttcagttttgtacctaaaagatc

SEQ ID NO: 62874 - DNA, 25 bp, Homo sapien
tgttcagttttgaacctaaaagatc

SEQ ID NO: 62875 - DNA, 25 bp, Homo sapien
ggtgtcccggggacccagacactaa

SEQ ID NO: 62876 - DNA, 25 bp, Homo sapien
ggtgtcccggggtcccagacactaa

SEQ ID NO: 62877 - DNA, 25 bp, Homo sapien
aggacctcggggacttactctcaaa

SEQ ID NO: 62878 - DNA, 25 bp, Homo sapien
aggacctcggggtcttactctcaaa

SEQ ID NO: 62879 - DNA, 25 bp, Homo sapien
tccctggtcccttcgtgtcagacga

SEQ ID NO: 62880 - DNA, 25 bp, Homo sapien
tccctggtccctacgtgtcagacga

SEQ ID NO: 62881 - DNA, 25 bp, Homo sapien
cctccgtggccgagacttcgatcga

SEQ ID NO: 62882 - DNA, 25 bp, Homo sapien
cctccgtggccgtgacttcgatcga

SEQ ID NO: 62883 - DNA, 25 bp, Homo sapien
gacgtgggaacaacttacctaaacc

SEQ ID NO: 62884 - DNA, 25 bp, Homo sapien
gacgtgggaacatcttacctaaacc

SEQ ID NO: 62885 - DNA, 25 bp, Homo sapien
gatcggagggaaagagtctaaacct

SEQ ID NO: 62886 - DNA, 25 bp, Homo sapien
gatcggagggaatgagtctaaacct

SEQ ID NO: 62887 - DNA, 25 bp, Homo sapien
ctgagtcaatattacgtcgtaaatt

SEQ ID NO: 62888 - DNA, 25 bp, Homo sapien
ctgagtcaatataacgtcgtaaatt

SEQ ID NO: 62889 - DNA, 25 bp, Homo sapien
aaaagtctttccactaactttaggg

SEQ ID NO: 62890 - DNA, 25 bp, Homo sapien
aaaagtctttcctctaactttaggg

SEQ ID NO: 62891 - DNA, 25 bp, Homo sapien
gaagattccctttaattgtacgtgg

SEQ ID NO: 62892 - DNA, 25 bp, Homo sapien
gaagattcccttaaattgtacgtgg

SEQ ID NO: 62893 - DNA, 25 bp, Homo sapien
catcttacccgtagaggtttctcat

SEQ ID NO: 62894 - DNA, 25 bp, Homo sapien
catcttacccgttgaggtttctcat

SEQ ID NO: 62895 - DNA, 25 bp, Homo sapien
cctataggatggagatcgactccca

SEQ ID NO: 62896 - DNA, 25 bp, Homo sapien
cctataggatggtgatcgactccca

SEQ ID NO: 62897 - DNA, 25 bp, Homo sapien
ggtatgttgttaagaccttacgact

SEQ ID NO: 62898 - DNA, 25 bp, Homo sapien
ggtatgttgttatgaccttacgact

SEQ ID NO: 62899 - DNA, 25 bp, Homo sapien
agagggacgcgaatcagggtttcct

SEQ ID NO: 62900 - DNA, 25 bp, Homo sapien
agagggacgcgattcagggtttcct

SEQ ID NO: 62901 - DNA, 25 bp, Homo sapien
gcgactggtccttcgggaccttcct

SEQ ID NO: 62902 - DNA, 25 bp, Homo sapien
gcgactggtcctacgggaccttcct

SEQ ID NO: 62903 - DNA, 25 bp, Homo sapien
tgacgtggaccgacggttagctaaa

SEQ ID NO: 62904 - DNA, 25 bp, Homo sapien
tgacgtggaccgtcggttagctaaa

SEQ ID NO: 62905 - DNA, 25 bp, Homo sapien
tccgcgcggtgtgtccgcgacatcg

SEQ ID NO: 62906 - DNA, 25 bp, Homo sapien
tccgcgcggtgtctccgcgacatcg

SEQ ID NO: 62907 - DNA, 25 bp, Homo sapien
gtccgacccgacaggtgcggacctt

SEQ ID NO: 62908 - DNA, 25 bp, Homo sapien
gtccgacccgactggtgcggacctt

SEQ ID NO: 62909 - DNA, 25 bp, Homo sapien
ggtagtccctgaactcccggaccag

SEQ ID NO: 62910 - DNA, 25 bp, Homo sapien
ggtagtccctgatctcccggaccag

SEQ ID NO: 62911 - DNA, 25 bp, Homo sapien
agctggcagactcgtcggtcgaagt

SEQ ID NO: 62912 - DNA, 25 bp, Homo sapien
agctggcagactggtcggtcgaagt

SEQ ID NO: 62913 - DNA, 25 bp, Homo sapien
gcggctcacgccggtcgagacgagg

SEQ ID NO: 62914 - DNA, 25 bp, Homo sapien
gcggctcacgcccgtcgagacgagg

SEQ ID NO: 62915 - DNA, 25 bp, Homo sapien
gccggctcaagaccacgcgccgccg

SEQ ID NO: 62916 - DNA, 25 bp, Homo sapien
gccggctcaagagcacgcgccgccg

SEQ ID NO: 62917 - DNA, 25 bp, Homo sapien
cggacccgaggtacggtgtcgtacc

SEQ ID NO: 62918 - DNA, 25 bp, Homo sapien
cggacccgaggttcggtgtcgtacc

SEQ ID NO: 62919 - DNA, 25 bp, Homo sapien
atgtctcggaggtccgtcacgatac

SEQ ID NO: 62920 - DNA, 25 bp, Homo sapien
atgtctcggaggaccgtcacgatac

SEQ ID NO: 62921 - DNA, 25 bp, Homo sapien
cacttgagataggagttcatacaga

SEQ ID NO: 62922 - DNA, 25 bp, Homo sapien
cacttgagatagcagttcatacaga

SEQ ID NO: 62923 - DNA, 25 bp, Homo sapien
tatcttttggaacctctttgtgaga

SEQ ID NO: 62924 - DNA, 25 bp, Homo sapien
tatcttttggaagctctttgtgaga

SEQ ID NO: 62925 - DNA, 25 bp, Homo sapien
gaagtggtggtacctcttccgaccc

SEQ ID NO: 62926 - DNA, 25 bp, Homo sapien
gaagtggtggtagctcttccgaccc

SEQ ID NO: 62927 - DNA, 25 bp, Homo sapien
ccaattacatggaccgtcccggcgg

SEQ ID NO: 62928 - DNA, 25 bp, Homo sapien
ccaattacatggtccgtcccggcgg

SEQ ID NO: 62929 - DNA, 25 bp, Homo sapien
aaagacccctcgtggcgtccgagga

SEQ ID NO: 62930 - DNA, 25 bp, Homo sapien
aaagacccctcgaggcgtccgagga

SEQ ID NO: 62931 - DNA, 25 bp, Homo sapien
agacccgtcgccagtggcctgaaac

SEQ ID NO: 62932 - DNA, 25 bp, Homo sapien
agacccgtcgcctgtggcctgaaac

SEQ ID NO: 62933 - DNA, 25 bp, Homo sapien
ttatcttctctgtgccactcggtaa

SEQ ID NO: 62934 - DNA, 25 bp, Homo sapien
ttatcttctctgagccactcggtaa

SEQ ID NO: 62935 - DNA, 25 bp, Homo sapien
tatatttcattgaaggtccggtaac

SEQ ID NO: 62936 - DNA, 25 bp, Homo sapien
tatatttcattgtaggtccggtaac

SEQ ID NO: 62937 - DNA, 25 bp, Homo sapien
gttttcgtccattgtggtttcatga

SEQ ID NO: 62938 - DNA, 25 bp, Homo sapien
gttttcgtccatagtggtttcatga

SEQ ID NO: 62939 - DNA, 25 bp, Homo sapien
gttgtttaaacagtgtaacccggac

SEQ ID NO: 62940 - DNA, 25 bp, Homo sapien
gttgtttaaacactgtaacccggac

SEQ ID NO: 62941 - DNA, 25 bp, Homo sapien
ccttcttggttgtgagtcctcgggt

SEQ ID NO: 62942 - DNA, 25 bp, Homo sapien
ccttcttggttgagagtcctcgggt

SEQ ID NO: 62943 - DNA, 25 bp, Homo sapien
gttcacccgaggatacggtcttttt

SEQ ID NO: 62944 - DNA, 25 bp, Homo sapien
gttcacccgaggttacggtcttttt

SEQ ID NO: 62945 - DNA, 25 bp, Homo sapien
gattcggtctgagaatgtcgattcc

SEQ ID NO: 62946 - DNA, 25 bp, Homo sapien
gattcggtctgacaatgtcgattcc

SEQ ID NO: 62947 - DNA, 25 bp, Homo sapien
tagtcacaaaggtatgtcatgtcct

SEQ ID NO: 62948 - DNA, 25 bp, Homo sapien
tagtcacaaaggaatgtcatgtcct

SEQ ID NO: 62949 - DNA, 25 bp, Homo sapien
atacgtcaagggacttctagtttct

SEQ ID NO: 62950 - DNA, 25 bp, Homo sapien
atacgtcaagggtcttctagtttct

SEQ ID NO: 62951 - DNA, 25 bp, Homo sapien
tgtgcattcgcaacgttcgtgtccc

SEQ ID NO: 62952 - DNA, 25 bp, Homo sapien
tgtgcattcgcatcgttcgtgtccc

SEQ ID NO: 62953 - DNA, 25 bp, Homo sapien
tactacctctgcaacttcttctcga

SEQ ID NO: 62954 - DNA, 25 bp, Homo sapien
tactacctctgctacttcttctcga

SEQ ID NO: 62955 - DNA, 25 bp, Homo sapien
cacacaaagacagtccgtcgtcgta

SEQ ID NO: 62956 - DNA, 25 bp, Homo sapien
cacacaaagacactccgtcgtcgta

SEQ ID NO: 62957 - DNA, 25 bp, Homo sapien
agcagacaaccgtagctcccgactt

SEQ ID NO: 62958 - DNA, 25 bp, Homo sapien
agcagacaaccgaagctcccgactt

SEQ ID NO: 62959 - DNA, 25 bp, Homo sapien
gttcgggacactataatccctacat

SEQ ID NO: 62960 - DNA, 25 bp, Homo sapien
gttcgggacactttaatccctacat

SEQ ID NO: 62961 - DNA, 25 bp, Homo sapien
ggtctgagccgtttcagctctatca

SEQ ID NO: 62962 - DNA, 25 bp, Homo sapien
ggtctgagccgtatcagctctatca

SEQ ID NO: 62963 - DNA, 25 bp, Homo sapien
gactccgttgggaccgggtccacct

SEQ ID NO: 62964 - DNA, 25 bp, Homo sapien
gactccgttgggtccgggtccacct

SEQ ID NO: 62965 - DNA, 25 bp, Homo sapien
gggaagttacgtaccgtcctcatcc

SEQ ID NO: 62966 - DNA, 25 bp, Homo sapien
gggaagttacgttccgtcctcatcc

SEQ ID NO: 62967 - DNA, 25 bp, Homo sapien
gtgtgaactagctccgctatttcta

SEQ ID NO: 62968 - DNA, 25 bp, Homo sapien
gtgtgaactagcaccgctatttcta

SEQ ID NO: 62969 - DNA, 25 bp, Homo sapien
taacgttacagaggtgtatgctaca

SEQ ID NO: 62970 - DNA, 25 bp, Homo sapien
taacgttacagacgtgtatgctaca

SEQ ID NO: 62971 - DNA, 25 bp, Homo sapien
ccgtcttaagaggagactcgctatt

SEQ ID NO: 62972 - DNA, 25 bp, Homo sapien
ccgtcttaagagcagactcgctatt

SEQ ID NO: 62973 - DNA, 25 bp, Homo sapien
tcaactcttttcgacagatccgttt

SEQ ID NO: 62974 - DNA, 25 bp, Homo sapien
tcaactcttttccacagatccgttt

SEQ ID NO: 62975 - DNA, 25 bp, Homo sapien
gaaatgtcagttcctttaatttcat

SEQ ID NO: 62976 - DNA, 25 bp, Homo sapien
gaaatgtcagttgctttaatttcat

SEQ ID NO: 62977 - DNA, 25 bp, Homo sapien
aggactggaccgagtccgtaatacc

SEQ ID NO: 62978 - DNA, 25 bp, Homo sapien
aggactggaccgtgtccgtaatacc

SEQ ID NO: 62979 - DNA, 25 bp, Homo sapien
aggtactataaaaggtacctaaacc

SEQ ID NO: 62980 - DNA, 25 bp, Homo sapien
aggtactataaatggtacctaaacc

SEQ ID NO: 62981 - DNA, 25 bp, Homo sapien
agacgtctatgatccgtctttcctc

SEQ ID NO: 62982 - DNA, 25 bp, Homo sapien
agacgtctatgaaccgtctttcctc

SEQ ID NO: 62983 - DNA, 25 bp, Homo sapien
gtaatagttatgtccgttgaaccct

SEQ ID NO: 62984 - DNA, 25 bp, Homo sapien
gtaatagttatgaccgttgaaccct

SEQ ID NO: 62985 - DNA, 25 bp, Homo sapien
catgtttgtatcacctggtatccat

SEQ ID NO: 62986 - DNA, 25 bp, Homo sapien
catgtttgtatctcctggtatccat

SEQ ID NO: 62987 - DNA, 25 bp, Homo sapien
aagttcaggggacctaagtactttt

SEQ ID NO: 62988 - DNA, 25 bp, Homo sapien
aagttcaggggagctaagtactttt

SEQ ID NO: 62989 - DNA, 25 bp, Homo sapien
agaggtgaggtacaactaatcctta

SEQ ID NO: 62990 - DNA, 25 bp, Homo sapien
agaggtgaggtagaactaatcctta

SEQ ID NO: 62991 - DNA, 25 bp, Homo sapien
tgaaagtgatacactaacggattct

SEQ ID NO: 62992 - DNA, 25 bp, Homo sapien
tgaaagtgatactctaacggattct

SEQ ID NO: 62993 - DNA, 25 bp, Homo sapien
ggataatgtacctttaagtgaacct

SEQ ID NO: 62994 - DNA, 25 bp, Homo sapien
ggataatgtaccattaagtgaacct

SEQ ID NO: 62995 - DNA, 25 bp, Homo sapien
ttactagcagtcacctaaaactcgg

SEQ ID NO: 62996 - DNA, 25 bp, Homo sapien
ttactagcagtctcctaaaactcgg

SEQ ID NO: 62997 - DNA, 25 bp, Homo sapien
agactgcacttcagtcaacaatcag

SEQ ID NO: 62998 - DNA, 25 bp, Homo sapien
agactgcacttctgtcaacaatcag

SEQ ID NO: 62999 - DNA, 25 bp, Homo sapien
aaagtacttcatgtttgacaacccg

SEQ ID NO: 63000 - DNA, 25 bp, Homo sapien
aaagtacttcatctttgacaacccg

SEQ ID NO: 63001 - DNA, 25 bp, Homo sapien
gtgaacaccaatgtttgtcatccat

SEQ ID NO: 63002 - DNA, 25 bp, Homo sapien
gtgaacaccaatctttgtcatccat

SEQ ID NO: 63003 - DNA, 25 bp, Homo sapien
tgcaaaggtatgtttttcccgaggt

SEQ ID NO: 63004 - DNA, 25 bp, Homo sapien
tgcaaaggtatgattttcccgaggt

SEQ ID NO: 63005 - DNA, 25 bp, Homo sapien
ctcgtaaaatcaattcttccgggtc

SEQ ID NO: 63006 - DNA, 25 bp, Homo sapien
ctcgtaaaatcatttcttccgggtc

SEQ ID NO: 63007 - DNA, 25 bp, Homo sapien
tgtaatctaaatgtcttctcggttt

SEQ ID NO: 63008 - DNA, 25 bp, Homo sapien
tgtaatctaaatctcttctcggttt

SEQ ID NO: 63009 - DNA, 25 bp, Homo sapien
gacacactggtcgtccttggggtgt

SEQ ID NO: 63010 - DNA, 25 bp, Homo sapien
gacacactggtcctccttggggtgt

SEQ ID NO: 63011 - DNA, 25 bp, Homo sapien
agcgaccctttctcggactgaaagg

SEQ ID NO: 63012 - DNA, 25 bp, Homo sapien
agcgaccctttcacggactgaaagg

SEQ ID NO: 63013 - DNA, 25 bp, Homo sapien
tgttccttctctctggaccaggttc

SEQ ID NO: 63014 - DNA, 25 bp, Homo sapien
tgttccttctctgtggaccaggttc

SEQ ID NO: 63015 - DNA, 25 bp, Homo sapien
tggtgtccaccgtggcccgactcgc

SEQ ID NO: 63016 - DNA, 25 bp, Homo sapien
tggtgtccaccgaggcccgactcgc

SEQ ID NO: 63017 - DNA, 25 bp, Homo sapien
gtgtccagtcggtccacccgtgact

SEQ ID NO: 63018 - DNA, 25 bp, Homo sapien
gtgtccagtcggaccacccgtgact

SEQ ID NO: 63019 - DNA, 25 bp, Homo sapien
tgtcttttatgaacccggacggtga

SEQ ID NO: 63020 - DNA, 25 bp, Homo sapien
tgtcttttatgatcccggacggtga

SEQ ID NO: 63021 - DNA, 25 bp, Homo sapien
agcttctcgaccaccacaaggagac

SEQ ID NO: 63022 - DNA, 25 bp, Homo sapien
agcttctcgacctccacaaggagac

SEQ ID NO: 63023 - DNA, 25 bp, Homo sapien
aaaacgacgtttcgacaacgaagtg

SEQ ID NO: 63024 - DNA, 25 bp, Homo sapien
aaaacgacgtttggacaacgaagtg

SEQ ID NO: 63025 - DNA, 25 bp, Homo sapien
acaaagcctcttgtaactagagtat

SEQ ID NO: 63026 - DNA, 25 bp, Homo sapien
acaaagcctcttctaactagagtat

SEQ ID NO: 63027 - DNA, 25 bp, Homo sapien
tgaatggattcttctactcttagtt

SEQ ID NO: 63028 - DNA, 25 bp, Homo sapien
tgaatggattctactactcttagtt

SEQ ID NO: 63029 - DNA, 25 bp, Homo sapien
tagtttaatgttttagatcccaggt

SEQ ID NO: 63030 - DNA, 25 bp, Homo sapien
tagtttaatgttatagatcccaggt

SEQ ID NO: 63031 - DNA, 25 bp, Homo sapien
aacctcagattgacgacctcctaag

SEQ ID NO: 63032 - DNA, 25 bp, Homo sapien
aacctcagattgtcgacctcctaag

SEQ ID NO: 63033 - DNA, 25 bp, Homo sapien
cccgagtcttaatgacgtccttagg

SEQ ID NO: 63034 - DNA, 25 bp, Homo sapien
cccgagtcttaaagacgtccttagg

SEQ ID NO: 63035 - DNA, 25 bp, Homo sapien
catgttagagacagacacgttgtcg

SEQ ID NO: 63036 - DNA, 25 bp, Homo sapien
catgttagagactgacacgttgtcg

SEQ ID NO: 63037 - DNA, 25 bp, Homo sapien
ccctggtactccagggactttcgtc

SEQ ID NO: 63038 - DNA, 25 bp, Homo sapien
ccctggtactcctgggactttcgtc

SEQ ID NO: 63039 - DNA, 25 bp, Homo sapien
actctttcccgatgtccgtacatcc

SEQ ID NO: 63040 - DNA, 25 bp, Homo sapien
actctttcccgaagtccgtacatcc

SEQ ID NO: 63041 - DNA, 25 bp, Homo sapien
gactcaacataaggtcccgtactcc

SEQ ID NO: 63042 - DNA, 25 bp, Homo sapien
gactcaacataacgtcccgtactcc

SEQ ID NO: 63043 - DNA, 25 bp, Homo sapien
caccccatgtgttttcgtctttagc

SEQ ID NO: 63044 - DNA, 25 bp, Homo sapien
caccccatgtgtattcgtctttagc

SEQ ID NO: 63045 - DNA, 25 bp, Homo sapien
accaccctgtgtatcacagattgtg

SEQ ID NO: 63046 - DNA, 25 bp, Homo sapien
accaccctgtgtttcacagattgtg

SEQ ID NO: 63047 - DNA, 25 bp, Homo sapien
catcagttgttctaagactataagt

SEQ ID NO: 63048 - DNA, 25 bp, Homo sapien
catcagttgttcaaagactataagt

SEQ ID NO: 63049 - DNA, 25 bp, Homo sapien
accgaaatcgtgatttgagctccgg

SEQ ID NO: 63050 - DNA, 25 bp, Homo sapien
accgaaatcgtgttttgagctccgg

SEQ ID NO: 63051 - DNA, 25 bp, Homo sapien
gaacgatcctttttatggcagcgtg

SEQ ID NO: 63052 - DNA, 25 bp, Homo sapien
gaacgatcctttatatggcagcgtg

SEQ ID NO: 63053 - DNA, 25 bp, Homo sapien
aatcgattaatttcacacgtagcag

SEQ ID NO: 63054 - DNA, 25 bp, Homo sapien
aatcgattaattacacacgtagcag

SEQ ID NO: 63055 - DNA, 25 bp, Homo sapien
atgacttttaagtcacatacttcgg

SEQ ID NO: 63056 - DNA, 25 bp, Homo sapien
atgacttttaagacacatacttcgg

SEQ ID NO: 63057 - DNA, 25 bp, Homo sapien
aggaattctaggacctataaacgtc

SEQ ID NO: 63058 - DNA, 25 bp, Homo sapien
aggaattctaggtcctataaacgtc

SEQ ID NO: 63059 - DNA, 25 bp, Homo sapien
aacttataaggtttcacaaagacgt

SEQ ID NO: 63060 - DNA, 25 bp, Homo sapien
aacttataaggtatcacaaagacgt

SEQ ID NO: 63061 - DNA, 25 bp, Homo sapien
gtgtggcgtagtagtactaccgtcg

SEQ ID NO: 63062 - DNA, 25 bp, Homo sapien
gtgtggcgtagttgtactaccgtcg

SEQ ID NO: 63063 - DNA, 25 bp, Homo sapien
cagttacgtcaaaagggttcggctc

SEQ ID NO: 63064 - DNA, 25 bp, Homo sapien
cagttacgtcaatagggttcggctc

SEQ ID NO: 63065 - DNA, 25 bp, Homo sapien
gccttatctcaggtaaggggttctc

SEQ ID NO: 63066 - DNA, 25 bp, Homo sapien
gccttatctcagctaaggggttctc

SEQ ID NO: 63067 - DNA, 25 bp, Homo sapien
taactttcttagtaaggtctttacc

SEQ ID NO: 63068 - DNA, 25 bp, Homo sapien
taactttcttagaaaggtctttacc

SEQ ID NO: 63069 - DNA, 25 bp, Homo sapien
tgagggcatacaaacgccattacgg

SEQ ID NO: 63070 - DNA, 25 bp, Homo sapien
tgagggcatacatacgccattacgg

SEQ ID NO: 63071 - DNA, 25 bp, Homo sapien
ttaatgaagagaaatgtcagttcct

SEQ ID NO: 63072 - DNA, 25 bp, Homo sapien
ttaatgaagagatatgtcagttcct

SEQ ID NO: 63073 - DNA, 25 bp, Homo sapien
gaagaaaagacgtcatctattactc

SEQ ID NO: 63074 - DNA, 25 bp, Homo sapien
gaagaaaagacgacatctattactc

SEQ ID NO: 63075 - DNA, 25 bp, Homo sapien
gagatacgatagagtcctaagattc

SEQ ID NO: 63076 - DNA, 25 bp, Homo sapien
gagatacgatagtgtcctaagattc

SEQ ID NO: 63077 - DNA, 25 bp, Homo sapien
taagaaaataatgaaccgagatctc

SEQ ID NO: 63078 - DNA, 25 bp, Homo sapien
taagaaaataatcaaccgagatctc

SEQ ID NO: 63079 - DNA, 25 bp, Homo sapien
gagcgaaaaatccttcgtaagtcta

SEQ ID NO: 63080 - DNA, 25 bp, Homo sapien
gagcgaaaaatcgttcgtaagtcta

SEQ ID NO: 63081 - DNA, 25 bp, Homo sapien
aacagagacggacctgaagattgta

SEQ ID NO: 63082 - DNA, 25 bp, Homo sapien
aacagagacggagctgaagattgta

SEQ ID NO: 63083 - DNA, 25 bp, Homo sapien
gtgagattggtctccgtaaattcgg

SEQ ID NO: 63084 - DNA, 25 bp, Homo sapien
gtgagattggtcaccgtaaattcgg

SEQ ID NO: 63085 - DNA, 25 bp, Homo sapien
aaatcttgagtaaatcttattccct

SEQ ID NO: 63086 - DNA, 25 bp, Homo sapien
aaatcttgagtatatcttattccct

SEQ ID NO: 63087 - DNA, 25 bp, Homo sapien
caaattaccgttaagcatatttggt

SEQ ID NO: 63088 - DNA, 25 bp, Homo sapien
caaattaccgtttagcatatttggt

SEQ ID NO: 63089 - DNA, 25 bp, Homo sapien
caattcagtgactgtctttattggt

SEQ ID NO: 63090 - DNA, 25 bp, Homo sapien
caattcagtgacagtctttattggt

SEQ ID NO: 63091 - DNA, 25 bp, Homo sapien
gatattttccagtcttgtaagtcat

SEQ ID NO: 63092 - DNA, 25 bp, Homo sapien
gatattttccagacttgtaagtcat

SEQ ID NO: 63093 - DNA, 25 bp, Homo sapien
ttgtttggagtccattgtcagacag

SEQ ID NO: 63094 - DNA, 25 bp, Homo sapien
ttgtttggagtcgattgtcagacag

SEQ ID NO: 63095 - DNA, 25 bp, Homo sapien
cttttggactaaactcgttagataa

SEQ ID NO: 63096 - DNA, 25 bp, Homo sapien
cttttggactaatctcgttagataa

SEQ ID NO: 63097 - DNA, 25 bp, Homo sapien
ccttgagggagtaatccatacttta

SEQ ID NO: 63098 - DNA, 25 bp, Homo sapien
ccttgagggagttatccatacttta

SEQ ID NO: 63099 - DNA, 25 bp, Homo sapien
gctccagggtagttcccaggtctga

SEQ ID NO: 63100 - DNA, 25 bp, Homo sapien
gctccagggtagatcccaggtctga

SEQ ID NO: 63101 - DNA, 25 bp, Homo sapien
tcaagagattaatctcacgagctga

SEQ ID NO: 63102 - DNA, 25 bp, Homo sapien
tcaagagattaaactcacgagctga

SEQ ID NO: 63103 - DNA, 25 bp, Homo sapien
tcctgttcattctacaacggtccgt

SEQ ID NO: 63104 - DNA, 25 bp, Homo sapien
tcctgttcattcaacaacggtccgt

SEQ ID NO: 63105 - DNA, 25 bp, Homo sapien
ctagggtccttgtacaaacatagag

SEQ ID NO: 63106 - DNA, 25 bp, Homo sapien
ctagggtccttgaacaaacatagag

SEQ ID NO: 63107 - DNA, 25 bp, Homo sapien
tgacagaggttctcaacaaaagaga

SEQ ID NO: 63108 - DNA, 25 bp, Homo sapien
tgacagaggttcacaacaaaagaga

SEQ ID NO: 63109 - DNA, 25 bp, Homo sapien
tgtgtgtaggggacacgcctctaga

SEQ ID NO: 63110 - DNA, 25 bp, Homo sapien
tgtgtgtaggggtcacgcctctaga

SEQ ID NO: 63111 - DNA, 25 bp, Homo sapien
ctatccgacgttcagtgtccccagg

SEQ ID NO: 63112 - DNA, 25 bp, Homo sapien
ctatccgacgttgagtgtccccagg

SEQ ID NO: 63113 - DNA, 25 bp, Homo sapien
ttctttcattagtttgtctacaagg

SEQ ID NO: 63114 - DNA, 25 bp, Homo sapien
ttctttcattagattgtctacaagg

SEQ ID NO: 63115 - DNA, 25 bp, Homo sapien
catttatacatcgatatttcatgac

SEQ ID NO: 63116 - DNA, 25 bp, Homo sapien
catttatacatccatatttcatgac

SEQ ID NO: 63117 - DNA, 25 bp, Homo sapien
tctttactgtggtgccgtcggaccg

SEQ ID NO: 63118 - DNA, 25 bp, Homo sapien
tctttactgtggagccgtcggaccg

SEQ ID NO: 63119 - DNA, 25 bp, Homo sapien
tttttgtcatgaaccgtcagacacg

SEQ ID NO: 63120 - DNA, 25 bp, Homo sapien
tttttgtcatgatccgtcagacacg

SEQ ID NO: 63121 - DNA, 25 bp, Homo sapien
ctgatgtaagaatcggtccacgacg

SEQ ID NO: 63122 - DNA, 25 bp, Homo sapien
ctgatgtaagaaacggtccacgacg

SEQ ID NO: 63123 - DNA, 25 bp, Homo sapien
acaattggtttgaatatcccggacg

SEQ ID NO: 63124 - DNA, 25 bp, Homo sapien
acaattggtttgtatatcccggacg

SEQ ID NO: 63125 - DNA, 25 bp, Homo sapien
aacattcgttctctctccgtggtct

SEQ ID NO: 63126 - DNA, 25 bp, Homo sapien
aacattcgttctgtctccgtggtct

SEQ ID NO: 63127 - DNA, 25 bp, Homo sapien
cagatccgttgatgttcagggtcgt

SEQ ID NO: 63128 - DNA, 25 bp, Homo sapien
cagatccgttgaagttcagggtcgt

SEQ ID NO: 63129 - DNA, 25 bp, Homo sapien
cggtcggtgtccgagtcaggagtct

SEQ ID NO: 63130 - DNA, 25 bp, Homo sapien
cggtcggtgtcccagtcaggagtct

SEQ ID NO: 63131 - DNA, 25 bp, Homo sapien
gccccgggtccgagtacgttgtgct

SEQ ID NO: 63132 - DNA, 25 bp, Homo sapien
gccccgggtccgtgtacgttgtgct

SEQ ID NO: 63133 - DNA, 25 bp, Homo sapien
gtgacagcaaacatttattgtcgtt

SEQ ID NO: 63134 - DNA, 25 bp, Homo sapien
gtgacagcaaacttttattgtcgtt

SEQ ID NO: 63135 - DNA, 25 bp, Homo sapien
agagtgcacacacttttaacctggt

SEQ ID NO: 63136 - DNA, 25 bp, Homo sapien
agagtgcacacagttttaacctggt

SEQ ID NO: 63137 - DNA, 25 bp, Homo sapien
acaaagtgtcgttctaacgagagag

SEQ ID NO: 63138 - DNA, 25 bp, Homo sapien
acaaagtgtcgtactaacgagagag

SEQ ID NO: 63139 - DNA, 25 bp, Homo sapien
ggaacaacggcgtccgaaaaatcgg

SEQ ID NO: 63140 - DNA, 25 bp, Homo sapien
ggaacaacggcgaccgaaaaatcgg

SEQ ID NO: 63141 - DNA, 25 bp, Homo sapien
accgaagtgaagagggacatttcgt

SEQ ID NO: 63142 - DNA, 25 bp, Homo sapien
accgaagtgaagtgggacatttcgt

SEQ ID NO: 63143 - DNA, 25 bp, Homo sapien
tttaggaataacagggaccacgaat

SEQ ID NO: 63144 - DNA, 25 bp, Homo sapien
tttaggaataactgggaccacgaat

SEQ ID NO: 63145 - DNA, 25 bp, Homo sapien
tttaagagacattgactaccagact

SEQ ID NO: 63146 - DNA, 25 bp, Homo sapien
tttaagagacatagactaccagact

SEQ ID NO: 63147 - DNA, 25 bp, Homo sapien
tatttctttggactaatctggactt

SEQ ID NO: 63148 - DNA, 25 bp, Homo sapien
tatttctttggagtaatctggactt

SEQ ID NO: 63149 - DNA, 25 bp, Homo sapien
gttatagtaaatgacctcttgactt

SEQ ID NO: 63150 - DNA, 25 bp, Homo sapien
gttatagtaaatcacctcttgactt

SEQ ID NO: 63151 - DNA, 25 bp, Homo sapien
gtgtccgagtcctcctcgtcgtact

SEQ ID NO: 63152 - DNA, 25 bp, Homo sapien
gtgtccgagtccacctcgtcgtact

SEQ ID NO: 63153 - DNA, 25 bp, Homo sapien
tagtactgtctcctgacgtctgttt

SEQ ID NO: 63154 - DNA, 25 bp, Homo sapien
tagtactgtctcgtgacgtctgttt

SEQ ID NO: 63155 - DNA, 25 bp, Homo sapien
tcgaaagttcctttcatgtttagtc

SEQ ID NO: 63156 - DNA, 25 bp, Homo sapien
tcgaaagttcctatcatgtttagtc

SEQ ID NO: 63157 - DNA, 25 bp, Homo sapien
acatatgtgaccttacaatataagg

SEQ ID NO: 63158 - DNA, 25 bp, Homo sapien
acatatgtgaccatacaatataagg

SEQ ID NO: 63159 - DNA, 25 bp, Homo sapien
gacagagtaggtacacaactaaagg

SEQ ID NO: 63160 - DNA, 25 bp, Homo sapien
gacagagtaggttcacaactaaagg

SEQ ID NO: 63161 - DNA, 25 bp, Homo sapien
ctattgagggtcttctgtcccgaat

SEQ ID NO: 63162 - DNA, 25 bp, Homo sapien
ctattgagggtcatctgtcccgaat

SEQ ID NO: 63163 - DNA, 25 bp, Homo sapien
ccgcggaaaggagaacttcttgaag

SEQ ID NO: 63164 - DNA, 25 bp, Homo sapien
ccgcggaaaggacaacttcttgaag

SEQ ID NO: 63165 - DNA, 25 bp, Homo sapien
ctggaacgggggtactcacccaagt

SEQ ID NO: 63166 - DNA, 25 bp, Homo sapien
ctggaacgggggaactcacccaagt

SEQ ID NO: 63167 - DNA, 25 bp, Homo sapien
cctgagacgaggtgaaccaaaaacg

SEQ ID NO: 63168 - DNA, 25 bp, Homo sapien
cctgagacgaggagaaccaaaaacg

SEQ ID NO: 63169 - DNA, 25 bp, Homo sapien
tccgagacgcacgttctcagaaatg

SEQ ID NO: 63170 - DNA, 25 bp, Homo sapien
tccgagacgcaccttctcagaaatg

SEQ ID NO: 63171 - DNA, 25 bp, Homo sapien
actacgtctccttcctcgagtcggg

SEQ ID NO: 63172 - DNA, 25 bp, Homo sapien
actacgtctcctacctcgagtcggg

SEQ ID NO: 63173 - DNA, 25 bp, Homo sapien
cgggtaggtcgatctcgagcagtac

SEQ ID NO: 63174 - DNA, 25 bp, Homo sapien
cgggtaggtcgaactcgagcagtac

SEQ ID NO: 63175 - DNA, 25 bp, Homo sapien
tcgacatggtataagtacataacct

SEQ ID NO: 63176 - DNA, 25 bp, Homo sapien
tcgacatggtattagtacataacct

SEQ ID NO: 63177 - DNA, 25 bp, Homo sapien
atgtagacttactggacgtaatttt

SEQ ID NO: 63178 - DNA, 25 bp, Homo sapien
atgtagacttacaggacgtaatttt

SEQ ID NO: 63179 - DNA, 25 bp, Homo sapien
acttgagtcgagtggtacgattctt

SEQ ID NO: 63180 - DNA, 25 bp, Homo sapien
acttgagtcgagaggtacgattctt

SEQ ID NO: 63181 - DNA, 25 bp, Homo sapien
agtttgtgtcagtggacgtatgctc

SEQ ID NO: 63182 - DNA, 25 bp, Homo sapien
agtttgtgtcagaggacgtatgctc

SEQ ID NO: 63183 - DNA, 25 bp, Homo sapien
cgtctctatgttcctatttggtggt

SEQ ID NO: 63184 - DNA, 25 bp, Homo sapien
cgtctctatgttgctatttggtggt

SEQ ID NO: 63185 - DNA, 25 bp, Homo sapien
tacaaaagtcgcttctgtagaccac

SEQ ID NO: 63186 - DNA, 25 bp, Homo sapien
tacaaaagtcgcatctgtagaccac

SEQ ID NO: 63187 - DNA, 25 bp, Homo sapien
gtctcacgaagacgactttttaaac

SEQ ID NO: 63188 - DNA, 25 bp, Homo sapien
gtctcacgaagaggactttttaaac

SEQ ID NO: 63189 - DNA, 25 bp, Homo sapien
agatggcaagggaccgtttgtgaac

SEQ ID NO: 63190 - DNA, 25 bp, Homo sapien
agatggcaagggtccgtttgtgaac

SEQ ID NO: 63191 - DNA, 25 bp, Homo sapien
gactaagatcgacgaggtccgactc

SEQ ID NO: 63192 - DNA, 25 bp, Homo sapien
gactaagatcgaggaggtccgactc

SEQ ID NO: 63193 - DNA, 25 bp, Homo sapien
cacgtgttgaccgctgtcaaaaggg

SEQ ID NO: 63194 - DNA, 25 bp, Homo sapien
cacgtgttgacccctgtcaaaaggg

SEQ ID NO: 63195 - DNA, 25 bp, Homo sapien
cgcaagcgtcaacgtcgctaacgtt

SEQ ID NO: 63196 - DNA, 25 bp, Homo sapien
cgcaagcgtcaaggtcgctaacgtt

SEQ ID NO: 63197 - DNA, 25 bp, Homo sapien
ctgtggaattatgtcttaaacagtc

SEQ ID NO: 63198 - DNA, 25 bp, Homo sapien
ctgtggaattatctcttaaacagtc

SEQ ID NO: 63199 - DNA, 25 bp, Homo sapien
caaaagacgtcgtctataaagtaga

SEQ ID NO: 63200 - DNA, 25 bp, Homo sapien
caaaagacgtcgactataaagtaga

SEQ ID NO: 63201 - DNA, 25 bp, Homo sapien
ataaggacggcgaaggacgtatacg

SEQ ID NO: 63202 - DNA, 25 bp, Homo sapien
ataaggacggcgtaggacgtatacg

SEQ ID NO: 63203 - DNA, 25 bp, Homo sapien
atagagacggaccactactccaact

SEQ ID NO: 63204 - DNA, 25 bp, Homo sapien
atagagacggacgactactccaact

SEQ ID NO: 63205 - DNA, 25 bp, Homo sapien
ctcacggtaggacgacctcgcctag

SEQ ID NO: 63206 - DNA, 25 bp, Homo sapien
ctcacggtaggaggacctcgcctag

SEQ ID NO: 63207 - DNA, 25 bp, Homo sapien
tgacccgtgggaagacctcgccggt

SEQ ID NO: 63208 - DNA, 25 bp, Homo sapien
tgacccgtgggatgacctcgccggt

SEQ ID NO: 63209 - DNA, 25 bp, Homo sapien
aaccatgtaattaactcgtgcggtg

SEQ ID NO: 63210 - DNA, 25 bp, Homo sapien
aaccatgtaatttactcgtgcggtg

SEQ ID NO: 63211 - DNA, 25 bp, Homo sapien
gtcatcttcgaagtcaccctctgtc

SEQ ID NO: 63212 - DNA, 25 bp, Homo sapien
gtcatcttcgaactcaccctctgtc

SEQ ID NO: 63213 - DNA, 25 bp, Homo sapien
tcaatactgaagacagaccgactcc

SEQ ID NO: 63214 - DNA, 25 bp, Homo sapien
tcaatactgaagtcagaccgactcc

SEQ ID NO: 63215 - DNA, 25 bp, Homo sapien
ctaaaacttcctgatgacgacgatc

SEQ ID NO: 63216 - DNA, 25 bp, Homo sapien
ctaaaacttcctcatgacgacgatc

SEQ ID NO: 63217 - DNA, 25 bp, Homo sapien
gacactactccttcatcgacgggac

SEQ ID NO: 63218 - DNA, 25 bp, Homo sapien
gacactactcctacatcgacgggac

SEQ ID NO: 63219 - DNA, 25 bp, Homo sapien
attctacacaattgtaggtcgtact

SEQ ID NO: 63220 - DNA, 25 bp, Homo sapien
attctacacaatagtaggtcgtact

SEQ ID NO: 63221 - DNA, 25 bp, Homo sapien
atgaccaggtataaagttcgtctac

SEQ ID NO: 63222 - DNA, 25 bp, Homo sapien
atgaccaggtattaagttcgtctac

SEQ ID NO: 63223 - DNA, 25 bp, Homo sapien
taggaactagttgaggtcgaccagt

SEQ ID NO: 63224 - DNA, 25 bp, Homo sapien
taggaactagttcaggtcgaccagt

SEQ ID NO: 63225 - DNA, 25 bp, Homo sapien
cgacatcaatgtcagggacgcttag

SEQ ID NO: 63226 - DNA, 25 bp, Homo sapien
cgacatcaatgtgagggacgcttag

SEQ ID NO: 63227 - DNA, 25 bp, Homo sapien
tacgtctaagttggttatcgttacg

SEQ ID NO: 63228 - DNA, 25 bp, Homo sapien
tacgtctaagttcgttatcgttacg

SEQ ID NO: 63229 - DNA, 25 bp, Homo sapien
tagacgaaggtacgaggtagtccag

SEQ ID NO: 63230 - DNA, 25 bp, Homo sapien
tagacgaaggtaggaggtagtccag

SEQ ID NO: 63231 - DNA, 25 bp, Homo sapien
agtagaacaggtagagagacgccta

SEQ ID NO: 63232 - DNA, 25 bp, Homo sapien
agtagaacaggttgagagacgccta

SEQ ID NO: 63233 - DNA, 25 bp, Homo sapien
acgaacgagtgtgacgggcgtctca

SEQ ID NO: 63234 - DNA, 25 bp, Homo sapien
acgaacgagtgtcacgggcgtctca

SEQ ID NO: 63235 - DNA, 25 bp, Homo sapien
aggagcatgagatccgtgagcccct

SEQ ID NO: 63236 - DNA, 25 bp, Homo sapien
aggagcatgagaaccgtgagcccct

SEQ ID NO: 63237 - DNA, 25 bp, Homo sapien
tacgaaagatgaaccggggaccctg

SEQ ID NO: 63238 - DNA, 25 bp, Homo sapien
tacgaaagatgatccggggaccctg

SEQ ID NO: 63239 - DNA, 25 bp, Homo sapien
gtacgcaaagaagacgggtcccctc

SEQ ID NO: 63240 - DNA, 25 bp, Homo sapien
gtacgcaaagaacacgggtcccctc

SEQ ID NO: 63241 - DNA, 25 bp, Homo sapien
agacattgttgtgtgctctgtgccg

SEQ ID NO: 63242 - DNA, 25 bp, Homo sapien
agacattgttgtctgctctgtgccg

SEQ ID NO: 63243 - DNA, 25 bp, Homo sapien
agaaagtattagactgtccagttca

SEQ ID NO: 63244 - DNA, 25 bp, Homo sapien
agaaagtattagtctgtccagttca

SEQ ID NO: 63245 - DNA, 25 bp, Homo sapien
cgtaacgtctttacggtcccccgag

SEQ ID NO: 63246 - DNA, 25 bp, Homo sapien
cgtaacgtcttttcggtcccccgag

SEQ ID NO: 63247 - DNA, 25 bp, Homo sapien
tgattttacatagtactcttcacgg

SEQ ID NO: 63248 - DNA, 25 bp, Homo sapien
tgattttacatactactcttcacgg

SEQ ID NO: 63249 - DNA, 25 bp, Homo sapien
gttttctatatatcgtacttcagtg

SEQ ID NO: 63250 - DNA, 25 bp, Homo sapien
gttttctatataacgtacttcagtg

SEQ ID NO: 63251 - DNA, 25 bp, Homo sapien
acggtttctcgtacgttatatgaca

SEQ ID NO: 63252 - DNA, 25 bp, Homo sapien
acggtttctcgttcgttatatgaca

SEQ ID NO: 63253 - DNA, 25 bp, Homo sapien
ctcgttgtacacttgtgatgtgtaa

SEQ ID NO: 63254 - DNA, 25 bp, Homo sapien
ctcgttgtacacatgtgatgtgtaa

SEQ ID NO: 63255 - DNA, 25 bp, Homo sapien
ttatgccaagaccagtagtccgaga

SEQ ID NO: 63256 - DNA, 25 bp, Homo sapien
ttatgccaagacgagtagtccgaga

SEQ ID NO: 63257 - DNA, 25 bp, Homo sapien
ttttagaaactgacgatgtccagag

SEQ ID NO: 63258 - DNA, 25 bp, Homo sapien
ttttagaaactgtcgatgtccagag

SEQ ID NO: 63259 - DNA, 25 bp, Homo sapien
cttaatacaacttttcattcgtgct

SEQ ID NO: 63260 - DNA, 25 bp, Homo sapien
cttaatacaactattcattcgtgct

SEQ ID NO: 63261 - DNA, 25 bp, Homo sapien
tgttcgtcggctcctatgattcata

SEQ ID NO: 63262 - DNA, 25 bp, Homo sapien
tgttcgtcggctgctatgattcata

SEQ ID NO: 63263 - DNA, 25 bp, Homo sapien
attgttgtgtcgtaccagtcgcaga

SEQ ID NO: 63264 - DNA, 25 bp, Homo sapien
attgttgtgtcgaaccagtcgcaga

SEQ ID NO: 63265 - DNA, 25 bp, Homo sapien
agattttccggatctcttgtatata

SEQ ID NO: 63266 - DNA, 25 bp, Homo sapien
agattttccggaactcttgtatata

SEQ ID NO: 63267 - DNA, 25 bp, Homo sapien
tatcttctgtcagatcttccgggta

SEQ ID NO: 63268 - DNA, 25 bp, Homo sapien
tatcttctgtcacatcttccgggta

SEQ ID NO: 63269 - DNA, 25 bp, Homo sapien
ttgagtcttcctattcgttctgaag

SEQ ID NO: 63270 - DNA, 25 bp, Homo sapien
ttgagtcttccttttcgttctgaag

SEQ ID NO: 63271 - DNA, 25 bp, Homo sapien
cctactactccttgtttgtcggata

SEQ ID NO: 63272 - DNA, 25 bp, Homo sapien
cctactactcctagtttgtcggata

SEQ ID NO: 63273 - DNA, 25 bp, Homo sapien
cggtttccccgttgtgtttcgtaac

SEQ ID NO: 63274 - DNA, 25 bp, Homo sapien
cggtttccccgtagtgtttcgtaac

SEQ ID NO: 63275 - DNA, 25 bp, Homo sapien
tgagtcgacaggacgtcgtttgtga

SEQ ID NO: 63276 - DNA, 25 bp, Homo sapien
tgagtcgacaggtcgtcgtttgtga

SEQ ID NO: 63277 - DNA, 25 bp, Homo sapien
cctcggtgccggtcacgtctgcgga

SEQ ID NO: 63278 - DNA, 25 bp, Homo sapien
cctcggtgccggacacgtctgcgga

SEQ ID NO: 63279 - DNA, 25 bp, Homo sapien
ccgtcggccggaaacactgtccgag

SEQ ID NO: 63280 - DNA, 25 bp, Homo sapien
ccgtcggccggatacactgtccgag

SEQ ID NO: 63281 - DNA, 25 bp, Homo sapien
gaagtggacgcagagcctctccgac

SEQ ID NO: 63282 - DNA, 25 bp, Homo sapien
gaagtggacgcacagcctctccgac

SEQ ID NO: 63283 - DNA, 25 bp, Homo sapien
aatccaacaggagtagtcgtctgag

SEQ ID NO: 63284 - DNA, 25 bp, Homo sapien
aatccaacaggactagtcgtctgag

SEQ ID NO: 63285 - DNA, 25 bp, Homo sapien
ttacccgctacaaagagtcccgacg

SEQ ID NO: 63286 - DNA, 25 bp, Homo sapien
ttacccgctacatagagtcccgacg

SEQ ID NO: 63287 - DNA, 25 bp, Homo sapien
tggaactacatctgaggacctccac

SEQ ID NO: 63288 - DNA, 25 bp, Homo sapien
tggaactacatcagaggacctccac

SEQ ID NO: 63289 - DNA, 25 bp, Homo sapien
agtgaaaccccaagacgacaacccg

SEQ ID NO: 63290 - DNA, 25 bp, Homo sapien
agtgaaaccccatgacgacaacccg

SEQ ID NO: 63291 - DNA, 25 bp, Homo sapien
actgacgtcaaaatgtttttacccg

SEQ ID NO: 63292 - DNA, 25 bp, Homo sapien
actgacgtcaaattgtttttacccg

SEQ ID NO: 63293 - DNA, 25 bp, Homo sapien
taactacgataagagtttccattcg

SEQ ID NO: 63294 - DNA, 25 bp, Homo sapien
taactacgataacagtttccattcg

SEQ ID NO: 63295 - DNA, 25 bp, Homo sapien
gagagcggtaatcaagttttcgaac

SEQ ID NO: 63296 - DNA, 25 bp, Homo sapien
gagagcggtaatgaagttttcgaac

SEQ ID NO: 63297 - DNA, 25 bp, Homo sapien
aagaggccacacaaattgactaaca

SEQ ID NO: 63298 - DNA, 25 bp, Homo sapien
aagaggccacactaattgactaaca

SEQ ID NO: 63299 - DNA, 25 bp, Homo sapien
tgaggacggtcataacttgttctta

SEQ ID NO: 63300 - DNA, 25 bp, Homo sapien
tgaggacggtcaaaacttgttctta

SEQ ID NO: 63301 - DNA, 25 bp, Homo sapien
agtgtctgtcaaagggtcgacctct

SEQ ID NO: 63302 - DNA, 25 bp, Homo sapien
agtgtctgtcaatgggtcgacctct

SEQ ID NO: 63303 - DNA, 25 bp, Homo sapien
gtcgacctgacgtcggaggacgttc

SEQ ID NO: 63304 - DNA, 25 bp, Homo sapien
gtcgacctgacgacggaggacgttc

SEQ ID NO: 63305 - DNA, 25 bp, Homo sapien
tccgactcgggaacgttaccggcac

SEQ ID NO: 63306 - DNA, 25 bp, Homo sapien
tccgactcgggatcgttaccggcac

SEQ ID NO: 63307 - DNA, 25 bp, Homo sapien
ctcgagccggagagtctctggcgac

SEQ ID NO: 63308 - DNA, 25 bp, Homo sapien
ctcgagccggagtgtctctggcgac

SEQ ID NO: 63309 - DNA, 25 bp, Homo sapien
ctattttacagagacttcttgtgga

SEQ ID NO: 63310 - DNA, 25 bp, Homo sapien
ctattttacagacacttcttgtgga

SEQ ID NO: 63311 - DNA, 25 bp, Homo sapien
tagtccagtccgttatcttgttcag

SEQ ID NO: 63312 - DNA, 25 bp, Homo sapien
tagtccagtccgatatcttgttcag

SEQ ID NO: 63313 - DNA, 25 bp, Homo sapien
tgttccccgttggtcggtactacat

SEQ ID NO: 63314 - DNA, 25 bp, Homo sapien
tgttccccgttgctcggtactacat

SEQ ID NO: 63315 - DNA, 25 bp, Homo sapien
ggagtcactcagatcagaacttcct

SEQ ID NO: 63316 - DNA, 25 bp, Homo sapien
ggagtcactcagttcagaacttcct

SEQ ID NO: 63317 - DNA, 25 bp, Homo sapien
agtactctactttccggacctccgt

SEQ ID NO: 63318 - DNA, 25 bp, Homo sapien
agtactctacttaccggacctccgt

SEQ ID NO: 63319 - DNA, 25 bp, Homo sapien
atatgacttcgatcataactcgacg

SEQ ID NO: 63320 - DNA, 25 bp, Homo sapien
atatgacttcgaacataactcgacg

SEQ ID NO: 63321 - DNA, 25 bp, Homo sapien
gagtacacattgtaagtcactacac

SEQ ID NO: 63322 - DNA, 25 bp, Homo sapien
gagtacacattgaaagtcactacac

SEQ ID NO: 63323 - DNA, 25 bp, Homo sapien
gactcgatgtaaacgacgttagaca

SEQ ID NO: 63324 - DNA, 25 bp, Homo sapien
gactcgatgtaatcgacgttagaca

SEQ ID NO: 63325 - DNA, 25 bp, Homo sapien
tcctcgtatctacagtttactcagt

SEQ ID NO: 63326 - DNA, 25 bp, Homo sapien
tcctcgtatctagagtttactcagt

SEQ ID NO: 63327 - DNA, 25 bp, Homo sapien
taatctttcgtgaccgattttcgtt

SEQ ID NO: 63328 - DNA, 25 bp, Homo sapien
taatctttcgtgtccgattttcgtt

SEQ ID NO: 63329 - DNA, 25 bp, Homo sapien
ctctttcagatgcttctgtatgtcg

SEQ ID NO: 63330 - DNA, 25 bp, Homo sapien
ctctttcagatggttctgtatgtcg

SEQ ID NO: 63331 - DNA, 25 bp, Homo sapien
cttcgtttgaagacttcctctatgt

SEQ ID NO: 63332 - DNA, 25 bp, Homo sapien
cttcgtttgaagtcttcctctatgt

SEQ ID NO: 63333 - DNA, 25 bp, Homo sapien
atacttcatgtgaatcttccttagg

SEQ ID NO: 63334 - DNA, 25 bp, Homo sapien
atacttcatgtgtatcttccttagg

SEQ ID NO: 63335 - DNA, 25 bp, Homo sapien
tcatgaaagtttgtgactctaagac

SEQ ID NO: 63336 - DNA, 25 bp, Homo sapien
tcatgaaagtttctgactctaagac

SEQ ID NO: 63337 - DNA, 25 bp, Homo sapien
tgtagtaatcatctcatctcagacg

SEQ ID NO: 63338 - DNA, 25 bp, Homo sapien
tgtagtaatcatgtcatctcagacg

SEQ ID NO: 63339 - DNA, 25 bp, Homo sapien
tggtgtaccagttatcggttctctc

SEQ ID NO: 63340 - DNA, 25 bp, Homo sapien
tggtgtaccagtaatcggttctctc

SEQ ID NO: 63341 - DNA, 25 bp, Homo sapien
ccgtgggtctggacggtcgattcta

SEQ ID NO: 63342 - DNA, 25 bp, Homo sapien
ccgtgggtctggtcggtcgattcta

SEQ ID NO: 63343 - DNA, 25 bp, Homo sapien
caagattcgccgtgtgtcgattcgc

SEQ ID NO: 63344 - DNA, 25 bp, Homo sapien
caagattcgccgagtgtcgattcgc

SEQ ID NO: 63345 - DNA, 25 bp, Homo sapien
cggagttttagtcgaaccgcatttc

SEQ ID NO: 63346 - DNA, 25 bp, Homo sapien
cggagttttagtggaaccgcatttc

SEQ ID NO: 63347 - DNA, 25 bp, Homo sapien
gggaaaggagttacccgtccattac

SEQ ID NO: 63348 - DNA, 25 bp, Homo sapien
gggaaaggagtttcccgtccattac

SEQ ID NO: 63349 - DNA, 25 bp, Homo sapien
ttggtccagtctagtcctccagctc

SEQ ID NO: 63350 - DNA, 25 bp, Homo sapien
ttggtccagtcttgtcctccagctc

SEQ ID NO: 63351 - DNA, 25 bp, Homo sapien
tcgtgtcctatacttgtccaagaag

SEQ ID NO: 63352 - DNA, 25 bp, Homo sapien
tcgtgtcctatagttgtccaagaag

SEQ ID NO: 63353 - DNA, 25 bp, Homo sapien
actgaaaatcgtgtcacatatgtac

SEQ ID NO: 63354 - DNA, 25 bp, Homo sapien
actgaaaatcgtctcacatatgtac

SEQ ID NO: 63355 - DNA, 25 bp, Homo sapien
aagaacgaacggagtgaccgatgtc

SEQ ID NO: 63356 - DNA, 25 bp, Homo sapien
aagaacgaacggtgtgaccgatgtc

SEQ ID NO: 63357 - DNA, 25 bp, Homo sapien
aaaacacacaggtccggtagactgg

SEQ ID NO: 63358 - DNA, 25 bp, Homo sapien
aaaacacacaggaccggtagactgg

SEQ ID NO: 63359 - DNA, 25 bp, Homo sapien
aacgacctgagacgtggcgacccga

SEQ ID NO: 63360 - DNA, 25 bp, Homo sapien
aacgacctgagaggtggcgacccga

SEQ ID NO: 63361 - DNA, 25 bp, Homo sapien
agtagactccgaggagaggagccca

SEQ ID NO: 63362 - DNA, 25 bp, Homo sapien
agtagactccgacgagaggagccca

SEQ ID NO: 63363 - DNA, 25 bp, Homo sapien
gccgacctccgaagaggcggcagca

SEQ ID NO: 63364 - DNA, 25 bp, Homo sapien
gccgacctccgatgaggcggcagca

SEQ ID NO: 63365 - DNA, 25 bp, Homo sapien
acgcctctctcatcggggtttaggt

SEQ ID NO: 63366 - DNA, 25 bp, Homo sapien
acgcctctctcaacggggtttaggt

SEQ ID NO: 63367 - DNA, 25 bp, Homo sapien
aaaccactttttggtatgttcaagt

SEQ ID NO: 63368 - DNA, 25 bp, Homo sapien
aaaccactttttcgtatgttcaagt

SEQ ID NO: 63369 - DNA, 25 bp, Homo sapien
cgacccttctttctagggactcgtc

SEQ ID NO: 63370 - DNA, 25 bp, Homo sapien
cgacccttctttgtagggactcgtc

SEQ ID NO: 63371 - DNA, 25 bp, Homo sapien
ccgtagctcgtcagggacaggagtc

SEQ ID NO: 63372 - DNA, 25 bp, Homo sapien
ccgtagctcgtctgggacaggagtc

SEQ ID NO: 63373 - DNA, 25 bp, Homo sapien
gcccggaaaccctgtcacagggtcg

SEQ ID NO: 63374 - DNA, 25 bp, Homo sapien
gcccggaaacccagtcacagggtcg

SEQ ID NO: 63375 - DNA, 25 bp, Homo sapien
cggtgttacttcgtcacgaggaagt

SEQ ID NO: 63376 - DNA, 25 bp, Homo sapien
cggtgttacttcctcacgaggaagt

SEQ ID NO: 63377 - DNA, 25 bp, Homo sapien
ctggtaattcgtcgacgtagaagat

SEQ ID NO: 63378 - DNA, 25 bp, Homo sapien
ctggtaattcgtggacgtagaagat

SEQ ID NO: 63379 - DNA, 25 bp, Homo sapien
tcggtgggtctgtcgtccacgagac

SEQ ID NO: 63380 - DNA, 25 bp, Homo sapien
tcggtgggtctgacgtccacgagac

SEQ ID NO: 63381 - DNA, 25 bp, Homo sapien
agcggaggctccttccacgtcgact

SEQ ID NO: 63382 - DNA, 25 bp, Homo sapien
agcggaggctccatccacgtcgact

SEQ ID NO: 63383 - DNA, 25 bp, Homo sapien
agacactcctcaccaagtccgagag

SEQ ID NO: 63384 - DNA, 25 bp, Homo sapien
agacactcctcagcaagtccgagag

SEQ ID NO: 63385 - DNA, 25 bp, Homo sapien
cgtactgacacttggttactccgaa

SEQ ID NO: 63386 - DNA, 25 bp, Homo sapien
cgtactgacactaggttactccgaa

SEQ ID NO: 63387 - DNA, 25 bp, Homo sapien
cctataatgttctttctactcgaat

SEQ ID NO: 63388 - DNA, 25 bp, Homo sapien
cctataatgttcattctactcgaat

SEQ ID NO: 63389 - DNA, 25 bp, Homo sapien
ttaatgtacgttctctctcgatacg

SEQ ID NO: 63390 - DNA, 25 bp, Homo sapien
ttaatgtacgttgtctctcgatacg

SEQ ID NO: 63391 - DNA, 25 bp, Homo sapien
gcctgtttacttgtcgactgagtcg

SEQ ID NO: 63392 - DNA, 25 bp, Homo sapien
gcctgtttacttctcgactgagtcg

SEQ ID NO: 63393 - DNA, 25 bp, Homo sapien
aaggcattgttgtgtcgtaccagtc

SEQ ID NO: 63394 - DNA, 25 bp, Homo sapien
aaggcattgttgagtcgtaccagtc

SEQ ID NO: 63395 - DNA, 25 bp, Homo sapien
atcgtgcattgtttcatacacgaaa

SEQ ID NO: 63396 - DNA, 25 bp, Homo sapien
atcgtgcattgtatcatacacgaaa

SEQ ID NO: 63397 - DNA, 25 bp, Homo sapien
tagaaacttcattgacaagtcgaaa

SEQ ID NO: 63398 - DNA, 25 bp, Homo sapien
tagaaacttcatagacaagtcgaaa

SEQ ID NO: 63399 - DNA, 25 bp, Homo sapien
ggtactcactcactaggttccgaaa

SEQ ID NO: 63400 - DNA, 25 bp, Homo sapien
ggtactcactcagtaggttccgaaa

SEQ ID NO: 63401 - DNA, 25 bp, Homo sapien
attccgtcccggttcacgaggacag

SEQ ID NO: 63402 - DNA, 25 bp, Homo sapien
attccgtcccggatcacgaggacag

SEQ ID NO: 63403 - DNA, 25 bp, Homo sapien
gtgtaccgtctctatgctataatga

SEQ ID NO: 63404 - DNA, 25 bp, Homo sapien
gtgtaccgtctcaatgctataatga

SEQ ID NO: 63405 - DNA, 25 bp, Homo sapien
ttactgaaacttttgtcatattgag

SEQ ID NO: 63406 - DNA, 25 bp, Homo sapien
ttactgaaacttatgtcatattgag

SEQ ID NO: 63407 - DNA, 25 bp, Homo sapien
ctgtcttaattgatgattatccgtc

SEQ ID NO: 63408 - DNA, 25 bp, Homo sapien
ctgtcttaattgttgattatccgtc

SEQ ID NO: 63409 - DNA, 25 bp, Homo sapien
tttcaaactcctaagattcggagtt

SEQ ID NO: 63410 - DNA, 25 bp, Homo sapien
tttcaaactccttagattcggagtt

SEQ ID NO: 63411 - DNA, 25 bp, Homo sapien
ctaagatagaaaaacgtgttcaacc

SEQ ID NO: 63412 - DNA, 25 bp, Homo sapien
ctaagatagaaatacgtgttcaacc

SEQ ID NO: 63413 - DNA, 25 bp, Homo sapien
aaatgttagtaacgtgtaacaactc

SEQ ID NO: 63414 - DNA, 25 bp, Homo sapien
aaatgttagtaaggtgtaacaactc

SEQ ID NO: 63415 - DNA, 25 bp, Homo sapien
cgtgaaatgtttgtaacttcttctt

SEQ ID NO: 63416 - DNA, 25 bp, Homo sapien
cgtgaaatgtttctaacttcttctt

SEQ ID NO: 63417 - DNA, 25 bp, Homo sapien
agactaggtatatatgttcacctct

SEQ ID NO: 63418 - DNA, 25 bp, Homo sapien
agactaggtataaatgttcacctct

SEQ ID NO: 63419 - DNA, 25 bp, Homo sapien
cgttggtgagaggtcgttcaccgtc

SEQ ID NO: 63420 - DNA, 25 bp, Homo sapien
cgttggtgagagctcgttcaccgtc

SEQ ID NO: 63421 - DNA, 25 bp, Homo sapien
catcagtggactgttttcgacaggt

SEQ ID NO: 63422 - DNA, 25 bp, Homo sapien
catcagtggactcttttcgacaggt

SEQ ID NO: 63423 - DNA, 25 bp, Homo sapien
aacggtcggagatctctttagggtc

SEQ ID NO: 63424 - DNA, 25 bp, Homo sapien
aacggtcggagaactctttagggtc

SEQ ID NO: 63425 - DNA, 25 bp, Homo sapien
cgtcgacgagtactcctgcacgtgc

SEQ ID NO: 63426 - DNA, 25 bp, Homo sapien
cgtcgacgagtagtcctgcacgtgc

SEQ ID NO: 63427 - DNA, 25 bp, Homo sapien
cgtggtcggtgagactttctgtgtt

SEQ ID NO: 63428 - DNA, 25 bp, Homo sapien
cgtggtcggtgacactttctgtgtt

SEQ ID NO: 63429 - DNA, 25 bp, Homo sapien
acatctcggtgtaaaggttctttag

SEQ ID NO: 63430 - DNA, 25 bp, Homo sapien
acatctcggtgttaaggttctttag

SEQ ID NO: 63431 - DNA, 25 bp, Homo sapien
cgttctactgtgacgggttgtgttt

SEQ ID NO: 63432 - DNA, 25 bp, Homo sapien
cgttctactgtgtcgggttgtgttt

SEQ ID NO: 63433 - DNA, 25 bp, Homo sapien
ctagtgttactaatcttcgtagtgt

SEQ ID NO: 63434 - DNA, 25 bp, Homo sapien
ctagtgttactattcttcgtagtgt

SEQ ID NO: 63435 - DNA, 25 bp, Homo sapien
aggtcgagagttcctctaacagcaa

SEQ ID NO: 63436 - DNA, 25 bp, Homo sapien
aggtcgagagttgctctaacagcaa

SEQ ID NO: 63437 - DNA, 25 bp, Homo sapien
cggtgggtctgtcgtccacgagacc

SEQ ID NO: 63438 - DNA, 25 bp, Homo sapien
cggtgggtctgtggtccacgagacc

SEQ ID NO: 63439 - DNA, 25 bp, Homo sapien
taagaggggacttggttccgagacc

SEQ ID NO: 63440 - DNA, 25 bp, Homo sapien
taagaggggactaggttccgagacc

SEQ ID NO: 63441 - DNA, 25 bp, Homo sapien
aacagaaacgtctacggtcagtttt

SEQ ID NO: 63442 - DNA, 25 bp, Homo sapien
aacagaaacgtcaacggtcagtttt

SEQ ID NO: 63443 - DNA, 25 bp, Homo sapien
cgacagtattctgaccgtcataatt

SEQ ID NO: 63444 - DNA, 25 bp, Homo sapien
cgacagtattctcaccgtcataatt

SEQ ID NO: 63445 - DNA, 25 bp, Homo sapien
ccgtatagtttcgtgacaagtattt

SEQ ID NO: 63446 - DNA, 25 bp, Homo sapien
ccgtatagtttcctgacaagtattt

SEQ ID NO: 63447 - DNA, 25 bp, Homo sapien
cccgatttaactcagctgagttctg

SEQ ID NO: 63448 - DNA, 25 bp, Homo sapien
cccgatttaactgagctgagttctg

SEQ ID NO: 63449 - DNA, 25 bp, Homo sapien
gaggaccgcacacaagggtctgtac

SEQ ID NO: 63450 - DNA, 25 bp, Homo sapien
gaggaccgcacagaagggtctgtac

SEQ ID NO: 63451 - DNA, 25 bp, Homo sapien
ttgtataagaacaacaagtgtctcc

SEQ ID NO: 63452 - DNA, 25 bp, Homo sapien
ttgtataagaactacaagtgtctcc

SEQ ID NO: 63453 - DNA, 25 bp, Homo sapien
gtttgagatcggaacaacattttgc

SEQ ID NO: 63454 - DNA, 25 bp, Homo sapien
gtttgagatcggtacaacattttgc

SEQ ID NO: 63455 - DNA, 25 bp, Homo sapien
ggaccatggacgatacattttctcg

SEQ ID NO: 63456 - DNA, 25 bp, Homo sapien
ggaccatggacgttacattttctcg

SEQ ID NO: 63457 - DNA, 25 bp, Homo sapien
gaatacttatgtcttcctttcggtc

SEQ ID NO: 63458 - DNA, 25 bp, Homo sapien
gaatacttatgtgttcctttcggtc

SEQ ID NO: 63459 - DNA, 25 bp, Homo sapien
aacctgtctcccttctgggtgacgg

SEQ ID NO: 63460 - DNA, 25 bp, Homo sapien
aacctgtctcccatctgggtgacgg

SEQ ID NO: 63461 - DNA, 25 bp, Homo sapien
atcccgaacgttgtatctgggtcgg

SEQ ID NO: 63462 - DNA, 25 bp, Homo sapien
atcccgaacgttctatctgggtcgg

SEQ ID NO: 63463 - DNA, 25 bp, Homo sapien
tcccggatgcgacacgagtccgacg

SEQ ID NO: 63464 - DNA, 25 bp, Homo sapien
tcccggatgcgagacgagtccgacg

SEQ ID NO: 63465 - DNA, 25 bp, Homo sapien
tcccgggtcgagtaagcgtacggac

SEQ ID NO: 63466 - DNA, 25 bp, Homo sapien
tcccgggtcgagaaagcgtacggac

SEQ ID NO: 63467 - DNA, 25 bp, Homo sapien
taaccgaccctctttgtcttcgagg

SEQ ID NO: 63468 - DNA, 25 bp, Homo sapien
taaccgaccctcattgtcttcgagg

SEQ ID NO: 63469 - DNA, 25 bp, Homo sapien
ccactggtcaacatggtcaacgagg

SEQ ID NO: 63470 - DNA, 25 bp, Homo sapien
ccactggtcaacttggtcaacgagg

SEQ ID NO: 63471 - DNA, 25 bp, Homo sapien
caatgtcagttcgtcctactagaca

SEQ ID NO: 63472 - DNA, 25 bp, Homo sapien
caatgtcagttcctcctactagaca

SEQ ID NO: 63473 - DNA, 25 bp, Homo sapien
tgcagaaggttgtttccatacagaa

SEQ ID NO: 63474 - DNA, 25 bp, Homo sapien
tgcagaaggttgattccatacagaa

SEQ ID NO: 63475 - DNA, 25 bp, Homo sapien
cacaagcgttgtgatctctgcagaa

SEQ ID NO: 63476 - DNA, 25 bp, Homo sapien
cacaagcgttgtcatctctgcagaa

SEQ ID NO: 63477 - DNA, 25 bp, Homo sapien
accttcggcggaaaccacaaagacg

SEQ ID NO: 63478 - DNA, 25 bp, Homo sapien
accttcggcggataccacaaagacg

SEQ ID NO: 63479 - DNA, 25 bp, Homo sapien
tcctatccccgacagaaacttagag

SEQ ID NO: 63480 - DNA, 25 bp, Homo sapien
tcctatccccgagagaaacttagag

SEQ ID NO: 63481 - DNA, 25 bp, Homo sapien
cagtgccggcggtagaaacagcgtc

SEQ ID NO: 63482 - DNA, 25 bp, Homo sapien
cagtgccggcggaagaaacagcgtc

SEQ ID NO: 63483 - DNA, 25 bp, Homo sapien
gtgtctcggcgaaccctcagagccg

SEQ ID NO: 63484 - DNA, 25 bp, Homo sapien
gtgtctcggcgatccctcagagccg

SEQ ID NO: 63485 - DNA, 25 bp, Homo sapien
ggtttcttacggagacctatctcct

SEQ ID NO: 63486 - DNA, 25 bp, Homo sapien
ggtttcttacggtgacctatctcct

SEQ ID NO: 63487 - DNA, 25 bp, Homo sapien
aggtatttcgagctcatcttataat

SEQ ID NO: 63488 - DNA, 25 bp, Homo sapien
aggtatttcgaggtcatcttataat

SEQ ID NO: 63489 - DNA, 25 bp, Homo sapien
tctcagatattggtgacaaacaaat

SEQ ID NO: 63490 - DNA, 25 bp, Homo sapien
tctcagatattgctgacaaacaaat

SEQ ID NO: 63491 - DNA, 25 bp, Homo sapien
tgtcctaggttttgtgcaaaaatct

SEQ ID NO: 63492 - DNA, 25 bp, Homo sapien
tgtcctaggtttagtgcaaaaatct

SEQ ID NO: 63493 - DNA, 25 bp, Homo sapien
tgcccgtgtcggaccccgaacagat

SEQ ID NO: 63494 - DNA, 25 bp, Homo sapien
tgcccgtgtcggtccccgaacagat

SEQ ID NO: 63495 - DNA, 25 bp, Homo sapien
ggtacccggtgaggtccatccagaa

SEQ ID NO: 63496 - DNA, 25 bp, Homo sapien
ggtacccggtgacgtccatccagaa

SEQ ID NO: 63497 - DNA, 25 bp, Homo sapien
cccgcggcctcgtcgtgcacgagct

SEQ ID NO: 63498 - DNA, 25 bp, Homo sapien
cccgcggcctcgacgtgcacgagct

SEQ ID NO: 63499 - DNA, 25 bp, Homo sapien
cccatagagcagagactggagtcga

SEQ ID NO: 63500 - DNA, 25 bp, Homo sapien
cccatagagcagtgactggagtcga

SEQ ID NO: 63501 - DNA, 25 bp, Homo sapien
cgggttagacatttactgtaaactc

SEQ ID NO: 63502 - DNA, 25 bp, Homo sapien
cgggttagacatatactgtaaactc

SEQ ID NO: 63503 - DNA, 25 bp, Homo sapien
tttcgggtaggagagagactaaacc

SEQ ID NO: 63504 - DNA, 25 bp, Homo sapien
tttcgggtaggacagagactaaacc

SEQ ID NO: 63505 - DNA, 25 bp, Homo sapien
ccggaggtgagtaaactctaaagtc

SEQ ID NO: 63506 - DNA, 25 bp, Homo sapien
ccggaggtgagttaactctaaagtc

SEQ ID NO: 63507 - DNA, 25 bp, Homo sapien
aaaccgattccgtgaactttaggta

SEQ ID NO: 63508 - DNA, 25 bp, Homo sapien
aaaccgattccgagaactttaggta

SEQ ID NO: 63509 - DNA, 25 bp, Homo sapien
cgaacaactcccacagctttacggg

SEQ ID NO: 63510 - DNA, 25 bp, Homo sapien
cgaacaactccctcagctttacggg

SEQ ID NO: 63511 - DNA, 25 bp, Homo sapien
ccatatctaccctcggtttgtccag

SEQ ID NO: 63512 - DNA, 25 bp, Homo sapien
ccatatctacccacggtttgtccag

SEQ ID NO: 63513 - DNA, 25 bp, Homo sapien
gataacgatccgagaccacttctca

SEQ ID NO: 63514 - DNA, 25 bp, Homo sapien
gataacgatccgtgaccacttctca

SEQ ID NO: 63515 - DNA, 25 bp, Homo sapien
tgagatggttatagactcctacacg

SEQ ID NO: 63516 - DNA, 25 bp, Homo sapien
tgagatggttattgactcctacacg

SEQ ID NO: 63517 - DNA, 25 bp, Homo sapien
agttgaggcgagaccgggtcttcct

SEQ ID NO: 63518 - DNA, 25 bp, Homo sapien
agttgaggcgagtccgggtcttcct

SEQ ID NO: 63519 - DNA, 25 bp, Homo sapien
aaccacaggggttcggaaccttcct

SEQ ID NO: 63520 - DNA, 25 bp, Homo sapien
aaccacaggggtacggaaccttcct

SEQ ID NO: 63521 - DNA, 25 bp, Homo sapien
gacgtaagaccgacgaggaggtcaa

SEQ ID NO: 63522 - DNA, 25 bp, Homo sapien
gacgtaagaccgtcgaggaggtcaa

SEQ ID NO: 63523 - DNA, 25 bp, Homo sapien
gtccgcgcggtgtgtccgcgacatc

SEQ ID NO: 63524 - DNA, 25 bp, Homo sapien
gtccgcgcggtgagtccgcgacatc

SEQ ID NO: 63525 - DNA, 25 bp, Homo sapien
gtcctccggacagtctcggacttct

SEQ ID NO: 63526 - DNA, 25 bp, Homo sapien
gtcctccggacactctcggacttct

SEQ ID NO: 63527 - DNA, 25 bp, Homo sapien
tgatcacctaaaacccgtgacctcg

SEQ ID NO: 63528 - DNA, 25 bp, Homo sapien
tgatcacctaaatcccgtgacctcg

SEQ ID NO: 63529 - DNA, 25 bp, Homo sapien
agctgccggactccgcggacgtgtc

SEQ ID NO: 63530 - DNA, 25 bp, Homo sapien
agctgccggactgcgcggacgtgtc

SEQ ID NO: 63531 - DNA, 25 bp, Homo sapien
tgctgagccccgacgacgacgagag

SEQ ID NO: 63532 - DNA, 25 bp, Homo sapien
tgctgagccccgtcgacgacgagag

SEQ ID NO: 63533 - DNA, 25 bp, Homo sapien
cggcacgaaccggagtcccgaccgt

SEQ ID NO: 63534 - DNA, 25 bp, Homo sapien
cggcacgaaccgcagtcccgaccgt

SEQ ID NO: 63535 - DNA, 25 bp, Homo sapien
cggtacctcgacgtgtgtgtggacc

SEQ ID NO: 63536 - DNA, 25 bp, Homo sapien
cggtacctcgacctgtgtgtggacc

SEQ ID NO: 63537 - DNA, 25 bp, Homo sapien
atctctctgaggttcgacgtcagaa

SEQ ID NO: 63538 - DNA, 25 bp, Homo sapien
atctctctgaggatcgacgtcagaa

SEQ ID NO: 63539 - DNA, 25 bp, Homo sapien
actactggatacgattcctcgagta

SEQ ID NO: 63540 - DNA, 25 bp, Homo sapien
actactggataccattcctcgagta

SEQ ID NO: 63541 - DNA, 25 bp, Homo sapien
ttttactgaatacctctgttggtga

SEQ ID NO: 63542 - DNA, 25 bp, Homo sapien
ttttactgaatagctctgttggtga

SEQ ID NO: 63543 - DNA, 25 bp, Homo sapien
gacagtctgtgttgactttggaccc

SEQ ID NO: 63544 - DNA, 25 bp, Homo sapien
gacagtctgtgtagactttggaccc

SEQ ID NO: 63545 - DNA, 25 bp, Homo sapien
acattacagtgtgaactcttgggga

SEQ ID NO: 63546 - DNA, 25 bp, Homo sapien
acattacagtgtcaactcttgggga

SEQ ID NO: 63547 - DNA, 25 bp, Homo sapien
aagtcacacttgtggctcgcgagca

SEQ ID NO: 63548 - DNA, 25 bp, Homo sapien
aagtcacacttgaggctcgcgagca

SEQ ID NO: 63549 - DNA, 25 bp, Homo sapien
agaccttcgccgagggtctcggaca

SEQ ID NO: 63550 - DNA, 25 bp, Homo sapien
agaccttcgccgtgggtctcggaca

SEQ ID NO: 63551 - DNA, 25 bp, Homo sapien
tatcttcccgaggacggaccggaga

SEQ ID NO: 63552 - DNA, 25 bp, Homo sapien
tatcttcccgagcacggaccggaga

SEQ ID NO: 63553 - DNA, 25 bp, Homo sapien
agatttccgttgcagctccagtgac

SEQ ID NO: 63554 - DNA, 25 bp, Homo sapien
agatttccgttggagctccagtgac

SEQ ID NO: 63555 - DNA, 25 bp, Homo sapien
ttatagttccaatgggcttcatatt

SEQ ID NO: 63556 - DNA, 25 bp, Homo sapien
ttatagttccaaagggcttcatatt

SEQ ID NO: 63557 - DNA, 25 bp, Homo sapien
gtttcttaagactgggaacccgaat

SEQ ID NO: 63558 - DNA, 25 bp, Homo sapien
gtttcttaagacagggaacccgaat

SEQ ID NO: 63559 - DNA, 25 bp, Homo sapien
accttcttggttgtgagtcctcggg

SEQ ID NO: 63560 - DNA, 25 bp, Homo sapien
accttcttggttctgagtcctcggg

SEQ ID NO: 63561 - DNA, 25 bp, Homo sapien
gttccctgagtgtcggtcgtccaat

SEQ ID NO: 63562 - DNA, 25 bp, Homo sapien
gttccctgagtgacggtcgtccaat

SEQ ID NO: 63563 - DNA, 25 bp, Homo sapien
attccctgagttcagtgtcctaccc

SEQ ID NO: 63564 - DNA, 25 bp, Homo sapien
attccctgagttgagtgtcctaccc

SEQ ID NO: 63565 - DNA, 25 bp, Homo sapien
gaagtcaatgagtgttgtcctgcct

SEQ ID NO: 63566 - DNA, 25 bp, Homo sapien
gaagtcaatgagagttgtcctgcct

SEQ ID NO: 63567 - DNA, 25 bp, Homo sapien
ggactccaagagagttgtctttctt

SEQ ID NO: 63568 - DNA, 25 bp, Homo sapien
ggactccaagagtgttgtctttctt

SEQ ID NO: 63569 - DNA, 25 bp, Homo sapien
cagttgtaattgtggttctgtccct

SEQ ID NO: 63570 - DNA, 25 bp, Homo sapien
cagttgtaattgaggttctgtccct

SEQ ID NO: 63571 - DNA, 25 bp, Homo sapien
atgtacgacttgtcctttgtctcac

SEQ ID NO: 63572 - DNA, 25 bp, Homo sapien
atgtacgacttgacctttgtctcac

SEQ ID NO: 63573 - DNA, 25 bp, Homo sapien
taaacaagacgagtcagtctacgtc

SEQ ID NO: 63574 - DNA, 25 bp, Homo sapien
taaacaagacgactcagtctacgtc

SEQ ID NO: 63575 - DNA, 25 bp, Homo sapien
gcagagaaggacagcttcgtgacct

SEQ ID NO: 63576 - DNA, 25 bp, Homo sapien
gcagagaaggactgcttcgtgacct

SEQ ID NO: 63577 - DNA, 25 bp, Homo sapien
gagacacttagtgatactcttcact

SEQ ID NO: 63578 - DNA, 25 bp, Homo sapien
gagacacttagtcatactcttcact

SEQ ID NO: 63579 - DNA, 25 bp, Homo sapien
ggccggacctcacagcacgttcagt

SEQ ID NO: 63580 - DNA, 25 bp, Homo sapien
ggccggacctcagagcacgttcagt

SEQ ID NO: 63581 - DNA, 25 bp, Homo sapien
agttcgagagagaggagcagttcct

SEQ ID NO: 63582 - DNA, 25 bp, Homo sapien
agttcgagagagtggagcagttcct

SEQ ID NO: 63583 - DNA, 25 bp, Homo sapien
ggtctaaggagtacggacatcttcc

SEQ ID NO: 63584 - DNA, 25 bp, Homo sapien
ggtctaaggagttcggacatcttcc

SEQ ID NO: 63585 - DNA, 25 bp, Homo sapien
tgtgtcgacggctcgggtatcctca

SEQ ID NO: 63586 - DNA, 25 bp, Homo sapien
tgtgtcgacggcacgggtatcctca

SEQ ID NO: 63587 - DNA, 25 bp, Homo sapien
gtttcagttcaagagtagtctctga

SEQ ID NO: 63588 - DNA, 25 bp, Homo sapien
gtttcagttcaacagtagtctctga

SEQ ID NO: 63589 - DNA, 25 bp, Homo sapien
cctgtctgttgagagactcctaagt

SEQ ID NO: 63590 - DNA, 25 bp, Homo sapien
cctgtctgttgacagactcctaagt

SEQ ID NO: 63591 - DNA, 25 bp, Homo sapien
ttacattctttcagactgaaccttt

SEQ ID NO: 63592 - DNA, 25 bp, Homo sapien
ttacattctttctgactgaaccttt

SEQ ID NO: 63593 - DNA, 25 bp, Homo sapien
agattcattggtctacatgtcttat

SEQ ID NO: 63594 - DNA, 25 bp, Homo sapien
agattcattggtgtacatgtcttat

SEQ ID NO: 63595 - DNA, 25 bp, Homo sapien
ggtacaggtccgagtccgtcctcgc

SEQ ID NO: 63596 - DNA, 25 bp, Homo sapien
ggtacaggtccgtgtccgtcctcgc

SEQ ID NO: 63597 - DNA, 25 bp, Homo sapien
gaggtcattccaggtaccactaacc

SEQ ID NO: 63598 - DNA, 25 bp, Homo sapien
gaggtcattccacgtaccactaacc

SEQ ID NO: 63599 - DNA, 25 bp, Homo sapien
gtgtcgcgttgaaccgtccatcccg

SEQ ID NO: 63600 - DNA, 25 bp, Homo sapien
gtgtcgcgttgatccgtccatcccg

SEQ ID NO: 63601 - DNA, 25 bp, Homo sapien
tgtactgtgatttccgttcggaccc

SEQ ID NO: 63602 - DNA, 25 bp, Homo sapien
tgtactgtgattaccgttcggaccc

SEQ ID NO: 63603 - DNA, 25 bp, Homo sapien
ttgtttgtatgtctcgtggacccag

SEQ ID NO: 63604 - DNA, 25 bp, Homo sapien
ttgtttgtatgtgtcgtggacccag

SEQ ID NO: 63605 - DNA, 25 bp, Homo sapien
cttctcgggtcactaggactcttgt

SEQ ID NO: 63606 - DNA, 25 bp, Homo sapien
cttctcgggtcagtaggactcttgt

SEQ ID NO: 63607 - DNA, 25 bp, Homo sapien
cgaggctcgaggtcaatgttcctta

SEQ ID NO: 63608 - DNA, 25 bp, Homo sapien
cgaggctcgaggacaatgttcctta

SEQ ID NO: 63609 - DNA, 25 bp, Homo sapien
gtaagaggaacttcttaggactgtc

SEQ ID NO: 63610 - DNA, 25 bp, Homo sapien
gtaagaggaactacttaggactgtc

SEQ ID NO: 63611 - DNA, 25 bp, Homo sapien
agtaaggtgaacgttaaggacacct

SEQ ID NO: 63612 - DNA, 25 bp, Homo sapien
agtaaggtgaaccttaaggacacct

SEQ ID NO: 63613 - DNA, 25 bp, Homo sapien
taagatgtaccacgtagaaaccgcg

SEQ ID NO: 63614 - DNA, 25 bp, Homo sapien
taagatgtaccaggtagaaaccgcg

SEQ ID NO: 63615 - DNA, 25 bp, Homo sapien
gagatgcatcgcagaaccagatccg

SEQ ID NO: 63616 - DNA, 25 bp, Homo sapien
gagatgcatcgctgaaccagatccg

SEQ ID NO: 63617 - DNA, 25 bp, Homo sapien
gtctctcatcagtttgactaaaccg

SEQ ID NO: 63618 - DNA, 25 bp, Homo sapien
gtctctcatcagattgactaaaccg

SEQ ID NO: 63619 - DNA, 25 bp, Homo sapien
tcaacatcttatgggttgtcaaaat

SEQ ID NO: 63620 - DNA, 25 bp, Homo sapien
tcaacatcttatcggttgtcaaaat

SEQ ID NO: 63621 - DNA, 25 bp, Homo sapien
tagcaagaggatccttttcggggag

SEQ ID NO: 63622 - DNA, 25 bp, Homo sapien
tagcaagaggatgcttttcggggag

SEQ ID NO: 63623 - DNA, 25 bp, Homo sapien
acccaaagaagtcttttcggggtct

SEQ ID NO: 63624 - DNA, 25 bp, Homo sapien
acccaaagaagtgttttcggggtct

SEQ ID NO: 63625 - DNA, 25 bp, Homo sapien
ttaatacaacttttcattcgtgctt

SEQ ID NO: 63626 - DNA, 25 bp, Homo sapien
ttaatacaacttatcattcgtgctt

SEQ ID NO: 63627 - DNA, 25 bp, Homo sapien
acacactgttttactcttgttgtgt

SEQ ID NO: 63628 - DNA, 25 bp, Homo sapien
acacactgtttttctcttgttgtgt

SEQ ID NO: 63629 - DNA, 25 bp, Homo sapien
gaggccctttcttccatgattgtcg

SEQ ID NO: 63630 - DNA, 25 bp, Homo sapien
gaggccctttctaccatgattgtcg

SEQ ID NO: 63631 - DNA, 25 bp, Homo sapien
gtgcctttttgtgaacagggtctct

SEQ ID NO: 63632 - DNA, 25 bp, Homo sapien
gtgcctttttgtcaacagggtctct

SEQ ID NO: 63633 - DNA, 25 bp, Homo sapien
ttgaggtccacctttgaccacatcc

SEQ ID NO: 63634 - DNA, 25 bp, Homo sapien
ttgaggtccaccattgaccacatcc

SEQ ID NO: 63635 - DNA, 25 bp, Homo sapien
tagtgttcagtctttctcccctgac

SEQ ID NO: 63636 - DNA, 25 bp, Homo sapien
tagtgttcagtcattctcccctgac

SEQ ID NO: 63637 - DNA, 25 bp, Homo sapien
ctttcttagggaacccaaccgtgac

SEQ ID NO: 63638 - DNA, 25 bp, Homo sapien
ctttcttagggatcccaaccgtgac

SEQ ID NO: 63639 - DNA, 25 bp, Homo sapien
agaccttctgccacccgttagggac

SEQ ID NO: 63640 - DNA, 25 bp, Homo sapien
agaccttctgcctcccgttagggac

SEQ ID NO: 63641 - DNA, 25 bp, Homo sapien
atataaaaccttcgacggacacagg

SEQ ID NO: 63642 - DNA, 25 bp, Homo sapien
atataaaaccttggacggacacagg

SEQ ID NO: 63643 - DNA, 25 bp, Homo sapien
agagaccactcttgtgaactaagta

SEQ ID NO: 63644 - DNA, 25 bp, Homo sapien
agagaccactctagtgaactaagta

SEQ ID NO: 63645 - DNA, 25 bp, Homo sapien
caacggagattcagttaccttactt

SEQ ID NO: 63646 - DNA, 25 bp, Homo sapien
caacggagattctgttaccttactt

SEQ ID NO: 63647 - DNA, 25 bp, Homo sapien
ttcttacaattgtgatccgacatgt

SEQ ID NO: 63648 - DNA, 25 bp, Homo sapien
ttcttacaattgagatccgacatgt

SEQ ID NO: 63649 - DNA, 25 bp, Homo sapien
aacccaatctagagagccacagtgt

SEQ ID NO: 63650 - DNA, 25 bp, Homo sapien
aacccaatctagtgagccacagtgt

SEQ ID NO: 63651 - DNA, 25 bp, Homo sapien
acaccatctccgatgacgtccaaag

SEQ ID NO: 63652 - DNA, 25 bp, Homo sapien
acaccatctccgttgacgtccaaag

SEQ ID NO: 63653 - DNA, 25 bp, Homo sapien
atgtcgtagagtcgtcacgatgacg

SEQ ID NO: 63654 - DNA, 25 bp, Homo sapien
atgtcgtagagtggtcacgatgacg

SEQ ID NO: 63655 - DNA, 25 bp, Homo sapien
ccctgtctgtccagggacgtttccg

SEQ ID NO: 63656 - DNA, 25 bp, Homo sapien
ccctgtctgtcctgggacgtttccg

SEQ ID NO: 63657 - DNA, 25 bp, Homo sapien
tacctttacggcagtgtcatcatcc

SEQ ID NO: 63658 - DNA, 25 bp, Homo sapien
tacctttacggctgtgtcatcatcc

SEQ ID NO: 63659 - DNA, 25 bp, Homo sapien
gactcacacgattggttaccacccg

SEQ ID NO: 63660 - DNA, 25 bp, Homo sapien
gactcacacgataggttaccacccg

SEQ ID NO: 63661 - DNA, 25 bp, Homo sapien
cacggcccctgtgtgtgtctcttgg

SEQ ID NO: 63662 - DNA, 25 bp, Homo sapien
cacggcccctgtctgtgtctcttgg

SEQ ID NO: 63663 - DNA, 25 bp, Homo sapien
tcactgcccctgtttccagatttcg

SEQ ID NO: 63664 - DNA, 25 bp, Homo sapien
tcactgcccctgattccagatttcg

SEQ ID NO: 63665 - DNA, 25 bp, Homo sapien
tcgagttgtagtccaaatatactgt

SEQ ID NO: 63666 - DNA, 25 bp, Homo sapien
tcgagttgtagtgcaaatatactgt

SEQ ID NO: 63667 - DNA, 25 bp, Homo sapien
ataatcgtgtatttaactacttcgg

SEQ ID NO: 63668 - DNA, 25 bp, Homo sapien
ataatcgtgtatataactacttcgg

SEQ ID NO: 63669 - DNA, 25 bp, Homo sapien
accgattatcttttatgtctcaagg

SEQ ID NO: 63670 - DNA, 25 bp, Homo sapien
accgattatcttatatgtctcaagg

SEQ ID NO: 63671 - DNA, 25 bp, Homo sapien
aatcagtgaatttccgagacgcacg

SEQ ID NO: 63672 - DNA, 25 bp, Homo sapien
aatcagtgaattaccgagacgcacg

SEQ ID NO: 63673 - DNA, 25 bp, Homo sapien
taagattgttaaggtccagtaatcc

SEQ ID NO: 63674 - DNA, 25 bp, Homo sapien
taagattgttaacgtccagtaatcc

SEQ ID NO: 63675 - DNA, 25 bp, Homo sapien
agtgattttgtaatccactaaactc

SEQ ID NO: 63676 - DNA, 25 bp, Homo sapien
agtgattttgtattccactaaactc

SEQ ID NO: 63677 - DNA, 25 bp, Homo sapien
aattttacgacatctcgaaaacggt

SEQ ID NO: 63678 - DNA, 25 bp, Homo sapien
aattttacgacaactcgaaaacggt

SEQ ID NO: 63679 - DNA, 25 bp, Homo sapien
ctgaagggtagtaaactcacgtcgt

SEQ ID NO: 63680 - DNA, 25 bp, Homo sapien
ctgaagggtagttaactcacgtcgt

SEQ ID NO: 63681 - DNA, 25 bp, Homo sapien
gttactcaagaaggtgagctcgatc

SEQ ID NO: 63682 - DNA, 25 bp, Homo sapien
gttactcaagaacgtgagctcgatc

SEQ ID NO: 63683 - DNA, 25 bp, Homo sapien
ccatatcttgaacgacgggttctct

SEQ ID NO: 63684 - DNA, 25 bp, Homo sapien
ccatatcttgaaggacgggttctct

SEQ ID NO: 63685 - DNA, 25 bp, Homo sapien
tagacattttgaacgcggttttaca

SEQ ID NO: 63686 - DNA, 25 bp, Homo sapien
tagacattttgatcgcggttttaca

SEQ ID NO: 63687 - DNA, 25 bp, Homo sapien
gagaatcataagaacacctttactg

SEQ ID NO: 63688 - DNA, 25 bp, Homo sapien
gagaatcataagtacacctttactg

SEQ ID NO: 63689 - DNA, 25 bp, Homo sapien
tttataaagaacactgtcagttccg

SEQ ID NO: 63690 - DNA, 25 bp, Homo sapien
tttataaagaactctgtcagttccg

SEQ ID NO: 63691 - DNA, 25 bp, Homo sapien
aaagtaaaaacgtccgttaaacgtc

SEQ ID NO: 63692 - DNA, 25 bp, Homo sapien
aaagtaaaaacgaccgttaaacgtc

SEQ ID NO: 63693 - DNA, 25 bp, Homo sapien
aagaaaagacgtgagccttaaactc

SEQ ID NO: 63694 - DNA, 25 bp, Homo sapien
aagaaaagacgtcagccttaaactc

SEQ ID NO: 63695 - DNA, 25 bp, Homo sapien
agaaatatatctgagaccaagatct

SEQ ID NO: 63696 - DNA, 25 bp, Homo sapien
agaaatatatctcagaccaagatct

SEQ ID NO: 63697 - DNA, 25 bp, Homo sapien
agaacataaatccgtagtccaatat

SEQ ID NO: 63698 - DNA, 25 bp, Homo sapien
agaacataaatcggtagtccaatat

SEQ ID NO: 63699 - DNA, 25 bp, Homo sapien
aaagggaggtctgaagactctacta

SEQ ID NO: 63700 - DNA, 25 bp, Homo sapien
aaagggaggtctcaagactctacta

SEQ ID NO: 63701 - DNA, 25 bp, Homo sapien
tgtagaaggaggtccgacgaattca

SEQ ID NO: 63702 - DNA, 25 bp, Homo sapien
tgtagaaggaggaccgacgaattca

SEQ ID NO: 63703 - DNA, 25 bp, Homo sapien
taaatttgaaaacctaggttcccgt

SEQ ID NO: 63704 - DNA, 25 bp, Homo sapien
taaatttgaaaagctaggttcccgt

SEQ ID NO: 63705 - DNA, 25 bp, Homo sapien
gattgtcgaggtaagctagattttt

SEQ ID NO: 63706 - DNA, 25 bp, Homo sapien
gattgtcgaggttagctagattttt

SEQ ID NO: 63707 - DNA, 25 bp, Homo sapien
gatcttcaagacactagttttgtat

SEQ ID NO: 63708 - DNA, 25 bp, Homo sapien
gatcttcaagactctagttttgtat

SEQ ID NO: 63709 - DNA, 25 bp, Homo sapien
atattttgcagatttattactctag

SEQ ID NO: 63710 - DNA, 25 bp, Homo sapien
atattttgcagaattattactctag

SEQ ID NO: 63711 - DNA, 25 bp, Homo sapien
tgttttgaacgtcttgttatactac

SEQ ID NO: 63712 - DNA, 25 bp, Homo sapien
tgttttgaacgtgttgttatactac

SEQ ID NO: 63713 - DNA, 25 bp, Homo sapien
cttttgttacagattcgttgaactt

SEQ ID NO: 63714 - DNA, 25 bp, Homo sapien
cttttgttacagtttcgttgaactt

SEQ ID NO: 63715 - DNA, 25 bp, Homo sapien
ccttagtggaagaatctttcatgtt

SEQ ID NO: 63716 - DNA, 25 bp, Homo sapien
ccttagtggaagtatctttcatgtt

SEQ ID NO: 63717 - DNA, 25 bp, Homo sapien
gttcaagggaattctctagtttgag

SEQ ID NO: 63718 - DNA, 25 bp, Homo sapien
gttcaagggaatactctagtttgag

SEQ ID NO: 63719 - DNA, 25 bp, Homo sapien
agtcaaggattagtaccaacttggt

SEQ ID NO: 63720 - DNA, 25 bp, Homo sapien
agtcaaggattactaccaacttggt

SEQ ID NO: 63721 - DNA, 25 bp, Homo sapien
atcattgtttatcaacaatgtcact

SEQ ID NO: 63722 - DNA, 25 bp, Homo sapien
atcattgtttatgaacaatgtcact

SEQ ID NO: 63723 - DNA, 25 bp, Homo sapien
tggttaccatactgtacaaaatgat

SEQ ID NO: 63724 - DNA, 25 bp, Homo sapien
tggttaccatacagtacaaaatgat

SEQ ID NO: 63725 - DNA, 25 bp, Homo sapien
ctacagttcgaatcatcaaaagaga

SEQ ID NO: 63726 - DNA, 25 bp, Homo sapien
ctacagttcgaaacatcaaaagaga

SEQ ID NO: 63727 - DNA, 25 bp, Homo sapien
tatttgagacggacacgacaataat

SEQ ID NO: 63728 - DNA, 25 bp, Homo sapien
tatttgagacggtcacgacaataat

SEQ ID NO: 63729 - DNA, 25 bp, Homo sapien
actatccgtcattgtgcccctagag

SEQ ID NO: 63730 - DNA, 25 bp, Homo sapien
actatccgtcatagtgcccctagag

SEQ ID NO: 63731 - DNA, 25 bp, Homo sapien
cttgtccactattttgtgacacagg

SEQ ID NO: 63732 - DNA, 25 bp, Homo sapien
cttgtccactatattgtgacacagg

SEQ ID NO: 63733 - DNA, 25 bp, Homo sapien
tctctaacatacgacattgtcataa

SEQ ID NO: 63734 - DNA, 25 bp, Homo sapien
tctctaacataccacattgtcataa

SEQ ID NO: 63735 - DNA, 25 bp, Homo sapien
tgtctttataggaccccgtcatacc

SEQ ID NO: 63736 - DNA, 25 bp, Homo sapien
tgtctttataggtccccgtcatacc

SEQ ID NO: 63737 - DNA, 25 bp, Homo sapien
ttcttttgatcccgtcgtcgatacc

SEQ ID NO: 63738 - DNA, 25 bp, Homo sapien
ttcttttgatccggtcgtcgatacc

SEQ ID NO: 63739 - DNA, 25 bp, Homo sapien
tctgtattcaattgtgttacacacg

SEQ ID NO: 63740 - DNA, 25 bp, Homo sapien
tctgtattcaatagtgttacacacg

SEQ ID NO: 63741 - DNA, 25 bp, Homo sapien
tcttagattggagtatccacggacg

SEQ ID NO: 63742 - DNA, 25 bp, Homo sapien
tcttagattggactatccacggacg

SEQ ID NO: 63743 - DNA, 25 bp, Homo sapien
ttgtaatggttatctctccgtggtc

SEQ ID NO: 63744 - DNA, 25 bp, Homo sapien
ttgtaatggttaactctccgtggtc

SEQ ID NO: 63745 - DNA, 25 bp, Homo sapien
cgaaactggtgacctttagggtcgt

SEQ ID NO: 63746 - DNA, 25 bp, Homo sapien
cgaaactggtgagctttagggtcgt

SEQ ID NO: 63747 - DNA, 25 bp, Homo sapien
ccggagtctggccggagtctggatt

SEQ ID NO: 63748 - DNA, 25 bp, Homo sapien
ccggagtctggcgggagtctggatt

SEQ ID NO: 63749 - DNA, 25 bp, Homo sapien
ctccggggaccgaagtactcttgtt

SEQ ID NO: 63750 - DNA, 25 bp, Homo sapien
ctccggggaccgtagtactcttgtt

SEQ ID NO: 63751 - DNA, 25 bp, Homo sapien
tttaccgtggaagttgtcttgtgtt

SEQ ID NO: 63752 - DNA, 25 bp, Homo sapien
tttaccgtggaacttgtcttgtgtt

SEQ ID NO: 63753 - DNA, 25 bp, Homo sapien
aagagtgcacacacttttaacctgg

SEQ ID NO: 63754 - DNA, 25 bp, Homo sapien
aagagtgcacactcttttaacctgg

SEQ ID NO: 63755 - DNA, 25 bp, Homo sapien
taaggatctcgttcgtacacgaagg

SEQ ID NO: 63756 - DNA, 25 bp, Homo sapien
taaggatctcgtacgtacacgaagg

SEQ ID NO: 63757 - DNA, 25 bp, Homo sapien
acacagaggtcgtccgaaaaacttc

SEQ ID NO: 63758 - DNA, 25 bp, Homo sapien
acacagaggtcgaccgaaaaacttc

SEQ ID NO: 63759 - DNA, 25 bp, Homo sapien
tccgaaggagaacgagtaaactttt

SEQ ID NO: 63760 - DNA, 25 bp, Homo sapien
tccgaaggagaaggagtaaactttt

SEQ ID NO: 63761 - DNA, 25 bp, Homo sapien
tcaagactaacaagggaaccgttat

SEQ ID NO: 63762 - DNA, 25 bp, Homo sapien
tcaagactaacatgggaaccgttat

SEQ ID NO: 63763 - DNA, 25 bp, Homo sapien
ttaaagagagagtcgacaccagtgt

SEQ ID NO: 63764 - DNA, 25 bp, Homo sapien
ttaaagagagagacgacaccagtgt

SEQ ID NO: 63765 - DNA, 25 bp, Homo sapien
ttttgttggcgacaagctctgagtt

SEQ ID NO: 63766 - DNA, 25 bp, Homo sapien
ttttgttggcgagaagctctgagtt

SEQ ID NO: 63767 - DNA, 25 bp, Homo sapien
cagtcgttttaagaccacctgactt

SEQ ID NO: 63768 - DNA, 25 bp, Homo sapien
cagtcgttttaacaccacctgactt

SEQ ID NO: 63769 - DNA, 25 bp, Homo sapien
gggtctgagacctgtacctcgtcat

SEQ ID NO: 63770 - DNA, 25 bp, Homo sapien
gggtctgagaccagtacctcgtcat

SEQ ID NO: 63771 - DNA, 25 bp, Homo sapien
agtacgtgactacctgtcttctctt

SEQ ID NO: 63772 - DNA, 25 bp, Homo sapien
agtacgtgactagctgtcttctctt

SEQ ID NO: 63773 - DNA, 25 bp, Homo sapien
aatagtcgtcgtttaatctttgtct

SEQ ID NO: 63774 - DNA, 25 bp, Homo sapien
aatagtcgtcgtataatctttgtct

SEQ ID NO: 63775 - DNA, 25 bp, Homo sapien
aacgtgtgaccgtacgaataagtga

SEQ ID NO: 63776 - DNA, 25 bp, Homo sapien
aacgtgtgaccgaacgaataagtga

SEQ ID NO: 63777 - DNA, 25 bp, Homo sapien
gacagtagagctacctagactttga

SEQ ID NO: 63778 - DNA, 25 bp, Homo sapien
gacagtagagcttcctagactttga

SEQ ID NO: 63779 - DNA, 25 bp, Homo sapien
ttttgagggtcatcgtgacccgggt

SEQ ID NO: 63780 - DNA, 25 bp, Homo sapien
ttttgagggtcaacgtgacccgggt

SEQ ID NO: 63781 - DNA, 25 bp, Homo sapien
ggtaagagagacgaacctcatgagg

SEQ ID NO: 63782 - DNA, 25 bp, Homo sapien
ggtaagagagaccaacctcatgagg

SEQ ID NO: 63783 - DNA, 25 bp, Homo sapien
gagaacgggattcactctccagaag

SEQ ID NO: 63784 - DNA, 25 bp, Homo sapien
gagaacgggattgactctccagaag

SEQ ID NO: 63785 - DNA, 25 bp, Homo sapien
tgcggagcgaggtgtcacctttaaa

SEQ ID NO: 63786 - DNA, 25 bp, Homo sapien
tgcggagcgaggagtcacctttaaa

SEQ ID NO: 63787 - DNA, 25 bp, Homo sapien
tttcaggaggtagttccatataaac

SEQ ID NO: 63788 - DNA, 25 bp, Homo sapien
tttcaggaggtacttccatataaac

SEQ ID NO: 63789 - DNA, 25 bp, Homo sapien
tacgtcgtcactaccgcggtccgag

SEQ ID NO: 63790 - DNA, 25 bp, Homo sapien
tacgtcgtcacttccgcggtccgag

SEQ ID NO: 63791 - DNA, 25 bp, Homo sapien
ccagctacgaggtccggtcacgtac

SEQ ID NO: 63792 - DNA, 25 bp, Homo sapien
ccagctacgaggaccggtcacgtac

SEQ ID NO: 63793 - DNA, 25 bp, Homo sapien
cgtacccagtagaaacagtccgact

SEQ ID NO: 63794 - DNA, 25 bp, Homo sapien
cgtacccagtagtaacagtccgact

SEQ ID NO: 63795 - DNA, 25 bp, Homo sapien
gtacactcactgctgtaattatcgt

SEQ ID NO: 63796 - DNA, 25 bp, Homo sapien
gtacactcactggtgtaattatcgt

SEQ ID NO: 63797 - DNA, 25 bp, Homo sapien
ttgaccgactaacgtaagttactct

SEQ ID NO: 63798 - DNA, 25 bp, Homo sapien
ttgaccgactaaggtaagttactct

SEQ ID NO: 63799 - DNA, 25 bp, Homo sapien
tcttggtcgacttcggcttcgactc

SEQ ID NO: 63800 - DNA, 25 bp, Homo sapien
tcttggtcgactacggcttcgactc

SEQ ID NO: 63801 - DNA, 25 bp, Homo sapien
tctactcttgctcctcttcgtgggg

SEQ ID NO: 63802 - DNA, 25 bp, Homo sapien
tctactcttgctgctcttcgtgggg

SEQ ID NO: 63803 - DNA, 25 bp, Homo sapien
tacacatacatgtctctgtggtcct

SEQ ID NO: 63804 - DNA, 25 bp, Homo sapien
tacacatacatgactctgtggtcct

SEQ ID NO: 63805 - DNA, 25 bp, Homo sapien
gttcacaagactgacgattcctaaa

SEQ ID NO: 63806 - DNA, 25 bp, Homo sapien
gttcacaagactcacgattcctaaa

SEQ ID NO: 63807 - DNA, 25 bp, Homo sapien
gtaccgtaaagcacggtttgtagaa

SEQ ID NO: 63808 - DNA, 25 bp, Homo sapien
gtaccgtaaagctcggtttgtagaa

SEQ ID NO: 63809 - DNA, 25 bp, Homo sapien
aggactaagatgtcgaggtccggac

SEQ ID NO: 63810 - DNA, 25 bp, Homo sapien
aggactaagatgacgaggtccggac

SEQ ID NO: 63811 - DNA, 25 bp, Homo sapien
ccgaacattttcacgtgttgaccgc

SEQ ID NO: 63812 - DNA, 25 bp, Homo sapien
ccgaacattttctcgtgttgaccgc

SEQ ID NO: 63813 - DNA, 25 bp, Homo sapien
tcaacgtcgctaacgttgaccggac

SEQ ID NO: 63814 - DNA, 25 bp, Homo sapien
tcaacgtcgctatcgttgaccggac

SEQ ID NO: 63815 - DNA, 25 bp, Homo sapien
ctttgaattatcgtctgtagggatc

SEQ ID NO: 63816 - DNA, 25 bp, Homo sapien
ctttgaattatcctctgtagggatc

SEQ ID NO: 63817 - DNA, 25 bp, Homo sapien
agtacaaccgtctctatagatgaga

SEQ ID NO: 63818 - DNA, 25 bp, Homo sapien
agtacaaccgtcactatagatgaga

SEQ ID NO: 63819 - DNA, 25 bp, Homo sapien
tataaggaggacaagacgccgtagt

SEQ ID NO: 63820 - DNA, 25 bp, Homo sapien
tataaggaggactagacgccgtagt

SEQ ID NO: 63821 - DNA, 25 bp, Homo sapien
tatagagacggaccactactccaac

SEQ ID NO: 63822 - DNA, 25 bp, Homo sapien
tatagagacggagcactactccaac

SEQ ID NO: 63823 - DNA, 25 bp, Homo sapien
ctcagactaggacactctcggtctc

SEQ ID NO: 63824 - DNA, 25 bp, Homo sapien
ctcagactaggagactctcggtctc

SEQ ID NO: 63825 - DNA, 25 bp, Homo sapien
ctgacccgtgggaagacctcgccgg

SEQ ID NO: 63826 - DNA, 25 bp, Homo sapien
ctgacccgtgggtagacctcgccgg

SEQ ID NO: 63827 - DNA, 25 bp, Homo sapien
aaccatgtaccttgatgtagtctgg

SEQ ID NO: 63828 - DNA, 25 bp, Homo sapien
aaccatgtacctagatgtagtctgg

SEQ ID NO: 63829 - DNA, 25 bp, Homo sapien
gtaatctgtcaagtacctcatttcg

SEQ ID NO: 63830 - DNA, 25 bp, Homo sapien
gtaatctgtcaactacctcatttcg

SEQ ID NO: 63831 - DNA, 25 bp, Homo sapien
aaacgtagacagacacgcctacctc

SEQ ID NO: 63832 - DNA, 25 bp, Homo sapien
aaacgtagacagtcacgcctacctc

SEQ ID NO: 63833 - DNA, 25 bp, Homo sapien
ccagaaacgttcgtccgtgcacatc

SEQ ID NO: 63834 - DNA, 25 bp, Homo sapien
ccagaaacgttcctccgtgcacatc

SEQ ID NO: 63835 - DNA, 25 bp, Homo sapien
gtgacctcctctgacgcgacgggac

SEQ ID NO: 63836 - DNA, 25 bp, Homo sapien
gtgacctcctctcacgcgacgggac

SEQ ID NO: 63837 - DNA, 25 bp, Homo sapien
tatatctaccatgaggagtcggact

SEQ ID NO: 63838 - DNA, 25 bp, Homo sapien
tatatctaccatcaggagtcggact

SEQ ID NO: 63839 - DNA, 25 bp, Homo sapien
tgacctgtgtatacacgggtactac

SEQ ID NO: 63840 - DNA, 25 bp, Homo sapien
tgacctgtgtattcacgggtactac

SEQ ID NO: 63841 - DNA, 25 bp, Homo sapien
taacgattagttggtgtcgtgtcac

SEQ ID NO: 63842 - DNA, 25 bp, Homo sapien
taacgattagttcgtgtcgtgtcac

SEQ ID NO: 63843 - DNA, 25 bp, Homo sapien
cccatagaatttcatgtcgcttacg

SEQ ID NO: 63844 - DNA, 25 bp, Homo sapien
cccatagaatttgatgtcgcttacg

SEQ ID NO: 63845 - DNA, 25 bp, Homo sapien
acgtctaagttggttatcgttacgt

SEQ ID NO: 63846 - DNA, 25 bp, Homo sapien
acgtctaagttgcttatcgttacgt

SEQ ID NO: 63847 - DNA, 25 bp, Homo sapien
agtacggacactcgacggtgtccag

SEQ ID NO: 63848 - DNA, 25 bp, Homo sapien
agtacggacactggacggtgtccag

SEQ ID NO: 63849 - DNA, 25 bp, Homo sapien
cgtcgaacacttcgacggaccctag

SEQ ID NO: 63850 - DNA, 25 bp, Homo sapien
cgtcgaacacttggacggaccctag

SEQ ID NO: 63851 - DNA, 25 bp, Homo sapien
cccgtaacggtcgagggacactcac

SEQ ID NO: 63852 - DNA, 25 bp, Homo sapien
cccgtaacggtccagggacactcac

SEQ ID NO: 63853 - DNA, 25 bp, Homo sapien
agtcaggttgagtctcggcgcccct

SEQ ID NO: 63854 - DNA, 25 bp, Homo sapien
agtcaggttgagactcggcgcccct

SEQ ID NO: 63855 - DNA, 25 bp, Homo sapien
ttaaatgtgacctcggcgaccctcg

SEQ ID NO: 63856 - DNA, 25 bp, Homo sapien
ttaaatgtgaccacggcgaccctcg

SEQ ID NO: 63857 - DNA, 25 bp, Homo sapien
gtcaaaagagacgaggagaaccctc

SEQ ID NO: 63858 - DNA, 25 bp, Homo sapien
gtcaaaagagaccaggagaaccctc

SEQ ID NO: 63859 - DNA, 25 bp, Homo sapien
gaatatgtgtgtttgctactgatcc

SEQ ID NO: 63860 - DNA, 25 bp, Homo sapien
gaatatgtgtgtatgctactgatcc

SEQ ID NO: 63861 - DNA, 25 bp, Homo sapien
gaatgtctctagttattcttgttca

SEQ ID NO: 63862 - DNA, 25 bp, Homo sapien
gaatgtctctagatattcttgttca

SEQ ID NO: 63863 - DNA, 25 bp, Homo sapien
gatcgtcttataaggtctttcaagt

SEQ ID NO: 63864 - DNA, 25 bp, Homo sapien
gatcgtcttatatggtctttcaagt

SEQ ID NO: 63865 - DNA, 25 bp, Homo sapien
agacctttaccagtctttacacgag

SEQ ID NO: 63866 - DNA, 25 bp, Homo sapien
agacctttaccactctttacacgag

SEQ ID NO: 63867 - DNA, 25 bp, Homo sapien
tgtactgttcaaatacgttctaatg

SEQ ID NO: 63868 - DNA, 25 bp, Homo sapien
tgtactgttcaattacgttctaatg

SEQ ID NO: 63869 - DNA, 25 bp, Homo sapien
acgtagtctgtcactcgtatttgaa

SEQ ID NO: 63870 - DNA, 25 bp, Homo sapien
acgtagtctgtctctcgtatttgaa

SEQ ID NO: 63871 - DNA, 25 bp, Homo sapien
actagtttcacactgatatgtaagt

SEQ ID NO: 63872 - DNA, 25 bp, Homo sapien
actagtttcacagtgatatgtaagt

SEQ ID NO: 63873 - DNA, 25 bp, Homo sapien
agtcaccaagacaggactctgagac

SEQ ID NO: 63874 - DNA, 25 bp, Homo sapien
agtcaccaagactggactctgagac

SEQ ID NO: 63875 - DNA, 25 bp, Homo sapien
gtttacgtaacaattcaatccagag

SEQ ID NO: 63876 - DNA, 25 bp, Homo sapien
gtttacgtaacatttcaatccagag

SEQ ID NO: 63877 - DNA, 25 bp, Homo sapien
ccttaatacaacttttcattcgtgc

SEQ ID NO: 63878 - DNA, 25 bp, Homo sapien
ccttaatacaacatttcattcgtgc

SEQ ID NO: 63879 - DNA, 25 bp, Homo sapien
ttaagcggctacagatcattctaga

SEQ ID NO: 63880 - DNA, 25 bp, Homo sapien
ttaagcggctactgatcattctaga

SEQ ID NO: 63881 - DNA, 25 bp, Homo sapien
ctttgtctggagtccgagtgtctaa

SEQ ID NO: 63882 - DNA, 25 bp, Homo sapien
ctttgtctggagaccgagtgtctaa

SEQ ID NO: 63883 - DNA, 25 bp, Homo sapien
ctactttttaggtactttgtctaag

SEQ ID NO: 63884 - DNA, 25 bp, Homo sapien
ctactttttaggaactttgtctaag

SEQ ID NO: 63885 - DNA, 25 bp, Homo sapien
aatcttttcaggatctttacgtggg

SEQ ID NO: 63886 - DNA, 25 bp, Homo sapien
aatcttttcaggttctttacgtggg

SEQ ID NO: 63887 - DNA, 25 bp, Homo sapien
tttgtgtccaccatttttagtgaag

SEQ ID NO: 63888 - DNA, 25 bp, Homo sapien
tttgtgtccaccttttttagtgaag

SEQ ID NO: 63889 - DNA, 25 bp, Homo sapien
cctactccctagagtcttacggaag

SEQ ID NO: 63890 - DNA, 25 bp, Homo sapien
cctactccctagtgtcttacggaag

SEQ ID NO: 63891 - DNA, 25 bp, Homo sapien
ccgttatgcccgtgctcgtgcgaag

SEQ ID NO: 63892 - DNA, 25 bp, Homo sapien
ccgttatgcccgagctcgtgcgaag

SEQ ID NO: 63893 - DNA, 25 bp, Homo sapien
gtggcgaccggtgtctacttgtcgg

SEQ ID NO: 63894 - DNA, 25 bp, Homo sapien
gtggcgaccggtctctacttgtcgg

SEQ ID NO: 63895 - DNA, 25 bp, Homo sapien
tcagtgtccgagtctcgtttgagta

SEQ ID NO: 63896 - DNA, 25 bp, Homo sapien
tcagtgtccgagactcgtttgagta

SEQ ID NO: 63897 - DNA, 25 bp, Homo sapien
cgacgtgcctggatctattctacgg

SEQ ID NO: 63898 - DNA, 25 bp, Homo sapien
cgacgtgcctggttctattctacgg

SEQ ID NO: 63899 - DNA, 25 bp, Homo sapien
taagcggctacagatcattctagac

SEQ ID NO: 63900 - DNA, 25 bp, Homo sapien
taagcggctacacatcattctagac

SEQ ID NO: 63901 - DNA, 25 bp, Homo sapien
gatccagacaggttgagttactaag

SEQ ID NO: 63902 - DNA, 25 bp, Homo sapien
gatccagacaggatgagttactaag

SEQ ID NO: 63903 - DNA, 25 bp, Homo sapien
atccacgacacgaacgggtcccgag

SEQ ID NO: 63904 - DNA, 25 bp, Homo sapien
atccacgacacgtacgggtcccgag

SEQ ID NO: 63905 - DNA, 25 bp, Homo sapien
tacctacatacgtagatccaccacg

SEQ ID NO: 63906 - DNA, 25 bp, Homo sapien
tacctacatacgaagatccaccacg

SEQ ID NO: 63907 - DNA, 25 bp, Homo sapien
agtttcccttacaagagaccgcccg

SEQ ID NO: 63908 - DNA, 25 bp, Homo sapien
agtttcccttactagagaccgcccg

SEQ ID NO: 63909 - DNA, 25 bp, Homo sapien
gtatcaaatatgttatccgacaccg

SEQ ID NO: 63910 - DNA, 25 bp, Homo sapien
gtatcaaatatgatatccgacaccg

SEQ ID NO: 63911 - DNA, 25 bp, Homo sapien
tgacacgatacaatcggttcaattc

SEQ ID NO: 63912 - DNA, 25 bp, Homo sapien
tgacacgatacattcggttcaattc

SEQ ID NO: 63913 - DNA, 25 bp, Homo sapien
gataccgtaatcttgtctttagtaa

SEQ ID NO: 63914 - DNA, 25 bp, Homo sapien
gataccgtaatcatgtctttagtaa

SEQ ID NO: 63915 - DNA, 25 bp, Homo sapien
aggtgtcacaaaacgtttgactaaa

SEQ ID NO: 63916 - DNA, 25 bp, Homo sapien
aggtgtcacaaatcgtttgactaaa

SEQ ID NO: 63917 - DNA, 25 bp, Homo sapien
tgggtacggcacatcatgtttttat

SEQ ID NO: 63918 - DNA, 25 bp, Homo sapien
tgggtacggcacttcatgtttttat

SEQ ID NO: 63919 - DNA, 25 bp, Homo sapien
ggagtcgttccacacgggtccccgt

SEQ ID NO: 63920 - DNA, 25 bp, Homo sapien
ggagtcgttccagacgggtccccgt

SEQ ID NO: 63921 - DNA, 25 bp, Homo sapien
gagtctccggacacgggtagcgtcc

SEQ ID NO: 63922 - DNA, 25 bp, Homo sapien
gagtctccggactcgggtagcgtcc

SEQ ID NO: 63923 - DNA, 25 bp, Homo sapien
tattactcgagtttcggacacggcc

SEQ ID NO: 63924 - DNA, 25 bp, Homo sapien
tattactcgagtatcggacacggcc

SEQ ID NO: 63925 - DNA, 25 bp, Homo sapien
tctcgagccggagagtctctggcga

SEQ ID NO: 63926 - DNA, 25 bp, Homo sapien
tctcgagccggacagtctctggcga

SEQ ID NO: 63927 - DNA, 25 bp, Homo sapien
ctaggtgttccagagttcttgagga

SEQ ID NO: 63928 - DNA, 25 bp, Homo sapien
ctaggtgttccacagttcttgagga

SEQ ID NO: 63929 - DNA, 25 bp, Homo sapien
tctgtcagtcactgtagtttgttca

SEQ ID NO: 63930 - DNA, 25 bp, Homo sapien
tctgtcagtcacagtagtttgttca

SEQ ID NO: 63931 - DNA, 25 bp, Homo sapien
atttaccccgtcatgtggtacaagt

SEQ ID NO: 63932 - DNA, 25 bp, Homo sapien
atttaccccgtcttgtggtacaagt

SEQ ID NO: 63933 - DNA, 25 bp, Homo sapien
ggcagtcccagaccagaacttagtc

SEQ ID NO: 63934 - DNA, 25 bp, Homo sapien
ggcagtcccagagcagaacttagtc

SEQ ID NO: 63935 - DNA, 25 bp, Homo sapien
agtgtcgaccgacacggactcccgt

SEQ ID NO: 63936 - DNA, 25 bp, Homo sapien
agtgtcgaccgagacggactcccgt

SEQ ID NO: 63937 - DNA, 25 bp, Homo sapien
atagtcgactccaacgttaccaccg

SEQ ID NO: 63938 - DNA, 25 bp, Homo sapien
atagtcgactcctacgttaccaccg

SEQ ID NO: 63939 - DNA, 25 bp, Homo sapien
tagaccttcgtctacgagacctacc

SEQ ID NO: 63940 - DNA, 25 bp, Homo sapien
tagaccttcgtcaacgagacctacc

SEQ ID NO: 63941 - DNA, 25 bp, Homo sapien
accgtagtagacaacagtcgagacc

SEQ ID NO: 63942 - DNA, 25 bp, Homo sapien
accgtagtagactacagtcgagacc

SEQ ID NO: 63943 - DNA, 25 bp, Homo sapien
ctcctcgtatctacagtttactcag

SEQ ID NO: 63944 - DNA, 25 bp, Homo sapien
ctcctcgtatcttcagtttactcag

SEQ ID NO: 63945 - DNA, 25 bp, Homo sapien
ttccactgtcggtccgattttcgat

SEQ ID NO: 63946 - DNA, 25 bp, Homo sapien
ttccactgtcggaccgattttcgat

SEQ ID NO: 63947 - DNA, 25 bp, Homo sapien
tctttcagatgcttctgtatgtcgt

SEQ ID NO: 63948 - DNA, 25 bp, Homo sapien
tctttcagatgcatctgtatgtcgt

SEQ ID NO: 63949 - DNA, 25 bp, Homo sapien
ataattttcaagtcttccgtgttgt

SEQ ID NO: 63950 - DNA, 25 bp, Homo sapien
ataattttcaagacttccgtgttgt

SEQ ID NO: 63951 - DNA, 25 bp, Homo sapien
tctatatcatagacccttcctgtgg

SEQ ID NO: 63952 - DNA, 25 bp, Homo sapien
tctatatcatagtcccttcctgtgg

SEQ ID NO: 63953 - DNA, 25 bp, Homo sapien
tcgaatagttctggttcgtctagga

SEQ ID NO: 63954 - DNA, 25 bp, Homo sapien
tcgaatagttctcgttcgtctagga

SEQ ID NO: 63955 - DNA, 25 bp, Homo sapien
tgatatactcttttcacgttgacga

SEQ ID NO: 63956 - DNA, 25 bp, Homo sapien
tgatatactcttatcacgttgacga

SEQ ID NO: 63957 - DNA, 25 bp, Homo sapien
tgtcgtataacctttcgatttcgtc

SEQ ID NO: 63958 - DNA, 25 bp, Homo sapien
tgtcgtataaccattcgatttcgtc

SEQ ID NO: 63959 - DNA, 25 bp, Homo sapien
cgtgcggaagggatcgtcgtttcta

SEQ ID NO: 63960 - DNA, 25 bp, Homo sapien
cgtgcggaagggttcgtcgtttcta

SEQ ID NO: 63961 - DNA, 25 bp, Homo sapien
aagtactggaggtctctgatatcgc

SEQ ID NO: 63962 - DNA, 25 bp, Homo sapien
aagtactggaggactctgatatcgc

SEQ ID NO: 63963 - DNA, 25 bp, Homo sapien
ggggtcttcgtgcaaccgttgttcc

SEQ ID NO: 63964 - DNA, 25 bp, Homo sapien
ggggtcttcgtggaaccgttgttcc

SEQ ID NO: 63965 - DNA, 25 bp, Homo sapien
ggcaagaggttgaccgtcaagtcac

SEQ ID NO: 63966 - DNA, 25 bp, Homo sapien
ggcaagaggttgtccgtcaagtcac

SEQ ID NO: 63967 - DNA, 25 bp, Homo sapien
gctgtccatgtgtcctcacgagctc

SEQ ID NO: 63968 - DNA, 25 bp, Homo sapien
gctgtccatgtgacctcacgagctc

SEQ ID NO: 63969 - DNA, 25 bp, Homo sapien
ctcgtgtcctatacttgtccaagaa

SEQ ID NO: 63970 - DNA, 25 bp, Homo sapien
ctcgtgtcctattcttgtccaagaa

SEQ ID NO: 63971 - DNA, 25 bp, Homo sapien
ctgaaaatcgtgtcacatatgtacg

SEQ ID NO: 63972 - DNA, 25 bp, Homo sapien
ctgaaaatcgtgacacatatgtacg

SEQ ID NO: 63973 - DNA, 25 bp, Homo sapien
ggtaagaactgtctcgacttatgtc

SEQ ID NO: 63974 - DNA, 25 bp, Homo sapien
ggtaagaactgtgtcgacttatgtc

SEQ ID NO: 63975 - DNA, 25 bp, Homo sapien
tgatacacaatgtccgttaagtgtc

SEQ ID NO: 63976 - DNA, 25 bp, Homo sapien
tgatacacaatgaccgttaagtgtc

SEQ ID NO: 63977 - DNA, 25 bp, Homo sapien
accacgtcggtaggtgggtacccga

SEQ ID NO: 63978 - DNA, 25 bp, Homo sapien
accacgtcggtacgtgggtacccga

SEQ ID NO: 63979 - DNA, 25 bp, Homo sapien
aggacgtcgagatcagagggcacca

SEQ ID NO: 63980 - DNA, 25 bp, Homo sapien
aggacgtcgagaacagagggcacca

SEQ ID NO: 63981 - DNA, 25 bp, Homo sapien
gccacgctcataagggtgagcgcca

SEQ ID NO: 63982 - DNA, 25 bp, Homo sapien
gccacgctcatatgggtgagcgcca

SEQ ID NO: 63983 - DNA, 25 bp, Homo sapien
tacctctctatctgggggtttgtct

SEQ ID NO: 63984 - DNA, 25 bp, Homo sapien
tacctctctatcagggggtttgtct

SEQ ID NO: 63985 - DNA, 25 bp, Homo sapien
caacccctttttgtcggttgtatat

SEQ ID NO: 63986 - DNA, 25 bp, Homo sapien
caacccctttttctcggttgtatat

SEQ ID NO: 63987 - DNA, 25 bp, Homo sapien
cgcccagtctttatagggcgtcact

SEQ ID NO: 63988 - DNA, 25 bp, Homo sapien
cgcccagtctttttagggcgtcact

SEQ ID NO: 63989 - DNA, 25 bp, Homo sapien
cgccggcttcaggtaggtaggtatc

SEQ ID NO: 63990 - DNA, 25 bp, Homo sapien
cgccggcttcagctaggtaggtatc

SEQ ID NO: 63991 - DNA, 25 bp, Homo sapien
gccgacaacctggtccgtagggtcg

SEQ ID NO: 63992 - DNA, 25 bp, Homo sapien
gccgacaacctgctccgtagggtcg

SEQ ID NO: 63993 - DNA, 25 bp, Homo sapien
gccggactcttgctccgaggactcg

SEQ ID NO: 63994 - DNA, 25 bp, Homo sapien
gccggactcttggtccgaggactcg

SEQ ID NO: 63995 - DNA, 25 bp, Homo sapien
cggaacttcgagtcgagtagtacga

SEQ ID NO: 63996 - DNA, 25 bp, Homo sapien
cggaacttcgagacgagtagtacga

SEQ ID NO: 63997 - DNA, 25 bp, Homo sapien
agtggaatcgtgtcgcgaagagact

SEQ ID NO: 63998 - DNA, 25 bp, Homo sapien
agtggaatcgtgacgcgaagagact

SEQ ID NO: 63999 - DNA, 25 bp, Homo sapien
gagacgagaccctgtcaccgtcgat

SEQ ID NO: 64000 - DNA, 25 bp, Homo sapien
gagacgagacccagtcaccgtcgat

SEQ ID NO: 64001 - DNA, 25 bp, Homo sapien
acagtcccactctagtccgtacgtg

SEQ ID NO: 64002 - DNA, 25 bp, Homo sapien
acagtcccactcaagtccgtacgtg

SEQ ID NO: 64003 - DNA, 25 bp, Homo sapien
ctagacactgagcaactccgagtcg

SEQ ID NO: 64004 - DNA, 25 bp, Homo sapien
ctagacactgaggaactccgagtcg

SEQ ID NO: 64005 - DNA, 25 bp, Homo sapien
tacagaagtatctattctcgagtct

SEQ ID NO: 64006 - DNA, 25 bp, Homo sapien
tacagaagtatcaattctcgagtct

SEQ ID NO: 64007 - DNA, 25 bp, Homo sapien
gtataaggttctttctctgtagtcg

SEQ ID NO: 64008 - DNA, 25 bp, Homo sapien
gtataaggttctatctctgtagtcg

SEQ ID NO: 64009 - DNA, 25 bp, Homo sapien
ggtgagattcatgtcactgacgtcg

SEQ ID NO: 64010 - DNA, 25 bp, Homo sapien
ggtgagattcatctcactgacgtcg

SEQ ID NO: 64011 - DNA, 25 bp, Homo sapien
aacgggagcgttattagtgaccatc

SEQ ID NO: 64012 - DNA, 25 bp, Homo sapien
aacgggagcgtttttagtgaccatc

SEQ ID NO: 64013 - DNA, 25 bp, Homo sapien
acgggacttcgttttaaagactata

SEQ ID NO: 64014 - DNA, 25 bp, Homo sapien
acgggacttcgtattaaagactata

SEQ ID NO: 64015 - DNA, 25 bp, Homo sapien
gaccgacctcattgactgaagataa

SEQ ID NO: 64016 - DNA, 25 bp, Homo sapien
gaccgacctcatagactgaagataa

SEQ ID NO: 64017 - DNA, 25 bp, Homo sapien
aggaccctcgaccagactgaccaaa

SEQ ID NO: 64018 - DNA, 25 bp, Homo sapien
aggaccctcgacgagactgaccaaa

SEQ ID NO: 64019 - DNA, 25 bp, Homo sapien
acttccgtctcaggtttaccggata

SEQ ID NO: 64020 - DNA, 25 bp, Homo sapien
acttccgtctcacgtttaccggata

SEQ ID NO: 64021 - DNA, 25 bp, Homo sapien
ttaccgtgtcaggtgtctaataata

SEQ ID NO: 64022 - DNA, 25 bp, Homo sapien
ttaccgtgtcagctgtctaataata

SEQ ID NO: 64023 - DNA, 25 bp, Homo sapien
tactgaaacttttgtcatattgagt

SEQ ID NO: 64024 - DNA, 25 bp, Homo sapien
tactgaaactttagtcatattgagt

SEQ ID NO: 64025 - DNA, 25 bp, Homo sapien
cttttatttttgttatatcggtact

SEQ ID NO: 64026 - DNA, 25 bp, Homo sapien
cttttatttttgatatatcggtact

SEQ ID NO: 64027 - DNA, 25 bp, Homo sapien
ttttaatctccgtcatgtaaggtat

SEQ ID NO: 64028 - DNA, 25 bp, Homo sapien
ttttaatctccgacatgtaaggtat

SEQ ID NO: 64029 - DNA, 25 bp, Homo sapien
ctaagatggttgactttacagacga

SEQ ID NO: 64030 - DNA, 25 bp, Homo sapien
ctaagatggttgtctttacagacga

SEQ ID NO: 64031 - DNA, 25 bp, Homo sapien
tacgaattcttattttcacaactac

SEQ ID NO: 64032 - DNA, 25 bp, Homo sapien
tacgaattcttaatttcacaactac

SEQ ID NO: 64033 - DNA, 25 bp, Homo sapien
cgttacgaaggtttttaactttttc

SEQ ID NO: 64034 - DNA, 25 bp, Homo sapien
cgttacgaaggtatttaactttttc

SEQ ID NO: 64035 - DNA, 25 bp, Homo sapien
agatgtgactgtttattctacctcg

SEQ ID NO: 64036 - DNA, 25 bp, Homo sapien
agatgtgactgtatattctacctcg

SEQ ID NO: 64037 - DNA, 25 bp, Homo sapien
ttagtggtggtagtcgtgaccctcg

SEQ ID NO: 64038 - DNA, 25 bp, Homo sapien
ttagtggtggtactcgtgaccctcg

SEQ ID NO: 64039 - DNA, 25 bp, Homo sapien
acatcagggacttttgtctcacaat

SEQ ID NO: 64040 - DNA, 25 bp, Homo sapien
acatcagggactattgtctcacaat

SEQ ID NO: 64041 - DNA, 25 bp, Homo sapien
acaacagtcggagcacctttggtcc

SEQ ID NO: 64042 - DNA, 25 bp, Homo sapien
acaacagtcggaccacctttggtcc

SEQ ID NO: 64043 - DNA, 25 bp, Homo sapien
accagtgacagtctccttcgagtca

SEQ ID NO: 64044 - DNA, 25 bp, Homo sapien
accagtgacagtgtccttcgagtca

SEQ ID NO: 64045 - DNA, 25 bp, Homo sapien
agtggtaccgttgtctttcggagtt

SEQ ID NO: 64046 - DNA, 25 bp, Homo sapien
agtggtaccgttctctttcggagtt

SEQ ID NO: 64047 - DNA, 25 bp, Homo sapien
ctttcgagtcgtaatggttttcgtg

SEQ ID NO: 64048 - DNA, 25 bp, Homo sapien
ctttcgagtcgttatggttttcgtg

SEQ ID NO: 64049 - DNA, 25 bp, Homo sapien
acttctatacagacgggttatttgt

SEQ ID NO: 64050 - DNA, 25 bp, Homo sapien
acttctatacagtcgggttatttgt

SEQ ID NO: 64051 - DNA, 25 bp, Homo sapien
tactaggttctaagacgttctgtgt

SEQ ID NO: 64052 - DNA, 25 bp, Homo sapien
tactaggttctatgacgttctgtgt

SEQ ID NO: 64053 - DNA, 25 bp, Homo sapien
ggtgacagtgtgctcagacagaaga

SEQ ID NO: 64054 - DNA, 25 bp, Homo sapien
ggtgacagtgtggtcagacagaaga

SEQ ID NO: 64055 - DNA, 25 bp, Homo sapien
aggtgtgtgtactgggtcaagaacc

SEQ ID NO: 64056 - DNA, 25 bp, Homo sapien
aggtgtgtgtacagggtcaagaacc

SEQ ID NO: 64057 - DNA, 25 bp, Homo sapien
cacgatgggtatgtgttggtagacc

SEQ ID NO: 64058 - DNA, 25 bp, Homo sapien
cacgatgggtatctgttggtagacc

SEQ ID NO: 64059 - DNA, 25 bp, Homo sapien
aaacgaaacgtctcgttaaatgtat

SEQ ID NO: 64060 - DNA, 25 bp, Homo sapien
aaacgaaacgtcacgttaaatgtat

SEQ ID NO: 64061 - DNA, 25 bp, Homo sapien
agacagtatatcgacttacacaatt

SEQ ID NO: 64062 - DNA, 25 bp, Homo sapien
agacagtatatccacttacacaatt

SEQ ID NO: 64063 - DNA, 25 bp, Homo sapien
gactaggttcctacgaccgtagttt

SEQ ID NO: 64064 - DNA, 25 bp, Homo sapien
gactaggttccttcgaccgtagttt

SEQ ID NO: 64065 - DNA, 25 bp, Homo sapien
cctcggtttcgactgctacggtttg

SEQ ID NO: 64066 - DNA, 25 bp, Homo sapien
cctcggtttcgagtgctacggtttg

SEQ ID NO: 64067 - DNA, 25 bp, Homo sapien
gagtcgccactctagaggtctctac

SEQ ID NO: 64068 - DNA, 25 bp, Homo sapien
gagtcgccactcaagaggtctctac

SEQ ID NO: 64069 - DNA, 25 bp, Homo sapien
agagtccgaactcacggagttctcc

SEQ ID NO: 64070 - DNA, 25 bp, Homo sapien
agagtccgaactgacggagttctcc

SEQ ID NO: 64071 - DNA, 25 bp, Homo sapien
gtttgactagggacttcttatttgc

SEQ ID NO: 64072 - DNA, 25 bp, Homo sapien
gtttgactagggtcttcttatttgc

SEQ ID NO: 64073 - DNA, 25 bp, Homo sapien
gtgtctacatggtttacattttgtc

SEQ ID NO: 64074 - DNA, 25 bp, Homo sapien
gtgtctacatggattacattttgtc

SEQ ID NO: 64075 - DNA, 25 bp, Homo sapien
tggttacttggtattcactttcatc

SEQ ID NO: 64076 - DNA, 25 bp, Homo sapien
tggttacttggttttcactttcatc

SEQ ID NO: 64077 - DNA, 25 bp, Homo sapien
agtcacttcccctttgtcggtgcct

SEQ ID NO: 64078 - DNA, 25 bp, Homo sapien
agtcacttccccattgtcggtgcct

SEQ ID NO: 64079 - DNA, 25 bp, Homo sapien
tccctccttatttctggtcgacggt

SEQ ID NO: 64080 - DNA, 25 bp, Homo sapien
tccctccttattactggtcgacggt

SEQ ID NO: 64081 - DNA, 25 bp, Homo sapien
atccccttagtctgtctggtccgcg

SEQ ID NO: 64082 - DNA, 25 bp, Homo sapien
atccccttagtcagtctggtccgcg

SEQ ID NO: 64083 - DNA, 25 bp, Homo sapien
catcccgggcgtcagcaggtgcgta

SEQ ID NO: 64084 - DNA, 25 bp, Homo sapien
catcccgggcgtgagcaggtgcgta

SEQ ID NO: 64085 - DNA, 25 bp, Homo sapien
taaacaccgccgtttctgtatgggt

SEQ ID NO: 64086 - DNA, 25 bp, Homo sapien
taaacaccgccgattctgtatgggt

SEQ ID NO: 64087 - DNA, 25 bp, Homo sapien
ccactgaagtcaatggtcaacgggt

SEQ ID NO: 64088 - DNA, 25 bp, Homo sapien
ccactgaagtcattggtcaacgggt

SEQ ID NO: 64089 - DNA, 25 bp, Homo sapien
aatgtcactatcgttctattacact

SEQ ID NO: 64090 - DNA, 25 bp, Homo sapien
aatgtcactatccttctattacact

SEQ ID NO: 64091 - DNA, 25 bp, Homo sapien
aatacaggttgttactccaaagtaa

SEQ ID NO: 64092 - DNA, 25 bp, Homo sapien
aatacaggttgtaactccaaagtaa

SEQ ID NO: 64093 - DNA, 25 bp, Homo sapien
aaaaccgtaagtctctcgtgcaaat

SEQ ID NO: 64094 - DNA, 25 bp, Homo sapien
aaaaccgtaagtgtctcgtgcaaat

SEQ ID NO: 64095 - DNA, 25 bp, Homo sapien
atgtcggtggtacactctgaaaact

SEQ ID NO: 64096 - DNA, 25 bp, Homo sapien
atgtcggtggtagactctgaaaact

SEQ ID NO: 64097 - DNA, 25 bp, Homo sapien
acttcgtcccgagaacatctgtaga

SEQ ID NO: 64098 - DNA, 25 bp, Homo sapien
acttcgtcccgacaacatctgtaga

SEQ ID NO: 64099 - DNA, 25 bp, Homo sapien
atgtctctgcgaccagaattcggta

SEQ ID NO: 64100 - DNA, 25 bp, Homo sapien
atgtctctgcgagcagaattcggta

SEQ ID NO: 64101 - DNA, 25 bp, Homo sapien
gtgtctctggaaccactacatccga

SEQ ID NO: 64102 - DNA, 25 bp, Homo sapien
gtgtctctggaagcactacatccga

SEQ ID NO: 64103 - DNA, 25 bp, Homo sapien
ggtttcttacggaacttctataaca

SEQ ID NO: 64104 - DNA, 25 bp, Homo sapien
ggtttcttacggtacttctataaca

SEQ ID NO: 64105 - DNA, 25 bp, Homo sapien
gggtattgaagtccactcttaatat

SEQ ID NO: 64106 - DNA, 25 bp, Homo sapien
gggtattgaagtgcactcttaatat

SEQ ID NO: 64107 - DNA, 25 bp, Homo sapien
ttaccgaatattcgtgcaaaaacga

SEQ ID NO: 64108 - DNA, 25 bp, Homo sapien
ttaccgaatattggtgcaaaaacga

SEQ ID NO: 64109 - DNA, 25 bp, Homo sapien
taccgtgagttgtgtgccaaaacat

SEQ ID NO: 64110 - DNA, 25 bp, Homo sapien
taccgtgagttgagtgccaaaacat

SEQ ID NO: 64111 - DNA, 25 bp, Homo sapien
atctacctctgagtccccgaacaga

SEQ ID NO: 64112 - DNA, 25 bp, Homo sapien
atctacctctgactccccgaacaga

SEQ ID NO: 64113 - DNA, 25 bp, Homo sapien
agacccggtagacacccgcaaacga

SEQ ID NO: 64114 - DNA, 25 bp, Homo sapien
agacccggtagagacccgcaaacga

SEQ ID NO: 64115 - DNA, 25 bp, Homo sapien
caccggagcccgttactgtgacagc

SEQ ID NO: 64116 - DNA, 25 bp, Homo sapien
caccggagcccgatactgtgacagc

SEQ ID NO: 64117 - DNA, 25 bp, Homo sapien
gcccctgaggaggagtatgtcgaaa

SEQ ID NO: 64118 - DNA, 25 bp, Homo sapien
gcccctgaggagcagtatgtcgaaa

SEQ ID NO: 64119 - DNA, 25 bp, Homo sapien
gtgtagaatcgttagtgtaatctac

SEQ ID NO: 64120 - DNA, 25 bp, Homo sapien
gtgtagaatcgtaagtgtaatctac

SEQ ID NO: 64121 - DNA, 25 bp, Homo sapien
ttattggtacaagactagttaaacc

SEQ ID NO: 64122 - DNA, 25 bp, Homo sapien
ttattggtacaacactagttaaacc

SEQ ID NO: 64123 - DNA, 25 bp, Homo sapien
atcctgacggtaaaagacctaaatc

SEQ ID NO: 64124 - DNA, 25 bp, Homo sapien
atcctgacggtataagacctaaatc

SEQ ID NO: 64125 - DNA, 25 bp, Homo sapien
aaccggtccgaccagaacttgagga

SEQ ID NO: 64126 - DNA, 25 bp, Homo sapien
aaccggtccgacgagaacttgagga

SEQ ID NO: 64127 - DNA, 25 bp, Homo sapien
acacaagtccacacagacctcggga

SEQ ID NO: 64128 - DNA, 25 bp, Homo sapien
acacaagtccactcagacctcggga

SEQ ID NO: 64129 - DNA, 25 bp, Homo sapien
tccattgacccgtcacgttttccgg

SEQ ID NO: 64130 - DNA, 25 bp, Homo sapien
tccattgacccgacacgttttccgg

SEQ ID NO: 64131 - DNA, 25 bp, Homo sapien
gataaatctaggtcccttctacgat

SEQ ID NO: 64132 - DNA, 25 bp, Homo sapien
gataaatctaggacccttctacgat

SEQ ID NO: 64133 - DNA, 25 bp, Homo sapien
tgattggtgtcttacccgtctacac

SEQ ID NO: 64134 - DNA, 25 bp, Homo sapien
tgattggtgtctaacccgtctacac

SEQ ID NO: 64135 - DNA, 25 bp, Homo sapien
tgaggtcgtagttcccggatcgtcc

SEQ ID NO: 64136 - DNA, 25 bp, Homo sapien
tgaggtcgtagtacccggatcgtcc

SEQ ID NO: 64137 - DNA, 25 bp, Homo sapien
taaccacaggggttcggaaccttcc

SEQ ID NO: 64138 - DNA, 25 bp, Homo sapien
taaccacaggggatcggaaccttcc

SEQ ID NO: 64139 - DNA, 25 bp, Homo sapien
cacatagagacgaggagaggtcttc

SEQ ID NO: 64140 - DNA, 25 bp, Homo sapien
cacatagagacgtggagaggtcttc

SEQ ID NO: 64141 - DNA, 25 bp, Homo sapien
tccgacgggagttgtcacgcgaccc

SEQ ID NO: 64142 - DNA, 25 bp, Homo sapien
tccgacgggagtagtcacgcgaccc

SEQ ID NO: 64143 - DNA, 25 bp, Homo sapien
tcctgcggacacgtcaggacgagac

SEQ ID NO: 64144 - DNA, 25 bp, Homo sapien
tcctgcggacacctcaggacgagac

SEQ ID NO: 64145 - DNA, 25 bp, Homo sapien
ttgttcacgaaaactcccggcggcg

SEQ ID NO: 64146 - DNA, 25 bp, Homo sapien
ttgttcacgaaatctcccggcggcg

SEQ ID NO: 64147 - DNA, 25 bp, Homo sapien
cctgacagacgcatcgcggaggtcg

SEQ ID NO: 64148 - DNA, 25 bp, Homo sapien
cctgacagacgcttcgcggaggtcg

SEQ ID NO: 64149 - DNA, 25 bp, Homo sapien
ctgacgtgagccttcgccggacagg

SEQ ID NO: 64150 - DNA, 25 bp, Homo sapien
ctgacgtgagccatcgccggacagg

SEQ ID NO: 64151 - DNA, 25 bp, Homo sapien
tgcggtcgaaactacagcccaccgt

SEQ ID NO: 64152 - DNA, 25 bp, Homo sapien
tgcggtcgaaacaacagcccaccgt

SEQ ID NO: 64153 - DNA, 25 bp, Homo sapien
cgtcggtcccaaggacgtcgggacc

SEQ ID NO: 64154 - DNA, 25 bp, Homo sapien
cgtcggtcccaacgacgtcgggacc

SEQ ID NO: 64155 - DNA, 25 bp, Homo sapien
ggaatctccttagatcgcgcagacc

SEQ ID NO: 64156 - DNA, 25 bp, Homo sapien
ggaatctccttacatcgcgcagacc

SEQ ID NO: 64157 - DNA, 25 bp, Homo sapien
gaactctcattatattcctgtacgg

SEQ ID NO: 64158 - DNA, 25 bp, Homo sapien
gaactctcattaaattcctgtacgg

SEQ ID NO: 64159 - DNA, 25 bp, Homo sapien
tttacacaaaccttgtctctgtgtg

SEQ ID NO: 64160 - DNA, 25 bp, Homo sapien
tttacacaaaccatgtctctgtgtg

SEQ ID NO: 64161 - DNA, 25 bp, Homo sapien
gacgagtaccggtgcttcttggccg

SEQ ID NO: 64162 - DNA, 25 bp, Homo sapien
gacgagtaccggagcttcttggccg

SEQ ID NO: 64163 - DNA, 25 bp, Homo sapien
ccaaactcgtggtactcttgggccg

SEQ ID NO: 64164 - DNA, 25 bp, Homo sapien
ccaaactcgtggaactcttgggccg

SEQ ID NO: 64165 - DNA, 25 bp, Homo sapien
agtatatctgtgtcagatgcagtca

SEQ ID NO: 64166 - DNA, 25 bp, Homo sapien
agtatatctgtgacagatgcagtca

SEQ ID NO: 64167 - DNA, 25 bp, Homo sapien
cgaccttcgttgaggtccctgtaca

SEQ ID NO: 64168 - DNA, 25 bp, Homo sapien
cgaccttcgttgtggtccctgtaca

SEQ ID NO: 64169 - DNA, 25 bp, Homo sapien
accttccgtcggtacgacaccggga

SEQ ID NO: 64170 - DNA, 25 bp, Homo sapien
accttccgtcggaacgacaccggga

SEQ ID NO: 64171 - DNA, 25 bp, Homo sapien
tactcttccggtggagcttcaagac

SEQ ID NO: 64172 - DNA, 25 bp, Homo sapien
tactcttccggtcgagcttcaagac

SEQ ID NO: 64173 - DNA, 25 bp, Homo sapien
ctactcttccggtggagcttcaaga

SEQ ID NO: 64174 - DNA, 25 bp, Homo sapien
ctactcttccggaggagcttcaaga

SEQ ID NO: 64175 - DNA, 25 bp, Homo sapien
tcttcctcgagatcaggaacccaat

SEQ ID NO: 64176 - DNA, 25 bp, Homo sapien
tcttcctcgagaacaggaacccaat

SEQ ID NO: 64177 - DNA, 25 bp, Homo sapien
ctccttgaggtacagacgtcccgga

SEQ ID NO: 64178 - DNA, 25 bp, Homo sapien
ctccttgaggtagagacgtcccgga

SEQ ID NO: 64179 - DNA, 25 bp, Homo sapien
ctcctcgctgggaaagtcgtccaga

SEQ ID NO: 64180 - DNA, 25 bp, Homo sapien
ctcctcgctgggtaagtcgtccaga

SEQ ID NO: 64181 - DNA, 25 bp, Homo sapien
actctccgtgaggtgagttcccctc

SEQ ID NO: 64182 - DNA, 25 bp, Homo sapien
actctccgtgagctgagttcccctc

SEQ ID NO: 64183 - DNA, 25 bp, Homo sapien
cgaagtcaatgagtgttgtcctgcc

SEQ ID NO: 64184 - DNA, 25 bp, Homo sapien
cgaagtcaatgactgttgtcctgcc

SEQ ID NO: 64185 - DNA, 25 bp, Homo sapien
agaactccagggagtttatgttctc

SEQ ID NO: 64186 - DNA, 25 bp, Homo sapien
agaactccagggtgtttatgttctc

SEQ ID NO: 64187 - DNA, 25 bp, Homo sapien
tagttacaagggaaggttcttccct

SEQ ID NO: 64188 - DNA, 25 bp, Homo sapien
tagttacaagggtaggttcttccct

SEQ ID NO: 64189 - DNA, 25 bp, Homo sapien
catgtacgacttgtcctttgtctca

SEQ ID NO: 64190 - DNA, 25 bp, Homo sapien
catgtacgacttctcctttgtctca

SEQ ID NO: 64191 - DNA, 25 bp, Homo sapien
tgaaacgtaacgtctctgtctacac

SEQ ID NO: 64192 - DNA, 25 bp, Homo sapien
tgaaacgtaacgactctgtctacac

SEQ ID NO: 64193 - DNA, 25 bp, Homo sapien
gcggagacaggaacggtcttctacc

SEQ ID NO: 64194 - DNA, 25 bp, Homo sapien
gcggagacaggatcggtcttctacc

SEQ ID NO: 64195 - DNA, 25 bp, Homo sapien
gagacgagtgattctatttacgtct

SEQ ID NO: 64196 - DNA, 25 bp, Homo sapien
gagacgagtgatactatttacgtct

SEQ ID NO: 64197 - DNA, 25 bp, Homo sapien
ggccggaccgcgacagactcttctc

SEQ ID NO: 64198 - DNA, 25 bp, Homo sapien
ggccggaccgcgtcagactcttctc

SEQ ID NO: 64199 - DNA, 25 bp, Homo sapien
ccgttcggaacgaggagctgtcttc

SEQ ID NO: 64200 - DNA, 25 bp, Homo sapien
ccgttcggaacgtggagctgtcttc

SEQ ID NO: 64201 - DNA, 25 bp, Homo sapien
gtttgggagtaaggtacactcttcc

SEQ ID NO: 64202 - DNA, 25 bp, Homo sapien
gtttgggagtaacgtacactcttcc

SEQ ID NO: 64203 - DNA, 25 bp, Homo sapien
ctgtctgacggcttcaggttttcga

SEQ ID NO: 64204 - DNA, 25 bp, Homo sapien
ctgtctgacggcatcaggttttcga

SEQ ID NO: 64205 - DNA, 25 bp, Homo sapien
gtttcacgaacattctgtatcttga

SEQ ID NO: 64206 - DNA, 25 bp, Homo sapien
gtttcacgaacaatctgtatcttga

SEQ ID NO: 64207 - DNA, 25 bp, Homo sapien
cttatgttatgagtagatcctacat

SEQ ID NO: 64208 - DNA, 25 bp, Homo sapien
cttatgttatgactagatcctacat

SEQ ID NO: 64209 - DNA, 25 bp, Homo sapien
gaacatatttctagctgaacctgat

SEQ ID NO: 64210 - DNA, 25 bp, Homo sapien
gaacatatttcttgctgaacctgat

SEQ ID NO: 64211 - DNA, 25 bp, Homo sapien
aaatttttctgtcgacgaggactga

SEQ ID NO: 64212 - DNA, 25 bp, Homo sapien
aaatttttctgtggacgaggactga

SEQ ID NO: 64213 - DNA, 25 bp, Homo sapien
aatcggtcgtcgagtcagtcccgta

SEQ ID NO: 64214 - DNA, 25 bp, Homo sapien
aatcggtcgtcgtgtcagtcccgta

SEQ ID NO: 64215 - DNA, 25 bp, Homo sapien
aaccttcgacgaggtccctacaacg

SEQ ID NO: 64216 - DNA, 25 bp, Homo sapien
aaccttcgacgacgtccctacaacg

SEQ ID NO: 64217 - DNA, 25 bp, Homo sapien
tgggcgttcgaacgaccactgctcg

SEQ ID NO: 64218 - DNA, 25 bp, Homo sapien
tgggcgttcgaaggaccactgctcg

SEQ ID NO: 64219 - DNA, 25 bp, Homo sapien
tgtcaggatcttcgtgtcggacacc

SEQ ID NO: 64220 - DNA, 25 bp, Homo sapien
tgtcaggatcttggtgtcggacacc

SEQ ID NO: 64221 - DNA, 25 bp, Homo sapien
tttgtttgtatgtctcgtggaccca

SEQ ID NO: 64222 - DNA, 25 bp, Homo sapien
tttgtttgtatgactcgtggaccca

SEQ ID NO: 64223 - DNA, 25 bp, Homo sapien
gttttctgaagtcaataggaccctt

SEQ ID NO: 64224 - DNA, 25 bp, Homo sapien
gttttctgaagtgaataggaccctt

SEQ ID NO: 64225 - DNA, 25 bp, Homo sapien
cgggctcgggatcttgagtcctctt

SEQ ID NO: 64226 - DNA, 25 bp, Homo sapien
cgggctcgggatgttgagtcctctt

SEQ ID NO: 64227 - DNA, 25 bp, Homo sapien
gtcgaagagatttcttagtcctgtc

SEQ ID NO: 64228 - DNA, 25 bp, Homo sapien
gtcgaagagattacttagtcctgtc

SEQ ID NO: 64229 - DNA, 25 bp, Homo sapien
aggaggtaggacttcaaggctcact

SEQ ID NO: 64230 - DNA, 25 bp, Homo sapien
aggaggtaggacatcaaggctcact

SEQ ID NO: 64231 - DNA, 25 bp, Homo sapien
gtagaaagacaactaatacaccgcg

SEQ ID NO: 64232 - DNA, 25 bp, Homo sapien
gtagaaagacaagtaatacaccgcg

SEQ ID NO: 64233 - DNA, 25 bp, Homo sapien
cgactggaacctcaaccagactcgg

SEQ ID NO: 64234 - DNA, 25 bp, Homo sapien
cgactggaacctgaaccagactcgg

SEQ ID NO: 64235 - DNA, 25 bp, Homo sapien
ggtactccaccagtatcaagatccg

SEQ ID NO: 64236 - DNA, 25 bp, Homo sapien
ggtactccaccactatcaagatccg

SEQ ID NO: 64237 - DNA, 25 bp, Homo sapien
ccacacttctatgtcttggagaaat

SEQ ID NO: 64238 - DNA, 25 bp, Homo sapien
ccacacttctatctcttggagaaat

SEQ ID NO: 64239 - DNA, 25 bp, Homo sapien
ttaccaagggttacagtttcgggga

SEQ ID NO: 64240 - DNA, 25 bp, Homo sapien
ttaccaagggtttcagtttcgggga

SEQ ID NO: 64241 - DNA, 25 bp, Homo sapien
accaaagttgtcttaattcgtggga

SEQ ID NO: 64242 - DNA, 25 bp, Homo sapien
accaaagttgtcataattcgtggga

SEQ ID NO: 64243 - DNA, 25 bp, Homo sapien
caaacaatgttgatttcggtcgtat

SEQ ID NO: 64244 - DNA, 25 bp, Homo sapien
caaacaatgttgttttcggtcgtat

SEQ ID NO: 64245 - DNA, 25 bp, Homo sapien
aaaatgtacgtgtttccttttagtt

SEQ ID NO: 64246 - DNA, 25 bp, Homo sapien
aaaatgtacgtgattccttttagtt

SEQ ID NO: 64247 - DNA, 25 bp, Homo sapien
ggttaccctttcctccactgtttgc

SEQ ID NO: 64248 - DNA, 25 bp, Homo sapien
ggttaccctttcgtccactgtttgc

SEQ ID NO: 64249 - DNA, 25 bp, Homo sapien
ggtccctcttgtgtcaacttccttc

SEQ ID NO: 64250 - DNA, 25 bp, Homo sapien
ggtccctcttgtctcaacttccttc

SEQ ID NO: 64251 - DNA, 25 bp, Homo sapien
gttcaggtctaactttccccatgtc

SEQ ID NO: 64252 - DNA, 25 bp, Homo sapien
gttcaggtctaagtttccccatgtc

SEQ ID NO: 64253 - DNA, 25 bp, Homo sapien
tacgtttgatctttcccaccgagac

SEQ ID NO: 64254 - DNA, 25 bp, Homo sapien
tacgtttgatctatcccaccgagac

SEQ ID NO: 64255 - DNA, 25 bp, Homo sapien
atttaatagattatccaaccgtgag

SEQ ID NO: 64256 - DNA, 25 bp, Homo sapien
atttaatagattttccaaccgtgag

SEQ ID NO: 64257 - DNA, 25 bp, Homo sapien
tccttctgtgactcccttagacgga

SEQ ID NO: 64258 - DNA, 25 bp, Homo sapien
tccttctgtgacacccttagacgga

SEQ ID NO: 64259 - DNA, 25 bp, Homo sapien
aacttgaaccaaccaggaacagacg

SEQ ID NO: 64260 - DNA, 25 bp, Homo sapien
aacttgaaccaagcaggaacagacg

SEQ ID NO: 64261 - DNA, 25 bp, Homo sapien
agaaggaccatcgagtgagcaggta

SEQ ID NO: 64262 - DNA, 25 bp, Homo sapien
agaaggaccatccagtgagcaggta

SEQ ID NO: 64263 - DNA, 25 bp, Homo sapien
agaaagaacgatcacattagcaatt

SEQ ID NO: 64264 - DNA, 25 bp, Homo sapien
agaaagaacgatgacattagcaatt

SEQ ID NO: 64265 - DNA, 25 bp, Homo sapien
cttataattgtagagtaccacaggt

SEQ ID NO: 64266 - DNA, 25 bp, Homo sapien
cttataattgtacagtaccacaggt

SEQ ID NO: 64267 - DNA, 25 bp, Homo sapien
tatcagaattagagagtccacgggt

SEQ ID NO: 64268 - DNA, 25 bp, Homo sapien
tatcagaattagtgagtccacgggt

SEQ ID NO: 64269 - DNA, 25 bp, Homo sapien
cccgatgtccctgactccgagaggt

SEQ ID NO: 64270 - DNA, 25 bp, Homo sapien
cccgatgtccctcactccgagaggt

SEQ ID NO: 64271 - DNA, 25 bp, Homo sapien
aactggtagagtcagtcgacgaaac

SEQ ID NO: 64272 - DNA, 25 bp, Homo sapien
aactggtagagtgagtcgacgaaac

SEQ ID NO: 64273 - DNA, 25 bp, Homo sapien
cctcgtcgttgaagcgggttgtccg

SEQ ID NO: 64274 - DNA, 25 bp, Homo sapien
cctcgtcgttgatgcgggttgtccg

SEQ ID NO: 64275 - DNA, 25 bp, Homo sapien
ccgtagtaagacaggcgagtcatcc

SEQ ID NO: 64276 - DNA, 25 bp, Homo sapien
ccgtagtaagactggcgagtcatcc

SEQ ID NO: 64277 - DNA, 25 bp, Homo sapien
tcggagtcacagtgggttccacccg

SEQ ID NO: 64278 - DNA, 25 bp, Homo sapien
tcggagtcacagagggttccacccg

SEQ ID NO: 64279 - DNA, 25 bp, Homo sapien
cgtgcccgccgtgtgtgccttgtag

SEQ ID NO: 64280 - DNA, 25 bp, Homo sapien
cgtgcccgccgtctgtgccttgtag

SEQ ID NO: 64281 - DNA, 25 bp, Homo sapien
cctgaaccctgtctgctgacttcta

SEQ ID NO: 64282 - DNA, 25 bp, Homo sapien
cctgaaccctgtgtgctgacttcta

SEQ ID NO: 64283 - DNA, 25 bp, Homo sapien
gactacgattcgatgacaaatttat

SEQ ID NO: 64284 - DNA, 25 bp, Homo sapien
gactacgattcgttgacaaatttat

SEQ ID NO: 64285 - DNA, 25 bp, Homo sapien
tacccgtcgtgtttacatacttgtc

SEQ ID NO: 64286 - DNA, 25 bp, Homo sapien
tacccgtcgtgtatacatacttgtc

SEQ ID NO: 64287 - DNA, 25 bp, Homo sapien
aaccatttcgtttttgatctgagtg

SEQ ID NO: 64288 - DNA, 25 bp, Homo sapien
aaccatttcgttattgatctgagtg

SEQ ID NO: 64289 - DNA, 25 bp, Homo sapien
tccgtgatcttatcctcgacctacg

SEQ ID NO: 64290 - DNA, 25 bp, Homo sapien
tccgtgatcttaacctcgacctacg

SEQ ID NO: 64291 - DNA, 25 bp, Homo sapien
taacctgtgttactgtccatgcccg

SEQ ID NO: 64292 - DNA, 25 bp, Homo sapien
taacctgtgttagtgtccatgcccg

SEQ ID NO: 64293 - DNA, 25 bp, Homo sapien
aggatgtgtttcatcgacaataatc

SEQ ID NO: 64294 - DNA, 25 bp, Homo sapien
aggatgtgtttcttcgacaataatc

SEQ ID NO: 64295 - DNA, 25 bp, Homo sapien
tacttttgtacatcgtctaaaaggt

SEQ ID NO: 64296 - DNA, 25 bp, Homo sapien
tacttttgtacaacgtctaaaaggt

SEQ ID NO: 64297 - DNA, 25 bp, Homo sapien
ttagagggtacgtcacactagtcgt

SEQ ID NO: 64298 - DNA, 25 bp, Homo sapien
ttagagggtacgacacactagtcgt

SEQ ID NO: 64299 - DNA, 25 bp, Homo sapien
ctcttaaaggaggacctacagtcgt

SEQ ID NO: 64300 - DNA, 25 bp, Homo sapien
ctcttaaaggagcacctacagtcgt

SEQ ID NO: 64301 - DNA, 25 bp, Homo sapien
caacttcttaaagtcggtttctcgt

SEQ ID NO: 64302 - DNA, 25 bp, Homo sapien
caacttcttaaactcggtttctcgt

SEQ ID NO: 64303 - DNA, 25 bp, Homo sapien
ctgaactgtttgaagaccgtttgaa

SEQ ID NO: 64304 - DNA, 25 bp, Homo sapien
ctgaactgtttgtagaccgtttgaa

SEQ ID NO: 64305 - DNA, 25 bp, Homo sapien
aacatctgtaagacctctatgagta

SEQ ID NO: 64306 - DNA, 25 bp, Homo sapien
aacatctgtaagtcctctatgagta

SEQ ID NO: 64307 - DNA, 25 bp, Homo sapien
tttaaactgaagtatccagtagccg

SEQ ID NO: 64308 - DNA, 25 bp, Homo sapien
tttaaactgaagaatccagtagccg

SEQ ID NO: 64309 - DNA, 25 bp, Homo sapien
aatgtaaactaagaccgtcaaggtc

SEQ ID NO: 64310 - DNA, 25 bp, Homo sapien
aatgtaaactaacaccgtcaaggtc

SEQ ID NO: 64311 - DNA, 25 bp, Homo sapien
caagagaacaaggacgaatttaatc

SEQ ID NO: 64312 - DNA, 25 bp, Homo sapien
caagagaacaagcacgaatttaatc

SEQ ID NO: 64313 - DNA, 25 bp, Homo sapien
caataaagtatcgaacctagaggtt

SEQ ID NO: 64314 - DNA, 25 bp, Homo sapien
caataaagtatccaacctagaggtt

SEQ ID NO: 64315 - DNA, 25 bp, Homo sapien
agataaaacccgtcgtcactagatt

SEQ ID NO: 64316 - DNA, 25 bp, Homo sapien
agataaaacccgacgtcactagatt

SEQ ID NO: 64317 - DNA, 25 bp, Homo sapien
caaagggggttcaggtactgtacat

SEQ ID NO: 64318 - DNA, 25 bp, Homo sapien
caaagggggttctggtactgtacat

SEQ ID NO: 64319 - DNA, 25 bp, Homo sapien
gtaccaggagggttcggaccttcac

SEQ ID NO: 64320 - DNA, 25 bp, Homo sapien
gtaccaggagggatcggaccttcac

SEQ ID NO: 64321 - DNA, 25 bp, Homo sapien
taagatttgacatatccgatgtccc

SEQ ID NO: 64322 - DNA, 25 bp, Homo sapien
taagatttgacaaatccgatgtccc

SEQ ID NO: 64323 - DNA, 25 bp, Homo sapien
gatttgtagcattctgatgtgtgtt

SEQ ID NO: 64324 - DNA, 25 bp, Homo sapien
gatttgtagcatactgatgtgtgtt

SEQ ID NO: 64325 - DNA, 25 bp, Homo sapien
ctctccggagtcaactaatttgtat

SEQ ID NO: 64326 - DNA, 25 bp, Homo sapien
ctctccggagtctactaatttgtat

SEQ ID NO: 64327 - DNA, 25 bp, Homo sapien
aaaatatttccataatttacttagt

SEQ ID NO: 64328 - DNA, 25 bp, Homo sapien
aaaatatttccaaaatttacttagt

SEQ ID NO: 64329 - DNA, 25 bp, Homo sapien
atttctttcaagacttgtcttatag

SEQ ID NO: 64330 - DNA, 25 bp, Homo sapien
atttctttcaagtcttgtcttatag

SEQ ID NO: 64331 - DNA, 25 bp, Homo sapien
ctttgtcgtacaatgtctgtcaatt

SEQ ID NO: 64332 - DNA, 25 bp, Homo sapien
ctttgtcgtacattgtctgtcaatt

SEQ ID NO: 64333 - DNA, 25 bp, Homo sapien
cactactgtggtgaatttttcatta

SEQ ID NO: 64334 - DNA, 25 bp, Homo sapien
cactactgtggtcaatttttcatta

SEQ ID NO: 64335 - DNA, 25 bp, Homo sapien
tttacatcggcatattattcatgag

SEQ ID NO: 64336 - DNA, 25 bp, Homo sapien
tttacatcggcaaattattcatgag

SEQ ID NO: 64337 - DNA, 25 bp, Homo sapien
ctcaaggaagtatctaaaacttgat

SEQ ID NO: 64338 - DNA, 25 bp, Homo sapien
ctcaaggaagtaactaaaacttgat

SEQ ID NO: 64339 - DNA, 25 bp, Homo sapien
tatcattgtttatcaacaatgtcac

SEQ ID NO: 64340 - DNA, 25 bp, Homo sapien
tatcattgtttaacaacaatgtcac

SEQ ID NO: 64341 - DNA, 25 bp, Homo sapien
ctgattagcaactgtaagaattcta

SEQ ID NO: 64342 - DNA, 25 bp, Homo sapien
ctgattagcaacagtaagaattcta

SEQ ID NO: 64343 - DNA, 25 bp, Homo sapien
caggaattcgcacatcaaaagtgac

SEQ ID NO: 64344 - DNA, 25 bp, Homo sapien
caggaattcgcagatcaaaagtgac

SEQ ID NO: 64345 - DNA, 25 bp, Homo sapien
aggaattatgggacacgacagaaac

SEQ ID NO: 64346 - DNA, 25 bp, Homo sapien
aggaattatgggtcacgacagaaac

SEQ ID NO: 64347 - DNA, 25 bp, Homo sapien
cttccgtcatttcgacgtcatatag

SEQ ID NO: 64348 - DNA, 25 bp, Homo sapien
cttccgtcatttggacgtcatatag

SEQ ID NO: 64349 - DNA, 25 bp, Homo sapien
tcgttgccaatgtttagaacacata

SEQ ID NO: 64350 - DNA, 25 bp, Homo sapien
tcgttgccaatgattagaacacata

SEQ ID NO: 64351 - DNA, 25 bp, Homo sapien
ctcttgacggtagaattgtcataat

SEQ ID NO: 64352 - DNA, 25 bp, Homo sapien
ctcttgacggtacaattgtcataat

SEQ ID NO: 64353 - DNA, 25 bp, Homo sapien
ccttgacgtaggacctccacatcat

SEQ ID NO: 64354 - DNA, 25 bp, Homo sapien
ccttgacgtaggtcctccacatcat

SEQ ID NO: 64355 - DNA, 25 bp, Homo sapien
ctgtcttgttcgtcgccctcattct

SEQ ID NO: 64356 - DNA, 25 bp, Homo sapien
ctgtcttgttcgacgccctcattct

SEQ ID NO: 64357 - DNA, 25 bp, Homo sapien
tcttagtttgactagtgtgactaac

SEQ ID NO: 64358 - DNA, 25 bp, Homo sapien
tcttagtttgacaagtgtgactaac

SEQ ID NO: 64359 - DNA, 25 bp, Homo sapien
atttaattggtacagtcccgtgtag

SEQ ID NO: 64360 - DNA, 25 bp, Homo sapien
atttaattggtagagtcccgtgtag

SEQ ID NO: 64361 - DNA, 25 bp, Homo sapien
atcttaatatgaaacatccggtgtg

SEQ ID NO: 64362 - DNA, 25 bp, Homo sapien
atcttaatatgatacatccggtgtg

SEQ ID NO: 64363 - DNA, 25 bp, Homo sapien
cgtttactggtcaacattagggtct

SEQ ID NO: 64364 - DNA, 25 bp, Homo sapien
cgtttactggtctacattagggtct

SEQ ID NO: 64365 - DNA, 25 bp, Homo sapien
ctgtctctgtgtcgtaatttgactt

SEQ ID NO: 64366 - DNA, 25 bp, Homo sapien
ctgtctctgtgtggtaatttgactt

SEQ ID NO: 64367 - DNA, 25 bp, Homo sapien
tccagggtaccgaagattctctagt

SEQ ID NO: 64368 - DNA, 25 bp, Homo sapien
tccagggtaccgtagattctctagt

SEQ ID NO: 64369 - DNA, 25 bp, Homo sapien
atttcccgggaagtttactggtatt

SEQ ID NO: 64370 - DNA, 25 bp, Homo sapien
atttcccgggaactttactggtatt

SEQ ID NO: 64371 - DNA, 25 bp, Homo sapien
aactccgactcaattgttaccctgg

SEQ ID NO: 64372 - DNA, 25 bp, Homo sapien
aactccgactcatttgttaccctgg

SEQ ID NO: 64373 - DNA, 25 bp, Homo sapien
ctcgagtcactcatttacacatagg

SEQ ID NO: 64374 - DNA, 25 bp, Homo sapien
ctcgagtcactcttttacacatagg

SEQ ID NO: 64375 - DNA, 25 bp, Homo sapien
acatggtcgactgagtaaaaacttt

SEQ ID NO: 64376 - DNA, 25 bp, Homo sapien
acatggtcgactcagtaaaaacttt

SEQ ID NO: 64377 - DNA, 25 bp, Homo sapien
ctcacacggagatgggtgaaacttt

SEQ ID NO: 64378 - DNA, 25 bp, Homo sapien
ctcacacggagaagggtgaaacttt

SEQ ID NO: 64379 - DNA, 25 bp, Homo sapien
tcacaggaaaactggatacacttag

SEQ ID NO: 64380 - DNA, 25 bp, Homo sapien
tcacaggaaaacaggatacacttag

SEQ ID NO: 64381 - DNA, 25 bp, Homo sapien
acttaggaaaaggtgacaacacgtg

SEQ ID NO: 64382 - DNA, 25 bp, Homo sapien
acttaggaaaagctgacaacacgtg

SEQ ID NO: 64383 - DNA, 25 bp, Homo sapien
ttatcttgaagagtaacccttagtt

SEQ ID NO: 64384 - DNA, 25 bp, Homo sapien
ttatcttgaagactaacccttagtt

SEQ ID NO: 64385 - DNA, 25 bp, Homo sapien
agcttgcagactgaacactcagatt

SEQ ID NO: 64386 - DNA, 25 bp, Homo sapien
agcttgcagactcaacactcagatt

SEQ ID NO: 64387 - DNA, 25 bp, Homo sapien
gaggtgtctagacgaccctccgtca

SEQ ID NO: 64388 - DNA, 25 bp, Homo sapien
gaggtgtctagaggaccctccgtca

SEQ ID NO: 64389 - DNA, 25 bp, Homo sapien
cggacgtctagatccttctcttctc

SEQ ID NO: 64390 - DNA, 25 bp, Homo sapien
cggacgtctagaaccttctcttctc

SEQ ID NO: 64391 - DNA, 25 bp, Homo sapien
aataggagtataatgtcttgtgtct

SEQ ID NO: 64392 - DNA, 25 bp, Homo sapien
aataggagtatattgtcttgtgtct

SEQ ID NO: 64393 - DNA, 25 bp, Homo sapien
acactacggatgacgtgttatgtga

SEQ ID NO: 64394 - DNA, 25 bp, Homo sapien
acactacggatgtcgtgttatgtga

SEQ ID NO: 64395 - DNA, 25 bp, Homo sapien
ccgtcggattacgtgtagtattgta

SEQ ID NO: 64396 - DNA, 25 bp, Homo sapien
ccgtcggattacctgtagtattgta

SEQ ID NO: 64397 - DNA, 25 bp, Homo sapien
gctttcgggatctcgttacccttat

SEQ ID NO: 64398 - DNA, 25 bp, Homo sapien
gctttcgggatcacgttacccttat

SEQ ID NO: 64399 - DNA, 25 bp, Homo sapien
taagagacgacctactgcactcatt

SEQ ID NO: 64400 - DNA, 25 bp, Homo sapien
taagagacgaccaactgcactcatt

SEQ ID NO: 64401 - DNA, 25 bp, Homo sapien
gaaggacactgtcacttccgacgaa

SEQ ID NO: 64402 - DNA, 25 bp, Homo sapien
gaaggacactgtgacttccgacgaa

SEQ ID NO: 64403 - DNA, 25 bp, Homo sapien
ggcggaagaggacgtccttgctcaa

SEQ ID NO: 64404 - DNA, 25 bp, Homo sapien
ggcggaagaggaggtccttgctcaa

SEQ ID NO: 64405 - DNA, 25 bp, Homo sapien
tcctcaagggtagtcctttacaaac

SEQ ID NO: 64406 - DNA, 25 bp, Homo sapien
tcctcaagggtactcctttacaaac

SEQ ID NO: 64407 - DNA, 25 bp, Homo sapien
tgacggtacactatctgtagtacca

SEQ ID NO: 64408 - DNA, 25 bp, Homo sapien
tgacggtacactttctgtagtacca

SEQ ID NO: 64409 - DNA, 25 bp, Homo sapien
cagatacgacttaaccgttaccgtc

SEQ ID NO: 64410 - DNA, 25 bp, Homo sapien
cagatacgactttaccgttaccgtc

SEQ ID NO: 64411 - DNA, 25 bp, Homo sapien
ctacttcagtagatacaggtacctt

SEQ ID NO: 64412 - DNA, 25 bp, Homo sapien
ctacttcagtagttacaggtacctt

SEQ ID NO: 64413 - DNA, 25 bp, Homo sapien
cttactcacgtgtcgtaaaagtact

SEQ ID NO: 64414 - DNA, 25 bp, Homo sapien
cttactcacgtgacgtaaaagtact

SEQ ID NO: 64415 - DNA, 25 bp, Homo sapien
tttgttgactgactacagtatacac

SEQ ID NO: 64416 - DNA, 25 bp, Homo sapien
tttgttgactgagtacagtatacac

SEQ ID NO: 64417 - DNA, 25 bp, Homo sapien
tcgtttgacactaggtacatgtacc

SEQ ID NO: 64418 - DNA, 25 bp, Homo sapien
tcgtttgacacttggtacatgtacc

SEQ ID NO: 64419 - DNA, 25 bp, Homo sapien
tcgtctttgccgtagtccggagagg

SEQ ID NO: 64420 - DNA, 25 bp, Homo sapien
tcgtctttgccgaagtccggagagg

SEQ ID NO: 64421 - DNA, 25 bp, Homo sapien
gtctctactcatgatcgctgtggcc

SEQ ID NO: 64422 - DNA, 25 bp, Homo sapien
gtctctactcatcatcgctgtggcc

SEQ ID NO: 64423 - DNA, 25 bp, Homo sapien
gttttacatgacaaattccgtagaa

SEQ ID NO: 64424 - DNA, 25 bp, Homo sapien
gttttacatgactaattccgtagaa

SEQ ID NO: 64425 - DNA, 25 bp, Homo sapien
cactcaagacaacgttctcgagtaa

SEQ ID NO: 64426 - DNA, 25 bp, Homo sapien
cactcaagacaaggttctcgagtaa

SEQ ID NO: 64427 - DNA, 25 bp, Homo sapien
tagctaaaaccgtcgggtccggtac

SEQ ID NO: 64428 - DNA, 25 bp, Homo sapien
tagctaaaaccgacgggtccggtac

SEQ ID NO: 64429 - DNA, 25 bp, Homo sapien
cgacggaaacgccgaacattttcac

SEQ ID NO: 64430 - DNA, 25 bp, Homo sapien
cgacggaaacgcggaacattttcac

SEQ ID NO: 64431 - DNA, 25 bp, Homo sapien
cccttttgacagcggtcaacacgtg

SEQ ID NO: 64432 - DNA, 25 bp, Homo sapien
cccttttgacaggggtcaacacgtg

SEQ ID NO: 64433 - DNA, 25 bp, Homo sapien
cttctgaactctaccctgaaggttg

SEQ ID NO: 64434 - DNA, 25 bp, Homo sapien
cttctgaactcttccctgaaggttg

SEQ ID NO: 64435 - DNA, 25 bp, Homo sapien
gtacaactcgtccactataaatggt

SEQ ID NO: 64436 - DNA, 25 bp, Homo sapien
gtacaactcgtcgactataaatggt

SEQ ID NO: 64437 - DNA, 25 bp, Homo sapien
taaaggatcgacaacgaggtctagt

SEQ ID NO: 64438 - DNA, 25 bp, Homo sapien
taaaggatcgactacgaggtctagt

SEQ ID NO: 64439 - DNA, 25 bp, Homo sapien
tatacacgggtactactactcctgc

SEQ ID NO: 64440 - DNA, 25 bp, Homo sapien
tatacacgggtagtactactcctgc

SEQ ID NO: 64441 - DNA, 25 bp, Homo sapien
tctcgacgtaagatgttctccgttc

SEQ ID NO: 64442 - DNA, 25 bp, Homo sapien
tctcgacgtaagttgttctccgttc

SEQ ID NO: 64443 - DNA, 25 bp, Homo sapien
gacccgaggtgttcgtcctccgctg

SEQ ID NO: 64444 - DNA, 25 bp, Homo sapien
gacccgaggtgtacgtcctccgctg

SEQ ID NO: 64445 - DNA, 25 bp, Homo sapien
atacctaagttttctattgactgtg

SEQ ID NO: 64446 - DNA, 25 bp, Homo sapien
atacctaagtttactattgactgtg

SEQ ID NO: 64447 - DNA, 25 bp, Homo sapien
tatatcttataactcacttctttcg

SEQ ID NO: 64448 - DNA, 25 bp, Homo sapien
tatatcttataagtcacttctttcg

SEQ ID NO: 64449 - DNA, 25 bp, Homo sapien
agaaagtataaggacgattcacttc

SEQ ID NO: 64450 - DNA, 25 bp, Homo sapien
agaaagtataagcacgattcacttc

SEQ ID NO: 64451 - DNA, 25 bp, Homo sapien
cggagaaacttcctcctgaacatcg

SEQ ID NO: 64452 - DNA, 25 bp, Homo sapien
cggagaaacttcgtcctgaacatcg

SEQ ID NO: 64453 - DNA, 25 bp, Homo sapien
agagagacctcctcaccgtaacgga

SEQ ID NO: 64454 - DNA, 25 bp, Homo sapien
agagagacctccacaccgtaacgga

SEQ ID NO: 64455 - DNA, 25 bp, Homo sapien
gatatgactcatgaccatacgagat

SEQ ID NO: 64456 - DNA, 25 bp, Homo sapien
gatatgactcatcaccatacgagat

SEQ ID NO: 64457 - DNA, 25 bp, Homo sapien
gacctgtgtatacacgggtactact

SEQ ID NO: 64458 - DNA, 25 bp, Homo sapien
gacctgtgtatagacgggtactact

SEQ ID NO: 64459 - DNA, 25 bp, Homo sapien
ttcacgttgtatgagtagtggtctc

SEQ ID NO: 64460 - DNA, 25 bp, Homo sapien
ttcacgttgtatcagtagtggtctc

SEQ ID NO: 64461 - DNA, 25 bp, Homo sapien
caatagacatgttctatgtgatgtc

SEQ ID NO: 64462 - DNA, 25 bp, Homo sapien
caatagacatgtactatgtgatgtc

SEQ ID NO: 64463 - DNA, 25 bp, Homo sapien
tgtattagttcgtttatcgtcacgt

SEQ ID NO: 64464 - DNA, 25 bp, Homo sapien
tgtattagttcgattatcgtcacgt

SEQ ID NO: 64465 - DNA, 25 bp, Homo sapien
gagtacggacactcgacggtgtcca

SEQ ID NO: 64466 - DNA, 25 bp, Homo sapien
gagtacggacacacgacggtgtcca

SEQ ID NO: 64467 - DNA, 25 bp, Homo sapien
ttgtaccacactctcggtaccctag

SEQ ID NO: 64468 - DNA, 25 bp, Homo sapien
ttgtaccacactgtcggtaccctag

SEQ ID NO: 64469 - DNA, 25 bp, Homo sapien
tccttaacggttgaggagaccactc

SEQ ID NO: 64470 - DNA, 25 bp, Homo sapien
tccttaacggttcaggagaccactc

SEQ ID NO: 64471 - DNA, 25 bp, Homo sapien
gagtcaggttgagtctcggcgcccc

SEQ ID NO: 64472 - DNA, 25 bp, Homo sapien
gagtcaggttgactctcggcgcccc

SEQ ID NO: 64473 - DNA, 25 bp, Homo sapien
tagacactgggctacggcgaccctt

SEQ ID NO: 64474 - DNA, 25 bp, Homo sapien
tagacactgggcaacggcgaccctt

SEQ ID NO: 64475 - DNA, 25 bp, Homo sapien
caaaagagacgaggagaaccctctc

SEQ ID NO: 64476 - DNA, 25 bp, Homo sapien
caaaagagacgacgagaaccctctc

SEQ ID NO: 64477 - DNA, 25 bp, Homo sapien
cgaagtaaaggtttggtaggactcc

SEQ ID NO: 64478 - DNA, 25 bp, Homo sapien
cgaagtaaaggtatggtaggactcc

SEQ ID NO: 64479 - DNA, 25 bp, Homo sapien
gaactggtatattatcgtttgttcc

SEQ ID NO: 64480 - DNA, 25 bp, Homo sapien
gaactggtatataatcgtttgttcc

SEQ ID NO: 64481 - DNA, 25 bp, Homo sapien
aagtacgtgtttaatgttttcctcg

SEQ ID NO: 64482 - DNA, 25 bp, Homo sapien
aagtacgtgttttatgttttcctcg

SEQ ID NO: 64483 - DNA, 25 bp, Homo sapien
agagacattaccttttttacagagt

SEQ ID NO: 64484 - DNA, 25 bp, Homo sapien
agagacattaccatttttacagagt

SEQ ID NO: 64485 - DNA, 25 bp, Homo sapien
ctgacagttcaattgtagtctacaa

SEQ ID NO: 64486 - DNA, 25 bp, Homo sapien
ctgacagttcaaatgtagtctacaa

SEQ ID NO: 64487 - DNA, 25 bp, Homo sapien
cgtagtctgtcactcgtatttgaag

SEQ ID NO: 64488 - DNA, 25 bp, Homo sapien
cgtagtctgtcagtcgtatttgaag

SEQ ID NO: 64489 - DNA, 25 bp, Homo sapien
tactagtttcacactgatatgtaag

SEQ ID NO: 64490 - DNA, 25 bp, Homo sapien
tactagtttcactctgatatgtaag

SEQ ID NO: 64491 - DNA, 25 bp, Homo sapien
accacgtacaccaagctggcttgaa

SEQ ID NO: 64492 - DNA, 25 bp, Homo sapien
accacgtacacctagctggcttgaa

SEQ ID NO: 64493 - DNA, 25 bp, Homo sapien
gtttctacaatactcgtcctaccaa

SEQ ID NO: 64494 - DNA, 25 bp, Homo sapien
gtttctacaatagtcgtcctaccaa

SEQ ID NO: 64495 - DNA, 25 bp, Homo sapien
ggtcctacagacttttcctctctga

SEQ ID NO: 64496 - DNA, 25 bp, Homo sapien
ggtcctacagacatttcctctctga

SEQ ID NO: 64497 - DNA, 25 bp, Homo sapien
aagcggctacagatcattctagact

SEQ ID NO: 64498 - DNA, 25 bp, Homo sapien
aagcggctacagttcattctagact

SEQ ID NO: 64499 - DNA, 25 bp, Homo sapien
ctttagatggtgtctcagttctata

SEQ ID NO: 64500 - DNA, 25 bp, Homo sapien
ctttagatggtgactcagttctata

SEQ ID NO: 64501 - DNA, 25 bp, Homo sapien
gctatgtttttgtacctctcttaag

SEQ ID NO: 64502 - DNA, 25 bp, Homo sapien
gctatgtttttgaacctctcttaag

SEQ ID NO: 64503 - DNA, 25 bp, Homo sapien
taaacttttgggatcctatacaggg

SEQ ID NO: 64504 - DNA, 25 bp, Homo sapien
taaacttttgggttcctatacaggg

SEQ ID NO: 64505 - DNA, 25 bp, Homo sapien
tttcggtcctacgtttgtttgtaaa

SEQ ID NO: 64506 - DNA, 25 bp, Homo sapien
tttcggtcctacctttgtttgtaaa

SEQ ID NO: 64507 - DNA, 25 bp, Homo sapien
gttcgcttccacagatcgtttggaa

SEQ ID NO: 64508 - DNA, 25 bp, Homo sapien
gttcgcttccactgatcgtttggaa

SEQ ID NO: 64509 - DNA, 25 bp, Homo sapien
tctctcttgaccagggttctggaag

SEQ ID NO: 64510 - DNA, 25 bp, Homo sapien
tctctcttgacctgggttctggaag

SEQ ID NO: 64511 - DNA, 25 bp, Homo sapien
cggtgcgaccgtttgttactttcat

SEQ ID NO: 64512 - DNA, 25 bp, Homo sapien
cggtgcgaccgtatgttactttcat

SEQ ID NO: 64513 - DNA, 25 bp, Homo sapien
agtgtggtccggtacgttttgacat

SEQ ID NO: 64514 - DNA, 25 bp, Homo sapien
agtgtggtccggaacgttttgacat

SEQ ID NO: 64515 - DNA, 25 bp, Homo sapien
tcggtgccgacgaagctttcactcg

SEQ ID NO: 64516 - DNA, 25 bp, Homo sapien
tcggtgccgacgtagctttcactcg

SEQ ID NO: 64517 - DNA, 25 bp, Homo sapien
taggggtcgtcagatacatgtcccg

SEQ ID NO: 64518 - DNA, 25 bp, Homo sapien
taggggtcgtcacatacatgtcccg

SEQ ID NO: 64519 - DNA, 25 bp, Homo sapien
aagtttacgacacatcgtattcttg

SEQ ID NO: 64520 - DNA, 25 bp, Homo sapien
aagtttacgacagatcgtattcttg

SEQ ID NO: 64521 - DNA, 25 bp, Homo sapien
aagtcaagacacaaggtagtccgga

SEQ ID NO: 64522 - DNA, 25 bp, Homo sapien
aagtcaagacactaggtagtccgga

SEQ ID NO: 64523 - DNA, 25 bp, Homo sapien
caggtacaaaagtaggtcccgaacg

SEQ ID NO: 64524 - DNA, 25 bp, Homo sapien
caggtacaaaagaaggtcccgaacg

SEQ ID NO: 64525 - DNA, 25 bp, Homo sapien
ttgtcacacttaaagattgtctccg

SEQ ID NO: 64526 - DNA, 25 bp, Homo sapien
ttgtcacacttatagattgtctccg

SEQ ID NO: 64527 - DNA, 25 bp, Homo sapien
gtagacacaagaggtgatccaaccg

SEQ ID NO: 64528 - DNA, 25 bp, Homo sapien
gtagacacaagacgtgatccaaccg

SEQ ID NO: 64529 - DNA, 25 bp, Homo sapien
gacacgatacaatcggttcaattct

SEQ ID NO: 64530 - DNA, 25 bp, Homo sapien
gacacgatacaaacggttcaattct

SEQ ID NO: 64531 - DNA, 25 bp, Homo sapien
gagaccgtaaacctttatccgtaat

SEQ ID NO: 64532 - DNA, 25 bp, Homo sapien
gagaccgtaaacgtttatccgtaat

SEQ ID NO: 64533 - DNA, 25 bp, Homo sapien
agaggtcaacaaggtctttacacaa

SEQ ID NO: 64534 - DNA, 25 bp, Homo sapien
agaggtcaacaacgtctttacacaa

SEQ ID NO: 64535 - DNA, 25 bp, Homo sapien
gtaggtcgcactattctttccttat

SEQ ID NO: 64536 - DNA, 25 bp, Homo sapien
gtaggtcgcacttttctttccttat

SEQ ID NO: 64537 - DNA, 25 bp, Homo sapien
gggtcgtctccatgtctcggtttcc

SEQ ID NO: 64538 - DNA, 25 bp, Homo sapien
gggtcgtctccaagtctcggtttcc

SEQ ID NO: 64539 - DNA, 25 bp, Homo sapien
gtagtcccagacaccgtttcgtcgc

SEQ ID NO: 64540 - DNA, 25 bp, Homo sapien
gtagtcccagactccgtttcgtcgc

SEQ ID NO: 64541 - DNA, 25 bp, Homo sapien
ttactgctcggtttcggaagacgca

SEQ ID NO: 64542 - DNA, 25 bp, Homo sapien
ttactgctcggtatcggaagacgca

SEQ ID NO: 64543 - DNA, 25 bp, Homo sapien
ccgacgccggacatcgtccgaggga

SEQ ID NO: 64544 - DNA, 25 bp, Homo sapien
ccgacgccggacttcgtccgaggga

SEQ ID NO: 64545 - DNA, 25 bp, Homo sapien
aggaggtccaagacttctagaggac

SEQ ID NO: 64546 - DNA, 25 bp, Homo sapien
aggaggtccaagtcttctagaggac

SEQ ID NO: 64547 - DNA, 25 bp, Homo sapien
gttgtctgtcacttcttacagttta

SEQ ID NO: 64548 - DNA, 25 bp, Homo sapien
gttgtctgtcacatcttacagttta

SEQ ID NO: 64549 - DNA, 25 bp, Homo sapien
tatttaccccgtcatgtggtacaag

SEQ ID NO: 64550 - DNA, 25 bp, Homo sapien
tatttaccccgtgatgtggtacaag

SEQ ID NO: 64551 - DNA, 25 bp, Homo sapien
ggcactaccacatccagaactaaga

SEQ ID NO: 64552 - DNA, 25 bp, Homo sapien
ggcactaccacaaccagaactaaga

SEQ ID NO: 64553 - DNA, 25 bp, Homo sapien
ccgttcaacgacacggactcgactt

SEQ ID NO: 64554 - DNA, 25 bp, Homo sapien
ccgttcaacgactcggactcgactt

SEQ ID NO: 64555 - DNA, 25 bp, Homo sapien
ggtcggaccgacacgttacaaccgt

SEQ ID NO: 64556 - DNA, 25 bp, Homo sapien
ggtcggaccgactcgttacaaccgt

SEQ ID NO: 64557 - DNA, 25 bp, Homo sapien
atcgtcgtcctctatagacactacc

SEQ ID NO: 64558 - DNA, 25 bp, Homo sapien
atcgtcgtcctcaatagacactacc

SEQ ID NO: 64559 - DNA, 25 bp, Homo sapien
taaccggtactcaactagtgactcc

SEQ ID NO: 64560 - DNA, 25 bp, Homo sapien
taaccggtactctactagtgactcc

SEQ ID NO: 64561 - DNA, 25 bp, Homo sapien
ctacactcactctccgtaggatcag

SEQ ID NO: 64562 - DNA, 25 bp, Homo sapien
ctacactcactcaccgtaggatcag

SEQ ID NO: 64563 - DNA, 25 bp, Homo sapien
atccactgtcgtattcatgtgatca

SEQ ID NO: 64564 - DNA, 25 bp, Homo sapien
atccactgtcgttttcatgtgatca

SEQ ID NO: 64565 - DNA, 25 bp, Homo sapien
actctttcagatgcttctgtatgtc

SEQ ID NO: 64566 - DNA, 25 bp, Homo sapien
actctttcagatccttctgtatgtc

SEQ ID NO: 64567 - DNA, 25 bp, Homo sapien
attatttccaagcttattggtgtct

SEQ ID NO: 64568 - DNA, 25 bp, Homo sapien
attatttccaaggttattggtgtct

SEQ ID NO: 64569 - DNA, 25 bp, Homo sapien
ttattgcgcgtaacccttccggtgg

SEQ ID NO: 64570 - DNA, 25 bp, Homo sapien
ttattgcgcgtatcccttccggtgg

SEQ ID NO: 64571 - DNA, 25 bp, Homo sapien
ttaacagtactcgacgttcgaagga

SEQ ID NO: 64572 - DNA, 25 bp, Homo sapien
ttaacagtactccacgttcgaagga

SEQ ID NO: 64573 - DNA, 25 bp, Homo sapien
ttaaactctttggtacgtatgacat

SEQ ID NO: 64574 - DNA, 25 bp, Homo sapien
ttaaactctttgctacgtatgacat

SEQ ID NO: 64575 - DNA, 25 bp, Homo sapien
gtcgtataacctttcgatttcgtct

SEQ ID NO: 64576 - DNA, 25 bp, Homo sapien
gtcgtataacctatcgatttcgtct

SEQ ID NO: 64577 - DNA, 25 bp, Homo sapien
cgtgacgaagggatctcgtttcgtc

SEQ ID NO: 64578 - DNA, 25 bp, Homo sapien
cgtgacgaagggttctcgtttcgtc

SEQ ID NO: 64579 - DNA, 25 bp, Homo sapien
agaaccgagggttcttgtttcgtct

SEQ ID NO: 64580 - DNA, 25 bp, Homo sapien
agaaccgagggtacttgtttcgtct

SEQ ID NO: 64581 - DNA, 25 bp, Homo sapien
cagaggttggtgtgactttgttccg

SEQ ID NO: 64582 - DNA, 25 bp, Homo sapien
cagaggttggtgagactttgttccg

SEQ ID NO: 64583 - DNA, 25 bp, Homo sapien
tgcagtaaggggtcctcagagtcga

SEQ ID NO: 64584 - DNA, 25 bp, Homo sapien
tgcagtaaggggacctcagagtcga

SEQ ID NO: 64585 - DNA, 25 bp, Homo sapien
cgaagccgatggtccttcgagtgac

SEQ ID NO: 64586 - DNA, 25 bp, Homo sapien
cgaagccgatggaccttcgagtgac

SEQ ID NO: 64587 - DNA, 25 bp, Homo sapien
actcgtgccgatacacttcaaagga

SEQ ID NO: 64588 - DNA, 25 bp, Homo sapien
actcgtgccgattcacttcaaagga

SEQ ID NO: 64589 - DNA, 25 bp, Homo sapien
cttaaatatgtggtacacaagtgtc

SEQ ID NO: 64590 - DNA, 25 bp, Homo sapien
cttaaatatgtgctacacaagtgtc

SEQ ID NO: 64591 - DNA, 25 bp, Homo sapien
gttaaaacagtatccgactttgtct

SEQ ID NO: 64592 - DNA, 25 bp, Homo sapien
gttaaaacagtaaccgactttgtct

SEQ ID NO: 64593 - DNA, 25 bp, Homo sapien
gagtaaacctattcctctaagtgtt

SEQ ID NO: 64594 - DNA, 25 bp, Homo sapien
gagtaaacctatacctctaagtgtt

SEQ ID NO: 64595 - DNA, 25 bp, Homo sapien
accacgtcggtaggtgggtacccga

SEQ ID NO: 64596 - DNA, 25 bp, Homo sapien
accacgtcggtacgtgggtacccga

SEQ ID NO: 64597 - DNA, 25 bp, Homo sapien
tagtagatcgtgtacaggggccctc

SEQ ID NO: 64598 - DNA, 25 bp, Homo sapien
tagtagatcgtgaacaggggccctc

SEQ ID NO: 64599 - DNA, 25 bp, Homo sapien
tcgccgactcagagtgcgggcgccc

SEQ ID NO: 64600 - DNA, 25 bp, Homo sapien
tcgccgactcagtgtgcgggcgccc

SEQ ID NO: 64601 - DNA, 25 bp, Homo sapien
tgacctccactcgagagggtctttc

SEQ ID NO: 64602 - DNA, 25 bp, Homo sapien
tgacctccactccagagggtctttc

SEQ ID NO: 64603 - DNA, 25 bp, Homo sapien
acaacccctttttgtcggttgtata

SEQ ID NO: 64604 - DNA, 25 bp, Homo sapien
acaaccccttttagtcggttgtata

SEQ ID NO: 64605 - DNA, 25 bp, Homo sapien
cacccgtctttgtagggtcgttacg

SEQ ID NO: 64606 - DNA, 25 bp, Homo sapien
cacccgtctttgaagggtcgttacg

SEQ ID NO: 64607 - DNA, 25 bp, Homo sapien
ccacccggtgtcgagggtaggttct

SEQ ID NO: 64608 - DNA, 25 bp, Homo sapien
ccacccggtgtccagggtaggttct

SEQ ID NO: 64609 - DNA, 25 bp, Homo sapien
acccgccgactcgtgagagggtcgt

SEQ ID NO: 64610 - DNA, 25 bp, Homo sapien
acccgccgactcctgagagggtcgt

SEQ ID NO: 64611 - DNA, 25 bp, Homo sapien
actccgtcctgtcgtccgggtagtc

SEQ ID NO: 64612 - DNA, 25 bp, Homo sapien
actccgtcctgtggtccgggtagtc

SEQ ID NO: 64613 - DNA, 25 bp, Homo sapien
ccgagactgtcgtccgtgtctcgtc

SEQ ID NO: 64614 - DNA, 25 bp, Homo sapien
ccgagactgtcgaccgtgtctcgtc

SEQ ID NO: 64615 - DNA, 25 bp, Homo sapien
gttcagacacggtaccgaagacgac

SEQ ID NO: 64616 - DNA, 25 bp, Homo sapien
gttcagacacggaaccgaagacgac

SEQ ID NO: 64617 - DNA, 25 bp, Homo sapien
ggagagtgacccatcgagacgcgat

SEQ ID NO: 64618 - DNA, 25 bp, Homo sapien
ggagagtgacccttcgagacgcgat

SEQ ID NO: 64619 - DNA, 25 bp, Homo sapien
ggagacagaaccttagtcagtacga

SEQ ID NO: 64620 - DNA, 25 bp, Homo sapien
ggagacagaaccatagtcagtacga

SEQ ID NO: 64621 - DNA, 25 bp, Homo sapien
tggtagaaccgacgacctcagactg

SEQ ID NO: 64622 - DNA, 25 bp, Homo sapien
tggtagaaccgaggacctcagactg

SEQ ID NO: 64623 - DNA, 25 bp, Homo sapien
tttacggaaggagatttacgatcgt

SEQ ID NO: 64624 - DNA, 25 bp, Homo sapien
tttacggaaggacatttacgatcgt

SEQ ID NO: 64625 - DNA, 25 bp, Homo sapien
cgtatgggtgtctcttactagaggt

SEQ ID NO: 64626 - DNA, 25 bp, Homo sapien
cgtatgggtgtcacttactagaggt

SEQ ID NO: 64627 - DNA, 25 bp, Homo sapien
gttaagcttcttaccactaacgtcg

SEQ ID NO: 64628 - DNA, 25 bp, Homo sapien
gttaagcttctttccactaacgtcg

SEQ ID NO: 64629 - DNA, 25 bp, Homo sapien
gagtgagacgttgttgtcccgactc

SEQ ID NO: 64630 - DNA, 25 bp, Homo sapien
gagtgagacgttcttgtcccgactc

SEQ ID NO: 64631 - DNA, 25 bp, Homo sapien
atgtgatactctgattaaagcatac

SEQ ID NO: 64632 - DNA, 25 bp, Homo sapien
atgtgatactctcattaaagcatac

SEQ ID NO: 64633 - DNA, 25 bp, Homo sapien
cgctacctccttgacgtgaagataa

SEQ ID NO: 64634 - DNA, 25 bp, Homo sapien
cgctacctccttcacgtgaagataa

SEQ ID NO: 64635 - DNA, 25 bp, Homo sapien
cacctctcgactcgactaaagaaag

SEQ ID NO: 64636 - DNA, 25 bp, Homo sapien
cacctctcgactggactaaagaaag

SEQ ID NO: 64637 - DNA, 25 bp, Homo sapien
cgactccgttaaggtgttaccaaag

SEQ ID NO: 64638 - DNA, 25 bp, Homo sapien
cgactccgttaacgtgttaccaaag

SEQ ID NO: 64639 - DNA, 25 bp, Homo sapien
tacacacttcgagtgttcagacata

SEQ ID NO: 64640 - DNA, 25 bp, Homo sapien
tacacacttcgactgttcagacata

SEQ ID NO: 64641 - DNA, 25 bp, Homo sapien
tatgatctcttttagtcataagtga

SEQ ID NO: 64642 - DNA, 25 bp, Homo sapien
tatgatctctttaagtcataagtga

SEQ ID NO: 64643 - DNA, 25 bp, Homo sapien
tttggtacttttaccttatggacgt

SEQ ID NO: 64644 - DNA, 25 bp, Homo sapien
tttggtactttttccttatggacgt

SEQ ID NO: 64645 - DNA, 25 bp, Homo sapien
tgtacaacttcctctctgtatggac

SEQ ID NO: 64646 - DNA, 25 bp, Homo sapien
tgtacaacttccactctgtatggac

SEQ ID NO: 64647 - DNA, 25 bp, Homo sapien
caaatatgtatgacgtattactgaa

SEQ ID NO: 64648 - DNA, 25 bp, Homo sapien
caaatatgtatgtcgtattactgaa

SEQ ID NO: 64649 - DNA, 25 bp, Homo sapien
cgaattgtatactgtcttgacataa

SEQ ID NO: 64650 - DNA, 25 bp, Homo sapien
cgaattgtatacagtcttgacataa

SEQ ID NO: 64651 - DNA, 25 bp, Homo sapien
aagttcaaggtataaacctgttttc

SEQ ID NO: 64652 - DNA, 25 bp, Homo sapien
aagttcaaggtaaaaacctgttttc

SEQ ID NO: 64653 - DNA, 25 bp, Homo sapien
ttagatgtgctagacattctagttc

SEQ ID NO: 64654 - DNA, 25 bp, Homo sapien
ttagatgtgctacacattctagttc

SEQ ID NO: 64655 - DNA, 25 bp, Homo sapien
ttatggacgagtcacctgactcatc

SEQ ID NO: 64656 - DNA, 25 bp, Homo sapien
ttatggacgagtgacctgactcatc

SEQ ID NO: 64657 - DNA, 25 bp, Homo sapien
attaggagacttccttctcgtaaat

SEQ ID NO: 64658 - DNA, 25 bp, Homo sapien
attaggagacttgcttctcgtaaat

SEQ ID NO: 64659 - DNA, 25 bp, Homo sapien
caaagtccgaccactatctcgagga

SEQ ID NO: 64660 - DNA, 25 bp, Homo sapien
caaagtccgacctctatctcgagga

SEQ ID NO: 64661 - DNA, 25 bp, Homo sapien
aaaagtaactgtctccttgtacgga

SEQ ID NO: 64662 - DNA, 25 bp, Homo sapien
aaaagtaactgtgtccttgtacgga

SEQ ID NO: 64663 - DNA, 25 bp, Homo sapien
tgtggacctcgtcgtccttagggtg

SEQ ID NO: 64664 - DNA, 25 bp, Homo sapien
tgtggacctcgtggtccttagggtg

SEQ ID NO: 64665 - DNA, 25 bp, Homo sapien
tcggcgacgtcttcgcctttgcgtg

SEQ ID NO: 64666 - DNA, 25 bp, Homo sapien
tcggcgacgtctacgcctttgcgtg

SEQ ID NO: 64667 - DNA, 25 bp, Homo sapien
catgttcacagtagcgtactttttg

SEQ ID NO: 64668 - DNA, 25 bp, Homo sapien
catgttcacagttgcgtactttttg

SEQ ID NO: 64669 - DNA, 25 bp, Homo sapien
tccgtaggtatcaagacttgtgtgt

SEQ ID NO: 64670 - DNA, 25 bp, Homo sapien
tccgtaggtatctagacttgtgtgt

SEQ ID NO: 64671 - DNA, 25 bp, Homo sapien
tcggtgacatgttcaacgacaaagg

SEQ ID NO: 64672 - DNA, 25 bp, Homo sapien
tcggtgacatgtacaacgacaaagg

SEQ ID NO: 64673 - DNA, 25 bp, Homo sapien
tcggtgtgactttgaacaagaacgc

SEQ ID NO: 64674 - DNA, 25 bp, Homo sapien
tcggtgtgacttagaacaagaacgc

SEQ ID NO: 64675 - DNA, 25 bp, Homo sapien
cgtcatgtggtacaagttgttaacc

SEQ ID NO: 64676 - DNA, 25 bp, Homo sapien
cgtcatgtggtagaagttgttaacc

SEQ ID NO: 64677 - DNA, 25 bp, Homo sapien
caaagaggacttcactttaaagtat

SEQ ID NO: 64678 - DNA, 25 bp, Homo sapien
caaagaggacttgactttaaagtat

SEQ ID NO: 64679 - DNA, 25 bp, Homo sapien
ctcgtaaaaatcgagttaccaagtt

SEQ ID NO: 64680 - DNA, 25 bp, Homo sapien
ctcgtaaaaatccagttaccaagtt

SEQ ID NO: 64681 - DNA, 25 bp, Homo sapien
tatgaaagttccacactacacggtt

SEQ ID NO: 64682 - DNA, 25 bp, Homo sapien
tatgaaagttcctcactacacggtt

SEQ ID NO: 64683 - DNA, 25 bp, Homo sapien
cttggtctattacttaccgtgttta

SEQ ID NO: 64684 - DNA, 25 bp, Homo sapien
cttggtctattagttaccgtgttta

SEQ ID NO: 64685 - DNA, 25 bp, Homo sapien
cttggtgtaccagttatcggttctc

SEQ ID NO: 64686 - DNA, 25 bp, Homo sapien
cttggtgtaccacttatcggttctc

SEQ ID NO: 64687 - DNA, 25 bp, Homo sapien
gaaggtctcgaaccactgggtgtcc

SEQ ID NO: 64688 - DNA, 25 bp, Homo sapien
gaaggtctcgaagcactgggtgtcc

SEQ ID NO: 64689 - DNA, 25 bp, Homo sapien
ggtttgacggggagttccttcttcc

SEQ ID NO: 64690 - DNA, 25 bp, Homo sapien
ggtttgacggggtgttccttcttcc

SEQ ID NO: 64691 - DNA, 25 bp, Homo sapien
attttacacgggtttaccttttgta

SEQ ID NO: 64692 - DNA, 25 bp, Homo sapien
attttacacgggattaccttttgta

SEQ ID NO: 64693 - DNA, 25 bp, Homo sapien
tttttgaggttattctatttcactt

SEQ ID NO: 64694 - DNA, 25 bp, Homo sapien
tttttgaggttaatctatttcactt

SEQ ID NO: 64695 - DNA, 25 bp, Homo sapien
ttattctaccccttggtcggagcct

SEQ ID NO: 64696 - DNA, 25 bp, Homo sapien
ttattctaccccatggtcggagcct

SEQ ID NO: 64697 - DNA, 25 bp, Homo sapien
ttgtccgtccgttttttgctccggt

SEQ ID NO: 64698 - DNA, 25 bp, Homo sapien
ttgtccgtccgtattttgctccggt

SEQ ID NO: 64699 - DNA, 25 bp, Homo sapien
ggagtccaccttcctttgacccggt

SEQ ID NO: 64700 - DNA, 25 bp, Homo sapien
ggagtccaccttgctttgacccggt

SEQ ID NO: 64701 - DNA, 25 bp, Homo sapien
agtcccggagcctctagacgcgcga

SEQ ID NO: 64702 - DNA, 25 bp, Homo sapien
agtcccggagccactagacgcgcga

SEQ ID NO: 64703 - DNA, 25 bp, Homo sapien
tagcaaccgtccactctaagtggtt

SEQ ID NO: 64704 - DNA, 25 bp, Homo sapien
tagcaaccgtcctctctaagtggtt

SEQ ID NO: 64705 - DNA, 25 bp, Homo sapien
ctcctagaagttctttcagtcgggt

SEQ ID NO: 64706 - DNA, 25 bp, Homo sapien
ctcctagaagttgtttcagtcgggt

SEQ ID NO: 64707 - DNA, 25 bp, Homo sapien
aatagtagttgtcgttcttgtacct

SEQ ID NO: 64708 - DNA, 25 bp, Homo sapien
aatagtagttgtggttcttgtacct

SEQ ID NO: 64709 - DNA, 25 bp, Homo sapien
aaaatgtgtttcgacgactatgtca

SEQ ID NO: 64710 - DNA, 25 bp, Homo sapien
aaaatgtgtttccacgactatgtca

SEQ ID NO: 64711 - DNA, 25 bp, Homo sapien
agaaagtgtaagtctcactcttaaa

SEQ ID NO: 64712 - DNA, 25 bp, Homo sapien
agaaagtgtaagactcactcttaaa

SEQ ID NO: 64713 - DNA, 25 bp, Homo sapien
cattaccgcggtacgcctgaataat

SEQ ID NO: 64714 - DNA, 25 bp, Homo sapien
cattaccgcggttcgcctgaataat

SEQ ID NO: 64715 - DNA, 25 bp, Homo sapien
acttactcgcggtaaaacgctagaa

SEQ ID NO: 64716 - DNA, 25 bp, Homo sapien
acttactcgcggaaaaacgctagaa

SEQ ID NO: 64717 - DNA, 25 bp, Homo sapien
atgtatcgcggaaccagatccggtt

SEQ ID NO: 64718 - DNA, 25 bp, Homo sapien
atgtatcgcggatccagatccggtt

SEQ ID NO: 64719 - DNA, 25 bp, Homo sapien
tgtctctcgggacgacagattcgac

SEQ ID NO: 64720 - DNA, 25 bp, Homo sapien
tgtctctcgggaggacagattcgac

SEQ ID NO: 64721 - DNA, 25 bp, Homo sapien
ggttctatgtagaccgtatcattca

SEQ ID NO: 64722 - DNA, 25 bp, Homo sapien
ggttctatgtagtccgtatcattca

SEQ ID NO: 64723 - DNA, 25 bp, Homo sapien
gaggatacatcgtgtccatcttaaa

SEQ ID NO: 64724 - DNA, 25 bp, Homo sapien
gaggatacatcgagtccatcttaaa

SEQ ID NO: 64725 - DNA, 25 bp, Homo sapien
acagagacttcttgtggaaaaacta

SEQ ID NO: 64726 - DNA, 25 bp, Homo sapien
acagagacttctagtggaaaaacta

SEQ ID NO: 64727 - DNA, 25 bp, Homo sapien
aaccgagcgtttgtgaacaagtaaa

SEQ ID NO: 64728 - DNA, 25 bp, Homo sapien
aaccgagcgtttctgaacaagtaaa

SEQ ID NO: 64729 - DNA, 25 bp, Homo sapien
atgcctctagaggtcctcacttaaa

SEQ ID NO: 64730 - DNA, 25 bp, Homo sapien
atgcctctagagctcctcacttaaa

SEQ ID NO: 64731 - DNA, 25 bp, Homo sapien
tagtccctgtgacatcggacaacca

SEQ ID NO: 64732 - DNA, 25 bp, Homo sapien
tagtccctgtgagatcggacaacca

SEQ ID NO: 64733 - DNA, 25 bp, Homo sapien
tcctcggagtaacttctggacgagc

SEQ ID NO: 64734 - DNA, 25 bp, Homo sapien
tcctcggagtaagttctggacgagc

SEQ ID NO: 64735 - DNA, 25 bp, Homo sapien
gaccttgaagaggagttacgtcaaa

SEQ ID NO: 64736 - DNA, 25 bp, Homo sapien
gaccttgaagagcagttacgtcaaa

SEQ ID NO: 64737 - DNA, 25 bp, Homo sapien
cctgtgaaccgtaatcgtcgatcta

SEQ ID NO: 64738 - DNA, 25 bp, Homo sapien
cctgtgaaccgttatcgtcgatcta

SEQ ID NO: 64739 - DNA, 25 bp, Homo sapien
aggttgacaacctagtctaaacgac

SEQ ID NO: 64740 - DNA, 25 bp, Homo sapien
aggttgacaaccaagtctaaacgac

SEQ ID NO: 64741 - DNA, 25 bp, Homo sapien
acctttcggtaaagaatctcaagtc

SEQ ID NO: 64742 - DNA, 25 bp, Homo sapien
acctttcggtaatgaatctcaagtc

SEQ ID NO: 64743 - DNA, 25 bp, Homo sapien
agcgggccgacttgaccttaagaac

SEQ ID NO: 64744 - DNA, 25 bp, Homo sapien
agcgggccgactagaccttaagaac

SEQ ID NO: 64745 - DNA, 25 bp, Homo sapien
acaccagttcctaccctactaggga

SEQ ID NO: 64746 - DNA, 25 bp, Homo sapien
acaccagttccttccctactaggga

SEQ ID NO: 64747 - DNA, 25 bp, Homo sapien
ccaattgacccgacggtcttttcgg

SEQ ID NO: 64748 - DNA, 25 bp, Homo sapien
ccaattgacccgtcggtcttttcgg

SEQ ID NO: 64749 - DNA, 25 bp, Homo sapien
aataatctcaggaacccttagtaga

SEQ ID NO: 64750 - DNA, 25 bp, Homo sapien
aataatctcaggtacccttagtaga

SEQ ID NO: 64751 - DNA, 25 bp, Homo sapien
attgagtgtcgtcatacagtgtaca

SEQ ID NO: 64752 - DNA, 25 bp, Homo sapien
attgagtgtcgtgatacagtgtaca

SEQ ID NO: 64753 - DNA, 25 bp, Homo sapien
taaagttgtagttccaccttcgtcc

SEQ ID NO: 64754 - DNA, 25 bp, Homo sapien
taaagttgtagtaccaccttcgtcc

SEQ ID NO: 64755 - DNA, 25 bp, Homo sapien
ctcaagagttgtacaacctgtgtcc

SEQ ID NO: 64756 - DNA, 25 bp, Homo sapien
ctcaagagttgttcaacctgtgtcc

SEQ ID NO: 64757 - DNA, 25 bp, Homo sapien
ctcaaagagcagagagacggttccg

SEQ ID NO: 64758 - DNA, 25 bp, Homo sapien
ctcaaagagcagtgagacggttccg

SEQ ID NO: 64759 - DNA, 25 bp, Homo sapien
tgccaggcgtagtggacgcgtatcc

SEQ ID NO: 64760 - DNA, 25 bp, Homo sapien
tgccaggcgtagaggacgcgtatcc

SEQ ID NO: 64761 - DNA, 25 bp, Homo sapien
ctggagacccgtggacgacgtcgac

SEQ ID NO: 64762 - DNA, 25 bp, Homo sapien
ctggagacccgtcgacgacgtcgac

SEQ ID NO: 64763 - DNA, 25 bp, Homo sapien
tctcagagagcagctccggtcggcg

SEQ ID NO: 64764 - DNA, 25 bp, Homo sapien
tctcagagagcacctccggtcggcg

SEQ ID NO: 64765 - DNA, 25 bp, Homo sapien
ccccgacagacacgtcggttggtcg

SEQ ID NO: 64766 - DNA, 25 bp, Homo sapien
ccccgacagacaggtcggttggtcg

SEQ ID NO: 64767 - DNA, 25 bp, Homo sapien
ccgacggacccacacgcgagaggag

SEQ ID NO: 64768 - DNA, 25 bp, Homo sapien
ccgacggacccagacgcgagaggag

SEQ ID NO: 64769 - DNA, 25 bp, Homo sapien
gtagcgaacacagaacgacccgcgt

SEQ ID NO: 64770 - DNA, 25 bp, Homo sapien
gtagcgaacacacaacgacccgcgt

SEQ ID NO: 64771 - DNA, 25 bp, Homo sapien
cgcgtgcccaaggacgaagtacgcc

SEQ ID NO: 64772 - DNA, 25 bp, Homo sapien
cgcgtgcccaagcacgaagtacgcc

SEQ ID NO: 64773 - DNA, 25 bp, Homo sapien
ggacctccctttttggtacagacct

SEQ ID NO: 64774 - DNA, 25 bp, Homo sapien
ggacctccctttatggtacagacct

SEQ ID NO: 64775 - DNA, 25 bp, Homo sapien
ttaactccattttcttcgactgggt

SEQ ID NO: 64776 - DNA, 25 bp, Homo sapien
ttaactccatttacttcgactgggt

SEQ ID NO: 64777 - DNA, 25 bp, Homo sapien
tttgttccacagacctgcctggtgt

SEQ ID NO: 64778 - DNA, 25 bp, Homo sapien
tttgttccacagtcctgcctggtgt

SEQ ID NO: 64779 - DNA, 25 bp, Homo sapien
ccgttaccgcggtcgttttgggtgt

SEQ ID NO: 64780 - DNA, 25 bp, Homo sapien
ccgttaccgcggacgttttgggtgt

SEQ ID NO: 64781 - DNA, 25 bp, Homo sapien
cccaaactcgtggtactcttgggcc

SEQ ID NO: 64782 - DNA, 25 bp, Homo sapien
cccaaactcgtgctactcttgggcc

SEQ ID NO: 64783 - DNA, 25 bp, Homo sapien
cgatatcggtagtcaggggacgaca

SEQ ID NO: 64784 - DNA, 25 bp, Homo sapien
cgatatcggtagacaggggacgaca

SEQ ID NO: 64785 - DNA, 25 bp, Homo sapien
tgtctattcttgaggtccggagaga

SEQ ID NO: 64786 - DNA, 25 bp, Homo sapien
tgtctattcttgtggtccggagaga

SEQ ID NO: 64787 - DNA, 25 bp, Homo sapien
cttccgtcggtacgacaccgggagt

SEQ ID NO: 64788 - DNA, 25 bp, Homo sapien
cttccgtcggtaggacaccgggagt

SEQ ID NO: 64789 - DNA, 25 bp, Homo sapien
ctccttctcggagaggtctcagagc

SEQ ID NO: 64790 - DNA, 25 bp, Homo sapien
ctccttctcggacaggtctcagagc

SEQ ID NO: 64791 - DNA, 25 bp, Homo sapien
ttcacattcgtgagggcttctaata

SEQ ID NO: 64792 - DNA, 25 bp, Homo sapien
ttcacattcgtgtgggcttctaata

SEQ ID NO: 64793 - DNA, 25 bp, Homo sapien
tcttcccgaagatggttctcacaag

SEQ ID NO: 64794 - DNA, 25 bp, Homo sapien
tcttcccgaagaaggttctcacaag

SEQ ID NO: 64795 - DNA, 25 bp, Homo sapien
tttctttaagtacgaggctcacgga

SEQ ID NO: 64796 - DNA, 25 bp, Homo sapien
tttctttaagtaggaggctcacgga

SEQ ID NO: 64797 - DNA, 25 bp, Homo sapien
ctattttggtaggaatcgcgacaga

SEQ ID NO: 64798 - DNA, 25 bp, Homo sapien
ctattttggtagcaatcgcgacaga

SEQ ID NO: 64799 - DNA, 25 bp, Homo sapien
agctccgtgggtcaggcaccactcg

SEQ ID NO: 64800 - DNA, 25 bp, Homo sapien
agctccgtgggtgaggcaccactcg

SEQ ID NO: 64801 - DNA, 25 bp, Homo sapien
cgccatgaggtggtagacctacctc

SEQ ID NO: 64802 - DNA, 25 bp, Homo sapien
cgccatgaggtgctagacctacctc

SEQ ID NO: 64803 - DNA, 25 bp, Homo sapien
tgtaacccagggagcatgttacttc

SEQ ID NO: 64804 - DNA, 25 bp, Homo sapien
tgtaacccagggtgcatgttacttc

SEQ ID NO: 64805 - DNA, 25 bp, Homo sapien
gtgtagaaagggtgcttcttctgct

SEQ ID NO: 64806 - DNA, 25 bp, Homo sapien
gtgtagaaagggagcttcttctgct

SEQ ID NO: 64807 - DNA, 25 bp, Homo sapien
caggtagactgagagactttgtcaa

SEQ ID NO: 64808 - DNA, 25 bp, Homo sapien
caggtagactgacagactttgtcaa

SEQ ID NO: 64809 - DNA, 25 bp, Homo sapien
ctgtaaacgacctcgtgtgtcatac

SEQ ID NO: 64810 - DNA, 25 bp, Homo sapien
ctgtaaacgaccacgtgtgtcatac

SEQ ID NO: 64811 - DNA, 25 bp, Homo sapien
tcgggacagtgatcggtttcactac

SEQ ID NO: 64812 - DNA, 25 bp, Homo sapien
tcgggacagtgaacggtttcactac

SEQ ID NO: 64813 - DNA, 25 bp, Homo sapien
tggacgacgtgaagaattactcgat

SEQ ID NO: 64814 - DNA, 25 bp, Homo sapien
tggacgacgtgatgaattactcgat

SEQ ID NO: 64815 - DNA, 25 bp, Homo sapien
gccggagactactaaactcttctac

SEQ ID NO: 64816 - DNA, 25 bp, Homo sapien
gccggagactacaaaactcttctac

SEQ ID NO: 64817 - DNA, 25 bp, Homo sapien
cttacggaaggtaaggacagtcttc

SEQ ID NO: 64818 - DNA, 25 bp, Homo sapien
cttacggaaggttaggacagtcttc

SEQ ID NO: 64819 - DNA, 25 bp, Homo sapien
tactgtgggtaaaggaactcttctc

SEQ ID NO: 64820 - DNA, 25 bp, Homo sapien
tactgtgggtaatggaactcttctc

SEQ ID NO: 64821 - DNA, 25 bp, Homo sapien
tacctgacgtgtatcaggagttttc

SEQ ID NO: 64822 - DNA, 25 bp, Homo sapien
tacctgacgtgtttcaggagttttc

SEQ ID NO: 64823 - DNA, 25 bp, Homo sapien
agtttcaagaccttccgatctttag

SEQ ID NO: 64824 - DNA, 25 bp, Homo sapien
agtttcaagaccatccgatctttag

SEQ ID NO: 64825 - DNA, 25 bp, Homo sapien
acttatgttatgagtagatcctaca

SEQ ID NO: 64826 - DNA, 25 bp, Homo sapien
acttatgttatgtgtagatcctaca

SEQ ID NO: 64827 - DNA, 25 bp, Homo sapien
tgaacatatttctagctgaacctga

SEQ ID NO: 64828 - DNA, 25 bp, Homo sapien
tgaacatatttcaagctgaacctga

SEQ ID NO: 64829 - DNA, 25 bp, Homo sapien
cacaacatatttagggggcactgta

SEQ ID NO: 64830 - DNA, 25 bp, Homo sapien
cacaacatattttgggggcactgta

SEQ ID NO: 64831 - DNA, 25 bp, Homo sapien
gcaaaaagatggagtcgagccagta

SEQ ID NO: 64832 - DNA, 25 bp, Homo sapien
gcaaaaagatggtgtcgagccagta

SEQ ID NO: 64833 - DNA, 25 bp, Homo sapien
aacctatcgaaggtcactctaggtg

SEQ ID NO: 64834 - DNA, 25 bp, Homo sapien
aacctatcgaagctcactctaggtg

SEQ ID NO: 64835 - DNA, 25 bp, Homo sapien
tggggtctgagactcctaccgtctg

SEQ ID NO: 64836 - DNA, 25 bp, Homo sapien
tggggtctgagagtcctaccgtctg

SEQ ID NO: 64837 - DNA, 25 bp, Homo sapien
ttaaggtctgatgtgtcgtgacccg

SEQ ID NO: 64838 - DNA, 25 bp, Homo sapien
ttaaggtctgatctgtcgtgacccg

SEQ ID NO: 64839 - DNA, 25 bp, Homo sapien
ttgtttagtatgtccttcaacaccg

SEQ ID NO: 64840 - DNA, 25 bp, Homo sapien
ttgtttagtatgaccttcaacaccg

SEQ ID NO: 64841 - DNA, 25 bp, Homo sapien
tttctagaagcatagaacgaccgta

SEQ ID NO: 64842 - DNA, 25 bp, Homo sapien
tttctagaagcaaagaacgaccgta

SEQ ID NO: 64843 - DNA, 25 bp, Homo sapien
gtctcgtcaggtcttggtcaccgtc

SEQ ID NO: 64844 - DNA, 25 bp, Homo sapien
gtctcgtcaggtgttggtcaccgtc

SEQ ID NO: 64845 - DNA, 25 bp, Homo sapien
ggtgtacacattttaagtcacttac

SEQ ID NO: 64846 - DNA, 25 bp, Homo sapien
ggtgtacacattataagtcacttac

SEQ ID NO: 64847 - DNA, 25 bp, Homo sapien
aaggagagtttattcagaggactcc

SEQ ID NO: 64848 - DNA, 25 bp, Homo sapien
aaggagagtttaatcagaggactcc

SEQ ID NO: 64849 - DNA, 25 bp, Homo sapien
gaagtagtacaacaacacgtaccac

SEQ ID NO: 64850 - DNA, 25 bp, Homo sapien
gaagtagtacaagaacacgtaccac

SEQ ID NO: 64851 - DNA, 25 bp, Homo sapien
tctggtaacctcgactccgccgacg

SEQ ID NO: 64852 - DNA, 25 bp, Homo sapien
tctggtaacctccactccgccgacg

SEQ ID NO: 64853 - DNA, 25 bp, Homo sapien
ggttttacacatacacaagactccg

SEQ ID NO: 64854 - DNA, 25 bp, Homo sapien
ggttttacacattcacaagactccg

SEQ ID NO: 64855 - DNA, 25 bp, Homo sapien
cgtaccgatcatgtctgggagacaa

SEQ ID NO: 64856 - DNA, 25 bp, Homo sapien
cgtaccgatcatctctgggagacaa

SEQ ID NO: 64857 - DNA, 25 bp, Homo sapien
ataccaaggtagtcccttaggggga

SEQ ID NO: 64858 - DNA, 25 bp, Homo sapien
ataccaaggtagacccttaggggga

SEQ ID NO: 64859 - DNA, 25 bp, Homo sapien
accaaatttacctttggtggtgagt

SEQ ID NO: 64860 - DNA, 25 bp, Homo sapien
accaaatttaccattggtggtgagt

SEQ ID NO: 64861 - DNA, 25 bp, Homo sapien
ccataaattcgtttatttcgggtgt

SEQ ID NO: 64862 - DNA, 25 bp, Homo sapien
ccataaattcgtatatttcgggtgt

SEQ ID NO: 64863 - DNA, 25 bp, Homo sapien
cataattaggtcttccttcgttgtc

SEQ ID NO: 64864 - DNA, 25 bp, Homo sapien
cataattaggtcatccttcgttgtc

SEQ ID NO: 64865 - DNA, 25 bp, Homo sapien
gtcctgactattgattccttttgct

SEQ ID NO: 64866 - DNA, 25 bp, Homo sapien
gtcctgactattcattccttttgct

SEQ ID NO: 64867 - DNA, 25 bp, Homo sapien
ggtccttcttgtgtccggttccgcc

SEQ ID NO: 64868 - DNA, 25 bp, Homo sapien
ggtccttcttgtctccggttccgcc

SEQ ID NO: 64869 - DNA, 25 bp, Homo sapien
ggttccgtgtttcttccctggatcc

SEQ ID NO: 64870 - DNA, 25 bp, Homo sapien
ggttccgtgtttgttccctggatcc

SEQ ID NO: 64871 - DNA, 25 bp, Homo sapien
cagcgtttggcttgtcgcccgcaac

SEQ ID NO: 64872 - DNA, 25 bp, Homo sapien
cagcgtttggctagtcgcccgcaac

SEQ ID NO: 64873 - DNA, 25 bp, Homo sapien
attgtttgagctaccaacaactgag

SEQ ID NO: 64874 - DNA, 25 bp, Homo sapien
attgtttgagcttccaacaactgag

SEQ ID NO: 64875 - DNA, 25 bp, Homo sapien
tacctttagttccaccatataatga

SEQ ID NO: 64876 - DNA, 25 bp, Homo sapien
tacctttagttcgaccatataatga

SEQ ID NO: 64877 - DNA, 25 bp, Homo sapien
tcacttgagaccgagcaagagaaca

SEQ ID NO: 64878 - DNA, 25 bp, Homo sapien
tcacttgagacccagcaagagaaca

SEQ ID NO: 64879 - DNA, 25 bp, Homo sapien
acgaaagacccagaggacggaagta

SEQ ID NO: 64880 - DNA, 25 bp, Homo sapien
acgaaagacccacaggacggaagta

SEQ ID NO: 64881 - DNA, 25 bp, Homo sapien
agtaaagatcatccataaaaccgtg

SEQ ID NO: 64882 - DNA, 25 bp, Homo sapien
agtaaagatcatgcataaaaccgtg

SEQ ID NO: 64883 - DNA, 25 bp, Homo sapien
aataagaactgataactacacaggt

SEQ ID NO: 64884 - DNA, 25 bp, Homo sapien
aataagaactgaaaactacacaggt

SEQ ID NO: 64885 - DNA, 25 bp, Homo sapien
taccagaacaccacggtccacgggt

SEQ ID NO: 64886 - DNA, 25 bp, Homo sapien
taccagaacacctcggtccacgggt

SEQ ID NO: 64887 - DNA, 25 bp, Homo sapien
gagcggatgtccttcctccgacggg

SEQ ID NO: 64888 - DNA, 25 bp, Homo sapien
gagcggatgtccatcctccgacggg

SEQ ID NO: 64889 - DNA, 25 bp, Homo sapien
aactacggtggtcagtggacgagac

SEQ ID NO: 64890 - DNA, 25 bp, Homo sapien
aactacggtggtgagtggacgagac

SEQ ID NO: 64891 - DNA, 25 bp, Homo sapien
cctccgtcctgtaggggtttctacg

SEQ ID NO: 64892 - DNA, 25 bp, Homo sapien
cctccgtcctgttggggtttctacg

SEQ ID NO: 64893 - DNA, 25 bp, Homo sapien
caccctagcagaagggtagttctca

SEQ ID NO: 64894 - DNA, 25 bp, Homo sapien
caccctagcagatgggtagttctca

SEQ ID NO: 64895 - DNA, 25 bp, Homo sapien
atcgggcaacgtctggttccccgac

SEQ ID NO: 64896 - DNA, 25 bp, Homo sapien
atcgggcaacgtgtggttccccgac

SEQ ID NO: 64897 - DNA, 25 bp, Homo sapien
ccggaccacccttttgtcttttacg

SEQ ID NO: 64898 - DNA, 25 bp, Homo sapien
ccggaccaccctattgtcttttacg

SEQ ID NO: 64899 - DNA, 25 bp, Homo sapien
gtgacacccctttgatgactttact

SEQ ID NO: 64900 - DNA, 25 bp, Homo sapien
gtgacaccccttagatgactttact

SEQ ID NO: 64901 - DNA, 25 bp, Homo sapien
gtagacaccatcaaaagagactttt

SEQ ID NO: 64902 - DNA, 25 bp, Homo sapien
gtagacaccatctaaagagactttt

SEQ ID NO: 64903 - DNA, 25 bp, Homo sapien
acctatacggtgttctatattgact

SEQ ID NO: 64904 - DNA, 25 bp, Homo sapien
acctatacggtgatctatattgact

SEQ ID NO: 64905 - DNA, 25 bp, Homo sapien
tataaatatttttttcgttttagtc

SEQ ID NO: 64906 - DNA, 25 bp, Homo sapien
tataaatattttattcgttttagtc

SEQ ID NO: 64907 - DNA, 25 bp, Homo sapien
ttgtagatctcttacggtgtctgtc

SEQ ID NO: 64908 - DNA, 25 bp, Homo sapien
ttgtagatctctaacggtgtctgtc

SEQ ID NO: 64909 - DNA, 25 bp, Homo sapien
tccctgtgtatggtgtccaggccct

SEQ ID NO: 64910 - DNA, 25 bp, Homo sapien
tccctgtgtatgctgtccaggccct

SEQ ID NO: 64911 - DNA, 25 bp, Homo sapien
agttggtctttcagtcgaaataatc

SEQ ID NO: 64912 - DNA, 25 bp, Homo sapien
agttggtctttctgtcgaaataatc

SEQ ID NO: 64913 - DNA, 25 bp, Homo sapien
atacttttgtacatcgtctaaaagg

SEQ ID NO: 64914 - DNA, 25 bp, Homo sapien
atacttttgtacttcgtctaaaagg

SEQ ID NO: 64915 - DNA, 25 bp, Homo sapien
cttaggacgttgttacacatactgt

SEQ ID NO: 64916 - DNA, 25 bp, Homo sapien
cttaggacgttgatacacatactgt

SEQ ID NO: 64917 - DNA, 25 bp, Homo sapien
tcgttaaacgggaaaccgtagtagt

SEQ ID NO: 64918 - DNA, 25 bp, Homo sapien
tcgttaaacgggtaaccgtagtagt

SEQ ID NO: 64919 - DNA, 25 bp, Homo sapien
atacttttaaagacggttacgtctt

SEQ ID NO: 64920 - DNA, 25 bp, Homo sapien
atacttttaaagtcggttacgtctt

SEQ ID NO: 64921 - DNA, 25 bp, Homo sapien
cctacattttaagaccgtcgttaaa

SEQ ID NO: 64922 - DNA, 25 bp, Homo sapien
cctacattttaacaccgtcgttaaa

SEQ ID NO: 64923 - DNA, 25 bp, Homo sapien
cgaactttcaagaacccttcgtaga

SEQ ID NO: 64924 - DNA, 25 bp, Homo sapien
cgaactttcaagtacccttcgtaga

SEQ ID NO: 64925 - DNA, 25 bp, Homo sapien
gtttaaactgaagtatccagtagcc

SEQ ID NO: 64926 - DNA, 25 bp, Homo sapien
gtttaaactgaactatccagtagcc

SEQ ID NO: 64927 - DNA, 25 bp, Homo sapien
tttttaagataacacactgaaggtc

SEQ ID NO: 64928 - DNA, 25 bp, Homo sapien
tttttaagataagacactgaaggtc

SEQ ID NO: 64929 - DNA, 25 bp, Homo sapien
acgatggtaaaaaagcattctattc

SEQ ID NO: 64930 - DNA, 25 bp, Homo sapien
acgatggtaaaatagcattctattc

SEQ ID NO: 64931 - DNA, 25 bp, Homo sapien
tacagaaaatcaaactctcgaggtc

SEQ ID NO: 64932 - DNA, 25 bp, Homo sapien
tacagaaaatcatactctcgaggtc

SEQ ID NO: 64933 - DNA, 25 bp, Homo sapien
atgaaaaatctggttcactgagtct

SEQ ID NO: 64934 - DNA, 25 bp, Homo sapien
atgaaaaatctgcttcactgagtct

SEQ ID NO: 64935 - DNA, 25 bp, Homo sapien
ctgaaaaaggttaatcctgtatact

SEQ ID NO: 64936 - DNA, 25 bp, Homo sapien
ctgaaaaaggtttatcctgtatact

SEQ ID NO: 64937 - DNA, 25 bp, Homo sapien
taccaggagggttcggaccttcacg

SEQ ID NO: 64938 - DNA, 25 bp, Homo sapien
taccaggagggtacggaccttcacg

SEQ ID NO: 64939 - DNA, 25 bp, Homo sapien
tccatgacgatgttccgacgttccc

SEQ ID NO: 64940 - DNA, 25 bp, Homo sapien
tccatgacgatgatccgacgttccc

SEQ ID NO: 64941 - DNA, 25 bp, Homo sapien
cacttgacacagtgtcgatggtgtt

SEQ ID NO: 64942 - DNA, 25 bp, Homo sapien
cacttgacacagagtcgatggtgtt

SEQ ID NO: 64943 - DNA, 25 bp, Homo sapien
ctccccgtagcgactatttatgtct

SEQ ID NO: 64944 - DNA, 25 bp, Homo sapien
ctccccgtagcgtctatttatgtct

SEQ ID NO: 64945 - DNA, 25 bp, Homo sapien
tttacgtctccgtaatgttacttag

SEQ ID NO: 64946 - DNA, 25 bp, Homo sapien
tttacgtctccgaaatgttacttag

SEQ ID NO: 64947 - DNA, 25 bp, Homo sapien
aggtttcttccataatatgtctttg

SEQ ID NO: 64948 - DNA, 25 bp, Homo sapien
aggtttcttccaaaatatgtctttg

SEQ ID NO: 64949 - DNA, 25 bp, Homo sapien
ctttcgtgaataatcgagacttatt

SEQ ID NO: 64950 - DNA, 25 bp, Homo sapien
ctttcgtgaatattcgagacttatt

SEQ ID NO: 64951 - DNA, 25 bp, Homo sapien
gcaccttggaaattgtttacatctt

SEQ ID NO: 64952 - DNA, 25 bp, Homo sapien
gcaccttggaaaatgtttacatctt

SEQ ID NO: 64953 - DNA, 25 bp, Homo sapien
gatgtcatggcatatatttctgtta

SEQ ID NO: 64954 - DNA, 25 bp, Homo sapien
gatgtcatggcaaatatttctgtta

SEQ ID NO: 64955 - DNA, 25 bp, Homo sapien
tcataggtaaagtacgaaacttgct

SEQ ID NO: 64956 - DNA, 25 bp, Homo sapien
tcataggtaaagaacgaaacttgct

SEQ ID NO: 64957 - DNA, 25 bp, Homo sapien
ttgattgtcgtttcaagttatgtcc

SEQ ID NO: 64958 - DNA, 25 bp, Homo sapien
ttgattgtcgttacaagttatgtcc

SEQ ID NO: 64959 - DNA, 25 bp, Homo sapien
gttacattgcattgtcagcattcta

SEQ ID NO: 64960 - DNA, 25 bp, Homo sapien
gttacattgcatagtcagcattcta

SEQ ID NO: 64961 - DNA, 25 bp, Homo sapien
cgagaaatctgcacgaaaaaagtta

SEQ ID NO: 64962 - DNA, 25 bp, Homo sapien
cgagaaatctgctcgaaaaaagtta

SEQ ID NO: 64963 - DNA, 25 bp, Homo sapien
ggaatcttcaacactagaagtatta

SEQ ID NO: 64964 - DNA, 25 bp, Homo sapien
ggaatcttcaactctagaagtatta

SEQ ID NO: 64965 - DNA, 25 bp, Homo sapien
gttatcctcatttgaacgatatctg

SEQ ID NO: 64966 - DNA, 25 bp, Homo sapien
gttatcctcattagaacgatatctg

SEQ ID NO: 64967 - DNA, 25 bp, Homo sapien
gttgacgtcaatttgcagaactatg

SEQ ID NO: 64968 - DNA, 25 bp, Homo sapien
gttgacgtcaatatgcagaactatg

SEQ ID NO: 64969 - DNA, 25 bp, Homo sapien
tcttgcggtctgaatctcacctata

SEQ ID NO: 64970 - DNA, 25 bp, Homo sapien
tcttgcggtctgtatctcacctata

SEQ ID NO: 64971 - DNA, 25 bp, Homo sapien
ccttccgagggactcctacatcgtt

SEQ ID NO: 64972 - DNA, 25 bp, Homo sapien
ccttccgagggagtcctacatcgtt

SEQ ID NO: 64973 - DNA, 25 bp, Homo sapien
ggtttaggtcgatcctccaatgtct

SEQ ID NO: 64974 - DNA, 25 bp, Homo sapien
ggtttaggtcgaacctccaatgtct

SEQ ID NO: 64975 - DNA, 25 bp, Homo sapien
cttagtttgactagtgtgactaact

SEQ ID NO: 64976 - DNA, 25 bp, Homo sapien
cttagtttgacttgtgtgactaact

SEQ ID NO: 64977 - DNA, 25 bp, Homo sapien
ttattctgtctctgtcctcgtcgag

SEQ ID NO: 64978 - DNA, 25 bp, Homo sapien
ttattctgtctcagtcctcgtcgag

SEQ ID NO: 64979 - DNA, 25 bp, Homo sapien
ttctgactctttaaatcacggtctg

SEQ ID NO: 64980 - DNA, 25 bp, Homo sapien
ttctgactcttttaatcacggtctg

SEQ ID NO: 64981 - DNA, 25 bp, Homo sapien
ttttattgtcgaccacttaggttct

SEQ ID NO: 64982 - DNA, 25 bp, Homo sapien
ttttattgtcgagcacttaggttct

SEQ ID NO: 64983 - DNA, 25 bp, Homo sapien
ctgttgtgtgtacatattacatctt

SEQ ID NO: 64984 - DNA, 25 bp, Homo sapien
ctgttgtgtgtagatattacatctt

SEQ ID NO: 64985 - DNA, 25 bp, Homo sapien
ttcctgcagaagaagctcttctagt

SEQ ID NO: 64986 - DNA, 25 bp, Homo sapien
ttcctgcagaagtagctcttctagt

SEQ ID NO: 64987 - DNA, 25 bp, Homo sapien
atttctctgaaagatcactggtatt

SEQ ID NO: 64988 - DNA, 25 bp, Homo sapien
atttctctgaaacatcactggtatt

SEQ ID NO: 64989 - DNA, 25 bp, Homo sapien
aatccctacatgtcgtctccctgtg

SEQ ID NO: 64990 - DNA, 25 bp, Homo sapien
aatccctacatgacgtctccctgtg

SEQ ID NO: 64991 - DNA, 25 bp, Homo sapien
tcttgtcactagactgtcaccagtg

SEQ ID NO: 64992 - DNA, 25 bp, Homo sapien
tcttgtcactagtctgtcaccagtg

SEQ ID NO: 64993 - DNA, 25 bp, Homo sapien
cctgtgtcactgactaactaacttg

SEQ ID NO: 64994 - DNA, 25 bp, Homo sapien
cctgtgtcactgtctaactaacttg

SEQ ID NO: 64995 - DNA, 25 bp, Homo sapien
ccccgtcggctgtgtctaaactgtt

SEQ ID NO: 64996 - DNA, 25 bp, Homo sapien
ccccgtcggctgagtctaaactgtt

SEQ ID NO: 64997 - DNA, 25 bp, Homo sapien
caggtaacacacctgaacactagta

SEQ ID NO: 64998 - DNA, 25 bp, Homo sapien
caggtaacacacgtgaacactagta

SEQ ID NO: 64999 - DNA, 25 bp, Homo sapien
cttacggatgcacctgtcaacacgg

SEQ ID NO: 65000 - DNA, 25 bp, Homo sapien
cttacggatgcagctgtcaacacgg

SEQ ID NO: 65001 - DNA, 25 bp, Homo sapien
ttctaaagagacgacttccataggt

SEQ ID NO: 65002 - DNA, 25 bp, Homo sapien
ttctaaagagaccacttccataggt

SEQ ID NO: 65003 - DNA, 25 bp, Homo sapien
cttccagacttactactacagaagt

SEQ ID NO: 65004 - DNA, 25 bp, Homo sapien
cttccagacttagtactacagaagt

SEQ ID NO: 65005 - DNA, 25 bp, Homo sapien
gacggtgtctgacatcgttacataa

SEQ ID NO: 65006 - DNA, 25 bp, Homo sapien
gacggtgtctgagatcgttacataa

SEQ ID NO: 65007 - DNA, 25 bp, Homo sapien
ggtgcgtctgaactacgtcctctcc

SEQ ID NO: 65008 - DNA, 25 bp, Homo sapien
ggtgcgtctgaagtacgtcctctcc

SEQ ID NO: 65009 - DNA, 25 bp, Homo sapien
tatagtcgtaaaagtgtctttctac

SEQ ID NO: 65010 - DNA, 25 bp, Homo sapien
tatagtcgtaaatgtgtctttctac

SEQ ID NO: 65011 - DNA, 25 bp, Homo sapien
cataggactcgtgtagtagttgtgc

SEQ ID NO: 65012 - DNA, 25 bp, Homo sapien
cataggactcgtctagtagttgtgc

SEQ ID NO: 65013 - DNA, 25 bp, Homo sapien
tgtcgagacttcctgtagtagttcc

SEQ ID NO: 65014 - DNA, 25 bp, Homo sapien
tgtcgagacttcgtgtagtagttcc

SEQ ID NO: 65015 - DNA, 25 bp, Homo sapien
gctttcgggttgtcgtcgttaattt

SEQ ID NO: 65016 - DNA, 25 bp, Homo sapien
gctttcgggttgacgtcgttaattt

SEQ ID NO: 65017 - DNA, 25 bp, Homo sapien
ttttgagacgcagactccctctatt

SEQ ID NO: 65018 - DNA, 25 bp, Homo sapien
ttttgagacgcacactccctctatt

SEQ ID NO: 65019 - DNA, 25 bp, Homo sapien
ttgaagtgacatcgattcggataca

SEQ ID NO: 65020 - DNA, 25 bp, Homo sapien
ttgaagtgacatggattcggataca

SEQ ID NO: 65021 - DNA, 25 bp, Homo sapien
ggtgaggaggtactcttggctcaac

SEQ ID NO: 65022 - DNA, 25 bp, Homo sapien
ggtgaggaggtagtcttggctcaac

SEQ ID NO: 65023 - DNA, 25 bp, Homo sapien
ttccatggcgtatgcctggaccaac

SEQ ID NO: 65024 - DNA, 25 bp, Homo sapien
ttccatggcgtaagcctggaccaac

SEQ ID NO: 65025 - DNA, 25 bp, Homo sapien
tcgaggtacattcaggtagacagac

SEQ ID NO: 65026 - DNA, 25 bp, Homo sapien
tcgaggtacattgaggtagacagac

SEQ ID NO: 65027 - DNA, 25 bp, Homo sapien
ctacgtatacatgtatggtaccgtc

SEQ ID NO: 65028 - DNA, 25 bp, Homo sapien
ctacgtatacatctatggtaccgtc

SEQ ID NO: 65029 - DNA, 25 bp, Homo sapien
ctactttacagtaactagctacttc

SEQ ID NO: 65030 - DNA, 25 bp, Homo sapien
ctactttacagttactagctacttc

SEQ ID NO: 65031 - DNA, 25 bp, Homo sapien
tactctctcgtgttacgtgcatgtc

SEQ ID NO: 65032 - DNA, 25 bp, Homo sapien
tactctctcgtgatacgtgcatgtc

SEQ ID NO: 65033 - DNA, 25 bp, Homo sapien
tagtctgactgagtacggacgtccg

SEQ ID NO: 65034 - DNA, 25 bp, Homo sapien
tagtctgactgactacggacgtccg

SEQ ID NO: 65035 - DNA, 25 bp, Homo sapien
gttacttagtatagtctcaagtacc

SEQ ID NO: 65036 - DNA, 25 bp, Homo sapien
gttacttagtattgtctcaagtacc

SEQ ID NO: 65037 - DNA, 25 bp, Homo sapien
cgcttagtgactctgtccggggcgt

SEQ ID NO: 65038 - DNA, 25 bp, Homo sapien
cgcttagtgactgtgtccggggcgt

SEQ ID NO: 65039 - DNA, 25 bp, Homo sapien
gtctacgtgtcatcctgttggggct

SEQ ID NO: 65040 - DNA, 25 bp, Homo sapien
gtctacgtgtcaacctgttggggct

SEQ ID NO: 65041 - DNA, 25 bp, Homo sapien
ttgtatacctcaaaattctggtgat

SEQ ID NO: 65042 - DNA, 25 bp, Homo sapien
ttgtatacctcataattctggtgat

SEQ ID NO: 65043 - DNA, 25 bp, Homo sapien
gatcgatcaacataaatctcggtga

SEQ ID NO: 65044 - DNA, 25 bp, Homo sapien
gatcgatcaacaaaaatctcggtga

SEQ ID NO: 65045 - DNA, 25 bp, Homo sapien
tacgaaaaaccgtctctctccggtc

SEQ ID NO: 65046 - DNA, 25 bp, Homo sapien
tacgaaaaaccgactctctccggtc

SEQ ID NO: 65047 - DNA, 25 bp, Homo sapien
ccatcggacgacggaaacgccgaac

SEQ ID NO: 65048 - DNA, 25 bp, Homo sapien
ccatcggacgaccgaaacgccgaac

SEQ ID NO: 65049 - DNA, 25 bp, Homo sapien
gcggtcaacacgtgaaaatgttcgg

SEQ ID NO: 65050 - DNA, 25 bp, Homo sapien
gcggtcaacacgagaaaatgttcgg

SEQ ID NO: 65051 - DNA, 25 bp, Homo sapien
actcttggctcaacccttaaaggtg

SEQ ID NO: 65052 - DNA, 25 bp, Homo sapien
actcttggctcatcccttaaaggtg

SEQ ID NO: 65053 - DNA, 25 bp, Homo sapien
tgtacaactcgtccactataaatgg

SEQ ID NO: 65054 - DNA, 25 bp, Homo sapien
tgtacaactcgtgcactataaatgg

SEQ ID NO: 65055 - DNA, 25 bp, Homo sapien
gtaacagtcgatcaacacgggtcct

SEQ ID NO: 65056 - DNA, 25 bp, Homo sapien
gtaacagtcgatgaacacgggtcct

SEQ ID NO: 65057 - DNA, 25 bp, Homo sapien
tagacacaggtactacccgactcac

SEQ ID NO: 65058 - DNA, 25 bp, Homo sapien
tagacacaggtagtacccgactcac

SEQ ID NO: 65059 - DNA, 25 bp, Homo sapien
cgacgtcagtaggtccgtcctctac

SEQ ID NO: 65060 - DNA, 25 bp, Homo sapien
cgacgtcagtagctccgtcctctac

SEQ ID NO: 65061 - DNA, 25 bp, Homo sapien
ggccggacgatgaactccgtccctg

SEQ ID NO: 65062 - DNA, 25 bp, Homo sapien
ggccggacgatgtactccgtccctg

SEQ ID NO: 65063 - DNA, 25 bp, Homo sapien
gactctatatgttcctttgacttgt

SEQ ID NO: 65064 - DNA, 25 bp, Homo sapien
gactctatatgtacctttgacttgt

SEQ ID NO: 65065 - DNA, 25 bp, Homo sapien
tactcgtattgagtccttcttctcg

SEQ ID NO: 65066 - DNA, 25 bp, Homo sapien
tactcgtattgactccttcttctcg

SEQ ID NO: 65067 - DNA, 25 bp, Homo sapien
atacaagtatgacaccgttcatccg

SEQ ID NO: 65068 - DNA, 25 bp, Homo sapien
atacaagtatgagaccgttcatccg

SEQ ID NO: 65069 - DNA, 25 bp, Homo sapien
ggaaagtatataggtacctgaaacc

SEQ ID NO: 65070 - DNA, 25 bp, Homo sapien
ggaaagtatatacgtacctgaaacc

SEQ ID NO: 65071 - DNA, 25 bp, Homo sapien
gagaacctactctactcagaaacga

SEQ ID NO: 65072 - DNA, 25 bp, Homo sapien
gagaacctactcaactcagaaacga

SEQ ID NO: 65073 - DNA, 25 bp, Homo sapien
gagttattatcttacaccatcggat

SEQ ID NO: 65074 - DNA, 25 bp, Homo sapien
gagttattatctaacaccatcggat

SEQ ID NO: 65075 - DNA, 25 bp, Homo sapien
gatgtataactacacgatgtactat

SEQ ID NO: 65076 - DNA, 25 bp, Homo sapien
gatgtataactagacgatgtactat

SEQ ID NO: 65077 - DNA, 25 bp, Homo sapien
cgtgactgtatgtaagtcgggtctc

SEQ ID NO: 65078 - DNA, 25 bp, Homo sapien
cgtgactgtatgaaagtcgggtctc

SEQ ID NO: 65079 - DNA, 25 bp, Homo sapien
aaaagaactgtgtttcgtcggtgtc

SEQ ID NO: 65080 - DNA, 25 bp, Homo sapien
aaaagaactgtgattcgtcggtgtc

SEQ ID NO: 65081 - DNA, 25 bp, Homo sapien
aatgaatcgtattttactgtcgtcg

SEQ ID NO: 65082 - DNA, 25 bp, Homo sapien
aatgaatcgtatattactgtcgtcg

SEQ ID NO: 65083 - DNA, 25 bp, Homo sapien
agagtagaaccgaccggtcgtctga

SEQ ID NO: 65084 - DNA, 25 bp, Homo sapien
agagtagaaccgtccggtcgtctga

SEQ ID NO: 65085 - DNA, 25 bp, Homo sapien
gatagacgacctctaggtacgccga

SEQ ID NO: 65086 - DNA, 25 bp, Homo sapien
gatagacgacctgtaggtacgccga

SEQ ID NO: 65087 - DNA, 25 bp, Homo sapien
ttttatacgagtgtaggataccaca

SEQ ID NO: 65088 - DNA, 25 bp, Homo sapien
ttttatacgagtctaggataccaca

SEQ ID NO: 65089 - DNA, 25 bp, Homo sapien
gtcaggttcgaggacccggtccctc

SEQ ID NO: 65090 - DNA, 25 bp, Homo sapien
gtcaggttcgagcacccggtccctc

SEQ ID NO: 65091 - DNA, 25 bp, Homo sapien
agcatgtcggcgtcggacaccctct

SEQ ID NO: 65092 - DNA, 25 bp, Homo sapien
agcatgtcggcgacggacaccctct

SEQ ID NO: 65093 - DNA, 25 bp, Homo sapien
cagaaatacgggagaagacctcgtc

SEQ ID NO: 65094 - DNA, 25 bp, Homo sapien
cagaaatacgggtgaagacctcgtc

SEQ ID NO: 65095 - DNA, 25 bp, Homo sapien
tgaagaaaggtcttgaagtcttacc

SEQ ID NO: 65096 - DNA, 25 bp, Homo sapien
tgaagaaaggtcatgaagtcttacc

SEQ ID NO: 65097 - DNA, 25 bp, Homo sapien
gacagggtcttaatgattgttactc

SEQ ID NO: 65098 - DNA, 25 bp, Homo sapien
gacagggtcttattgattgttactc

SEQ ID NO: 65099 - DNA, 25 bp, Homo sapien
aaataccgtttatgtgtttctttcg

SEQ ID NO: 65100 - DNA, 25 bp, Homo sapien
aaataccgtttaagtgtttctttcg

SEQ ID NO: 65101 - DNA, 25 bp, Homo sapien
gggtacagttccatgttttactaat

SEQ ID NO: 65102 - DNA, 25 bp, Homo sapien
gggtacagttccttgttttactaat

SEQ ID NO: 65103 - DNA, 25 bp, Homo sapien
gtgtctcagttctatatgttcaata

SEQ ID NO: 65104 - DNA, 25 bp, Homo sapien
gtgtctcagttcaatatgttcaata

SEQ ID NO: 65105 - DNA, 25 bp, Homo sapien
ctgtagttctcaaacttattgaacg

SEQ ID NO: 65106 - DNA, 25 bp, Homo sapien
ctgtagttctcatacttattgaacg

SEQ ID NO: 65107 - DNA, 25 bp, Homo sapien
tcgagttataacactgatatgtctc

SEQ ID NO: 65108 - DNA, 25 bp, Homo sapien
tcgagttataactctgatatgtctc

SEQ ID NO: 65109 - DNA, 25 bp, Homo sapien
acgacaccaactaggtcttcgacag

SEQ ID NO: 65110 - DNA, 25 bp, Homo sapien
acgacaccaacttggtcttcgacag

SEQ ID NO: 65111 - DNA, 25 bp, Homo sapien
gatgtcacaagtctccttctcgaca

SEQ ID NO: 65112 - DNA, 25 bp, Homo sapien
gatgtcacaagtgtccttctcgaca

SEQ ID NO: 65113 - DNA, 25 bp, Homo sapien
gaaccaccgagagtctcctctcgga

SEQ ID NO: 65114 - DNA, 25 bp, Homo sapien
gaaccaccgagactctcctctcgga

SEQ ID NO: 65115 - DNA, 25 bp, Homo sapien
aaggggtccggttctctctacgact

SEQ ID NO: 65116 - DNA, 25 bp, Homo sapien
aaggggtccggtactctctacgact

SEQ ID NO: 65117 - DNA, 25 bp, Homo sapien
ttactaatggtttccagtgtctgta

SEQ ID NO: 65118 - DNA, 25 bp, Homo sapien
ttactaatggttaccagtgtctgta

SEQ ID NO: 65119 - DNA, 25 bp, Homo sapien
tatacgttttgtaagaccattcaag

SEQ ID NO: 65120 - DNA, 25 bp, Homo sapien
tatacgttttgttagaccattcaag

SEQ ID NO: 65121 - DNA, 25 bp, Homo sapien
cacacttatttgagaccatctccgg

SEQ ID NO: 65122 - DNA, 25 bp, Homo sapien
cacacttatttgtgaccatctccgg

SEQ ID NO: 65123 - DNA, 25 bp, Homo sapien
tcatccgtctcagttttttcgttga

SEQ ID NO: 65124 - DNA, 25 bp, Homo sapien
tcatccgtctcacttttttcgttga

SEQ ID NO: 65125 - DNA, 25 bp, Homo sapien
gttccgttcccttttgtgtgtgtcc

SEQ ID NO: 65126 - DNA, 25 bp, Homo sapien
gttccgttccctattgtgtgtgtcc

SEQ ID NO: 65127 - DNA, 25 bp, Homo sapien
gtttcgttgccaatgtttagaacac

SEQ ID NO: 65128 - DNA, 25 bp, Homo sapien
gtttcgttgccattgtttagaacac

SEQ ID NO: 65129 - DNA, 25 bp, Homo sapien
tgttgagactccttgtctctgttca

SEQ ID NO: 65130 - DNA, 25 bp, Homo sapien
tgttgagactccatgtctctgttca

SEQ ID NO: 65131 - DNA, 25 bp, Homo sapien
ctgtggtcagcgtagtgtctgtgca

SEQ ID NO: 65132 - DNA, 25 bp, Homo sapien
ctgtggtcagcgaagtgtctgtgca

SEQ ID NO: 65133 - DNA, 25 bp, Homo sapien
accggtgtcggaggagctttcactc

SEQ ID NO: 65134 - DNA, 25 bp, Homo sapien
accggtgtcggacgagctttcactc

SEQ ID NO: 65135 - DNA, 25 bp, Homo sapien
gaggggtcgtcgagacgaattcttc

SEQ ID NO: 65136 - DNA, 25 bp, Homo sapien
gaggggtcgtcgtgacgaattcttc

SEQ ID NO: 65137 - DNA, 25 bp, Homo sapien
gttcgtacgaatatacatgtcttct

SEQ ID NO: 65138 - DNA, 25 bp, Homo sapien
gttcgtacgaatttacatgtcttct

SEQ ID NO: 65139 - DNA, 25 bp, Homo sapien
aagtcaagaaggtttagtcacgcta

SEQ ID NO: 65140 - DNA, 25 bp, Homo sapien
aagtcaagaaggattagtcacgcta

SEQ ID NO: 65141 - DNA, 25 bp, Homo sapien
ggtacacagaggtgtagtcccgacc

SEQ ID NO: 65142 - DNA, 25 bp, Homo sapien
ggtacacagaggagtagtcccgacc

SEQ ID NO: 65143 - DNA, 25 bp, Homo sapien
tcggcacacatgaaatccgacaccg

SEQ ID NO: 65144 - DNA, 25 bp, Homo sapien
tcggcacacatgtaatccgacaccg

SEQ ID NO: 65145 - DNA, 25 bp, Homo sapien
tagacacacatggtgttctcgaacc

SEQ ID NO: 65146 - DNA, 25 bp, Homo sapien
tagacacacatgctgttctcgaacc

SEQ ID NO: 65147 - DNA, 25 bp, Homo sapien
gagaaacaaccttctcagagtctct

SEQ ID NO: 65148 - DNA, 25 bp, Homo sapien
gagaaacaacctactcagagtctct

SEQ ID NO: 65149 - DNA, 25 bp, Homo sapien
agcagaaaccgtttatgcgtatacg

SEQ ID NO: 65150 - DNA, 25 bp, Homo sapien
agcagaaaccgtatatgcgtatacg

SEQ ID NO: 65151 - DNA, 25 bp, Homo sapien
gagagggataatcgtctttacacaa

SEQ ID NO: 65152 - DNA, 25 bp, Homo sapien
gagagggataatggtctttacacaa

SEQ ID NO: 65153 - DNA, 25 bp, Homo sapien
gagtgtctacctaatgttttcatta

SEQ ID NO: 65154 - DNA, 25 bp, Homo sapien
gagtgtctaccttatgttttcatta

SEQ ID NO: 65155 - DNA, 25 bp, Homo sapien
gtctctctctctagttggttactcc

SEQ ID NO: 65156 - DNA, 25 bp, Homo sapien
gtctctctctcttgttggttactcc

SEQ ID NO: 65157 - DNA, 25 bp, Homo sapien
tgacgtcccagttatccgtttaccc

SEQ ID NO: 65158 - DNA, 25 bp, Homo sapien
tgacgtcccagtaatccgtttaccc

SEQ ID NO: 65159 - DNA, 25 bp, Homo sapien
actgtcgtcggtgtcggaggtccct

SEQ ID NO: 65160 - DNA, 25 bp, Homo sapien
actgtcgtcggtctcggaggtccct

SEQ ID NO: 65161 - DNA, 25 bp, Homo sapien
ccgacctcggtaatgacgggtgtta

SEQ ID NO: 65162 - DNA, 25 bp, Homo sapien
ccgacctcggtattgacgggtgtta

SEQ ID NO: 65163 - DNA, 25 bp, Homo sapien
aagggacccaagtctctggaggtct

SEQ ID NO: 65164 - DNA, 25 bp, Homo sapien
aagggacccaagactctggaggtct

SEQ ID NO: 65165 - DNA, 25 bp, Homo sapien
gtttctagtcacacctcacgatgtc

SEQ ID NO: 65166 - DNA, 25 bp, Homo sapien
gtttctagtcactcctcacgatgtc

SEQ ID NO: 65167 - DNA, 25 bp, Homo sapien
tatgtaacccctaaactggtaagag

SEQ ID NO: 65168 - DNA, 25 bp, Homo sapien
tatgtaaccccttaactggtaagag

SEQ ID NO: 65169 - DNA, 25 bp, Homo sapien
gcgctcaccaaggtcaaactataga

SEQ ID NO: 65170 - DNA, 25 bp, Homo sapien
gcgctcaccaagctcaaactataga

SEQ ID NO: 65171 - DNA, 25 bp, Homo sapien
gtccccaagaccaggacgtcagact

SEQ ID NO: 65172 - DNA, 25 bp, Homo sapien
gtccccaagacctggacgtcagact

SEQ ID NO: 65173 - DNA, 25 bp, Homo sapien
agggtcggaccgacacgttacaacc

SEQ ID NO: 65174 - DNA, 25 bp, Homo sapien
agggtcggaccgtcacgttacaacc

SEQ ID NO: 65175 - DNA, 25 bp, Homo sapien
tgacgtaccgtctttcgtcactacc

SEQ ID NO: 65176 - DNA, 25 bp, Homo sapien
tgacgtaccgtcattcgtcactacc

SEQ ID NO: 65177 - DNA, 25 bp, Homo sapien
ggacacggactcctctgtgactccg

SEQ ID NO: 65178 - DNA, 25 bp, Homo sapien
ggacacggactcgtctgtgactccg

SEQ ID NO: 65179 - DNA, 25 bp, Homo sapien
aagactcactactctcaggactctg

SEQ ID NO: 65180 - DNA, 25 bp, Homo sapien
aagactcactacactcaggactctg

SEQ ID NO: 65181 - DNA, 25 bp, Homo sapien
acactgtctgtcgtcatggagtcac

SEQ ID NO: 65182 - DNA, 25 bp, Homo sapien
acactgtctgtcctcatggagtcac

SEQ ID NO: 65183 - DNA, 25 bp, Homo sapien
aatattcggatctttctgtaggtac

SEQ ID NO: 65184 - DNA, 25 bp, Homo sapien
aatattcggatcattctgtaggtac

SEQ ID NO: 65185 - DNA, 25 bp, Homo sapien
tacttttaccaacgtttcggtgttc

SEQ ID NO: 65186 - DNA, 25 bp, Homo sapien
tacttttaccaaggtttcggtgttc

SEQ ID NO: 65187 - DNA, 25 bp, Homo sapien
tttatgtgtcgagtggttcccgtgg

SEQ ID NO: 65188 - DNA, 25 bp, Homo sapien
tttatgtgtcgactggttcccgtgg

SEQ ID NO: 65189 - DNA, 25 bp, Homo sapien
attttttagttcaacgttcaccgga

SEQ ID NO: 65190 - DNA, 25 bp, Homo sapien
attttttagttctacgttcaccgga

SEQ ID NO: 65191 - DNA, 25 bp, Homo sapien
tttacaactctcatttatacgggat

SEQ ID NO: 65192 - DNA, 25 bp, Homo sapien
tttacaactctcttttatacgggat

SEQ ID NO: 65193 - DNA, 25 bp, Homo sapien
tttgtcaattctttcgaatgtcgtc

SEQ ID NO: 65194 - DNA, 25 bp, Homo sapien
tttgtcaattctatcgaatgtcgtc

SEQ ID NO: 65195 - DNA, 25 bp, Homo sapien
ggtaacaggtaggtttcgtttcgtc

SEQ ID NO: 65196 - DNA, 25 bp, Homo sapien
ggtaacaggtagctttcgtttcgtc

SEQ ID NO: 65197 - DNA, 25 bp, Homo sapien
aagacgaacgggttctttgtttcga

SEQ ID NO: 65198 - DNA, 25 bp, Homo sapien
aagacgaacgggatctttgtttcga

SEQ ID NO: 65199 - DNA, 25 bp, Homo sapien
tccgggtcagggtcgtttctgttcc

SEQ ID NO: 65200 - DNA, 25 bp, Homo sapien
tccgggtcagggacgtttctgttcc

SEQ ID NO: 65201 - DNA, 25 bp, Homo sapien
gtcttctaggagtgcctcaggtcga

SEQ ID NO: 65202 - DNA, 25 bp, Homo sapien
gtcttctaggagagcctcaggtcga

SEQ ID NO: 65203 - DNA, 25 bp, Homo sapien
gaacctctgtggtccactcagtgac

SEQ ID NO: 65204 - DNA, 25 bp, Homo sapien
gaacctctgtggaccactcagtgac

SEQ ID NO: 65205 - DNA, 25 bp, Homo sapien
ctcgtgccgatacacttcaaaggag

SEQ ID NO: 65206 - DNA, 25 bp, Homo sapien
ctcgtgccgatagacttcaaaggag

SEQ ID NO: 65207 - DNA, 25 bp, Homo sapien
gtcgttaattatgttcacaatgtct

SEQ ID NO: 65208 - DNA, 25 bp, Homo sapien
gtcgttaattatcttcacaatgtct

SEQ ID NO: 65209 - DNA, 25 bp, Homo sapien
ttcgtctaaaattcaccgatttgtt

SEQ ID NO: 65210 - DNA, 25 bp, Homo sapien
ttcgtctaaaatacaccgatttgtt

SEQ ID NO: 65211 - DNA, 25 bp, Homo sapien
tggtataacattaccatacgtgttt

SEQ ID NO: 65212 - DNA, 25 bp, Homo sapien
tggtataacatttccatacgtgttt

SEQ ID NO: 65213 - DNA, 25 bp, Homo sapien
agtccgacggtcgtcgagagaccca

SEQ ID NO: 65214 - DNA, 25 bp, Homo sapien
agtccgacggtcctcgagagaccca

SEQ ID NO: 65215 - DNA, 25 bp, Homo sapien
agagacccggtcaggaggaccctcg

SEQ ID NO: 65216 - DNA, 25 bp, Homo sapien
agagacccggtctggaggaccctcg

SEQ ID NO: 65217 - DNA, 25 bp, Homo sapien
cgcgcgaacattaagcgagggcctc

SEQ ID NO: 65218 - DNA, 25 bp, Homo sapien
cgcgcgaacatttagcgagggcctc

SEQ ID NO: 65219 - DNA, 25 bp, Homo sapien
tgactacaccatcgagagggtttta

SEQ ID NO: 65220 - DNA, 25 bp, Homo sapien
tgactacaccatggagagggtttta

SEQ ID NO: 65221 - DNA, 25 bp, Homo sapien
agtcaacactttttagggttctata

SEQ ID NO: 65222 - DNA, 25 bp, Homo sapien
agtcaacactttatagggttctata

SEQ ID NO: 65223 - DNA, 25 bp, Homo sapien
tctcccgttctttgcgggtcctacg

SEQ ID NO: 65224 - DNA, 25 bp, Homo sapien
tctcccgttcttagcgggtcctacg

SEQ ID NO: 65225 - DNA, 25 bp, Homo sapien
cttcccggtgtagagggagacgtcc

SEQ ID NO: 65226 - DNA, 25 bp, Homo sapien
cttcccggtgtacagggagacgtcc

SEQ ID NO: 65227 - DNA, 25 bp, Homo sapien
ccgccgactcgtgagagggtcgtct

SEQ ID NO: 65228 - DNA, 25 bp, Homo sapien
ccgccgactcgtcagagggtcgtct

SEQ ID NO: 65229 - DNA, 25 bp, Homo sapien
cactccgtcggtaggtccgggtcgc

SEQ ID NO: 65230 - DNA, 25 bp, Homo sapien
cactccgtcggttggtccgggtcgc

SEQ ID NO: 65231 - DNA, 25 bp, Homo sapien
tcttccggattgtccgtagacttct

SEQ ID NO: 65232 - DNA, 25 bp, Homo sapien
tcttccggattgaccgtagacttct

SEQ ID NO: 65233 - DNA, 25 bp, Homo sapien
tgttcgagaatcttaccgaataacg

SEQ ID NO: 65234 - DNA, 25 bp, Homo sapien
tgttcgagaatcataccgaataacg

SEQ ID NO: 65235 - DNA, 25 bp, Homo sapien
aggtgagagacctttgacgacagag

SEQ ID NO: 65236 - DNA, 25 bp, Homo sapien
aggtgagagaccattgacgacagag

SEQ ID NO: 65237 - DNA, 25 bp, Homo sapien
aaggagacgaagcacttaacacgga

SEQ ID NO: 65238 - DNA, 25 bp, Homo sapien
aaggagacgaaggacttaacacgga

SEQ ID NO: 65239 - DNA, 25 bp, Homo sapien
cgtgtagaaccgagaacctacacta

SEQ ID NO: 65240 - DNA, 25 bp, Homo sapien
cgtgtagaaccgtgaacctacacta

SEQ ID NO: 65241 - DNA, 25 bp, Homo sapien
tctaggaacgcaagatctgagatct

SEQ ID NO: 65242 - DNA, 25 bp, Homo sapien
tctaggaacgcatgatctgagatct

SEQ ID NO: 65243 - DNA, 25 bp, Homo sapien
ttctggggtctcttctgtaggaggt

SEQ ID NO: 65244 - DNA, 25 bp, Homo sapien
ttctggggtctcatctgtaggaggt

SEQ ID NO: 65245 - DNA, 25 bp, Homo sapien
ttgtaagatttcgtccgtacaacgg

SEQ ID NO: 65246 - DNA, 25 bp, Homo sapien
ttgtaagatttcctccgtacaacgg

SEQ ID NO: 65247 - DNA, 25 bp, Homo sapien
acgtgtggtttgtgtccgacgactg

SEQ ID NO: 65248 - DNA, 25 bp, Homo sapien
acgtgtggtttgagtccgacgactg

SEQ ID NO: 65249 - DNA, 25 bp, Homo sapien
tcgtgaactatcttttccgcatacg

SEQ ID NO: 65250 - DNA, 25 bp, Homo sapien
tcgtgaactatcatttccgcatacg

SEQ ID NO: 65251 - DNA, 25 bp, Homo sapien
gtctaacctatgtgtgcacgtataa

SEQ ID NO: 65252 - DNA, 25 bp, Homo sapien
gtctaacctatgagtgcacgtataa

SEQ ID NO: 65253 - DNA, 25 bp, Homo sapien
cgaccttcactggacttacaaatag

SEQ ID NO: 65254 - DNA, 25 bp, Homo sapien
cgaccttcactgcacttacaaatag

SEQ ID NO: 65255 - DNA, 25 bp, Homo sapien
ggacctcgtgtaagccttcctaaca

SEQ ID NO: 65256 - DNA, 25 bp, Homo sapien
ggacctcgtgtatgccttcctaaca

SEQ ID NO: 65257 - DNA, 25 bp, Homo sapien
gtacccgttaatatgtccgacatac

SEQ ID NO: 65258 - DNA, 25 bp, Homo sapien
gtacccgttaatttgtccgacatac

SEQ ID NO: 65259 - DNA, 25 bp, Homo sapien
tatacgttctctattttgaagtgtc

SEQ ID NO: 65260 - DNA, 25 bp, Homo sapien
tatacgttctcttttttgaagtgtc

SEQ ID NO: 65261 - DNA, 25 bp, Homo sapien
tataagtcttccttatttatggacg

SEQ ID NO: 65262 - DNA, 25 bp, Homo sapien
tataagtcttccatatttatggacg

SEQ ID NO: 65263 - DNA, 25 bp, Homo sapien
ttacaaatcgcgtactcttctgtga

SEQ ID NO: 65264 - DNA, 25 bp, Homo sapien
ttacaaatcgcgaactcttctgtga

SEQ ID NO: 65265 - DNA, 25 bp, Homo sapien
acacagtatttgacttctctgtagg

SEQ ID NO: 65266 - DNA, 25 bp, Homo sapien
acacagtatttgtcttctctgtagg

SEQ ID NO: 65267 - DNA, 25 bp, Homo sapien
gaagacattttacctcttgagataa

SEQ ID NO: 65268 - DNA, 25 bp, Homo sapien
gaagacattttagctcttgagataa

SEQ ID NO: 65269 - DNA, 25 bp, Homo sapien
taggtttaattctaaaccttttata

SEQ ID NO: 65270 - DNA, 25 bp, Homo sapien
taggtttaattcaaaaccttttata

SEQ ID NO: 65271 - DNA, 25 bp, Homo sapien
ttagactgtgcagataactgttctc

SEQ ID NO: 65272 - DNA, 25 bp, Homo sapien
ttagactgtgcacataactgttctc

SEQ ID NO: 65273 - DNA, 25 bp, Homo sapien
tttacgggtagacattagatctatc

SEQ ID NO: 65274 - DNA, 25 bp, Homo sapien
tttacgggtagagattagatctatc

SEQ ID NO: 65275 - DNA, 25 bp, Homo sapien
tattacgggacttcgttttaaagac

SEQ ID NO: 65276 - DNA, 25 bp, Homo sapien
tattacgggactacgttttaaagac

SEQ ID NO: 65277 - DNA, 25 bp, Homo sapien
tgaaacgtccccaattatcaggact

SEQ ID NO: 65278 - DNA, 25 bp, Homo sapien
tgaaacgtcccctattatcaggact

SEQ ID NO: 65279 - DNA, 25 bp, Homo sapien
aagaaagaaggtatccttcagagac

SEQ ID NO: 65280 - DNA, 25 bp, Homo sapien
aagaaagaaggtttccttcagagac

SEQ ID NO: 65281 - DNA, 25 bp, Homo sapien
ggtcgagaccctttcacttgaggtc

SEQ ID NO: 65282 - DNA, 25 bp, Homo sapien
ggtcgagaccctatcacttgaggtc

SEQ ID NO: 65283 - DNA, 25 bp, Homo sapien
gtcgccgcgtcactcatgtggcgtc

SEQ ID NO: 65284 - DNA, 25 bp, Homo sapien
gtcgccgcgtcagtcatgtggcgtc

SEQ ID NO: 65285 - DNA, 25 bp, Homo sapien
cactgcgcacggtgctctgtggttc

SEQ ID NO: 65286 - DNA, 25 bp, Homo sapien
cactgcgcacggagctctgtggttc

SEQ ID NO: 65287 - DNA, 25 bp, Homo sapien
gtcgacggcgcctgtacttgtgtgt

SEQ ID NO: 65288 - DNA, 25 bp, Homo sapien
gtcgacggcgccagtacttgtgtgt

SEQ ID NO: 65289 - DNA, 25 bp, Homo sapien
acggtgacatgttccaaataatagt

SEQ ID NO: 65290 - DNA, 25 bp, Homo sapien
acggtgacatgtaccaaataatagt

SEQ ID NO: 65291 - DNA, 25 bp, Homo sapien
ttccgtgaactttcgacaaagaaat

SEQ ID NO: 65292 - DNA, 25 bp, Homo sapien
ttccgtgaacttacgacaaagaaat

SEQ ID NO: 65293 - DNA, 25 bp, Homo sapien
ctttgtgcgtatcatttatgtaaac

SEQ ID NO: 65294 - DNA, 25 bp, Homo sapien
ctttgtgcgtatgatttatgtaaac

SEQ ID NO: 65295 - DNA, 25 bp, Homo sapien
caaaggtcgtagagactttctaata

SEQ ID NO: 65296 - DNA, 25 bp, Homo sapien
caaaggtcgtagtgactttctaata

SEQ ID NO: 65297 - DNA, 25 bp, Homo sapien
ccgtaatgacatgtatctatgaatt

SEQ ID NO: 65298 - DNA, 25 bp, Homo sapien
ccgtaatgacatctatctatgaatt

SEQ ID NO: 65299 - DNA, 25 bp, Homo sapien
ttgaaattcgtcttacactgagctc

SEQ ID NO: 65300 - DNA, 25 bp, Homo sapien
ttgaaattcgtcatacactgagctc

SEQ ID NO: 65301 - DNA, 25 bp, Homo sapien
tgacgacatctacactaccggatta

SEQ ID NO: 65302 - DNA, 25 bp, Homo sapien
tgacgacatctagactaccggatta

SEQ ID NO: 65303 - DNA, 25 bp, Homo sapien
ttcagtgtacctgtcccggtctctt

SEQ ID NO: 65304 - DNA, 25 bp, Homo sapien
ttcagtgtacctctcccggtctctt

SEQ ID NO: 65305 - DNA, 25 bp, Homo sapien
gaaagctcgcgatcctcgggtcccg

SEQ ID NO: 65306 - DNA, 25 bp, Homo sapien
gaaagctcgcgaacctcgggtcccg

SEQ ID NO: 65307 - DNA, 25 bp, Homo sapien
ggttgaagccggaactctctttccc

SEQ ID NO: 65308 - DNA, 25 bp, Homo sapien
ggttgaagccggtactctctttccc

SEQ ID NO: 65309 - DNA, 25 bp, Homo sapien
attcaactagggtagtccttgtttt

SEQ ID NO: 65310 - DNA, 25 bp, Homo sapien
attcaactagggaagtccttgtttt

SEQ ID NO: 65311 - DNA, 25 bp, Homo sapien
cttcttgagggctcagtgtgtcttt

SEQ ID NO: 65312 - DNA, 25 bp, Homo sapien
cttcttgagggcacagtgtgtcttt

SEQ ID NO: 65313 - DNA, 25 bp, Homo sapien
tgtagtttcccctggggtgactctt

SEQ ID NO: 65314 - DNA, 25 bp, Homo sapien
tgtagtttccccaggggtgactctt

SEQ ID NO: 65315 - DNA, 25 bp, Homo sapien
tttgtccgtccgttttttgctccgg

SEQ ID NO: 65316 - DNA, 25 bp, Homo sapien
tttgtccgtccgatttttgctccgg

SEQ ID NO: 65317 - DNA, 25 bp, Homo sapien
ggtgtccctaatctctatgtcccgg

SEQ ID NO: 65318 - DNA, 25 bp, Homo sapien
ggtgtccctaatgtctatgtcccgg

SEQ ID NO: 65319 - DNA, 25 bp, Homo sapien
atcaccgtgcgtgtcagagacccgg

SEQ ID NO: 65320 - DNA, 25 bp, Homo sapien
atcaccgtgcgtctcagagacccgg

SEQ ID NO: 65321 - DNA, 25 bp, Homo sapien
caccgtcgtcgtcttcgtgatggtt

SEQ ID NO: 65322 - DNA, 25 bp, Homo sapien
caccgtcgtcgtgttcgtgatggtt

SEQ ID NO: 65323 - DNA, 25 bp, Homo sapien
tctctttagggtcttgtgagtcggg

SEQ ID NO: 65324 - DNA, 25 bp, Homo sapien
tctctttagggtgttgtgagtcggg

SEQ ID NO: 65325 - DNA, 25 bp, Homo sapien
taatagtagttgtcgttcttgtacc

SEQ ID NO: 65326 - DNA, 25 bp, Homo sapien
taatagtagttgacgttcttgtacc

SEQ ID NO: 65327 - DNA, 25 bp, Homo sapien
gacatctgtttcaagacatgtacat

SEQ ID NO: 65328 - DNA, 25 bp, Homo sapien
gacatctgtttctagacatgtacat

SEQ ID NO: 65329 - DNA, 25 bp, Homo sapien
gaaggtcgtaggtcttcacttgaac

SEQ ID NO: 65330 - DNA, 25 bp, Homo sapien
gaaggtcgtaggacttcacttgaac

SEQ ID NO: 65331 - DNA, 25 bp, Homo sapien
cattcgctccgtatcttagaaaagt

SEQ ID NO: 65332 - DNA, 25 bp, Homo sapien
cattcgctccgtttcttagaaaagt

SEQ ID NO: 65333 - DNA, 25 bp, Homo sapien
ccttctcgtccgtcgacaagggaag

SEQ ID NO: 65334 - DNA, 25 bp, Homo sapien
ccttctcgtccgacgacaagggaag

SEQ ID NO: 65335 - DNA, 25 bp, Homo sapien
atgtatcgcggaaccagatccggtt

SEQ ID NO: 65336 - DNA, 25 bp, Homo sapien
atgtatcgcggatccagatccggtt

SEQ ID NO: 65337 - DNA, 25 bp, Homo sapien
atatctctcggaaggacagtattga

SEQ ID NO: 65338 - DNA, 25 bp, Homo sapien
atatctctcggatggacagtattga

SEQ ID NO: 65339 - DNA, 25 bp, Homo sapien
gagttcatctgatccttcattcggt

SEQ ID NO: 65340 - DNA, 25 bp, Homo sapien
gagttcatctgaaccttcattcggt

SEQ ID NO: 65341 - DNA, 25 bp, Homo sapien
ggatactgtttaaccgatcttatta

SEQ ID NO: 65342 - DNA, 25 bp, Homo sapien
ggatactgtttatccgatcttatta

SEQ ID NO: 65343 - DNA, 25 bp, Homo sapien
acagtaacttctctcgacaatttta

SEQ ID NO: 65344 - DNA, 25 bp, Homo sapien
acagtaacttctgtcgacaatttta

SEQ ID NO: 65345 - DNA, 25 bp, Homo sapien
taaacgcgttgtgtccaatgtataa

SEQ ID NO: 65346 - DNA, 25 bp, Homo sapien
taaacgcgttgtctccaatgtataa

SEQ ID NO: 65347 - DNA, 25 bp, Homo sapien
tatgtccacgtgtgtccacattaaa

SEQ ID NO: 65348 - DNA, 25 bp, Homo sapien
tatgtccacgtgagtccacattaaa

SEQ ID NO: 65349 - DNA, 25 bp, Homo sapien
ttgtccggtggactcgtgaccacca

SEQ ID NO: 65350 - DNA, 25 bp, Homo sapien
ttgtccggtggagtcgtgaccacca

SEQ ID NO: 65351 - DNA, 25 bp, Homo sapien
cccggagtagtcgttgtcggacggg

SEQ ID NO: 65352 - DNA, 25 bp, Homo sapien
cccggagtagtccttgtcggacggg

SEQ ID NO: 65353 - DNA, 25 bp, Homo sapien
tcctcggaagagtggtacgaacgaa

SEQ ID NO: 65354 - DNA, 25 bp, Homo sapien
tcctcggaagagaggtacgaacgaa

SEQ ID NO: 65355 - DNA, 25 bp, Homo sapien
tcctcggtagaagtttaggtgtcta

SEQ ID NO: 65356 - DNA, 25 bp, Homo sapien
tcctcggtagaactttaggtgtcta

SEQ ID NO: 65357 - DNA, 25 bp, Homo sapien
ggtggtctaatcttgtcattcgtat

SEQ ID NO: 65358 - DNA, 25 bp, Homo sapien
ggtggtctaatcatgtcattcgtat

SEQ ID NO: 65359 - DNA, 25 bp, Homo sapien
acttctcggtaaaagtatccacaga

SEQ ID NO: 65360 - DNA, 25 bp, Homo sapien
acttctcggtaatagtatccacaga

SEQ ID NO: 65361 - DNA, 25 bp, Homo sapien
agggtgtccgaaataagtccagaga

SEQ ID NO: 65362 - DNA, 25 bp, Homo sapien
agggtgtccgaattaagtccagaga

SEQ ID NO: 65363 - DNA, 25 bp, Homo sapien
agaaggttgtctacacctacaggaa

SEQ ID NO: 65364 - DNA, 25 bp, Homo sapien
agaaggttgtcttcacctacaggaa

SEQ ID NO: 65365 - DNA, 25 bp, Homo sapien
aacatggtgtcgacggtctttatga

SEQ ID NO: 65366 - DNA, 25 bp, Homo sapien
aacatggtgtcgtcggtctttatga

SEQ ID NO: 65367 - DNA, 25 bp, Homo sapien
ataggtcttcggaacgtcctctgga

SEQ ID NO: 65368 - DNA, 25 bp, Homo sapien
ataggtcttcggtacgtcctctgga

SEQ ID NO: 65369 - DNA, 25 bp, Homo sapien
ttcttagtgtatcaactgtcgtaca

SEQ ID NO: 65370 - DNA, 25 bp, Homo sapien
ttcttagtgtatgaactgtcgtaca

SEQ ID NO: 65371 - DNA, 25 bp, Homo sapien
aaatctgtggtaccaacatcgtcac

SEQ ID NO: 65372 - DNA, 25 bp, Homo sapien
aaatctgtggtagcaacatcgtcac

SEQ ID NO: 65373 - DNA, 25 bp, Homo sapien
gacaatagtgttacaacagttctcc

SEQ ID NO: 65374 - DNA, 25 bp, Homo sapien
gacaatagtgtttcaacagttctcc

SEQ ID NO: 65375 - DNA, 25 bp, Homo sapien
caagggtcgagtagaacgtgatccg

SEQ ID NO: 65376 - DNA, 25 bp, Homo sapien
caagggtcgagttgaacgtgatccg

SEQ ID NO: 65377 - DNA, 25 bp, Homo sapien
tcccggaggtaggtgaggtcatcac

SEQ ID NO: 65378 - DNA, 25 bp, Homo sapien
tcccggaggtagctgaggtcatcac

SEQ ID NO: 65379 - DNA, 25 bp, Homo sapien
tcgccggggacagcgggcgcgcgac

SEQ ID NO: 65380 - DNA, 25 bp, Homo sapien
tcgccggggacaccgggcgcgcgac

SEQ ID NO: 65381 - DNA, 25 bp, Homo sapien
gctgacgggctactccggtcgcgtc

SEQ ID NO: 65382 - DNA, 25 bp, Homo sapien
gctgacgggctagtccggtcgcgtc

SEQ ID NO: 65383 - DNA, 25 bp, Homo sapien
gtcccgaggactcgtgtgtcaggtc

SEQ ID NO: 65384 - DNA, 25 bp, Homo sapien
gtcccgaggactggtgtgtcaggtc

SEQ ID NO: 65385 - DNA, 25 bp, Homo sapien
tgaggaccagtgctacgtcgaagga

SEQ ID NO: 65386 - DNA, 25 bp, Homo sapien
tgaggaccagtggtacgtcgaagga

SEQ ID NO: 65387 - DNA, 25 bp, Homo sapien
gacgcaacagggtcgtacactcgac

SEQ ID NO: 65388 - DNA, 25 bp, Homo sapien
gacgcaacagggacgtacactcgac

SEQ ID NO: 65389 - DNA, 25 bp, Homo sapien
gggtcaacaaggaagacgtacacac

SEQ ID NO: 65390 - DNA, 25 bp, Homo sapien
gggtcaacaaggtagacgtacacac

SEQ ID NO: 65391 - DNA, 25 bp, Homo sapien
ggttccccttatagcgtaccgacct

SEQ ID NO: 65392 - DNA, 25 bp, Homo sapien
ggttccccttattgcgtaccgacct

SEQ ID NO: 65393 - DNA, 25 bp, Homo sapien
acgtctcactttttccgaagaccgt

SEQ ID NO: 65394 - DNA, 25 bp, Homo sapien
acgtctcactttatccgaagaccgt

SEQ ID NO: 65395 - DNA, 25 bp, Homo sapien
cctttcctcgagacttccctggtgt

SEQ ID NO: 65396 - DNA, 25 bp, Homo sapien
cctttcctcgagtcttccctggtgt

SEQ ID NO: 65397 - DNA, 25 bp, Homo sapien
acgttccggtcgtgtttccgggtcg

SEQ ID NO: 65398 - DNA, 25 bp, Homo sapien
acgttccggtcgagtttccgggtcg

SEQ ID NO: 65399 - DNA, 25 bp, Homo sapien
ccagtacccggtgtctcttgaggcc

SEQ ID NO: 65400 - DNA, 25 bp, Homo sapien
ccagtacccggtctctcttgaggcc

SEQ ID NO: 65401 - DNA, 25 bp, Homo sapien
ctggtaaacggtcttaggtggcgaa

SEQ ID NO: 65402 - DNA, 25 bp, Homo sapien
ctggtaaacggtgttaggtggcgaa

SEQ ID NO: 65403 - DNA, 25 bp, Homo sapien
agttgtgtctgtgtgcgtccggaaa

SEQ ID NO: 65404 - DNA, 25 bp, Homo sapien
agttgtgtctgtctgcgtccggaaa

SEQ ID NO: 65405 - DNA, 25 bp, Homo sapien
ggtcctcttcgcagtcgcaccggga

SEQ ID NO: 65406 - DNA, 25 bp, Homo sapien
ggtcctcttcgctgtcgcaccggga

SEQ ID NO: 65407 - DNA, 25 bp, Homo sapien
ccactctccgagtcgaggttctgga

SEQ ID NO: 65408 - DNA, 25 bp, Homo sapien
ccactctccgagacgaggttctgga

SEQ ID NO: 65409 - DNA, 25 bp, Homo sapien
tctccattctggagtgagttcttaa

SEQ ID NO: 65410 - DNA, 25 bp, Homo sapien
tctccattctggtgtgagttcttaa

SEQ ID NO: 65411 - DNA, 25 bp, Homo sapien
tcctgtccgggactgtgtcctacaa

SEQ ID NO: 65412 - DNA, 25 bp, Homo sapien
tcctgtccgggagtgtgtcctacaa

SEQ ID NO: 65413 - DNA, 25 bp, Homo sapien
ctgtacgtttggttgggtctccgga

SEQ ID NO: 65414 - DNA, 25 bp, Homo sapien
ctgtacgtttggatgggtctccgga

SEQ ID NO: 65415 - DNA, 25 bp, Homo sapien
actttcttggtaaacggtcttcgga

SEQ ID NO: 65416 - DNA, 25 bp, Homo sapien
actttcttggtatacggtcttcgga

SEQ ID NO: 65417 - DNA, 25 bp, Homo sapien
gctccgtgggtcaggcaccactcgt

SEQ ID NO: 65418 - DNA, 25 bp, Homo sapien
gctccgtgggtctggcaccactcgt

SEQ ID NO: 65419 - DNA, 25 bp, Homo sapien
ccagtcgaggtcgtagagcctcgtc

SEQ ID NO: 65420 - DNA, 25 bp, Homo sapien
ccagtcgaggtcctagagcctcgtc

SEQ ID NO: 65421 - DNA, 25 bp, Homo sapien
gtctaccccgggacgcagggtatcc

SEQ ID NO: 65422 - DNA, 25 bp, Homo sapien
gtctaccccgggtcgcagggtatcc

SEQ ID NO: 65423 - DNA, 25 bp, Homo sapien
tcgtaaaaggggtgtccttttgtct

SEQ ID NO: 65424 - DNA, 25 bp, Homo sapien
tcgtaaaaggggagtccttttgtct

SEQ ID NO: 65425 - DNA, 25 bp, Homo sapien
caagtagttagagagtatctttgcc

SEQ ID NO: 65426 - DNA, 25 bp, Homo sapien
caagtagttagacagtatctttgcc

SEQ ID NO: 65427 - DNA, 25 bp, Homo sapien
gtgttaagaccgtctctctcggtac

SEQ ID NO: 65428 - DNA, 25 bp, Homo sapien
gtgttaagaccgactctctcggtac

SEQ ID NO: 65429 - DNA, 25 bp, Homo sapien
cgtcgcacaggagacgtttcacgtc

SEQ ID NO: 65430 - DNA, 25 bp, Homo sapien
cgtcgcacaggacacgtttcacgtc

SEQ ID NO: 65431 - DNA, 25 bp, Homo sapien
acgtggacgcggatacctattccat

SEQ ID NO: 65432 - DNA, 25 bp, Homo sapien
acgtggacgcggttacctattccat

SEQ ID NO: 65433 - DNA, 25 bp, Homo sapien
gagcggagacaggaacggtcttcta

SEQ ID NO: 65434 - DNA, 25 bp, Homo sapien
gagcggagacagcaacggtcttcta

SEQ ID NO: 65435 - DNA, 25 bp, Homo sapien
ttttaggaacggaacggaactttct

SEQ ID NO: 65436 - DNA, 25 bp, Homo sapien
ttttaggaacggtacggaactttct

SEQ ID NO: 65437 - DNA, 25 bp, Homo sapien
tacttgaaagatacagtaacttctc

SEQ ID NO: 65438 - DNA, 25 bp, Homo sapien
tacttgaaagattcagtaacttctc

SEQ ID NO: 65439 - DNA, 25 bp, Homo sapien
ctcatagacatgatcttggtatttc

SEQ ID NO: 65440 - DNA, 25 bp, Homo sapien
ctcatagacatgttcttggtatttc

SEQ ID NO: 65441 - DNA, 25 bp, Homo sapien
agtcttgaagacactcggttgtttg

SEQ ID NO: 65442 - DNA, 25 bp, Homo sapien
agtcttgaagactctcggttgtttg

SEQ ID NO: 65443 - DNA, 25 bp, Homo sapien
gcttcttgaagcagtgatatctaca

SEQ ID NO: 65444 - DNA, 25 bp, Homo sapien
gcttcttgaagctgtgatatctaca

SEQ ID NO: 65445 - DNA, 25 bp, Homo sapien
ggacaacttcgctacttgaaccgca

SEQ ID NO: 65446 - DNA, 25 bp, Homo sapien
ggacaacttcgcaacttgaaccgca

SEQ ID NO: 65447 - DNA, 25 bp, Homo sapien
aaaacattcttgtaggaggacctga

SEQ ID NO: 65448 - DNA, 25 bp, Homo sapien
aaaacattcttgaaggaggacctga

SEQ ID NO: 65449 - DNA, 25 bp, Homo sapien
aaaaatttgagtgtgacgaccacta

SEQ ID NO: 65450 - DNA, 25 bp, Homo sapien
aaaaatttgagtctgacgaccacta

SEQ ID NO: 65451 - DNA, 25 bp, Homo sapien
aagacctctgaaacgtcctccggtt

SEQ ID NO: 65452 - DNA, 25 bp, Homo sapien
aagacctctgaatcgtcctccggtt

SEQ ID NO: 65453 - DNA, 25 bp, Homo sapien
gacgctccgagactcctgtgtcgtg

SEQ ID NO: 65454 - DNA, 25 bp, Homo sapien
gacgctccgagagtcctgtgtcgtg

SEQ ID NO: 65455 - DNA, 25 bp, Homo sapien
tcaggtctcggtctctcgtgtccct

SEQ ID NO: 65456 - DNA, 25 bp, Homo sapien
tcaggtctcggtgtctcgtgtccct

SEQ ID NO: 65457 - DNA, 25 bp, Homo sapien
gactgtcttttgtctcttcaacacc

SEQ ID NO: 65458 - DNA, 25 bp, Homo sapien
gactgtcttttgactcttcaacacc

SEQ ID NO: 65459 - DNA, 25 bp, Homo sapien
gttagtttagaaccaaaaccgacaa

SEQ ID NO: 65460 - DNA, 25 bp, Homo sapien
gttagtttagaagcaaaaccgacaa

SEQ ID NO: 65461 - DNA, 25 bp, Homo sapien
cgtcttcacggttctttgtcagacc

SEQ ID NO: 65462 - DNA, 25 bp, Homo sapien
cgtcttcacggtactttgtcagacc

SEQ ID NO: 65463 - DNA, 25 bp, Homo sapien
atctgtccgtgtattaagtcctatc

SEQ ID NO: 65464 - DNA, 25 bp, Homo sapien
atctgtccgtgttttaagtcctatc

SEQ ID NO: 65465 - DNA, 25 bp, Homo sapien
taaggaggtttagttgagctctctc

SEQ ID NO: 65466 - DNA, 25 bp, Homo sapien
taaggaggtttacttgagctctctc

SEQ ID NO: 65467 - DNA, 25 bp, Homo sapien
aagaagttcatatagatctcgtcac

SEQ ID NO: 65468 - DNA, 25 bp, Homo sapien
aagaagttcataaagatctcgtcac

SEQ ID NO: 65469 - DNA, 25 bp, Homo sapien
atctggcacttcagcccgctgtacg

SEQ ID NO: 65470 - DNA, 25 bp, Homo sapien
atctggcacttctgcccgctgtacg

SEQ ID NO: 65471 - DNA, 25 bp, Homo sapien
attgttaactattgacgagaacttc

SEQ ID NO: 65472 - DNA, 25 bp, Homo sapien
attgttaactatagacgagaacttc

SEQ ID NO: 65473 - DNA, 25 bp, Homo sapien
tcgacaggtcaagactgggagaccc

SEQ ID NO: 65474 - DNA, 25 bp, Homo sapien
tcgacaggtcaacactgggagaccc

SEQ ID NO: 65475 - DNA, 25 bp, Homo sapien
gcaccacttgtgtcccgttggggca

SEQ ID NO: 65476 - DNA, 25 bp, Homo sapien
gcaccacttgtgacccgttggggca

SEQ ID NO: 65477 - DNA, 25 bp, Homo sapien
ccaatagttatagacttggcagtga

SEQ ID NO: 65478 - DNA, 25 bp, Homo sapien
ccaatagttatacacttggcagtga

SEQ ID NO: 65479 - DNA, 25 bp, Homo sapien
acaaacgtttgtcacttttgggtgt

SEQ ID NO: 65480 - DNA, 25 bp, Homo sapien
acaaacgtttgtgacttttgggtgt

SEQ ID NO: 65481 - DNA, 25 bp, Homo sapien
acataattaggtcttccttcgttgt

SEQ ID NO: 65482 - DNA, 25 bp, Homo sapien
acataattaggtgttccttcgttgt

SEQ ID NO: 65483 - DNA, 25 bp, Homo sapien
gtcctcagtactcgtttccctttgc

SEQ ID NO: 65484 - DNA, 25 bp, Homo sapien
gtcctcagtactggtttccctttgc

SEQ ID NO: 65485 - DNA, 25 bp, Homo sapien
ggttcttcctgctcgggttctcgcc

SEQ ID NO: 65486 - DNA, 25 bp, Homo sapien
ggttcttcctgcacgggttctcgcc

SEQ ID NO: 65487 - DNA, 25 bp, Homo sapien
gtgcttcgtgttctttccttcaccc

SEQ ID NO: 65488 - DNA, 25 bp, Homo sapien
gtgcttcgtgttgtttccttcaccc

SEQ ID NO: 65489 - DNA, 25 bp, Homo sapien
acagcgtttggcttgtcgcccgcaa

SEQ ID NO: 65490 - DNA, 25 bp, Homo sapien
acagcgtttggcatgtcgcccgcaa

SEQ ID NO: 65491 - DNA, 25 bp, Homo sapien
tatattttgtgcacgtcaactgaaa

SEQ ID NO: 65492 - DNA, 25 bp, Homo sapien
tatattttgtgctcgtcaactgaaa

SEQ ID NO: 65493 - DNA, 25 bp, Homo sapien
gacctttgtgcgtatcatttatgta

SEQ ID NO: 65494 - DNA, 25 bp, Homo sapien
gacctttgtgcgaatcatttatgta

SEQ ID NO: 65495 - DNA, 25 bp, Homo sapien
tcctttcgtcggagcaagaatcgat

SEQ ID NO: 65496 - DNA, 25 bp, Homo sapien
tcctttcgtcggtgcaagaatcgat

SEQ ID NO: 65497 - DNA, 25 bp, Homo sapien
actccagacccatgggaaatgtact

SEQ ID NO: 65498 - DNA, 25 bp, Homo sapien
actccagacccaagggaaatgtact

SEQ ID NO: 65499 - DNA, 25 bp, Homo sapien
gtaaagatcatccataaaaccgtgt

SEQ ID NO: 65500 - DNA, 25 bp, Homo sapien
gtaaagatcatcgataaaaccgtgt

SEQ ID NO: 65501 - DNA, 25 bp, Homo sapien
aataaaccgcggtagctacaagtgt

SEQ ID NO: 65502 - DNA, 25 bp, Homo sapien
aataaaccgcggaagctacaagtgt

SEQ ID NO: 65503 - DNA, 25 bp, Homo sapien
accagaaccacgaggtccagcacgt

SEQ ID NO: 65504 - DNA, 25 bp, Homo sapien
accagaaccacgtggtccagcacgt

SEQ ID NO: 65505 - DNA, 25 bp, Homo sapien
gtgtcggatcccttttcctacggag

SEQ ID NO: 65506 - DNA, 25 bp, Homo sapien
gtgtcggatcccatttcctacggag

SEQ ID NO: 65507 - DNA, 25 bp, Homo sapien
agaaactggggtcgtagcacgtaga

SEQ ID NO: 65508 - DNA, 25 bp, Homo sapien
agaaactggggtggtagcacgtaga

SEQ ID NO: 65509 - DNA, 25 bp, Homo sapien
ctcctccgtcctgtaggggtttcta

SEQ ID NO: 65510 - DNA, 25 bp, Homo sapien
ctcctccgtcctctaggggtttcta

SEQ ID NO: 65511 - DNA, 25 bp, Homo sapien
tcccctacctagagtgttgattcat

SEQ ID NO: 65512 - DNA, 25 bp, Homo sapien
tcccctacctagtgtgttgattcat

SEQ ID NO: 65513 - DNA, 25 bp, Homo sapien
tcgtgccgacctctgggtgctggac

SEQ ID NO: 65514 - DNA, 25 bp, Homo sapien
tcgtgccgacctgtgggtgctggac

SEQ ID NO: 65515 - DNA, 25 bp, Homo sapien
cctgctcaccttgtgttcgttttat

SEQ ID NO: 65516 - DNA, 25 bp, Homo sapien
cctgctcaccttctgttcgttttat

SEQ ID NO: 65517 - DNA, 25 bp, Homo sapien
ggacgtcccttctccgtgatcttat

SEQ ID NO: 65518 - DNA, 25 bp, Homo sapien
ggacgtcccttcaccgtgatcttat

SEQ ID NO: 65519 - DNA, 25 bp, Homo sapien
ttagacaacctttaaacagaccttt

SEQ ID NO: 65520 - DNA, 25 bp, Homo sapien
ttagacaaccttaaaacagaccttt

SEQ ID NO: 65521 - DNA, 25 bp, Homo sapien
accttacggtaggagtatttatact

SEQ ID NO: 65522 - DNA, 25 bp, Homo sapien
accttacggtagcagtatttatact

SEQ ID NO: 65523 - DNA, 25 bp, Homo sapien
aatagtctctcttgtgtgatttgtc

SEQ ID NO: 65524 - DNA, 25 bp, Homo sapien
aatagtctctctagtgtgatttgtc

SEQ ID NO: 65525 - DNA, 25 bp, Homo sapien
attggactgttttacggtgtatgtc

SEQ ID NO: 65526 - DNA, 25 bp, Homo sapien
attggactgtttaacggtgtatgtc

SEQ ID NO: 65527 - DNA, 25 bp, Homo sapien
acacctggtctgtgtcctcggttcc

SEQ ID NO: 65528 - DNA, 25 bp, Homo sapien
acacctggtctgagtcctcggttcc

SEQ ID NO: 65529 - DNA, 25 bp, Homo sapien
gtctccgatcttagtccatgtaatc

SEQ ID NO: 65530 - DNA, 25 bp, Homo sapien
gtctccgatctttgtccatgtaatc

SEQ ID NO: 65531 - DNA, 25 bp, Homo sapien
gtatcacgttttttcgacaataatg

SEQ ID NO: 65532 - DNA, 25 bp, Homo sapien
gtatcacgttttatcgacaataatg

SEQ ID NO: 65533 - DNA, 25 bp, Homo sapien
ccgcctcttcggtgatacacaatgt

SEQ ID NO: 65534 - DNA, 25 bp, Homo sapien
ccgcctcttcggagatacacaatgt

SEQ ID NO: 65535 - DNA, 25 bp, Homo sapien
atctctaaggggatctactacgatt

SEQ ID NO: 65536 - DNA, 25 bp, Homo sapien
atctctaaggggttctactacgatt

SEQ ID NO: 65537 - DNA, 25 bp, Homo sapien
aattcttagggtactgttacgcgtt

SEQ ID NO: 65538 - DNA, 25 bp, Homo sapien
aattcttagggttctgttacgcgtt

SEQ ID NO: 65539 - DNA, 25 bp, Homo sapien
accatgtattaatgccgtgtttata

SEQ ID NO: 65540 - DNA, 25 bp, Homo sapien
accatgtattaaagccgtgtttata

SEQ ID NO: 65541 - DNA, 25 bp, Homo sapien
caatagtgtcaaaaccattgaacgt

SEQ ID NO: 65542 - DNA, 25 bp, Homo sapien
caatagtgtcaataccattgaacgt

SEQ ID NO: 65543 - DNA, 25 bp, Homo sapien
gtgtaaaatgatgtctccataaact

SEQ ID NO: 65544 - DNA, 25 bp, Homo sapien
gtgtaaaatgatctctccataaact

SEQ ID NO: 65545 - DNA, 25 bp, Homo sapien
gtttgtcataaactcctgatagatc

SEQ ID NO: 65546 - DNA, 25 bp, Homo sapien
gtttgtcataaagtcctgatagatc

SEQ ID NO: 65547 - DNA, 25 bp, Homo sapien
cgatggtaaagcataaacttttatc

SEQ ID NO: 65548 - DNA, 25 bp, Homo sapien
cgatggtaaagcttaaacttttatc

SEQ ID NO: 65549 - DNA, 25 bp, Homo sapien
tcatcagaagaagtttaccttggtc

SEQ ID NO: 65550 - DNA, 25 bp, Homo sapien
tcatcagaagaactttaccttggtc

SEQ ID NO: 65551 - DNA, 25 bp, Homo sapien
attaggacaaatgtgcactgacgtc

SEQ ID NO: 65552 - DNA, 25 bp, Homo sapien
attaggacaaatctgcactgacgtc

SEQ ID NO: 65553 - DNA, 25 bp, Homo sapien
gtcaaacaaggtttttctagtctct

SEQ ID NO: 65554 - DNA, 25 bp, Homo sapien
gtcaaacaaggtatttctagtctct

SEQ ID NO: 65555 - DNA, 25 bp, Homo sapien
taccaggaaggtcagagaacaactc

SEQ ID NO: 65556 - DNA, 25 bp, Homo sapien
taccaggaaggtgagagaacaactc

SEQ ID NO: 65557 - DNA, 25 bp, Homo sapien
tacacgatgagaagtgaaaccttcc

SEQ ID NO: 65558 - DNA, 25 bp, Homo sapien
tacacgatgagatgtgaaaccttcc

SEQ ID NO: 65559 - DNA, 25 bp, Homo sapien
ctacatgaccgtggttgatgtggtt

SEQ ID NO: 65560 - DNA, 25 bp, Homo sapien
ctacatgaccgtcgttgatgtggtt

SEQ ID NO: 65561 - DNA, 25 bp, Homo sapien
gtctctaccctggagtgtatttttc

SEQ ID NO: 65562 - DNA, 25 bp, Homo sapien
gtctctaccctgcagtgtatttttc

SEQ ID NO: 65563 - DNA, 25 bp, Homo sapien
gtcgttcacctctgaaattttgtag

SEQ ID NO: 65564 - DNA, 25 bp, Homo sapien
gtcgttcacctcagaaattttgtag

SEQ ID NO: 65565 - DNA, 25 bp, Homo sapien
gggtttccctcataatgtctctctc

SEQ ID NO: 65566 - DNA, 25 bp, Homo sapien
gggtttccctcaaaatgtctctctc

SEQ ID NO: 65567 - DNA, 25 bp, Homo sapien
ggactcttgtccaaaaagtctcttt

SEQ ID NO: 65568 - DNA, 25 bp, Homo sapien
ggactcttgtcctaaaagtctcttt

SEQ ID NO: 65569 - DNA, 25 bp, Homo sapien
accttaggtaatttgtttcgctcat

SEQ ID NO: 65570 - DNA, 25 bp, Homo sapien
accttaggtaatatgtttcgctcat

SEQ ID NO: 65571 - DNA, 25 bp, Homo sapien
gaagtcatgaaataactttctttcg

SEQ ID NO: 65572 - DNA, 25 bp, Homo sapien
gaagtcatgaaaaaactttctttcg

SEQ ID NO: 65573 - DNA, 25 bp, Homo sapien
actggatagagaacagtatactttc

SEQ ID NO: 65574 - DNA, 25 bp, Homo sapien
actggatagagatcagtatactttc

SEQ ID NO: 65575 - DNA, 25 bp, Homo sapien
tatgattgacgtggatggtttgtgc

SEQ ID NO: 65576 - DNA, 25 bp, Homo sapien
tatgattgacgtcgatggtttgtgc

SEQ ID NO: 65577 - DNA, 25 bp, Homo sapien
ttagattgacccttcagtcggttcc

SEQ ID NO: 65578 - DNA, 25 bp, Homo sapien
ttagattgacccatcagtcggttcc

SEQ ID NO: 65579 - DNA, 25 bp, Homo sapien
gacaaatatgctacaaaaggtctta

SEQ ID NO: 65580 - DNA, 25 bp, Homo sapien
gacaaatatgcttcaaaaggtctta

SEQ ID NO: 65581 - DNA, 25 bp, Homo sapien
aaattgttacagactgaagtcttac

SEQ ID NO: 65582 - DNA, 25 bp, Homo sapien
aaattgttacagtctgaagtcttac

SEQ ID NO: 65583 - DNA, 25 bp, Homo sapien
ataatcccttcttgtgaagtcttag

SEQ ID NO: 65584 - DNA, 25 bp, Homo sapien
ataatcccttctagtgaagtcttag

SEQ ID NO: 65585 - DNA, 25 bp, Homo sapien
agttcctccagtttcgtcaaacatg

SEQ ID NO: 65586 - DNA, 25 bp, Homo sapien
agttcctccagtatcgtcaaacatg

SEQ ID NO: 65587 - DNA, 25 bp, Homo sapien
ttttgtcatactatacttccctaca

SEQ ID NO: 65588 - DNA, 25 bp, Homo sapien
ttttgtcatactttacttccctaca

SEQ ID NO: 65589 - DNA, 25 bp, Homo sapien
acccccgaaggactcttacagtcta

SEQ ID NO: 65590 - DNA, 25 bp, Homo sapien
acccccgaaggagtcttacagtcta

SEQ ID NO: 65591 - DNA, 25 bp, Homo sapien
atactgtgacgatcttaccaatgtt

SEQ ID NO: 65592 - DNA, 25 bp, Homo sapien
atactgtgacgaacttaccaatgtt

SEQ ID NO: 65593 - DNA, 25 bp, Homo sapien
atgtaggttgacctttcactagact

SEQ ID NO: 65594 - DNA, 25 bp, Homo sapien
atgtaggttgacgtttcactagact

SEQ ID NO: 65595 - DNA, 25 bp, Homo sapien
ttactgttgtcctgtgtctacgtta

SEQ ID NO: 65596 - DNA, 25 bp, Homo sapien
ttactgttgtccagtgtctacgtta

SEQ ID NO: 65597 - DNA, 25 bp, Homo sapien
tactcacttgttacagtcatagttg

SEQ ID NO: 65598 - DNA, 25 bp, Homo sapien
tactcacttgtttcagtcatagttg

SEQ ID NO: 65599 - DNA, 25 bp, Homo sapien
atctttactttgtactccaggttcg

SEQ ID NO: 65600 - DNA, 25 bp, Homo sapien
atctttactttgaactccaggttcg

SEQ ID NO: 65601 - DNA, 25 bp, Homo sapien
tcgatacgtttacatctaaggtctt

SEQ ID NO: 65602 - DNA, 25 bp, Homo sapien
tcgatacgtttagatctaaggtctt

SEQ ID NO: 65603 - DNA, 25 bp, Homo sapien
ttcactagtcattgggaatgtctgt

SEQ ID NO: 65604 - DNA, 25 bp, Homo sapien
ttcactagtcatagggaatgtctgt

SEQ ID NO: 65605 - DNA, 25 bp, Homo sapien
gtttcttgtaaagatgtacactttt

SEQ ID NO: 65606 - DNA, 25 bp, Homo sapien
gtttcttgtaaacatgtacactttt

SEQ ID NO: 65607 - DNA, 25 bp, Homo sapien
attccttaaagacctctgacatgtt

SEQ ID NO: 65608 - DNA, 25 bp, Homo sapien
attccttaaagagctctgacatgtt

SEQ ID NO: 65609 - DNA, 25 bp, Homo sapien
tatttacactaggtttacacaggtg

SEQ ID NO: 65610 - DNA, 25 bp, Homo sapien
tatttacactagctttacacaggtg

SEQ ID NO: 65611 - DNA, 25 bp, Homo sapien
tttagttcaccgtctataaatgtag

SEQ ID NO: 65612 - DNA, 25 bp, Homo sapien
tttagttcaccgactataaatgtag

SEQ ID NO: 65613 - DNA, 25 bp, Homo sapien
cctcctcggcagtcacgtaagcttt

SEQ ID NO: 65614 - DNA, 25 bp, Homo sapien
cctcctcggcagacacgtaagcttt

SEQ ID NO: 65615 - DNA, 25 bp, Homo sapien
ggtaacacacctgaacactagtagt

SEQ ID NO: 65616 - DNA, 25 bp, Homo sapien
ggtaacacacctcaacactagtagt

SEQ ID NO: 65617 - DNA, 25 bp, Homo sapien
ttacgtgtatgttacctctaaaagg

SEQ ID NO: 65618 - DNA, 25 bp, Homo sapien
ttacgtgtatgtaacctctaaaagg

SEQ ID NO: 65619 - DNA, 25 bp, Homo sapien
atttgaacctacgacttcaagtagg

SEQ ID NO: 65620 - DNA, 25 bp, Homo sapien
atttgaacctaccacttcaagtagg

SEQ ID NO: 65621 - DNA, 25 bp, Homo sapien
ttgtcacgacgtcattcgacagagg

SEQ ID NO: 65622 - DNA, 25 bp, Homo sapien
ttgtcacgacgtgattcgacagagg

SEQ ID NO: 65623 - DNA, 25 bp, Homo sapien
cgacctagtcaagatctgtacataa

SEQ ID NO: 65624 - DNA, 25 bp, Homo sapien
cgacctagtcaacatctgtacataa

SEQ ID NO: 65625 - DNA, 25 bp, Homo sapien
gagggtctggagatacgtgcacacc

SEQ ID NO: 65626 - DNA, 25 bp, Homo sapien
gagggtctggagttacgtgcacacc

SEQ ID NO: 65627 - DNA, 25 bp, Homo sapien
tcgagtcgtaaaggtgtggttcgtc

SEQ ID NO: 65628 - DNA, 25 bp, Homo sapien
tcgagtcgtaaacgtgtggttcgtc

SEQ ID NO: 65629 - DNA, 25 bp, Homo sapien
cctagtagaactgtgttttagtact

SEQ ID NO: 65630 - DNA, 25 bp, Homo sapien
cctagtagaactctgttttagtact

SEQ ID NO: 65631 - DNA, 25 bp, Homo sapien
attttacgacttttgtatgtgtcac

SEQ ID NO: 65632 - DNA, 25 bp, Homo sapien
attttacgacttatgtatgtgtcac

SEQ ID NO: 65633 - DNA, 25 bp, Homo sapien
ctttggtgactgactgactgattgt

SEQ ID NO: 65634 - DNA, 25 bp, Homo sapien
ctttggtgactgtctgactgattgt

SEQ ID NO: 65635 - DNA, 25 bp, Homo sapien
tttggagaccattcttcgtgtcttg

SEQ ID NO: 65636 - DNA, 25 bp, Homo sapien
tttggagaccatacttcgtgtcttg

SEQ ID NO: 65637 - DNA, 25 bp, Homo sapien
ttgacaagaactcaattcggttcat

SEQ ID NO: 65638 - DNA, 25 bp, Homo sapien
ttgacaagaactgaattcggttcat

SEQ ID NO: 65639 - DNA, 25 bp, Homo sapien
tgacagaggacatctttagactcaa

SEQ ID NO: 65640 - DNA, 25 bp, Homo sapien
tgacagaggacaactttagactcaa

SEQ ID NO: 65641 - DNA, 25 bp, Homo sapien
tttgaagggtagcatctggacccag

SEQ ID NO: 65642 - DNA, 25 bp, Homo sapien
tttgaagggtaggatctggacccag

SEQ ID NO: 65643 - DNA, 25 bp, Homo sapien
tgactgtaagtgtggtacgacgaac

SEQ ID NO: 65644 - DNA, 25 bp, Homo sapien
tgactgtaagtgaggtacgacgaac

SEQ ID NO: 65645 - DNA, 25 bp, Homo sapien
acgtataagagtaacaggtacctac

SEQ ID NO: 65646 - DNA, 25 bp, Homo sapien
acgtataagagttacaggtacctac

SEQ ID NO: 65647 - DNA, 25 bp, Homo sapien
gtacatagtgaaaacagcgtacttc

SEQ ID NO: 65648 - DNA, 25 bp, Homo sapien
gtacatagtgaatacagcgtacttc

SEQ ID NO: 65649 - DNA, 25 bp, Homo sapien
actattcgtccttacggcaggtcgt

SEQ ID NO: 65650 - DNA, 25 bp, Homo sapien
actattcgtcctaacggcaggtcgt

SEQ ID NO: 65651 - DNA, 25 bp, Homo sapien
ttctagtaacgaggaggactcgcgt

SEQ ID NO: 65652 - DNA, 25 bp, Homo sapien
ttctagtaacgacgaggactcgcgt

SEQ ID NO: 65653 - DNA, 25 bp, Homo sapien
tggtgttttgttacgctgaatacgc

SEQ ID NO: 65654 - DNA, 25 bp, Homo sapien
tggtgttttgtttcgctgaatacgc

SEQ ID NO: 65655 - DNA, 25 bp, Homo sapien
cggtgtgtgctacttccacgggcgt

SEQ ID NO: 65656 - DNA, 25 bp, Homo sapien
cggtgtgtgctagttccacgggcgt

SEQ ID NO: 65657 - DNA, 25 bp, Homo sapien
cgttcgtgtggtgggtggagggcgt

SEQ ID NO: 65658 - DNA, 25 bp, Homo sapien
cgttcgtgtggtcggtggagggcgt

SEQ ID NO: 65659 - DNA, 25 bp, Homo sapien
attgtatacctcaaaattctggtga

SEQ ID NO: 65660 - DNA, 25 bp, Homo sapien
attgtatacctctaaattctggtga

SEQ ID NO: 65661 - DNA, 25 bp, Homo sapien
agtccttgaacataagttctcagga

SEQ ID NO: 65662 - DNA, 25 bp, Homo sapien
agtccttgaacaaaagttctcagga

SEQ ID NO: 65663 - DNA, 25 bp, Homo sapien
ttgtaaaagatgtctgtctccgttc

SEQ ID NO: 65664 - DNA, 25 bp, Homo sapien
ttgtaaaagatgactgtctccgttc

SEQ ID NO: 65665 - DNA, 25 bp, Homo sapien
ggcaggccatcggacgacggaaacg

SEQ ID NO: 65666 - DNA, 25 bp, Homo sapien
ggcaggccatcgcacgacggaaacg

SEQ ID NO: 65667 - DNA, 25 bp, Homo sapien
gtgaaaatgttcggcgtttccgtcg

SEQ ID NO: 65668 - DNA, 25 bp, Homo sapien
gtgaaaatgttccgcgtttccgtcg

SEQ ID NO: 65669 - DNA, 25 bp, Homo sapien
accttgctccactcggttaataggg

SEQ ID NO: 65670 - DNA, 25 bp, Homo sapien
accttgctccacacggttaataggg

SEQ ID NO: 65671 - DNA, 25 bp, Homo sapien
tgtacagatgtctctactaaatgtg

SEQ ID NO: 65672 - DNA, 25 bp, Homo sapien
tgtacagatgtcactactaaatgtg

SEQ ID NO: 65673 - DNA, 25 bp, Homo sapien
ttgaaatgtagtccacagaggttct

SEQ ID NO: 65674 - DNA, 25 bp, Homo sapien
ttgaaatgtagtgcacagaggttct

SEQ ID NO: 65675 - DNA, 25 bp, Homo sapien
gaactagtagtatctacgcccgtca

SEQ ID NO: 65676 - DNA, 25 bp, Homo sapien
gaactagtagtaactacgcccgtca

SEQ ID NO: 65677 - DNA, 25 bp, Homo sapien
gcgacgacagtattctgaccgtcat

SEQ ID NO: 65678 - DNA, 25 bp, Homo sapien
gcgacgacagtaatctgaccgtcat

SEQ ID NO: 65679 - DNA, 25 bp, Homo sapien
ccaacgactagaacccgcctatagt

SEQ ID NO: 65680 - DNA, 25 bp, Homo sapien
ccaacgactagatcccgcctatagt

SEQ ID NO: 65681 - DNA, 25 bp, Homo sapien
actcctatgtctccttgtgctactg

SEQ ID NO: 65682 - DNA, 25 bp, Homo sapien
actcctatgtctgcttgtgctactg

SEQ ID NO: 65683 - DNA, 25 bp, Homo sapien
caaccctatgacgtcacttgttctg

SEQ ID NO: 65684 - DNA, 25 bp, Homo sapien
caaccctatgacctcacttgttctg

SEQ ID NO: 65685 - DNA, 25 bp, Homo sapien
accgagttatgactaccttcattag

SEQ ID NO: 65686 - DNA, 25 bp, Homo sapien
accgagttatgagtaccttcattag

SEQ ID NO: 65687 - DNA, 25 bp, Homo sapien
aggaagttagaggacctcgaaacat

SEQ ID NO: 65688 - DNA, 25 bp, Homo sapien
aggaagttagagcacctcgaaacat

SEQ ID NO: 65689 - DNA, 25 bp, Homo sapien
agaaacgttctctcgtccgaaagag

SEQ ID NO: 65690 - DNA, 25 bp, Homo sapien
agaaacgttctcacgtccgaaagag

SEQ ID NO: 65691 - DNA, 25 bp, Homo sapien
catgtactgttccacgccgagggat

SEQ ID NO: 65692 - DNA, 25 bp, Homo sapien
catgtactgttcgacgccgagggat

SEQ ID NO: 65693 - DNA, 25 bp, Homo sapien
tagatgttcctatcggtgtgctagt

SEQ ID NO: 65694 - DNA, 25 bp, Homo sapien
tagatgttcctaacggtgtgctagt

SEQ ID NO: 65695 - DNA, 25 bp, Homo sapien
agactgtcagaaacggtaggtctgt

SEQ ID NO: 65696 - DNA, 25 bp, Homo sapien
agactgtcagaatcggtaggtctgt

SEQ ID NO: 65697 - DNA, 25 bp, Homo sapien
ataaaacactgtgacttagcggttt

SEQ ID NO: 65698 - DNA, 25 bp, Homo sapien
ataaaacactgtcacttagcggttt

SEQ ID NO: 65699 - DNA, 25 bp, Homo sapien
tacaagaatctattgttccgtgtcg

SEQ ID NO: 65700 - DNA, 25 bp, Homo sapien
tacaagaatctaatgttccgtgtcg

SEQ ID NO: 65701 - DNA, 25 bp, Homo sapien
aggaatacacgaaccttctctacga

SEQ ID NO: 65702 - DNA, 25 bp, Homo sapien
aggaatacacgatccttctctacga

SEQ ID NO: 65703 - DNA, 25 bp, Homo sapien
ggaagtacacgaaggcgtcgctcga

SEQ ID NO: 65704 - DNA, 25 bp, Homo sapien
ggaagtacacgatggcgtcgctcga

SEQ ID NO: 65705 - DNA, 25 bp, Homo sapien
aagttgaagtagaatagcatccaca

SEQ ID NO: 65706 - DNA, 25 bp, Homo sapien
aagttgaagtagtatagcatccaca

SEQ ID NO: 65707 - DNA, 25 bp, Homo sapien
gacaggagtcagaccctgtccactc

SEQ ID NO: 65708 - DNA, 25 bp, Homo sapien
gacaggagtcagtccctgtccactc

SEQ ID NO: 65709 - DNA, 25 bp, Homo sapien
aggatgtcggcgacggcactcatcg

SEQ ID NO: 65710 - DNA, 25 bp, Homo sapien
aggatgtcggcgtcggcactcatcg

SEQ ID NO: 65711 - DNA, 25 bp, Homo sapien
gagctataggtgacagaacctcgtc

SEQ ID NO: 65712 - DNA, 25 bp, Homo sapien
gagctataggtgtcagaacctcgtc

SEQ ID NO: 65713 - DNA, 25 bp, Homo sapien
gagacggaaggcaagaagctgtcac

SEQ ID NO: 65714 - DNA, 25 bp, Homo sapien
gagacggaaggctagaagctgtcac

SEQ ID NO: 65715 - DNA, 25 bp, Homo sapien
acagggtcttaatgattgttactct

SEQ ID NO: 65716 - DNA, 25 bp, Homo sapien
acagggtcttaaagattgttactct

SEQ ID NO: 65717 - DNA, 25 bp, Homo sapien
taaaatgtcttatgtagtctttttg

SEQ ID NO: 65718 - DNA, 25 bp, Homo sapien
taaaatgtcttaagtagtctttttg

SEQ ID NO: 65719 - DNA, 25 bp, Homo sapien
aaggaaattccgatgtcttttagac

SEQ ID NO: 65720 - DNA, 25 bp, Homo sapien
aaggaaattccgttgtcttttagac

SEQ ID NO: 65721 - DNA, 25 bp, Homo sapien
gtttcagtcccttttcgtctataag

SEQ ID NO: 65722 - DNA, 25 bp, Homo sapien
gtttcagtccctattcgtctataag

SEQ ID NO: 65723 - DNA, 25 bp, Homo sapien
cttactgtctactcagttttgaagt

SEQ ID NO: 65724 - DNA, 25 bp, Homo sapien
cttactgtctacacagttttgaagt

SEQ ID NO: 65725 - DNA, 25 bp, Homo sapien
gtcagtttatccaacgatatgtcct

SEQ ID NO: 65726 - DNA, 25 bp, Homo sapien
gtcagtttatcctacgatatgtcct

SEQ ID NO: 65727 - DNA, 25 bp, Homo sapien
gacgacaccaatcaggtgactcccg

SEQ ID NO: 65728 - DNA, 25 bp, Homo sapien
gacgacaccaatgaggtgactcccg

SEQ ID NO: 65729 - DNA, 25 bp, Homo sapien
gagtaacacaaacgtcctgtctccc

SEQ ID NO: 65730 - DNA, 25 bp, Homo sapien
gagtaacacaaaggtcctgtctccc

SEQ ID NO: 65731 - DNA, 25 bp, Homo sapien
ggaccactcaggtctcggtccagac

SEQ ID NO: 65732 - DNA, 25 bp, Homo sapien
ggaccactcaggactcggtccagac

SEQ ID NO: 65733 - DNA, 25 bp, Homo sapien
ggcaagggtccgtccgtcttacgag

SEQ ID NO: 65734 - DNA, 25 bp, Homo sapien
ggcaagggtccgaccgtcttacgag

SEQ ID NO: 65735 - DNA, 25 bp, Homo sapien
gtcaagggtcttcctatagctagta

SEQ ID NO: 65736 - DNA, 25 bp, Homo sapien
gtcaagggtcttgctatagctagta

SEQ ID NO: 65737 - DNA, 25 bp, Homo sapien
taggaattgtaaaccacttctagag

SEQ ID NO: 65738 - DNA, 25 bp, Homo sapien
taggaattgtaatccacttctagag

SEQ ID NO: 65739 - DNA, 25 bp, Homo sapien
acagagtttttgaatccattcgtga

SEQ ID NO: 65740 - DNA, 25 bp, Homo sapien
acagagtttttgtatccattcgtga

SEQ ID NO: 65741 - DNA, 25 bp, Homo sapien
tcaagtgtctcatttttggtcttgg

SEQ ID NO: 65742 - DNA, 25 bp, Homo sapien
tcaagtgtctcaattttggtcttgg

SEQ ID NO: 65743 - DNA, 25 bp, Homo sapien
tctgtatcaatgtttctcgtttccg

SEQ ID NO: 65744 - DNA, 25 bp, Homo sapien
tctgtatcaatgattctcgtttccg

SEQ ID NO: 65745 - DNA, 25 bp, Homo sapien
cgtttgttcccgttttgtaaatcac

SEQ ID NO: 65746 - DNA, 25 bp, Homo sapien
cgtttgttcccgatttgtaaatcac

SEQ ID NO: 65747 - DNA, 25 bp, Homo sapien
tctgtggtcccttgtctctcttcta

SEQ ID NO: 65748 - DNA, 25 bp, Homo sapien
tctgtggtccctagtctctcttcta

SEQ ID NO: 65749 - DNA, 25 bp, Homo sapien
gtgtgggtccggtgtgtcttctcta

SEQ ID NO: 65750 - DNA, 25 bp, Homo sapien
gtgtgggtccggagtgtcttctcta

SEQ ID NO: 65751 - DNA, 25 bp, Homo sapien
tcggagggccgaggagtccttcctc

SEQ ID NO: 65752 - DNA, 25 bp, Homo sapien
tcggagggccgacgagtccttcctc

SEQ ID NO: 65753 - DNA, 25 bp, Homo sapien
gaaggtgtctgaagcccttcttcgt

SEQ ID NO: 65754 - DNA, 25 bp, Homo sapien
gaaggtgtctgatgcccttcttcgt

SEQ ID NO: 65755 - DNA, 25 bp, Homo sapien
tttgtcgtcatgataattacgttct

SEQ ID NO: 65756 - DNA, 25 bp, Homo sapien
tttgtcgtcatgttaattacgttct

SEQ ID NO: 65757 - DNA, 25 bp, Homo sapien
agtttacacaggttctataacgata

SEQ ID NO: 65758 - DNA, 25 bp, Homo sapien
agtttacacaggatctataacgata

SEQ ID NO: 65759 - DNA, 25 bp, Homo sapien
gggtaaagatagttgatcctcgacc

SEQ ID NO: 65760 - DNA, 25 bp, Homo sapien
gggtaaagatagatgatcctcgacc

SEQ ID NO: 65761 - DNA, 25 bp, Homo sapien
gtcggcacacatgaaatccgacacc

SEQ ID NO: 65762 - DNA, 25 bp, Homo sapien
gtcggcacacatcaaatccgacacc

SEQ ID NO: 65763 - DNA, 25 bp, Homo sapien
cttcagataaatgtgttctcgaaca

SEQ ID NO: 65764 - DNA, 25 bp, Homo sapien
cttcagataaatctgttctcgaaca

SEQ ID NO: 65765 - DNA, 25 bp, Homo sapien
aaaagagtacctttaccgtgtctat

SEQ ID NO: 65766 - DNA, 25 bp, Homo sapien
aaaagagtacctataccgtgtctat

SEQ ID NO: 65767 - DNA, 25 bp, Homo sapien
atacaaagccgtactaccggtaagt

SEQ ID NO: 65768 - DNA, 25 bp, Homo sapien
atacaaagccgttctaccggtaagt

SEQ ID NO: 65769 - DNA, 25 bp, Homo sapien
agaggaataatagtctctccggaca

SEQ ID NO: 65770 - DNA, 25 bp, Homo sapien
agaggaataatactctctccggaca

SEQ ID NO: 65771 - DNA, 25 bp, Homo sapien
aggtaacactaactttgtcgttcga

SEQ ID NO: 65772 - DNA, 25 bp, Homo sapien
aggtaacactaagtttgtcgttcga

SEQ ID NO: 65773 - DNA, 25 bp, Homo sapien
tctatcctcgtagttctgtagttgc

SEQ ID NO: 65774 - DNA, 25 bp, Homo sapien
tctatcctcgtacttctgtagttgc

SEQ ID NO: 65775 - DNA, 25 bp, Homo sapien
ctgtcgtcccggaatccttttacac

SEQ ID NO: 65776 - DNA, 25 bp, Homo sapien
ctgtcgtcccggtatccttttacac

SEQ ID NO: 65777 - DNA, 25 bp, Homo sapien
gcgaactcccggagtcggtggtccc

SEQ ID NO: 65778 - DNA, 25 bp, Homo sapien
gcgaactcccggtgtcggtggtccc

SEQ ID NO: 65779 - DNA, 25 bp, Homo sapien
tccgactcgcggaaggacgggttcc

SEQ ID NO: 65780 - DNA, 25 bp, Homo sapien
tccgactcgcggtaggacgggttcc

SEQ ID NO: 65781 - DNA, 25 bp, Homo sapien
ggaaccacagagactctgaggctct

SEQ ID NO: 65782 - DNA, 25 bp, Homo sapien
ggaaccacagagtctctgaggctct

SEQ ID NO: 65783 - DNA, 25 bp, Homo sapien
ctacgtcgacgtccttcacggtgtc

SEQ ID NO: 65784 - DNA, 25 bp, Homo sapien
ctacgtcgacgtgcttcacggtgtc

SEQ ID NO: 65785 - DNA, 25 bp, Homo sapien
aataactcccggtctcgacgtaaga

SEQ ID NO: 65786 - DNA, 25 bp, Homo sapien
aataactcccggactcgacgtaaga

SEQ ID NO: 65787 - DNA, 25 bp, Homo sapien
gggaagaccccgacacagactatga

SEQ ID NO: 65788 - DNA, 25 bp, Homo sapien
gggaagaccccgtcacagactatga

SEQ ID NO: 65789 - DNA, 25 bp, Homo sapien
gcacgacccggagctcggtcgttga

SEQ ID NO: 65790 - DNA, 25 bp, Homo sapien
gcacgacccggacctcggtcgttga

SEQ ID NO: 65791 - DNA, 25 bp, Homo sapien
ggggagcggccgcccgttcatgtac

SEQ ID NO: 65792 - DNA, 25 bp, Homo sapien
ggggagcggccggccgttcatgtac

SEQ ID NO: 65793 - DNA, 25 bp, Homo sapien
ggggccgtccgtggtctcgtcctcc

SEQ ID NO: 65794 - DNA, 25 bp, Homo sapien
ggggccgtccgtcgtctcgtcctcc

SEQ ID NO: 65795 - DNA, 25 bp, Homo sapien
gtcgttggacgtctctgtgatcacg

SEQ ID NO: 65796 - DNA, 25 bp, Homo sapien
gtcgttggacgtgtctgtgatcacg

SEQ ID NO: 65797 - DNA, 25 bp, Homo sapien
ctgcctctactcttctgtgactctg

SEQ ID NO: 65798 - DNA, 25 bp, Homo sapien
ctgcctctactcatctgtgactctg

SEQ ID NO: 65799 - DNA, 25 bp, Homo sapien
gacactgtctgtcgtcatggagtca

SEQ ID NO: 65800 - DNA, 25 bp, Homo sapien
gacactgtctgtggtcatggagtca

SEQ ID NO: 65801 - DNA, 25 bp, Homo sapien
gaacgttgtccttctttgtagttac

SEQ ID NO: 65802 - DNA, 25 bp, Homo sapien
gaacgttgtcctactttgtagttac

SEQ ID NO: 65803 - DNA, 25 bp, Homo sapien
acttttaccaacgtttcggtgttct

SEQ ID NO: 65804 - DNA, 25 bp, Homo sapien
acttttaccaacctttcggtgttct

SEQ ID NO: 65805 - DNA, 25 bp, Homo sapien
tttgtctcacaatgttcctgtatgt

SEQ ID NO: 65806 - DNA, 25 bp, Homo sapien
tttgtctcacaaagttcctgtatgt

SEQ ID NO: 65807 - DNA, 25 bp, Homo sapien
tgttctttgatcaagtaccccgatg

SEQ ID NO: 65808 - DNA, 25 bp, Homo sapien
tgttctttgatctagtaccccgatg

SEQ ID NO: 65809 - DNA, 25 bp, Homo sapien
atttacaactctcatttatacggga

SEQ ID NO: 65810 - DNA, 25 bp, Homo sapien
atttacaactctgatttatacggga

SEQ ID NO: 65811 - DNA, 25 bp, Homo sapien
ttgtcgatttcttgtctacaggtgc

SEQ ID NO: 65812 - DNA, 25 bp, Homo sapien
ttgtcgatttctagtctacaggtgc

SEQ ID NO: 65813 - DNA, 25 bp, Homo sapien
ccgggactccgtgtttacgtttgtc

SEQ ID NO: 65814 - DNA, 25 bp, Homo sapien
ccgggactccgtctttacgtttgtc

SEQ ID NO: 65815 - DNA, 25 bp, Homo sapien
caaagtgaccagtttttagtttgac

SEQ ID NO: 65816 - DNA, 25 bp, Homo sapien
caaagtgaccagattttagtttgac

SEQ ID NO: 65817 - DNA, 25 bp, Homo sapien
tccgggcataagtccttgttgtacc

SEQ ID NO: 65818 - DNA, 25 bp, Homo sapien
tccgggcataagaccttgttgtacc

SEQ ID NO: 65819 - DNA, 25 bp, Homo sapien
gttacttagggatgcctggtcgtca

SEQ ID NO: 65820 - DNA, 25 bp, Homo sapien
gttacttagggaagcctggtcgtca

SEQ ID NO: 65821 - DNA, 25 bp, Homo sapien
gacaactcttggtccagtctagtcc

SEQ ID NO: 65822 - DNA, 25 bp, Homo sapien
gacaactcttggaccagtctagtcc

SEQ ID NO: 65823 - DNA, 25 bp, Homo sapien
tcgtcaccgattacaacaacaggag

SEQ ID NO: 65824 - DNA, 25 bp, Homo sapien
tcgtcaccgatttcaacaacaggag

SEQ ID NO: 65825 - DNA, 25 bp, Homo sapien
ccctaacgttattcagtcaaatggt

SEQ ID NO: 65826 - DNA, 25 bp, Homo sapien
ccctaacgttatacagtcaaatggt

SEQ ID NO: 65827 - DNA, 25 bp, Homo sapien
tccaatatactatgaccgatttgag

SEQ ID NO: 65828 - DNA, 25 bp, Homo sapien
tccaatatactaagaccgatttgag

SEQ ID NO: 65829 - DNA, 25 bp, Homo sapien
atttctgaaactagccgatagtttt

SEQ ID NO: 65830 - DNA, 25 bp, Homo sapien
atttctgaaacttgccgatagtttt

SEQ ID NO: 65831 - DNA, 25 bp, Homo sapien
tcgtccacggtcgacacagcctgta

SEQ ID NO: 65832 - DNA, 25 bp, Homo sapien
tcgtccacggtccacacagcctgta

SEQ ID NO: 65833 - DNA, 25 bp, Homo sapien
gagagacccggtcaggaggaccctc

SEQ ID NO: 65834 - DNA, 25 bp, Homo sapien
gagagacccggtgaggaggaccctc

SEQ ID NO: 65835 - DNA, 25 bp, Homo sapien
gcgcgaacattaagcgagggcctcg

SEQ ID NO: 65836 - DNA, 25 bp, Homo sapien
gcgcgaacattatgcgagggcctcg

SEQ ID NO: 65837 - DNA, 25 bp, Homo sapien
gtcagaccatctcagaagattttac

SEQ ID NO: 65838 - DNA, 25 bp, Homo sapien
gtcagaccatctgagaagattttac

SEQ ID NO: 65839 - DNA, 25 bp, Homo sapien
gtcagaacattttaggactcttaca

SEQ ID NO: 65840 - DNA, 25 bp, Homo sapien
gtcagaacatttaaggactcttaca

SEQ ID NO: 65841 - DNA, 25 bp, Homo sapien
ctcccactttgtgagtggatcacac

SEQ ID NO: 65842 - DNA, 25 bp, Homo sapien
ctcccactttgtcagtggatcacac

SEQ ID NO: 65843 - DNA, 25 bp, Homo sapien
gttcacccgtagttctaggggctcc

SEQ ID NO: 65844 - DNA, 25 bp, Homo sapien
gttcacccgtagatctaggggctcc

SEQ ID NO: 65845 - DNA, 25 bp, Homo sapien
tcgacagacgtcgagaggcgtagtc

SEQ ID NO: 65846 - DNA, 25 bp, Homo sapien
tcgacagacgtccagaggcgtagtc

SEQ ID NO: 65847 - DNA, 25 bp, Homo sapien
actaccggtggtcctccggttcgtc

SEQ ID NO: 65848 - DNA, 25 bp, Homo sapien
actaccggtggtgctccggttcgtc

SEQ ID NO: 65849 - DNA, 25 bp, Homo sapien
tcccgggtttcgttccgtgattact

SEQ ID NO: 65850 - DNA, 25 bp, Homo sapien
tcccgggtttcgatccgtgattact

SEQ ID NO: 65851 - DNA, 25 bp, Homo sapien
cctgagtaatcgtacaacattacgt

SEQ ID NO: 65852 - DNA, 25 bp, Homo sapien
cctgagtaatcgaacaacattacgt

SEQ ID NO: 65853 - DNA, 25 bp, Homo sapien
gtgtagagacctactgacgctaggt

SEQ ID NO: 65854 - DNA, 25 bp, Homo sapien
gtgtagagaccttctgacgctaggt

SEQ ID NO: 65855 - DNA, 25 bp, Homo sapien
cgggtacgagaccatctcccggtat

SEQ ID NO: 65856 - DNA, 25 bp, Homo sapien
cgggtacgagacgatctcccggtat

SEQ ID NO: 65857 - DNA, 25 bp, Homo sapien
cgttgagaccggatatacttaggta

SEQ ID NO: 65858 - DNA, 25 bp, Homo sapien
cgttgagaccggttatacttaggta

SEQ ID NO: 65859 - DNA, 25 bp, Homo sapien
gtctagagaaccaaaactaagacga

SEQ ID NO: 65860 - DNA, 25 bp, Homo sapien
gtctagagaacctaaactaagacga

SEQ ID NO: 65861 - DNA, 25 bp, Homo sapien
tctcggtgctcctggtcaggacggt

SEQ ID NO: 65862 - DNA, 25 bp, Homo sapien
tctcggtgctccaggtcaggacggt

SEQ ID NO: 65863 - DNA, 25 bp, Homo sapien
tttgtggatatttcccgacagacgg

SEQ ID NO: 65864 - DNA, 25 bp, Homo sapien
tttgtggatattacccgacagacgg

SEQ ID NO: 65865 - DNA, 25 bp, Homo sapien
tcttgggttgtgtactccagacgtg

SEQ ID NO: 65866 - DNA, 25 bp, Homo sapien
tcttgggttgtgaactccagacgtg

SEQ ID NO: 65867 - DNA, 25 bp, Homo sapien
ccgtgagtctctttttccgtaagtc

SEQ ID NO: 65868 - DNA, 25 bp, Homo sapien
ccgtgagtctctatttccgtaagtc

SEQ ID NO: 65869 - DNA, 25 bp, Homo sapien
ggtcaacgtttgtattacacgaatc

SEQ ID NO: 65870 - DNA, 25 bp, Homo sapien
ggtcaacgtttgaattacacgaatc

SEQ ID NO: 65871 - DNA, 25 bp, Homo sapien
cgaccgttccggaatcgacataaag

SEQ ID NO: 65872 - DNA, 25 bp, Homo sapien
cgaccgttccggtatcgacataaag

SEQ ID NO: 65873 - DNA, 25 bp, Homo sapien
acccgtgtagtggagtgtcataaat

SEQ ID NO: 65874 - DNA, 25 bp, Homo sapien
acccgtgtagtgcagtgtcataaat

SEQ ID NO: 65875 - DNA, 25 bp, Homo sapien
agcccgtgtaagagtatccgtaaga

SEQ ID NO: 65876 - DNA, 25 bp, Homo sapien
agcccgtgtaagtgtatccgtaaga

SEQ ID NO: 65877 - DNA, 25 bp, Homo sapien
tagagttaccgtagttttcaatatc

SEQ ID NO: 65878 - DNA, 25 bp, Homo sapien
tagagttaccgttgttttcaatatc

SEQ ID NO: 65879 - DNA, 25 bp, Homo sapien
taaatcggttcgatatatcattgac

SEQ ID NO: 65880 - DNA, 25 bp, Homo sapien
taaatcggttcgttatatcattgac

SEQ ID NO: 65881 - DNA, 25 bp, Homo sapien
ttaagaagtgctcactacttgttga

SEQ ID NO: 65882 - DNA, 25 bp, Homo sapien
ttaagaagtgctgactacttgttga

SEQ ID NO: 65883 - DNA, 25 bp, Homo sapien
cgaagtattggtactcgtccatggt

SEQ ID NO: 65884 - DNA, 25 bp, Homo sapien
cgaagtattggttctcgtccatggt

SEQ ID NO: 65885 - DNA, 25 bp, Homo sapien
tcgacatatttcttcgttaagaaga

SEQ ID NO: 65886 - DNA, 25 bp, Homo sapien
tcgacatatttcatcgttaagaaga

SEQ ID NO: 65887 - DNA, 25 bp, Homo sapien
gggtttagcttctaaacctcttcaa

SEQ ID NO: 65888 - DNA, 25 bp, Homo sapien
gggtttagcttcaaaacctcttcaa

SEQ ID NO: 65889 - DNA, 25 bp, Homo sapien
tgagacttgaactgactcctttaca

SEQ ID NO: 65890 - DNA, 25 bp, Homo sapien
tgagacttgaacagactcctttaca

SEQ ID NO: 65891 - DNA, 25 bp, Homo sapien
tcagtagaggaacatttatcgtacc

SEQ ID NO: 65892 - DNA, 25 bp, Homo sapien
tcagtagaggaagatttatcgtacc

SEQ ID NO: 65893 - DNA, 25 bp, Homo sapien
ctatcgtgggtaaggtatttaatcc

SEQ ID NO: 65894 - DNA, 25 bp, Homo sapien
ctatcgtgggtatggtatttaatcc

SEQ ID NO: 65895 - DNA, 25 bp, Homo sapien
agtacagagccattgatttcagaac

SEQ ID NO: 65896 - DNA, 25 bp, Homo sapien
agtacagagccaatgatttcagaac

SEQ ID NO: 65897 - DNA, 25 bp, Homo sapien
tgtaaagaaagtacagcttacaggc

SEQ ID NO: 65898 - DNA, 25 bp, Homo sapien
tgtaaagaaagttcagcttacaggc

SEQ ID NO: 65899 - DNA, 25 bp, Homo sapien
ggtggagaaccttcaccctcaggtg

SEQ ID NO: 65900 - DNA, 25 bp, Homo sapien
ggtggagaacctacaccctcaggtg

SEQ ID NO: 65901 - DNA, 25 bp, Homo sapien
ggtgtcaagtcacacttgtggctcg

SEQ ID NO: 65902 - DNA, 25 bp, Homo sapien
ggtgtcaagtcagacttgtggctcg

SEQ ID NO: 65903 - DNA, 25 bp, Homo sapien
catcgtgatgtgtaatctgtggttc

SEQ ID NO: 65904 - DNA, 25 bp, Homo sapien
catcgtgatgtgaaatctgtggttc

SEQ ID NO: 65905 - DNA, 25 bp, Homo sapien
tcgtcgagcgccttctctgcgtcgt

SEQ ID NO: 65906 - DNA, 25 bp, Homo sapien
tcgtcgagcgccatctctgcgtcgt

SEQ ID NO: 65907 - DNA, 25 bp, Homo sapien
tcagggtctcggtcacaaataatcg

SEQ ID NO: 65908 - DNA, 25 bp, Homo sapien
tcagggtctcggacacaaataatcg

SEQ ID NO: 65909 - DNA, 25 bp, Homo sapien
ttctcggaaccttcaaagataatgt

SEQ ID NO: 65910 - DNA, 25 bp, Homo sapien
ttctcggaacctacaaagataatgt

SEQ ID NO: 65911 - DNA, 25 bp, Homo sapien
tcttgagtgcctctaattgtaaagt

SEQ ID NO: 65912 - DNA, 25 bp, Homo sapien
tcttgagtgcctgtaattgtaaagt

SEQ ID NO: 65913 - DNA, 25 bp, Homo sapien
cagaaagtctgtctactttgtaatt

SEQ ID NO: 65914 - DNA, 25 bp, Homo sapien
cagaaagtctgtgtactttgtaatt

SEQ ID NO: 65915 - DNA, 25 bp, Homo sapien
tccaaagtacctgtcgcttgtattt

SEQ ID NO: 65916 - DNA, 25 bp, Homo sapien
tccaaagtacctctcgcttgtattt

SEQ ID NO: 65917 - DNA, 25 bp, Homo sapien
ttagaaaatcgctcgataagtctct

SEQ ID NO: 65918 - DNA, 25 bp, Homo sapien
ttagaaaatcgcacgataagtctct

SEQ ID NO: 65919 - DNA, 25 bp, Homo sapien
tgagacgttacacttacggtaattt

SEQ ID NO: 65920 - DNA, 25 bp, Homo sapien
tgagacgttacagttacggtaattt

SEQ ID NO: 65921 - DNA, 25 bp, Homo sapien
ctcgtcggtcctgtcaccagatgtt

SEQ ID NO: 65922 - DNA, 25 bp, Homo sapien
ctcgtcggtcctctcaccagatgtt

SEQ ID NO: 65923 - DNA, 25 bp, Homo sapien
aagggtccgactcctcgggagtccg

SEQ ID NO: 65924 - DNA, 25 bp, Homo sapien
aagggtccgactgctcgggagtccg

SEQ ID NO: 65925 - DNA, 25 bp, Homo sapien
gttaaagtccagtcctctgtattcc

SEQ ID NO: 65926 - DNA, 25 bp, Homo sapien
gttaaagtccagacctctgtattcc

SEQ ID NO: 65927 - DNA, 25 bp, Homo sapien
ttcaagaccgtgtagtccttgttaa

SEQ ID NO: 65928 - DNA, 25 bp, Homo sapien
ttcaagaccgtgaagtccttgttaa

SEQ ID NO: 65929 - DNA, 25 bp, Homo sapien
ttattgaggcgcagtgactggcttt

SEQ ID NO: 65930 - DNA, 25 bp, Homo sapien
ttattgaggcgctgtgactggcttt

SEQ ID NO: 65931 - DNA, 25 bp, Homo sapien
aagactttcccctgggtgtgaacat

SEQ ID NO: 65932 - DNA, 25 bp, Homo sapien
aagactttccccagggtgtgaacat

SEQ ID NO: 65933 - DNA, 25 bp, Homo sapien
ttcatcctccgagttttcggttcgg

SEQ ID NO: 65934 - DNA, 25 bp, Homo sapien
ttcatcctccgacttttcggttcgg

SEQ ID NO: 65935 - DNA, 25 bp, Homo sapien
cggtcccgagatcttctgccacgtg

SEQ ID NO: 65936 - DNA, 25 bp, Homo sapien
cggtcccgagatgttctgccacgtg

SEQ ID NO: 65937 - DNA, 25 bp, Homo sapien
taccctagtactttcagagcctcgg

SEQ ID NO: 65938 - DNA, 25 bp, Homo sapien
taccctagtactatcagagcctcgg

SEQ ID NO: 65939 - DNA, 25 bp, Homo sapien
ctgtcgtcgtctctgtcggaccctt

SEQ ID NO: 65940 - DNA, 25 bp, Homo sapien
ctgtcgtcgtctgtgtcggaccctt

SEQ ID NO: 65941 - DNA, 25 bp, Homo sapien
accttttaggtacttggagtcaagt

SEQ ID NO: 65942 - DNA, 25 bp, Homo sapien
accttttaggtagttggagtcaagt

SEQ ID NO: 65943 - DNA, 25 bp, Homo sapien
gtattctagtatttcgttttgaccg

SEQ ID NO: 65944 - DNA, 25 bp, Homo sapien
gtattctagtatatcgttttgaccg

SEQ ID NO: 65945 - DNA, 25 bp, Homo sapien
gttatctgtcgtcttatacatgtaa

SEQ ID NO: 65946 - DNA, 25 bp, Homo sapien
gttatctgtcgtgttatacatgtaa

SEQ ID NO: 65947 - DNA, 25 bp, Homo sapien
ggtagtggttcgtctttctctgaac

SEQ ID NO: 65948 - DNA, 25 bp, Homo sapien
ggtagtggttcgactttctctgaac

SEQ ID NO: 65949 - DNA, 25 bp, Homo sapien
gaagtttctcctatgttcgaaaagt

SEQ ID NO: 65950 - DNA, 25 bp, Homo sapien
gaagtttctcctttgttcgaaaagt

SEQ ID NO: 65951 - DNA, 25 bp, Homo sapien
acacttatcccgtgcaagaggatgt

SEQ ID NO: 65952 - DNA, 25 bp, Homo sapien
acacttatcccgagcaagaggatgt

SEQ ID NO: 65953 - DNA, 25 bp, Homo sapien
aggatcgtcgaaaccaaatcgtatt

SEQ ID NO: 65954 - DNA, 25 bp, Homo sapien
aggatcgtcgaatccaaatcgtatt

SEQ ID NO: 65955 - DNA, 25 bp, Homo sapien
aaaggtctacggaggactaactgga

SEQ ID NO: 65956 - DNA, 25 bp, Homo sapien
aaaggtctacggtggactaactgga

SEQ ID NO: 65957 - DNA, 25 bp, Homo sapien
aaggtcttcgtgtctttcatccagt

SEQ ID NO: 65958 - DNA, 25 bp, Homo sapien
aaggtcttcgtgactttcatccagt

SEQ ID NO: 65959 - DNA, 25 bp, Homo sapien
gtatattcgtgtacacatcgttaaa

SEQ ID NO: 65960 - DNA, 25 bp, Homo sapien
gtatattcgtgttcacatcgttaaa

SEQ ID NO: 65961 - DNA, 25 bp, Homo sapien
acagtaacttctctcgacaatttta

SEQ ID NO: 65962 - DNA, 25 bp, Homo sapien
acagtaacttctgtcgacaatttta

SEQ ID NO: 65963 - DNA, 25 bp, Homo sapien
aaacgtcttcgtcgtgcgaatcaaa

SEQ ID NO: 65964 - DNA, 25 bp, Homo sapien
aaacgtcttcgtggtgcgaatcaaa

SEQ ID NO: 65965 - DNA, 25 bp, Homo sapien
aggtacctcggttagacccattaaa

SEQ ID NO: 65966 - DNA, 25 bp, Homo sapien
aggtacctcggtaagacccattaaa

SEQ ID NO: 65967 - DNA, 25 bp, Homo sapien
gagtcaccgggacgactggctacca

SEQ ID NO: 65968 - DNA, 25 bp, Homo sapien
gagtcaccgggaggactggctacca

SEQ ID NO: 65969 - DNA, 25 bp, Homo sapien
acccggagagtccagtgagcacggg

SEQ ID NO: 65970 - DNA, 25 bp, Homo sapien
acccggagagtcgagtgagcacggg

SEQ ID NO: 65971 - DNA, 25 bp, Homo sapien
ccccggacagcgtgggtcacgtata

SEQ ID NO: 65972 - DNA, 25 bp, Homo sapien
ccccggacagcgagggtcacgtata

SEQ ID NO: 65973 - DNA, 25 bp, Homo sapien
tccgggacgtagtctttaagtgtta

SEQ ID NO: 65974 - DNA, 25 bp, Homo sapien
tccgggacgtagactttaagtgtta

SEQ ID NO: 65975 - DNA, 25 bp, Homo sapien
actcgtgactaaactttacagttta

SEQ ID NO: 65976 - DNA, 25 bp, Homo sapien
actcgtgactaatctttacagttta

SEQ ID NO: 65977 - DNA, 25 bp, Homo sapien
tcttctcgctaattaatcggctaga

SEQ ID NO: 65978 - DNA, 25 bp, Homo sapien
tcttctcgctaaataatcggctaga

SEQ ID NO: 65979 - DNA, 25 bp, Homo sapien
aggatcgtgcaaataacctcggaac

SEQ ID NO: 65980 - DNA, 25 bp, Homo sapien
aggatcgtgcaattaacctcggaac

SEQ ID NO: 65981 - DNA, 25 bp, Homo sapien
aagggttcgatcagaccctaggaac

SEQ ID NO: 65982 - DNA, 25 bp, Homo sapien
aagggttcgatctgaccctaggaac

SEQ ID NO: 65983 - DNA, 25 bp, Homo sapien
gacgattgttcgtcggctcctatga

SEQ ID NO: 65984 - DNA, 25 bp, Homo sapien
gacgattgttcgacggctcctatga

SEQ ID NO: 65985 - DNA, 25 bp, Homo sapien
gaggtgtagttccaactccttgtga

SEQ ID NO: 65986 - DNA, 25 bp, Homo sapien
gaggtgtagttcgaactccttgtga

SEQ ID NO: 65987 - DNA, 25 bp, Homo sapien
cgttttagtcgaagaatctactaca

SEQ ID NO: 65988 - DNA, 25 bp, Homo sapien
cgttttagtcgatgaatctactaca

SEQ ID NO: 65989 - DNA, 25 bp, Homo sapien
atctactgggtacaactaccgtcat

SEQ ID NO: 65990 - DNA, 25 bp, Homo sapien
atctactgggtagaactaccgtcat

SEQ ID NO: 65991 - DNA, 25 bp, Homo sapien
gacattatggtgaaactgatctctc

SEQ ID NO: 65992 - DNA, 25 bp, Homo sapien
gacattatggtgtaactgatctctc

SEQ ID NO: 65993 - DNA, 25 bp, Homo sapien
ctaaggagtcggagatagtgtcacc

SEQ ID NO: 65994 - DNA, 25 bp, Homo sapien
ctaaggagtcggtgatagtgtcacc

SEQ ID NO: 65995 - DNA, 25 bp, Homo sapien
tctccggagtagcagtgggtcaccc

SEQ ID NO: 65996 - DNA, 25 bp, Homo sapien
tctccggagtaggagtgggtcaccc

SEQ ID NO: 65997 - DNA, 25 bp, Homo sapien
tacgccggtagtctctgggacccgc

SEQ ID NO: 65998 - DNA, 25 bp, Homo sapien
tacgccggtagtgtctgggacccgc

SEQ ID NO: 65999 - DNA, 25 bp, Homo sapien
acacagacggggttcaccggccgtc

SEQ ID NO: 66000 - DNA, 25 bp, Homo sapien
acacagacggggatcaccggccgtc

SEQ ID NO: 66001 - DNA, 25 bp, Homo sapien
cggtccgcgggcttgtgtccaagtc

SEQ ID NO: 66002 - DNA, 25 bp, Homo sapien
cggtccgcgggcatgtgtccaagtc

SEQ ID NO: 66003 - DNA, 25 bp, Homo sapien
gtgggaccgtggtcgtcacccgtac

SEQ ID NO: 66004 - DNA, 25 bp, Homo sapien
gtgggaccgtggacgtcacccgtac

SEQ ID NO: 66005 - DNA, 25 bp, Homo sapien
tgggaaaacgggtcgtacacacgta

SEQ ID NO: 66006 - DNA, 25 bp, Homo sapien
tgggaaaacgggacgtacacacgta

SEQ ID NO: 66007 - DNA, 25 bp, Homo sapien
gtgtacaaagggagtactactcgtg

SEQ ID NO: 66008 - DNA, 25 bp, Homo sapien
gtgtacaaagggtgtactactcgtg

SEQ ID NO: 66009 - DNA, 25 bp, Homo sapien
aggttccccttatagcgtaccgacc

SEQ ID NO: 66010 - DNA, 25 bp, Homo sapien
aggttccccttaaagcgtaccgacc

SEQ ID NO: 66011 - DNA, 25 bp, Homo sapien
actctcgccttaaaccacagtaggt

SEQ ID NO: 66012 - DNA, 25 bp, Homo sapien
actctcgccttataccacagtaggt

SEQ ID NO: 66013 - DNA, 25 bp, Homo sapien
acaattcccgaggtttccctgacgg

SEQ ID NO: 66014 - DNA, 25 bp, Homo sapien
acaattcccgagctttccctgacgg

SEQ ID NO: 66015 - DNA, 25 bp, Homo sapien
aagttccgacgtatgcttaccgggg

SEQ ID NO: 66016 - DNA, 25 bp, Homo sapien
aagttccgacgtttgcttaccgggg

SEQ ID NO: 66017 - DNA, 25 bp, Homo sapien
cggagtctccctgtctttgggtcct

SEQ ID NO: 66018 - DNA, 25 bp, Homo sapien
cggagtctccctctctttgggtcct

SEQ ID NO: 66019 - DNA, 25 bp, Homo sapien
ggtgtcgacggtctttatgagacaa

SEQ ID NO: 66020 - DNA, 25 bp, Homo sapien
ggtgtcgacggtgtttatgagacaa

SEQ ID NO: 66021 - DNA, 25 bp, Homo sapien
tactgtgtcgttccttctccggaaa

SEQ ID NO: 66022 - DNA, 25 bp, Homo sapien
tactgtgtcgttgcttctccggaaa

SEQ ID NO: 66023 - DNA, 25 bp, Homo sapien
gtgaacccttgcagtcgccagatga

SEQ ID NO: 66024 - DNA, 25 bp, Homo sapien
gtgaacccttgctgtcgccagatga

SEQ ID NO: 66025 - DNA, 25 bp, Homo sapien
cgaccctctaggtgagcctctggta

SEQ ID NO: 66026 - DNA, 25 bp, Homo sapien
cgaccctctaggagagcctctggta

SEQ ID NO: 66027 - DNA, 25 bp, Homo sapien
acgacattctggtaggagataccaa

SEQ ID NO: 66028 - DNA, 25 bp, Homo sapien
acgacattctggaaggagataccaa

SEQ ID NO: 66029 - DNA, 25 bp, Homo sapien
cactttcgaggaacgtttacccgaa

SEQ ID NO: 66030 - DNA, 25 bp, Homo sapien
cactttcgaggatcgtttacccgaa

SEQ ID NO: 66031 - DNA, 25 bp, Homo sapien
cgcttgtgcgatcgtgtcccggacg

SEQ ID NO: 66032 - DNA, 25 bp, Homo sapien
cgcttgtgcgatggtgtcccggacg

SEQ ID NO: 66033 - DNA, 25 bp, Homo sapien
ttttcgttcgaaacggtttacggac

SEQ ID NO: 66034 - DNA, 25 bp, Homo sapien
ttttcgttcgaatcggtttacggac

SEQ ID NO: 66035 - DNA, 25 bp, Homo sapien
tggtgggtctcgtcacgctacgtcg

SEQ ID NO: 66036 - DNA, 25 bp, Homo sapien
tggtgggtctcgacacgctacgtcg

SEQ ID NO: 66037 - DNA, 25 bp, Homo sapien
cgcagaggggtcgagatcccgtcgt

SEQ ID NO: 66038 - DNA, 25 bp, Homo sapien
cgcagaggggtccagatcccgtcgt

SEQ ID NO: 66039 - DNA, 25 bp, Homo sapien
accagggggtcctgtgtgtgtctct

SEQ ID NO: 66040 - DNA, 25 bp, Homo sapien
accagggggtccagtgtgtgtctct

SEQ ID NO: 66041 - DNA, 25 bp, Homo sapien
actgaacagggggtcccttcttctt

SEQ ID NO: 66042 - DNA, 25 bp, Homo sapien
actgaacaggggctcccttcttctt

SEQ ID NO: 66043 - DNA, 25 bp, Homo sapien
ggaagaggaggcagccttctcctac

SEQ ID NO: 66044 - DNA, 25 bp, Homo sapien
ggaagaggaggctgccttctcctac

SEQ ID NO: 66045 - DNA, 25 bp, Homo sapien
gtgtaggagacctctctagtcgttc

SEQ ID NO: 66046 - DNA, 25 bp, Homo sapien
gtgtaggagaccactctagtcgttc

SEQ ID NO: 66047 - DNA, 25 bp, Homo sapien
cacgaacaggacgacgagtgtggtc

SEQ ID NO: 66048 - DNA, 25 bp, Homo sapien
cacgaacaggaccacgagtgtggtc

SEQ ID NO: 66049 - DNA, 25 bp, Homo sapien
ttactggcgacgaaccctatgtcca

SEQ ID NO: 66050 - DNA, 25 bp, Homo sapien
ttactggcgacgtaccctatgtcca

SEQ ID NO: 66051 - DNA, 25 bp, Homo sapien
aatcgggacagtgatcggtttcact

SEQ ID NO: 66052 - DNA, 25 bp, Homo sapien
aatcgggacagtcatcggtttcact

SEQ ID NO: 66053 - DNA, 25 bp, Homo sapien
ttatctgggaggacggagacttgtc

SEQ ID NO: 66054 - DNA, 25 bp, Homo sapien
ttatctgggaggtcggagacttgtc

SEQ ID NO: 66055 - DNA, 25 bp, Homo sapien
attgcgaacgtaagacaaacgtttc

SEQ ID NO: 66056 - DNA, 25 bp, Homo sapien
attgcgaacgtatgacaaacgtttc

SEQ ID NO: 66057 - DNA, 25 bp, Homo sapien
cctatgacgatttgtaagtttattc

SEQ ID NO: 66058 - DNA, 25 bp, Homo sapien
cctatgacgattagtaagtttattc

SEQ ID NO: 66059 - DNA, 25 bp, Homo sapien
ttatgagagactctcggtcctttcg

SEQ ID NO: 66060 - DNA, 25 bp, Homo sapien
ttatgagagactgtcggtcctttcg

SEQ ID NO: 66061 - DNA, 25 bp, Homo sapien
ttctaagaaactgagtatgtctaca

SEQ ID NO: 66062 - DNA, 25 bp, Homo sapien
ttctaagaaactcagtatgtctaca

SEQ ID NO: 66063 - DNA, 25 bp, Homo sapien
ggactgacttcgtaaatgaactcaa

SEQ ID NO: 66064 - DNA, 25 bp, Homo sapien
ggactgacttcgaaaatgaactcaa

SEQ ID NO: 66065 - DNA, 25 bp, Homo sapien
aacatttcttctaagaggactcaat

SEQ ID NO: 66066 - DNA, 25 bp, Homo sapien
aacatttcttcttagaggactcaat

SEQ ID NO: 66067 - DNA, 25 bp, Homo sapien
aaaatttgtgtcgtcaactcgactc

SEQ ID NO: 66068 - DNA, 25 bp, Homo sapien
aaaatttgtgtcctcaactcgactc

SEQ ID NO: 66069 - DNA, 25 bp, Homo sapien
aaagtactttgactccagtccgttc

SEQ ID NO: 66070 - DNA, 25 bp, Homo sapien
aaagtactttgagtccagtccgttc

SEQ ID NO: 66071 - DNA, 25 bp, Homo sapien
aaactcgtccaacacctgttacgtg

SEQ ID NO: 66072 - DNA, 25 bp, Homo sapien
aaactcgtccaagacctgttacgtg

SEQ ID NO: 66073 - DNA, 25 bp, Homo sapien
atcacggttggtgtactggtctacc

SEQ ID NO: 66074 - DNA, 25 bp, Homo sapien
atcacggttggtctactggtctacc

SEQ ID NO: 66075 - DNA, 25 bp, Homo sapien
tcgtatctttcgttctcttcaaccc

SEQ ID NO: 66076 - DNA, 25 bp, Homo sapien
tcgtatctttcgatctcttcaaccc

SEQ ID NO: 66077 - DNA, 25 bp, Homo sapien
tgtatgtttagatgaaagatcccca

SEQ ID NO: 66078 - DNA, 25 bp, Homo sapien
tgtatgtttagaagaaagatcccca

SEQ ID NO: 66079 - DNA, 25 bp, Homo sapien
gtacatcacggttcttattccacag

SEQ ID NO: 66080 - DNA, 25 bp, Homo sapien
gtacatcacggtacttattccacag

SEQ ID NO: 66081 - DNA, 25 bp, Homo sapien
gtcctctactgtgttatgtcaactc

SEQ ID NO: 66082 - DNA, 25 bp, Homo sapien
gtcctctactgtcttatgtcaactc

SEQ ID NO: 66083 - DNA, 25 bp, Homo sapien
gatatcgggtttaagttggtcatcc

SEQ ID NO: 66084 - DNA, 25 bp, Homo sapien
gatatcgggttttagttggtcatcc

SEQ ID NO: 66085 - DNA, 25 bp, Homo sapien
tcgggttcagtgtgagtctctcgct

SEQ ID NO: 66086 - DNA, 25 bp, Homo sapien
tcgggttcagtgagagtctctcgct

SEQ ID NO: 66087 - DNA, 25 bp, Homo sapien
acatctggcacttcagcccgctgta

SEQ ID NO: 66088 - DNA, 25 bp, Homo sapien
acatctggcactacagcccgctgta

SEQ ID NO: 66089 - DNA, 25 bp, Homo sapien
aataaggaactttgacgagcataac

SEQ ID NO: 66090 - DNA, 25 bp, Homo sapien
aataaggaacttagacgagcataac

SEQ ID NO: 66091 - DNA, 25 bp, Homo sapien
tcataggtgaactaaggaggtccgc

SEQ ID NO: 66092 - DNA, 25 bp, Homo sapien
tcataggtgaacaaaggaggtccgc

SEQ ID NO: 66093 - DNA, 25 bp, Homo sapien
accactttgatatccctgaggggtc

SEQ ID NO: 66094 - DNA, 25 bp, Homo sapien
accactttgataaccctgaggggtc

SEQ ID NO: 66095 - DNA, 25 bp, Homo sapien
caatagttatagacttggcagtgac

SEQ ID NO: 66096 - DNA, 25 bp, Homo sapien
caatagttatagtcttggcagtgac

SEQ ID NO: 66097 - DNA, 25 bp, Homo sapien
gacacataattcatccttttgggtt

SEQ ID NO: 66098 - DNA, 25 bp, Homo sapien
gacacataattcttccttttgggtt

SEQ ID NO: 66099 - DNA, 25 bp, Homo sapien
tacataattaggtcttccttcgttg

SEQ ID NO: 66100 - DNA, 25 bp, Homo sapien
tacataattaggacttccttcgttg

SEQ ID NO: 66101 - DNA, 25 bp, Homo sapien
tcctaagttgaggatccctttcgtt

SEQ ID NO: 66102 - DNA, 25 bp, Homo sapien
tcctaagttgagcatccctttcgtt

SEQ ID NO: 66103 - DNA, 25 bp, Homo sapien
ggtctctgtcataccattgtttccc

SEQ ID NO: 66104 - DNA, 25 bp, Homo sapien
ggtctctgtcattccattgtttccc

SEQ ID NO: 66105 - DNA, 25 bp, Homo sapien
ggtttgtctcgtcttcttaatcccc

SEQ ID NO: 66106 - DNA, 25 bp, Homo sapien
ggtttgtctcgtgttcttaatcccc

SEQ ID NO: 66107 - DNA, 25 bp, Homo sapien
aagtctttgggtatacgtaacccaa

SEQ ID NO: 66108 - DNA, 25 bp, Homo sapien
aagtctttgggtttacgtaacccaa

SEQ ID NO: 66109 - DNA, 25 bp, Homo sapien
tatgtctttgaacttgaactcgaaa

SEQ ID NO: 66110 - DNA, 25 bp, Homo sapien
tatgtctttgaagttgaactcgaaa

SEQ ID NO: 66111 - DNA, 25 bp, Homo sapien
catctttagtggtatcattgtacaa

SEQ ID NO: 66112 - DNA, 25 bp, Homo sapien
catctttagtggaatcattgtacaa

SEQ ID NO: 66113 - DNA, 25 bp, Homo sapien
tacctttccggagtcaatcactcag

SEQ ID NO: 66114 - DNA, 25 bp, Homo sapien
tacctttccggactcaatcactcag

SEQ ID NO: 66115 - DNA, 25 bp, Homo sapien
gctccgaggccatgggaaacagacg

SEQ ID NO: 66116 - DNA, 25 bp, Homo sapien
gctccgaggccaagggaaacagacg

SEQ ID NO: 66117 - DNA, 25 bp, Homo sapien
ataaaggcctacactaaaaggtcgt

SEQ ID NO: 66118 - DNA, 25 bp, Homo sapien
ataaaggcctactctaaaaggtcgt

SEQ ID NO: 66119 - DNA, 25 bp, Homo sapien
agaatgacccggagttacgagtggt

SEQ ID NO: 66120 - DNA, 25 bp, Homo sapien
agaatgacccggtgttacgagtggt

SEQ ID NO: 66121 - DNA, 25 bp, Homo sapien
gaccaggacccgtgcttacggtcac

SEQ ID NO: 66122 - DNA, 25 bp, Homo sapien
gaccaggacccgagcttacggtcac

SEQ ID NO: 66123 - DNA, 25 bp, Homo sapien
gcgtcgggcccgttttccgtcggtc

SEQ ID NO: 66124 - DNA, 25 bp, Homo sapien
gcgtcgggcccgatttccgtcggtc

SEQ ID NO: 66125 - DNA, 25 bp, Homo sapien
gggaaaacgggtcgtacacacgtaa

SEQ ID NO: 66126 - DNA, 25 bp, Homo sapien
gggaaaacgggtggtacacacgtaa

SEQ ID NO: 66127 - DNA, 25 bp, Homo sapien
ttcctggtccttgaggagtttttat

SEQ ID NO: 66128 - DNA, 25 bp, Homo sapien
ttcctggtccttcaggagtttttat

SEQ ID NO: 66129 - DNA, 25 bp, Homo sapien
tcctacacccttagggtcgagttta

SEQ ID NO: 66130 - DNA, 25 bp, Homo sapien
tcctacaccctttgggtcgagttta

SEQ ID NO: 66131 - DNA, 25 bp, Homo sapien
ttcgtgccgacctctgggtgctgga

SEQ ID NO: 66132 - DNA, 25 bp, Homo sapien
ttcgtgccgaccactgggtgctgga

SEQ ID NO: 66133 - DNA, 25 bp, Homo sapien
acttctcactttttgtatgtttgtt

SEQ ID NO: 66134 - DNA, 25 bp, Homo sapien
acttctcactttatgtatgtttgtt

SEQ ID NO: 66135 - DNA, 25 bp, Homo sapien
gggacgtcccttctccgtgatctta

SEQ ID NO: 66136 - DNA, 25 bp, Homo sapien
gggacgtcccttgtccgtgatctta

SEQ ID NO: 66137 - DNA, 25 bp, Homo sapien
gagtgacccctttccacagtccttt

SEQ ID NO: 66138 - DNA, 25 bp, Homo sapien
gagtgaccccttaccacagtccttt

SEQ ID NO: 66139 - DNA, 25 bp, Homo sapien
caggaacctgtagtcaagatttatt

SEQ ID NO: 66140 - DNA, 25 bp, Homo sapien
caggaacctgtactcaagatttatt

SEQ ID NO: 66141 - DNA, 25 bp, Homo sapien
agatcgtcgttttgtggactttatc

SEQ ID NO: 66142 - DNA, 25 bp, Homo sapien
agatcgtcgtttagtggactttatc

SEQ ID NO: 66143 - DNA, 25 bp, Homo sapien
acttcggtagtgagttcgattttac

SEQ ID NO: 66144 - DNA, 25 bp, Homo sapien
acttcggtagtgtgttcgattttac

SEQ ID NO: 66145 - DNA, 25 bp, Homo sapien
cactcttgactgaagtcccgtttcc

SEQ ID NO: 66146 - DNA, 25 bp, Homo sapien
cactcttgactgtagtcccgtttcc

SEQ ID NO: 66147 - DNA, 25 bp, Homo sapien
actactgtctctgtgtccatgatta

SEQ ID NO: 66148 - DNA, 25 bp, Homo sapien
actactgtctctctgtccatgatta

SEQ ID NO: 66149 - DNA, 25 bp, Homo sapien
cttctcagtttttccgcaggaagtg

SEQ ID NO: 66150 - DNA, 25 bp, Homo sapien
cttctcagttttaccgcaggaagtg

SEQ ID NO: 66151 - DNA, 25 bp, Homo sapien
ctcttccgtcggtgacagtcaatgt

SEQ ID NO: 66152 - DNA, 25 bp, Homo sapien
ctcttccgtcggagacagtcaatgt

SEQ ID NO: 66153 - DNA, 25 bp, Homo sapien
acctcagaggtaggagttacacatt

SEQ ID NO: 66154 - DNA, 25 bp, Homo sapien
acctcagaggtacgagttacacatt

SEQ ID NO: 66155 - DNA, 25 bp, Homo sapien
aaaaccaagggtactgtaactgtct

SEQ ID NO: 66156 - DNA, 25 bp, Homo sapien
aaaaccaagggttctgtaactgtct

SEQ ID NO: 66157 - DNA, 25 bp, Homo sapien
ctcaagacatagtgtcttgtaattt

SEQ ID NO: 66158 - DNA, 25 bp, Homo sapien
ctcaagacatagagtcttgtaattt

SEQ ID NO: 66159 - DNA, 25 bp, Homo sapien
ccaatagtgtcaaaaccattgaacg

SEQ ID NO: 66160 - DNA, 25 bp, Homo sapien
ccaatagtgtcataaccattgaacg

SEQ ID NO: 66161 - DNA, 25 bp, Homo sapien
tggtcaattgattgtctcacttgaa

SEQ ID NO: 66162 - DNA, 25 bp, Homo sapien
tggtcaattgatagtctcacttgaa

SEQ ID NO: 66163 - DNA, 25 bp, Homo sapien
gttcttattgatactccaaagaccg

SEQ ID NO: 66164 - DNA, 25 bp, Homo sapien
gttcttattgattctccaaagaccg

SEQ ID NO: 66165 - DNA, 25 bp, Homo sapien
gtttgagaagacatcaaccatttct

SEQ ID NO: 66166 - DNA, 25 bp, Homo sapien
gtttgagaagacttcaaccatttct

SEQ ID NO: 66167 - DNA, 25 bp, Homo sapien
gtttgacgaagatagttaccttttc

SEQ ID NO: 66168 - DNA, 25 bp, Homo sapien
gtttgacgaagaaagttaccttttc

SEQ ID NO: 66169 - DNA, 25 bp, Homo sapien
ttaggaagacttgtgtcttagactc

SEQ ID NO: 66170 - DNA, 25 bp, Homo sapien
ttaggaagacttctgtcttagactc

SEQ ID NO: 66171 - DNA, 25 bp, Homo sapien
tccaggaaagtgtcttttagactct

SEQ ID NO: 66172 - DNA, 25 bp, Homo sapien
tccaggaaagtgacttttagactct

SEQ ID NO: 66173 - DNA, 25 bp, Homo sapien
acacatgtatgacgaggaacaactc

SEQ ID NO: 66174 - DNA, 25 bp, Homo sapien
acacatgtatgaggaggaacaactc

SEQ ID NO: 66175 - DNA, 25 bp, Homo sapien
gattcagaggaaaggaagacccacc

SEQ ID NO: 66176 - DNA, 25 bp, Homo sapien
gattcagaggaatggaagacccacc

SEQ ID NO: 66177 - DNA, 25 bp, Homo sapien
tacgaggacctgtgtgactgtgctt

SEQ ID NO: 66178 - DNA, 25 bp, Homo sapien
tacgaggacctgagtgactgtgctt

SEQ ID NO: 66179 - DNA, 25 bp, Homo sapien
ttctcggaccggttgttttgtacct

SEQ ID NO: 66180 - DNA, 25 bp, Homo sapien
ttctcggaccggatgttttgtacct

SEQ ID NO: 66181 - DNA, 25 bp, Homo sapien
tatcctcaactctgggtattttgta

SEQ ID NO: 66182 - DNA, 25 bp, Homo sapien
tatcctcaactcagggtattttgta

SEQ ID NO: 66183 - DNA, 25 bp, Homo sapien
ggtccgtccctcgtaaatttcgtta

SEQ ID NO: 66184 - DNA, 25 bp, Homo sapien
ggtccgtccctcctaaatttcgtta

SEQ ID NO: 66185 - DNA, 25 bp, Homo sapien
ggactgcttactataaaatcagtta

SEQ ID NO: 66186 - DNA, 25 bp, Homo sapien
ggactgcttactttaaaatcagtta

SEQ ID NO: 66187 - DNA, 25 bp, Homo sapien
gaccttgtgttctttcgtttcccct

SEQ ID NO: 66188 - DNA, 25 bp, Homo sapien
gaccttgtgttcattcgtttcccct

SEQ ID NO: 66189 - DNA, 25 bp, Homo sapien
gtcgtctgaaaaaactttccctacg

SEQ ID NO: 66190 - DNA, 25 bp, Homo sapien
gtcgtctgaaaatactttccctacg

SEQ ID NO: 66191 - DNA, 25 bp, Homo sapien
atgtatggaaacacatatctgttcg

SEQ ID NO: 66192 - DNA, 25 bp, Homo sapien
atgtatggaaactcatatctgttcg

SEQ ID NO: 66193 - DNA, 25 bp, Homo sapien
atgtatatgatccatttgtgttctc

SEQ ID NO: 66194 - DNA, 25 bp, Homo sapien
atgtatatgatcgatttgtgttctc

SEQ ID NO: 66195 - DNA, 25 bp, Homo sapien
tttgtttcacctataagtcggatcc

SEQ ID NO: 66196 - DNA, 25 bp, Homo sapien
tttgtttcacctttaagtcggatcc

SEQ ID NO: 66197 - DNA, 25 bp, Homo sapien
cttttatccttgtaaacgagctgac

SEQ ID NO: 66198 - DNA, 25 bp, Homo sapien
cttttatccttgaaaacgagctgac

SEQ ID NO: 66199 - DNA, 25 bp, Homo sapien
ctaattttctggactgaagtcgaga

SEQ ID NO: 66200 - DNA, 25 bp, Homo sapien
ctaattttctggtctgaagtcgaga

SEQ ID NO: 66201 - DNA, 25 bp, Homo sapien
cataatcccttcttgtgaagtctta

SEQ ID NO: 66202 - DNA, 25 bp, Homo sapien
cataatcccttcatgtgaagtctta

SEQ ID NO: 66203 - DNA, 25 bp, Homo sapien
aggtccccggtctacgtaaaaatag

SEQ ID NO: 66204 - DNA, 25 bp, Homo sapien
aggtccccggtcaacgtaaaaatag

SEQ ID NO: 66205 - DNA, 25 bp, Homo sapien
cagtcataccgtaactaaccctaca

SEQ ID NO: 66206 - DNA, 25 bp, Homo sapien
cagtcataccgttactaaccctaca

SEQ ID NO: 66207 - DNA, 25 bp, Homo sapien
acccccgaaggactcttacagtcta

SEQ ID NO: 66208 - DNA, 25 bp, Homo sapien
acccccgaaggagtcttacagtcta

SEQ ID NO: 66209 - DNA, 25 bp, Homo sapien
attctgacgaacagtactaaagttt

SEQ ID NO: 66210 - DNA, 25 bp, Homo sapien
attctgacgaactgtactaaagttt

SEQ ID NO: 66211 - DNA, 25 bp, Homo sapien
agttcggaggacttactctaataga

SEQ ID NO: 66212 - DNA, 25 bp, Homo sapien
agttcggaggacatactctaataga

SEQ ID NO: 66213 - DNA, 25 bp, Homo sapien
gttctgtaggtccagtgtcgtctaa

SEQ ID NO: 66214 - DNA, 25 bp, Homo sapien
gttctgtaggtcgagtgtcgtctaa

SEQ ID NO: 66215 - DNA, 25 bp, Homo sapien
actcatgtggtttatcctacgttcg

SEQ ID NO: 66216 - DNA, 25 bp, Homo sapien
actcatgtggttaatcctacgttcg

SEQ ID NO: 66217 - DNA, 25 bp, Homo sapien
tagacttgtcgttactcccacgttc

SEQ ID NO: 66218 - DNA, 25 bp, Homo sapien
tagacttgtcgtaactcccacgttc

SEQ ID NO: 66219 - DNA, 25 bp, Homo sapien
gtgagtcgtttacactcgtttgttt

SEQ ID NO: 66220 - DNA, 25 bp, Homo sapien
gtgagtcgtttagactcgtttgttt

SEQ ID NO: 66221 - DNA, 25 bp, Homo sapien
ttcgagtgtgatagggtttcgtctc

SEQ ID NO: 66222 - DNA, 25 bp, Homo sapien
ttcgagtgtgattgggtttcgtctc

SEQ ID NO: 66223 - DNA, 25 bp, Homo sapien
gtttcttggaaagtgtaccttctgt

SEQ ID NO: 66224 - DNA, 25 bp, Homo sapien
gtttcttggaaactgtaccttctgt

SEQ ID NO: 66225 - DNA, 25 bp, Homo sapien
tttctgtgaaaagctacactatgtt

SEQ ID NO: 66226 - DNA, 25 bp, Homo sapien
tttctgtgaaaacctacactatgtt

SEQ ID NO: 66227 - DNA, 25 bp, Homo sapien
cttttcgatagatctcatacagttg

SEQ ID NO: 66228 - DNA, 25 bp, Homo sapien
cttttcgatagaactcatacagttg

SEQ ID NO: 66229 - DNA, 25 bp, Homo sapien
gacttgttccactcgtagaaatgta

SEQ ID NO: 66230 - DNA, 25 bp, Homo sapien
gacttgttccacacgtagaaatgta

SEQ ID NO: 66231 - DNA, 25 bp, Homo sapien
gtctcatgccagtacacgaagaagg

SEQ ID NO: 66232 - DNA, 25 bp, Homo sapien
gtctcatgccagaacacgaagaagg

SEQ ID NO: 66233 - DNA, 25 bp, Homo sapien
cctggaaacaactaacgtactaggt

SEQ ID NO: 66234 - DNA, 25 bp, Homo sapien
cctggaaacaacaaacgtactaggt

SEQ ID NO: 66235 - DNA, 25 bp, Homo sapien
gactctagtagaaaacccaattagg

SEQ ID NO: 66236 - DNA, 25 bp, Homo sapien
gactctagtagataacccaattagg

SEQ ID NO: 66237 - DNA, 25 bp, Homo sapien
atttgaacctacgacttcaagtaag

SEQ ID NO: 66238 - DNA, 25 bp, Homo sapien
atttgaacctaccacttcaagtaag

SEQ ID NO: 66239 - DNA, 25 bp, Homo sapien
gagtcacgacgtcacttccggacgg

SEQ ID NO: 66240 - DNA, 25 bp, Homo sapien
gagtcacgacgtgacttccggacgg

SEQ ID NO: 66241 - DNA, 25 bp, Homo sapien
cgaccacgccacagatttcgtaaag

SEQ ID NO: 66242 - DNA, 25 bp, Homo sapien
cgaccacgccactgatttcgtaaag

SEQ ID NO: 66243 - DNA, 25 bp, Homo sapien
cgacaggccgggagtgtacacactc

SEQ ID NO: 66244 - DNA, 25 bp, Homo sapien
cgacaggccgggtgtgtacacactc

SEQ ID NO: 66245 - DNA, 25 bp, Homo sapien
tctgagtctacgagtctgtgaaccc

SEQ ID NO: 66246 - DNA, 25 bp, Homo sapien
tctgagtctacgtgtctgtgaaccc

SEQ ID NO: 66247 - DNA, 25 bp, Homo sapien
cttatacgaagttctcgtcttttgt

SEQ ID NO: 66248 - DNA, 25 bp, Homo sapien
cttatacgaagtactcgtcttttgt

SEQ ID NO: 66249 - DNA, 25 bp, Homo sapien
cggtttactcgaattatgtctttta

SEQ ID NO: 66250 - DNA, 25 bp, Homo sapien
cggtttactcgatttatgtctttta

SEQ ID NO: 66251 - DNA, 25 bp, Homo sapien
actttggtgactttttacacttatg

SEQ ID NO: 66252 - DNA, 25 bp, Homo sapien
actttggtgactatttacacttatg

SEQ ID NO: 66253 - DNA, 25 bp, Homo sapien
aggtgtgagaccttttcttcgtttg

SEQ ID NO: 66254 - DNA, 25 bp, Homo sapien
aggtgtgagaccatttcttcgtttg

SEQ ID NO: 66255 - DNA, 25 bp, Homo sapien
tggtcaggaacgactttctgttcag

SEQ ID NO: 66256 - DNA, 25 bp, Homo sapien
tggtcaggaacgtctttctgttcag

SEQ ID NO: 66257 - DNA, 25 bp, Homo sapien
tgcgagggtacactttacgatgtaa

SEQ ID NO: 66258 - DNA, 25 bp, Homo sapien
tgcgagggtacagtttacgatgtaa

SEQ ID NO: 66259 - DNA, 25 bp, Homo sapien
gtgtaagggtctttctgtgtatcca

SEQ ID NO: 66260 - DNA, 25 bp, Homo sapien
gtgtaagggtctatctgtgtatcca

SEQ ID NO: 66261 - DNA, 25 bp, Homo sapien
taatgttgttggtagtgtacaccac

SEQ ID NO: 66262 - DNA, 25 bp, Homo sapien
taatgttgttggaagtgtacaccac

SEQ ID NO: 66263 - DNA, 25 bp, Homo sapien
tagtagtagtaggtacaccggaccc

SEQ ID NO: 66264 - DNA, 25 bp, Homo sapien
tagtagtagtagctacaccggaccc

SEQ ID NO: 66265 - DNA, 25 bp, Homo sapien
gaatagttaaaccaccgtcgtcgtc

SEQ ID NO: 66266 - DNA, 25 bp, Homo sapien
gaatagttaaacgaccgtcgtcgtc

SEQ ID NO: 66267 - DNA, 25 bp, Homo sapien
aggacatgtgccacaggagcgtcgt

SEQ ID NO: 66268 - DNA, 25 bp, Homo sapien
aggacatgtgcctcaggagcgtcgt

SEQ ID NO: 66269 - DNA, 25 bp, Homo sapien
ttatagacacgttaagtgacgtcgc

SEQ ID NO: 66270 - DNA, 25 bp, Homo sapien
ttatagacacgtaaagtgacgtcgc

SEQ ID NO: 66271 - DNA, 25 bp, Homo sapien
ttgggtcctgtttacgactgaaacc

SEQ ID NO: 66272 - DNA, 25 bp, Homo sapien
ttgggtcctgttaacgactgaaacc

SEQ ID NO: 66273 - DNA, 25 bp, Homo sapien
ctcgggtttcttccgtccgaggagc

SEQ ID NO: 66274 - DNA, 25 bp, Homo sapien
ctcgggtttcttgcgtccgaggagc

SEQ ID NO: 66275 - DNA, 25 bp, Homo sapien
cccgagggtgaggggaggagggtcg

SEQ ID NO: 66276 - DNA, 25 bp, Homo sapien
cccgagggtgagcggaggagggtcg

SEQ ID NO: 66277 - DNA, 25 bp, Homo sapien
ctcactcgctcgaaacatttgatga

SEQ ID NO: 66278 - DNA, 25 bp, Homo sapien
ctcactcgctcgtaacatttgatga

SEQ ID NO: 66279 - DNA, 25 bp, Homo sapien
agcttgtgccaaaagtccggagaga

SEQ ID NO: 66280 - DNA, 25 bp, Homo sapien
agcttgtgccaatagtccggagaga

SEQ ID NO: 66281 - DNA, 25 bp, Homo sapien
ttgtgaaatatgtctgtccttatct

SEQ ID NO: 66282 - DNA, 25 bp, Homo sapien
ttgtgaaatatgactgtccttatct

SEQ ID NO: 66283 - DNA, 25 bp, Homo sapien
gtcgcgcagcgataacgcatttgga

SEQ ID NO: 66284 - DNA, 25 bp, Homo sapien
gtcgcgcagcgaaaacgcatttgga

SEQ ID NO: 66285 - DNA, 25 bp, Homo sapien
gttcggcgtttccgtcgtccgatgg

SEQ ID NO: 66286 - DNA, 25 bp, Homo sapien
gttcggcgtttcggtcgtccgatgg

SEQ ID NO: 66287 - DNA, 25 bp, Homo sapien
acgaatgctccctcacttaaaggag

SEQ ID NO: 66288 - DNA, 25 bp, Homo sapien
acgaatgctcccacacttaaaggag

SEQ ID NO: 66289 - DNA, 25 bp, Homo sapien
ttatacatgttttactacgacatgg

SEQ ID NO: 66290 - DNA, 25 bp, Homo sapien
ttatacatgtttaactacgacatgg

SEQ ID NO: 66291 - DNA, 25 bp, Homo sapien
taaaatgttgcatcgagatctacgt

SEQ ID NO: 66292 - DNA, 25 bp, Homo sapien
taaaatgttgcaacgagatctacgt

SEQ ID NO: 66293 - DNA, 25 bp, Homo sapien
tagaatgtacgtacagcagagtcag

SEQ ID NO: 66294 - DNA, 25 bp, Homo sapien
tagaatgtacgttcagcagagtcag

SEQ ID NO: 66295 - DNA, 25 bp, Homo sapien
tgtagacaacgtttccacacgctag

SEQ ID NO: 66296 - DNA, 25 bp, Homo sapien
tgtagacaacgtatccacacgctag

SEQ ID NO: 66297 - DNA, 25 bp, Homo sapien
accaacgactagaacccgcctatag

SEQ ID NO: 66298 - DNA, 25 bp, Homo sapien
accaacgactagtacccgcctatag

SEQ ID NO: 66299 - DNA, 25 bp, Homo sapien
accactacggtgacagtgtgctcag

SEQ ID NO: 66300 - DNA, 25 bp, Homo sapien
accactacggtgtcagtgtgctcag

SEQ ID NO: 66301 - DNA, 25 bp, Homo sapien
aaccctacagtagtacctttccgag

SEQ ID NO: 66302 - DNA, 25 bp, Homo sapien
aaccctacagtactacctttccgag

SEQ ID NO: 66303 - DNA, 25 bp, Homo sapien
accggacttcgacaccatttcgacg

SEQ ID NO: 66304 - DNA, 25 bp, Homo sapien
accggacttcgagaccatttcgacg

SEQ ID NO: 66305 - DNA, 25 bp, Homo sapien
ccgcaagttagaggacctcggaaac

SEQ ID NO: 66306 - DNA, 25 bp, Homo sapien
ccgcaagttagacgacctcggaaac

SEQ ID NO: 66307 - DNA, 25 bp, Homo sapien
gtaacagtttacctacttgagtaaa

SEQ ID NO: 66308 - DNA, 25 bp, Homo sapien
gtaacagtttacgtacttgagtaaa

SEQ ID NO: 66309 - DNA, 25 bp, Homo sapien
gatcgtcgtttctacctcgaggtca

SEQ ID NO: 66310 - DNA, 25 bp, Homo sapien
gatcgtcgtttcaacctcgaggtca

SEQ ID NO: 66311 - DNA, 25 bp, Homo sapien
gaagactttcgactcgggtagcacg

SEQ ID NO: 66312 - DNA, 25 bp, Homo sapien
gaagactttcgagtcgggtagcacg

SEQ ID NO: 66313 - DNA, 25 bp, Homo sapien
cgtaactgcaagaacggtaggtctt

SEQ ID NO: 66314 - DNA, 25 bp, Homo sapien
cgtaactgcaagtacggtaggtctt

SEQ ID NO: 66315 - DNA, 25 bp, Homo sapien
aagaaactcttgactagaccgttct

SEQ ID NO: 66316 - DNA, 25 bp, Homo sapien
aagaaactcttgtctagaccgttct

SEQ ID NO: 66317 - DNA, 25 bp, Homo sapien
ggtacgaaacattttctaaccttcg

SEQ ID NO: 66318 - DNA, 25 bp, Homo sapien
ggtacgaaacatattctaaccttcg

SEQ ID NO: 66319 - DNA, 25 bp, Homo sapien
gacaggaaaccgtactctatcctga

SEQ ID NO: 66320 - DNA, 25 bp, Homo sapien
gacaggaaaccgaactctatcctga

SEQ ID NO: 66321 - DNA, 25 bp, Homo sapien
aggagagtcagaaccagtctctgta

SEQ ID NO: 66322 - DNA, 25 bp, Homo sapien
aggagagtcagatccagtctctgta

SEQ ID NO: 66323 - DNA, 25 bp, Homo sapien
taacgggaagtagaaggagtccaca

SEQ ID NO: 66324 - DNA, 25 bp, Homo sapien
taacgggaagtacaaggagtccaca

SEQ ID NO: 66325 - DNA, 25 bp, Homo sapien
ggggagcatctacccgtgtcacacc

SEQ ID NO: 66326 - DNA, 25 bp, Homo sapien
ggggagcatctagccgtgtcacacc

SEQ ID NO: 66327 - DNA, 25 bp, Homo sapien
ggggtcgaggtaaccgtcctcactt

SEQ ID NO: 66328 - DNA, 25 bp, Homo sapien
ggggtcgaggtatccgtcctcactt

SEQ ID NO: 66329 - DNA, 25 bp, Homo sapien
gagctagtggtgaaacctctctagc

SEQ ID NO: 66330 - DNA, 25 bp, Homo sapien
gagctagtggtgtaacctctctagc

SEQ ID NO: 66331 - DNA, 25 bp, Homo sapien
aagagagagggatagaacacttcac

SEQ ID NO: 66332 - DNA, 25 bp, Homo sapien
aagagagagggaaagaacacttcac

SEQ ID NO: 66333 - DNA, 25 bp, Homo sapien
gacagggtccagaagatatcgttcc

SEQ ID NO: 66334 - DNA, 25 bp, Homo sapien
gacagggtccagtagatatcgttcc

SEQ ID NO: 66335 - DNA, 25 bp, Homo sapien
gtcaaatgtttattgtctgtccttg

SEQ ID NO: 66336 - DNA, 25 bp, Homo sapien
gtcaaatgtttaatgtctgtccttg

SEQ ID NO: 66337 - DNA, 25 bp, Homo sapien
aaaagttggtcgatgtttttcgtac

SEQ ID NO: 66338 - DNA, 25 bp, Homo sapien
aaaagttggtcgttgtttttcgtac

SEQ ID NO: 66339 - DNA, 25 bp, Homo sapien
ttttagtcgggttacttcgtcataa

SEQ ID NO: 66340 - DNA, 25 bp, Homo sapien
ttttagtcgggtaacttcgtcataa

SEQ ID NO: 66341 - DNA, 25 bp, Homo sapien
acttactgtctactcagttttgaag

SEQ ID NO: 66342 - DNA, 25 bp, Homo sapien
acttactgtctagtcagttttgaag

SEQ ID NO: 66343 - DNA, 25 bp, Homo sapien
ttgatttactcctcgagtaagtcct

SEQ ID NO: 66344 - DNA, 25 bp, Homo sapien
ttgatttactccacgagtaagtcct

SEQ ID NO: 66345 - DNA, 25 bp, Homo sapien
gacctacaacatcagtctgtcccac

SEQ ID NO: 66346 - DNA, 25 bp, Homo sapien
gacctacaacatgagtctgtcccac

SEQ ID NO: 66347 - DNA, 25 bp, Homo sapien
gtagtaacaaaagtcactgatcaca

SEQ ID NO: 66348 - DNA, 25 bp, Homo sapien
gtagtaacaaaactcactgatcaca

SEQ ID NO: 66349 - DNA, 25 bp, Homo sapien
ggaccatgaggaactacttccctac

SEQ ID NO: 66350 - DNA, 25 bp, Homo sapien
ggaccatgaggatctacttccctac

SEQ ID NO: 66351 - DNA, 25 bp, Homo sapien
aacagggactaccaccgtcttctag

SEQ ID NO: 66352 - DNA, 25 bp, Homo sapien
aacagggactacgaccgtcttctag

SEQ ID NO: 66353 - DNA, 25 bp, Homo sapien
gtctacgagggtacccatttactac

SEQ ID NO: 66354 - DNA, 25 bp, Homo sapien
gtctacgagggttcccatttactac

SEQ ID NO: 66355 - DNA, 25 bp, Homo sapien
ttaggaattgtaaaccacttctaga

SEQ ID NO: 66356 - DNA, 25 bp, Homo sapien
ttaggaattgtataccacttctaga

SEQ ID NO: 66357 - DNA, 25 bp, Homo sapien
gacatgtttctgaagtccatttaat

SEQ ID NO: 66358 - DNA, 25 bp, Homo sapien
gacatgtttctgtagtccatttaat

SEQ ID NO: 66359 - DNA, 25 bp, Homo sapien
gatcgtactctagttgttcttttgg

SEQ ID NO: 66360 - DNA, 25 bp, Homo sapien
gatcgtactctacttgttcttttgg

SEQ ID NO: 66361 - DNA, 25 bp, Homo sapien
ctggtctaacttataccgtttctcg

SEQ ID NO: 66362 - DNA, 25 bp, Homo sapien
ctggtctaacttttaccgtttctcg

SEQ ID NO: 66363 - DNA, 25 bp, Homo sapien
ggtttttcagagttttcacatttac

SEQ ID NO: 66364 - DNA, 25 bp, Homo sapien
ggtttttcagagatttcacatttac

SEQ ID NO: 66365 - DNA, 25 bp, Homo sapien
ttgtgtatccattgctcagtctcga

SEQ ID NO: 66366 - DNA, 25 bp, Homo sapien
ttgtgtatccatagctcagtctcga

SEQ ID NO: 66367 - DNA, 25 bp, Homo sapien
atgggatccgggacgtctcgtctca

SEQ ID NO: 66368 - DNA, 25 bp, Homo sapien
atgggatccgggtcgtctcgtctca

SEQ ID NO: 66369 - DNA, 25 bp, Homo sapien
tgggggtccggtgaccgtcttctcc

SEQ ID NO: 66370 - DNA, 25 bp, Homo sapien
tgggggtccggtcaccgtcttctcc

SEQ ID NO: 66371 - DNA, 25 bp, Homo sapien
gagaggtttgatcacccgtttctcg

SEQ ID NO: 66372 - DNA, 25 bp, Homo sapien
gagaggtttgatgacccgtttctcg

SEQ ID NO: 66373 - DNA, 25 bp, Homo sapien
cttttcgatgacatgttacgtcgtt

SEQ ID NO: 66374 - DNA, 25 bp, Homo sapien
cttttcgatgacttgttacgtcgtt

SEQ ID NO: 66375 - DNA, 25 bp, Homo sapien
gtttaacacacgttctacaagagtt

SEQ ID NO: 66376 - DNA, 25 bp, Homo sapien
gtttaacacacgatctacaagagtt

SEQ ID NO: 66377 - DNA, 25 bp, Homo sapien
gacggtaaaaagttgactcaacata

SEQ ID NO: 66378 - DNA, 25 bp, Homo sapien
gacggtaaaaagatgactcaacata

SEQ ID NO: 66379 - DNA, 25 bp, Homo sapien
cgtcgtgcgaatcaaaatcccactc

SEQ ID NO: 66380 - DNA, 25 bp, Homo sapien
cgtcgtgcgaatgaaaatcccactc

SEQ ID NO: 66381 - DNA, 25 bp, Homo sapien
ctttagataaatactgtcttcagaa

SEQ ID NO: 66382 - DNA, 25 bp, Homo sapien
ctttagataaattctgtcttcagaa

SEQ ID NO: 66383 - DNA, 25 bp, Homo sapien
gatatatagatccttgttctgtcta

SEQ ID NO: 66384 - DNA, 25 bp, Homo sapien
gatatatagatcgttgttctgtcta

SEQ ID NO: 66385 - DNA, 25 bp, Homo sapien
catacaaagccgtactaccggtaag

SEQ ID NO: 66386 - DNA, 25 bp, Homo sapien
catacaaagccgaactaccggtaag

SEQ ID NO: 66387 - DNA, 25 bp, Homo sapien
cagggaaaatccttctacccgacag

SEQ ID NO: 66388 - DNA, 25 bp, Homo sapien
cagggaaaatccatctacccgacag

SEQ ID NO: 66389 - DNA, 25 bp, Homo sapien
gagtagaagtcacctttcgtcttca

SEQ ID NO: 66390 - DNA, 25 bp, Homo sapien
gagtagaagtcagctttcgtcttca

SEQ ID NO: 66391 - DNA, 25 bp, Homo sapien
ttatccgtgaggtctcgtgttacac

SEQ ID NO: 66392 - DNA, 25 bp, Homo sapien
ttatccgtgaggactcgtgttacac

SEQ ID NO: 66393 - DNA, 25 bp, Homo sapien
gctctacgtcggagtcctctcttaa

SEQ ID NO: 66394 - DNA, 25 bp, Homo sapien
gctctacgtcggtgtcctctcttaa

SEQ ID NO: 66395 - DNA, 25 bp, Homo sapien
ggacctctccggtttcagccgttaa

SEQ ID NO: 66396 - DNA, 25 bp, Homo sapien
ggacctctccggattcagccgttaa

SEQ ID NO: 66397 - DNA, 25 bp, Homo sapien
ttgcgactccggaagagaccggccc

SEQ ID NO: 66398 - DNA, 25 bp, Homo sapien
ttgcgactccggtagagaccggccc

SEQ ID NO: 66399 - DNA, 25 bp, Homo sapien
cggaaccacagagactctgaggctc

SEQ ID NO: 66400 - DNA, 25 bp, Homo sapien
cggaaccacagacactctgaggctc

SEQ ID NO: 66401 - DNA, 25 bp, Homo sapien
cccactcccgactcttccggtcgtc

SEQ ID NO: 66402 - DNA, 25 bp, Homo sapien
cccactcccgacacttccggtcgtc

SEQ ID NO: 66403 - DNA, 25 bp, Homo sapien
cacgacaaccccacatgagagtaga

SEQ ID NO: 66404 - DNA, 25 bp, Homo sapien
cacgacaacccctcatgagagtaga

SEQ ID NO: 66405 - DNA, 25 bp, Homo sapien
aagaaactacccacaaggtagtgta

SEQ ID NO: 66406 - DNA, 25 bp, Homo sapien
aagaaactaccctcaaggtagtgta

SEQ ID NO: 66407 - DNA, 25 bp, Homo sapien
cgacgacaccaactaggtcttcgac

SEQ ID NO: 66408 - DNA, 25 bp, Homo sapien
cgacgacaccaagtaggtcttcgac

SEQ ID NO: 66409 - DNA, 25 bp, Homo sapien
gtggaacagcaacgacctcttgtac

SEQ ID NO: 66410 - DNA, 25 bp, Homo sapien
gtggaacagcaaggacctcttgtac

SEQ ID NO: 66411 - DNA, 25 bp, Homo sapien
gggctctcagtcggactcgcccacg

SEQ ID NO: 66412 - DNA, 25 bp, Homo sapien
gggctctcagtccgactcgcccacg

SEQ ID NO: 66413 - DNA, 25 bp, Homo sapien
agtggtgtgatacatgtcagtcacg

SEQ ID NO: 66414 - DNA, 25 bp, Homo sapien
agtggtgtgatagatgtcagtcacg

SEQ ID NO: 66415 - DNA, 25 bp, Homo sapien
ctgacctcacttgactgtaatatcg

SEQ ID NO: 66416 - DNA, 25 bp, Homo sapien
ctgacctcacttcactgtaatatcg

SEQ ID NO: 66417 - DNA, 25 bp, Homo sapien
acattcttaagtcctgcgagtctcg

SEQ ID NO: 66418 - DNA, 25 bp, Homo sapien
acattcttaagtgctgcgagtctcg

SEQ ID NO: 66419 - DNA, 25 bp, Homo sapien
aactctgtctctacctctgtaggtc

SEQ ID NO: 66420 - DNA, 25 bp, Homo sapien
aactctgtctcttcctctgtaggtc

SEQ ID NO: 66421 - DNA, 25 bp, Homo sapien
aagttttacacctttatcggtggtc

SEQ ID NO: 66422 - DNA, 25 bp, Homo sapien
aagttttacaccattatcggtggtc

SEQ ID NO: 66423 - DNA, 25 bp, Homo sapien
agtatttctcccatttgtatgatgt

SEQ ID NO: 66424 - DNA, 25 bp, Homo sapien
agtatttctcccttttgtatgatgt

SEQ ID NO: 66425 - DNA, 25 bp, Homo sapien
gtctctttttcgaataccatagaag

SEQ ID NO: 66426 - DNA, 25 bp, Homo sapien
gtctctttttcgtataccatagaag

SEQ ID NO: 66427 - DNA, 25 bp, Homo sapien
attccgttcttgtttactaagtgaa

SEQ ID NO: 66428 - DNA, 25 bp, Homo sapien
attccgttcttgattactaagtgaa

SEQ ID NO: 66429 - DNA, 25 bp, Homo sapien
cttgcgggttgttgttcaggtagac

SEQ ID NO: 66430 - DNA, 25 bp, Homo sapien
cttgcgggttgtagttcaggtagac

SEQ ID NO: 66431 - DNA, 25 bp, Homo sapien
cttgggttcgtctttgacggtttac

SEQ ID NO: 66432 - DNA, 25 bp, Homo sapien
cttgggttcgtcattgacggtttac

SEQ ID NO: 66433 - DNA, 25 bp, Homo sapien
caatgtgagcaattttactttgact

SEQ ID NO: 66434 - DNA, 25 bp, Homo sapien
caatgtgagcaaatttactttgact

SEQ ID NO: 66435 - DNA, 25 bp, Homo sapien
tcacaggaaaagacctctgggtctc

SEQ ID NO: 66436 - DNA, 25 bp, Homo sapien
tcacaggaaaagtcctctgggtctc

SEQ ID NO: 66437 - DNA, 25 bp, Homo sapien
ctctattatgcgtccctgaggtcag

SEQ ID NO: 66438 - DNA, 25 bp, Homo sapien
ctctattatgcgaccctgaggtcag

SEQ ID NO: 66439 - DNA, 25 bp, Homo sapien
gacattcttaagtcctgcgagtctc

SEQ ID NO: 66440 - DNA, 25 bp, Homo sapien
gacattcttaagacctgcgagtctc

SEQ ID NO: 66441 - DNA, 25 bp, Homo sapien
tgtacatgatacagaaacaacatgg

SEQ ID NO: 66442 - DNA, 25 bp, Homo sapien
tgtacatgatactgaaacaacatgg

SEQ ID NO: 66443 - DNA, 25 bp, Homo sapien
tgaaacgatacttacatcacaatgg

SEQ ID NO: 66444 - DNA, 25 bp, Homo sapien
tgaaacgatactaacatcacaatgg

SEQ ID NO: 66445 - DNA, 25 bp, Homo sapien
atagaaattctatactcgactttgg

SEQ ID NO: 66446 - DNA, 25 bp, Homo sapien
atagaaattctaaactcgactttgg

SEQ ID NO: 66447 - DNA, 25 bp, Homo sapien
tatagatatactagcccgtagatta

SEQ ID NO: 66448 - DNA, 25 bp, Homo sapien
tatagatatacttgcccgtagatta

SEQ ID NO: 66449 - DNA, 25 bp, Homo sapien
tcgtgccggtctaacaccgtcctga

SEQ ID NO: 66450 - DNA, 25 bp, Homo sapien
tcgtgccggtcttacaccgtcctga

SEQ ID NO: 66451 - DNA, 25 bp, Homo sapien
ggacctcgagtcctagggacctctc

SEQ ID NO: 66452 - DNA, 25 bp, Homo sapien
ggacctcgagtcgtagggacctctc

SEQ ID NO: 66453 - DNA, 25 bp, Homo sapien
cggagaaagttcaggtgggtctctc

SEQ ID NO: 66454 - DNA, 25 bp, Homo sapien
cggagaaagttctggtgggtctctc

SEQ ID NO: 66455 - DNA, 25 bp, Homo sapien
cctagaacacgtctgatgttttctc

SEQ ID NO: 66456 - DNA, 25 bp, Homo sapien
cctagaacacgtgtgatgttttctc

SEQ ID NO: 66457 - DNA, 25 bp, Homo sapien
gtcaggaccttttaggtacttggag

SEQ ID NO: 66458 - DNA, 25 bp, Homo sapien
gtcaggacctttaaggtacttggag

SEQ ID NO: 66459 - DNA, 25 bp, Homo sapien
tcatcgactttcagcgtgtttcaca

SEQ ID NO: 66460 - DNA, 25 bp, Homo sapien
tcatcgactttctgcgtgtttcaca

SEQ ID NO: 66461 - DNA, 25 bp, Homo sapien
atccacccgagctgagggtgccacg

SEQ ID NO: 66462 - DNA, 25 bp, Homo sapien
atccacccgagcagagggtgccacg

SEQ ID NO: 66463 - DNA, 25 bp, Homo sapien
tcgacgagactgaatggacgtcgtc

SEQ ID NO: 66464 - DNA, 25 bp, Homo sapien
tcgacgagactgtatggacgtcgtc

SEQ ID NO: 66465 - DNA, 25 bp, Homo sapien
cccgtagtgtgtgtcggtgtatcgc

SEQ ID NO: 66466 - DNA, 25 bp, Homo sapien
cccgtagtgtgtctcggtgtatcgc

SEQ ID NO: 66467 - DNA, 25 bp, Homo sapien
tctcccgggtgtcgacccgggtgct

SEQ ID NO: 66468 - DNA, 25 bp, Homo sapien
tctcccgggtgtggacccgggtgct

SEQ ID NO: 66469 - DNA, 25 bp, Homo sapien
cgtgagtcatgttacttaatgacgt

SEQ ID NO: 66470 - DNA, 25 bp, Homo sapien
cgtgagtcatgtaacttaatgacgt

SEQ ID NO: 66471 - DNA, 25 bp, Homo sapien
tctagacgaccgacggagtcgaggt

SEQ ID NO: 66472 - DNA, 25 bp, Homo sapien
tctagacgaccgtcggagtcgaggt

SEQ ID NO: 66473 - DNA, 25 bp, Homo sapien
gtggtagaaccgacgacctcagact

SEQ ID NO: 66474 - DNA, 25 bp, Homo sapien
gtggtagaaccgtcgacctcagact

SEQ ID NO: 66475 - DNA, 25 bp, Homo sapien
tttgaacgacggttagtcttaagac

SEQ ID NO: 66476 - DNA, 25 bp, Homo sapien
tttgaacgacggatagtcttaagac

SEQ ID NO: 66477 - DNA, 25 bp, Homo sapien
gtctcgaaacgtccaaatataagac

SEQ ID NO: 66478 - DNA, 25 bp, Homo sapien
gtctcgaaacgtgcaaatataagac

SEQ ID NO: 66479 - DNA, 25 bp, Homo sapien
ctctcggttctcctgcctaagcgag

SEQ ID NO: 66480 - DNA, 25 bp, Homo sapien
ctctcggttctcgtgcctaagcgag

SEQ ID NO: 66481 - DNA, 25 bp, Homo sapien
tttgagtgtgaccttgccgaagagg

SEQ ID NO: 66482 - DNA, 25 bp, Homo sapien
tttgagtgtgacgttgccgaagagg

SEQ ID NO: 66483 - DNA, 25 bp, Homo sapien
ttcttttggtgtcgaccggacggtg

SEQ ID NO: 66484 - DNA, 25 bp, Homo sapien
ttcttttggtgtggaccggacggtg

SEQ ID NO: 66485 - DNA, 25 bp, Homo sapien
cctgagtcttgtgtcctctcacgtt

SEQ ID NO: 66486 - DNA, 25 bp, Homo sapien
cctgagtcttgtctcctctcacgtt

SEQ ID NO: 66487 - DNA, 25 bp, Homo sapien
ttaacgttgtcttacttccgacatg

SEQ ID NO: 66488 - DNA, 25 bp, Homo sapien
ttaacgttgtctaacttccgacatg

SEQ ID NO: 66489 - DNA, 25 bp, Homo sapien
gtaccttctaggaactctattaaag

SEQ ID NO: 66490 - DNA, 25 bp, Homo sapien
gtaccttctaggtactctattaaag

SEQ ID NO: 66491 - DNA, 25 bp, Homo sapien
agaccgtgtagtccttgttaaagat

SEQ ID NO: 66492 - DNA, 25 bp, Homo sapien
agaccgtgtagtgcttgttaaagat

SEQ ID NO: 66493 - DNA, 25 bp, Homo sapien
gaaaccgtcgagaacttatttaaga

SEQ ID NO: 66494 - DNA, 25 bp, Homo sapien
gaaaccgtcgagtacttatttaaga

SEQ ID NO: 66495 - DNA, 25 bp, Homo sapien
aagtataccgggattctcaaagtct

SEQ ID NO: 66496 - DNA, 25 bp, Homo sapien
aagtataccgggtttctcaaagtct

SEQ ID NO: 66497 - DNA, 25 bp, Homo sapien
attagaacaggtgtttctcaaagac

SEQ ID NO: 66498 - DNA, 25 bp, Homo sapien
attagaacaggtctttctcaaagac

SEQ ID NO: 66499 - DNA, 25 bp, Homo sapien
gtacatgaagtgctcctcctttgac

SEQ ID NO: 66500 - DNA, 25 bp, Homo sapien
gtacatgaagtggtcctcctttgac

SEQ ID NO: 66501 - DNA, 25 bp, Homo sapien
tcagacgtagggtcactgtccatgc

SEQ ID NO: 66502 - DNA, 25 bp, Homo sapien
tcagacgtagggacactgtccatgc

SEQ ID NO: 66503 - DNA, 25 bp, Homo sapien
cacgagatgtccttcgttatgaaga

SEQ ID NO: 66504 - DNA, 25 bp, Homo sapien
cacgagatgtccatcgttatgaaga

SEQ ID NO: 66505 - DNA, 25 bp, Homo sapien
gttcagagttcagttcctttcatag

SEQ ID NO: 66506 - DNA, 25 bp, Homo sapien
gttcagagttcacttcctttcatag

SEQ ID NO: 66507 - DNA, 25 bp, Homo sapien
tgacgagttcacataaccctttatg

SEQ ID NO: 66508 - DNA, 25 bp, Homo sapien
tgacgagttcacttaaccctttatg

SEQ ID NO: 66509 - DNA, 25 bp, Homo sapien
tctcgtgtggaacatatgtcttacc

SEQ ID NO: 66510 - DNA, 25 bp, Homo sapien
tctcgtgtggaagatatgtcttacc

SEQ ID NO: 66511 - DNA, 25 bp, Homo sapien
gaccttgtggagaagaatttttacc

SEQ ID NO: 66512 - DNA, 25 bp, Homo sapien
gaccttgtggagtagaatttttacc

SEQ ID NO: 66513 - DNA, 25 bp, Homo sapien
taggagaggaaaagattcctagacc

SEQ ID NO: 66514 - DNA, 25 bp, Homo sapien
taggagaggaaatgattcctagacc

SEQ ID NO: 66515 - DNA, 25 bp, Homo sapien
gtgagaagaaatgaaccctaaggtc

SEQ ID NO: 66516 - DNA, 25 bp, Homo sapien
gtgagaagaaatcaaccctaaggtc

SEQ ID NO: 66517 - DNA, 25 bp, Homo sapien
aggacgaaatctctacccacaggtc

SEQ ID NO: 66518 - DNA, 25 bp, Homo sapien
aggacgaaatctgtacccacaggtc

SEQ ID NO: 66519 - DNA, 25 bp, Homo sapien
ggggaagtactttcttctacggccg

SEQ ID NO: 66520 - DNA, 25 bp, Homo sapien
ggggaagtacttacttctacggccg

SEQ ID NO: 66521 - DNA, 25 bp, Homo sapien
gttagactagactaactttgtgttc

SEQ ID NO: 66522 - DNA, 25 bp, Homo sapien
gttagactagacaaactttgtgttc

SEQ ID NO: 66523 - DNA, 25 bp, Homo sapien
tgacgtcgagtgtcgttttggtcgt

SEQ ID NO: 66524 - DNA, 25 bp, Homo sapien
tgacgtcgagtgacgttttggtcgt

SEQ ID NO: 66525 - DNA, 25 bp, Homo sapien
attatcgtcggtaaacaaatcatcg

SEQ ID NO: 66526 - DNA, 25 bp, Homo sapien
attatcgtcggttaacaaatcatcg

SEQ ID NO: 66527 - DNA, 25 bp, Homo sapien
gagtaacctagtcacaagactaatt

SEQ ID NO: 66528 - DNA, 25 bp, Homo sapien
gagtaacctagtgacaagactaatt

SEQ ID NO: 66529 - DNA, 25 bp, Homo sapien
tcctgatgtcttcgtcaagtgtaaa

SEQ ID NO: 66530 - DNA, 25 bp, Homo sapien
tcctgatgtcttggtcaagtgtaaa

SEQ ID NO: 66531 - DNA, 25 bp, Homo sapien
cgtgaatgtacttccttttgtaatg

SEQ ID NO: 66532 - DNA, 25 bp, Homo sapien
cgtgaatgtactaccttttgtaatg

SEQ ID NO: 66533 - DNA, 25 bp, Homo sapien
ttccaatgtccatttttcgatgtgt

SEQ ID NO: 66534 - DNA, 25 bp, Homo sapien
ttccaatgtccaattttcgatgtgt

SEQ ID NO: 66535 - DNA, 25 bp, Homo sapien
taaatacaagacttacgttcagttg

SEQ ID NO: 66536 - DNA, 25 bp, Homo sapien
taaatacaagacatacgttcagttg

SEQ ID NO: 66537 - DNA, 25 bp, Homo sapien
aacgagtccaaggtacgagtaattt

SEQ ID NO: 66538 - DNA, 25 bp, Homo sapien
aacgagtccaagctacgagtaattt

SEQ ID NO: 66539 - DNA, 25 bp, Homo sapien
gaccggtacctcgtcacaaactctt

SEQ ID NO: 66540 - DNA, 25 bp, Homo sapien
gaccggtacctcctcacaaactctt

SEQ ID NO: 66541 - DNA, 25 bp, Homo sapien
accggtcggtatccttggactccgt

SEQ ID NO: 66542 - DNA, 25 bp, Homo sapien
accggtcggtatgcttggactccgt

SEQ ID NO: 66543 - DNA, 25 bp, Homo sapien
aacagttctagttctctcaggtccc

SEQ ID NO: 66544 - DNA, 25 bp, Homo sapien
aacagttctagtactctcaggtccc

SEQ ID NO: 66545 - DNA, 25 bp, Homo sapien
ttgtcaaaactgttgtccttgttta

SEQ ID NO: 66546 - DNA, 25 bp, Homo sapien
ttgtcaaaactgatgtccttgttta

SEQ ID NO: 66547 - DNA, 25 bp, Homo sapien
ctttcagaagacaaggtctggtttt

SEQ ID NO: 66548 - DNA, 25 bp, Homo sapien
ctttcagaagactaggtctggtttt

SEQ ID NO: 66549 - DNA, 25 bp, Homo sapien
ataaacttaacctacggcgtggaaa

SEQ ID NO: 66550 - DNA, 25 bp, Homo sapien
ataaacttaaccaacggcgtggaaa

SEQ ID NO: 66551 - DNA, 25 bp, Homo sapien
tcatccgtccgtgtgggtggggtag

SEQ ID NO: 66552 - DNA, 25 bp, Homo sapien
tcatccgtccgtctgggtggggtag

SEQ ID NO: 66553 - DNA, 25 bp, Homo sapien
ttgtacccagttcttcttcccgtcg

SEQ ID NO: 66554 - DNA, 25 bp, Homo sapien
ttgtacccagttgttcttcccgtcg

SEQ ID NO: 66555 - DNA, 25 bp, Homo sapien
taccatgtactgttccacgccgagg

SEQ ID NO: 66556 - DNA, 25 bp, Homo sapien
taccatgtactgatccacgccgagg

SEQ ID NO: 66557 - DNA, 25 bp, Homo sapien
tccgtactgttgtcgtccactcctt

SEQ ID NO: 66558 - DNA, 25 bp, Homo sapien
tccgtactgttgacgtccactcctt

SEQ ID NO: 66559 - DNA, 25 bp, Homo sapien
tccttcatggtactctcgggccggt

SEQ ID NO: 66560 - DNA, 25 bp, Homo sapien
tccttcatggtagtctcgggccggt

SEQ ID NO: 66561 - DNA, 25 bp, Homo sapien
agtattctagtatttcgttttgacc

SEQ ID NO: 66562 - DNA, 25 bp, Homo sapien
agtattctagtaattcgttttgacc

SEQ ID NO: 66563 - DNA, 25 bp, Homo sapien
gtactacctgttgtcttgatgacga

SEQ ID NO: 66564 - DNA, 25 bp, Homo sapien
gtactacctgttctcttgatgacga

SEQ ID NO: 66565 - DNA, 25 bp, Homo sapien
gtagtctgttgttcgatttactgca

SEQ ID NO: 66566 - DNA, 25 bp, Homo sapien
gtagtctgttgtacgatttactgca

SEQ ID NO: 66567 - DNA, 25 bp, Homo sapien
gatgtttctcatctagttcaaaagt

SEQ ID NO: 66568 - DNA, 25 bp, Homo sapien
gatgtttctcatgtagttcaaaagt

SEQ ID NO: 66569 - DNA, 25 bp, Homo sapien
cacacttcccctcgtggaaggaagt

SEQ ID NO: 66570 - DNA, 25 bp, Homo sapien
cacacttcccctggtggaaggaagt

SEQ ID NO: 66571 - DNA, 25 bp, Homo sapien
catcgacctcgatacggaaatcgaa

SEQ ID NO: 66572 - DNA, 25 bp, Homo sapien
catcgacctcgaaacggaaatcgaa

SEQ ID NO: 66573 - DNA, 25 bp, Homo sapien
caaaggctacggttggaacctggta

SEQ ID NO: 66574 - DNA, 25 bp, Homo sapien
caaaggctacggatggaacctggta

SEQ ID NO: 66575 - DNA, 25 bp, Homo sapien
aatgtttcgtcgatctttcataaga

SEQ ID NO: 66576 - DNA, 25 bp, Homo sapien
aatgtttcgtcgttctttcataaga

SEQ ID NO: 66577 - DNA, 25 bp, Homo sapien
aaatatcgtcgtagacattctaaga

SEQ ID NO: 66578 - DNA, 25 bp, Homo sapien
aaatatcgtcgttgacattctaaga

SEQ ID NO: 66579 - DNA, 25 bp, Homo sapien
cactaatgtcggttgacaatgattt

SEQ ID NO: 66580 - DNA, 25 bp, Homo sapien
cactaatgtcggatgacaatgattt

SEQ ID NO: 66581 - DNA, 25 bp, Homo sapien
acatcgttttacagggaatcattat

SEQ ID NO: 66582 - DNA, 25 bp, Homo sapien
acatcgttttactgggaatcattat

SEQ ID NO: 66583 - DNA, 25 bp, Homo sapien
ccgtttctcggtagggactattaaa

SEQ ID NO: 66584 - DNA, 25 bp, Homo sapien
ccgtttctcggttgggactattaaa

SEQ ID NO: 66585 - DNA, 25 bp, Homo sapien
tggtcactgcgtcagggtccctcca

SEQ ID NO: 66586 - DNA, 25 bp, Homo sapien
tggtcactgcgtgagggtccctcca

SEQ ID NO: 66587 - DNA, 25 bp, Homo sapien
tccgtaagagtacgagtgacctgga

SEQ ID NO: 66588 - DNA, 25 bp, Homo sapien
tccgtaagagtaggagtgacctgga

SEQ ID NO: 66589 - DNA, 25 bp, Homo sapien
acccggacggagtaggatcgtagaa

SEQ ID NO: 66590 - DNA, 25 bp, Homo sapien
acccggacggagaaggatcgtagaa

SEQ ID NO: 66591 - DNA, 25 bp, Homo sapien
tccgggtactgataagatcgtcgaa

SEQ ID NO: 66592 - DNA, 25 bp, Homo sapien
tccgggtactgaaaagatcgtcgaa

SEQ ID NO: 66593 - DNA, 25 bp, Homo sapien
ttcgtgtactgagctttacgattta

SEQ ID NO: 66594 - DNA, 25 bp, Homo sapien
ttcgtgtactgacctttacgattta

SEQ ID NO: 66595 - DNA, 25 bp, Homo sapien
ttggactaatcttatacggtctacc

SEQ ID NO: 66596 - DNA, 25 bp, Homo sapien
ttggactaatctaatacggtctacc

SEQ ID NO: 66597 - DNA, 25 bp, Homo sapien
aaagaactgacaatcaacccggaac

SEQ ID NO: 66598 - DNA, 25 bp, Homo sapien
aaagaactgacattcaacccggaac

SEQ ID NO: 66599 - DNA, 25 bp, Homo sapien
caaaagtgttattgaccccggacac

SEQ ID NO: 66600 - DNA, 25 bp, Homo sapien
caaaagtgttatagaccccggacac

SEQ ID NO: 66601 - DNA, 25 bp, Homo sapien
gagaaagttctgtcgcgtcccttta

SEQ ID NO: 66602 - DNA, 25 bp, Homo sapien
gagaaagttctgacgcgtcccttta

SEQ ID NO: 66603 - DNA, 25 bp, Homo sapien
aggtgtagttccaactccttgtgac

SEQ ID NO: 66604 - DNA, 25 bp, Homo sapien
aggtgtagttcctactccttgtgac

SEQ ID NO: 66605 - DNA, 25 bp, Homo sapien
ttttagtcgaagaatctactacagt

SEQ ID NO: 66606 - DNA, 25 bp, Homo sapien
ttttagtcgaagtatctactacagt

SEQ ID NO: 66607 - DNA, 25 bp, Homo sapien
cgtccttaggacgacactcctcgat

SEQ ID NO: 66608 - DNA, 25 bp, Homo sapien
cgtccttaggaccacactcctcgat

SEQ ID NO: 66609 - DNA, 25 bp, Homo sapien
aaccttatggtgtcgaccgaccctc

SEQ ID NO: 66610 - DNA, 25 bp, Homo sapien
aaccttatggtgacgaccgaccctc

SEQ ID NO: 66611 - DNA, 25 bp, Homo sapien
acatgaacggcgagactcagtcacc

SEQ ID NO: 66612 - DNA, 25 bp, Homo sapien
acatgaacggcgtgactcagtcacc

SEQ ID NO: 66613 - DNA, 25 bp, Homo sapien
tttccgagatagtgtggaggacacc

SEQ ID NO: 66614 - DNA, 25 bp, Homo sapien
tttccgagatagagtggaggacacc

SEQ ID NO: 66615 - DNA, 25 bp, Homo sapien
gagcctgagtcgactggaggcacac

SEQ ID NO: 66616 - DNA, 25 bp, Homo sapien
gagcctgagtcgtctggaggcacac

SEQ ID NO: 66617 - DNA, 25 bp, Homo sapien
gagcaccgggccgcacggcacgtac

SEQ ID NO: 66618 - DNA, 25 bp, Homo sapien
gagcaccgggccccacggcacgtac

SEQ ID NO: 66619 - DNA, 25 bp, Homo sapien
tgggacccgggcaagagtccaagac

SEQ ID NO: 66620 - DNA, 25 bp, Homo sapien
tgggacccgggctagagtccaagac

SEQ ID NO: 66621 - DNA, 25 bp, Homo sapien
ggtgggacgagtcgagttcccctct

SEQ ID NO: 66622 - DNA, 25 bp, Homo sapien
ggtgggacgagtggagttcccctct

SEQ ID NO: 66623 - DNA, 25 bp, Homo sapien
ggaaagacacggtcgtcgacgacta

SEQ ID NO: 66624 - DNA, 25 bp, Homo sapien
ggaaagacacggacgtcgacgacta

SEQ ID NO: 66625 - DNA, 25 bp, Homo sapien
gtagaaaccgcgaagtacgtactaa

SEQ ID NO: 66626 - DNA, 25 bp, Homo sapien
gtagaaaccgcgtagtacgtactaa

SEQ ID NO: 66627 - DNA, 25 bp, Homo sapien
ggattgacctcttatggtacgacaa

SEQ ID NO: 66628 - DNA, 25 bp, Homo sapien
ggattgacctctaatggtacgacaa

SEQ ID NO: 66629 - DNA, 25 bp, Homo sapien
gatcccgttgtaaaccgtcaagagt

SEQ ID NO: 66630 - DNA, 25 bp, Homo sapien
gatcccgttgtataccgtcaagagt

SEQ ID NO: 66631 - DNA, 25 bp, Homo sapien
accgagccccaggtttgctcagagg

SEQ ID NO: 66632 - DNA, 25 bp, Homo sapien
accgagccccagctttgctcagagg

SEQ ID NO: 66633 - DNA, 25 bp, Homo sapien
aatgaccaccgtatttatccggggt

SEQ ID NO: 66634 - DNA, 25 bp, Homo sapien
aatgaccaccgtttttatccggggt

SEQ ID NO: 66635 - DNA, 25 bp, Homo sapien
ggtctccctttcatctagggtcgtg

SEQ ID NO: 66636 - DNA, 25 bp, Homo sapien
ggtctccctttcttctagggtcgtg

SEQ ID NO: 66637 - DNA, 25 bp, Homo sapien
gtgtcctcggtctctttaggacaat

SEQ ID NO: 66638 - DNA, 25 bp, Homo sapien
gtgtcctcggtcactttaggacaat

SEQ ID NO: 66639 - DNA, 25 bp, Homo sapien
tatcgtagtcatttttaccgtgaaa

SEQ ID NO: 66640 - DNA, 25 bp, Homo sapien
tatcgtagtcatatttaccgtgaaa

SEQ ID NO: 66641 - DNA, 25 bp, Homo sapien
gaacgaccactgctcgctcctgaaa

SEQ ID NO: 66642 - DNA, 25 bp, Homo sapien
gaacgaccactggtcgctcctgaaa

SEQ ID NO: 66643 - DNA, 25 bp, Homo sapien
cgacgaccctgatagacccttaaga

SEQ ID NO: 66644 - DNA, 25 bp, Homo sapien
cgacgaccctgaaagacccttaaga

SEQ ID NO: 66645 - DNA, 25 bp, Homo sapien
taaatgctggaacacctatacagac

SEQ ID NO: 66646 - DNA, 25 bp, Homo sapien
taaatgctggaagacctatacagac

SEQ ID NO: 66647 - DNA, 25 bp, Homo sapien
tggattgtcgggtactttctccgaa

SEQ ID NO: 66648 - DNA, 25 bp, Homo sapien
tggattgtcgggaactttctccgaa

SEQ ID NO: 66649 - DNA, 25 bp, Homo sapien
cttgggatagtctgtcgctcgtaag

SEQ ID NO: 66650 - DNA, 25 bp, Homo sapien
cttgggatagtcagtcgctcgtaag

SEQ ID NO: 66651 - DNA, 25 bp, Homo sapien
ttcttgtagtaagtctgtttcggac

SEQ ID NO: 66652 - DNA, 25 bp, Homo sapien
ttcttgtagtaactctgtttcggac

SEQ ID NO: 66653 - DNA, 25 bp, Homo sapien
tggtggtgacacgtatacctacgtc

SEQ ID NO: 66654 - DNA, 25 bp, Homo sapien
tggtggtgacacctatacctacgtc

SEQ ID NO: 66655 - DNA, 25 bp, Homo sapien
tcgcagaggggtcgagatcccgtcg

SEQ ID NO: 66656 - DNA, 25 bp, Homo sapien
tcgcagaggggtggagatcccgtcg

SEQ ID NO: 66657 - DNA, 25 bp, Homo sapien
gaccaaggaggtagtttctctctct

SEQ ID NO: 66658 - DNA, 25 bp, Homo sapien
gaccaaggaggttgtttctctctct

SEQ ID NO: 66659 - DNA, 25 bp, Homo sapien
attacgaaagggtctctttcatctt

SEQ ID NO: 66660 - DNA, 25 bp, Homo sapien
attacgaaagggactctttcatctt

SEQ ID NO: 66661 - DNA, 25 bp, Homo sapien
gacaagagggacagacttctccctc

SEQ ID NO: 66662 - DNA, 25 bp, Homo sapien
gacaagagggactgacttctccctc

SEQ ID NO: 66663 - DNA, 25 bp, Homo sapien
cctatagggcagactacagtcgttc

SEQ ID NO: 66664 - DNA, 25 bp, Homo sapien
cctatagggcagtctacagtcgttc

SEQ ID NO: 66665 - DNA, 25 bp, Homo sapien
tccagaaggacgtactcgagtggtc

SEQ ID NO: 66666 - DNA, 25 bp, Homo sapien
tccagaaggacgaactcgagtggtc

SEQ ID NO: 66667 - DNA, 25 bp, Homo sapien
ttaccgtccgagacccctgtcggta

SEQ ID NO: 66668 - DNA, 25 bp, Homo sapien
ttaccgtccgagtcccctgtcggta

SEQ ID NO: 66669 - DNA, 25 bp, Homo sapien
tcgccgacgccgtcgcgttgtgact

SEQ ID NO: 66670 - DNA, 25 bp, Homo sapien
tcgccgacgccgacgcgttgtgact

SEQ ID NO: 66671 - DNA, 25 bp, Homo sapien
ctttggtcagtcgaggcgacttgtc

SEQ ID NO: 66672 - DNA, 25 bp, Homo sapien
ctttggtcagtccaggcgacttgtc

SEQ ID NO: 66673 - DNA, 25 bp, Homo sapien
ctttgggacgtcagaaacatgtgtg

SEQ ID NO: 66674 - DNA, 25 bp, Homo sapien
ctttgggacgtctgaaacatgtgtg

SEQ ID NO: 66675 - DNA, 25 bp, Homo sapien
ccttgagatacttctaagatattga

SEQ ID NO: 66676 - DNA, 25 bp, Homo sapien
ccttgagatactactaagatattga

SEQ ID NO: 66677 - DNA, 25 bp, Homo sapien
gttatgtcaactctgatacctttcg

SEQ ID NO: 66678 - DNA, 25 bp, Homo sapien
gttatgtcaactgtgatacctttcg

SEQ ID NO: 66679 - DNA, 25 bp, Homo sapien
ttgtgttaactcctgagatgttaac

SEQ ID NO: 66680 - DNA, 25 bp, Homo sapien
ttgtgttaactcgtgagatgttaac

SEQ ID NO: 66681 - DNA, 25 bp, Homo sapien
tgtacgtagcctaaatgaactcaag

SEQ ID NO: 66682 - DNA, 25 bp, Homo sapien
tgtacgtagccttaatgaactcaag

SEQ ID NO: 66683 - DNA, 25 bp, Homo sapien
actcatctctgtagagaactcgaga

SEQ ID NO: 66684 - DNA, 25 bp, Homo sapien
actcatctctgttgagaactcgaga

SEQ ID NO: 66685 - DNA, 25 bp, Homo sapien
gatatatttgtcgtgatacacactg

SEQ ID NO: 66686 - DNA, 25 bp, Homo sapien
gatatatttgtcctgatacacactg

SEQ ID NO: 66687 - DNA, 25 bp, Homo sapien
gtatcttccggtcctcagtcctctg

SEQ ID NO: 66688 - DNA, 25 bp, Homo sapien
gtatcttccggtgctcagtcctctg

SEQ ID NO: 66689 - DNA, 25 bp, Homo sapien
ataacgtcccagttcgacttttccg

SEQ ID NO: 66690 - DNA, 25 bp, Homo sapien
ataacgtcccagatcgacttttccg

SEQ ID NO: 66691 - DNA, 25 bp, Homo sapien
tcactgggatacgactcggtctacc

SEQ ID NO: 66692 - DNA, 25 bp, Homo sapien
tcactgggataccactcggtctacc

SEQ ID NO: 66693 - DNA, 25 bp, Homo sapien
tctctctgagcgtctcttcggcagc

SEQ ID NO: 66694 - DNA, 25 bp, Homo sapien
tctctctgagcgactcttcggcagc

SEQ ID NO: 66695 - DNA, 25 bp, Homo sapien
ttcttctgggaaacttccgtccgta

SEQ ID NO: 66696 - DNA, 25 bp, Homo sapien
ttcttctgggaatcttccgtccgta

SEQ ID NO: 66697 - DNA, 25 bp, Homo sapien
tcatcgacgagtactcttttcacgg

SEQ ID NO: 66698 - DNA, 25 bp, Homo sapien
tcatcgacgagttctcttttcacgg

SEQ ID NO: 66699 - DNA, 25 bp, Homo sapien
ttcccgtacgttctcttttagagtc

SEQ ID NO: 66700 - DNA, 25 bp, Homo sapien
ttcccgtacgttgtcttttagagtc

SEQ ID NO: 66701 - DNA, 25 bp, Homo sapien
gaatccggtttgtttgttatgacct

SEQ ID NO: 66702 - DNA, 25 bp, Homo sapien
gaatccggtttgattgttatgacct

SEQ ID NO: 66703 - DNA, 25 bp, Homo sapien
gtccggttacagatccggatcccgt

SEQ ID NO: 66704 - DNA, 25 bp, Homo sapien
gtccggttacagttccggatcccgt

SEQ ID NO: 66705 - DNA, 25 bp, Homo sapien
gccatcgggcctttgaccctcgttt

SEQ ID NO: 66706 - DNA, 25 bp, Homo sapien
gccatcgggcctatgaccctcgttt

SEQ ID NO: 66707 - DNA, 25 bp, Homo sapien
taataagggatttatcgaccatatc

SEQ ID NO: 66708 - DNA, 25 bp, Homo sapien
taataagggattaatcgaccatatc

SEQ ID NO: 66709 - DNA, 25 bp, Homo sapien
tgattcgtgaagtcacggaggtccc

SEQ ID NO: 66710 - DNA, 25 bp, Homo sapien
tgattcgtgaagacacggaggtccc

SEQ ID NO: 66711 - DNA, 25 bp, Homo sapien
acaactttcaccttcctgaggggtt

SEQ ID NO: 66712 - DNA, 25 bp, Homo sapien
acaactttcaccatcctgaggggtt

SEQ ID NO: 66713 - DNA, 25 bp, Homo sapien
accataattctggtttggtcaggta

SEQ ID NO: 66714 - DNA, 25 bp, Homo sapien
accataattctgctttggtcaggta

SEQ ID NO: 66715 - DNA, 25 bp, Homo sapien
cgacagtaacttgtcattgggggtt

SEQ ID NO: 66716 - DNA, 25 bp, Homo sapien
cgacagtaacttctcattgggggtt

SEQ ID NO: 66717 - DNA, 25 bp, Homo sapien
cgtgaaattggtattcattcgttac

SEQ ID NO: 66718 - DNA, 25 bp, Homo sapien
cgtgaaattggttttcattcgttac

SEQ ID NO: 66719 - DNA, 25 bp, Homo sapien
tttaagttgtacgtcctcctttcgg

SEQ ID NO: 66720 - DNA, 25 bp, Homo sapien
tttaagttgtacctcctcctttcgg

SEQ ID NO: 66721 - DNA, 25 bp, Homo sapien
cgtctgcttgtcacttttgtctcgg

SEQ ID NO: 66722 - DNA, 25 bp, Homo sapien
cgtctgcttgtctcttttgtctcgg

SEQ ID NO: 66723 - DNA, 25 bp, Homo sapien
ttagttacggtctctgtttcactcc

SEQ ID NO: 66724 - DNA, 25 bp, Homo sapien
ttagttacggtcactgtttcactcc

SEQ ID NO: 66725 - DNA, 25 bp, Homo sapien
attttaccggtgatagttatcctaa

SEQ ID NO: 66726 - DNA, 25 bp, Homo sapien
attttaccggtgttagttatcctaa

SEQ ID NO: 66727 - DNA, 25 bp, Homo sapien
gatgcatttacacttgcaccgacaa

SEQ ID NO: 66728 - DNA, 25 bp, Homo sapien
gatgcatttacagttgcaccgacaa

SEQ ID NO: 66729 - DNA, 25 bp, Homo sapien
tccttttgtgggatacatgttacaa

SEQ ID NO: 66730 - DNA, 25 bp, Homo sapien
tccttttgtgggttacatgttacaa

SEQ ID NO: 66731 - DNA, 25 bp, Homo sapien
acctttccggagtcaatcactcagt

SEQ ID NO: 66732 - DNA, 25 bp, Homo sapien
acctttccggagacaatcactcagt

SEQ ID NO: 66733 - DNA, 25 bp, Homo sapien
ctccgggcctgtcgaagaactagcg

SEQ ID NO: 66734 - DNA, 25 bp, Homo sapien
ctccgggcctgtggaagaactagcg

SEQ ID NO: 66735 - DNA, 25 bp, Homo sapien
ccaaaggacttctctaagaaagtgt

SEQ ID NO: 66736 - DNA, 25 bp, Homo sapien
ccaaaggacttcactaagaaagtgt

SEQ ID NO: 66737 - DNA, 25 bp, Homo sapien
agagatgacgttccaatgtcatgtg

SEQ ID NO: 66738 - DNA, 25 bp, Homo sapien
agagatgacgttgcaatgtcatgtg

SEQ ID NO: 66739 - DNA, 25 bp, Homo sapien
gaacaggacccgtaattgtagtcga

SEQ ID NO: 66740 - DNA, 25 bp, Homo sapien
gaacaggacccgaaattgtagtcga

SEQ ID NO: 66741 - DNA, 25 bp, Homo sapien
ggcgggccatgtctctcgacgcgtc

SEQ ID NO: 66742 - DNA, 25 bp, Homo sapien
ggcgggccatgtgtctcgacgcgtc

SEQ ID NO: 66743 - DNA, 25 bp, Homo sapien
aggcaggaacggtggtcctacgtca

SEQ ID NO: 66744 - DNA, 25 bp, Homo sapien
aggcaggaacggaggtcctacgtca

SEQ ID NO: 66745 - DNA, 25 bp, Homo sapien
tggggtccactctggagtttagtga

SEQ ID NO: 66746 - DNA, 25 bp, Homo sapien
tggggtccactcaggagtttagtga

SEQ ID NO: 66747 - DNA, 25 bp, Homo sapien
gtacacacctctacgggtccttaga

SEQ ID NO: 66748 - DNA, 25 bp, Homo sapien
gtacacacctcttcgggtccttaga

SEQ ID NO: 66749 - DNA, 25 bp, Homo sapien
cggaccgactacgttgggttcaaga

SEQ ID NO: 66750 - DNA, 25 bp, Homo sapien
cggaccgactaccttgggttcaaga

SEQ ID NO: 66751 - DNA, 25 bp, Homo sapien
cgatctgattcttatggttcttgtg

SEQ ID NO: 66752 - DNA, 25 bp, Homo sapien
cgatctgattctaatggttcttgtg

SEQ ID NO: 66753 - DNA, 25 bp, Homo sapien
gacccactactttaccggttcttag

SEQ ID NO: 66754 - DNA, 25 bp, Homo sapien
gacccactacttaaccggttcttag

SEQ ID NO: 66755 - DNA, 25 bp, Homo sapien
gtgcctcctgtacaccggtcctatt

SEQ ID NO: 66756 - DNA, 25 bp, Homo sapien
gtgcctcctgtagaccggtcctatt

SEQ ID NO: 66757 - DNA, 25 bp, Homo sapien
gtgggaatcttaggtcaggattttt

SEQ ID NO: 66758 - DNA, 25 bp, Homo sapien
gtgggaatcttacgtcaggattttt

SEQ ID NO: 66759 - DNA, 25 bp, Homo sapien
aagatcgtcgttcttgtcattgttt

SEQ ID NO: 66760 - DNA, 25 bp, Homo sapien
aagatcgtcgttgttgtcattgttt

SEQ ID NO: 66761 - DNA, 25 bp, Homo sapien
acactatgttgtctttcatgtcttg

SEQ ID NO: 66762 - DNA, 25 bp, Homo sapien
acactatgttgtgtttcatgtcttg

SEQ ID NO: 66763 - DNA, 25 bp, Homo sapien
cgtgttgactggttccaggttctac

SEQ ID NO: 66764 - DNA, 25 bp, Homo sapien
cgtgttgactggatccaggttctac

SEQ ID NO: 66765 - DNA, 25 bp, Homo sapien
acagttcgtactgttaaccagatca

SEQ ID NO: 66766 - DNA, 25 bp, Homo sapien
acagttcgtactcttaaccagatca

SEQ ID NO: 66767 - DNA, 25 bp, Homo sapien
ctcctcggtttttgcctaaatgtag

SEQ ID NO: 66768 - DNA, 25 bp, Homo sapien
ctcctcggttttagcctaaatgtag

SEQ ID NO: 66769 - DNA, 25 bp, Homo sapien
tgagtcactcggagacagtcatatt

SEQ ID NO: 66770 - DNA, 25 bp, Homo sapien
tgagtcactcggtgacagtcatatt

SEQ ID NO: 66771 - DNA, 25 bp, Homo sapien
ccctcactggtagatgtcacacact

SEQ ID NO: 66772 - DNA, 25 bp, Homo sapien
ccctcactggtacatgtcacacact

SEQ ID NO: 66773 - DNA, 25 bp, Homo sapien
gaaaaccaagggtactgtaactgtc

SEQ ID NO: 66774 - DNA, 25 bp, Homo sapien
gaaaaccaagggaactgtaactgtc

SEQ ID NO: 66775 - DNA, 25 bp, Homo sapien
cacaagacaagtgttacgttaattt

SEQ ID NO: 66776 - DNA, 25 bp, Homo sapien
cacaagacaagtcttacgttaattt

SEQ ID NO: 66777 - DNA, 25 bp, Homo sapien
ccgatagttcaggaaacgacttaaa

SEQ ID NO: 66778 - DNA, 25 bp, Homo sapien
ccgatagttcagcaaacgacttaaa

SEQ ID NO: 66779 - DNA, 25 bp, Homo sapien
cggtcaatgaattttacgacttcaa

SEQ ID NO: 66780 - DNA, 25 bp, Homo sapien
cggtcaatgaatattacgacttcaa

SEQ ID NO: 66781 - DNA, 25 bp, Homo sapien
gtattctattcatttgcaaacacac

SEQ ID NO: 66782 - DNA, 25 bp, Homo sapien
gtattctattcaattgcaaacacac

SEQ ID NO: 66783 - DNA, 25 bp, Homo sapien
gttgttaaagaacatacaatatctt

SEQ ID NO: 66784 - DNA, 25 bp, Homo sapien
gttgttaaagaagatacaatatctt

SEQ ID NO: 66785 - DNA, 25 bp, Homo sapien
tatatgagaaagagtctccgttttc

SEQ ID NO: 66786 - DNA, 25 bp, Homo sapien
tatatgagaaagtgtctccgttttc

SEQ ID NO: 66787 - DNA, 25 bp, Homo sapien
agaacaacgttttgtctatagagtc

SEQ ID NO: 66788 - DNA, 25 bp, Homo sapien
agaacaacgtttagtctatagagtc

SEQ ID NO: 66789 - DNA, 25 bp, Homo sapien
tcacaggcaagtgtgtgtttgagtc

SEQ ID NO: 66790 - DNA, 25 bp, Homo sapien
tcacaggcaagtctgtgtttgagtc

SEQ ID NO: 66791 - DNA, 25 bp, Homo sapien
aacgatcgttgacgacgttaaaatt

SEQ ID NO: 66792 - DNA, 25 bp, Homo sapien
aacgatcgttgaggacgttaaaatt

SEQ ID NO: 66793 - DNA, 25 bp, Homo sapien
tctctggagacaaggaagaaccatc

SEQ ID NO: 66794 - DNA, 25 bp, Homo sapien
tctctggagacatggaagaaccatc

SEQ ID NO: 66795 - DNA, 25 bp, Homo sapien
tcgaggcactagtggtctaggtgtt

SEQ ID NO: 66796 - DNA, 25 bp, Homo sapien
tcgaggcactagaggtctaggtgtt

SEQ ID NO: 66797 - DNA, 25 bp, Homo sapien
ctctcggtccgactggtctggtctc

SEQ ID NO: 66798 - DNA, 25 bp, Homo sapien
ctctcggtccgagtggtctggtctc

SEQ ID NO: 66799 - DNA, 25 bp, Homo sapien
ctatcctcaactctgggtattttgt

SEQ ID NO: 66800 - DNA, 25 bp, Homo sapien
ctatcctcaactgtgggtattttgt

SEQ ID NO: 66801 - DNA, 25 bp, Homo sapien
ttcggcacctcttagaatattttgt

SEQ ID NO: 66802 - DNA, 25 bp, Homo sapien
ttcggcacctctaagaatattttgt

SEQ ID NO: 66803 - DNA, 25 bp, Homo sapien
gagaccgcttcaatacaataaattg

SEQ ID NO: 66804 - DNA, 25 bp, Homo sapien
gagaccgcttcattacaataaattg

SEQ ID NO: 66805 - DNA, 25 bp, Homo sapien
gattgtttgtttaagttgtaccctc

SEQ ID NO: 66806 - DNA, 25 bp, Homo sapien
gattgtttgttttagttgtaccctc

SEQ ID NO: 66807 - DNA, 25 bp, Homo sapien
cgtttaaggacattactttaccccg

SEQ ID NO: 66808 - DNA, 25 bp, Homo sapien
cgtttaaggacaatactttaccccg

SEQ ID NO: 66809 - DNA, 25 bp, Homo sapien
tttaagaatataacacgtattgccg

SEQ ID NO: 66810 - DNA, 25 bp, Homo sapien
tttaagaatatatcacgtattgccg

SEQ ID NO: 66811 - DNA, 25 bp, Homo sapien
tgtatatgatccatttgtgttctcg

SEQ ID NO: 66812 - DNA, 25 bp, Homo sapien
tgtatatgatccttttgtgttctcg

SEQ ID NO: 66813 - DNA, 25 bp, Homo sapien
ttcgtttcgcctttgatgtcgattc

SEQ ID NO: 66814 - DNA, 25 bp, Homo sapien
ttcgtttcgcctatgatgtcgattc

SEQ ID NO: 66815 - DNA, 25 bp, Homo sapien
ctttttccttgctgaacgttgtaga

SEQ ID NO: 66816 - DNA, 25 bp, Homo sapien
ctttttccttgcagaacgttgtaga

SEQ ID NO: 66817 - DNA, 25 bp, Homo sapien
tcttgtccttgtacggaatcgacga

SEQ ID NO: 66818 - DNA, 25 bp, Homo sapien
tcttgtccttgttcggaatcgacga

SEQ ID NO: 66819 - DNA, 25 bp, Homo sapien
tcatttgccttttggtaagtgtcta

SEQ ID NO: 66820 - DNA, 25 bp, Homo sapien
tcatttgcctttaggtaagtgtcta

SEQ ID NO: 66821 - DNA, 25 bp, Homo sapien
caagccccggtcacgaaagctctat

SEQ ID NO: 66822 - DNA, 25 bp, Homo sapien
caagccccggtctcgaaagctctat

SEQ ID NO: 66823 - DNA, 25 bp, Homo sapien
gcattcgtactcatacaaagccgta

SEQ ID NO: 66824 - DNA, 25 bp, Homo sapien
gcattcgtactcttacaaagccgta

SEQ ID NO: 66825 - DNA, 25 bp, Homo sapien
taagcaaaaggactgttacaccgta

SEQ ID NO: 66826 - DNA, 25 bp, Homo sapien
taagcaaaaggagtgttacaccgta

SEQ ID NO: 66827 - DNA, 25 bp, Homo sapien
tatccgagactcgtctaaagtctat

SEQ ID NO: 66828 - DNA, 25 bp, Homo sapien
tatccgagactcctctaaagtctat

SEQ ID NO: 66829 - DNA, 25 bp, Homo sapien
aggtctgaagactctactagactta

SEQ ID NO: 66830 - DNA, 25 bp, Homo sapien
aggtctgaagacactactagactta

SEQ ID NO: 66831 - DNA, 25 bp, Homo sapien
tcctctaggactcagtcgtgactaa

SEQ ID NO: 66832 - DNA, 25 bp, Homo sapien
tcctctaggactgagtcgtgactaa

SEQ ID NO: 66833 - DNA, 25 bp, Homo sapien
cacacttaggttgatacggtacgaa

SEQ ID NO: 66834 - DNA, 25 bp, Homo sapien
cacacttaggttcatacggtacgaa

SEQ ID NO: 66835 - DNA, 25 bp, Homo sapien
ttaagattgtgtctccctcgtatct

SEQ ID NO: 66836 - DNA, 25 bp, Homo sapien
ttaagattgtgtgtccctcgtatct

SEQ ID NO: 66837 - DNA, 25 bp, Homo sapien
ctagagtttgttcatgtaactcttt

SEQ ID NO: 66838 - DNA, 25 bp, Homo sapien
ctagagtttgttgatgtaactcttt

SEQ ID NO: 66839 - DNA, 25 bp, Homo sapien
tcgagttcattatacgttccgtgtt

SEQ ID NO: 66840 - DNA, 25 bp, Homo sapien
tcgagttcattaaacgttccgtgtt

SEQ ID NO: 66841 - DNA, 25 bp, Homo sapien
tttttgacgaatacgtgacactttt

SEQ ID NO: 66842 - DNA, 25 bp, Homo sapien
tttttgacgaattcgtgacactttt

SEQ ID NO: 66843 - DNA, 25 bp, Homo sapien
tacggagatccttgatcccaggaag

SEQ ID NO: 66844 - DNA, 25 bp, Homo sapien
tacggagatcctagatcccaggaag

SEQ ID NO: 66845 - DNA, 25 bp, Homo sapien
cctcttgtcgaaacccaacagttgt

SEQ ID NO: 66846 - DNA, 25 bp, Homo sapien
cctcttgtcgaatcccaacagttgt

SEQ ID NO: 66847 - DNA, 25 bp, Homo sapien
acttgttccactcgtagaaatgtac

SEQ ID NO: 66848 - DNA, 25 bp, Homo sapien
acttgttccactggtagaaatgtac

SEQ ID NO: 66849 - DNA, 25 bp, Homo sapien
tcttaggtccgattactaaaaatag

SEQ ID NO: 66850 - DNA, 25 bp, Homo sapien
tcttaggtccgaatactaaaaatag

SEQ ID NO: 66851 - DNA, 25 bp, Homo sapien
tcgtgtcaaaacagacactatatgt

SEQ ID NO: 66852 - DNA, 25 bp, Homo sapien
tcgtgtcaaaactgacactatatgt

SEQ ID NO: 66853 - DNA, 25 bp, Homo sapien
ccgtcttgtaaatccaaattatagt

SEQ ID NO: 66854 - DNA, 25 bp, Homo sapien
ccgtcttgtaaaaccaaattatagt

SEQ ID NO: 66855 - DNA, 25 bp, Homo sapien
atttgaacctacgacttcaagtaag

SEQ ID NO: 66856 - DNA, 25 bp, Homo sapien
atttgaacctaccacttcaagtaag

SEQ ID NO: 66857 - DNA, 25 bp, Homo sapien
gacgactacgagaactgtccaaggt

SEQ ID NO: 66858 - DNA, 25 bp, Homo sapien
gacgactacgagtactgtccaaggt

SEQ ID NO: 66859 - DNA, 25 bp, Homo sapien
cacgtcgctacaaattaccgttaag

SEQ ID NO: 66860 - DNA, 25 bp, Homo sapien
cacgtcgctacatattaccgttaag

SEQ ID NO: 66861 - DNA, 25 bp, Homo sapien
gacaggccgggagtgtacacactct

SEQ ID NO: 66862 - DNA, 25 bp, Homo sapien
gacaggccgggactgtacacactct

SEQ ID NO: 66863 - DNA, 25 bp, Homo sapien
atcgagcttacgagtactggaacca

SEQ ID NO: 66864 - DNA, 25 bp, Homo sapien
atcgagcttacgtgtactggaacca

SEQ ID NO: 66865 - DNA, 25 bp, Homo sapien
acttatacgaagttctcgtcttttg

SEQ ID NO: 66866 - DNA, 25 bp, Homo sapien
acttatacgaagatctcgtcttttg

SEQ ID NO: 66867 - DNA, 25 bp, Homo sapien
gtctattacggaaacttgtcattta

SEQ ID NO: 66868 - DNA, 25 bp, Homo sapien
gtctattacggatacttgtcattta

SEQ ID NO: 66869 - DNA, 25 bp, Homo sapien
cactagttggacatgtttcattatg

SEQ ID NO: 66870 - DNA, 25 bp, Homo sapien
cactagttggacttgtttcattatg

SEQ ID NO: 66871 - DNA, 25 bp, Homo sapien
agagttgaaacctttttgtcttctg

SEQ ID NO: 66872 - DNA, 25 bp, Homo sapien
agagttgaaaccattttgtcttctg

SEQ ID NO: 66873 - DNA, 25 bp, Homo sapien
cgtgtcaggtggtctttctgttagg

SEQ ID NO: 66874 - DNA, 25 bp, Homo sapien
cgtgtcaggtggactttctgttagg

SEQ ID NO: 66875 - DNA, 25 bp, Homo sapien
gtgtcaatctaactttcacgtgtga

SEQ ID NO: 66876 - DNA, 25 bp, Homo sapien
gtgtcaatctaagtttcacgtgtga

SEQ ID NO: 66877 - DNA, 25 bp, Homo sapien
ggtaaaggtctttactgtagatgga

SEQ ID NO: 66878 - DNA, 25 bp, Homo sapien
ggtaaaggtcttaactgtagatgga

SEQ ID NO: 66879 - DNA, 25 bp, Homo sapien
atgttagttaggtagtagaccccgt

SEQ ID NO: 66880 - DNA, 25 bp, Homo sapien
atgttagttaggaagtagaccccgt

SEQ ID NO: 66881 - DNA, 25 bp, Homo sapien
tatatagtgtaggaaaccgtctccg

SEQ ID NO: 66882 - DNA, 25 bp, Homo sapien
tatatagtgtagcaaaccgtctccg

SEQ ID NO: 66883 - DNA, 25 bp, Homo sapien
atatagtagtaatcccggtctctag

SEQ ID NO: 66884 - DNA, 25 bp, Homo sapien
atatagtagtaaacccggtctctag

SEQ ID NO: 66885 - DNA, 25 bp, Homo sapien
aggtcatgcgcctgccggacctcgt

SEQ ID NO: 66886 - DNA, 25 bp, Homo sapien
aggtcatgcgccagccggacctcgt

SEQ ID NO: 66887 - DNA, 25 bp, Homo sapien
tcttcttcgtacgtaaacgtgaccc

SEQ ID NO: 66888 - DNA, 25 bp, Homo sapien
tcttcttcgtacctaaacgtgaccc

SEQ ID NO: 66889 - DNA, 25 bp, Homo sapien
tggtgcacggttcagactacaaccc

SEQ ID NO: 66890 - DNA, 25 bp, Homo sapien
tggtgcacggttgagactacaaccc

SEQ ID NO: 66891 - DNA, 25 bp, Homo sapien
ccgtggtcttctggtcccaggacgc

SEQ ID NO: 66892 - DNA, 25 bp, Homo sapien
ccgtggtcttctcgtcccaggacgc

SEQ ID NO: 66893 - DNA, 25 bp, Homo sapien
ctggagggagagggaggagggtcgt

SEQ ID NO: 66894 - DNA, 25 bp, Homo sapien
ctggagggagagcgaggagggtcgt

SEQ ID NO: 66895 - DNA, 25 bp, Homo sapien
cctcctcgcggagaaggggatcgtc

SEQ ID NO: 66896 - DNA, 25 bp, Homo sapien
cctcctcgcggacaaggggatcgtc

SEQ ID NO: 66897 - DNA, 25 bp, Homo sapien
cgcctgttcccaaagtcaggacgaa

SEQ ID NO: 66898 - DNA, 25 bp, Homo sapien
cgcctgttcccatagtcaggacgaa

SEQ ID NO: 66899 - DNA, 25 bp, Homo sapien
tggtcggaatatataggtcctttct

SEQ ID NO: 66900 - DNA, 25 bp, Homo sapien
tggtcggaatatttaggtcctttct

SEQ ID NO: 66901 - DNA, 25 bp, Homo sapien
cattgcggtcgcgcagcgataacgc

SEQ ID NO: 66902 - DNA, 25 bp, Homo sapien
cattgcggtcgcccagcgataacgc

SEQ ID NO: 66903 - DNA, 25 bp, Homo sapien
cgtttccgtcgtccgatggcctgcc

SEQ ID NO: 66904 - DNA, 25 bp, Homo sapien
cgtttccgtcgtgcgatggcctgcc

SEQ ID NO: 66905 - DNA, 25 bp, Homo sapien
acttgtctctccacactgaaaggag

SEQ ID NO: 66906 - DNA, 25 bp, Homo sapien
acttgtctctcctcactgaaaggag

SEQ ID NO: 66907 - DNA, 25 bp, Homo sapien
ctttataagtatcttcgtaacatgg

SEQ ID NO: 66908 - DNA, 25 bp, Homo sapien
ctttataagtatgttcgtaacatgg

SEQ ID NO: 66909 - DNA, 25 bp, Homo sapien
tacaaatagttgtttagatctctcg

SEQ ID NO: 66910 - DNA, 25 bp, Homo sapien
tacaaatagttgattagatctctcg

SEQ ID NO: 66911 - DNA, 25 bp, Homo sapien
agtaactgcttcctcaagtactacg

SEQ ID NO: 66912 - DNA, 25 bp, Homo sapien
agtaactgcttcgtcaagtactacg

SEQ ID NO: 66913 - DNA, 25 bp, Homo sapien
tttgtgacccgtttgtcacagacgg

SEQ ID NO: 66914 - DNA, 25 bp, Homo sapien
tttgtgacccgtatgtcacagacgg

SEQ ID NO: 66915 - DNA, 25 bp, Homo sapien
gttcagagtctgaactcctccagag

SEQ ID NO: 66916 - DNA, 25 bp, Homo sapien
gttcagagtctgtactcctccagag

SEQ ID NO: 66917 - DNA, 25 bp, Homo sapien
tccctactgtcgaccgtttctcgag

SEQ ID NO: 66918 - DNA, 25 bp, Homo sapien
tccctactgtcgtccgtttctcgag

SEQ ID NO: 66919 - DNA, 25 bp, Homo sapien
gacacacaagacgtccttccgcgag

SEQ ID NO: 66920 - DNA, 25 bp, Homo sapien
gacacacaagacctccttccgcgag

SEQ ID NO: 66921 - DNA, 25 bp, Homo sapien
cggacttcgacaccatttcgacgag

SEQ ID NO: 66922 - DNA, 25 bp, Homo sapien
cggacttcgacagcatttcgacgag

SEQ ID NO: 66923 - DNA, 25 bp, Homo sapien
accagattacgagtacatcgattaa

SEQ ID NO: 66924 - DNA, 25 bp, Homo sapien
accagattacgactacatcgattaa

SEQ ID NO: 66925 - DNA, 25 bp, Homo sapien
ggtaagaatcgactcttgtagaaac

SEQ ID NO: 66926 - DNA, 25 bp, Homo sapien
ggtaagaatcgagtcttgtagaaac

SEQ ID NO: 66927 - DNA, 25 bp, Homo sapien
agactcaatctctcctcgagagacc

SEQ ID NO: 66928 - DNA, 25 bp, Homo sapien
agactcaatctcacctcgagagacc

SEQ ID NO: 66929 - DNA, 25 bp, Homo sapien
caagaacttctacgtcggcgtgcac

SEQ ID NO: 66930 - DNA, 25 bp, Homo sapien
caagaacttctaggtcggcgtgcac

SEQ ID NO: 66931 - DNA, 25 bp, Homo sapien
cgtaacgagaccagactcggggtcc

SEQ ID NO: 66932 - DNA, 25 bp, Homo sapien
cgtaacgagacctgactcggggtcc

SEQ ID NO: 66933 - DNA, 25 bp, Homo sapien
actagactattgtctgacgtcgttc

SEQ ID NO: 66934 - DNA, 25 bp, Homo sapien
actagactattgactgacgtcgttc

SEQ ID NO: 66935 - DNA, 25 bp, Homo sapien
tacgaagacacgtgttactaatttt

SEQ ID NO: 66936 - DNA, 25 bp, Homo sapien
tacgaagacacgagttactaatttt

SEQ ID NO: 66937 - DNA, 25 bp, Homo sapien
cagggaaaccggttactagtcctca

SEQ ID NO: 66938 - DNA, 25 bp, Homo sapien
cagggaaaccggatactagtcctca

SEQ ID NO: 66939 - DNA, 25 bp, Homo sapien
cgaaggatatctcaattgtctctga

SEQ ID NO: 66940 - DNA, 25 bp, Homo sapien
cgaaggatatctgaattgtctctga

SEQ ID NO: 66941 - DNA, 25 bp, Homo sapien
cagagaggaacttgagaaagtccca

SEQ ID NO: 66942 - DNA, 25 bp, Homo sapien
cagagaggaactagagaaagtccca

SEQ ID NO: 66943 - DNA, 25 bp, Homo sapien
aggacggagacaaacgagggacccc

SEQ ID NO: 66944 - DNA, 25 bp, Homo sapien
aggacggagacatacgagggacccc

SEQ ID NO: 66945 - DNA, 25 bp, Homo sapien
ggcgtaggtacgaacgtcgaccctt

SEQ ID NO: 66946 - DNA, 25 bp, Homo sapien
ggcgtaggtacgtacgtcgaccctt

SEQ ID NO: 66947 - DNA, 25 bp, Homo sapien
agaggagagcggaatacctcctctt

SEQ ID NO: 66948 - DNA, 25 bp, Homo sapien
agaggagagcggtatacctcctctt

SEQ ID NO: 66949 - DNA, 25 bp, Homo sapien
aaagagggtgaaataatacctcgtc

SEQ ID NO: 66950 - DNA, 25 bp, Homo sapien
aaagagggtgaattaatacctcgtc

SEQ ID NO: 66951 - DNA, 25 bp, Homo sapien
agacagggtccagaagatatcgttc

SEQ ID NO: 66952 - DNA, 25 bp, Homo sapien
agacagggtccacaagatatcgttc

SEQ ID NO: 66953 - DNA, 25 bp, Homo sapien
caagatgtgttatgttcttctgttc

SEQ ID NO: 66954 - DNA, 25 bp, Homo sapien
caagatgtgttaagttcttctgttc

SEQ ID NO: 66955 - DNA, 25 bp, Homo sapien
gaaaatgtctttagtgtcttttctc

SEQ ID NO: 66956 - DNA, 25 bp, Homo sapien
gaaaatgtcttttgtgtcttttctc

SEQ ID NO: 66957 - DNA, 25 bp, Homo sapien
tttgtgtcgggtgagttcgtcacca

SEQ ID NO: 66958 - DNA, 25 bp, Homo sapien
tttgtgtcgggtcagttcgtcacca

SEQ ID NO: 66959 - DNA, 25 bp, Homo sapien
tttactgtcgtagtcatgggtgagg

SEQ ID NO: 66960 - DNA, 25 bp, Homo sapien
tttactgtcgtactcatgggtgagg

SEQ ID NO: 66961 - DNA, 25 bp, Homo sapien
tttatttacccgtcgcgacgggtct

SEQ ID NO: 66962 - DNA, 25 bp, Homo sapien
tttatttacccgacgcgacgggtct

SEQ ID NO: 66963 - DNA, 25 bp, Homo sapien
acctacaacatcagtctgtcccacg

SEQ ID NO: 66964 - DNA, 25 bp, Homo sapien
acctacaacatctgtctgtcccacg

SEQ ID NO: 66965 - DNA, 25 bp, Homo sapien
tataaacaacatttactgattacga

SEQ ID NO: 66966 - DNA, 25 bp, Homo sapien
tataaacaacatatactgattacga

SEQ ID NO: 66967 - DNA, 25 bp, Homo sapien
cggaccatgaggaactacttcccta

SEQ ID NO: 66968 - DNA, 25 bp, Homo sapien
cggaccatgaggtactacttcccta

SEQ ID NO: 66969 - DNA, 25 bp, Homo sapien
cctgagactctacctacgcttctag

SEQ ID NO: 66970 - DNA, 25 bp, Homo sapien
cctgagactctagctacgcttctag

SEQ ID NO: 66971 - DNA, 25 bp, Homo sapien
ggtcgtctatggtcccactattata

SEQ ID NO: 66972 - DNA, 25 bp, Homo sapien
ggtcgtctatggacccactattata

SEQ ID NO: 66973 - DNA, 25 bp, Homo sapien
ttaggaattaaaaccctagtcgtaa

SEQ ID NO: 66974 - DNA, 25 bp, Homo sapien
ttaggaattaaatccctagtcgtaa

SEQ ID NO: 66975 - DNA, 25 bp, Homo sapien
gaatgtttcttcagtcgcattcaat

SEQ ID NO: 66976 - DNA, 25 bp, Homo sapien
gaatgtttcttctgtcgcattcaat

SEQ ID NO: 66977 - DNA, 25 bp, Homo sapien
atcgtactctagttgttcttttggg

SEQ ID NO: 66978 - DNA, 25 bp, Homo sapien
atcgtactctagatgttcttttggg

SEQ ID NO: 66979 - DNA, 25 bp, Homo sapien
cgttctagagttacttcgtttagtg

SEQ ID NO: 66980 - DNA, 25 bp, Homo sapien
cgttctagagtttcttcgtttagtg

SEQ ID NO: 66981 - DNA, 25 bp, Homo sapien
ttcctacacgagtttcccactttac

SEQ ID NO: 66982 - DNA, 25 bp, Homo sapien
ttcctacacgagattcccactttac

SEQ ID NO: 66983 - DNA, 25 bp, Homo sapien
ttcttacagaatggttcagtatcga

SEQ ID NO: 66984 - DNA, 25 bp, Homo sapien
ttcttacagaatcgttcagtatcga

SEQ ID NO: 66985 - DNA, 25 bp, Homo sapien
agtacacgacggagtctactctcga

SEQ ID NO: 66986 - DNA, 25 bp, Homo sapien
agtacacgacggtgtctactctcga

SEQ ID NO: 66987 - DNA, 25 bp, Homo sapien
gaagtctgaggtcctctctctcgac

SEQ ID NO: 66988 - DNA, 25 bp, Homo sapien
gaagtctgaggtgctctctctcgac

SEQ ID NO: 66989 - DNA, 25 bp, Homo sapien
ggacgagtttgagaccgtttccacg

SEQ ID NO: 66990 - DNA, 25 bp, Homo sapien
ggacgagtttgacaccgtttccacg

SEQ ID NO: 66991 - DNA, 25 bp, Homo sapien
cttattcgatcgactagtgttactt

SEQ ID NO: 66992 - DNA, 25 bp, Homo sapien
cttattcgatcgtctagtgttactt

SEQ ID NO: 66993 - DNA, 25 bp, Homo sapien
tcttaacactgtcctagaagagtat

SEQ ID NO: 66994 - DNA, 25 bp, Homo sapien
tcttaacactgtgctagaagagtat

SEQ ID NO: 66995 - DNA, 25 bp, Homo sapien
gacataaaagactagaccaatgtat

SEQ ID NO: 66996 - DNA, 25 bp, Homo sapien
gacataaaagacaagaccaatgtat

SEQ ID NO: 66997 - DNA, 25 bp, Homo sapien
cgtcaacaagtataaaccccacgtc

SEQ ID NO: 66998 - DNA, 25 bp, Homo sapien
cgtcaacaagtaaaaaccccacgtc

SEQ ID NO: 66999 - DNA, 25 bp, Homo sapien
ccgtccataaatgttcttccgagtc

SEQ ID NO: 67000 - DNA, 25 bp, Homo sapien
ccgtccataaatcttcttccgagtc

SEQ ID NO: 67001 - DNA, 25 bp, Homo sapien
ccgacaaagagtctgtttcttactc

SEQ ID NO: 67002 - DNA, 25 bp, Homo sapien
ccgacaaagagtgtgtttcttactc

SEQ ID NO: 67003 - DNA, 25 bp, Homo sapien
cactaaaacgtagatcttccgtaag

SEQ ID NO: 67004 - DNA, 25 bp, Homo sapien
cactaaaacgtacatcttccgtaag

SEQ ID NO: 67005 - DNA, 25 bp, Homo sapien
aagggaaaaaccttccacgagacag

SEQ ID NO: 67006 - DNA, 25 bp, Homo sapien
aagggaaaaaccatccacgagacag

SEQ ID NO: 67007 - DNA, 25 bp, Homo sapien
gacgtagaagtcatactttcatcca

SEQ ID NO: 67008 - DNA, 25 bp, Homo sapien
gacgtagaagtcttactttcatcca

SEQ ID NO: 67009 - DNA, 25 bp, Homo sapien
atagaccgggagtctgtgttactat

SEQ ID NO: 67010 - DNA, 25 bp, Homo sapien
atagaccgggagactgtgttactat

SEQ ID NO: 67011 - DNA, 25 bp, Homo sapien
actataccgtgtaggacgttttaat

SEQ ID NO: 67012 - DNA, 25 bp, Homo sapien
actataccgtgttggacgttttaat

SEQ ID NO: 67013 - DNA, 25 bp, Homo sapien
cgtctccacgcgttttgtaccttaa

SEQ ID NO: 67014 - DNA, 25 bp, Homo sapien
cgtctccacgcgatttgtaccttaa

SEQ ID NO: 67015 - DNA, 25 bp, Homo sapien
ccgtcatcacggtgagaccgggctc

SEQ ID NO: 67016 - DNA, 25 bp, Homo sapien
ccgtcatcacggagagaccgggctc

SEQ ID NO: 67017 - DNA, 25 bp, Homo sapien
cggagccgatgagacctgaggacac

SEQ ID NO: 67018 - DNA, 25 bp, Homo sapien
cggagccgatgacacctgaggacac

SEQ ID NO: 67019 - DNA, 25 bp, Homo sapien
cccccactcccccgtcacgagtcga

SEQ ID NO: 67020 - DNA, 25 bp, Homo sapien
cccccactccccggtcacgagtcga

SEQ ID NO: 67021 - DNA, 25 bp, Homo sapien
acgacaaccccacatgagagtagac

SEQ ID NO: 67022 - DNA, 25 bp, Homo sapien
acgacaaccccagatgagagtagac

SEQ ID NO: 67023 - DNA, 25 bp, Homo sapien
aaaagaacgtccatcaagacggtta

SEQ ID NO: 67024 - DNA, 25 bp, Homo sapien
aaaagaacgtccttcaagacggtta

SEQ ID NO: 67025 - DNA, 25 bp, Homo sapien
gcggaactcagactacagtcttctc

SEQ ID NO: 67026 - DNA, 25 bp, Homo sapien
gcggaactcagagtacagtcttctc

SEQ ID NO: 67027 - DNA, 25 bp, Homo sapien
gtggagaagttatggtccctataac

SEQ ID NO: 67028 - DNA, 25 bp, Homo sapien
gtggagaagttaaggtccctataac

SEQ ID NO: 67029 - DNA, 25 bp, Homo sapien
gggacctcatagtctcgaacaacgt

SEQ ID NO: 67030 - DNA, 25 bp, Homo sapien
gggacctcatagactcgaacaacgt

SEQ ID NO: 67031 - DNA, 25 bp, Homo sapien
ggagttgaaataagtcgactacacg

SEQ ID NO: 67032 - DNA, 25 bp, Homo sapien
ggagttgaaatatgtcgactacacg

SEQ ID NO: 67033 - DNA, 25 bp, Homo sapien
tctgtacatccaacatgtccgatcg

SEQ ID NO: 67034 - DNA, 25 bp, Homo sapien
tctgtacatccatcatgtccgatcg

SEQ ID NO: 67035 - DNA, 25 bp, Homo sapien
aataacttaagacctcgtcgattag

SEQ ID NO: 67036 - DNA, 25 bp, Homo sapien
aataacttaagagctcgtcgattag

SEQ ID NO: 67037 - DNA, 25 bp, Homo sapien
aaactctgtcttactttgtgtatag

SEQ ID NO: 67038 - DNA, 25 bp, Homo sapien
aaactctgtctttctttgtgtatag

SEQ ID NO: 67039 - DNA, 25 bp, Homo sapien
gcatattttcactttactcttggtg

SEQ ID NO: 67040 - DNA, 25 bp, Homo sapien
gcatattttcacattactcttggtg

SEQ ID NO: 67041 - DNA, 25 bp, Homo sapien
gtcattcttcccataattatgacgg

SEQ ID NO: 67042 - DNA, 25 bp, Homo sapien
gtcattcttcccttaattatgacgg

SEQ ID NO: 67043 - DNA, 25 bp, Homo sapien
ctcttgtctatttaataccatcaag

SEQ ID NO: 67044 - DNA, 25 bp, Homo sapien
ctcttgtctattaaataccatcaag

SEQ ID NO: 67045 - DNA, 25 bp, Homo sapien
atttgcgtcttgactctagatgaat

SEQ ID NO: 67046 - DNA, 25 bp, Homo sapien
atttgcgtcttgtctctagatgaat

SEQ ID NO: 67047 - DNA, 25 bp, Homo sapien
atttgtcattgttcgatcagtgaac

SEQ ID NO: 67048 - DNA, 25 bp, Homo sapien
atttgtcattgtacgatcagtgaac

SEQ ID NO: 67049 - DNA, 25 bp, Homo sapien
agtttgcactattttgacggtgaac

SEQ ID NO: 67050 - DNA, 25 bp, Homo sapien
agtttgcactatattgacggtgaac

SEQ ID NO: 67051 - DNA, 25 bp, Homo sapien
tcaatgtgagcaattttactttgac

SEQ ID NO: 67052 - DNA, 25 bp, Homo sapien
tcaatgtgagcatttttactttgac

SEQ ID NO: 67053 - DNA, 25 bp, Homo sapien
tccaggaagaggtccttcgagttca

SEQ ID NO: 67054 - DNA, 25 bp, Homo sapien
tccaggaagaggaccttcgagttca

SEQ ID NO: 67055 - DNA, 25 bp, Homo sapien
cacacgaagtggtccttgaggtggt

SEQ ID NO: 67056 - DNA, 25 bp, Homo sapien
cacacgaagtggaccttgaggtggt

SEQ ID NO: 67057 - DNA, 25 bp, Homo sapien
acagatttacagtcctagtgatcct

SEQ ID NO: 67058 - DNA, 25 bp, Homo sapien
acagatttacagacctagtgatcct

SEQ ID NO: 67059 - DNA, 25 bp, Homo sapien
ttacactgactctcaatagaactgg

SEQ ID NO: 67060 - DNA, 25 bp, Homo sapien
ttacactgactcacaatagaactgg

SEQ ID NO: 67061 - DNA, 25 bp, Homo sapien
aaatcgacgactaaataccacatgg

SEQ ID NO: 67062 - DNA, 25 bp, Homo sapien
aaatcgacgacttaataccacatgg

SEQ ID NO: 67063 - DNA, 25 bp, Homo sapien
aagaattacgtcaaattaccttagg

SEQ ID NO: 67064 - DNA, 25 bp, Homo sapien
aagaattacgtctaattaccttagg

SEQ ID NO: 67065 - DNA, 25 bp, Homo sapien
gtactgatatattagtcccagtaaa

SEQ ID NO: 67066 - DNA, 25 bp, Homo sapien
gtactgatatataagtcccagtaaa

SEQ ID NO: 67067 - DNA, 25 bp, Homo sapien
tcgtgatcgagtatcaccgtcccac

SEQ ID NO: 67068 - DNA, 25 bp, Homo sapien
tcgtgatcgagtttcaccgtcccac

SEQ ID NO: 67069 - DNA, 25 bp, Homo sapien
ttcacctcgagcttaaggtacctca

SEQ ID NO: 67070 - DNA, 25 bp, Homo sapien
ttcacctcgagcataaggtacctca

SEQ ID NO: 67071 - DNA, 25 bp, Homo sapien
tggtaaaagtgtctagtggatctcc

SEQ ID NO: 67072 - DNA, 25 bp, Homo sapien
tggtaaaagtgtgtagtggatctcc

SEQ ID NO: 67073 - DNA, 25 bp, Homo sapien
tggagtaacagtttgaggtgcttcc

SEQ ID NO: 67074 - DNA, 25 bp, Homo sapien
tggagtaacagtatgaggtgcttcc

SEQ ID NO: 67075 - DNA, 25 bp, Homo sapien
gtcaaacataaggaggtcgtcttgg

SEQ ID NO: 67076 - DNA, 25 bp, Homo sapien
gtcaaacataagcaggtcgtcttgg

SEQ ID NO: 67077 - DNA, 25 bp, Homo sapien
atcaacgactttagacgattttatg

SEQ ID NO: 67078 - DNA, 25 bp, Homo sapien
atcaacgacttttgacgattttatg

SEQ ID NO: 67079 - DNA, 25 bp, Homo sapien
tcgacacacctgtcagaggtgcatc

SEQ ID NO: 67080 - DNA, 25 bp, Homo sapien
tcgacacacctgacagaggtgcatc

SEQ ID NO: 67081 - DNA, 25 bp, Homo sapien
ccactcctagctttatgtgctcgtg

SEQ ID NO: 67082 - DNA, 25 bp, Homo sapien
ccactcctagctatatgtgctcgtg

SEQ ID NO: 67083 - DNA, 25 bp, Homo sapien
acgctgtaaggtgtgtgttactgtc

SEQ ID NO: 67084 - DNA, 25 bp, Homo sapien
acgctgtaaggtctgtgttactgtc

SEQ ID NO: 67085 - DNA, 25 bp, Homo sapien
tctcgcaccgggttcccggggtgtc

SEQ ID NO: 67086 - DNA, 25 bp, Homo sapien
tctcgcaccgggatcccggggtgtc

SEQ ID NO: 67087 - DNA, 25 bp, Homo sapien
cgtcgaccgactccctgtaactgat

SEQ ID NO: 67088 - DNA, 25 bp, Homo sapien
cgtcgaccgactgcctgtaactgat

SEQ ID NO: 67089 - DNA, 25 bp, Homo sapien
ttatagagaccgaggactgtacggt

SEQ ID NO: 67090 - DNA, 25 bp, Homo sapien
ttatagagaccgtggactgtacggt

SEQ ID NO: 67091 - DNA, 25 bp, Homo sapien
ggtggagaaccgacactaccgaagt

SEQ ID NO: 67092 - DNA, 25 bp, Homo sapien
ggtggagaaccgtcactaccgaagt

SEQ ID NO: 67093 - DNA, 25 bp, Homo sapien
gtagttgtaaacagttaccctaaat

SEQ ID NO: 67094 - DNA, 25 bp, Homo sapien
gtagttgtaaactgttaccctaaat

SEQ ID NO: 67095 - DNA, 25 bp, Homo sapien
ggtcgtatagaaccaaataaacact

SEQ ID NO: 67096 - DNA, 25 bp, Homo sapien
ggtcgtatagaagcaaataaacact

SEQ ID NO: 67097 - DNA, 25 bp, Homo sapien
ttcggttccgcgaccacgaccgagt

SEQ ID NO: 67098 - DNA, 25 bp, Homo sapien
ttcggttccgcgtccacgaccgagt

SEQ ID NO: 67099 - DNA, 25 bp, Homo sapien
gtacgtgtcccgagcctagagtggt

SEQ ID NO: 67100 - DNA, 25 bp, Homo sapien
gtacgtgtcccgtgcctagagtggt

SEQ ID NO: 67101 - DNA, 25 bp, Homo sapien
tctctgcgtcgctgccggacggagt

SEQ ID NO: 67102 - DNA, 25 bp, Homo sapien
tctctgcgtcgcagccggacggagt

SEQ ID NO: 67103 - DNA, 25 bp, Homo sapien
cgctgtccatgtgtcctcacgagct

SEQ ID NO: 67104 - DNA, 25 bp, Homo sapien
cgctgtccatgtctcctcacgagct

SEQ ID NO: 67105 - DNA, 25 bp, Homo sapien
gttatcttcgttgcttaccctagtc

SEQ ID NO: 67106 - DNA, 25 bp, Homo sapien
gttatcttcgttccttaccctagtc

SEQ ID NO: 67107 - DNA, 25 bp, Homo sapien
gtcacttctgtacgacctatctaaa

SEQ ID NO: 67108 - DNA, 25 bp, Homo sapien
gtcacttctgtaggacctatctaaa

SEQ ID NO: 67109 - DNA, 25 bp, Homo sapien
ccggtgtacgtgtctgtgtaagaga

SEQ ID NO: 67110 - DNA, 25 bp, Homo sapien
ccggtgtacgtgactgtgtaagaga

SEQ ID NO: 67111 - DNA, 25 bp, Homo sapien
agaggacctcgaaacatatttgtga

SEQ ID NO: 67112 - DNA, 25 bp, Homo sapien
agaggacctcgatacatatttgtga

SEQ ID NO: 67113 - DNA, 25 bp, Homo sapien
agtaaacacgaggatttctaaaact

SEQ ID NO: 67114 - DNA, 25 bp, Homo sapien
agtaaacacgagcatttctaaaact

SEQ ID NO: 67115 - DNA, 25 bp, Homo sapien
cttctaaaaggtgtttttgcagact

SEQ ID NO: 67116 - DNA, 25 bp, Homo sapien
cttctaaaaggtctttttgcagact

SEQ ID NO: 67117 - DNA, 25 bp, Homo sapien
ggtacatgaagtgctcctcctttga

SEQ ID NO: 67118 - DNA, 25 bp, Homo sapien
ggtacatgaagtcctcctcctttga

SEQ ID NO: 67119 - DNA, 25 bp, Homo sapien
tcatacagacgctccggctcttgta

SEQ ID NO: 67120 - DNA, 25 bp, Homo sapien
tcatacagacgcaccggctcttgta

SEQ ID NO: 67121 - DNA, 25 bp, Homo sapien
gaacatgtcacaggttctgtatgta

SEQ ID NO: 67122 - DNA, 25 bp, Homo sapien
gaacatgtcacacgttctgtatgta

SEQ ID NO: 67123 - DNA, 25 bp, Homo sapien
gttgagaatgacatttctcttcatt

SEQ ID NO: 67124 - DNA, 25 bp, Homo sapien
gttgagaatgacttttctcttcatt

SEQ ID NO: 67125 - DNA, 25 bp, Homo sapien
tggactttacttcctcgctcttagg

SEQ ID NO: 67126 - DNA, 25 bp, Homo sapien
tggactttacttgctcgctcttagg

SEQ ID NO: 67127 - DNA, 25 bp, Homo sapien
tccttggaagtgttattctactaag

SEQ ID NO: 67128 - DNA, 25 bp, Homo sapien
tccttggaagtgatattctactaag

SEQ ID NO: 67129 - DNA, 25 bp, Homo sapien
gggcttgtgggagaattcctgtaac

SEQ ID NO: 67130 - DNA, 25 bp, Homo sapien
gggcttgtgggacaattcctgtaac

SEQ ID NO: 67131 - DNA, 25 bp, Homo sapien
ttgcaggtagaagagattcctgaac

SEQ ID NO: 67132 - DNA, 25 bp, Homo sapien
ttgcaggtagaacagattcctgaac

SEQ ID NO: 67133 - DNA, 25 bp, Homo sapien
tgatgagtaaataaaccctaggttc

SEQ ID NO: 67134 - DNA, 25 bp, Homo sapien
tgatgagtaaattaaccctaggttc

SEQ ID NO: 67135 - DNA, 25 bp, Homo sapien
ggaccaaacactacaaccacaggtc

SEQ ID NO: 67136 - DNA, 25 bp, Homo sapien
ggaccaaacacttcaaccacaggtc

SEQ ID NO: 67137 - DNA, 25 bp, Homo sapien
aaggaagtacttcgtccacgagtcc

SEQ ID NO: 67138 - DNA, 25 bp, Homo sapien
aaggaagtacttggtccacgagtcc

SEQ ID NO: 67139 - DNA, 25 bp, Homo sapien
gtatgactgacttttacatcgattc

SEQ ID NO: 67140 - DNA, 25 bp, Homo sapien
gtatgactgactattacatcgattc

SEQ ID NO: 67141 - DNA, 25 bp, Homo sapien
gacgtgtacgtgtctttcgagttcg

SEQ ID NO: 67142 - DNA, 25 bp, Homo sapien
gacgtgtacgtgactttcgagttcg

SEQ ID NO: 67143 - DNA, 25 bp, Homo sapien
gattttacggtcaacataaactatg

SEQ ID NO: 67144 - DNA, 25 bp, Homo sapien
gattttacggtctacataaactatg

SEQ ID NO: 67145 - DNA, 25 bp, Homo sapien
ggaggtgaacctaaacaacaatatt

SEQ ID NO: 67146 - DNA, 25 bp, Homo sapien
ggaggtgaaccttaacaacaatatt

SEQ ID NO: 67147 - DNA, 25 bp, Homo sapien
atctctgtttttcgtcaagtgaaat

SEQ ID NO: 67148 - DNA, 25 bp, Homo sapien
atctctgtttttggtcaagtgaaat

SEQ ID NO: 67149 - DNA, 25 bp, Homo sapien
gtagagtatgtttggttgatgaata

SEQ ID NO: 67150 - DNA, 25 bp, Homo sapien
gtagagtatgttaggttgatgaata

SEQ ID NO: 67151 - DNA, 25 bp, Homo sapien
tctagacttccatttattgtatatg

SEQ ID NO: 67152 - DNA, 25 bp, Homo sapien
tctagacttccaattattgtatatg

SEQ ID NO: 67153 - DNA, 25 bp, Homo sapien
taacagtacatactgtattcactta

SEQ ID NO: 67154 - DNA, 25 bp, Homo sapien
taacagtacatagtgtattcactta

SEQ ID NO: 67155 - DNA, 25 bp, Homo sapien
gcaagatccaacagtacagtcattt

SEQ ID NO: 67156 - DNA, 25 bp, Homo sapien
gcaagatccaactgtacagtcattt

SEQ ID NO: 67157 - DNA, 25 bp, Homo sapien
cggacacggccagaccagacacttt

SEQ ID NO: 67158 - DNA, 25 bp, Homo sapien
cggacacggccacaccagacacttt

SEQ ID NO: 67159 - DNA, 25 bp, Homo sapien
cacggtaggtctcctgagagacctt

SEQ ID NO: 67160 - DNA, 25 bp, Homo sapien
cacggtaggtctgctgagagacctt

SEQ ID NO: 67161 - DNA, 25 bp, Homo sapien
ataaagttagtatgtctcaggccct

SEQ ID NO: 67162 - DNA, 25 bp, Homo sapien
ataaagttagtaagtctcaggccct

SEQ ID NO: 67163 - DNA, 25 bp, Homo sapien
ctgttaaaactgagtccatgggtgt

SEQ ID NO: 67164 - DNA, 25 bp, Homo sapien
ctgttaaaactgtgtccatgggtgt

SEQ ID NO: 67165 - DNA, 25 bp, Homo sapien
cctattcaaaactcggtgatggttt

SEQ ID NO: 67166 - DNA, 25 bp, Homo sapien
cctattcaaaacacggtgatggttt

SEQ ID NO: 67167 - DNA, 25 bp, Homo sapien
ataactctaaacacggcacagaaag

SEQ ID NO: 67168 - DNA, 25 bp, Homo sapien
ataactctaaactcggcacagaaag

SEQ ID NO: 67169 - DNA, 25 bp, Homo sapien
caccacgtacctgtgcacagggatg

SEQ ID NO: 67170 - DNA, 25 bp, Homo sapien
caccacgtacctctgcacagggatg

SEQ ID NO: 67171 - DNA, 25 bp, Homo sapien
ccgtccgaacttcttttctacagtg

SEQ ID NO: 67172 - DNA, 25 bp, Homo sapien
ccgtccgaacttgttttctacagtg

SEQ ID NO: 67173 - DNA, 25 bp, Homo sapien
taccagagtctgcaccacctacggg

SEQ ID NO: 67174 - DNA, 25 bp, Homo sapien
taccagagtctggaccacctacggg

SEQ ID NO: 67175 - DNA, 25 bp, Homo sapien
attccggtgttttactccaacggtt

SEQ ID NO: 67176 - DNA, 25 bp, Homo sapien
attccggtgtttaactccaacggtt

SEQ ID NO: 67177 - DNA, 25 bp, Homo sapien
tgtcgttgtgtaacctgttgccggt

SEQ ID NO: 67178 - DNA, 25 bp, Homo sapien
tgtcgttgtgtatcctgttgccggt

SEQ ID NO: 67179 - DNA, 25 bp, Homo sapien
atgtctcagtcattacttttgactg

SEQ ID NO: 67180 - DNA, 25 bp, Homo sapien
atgtctcagtcaatacttttgactg

SEQ ID NO: 67181 - DNA, 25 bp, Homo sapien
tatactcctgttcgacttttgactg

SEQ ID NO: 67182 - DNA, 25 bp, Homo sapien
tatactcctgttggacttttgactg

SEQ ID NO: 67183 - DNA, 25 bp, Homo sapien
gtttatccttttcgtgttctgacag

SEQ ID NO: 67184 - DNA, 25 bp, Homo sapien
gtttatccttttggtgttctgacag

SEQ ID NO: 67185 - DNA, 25 bp, Homo sapien
atgtttcacgatcttctaaagacag

SEQ ID NO: 67186 - DNA, 25 bp, Homo sapien
atgtttcacgatgttctaaagacag

SEQ ID NO: 67187 - DNA, 25 bp, Homo sapien
cctacgttcccactttgtaagaaag

SEQ ID NO: 67188 - DNA, 25 bp, Homo sapien
cctacgttcccagtttgtaagaaag

SEQ ID NO: 67189 - DNA, 25 bp, Homo sapien
cgtatgacccaagacgatacatgaa

SEQ ID NO: 67190 - DNA, 25 bp, Homo sapien
cgtatgacccaacacgatacatgaa

SEQ ID NO: 67191 - DNA, 25 bp, Homo sapien
caaacgccactactgagaacttgaa

SEQ ID NO: 67192 - DNA, 25 bp, Homo sapien
caaacgccactagtgagaacttgaa

SEQ ID NO: 67193 - DNA, 25 bp, Homo sapien
acatgttatctggtttccgatggat

SEQ ID NO: 67194 - DNA, 25 bp, Homo sapien
acatgttatctgctttccgatggat

SEQ ID NO: 67195 - DNA, 25 bp, Homo sapien
aatatatccttaccagtgtaaggat

SEQ ID NO: 67196 - DNA, 25 bp, Homo sapien
aatatatccttagcagtgtaaggat

SEQ ID NO: 67197 - DNA, 25 bp, Homo sapien
gcgaaaatccttgacagttgagctt

SEQ ID NO: 67198 - DNA, 25 bp, Homo sapien
gcgaaaatccttcacagttgagctt

SEQ ID NO: 67199 - DNA, 25 bp, Homo sapien
gaatgatcttcaaggattcaactat

SEQ ID NO: 67200 - DNA, 25 bp, Homo sapien
gaatgatcttcatggattcaactat

SEQ ID NO: 67201 - DNA, 25 bp, Homo sapien
actagttccgagaagggactttgaa

SEQ ID NO: 67202 - DNA, 25 bp, Homo sapien
actagttccgagtagggactttgaa

SEQ ID NO: 67203 - DNA, 25 bp, Homo sapien
tttggtcctcggagggactcttcca

SEQ ID NO: 67204 - DNA, 25 bp, Homo sapien
tttggtcctcggtgggactcttcca

SEQ ID NO: 67205 - DNA, 25 bp, Homo sapien
ccaagacgtcggagacgctacggag

SEQ ID NO: 67206 - DNA, 25 bp, Homo sapien
ccaagacgtcggtgacgctacggag

SEQ ID NO: 67207 - DNA, 25 bp, Homo sapien
gtccggaccgcgtggaactagaagt

SEQ ID NO: 67208 - DNA, 25 bp, Homo sapien
gtccggaccgcgaggaactagaagt

SEQ ID NO: 67209 - DNA, 25 bp, Homo sapien
tccaggacttatacacgaacgtaaa

SEQ ID NO: 67210 - DNA, 25 bp, Homo sapien
tccaggacttattcacgaacgtaaa

SEQ ID NO: 67211 - DNA, 25 bp, Homo sapien
tcgtgtactgagctttacgatttat

SEQ ID NO: 67212 - DNA, 25 bp, Homo sapien
tcgtgtactgaggtttacgatttat

SEQ ID NO: 67213 - DNA, 25 bp, Homo sapien
ttcggacgtactgtcatcggttcta

SEQ ID NO: 67214 - DNA, 25 bp, Homo sapien
ttcggacgtactctcatcggttcta

SEQ ID NO: 67215 - DNA, 25 bp, Homo sapien
aaattactgtcaagttccccggtta

SEQ ID NO: 67216 - DNA, 25 bp, Homo sapien
aaattactgtcatgttccccggtta

SEQ ID NO: 67217 - DNA, 25 bp, Homo sapien
aaaaattacagttcccgaccggacc

SEQ ID NO: 67218 - DNA, 25 bp, Homo sapien
aaaaattacagtacccgaccggacc

SEQ ID NO: 67219 - DNA, 25 bp, Homo sapien
gacgaagatttttccgtccctggac

SEQ ID NO: 67220 - DNA, 25 bp, Homo sapien
gacgaagattttaccgtccctggac

SEQ ID NO: 67221 - DNA, 25 bp, Homo sapien
gaaagtttttcaatctcgtattgac

SEQ ID NO: 67222 - DNA, 25 bp, Homo sapien
gaaagtttttcattctcgtattgac

SEQ ID NO: 67223 - DNA, 25 bp, Homo sapien
tattttagacactactcgtcttaat

SEQ ID NO: 67224 - DNA, 25 bp, Homo sapien
tattttagacacaactcgtcttaat

SEQ ID NO: 67225 - DNA, 25 bp, Homo sapien
tccgtctttgaaacaccccacgtat

SEQ ID NO: 67226 - DNA, 25 bp, Homo sapien
tccgtctttgaatcaccccacgtat

SEQ ID NO: 67227 - DNA, 25 bp, Homo sapien
ataccttatgggacccacacacgtt

SEQ ID NO: 67228 - DNA, 25 bp, Homo sapien
ataccttatgggtcccacacacgtt

SEQ ID NO: 67229 - DNA, 25 bp, Homo sapien
cagtgagtagggagacgtcgatcaa

SEQ ID NO: 67230 - DNA, 25 bp, Homo sapien
cagtgagtagggtgacgtcgatcaa

SEQ ID NO: 67231 - DNA, 25 bp, Homo sapien
ttccgagacaggtacggggaccgac

SEQ ID NO: 67232 - DNA, 25 bp, Homo sapien
ttccgagacaggaacggggaccgac

SEQ ID NO: 67233 - DNA, 25 bp, Homo sapien
cgtgcccgacgtgcattgaggcacc

SEQ ID NO: 67234 - DNA, 25 bp, Homo sapien
cgtgcccgacgtccattgaggcacc

SEQ ID NO: 67235 - DNA, 25 bp, Homo sapien
ggacccgtgccagtcgacgagcatc

SEQ ID NO: 67236 - DNA, 25 bp, Homo sapien
ggacccgtgccactcgacgagcatc

SEQ ID NO: 67237 - DNA, 25 bp, Homo sapien
gggactccggccactgtcacgaaac

SEQ ID NO: 67238 - DNA, 25 bp, Homo sapien
gggactccggcctctgtcacgaaac

SEQ ID NO: 67239 - DNA, 25 bp, Homo sapien
ggagaggactgtggtcgttccccct

SEQ ID NO: 67240 - DNA, 25 bp, Homo sapien
ggagaggactgtcgtcgttccccct

SEQ ID NO: 67241 - DNA, 25 bp, Homo sapien
gagacaggactaggttccgacacag

SEQ ID NO: 67242 - DNA, 25 bp, Homo sapien
gagacaggactacgttccgacacag

SEQ ID NO: 67243 - DNA, 25 bp, Homo sapien
gtgacgggactcgataagtactaga

SEQ ID NO: 67244 - DNA, 25 bp, Homo sapien
gtgacgggactccataagtactaga

SEQ ID NO: 67245 - DNA, 25 bp, Homo sapien
ggtcgagcctctcacggtacacaga

SEQ ID NO: 67246 - DNA, 25 bp, Homo sapien
ggtcgagcctctgacggtacacaga

SEQ ID NO: 67247 - DNA, 25 bp, Homo sapien
tgtctggtcgtagaggtaccagagt

SEQ ID NO: 67248 - DNA, 25 bp, Homo sapien
tgtctggtcgtacaggtaccagagt

SEQ ID NO: 67249 - DNA, 25 bp, Homo sapien
ccggcccacagtcttcgatcaggag

SEQ ID NO: 67250 - DNA, 25 bp, Homo sapien
ccggcccacagtgttcgatcaggag

SEQ ID NO: 67251 - DNA, 25 bp, Homo sapien
taatgaccaccgtatttatccgggg

SEQ ID NO: 67252 - DNA, 25 bp, Homo sapien
taatgaccaccgaatttatccgggg

SEQ ID NO: 67253 - DNA, 25 bp, Homo sapien
agtgacccctgttgtgtcttcgggg

SEQ ID NO: 67254 - DNA, 25 bp, Homo sapien
agtgacccctgtagtgtcttcgggg

SEQ ID NO: 67255 - DNA, 25 bp, Homo sapien
cgagtcctggtctctttataaagag

SEQ ID NO: 67256 - DNA, 25 bp, Homo sapien
cgagtcctggtcactttataaagag

SEQ ID NO: 67257 - DNA, 25 bp, Homo sapien
agttcggtcatcctttagagtcaaa

SEQ ID NO: 67258 - DNA, 25 bp, Homo sapien
agttcggtcatcgtttagagtcaaa

SEQ ID NO: 67259 - DNA, 25 bp, Homo sapien
gaagagcatgtctgacttgtgaaca

SEQ ID NO: 67260 - DNA, 25 bp, Homo sapien
gaagagcatgtcagacttgtgaaca

SEQ ID NO: 67261 - DNA, 25 bp, Homo sapien
gagaccacatagtagtcctggtaaa

SEQ ID NO: 67262 - DNA, 25 bp, Homo sapien
gagaccacatagaagtcctggtaaa

SEQ ID NO: 67263 - DNA, 25 bp, Homo sapien
aaatcctagggacaccgtagaagta

SEQ ID NO: 67264 - DNA, 25 bp, Homo sapien
aaatcctagggagaccgtagaagta

SEQ ID NO: 67265 - DNA, 25 bp, Homo sapien
ataattctgggacttctctcacgta

SEQ ID NO: 67266 - DNA, 25 bp, Homo sapien
ataattctgggagttctctcacgta

SEQ ID NO: 67267 - DNA, 25 bp, Homo sapien
tgtcgtggtaatttcttacgtacta

SEQ ID NO: 67268 - DNA, 25 bp, Homo sapien
tgtcgtggtaatatcttacgtacta

SEQ ID NO: 67269 - DNA, 25 bp, Homo sapien
ttctcgtgtaaggtcttttcgtcgg

SEQ ID NO: 67270 - DNA, 25 bp, Homo sapien
ttctcgtgtaagctcttttcgtcgg

SEQ ID NO: 67271 - DNA, 25 bp, Homo sapien
ttatggttgtcaccttactctactg

SEQ ID NO: 67272 - DNA, 25 bp, Homo sapien
ttatggttgtcagcttactctactg

SEQ ID NO: 67273 - DNA, 25 bp, Homo sapien
cccaagagaggtcgagtgtccactg

SEQ ID NO: 67274 - DNA, 25 bp, Homo sapien
cccaagagaggtggagtgtccactg

SEQ ID NO: 67275 - DNA, 25 bp, Homo sapien
gtaccaaagggtaaggttctatccg

SEQ ID NO: 67276 - DNA, 25 bp, Homo sapien
gtaccaaagggttaggttctatccg

SEQ ID NO: 67277 - DNA, 25 bp, Homo sapien
agttaaaagagttttcgtttcatcc

SEQ ID NO: 67278 - DNA, 25 bp, Homo sapien
agttaaaagagtattcgtttcatcc

SEQ ID NO: 67279 - DNA, 25 bp, Homo sapien
gactatacgaggtcttatttctccc

SEQ ID NO: 67280 - DNA, 25 bp, Homo sapien
gactatacgaggacttatttctccc

SEQ ID NO: 67281 - DNA, 25 bp, Homo sapien
gacatagagggtcaagtcttgttcc

SEQ ID NO: 67282 - DNA, 25 bp, Homo sapien
gacatagagggtgaagtcttgttcc

SEQ ID NO: 67283 - DNA, 25 bp, Homo sapien
tccgaggagaagtatcgtagggtct

SEQ ID NO: 67284 - DNA, 25 bp, Homo sapien
tccgaggagaagaatcgtagggtct

SEQ ID NO: 67285 - DNA, 25 bp, Homo sapien
tcctcggtacgaaccccgtggcgag

SEQ ID NO: 67286 - DNA, 25 bp, Homo sapien
tcctcggtacgatccccgtggcgag

SEQ ID NO: 67287 - DNA, 25 bp, Homo sapien
cactccgacggctacggtacgtgga

SEQ ID NO: 67288 - DNA, 25 bp, Homo sapien
cactccgacggcaacggtacgtgga

SEQ ID NO: 67289 - DNA, 25 bp, Homo sapien
gtttctgtcaggaaaggactcggtc

SEQ ID NO: 67290 - DNA, 25 bp, Homo sapien
gtttctgtcaggtaaggactcggtc

SEQ ID NO: 67291 - DNA, 25 bp, Homo sapien
ttttggacgacgatagaagccggta

SEQ ID NO: 67292 - DNA, 25 bp, Homo sapien
ttttggacgacgttagaagccggta

SEQ ID NO: 67293 - DNA, 25 bp, Homo sapien
ctctaaggttactctaaaagttcga

SEQ ID NO: 67294 - DNA, 25 bp, Homo sapien
ctctaaggttacactaaaagttcga

SEQ ID NO: 67295 - DNA, 25 bp, Homo sapien
gtctaaggcactctgttccgtttac

SEQ ID NO: 67296 - DNA, 25 bp, Homo sapien
gtctaaggcactgtgttccgtttac

SEQ ID NO: 67297 - DNA, 25 bp, Homo sapien
tagtcgtaacatcttgatagttaac

SEQ ID NO: 67298 - DNA, 25 bp, Homo sapien
tagtcgtaacatgttgatagttaac

SEQ ID NO: 67299 - DNA, 25 bp, Homo sapien
cttacgagctatagtcagagatcaa

SEQ ID NO: 67300 - DNA, 25 bp, Homo sapien
cttacgagctattgtcagagatcaa

SEQ ID NO: 67301 - DNA, 25 bp, Homo sapien
cacagactcttatgaaactacggat

SEQ ID NO: 67302 - DNA, 25 bp, Homo sapien
cacagactcttaagaaactacggat

SEQ ID NO: 67303 - DNA, 25 bp, Homo sapien
gatatatttgtcgtgatacacactg

SEQ ID NO: 67304 - DNA, 25 bp, Homo sapien
gatatatttgtcctgatacacactg

SEQ ID NO: 67305 - DNA, 25 bp, Homo sapien
ggtcttttcagtcctgaactcctag

SEQ ID NO: 67306 - DNA, 25 bp, Homo sapien
ggtcttttcagtgctgaactcctag

SEQ ID NO: 67307 - DNA, 25 bp, Homo sapien
aagtcctcagtgtacgattccgtag

SEQ ID NO: 67308 - DNA, 25 bp, Homo sapien
aagtcctcagtgaacgattccgtag

SEQ ID NO: 67309 - DNA, 25 bp, Homo sapien
cacacgtggggtccactggtccgcg

SEQ ID NO: 67310 - DNA, 25 bp, Homo sapien
cacacgtggggtgcactggtccgcg

SEQ ID NO: 67311 - DNA, 25 bp, Homo sapien
tacctctgaggtactcttcggcacc

SEQ ID NO: 67312 - DNA, 25 bp, Homo sapien
tacctctgaggttctcttcggcacc

SEQ ID NO: 67313 - DNA, 25 bp, Homo sapien
tcgtccctggaattcttcgtccgca

SEQ ID NO: 67314 - DNA, 25 bp, Homo sapien
tcgtccctggaaatcttcgtccgca

SEQ ID NO: 67315 - DNA, 25 bp, Homo sapien
ggcccatgagaaatctcggttccag

SEQ ID NO: 67316 - DNA, 25 bp, Homo sapien
ggcccatgagaattctcggttccag

SEQ ID NO: 67317 - DNA, 25 bp, Homo sapien
ctaccttgtattttctgtgttaagg

SEQ ID NO: 67318 - DNA, 25 bp, Homo sapien
ctaccttgtattatctgtgttaagg

SEQ ID NO: 67319 - DNA, 25 bp, Homo sapien
acttcgacttttcactttattgacc

SEQ ID NO: 67320 - DNA, 25 bp, Homo sapien
acttcgacttttgactttattgacc

SEQ ID NO: 67321 - DNA, 25 bp, Homo sapien
agtctcggttaagctctcggtcccc

SEQ ID NO: 67322 - DNA, 25 bp, Homo sapien
agtctcggttaacctctcggtcccc

SEQ ID NO: 67323 - DNA, 25 bp, Homo sapien
atactgtgtcatgtgtcctccgttt

SEQ ID NO: 67324 - DNA, 25 bp, Homo sapien
atactgtgtcatctgtcctccgttt

SEQ ID NO: 67325 - DNA, 25 bp, Homo sapien
aaataatgaactttattaccatatg

SEQ ID NO: 67326 - DNA, 25 bp, Homo sapien
aaataatgaactatattaccatatg

SEQ ID NO: 67327 - DNA, 25 bp, Homo sapien
taactgggaacgtcgatgggttatc

SEQ ID NO: 67328 - DNA, 25 bp, Homo sapien
taactgggaacgacgatgggttatc

SEQ ID NO: 67329 - DNA, 25 bp, Homo sapien
aaagtgtgacccacactgggcttct

SEQ ID NO: 67330 - DNA, 25 bp, Homo sapien
aaagtgtgaccctcactgggcttct

SEQ ID NO: 67331 - DNA, 25 bp, Homo sapien
acacgattatttatcttgttcagga

SEQ ID NO: 67332 - DNA, 25 bp, Homo sapien
acacgattatttttcttgttcagga

SEQ ID NO: 67333 - DNA, 25 bp, Homo sapien
catatcttttcattgcgtgagcggt

SEQ ID NO: 67334 - DNA, 25 bp, Homo sapien
catatcttttcaatgcgtgagcggt

SEQ ID NO: 67335 - DNA, 25 bp, Homo sapien
cagggatttgttattcattcgatac

SEQ ID NO: 67336 - DNA, 25 bp, Homo sapien
cagggatttgtttttcattcgatac

SEQ ID NO: 67337 - DNA, 25 bp, Homo sapien
attgaatgtgtagtctccttttcga

SEQ ID NO: 67338 - DNA, 25 bp, Homo sapien
attgaatgtgtactctccttttcga

SEQ ID NO: 67339 - DNA, 25 bp, Homo sapien
tcgtatgctttctatgctttctcga

SEQ ID NO: 67340 - DNA, 25 bp, Homo sapien
tcgtatgctttcaatgctttctcga

SEQ ID NO: 67341 - DNA, 25 bp, Homo sapien
cctgttacggtcacggtatgtcccc

SEQ ID NO: 67342 - DNA, 25 bp, Homo sapien
cctgttacggtctcggtatgtcccc

SEQ ID NO: 67343 - DNA, 25 bp, Homo sapien
agacgtttaccgagatttactccca

SEQ ID NO: 67344 - DNA, 25 bp, Homo sapien
agacgtttaccgtgatttactccca

SEQ ID NO: 67345 - DNA, 25 bp, Homo sapien
aagaagttaacagtttcacctcaag

SEQ ID NO: 67346 - DNA, 25 bp, Homo sapien
aagaagttaacactttcacctcaag

SEQ ID NO: 67347 - DNA, 25 bp, Homo sapien
tcctttttagggtcaggtctcgtaa

SEQ ID NO: 67348 - DNA, 25 bp, Homo sapien
tcctttttagggacaggtctcgtaa

SEQ ID NO: 67349 - DNA, 25 bp, Homo sapien
aaccttgccgggtccgatcatcggt

SEQ ID NO: 67350 - DNA, 25 bp, Homo sapien
aaccttgccgggaccgatcatcggt

SEQ ID NO: 67351 - DNA, 25 bp, Homo sapien
tctccgggcctgtcgaagaactagc

SEQ ID NO: 67352 - DNA, 25 bp, Homo sapien
tctccgggcctgacgaagaactagc

SEQ ID NO: 67353 - DNA, 25 bp, Homo sapien
agagactcgtccttacagataagtc

SEQ ID NO: 67354 - DNA, 25 bp, Homo sapien
agagactcgtccatacagataagtc

SEQ ID NO: 67355 - DNA, 25 bp, Homo sapien
agtcgatgatctccagatattaagg

SEQ ID NO: 67356 - DNA, 25 bp, Homo sapien
agtcgatgatctgcagatattaagg

SEQ ID NO: 67357 - DNA, 25 bp, Homo sapien
aacgagtgacacgtctgatttaaat

SEQ ID NO: 67358 - DNA, 25 bp, Homo sapien
aacgagtgacacctctgatttaaat

SEQ ID NO: 67359 - DNA, 25 bp, Homo sapien
gcgggccatgtctctcgacgcgtcg

SEQ ID NO: 67360 - DNA, 25 bp, Homo sapien
gcgggccatgtcactcgacgcgtcg

SEQ ID NO: 67361 - DNA, 25 bp, Homo sapien
gaggcaggaccctcttccgtcgtca

SEQ ID NO: 67362 - DNA, 25 bp, Homo sapien
gaggcaggacccacttccgtcgtca

SEQ ID NO: 67363 - DNA, 25 bp, Homo sapien
tgggacccacacacgtttatgtgac

SEQ ID NO: 67364 - DNA, 25 bp, Homo sapien
tgggacccacactcgtttatgtgac

SEQ ID NO: 67365 - DNA, 25 bp, Homo sapien
gaccgacgtcactgagggtccttga

SEQ ID NO: 67366 - DNA, 25 bp, Homo sapien
gaccgacgtcacagagggtccttga

SEQ ID NO: 67367 - DNA, 25 bp, Homo sapien
gagggacccccgagggttcaagact

SEQ ID NO: 67368 - DNA, 25 bp, Homo sapien
gagggacccccgtgggttcaagact

SEQ ID NO: 67369 - DNA, 25 bp, Homo sapien
gggaatcatctttgggtctcttgat

SEQ ID NO: 67370 - DNA, 25 bp, Homo sapien
gggaatcatcttagggtctcttgat

SEQ ID NO: 67371 - DNA, 25 bp, Homo sapien
acacatctcttgtacgtgtctttgt

SEQ ID NO: 67372 - DNA, 25 bp, Homo sapien
acacatctcttgaacgtgtctttgt

SEQ ID NO: 67373 - DNA, 25 bp, Homo sapien
ggccgtcgcttccaccggtgcaggt

SEQ ID NO: 67374 - DNA, 25 bp, Homo sapien
ggccgtcgcttcgaccggtgcaggt

SEQ ID NO: 67375 - DNA, 25 bp, Homo sapien
gagaactcttatccttcggtttggt

SEQ ID NO: 67376 - DNA, 25 bp, Homo sapien
gagaactcttatgcttcggtttggt

SEQ ID NO: 67377 - DNA, 25 bp, Homo sapien
aagagatcgttgtttggagtttgtt

SEQ ID NO: 67378 - DNA, 25 bp, Homo sapien
aagagatcgttgattggagtttgtt

SEQ ID NO: 67379 - DNA, 25 bp, Homo sapien
ccgttagttagtcgtttaatctttg

SEQ ID NO: 67380 - DNA, 25 bp, Homo sapien
ccgttagttagtggtttaatctttg

SEQ ID NO: 67381 - DNA, 25 bp, Homo sapien
aacggttgagggttccggacttcgc

SEQ ID NO: 67382 - DNA, 25 bp, Homo sapien
aacggttgagggatccggacttcgc

SEQ ID NO: 67383 - DNA, 25 bp, Homo sapien
taaatgttgtttatcacccgatcga

SEQ ID NO: 67384 - DNA, 25 bp, Homo sapien
taaatgttgtttttcacccgatcga

SEQ ID NO: 67385 - DNA, 25 bp, Homo sapien
aactggtttttaaccactaaccgtg

SEQ ID NO: 67386 - DNA, 25 bp, Homo sapien
aactggtttttatccactaaccgtg

SEQ ID NO: 67387 - DNA, 25 bp, Homo sapien
tgagtcactgtttcacagtaaaact

SEQ ID NO: 67388 - DNA, 25 bp, Homo sapien
tgagtcactgttacacagtaaaact

SEQ ID NO: 67389 - DNA, 25 bp, Homo sapien
ggactcgacttttcaacgtcaccct

SEQ ID NO: 67390 - DNA, 25 bp, Homo sapien
ggactcgactttacaacgtcaccct

SEQ ID NO: 67391 - DNA, 25 bp, Homo sapien
gaagaacccagtcgacaactccttc

SEQ ID NO: 67392 - DNA, 25 bp, Homo sapien
gaagaacccagtggacaactccttc

SEQ ID NO: 67393 - DNA, 25 bp, Homo sapien
accgaagaaatcgtgatataacttc

SEQ ID NO: 67394 - DNA, 25 bp, Homo sapien
accgaagaaatcctgatataacttc

SEQ ID NO: 67395 - DNA, 25 bp, Homo sapien
cgataatcagtgtgtcacttaaagt

SEQ ID NO: 67396 - DNA, 25 bp, Homo sapien
cgataatcagtgagtcacttaaagt

SEQ ID NO: 67397 - DNA, 25 bp, Homo sapien
tgtacaaaaagtttgacgtttcaac

SEQ ID NO: 67398 - DNA, 25 bp, Homo sapien
tgtacaaaaagtatgacgtttcaac

SEQ ID NO: 67399 - DNA, 25 bp, Homo sapien
gtattcagtccattgtgacacccaa

SEQ ID NO: 67400 - DNA, 25 bp, Homo sapien
gtattcagtccaatgtgacacccaa

SEQ ID NO: 67401 - DNA, 25 bp, Homo sapien
gtctttacgaagaaaggaccctttt

SEQ ID NO: 67402 - DNA, 25 bp, Homo sapien
gtctttacgaagtaaggaccctttt

SEQ ID NO: 67403 - DNA, 25 bp, Homo sapien
tattgacgataacgtttcctcttta

SEQ ID NO: 67404 - DNA, 25 bp, Homo sapien
tattgacgataaggtttcctcttta

SEQ ID NO: 67405 - DNA, 25 bp, Homo sapien
aaataagagtttctctactagtgtc

SEQ ID NO: 67406 - DNA, 25 bp, Homo sapien
aaataagagtttgtctactagtgtc

SEQ ID NO: 67407 - DNA, 25 bp, Homo sapien
ccacaccagagtctgtgttttagtg

SEQ ID NO: 67408 - DNA, 25 bp, Homo sapien
ccacaccagagtgtgtgttttagtg

SEQ ID NO: 67409 - DNA, 25 bp, Homo sapien
aaacatccgtgacgactatgaaatc

SEQ ID NO: 67410 - DNA, 25 bp, Homo sapien
aaacatccgtgaggactatgaaatc

SEQ ID NO: 67411 - DNA, 25 bp, Homo sapien
tcgaacgagaaaaggcatcaccatc

SEQ ID NO: 67412 - DNA, 25 bp, Homo sapien
tcgaacgagaaatggcatcaccatc

SEQ ID NO: 67413 - DNA, 25 bp, Homo sapien
actaagaatagttcggtcaactatt

SEQ ID NO: 67414 - DNA, 25 bp, Homo sapien
actaagaatagtacggtcaactatt

SEQ ID NO: 67415 - DNA, 25 bp, Homo sapien
tccgagttcgaaaggtctagattac

SEQ ID NO: 67416 - DNA, 25 bp, Homo sapien
tccgagttcgaatggtctagattac

SEQ ID NO: 67417 - DNA, 25 bp, Homo sapien
tctatcctcaactctgggtattttg

SEQ ID NO: 67418 - DNA, 25 bp, Homo sapien
tctatcctcaacactgggtattttg

SEQ ID NO: 67419 - DNA, 25 bp, Homo sapien
gttctcccaacctttgtatttttgt

SEQ ID NO: 67420 - DNA, 25 bp, Homo sapien
gttctcccaaccattgtatttttgt

SEQ ID NO: 67421 - DNA, 25 bp, Homo sapien
gtggatccttcaaacaaattttacg

SEQ ID NO: 67422 - DNA, 25 bp, Homo sapien
gtggatccttcatacaaattttacg

SEQ ID NO: 67423 - DNA, 25 bp, Homo sapien
gaattttagtttcttgagtctctcg

SEQ ID NO: 67424 - DNA, 25 bp, Homo sapien
gaattttagtttgttgagtctctcg

SEQ ID NO: 67425 - DNA, 25 bp, Homo sapien
gtgttaggtaactatcttgacctcc

SEQ ID NO: 67426 - DNA, 25 bp, Homo sapien
gtgttaggtaacaatcttgacctcc

SEQ ID NO: 67427 - DNA, 25 bp, Homo sapien
gttggtaacgaaatatcttttgtcc

SEQ ID NO: 67428 - DNA, 25 bp, Homo sapien
gttggtaacgaattatcttttgtcc

SEQ ID NO: 67429 - DNA, 25 bp, Homo sapien
catttatccgatcttttcggttccg

SEQ ID NO: 67430 - DNA, 25 bp, Homo sapien
catttatccgatgttttcggttccg

SEQ ID NO: 67431 - DNA, 25 bp, Homo sapien
gttgtttgctttagattcacgttcg

SEQ ID NO: 67432 - DNA, 25 bp, Homo sapien
gttgtttgcttttgattcacgttcg

SEQ ID NO: 67433 - DNA, 25 bp, Homo sapien
taggtctccttgtcgatgttagtga

SEQ ID NO: 67434 - DNA, 25 bp, Homo sapien
taggtctccttgacgatgttagtga

SEQ ID NO: 67435 - DNA, 25 bp, Homo sapien
cttggtccttagagtcgatactgga

SEQ ID NO: 67436 - DNA, 25 bp, Homo sapien
cttggtccttagtgtcgatactgga

SEQ ID NO: 67437 - DNA, 25 bp, Homo sapien
tcattctgccttctagtgttgatta

SEQ ID NO: 67438 - DNA, 25 bp, Homo sapien
tcattctgccttgtagtgttgatta

SEQ ID NO: 67439 - DNA, 25 bp, Homo sapien
ctatagccccatgtccaggagtcta

SEQ ID NO: 67440 - DNA, 25 bp, Homo sapien
ctatagccccatctccaggagtcta

SEQ ID NO: 67441 - DNA, 25 bp, Homo sapien
tccttcttacctacaaagtaccgta

SEQ ID NO: 67442 - DNA, 25 bp, Homo sapien
tccttcttaccttcaaagtaccgta

SEQ ID NO: 67443 - DNA, 25 bp, Homo sapien
taagcaaaaggactgttacaccgta

SEQ ID NO: 67444 - DNA, 25 bp, Homo sapien
taagcaaaaggagtgttacaccgta

SEQ ID NO: 67445 - DNA, 25 bp, Homo sapien
acaactagagtcgttcgaacgtctt

SEQ ID NO: 67446 - DNA, 25 bp, Homo sapien
acaactagagtccttcgaacgtctt

SEQ ID NO: 67447 - DNA, 25 bp, Homo sapien
ggtctgtaagactcgtaccgagtca

SEQ ID NO: 67448 - DNA, 25 bp, Homo sapien
ggtctgtaagacacgtaccgagtca

SEQ ID NO: 67449 - DNA, 25 bp, Homo sapien
gtctctagagacgactgtgacacta

SEQ ID NO: 67450 - DNA, 25 bp, Homo sapien
gtctctagagaccactgtgacacta

SEQ ID NO: 67451 - DNA, 25 bp, Homo sapien
ctaacttgagtatccgtggtagaag

SEQ ID NO: 67452 - DNA, 25 bp, Homo sapien
ctaacttgagtaaccgtggtagaag

SEQ ID NO: 67453 - DNA, 25 bp, Homo sapien
taataatgtggtcgaccctactaat

SEQ ID NO: 67454 - DNA, 25 bp, Homo sapien
taataatgtggtggaccctactaat

SEQ ID NO: 67455 - DNA, 25 bp, Homo sapien
agataagattttgtacgcacacttt

SEQ ID NO: 67456 - DNA, 25 bp, Homo sapien
agataagattttctacgcacacttt

SEQ ID NO: 67457 - DNA, 25 bp, Homo sapien
aaacaattttactcgttacagtggt

SEQ ID NO: 67458 - DNA, 25 bp, Homo sapien
aaacaattttacacgttacagtggt

SEQ ID NO: 67459 - DNA, 25 bp, Homo sapien
ttacttcggtttactcgaattatgt

SEQ ID NO: 67460 - DNA, 25 bp, Homo sapien
ttacttcggttttctcgaattatgt

SEQ ID NO: 67461 - DNA, 25 bp, Homo sapien
tcttaggtgatgttccacgttgtct

SEQ ID NO: 67462 - DNA, 25 bp, Homo sapien
tcttaggtgatgatccacgttgtct

SEQ ID NO: 67463 - DNA, 25 bp, Homo sapien
tctttgtcagattccaacggtagtt

SEQ ID NO: 67464 - DNA, 25 bp, Homo sapien
tctttgtcagataccaacggtagtt

SEQ ID NO: 67465 - DNA, 25 bp, Homo sapien
cacatttcacatcgtactacaattc

SEQ ID NO: 67466 - DNA, 25 bp, Homo sapien
cacatttcacatggtactacaattc

SEQ ID NO: 67467 - DNA, 25 bp, Homo sapien
ctcatgagccatggtatacaacaac

SEQ ID NO: 67468 - DNA, 25 bp, Homo sapien
ctcatgagccatcgtatacaacaac

SEQ ID NO: 67469 - DNA, 25 bp, Homo sapien
tctgtcgacgaggactgaatatatc

SEQ ID NO: 67470 - DNA, 25 bp, Homo sapien
tctgtcgacgagcactgaatatatc

SEQ ID NO: 67471 - DNA, 25 bp, Homo sapien
cctgttcgacaatcccgaatcactg

SEQ ID NO: 67472 - DNA, 25 bp, Homo sapien
cctgttcgacaaacccgaatcactg

SEQ ID NO: 67473 - DNA, 25 bp, Homo sapien
attttacaccaagtccgatgatagt

SEQ ID NO: 67474 - DNA, 25 bp, Homo sapien
attttacaccaactccgatgatagt

SEQ ID NO: 67475 - DNA, 25 bp, Homo sapien
gacgtactacggaacttcctttact

SEQ ID NO: 67476 - DNA, 25 bp, Homo sapien
gacgtactacggtacttcctttact

SEQ ID NO: 67477 - DNA, 25 bp, Homo sapien
ttgggacgctaaaattactcttaat

SEQ ID NO: 67478 - DNA, 25 bp, Homo sapien
ttgggacgctaatattactcttaat

SEQ ID NO: 67479 - DNA, 25 bp, Homo sapien
aggagcccgggtattacgtaatact

SEQ ID NO: 67480 - DNA, 25 bp, Homo sapien
aggagcccgggttttacgtaatact

SEQ ID NO: 67481 - DNA, 25 bp, Homo sapien
atcgtggttaggtgtggactaacac

SEQ ID NO: 67482 - DNA, 25 bp, Homo sapien
atcgtggttaggagtggactaacac

SEQ ID NO: 67483 - DNA, 25 bp, Homo sapien
caatttacagagacgtgtacttaaa

SEQ ID NO: 67484 - DNA, 25 bp, Homo sapien
caatttacagagtcgtgtacttaaa

SEQ ID NO: 67485 - DNA, 25 bp, Homo sapien
gtctgttgtaaaacactgctattta

SEQ ID NO: 67486 - DNA, 25 bp, Homo sapien
gtctgttgtaaatcactgctattta

SEQ ID NO: 67487 - DNA, 25 bp, Homo sapien
cactgggaaagtacgtgtctattta

SEQ ID NO: 67488 - DNA, 25 bp, Homo sapien
cactgggaaagttcgtgtctattta

SEQ ID NO: 67489 - DNA, 25 bp, Homo sapien
aaaggaagacgttttactttttctg

SEQ ID NO: 67490 - DNA, 25 bp, Homo sapien
aaaggaagacgtattactttttctg

SEQ ID NO: 67491 - DNA, 25 bp, Homo sapien
ttgtcgagggagtcgttatcttggg

SEQ ID NO: 67492 - DNA, 25 bp, Homo sapien
ttgtcgagggagacgttatcttggg

SEQ ID NO: 67493 - DNA, 25 bp, Homo sapien
ttgtcaggtctttctttcagttcag

SEQ ID NO: 67494 - DNA, 25 bp, Homo sapien
ttgtcaggtcttactttcagttcag

SEQ ID NO: 67495 - DNA, 25 bp, Homo sapien
tcgtaaaggcttttgtcgaggaacg

SEQ ID NO: 67496 - DNA, 25 bp, Homo sapien
tcgtaaaggcttatgtcgaggaacg

SEQ ID NO: 67497 - DNA, 25 bp, Homo sapien
taagttagtatatgggtgaccacac

SEQ ID NO: 67498 - DNA, 25 bp, Homo sapien
taagttagtataagggtgaccacac

SEQ ID NO: 67499 - DNA, 25 bp, Homo sapien
agacttagtgaggaaaccgttctag

SEQ ID NO: 67500 - DNA, 25 bp, Homo sapien
agacttagtgagcaaaccgttctag

SEQ ID NO: 67501 - DNA, 25 bp, Homo sapien
ttataagtgacttccgacggcttag

SEQ ID NO: 67502 - DNA, 25 bp, Homo sapien
ttataagtgactaccgacggcttag

SEQ ID NO: 67503 - DNA, 25 bp, Homo sapien
gggtaatggcccggacgaacatacg

SEQ ID NO: 67504 - DNA, 25 bp, Homo sapien
gggtaatggccccgacgaacatacg

SEQ ID NO: 67505 - DNA, 25 bp, Homo sapien
gtgctggtttacgtaaccgttaccc

SEQ ID NO: 67506 - DNA, 25 bp, Homo sapien
gtgctggtttacctaaccgttaccc

SEQ ID NO: 67507 - DNA, 25 bp, Homo sapien
tcaggtgccgttctagacagaatcc

SEQ ID NO: 67508 - DNA, 25 bp, Homo sapien
tcaggtgccgttgtagacagaatcc

SEQ ID NO: 67509 - DNA, 25 bp, Homo sapien
aagggtctgtctcgtcccgaggacc

SEQ ID NO: 67510 - DNA, 25 bp, Homo sapien
aagggtctgtctggtcccgaggacc

SEQ ID NO: 67511 - DNA, 25 bp, Homo sapien
ggagcgtgaacgtcctcaggcgcgt

SEQ ID NO: 67512 - DNA, 25 bp, Homo sapien
ggagcgtgaacgacctcaggcgcgt

SEQ ID NO: 67513 - DNA, 25 bp, Homo sapien
cccctgaggaactcgatggtgtcgc

SEQ ID NO: 67514 - DNA, 25 bp, Homo sapien
cccctgaggaacacgatggtgtcgc

SEQ ID NO: 67515 - DNA, 25 bp, Homo sapien
cccgtattcccaaagccggtcggtc

SEQ ID NO: 67516 - DNA, 25 bp, Homo sapien
cccgtattcccatagccggtcggtc

SEQ ID NO: 67517 - DNA, 25 bp, Homo sapien
gtggtcggaatatataggtcctttc

SEQ ID NO: 67518 - DNA, 25 bp, Homo sapien
gtggtcggaataaataggtcctttc

SEQ ID NO: 67519 - DNA, 25 bp, Homo sapien
aacgcgacattgcggtcgcgcagcg

SEQ ID NO: 67520 - DNA, 25 bp, Homo sapien
aacgcgacattggggtcgcgcagcg

SEQ ID NO: 67521 - DNA, 25 bp, Homo sapien
tccaaatgcgttatcgctgcgcgac

SEQ ID NO: 67522 - DNA, 25 bp, Homo sapien
tccaaatgcgttttcgctgcgcgac

SEQ ID NO: 67523 - DNA, 25 bp, Homo sapien
gactcttcccgctcactaaaaagag

SEQ ID NO: 67524 - DNA, 25 bp, Homo sapien
gactcttcccgcacactaaaaagag

SEQ ID NO: 67525 - DNA, 25 bp, Homo sapien
ttttgagtaaactttacacaagacg

SEQ ID NO: 67526 - DNA, 25 bp, Homo sapien
ttttgagtaaacattacacaagacg

SEQ ID NO: 67527 - DNA, 25 bp, Homo sapien
ttcaaataggtatatagacctatcg

SEQ ID NO: 67528 - DNA, 25 bp, Homo sapien
ttcaaataggtaaatagacctatcg

SEQ ID NO: 67529 - DNA, 25 bp, Homo sapien
agcaactgcttcctcaagtactacg

SEQ ID NO: 67530 - DNA, 25 bp, Homo sapien
agcaactgcttcgtcaagtactacg

SEQ ID NO: 67531 - DNA, 25 bp, Homo sapien
agtcgagacccgtctcgtcacagaa

SEQ ID NO: 67532 - DNA, 25 bp, Homo sapien
agtcgagacccgactcgtcacagaa

SEQ ID NO: 67533 - DNA, 25 bp, Homo sapien
gttcgacgattgaaccgttattaag

SEQ ID NO: 67534 - DNA, 25 bp, Homo sapien
gttcgacgattgtaccgttattaag

SEQ ID NO: 67535 - DNA, 25 bp, Homo sapien
ttcttcgcttcgacgcgtttgtaag

SEQ ID NO: 67536 - DNA, 25 bp, Homo sapien
ttcttcgcttcgtcgcgtttgtaag

SEQ ID NO: 67537 - DNA, 25 bp, Homo sapien
cgacctactgaaggtccttctcgca

SEQ ID NO: 67538 - DNA, 25 bp, Homo sapien
cgacctactgaacgtccttctcgca

SEQ ID NO: 67539 - DNA, 25 bp, Homo sapien
gtcgtacccgacctctttccgagag

SEQ ID NO: 67540 - DNA, 25 bp, Homo sapien
gtcgtacccgacgtctttccgagag

SEQ ID NO: 67541 - DNA, 25 bp, Homo sapien
ccagattacgagtacatcgattaag

SEQ ID NO: 67542 - DNA, 25 bp, Homo sapien
ccagattacgagaacatcgattaag

SEQ ID NO: 67543 - DNA, 25 bp, Homo sapien
gtcagatatcagaactctttaaacg

SEQ ID NO: 67544 - DNA, 25 bp, Homo sapien
gtcagatatcagtactctttaaacg

SEQ ID NO: 67545 - DNA, 25 bp, Homo sapien
acggcacaattctctctcggagaac

SEQ ID NO: 67546 - DNA, 25 bp, Homo sapien
acggcacaattcactctcggagaac

SEQ ID NO: 67547 - DNA, 25 bp, Homo sapien
tttcacgaacttgtctcggcggcac

SEQ ID NO: 67548 - DNA, 25 bp, Homo sapien
tttcacgaacttctctcggcggcac

SEQ ID NO: 67549 - DNA, 25 bp, Homo sapien
taagaacgaactcgccggcgagtcc

SEQ ID NO: 67550 - DNA, 25 bp, Homo sapien
taagaacgaactggccggcgagtcc

SEQ ID NO: 67551 - DNA, 25 bp, Homo sapien
aaaactaaattgtctgtcgtactta

SEQ ID NO: 67552 - DNA, 25 bp, Homo sapien
aaaactaaattgactgtcgtactta

SEQ ID NO: 67553 - DNA, 25 bp, Homo sapien
gcaacataacagtgttatgactttt

SEQ ID NO: 67554 - DNA, 25 bp, Homo sapien
gcaacataacagagttatgactttt

SEQ ID NO: 67555 - DNA, 25 bp, Homo sapien
ggggataactggttactgttcttac

SEQ ID NO: 67556 - DNA, 25 bp, Homo sapien
ggggataactggatactgttcttac

SEQ ID NO: 67557 - DNA, 25 bp, Homo sapien
ggacgaattctctgtattgtctcaa

SEQ ID NO: 67558 - DNA, 25 bp, Homo sapien
ggacgaattctcagtattgtctcaa

SEQ ID NO: 67559 - DNA, 25 bp, Homo sapien
gaagagtaacttcagaacttctcaa

SEQ ID NO: 67560 - DNA, 25 bp, Homo sapien
gaagagtaacttgagaacttctcaa

SEQ ID NO: 67561 - DNA, 25 bp, Homo sapien
ggacagagacaaagaggaacctaca

SEQ ID NO: 67562 - DNA, 25 bp, Homo sapien
ggacagagacaatgaggaacctaca

SEQ ID NO: 67563 - DNA, 25 bp, Homo sapien
agctagtacgtgaacgtgtcccact

SEQ ID NO: 67564 - DNA, 25 bp, Homo sapien
agctagtacgtgtacgtgtcccact

SEQ ID NO: 67565 - DNA, 25 bp, Homo sapien
ggagtacggactgtctctacctctt

SEQ ID NO: 67566 - DNA, 25 bp, Homo sapien
ggagtacggactctctctacctctt

SEQ ID NO: 67567 - DNA, 25 bp, Homo sapien
aagagggtgaaataatacctcgtct

SEQ ID NO: 67568 - DNA, 25 bp, Homo sapien
aagagggtgaaaaaatacctcgtct

SEQ ID NO: 67569 - DNA, 25 bp, Homo sapien
gacgagggtgaacgaaaatctagtc

SEQ ID NO: 67570 - DNA, 25 bp, Homo sapien
gacgagggtgaaggaaaatctagtc

SEQ ID NO: 67571 - DNA, 25 bp, Homo sapien
caaagttagtcatgatgttctttcg

SEQ ID NO: 67572 - DNA, 25 bp, Homo sapien
caaagttagtcaagatgttctttcg

SEQ ID NO: 67573 - DNA, 25 bp, Homo sapien
ataaagttttaacgtcgtttctgtc

SEQ ID NO: 67574 - DNA, 25 bp, Homo sapien
ataaagttttaaggtcgtttctgtc

SEQ ID NO: 67575 - DNA, 25 bp, Homo sapien
tttgtgctcggtgagtcgtcccttt

SEQ ID NO: 67576 - DNA, 25 bp, Homo sapien
tttgtgctcggtcagtcgtcccttt

SEQ ID NO: 67577 - DNA, 25 bp, Homo sapien
tcttacgtggagtcactgggcggtt

SEQ ID NO: 67578 - DNA, 25 bp, Homo sapien
tcttacgtggagacactgggcggtt

SEQ ID NO: 67579 - DNA, 25 bp, Homo sapien
ttataatcaccgtggtcgtaggtct

SEQ ID NO: 67580 - DNA, 25 bp, Homo sapien
ttataatcaccgaggtcgtaggtct

SEQ ID NO: 67581 - DNA, 25 bp, Homo sapien
gacctgaacaccagtgagacccacg

SEQ ID NO: 67582 - DNA, 25 bp, Homo sapien
gacctgaacacctgtgagacccacg

SEQ ID NO: 67583 - DNA, 25 bp, Homo sapien
tataatcgaacctagacggaaacag

SEQ ID NO: 67584 - DNA, 25 bp, Homo sapien
tataatcgaaccaagacggaaacag

SEQ ID NO: 67585 - DNA, 25 bp, Homo sapien
cggatcccgaggagactcgtcacca

SEQ ID NO: 67586 - DNA, 25 bp, Homo sapien
cggatcccgaggtgactcgtcacca

SEQ ID NO: 67587 - DNA, 25 bp, Homo sapien
ttcatcgtagacatagtccgtttca

SEQ ID NO: 67588 - DNA, 25 bp, Homo sapien
ttcatcgtagacttagtccgtttca

SEQ ID NO: 67589 - DNA, 25 bp, Homo sapien
ctgtgtcatgtgtcctccgtttcac

SEQ ID NO: 67590 - DNA, 25 bp, Homo sapien
ctgtgtcatgtgacctccgtttcac

SEQ ID NO: 67591 - DNA, 25 bp, Homo sapien
aggagattacgtaaaccctgctgac

SEQ ID NO: 67592 - DNA, 25 bp, Homo sapien
aggagattacgttaaccctgctgac

SEQ ID NO: 67593 - DNA, 25 bp, Homo sapien
ggatgtttctcacgtccgtttcaat

SEQ ID NO: 67594 - DNA, 25 bp, Homo sapien
ggatgtttctcaggtccgtttcaat

SEQ ID NO: 67595 - DNA, 25 bp, Homo sapien
ccgtcgtctgtgatgtctctttggg

SEQ ID NO: 67596 - DNA, 25 bp, Homo sapien
ccgtcgtctgtgttgtctctttggg

SEQ ID NO: 67597 - DNA, 25 bp, Homo sapien
cctttgtacgtttctgtgtgagtgg

SEQ ID NO: 67598 - DNA, 25 bp, Homo sapien
cctttgtacgttactgtgtgagtgg

SEQ ID NO: 67599 - DNA, 25 bp, Homo sapien
tcctacacgagtttcccactttact

SEQ ID NO: 67600 - DNA, 25 bp, Homo sapien
tcctacacgagtatcccactttact

SEQ ID NO: 67601 - DNA, 25 bp, Homo sapien
tacttacagaagatcggtcaattat

SEQ ID NO: 67602 - DNA, 25 bp, Homo sapien
tacttacagaagttcggtcaattat

SEQ ID NO: 67603 - DNA, 25 bp, Homo sapien
gtacacgacggagtctactctcgag

SEQ ID NO: 67604 - DNA, 25 bp, Homo sapien
gtacacgacggactctactctcgag

SEQ ID NO: 67605 - DNA, 25 bp, Homo sapien
gactttggtgtacctcacgtctcga

SEQ ID NO: 67606 - DNA, 25 bp, Homo sapien
gactttggtgtagctcacgtctcga

SEQ ID NO: 67607 - DNA, 25 bp, Homo sapien
gggacattatgaaacggtgtccccg

SEQ ID NO: 67608 - DNA, 25 bp, Homo sapien
gggacattatgatacggtgtccccg

SEQ ID NO: 67609 - DNA, 25 bp, Homo sapien
cctgtttcatcgactcgtcgtcctt

SEQ ID NO: 67610 - DNA, 25 bp, Homo sapien
cctgtttcatcgtctcgtcgtcctt

SEQ ID NO: 67611 - DNA, 25 bp, Homo sapien
ctcttcctatgtcctcgacaggagt

SEQ ID NO: 67612 - DNA, 25 bp, Homo sapien
ctcttcctatgtgctcgacaggagt

SEQ ID NO: 67613 - DNA, 25 bp, Homo sapien
taacgatagacatgactcaatagac

SEQ ID NO: 67614 - DNA, 25 bp, Homo sapien
taacgatagacaagactcaatagac

SEQ ID NO: 67615 - DNA, 25 bp, Homo sapien
ggatcgaaaatacaaaccgaaagtc

SEQ ID NO: 67616 - DNA, 25 bp, Homo sapien
ggatcgaaaatagaaaccgaaagtc

SEQ ID NO: 67617 - DNA, 25 bp, Homo sapien
gctcgaaaaactattcttgactgtc

SEQ ID NO: 67618 - DNA, 25 bp, Homo sapien
gctcgaaaaacttttcttgactgtc

SEQ ID NO: 67619 - DNA, 25 bp, Homo sapien
gcgacagaagtctcttcttttctct

SEQ ID NO: 67620 - DNA, 25 bp, Homo sapien
gcgacagaagtcacttcttttctct

SEQ ID NO: 67621 - DNA, 25 bp, Homo sapien
cacagaagactatatgattcgtacc

SEQ ID NO: 67622 - DNA, 25 bp, Homo sapien
cacagaagactaaatgattcgtacc

SEQ ID NO: 67623 - DNA, 25 bp, Homo sapien
ggcagaaagaactccacagacacgt

SEQ ID NO: 67624 - DNA, 25 bp, Homo sapien
ggcagaaagaacaccacagacacgt

SEQ ID NO: 67625 - DNA, 25 bp, Homo sapien
tgaagtcatactatactatcgatag

SEQ ID NO: 67626 - DNA, 25 bp, Homo sapien
tgaagtcatactttactatcgatag

SEQ ID NO: 67627 - DNA, 25 bp, Homo sapien
tgagaggagagttctcttcgacgat

SEQ ID NO: 67628 - DNA, 25 bp, Homo sapien
tgagaggagagtactcttcgacgat

SEQ ID NO: 67629 - DNA, 25 bp, Homo sapien
tcactcaggtgtgtgcgtgtttaat

SEQ ID NO: 67630 - DNA, 25 bp, Homo sapien
tcactcaggtgtctgcgtgtttaat

SEQ ID NO: 67631 - DNA, 25 bp, Homo sapien
ttctcccgtcgtcttgatcgtttac

SEQ ID NO: 67632 - DNA, 25 bp, Homo sapien
ttctcccgtcgtgttgatcgtttac

SEQ ID NO: 67633 - DNA, 25 bp, Homo sapien
ccgtacagcaggtgcacgcggtgcc

SEQ ID NO: 67634 - DNA, 25 bp, Homo sapien
ccgtacagcaggagcacgcggtgcc

SEQ ID NO: 67635 - DNA, 25 bp, Homo sapien
tcggagccgatgagacctgaggaca

SEQ ID NO: 67636 - DNA, 25 bp, Homo sapien
tcggagccgatgtgacctgaggaca

SEQ ID NO: 67637 - DNA, 25 bp, Homo sapien
tactcctgcatctcccggaggtcga

SEQ ID NO: 67638 - DNA, 25 bp, Homo sapien
tactcctgcatcacccggaggtcga

SEQ ID NO: 67639 - DNA, 25 bp, Homo sapien
tactcaacctccattgtgagatgta

SEQ ID NO: 67640 - DNA, 25 bp, Homo sapien
tactcaacctcctttgtgagatgta

SEQ ID NO: 67641 - DNA, 25 bp, Homo sapien
agtacagtctcatccgagaggtgta

SEQ ID NO: 67642 - DNA, 25 bp, Homo sapien
agtacagtctcaaccgagaggtgta

SEQ ID NO: 67643 - DNA, 25 bp, Homo sapien
gggacgaccagagacgagacttctc

SEQ ID NO: 67644 - DNA, 25 bp, Homo sapien
gggacgaccagacacgagacttctc

SEQ ID NO: 67645 - DNA, 25 bp, Homo sapien
tgaggggtctatcgtcactcttacc

SEQ ID NO: 67646 - DNA, 25 bp, Homo sapien
tgaggggtctatggtcactcttacc

SEQ ID NO: 67647 - DNA, 25 bp, Homo sapien
cctgtggagccagaactcgaacaac

SEQ ID NO: 67648 - DNA, 25 bp, Homo sapien
cctgtggagccacaactcgaacaac

SEQ ID NO: 67649 - DNA, 25 bp, Homo sapien
taggagtctcgaaggaaggaccacg

SEQ ID NO: 67650 - DNA, 25 bp, Homo sapien
taggagtctcgatggaaggaccacg

SEQ ID NO: 67651 - DNA, 25 bp, Homo sapien
actgatatcactgtatagcctagtc

SEQ ID NO: 67652 - DNA, 25 bp, Homo sapien
actgatatcactctatagcctagtc

SEQ ID NO: 67653 - DNA, 25 bp, Homo sapien
catgtatacatatgcctccgacatg

SEQ ID NO: 67654 - DNA, 25 bp, Homo sapien
catgtatacataagcctccgacatg

SEQ ID NO: 67655 - DNA, 25 bp, Homo sapien
aactgtatctcgactattgagtatg

SEQ ID NO: 67656 - DNA, 25 bp, Homo sapien
aactgtatctcgtctattgagtatg

SEQ ID NO: 67657 - DNA, 25 bp, Homo sapien
ccgtgattttcctgttacgttgggg

SEQ ID NO: 67658 - DNA, 25 bp, Homo sapien
ccgtgattttccagttacgttgggg

SEQ ID NO: 67659 - DNA, 25 bp, Homo sapien
cagattgtcccttgtacttaggggt

SEQ ID NO: 67660 - DNA, 25 bp, Homo sapien
cagattgtccctagtacttaggggt

SEQ ID NO: 67661 - DNA, 25 bp, Homo sapien
ctctatttactcctaaatctagggg

SEQ ID NO: 67662 - DNA, 25 bp, Homo sapien
ctctatttactcgtaaatctagggg

SEQ ID NO: 67663 - DNA, 25 bp, Homo sapien
tatttgcgtcttgactctagatgaa

SEQ ID NO: 67664 - DNA, 25 bp, Homo sapien
tatttgcgtcttcactctagatgaa

SEQ ID NO: 67665 - DNA, 25 bp, Homo sapien
actttatggttttcgaccagtaata

SEQ ID NO: 67666 - DNA, 25 bp, Homo sapien
actttatggtttacgaccagtaata

SEQ ID NO: 67667 - DNA, 25 bp, Homo sapien
gattttcaagtgttccgagaggaac

SEQ ID NO: 67668 - DNA, 25 bp, Homo sapien
gattttcaagtgatccgagaggaac

SEQ ID NO: 67669 - DNA, 25 bp, Homo sapien
atattgaccatgatattcgtttgtc

SEQ ID NO: 67670 - DNA, 25 bp, Homo sapien
atattgaccatgttattcgtttgtc

SEQ ID NO: 67671 - DNA, 25 bp, Homo sapien
acaaagagagggtctattcgattcc

SEQ ID NO: 67672 - DNA, 25 bp, Homo sapien
acaaagagagggactattcgattcc

SEQ ID NO: 67673 - DNA, 25 bp, Homo sapien
acactacaagggtccttgacacagg

SEQ ID NO: 67674 - DNA, 25 bp, Homo sapien
acactacaagggaccttgacacagg

SEQ ID NO: 67675 - DNA, 25 bp, Homo sapien
gaagatttagaggactcagtgaacc

SEQ ID NO: 67676 - DNA, 25 bp, Homo sapien
gaagatttagagcactcagtgaacc

SEQ ID NO: 67677 - DNA, 25 bp, Homo sapien
ctacctgtctctccacactgaaagg

SEQ ID NO: 67678 - DNA, 25 bp, Homo sapien
ctacctgtctctgcacactgaaagg

SEQ ID NO: 67679 - DNA, 25 bp, Homo sapien
atcccggtctataaacacacatagg

SEQ ID NO: 67680 - DNA, 25 bp, Homo sapien
atcccggtctattaacacacatagg

SEQ ID NO: 67681 - DNA, 25 bp, Homo sapien
gaactaagtcagtaataccttactg

SEQ ID NO: 67682 - DNA, 25 bp, Homo sapien
gaactaagtcagaaataccttactg

SEQ ID NO: 67683 - DNA, 25 bp, Homo sapien
tgaccgtcgatatataaccagtaaa

SEQ ID NO: 67684 - DNA, 25 bp, Homo sapien
tgaccgtcgataaataaccagtaaa

SEQ ID NO: 67685 - DNA, 25 bp, Homo sapien
ctcggcacgagtatacccgttcatc

SEQ ID NO: 67686 - DNA, 25 bp, Homo sapien
ctcggcacgagtttacccgttcatc

SEQ ID NO: 67687 - DNA, 25 bp, Homo sapien
actcgtcccgggttaaggatcttac

SEQ ID NO: 67688 - DNA, 25 bp, Homo sapien
actcgtcccgggataaggatcttac

SEQ ID NO: 67689 - DNA, 25 bp, Homo sapien
tggtagaaatgtattgtgaccctac

SEQ ID NO: 67690 - DNA, 25 bp, Homo sapien
tggtagaaatgttttgtgaccctac

SEQ ID NO: 67691 - DNA, 25 bp, Homo sapien
tcggagaaaggagaggttcctactc

SEQ ID NO: 67692 - DNA, 25 bp, Homo sapien
tcggagaaaggacaggttcctactc

SEQ ID NO: 67693 - DNA, 25 bp, Homo sapien
ctagaagaagacgaggtcctcgtgg

SEQ ID NO: 67694 - DNA, 25 bp, Homo sapien
ctagaagaagaccaggtcctcgtgg

SEQ ID NO: 67695 - DNA, 25 bp, Homo sapien
tcaacgactttagacgattttatgt

SEQ ID NO: 67696 - DNA, 25 bp, Homo sapien
tcaacgactttacacgattttatgt

SEQ ID NO: 67697 - DNA, 25 bp, Homo sapien
gaactacttcgacacaagttcatcg

SEQ ID NO: 67698 - DNA, 25 bp, Homo sapien
gaactacttcgagacaagttcatcg

SEQ ID NO: 67699 - DNA, 25 bp, Homo sapien
ctactacgtctgtcttaaggctcgg

SEQ ID NO: 67700 - DNA, 25 bp, Homo sapien
ctactacgtctgacttaaggctcgg

SEQ ID NO: 67701 - DNA, 25 bp, Homo sapien
aactgtactggtgtagggtcagtcg

SEQ ID NO: 67702 - DNA, 25 bp, Homo sapien
aactgtactggtctagggtcagtcg

SEQ ID NO: 67703 - DNA, 25 bp, Homo sapien
ttgtaactggtttcctgggtctgtc

SEQ ID NO: 67704 - DNA, 25 bp, Homo sapien
ttgtaactggttacctgggtctgtc

SEQ ID NO: 67705 - DNA, 25 bp, Homo sapien
gttctggtcgttccttgtatatgta

SEQ ID NO: 67706 - DNA, 25 bp, Homo sapien
gttctggtcgttgcttgtatatgta

SEQ ID NO: 67707 - DNA, 25 bp, Homo sapien
actttaagaccctcgtactgtacga

SEQ ID NO: 67708 - DNA, 25 bp, Homo sapien
actttaagacccacgtactgtacga

SEQ ID NO: 67709 - DNA, 25 bp, Homo sapien
gacgtgtgagaacagtaactccaga

SEQ ID NO: 67710 - DNA, 25 bp, Homo sapien
gacgtgtgagaagagtaactccaga

SEQ ID NO: 67711 - DNA, 25 bp, Homo sapien
cgggtgtgtaaagtctcctctcaag

SEQ ID NO: 67712 - DNA, 25 bp, Homo sapien
cgggtgtgtaaactctcctctcaag

SEQ ID NO: 67713 - DNA, 25 bp, Homo sapien
tgtctgtagaaccacaaagtacaac

SEQ ID NO: 67714 - DNA, 25 bp, Homo sapien
tgtctgtagaacgacaaagtacaac

SEQ ID NO: 67715 - DNA, 25 bp, Homo sapien
tctccgttcccgaacgtcatcagag

SEQ ID NO: 67716 - DNA, 25 bp, Homo sapien
tctccgttcccgtacgtcatcagag

SEQ ID NO: 67717 - DNA, 25 bp, Homo sapien
actcagttcccgagtcctaacgggt

SEQ ID NO: 67718 - DNA, 25 bp, Homo sapien
actcagttcccgtgtcctaacgggt

SEQ ID NO: 67719 - DNA, 25 bp, Homo sapien
cacgtctcggcgtgtcctcgacggg

SEQ ID NO: 67720 - DNA, 25 bp, Homo sapien
cacgtctcggcgagtcctcgacggg

SEQ ID NO: 67721 - DNA, 25 bp, Homo sapien
tcgctgtccatgtgtcctcacgagc

SEQ ID NO: 67722 - DNA, 25 bp, Homo sapien
tcgctgtccatgagtcctcacgagc

SEQ ID NO: 67723 - DNA, 25 bp, Homo sapien
cgtttctcttgtccttaccgactga

SEQ ID NO: 67724 - DNA, 25 bp, Homo sapien
cgtttctcttgtgcttaccgactga

SEQ ID NO: 67725 - DNA, 25 bp, Homo sapien
tcacttctgtacgacctatctaaag

SEQ ID NO: 67726 - DNA, 25 bp, Homo sapien
tcacttctgtaccacctatctaaag

SEQ ID NO: 67727 - DNA, 25 bp, Homo sapien
actgtgtctacttctgtgtgaagag

SEQ ID NO: 67728 - DNA, 25 bp, Homo sapien
actgtgtctactactgtgtgaagag

SEQ ID NO: 67729 - DNA, 25 bp, Homo sapien
gaagacctacgaccaatctttggag

SEQ ID NO: 67730 - DNA, 25 bp, Homo sapien
gaagacctacgagcaatctttggag

SEQ ID NO: 67731 - DNA, 25 bp, Homo sapien
gaactacacgagtctatgtcttaaa

SEQ ID NO: 67732 - DNA, 25 bp, Homo sapien
gaactacacgagactatgtcttaaa

SEQ ID NO: 67733 - DNA, 25 bp, Homo sapien
cctcaaatgagtgtcttttgtgata

SEQ ID NO: 67734 - DNA, 25 bp, Homo sapien
cctcaaatgagtctcttttgtgata

SEQ ID NO: 67735 - DNA, 25 bp, Homo sapien
ttagagtagaaggtctccttttttg

SEQ ID NO: 67736 - DNA, 25 bp, Homo sapien
ttagagtagaagctctccttttttg

SEQ ID NO: 67737 - DNA, 25 bp, Homo sapien
actagttaagactccggtgtttgta

SEQ ID NO: 67738 - DNA, 25 bp, Homo sapien
actagttaagacaccggtgtttgta

SEQ ID NO: 67739 - DNA, 25 bp, Homo sapien
taaaagtgtgaagggtcgttagtga

SEQ ID NO: 67740 - DNA, 25 bp, Homo sapien
taaaagtgtgaacggtcgttagtga

SEQ ID NO: 67741 - DNA, 25 bp, Homo sapien
gttgaattgaaattcgtcttcacat

SEQ ID NO: 67742 - DNA, 25 bp, Homo sapien
gttgaattgaaaatcgtcttcacat

SEQ ID NO: 67743 - DNA, 25 bp, Homo sapien
cacacgttgattcactcccttagag

SEQ ID NO: 67744 - DNA, 25 bp, Homo sapien
cacacgttgattgactcccttagag

SEQ ID NO: 67745 - DNA, 25 bp, Homo sapien
attgtgacggtgtcttctatagacg

SEQ ID NO: 67746 - DNA, 25 bp, Homo sapien
attgtgacggtgacttctatagacg

SEQ ID NO: 67747 - DNA, 25 bp, Homo sapien
gggtttcaggggtttccctgtatac

SEQ ID NO: 67748 - DNA, 25 bp, Homo sapien
gggtttcaggggattccctgtatac

SEQ ID NO: 67749 - DNA, 25 bp, Homo sapien
ggctgcgaggaacgattacctcaac

SEQ ID NO: 67750 - DNA, 25 bp, Homo sapien
ggctgcgaggaaggattacctcaac

SEQ ID NO: 67751 - DNA, 25 bp, Homo sapien
tgatggacacaatgcacctatgttc

SEQ ID NO: 67752 - DNA, 25 bp, Homo sapien
tgatggacacaaagcacctatgttc

SEQ ID NO: 67753 - DNA, 25 bp, Homo sapien
cataatacacacacacccatggtct

SEQ ID NO: 67754 - DNA, 25 bp, Homo sapien
cataatacacactcacccatggtct

SEQ ID NO: 67755 - DNA, 25 bp, Homo sapien
aaggtacagcttcgttacaagaact

SEQ ID NO: 67756 - DNA, 25 bp, Homo sapien
aaggtacagcttggttacaagaact

SEQ ID NO: 67757 - DNA, 25 bp, Homo sapien
gtgtaaagacttatctatgatactc

SEQ ID NO: 67758 - DNA, 25 bp, Homo sapien
gtgtaaagacttttctatgatactc

SEQ ID NO: 67759 - DNA, 25 bp, Homo sapien
gaagacgacgtttcttaccgattct

SEQ ID NO: 67760 - DNA, 25 bp, Homo sapien
gaagacgacgttacttaccgattct

SEQ ID NO: 67761 - DNA, 25 bp, Homo sapien
aatttatccgtcaacaatgataggt

SEQ ID NO: 67762 - DNA, 25 bp, Homo sapien
aatttatccgtctacaatgataggt

SEQ ID NO: 67763 - DNA, 25 bp, Homo sapien
agaagtggacctaaaagaccacatt

SEQ ID NO: 67764 - DNA, 25 bp, Homo sapien
agaagtggaccttaaagaccacatt

SEQ ID NO: 67765 - DNA, 25 bp, Homo sapien
ccttgttatcttgtgagacggacaa

SEQ ID NO: 67766 - DNA, 25 bp, Homo sapien
ccttgttatcttctgagacggacaa

SEQ ID NO: 67767 - DNA, 25 bp, Homo sapien
catagttgtatttttgatcgaacac

SEQ ID NO: 67768 - DNA, 25 bp, Homo sapien
catagttgtattattgatcgaacac

SEQ ID NO: 67769 - DNA, 25 bp, Homo sapien
acttaatgtccttattttggtctag

SEQ ID NO: 67770 - DNA, 25 bp, Homo sapien
acttaatgtcctaattttggtctag

SEQ ID NO: 67771 - DNA, 25 bp, Homo sapien
aaatagtcagtagcttatgtcattc

SEQ ID NO: 67772 - DNA, 25 bp, Homo sapien
aaatagtcagtaccttatgtcattc

SEQ ID NO: 67773 - DNA, 25 bp, Homo sapien
gtccagatcggactgagagtcatta

SEQ ID NO: 67774 - DNA, 25 bp, Homo sapien
gtccagatcggagtgagagtcatta

SEQ ID NO: 67775 - DNA, 25 bp, Homo sapien
ccggcagtcccagaccagaacttag

SEQ ID NO: 67776 - DNA, 25 bp, Homo sapien
ccggcagtcccacaccagaacttag

SEQ ID NO: 67777 - DNA, 25 bp, Homo sapien
tcgggacgtgtccactgaggactca

SEQ ID NO: 67778 - DNA, 25 bp, Homo sapien
tcgggacgtgtcgactgaggactca

SEQ ID NO: 67779 - DNA, 25 bp, Homo sapien
acatagttgttgttcacgtcgaccc

SEQ ID NO: 67780 - DNA, 25 bp, Homo sapien
acatagttgttgatcacgtcgaccc

SEQ ID NO: 67781 - DNA, 25 bp, Homo sapien
aataagatgttgttacatggtagtt

SEQ ID NO: 67782 - DNA, 25 bp, Homo sapien
aataagatgttgatacatggtagtt

SEQ ID NO: 67783 - DNA, 25 bp, Homo sapien
tacaagaaaccgtggacataggttt

SEQ ID NO: 67784 - DNA, 25 bp, Homo sapien
tacaagaaaccgaggacataggttt

SEQ ID NO: 67785 - DNA, 25 bp, Homo sapien
aagactcaacacaagccaaaagtgt

SEQ ID NO: 67786 - DNA, 25 bp, Homo sapien
aagactcaacactagccaaaagtgt

SEQ ID NO: 67787 - DNA, 25 bp, Homo sapien
cacgactcacttgtgctcaacaatg

SEQ ID NO: 67788 - DNA, 25 bp, Homo sapien
cacgactcacttctgctcaacaatg

SEQ ID NO: 67789 - DNA, 25 bp, Homo sapien
ccgtgacaacttttctcttcgtttg

SEQ ID NO: 67790 - DNA, 25 bp, Homo sapien
ccgtgacaacttatctcttcgtttg

SEQ ID NO: 67791 - DNA, 25 bp, Homo sapien
ctccagagtctggtcctacttaggg

SEQ ID NO: 67792 - DNA, 25 bp, Homo sapien
ctccagagtctgctcctacttaggg

SEQ ID NO: 67793 - DNA, 25 bp, Homo sapien
tccggtcttctcctccttacgatgt

SEQ ID NO: 67794 - DNA, 25 bp, Homo sapien
tccggtcttctcgtccttacgatgt

SEQ ID NO: 67795 - DNA, 25 bp, Homo sapien
tgtcgttgtctatcttgtctgggag

SEQ ID NO: 67796 - DNA, 25 bp, Homo sapien
tgtcgttgtctaacttgtctgggag

SEQ ID NO: 67797 - DNA, 25 bp, Homo sapien
tgtctcagtcattacttttgactgt

SEQ ID NO: 67798 - DNA, 25 bp, Homo sapien
tgtctcagtcataacttttgactgt

SEQ ID NO: 67799 - DNA, 25 bp, Homo sapien
ttattggtatcaacttttacgactg

SEQ ID NO: 67800 - DNA, 25 bp, Homo sapien
ttattggtatcatcttttacgactg

SEQ ID NO: 67801 - DNA, 25 bp, Homo sapien
ttatattcttaacgtgttctgtcag

SEQ ID NO: 67802 - DNA, 25 bp, Homo sapien
ttatattcttaaggtgttctgtcag

SEQ ID NO: 67803 - DNA, 25 bp, Homo sapien
caggttttcagtgttcttaatacag

SEQ ID NO: 67804 - DNA, 25 bp, Homo sapien
caggttttcagtcttcttaatacag

SEQ ID NO: 67805 - DNA, 25 bp, Homo sapien
actacgtttgtcgatcttgtggaaa

SEQ ID NO: 67806 - DNA, 25 bp, Homo sapien
actacgtttgtccatcttgtggaaa

SEQ ID NO: 67807 - DNA, 25 bp, Homo sapien
tgtatgtcccaatgacgtagaaaaa

SEQ ID NO: 67808 - DNA, 25 bp, Homo sapien
tgtatgtcccaaagacgtagaaaaa

SEQ ID NO: 67809 - DNA, 25 bp, Homo sapien
tacaagccgacaaaaggactcaaag

SEQ ID NO: 67810 - DNA, 25 bp, Homo sapien
tacaagccgacataaggactcaaag

SEQ ID NO: 67811 - DNA, 25 bp, Homo sapien
cacatgttatctggtttccgatgga

SEQ ID NO: 67812 - DNA, 25 bp, Homo sapien
cacatgttatctcgtttccgatgga

SEQ ID NO: 67813 - DNA, 25 bp, Homo sapien
caatcaatcctgttctgtgaaggta

SEQ ID NO: 67814 - DNA, 25 bp, Homo sapien
caatcaatcctgatctgtgaaggta

SEQ ID NO: 67815 - DNA, 25 bp, Homo sapien
agaaacacatcctttgagttggttt

SEQ ID NO: 67816 - DNA, 25 bp, Homo sapien
agaaacacatccattgagttggttt

SEQ ID NO: 67817 - DNA, 25 bp, Homo sapien
actcgatcttcaaggacgatccctt

SEQ ID NO: 67818 - DNA, 25 bp, Homo sapien
actcgatcttcatggacgatccctt

SEQ ID NO: 67819 - DNA, 25 bp, Homo sapien
atattccagtaacgttcgtttagaa

SEQ ID NO: 67820 - DNA, 25 bp, Homo sapien
atattccagtaaggttcgtttagaa

SEQ ID NO: 67821 - DNA, 25 bp, Homo sapien
ggtaatcctcggagcggaccttgcc

SEQ ID NO: 67822 - DNA, 25 bp, Homo sapien
ggtaatcctcggtgcggaccttgcc

SEQ ID NO: 67823 - DNA, 25 bp, Homo sapien
tccaggagtcggtaagtcgtggtac

SEQ ID NO: 67824 - DNA, 25 bp, Homo sapien
tccaggagtcggaaagtcgtggtac

SEQ ID NO: 67825 - DNA, 25 bp, Homo sapien
atccagacaggttgagttactaaga

SEQ ID NO: 67826 - DNA, 25 bp, Homo sapien
atccagacaggtagagttactaaga

SEQ ID NO: 67827 - DNA, 25 bp, Homo sapien
ccaggacttcgtactcgtgacaaac

SEQ ID NO: 67828 - DNA, 25 bp, Homo sapien
ccaggacttcgttctcgtgacaaac

SEQ ID NO: 67829 - DNA, 25 bp, Homo sapien
ttcggatgacgttttagacatacat

SEQ ID NO: 67830 - DNA, 25 bp, Homo sapien
ttcggatgacgtattagacatacat

SEQ ID NO: 67831 - DNA, 25 bp, Homo sapien
cttcggatatttttcgtgtctatag

SEQ ID NO: 67832 - DNA, 25 bp, Homo sapien
cttcggatatttatcgtgtctatag

SEQ ID NO: 67833 - DNA, 25 bp, Homo sapien
gaatgtacgttcttttcctcccttg

SEQ ID NO: 67834 - DNA, 25 bp, Homo sapien
gaatgtacgttcatttcctcccttg

SEQ ID NO: 67835 - DNA, 25 bp, Homo sapien
aaaacgttcactttccccgtcgggt

SEQ ID NO: 67836 - DNA, 25 bp, Homo sapien
aaaacgttcactatccccgtcgggt

SEQ ID NO: 67837 - DNA, 25 bp, Homo sapien
acaggacattgttgcgccccggact

SEQ ID NO: 67838 - DNA, 25 bp, Homo sapien
acaggacattgtagcgccccggact

SEQ ID NO: 67839 - DNA, 25 bp, Homo sapien
aggtcatatttaacctgacttgact

SEQ ID NO: 67840 - DNA, 25 bp, Homo sapien
aggtcatatttatcctgacttgact

SEQ ID NO: 67841 - DNA, 25 bp, Homo sapien
attttgtgacctcgtcgctataact

SEQ ID NO: 67842 - DNA, 25 bp, Homo sapien
attttgtgacctggtcgctataact

SEQ ID NO: 67843 - DNA, 25 bp, Homo sapien
tttcttctgacgaagtcccgcacat

SEQ ID NO: 67844 - DNA, 25 bp, Homo sapien
tttcttctgacgtagtcccgcacat

SEQ ID NO: 67845 - DNA, 25 bp, Homo sapien
atagatcatgggtttccacaacgtt

SEQ ID NO: 67846 - DNA, 25 bp, Homo sapien
atagatcatgggattccacaacgtt

SEQ ID NO: 67847 - DNA, 25 bp, Homo sapien
agtactgtgggaagtctcgatgaca

SEQ ID NO: 67848 - DNA, 25 bp, Homo sapien
agtactgtgggatgtctcgatgaca

SEQ ID NO: 67849 - DNA, 25 bp, Homo sapien
cttaagttaaggtcggcggaccgac

SEQ ID NO: 67850 - DNA, 25 bp, Homo sapien
cttaagttaaggacggcggaccgac

SEQ ID NO: 67851 - DNA, 25 bp, Homo sapien
ccgcacctactgtaatgggactctc

SEQ ID NO: 67852 - DNA, 25 bp, Homo sapien
ccgcacctactgaaatgggactctc

SEQ ID NO: 67853 - DNA, 25 bp, Homo sapien
cgtccctccggacgtggagactgtc

SEQ ID NO: 67854 - DNA, 25 bp, Homo sapien
cgtccctccggaggtggagactgtc

SEQ ID NO: 67855 - DNA, 25 bp, Homo sapien
ggcgccgtgcaccttcgtcggaaac

SEQ ID NO: 67856 - DNA, 25 bp, Homo sapien
ggcgccgtgcacgttcgtcggaaac

SEQ ID NO: 67857 - DNA, 25 bp, Homo sapien
gtgagaccgagtccttttcccctct

SEQ ID NO: 67858 - DNA, 25 bp, Homo sapien
gtgagaccgagtgcttttcccctct

SEQ ID NO: 67859 - DNA, 25 bp, Homo sapien
gacaacggtctaggtctccgcagac

SEQ ID NO: 67860 - DNA, 25 bp, Homo sapien
gacaacggtctacgtctccgcagac

SEQ ID NO: 67861 - DNA, 25 bp, Homo sapien
ggacgatacctggtacaagtctaga

SEQ ID NO: 67862 - DNA, 25 bp, Homo sapien
ggacgatacctgctacaagtctaga

SEQ ID NO: 67863 - DNA, 25 bp, Homo sapien
gggtgacctcgtcacgagaccttag

SEQ ID NO: 67864 - DNA, 25 bp, Homo sapien
gggtgacctcgtgacgagaccttag

SEQ ID NO: 67865 - DNA, 25 bp, Homo sapien
gtgttgcgacacgacggtacgatga

SEQ ID NO: 67866 - DNA, 25 bp, Homo sapien
gtgttgcgacaccacggtacgatga

SEQ ID NO: 67867 - DNA, 25 bp, Homo sapien
acggctggcagtcgttcgaaagaga

SEQ ID NO: 67868 - DNA, 25 bp, Homo sapien
acggctggcagtggttcgaaagaga

SEQ ID NO: 67869 - DNA, 25 bp, Homo sapien
aagtgtccaccatttgaaccgaagc

SEQ ID NO: 67870 - DNA, 25 bp, Homo sapien
aagtgtccaccaattgaaccgaagc

SEQ ID NO: 67871 - DNA, 25 bp, Homo sapien
gtgccgacctgtctgtttcgccgtc

SEQ ID NO: 67872 - DNA, 25 bp, Homo sapien
gtgccgacctgtgtgtttcgccgtc

SEQ ID NO: 67873 - DNA, 25 bp, Homo sapien
cgaacctggtgagtttttactgtag

SEQ ID NO: 67874 - DNA, 25 bp, Homo sapien
cgaacctggtgactttttactgtag

SEQ ID NO: 67875 - DNA, 25 bp, Homo sapien
taaccgtgtagtctttactgttaaa

SEQ ID NO: 67876 - DNA, 25 bp, Homo sapien
taaccgtgtagtgtttactgttaaa

SEQ ID NO: 67877 - DNA, 25 bp, Homo sapien
agagatatatgttcgactctggaaa

SEQ ID NO: 67878 - DNA, 25 bp, Homo sapien
agagatatatgtacgactctggaaa

SEQ ID NO: 67879 - DNA, 25 bp, Homo sapien
agacaaactacgagcctgtagaaat

SEQ ID NO: 67880 - DNA, 25 bp, Homo sapien
agacaaactacgtgcctgtagaaat

SEQ ID NO: 67881 - DNA, 25 bp, Homo sapien
gagtcctagggacctctcgagaaag

SEQ ID NO: 67882 - DNA, 25 bp, Homo sapien
gagtcctagggagctctcgagaaag

SEQ ID NO: 67883 - DNA, 25 bp, Homo sapien
gacaagttctgttgaccttcctcaa

SEQ ID NO: 67884 - DNA, 25 bp, Homo sapien
gacaagttctgtagaccttcctcaa

SEQ ID NO: 67885 - DNA, 25 bp, Homo sapien
ctagtgtggttctctcttctactac

SEQ ID NO: 67886 - DNA, 25 bp, Homo sapien
ctagtgtggttcactcttctactac

SEQ ID NO: 67887 - DNA, 25 bp, Homo sapien
tctactggtggttcctcttcgaccg

SEQ ID NO: 67888 - DNA, 25 bp, Homo sapien
tctactggtggtacctcttcgaccg

SEQ ID NO: 67889 - DNA, 25 bp, Homo sapien
tactggtttcgacctagtatccgta

SEQ ID NO: 67890 - DNA, 25 bp, Homo sapien
tactggtttcgagctagtatccgta

SEQ ID NO: 67891 - DNA, 25 bp, Homo sapien
cgcccggagagatgagcttccactg

SEQ ID NO: 67892 - DNA, 25 bp, Homo sapien
cgcccggagagaagagcttccactg

SEQ ID NO: 67893 - DNA, 25 bp, Homo sapien
agtccaaaatagaagtcttcaactg

SEQ ID NO: 67894 - DNA, 25 bp, Homo sapien
agtccaaaatagtagtcttcaactg

SEQ ID NO: 67895 - DNA, 25 bp, Homo sapien
tcacaagttaagtcgtttcataacg

SEQ ID NO: 67896 - DNA, 25 bp, Homo sapien
tcacaagttaagacgtttcataacg

SEQ ID NO: 67897 - DNA, 25 bp, Homo sapien
taacgagaaactacgtattctcccg

SEQ ID NO: 67898 - DNA, 25 bp, Homo sapien
taacgagaaacttcgtattctcccg

SEQ ID NO: 67899 - DNA, 25 bp, Homo sapien
acatagagggtcaagtcttgttccg

SEQ ID NO: 67900 - DNA, 25 bp, Homo sapien
acatagagggtctagtcttgttccg

SEQ ID NO: 67901 - DNA, 25 bp, Homo sapien
tgacggagacagttttcggtcgcgt

SEQ ID NO: 67902 - DNA, 25 bp, Homo sapien
tgacggagacagatttcggtcgcgt

SEQ ID NO: 67903 - DNA, 25 bp, Homo sapien
gtcctcggtacgaaccccgtggcga

SEQ ID NO: 67904 - DNA, 25 bp, Homo sapien
gtcctcggtacgtaccccgtggcga

SEQ ID NO: 67905 - DNA, 25 bp, Homo sapien
atcctccgggactacggtgtcgctc

SEQ ID NO: 67906 - DNA, 25 bp, Homo sapien
atcctccgggacaacggtgtcgctc

SEQ ID NO: 67907 - DNA, 25 bp, Homo sapien
gagtgttccaggaaaagactcgcgc

SEQ ID NO: 67908 - DNA, 25 bp, Homo sapien
gagtgttccaggtaaagactcgcgc

SEQ ID NO: 67909 - DNA, 25 bp, Homo sapien
gtctttggacaggagagagcctctt

SEQ ID NO: 67910 - DNA, 25 bp, Homo sapien
gtctttggacagcagagagcctctt

SEQ ID NO: 67911 - DNA, 25 bp, Homo sapien
gtctctttgtactcaaaagtatcga

SEQ ID NO: 67912 - DNA, 25 bp, Homo sapien
gtctctttgtacacaaaagtatcga

SEQ ID NO: 67913 - DNA, 25 bp, Homo sapien
gtcaactgcatgcagatcctttact

SEQ ID NO: 67914 - DNA, 25 bp, Homo sapien
gtcaactgcatggagatcctttact

SEQ ID NO: 67915 - DNA, 25 bp, Homo sapien
tcatctaccgatagtggaagttctc

SEQ ID NO: 67916 - DNA, 25 bp, Homo sapien
tcatctaccgattgtggaagttctc

SEQ ID NO: 67917 - DNA, 25 bp, Homo sapien
ttctaactgcctagtcagaatcgga

SEQ ID NO: 67918 - DNA, 25 bp, Homo sapien
ttctaactgccttgtcagaatcgga

SEQ ID NO: 67919 - DNA, 25 bp, Homo sapien
actacgtactgtacagaaacacgga

SEQ ID NO: 67920 - DNA, 25 bp, Homo sapien
actacgtactgttcagaaacacgga

SEQ ID NO: 67921 - DNA, 25 bp, Homo sapien
gatatatttgtcgtgatacacactg

SEQ ID NO: 67922 - DNA, 25 bp, Homo sapien
gatatatttgtcctgatacacactg

SEQ ID NO: 67923 - DNA, 25 bp, Homo sapien
gttttcgtcggttctgaacacaccg

SEQ ID NO: 67924 - DNA, 25 bp, Homo sapien
gttttcgtcggtactgaacacaccg

SEQ ID NO: 67925 - DNA, 25 bp, Homo sapien
tttcctctgagatcgacttcagtag

SEQ ID NO: 67926 - DNA, 25 bp, Homo sapien
tttcctctgagaacgacttcagtag

SEQ ID NO: 67927 - DNA, 25 bp, Homo sapien
gcacacgatgcgacgcctggtccgg

SEQ ID NO: 67928 - DNA, 25 bp, Homo sapien
gcacacgatgcgtcgcctggtccgg

SEQ ID NO: 67929 - DNA, 25 bp, Homo sapien
tcctctcgggtaaccctgtgacagg

SEQ ID NO: 67930 - DNA, 25 bp, Homo sapien
tcctctcgggtatccctgtgacagg

SEQ ID NO: 67931 - DNA, 25 bp, Homo sapien
cgtcccttgacatccgttcgttaaa

SEQ ID NO: 67932 - DNA, 25 bp, Homo sapien
cgtcccttgacaaccgttcgttaaa

SEQ ID NO: 67933 - DNA, 25 bp, Homo sapien
gctcccttaaatactggtgtctacc

SEQ ID NO: 67934 - DNA, 25 bp, Homo sapien
gctcccttaaattctggtgtctacc

SEQ ID NO: 67935 - DNA, 25 bp, Homo sapien
agttcctttaatttcatttacatcg

SEQ ID NO: 67936 - DNA, 25 bp, Homo sapien
agttcctttaatatcatttacatcg

SEQ ID NO: 67937 - DNA, 25 bp, Homo sapien
aaggttcattttatttcttgtatac

SEQ ID NO: 67938 - DNA, 25 bp, Homo sapien
aaggttcattttttttcttgtatac

SEQ ID NO: 67939 - DNA, 25 bp, Homo sapien
gttactgttaactctccgtttctcg

SEQ ID NO: 67940 - DNA, 25 bp, Homo sapien
gttactgttaacactccgtttctcg

SEQ ID NO: 67941 - DNA, 25 bp, Homo sapien
gaggtgtcagggttcctccgtctgt

SEQ ID NO: 67942 - DNA, 25 bp, Homo sapien
gaggtgtcagggatcctccgtctgt

SEQ ID NO: 67943 - DNA, 25 bp, Homo sapien
cagtaaatgaatgttcccactactg

SEQ ID NO: 67944 - DNA, 25 bp, Homo sapien
cagtaaatgaatcttcccactactg

SEQ ID NO: 67945 - DNA, 25 bp, Homo sapien
aactgggaacgtcgatgggttatcg

SEQ ID NO: 67946 - DNA, 25 bp, Homo sapien
aactgggaacgtggatgggttatcg

SEQ ID NO: 67947 - DNA, 25 bp, Homo sapien
gttaatgaacccacactgggacttc

SEQ ID NO: 67948 - DNA, 25 bp, Homo sapien
gttaatgaaccctcactgggacttc

SEQ ID NO: 67949 - DNA, 25 bp, Homo sapien
taagatttaggcatctatttcatca

SEQ ID NO: 67950 - DNA, 25 bp, Homo sapien
taagatttaggcttctatttcatca

SEQ ID NO: 67951 - DNA, 25 bp, Homo sapien
atatatttccacttgtagtcatggt

SEQ ID NO: 67952 - DNA, 25 bp, Homo sapien
atatatttccacatgtagtcatggt

SEQ ID NO: 67953 - DNA, 25 bp, Homo sapien
aggaatttatcgacatcagtctaaa

SEQ ID NO: 67954 - DNA, 25 bp, Homo sapien
aggaatttatcgtcatcagtctaaa

SEQ ID NO: 67955 - DNA, 25 bp, Homo sapien
cacttaaagattgtctccgttttga

SEQ ID NO: 67956 - DNA, 25 bp, Homo sapien
cacttaaagattctctccgttttga

SEQ ID NO: 67957 - DNA, 25 bp, Homo sapien
ttcatgacgtttcttaggttttcag

SEQ ID NO: 67958 - DNA, 25 bp, Homo sapien
ttcatgacgtttgttaggttttcag

SEQ ID NO: 67959 - DNA, 25 bp, Homo sapien
tcatgtgttctctacggggtacccc

SEQ ID NO: 67960 - DNA, 25 bp, Homo sapien
tcatgtgttctcaacggggtacccc

SEQ ID NO: 67961 - DNA, 25 bp, Homo sapien
gtcctttacacgaaggttaacccca

SEQ ID NO: 67962 - DNA, 25 bp, Homo sapien
gtcctttacacgtaggttaacccca

SEQ ID NO: 67963 - DNA, 25 bp, Homo sapien
tagtatgtttaagtttacccctaag

SEQ ID NO: 67964 - DNA, 25 bp, Homo sapien
tagtatgtttaactttacccctaag

SEQ ID NO: 67965 - DNA, 25 bp, Homo sapien
acgggtttaaggtccggtcctaagt

SEQ ID NO: 67966 - DNA, 25 bp, Homo sapien
acgggtttaaggaccggtcctaagt

SEQ ID NO: 67967 - DNA, 25 bp, Homo sapien
agcctggaccggtccggctctcggt

SEQ ID NO: 67968 - DNA, 25 bp, Homo sapien
agcctggaccggaccggctctcggt

SEQ ID NO: 67969 - DNA, 25 bp, Homo sapien
tctccgggcctgtcgaagaactagc

SEQ ID NO: 67970 - DNA, 25 bp, Homo sapien
tctccgggcctgacgaagaactagc

SEQ ID NO: 67971 - DNA, 25 bp, Homo sapien
gaggactatccacagtatacggtcg

SEQ ID NO: 67972 - DNA, 25 bp, Homo sapien
gaggactatccagagtatacggtcg

SEQ ID NO: 67973 - DNA, 25 bp, Homo sapien
atctaggatctcgacggagtaaggg

SEQ ID NO: 67974 - DNA, 25 bp, Homo sapien
atctaggatctccacggagtaaggg

SEQ ID NO: 67975 - DNA, 25 bp, Homo sapien
aagaggtacctggagattctacaat

SEQ ID NO: 67976 - DNA, 25 bp, Homo sapien
aagaggtacctgcagattctacaat

SEQ ID NO: 67977 - DNA, 25 bp, Homo sapien
gcggcgctcagtacaactcgcgctt

SEQ ID NO: 67978 - DNA, 25 bp, Homo sapien
gcggcgctcagttcaactcgcgctt

SEQ ID NO: 67979 - DNA, 25 bp, Homo sapien
gcggggcgtcccgtacttcctcctt

SEQ ID NO: 67980 - DNA, 25 bp, Homo sapien
gcggggcgtcccctacttcctcctt

SEQ ID NO: 67981 - DNA, 25 bp, Homo sapien
ctgagggtgcccacgttctatggtt

SEQ ID NO: 67982 - DNA, 25 bp, Homo sapien
ctgagggtgccctcgttctatggtt

SEQ ID NO: 67983 - DNA, 25 bp, Homo sapien
accgacgtcactgagggtccttgat

SEQ ID NO: 67984 - DNA, 25 bp, Homo sapien
accgacgtcactcagggtccttgat

SEQ ID NO: 67985 - DNA, 25 bp, Homo sapien
ggatctaccccgagggcgtcaaggt

SEQ ID NO: 67986 - DNA, 25 bp, Homo sapien
ggatctaccccgtgggcgtcaaggt

SEQ ID NO: 67987 - DNA, 25 bp, Homo sapien
gagattcatttttggctaccgtgat

SEQ ID NO: 67988 - DNA, 25 bp, Homo sapien
gagattcattttaggctaccgtgat

SEQ ID NO: 67989 - DNA, 25 bp, Homo sapien
aacacatctcttgtacgtgtctttg

SEQ ID NO: 67990 - DNA, 25 bp, Homo sapien
aacacatctcttctacgtgtctttg

SEQ ID NO: 67991 - DNA, 25 bp, Homo sapien
agcatcgtttatgtcgtgtcctggt

SEQ ID NO: 67992 - DNA, 25 bp, Homo sapien
agcatcgtttatctcgtgtcctggt

SEQ ID NO: 67993 - DNA, 25 bp, Homo sapien
ggagaactcttatccttcggtttgg

SEQ ID NO: 67994 - DNA, 25 bp, Homo sapien
ggagaactcttaaccttcggtttgg

SEQ ID NO: 67995 - DNA, 25 bp, Homo sapien
ctaagaacgtttctgggagttttgt

SEQ ID NO: 67996 - DNA, 25 bp, Homo sapien
ctaagaacgtttgtgggagttttgt

SEQ ID NO: 67997 - DNA, 25 bp, Homo sapien
acggtgtcttatcttgtaattttcg

SEQ ID NO: 67998 - DNA, 25 bp, Homo sapien
acggtgtcttatgttgtaattttcg

SEQ ID NO: 67999 - DNA, 25 bp, Homo sapien
aggtgttggggttccgtcattcgtc

SEQ ID NO: 68000 - DNA, 25 bp, Homo sapien
aggtgttggggtaccgtcattcgtc

SEQ ID NO: 68001 - DNA, 25 bp, Homo sapien
taaatgtagttttttaatccatcag

SEQ ID NO: 68002 - DNA, 25 bp, Homo sapien
taaatgtagtttattaatccatcag

SEQ ID NO: 68003 - DNA, 25 bp, Homo sapien
gaactgaattttactcacaatgtcg

SEQ ID NO: 68004 - DNA, 25 bp, Homo sapien
gaactgaatttttctcacaatgtcg

SEQ ID NO: 68005 - DNA, 25 bp, Homo sapien
gacgtctacttttcaagtctagaat

SEQ ID NO: 68006 - DNA, 25 bp, Homo sapien
gacgtctactttacaagtctagaat

SEQ ID NO: 68007 - DNA, 25 bp, Homo sapien
ggacaccttagatcatagtcacaac

SEQ ID NO: 68008 - DNA, 25 bp, Homo sapien
ggacaccttagaacatagtcacaac

SEQ ID NO: 68009 - DNA, 25 bp, Homo sapien
ggaaagaaccgataacaagtccatc

SEQ ID NO: 68010 - DNA, 25 bp, Homo sapien
ggaaagaaccgaaaacaagtccatc

SEQ ID NO: 68011 - DNA, 25 bp, Homo sapien
accgggtaataaagtgattcacttc

SEQ ID NO: 68012 - DNA, 25 bp, Homo sapien
accgggtaataatgtgattcacttc

SEQ ID NO: 68013 - DNA, 25 bp, Homo sapien
cgatgacttatgtcggtctaaatat

SEQ ID NO: 68014 - DNA, 25 bp, Homo sapien
cgatgacttatgacggtctaaatat

SEQ ID NO: 68015 - DNA, 25 bp, Homo sapien
cgacaaaaactgctcggttatgaac

SEQ ID NO: 68016 - DNA, 25 bp, Homo sapien
cgacaaaaactggtcggttatgaac

SEQ ID NO: 68017 - DNA, 25 bp, Homo sapien
cgaagaagtccatggtgaacatgaa

SEQ ID NO: 68018 - DNA, 25 bp, Homo sapien
cgaagaagtccaaggtgaacatgaa

SEQ ID NO: 68019 - DNA, 25 bp, Homo sapien
tggttacactagaattgaacctttt

SEQ ID NO: 68020 - DNA, 25 bp, Homo sapien
tggttacactagtattgaacctttt

SEQ ID NO: 68021 - DNA, 25 bp, Homo sapien
ttgttacataaggtttccgacattc

SEQ ID NO: 68022 - DNA, 25 bp, Homo sapien
ttgttacataagctttccgacattc

SEQ ID NO: 68023 - DNA, 25 bp, Homo sapien
aaagacgtcgttgactgtatgtgtc

SEQ ID NO: 68024 - DNA, 25 bp, Homo sapien
aaagacgtcgttcactgtatgtgtc

SEQ ID NO: 68025 - DNA, 25 bp, Homo sapien
cgacagtcaggtctggtttgagtgt

SEQ ID NO: 68026 - DNA, 25 bp, Homo sapien
cgacagtcaggtgtggtttgagtgt

SEQ ID NO: 68027 - DNA, 25 bp, Homo sapien
aagacctcccgacaggtgacatatc

SEQ ID NO: 68028 - DNA, 25 bp, Homo sapien
aagacctcccgagaggtgacatatc

SEQ ID NO: 68029 - DNA, 25 bp, Homo sapien
aagacggtcgaaaggaattacaatt

SEQ ID NO: 68030 - DNA, 25 bp, Homo sapien
aagacggtcgaatggaattacaatt

SEQ ID NO: 68031 - DNA, 25 bp, Homo sapien
actaagaatagttcggtcaactatt

SEQ ID NO: 68032 - DNA, 25 bp, Homo sapien
actaagaatagtacggtcaactatt

SEQ ID NO: 68033 - DNA, 25 bp, Homo sapien
ctttcagggcaaaggtcagactaat

SEQ ID NO: 68034 - DNA, 25 bp, Homo sapien
ctttcagggcaatggtcagactaat

SEQ ID NO: 68035 - DNA, 25 bp, Homo sapien
tcttcggtccggtcagggtttttcg

SEQ ID NO: 68036 - DNA, 25 bp, Homo sapien
tcttcggtccggacagggtttttcg

SEQ ID NO: 68037 - DNA, 25 bp, Homo sapien
tctccgaaacacaaggtgtttttgt

SEQ ID NO: 68038 - DNA, 25 bp, Homo sapien
tctccgaaacactaggtgtttttgt

SEQ ID NO: 68039 - DNA, 25 bp, Homo sapien
tgtgtccaaccacagaagtttttcg

SEQ ID NO: 68040 - DNA, 25 bp, Homo sapien
tgtgtccaaccagagaagtttttcg

SEQ ID NO: 68041 - DNA, 25 bp, Homo sapien
gtgaacttctttataatgttcttcg

SEQ ID NO: 68042 - DNA, 25 bp, Homo sapien
gtgaacttctttttaatgttcttcg

SEQ ID NO: 68043 - DNA, 25 bp, Homo sapien
tgttaggtaactatcttgacctcct

SEQ ID NO: 68044 - DNA, 25 bp, Homo sapien
tgttaggtaactttcttgacctcct

SEQ ID NO: 68045 - DNA, 25 bp, Homo sapien
gttggtagaccaattcttgggtcat

SEQ ID NO: 68046 - DNA, 25 bp, Homo sapien
gttggtagaccatttcttgggtcat

SEQ ID NO: 68047 - DNA, 25 bp, Homo sapien
aagtgtttcctacttttgcgttctg

SEQ ID NO: 68048 - DNA, 25 bp, Homo sapien
aagtgtttcctagttttgcgttctg

SEQ ID NO: 68049 - DNA, 25 bp, Homo sapien
attgtttgtcctataggttccggtg

SEQ ID NO: 68050 - DNA, 25 bp, Homo sapien
attgtttgtcctttaggttccggtg

SEQ ID NO: 68051 - DNA, 25 bp, Homo sapien
gtaggtcccttgtcggttcggtcga

SEQ ID NO: 68052 - DNA, 25 bp, Homo sapien
gtaggtcccttgacggttcggtcga

SEQ ID NO: 68053 - DNA, 25 bp, Homo sapien
tgggcgtcttagacgcacttctcga

SEQ ID NO: 68054 - DNA, 25 bp, Homo sapien
tgggcgtcttagtcgcacttctcga

SEQ ID NO: 68055 - DNA, 25 bp, Homo sapien
cactttgactttgtgtgctgttgta

SEQ ID NO: 68056 - DNA, 25 bp, Homo sapien
cactttgactttctgtgctgttgta

SEQ ID NO: 68057 - DNA, 25 bp, Homo sapien
taggccctcatggtccgggacgttg

SEQ ID NO: 68058 - DNA, 25 bp, Homo sapien
taggccctcatgctccgggacgttg

SEQ ID NO: 68059 - DNA, 25 bp, Homo sapien
tcccctgaccttcacagtgaccgta

SEQ ID NO: 68060 - DNA, 25 bp, Homo sapien
tcccctgaccttgacagtgaccgta

SEQ ID NO: 68061 - DNA, 25 bp, Homo sapien
agcctctaaagacgtttgactcgta

SEQ ID NO: 68062 - DNA, 25 bp, Homo sapien
agcctctaaagaggtttgactcgta

SEQ ID NO: 68063 - DNA, 25 bp, Homo sapien
acttagtgagtcgtcacaactctat

SEQ ID NO: 68064 - DNA, 25 bp, Homo sapien
acttagtgagtcctcacaactctat

SEQ ID NO: 68065 - DNA, 25 bp, Homo sapien
cgtctgaacgcttgtactaagtctt

SEQ ID NO: 68066 - DNA, 25 bp, Homo sapien
cgtctgaacgctagtactaagtctt

SEQ ID NO: 68067 - DNA, 25 bp, Homo sapien
ctctgtaacgactgtacaagaacta

SEQ ID NO: 68068 - DNA, 25 bp, Homo sapien
ctctgtaacgacagtacaagaacta

SEQ ID NO: 68069 - DNA, 25 bp, Homo sapien
tctaccttcggcagcggagtagaca

SEQ ID NO: 68070 - DNA, 25 bp, Homo sapien
tctaccttcggctgcggagtagaca

SEQ ID NO: 68071 - DNA, 25 bp, Homo sapien
ctagatgggtgtccttctagtaagt

SEQ ID NO: 68072 - DNA, 25 bp, Homo sapien
ctagatgggtgtgcttctagtaagt

SEQ ID NO: 68073 - DNA, 25 bp, Homo sapien
ccaaaaatggttgtgtcactaatgt

SEQ ID NO: 68074 - DNA, 25 bp, Homo sapien
ccaaaaatggttctgtcactaatgt

SEQ ID NO: 68075 - DNA, 25 bp, Homo sapien
atcacaattttttccgtcgataggt

SEQ ID NO: 68076 - DNA, 25 bp, Homo sapien
atcacaatttttaccgtcgataggt

SEQ ID NO: 68077 - DNA, 25 bp, Homo sapien
tccttcgttttcgacccgtataagt

SEQ ID NO: 68078 - DNA, 25 bp, Homo sapien
tccttcgttttccacccgtataagt

SEQ ID NO: 68079 - DNA, 25 bp, Homo sapien
ttacgtttggtgtgaccccgttctt

SEQ ID NO: 68080 - DNA, 25 bp, Homo sapien
ttacgtttggtgagaccccgttctt

SEQ ID NO: 68081 - DNA, 25 bp, Homo sapien
acactttctcagagtccccggtctt

SEQ ID NO: 68082 - DNA, 25 bp, Homo sapien
acactttctcagtgtccccggtctt

SEQ ID NO: 68083 - DNA, 25 bp, Homo sapien
gacttttcatgtccgtaccctattc

SEQ ID NO: 68084 - DNA, 25 bp, Homo sapien
gacttttcatgtgcgtaccctattc

SEQ ID NO: 68085 - DNA, 25 bp, Homo sapien
agctacatggtccttggagcaaacc

SEQ ID NO: 68086 - DNA, 25 bp, Homo sapien
agctacatggtcgttggagcaaacc

SEQ ID NO: 68087 - DNA, 25 bp, Homo sapien
tcatctgtccacgaggttaagtatc

SEQ ID NO: 68088 - DNA, 25 bp, Homo sapien
tcatctgtccaccaggttaagtatc

SEQ ID NO: 68089 - DNA, 25 bp, Homo sapien
accacttgaccatcaggaacaactg

SEQ ID NO: 68090 - DNA, 25 bp, Homo sapien
accacttgaccaacaggaacaactg

SEQ ID NO: 68091 - DNA, 25 bp, Homo sapien
attttcacctaactctgcgagatgt

SEQ ID NO: 68092 - DNA, 25 bp, Homo sapien
attttcacctaagtctgcgagatgt

SEQ ID NO: 68093 - DNA, 25 bp, Homo sapien
ttagtacgactgaattcctacttct

SEQ ID NO: 68094 - DNA, 25 bp, Homo sapien
ttagtacgactgtattcctacttct

SEQ ID NO: 68095 - DNA, 25 bp, Homo sapien
gtgtacacgatgtattctctctaat

SEQ ID NO: 68096 - DNA, 25 bp, Homo sapien
gtgtacacgatgaattctctctaat

SEQ ID NO: 68097 - DNA, 25 bp, Homo sapien
tcgggccaagaggtttctacatact

SEQ ID NO: 68098 - DNA, 25 bp, Homo sapien
tcgggccaagagctttctacatact

SEQ ID NO: 68099 - DNA, 25 bp, Homo sapien
agtctggaagggttgaccgtacaca

SEQ ID NO: 68100 - DNA, 25 bp, Homo sapien
agtctggaagggatgaccgtacaca

SEQ ID NO: 68101 - DNA, 25 bp, Homo sapien
cgaatttgagtacatgtcttaacga

SEQ ID NO: 68102 - DNA, 25 bp, Homo sapien
cgaatttgagtagatgtcttaacga

SEQ ID NO: 68103 - DNA, 25 bp, Homo sapien
ggttttactgaacactgacttataa

SEQ ID NO: 68104 - DNA, 25 bp, Homo sapien
ggttttactgaagactgacttataa

SEQ ID NO: 68105 - DNA, 25 bp, Homo sapien
ctttgtcgaagttcgtgactgttaa

SEQ ID NO: 68106 - DNA, 25 bp, Homo sapien
ctttgtcgaagtacgtgactgttaa

SEQ ID NO: 68107 - DNA, 25 bp, Homo sapien
aagtgaagacgtcttcgattttgtt

SEQ ID NO: 68108 - DNA, 25 bp, Homo sapien
aagtgaagacgtgttcgattttgtt

SEQ ID NO: 68109 - DNA, 25 bp, Homo sapien
agtgagggtcactttatctcttgtg

SEQ ID NO: 68110 - DNA, 25 bp, Homo sapien
agtgagggtcacattatctcttgtg

SEQ ID NO: 68111 - DNA, 25 bp, Homo sapien
gtgtcaagttgttttagtcagttaa

SEQ ID NO: 68112 - DNA, 25 bp, Homo sapien
gtgtcaagttgtattagtcagttaa

SEQ ID NO: 68113 - DNA, 25 bp, Homo sapien
taaaggtctcctcgtcagtcgaact

SEQ ID NO: 68114 - DNA, 25 bp, Homo sapien
taaaggtctcctggtcagtcgaact

SEQ ID NO: 68115 - DNA, 25 bp, Homo sapien
aagtaataatgtggtcgaccctact

SEQ ID NO: 68116 - DNA, 25 bp, Homo sapien
aagtaataatgtcgtcgaccctact

SEQ ID NO: 68117 - DNA, 25 bp, Homo sapien
gaacttatagtatcatgaccgttca

SEQ ID NO: 68118 - DNA, 25 bp, Homo sapien
gaacttatagtaacatgaccgttca

SEQ ID NO: 68119 - DNA, 25 bp, Homo sapien
gttataagtgacttccgacggctta

SEQ ID NO: 68120 - DNA, 25 bp, Homo sapien
gttataagtgacatccgacggctta

SEQ ID NO: 68121 - DNA, 25 bp, Homo sapien
gtgtagaaggaggtccgacgaattc

SEQ ID NO: 68122 - DNA, 25 bp, Homo sapien
gtgtagaaggagctccgacgaattc

SEQ ID NO: 68123 - DNA, 25 bp, Homo sapien
atgggatttcgttaacacgttattc

SEQ ID NO: 68124 - DNA, 25 bp, Homo sapien
atgggatttcgtaaacacgttattc

SEQ ID NO: 68125 - DNA, 25 bp, Homo sapien
agtgtgaccgttactaataaatgtc

SEQ ID NO: 68126 - DNA, 25 bp, Homo sapien
agtgtgaccgtttctaataaatgtc

SEQ ID NO: 68127 - DNA, 25 bp, Homo sapien
agggtccgtctcctcctaagatgtc

SEQ ID NO: 68128 - DNA, 25 bp, Homo sapien
agggtccgtctcgtcctaagatgtc

SEQ ID NO: 68129 - DNA, 25 bp, Homo sapien
tgtgggtgtaactccactaggtggt

SEQ ID NO: 68130 - DNA, 25 bp, Homo sapien
tgtgggtgtaacaccactaggtggt

SEQ ID NO: 68131 - DNA, 25 bp, Homo sapien
tcatgtggaacgtgaacgggtacgc

SEQ ID NO: 68132 - DNA, 25 bp, Homo sapien
tcatgtggaacgagaacgggtacgc

SEQ ID NO: 68133 - DNA, 25 bp, Homo sapien
acttgtcctcaaagacacggagttc

SEQ ID NO: 68134 - DNA, 25 bp, Homo sapien
acttgtcctcaatgacacggagttc

SEQ ID NO: 68135 - DNA, 25 bp, Homo sapien
gtaggtggaacatatccctcttctc

SEQ ID NO: 68136 - DNA, 25 bp, Homo sapien
gtaggtggaacaaatccctcttctc

SEQ ID NO: 68137 - DNA, 25 bp, Homo sapien
acgacaacgcgacattgcggtcgcg

SEQ ID NO: 68138 - DNA, 25 bp, Homo sapien
acgacaacgcgagattgcggtcgcg

SEQ ID NO: 68139 - DNA, 25 bp, Homo sapien
gcgttatcgctgcgcgaccgcaatg

SEQ ID NO: 68140 - DNA, 25 bp, Homo sapien
gcgttatcgctgggcgaccgcaatg

SEQ ID NO: 68141 - DNA, 25 bp, Homo sapien
ttcgtttacccctcaggagaaagag

SEQ ID NO: 68142 - DNA, 25 bp, Homo sapien
ttcgtttaccccacaggagaaagag

SEQ ID NO: 68143 - DNA, 25 bp, Homo sapien
tttgagtaaactttacacaagacgt

SEQ ID NO: 68144 - DNA, 25 bp, Homo sapien
tttgagtaaactatacacaagacgt

SEQ ID NO: 68145 - DNA, 25 bp, Homo sapien
cgaaataaagtttacgacacatcgt

SEQ ID NO: 68146 - DNA, 25 bp, Homo sapien
cgaaataaagttaacgacacatcgt

SEQ ID NO: 68147 - DNA, 25 bp, Homo sapien
cagcaactgtttccttaagtactag

SEQ ID NO: 68148 - DNA, 25 bp, Homo sapien
cagcaactgtttgcttaagtactag

SEQ ID NO: 68149 - DNA, 25 bp, Homo sapien
aggacactccgttctactctggaag

SEQ ID NO: 68150 - DNA, 25 bp, Homo sapien
aggacactccgtactactctggaag

SEQ ID NO: 68151 - DNA, 25 bp, Homo sapien
ggttcgacgattgaaccgttattaa

SEQ ID NO: 68152 - DNA, 25 bp, Homo sapien
ggttcgacgattcaaccgttattaa

SEQ ID NO: 68153 - DNA, 25 bp, Homo sapien
tctgtacctgtcatggtttgtaggt

SEQ ID NO: 68154 - DNA, 25 bp, Homo sapien
tctgtacctgtcttggtttgtaggt

SEQ ID NO: 68155 - DNA, 25 bp, Homo sapien
tcgaccgttgggttccttcgtgaca

SEQ ID NO: 68156 - DNA, 25 bp, Homo sapien
tcgaccgttgggatccttcgtgaca

SEQ ID NO: 68157 - DNA, 25 bp, Homo sapien
ggtcgtacccgacctctttccgaga

SEQ ID NO: 68158 - DNA, 25 bp, Homo sapien
ggtcgtacccgagctctttccgaga

SEQ ID NO: 68159 - DNA, 25 bp, Homo sapien
cagattacgagtacatcgattaagt

SEQ ID NO: 68160 - DNA, 25 bp, Homo sapien
cagattacgagttcatcgattaagt

SEQ ID NO: 68161 - DNA, 25 bp, Homo sapien
tcagatatctttgacgtgttaaacg

SEQ ID NO: 68162 - DNA, 25 bp, Homo sapien
tcagatatctttcacgtgttaaacg

SEQ ID NO: 68163 - DNA, 25 bp, Homo sapien
tacacaagtgtctacccgtaagaac

SEQ ID NO: 68164 - DNA, 25 bp, Homo sapien
tacacaagtgtcaacccgtaagaac

SEQ ID NO: 68165 - DNA, 25 bp, Homo sapien
gtttacaaattggtcaccgggtcga

SEQ ID NO: 68166 - DNA, 25 bp, Homo sapien
gtttacaaattgctcaccgggtcga

SEQ ID NO: 68167 - DNA, 25 bp, Homo sapien
atacagagacatctccggaggtccg

SEQ ID NO: 68168 - DNA, 25 bp, Homo sapien
atacagagacatgtccggaggtccg

SEQ ID NO: 68169 - DNA, 25 bp, Homo sapien
ataactaaattgttatcggactcga

SEQ ID NO: 68170 - DNA, 25 bp, Homo sapien
ataactaaattgatatcggactcga

SEQ ID NO: 68171 - DNA, 25 bp, Homo sapien
caaataacgagttcgcataatttgt

SEQ ID NO: 68172 - DNA, 25 bp, Homo sapien
caaataacgagtacgcataatttgt

SEQ ID NO: 68173 - DNA, 25 bp, Homo sapien
cgagggagaagtagtttgtctcttc

SEQ ID NO: 68174 - DNA, 25 bp, Homo sapien
cgagggagaagttgtttgtctcttc

SEQ ID NO: 68175 - DNA, 25 bp, Homo sapien
acggagtactgttgtattgtccctt

SEQ ID NO: 68176 - DNA, 25 bp, Homo sapien
acggagtactgtagtattgtccctt

SEQ ID NO: 68177 - DNA, 25 bp, Homo sapien
taaagtaatagtcagaatgtccaac

SEQ ID NO: 68178 - DNA, 25 bp, Homo sapien
taaagtaatagtgagaatgtccaac

SEQ ID NO: 68179 - DNA, 25 bp, Homo sapien
acagacactataagggtgtcctata

SEQ ID NO: 68180 - DNA, 25 bp, Homo sapien
acagacactatatgggtgtcctata

SEQ ID NO: 68181 - DNA, 25 bp, Homo sapien
aaaggtatagagacggaccactact

SEQ ID NO: 68182 - DNA, 25 bp, Homo sapien
aaaggtatagagtcggaccactact

SEQ ID NO: 68183 - DNA, 25 bp, Homo sapien
gagtagtactctatccgacctctct

SEQ ID NO: 68184 - DNA, 25 bp, Homo sapien
gagtagtactctttccgacctctct

SEQ ID NO: 68185 - DNA, 25 bp, Homo sapien
atgtgaaataacttaagacctcgtc

SEQ ID NO: 68186 - DNA, 25 bp, Homo sapien
atgtgaaataacataagacctcgtc

SEQ ID NO: 68187 - DNA, 25 bp, Homo sapien
tgcgaggaggaacataagctacttc

SEQ ID NO: 68188 - DNA, 25 bp, Homo sapien
tgcgaggaggaagataagctacttc

SEQ ID NO: 68189 - DNA, 25 bp, Homo sapien
tcaaagttagtcatgatgttctttc

SEQ ID NO: 68190 - DNA, 25 bp, Homo sapien
tcaaagttagtcttgatgttctttc

SEQ ID NO: 68191 - DNA, 25 bp, Homo sapien
aaatgtctgatatttgtcttctgtc

SEQ ID NO: 68192 - DNA, 25 bp, Homo sapien
aaatgtctgataattgtcttctgtc

SEQ ID NO: 68193 - DNA, 25 bp, Homo sapien
gttctgccgggtcagtgtctccttt

SEQ ID NO: 68194 - DNA, 25 bp, Homo sapien
gttctgccgggtgagtgtctccttt

SEQ ID NO: 68195 - DNA, 25 bp, Homo sapien
tttcgtcgaggttcacgttttcatt

SEQ ID NO: 68196 - DNA, 25 bp, Homo sapien
tttcgtcgaggtacacgttttcatt

SEQ ID NO: 68197 - DNA, 25 bp, Homo sapien
tactaagtcccactgtcgtacgatt

SEQ ID NO: 68198 - DNA, 25 bp, Homo sapien
tactaagtcccagtgtcgtacgatt

SEQ ID NO: 68199 - DNA, 25 bp, Homo sapien
aaaccggaacaccactgagagccag

SEQ ID NO: 68200 - DNA, 25 bp, Homo sapien
aaaccggaacacgactgagagccag

SEQ ID NO: 68201 - DNA, 25 bp, Homo sapien
cttaaggagaccacgacggaaccga

SEQ ID NO: 68202 - DNA, 25 bp, Homo sapien
cttaaggagacctcgacggaaccga

SEQ ID NO: 68203 - DNA, 25 bp, Homo sapien
cgggtccgaagctccgtgtcgacca

SEQ ID NO: 68204 - DNA, 25 bp, Homo sapien
cgggtccgaagcaccgtgtcgacca

SEQ ID NO: 68205 - DNA, 25 bp, Homo sapien
gcagtcacctaaaactcggtattca

SEQ ID NO: 68206 - DNA, 25 bp, Homo sapien
gcagtcacctaatactcggtattca

SEQ ID NO: 68207 - DNA, 25 bp, Homo sapien
actgtgtcatgtgtcctccgtttca

SEQ ID NO: 68208 - DNA, 25 bp, Homo sapien
actgtgtcatgtctcctccgtttca

SEQ ID NO: 68209 - DNA, 25 bp, Homo sapien
gagtagttgttatacacctgtctga

SEQ ID NO: 68210 - DNA, 25 bp, Homo sapien
gagtagttgttaaacacctgtctga

SEQ ID NO: 68211 - DNA, 25 bp, Homo sapien
gggtgttctttacgacccgttcaac

SEQ ID NO: 68212 - DNA, 25 bp, Homo sapien
gggtgttctttaggacccgttcaac

SEQ ID NO: 68213 - DNA, 25 bp, Homo sapien
accgtccttttgctctgttaggtcg

SEQ ID NO: 68214 - DNA, 25 bp, Homo sapien
accgtccttttggtctgttaggtcg

SEQ ID NO: 68215 - DNA, 25 bp, Homo sapien
cctcttctcgtttctatcgtaaagg

SEQ ID NO: 68216 - DNA, 25 bp, Homo sapien
cctcttctcgttactatcgtaaagg

SEQ ID NO: 68217 - DNA, 25 bp, Homo sapien
ctcacctactatttcacacatcttt

SEQ ID NO: 68218 - DNA, 25 bp, Homo sapien
ctcacctactatatcacacatcttt

SEQ ID NO: 68219 - DNA, 25 bp, Homo sapien
acactaatacaaaatcgatcatttt

SEQ ID NO: 68220 - DNA, 25 bp, Homo sapien
acactaatacaatatcgatcatttt

SEQ ID NO: 68221 - DNA, 25 bp, Homo sapien
gtaccgtggtagatctacttagtgt

SEQ ID NO: 68222 - DNA, 25 bp, Homo sapien
gtaccgtggtagttctacttagtgt

SEQ ID NO: 68223 - DNA, 25 bp, Homo sapien
gattaccggtattcttacgtctgac

SEQ ID NO: 68224 - DNA, 25 bp, Homo sapien
gattaccggtatacttacgtctgac

SEQ ID NO: 68225 - DNA, 25 bp, Homo sapien
tgggacattatgaaacggtgtcccc

SEQ ID NO: 68226 - DNA, 25 bp, Homo sapien
tgggacattatgtaacggtgtcccc

SEQ ID NO: 68227 - DNA, 25 bp, Homo sapien
tcctctgtttgatgccgtgtcccct

SEQ ID NO: 68228 - DNA, 25 bp, Homo sapien
tcctctgtttgaagccgtgtcccct

SEQ ID NO: 68229 - DNA, 25 bp, Homo sapien
atctctttttgtcacctcagtaagt

SEQ ID NO: 68230 - DNA, 25 bp, Homo sapien
atctctttttgtgacctcagtaagt

SEQ ID NO: 68231 - DNA, 25 bp, Homo sapien
tctacgattaatgaccgaagacacg

SEQ ID NO: 68232 - DNA, 25 bp, Homo sapien
tctacgattaatcaccgaagacacg

SEQ ID NO: 68233 - DNA, 25 bp, Homo sapien
tgatgaagaataaggacccgaaatc

SEQ ID NO: 68234 - DNA, 25 bp, Homo sapien
tgatgaagaatatggacccgaaatc

SEQ ID NO: 68235 - DNA, 25 bp, Homo sapien
gatgagacaaatcctttctaatgtc

SEQ ID NO: 68236 - DNA, 25 bp, Homo sapien
gatgagacaaatgctttctaatgtc

SEQ ID NO: 68237 - DNA, 25 bp, Homo sapien
gacgaccaagactctttgtatttac

SEQ ID NO: 68238 - DNA, 25 bp, Homo sapien
gacgaccaagacactttgtatttac

SEQ ID NO: 68239 - DNA, 25 bp, Homo sapien
cgacaatagttatttgattgtctac

SEQ ID NO: 68240 - DNA, 25 bp, Homo sapien
cgacaatagttaattgattgtctac

SEQ ID NO: 68241 - DNA, 25 bp, Homo sapien
gtcagaaagaactgccttagtatat

SEQ ID NO: 68242 - DNA, 25 bp, Homo sapien
gtcagaaagaacagccttagtatat

SEQ ID NO: 68243 - DNA, 25 bp, Homo sapien
gaagtcatactatactatcgatagt

SEQ ID NO: 68244 - DNA, 25 bp, Homo sapien
gaagtcatactaaactatcgatagt

SEQ ID NO: 68245 - DNA, 25 bp, Homo sapien
tagacagtcaattcgacttcgactt

SEQ ID NO: 68246 - DNA, 25 bp, Homo sapien
tagacagtcaatacgacttcgactt

SEQ ID NO: 68247 - DNA, 25 bp, Homo sapien
actacgaagagtctgcggttgaact

SEQ ID NO: 68248 - DNA, 25 bp, Homo sapien
actacgaagagtgtgcggttgaact

SEQ ID NO: 68249 - DNA, 25 bp, Homo sapien
tatcactcaggtgtgtgcgtgttta

SEQ ID NO: 68250 - DNA, 25 bp, Homo sapien
tatcactcaggtctgtgcgtgttta

SEQ ID NO: 68251 - DNA, 25 bp, Homo sapien
acctcagcaggtcgttggtgtcggc

SEQ ID NO: 68252 - DNA, 25 bp, Homo sapien
acctcagcaggtggttggtgtcggc

SEQ ID NO: 68253 - DNA, 25 bp, Homo sapien
tcgcacctcatgagaactttcgaca

SEQ ID NO: 68254 - DNA, 25 bp, Homo sapien
tcgcacctcatgtgaactttcgaca

SEQ ID NO: 68255 - DNA, 25 bp, Homo sapien
cccgtcgaatcgtgaccgttgtgga

SEQ ID NO: 68256 - DNA, 25 bp, Homo sapien
cccgtcgaatcgagaccgttgtgga

SEQ ID NO: 68257 - DNA, 25 bp, Homo sapien
cctccaactcctttcgtggagacta

SEQ ID NO: 68258 - DNA, 25 bp, Homo sapien
cctccaactcctatcgtggagacta

SEQ ID NO: 68259 - DNA, 25 bp, Homo sapien
catgagtcacgtccaatcggaggaa

SEQ ID NO: 68260 - DNA, 25 bp, Homo sapien
catgagtcacgtgcaatcggaggaa

SEQ ID NO: 68261 - DNA, 25 bp, Homo sapien
tggggagtcagagacgacgatttct

SEQ ID NO: 68262 - DNA, 25 bp, Homo sapien
tggggagtcagacacgacgatttct

SEQ ID NO: 68263 - DNA, 25 bp, Homo sapien
atgagagaggtctgtggcctttagc

SEQ ID NO: 68264 - DNA, 25 bp, Homo sapien
atgagagaggtcagtggcctttagc

SEQ ID NO: 68265 - DNA, 25 bp, Homo sapien
gtgtggtaaccagagcacaagagac

SEQ ID NO: 68266 - DNA, 25 bp, Homo sapien
gtgtggtaaccacagcacaagagac

SEQ ID NO: 68267 - DNA, 25 bp, Homo sapien
gtaggagtctcgaaggaaggaccac

SEQ ID NO: 68268 - DNA, 25 bp, Homo sapien
gtaggagtctcgtaggaaggaccac

SEQ ID NO: 68269 - DNA, 25 bp, Homo sapien
caccgatactcgacgggtagccttc

SEQ ID NO: 68270 - DNA, 25 bp, Homo sapien
caccgatactcgtcgggtagccttc

SEQ ID NO: 68271 - DNA, 25 bp, Homo sapien
catgactactgagtcactccattag

SEQ ID NO: 68272 - DNA, 25 bp, Homo sapien
catgactactgactcactccattag

SEQ ID NO: 68273 - DNA, 25 bp, Homo sapien
caaccacctacgtctatctgagctg

SEQ ID NO: 68274 - DNA, 25 bp, Homo sapien
caaccacctacgactatctgagctg

SEQ ID NO: 68275 - DNA, 25 bp, Homo sapien
ctgactcatcccttctagttgggag

SEQ ID NO: 68276 - DNA, 25 bp, Homo sapien
ctgactcatcccatctagttgggag

SEQ ID NO: 68277 - DNA, 25 bp, Homo sapien
caagggtcccactactgtagggtgt

SEQ ID NO: 68278 - DNA, 25 bp, Homo sapien
caagggtcccacaactgtagggtgt

SEQ ID NO: 68279 - DNA, 25 bp, Homo sapien
actcttcttctctaccatacagggg

SEQ ID NO: 68280 - DNA, 25 bp, Homo sapien
actcttcttctcaaccatacagggg

SEQ ID NO: 68281 - DNA, 25 bp, Homo sapien
cctattccgttcatcacaagaagga

SEQ ID NO: 68282 - DNA, 25 bp, Homo sapien
cctattccgttcttcacaagaagga

SEQ ID NO: 68283 - DNA, 25 bp, Homo sapien
ctttatggttttcgaccagtaatat

SEQ ID NO: 68284 - DNA, 25 bp, Homo sapien
ctttatggttttggaccagtaatat

SEQ ID NO: 68285 - DNA, 25 bp, Homo sapien
aggttttcaagttccgtcaatagaa

SEQ ID NO: 68286 - DNA, 25 bp, Homo sapien
aggttttcaagtaccgtcaatagaa

SEQ ID NO: 68287 - DNA, 25 bp, Homo sapien
aattgtcctataatgttctttctac

SEQ ID NO: 68288 - DNA, 25 bp, Homo sapien
aattgtcctatattgttctttctac

SEQ ID NO: 68289 - DNA, 25 bp, Homo sapien
aaaaagtgcgaatctttacattagc

SEQ ID NO: 68290 - DNA, 25 bp, Homo sapien
aaaaagtgcgaaactttacattagc

SEQ ID NO: 68291 - DNA, 25 bp, Homo sapien
acagcaagggaaccttcgctactgg

SEQ ID NO: 68292 - DNA, 25 bp, Homo sapien
acagcaagggaagcttcgctactgg

SEQ ID NO: 68293 - DNA, 25 bp, Homo sapien
gtaaataatggtgactccgtcgccc

SEQ ID NO: 68294 - DNA, 25 bp, Homo sapien
gtaaataatggtcactccgtcgccc

SEQ ID NO: 68295 - DNA, 25 bp, Homo sapien
ctacttgtctctccacactgaaagg

SEQ ID NO: 68296 - DNA, 25 bp, Homo sapien
ctacttgtctctgcacactgaaagg

SEQ ID NO: 68297 - DNA, 25 bp, Homo sapien
agtctccgtgtctgagaacccaagg

SEQ ID NO: 68298 - DNA, 25 bp, Homo sapien
agtctccgtgtcagagaacccaagg

SEQ ID NO: 68299 - DNA, 25 bp, Homo sapien
gactacaagacataaccccacgtgt

SEQ ID NO: 68300 - DNA, 25 bp, Homo sapien
gactacaagacaaaaccccacgtgt

SEQ ID NO: 68301 - DNA, 25 bp, Homo sapien
gttgacagtgaaaatcaccatataa

SEQ ID NO: 68302 - DNA, 25 bp, Homo sapien
gttgacagtgaatatcaccatataa

SEQ ID NO: 68303 - DNA, 25 bp, Homo sapien
ttcacaggggtttacccgtcttatc

SEQ ID NO: 68304 - DNA, 25 bp, Homo sapien
ttcacaggggttaacccgtcttatc

SEQ ID NO: 68305 - DNA, 25 bp, Homo sapien
ctctgaccggggttctggtctttac

SEQ ID NO: 68306 - DNA, 25 bp, Homo sapien
ctctgaccggggatctggtctttac

SEQ ID NO: 68307 - DNA, 25 bp, Homo sapien
ggtaagtaaggtatcttgacctatc

SEQ ID NO: 68308 - DNA, 25 bp, Homo sapien
ggtaagtaaggtttcttgacctatc

SEQ ID NO: 68309 - DNA, 25 bp, Homo sapien
tcaagaacaggagatgtgaactctc

SEQ ID NO: 68310 - DNA, 25 bp, Homo sapien
tcaagaacaggacatgtgaactctc

SEQ ID NO: 68311 - DNA, 25 bp, Homo sapien
aacgtaagataagtaggtccctcgg

SEQ ID NO: 68312 - DNA, 25 bp, Homo sapien
aacgtaagataactaggtccctcgg

SEQ ID NO: 68313 - DNA, 25 bp, Homo sapien
taaagactcatagacggtccatctg

SEQ ID NO: 68314 - DNA, 25 bp, Homo sapien
taaagactcatacacggtccatctg

SEQ ID NO: 68315 - DNA, 25 bp, Homo sapien
agatactcctatcactgtgttcatg

SEQ ID NO: 68316 - DNA, 25 bp, Homo sapien
agatactcctatgactgtgttcatg

SEQ ID NO: 68317 - DNA, 25 bp, Homo sapien
atacactaccttaatatgggctctg

SEQ ID NO: 68318 - DNA, 25 bp, Homo sapien
atacactacctttatatgggctctg

SEQ ID NO: 68319 - DNA, 25 bp, Homo sapien
aactctcttctgtagggtcgagcgt

SEQ ID NO: 68320 - DNA, 25 bp, Homo sapien
aactctcttctgaagggtcgagcgt

SEQ ID NO: 68321 - DNA, 25 bp, Homo sapien
gtaaccgtcgtctccggaggcttcg

SEQ ID NO: 68322 - DNA, 25 bp, Homo sapien
gtaaccgtcgtcaccggaggcttcg

SEQ ID NO: 68323 - DNA, 25 bp, Homo sapien
attggtcgtatcgtggtgactgtac

SEQ ID NO: 68324 - DNA, 25 bp, Homo sapien
attggtcgtatcctggtgactgtac

SEQ ID NO: 68325 - DNA, 25 bp, Homo sapien
attgaagaacgtcaccgtactgaga

SEQ ID NO: 68326 - DNA, 25 bp, Homo sapien
attgaagaacgtgaccgtactgaga

SEQ ID NO: 68327 - DNA, 25 bp, Homo sapien
aggtagtagaaccataactcgagaa

SEQ ID NO: 68328 - DNA, 25 bp, Homo sapien
aggtagtagaacgataactcgagaa

SEQ ID NO: 68329 - DNA, 25 bp, Homo sapien
gaggtgtgaaactttcctcctacac

SEQ ID NO: 68330 - DNA, 25 bp, Homo sapien
gaggtgtgaaacattcctcctacac

SEQ ID NO: 68331 - DNA, 25 bp, Homo sapien
gttgtacaaccgaaatagactactc

SEQ ID NO: 68332 - DNA, 25 bp, Homo sapien
gttgtacaaccgtaatagactactc

SEQ ID NO: 68333 - DNA, 25 bp, Homo sapien
ttcggtccctcgacgtcgtgacagg

SEQ ID NO: 68334 - DNA, 25 bp, Homo sapien
ttcggtccctcgtcgtcgtgacagg

SEQ ID NO: 68335 - DNA, 25 bp, Homo sapien
actcattccacctctgtgacgcgag

SEQ ID NO: 68336 - DNA, 25 bp, Homo sapien
actcattccaccactgtgacgcgag

SEQ ID NO: 68337 - DNA, 25 bp, Homo sapien
gctacggacgacaccgtcgacggcg

SEQ ID NO: 68338 - DNA, 25 bp, Homo sapien
gctacggacgactccgtcgacggcg

SEQ ID NO: 68339 - DNA, 25 bp, Homo sapien
cgcggccgaaggtcctcgacagcgt

SEQ ID NO: 68340 - DNA, 25 bp, Homo sapien
cgcggccgaaggacctcgacagcgt

SEQ ID NO: 68341 - DNA, 25 bp, Homo sapien
gtcgttccttggacccgtacgacgg

SEQ ID NO: 68342 - DNA, 25 bp, Homo sapien
gtcgttccttggtcccgtacgacgg

SEQ ID NO: 68343 - DNA, 25 bp, Homo sapien
cggtccttcctagacacgattaagg

SEQ ID NO: 68344 - DNA, 25 bp, Homo sapien
cggtccttcctacacacgattaagg

SEQ ID NO: 68345 - DNA, 25 bp, Homo sapien
aatgtctacactcacttgtgaacag

SEQ ID NO: 68346 - DNA, 25 bp, Homo sapien
aatgtctacactgacttgtgaacag

SEQ ID NO: 68347 - DNA, 25 bp, Homo sapien
aacacgtcactggacttgttgagag

SEQ ID NO: 68348 - DNA, 25 bp, Homo sapien
aacacgtcactgcacttgttgagag

SEQ ID NO: 68349 - DNA, 25 bp, Homo sapien
aatgagaaccagtcttctacttaaa

SEQ ID NO: 68350 - DNA, 25 bp, Homo sapien
aatgagaaccagacttctacttaaa

SEQ ID NO: 68351 - DNA, 25 bp, Homo sapien
ccttaacatggtgtttcttatcaga

SEQ ID NO: 68352 - DNA, 25 bp, Homo sapien
ccttaacatggtctttcttatcaga

SEQ ID NO: 68353 - DNA, 25 bp, Homo sapien
ttaataaagacatccttttcgtgtg

SEQ ID NO: 68354 - DNA, 25 bp, Homo sapien
ttaataaagacaaccttttcgtgtg

SEQ ID NO: 68355 - DNA, 25 bp, Homo sapien
tttaatctaaagtctcggttttgtc

SEQ ID NO: 68356 - DNA, 25 bp, Homo sapien
tttaatctaaagactcggttttgtc

SEQ ID NO: 68357 - DNA, 25 bp, Homo sapien
ctaaagtgtggtacgggttctatgc

SEQ ID NO: 68358 - DNA, 25 bp, Homo sapien
ctaaagtgtggttcgggttctatgc

SEQ ID NO: 68359 - DNA, 25 bp, Homo sapien
tcaaaactgaagtgtgtcttactaa

SEQ ID NO: 68360 - DNA, 25 bp, Homo sapien
tcaaaactgaagagtgtcttactaa

SEQ ID NO: 68361 - DNA, 25 bp, Homo sapien
aacgtatgggtgtctcttactagag

SEQ ID NO: 68362 - DNA, 25 bp, Homo sapien
aacgtatgggtgactcttactagag

SEQ ID NO: 68363 - DNA, 25 bp, Homo sapien
attgtttactgatctcttatagacg

SEQ ID NO: 68364 - DNA, 25 bp, Homo sapien
attgtttactgaactcttatagacg

SEQ ID NO: 68365 - DNA, 25 bp, Homo sapien
atgttttgtggaaatcctctgtaac

SEQ ID NO: 68366 - DNA, 25 bp, Homo sapien
atgttttgtggatatcctctgtaac

SEQ ID NO: 68367 - DNA, 25 bp, Homo sapien
gagttcggacggaggtctccctcaa

SEQ ID NO: 68368 - DNA, 25 bp, Homo sapien
gagttcggacggtggtctccctcaa

SEQ ID NO: 68369 - DNA, 25 bp, Homo sapien
gtataggacgaaagggtccttcatc

SEQ ID NO: 68370 - DNA, 25 bp, Homo sapien
gtataggacgaatgggtccttcatc

SEQ ID NO: 68371 - DNA, 25 bp, Homo sapien
ctataaaacattaagaccatgaact

SEQ ID NO: 68372 - DNA, 25 bp, Homo sapien
ctataaaacatttagaccatgaact

SEQ ID NO: 68373 - DNA, 25 bp, Homo sapien
aaggtatagacttgtcccataaact

SEQ ID NO: 68374 - DNA, 25 bp, Homo sapien
aaggtatagactagtcccataaact

SEQ ID NO: 68375 - DNA, 25 bp, Homo sapien
aagtgtgtaagctgtttcttgttcc

SEQ ID NO: 68376 - DNA, 25 bp, Homo sapien
aagtgtgtaagcagtttcttgttcc

SEQ ID NO: 68377 - DNA, 25 bp, Homo sapien
cgagaaatagtgttctacagattct

SEQ ID NO: 68378 - DNA, 25 bp, Homo sapien
cgagaaatagtgatctacagattct

SEQ ID NO: 68379 - DNA, 25 bp, Homo sapien
aaatttatccgtcaacaatgatagg

SEQ ID NO: 68380 - DNA, 25 bp, Homo sapien
aaatttatccgtgaacaatgatagg

SEQ ID NO: 68381 - DNA, 25 bp, Homo sapien
agttttgtacctaaaagatccgaag

SEQ ID NO: 68382 - DNA, 25 bp, Homo sapien
agttttgtaccttaaagatccgaag

SEQ ID NO: 68383 - DNA, 25 bp, Homo sapien
ctgtgtttctattcggaacgggaac

SEQ ID NO: 68384 - DNA, 25 bp, Homo sapien
ctgtgtttctatacggaacgggaac

SEQ ID NO: 68385 - DNA, 25 bp, Homo sapien
tcatatgtgtttatcgatatgaacc

SEQ ID NO: 68386 - DNA, 25 bp, Homo sapien
tcatatgtgtttttcgatatgaacc

SEQ ID NO: 68387 - DNA, 25 bp, Homo sapien
acttaattcccgttcttagtggcag

SEQ ID NO: 68388 - DNA, 25 bp, Homo sapien
acttaattcccgatcttagtggcag

SEQ ID NO: 68389 - DNA, 25 bp, Homo sapien
gacatattcctggtttgtctattac

SEQ ID NO: 68390 - DNA, 25 bp, Homo sapien
gacatattcctgctttgtctattac

SEQ ID NO: 68391 - DNA, 25 bp, Homo sapien
atttgtctcggactgagtatcatta

SEQ ID NO: 68392 - DNA, 25 bp, Homo sapien
atttgtctcggagtgagtatcatta

SEQ ID NO: 68393 - DNA, 25 bp, Homo sapien
caccgcagcccaaacgcgataattg

SEQ ID NO: 68394 - DNA, 25 bp, Homo sapien
caccgcagcccatacgcgataattg

SEQ ID NO: 68395 - DNA, 25 bp, Homo sapien
cgtggcacgcgtctaggaggaccac

SEQ ID NO: 68396 - DNA, 25 bp, Homo sapien
cgtggcacgcgtgtaggaggaccac

SEQ ID NO: 68397 - DNA, 25 bp, Homo sapien
ccaagagtttgtctacgtcgaacac

SEQ ID NO: 68398 - DNA, 25 bp, Homo sapien
ccaagagtttgtgtacgtcgaacac

SEQ ID NO: 68399 - DNA, 25 bp, Homo sapien
caaagatgttcgtttagtgtgtacc

SEQ ID NO: 68400 - DNA, 25 bp, Homo sapien
caaagatgttcgattagtgtgtacc

SEQ ID NO: 68401 - DNA, 25 bp, Homo sapien
tcaaaaaccaggaacagaggtctac

SEQ ID NO: 68402 - DNA, 25 bp, Homo sapien
tcaaaaaccaggtacagaggtctac

SEQ ID NO: 68403 - DNA, 25 bp, Homo sapien
agtagacatccaagccaacaatagt

SEQ ID NO: 68404 - DNA, 25 bp, Homo sapien
agtagacatccatgccaacaatagt

SEQ ID NO: 68405 - DNA, 25 bp, Homo sapien
cagattctctcgagtaccacaaatg

SEQ ID NO: 68406 - DNA, 25 bp, Homo sapien
cagattctctcgtgtaccacaaatg

SEQ ID NO: 68407 - DNA, 25 bp, Homo sapien
ttccgtgaaattagtccctcgtttg

SEQ ID NO: 68408 - DNA, 25 bp, Homo sapien
ttccgtgaaatttgtccctcgtttg

SEQ ID NO: 68409 - DNA, 25 bp, Homo sapien
gttgaaagtactgtccttctagtgg

SEQ ID NO: 68410 - DNA, 25 bp, Homo sapien
gttgaaagtactctccttctagtgg

SEQ ID NO: 68411 - DNA, 25 bp, Homo sapien
gtctggatatttctaccttacatgt

SEQ ID NO: 68412 - DNA, 25 bp, Homo sapien
gtctggatatttgtaccttacatgt

SEQ ID NO: 68413 - DNA, 25 bp, Homo sapien
tgtcctgtctatgagttctgtgaga

SEQ ID NO: 68414 - DNA, 25 bp, Homo sapien
tgtcctgtctatcagttctgtgaga

SEQ ID NO: 68415 - DNA, 25 bp, Homo sapien
acgtctacggtcagttttttgatgt

SEQ ID NO: 68416 - DNA, 25 bp, Homo sapien
acgtctacggtctgttttttgatgt

SEQ ID NO: 68417 - DNA, 25 bp, Homo sapien
tgtattggttcctctttcgagtcgt

SEQ ID NO: 68418 - DNA, 25 bp, Homo sapien
tgtattggttccactttcgagtcgt

SEQ ID NO: 68419 - DNA, 25 bp, Homo sapien
ttatactcctgtcagcatttcgaag

SEQ ID NO: 68420 - DNA, 25 bp, Homo sapien
ttatactcctgtgagcatttcgaag

SEQ ID NO: 68421 - DNA, 25 bp, Homo sapien
ccaattttcagtagtcgtttcaaag

SEQ ID NO: 68422 - DNA, 25 bp, Homo sapien
ccaattttcagttgtcgtttcaaag

SEQ ID NO: 68423 - DNA, 25 bp, Homo sapien
actcggttgtcctctttgtcacaga

SEQ ID NO: 68424 - DNA, 25 bp, Homo sapien
actcggttgtccactttgtcacaga

SEQ ID NO: 68425 - DNA, 25 bp, Homo sapien
tgtgtgtctcctaaattgtaaacca

SEQ ID NO: 68426 - DNA, 25 bp, Homo sapien
tgtgtgtctccttaattgtaaacca

SEQ ID NO: 68427 - DNA, 25 bp, Homo sapien
tcaagtctacaaaagggtccaatac

SEQ ID NO: 68428 - DNA, 25 bp, Homo sapien
tcaagtctacaatagggtccaatac

SEQ ID NO: 68429 - DNA, 25 bp, Homo sapien
ctactttatactgttctgcacttaa

SEQ ID NO: 68430 - DNA, 25 bp, Homo sapien
ctactttatactcttctgcacttaa

SEQ ID NO: 68431 - DNA, 25 bp, Homo sapien
tatttaatcctgtttgtgacgaaac

SEQ ID NO: 68432 - DNA, 25 bp, Homo sapien
tatttaatcctgattgtgacgaaac

SEQ ID NO: 68433 - DNA, 25 bp, Homo sapien
tctataaaatcctttgttgggtctt

SEQ ID NO: 68434 - DNA, 25 bp, Homo sapien
tctataaaatccattgttgggtctt

SEQ ID NO: 68435 - DNA, 25 bp, Homo sapien
tttcgacttttaaggtggtccgctt

SEQ ID NO: 68436 - DNA, 25 bp, Homo sapien
tttcgacttttatggtggtccgctt

SEQ ID NO: 68437 - DNA, 25 bp, Homo sapien
ttatctcaggtaaggggttctcgaa

SEQ ID NO: 68438 - DNA, 25 bp, Homo sapien
ttatctcaggtatggggttctcgaa

SEQ ID NO: 68439 - DNA, 25 bp, Homo sapien
aatcctgtgtgtggagcatgtcggc

SEQ ID NO: 68440 - DNA, 25 bp, Homo sapien
aatcctgtgtgtcgagcatgtcggc

SEQ ID NO: 68441 - DNA, 25 bp, Homo sapien
gtccagcttggagacgtcgtcggtc

SEQ ID NO: 68442 - DNA, 25 bp, Homo sapien
gtccagcttggacacgtcgtcggtc

SEQ ID NO: 68443 - DNA, 25 bp, Homo sapien
gtccacgaaggtggtattctgtagg

SEQ ID NO: 68444 - DNA, 25 bp, Homo sapien
gtccacgaaggtcgtattctgtagg

SEQ ID NO: 68445 - DNA, 25 bp, Homo sapien
cagagagttgagatctgactgatac

SEQ ID NO: 68446 - DNA, 25 bp, Homo sapien
cagagagttgagttctgactgatac

SEQ ID NO: 68447 - DNA, 25 bp, Homo sapien
gtctcagttggtattgacttacact

SEQ ID NO: 68448 - DNA, 25 bp, Homo sapien
gtctcagttggttttgacttacact

SEQ ID NO: 68449 - DNA, 25 bp, Homo sapien
tgctgatacttttcttgtactatag

SEQ ID NO: 68450 - DNA, 25 bp, Homo sapien
tgctgatactttacttgtactatag

SEQ ID NO: 68451 - DNA, 25 bp, Homo sapien
catgtcttctagatttcgcccttcg

SEQ ID NO: 68452 - DNA, 25 bp, Homo sapien
catgtcttctagttttcgcccttcg

SEQ ID NO: 68453 - DNA, 25 bp, Homo sapien
aacttccgtatttcgcacgtctcgc

SEQ ID NO: 68454 - DNA, 25 bp, Homo sapien
aacttccgtattacgcacgtctcgc

SEQ ID NO: 68455 - DNA, 25 bp, Homo sapien
gaaggctcctgtaagtacccccggc

SEQ ID NO: 68456 - DNA, 25 bp, Homo sapien
gaaggctcctgttagtacccccggc

SEQ ID NO: 68457 - DNA, 25 bp, Homo sapien
acgaggaccaattatcctgctggac

SEQ ID NO: 68458 - DNA, 25 bp, Homo sapien
acgaggaccaataatcctgctggac

SEQ ID NO: 68459 - DNA, 25 bp, Homo sapien
tgttatttgattcctcggagtagac

SEQ ID NO: 68460 - DNA, 25 bp, Homo sapien
tgttatttgattgctcggagtagac

SEQ ID NO: 68461 - DNA, 25 bp, Homo sapien
tctttctgactatgtctctcgggac

SEQ ID NO: 68462 - DNA, 25 bp, Homo sapien
tctttctgactaagtctctcgggac

SEQ ID NO: 68463 - DNA, 25 bp, Homo sapien
atgttaatggtaaagtcccgaagtc

SEQ ID NO: 68464 - DNA, 25 bp, Homo sapien
atgttaatggtatagtcccgaagtc

SEQ ID NO: 68465 - DNA, 25 bp, Homo sapien
tgttggtggtgacgtccgaagacta

SEQ ID NO: 68466 - DNA, 25 bp, Homo sapien
tgttggtggtgaggtccgaagacta

SEQ ID NO: 68467 - DNA, 25 bp, Homo sapien
acttttgaagagtggcggagtcgtc

SEQ ID NO: 68468 - DNA, 25 bp, Homo sapien
acttttgaagagaggcggagtcgtc

SEQ ID NO: 68469 - DNA, 25 bp, Homo sapien
cctgagtcagtccaatgggactctc

SEQ ID NO: 68470 - DNA, 25 bp, Homo sapien
cctgagtcagtcgaatgggactctc

SEQ ID NO: 68471 - DNA, 25 bp, Homo sapien
ggactccgcggacgtgtcgcacctc

SEQ ID NO: 68472 - DNA, 25 bp, Homo sapien
ggactccgcggaggtgtcgcacctc

SEQ ID NO: 68473 - DNA, 25 bp, Homo sapien
gcgtccagctaaatcgtcggagata

SEQ ID NO: 68474 - DNA, 25 bp, Homo sapien
gcgtccagctaattcgtcggagata

SEQ ID NO: 68475 - DNA, 25 bp, Homo sapien
actagaaccagagtttctccgcctt

SEQ ID NO: 68476 - DNA, 25 bp, Homo sapien
actagaaccagactttctccgcctt

SEQ ID NO: 68477 - DNA, 25 bp, Homo sapien
gaggaaccggtctgagttccgccac

SEQ ID NO: 68478 - DNA, 25 bp, Homo sapien
gaggaaccggtcagagttccgccac

SEQ ID NO: 68479 - DNA, 25 bp, Homo sapien
cgcacatcctaggtactccgtcaga

SEQ ID NO: 68480 - DNA, 25 bp, Homo sapien
cgcacatcctagctactccgtcaga

SEQ ID NO: 68481 - DNA, 25 bp, Homo sapien
gtcctactacctgcacagacacttg

SEQ ID NO: 68482 - DNA, 25 bp, Homo sapien
gtcctactacctccacagacacttg

SEQ ID NO: 68483 - DNA, 25 bp, Homo sapien
gtggtctcgctccacgagtcgaggg

SEQ ID NO: 68484 - DNA, 25 bp, Homo sapien
gtggtctcgctcgacgagtcgaggg

SEQ ID NO: 68485 - DNA, 25 bp, Homo sapien
cggactggcatgaaccgaaggacga

SEQ ID NO: 68486 - DNA, 25 bp, Homo sapien
cggactggcatgtaccgaaggacga

SEQ ID NO: 68487 - DNA, 25 bp, Homo sapien
agtgtccaccatttgaaccgaagct

SEQ ID NO: 68488 - DNA, 25 bp, Homo sapien
agtgtccaccatatgaaccgaagct

SEQ ID NO: 68489 - DNA, 25 bp, Homo sapien
gcccaccttaaggtttacgacctct

SEQ ID NO: 68490 - DNA, 25 bp, Homo sapien
gcccaccttaagctttacgacctct

SEQ ID NO: 68491 - DNA, 25 bp, Homo sapien
agaccctgctgttgtttgtttgtgt

SEQ ID NO: 68492 - DNA, 25 bp, Homo sapien
agaccctgctgtagtttgtttgtgt

SEQ ID NO: 68493 - DNA, 25 bp, Homo sapien
ttacccgtggctatttgtctaaggt

SEQ ID NO: 68494 - DNA, 25 bp, Homo sapien
ttacccgtggctttttgtctaaggt

SEQ ID NO: 68495 - DNA, 25 bp, Homo sapien
caattatcgtgtcagttgtcgtaaa

SEQ ID NO: 68496 - DNA, 25 bp, Homo sapien
caattatcgtgtgagttgtcgtaaa

SEQ ID NO: 68497 - DNA, 25 bp, Homo sapien
cgtaaaaactcgaggtctggaagat

SEQ ID NO: 68498 - DNA, 25 bp, Homo sapien
cgtaaaaactcgtggtctggaagat

SEQ ID NO: 68499 - DNA, 25 bp, Homo sapien
tagtcctagggtaagcgtcggaaat

SEQ ID NO: 68500 - DNA, 25 bp, Homo sapien
tagtcctagggttagcgtcggaaat

SEQ ID NO: 68501 - DNA, 25 bp, Homo sapien
tcaagttctgttggacttcctcaac

SEQ ID NO: 68502 - DNA, 25 bp, Homo sapien
tcaagttctgttcgacttcctcaac

SEQ ID NO: 68503 - DNA, 25 bp, Homo sapien
ttttgtcgtcggttcatctcttccc

SEQ ID NO: 68504 - DNA, 25 bp, Homo sapien
ttttgtcgtcggatcatctcttccc

SEQ ID NO: 68505 - DNA, 25 bp, Homo sapien
ggtttctttgggtccttctcgtccg

SEQ ID NO: 68506 - DNA, 25 bp, Homo sapien
ggtttctttgggaccttctcgtccg

SEQ ID NO: 68507 - DNA, 25 bp, Homo sapien
atcgttggttcagtacgtactccag

SEQ ID NO: 68508 - DNA, 25 bp, Homo sapien
atcgttggttcactacgtactccag

SEQ ID NO: 68509 - DNA, 25 bp, Homo sapien
gagatccgggtacagtctgtcccgg

SEQ ID NO: 68510 - DNA, 25 bp, Homo sapien
gagatccgggtagagtctgtcccgg

SEQ ID NO: 68511 - DNA, 25 bp, Homo sapien
agtcaccaagaattgacttcacctg

SEQ ID NO: 68512 - DNA, 25 bp, Homo sapien
agtcaccaagaaatgacttcacctg

SEQ ID NO: 68513 - DNA, 25 bp, Homo sapien
cacagacaaacatgttgtccatacg

SEQ ID NO: 68514 - DNA, 25 bp, Homo sapien
cacagacaaacaagttgtccatacg

SEQ ID NO: 68515 - DNA, 25 bp, Homo sapien
acgagtaatagtaacgacttcccac

SEQ ID NO: 68516 - DNA, 25 bp, Homo sapien
acgagtaatagttacgacttcccac

SEQ ID NO: 68517 - DNA, 25 bp, Homo sapien
caagaaggtgtttgtcttgttctac

SEQ ID NO: 68518 - DNA, 25 bp, Homo sapien
caagaaggtgttagtcttgttctac

SEQ ID NO: 68519 - DNA, 25 bp, Homo sapien
aatgacggagacagttttcggtcgc

SEQ ID NO: 68520 - DNA, 25 bp, Homo sapien
aatgacggagactgttttcggtcgc

SEQ ID NO: 68521 - DNA, 25 bp, Homo sapien
tctgggcggtacaaccccgggtcga

SEQ ID NO: 68522 - DNA, 25 bp, Homo sapien
tctgggcggtactaccccgggtcga

SEQ ID NO: 68523 - DNA, 25 bp, Homo sapien
ttcccggaggacctcggtgtcaccg

SEQ ID NO: 68524 - DNA, 25 bp, Homo sapien
ttcccggaggacgtcggtgtcaccg

SEQ ID NO: 68525 - DNA, 25 bp, Homo sapien
tagtgtgtccgacgccgggctcgcc

SEQ ID NO: 68526 - DNA, 25 bp, Homo sapien
tagtgtgtccgaggccgggctcgcc

SEQ ID NO: 68527 - DNA, 25 bp, Homo sapien
ttcttgtgaaaggagtaaggcctct

SEQ ID NO: 68528 - DNA, 25 bp, Homo sapien
ttcttgtgaaagcagtaaggcctct

SEQ ID NO: 68529 - DNA, 25 bp, Homo sapien
agtcctttgtcacagtaatagttta

SEQ ID NO: 68530 - DNA, 25 bp, Homo sapien
agtcctttgtcagagtaatagttta

SEQ ID NO: 68531 - DNA, 25 bp, Homo sapien
cgctcactgcgcaggagaaattcat

SEQ ID NO: 68532 - DNA, 25 bp, Homo sapien
cgctcactgcgctggagaaattcat

SEQ ID NO: 68533 - DNA, 25 bp, Homo sapien
tcactctcgcggacgcgtcaattcc

SEQ ID NO: 68534 - DNA, 25 bp, Homo sapien
tcactctcgcggtcgcgtcaattcc

SEQ ID NO: 68535 - DNA, 25 bp, Homo sapien
gttcctattcccaagtcaaatgtga

SEQ ID NO: 68536 - DNA, 25 bp, Homo sapien
gttcctattccctagtcaaatgtga

SEQ ID NO: 68537 - DNA, 25 bp, Homo sapien
taccggtactgtgacgaaaactgga

SEQ ID NO: 68538 - DNA, 25 bp, Homo sapien
taccggtactgtcacgaaaactgga

SEQ ID NO: 68539 - DNA, 25 bp, Homo sapien
gactctgtttctccaataccgaccg

SEQ ID NO: 68540 - DNA, 25 bp, Homo sapien
gactctgtttctgcaataccgaccg

SEQ ID NO: 68541 - DNA, 25 bp, Homo sapien
cttcttcgtcttcctggtaccgacc

SEQ ID NO: 68542 - DNA, 25 bp, Homo sapien
cttcttcgtcttgctggtaccgacc

SEQ ID NO: 68543 - DNA, 25 bp, Homo sapien
tttccgtcttagtgttatactcgtc

SEQ ID NO: 68544 - DNA, 25 bp, Homo sapien
tttccgtcttagagttatactcgtc

SEQ ID NO: 68545 - DNA, 25 bp, Homo sapien
aagaagaagacgagcctgagtccgg

SEQ ID NO: 68546 - DNA, 25 bp, Homo sapien
aagaagaagacgtgcctgagtccgg

SEQ ID NO: 68547 - DNA, 25 bp, Homo sapien
atccatcagagatccctggtactgg

SEQ ID NO: 68548 - DNA, 25 bp, Homo sapien
atccatcagagaaccctggtactgg

SEQ ID NO: 68549 - DNA, 25 bp, Homo sapien
ttctcactaagaaaccttcataaag

SEQ ID NO: 68550 - DNA, 25 bp, Homo sapien
ttctcactaagataccttcataaag

SEQ ID NO: 68551 - DNA, 25 bp, Homo sapien
cccactgtgaatcctgaggataccg

SEQ ID NO: 68552 - DNA, 25 bp, Homo sapien
cccactgtgaatgctgaggataccg

SEQ ID NO: 68553 - DNA, 25 bp, Homo sapien
ggcctttacattacatggtcgtccg

SEQ ID NO: 68554 - DNA, 25 bp, Homo sapien
ggcctttacatttcatggtcgtccg

SEQ ID NO: 68555 - DNA, 25 bp, Homo sapien
gttacggttcctagtttttgtctac

SEQ ID NO: 68556 - DNA, 25 bp, Homo sapien
gttacggttccttgtttttgtctac

SEQ ID NO: 68557 - DNA, 25 bp, Homo sapien
tgtatgttatcacctactgttttcg

SEQ ID NO: 68558 - DNA, 25 bp, Homo sapien
tgtatgttatcagctactgttttcg

SEQ ID NO: 68559 - DNA, 25 bp, Homo sapien
ggtcgtcggtggttcacctgtctgt

SEQ ID NO: 68560 - DNA, 25 bp, Homo sapien
ggtcgtcggtggatcacctgtctgt

SEQ ID NO: 68561 - DNA, 25 bp, Homo sapien
cgatgacatgcgaccacactactgt

SEQ ID NO: 68562 - DNA, 25 bp, Homo sapien
cgatgacatgcgtccacactactgt

SEQ ID NO: 68563 - DNA, 25 bp, Homo sapien
aactgttgaacctgaaccggttatg

SEQ ID NO: 68564 - DNA, 25 bp, Homo sapien
aactgttgaaccagaaccggttatg

SEQ ID NO: 68565 - DNA, 25 bp, Homo sapien
agaatgaaaaccaagggagtcttct

SEQ ID NO: 68566 - DNA, 25 bp, Homo sapien
agaatgaaaacctagggagtcttct

SEQ ID NO: 68567 - DNA, 25 bp, Homo sapien
aagaggttaggcttttgtctttcac

SEQ ID NO: 68568 - DNA, 25 bp, Homo sapien
aagaggttaggcatttgtctttcac

SEQ ID NO: 68569 - DNA, 25 bp, Homo sapien
tgatttgttcacttttcgacatggt

SEQ ID NO: 68570 - DNA, 25 bp, Homo sapien
tgatttgttcacatttcgacatggt

SEQ ID NO: 68571 - DNA, 25 bp, Homo sapien
tgaggaattttcacttccgttaaca

SEQ ID NO: 68572 - DNA, 25 bp, Homo sapien
tgaggaattttctcttccgttaaca

SEQ ID NO: 68573 - DNA, 25 bp, Homo sapien
gacggtaatttttcccccgtttgag

SEQ ID NO: 68574 - DNA, 25 bp, Homo sapien
gacggtaattttacccccgtttgag

SEQ ID NO: 68575 - DNA, 25 bp, Homo sapien
tccatttttgctcagggtttacagt

SEQ ID NO: 68576 - DNA, 25 bp, Homo sapien
tccatttttgctgagggtttacagt

SEQ ID NO: 68577 - DNA, 25 bp, Homo sapien
cttcatttcttctacagaggccctg

SEQ ID NO: 68578 - DNA, 25 bp, Homo sapien
cttcatttcttcaacagaggccctg

SEQ ID NO: 68579 - DNA, 25 bp, Homo sapien
tctcttttaacgagggtgcccacat

SEQ ID NO: 68580 - DNA, 25 bp, Homo sapien
tctcttttaacgtgggtgcccacat

SEQ ID NO: 68581 - DNA, 25 bp, Homo sapien
gtgtattcatagtattgactcccaa

SEQ ID NO: 68582 - DNA, 25 bp, Homo sapien
gtgtattcatagaattgactcccaa

SEQ ID NO: 68583 - DNA, 25 bp, Homo sapien
agggtcttaagagtcccacactcat

SEQ ID NO: 68584 - DNA, 25 bp, Homo sapien
agggtcttaagactcccacactcat

SEQ ID NO: 68585 - DNA, 25 bp, Homo sapien
tgccggcaacggttccggctctcgg

SEQ ID NO: 68586 - DNA, 25 bp, Homo sapien
tgccggcaacggatccggctctcgg

SEQ ID NO: 68587 - DNA, 25 bp, Homo sapien
ctccggaaccggtccagtcacgagg

SEQ ID NO: 68588 - DNA, 25 bp, Homo sapien
ctccggaaccggaccagtcacgagg

SEQ ID NO: 68589 - DNA, 25 bp, Homo sapien
cagagactagtcacagagttacccg

SEQ ID NO: 68590 - DNA, 25 bp, Homo sapien
cagagactagtctcagagttacccg

SEQ ID NO: 68591 - DNA, 25 bp, Homo sapien
aacagaatcgtctatcgagttaagg

SEQ ID NO: 68592 - DNA, 25 bp, Homo sapien
aacagaatcgtcaatcgagttaagg

SEQ ID NO: 68593 - DNA, 25 bp, Homo sapien
agacggactcgtcgaaggtgtaaga

SEQ ID NO: 68594 - DNA, 25 bp, Homo sapien
agacggactcgtggaaggtgtaaga

SEQ ID NO: 68595 - DNA, 25 bp, Homo sapien
ccgaggctcgagacggaccgcctgt

SEQ ID NO: 68596 - DNA, 25 bp, Homo sapien
ccgaggctcgagtcggaccgcctgt

SEQ ID NO: 68597 - DNA, 25 bp, Homo sapien
gcgggcgctccagtacttccggaca

SEQ ID NO: 68598 - DNA, 25 bp, Homo sapien
gcgggcgctccactacttccggaca

SEQ ID NO: 68599 - DNA, 25 bp, Homo sapien
ctgaggagccccacgttacagcaac

SEQ ID NO: 68600 - DNA, 25 bp, Homo sapien
ctgaggagcccctcgttacagcaac

SEQ ID NO: 68601 - DNA, 25 bp, Homo sapien
cgtcgacctcaggtgtaactctcga

SEQ ID NO: 68602 - DNA, 25 bp, Homo sapien
cgtcgacctcagctgtaactctcga

SEQ ID NO: 68603 - DNA, 25 bp, Homo sapien
tgtttaacacccagggacgcaacgg

SEQ ID NO: 68604 - DNA, 25 bp, Homo sapien
tgtttaacaccctgggacgcaacgg

SEQ ID NO: 68605 - DNA, 25 bp, Homo sapien
ggacctccattttggtcacaggagt

SEQ ID NO: 68606 - DNA, 25 bp, Homo sapien
ggacctccatttaggtcacaggagt

SEQ ID NO: 68607 - DNA, 25 bp, Homo sapien
tacacgacattcttggcgtattttg

SEQ ID NO: 68608 - DNA, 25 bp, Homo sapien
tacacgacattcatggcgtattttg

SEQ ID NO: 68609 - DNA, 25 bp, Homo sapien
gttcaatttttggtcgttcctcgtg

SEQ ID NO: 68610 - DNA, 25 bp, Homo sapien
gttcaatttttgctcgttcctcgtg

SEQ ID NO: 68611 - DNA, 25 bp, Homo sapien
gggaactctttcaggtcgtttgagg

SEQ ID NO: 68612 - DNA, 25 bp, Homo sapien
gggaactctttctggtcgtttgagg

SEQ ID NO: 68613 - DNA, 25 bp, Homo sapien
atttagaactttctgaaggttcagg

SEQ ID NO: 68614 - DNA, 25 bp, Homo sapien
atttagaactttgtgaaggttcagg

SEQ ID NO: 68615 - DNA, 25 bp, Homo sapien
attggttccgttattgaatctttcg

SEQ ID NO: 68616 - DNA, 25 bp, Homo sapien
attggttccgtttttgaatctttcg

SEQ ID NO: 68617 - DNA, 25 bp, Homo sapien
catgtttggggttcactaatatctt

SEQ ID NO: 68618 - DNA, 25 bp, Homo sapien
catgtttggggtacactaatatctt

SEQ ID NO: 68619 - DNA, 25 bp, Homo sapien
atatattctgtagttgatccatctg

SEQ ID NO: 68620 - DNA, 25 bp, Homo sapien
atatattctgtacttgatccatctg

SEQ ID NO: 68621 - DNA, 25 bp, Homo sapien
gtatatcaattttgagtcaccattg

SEQ ID NO: 68622 - DNA, 25 bp, Homo sapien
gtatatcaatttagagtcaccattg

SEQ ID NO: 68623 - DNA, 25 bp, Homo sapien
ctctagtttacaccagtctagagtt

SEQ ID NO: 68624 - DNA, 25 bp, Homo sapien
ctctagtttacagcagtctagagtt

SEQ ID NO: 68625 - DNA, 25 bp, Homo sapien
ggtacaccttcgtgactgtcttaac

SEQ ID NO: 68626 - DNA, 25 bp, Homo sapien
ggtacaccttcgagactgtcttaac

SEQ ID NO: 68627 - DNA, 25 bp, Homo sapien
ggaaagaccctataaacattccacg

SEQ ID NO: 68628 - DNA, 25 bp, Homo sapien
ggaaagaccctaaaaacattccacg

SEQ ID NO: 68629 - DNA, 25 bp, Homo sapien
gaggacacgtaaaagacaaccttcg

SEQ ID NO: 68630 - DNA, 25 bp, Homo sapien
gaggacacgtaatagacaaccttcg

SEQ ID NO: 68631 - DNA, 25 bp, Homo sapien
ccgatgatgtatccgggtcaattgt

SEQ ID NO: 68632 - DNA, 25 bp, Homo sapien
ccgatgatgtatgcgggtcaattgt

SEQ ID NO: 68633 - DNA, 25 bp, Homo sapien
cgacaagaatatctaggtaatcttt

SEQ ID NO: 68634 - DNA, 25 bp, Homo sapien
cgacaagaatatgtaggtaatcttt

SEQ ID NO: 68635 - DNA, 25 bp, Homo sapien
ataaaacctagtcgttaaatcgaat

SEQ ID NO: 68636 - DNA, 25 bp, Homo sapien
ataaaacctagtggttaaatcgaat

SEQ ID NO: 68637 - DNA, 25 bp, Homo sapien
aaccactatatattgaaccgttatt

SEQ ID NO: 68638 - DNA, 25 bp, Homo sapien
aaccactatataatgaaccgttatt

SEQ ID NO: 68639 - DNA, 25 bp, Homo sapien
ggtcagactaatatgttcacgattc

SEQ ID NO: 68640 - DNA, 25 bp, Homo sapien
ggtcagactaatttgttcacgattc

SEQ ID NO: 68641 - DNA, 25 bp, Homo sapien
cacaagatgttggtgtacgtcttcg

SEQ ID NO: 68642 - DNA, 25 bp, Homo sapien
cacaagatgttgctgtacgtcttcg

SEQ ID NO: 68643 - DNA, 25 bp, Homo sapien
cacgagtcattgtaggtatgtcatg

SEQ ID NO: 68644 - DNA, 25 bp, Homo sapien
cacgagtcattgaaggtatgtcatg

SEQ ID NO: 68645 - DNA, 25 bp, Homo sapien
tgagccgtcctgacaggtgcagatc

SEQ ID NO: 68646 - DNA, 25 bp, Homo sapien
tgagccgtcctgtcaggtgcagatc

SEQ ID NO: 68647 - DNA, 25 bp, Homo sapien
gaacctccacgacgaatgacaactt

SEQ ID NO: 68648 - DNA, 25 bp, Homo sapien
gaacctccacgaggaatgacaactt

SEQ ID NO: 68649 - DNA, 25 bp, Homo sapien
atactaaaagtggatacgacacatt

SEQ ID NO: 68650 - DNA, 25 bp, Homo sapien
atactaaaagtgcatacgacacatt

SEQ ID NO: 68651 - DNA, 25 bp, Homo sapien
ttacaggaacaaggagtccgacatc

SEQ ID NO: 68652 - DNA, 25 bp, Homo sapien
ttacaggaacaacgagtccgacatc

SEQ ID NO: 68653 - DNA, 25 bp, Homo sapien
tcgttcggcgggtccgggtttcctc

SEQ ID NO: 68654 - DNA, 25 bp, Homo sapien
tcgttcggcgggaccgggtttcctc

SEQ ID NO: 68655 - DNA, 25 bp, Homo sapien
ctctctgagaaaaggggtttctctc

SEQ ID NO: 68656 - DNA, 25 bp, Homo sapien
ctctctgagaaatggggtttctctc

SEQ ID NO: 68657 - DNA, 25 bp, Homo sapien
ttttcaaccaaaggtgttctattcg

SEQ ID NO: 68658 - DNA, 25 bp, Homo sapien
ttttcaaccaaacgtgttctattcg

SEQ ID NO: 68659 - DNA, 25 bp, Homo sapien
ggttcttcaatcatcgatgtgtttc

SEQ ID NO: 68660 - DNA, 25 bp, Homo sapien
ggttcttcaatcttcgatgtgtttc

SEQ ID NO: 68661 - DNA, 25 bp, Homo sapien
tgtgggtacactcctctgtgctccc

SEQ ID NO: 68662 - DNA, 25 bp, Homo sapien
tgtgggtacactgctctgtgctccc

SEQ ID NO: 68663 - DNA, 25 bp, Homo sapien
gttggggtctgtctcttggagtctt

SEQ ID NO: 68664 - DNA, 25 bp, Homo sapien
gttggggtctgtgtcttggagtctt

SEQ ID NO: 68665 - DNA, 25 bp, Homo sapien
gagaagggttctcttttgacttctt

SEQ ID NO: 68666 - DNA, 25 bp, Homo sapien
gagaagggttctgttttgacttctt

SEQ ID NO: 68667 - DNA, 25 bp, Homo sapien
attgttttacctgtattaacccgag

SEQ ID NO: 68668 - DNA, 25 bp, Homo sapien
attgttttacctctattaacccgag

SEQ ID NO: 68669 - DNA, 25 bp, Homo sapien
tacgcctctcttctggtaacctcga

SEQ ID NO: 68670 - DNA, 25 bp, Homo sapien
tacgcctctcttgtggtaacctcga

SEQ ID NO: 68671 - DNA, 25 bp, Homo sapien
tcggacctctggacccactcgtcga

SEQ ID NO: 68672 - DNA, 25 bp, Homo sapien
tcggacctctggtcccactcgtcga

SEQ ID NO: 68673 - DNA, 25 bp, Homo sapien
ataatgtcttgtgtcttcctctgta

SEQ ID NO: 68674 - DNA, 25 bp, Homo sapien
ataatgtcttgtctcttcctctgta

SEQ ID NO: 68675 - DNA, 25 bp, Homo sapien
gagacacctcatcgtcagggactaa

SEQ ID NO: 68676 - DNA, 25 bp, Homo sapien
gagacacctcatggtcagggactaa

SEQ ID NO: 68677 - DNA, 25 bp, Homo sapien
ttcgtccccttagttcaagtgataa

SEQ ID NO: 68678 - DNA, 25 bp, Homo sapien
ttcgtccccttacttcaagtgataa

SEQ ID NO: 68679 - DNA, 25 bp, Homo sapien
ggcccttgacaggtatcgtgaacga

SEQ ID NO: 68680 - DNA, 25 bp, Homo sapien
ggcccttgacagctatcgtgaacga

SEQ ID NO: 68681 - DNA, 25 bp, Homo sapien
gctttgacgtccatcactacacgtt

SEQ ID NO: 68682 - DNA, 25 bp, Homo sapien
gctttgacgtccttcactacacgtt

SEQ ID NO: 68683 - DNA, 25 bp, Homo sapien
actctgaggctcttctcagtctact

SEQ ID NO: 68684 - DNA, 25 bp, Homo sapien
actctgaggctcatctcagtctact

SEQ ID NO: 68685 - DNA, 25 bp, Homo sapien
cctcggtaacacagactataagatt

SEQ ID NO: 68686 - DNA, 25 bp, Homo sapien
cctcggtaacactgactataagatt

SEQ ID NO: 68687 - DNA, 25 bp, Homo sapien
agtcccgtctgaactgcaggtagaa

SEQ ID NO: 68688 - DNA, 25 bp, Homo sapien
agtcccgtctgatctgcaggtagaa

SEQ ID NO: 68689 - DNA, 25 bp, Homo sapien
ctcaggttggttctatgtagaccgt

SEQ ID NO: 68690 - DNA, 25 bp, Homo sapien
ctcaggttggttgtatgtagaccgt

SEQ ID NO: 68691 - DNA, 25 bp, Homo sapien
caaagaatttttcgtgtacattcgt

SEQ ID NO: 68692 - DNA, 25 bp, Homo sapien
caaagaatttttggtgtacattcgt

SEQ ID NO: 68693 - DNA, 25 bp, Homo sapien
aaaagatttgtttcacgtcacatag

SEQ ID NO: 68694 - DNA, 25 bp, Homo sapien
aaaagatttgttacacgtcacatag

SEQ ID NO: 68695 - DNA, 25 bp, Homo sapien
gatccttcttttatccgtcgacaag

SEQ ID NO: 68696 - DNA, 25 bp, Homo sapien
gatccttcttttttccgtcgacaag

SEQ ID NO: 68697 - DNA, 25 bp, Homo sapien
tccgtttgggttttccgtacgttta

SEQ ID NO: 68698 - DNA, 25 bp, Homo sapien
tccgtttgggttatccgtacgttta

SEQ ID NO: 68699 - DNA, 25 bp, Homo sapien
cactttgtgcgacgttctcgggttt

SEQ ID NO: 68700 - DNA, 25 bp, Homo sapien
cactttgtgcgaggttctcgggttt

SEQ ID NO: 68701 - DNA, 25 bp, Homo sapien
ctctatgtctacagggtcccgtttc

SEQ ID NO: 68702 - DNA, 25 bp, Homo sapien
ctctatgtctactgggtcccgtttc

SEQ ID NO: 68703 - DNA, 25 bp, Homo sapien
ccttggtctttggatcgatagaccg

SEQ ID NO: 68704 - DNA, 25 bp, Homo sapien
ccttggtctttgcatcgatagaccg

SEQ ID NO: 68705 - DNA, 25 bp, Homo sapien
tcatcgtgtctgatcaataaagtaa

SEQ ID NO: 68706 - DNA, 25 bp, Homo sapien
tcatcgtgtctgttcaataaagtaa

SEQ ID NO: 68707 - DNA, 25 bp, Homo sapien
gaacacctgacctctaggaacaatg

SEQ ID NO: 68708 - DNA, 25 bp, Homo sapien
gaacacctgaccactaggaacaatg

SEQ ID NO: 68709 - DNA, 25 bp, Homo sapien
agttttcgaccttcaggtggaatgt

SEQ ID NO: 68710 - DNA, 25 bp, Homo sapien
agttttcgacctacaggtggaatgt

SEQ ID NO: 68711 - DNA, 25 bp, Homo sapien
tcttagtcagtgaagttgtctcatt

SEQ ID NO: 68712 - DNA, 25 bp, Homo sapien
tcttagtcagtgtagttgtctcatt

SEQ ID NO: 68713 - DNA, 25 bp, Homo sapien
tgtctcatgacgttttctacgactt

SEQ ID NO: 68714 - DNA, 25 bp, Homo sapien
tgtctcatgacgatttctacgactt

SEQ ID NO: 68715 - DNA, 25 bp, Homo sapien
agggtcaataacagtctttgatact

SEQ ID NO: 68716 - DNA, 25 bp, Homo sapien
agggtcaataactgtctttgatact

SEQ ID NO: 68717 - DNA, 25 bp, Homo sapien
atgtgctagggcttgaccgtctaca

SEQ ID NO: 68718 - DNA, 25 bp, Homo sapien
atgtgctagggcatgaccgtctaca

SEQ ID NO: 68719 - DNA, 25 bp, Homo sapien
aaacttgtgtagcatcgactgaaca

SEQ ID NO: 68720 - DNA, 25 bp, Homo sapien
aaacttgtgtaggatcgactgaaca

SEQ ID NO: 68721 - DNA, 25 bp, Homo sapien
tcttacgtgtttcatgacgtgttaa

SEQ ID NO: 68722 - DNA, 25 bp, Homo sapien
tcttacgtgtttgatgacgtgttaa

SEQ ID NO: 68723 - DNA, 25 bp, Homo sapien
ctctacaggaatgatcactgtgtaa

SEQ ID NO: 68724 - DNA, 25 bp, Homo sapien
ctctacaggaatcatcactgtgtaa

SEQ ID NO: 68725 - DNA, 25 bp, Homo sapien
agactgaaggtcctgacattctttt

SEQ ID NO: 68726 - DNA, 25 bp, Homo sapien
agactgaaggtcgtgacattctttt

SEQ ID NO: 68727 - DNA, 25 bp, Homo sapien
aggggttacttaatatctactttcg

SEQ ID NO: 68728 - DNA, 25 bp, Homo sapien
aggggttacttattatctactttcg

SEQ ID NO: 68729 - DNA, 25 bp, Homo sapien
gtcgctaattgtcttatccttaacg

SEQ ID NO: 68730 - DNA, 25 bp, Homo sapien
gtcgctaattgtgttatccttaacg

SEQ ID NO: 68731 - DNA, 25 bp, Homo sapien
ccaaaggctcctactctcgtcgaac

SEQ ID NO: 68732 - DNA, 25 bp, Homo sapien
ccaaaggctccttctctcgtcgaac

SEQ ID NO: 68733 - DNA, 25 bp, Homo sapien
gagatagaattttgtcgacgtccct

SEQ ID NO: 68734 - DNA, 25 bp, Homo sapien
gagatagaatttagtcgacgtccct

SEQ ID NO: 68735 - DNA, 25 bp, Homo sapien
aaattatgtactcatgtcgacttca

SEQ ID NO: 68736 - DNA, 25 bp, Homo sapien
aaattatgtactgatgtcgacttca

SEQ ID NO: 68737 - DNA, 25 bp, Homo sapien
tttctaggacttaacgtcgagttta

SEQ ID NO: 68738 - DNA, 25 bp, Homo sapien
tttctaggactttacgtcgagttta

SEQ ID NO: 68739 - DNA, 25 bp, Homo sapien
tgagaagaagtactacgagaacttc

SEQ ID NO: 68740 - DNA, 25 bp, Homo sapien
tgagaagaagtagtacgagaacttc

SEQ ID NO: 68741 - DNA, 25 bp, Homo sapien
attggtttagtgaaacacgaatctc

SEQ ID NO: 68742 - DNA, 25 bp, Homo sapien
attggtttagtgtaacacgaatctc

SEQ ID NO: 68743 - DNA, 25 bp, Homo sapien
agttctaccggtatacatcgaatcc

SEQ ID NO: 68744 - DNA, 25 bp, Homo sapien
agttctaccggtttacatcgaatcc

SEQ ID NO: 68745 - DNA, 25 bp, Homo sapien
atgactccctacacctactaatgtc

SEQ ID NO: 68746 - DNA, 25 bp, Homo sapien
atgactccctactcctactaatgtc

SEQ ID NO: 68747 - DNA, 25 bp, Homo sapien
tgagctacgcgctaccactggtgtc

SEQ ID NO: 68748 - DNA, 25 bp, Homo sapien
tgagctacgcgcaaccactggtgtc

SEQ ID NO: 68749 - DNA, 25 bp, Homo sapien
tggtcatggggaccaaacgtggtcc

SEQ ID NO: 68750 - DNA, 25 bp, Homo sapien
tggtcatggggagcaaacgtggtcc

SEQ ID NO: 68751 - DNA, 25 bp, Homo sapien
cgtgtgccgtcgtctgaccggagcc

SEQ ID NO: 68752 - DNA, 25 bp, Homo sapien
cgtgtgccgtcgactgaccggagcc

SEQ ID NO: 68753 - DNA, 25 bp, Homo sapien
agggtggtaaattttccctctctct

SEQ ID NO: 68754 - DNA, 25 bp, Homo sapien
agggtggtaaatattccctctctct

SEQ ID NO: 68755 - DNA, 25 bp, Homo sapien
acgtccgacgacaacgcgacattgc

SEQ ID NO: 68756 - DNA, 25 bp, Homo sapien
acgtccgacgactacgcgacattgc

SEQ ID NO: 68757 - DNA, 25 bp, Homo sapien
cgctgcgcgaccgcaatgtcgcgtt

SEQ ID NO: 68758 - DNA, 25 bp, Homo sapien
cgctgcgcgaccccaatgtcgcgtt

SEQ ID NO: 68759 - DNA, 25 bp, Homo sapien
tttatttcctcctcagggtagaaag

SEQ ID NO: 68760 - DNA, 25 bp, Homo sapien
tttatttcctccacagggtagaaag

SEQ ID NO: 68761 - DNA, 25 bp, Homo sapien
tttacatccacttgtacgaaagacg

SEQ ID NO: 68762 - DNA, 25 bp, Homo sapien
tttacatccactagtacgaaagacg

SEQ ID NO: 68763 - DNA, 25 bp, Homo sapien
gtctaataacagaacacggaatcgt

SEQ ID NO: 68764 - DNA, 25 bp, Homo sapien
gtctaataacagtacacggaatcgt

SEQ ID NO: 68765 - DNA, 25 bp, Homo sapien
tcgaacttgtgtccttagacgactg

SEQ ID NO: 68766 - DNA, 25 bp, Homo sapien
tcgaacttgtgtgcttagacgactg

SEQ ID NO: 68767 - DNA, 25 bp, Homo sapien
taaagaactaattcttctgagaacg

SEQ ID NO: 68768 - DNA, 25 bp, Homo sapien
taaagaactaatacttctgagaacg

SEQ ID NO: 68769 - DNA, 25 bp, Homo sapien
cgacacgttacaaccgttaaagacg

SEQ ID NO: 68770 - DNA, 25 bp, Homo sapien
cgacacgttacatccgttaaagacg

SEQ ID NO: 68771 - DNA, 25 bp, Homo sapien
ttccgttactatcgtatagtctaga

SEQ ID NO: 68772 - DNA, 25 bp, Homo sapien
ttccgttactatggtatagtctaga

SEQ ID NO: 68773 - DNA, 25 bp, Homo sapien
tcccgtccgaggttccggtcgtgga

SEQ ID NO: 68774 - DNA, 25 bp, Homo sapien
tcccgtccgaggatccggtcgtgga

SEQ ID NO: 68775 - DNA, 25 bp, Homo sapien
gggtcgtcccgaactctgtccgaaa

SEQ ID NO: 68776 - DNA, 25 bp, Homo sapien
gggtcgtcccgatctctgtccgaaa

SEQ ID NO: 68777 - DNA, 25 bp, Homo sapien
gagattcgtagtccttcgacgtaaa

SEQ ID NO: 68778 - DNA, 25 bp, Homo sapien
gagattcgtagtgcttcgacgtaaa

SEQ ID NO: 68779 - DNA, 25 bp, Homo sapien
tcaattgttagtcactcgtgtataa

SEQ ID NO: 68780 - DNA, 25 bp, Homo sapien
tcaattgttagtgactcgtgtataa

SEQ ID NO: 68781 - DNA, 25 bp, Homo sapien
acacaagtgtctacccgtaagaact

SEQ ID NO: 68782 - DNA, 25 bp, Homo sapien
acacaagtgtcttcccgtaagaact

SEQ ID NO: 68783 - DNA, 25 bp, Homo sapien
ttacaaatgtagaaccctgaggtat

SEQ ID NO: 68784 - DNA, 25 bp, Homo sapien
ttacaaatgtagtaccctgaggtat

SEQ ID NO: 68785 - DNA, 25 bp, Homo sapien
ttacccgaactactcccaggtcagt

SEQ ID NO: 68786 - DNA, 25 bp, Homo sapien
ttacccgaactagtcccaggtcagt

SEQ ID NO: 68787 - DNA, 25 bp, Homo sapien
gacactagaatttattcgaaccgat

SEQ ID NO: 68788 - DNA, 25 bp, Homo sapien
gacactagaattaattcgaaccgat

SEQ ID NO: 68789 - DNA, 25 bp, Homo sapien
gacattacagttcctataagtcttg

SEQ ID NO: 68790 - DNA, 25 bp, Homo sapien
gacattacagttgctataagtcttg

SEQ ID NO: 68791 - DNA, 25 bp, Homo sapien
gaatcgaacacgagtttatctcttc

SEQ ID NO: 68792 - DNA, 25 bp, Homo sapien
gaatcgaacacgtgtttatctcttc

SEQ ID NO: 68793 - DNA, 25 bp, Homo sapien
aacccgagactgtagttttcaccta

SEQ ID NO: 68794 - DNA, 25 bp, Homo sapien
aacccgagactgaagttttcaccta

SEQ ID NO: 68795 - DNA, 25 bp, Homo sapien
aaagtaatagtcagaatgtccaacg

SEQ ID NO: 68796 - DNA, 25 bp, Homo sapien
aaagtaatagtctgaatgtccaacg

SEQ ID NO: 68797 - DNA, 25 bp, Homo sapien
cacacagtagtaaggtctgtccaca

SEQ ID NO: 68798 - DNA, 25 bp, Homo sapien
cacacagtagtatggtctgtccaca

SEQ ID NO: 68799 - DNA, 25 bp, Homo sapien
atgagtatacagacgcacacacact

SEQ ID NO: 68800 - DNA, 25 bp, Homo sapien
atgagtatacagtcgcacacacact

SEQ ID NO: 68801 - DNA, 25 bp, Homo sapien
gtgtagagtcaatccactctactct

SEQ ID NO: 68802 - DNA, 25 bp, Homo sapien
gtgtagagtcaaaccactctactct

SEQ ID NO: 68803 - DNA, 25 bp, Homo sapien
tgtgaaataacttaagacctcgtcg

SEQ ID NO: 68804 - DNA, 25 bp, Homo sapien
tgtgaaataactaaagacctcgtcg

SEQ ID NO: 68805 - DNA, 25 bp, Homo sapien
ctggggacgaaaagataagtccctc

SEQ ID NO: 68806 - DNA, 25 bp, Homo sapien
ctggggacgaaatgataagtccctc

SEQ ID NO: 68807 - DNA, 25 bp, Homo sapien
tcggagagttatttagaaggtcccc

SEQ ID NO: 68808 - DNA, 25 bp, Homo sapien
tcggagagttatatagaaggtcccc

SEQ ID NO: 68809 - DNA, 25 bp, Homo sapien
aaattattgtactttcggttctgtc

SEQ ID NO: 68810 - DNA, 25 bp, Homo sapien
aaattattgtacattcggttctgtc

SEQ ID NO: 68811 - DNA, 25 bp, Homo sapien
ttgtccggtgtcagtacgttttctt

SEQ ID NO: 68812 - DNA, 25 bp, Homo sapien
ttgtccggtgtctgtacgttttctt

SEQ ID NO: 68813 - DNA, 25 bp, Homo sapien
ttgtagaggtcgtgtcttcttctgt

SEQ ID NO: 68814 - DNA, 25 bp, Homo sapien
ttgtagaggtcgagtcttcttctgt

SEQ ID NO: 68815 - DNA, 25 bp, Homo sapien
ttagtagatgccaagagtctcgatt

SEQ ID NO: 68816 - DNA, 25 bp, Homo sapien
ttagtagatgcctagagtctcgatt

SEQ ID NO: 68817 - DNA, 25 bp, Homo sapien
gaaacccacaaccaaaggacacagt

SEQ ID NO: 68818 - DNA, 25 bp, Homo sapien
gaaacccacaacgaaaggacacagt

SEQ ID NO: 68819 - DNA, 25 bp, Homo sapien
ccgtcaggaaccaccggagacgaca

SEQ ID NO: 68820 - DNA, 25 bp, Homo sapien
ccgtcaggaacctccggagacgaca

SEQ ID NO: 68821 - DNA, 25 bp, Homo sapien
agttccgaactctccgtgtaagaat

SEQ ID NO: 68822 - DNA, 25 bp, Homo sapien
agttccgaactcaccgtgtaagaat

SEQ ID NO: 68823 - DNA, 25 bp, Homo sapien
acggtccctcataccgtctatgaca

SEQ ID NO: 68824 - DNA, 25 bp, Homo sapien
acggtccctcattccgtctatgaca

SEQ ID NO: 68825 - DNA, 25 bp, Homo sapien
tcgtcagtcgtcgtttcactttcga

SEQ ID NO: 68826 - DNA, 25 bp, Homo sapien
tcgtcagtcgtcctttcactttcga

SEQ ID NO: 68827 - DNA, 25 bp, Homo sapien
tacatgtcgtctttaacctgtccga

SEQ ID NO: 68828 - DNA, 25 bp, Homo sapien
tacatgtcgtctataacctgtccga

SEQ ID NO: 68829 - DNA, 25 bp, Homo sapien
gggtctgttttacgaccctctctca

SEQ ID NO: 68830 - DNA, 25 bp, Homo sapien
gggtctgttttaggaccctctctca

SEQ ID NO: 68831 - DNA, 25 bp, Homo sapien
ctctacgattttcgttgtctctgtc

SEQ ID NO: 68832 - DNA, 25 bp, Homo sapien
ctctacgattttggttgtctctgtc

SEQ ID NO: 68833 - DNA, 25 bp, Homo sapien
tccccttttgttccttcgttcagag

SEQ ID NO: 68834 - DNA, 25 bp, Homo sapien
tccccttttgttgcttcgttcagag

SEQ ID NO: 68835 - DNA, 25 bp, Homo sapien
gccctgtacttttcccttcgtgtat

SEQ ID NO: 68836 - DNA, 25 bp, Homo sapien
gccctgtactttacccttcgtgtat

SEQ ID NO: 68837 - DNA, 25 bp, Homo sapien
ccatatgatatattaatcatcgttt

SEQ ID NO: 68838 - DNA, 25 bp, Homo sapien
ccatatgatataataatcatcgttt

SEQ ID NO: 68839 - DNA, 25 bp, Homo sapien
tgtacatctgtcagtcactgtagtt

SEQ ID NO: 68840 - DNA, 25 bp, Homo sapien
tgtacatctgtctgtcactgtagtt

SEQ ID NO: 68841 - DNA, 25 bp, Homo sapien
gaacaccggtattcttaccgttact

SEQ ID NO: 68842 - DNA, 25 bp, Homo sapien
gaacaccggtatacttaccgttact

SEQ ID NO: 68843 - DNA, 25 bp, Homo sapien
tcgagatctaagaaacgggtccctt

SEQ ID NO: 68844 - DNA, 25 bp, Homo sapien
tcgagatctaagtaacgggtccctt

SEQ ID NO: 68845 - DNA, 25 bp, Homo sapien
tggtgtcgtttgtgcctgtccttct

SEQ ID NO: 68846 - DNA, 25 bp, Homo sapien
tggtgtcgtttgagcctgtccttct

SEQ ID NO: 68847 - DNA, 25 bp, Homo sapien
gtgtctacttagagtcatctccttt

SEQ ID NO: 68848 - DNA, 25 bp, Homo sapien
gtgtctacttagtgtcatctccttt

SEQ ID NO: 68849 - DNA, 25 bp, Homo sapien
ggttacaaaagtcaccatagactcg

SEQ ID NO: 68850 - DNA, 25 bp, Homo sapien
ggttacaaaagtgaccatagactcg

SEQ ID NO: 68851 - DNA, 25 bp, Homo sapien
tgaaaaaaggacgacgtaaacgacg

SEQ ID NO: 68852 - DNA, 25 bp, Homo sapien
tgaaaaaaggaccacgtaaacgacg

SEQ ID NO: 68853 - DNA, 25 bp, Homo sapien
cgtaaagaagaaacctttctaaagc

SEQ ID NO: 68854 - DNA, 25 bp, Homo sapien
cgtaaagaagaatcctttctaaagc

SEQ ID NO: 68855 - DNA, 25 bp, Homo sapien
taagacgaaaatcctttgtactttg

SEQ ID NO: 68856 - DNA, 25 bp, Homo sapien
taagacgaaaatgctttgtactttg

SEQ ID NO: 68857 - DNA, 25 bp, Homo sapien
agtacaatgttcttttgttgtcact

SEQ ID NO: 68858 - DNA, 25 bp, Homo sapien
agtacaatgttcatttgttgtcact

SEQ ID NO: 68859 - DNA, 25 bp, Homo sapien
tcgagaagaaatctttagtactacg

SEQ ID NO: 68860 - DNA, 25 bp, Homo sapien
tcgagaagaaatgtttagtactacg

SEQ ID NO: 68861 - DNA, 25 bp, Homo sapien
cgtgaaacatactttatatcgatgt

SEQ ID NO: 68862 - DNA, 25 bp, Homo sapien
cgtgaaacatacattatatcgatgt

SEQ ID NO: 68863 - DNA, 25 bp, Homo sapien
ataacagtacatactgtattcactt

SEQ ID NO: 68864 - DNA, 25 bp, Homo sapien
ataacagtacattctgtattcactt

SEQ ID NO: 68865 - DNA, 25 bp, Homo sapien
actacgaaaggtttgatctagaact

SEQ ID NO: 68866 - DNA, 25 bp, Homo sapien
actacgaaaggtatgatctagaact

SEQ ID NO: 68867 - DNA, 25 bp, Homo sapien
tgtacctaagatggttgactttaca

SEQ ID NO: 68868 - DNA, 25 bp, Homo sapien
tgtacctaagatcgttgactttaca

SEQ ID NO: 68869 - DNA, 25 bp, Homo sapien
cgctatatgagtcgttggtgtctga

SEQ ID NO: 68870 - DNA, 25 bp, Homo sapien
cgctatatgagtggttggtgtctga

SEQ ID NO: 68871 - DNA, 25 bp, Homo sapien
cgcacctcatgagaactttcgacag

SEQ ID NO: 68872 - DNA, 25 bp, Homo sapien
cgcacctcatgacaactttcgacag

SEQ ID NO: 68873 - DNA, 25 bp, Homo sapien
caccctcaatgacgatttccgagag

SEQ ID NO: 68874 - DNA, 25 bp, Homo sapien
caccctcaatgaggatttccgagag

SEQ ID NO: 68875 - DNA, 25 bp, Homo sapien
cctcctatgtccagatgtgtgctaa

SEQ ID NO: 68876 - DNA, 25 bp, Homo sapien
cctcctatgtcctgatgtgtgctaa

SEQ ID NO: 68877 - DNA, 25 bp, Homo sapien
cggatcacgtcgaagactcggggaa

SEQ ID NO: 68878 - DNA, 25 bp, Homo sapien
cggatcacgtcgtagactcggggaa

SEQ ID NO: 68879 - DNA, 25 bp, Homo sapien
ggacggacgtcgtacactgggattt

SEQ ID NO: 68880 - DNA, 25 bp, Homo sapien
ggacggacgtcgaacactgggattt

SEQ ID NO: 68881 - DNA, 25 bp, Homo sapien
gagagggtactgagacctattatct

SEQ ID NO: 68882 - DNA, 25 bp, Homo sapien
gagagggtactgtgacctattatct

SEQ ID NO: 68883 - DNA, 25 bp, Homo sapien
gtggaacgactgtgaccagaagtct

SEQ ID NO: 68884 - DNA, 25 bp, Homo sapien
gtggaacgactgagaccagaagtct

SEQ ID NO: 68885 - DNA, 25 bp, Homo sapien
gtagagaatacgaggaacggtaccc

SEQ ID NO: 68886 - DNA, 25 bp, Homo sapien
gtagagaatacgtggaacggtaccc

SEQ ID NO: 68887 - DNA, 25 bp, Homo sapien
agtcgtaactcgaccggacccttcg

SEQ ID NO: 68888 - DNA, 25 bp, Homo sapien
agtcgtaactcgtccggacccttcg

SEQ ID NO: 68889 - DNA, 25 bp, Homo sapien
agtgaatgactcagttacaccttag

SEQ ID NO: 68890 - DNA, 25 bp, Homo sapien
agtgaatgactctgttacaccttag

SEQ ID NO: 68891 - DNA, 25 bp, Homo sapien
acccactagagatctatcttgtctg

SEQ ID NO: 68892 - DNA, 25 bp, Homo sapien
acccactagagaactatcttgtctg

SEQ ID NO: 68893 - DNA, 25 bp, Homo sapien
gtcactacactcgacataatttggg

SEQ ID NO: 68894 - DNA, 25 bp, Homo sapien
gtcactacactccacataatttggg

SEQ ID NO: 68895 - DNA, 25 bp, Homo sapien
agtggtccacactttgtgcgacgtt

SEQ ID NO: 68896 - DNA, 25 bp, Homo sapien
agtggtccacacattgtgcgacgtt

SEQ ID NO: 68897 - DNA, 25 bp, Homo sapien
ttgtttctacgttcacatacagggg

SEQ ID NO: 68898 - DNA, 25 bp, Homo sapien
ttgtttctacgtacacatacagggg

SEQ ID NO: 68899 - DNA, 25 bp, Homo sapien
ctatgtcttcttctacaaacaggat

SEQ ID NO: 68900 - DNA, 25 bp, Homo sapien
ctatgtcttcttgtacaaacaggat

SEQ ID NO: 68901 - DNA, 25 bp, Homo sapien
ttgtcttcttgtcgacacaaagtgt

SEQ ID NO: 68902 - DNA, 25 bp, Homo sapien
ttgtcttcttgtggacacaaagtgt

SEQ ID NO: 68903 - DNA, 25 bp, Homo sapien
ggtgtacttttctccgtcaaagata

SEQ ID NO: 68904 - DNA, 25 bp, Homo sapien
ggtgtacttttcaccgtcaaagata

SEQ ID NO: 68905 - DNA, 25 bp, Homo sapien
taatgtgtttaacctgtccttgata

SEQ ID NO: 68906 - DNA, 25 bp, Homo sapien
taatgtgtttaagctgtccttgata

SEQ ID NO: 68907 - DNA, 25 bp, Homo sapien
aaatgtgtaaacttacttcatgtgc

SEQ ID NO: 68908 - DNA, 25 bp, Homo sapien
aaatgtgtaaacatacttcatgtgc

SEQ ID NO: 68909 - DNA, 25 bp, Homo sapien
aaactagaggaacttacatcgtgtg

SEQ ID NO: 68910 - DNA, 25 bp, Homo sapien
aaactagaggaagttacatcgtgtg

SEQ ID NO: 68911 - DNA, 25 bp, Homo sapien
tgaataaagatctttcgtcgtcccg

SEQ ID NO: 68912 - DNA, 25 bp, Homo sapien
tgaataaagatcattcgtcgtcccg

SEQ ID NO: 68913 - DNA, 25 bp, Homo sapien
tacctgtctctccacactgaaaggt

SEQ ID NO: 68914 - DNA, 25 bp, Homo sapien
tacctgtctctcgacactgaaaggt

SEQ ID NO: 68915 - DNA, 25 bp, Homo sapien
agtcttgtctctacgaagccagtgg

SEQ ID NO: 68916 - DNA, 25 bp, Homo sapien
agtcttgtctcttcgaagccagtgg

SEQ ID NO: 68917 - DNA, 25 bp, Homo sapien
gtgctcttaccttacgaagccccgg

SEQ ID NO: 68918 - DNA, 25 bp, Homo sapien
gtgctcttacctaacgaagccccgg

SEQ ID NO: 68919 - DNA, 25 bp, Homo sapien
ttgtaaggaaaaactccttatacag

SEQ ID NO: 68920 - DNA, 25 bp, Homo sapien
ttgtaaggaaaatctccttatacag

SEQ ID NO: 68921 - DNA, 25 bp, Homo sapien
ttgaaaggggattacgtccttgttc

SEQ ID NO: 68922 - DNA, 25 bp, Homo sapien
ttgaaaggggataacgtccttgttc

SEQ ID NO: 68923 - DNA, 25 bp, Homo sapien
ttaaccgaggagttgtccgttgttt

SEQ ID NO: 68924 - DNA, 25 bp, Homo sapien
ttaaccgaggagatgtccgttgttt

SEQ ID NO: 68925 - DNA, 25 bp, Homo sapien
tgtaagaaggtcatgttaacctaac

SEQ ID NO: 68926 - DNA, 25 bp, Homo sapien
tgtaagaaggtcttgttaacctaac

SEQ ID NO: 68927 - DNA, 25 bp, Homo sapien
taaaaagagtaccttgagatacttc

SEQ ID NO: 68928 - DNA, 25 bp, Homo sapien
taaaaagagtacgttgagatacttc

SEQ ID NO: 68929 - DNA, 25 bp, Homo sapien
acagacaagaacgtaggtatcttcc

SEQ ID NO: 68930 - DNA, 25 bp, Homo sapien
acagacaagaacctaggtatcttcc

SEQ ID NO: 68931 - DNA, 25 bp, Homo sapien
gaaagaaccgataacaagtccatca

SEQ ID NO: 68932 - DNA, 25 bp, Homo sapien
gaaagaaccgattacaagtccatca

SEQ ID NO: 68933 - DNA, 25 bp, Homo sapien
gacaaccgacttcaggtctcacagg

SEQ ID NO: 68934 - DNA, 25 bp, Homo sapien
gacaaccgacttgaggtctcacagg

SEQ ID NO: 68935 - DNA, 25 bp, Homo sapien
taccactccttcagtgtcggccggt

SEQ ID NO: 68936 - DNA, 25 bp, Homo sapien
taccactccttctgtgtcggccggt

SEQ ID NO: 68937 - DNA, 25 bp, Homo sapien
tacccttctctgtacgggtcctcgt

SEQ ID NO: 68938 - DNA, 25 bp, Homo sapien
tacccttctctgaacgggtcctcgt

SEQ ID NO: 68939 - DNA, 25 bp, Homo sapien
ggacccgtaccttgcagggatatcg

SEQ ID NO: 68940 - DNA, 25 bp, Homo sapien
ggacccgtacctagcagggatatcg

SEQ ID NO: 68941 - DNA, 25 bp, Homo sapien
ctgtggcgtcacgaggtgtactgtc

SEQ ID NO: 68942 - DNA, 25 bp, Homo sapien
ctgtggcgtcaccaggtgtactgtc

SEQ ID NO: 68943 - DNA, 25 bp, Homo sapien
cgggagtaacgtaccgtgtctacga

SEQ ID NO: 68944 - DNA, 25 bp, Homo sapien
cgggagtaacgttccgtgtctacga

SEQ ID NO: 68945 - DNA, 25 bp, Homo sapien
ggtagtagaaccataactcgagaag

SEQ ID NO: 68946 - DNA, 25 bp, Homo sapien
ggtagtagaaccttaactcgagaag

SEQ ID NO: 68947 - DNA, 25 bp, Homo sapien
gaggtgagaaaccttcactcagtga

SEQ ID NO: 68948 - DNA, 25 bp, Homo sapien
gaggtgagaaacgttcactcagtga

SEQ ID NO: 68949 - DNA, 25 bp, Homo sapien
gtggtacacgaggagtaactaatcc

SEQ ID NO: 68950 - DNA, 25 bp, Homo sapien
gtggtacacgagcagtaactaatcc

SEQ ID NO: 68951 - DNA, 25 bp, Homo sapien
cgtgtccctcgaagtacaacacggt

SEQ ID NO: 68952 - DNA, 25 bp, Homo sapien
cgtgtccctcgatgtacaacacggt

SEQ ID NO: 68953 - DNA, 25 bp, Homo sapien
accatcccgaactcgtggaccgagt

SEQ ID NO: 68954 - DNA, 25 bp, Homo sapien
accatcccgaacacgtggaccgagt

SEQ ID NO: 68955 - DNA, 25 bp, Homo sapien
caaactggaactaccggacgtcacg

SEQ ID NO: 68956 - DNA, 25 bp, Homo sapien
caaactggaacttccggacgtcacg

SEQ ID NO: 68957 - DNA, 25 bp, Homo sapien
ccggtccaagagtcgtcgtccgggt

SEQ ID NO: 68958 - DNA, 25 bp, Homo sapien
ccggtccaagagacgtcgtccgggt

SEQ ID NO: 68959 - DNA, 25 bp, Homo sapien
ttcggttccaggacgacctcgacgg

SEQ ID NO: 68960 - DNA, 25 bp, Homo sapien
ttcggttccaggtcgacctcgacgg

SEQ ID NO: 68961 - DNA, 25 bp, Homo sapien
ggtccttcctagacacgattaaggt

SEQ ID NO: 68962 - DNA, 25 bp, Homo sapien
ggtccttcctagtcacgattaaggt

SEQ ID NO: 68963 - DNA, 25 bp, Homo sapien
gaactcgtccatcctattgacaagt

SEQ ID NO: 68964 - DNA, 25 bp, Homo sapien
gaactcgtccatgctattgacaagt

SEQ ID NO: 68965 - DNA, 25 bp, Homo sapien
aagaggtctactcgacttttgaggt

SEQ ID NO: 68966 - DNA, 25 bp, Homo sapien
aagaggtctactggacttttgaggt

SEQ ID NO: 68967 - DNA, 25 bp, Homo sapien
ggatgaaacctacattctatgtaaa

SEQ ID NO: 68968 - DNA, 25 bp, Homo sapien
ggatgaaacctagattctatgtaaa

SEQ ID NO: 68969 - DNA, 25 bp, Homo sapien
taacgaattctggtttcagtatcaa

SEQ ID NO: 68970 - DNA, 25 bp, Homo sapien
taacgaattctgctttcagtatcaa

SEQ ID NO: 68971 - DNA, 25 bp, Homo sapien
aaataacagtcattctttgtcgttg

SEQ ID NO: 68972 - DNA, 25 bp, Homo sapien
aaataacagtcaatctttgtcgttg

SEQ ID NO: 68973 - DNA, 25 bp, Homo sapien
gtttatagtgaacattccgtttttc

SEQ ID NO: 68974 - DNA, 25 bp, Homo sapien
gtttatagtgaagattccgtttttc

SEQ ID NO: 68975 - DNA, 25 bp, Homo sapien
catgacgtagggactaggttcttgg

SEQ ID NO: 68976 - DNA, 25 bp, Homo sapien
catgacgtagggtctaggttcttgg

SEQ ID NO: 68977 - DNA, 25 bp, Homo sapien
tcagaatccaagtgtgtttcgtaga

SEQ ID NO: 68978 - DNA, 25 bp, Homo sapien
tcagaatccaagagtgtttcgtaga

SEQ ID NO: 68979 - DNA, 25 bp, Homo sapien
aacacgtccgggagtcgtgtttgag

SEQ ID NO: 68980 - DNA, 25 bp, Homo sapien
aacacgtccgggtgtcgtgtttgag

SEQ ID NO: 68981 - DNA, 25 bp, Homo sapien
accgtcttttgtgacgtttactgag

SEQ ID NO: 68982 - DNA, 25 bp, Homo sapien
accgtcttttgtcacgtttactgag

SEQ ID NO: 68983 - DNA, 25 bp, Homo sapien
tctttacggaataccttacgtagac

SEQ ID NO: 68984 - DNA, 25 bp, Homo sapien
tctttacggaattccttacgtagac

SEQ ID NO: 68985 - DNA, 25 bp, Homo sapien
aatatctgtgtggtaatcccctcaa

SEQ ID NO: 68986 - DNA, 25 bp, Homo sapien
aatatctgtgtgctaatcccctcaa

SEQ ID NO: 68987 - DNA, 25 bp, Homo sapien
gaagtgactagtagggcctctcctc

SEQ ID NO: 68988 - DNA, 25 bp, Homo sapien
gaagtgactagttgggcctctcctc

SEQ ID NO: 68989 - DNA, 25 bp, Homo sapien
taatataagataacggaccatgaac

SEQ ID NO: 68990 - DNA, 25 bp, Homo sapien
taatataagatatcggaccatgaac

SEQ ID NO: 68991 - DNA, 25 bp, Homo sapien
aaaggtatagacttgtcccataaac

SEQ ID NO: 68992 - DNA, 25 bp, Homo sapien
aaaggtatagacatgtcccataaac

SEQ ID NO: 68993 - DNA, 25 bp, Homo sapien
agatggaagacagtttaatactcac

SEQ ID NO: 68994 - DNA, 25 bp, Homo sapien
agatggaagacactttaatactcac

SEQ ID NO: 68995 - DNA, 25 bp, Homo sapien
ggaacacataggttctcagatgtac

SEQ ID NO: 68996 - DNA, 25 bp, Homo sapien
ggaacacataggatctcagatgtac

SEQ ID NO: 68997 - DNA, 25 bp, Homo sapien
aaattactcccgtaactagaatagg

SEQ ID NO: 68998 - DNA, 25 bp, Homo sapien
aaattactcccgaaactagaatagg

SEQ ID NO: 68999 - DNA, 25 bp, Homo sapien
atttttaccgtgaaaatcagtaccg

SEQ ID NO: 69000 - DNA, 25 bp, Homo sapien
atttttaccgtgtaaatcagtaccg

SEQ ID NO: 69001 - DNA, 25 bp, Homo sapien
gtttttatctcaagaacgttgtaac

SEQ ID NO: 69002 - DNA, 25 bp, Homo sapien
gtttttatctcatgaacgttgtaac

SEQ ID NO: 69003 - DNA, 25 bp, Homo sapien
ctattgttatttacgatcgtgaaac

SEQ ID NO: 69004 - DNA, 25 bp, Homo sapien
ctattgttattttcgatcgtgaaac

SEQ ID NO: 69005 - DNA, 25 bp, Homo sapien
cttcagttcccttcctcgggtcagt

SEQ ID NO: 69006 - DNA, 25 bp, Homo sapien
cttcagttccctacctcgggtcagt

SEQ ID NO: 69007 - DNA, 25 bp, Homo sapien
tgacatattcctggtttgtctatta

SEQ ID NO: 69008 - DNA, 25 bp, Homo sapien
tgacatattcctcgtttgtctatta

SEQ ID NO: 69009 - DNA, 25 bp, Homo sapien
tcttcgttccgtcgtggtatcagaa

SEQ ID NO: 69010 - DNA, 25 bp, Homo sapien
tcttcgttccgtggtggtatcagaa

SEQ ID NO: 69011 - DNA, 25 bp, Homo sapien
accgcagcccaaacgcgataattgt

SEQ ID NO: 69012 - DNA, 25 bp, Homo sapien
accgcagcccaatcgcgataattgt

SEQ ID NO: 69013 - DNA, 25 bp, Homo sapien
acgtggcacgcgtctaggaggacca

SEQ ID NO: 69014 - DNA, 25 bp, Homo sapien
acgtggcacgcgactaggaggacca

SEQ ID NO: 69015 - DNA, 25 bp, Homo sapien
aacctaggagttactaagttgacca

SEQ ID NO: 69016 - DNA, 25 bp, Homo sapien
aacctaggagtttctaagttgacca

SEQ ID NO: 69017 - DNA, 25 bp, Homo sapien
aagaaaggtatttgtttatgtgacc

SEQ ID NO: 69018 - DNA, 25 bp, Homo sapien
aagaaaggtattagtttatgtgacc

SEQ ID NO: 69019 - DNA, 25 bp, Homo sapien
aaaagacctgtgtcgagtggactag

SEQ ID NO: 69020 - DNA, 25 bp, Homo sapien
aaaagacctgtgacgagtggactag

SEQ ID NO: 69021 - DNA, 25 bp, Homo sapien
ctgtgacagtcctggctcataaatt

SEQ ID NO: 69022 - DNA, 25 bp, Homo sapien
ctgtgacagtccaggctcataaatt

SEQ ID NO: 69023 - DNA, 25 bp, Homo sapien
atgtcaacttcgacgtctcaaaatg

SEQ ID NO: 69024 - DNA, 25 bp, Homo sapien
atgtcaacttcgtcgtctcaaaatg

SEQ ID NO: 69025 - DNA, 25 bp, Homo sapien
tattgaatgtgtagtctccttttcg

SEQ ID NO: 69026 - DNA, 25 bp, Homo sapien
tattgaatgtgttgtctccttttcg

SEQ ID NO: 69027 - DNA, 25 bp, Homo sapien
ttttagacagatgtcactcttttcg

SEQ ID NO: 69028 - DNA, 25 bp, Homo sapien
ttttagacagatctcactcttttcg

SEQ ID NO: 69029 - DNA, 25 bp, Homo sapien
tgtctggatatttctaccttacatg

SEQ ID NO: 69030 - DNA, 25 bp, Homo sapien
tgtctggatattactaccttacatg

SEQ ID NO: 69031 - DNA, 25 bp, Homo sapien
tccgttctctacagttctgtcgtaa

SEQ ID NO: 69032 - DNA, 25 bp, Homo sapien
tccgttctctactgttctgtcgtaa

SEQ ID NO: 69033 - DNA, 25 bp, Homo sapien
actccgttctcgttcagtttagatg

SEQ ID NO: 69034 - DNA, 25 bp, Homo sapien
actccgttctcgatcagtttagatg

SEQ ID NO: 69035 - DNA, 25 bp, Homo sapien
gtagttggttctcgtttgtacagtc

SEQ ID NO: 69036 - DNA, 25 bp, Homo sapien
gtagttggttctggtttgtacagtc

SEQ ID NO: 69037 - DNA, 25 bp, Homo sapien
gtctgacggcttcaggttttcgaag

SEQ ID NO: 69038 - DNA, 25 bp, Homo sapien
gtctgacggcttgaggttttcgaag

SEQ ID NO: 69039 - DNA, 25 bp, Homo sapien
gatgtttcacgttggttgtaccaag

SEQ ID NO: 69040 - DNA, 25 bp, Homo sapien
gatgtttcacgtaggttgtaccaag

SEQ ID NO: 69041 - DNA, 25 bp, Homo sapien
tcgtattgtcacgaattgtcacaga

SEQ ID NO: 69042 - DNA, 25 bp, Homo sapien
tcgtattgtcaccaattgtcacaga

SEQ ID NO: 69043 - DNA, 25 bp, Homo sapien
gttatttctaccattaggtaacaga

SEQ ID NO: 69044 - DNA, 25 bp, Homo sapien
gttatttctacctttaggtaacaga

SEQ ID NO: 69045 - DNA, 25 bp, Homo sapien
ctcaagtctacaaaagggtccaata

SEQ ID NO: 69046 - DNA, 25 bp, Homo sapien
ctcaagtctacataagggtccaata

SEQ ID NO: 69047 - DNA, 25 bp, Homo sapien
ccgttagttagtattttgtccttaa

SEQ ID NO: 69048 - DNA, 25 bp, Homo sapien
ccgttagttagttttttgtccttaa

SEQ ID NO: 69049 - DNA, 25 bp, Homo sapien
agttgttaaccttttgagtcttaac

SEQ ID NO: 69050 - DNA, 25 bp, Homo sapien
agttgttaacctattgagtcttaac

SEQ ID NO: 69051 - DNA, 25 bp, Homo sapien
ctaacataaacgtatttgggttcct

SEQ ID NO: 69052 - DNA, 25 bp, Homo sapien
ctaacataaacgaatttgggttcct

SEQ ID NO: 69053 - DNA, 25 bp, Homo sapien
ttctccttgacgaaggtggtccctt

SEQ ID NO: 69054 - DNA, 25 bp, Homo sapien
ttctccttgacgtaggtggtccctt

SEQ ID NO: 69055 - DNA, 25 bp, Homo sapien
tacttgactgtaagagggtttcgca

SEQ ID NO: 69056 - DNA, 25 bp, Homo sapien
tacttgactgtatgagggtttcgca

SEQ ID NO: 69057 - DNA, 25 bp, Homo sapien
gaatctgtgggggggagttcgcgtc

SEQ ID NO: 69058 - DNA, 25 bp, Homo sapien
gaatctgtggggcggagttcgcgtc

SEQ ID NO: 69059 - DNA, 25 bp, Homo sapien
ccaacctctggaggacgtcggtgtc

SEQ ID NO: 69060 - DNA, 25 bp, Homo sapien
ccaacctctggacgacgtcggtgtc

SEQ ID NO: 69061 - DNA, 25 bp, Homo sapien
ggccacgaaggtgctgtatctttgt

SEQ ID NO: 69062 - DNA, 25 bp, Homo sapien
ggccacgaaggtcctgtatctttgt

SEQ ID NO: 69063 - DNA, 25 bp, Homo sapien
acgacgatactgtttttatgtatac

SEQ ID NO: 69064 - DNA, 25 bp, Homo sapien
acgacgatactgattttatgtatac

SEQ ID NO: 69065 - DNA, 25 bp, Homo sapien
tttcagttctggatactgatgatac

SEQ ID NO: 69066 - DNA, 25 bp, Homo sapien
tttcagttctggttactgatgatac

SEQ ID NO: 69067 - DNA, 25 bp, Homo sapien
tgtgctgatccgtttacgttaaatg

SEQ ID NO: 69068 - DNA, 25 bp, Homo sapien
tgtgctgatccgattacgttaaatg

SEQ ID NO: 69069 - DNA, 25 bp, Homo sapien
ctatgtcccaggtttctcctcatcg

SEQ ID NO: 69070 - DNA, 25 bp, Homo sapien
ctatgtcccaggattctcctcatcg

SEQ ID NO: 69071 - DNA, 25 bp, Homo sapien
tgacctcagtagaatccctccgacg

SEQ ID NO: 69072 - DNA, 25 bp, Homo sapien
tgacctcagtagtatccctccgacg

SEQ ID NO: 69073 - DNA, 25 bp, Homo sapien
aaggacaccgagaagaccccgggtc

SEQ ID NO: 69074 - DNA, 25 bp, Homo sapien
aaggacaccgagtagaccccgggtc

SEQ ID NO: 69075 - DNA, 25 bp, Homo sapien
tgacaggataccatgaacccctggc

SEQ ID NO: 69076 - DNA, 25 bp, Homo sapien
tgacaggataccttgaacccctggc

SEQ ID NO: 69077 - DNA, 25 bp, Homo sapien
agtacttgattaaccgacgtaggac

SEQ ID NO: 69078 - DNA, 25 bp, Homo sapien
agtacttgattatccgacgtaggac

SEQ ID NO: 69079 - DNA, 25 bp, Homo sapien
gtatttctgactttcttcggatact

SEQ ID NO: 69080 - DNA, 25 bp, Homo sapien
gtatttctgactatcttcggatact

SEQ ID NO: 69081 - DNA, 25 bp, Homo sapien
agatgtattggaacattccgaagtc

SEQ ID NO: 69082 - DNA, 25 bp, Homo sapien
agatgtattggatcattccgaagtc

SEQ ID NO: 69083 - DNA, 25 bp, Homo sapien
cgtttggtggttcatcttagaactc

SEQ ID NO: 69084 - DNA, 25 bp, Homo sapien
cgtttggtggttgatcttagaactc

SEQ ID NO: 69085 - DNA, 25 bp, Homo sapien
cttttagagaattgagccgagactg

SEQ ID NO: 69086 - DNA, 25 bp, Homo sapien
cttttagagaatagagccgagactg

SEQ ID NO: 69087 - DNA, 25 bp, Homo sapien
tgtagtcagttatatgaccctctcg

SEQ ID NO: 69088 - DNA, 25 bp, Homo sapien
tgtagtcagttaaatgaccctctcg

SEQ ID NO: 69089 - DNA, 25 bp, Homo sapien
tgactcagacggtgtctcccgctac

SEQ ID NO: 69090 - DNA, 25 bp, Homo sapien
tgactcagacggagtctcccgctac

SEQ ID NO: 69091 - DNA, 25 bp, Homo sapien
tcacgactagaatcgtacgaagcta

SEQ ID NO: 69092 - DNA, 25 bp, Homo sapien
tcacgactagaaacgtacgaagcta

SEQ ID NO: 69093 - DNA, 25 bp, Homo sapien
ctagaaccagagtttctccgccttt

SEQ ID NO: 69094 - DNA, 25 bp, Homo sapien
ctagaaccagagattctccgccttt

SEQ ID NO: 69095 - DNA, 25 bp, Homo sapien
agaaccacgagtttcgtttcctcta

SEQ ID NO: 69096 - DNA, 25 bp, Homo sapien
agaaccacgagtatcgtttcctcta

SEQ ID NO: 69097 - DNA, 25 bp, Homo sapien
gaccaccgtcgtgacttccgtctga

SEQ ID NO: 69098 - DNA, 25 bp, Homo sapien
gaccaccgtcgtcacttccgtctga

SEQ ID NO: 69099 - DNA, 25 bp, Homo sapien
aggtcctactagtccctgactcctg

SEQ ID NO: 69100 - DNA, 25 bp, Homo sapien
aggtcctactagaccctgactcctg

SEQ ID NO: 69101 - DNA, 25 bp, Homo sapien
ggtactcgcaccagtagcagtcgtg

SEQ ID NO: 69102 - DNA, 25 bp, Homo sapien
ggtactcgcacctgtagcagtcgtg

SEQ ID NO: 69103 - DNA, 25 bp, Homo sapien
tcggacgggtccgaccctagaggga

SEQ ID NO: 69104 - DNA, 25 bp, Homo sapien
tcggacgggtcccaccctagaggga

SEQ ID NO: 69105 - DNA, 25 bp, Homo sapien
tgtaccccttgttcgcaccgaagac

SEQ ID NO: 69106 - DNA, 25 bp, Homo sapien
tgtaccccttgtacgcaccgaagac

SEQ ID NO: 69107 - DNA, 25 bp, Homo sapien
ttcgcaccctttggtgtccgacaac

SEQ ID NO: 69108 - DNA, 25 bp, Homo sapien
ttcgcaccctttcgtgtccgacaac

SEQ ID NO: 69109 - DNA, 25 bp, Homo sapien
cgcatcgtctgtttttatctactgc

SEQ ID NO: 69110 - DNA, 25 bp, Homo sapien
cgcatcgtctgtatttatctactgc

SEQ ID NO: 69111 - DNA, 25 bp, Homo sapien
tgtaccatggtgttatttccttaga

SEQ ID NO: 69112 - DNA, 25 bp, Homo sapien
tgtaccatggtgatatttccttaga

SEQ ID NO: 69113 - DNA, 25 bp, Homo sapien
cccgatcactcgacgagtttgtaaa

SEQ ID NO: 69114 - DNA, 25 bp, Homo sapien
cccgatcactcgtcgagtttgtaaa

SEQ ID NO: 69115 - DNA, 25 bp, Homo sapien
ccgaagaactcgaagagcttcaaga

SEQ ID NO: 69116 - DNA, 25 bp, Homo sapien
ccgaagaactcgtagagcttcaaga

SEQ ID NO: 69117 - DNA, 25 bp, Homo sapien
tagtgctacagcaactcgttcaaat

SEQ ID NO: 69118 - DNA, 25 bp, Homo sapien
tagtgctacagctactcgttcaaat

SEQ ID NO: 69119 - DNA, 25 bp, Homo sapien
ccagttctggtcaatctctatcaag

SEQ ID NO: 69120 - DNA, 25 bp, Homo sapien
ccagttctggtctatctctatcaag

SEQ ID NO: 69121 - DNA, 25 bp, Homo sapien
tctgtgtccggtcttctctctccat

SEQ ID NO: 69122 - DNA, 25 bp, Homo sapien
tctgtgtccggtgttctctctccat

SEQ ID NO: 69123 - DNA, 25 bp, Homo sapien
ggtttcgttccgtgattacttcccc

SEQ ID NO: 69124 - DNA, 25 bp, Homo sapien
ggtttcgttccgagattacttcccc

SEQ ID NO: 69125 - DNA, 25 bp, Homo sapien
gttccgagtaattatacgtctccat

SEQ ID NO: 69126 - DNA, 25 bp, Homo sapien
gttccgagtaataatacgtctccat

SEQ ID NO: 69127 - DNA, 25 bp, Homo sapien
cgggcccggtaacgtcgagtcccga

SEQ ID NO: 69128 - DNA, 25 bp, Homo sapien
cgggcccggtaaggtcgagtcccga

SEQ ID NO: 69129 - DNA, 25 bp, Homo sapien
gccacccgtgaatgtcttcccgtag

SEQ ID NO: 69130 - DNA, 25 bp, Homo sapien
gccacccgtgaaagtcttcccgtag

SEQ ID NO: 69131 - DNA, 25 bp, Homo sapien
ccgacccaggacaggtttccgactg

SEQ ID NO: 69132 - DNA, 25 bp, Homo sapien
ccgacccaggactggtttccgactg

SEQ ID NO: 69133 - DNA, 25 bp, Homo sapien
aagagtaggtgttagagtgtccacc

SEQ ID NO: 69134 - DNA, 25 bp, Homo sapien
aagagtaggtgtaagagtgtccacc

SEQ ID NO: 69135 - DNA, 25 bp, Homo sapien
aaagtatcgtgttctagtttttctc

SEQ ID NO: 69136 - DNA, 25 bp, Homo sapien
aaagtatcgtgtactagtttttctc

SEQ ID NO: 69137 - DNA, 25 bp, Homo sapien
ctgtagacgagaacggtttcggtcc

SEQ ID NO: 69138 - DNA, 25 bp, Homo sapien
ctgtagacgagatcggtttcggtcc

SEQ ID NO: 69139 - DNA, 25 bp, Homo sapien
tctgcgaacgagaaacccccgggac

SEQ ID NO: 69140 - DNA, 25 bp, Homo sapien
tctgcgaacgagtaacccccgggac

SEQ ID NO: 69141 - DNA, 25 bp, Homo sapien
tcgtcccgtggtcgtccggcgtccc

SEQ ID NO: 69142 - DNA, 25 bp, Homo sapien
tcgtcccgtggtggtccggcgtccc

SEQ ID NO: 69143 - DNA, 25 bp, Homo sapien
agtgtgtccgacgccgggctcgccg

SEQ ID NO: 69144 - DNA, 25 bp, Homo sapien
agtgtgtccgaccccgggctcgccg

SEQ ID NO: 69145 - DNA, 25 bp, Homo sapien
gatttgtggaagagacaggacccgt

SEQ ID NO: 69146 - DNA, 25 bp, Homo sapien
gatttgtggaagtgacaggacccgt

SEQ ID NO: 69147 - DNA, 25 bp, Homo sapien
ggtaccttttcacgtaaatgttata

SEQ ID NO: 69148 - DNA, 25 bp, Homo sapien
ggtaccttttcaggtaaatgttata

SEQ ID NO: 69149 - DNA, 25 bp, Homo sapien
ccgccagagaccagaggaatttcta

SEQ ID NO: 69150 - DNA, 25 bp, Homo sapien
ccgccagagacctgaggaatttcta

SEQ ID NO: 69151 - DNA, 25 bp, Homo sapien
ctgtccttggcgacgatacatttca

SEQ ID NO: 69152 - DNA, 25 bp, Homo sapien
ctgtccttggcgtcgatacatttca

SEQ ID NO: 69153 - DNA, 25 bp, Homo sapien
ttcctattgtccataaacattgtaa

SEQ ID NO: 69154 - DNA, 25 bp, Homo sapien
ttcctattgtccttaaacattgtaa

SEQ ID NO: 69155 - DNA, 25 bp, Homo sapien
tgcatagggtttgacacacaatgga

SEQ ID NO: 69156 - DNA, 25 bp, Homo sapien
tgcatagggtttcacacacaatgga

SEQ ID NO: 69157 - DNA, 25 bp, Homo sapien
taagtggtgttcagacgaaaccgaa

SEQ ID NO: 69158 - DNA, 25 bp, Homo sapien
taagtggtgttctgacgaaaccgaa

SEQ ID NO: 69159 - DNA, 25 bp, Homo sapien
cttttgtcctgctttccgtacgtac

SEQ ID NO: 69160 - DNA, 25 bp, Homo sapien
cttttgtcctgcattccgtacgtac

SEQ ID NO: 69161 - DNA, 25 bp, Homo sapien
tgtatctgtcttgaagttacatctt

SEQ ID NO: 69162 - DNA, 25 bp, Homo sapien
tgtatctgtcttcaagttacatctt

SEQ ID NO: 69163 - DNA, 25 bp, Homo sapien
aataaagtacgttgcctaactcctc

SEQ ID NO: 69164 - DNA, 25 bp, Homo sapien
aataaagtacgtagcctaactcctc

SEQ ID NO: 69165 - DNA, 25 bp, Homo sapien
acaccaccagagtccctgagtctga

SEQ ID NO: 69166 - DNA, 25 bp, Homo sapien
acaccaccagagaccctgagtctga

SEQ ID NO: 69167 - DNA, 25 bp, Homo sapien
ttaccaaacgaaacctgacatgaag

SEQ ID NO: 69168 - DNA, 25 bp, Homo sapien
ttaccaaacgaatcctgacatgaag

SEQ ID NO: 69169 - DNA, 25 bp, Homo sapien
ccgactgtcgagaacctgaatataa

SEQ ID NO: 69170 - DNA, 25 bp, Homo sapien
ccgactgtcgagtacctgaatataa

SEQ ID NO: 69171 - DNA, 25 bp, Homo sapien
ggtcctgtcacttctcagggtcccg

SEQ ID NO: 69172 - DNA, 25 bp, Homo sapien
ggtcctgtcactactcagggtcccg

SEQ ID NO: 69173 - DNA, 25 bp, Homo sapien
ggacaccttcctacgttgggtgctc

SEQ ID NO: 69174 - DNA, 25 bp, Homo sapien
ggacaccttccttcgttgggtgctc

SEQ ID NO: 69175 - DNA, 25 bp, Homo sapien
tacatgtatatacttagtgattctc

SEQ ID NO: 69176 - DNA, 25 bp, Homo sapien
tacatgtatatagttagtgattctc

SEQ ID NO: 69177 - DNA, 25 bp, Homo sapien
tgagtgtcgagtctccgtccttctg

SEQ ID NO: 69178 - DNA, 25 bp, Homo sapien
tgagtgtcgagtgtccgtccttctg

SEQ ID NO: 69179 - DNA, 25 bp, Homo sapien
atgacgatgactgctcgagtatctg

SEQ ID NO: 69180 - DNA, 25 bp, Homo sapien
atgacgatgactcctcgagtatctg

SEQ ID NO: 69181 - DNA, 25 bp, Homo sapien
aatctttaggacgaaaccgaacttg

SEQ ID NO: 69182 - DNA, 25 bp, Homo sapien
aatctttaggaccaaaccgaacttg

SEQ ID NO: 69183 - DNA, 25 bp, Homo sapien
aaagtaaaagatcataggcaacttc

SEQ ID NO: 69184 - DNA, 25 bp, Homo sapien
aaagtaaaagatgataggcaacttc

SEQ ID NO: 69185 - DNA, 25 bp, Homo sapien
aaggataggaattagtgcaacctac

SEQ ID NO: 69186 - DNA, 25 bp, Homo sapien
aaggataggaataagtgcaacctac

SEQ ID NO: 69187 - DNA, 25 bp, Homo sapien
agtttatgactcttttcgagaccgg

SEQ ID NO: 69188 - DNA, 25 bp, Homo sapien
agtttatgactcatttcgagaccgg

SEQ ID NO: 69189 - DNA, 25 bp, Homo sapien
aggaattttacctttgtcataacga

SEQ ID NO: 69190 - DNA, 25 bp, Homo sapien
aggaattttaccattgtcataacga

SEQ ID NO: 69191 - DNA, 25 bp, Homo sapien
aaggtaatttgtaccttccttattg

SEQ ID NO: 69192 - DNA, 25 bp, Homo sapien
aaggtaatttgttccttccttattg

SEQ ID NO: 69193 - DNA, 25 bp, Homo sapien
gattttgtctctcatcagtttgact

SEQ ID NO: 69194 - DNA, 25 bp, Homo sapien
gattttgtctctgatcagtttgact

SEQ ID NO: 69195 - DNA, 25 bp, Homo sapien
tgattatcttcgtacgaattccccg

SEQ ID NO: 69196 - DNA, 25 bp, Homo sapien
tgattatcttcgaacgaattccccg

SEQ ID NO: 69197 - DNA, 25 bp, Homo sapien
gttacttttattacgggggccacta

SEQ ID NO: 69198 - DNA, 25 bp, Homo sapien
gttacttttatttcgggggccacta

SEQ ID NO: 69199 - DNA, 25 bp, Homo sapien
ccgtcgatttatgtttgacccctaa

SEQ ID NO: 69200 - DNA, 25 bp, Homo sapien
ccgtcgatttatctttgacccctaa

SEQ ID NO: 69201 - DNA, 25 bp, Homo sapien
ttgggttatacatatcccgactcca

SEQ ID NO: 69202 - DNA, 25 bp, Homo sapien
ttgggttatacaaatcccgactcca

SEQ ID NO: 69203 - DNA, 25 bp, Homo sapien
ttggtcctaaggttcgcggcaccgg

SEQ ID NO: 69204 - DNA, 25 bp, Homo sapien
ttggtcctaaggatcgcggcaccgg

SEQ ID NO: 69205 - DNA, 25 bp, Homo sapien
ccggagacccggtcccgtcagtggt

SEQ ID NO: 69206 - DNA, 25 bp, Homo sapien
ccggagacccggacccgtcagtggt

SEQ ID NO: 69207 - DNA, 25 bp, Homo sapien
gaaactaccgaggacgagttacccg

SEQ ID NO: 69208 - DNA, 25 bp, Homo sapien
gaaactaccgagcacgagttacccg

SEQ ID NO: 69209 - DNA, 25 bp, Homo sapien
acagaatcgtctatcgagttaaggt

SEQ ID NO: 69210 - DNA, 25 bp, Homo sapien
acagaatcgtctttcgagttaaggt

SEQ ID NO: 69211 - DNA, 25 bp, Homo sapien
taaaggactcgtttatcacggaaga

SEQ ID NO: 69212 - DNA, 25 bp, Homo sapien
taaaggactcgtatatcacggaaga

SEQ ID NO: 69213 - DNA, 25 bp, Homo sapien
tccgaggctcgagacggaccgcctg

SEQ ID NO: 69214 - DNA, 25 bp, Homo sapien
tccgaggctcgacacggaccgcctg

SEQ ID NO: 69215 - DNA, 25 bp, Homo sapien
gcgagggcccacacgtctgcgaaca

SEQ ID NO: 69216 - DNA, 25 bp, Homo sapien
gcgagggcccactcgtctgcgaaca

SEQ ID NO: 69217 - DNA, 25 bp, Homo sapien
ctggggtcccgcttgtccggacaag

SEQ ID NO: 69218 - DNA, 25 bp, Homo sapien
ctggggtcccgcatgtccggacaag

SEQ ID NO: 69219 - DNA, 25 bp, Homo sapien
gacgtcgacactaggtgcttcagag

SEQ ID NO: 69220 - DNA, 25 bp, Homo sapien
gacgtcgacacttggtgcttcagag

SEQ ID NO: 69221 - DNA, 25 bp, Homo sapien
gtttcggaccctgtcgaccacacga

SEQ ID NO: 69222 - DNA, 25 bp, Homo sapien
gtttcggaccctctcgaccacacga

SEQ ID NO: 69223 - DNA, 25 bp, Homo sapien
aggacctccattttggtcacaggag

SEQ ID NO: 69224 - DNA, 25 bp, Homo sapien
aggacctccattatggtcacaggag

SEQ ID NO: 69225 - DNA, 25 bp, Homo sapien
ttaccacatatctaccggtttatgg

SEQ ID NO: 69226 - DNA, 25 bp, Homo sapien
ttaccacatatcaaccggtttatgg

SEQ ID NO: 69227 - DNA, 25 bp, Homo sapien
ttcaattttagtcgacctctgtgtg

SEQ ID NO: 69228 - DNA, 25 bp, Homo sapien
ttcaattttagtggacctctgtgtg

SEQ ID NO: 69229 - DNA, 25 bp, Homo sapien
ccaacttttccgacgtctttagacg

SEQ ID NO: 69230 - DNA, 25 bp, Homo sapien
ccaacttttccgtcgtctttagacg

SEQ ID NO: 69231 - DNA, 25 bp, Homo sapien
tacaggactttgctgaaggttcata

SEQ ID NO: 69232 - DNA, 25 bp, Homo sapien
tacaggactttggtgaaggttcata

SEQ ID NO: 69233 - DNA, 25 bp, Homo sapien
gtttgggaccttatgaatttcttcg

SEQ ID NO: 69234 - DNA, 25 bp, Homo sapien
gtttgggaccttttgaatttcttcg

SEQ ID NO: 69235 - DNA, 25 bp, Homo sapien
catgtgactgttgctccattttctt

SEQ ID NO: 69236 - DNA, 25 bp, Homo sapien
catgtgactgttcctccattttctt

SEQ ID NO: 69237 - DNA, 25 bp, Homo sapien
caatttatgaagtacgatccatctg

SEQ ID NO: 69238 - DNA, 25 bp, Homo sapien
caatttatgaagaacgatccatctg

SEQ ID NO: 69239 - DNA, 25 bp, Homo sapien
accaatgattttcgagtcaacattg

SEQ ID NO: 69240 - DNA, 25 bp, Homo sapien
accaatgattttggagtcaacattg

SEQ ID NO: 69241 - DNA, 25 bp, Homo sapien
cttagtggacactagtactatagtt

SEQ ID NO: 69242 - DNA, 25 bp, Homo sapien
cttagtggacacaagtactatagtt

SEQ ID NO: 69243 - DNA, 25 bp, Homo sapien
gtgtcgtttccgtgaagtcttagag

SEQ ID NO: 69244 - DNA, 25 bp, Homo sapien
gtgtcgtttccgagaagtcttagag

SEQ ID NO: 69245 - DNA, 25 bp, Homo sapien
taagccctacacgaaagtcaccacg

SEQ ID NO: 69246 - DNA, 25 bp, Homo sapien
taagccctacaccaaagtcaccacg

SEQ ID NO: 69247 - DNA, 25 bp, Homo sapien
attggactctaaaaagatcctctag

SEQ ID NO: 69248 - DNA, 25 bp, Homo sapien
attggactctaataagatcctctag

SEQ ID NO: 69249 - DNA, 25 bp, Homo sapien
accatgatgatgatggtcattactg

SEQ ID NO: 69250 - DNA, 25 bp, Homo sapien
accatgatgatgttggtcattactg

SEQ ID NO: 69251 - DNA, 25 bp, Homo sapien
gtacacaggttttctgttaatcttt

SEQ ID NO: 69252 - DNA, 25 bp, Homo sapien
gtacacaggtttactgttaatcttt

SEQ ID NO: 69253 - DNA, 25 bp, Homo sapien
agacaaatgtctacggtgaatcaat

SEQ ID NO: 69254 - DNA, 25 bp, Homo sapien
agacaaatgtcttcggtgaatcaat

SEQ ID NO: 69255 - DNA, 25 bp, Homo sapien
aagtcctagttctggagaccgttta

SEQ ID NO: 69256 - DNA, 25 bp, Homo sapien
aagtcctagttcaggagaccgttta

SEQ ID NO: 69257 - DNA, 25 bp, Homo sapien
ggtccgaagatgaacgatcaggttc

SEQ ID NO: 69258 - DNA, 25 bp, Homo sapien
ggtccgaagatgtacgatcaggttc

SEQ ID NO: 69259 - DNA, 25 bp, Homo sapien
acgacacgagtaatgtcttagtttg

SEQ ID NO: 69260 - DNA, 25 bp, Homo sapien
acgacacgagtattgtcttagtttg

SEQ ID NO: 69261 - DNA, 25 bp, Homo sapien
ccgagtcataattatgactgtcatc

SEQ ID NO: 69262 - DNA, 25 bp, Homo sapien
ccgagtcataataatgactgtcatc

SEQ ID NO: 69263 - DNA, 25 bp, Homo sapien
gtgtcactgactaagggtcgcgatc

SEQ ID NO: 69264 - DNA, 25 bp, Homo sapien
gtgtcactgacttagggtcgcgatc

SEQ ID NO: 69265 - DNA, 25 bp, Homo sapien
acacctctccggtaaggcaactcgt

SEQ ID NO: 69266 - DNA, 25 bp, Homo sapien
acacctctccggaaaggcaactcgt

SEQ ID NO: 69267 - DNA, 25 bp, Homo sapien
taactatcaatggagacatacatgt

SEQ ID NO: 69268 - DNA, 25 bp, Homo sapien
taactatcaatgcagacatacatgt

SEQ ID NO: 69269 - DNA, 25 bp, Homo sapien
tacatgataaagtagtacggtcatc

SEQ ID NO: 69270 - DNA, 25 bp, Homo sapien
tacatgataaagaagtacggtcatc

SEQ ID NO: 69271 - DNA, 25 bp, Homo sapien
tatctgttggggtccgaactttccc

SEQ ID NO: 69272 - DNA, 25 bp, Homo sapien
tatctgttggggaccgaactttccc

SEQ ID NO: 69273 - DNA, 25 bp, Homo sapien
tctgttggtaaaatcgattttcttc

SEQ ID NO: 69274 - DNA, 25 bp, Homo sapien
tctgttggtaaattcgattttcttc

SEQ ID NO: 69275 - DNA, 25 bp, Homo sapien
tcttgtcaatcaggaatgttctttc

SEQ ID NO: 69276 - DNA, 25 bp, Homo sapien
tcttgtcaatcacgaatgttctttc

SEQ ID NO: 69277 - DNA, 25 bp, Homo sapien
gtgttttacatcagaccgtcttttc

SEQ ID NO: 69278 - DNA, 25 bp, Homo sapien
gtgttttacatctgaccgtcttttc

SEQ ID NO: 69279 - DNA, 25 bp, Homo sapien
gtgtgttataatggtcagtcctttc

SEQ ID NO: 69280 - DNA, 25 bp, Homo sapien
gtgtgttataatcgtcagtcctttc

SEQ ID NO: 69281 - DNA, 25 bp, Homo sapien
tgggttatctgttccttgggtctct

SEQ ID NO: 69282 - DNA, 25 bp, Homo sapien
tgggttatctgtaccttgggtctct

SEQ ID NO: 69283 - DNA, 25 bp, Homo sapien
aggtacgtttctctcttgctatctt

SEQ ID NO: 69284 - DNA, 25 bp, Homo sapien
aggtacgtttctgtcttgctatctt

SEQ ID NO: 69285 - DNA, 25 bp, Homo sapien
atgttttaatctatattgcctacgg

SEQ ID NO: 69286 - DNA, 25 bp, Homo sapien
atgttttaatctttattgcctacgg

SEQ ID NO: 69287 - DNA, 25 bp, Homo sapien
cgcctctcttctggtaacctcgact

SEQ ID NO: 69288 - DNA, 25 bp, Homo sapien
cgcctctcttctcgtaacctcgact

SEQ ID NO: 69289 - DNA, 25 bp, Homo sapien
gtcggacctttgtccagacgctaga

SEQ ID NO: 69290 - DNA, 25 bp, Homo sapien
gtcggacctttgaccagacgctaga

SEQ ID NO: 69291 - DNA, 25 bp, Homo sapien
ataattctttaggactgaaccagta

SEQ ID NO: 69292 - DNA, 25 bp, Homo sapien
ataattctttagcactgaaccagta

SEQ ID NO: 69293 - DNA, 25 bp, Homo sapien
ggaagagtccatctcgggagactga

SEQ ID NO: 69294 - DNA, 25 bp, Homo sapien
ggaagagtccatgtcgggagactga

SEQ ID NO: 69295 - DNA, 25 bp, Homo sapien
tgtccctacctttctttaaggaaga

SEQ ID NO: 69296 - DNA, 25 bp, Homo sapien
tgtccctaccttactttaaggaaga

SEQ ID NO: 69297 - DNA, 25 bp, Homo sapien
cccttcaccgtcttcgacgagagag

SEQ ID NO: 69298 - DNA, 25 bp, Homo sapien
cccttcaccgtcatcgacgagagag

SEQ ID NO: 69299 - DNA, 25 bp, Homo sapien
ctcatgacgaccagtgcgtacaggt

SEQ ID NO: 69300 - DNA, 25 bp, Homo sapien
ctcatgacgacctgtgcgtacaggt

SEQ ID NO: 69301 - DNA, 25 bp, Homo sapien
acctatagcctctgctcagtactct

SEQ ID NO: 69302 - DNA, 25 bp, Homo sapien
acctatagcctcagctcagtactct

SEQ ID NO: 69303 - DNA, 25 bp, Homo sapien
cactggtagccctactagacgaact

SEQ ID NO: 69304 - DNA, 25 bp, Homo sapien
cactggtagcccaactagacgaact

SEQ ID NO: 69305 - DNA, 25 bp, Homo sapien
agtcccgtctgaactgcaggtagaa

SEQ ID NO: 69306 - DNA, 25 bp, Homo sapien
agtcccgtctgatctgcaggtagaa

SEQ ID NO: 69307 - DNA, 25 bp, Homo sapien
tctgcgtgtttttcgagtgtaacat

SEQ ID NO: 69308 - DNA, 25 bp, Homo sapien
tctgcgtgttttacgagtgtaacat

SEQ ID NO: 69309 - DNA, 25 bp, Homo sapien
caccaaagttgttttcgtataattt

SEQ ID NO: 69310 - DNA, 25 bp, Homo sapien
caccaaagttgtattcgtataattt

SEQ ID NO: 69311 - DNA, 25 bp, Homo sapien
atagtagtcttggttcgacgtcaaa

SEQ ID NO: 69312 - DNA, 25 bp, Homo sapien
atagtagtcttgcttcgacgtcaaa

SEQ ID NO: 69313 - DNA, 25 bp, Homo sapien
ggtcctggtcttctccctcgataag

SEQ ID NO: 69314 - DNA, 25 bp, Homo sapien
ggtcctggtcttgtccctcgataag

SEQ ID NO: 69315 - DNA, 25 bp, Homo sapien
gtccgtttggcgtcatcactcgaaa

SEQ ID NO: 69316 - DNA, 25 bp, Homo sapien
gtccgtttggcgacatcactcgaaa

SEQ ID NO: 69317 - DNA, 25 bp, Homo sapien
cgactttgtcggaccgtcagggatc

SEQ ID NO: 69318 - DNA, 25 bp, Homo sapien
cgactttgtcggtccgtcagggatc

SEQ ID NO: 69319 - DNA, 25 bp, Homo sapien
actaagtgtcactggtccccgtttc

SEQ ID NO: 69320 - DNA, 25 bp, Homo sapien
actaagtgtcacaggtccccgtttc

SEQ ID NO: 69321 - DNA, 25 bp, Homo sapien
cctatgctcttacgcagtccggacc

SEQ ID NO: 69322 - DNA, 25 bp, Homo sapien
cctatgctcttaggcagtccggacc

SEQ ID NO: 69323 - DNA, 25 bp, Homo sapien
cctcatagtttgatcctaacaatca

SEQ ID NO: 69324 - DNA, 25 bp, Homo sapien
cctcatagtttgttcctaacaatca

SEQ ID NO: 69325 - DNA, 25 bp, Homo sapien
cgatcatcttcctcatgaccaagag

SEQ ID NO: 69326 - DNA, 25 bp, Homo sapien
cgatcatcttccacatgaccaagag

SEQ ID NO: 69327 - DNA, 25 bp, Homo sapien
ggtcttcttcaccacatggtgaaat

SEQ ID NO: 69328 - DNA, 25 bp, Homo sapien
ggtcttcttcacgacatggtgaaat

SEQ ID NO: 69329 - DNA, 25 bp, Homo sapien
cgtttgtcaccgtgtgtgtccgaat

SEQ ID NO: 69330 - DNA, 25 bp, Homo sapien
cgtttgtcaccgagtgtgtccgaat

SEQ ID NO: 69331 - DNA, 25 bp, Homo sapien
ggtctttatgcgttctctccactat

SEQ ID NO: 69332 - DNA, 25 bp, Homo sapien
ggtctttatgcgatctctccactat

SEQ ID NO: 69333 - DNA, 25 bp, Homo sapien
agaggtttataaaccgttctaacta

SEQ ID NO: 69334 - DNA, 25 bp, Homo sapien
agaggtttataatccgttctaacta

SEQ ID NO: 69335 - DNA, 25 bp, Homo sapien
aaggttaaggacttcgacactgtaa

SEQ ID NO: 69336 - DNA, 25 bp, Homo sapien
aaggttaaggacatcgacactgtaa

SEQ ID NO: 69337 - DNA, 25 bp, Homo sapien
gagaacttcggtgacatgacgggaa

SEQ ID NO: 69338 - DNA, 25 bp, Homo sapien
gagaacttcggtcacatgacgggaa

SEQ ID NO: 69339 - DNA, 25 bp, Homo sapien
gacagtcctgtcgatgacggtgtaa

SEQ ID NO: 69340 - DNA, 25 bp, Homo sapien
gacagtcctgtccatgacggtgtaa

SEQ ID NO: 69341 - DNA, 25 bp, Homo sapien
tctacaggaatgatcactgtgtaag

SEQ ID NO: 69342 - DNA, 25 bp, Homo sapien
tctacaggaatgttcactgtgtaag

SEQ ID NO: 69343 - DNA, 25 bp, Homo sapien
gaccgaaggtacgtcgacttttttc

SEQ ID NO: 69344 - DNA, 25 bp, Homo sapien
gaccgaaggtacctcgacttttttc

SEQ ID NO: 69345 - DNA, 25 bp, Homo sapien
cggggtagtaataaatctcttatct

SEQ ID NO: 69346 - DNA, 25 bp, Homo sapien
cggggtagtaattaatctcttatct

SEQ ID NO: 69347 - DNA, 25 bp, Homo sapien
gtgcatcgtttcctcatcctttacg

SEQ ID NO: 69348 - DNA, 25 bp, Homo sapien
gtgcatcgtttcgtcatcctttacg

SEQ ID NO: 69349 - DNA, 25 bp, Homo sapien
tcaatagtgtctttttctcgtacaa

SEQ ID NO: 69350 - DNA, 25 bp, Homo sapien
tcaatagtgtctatttctcgtacaa

SEQ ID NO: 69351 - DNA, 25 bp, Homo sapien
cgagagaagattttgcgtgtcacct

SEQ ID NO: 69352 - DNA, 25 bp, Homo sapien
cgagagaagattatgcgtgtcacct

SEQ ID NO: 69353 - DNA, 25 bp, Homo sapien
atcactatagttatgtcgtctccac

SEQ ID NO: 69354 - DNA, 25 bp, Homo sapien
atcactatagttttgtcgtctccac

SEQ ID NO: 69355 - DNA, 25 bp, Homo sapien
ctatctaggattcatgtacgttaat

SEQ ID NO: 69356 - DNA, 25 bp, Homo sapien
ctatctaggattgatgtacgttaat

SEQ ID NO: 69357 - DNA, 25 bp, Homo sapien
tgtaaagtatattgtaccggtcttc

SEQ ID NO: 69358 - DNA, 25 bp, Homo sapien
tgtaaagtatatagtaccggtcttc

SEQ ID NO: 69359 - DNA, 25 bp, Homo sapien
taggacggtatggagcacgagtttc

SEQ ID NO: 69360 - DNA, 25 bp, Homo sapien
taggacggtatgcagcacgagtttc

SEQ ID NO: 69361 - DNA, 25 bp, Homo sapien
gatccaccggtttacgtaacaattc

SEQ ID NO: 69362 - DNA, 25 bp, Homo sapien
gatccaccggttaacgtaacaattc

SEQ ID NO: 69363 - DNA, 25 bp, Homo sapien
agaagcctcctctgtaatcaatgtc

SEQ ID NO: 69364 - DNA, 25 bp, Homo sapien
agaagcctcctcagtaatcaatgtc

SEQ ID NO: 69365 - DNA, 25 bp, Homo sapien
tggcacgctcgactaccagtgtgtc

SEQ ID NO: 69366 - DNA, 25 bp, Homo sapien
tggcacgctcgagtaccagtgtgtc

SEQ ID NO: 69367 - DNA, 25 bp, Homo sapien
gtgcgccaggcgtccaaacgggtcc

SEQ ID NO: 69368 - DNA, 25 bp, Homo sapien
gtgcgccaggcgaccaaacgggtcc

SEQ ID NO: 69369 - DNA, 25 bp, Homo sapien
cggagtagcccgtcagccggagcat

SEQ ID NO: 69370 - DNA, 25 bp, Homo sapien
cggagtagcccgacagccggagcat

SEQ ID NO: 69371 - DNA, 25 bp, Homo sapien
atggatctcgcctcggatttctacg

SEQ ID NO: 69372 - DNA, 25 bp, Homo sapien
atggatctcgccacggatttctacg

SEQ ID NO: 69373 - DNA, 25 bp, Homo sapien
atgaacccggacaccatcttgtacg

SEQ ID NO: 69374 - DNA, 25 bp, Homo sapien
atgaacccggactccatcttgtacg

SEQ ID NO: 69375 - DNA, 25 bp, Homo sapien
gggacccctgaatccactcttcgta

SEQ ID NO: 69376 - DNA, 25 bp, Homo sapien
gggacccctgaaaccactcttcgta

SEQ ID NO: 69377 - DNA, 25 bp, Homo sapien
tcggaccctctgcagcaatttacta

SEQ ID NO: 69378 - DNA, 25 bp, Homo sapien
tcggaccctctggagcaatttacta

SEQ ID NO: 69379 - DNA, 25 bp, Homo sapien
ggttggtaatatcattcacctcttc

SEQ ID NO: 69380 - DNA, 25 bp, Homo sapien
ggttggtaatatgattcacctcttc

SEQ ID NO: 69381 - DNA, 25 bp, Homo sapien
aggtcgacgtccgacgacaacgcga

SEQ ID NO: 69382 - DNA, 25 bp, Homo sapien
aggtcgacgtcccacgacaacgcga

SEQ ID NO: 69383 - DNA, 25 bp, Homo sapien
cgcgaccgcaatgtcgcgttgtcgt

SEQ ID NO: 69384 - DNA, 25 bp, Homo sapien
cgcgaccgcaatctcgcgttgtcgt

SEQ ID NO: 69385 - DNA, 25 bp, Homo sapien
tatttgttcctcacaatggtaaaag

SEQ ID NO: 69386 - DNA, 25 bp, Homo sapien
tatttgttcctctcaatggtaaaag

SEQ ID NO: 69387 - DNA, 25 bp, Homo sapien
ttctacaaccacctagagtaaaagt

SEQ ID NO: 69388 - DNA, 25 bp, Homo sapien
ttctacaaccacgtagagtaaaagt

SEQ ID NO: 69389 - DNA, 25 bp, Homo sapien
gtataacaactactcgaggaatcgt

SEQ ID NO: 69390 - DNA, 25 bp, Homo sapien
gtataacaactagtcgaggaatcgt

SEQ ID NO: 69391 - DNA, 25 bp, Homo sapien
aatacatcgtgtgttgagacgtcgt

SEQ ID NO: 69392 - DNA, 25 bp, Homo sapien
aatacatcgtgtcttgagacgtcgt

SEQ ID NO: 69393 - DNA, 25 bp, Homo sapien
aatagatacattctttgtacgacag

SEQ ID NO: 69394 - DNA, 25 bp, Homo sapien
aatagatacattgtttgtacgacag

SEQ ID NO: 69395 - DNA, 25 bp, Homo sapien
ccgacacgttacaaccgttaaagac

SEQ ID NO: 69396 - DNA, 25 bp, Homo sapien
ccgacacgttactaccgttaaagac

SEQ ID NO: 69397 - DNA, 25 bp, Homo sapien
cgtctacttctttcgtatagaacga

SEQ ID NO: 69398 - DNA, 25 bp, Homo sapien
cgtctacttcttacgtatagaacga

SEQ ID NO: 69399 - DNA, 25 bp, Homo sapien
acccgtcggtgcacctgtcgagaga

SEQ ID NO: 69400 - DNA, 25 bp, Homo sapien
acccgtcggtgctcctgtcgagaga

SEQ ID NO: 69401 - DNA, 25 bp, Homo sapien
ggttcgtcactgagtctgtgtcaaa

SEQ ID NO: 69402 - DNA, 25 bp, Homo sapien
ggttcgtcactgtgtctgtgtcaaa

SEQ ID NO: 69403 - DNA, 25 bp, Homo sapien
taacattgtgtgtttacgacagaac

SEQ ID NO: 69404 - DNA, 25 bp, Homo sapien
taacattgtgtgattacgacagaac

SEQ ID NO: 69405 - DNA, 25 bp, Homo sapien
tcactatttgagatactgttctaga

SEQ ID NO: 69406 - DNA, 25 bp, Homo sapien
tcactatttgagttactgttctaga

SEQ ID NO: 69407 - DNA, 25 bp, Homo sapien
tgacagaagttgacaccgtaaacat

SEQ ID NO: 69408 - DNA, 25 bp, Homo sapien
tgacagaagttgtcaccgtaaacat

SEQ ID NO: 69409 - DNA, 25 bp, Homo sapien
aacatcatatagaccctgaacgagt

SEQ ID NO: 69410 - DNA, 25 bp, Homo sapien
aacatcatatagtccctgaacgagt

SEQ ID NO: 69411 - DNA, 25 bp, Homo sapien
cgacctcaagtctcccgaggtctgt

SEQ ID NO: 69412 - DNA, 25 bp, Homo sapien
cgacctcaagtcacccgaggtctgt

SEQ ID NO: 69413 - DNA, 25 bp, Homo sapien
gactacaaagttgacttgtaaccat

SEQ ID NO: 69414 - DNA, 25 bp, Homo sapien
gactacaaagttcacttgtaaccat

SEQ ID NO: 69415 - DNA, 25 bp, Homo sapien
atttcatgtcgcttacgagtcttgt

SEQ ID NO: 69416 - DNA, 25 bp, Homo sapien
atttcatgtcgcatacgagtcttgt

SEQ ID NO: 69417 - DNA, 25 bp, Homo sapien
aagtgagaagggattacgttctctc

SEQ ID NO: 69418 - DNA, 25 bp, Homo sapien
aagtgagaagggtttacgttctctc

SEQ ID NO: 69419 - DNA, 25 bp, Homo sapien
acccgagactgtagttttcacctag

SEQ ID NO: 69420 - DNA, 25 bp, Homo sapien
acccgagactgttgttttcacctag

SEQ ID NO: 69421 - DNA, 25 bp, Homo sapien
cctcctggaacgactaccggaggga

SEQ ID NO: 69422 - DNA, 25 bp, Homo sapien
cctcctggaacgtctaccggaggga

SEQ ID NO: 69423 - DNA, 25 bp, Homo sapien
ttagacatagtctgattgacgacaa

SEQ ID NO: 69424 - DNA, 25 bp, Homo sapien
ttagacatagtcagattgacgacaa

SEQ ID NO: 69425 - DNA, 25 bp, Homo sapien
tactagagttacagcttcaccagat

SEQ ID NO: 69426 - DNA, 25 bp, Homo sapien
tactagagttactgcttcaccagat

SEQ ID NO: 69427 - DNA, 25 bp, Homo sapien
tgtgtagagtcaatccactctactc

SEQ ID NO: 69428 - DNA, 25 bp, Homo sapien
tgtgtagagtcattccactctactc

SEQ ID NO: 69429 - DNA, 25 bp, Homo sapien
tgtaaatacacttaagtgtgtactc

SEQ ID NO: 69430 - DNA, 25 bp, Homo sapien
tgtaaatacactaaagtgtgtactc

SEQ ID NO: 69431 - DNA, 25 bp, Homo sapien
gtaggagaacatcataacgtcccct

SEQ ID NO: 69432 - DNA, 25 bp, Homo sapien
gtaggagaacatgataacgtcccct

SEQ ID NO: 69433 - DNA, 25 bp, Homo sapien
accgaggttgtagagagaggtcccc

SEQ ID NO: 69434 - DNA, 25 bp, Homo sapien
accgaggttgtacagagaggtcccc

SEQ ID NO: 69435 - DNA, 25 bp, Homo sapien
aacatacttttagtccggttcttcg

SEQ ID NO: 69436 - DNA, 25 bp, Homo sapien
aacatacttttactccggttcttcg

SEQ ID NO: 69437 - DNA, 25 bp, Homo sapien
ctagtactggtgttgactgtttctg

SEQ ID NO: 69438 - DNA, 25 bp, Homo sapien
ctagtactggtgatgactgtttctg

SEQ ID NO: 69439 - DNA, 25 bp, Homo sapien
aatttacgaagtgaggttgtttctg

SEQ ID NO: 69440 - DNA, 25 bp, Homo sapien
aatttacgaagtcaggttgtttctg

SEQ ID NO: 69441 - DNA, 25 bp, Homo sapien
ttaacgatagtctataagcctatag

SEQ ID NO: 69442 - DNA, 25 bp, Homo sapien
ttaacgatagtcaataagcctatag

SEQ ID NO: 69443 - DNA, 25 bp, Homo sapien
actaactcccaagaaagcgctacgg

SEQ ID NO: 69444 - DNA, 25 bp, Homo sapien
actaactcccaacaaagcgctacgg

SEQ ID NO: 69445 - DNA, 25 bp, Homo sapien
aaagacaggaacgagacagggcaca

SEQ ID NO: 69446 - DNA, 25 bp, Homo sapien
aaagacaggaaccagacagggcaca

SEQ ID NO: 69447 - DNA, 25 bp, Homo sapien
acctaggccgaacgacgacagactc

SEQ ID NO: 69448 - DNA, 25 bp, Homo sapien
acctaggccgaaggacgacagactc

SEQ ID NO: 69449 - DNA, 25 bp, Homo sapien
ggaactctcactgtgtctactgaca

SEQ ID NO: 69450 - DNA, 25 bp, Homo sapien
ggaactctcactctgtctactgaca

SEQ ID NO: 69451 - DNA, 25 bp, Homo sapien
gtttgtcatcgaacttttcttgtca

SEQ ID NO: 69452 - DNA, 25 bp, Homo sapien
gtttgtcatcgatcttttcttgtca

SEQ ID NO: 69453 - DNA, 25 bp, Homo sapien
aaatgtctctttgtactgtctcgta

SEQ ID NO: 69454 - DNA, 25 bp, Homo sapien
aaatgtctctttctactgtctcgta

SEQ ID NO: 69455 - DNA, 25 bp, Homo sapien
gggtctagttctacttccctcttcc

SEQ ID NO: 69456 - DNA, 25 bp, Homo sapien
gggtctagttcttcttccctcttcc

SEQ ID NO: 69457 - DNA, 25 bp, Homo sapien
tataggtttacttcgtccgctctgc

SEQ ID NO: 69458 - DNA, 25 bp, Homo sapien
tataggtttactacgtccgctctgc

SEQ ID NO: 69459 - DNA, 25 bp, Homo sapien
ctcttgtttgttcatccggacgagg

SEQ ID NO: 69460 - DNA, 25 bp, Homo sapien
ctcttgtttgttgatccggacgagg

SEQ ID NO: 69461 - DNA, 25 bp, Homo sapien
cccctttgttcgttcagttacgttt

SEQ ID NO: 69462 - DNA, 25 bp, Homo sapien
cccctttgttcgatcagttacgttt

SEQ ID NO: 69463 - DNA, 25 bp, Homo sapien
aaccaatggtttgaaacatacgatt

SEQ ID NO: 69464 - DNA, 25 bp, Homo sapien
aaccaatggtttcaaacatacgatt

SEQ ID NO: 69465 - DNA, 25 bp, Homo sapien
ttagtacactttagtctatgtcgtt

SEQ ID NO: 69466 - DNA, 25 bp, Homo sapien
ttagtacacttttgtctatgtcgtt

SEQ ID NO: 69467 - DNA, 25 bp, Homo sapien
atacactctggttcttataggtact

SEQ ID NO: 69468 - DNA, 25 bp, Homo sapien
atacactctggtacttataggtact

SEQ ID NO: 69469 - DNA, 25 bp, Homo sapien
gagactcaaaagtaggtaccgtctt

SEQ ID NO: 69470 - DNA, 25 bp, Homo sapien
gagactcaaaagaaggtaccgtctt

SEQ ID NO: 69471 - DNA, 25 bp, Homo sapien
gtgtctacttagagtcatctccttt

SEQ ID NO: 69472 - DNA, 25 bp, Homo sapien
gtgtctacttagtgtcatctccttt

SEQ ID NO: 69473 - DNA, 25 bp, Homo sapien
gtgtctacttagagtcatctccttt

SEQ ID NO: 69474 - DNA, 25 bp, Homo sapien
gtgtctacttagtgtcatctccttt

SEQ ID NO: 69475 - DNA, 25 bp, Homo sapien
ggtctataagaccttacctttatcg

SEQ ID NO: 69476 - DNA, 25 bp, Homo sapien
ggtctataagacgttacctttatcg

SEQ ID NO: 69477 - DNA, 25 bp, Homo sapien
ggaatagaagaggaccatattctcg

SEQ ID NO: 69478 - DNA, 25 bp, Homo sapien
ggaatagaagagcaccatattctcg

SEQ ID NO: 69479 - DNA, 25 bp, Homo sapien
ccatgatgaaacctttctaggagtc

SEQ ID NO: 69480 - DNA, 25 bp, Homo sapien
ccatgatgaaacgtttctaggagtc

SEQ ID NO: 69481 - DNA, 25 bp, Homo sapien
ttagaataaatcgtcttgatcagtc

SEQ ID NO: 69482 - DNA, 25 bp, Homo sapien
ttagaataaatcctcttgatcagtc

SEQ ID NO: 69483 - DNA, 25 bp, Homo sapien
tgtaaagacttctttgtcgtttcac

SEQ ID NO: 69484 - DNA, 25 bp, Homo sapien
tgtaaagacttcattgtcgtttcac

SEQ ID NO: 69485 - DNA, 25 bp, Homo sapien
gtcaaggagtaatggtttatcgtag

SEQ ID NO: 69486 - DNA, 25 bp, Homo sapien
gtcaaggagtaaaggtttatcgtag

SEQ ID NO: 69487 - DNA, 25 bp, Homo sapien
gtgacagaaacatatacacgtatat

SEQ ID NO: 69488 - DNA, 25 bp, Homo sapien
gtgacagaaacaaatacacgtatat

SEQ ID NO: 69489 - DNA, 25 bp, Homo sapien
attacgagacagtctgtgttgactt

SEQ ID NO: 69490 - DNA, 25 bp, Homo sapien
attacgagacagactgtgttgactt

SEQ ID NO: 69491 - DNA, 25 bp, Homo sapien
caaagaaacggtctttctagtcact

SEQ ID NO: 69492 - DNA, 25 bp, Homo sapien
caaagaaacggtgtttctagtcact

SEQ ID NO: 69493 - DNA, 25 bp, Homo sapien
gtacctaagatggttgactttacag

SEQ ID NO: 69494 - DNA, 25 bp, Homo sapien
gtacctaagatgcttgactttacag

SEQ ID NO: 69495 - DNA, 25 bp, Homo sapien
cagacatatggtcgtctgtgtttta

SEQ ID NO: 69496 - DNA, 25 bp, Homo sapien
cagacatatggtggtctgtgtttta

SEQ ID NO: 69497 - DNA, 25 bp, Homo sapien
ccgaatcggtgaggtcctttccgta

SEQ ID NO: 69498 - DNA, 25 bp, Homo sapien
ccgaatcggtgacgtcctttccgta

SEQ ID NO: 69499 - DNA, 25 bp, Homo sapien
gacacatcaatgtcggtttccgata

SEQ ID NO: 69500 - DNA, 25 bp, Homo sapien
gacacatcaatgacggtttccgata

SEQ ID NO: 69501 - DNA, 25 bp, Homo sapien
cataaaatccaggtcgtgtgacgaa

SEQ ID NO: 69502 - DNA, 25 bp, Homo sapien
cataaaatccagctcgtgtgacgaa

SEQ ID NO: 69503 - DNA, 25 bp, Homo sapien
ttaactcgagtgtcgactgtgggaa

SEQ ID NO: 69504 - DNA, 25 bp, Homo sapien
ttaactcgagtgacgactgtgggaa

SEQ ID NO: 69505 - DNA, 25 bp, Homo sapien
gtaactgagggacctgtggtatctt

SEQ ID NO: 69506 - DNA, 25 bp, Homo sapien
gtaactgagggagctgtggtatctt

SEQ ID NO: 69507 - DNA, 25 bp, Homo sapien
agaacgaggatgacgtggaatacct

SEQ ID NO: 69508 - DNA, 25 bp, Homo sapien
agaacgaggatgtcgtggaatacct

SEQ ID NO: 69509 - DNA, 25 bp, Homo sapien
gtgacgggactcctaggcggaacct

SEQ ID NO: 69510 - DNA, 25 bp, Homo sapien
gtgacgggactcgtaggcggaacct

SEQ ID NO: 69511 - DNA, 25 bp, Homo sapien
tgtcggaagatctgggacggaccac

SEQ ID NO: 69512 - DNA, 25 bp, Homo sapien
tgtcggaagatcagggacggaccac

SEQ ID NO: 69513 - DNA, 25 bp, Homo sapien
aagcgtaagcgtacccgaggcttcg

SEQ ID NO: 69514 - DNA, 25 bp, Homo sapien
aagcgtaagcgttcccgaggcttcg

SEQ ID NO: 69515 - DNA, 25 bp, Homo sapien
aagtgacatgtgtcttactaccttg

SEQ ID NO: 69516 - DNA, 25 bp, Homo sapien
aagtgacatgtgacttactaccttg

SEQ ID NO: 69517 - DNA, 25 bp, Homo sapien
cacctcaagggttctcttcgtcgtg

SEQ ID NO: 69518 - DNA, 25 bp, Homo sapien
cacctcaagggtactcttcgtcgtg

SEQ ID NO: 69519 - DNA, 25 bp, Homo sapien
gtccctactcggtgaacttctggag

SEQ ID NO: 69520 - DNA, 25 bp, Homo sapien
gtccctactcggagaacttctggag

SEQ ID NO: 69521 - DNA, 25 bp, Homo sapien
agtcggtcccactagttagacagtg

SEQ ID NO: 69522 - DNA, 25 bp, Homo sapien
agtcggtcccacaagttagacagtg

SEQ ID NO: 69523 - DNA, 25 bp, Homo sapien
accgtctatccttcaatctaagtgg

SEQ ID NO: 69524 - DNA, 25 bp, Homo sapien
accgtctatcctacaatctaagtgg

SEQ ID NO: 69525 - DNA, 25 bp, Homo sapien
agtgtcttcctacaaacagaagagt

SEQ ID NO: 69526 - DNA, 25 bp, Homo sapien
agtgtcttcctagaaacagaagagt

SEQ ID NO: 69527 - DNA, 25 bp, Homo sapien
gaactgtctttttgaacaaaactgt

SEQ ID NO: 69528 - DNA, 25 bp, Homo sapien
gaactgtcttttagaacaaaactgt

SEQ ID NO: 69529 - DNA, 25 bp, Homo sapien
gggtctgttttaaacttcaaaacat

SEQ ID NO: 69530 - DNA, 25 bp, Homo sapien
gggtctgttttatacttcaaaacat

SEQ ID NO: 69531 - DNA, 25 bp, Homo sapien
atcgtcgttgtactttcatatgaac

SEQ ID NO: 69532 - DNA, 25 bp, Homo sapien
atcgtcgttgtagtttcatatgaac

SEQ ID NO: 69533 - DNA, 25 bp, Homo sapien
aatccgtttaactttttgtcgtgtc

SEQ ID NO: 69534 - DNA, 25 bp, Homo sapien
aatccgtttaacattttgtcgtgtc

SEQ ID NO: 69535 - DNA, 25 bp, Homo sapien
caaaatttacgaatcttttcgtgtg

SEQ ID NO: 69536 - DNA, 25 bp, Homo sapien
caaaatttacgattcttttcgtgtg

SEQ ID NO: 69537 - DNA, 25 bp, Homo sapien
aagagaaaaagattttgtcgtccct

SEQ ID NO: 69538 - DNA, 25 bp, Homo sapien
aagagaaaaagaatttgtcgtccct

SEQ ID NO: 69539 - DNA, 25 bp, Homo sapien
gtcattctaccaccatggtacatgt

SEQ ID NO: 69540 - DNA, 25 bp, Homo sapien
gtcattctaccagcatggtacatgt

SEQ ID NO: 69541 - DNA, 25 bp, Homo sapien
cgtcgttgcaccagggaccagtggt

SEQ ID NO: 69542 - DNA, 25 bp, Homo sapien
cgtcgttgcacctgggaccagtggt

SEQ ID NO: 69543 - DNA, 25 bp, Homo sapien
agtcctaaaccttcgaagaccttgg

SEQ ID NO: 69544 - DNA, 25 bp, Homo sapien
agtcctaaacctacgaagaccttgg

SEQ ID NO: 69545 - DNA, 25 bp, Homo sapien
gttaagcacaacaaccatgtataag

SEQ ID NO: 69546 - DNA, 25 bp, Homo sapien
gttaagcacaactaccatgtataag

SEQ ID NO: 69547 - DNA, 25 bp, Homo sapien
cgtaaaagaagatcactccttgtgc

SEQ ID NO: 69548 - DNA, 25 bp, Homo sapien
cgtaaaagaagaacactccttgtgc

SEQ ID NO: 69549 - DNA, 25 bp, Homo sapien
atacaatgggatacgtctcgttttt

SEQ ID NO: 69550 - DNA, 25 bp, Homo sapien
atacaatgggattcgtctcgttttt

SEQ ID NO: 69551 - DNA, 25 bp, Homo sapien
tttcagaaggttgtctacacctaca

SEQ ID NO: 69552 - DNA, 25 bp, Homo sapien
tttcagaaggttctctacacctaca

SEQ ID NO: 69553 - DNA, 25 bp, Homo sapien
aacaagagtatactgaatatcgtct

SEQ ID NO: 69554 - DNA, 25 bp, Homo sapien
aacaagagtatagtgaatatcgtct

SEQ ID NO: 69555 - DNA, 25 bp, Homo sapien
cgaccgaagaacgaggttcctctct

SEQ ID NO: 69556 - DNA, 25 bp, Homo sapien
cgaccgaagaaccaggttcctctct

SEQ ID NO: 69557 - DNA, 25 bp, Homo sapien
acacaggaccaacatgtctcgatcc

SEQ ID NO: 69558 - DNA, 25 bp, Homo sapien
acacaggaccaagatgtctcgatcc

SEQ ID NO: 69559 - DNA, 25 bp, Homo sapien
acaaccgaaagacgtctctacgaat

SEQ ID NO: 69560 - DNA, 25 bp, Homo sapien
acaaccgaaagaggtctctacgaat

SEQ ID NO: 69561 - DNA, 25 bp, Homo sapien
tccctcgactatggtgtcctcgggt

SEQ ID NO: 69562 - DNA, 25 bp, Homo sapien
tccctcgactatcgtgtcctcgggt

SEQ ID NO: 69563 - DNA, 25 bp, Homo sapien
ctttcccttcattgtggctcctcgt

SEQ ID NO: 69564 - DNA, 25 bp, Homo sapien
ctttcccttcatagtggctcctcgt

SEQ ID NO: 69565 - DNA, 25 bp, Homo sapien
gacgcccgtgtctcgaagggcaccg

SEQ ID NO: 69566 - DNA, 25 bp, Homo sapien
gacgcccgtgtcacgaagggcaccg

SEQ ID NO: 69567 - DNA, 25 bp, Homo sapien
gaacatgggtcaccagggtctctct

SEQ ID NO: 69568 - DNA, 25 bp, Homo sapien
gaacatgggtcagcagggtctctct

SEQ ID NO: 69569 - DNA, 25 bp, Homo sapien
tgtcggggtaagaactcggtctcga

SEQ ID NO: 69570 - DNA, 25 bp, Homo sapien
tgtcggggtaagtactcggtctcga

SEQ ID NO: 69571 - DNA, 25 bp, Homo sapien
gacgtatactacatatcgtcgagaa

SEQ ID NO: 69572 - DNA, 25 bp, Homo sapien
gacgtatactacttatcgtcgagaa

SEQ ID NO: 69573 - DNA, 25 bp, Homo sapien
ggtgagaaaccttcactcagtgact

SEQ ID NO: 69574 - DNA, 25 bp, Homo sapien
ggtgagaaacctacactcagtgact

SEQ ID NO: 69575 - DNA, 25 bp, Homo sapien
gcgtggtacaggagacataggtcct

SEQ ID NO: 69576 - DNA, 25 bp, Homo sapien
gcgtggtacaggtgacataggtcct

SEQ ID NO: 69577 - DNA, 25 bp, Homo sapien
cgtagcttcgcgagtaagacgcggt

SEQ ID NO: 69578 - DNA, 25 bp, Homo sapien
cgtagcttcgcgtgtaagacgcggt

SEQ ID NO: 69579 - DNA, 25 bp, Homo sapien
atccacgtacggtagtacagaccga

SEQ ID NO: 69580 - DNA, 25 bp, Homo sapien
atccacgtacggaagtacagaccga

SEQ ID NO: 69581 - DNA, 25 bp, Homo sapien
tacaaactggaactaccggacgtca

SEQ ID NO: 69582 - DNA, 25 bp, Homo sapien
tacaaactggaagtaccggacgtca

SEQ ID NO: 69583 - DNA, 25 bp, Homo sapien
tcaggtccaaaggactgtctcggcg

SEQ ID NO: 69584 - DNA, 25 bp, Homo sapien
tcaggtccaaagcactgtctcggcg

SEQ ID NO: 69585 - DNA, 25 bp, Homo sapien
gaggtcccaggaagacgaccgacgc

SEQ ID NO: 69586 - DNA, 25 bp, Homo sapien
gaggtcccaggatgacgaccgacgc

SEQ ID NO: 69587 - DNA, 25 bp, Homo sapien
ggtcttcacacgaccgacccagagt

SEQ ID NO: 69588 - DNA, 25 bp, Homo sapien
ggtcttcacacgtccgacccagagt

SEQ ID NO: 69589 - DNA, 25 bp, Homo sapien
ggactcgtacacaacctttggtaat

SEQ ID NO: 69590 - DNA, 25 bp, Homo sapien
ggactcgtacactacctttggtaat

SEQ ID NO: 69591 - DNA, 25 bp, Homo sapien
agactgtgtactcgtactttggttt

SEQ ID NO: 69592 - DNA, 25 bp, Homo sapien
agactgtgtactggtactttggttt

SEQ ID NO: 69593 - DNA, 25 bp, Homo sapien
cattaaacctactatttatgagaca

SEQ ID NO: 69594 - DNA, 25 bp, Homo sapien
cattaaacctacaatttatgagaca

SEQ ID NO: 69595 - DNA, 25 bp, Homo sapien
atcgtaaagtctgtttggatcgaac

SEQ ID NO: 69596 - DNA, 25 bp, Homo sapien
atcgtaaagtctctttggatcgaac

SEQ ID NO: 69597 - DNA, 25 bp, Homo sapien
cgaaatataagtctttgtttcgttc

SEQ ID NO: 69598 - DNA, 25 bp, Homo sapien
cgaaatataagtgtttgtttcgttc

SEQ ID NO: 69599 - DNA, 25 bp, Homo sapien
actgacgatgaattttctgtttttc

SEQ ID NO: 69600 - DNA, 25 bp, Homo sapien
actgacgatgaaatttctgtttttc

SEQ ID NO: 69601 - DNA, 25 bp, Homo sapien
ccatgacggggcttcggtccttgtg

SEQ ID NO: 69602 - DNA, 25 bp, Homo sapien
ccatgacggggcatcggtccttgtg

SEQ ID NO: 69603 - DNA, 25 bp, Homo sapien
caaactcggaggtgtttattacgtt

SEQ ID NO: 69604 - DNA, 25 bp, Homo sapien
caaactcggaggagtttattacgtt

SEQ ID NO: 69605 - DNA, 25 bp, Homo sapien
gaccgtctcgggacgactgattcgg

SEQ ID NO: 69606 - DNA, 25 bp, Homo sapien
gaccgtctcgggtcgactgattcgg

SEQ ID NO: 69607 - DNA, 25 bp, Homo sapien
actctcctctgtcagacttgtctgg

SEQ ID NO: 69608 - DNA, 25 bp, Homo sapien
actctcctctgtgagacttgtctgg

SEQ ID NO: 69609 - DNA, 25 bp, Homo sapien
ttgttcgtcgaaacgccttacgaga

SEQ ID NO: 69610 - DNA, 25 bp, Homo sapien
ttgttcgtcgaatcgccttacgaga

SEQ ID NO: 69611 - DNA, 25 bp, Homo sapien
gaatatttgtcgaacatttcctgaa

SEQ ID NO: 69612 - DNA, 25 bp, Homo sapien
gaatatttgtcgtacatttcctgaa

SEQ ID NO: 69613 - DNA, 25 bp, Homo sapien
catgtgactacgagggacctcccga

SEQ ID NO: 69614 - DNA, 25 bp, Homo sapien
catgtgactacgtgggacctcccga

SEQ ID NO: 69615 - DNA, 25 bp, Homo sapien
atgtcacgatacgaaccactgagac

SEQ ID NO: 69616 - DNA, 25 bp, Homo sapien
atgtcacgataccaaccactgagac

SEQ ID NO: 69617 - DNA, 25 bp, Homo sapien
aaaggttagtattgccagacgtaaa

SEQ ID NO: 69618 - DNA, 25 bp, Homo sapien
aaaggttagtatagccagacgtaaa

SEQ ID NO: 69619 - DNA, 25 bp, Homo sapien
acaaggatgacaggtgtcaatttac

SEQ ID NO: 69620 - DNA, 25 bp, Homo sapien
acaaggatgacacgtgtcaatttac

SEQ ID NO: 69621 - DNA, 25 bp, Homo sapien
tggaacacataggttctcagatgta

SEQ ID NO: 69622 - DNA, 25 bp, Homo sapien
tggaacacatagcttctcagatgta

SEQ ID NO: 69623 - DNA, 25 bp, Homo sapien
caaatgacccacttatcgtgaaagg

SEQ ID NO: 69624 - DNA, 25 bp, Homo sapien
caaatgacccacatatcgtgaaagg

SEQ ID NO: 69625 - DNA, 25 bp, Homo sapien
atgagtgctcctcaaatgtcagatg

SEQ ID NO: 69626 - DNA, 25 bp, Homo sapien
atgagtgctcctgaaatgtcagatg

SEQ ID NO: 69627 - DNA, 25 bp, Homo sapien
tttgtgtattcagatacgctgactc

SEQ ID NO: 69628 - DNA, 25 bp, Homo sapien
tttgtgtattcacatacgctgactc

SEQ ID NO: 69629 - DNA, 25 bp, Homo sapien
tctttgtttctacactagtgagata

SEQ ID NO: 69630 - DNA, 25 bp, Homo sapien
tctttgtttctagactagtgagata

SEQ ID NO: 69631 - DNA, 25 bp, Homo sapien
cactgtcagttctcccgactgggaa

SEQ ID NO: 69632 - DNA, 25 bp, Homo sapien
cactgtcagttcacccgactgggaa

SEQ ID NO: 69633 - DNA, 25 bp, Homo sapien
gacgtcatgtcctatcatgtcatta

SEQ ID NO: 69634 - DNA, 25 bp, Homo sapien
gacgtcatgtccaatcatgtcatta

SEQ ID NO: 69635 - DNA, 25 bp, Homo sapien
ttcttatgtcttcctcggttcgaaa

SEQ ID NO: 69636 - DNA, 25 bp, Homo sapien
ttcttatgtcttgctcggttcgaaa

SEQ ID NO: 69637 - DNA, 25 bp, Homo sapien
gaaccgaatcccaaagaataattgt

SEQ ID NO: 69638 - DNA, 25 bp, Homo sapien
gaaccgaatccctaagaataattgt

SEQ ID NO: 69639 - DNA, 25 bp, Homo sapien
cagtggaacgcgtccggaaaccacg

SEQ ID NO: 69640 - DNA, 25 bp, Homo sapien
cagtggaacgcgaccggaaaccacg

SEQ ID NO: 69641 - DNA, 25 bp, Homo sapien
ggctaggacggtaccgagccaccac

SEQ ID NO: 69642 - DNA, 25 bp, Homo sapien
ggctaggacggttccgagccaccac

SEQ ID NO: 69643 - DNA, 25 bp, Homo sapien
aaaaacggatcttcgttttgatcac

SEQ ID NO: 69644 - DNA, 25 bp, Homo sapien
aaaaacggatctacgttttgatcac

SEQ ID NO: 69645 - DNA, 25 bp, Homo sapien
aataggatcttagtcgggaacgacg

SEQ ID NO: 69646 - DNA, 25 bp, Homo sapien
aataggatcttactcgggaacgacg

SEQ ID NO: 69647 - DNA, 25 bp, Homo sapien
agtacgacagtcctttctttaaatg

SEQ ID NO: 69648 - DNA, 25 bp, Homo sapien
agtacgacagtcgtttctttaaatg

SEQ ID NO: 69649 - DNA, 25 bp, Homo sapien
gtattcagacccaagttcaaaatcg

SEQ ID NO: 69650 - DNA, 25 bp, Homo sapien
gtattcagaccctagttcaaaatcg

SEQ ID NO: 69651 - DNA, 25 bp, Homo sapien
agttataaattggtagttccttttc

SEQ ID NO: 69652 - DNA, 25 bp, Homo sapien
agttataaattgctagttccttttc

SEQ ID NO: 69653 - DNA, 25 bp, Homo sapien
tttacaaacggtgtgtctctctttc

SEQ ID NO: 69654 - DNA, 25 bp, Homo sapien
tttacaaacggtctgtctctctttc

SEQ ID NO: 69655 - DNA, 25 bp, Homo sapien
ttacggaatctcatctcctgtcatg

SEQ ID NO: 69656 - DNA, 25 bp, Homo sapien
ttacggaatctcttctcctgtcatg

SEQ ID NO: 69657 - DNA, 25 bp, Homo sapien
cgttctctacagttctgtcgtaagt

SEQ ID NO: 69658 - DNA, 25 bp, Homo sapien
cgttctctacagatctgtcgtaagt

SEQ ID NO: 69659 - DNA, 25 bp, Homo sapien
atatgttccgttcgttgtgtactgt

SEQ ID NO: 69660 - DNA, 25 bp, Homo sapien
atatgttccgttggttgtgtactgt

SEQ ID NO: 69661 - DNA, 25 bp, Homo sapien
agttgctgacgtctcttcgtcagtt

SEQ ID NO: 69662 - DNA, 25 bp, Homo sapien
agttgctgacgtgtcttcgtcagtt

SEQ ID NO: 69663 - DNA, 25 bp, Homo sapien
acgtaggacttctagtttccgagat

SEQ ID NO: 69664 - DNA, 25 bp, Homo sapien
acgtaggacttcaagtttccgagat

SEQ ID NO: 69665 - DNA, 25 bp, Homo sapien
tgtttcacgtggttctgtactcgaa

SEQ ID NO: 69666 - DNA, 25 bp, Homo sapien
tgtttcacgtggatctgtactcgaa

SEQ ID NO: 69667 - DNA, 25 bp, Homo sapien
gtcgttttcccgaattcgtgcacga

SEQ ID NO: 69668 - DNA, 25 bp, Homo sapien
gtcgttttcccgtattcgtgcacga

SEQ ID NO: 69669 - DNA, 25 bp, Homo sapien
tcttttcacgtcctgtggagctcga

SEQ ID NO: 69670 - DNA, 25 bp, Homo sapien
tcttttcacgtcgtgtggagctcga

SEQ ID NO: 69671 - DNA, 25 bp, Homo sapien
tacaactctacataaggtgccatga

SEQ ID NO: 69672 - DNA, 25 bp, Homo sapien
tacaactctacaaaaggtgccatga

SEQ ID NO: 69673 - DNA, 25 bp, Homo sapien
ctgtgcgttttaaatgttccgttaa

SEQ ID NO: 69674 - DNA, 25 bp, Homo sapien
ctgtgcgttttatatgttccgttaa

SEQ ID NO: 69675 - DNA, 25 bp, Homo sapien
ggtgatctaccctcttcagtcttaa

SEQ ID NO: 69676 - DNA, 25 bp, Homo sapien
ggtgatctacccacttcagtcttaa

SEQ ID NO: 69677 - DNA, 25 bp, Homo sapien
taaaataacctaacgttggttgtca

SEQ ID NO: 69678 - DNA, 25 bp, Homo sapien
taaaataacctatcgttggttgtca

SEQ ID NO: 69679 - DNA, 25 bp, Homo sapien
tcccttacgacttctgggtccttct

SEQ ID NO: 69680 - DNA, 25 bp, Homo sapien
tcccttacgactactgggtccttct

SEQ ID NO: 69681 - DNA, 25 bp, Homo sapien
ctccgtttaacacggtattcgtcta

SEQ ID NO: 69682 - DNA, 25 bp, Homo sapien
ctccgtttaacagggtattcgtcta

SEQ ID NO: 69683 - DNA, 25 bp, Homo sapien
gtcatctgttagaggggacttctga

SEQ ID NO: 69684 - DNA, 25 bp, Homo sapien
gtcatctgttagtggggacttctga

SEQ ID NO: 69685 - DNA, 25 bp, Homo sapien
cccagcgacttgaagtgactgttga

SEQ ID NO: 69686 - DNA, 25 bp, Homo sapien
cccagcgacttgtagtgactgttga

SEQ ID NO: 69687 - DNA, 25 bp, Homo sapien
gcctccgaagtttactgactttaac

SEQ ID NO: 69688 - DNA, 25 bp, Homo sapien
gcctccgaagttaactgactttaac

SEQ ID NO: 69689 - DNA, 25 bp, Homo sapien
tgcgatacgtgtctacgttttacta

SEQ ID NO: 69690 - DNA, 25 bp, Homo sapien
tgcgatacgtgtgtacgttttacta

SEQ ID NO: 69691 - DNA, 25 bp, Homo sapien
tatcggttcgggatctggtcgagtc

SEQ ID NO: 69692 - DNA, 25 bp, Homo sapien
tatcggttcgggttctggtcgagtc

SEQ ID NO: 69693 - DNA, 25 bp, Homo sapien
tttactgctcggtttcggaagacgc

SEQ ID NO: 69694 - DNA, 25 bp, Homo sapien
tttactgctcggattcggaagacgc

SEQ ID NO: 69695 - DNA, 25 bp, Homo sapien
tattccgtcgggtttccagacaccg

SEQ ID NO: 69696 - DNA, 25 bp, Homo sapien
tattccgtcgggattccagacaccg

SEQ ID NO: 69697 - DNA, 25 bp, Homo sapien
tgtcccagtgagttcatctacccgt

SEQ ID NO: 69698 - DNA, 25 bp, Homo sapien
tgtcccagtgagatcatctacccgt

SEQ ID NO: 69699 - DNA, 25 bp, Homo sapien
tgagagagccaggagaccccggttc

SEQ ID NO: 69700 - DNA, 25 bp, Homo sapien
tgagagagccagcagaccccggttc

SEQ ID NO: 69701 - DNA, 25 bp, Homo sapien
aaggagtcagtagaacccacgtggc

SEQ ID NO: 69702 - DNA, 25 bp, Homo sapien
aaggagtcagtacaacccacgtggc

SEQ ID NO: 69703 - DNA, 25 bp, Homo sapien
ggatcgttcaaaactcgacacggac

SEQ ID NO: 69704 - DNA, 25 bp, Homo sapien
ggatcgttcaaatctcgacacggac

SEQ ID NO: 69705 - DNA, 25 bp, Homo sapien
gagtttttcactttctgtccacgta

SEQ ID NO: 69706 - DNA, 25 bp, Homo sapien
gagtttttcactatctgtccacgta

SEQ ID NO: 69707 - DNA, 25 bp, Homo sapien
aaggtcttggaggatcctgatagtc

SEQ ID NO: 69708 - DNA, 25 bp, Homo sapien
aaggtcttggagcatcctgatagtc

SEQ ID NO: 69709 - DNA, 25 bp, Homo sapien
ttttcgttcgtgaaatccagaagtc

SEQ ID NO: 69710 - DNA, 25 bp, Homo sapien
ttttcgttcgtgtaatccagaagtc

SEQ ID NO: 69711 - DNA, 25 bp, Homo sapien
ttttaagaaccgtccgacgagatgt

SEQ ID NO: 69712 - DNA, 25 bp, Homo sapien
ttttaagaaccgaccgacgagatgt

SEQ ID NO: 69713 - DNA, 25 bp, Homo sapien
tttcagtgtaacatgacgggactgt

SEQ ID NO: 69714 - DNA, 25 bp, Homo sapien
tttcagtgtaacttgacgggactgt

SEQ ID NO: 69715 - DNA, 25 bp, Homo sapien
ttgcgtcaagtctcgtgcccgccgt

SEQ ID NO: 69716 - DNA, 25 bp, Homo sapien
ttgcgtcaagtcacgtgcccgccgt

SEQ ID NO: 69717 - DNA, 25 bp, Homo sapien
tactacgatagaaacgtcaagtcct

SEQ ID NO: 69718 - DNA, 25 bp, Homo sapien
tactacgatagatacgtcaagtcct

SEQ ID NO: 69719 - DNA, 25 bp, Homo sapien
cgtgcaccagggactcgcactcttt

SEQ ID NO: 69720 - DNA, 25 bp, Homo sapien
cgtgcaccagggtctcgcactcttt

SEQ ID NO: 69721 - DNA, 25 bp, Homo sapien
tgagacacacgagatgtttcctatt

SEQ ID NO: 69722 - DNA, 25 bp, Homo sapien
tgagacacacgacatgtttcctatt

SEQ ID NO: 69723 - DNA, 25 bp, Homo sapien
ggacgaacacgaggtttccgtctta

SEQ ID NO: 69724 - DNA, 25 bp, Homo sapien
ggacgaacacgacgtttccgtctta

SEQ ID NO: 69725 - DNA, 25 bp, Homo sapien
aggtccctagtccgtcctatcccta

SEQ ID NO: 69726 - DNA, 25 bp, Homo sapien
aggtccctagtcggtcctatcccta

SEQ ID NO: 69727 - DNA, 25 bp, Homo sapien
gaccgagtgcccagagacagtactg

SEQ ID NO: 69728 - DNA, 25 bp, Homo sapien
gaccgagtgccctgagacagtactg

SEQ ID NO: 69729 - DNA, 25 bp, Homo sapien
tggaggcgtcttaccttaagggtgt

SEQ ID NO: 69730 - DNA, 25 bp, Homo sapien
tggaggcgtctttccttaagggtgt

SEQ ID NO: 69731 - DNA, 25 bp, Homo sapien
agtgtccccctttccgaccggtgag

SEQ ID NO: 69732 - DNA, 25 bp, Homo sapien
agtgtcccccttaccgaccggtgag

SEQ ID NO: 69733 - DNA, 25 bp, Homo sapien
cttcgcaccctttggtgtccgacaa

SEQ ID NO: 69734 - DNA, 25 bp, Homo sapien
cttcgcacccttaggtgtccgacaa

SEQ ID NO: 69735 - DNA, 25 bp, Homo sapien
gacacctctgtcatggtaccacttc

SEQ ID NO: 69736 - DNA, 25 bp, Homo sapien
gacacctctgtcttggtaccacttc

SEQ ID NO: 69737 - DNA, 25 bp, Homo sapien
atgtcctactgtgttttatccatga

SEQ ID NO: 69738 - DNA, 25 bp, Homo sapien
atgtcctactgtcttttatccatga

SEQ ID NO: 69739 - DNA, 25 bp, Homo sapien
ctccttcgatgttcagtgtattaaa

SEQ ID NO: 69740 - DNA, 25 bp, Homo sapien
ctccttcgatgtacagtgtattaaa

SEQ ID NO: 69741 - DNA, 25 bp, Homo sapien
cgagacaggatgacgatttctacaa

SEQ ID NO: 69742 - DNA, 25 bp, Homo sapien
cgagacaggatgtcgatttctacaa

SEQ ID NO: 69743 - DNA, 25 bp, Homo sapien
agagtgtcctgatatgttcatacat

SEQ ID NO: 69744 - DNA, 25 bp, Homo sapien
agagtgtcctgaaatgttcatacat

SEQ ID NO: 69745 - DNA, 25 bp, Homo sapien
ttgaccagttctgtcaatttatgaa

SEQ ID NO: 69746 - DNA, 25 bp, Homo sapien
ttgaccagttctctcaatttatgaa

SEQ ID NO: 69747 - DNA, 25 bp, Homo sapien
tactgttatggtgattctcttcaag

SEQ ID NO: 69748 - DNA, 25 bp, Homo sapien
tactgttatggtcattctcttcaag

SEQ ID NO: 69749 - DNA, 25 bp, Homo sapien
ggtattcttggagtattcgttcccc

SEQ ID NO: 69750 - DNA, 25 bp, Homo sapien
ggtattcttggactattcgttcccc

SEQ ID NO: 69751 - DNA, 25 bp, Homo sapien
tttcgttccgagtcatgacctccat

SEQ ID NO: 69752 - DNA, 25 bp, Homo sapien
tttcgttccgagacatgacctccat

SEQ ID NO: 69753 - DNA, 25 bp, Homo sapien
agggctcgcggaaggtcctcccgac

SEQ ID NO: 69754 - DNA, 25 bp, Homo sapien
agggctcgcggatggtcctcccgac

SEQ ID NO: 69755 - DNA, 25 bp, Homo sapien
ctactccggaagttatgacccgtcg

SEQ ID NO: 69756 - DNA, 25 bp, Homo sapien
ctactccggaagatatgacccgtcg

SEQ ID NO: 69757 - DNA, 25 bp, Homo sapien
ccaccgctcagaagtgtttccactt

SEQ ID NO: 69758 - DNA, 25 bp, Homo sapien
ccaccgctcagatgtgtttccactt

SEQ ID NO: 69759 - DNA, 25 bp, Homo sapien
ccacacgaagggtcggttccacgtc

SEQ ID NO: 69760 - DNA, 25 bp, Homo sapien
ccacacgaagggacggttccacgtc

SEQ ID NO: 69761 - DNA, 25 bp, Homo sapien
aagtaaacgagttcgtgtgttttcc

SEQ ID NO: 69762 - DNA, 25 bp, Homo sapien
aagtaaacgagtacgtgtgttttcc

SEQ ID NO: 69763 - DNA, 25 bp, Homo sapien
tgtctgaacagaaggtgttcgtgca

SEQ ID NO: 69764 - DNA, 25 bp, Homo sapien
tgtctgaacagatggtgttcgtgca

SEQ ID NO: 69765 - DNA, 25 bp, Homo sapien
gtcgtcaaggaatgcgctccgggac

SEQ ID NO: 69766 - DNA, 25 bp, Homo sapien
gtcgtcaaggaaagcgctccgggac

SEQ ID NO: 69767 - DNA, 25 bp, Homo sapien
gtcccgtggtcgtccggcgtcccgt

SEQ ID NO: 69768 - DNA, 25 bp, Homo sapien
gtcccgtggtcgaccggcgtcccgt

SEQ ID NO: 69769 - DNA, 25 bp, Homo sapien
aggatgtctcgggcccggggtccct

SEQ ID NO: 69770 - DNA, 25 bp, Homo sapien
aggatgtctcggccccggggtccct

SEQ ID NO: 69771 - DNA, 25 bp, Homo sapien
cgatttgtggaagagacaggacccg

SEQ ID NO: 69772 - DNA, 25 bp, Homo sapien
cgatttgtggaacagacaggacccg

SEQ ID NO: 69773 - DNA, 25 bp, Homo sapien
cgtattgtttcacgaactatgaatt

SEQ ID NO: 69774 - DNA, 25 bp, Homo sapien
cgtattgtttcaggaactatgaatt

SEQ ID NO: 69775 - DNA, 25 bp, Homo sapien
gtaacaggtctcaagaactatttca

SEQ ID NO: 69776 - DNA, 25 bp, Homo sapien
gtaacaggtctctagaactatttca

SEQ ID NO: 69777 - DNA, 25 bp, Homo sapien
aggaacaaggcgacgattagtttca

SEQ ID NO: 69778 - DNA, 25 bp, Homo sapien
aggaacaaggcgtcgattagtttca

SEQ ID NO: 69779 - DNA, 25 bp, Homo sapien
tgtccattggtcaaaacattgtaat

SEQ ID NO: 69780 - DNA, 25 bp, Homo sapien
tgtccattggtctaaacattgtaat

SEQ ID NO: 69781 - DNA, 25 bp, Homo sapien
gtcaagtgagttttgcacaactgga

SEQ ID NO: 69782 - DNA, 25 bp, Homo sapien
gtcaagtgagttatgcacaactgga

SEQ ID NO: 69783 - DNA, 25 bp, Homo sapien
agcgtctccggtcgtcttaggaagg

SEQ ID NO: 69784 - DNA, 25 bp, Homo sapien
agcgtctccggtggtcttaggaagg

SEQ ID NO: 69785 - DNA, 25 bp, Homo sapien
ggccctttgtcgtgacaaaccagac

SEQ ID NO: 69786 - DNA, 25 bp, Homo sapien
ggccctttgtcgagacaaaccagac

SEQ ID NO: 69787 - DNA, 25 bp, Homo sapien
gctatatgtcatgaattacgaccat

SEQ ID NO: 69788 - DNA, 25 bp, Homo sapien
gctatatgtcatcaattacgaccat

SEQ ID NO: 69789 - DNA, 25 bp, Homo sapien
gttaaagtgttctgcgtaacgtccc

SEQ ID NO: 69790 - DNA, 25 bp, Homo sapien
gttaaagtgttcagcgtaacgtccc

SEQ ID NO: 69791 - DNA, 25 bp, Homo sapien
tgctccaatggttcccggagtccga

SEQ ID NO: 69792 - DNA, 25 bp, Homo sapien
tgctccaatggtacccggagtccga

SEQ ID NO: 69793 - DNA, 25 bp, Homo sapien
tttccggatcgaatccggcgatgga

SEQ ID NO: 69794 - DNA, 25 bp, Homo sapien
tttccggatcgattccggcgatgga

SEQ ID NO: 69795 - DNA, 25 bp, Homo sapien
cgacgactggaatgcggacatataa

SEQ ID NO: 69796 - DNA, 25 bp, Homo sapien
cgacgactggaaagcggacatataa

SEQ ID NO: 69797 - DNA, 25 bp, Homo sapien
gtaccgtgcattgcagagatcgagg

SEQ ID NO: 69798 - DNA, 25 bp, Homo sapien
gtaccgtgcattccagagatcgagg

SEQ ID NO: 69799 - DNA, 25 bp, Homo sapien
tgactacctgcagtttggggactcg

SEQ ID NO: 69800 - DNA, 25 bp, Homo sapien
tgactacctgcactttggggactcg

SEQ ID NO: 69801 - DNA, 25 bp, Homo sapien
gctacatgaagacctgtgagggtcc

SEQ ID NO: 69802 - DNA, 25 bp, Homo sapien
gctacatgaagagctgtgagggtcc

SEQ ID NO: 69803 - DNA, 25 bp, Homo sapien
ggtcagttcggtcttctacgggtcc

SEQ ID NO: 69804 - DNA, 25 bp, Homo sapien
ggtcagttcggtgttctacgggtcc

SEQ ID NO: 69805 - DNA, 25 bp, Homo sapien
cagatgcagtggttctggtactctg

SEQ ID NO: 69806 - DNA, 25 bp, Homo sapien
cagatgcagtggatctggtactctg

SEQ ID NO: 69807 - DNA, 25 bp, Homo sapien
actttagaggaaaaactcgaacttg

SEQ ID NO: 69808 - DNA, 25 bp, Homo sapien
actttagaggaataactcgaacttg

SEQ ID NO: 69809 - DNA, 25 bp, Homo sapien
taaaggatgactacgtacagacttc

SEQ ID NO: 69810 - DNA, 25 bp, Homo sapien
taaaggatgacttcgtacagacttc

SEQ ID NO: 69811 - DNA, 25 bp, Homo sapien
aagagaataactgacaacacgtacg

SEQ ID NO: 69812 - DNA, 25 bp, Homo sapien
aagagaataactcacaacacgtacg

SEQ ID NO: 69813 - DNA, 25 bp, Homo sapien
gtcttatgattcttctcgacaagtg

SEQ ID NO: 69814 - DNA, 25 bp, Homo sapien
gtcttatgattcatctcgacaagtg

SEQ ID NO: 69815 - DNA, 25 bp, Homo sapien
attttactctattatacatacagtg

SEQ ID NO: 69816 - DNA, 25 bp, Homo sapien
attttactctataatacatacagtg

SEQ ID NO: 69817 - DNA, 25 bp, Homo sapien
aagagaacttttattcttacaattg

SEQ ID NO: 69818 - DNA, 25 bp, Homo sapien
aagagaactttttttcttacaattg

SEQ ID NO: 69819 - DNA, 25 bp, Homo sapien
aagaattttccgttctcagtgttgc

SEQ ID NO: 69820 - DNA, 25 bp, Homo sapien
aagaattttccgatctcagtgttgc

SEQ ID NO: 69821 - DNA, 25 bp, Homo sapien
ttagagattttccaaatgtcccacg

SEQ ID NO: 69822 - DNA, 25 bp, Homo sapien
ttagagattttcgaaatgtcccacg

SEQ ID NO: 69823 - DNA, 25 bp, Homo sapien
tcatgtcttcttaggggtgatcata

SEQ ID NO: 69824 - DNA, 25 bp, Homo sapien
tcatgtcttctttggggtgatcata

SEQ ID NO: 69825 - DNA, 25 bp, Homo sapien
atgttgtctcttgtttggtccacaa

SEQ ID NO: 69826 - DNA, 25 bp, Homo sapien
atgttgtctcttctttggtccacaa

SEQ ID NO: 69827 - DNA, 25 bp, Homo sapien
gtttgtgtttcagttcctcatccct

SEQ ID NO: 69828 - DNA, 25 bp, Homo sapien
gtttgtgtttcacttcctcatccct

SEQ ID NO: 69829 - DNA, 25 bp, Homo sapien
tttagcctctagtctccgggcctgt

SEQ ID NO: 69830 - DNA, 25 bp, Homo sapien
tttagcctctagactccgggcctgt

SEQ ID NO: 69831 - DNA, 25 bp, Homo sapien
tttgtcacctggtccctcgctgtgt

SEQ ID NO: 69832 - DNA, 25 bp, Homo sapien
tttgtcacctggaccctcgctgtgt

SEQ ID NO: 69833 - DNA, 25 bp, Homo sapien
aataccgtcgagacagttactcgtg

SEQ ID NO: 69834 - DNA, 25 bp, Homo sapien
aataccgtcgagtcagttactcgtg

SEQ ID NO: 69835 - DNA, 25 bp, Homo sapien
accaagtcgtctgatcgaggaagtg

SEQ ID NO: 69836 - DNA, 25 bp, Homo sapien
accaagtcgtctcatcgaggaagtg

SEQ ID NO: 69837 - DNA, 25 bp, Homo sapien
tagaacgaactcaggttcgggaaga

SEQ ID NO: 69838 - DNA, 25 bp, Homo sapien
tagaacgaactctggttcgggaaga

SEQ ID NO: 69839 - DNA, 25 bp, Homo sapien
agacaggacctagagcggcccgtgt

SEQ ID NO: 69840 - DNA, 25 bp, Homo sapien
agacaggacctacagcggcccgtgt

SEQ ID NO: 69841 - DNA, 25 bp, Homo sapien
acggcggcccccagcacgacatcag

SEQ ID NO: 69842 - DNA, 25 bp, Homo sapien
acggcggccccctgcacgacatcag

SEQ ID NO: 69843 - DNA, 25 bp, Homo sapien
ggggtccgtcacgtcctacgcaaag

SEQ ID NO: 69844 - DNA, 25 bp, Homo sapien
ggggtccgtcacctcctacgcaaag

SEQ ID NO: 69845 - DNA, 25 bp, Homo sapien
agtctcggactcctcggcgttcagg

SEQ ID NO: 69846 - DNA, 25 bp, Homo sapien
agtctcggactcgtcggcgttcagg

SEQ ID NO: 69847 - DNA, 25 bp, Homo sapien
agtccgacccgtgctgcttacgagg

SEQ ID NO: 69848 - DNA, 25 bp, Homo sapien
agtccgacccgtcctgcttacgagg

SEQ ID NO: 69849 - DNA, 25 bp, Homo sapien
aagcctcaactctcagcgccaggag

SEQ ID NO: 69850 - DNA, 25 bp, Homo sapien
aagcctcaactcacagcgccaggag

SEQ ID NO: 69851 - DNA, 25 bp, Homo sapien
agaccacacacctcgggttctcggg

SEQ ID NO: 69852 - DNA, 25 bp, Homo sapien
agaccacacaccacgggttctcggg

SEQ ID NO: 69853 - DNA, 25 bp, Homo sapien
ttccggtttcttcgactctttcgtg

SEQ ID NO: 69854 - DNA, 25 bp, Homo sapien
ttccggtttcttggactctttcgtg

SEQ ID NO: 69855 - DNA, 25 bp, Homo sapien
ccgaattattccacgtgtttatacg

SEQ ID NO: 69856 - DNA, 25 bp, Homo sapien
ccgaattattcctcgtgtttatacg

SEQ ID NO: 69857 - DNA, 25 bp, Homo sapien
acaaactttgacttcacggttcatg

SEQ ID NO: 69858 - DNA, 25 bp, Homo sapien
acaaactttgacatcacggttcatg

SEQ ID NO: 69859 - DNA, 25 bp, Homo sapien
gggagtcgttacctgaaattcttcg

SEQ ID NO: 69860 - DNA, 25 bp, Homo sapien
gggagtcgttacgtgaaattcttcg

SEQ ID NO: 69861 - DNA, 25 bp, Homo sapien
atgtgtatcgttgtcaacatctttt

SEQ ID NO: 69862 - DNA, 25 bp, Homo sapien
atgtgtatcgttctcaacatctttt

SEQ ID NO: 69863 - DNA, 25 bp, Homo sapien
tcaaggttaagactcaaaccatatg

SEQ ID NO: 69864 - DNA, 25 bp, Homo sapien
tcaaggttaagagtcaaaccatatg

SEQ ID NO: 69865 - DNA, 25 bp, Homo sapien
cctaaggaatttacaggaactattg

SEQ ID NO: 69866 - DNA, 25 bp, Homo sapien
cctaaggaattttcaggaactattg

SEQ ID NO: 69867 - DNA, 25 bp, Homo sapien
taggttactacgttactactatggt

SEQ ID NO: 69868 - DNA, 25 bp, Homo sapien
taggttactacgatactactatggt

SEQ ID NO: 69869 - DNA, 25 bp, Homo sapien
ggggttacctcttgaacgtattaga

SEQ ID NO: 69870 - DNA, 25 bp, Homo sapien
ggggttacctctagaacgtattaga

SEQ ID NO: 69871 - DNA, 25 bp, Homo sapien
aggtcctccgtcgagaagtcatcac

SEQ ID NO: 69872 - DNA, 25 bp, Homo sapien
aggtcctccgtccagaagtcatcac

SEQ ID NO: 69873 - DNA, 25 bp, Homo sapien
gacgtcaaacgtaagagtcttctac

SEQ ID NO: 69874 - DNA, 25 bp, Homo sapien
gacgtcaaacgttagagtcttctac

SEQ ID NO: 69875 - DNA, 25 bp, Homo sapien
ccatgttacaagattgtgtacttta

SEQ ID NO: 69876 - DNA, 25 bp, Homo sapien
ccatgttacaagtttgtgtacttta

SEQ ID NO: 69877 - DNA, 25 bp, Homo sapien
atccagagttatgtcgttttacttt

SEQ ID NO: 69878 - DNA, 25 bp, Homo sapien
atccagagttatctcgttttacttt

SEQ ID NO: 69879 - DNA, 25 bp, Homo sapien
agtacaaggtcctgcggtgcatcaa

SEQ ID NO: 69880 - DNA, 25 bp, Homo sapien
agtacaaggtccagcggtgcatcaa

SEQ ID NO: 69881 - DNA, 25 bp, Homo sapien
agtaactcatctacggggcctatta

SEQ ID NO: 69882 - DNA, 25 bp, Homo sapien
agtaactcatcttcggggcctatta

SEQ ID NO: 69883 - DNA, 25 bp, Homo sapien
tccgaagactgtgcactcaagtctg

SEQ ID NO: 69884 - DNA, 25 bp, Homo sapien
tccgaagactgtccactcaagtctg

SEQ ID NO: 69885 - DNA, 25 bp, Homo sapien
cttcgagagtgactgtacttgtttg

SEQ ID NO: 69886 - DNA, 25 bp, Homo sapien
cttcgagagtgagtgtacttgtttg

SEQ ID NO: 69887 - DNA, 25 bp, Homo sapien
cgttatcatgatcatgatcgttatc

SEQ ID NO: 69888 - DNA, 25 bp, Homo sapien
cgttatcatgatgatgatcgttatc

SEQ ID NO: 69889 - DNA, 25 bp, Homo sapien
ttctaggatgacttagaggtccatc

SEQ ID NO: 69890 - DNA, 25 bp, Homo sapien
ttctaggatgacatagaggtccatc

SEQ ID NO: 69891 - DNA, 25 bp, Homo sapien
caattcttgacgagaggtcacactc

SEQ ID NO: 69892 - DNA, 25 bp, Homo sapien
caattcttgacgtgaggtcacactc

SEQ ID NO: 69893 - DNA, 25 bp, Homo sapien
taatctgaagttgaggtgacactct

SEQ ID NO: 69894 - DNA, 25 bp, Homo sapien
taatctgaagttcaggtgacactct

SEQ ID NO: 69895 - DNA, 25 bp, Homo sapien
catgataaagtagtacggtcatcgt

SEQ ID NO: 69896 - DNA, 25 bp, Homo sapien
catgataaagtactacggtcatcgt

SEQ ID NO: 69897 - DNA, 25 bp, Homo sapien
gttgtttggtggtaccaatttccgg

SEQ ID NO: 69898 - DNA, 25 bp, Homo sapien
gttgtttggtggaaccaatttccgg

SEQ ID NO: 69899 - DNA, 25 bp, Homo sapien
gacgtctggaaaaccacattttctc

SEQ ID NO: 69900 - DNA, 25 bp, Homo sapien
gacgtctggaaatccacattttctc

SEQ ID NO: 69901 - DNA, 25 bp, Homo sapien
gtatgtcaaacccaatcttttcgtc

SEQ ID NO: 69902 - DNA, 25 bp, Homo sapien
gtatgtcaaaccgaatcttttcgtc

SEQ ID NO: 69903 - DNA, 25 bp, Homo sapien
tatgtcttagtaaaaaaccttttct

SEQ ID NO: 69904 - DNA, 25 bp, Homo sapien
tatgtcttagtataaaaccttttct

SEQ ID NO: 69905 - DNA, 25 bp, Homo sapien
ttgttgtaaatgcacagacttattc

SEQ ID NO: 69906 - DNA, 25 bp, Homo sapien
ttgttgtaaatggacagacttattc

SEQ ID NO: 69907 - DNA, 25 bp, Homo sapien
ggttatgtcgtggactccggattct

SEQ ID NO: 69908 - DNA, 25 bp, Homo sapien
ggttatgtcgtgcactccggattct

SEQ ID NO: 69909 - DNA, 25 bp, Homo sapien
agttgagttcttccttgtcactcct

SEQ ID NO: 69910 - DNA, 25 bp, Homo sapien
agttgagttcttgcttgtcactcct

SEQ ID NO: 69911 - DNA, 25 bp, Homo sapien
gtattggtatctatttccacgacgg

SEQ ID NO: 69912 - DNA, 25 bp, Homo sapien
gtattggtatctttttccacgacgg

SEQ ID NO: 69913 - DNA, 25 bp, Homo sapien
tgcgcgtactctgcttgtcccctat

SEQ ID NO: 69914 - DNA, 25 bp, Homo sapien
tgcgcgtactctccttgtcccctat

SEQ ID NO: 69915 - DNA, 25 bp, Homo sapien
gtccaccttctgtctccggacaggt

SEQ ID NO: 69916 - DNA, 25 bp, Homo sapien
gtccaccttctgactccggacaggt

SEQ ID NO: 69917 - DNA, 25 bp, Homo sapien
aacgaccgttgtcgactggaccaga

SEQ ID NO: 69918 - DNA, 25 bp, Homo sapien
aacgaccgttgtggactggaccaga

SEQ ID NO: 69919 - DNA, 25 bp, Homo sapien
aaggtaccagtcgacggggactgac

SEQ ID NO: 69920 - DNA, 25 bp, Homo sapien
aaggtaccagtccacggggactgac

SEQ ID NO: 69921 - DNA, 25 bp, Homo sapien
ctgagacgacttttcttgggacaga

SEQ ID NO: 69922 - DNA, 25 bp, Homo sapien
ctgagacgacttatcttgggacaga

SEQ ID NO: 69923 - DNA, 25 bp, Homo sapien
ctcccactgtcacctcgaaggaaag

SEQ ID NO: 69924 - DNA, 25 bp, Homo sapien
ctcccactgtcagctcgaaggaaag

SEQ ID NO: 69925 - DNA, 25 bp, Homo sapien
ccacccggagacgtggagtacagtg

SEQ ID NO: 69926 - DNA, 25 bp, Homo sapien
ccacccggagacctggagtacagtg

SEQ ID NO: 69927 - DNA, 25 bp, Homo sapien
cacctaagactcatgtcctacttct

SEQ ID NO: 69928 - DNA, 25 bp, Homo sapien
cacctaagactcttgtcctacttct

SEQ ID NO: 69929 - DNA, 25 bp, Homo sapien
attagtagaccctactaacgacgtc

SEQ ID NO: 69930 - DNA, 25 bp, Homo sapien
attagtagacccaactaacgacgtc

SEQ ID NO: 69931 - DNA, 25 bp, Homo sapien
atccttcgagacctcggatgtcgaa

SEQ ID NO: 69932 - DNA, 25 bp, Homo sapien
atccttcgagacgtcggatgtcgaa

SEQ ID NO: 69933 - DNA, 25 bp, Homo sapien
ttcctcttaggttcgatgtatcagt

SEQ ID NO: 69934 - DNA, 25 bp, Homo sapien
ttcctcttaggtacgatgtatcagt

SEQ ID NO: 69935 - DNA, 25 bp, Homo sapien
cctcggttgtttacgagtaattagt

SEQ ID NO: 69936 - DNA, 25 bp, Homo sapien
cctcggttgttttcgagtaattagt

SEQ ID NO: 69937 - DNA, 25 bp, Homo sapien
tagtagtcttggttcgacgtcaaag

SEQ ID NO: 69938 - DNA, 25 bp, Homo sapien
tagtagtcttggatcgacgtcaaag

SEQ ID NO: 69939 - DNA, 25 bp, Homo sapien
gactcgggtcttgttcgaccaaacg

SEQ ID NO: 69940 - DNA, 25 bp, Homo sapien
gactcgggtcttcttcgaccaaacg

SEQ ID NO: 69941 - DNA, 25 bp, Homo sapien
ctggttggatcgtcatcaccgtaaa

SEQ ID NO: 69942 - DNA, 25 bp, Homo sapien
ctggttggatcgacatcaccgtaaa

SEQ ID NO: 69943 - DNA, 25 bp, Homo sapien
gatttcgtactgacatctaggggtt

SEQ ID NO: 69944 - DNA, 25 bp, Homo sapien
gatttcgtactgtcatctaggggtt

SEQ ID NO: 69945 - DNA, 25 bp, Homo sapien
gagtaaggtcctcgtccagggtgac

SEQ ID NO: 69946 - DNA, 25 bp, Homo sapien
gagtaaggtcctggtccagggtgac

SEQ ID NO: 69947 - DNA, 25 bp, Homo sapien
acataagctacttccgcatcgggaa

SEQ ID NO: 69948 - DNA, 25 bp, Homo sapien
acataagctactaccgcatcgggaa

SEQ ID NO: 69949 - DNA, 25 bp, Homo sapien
tatatagttctgtccgaagagaaca

SEQ ID NO: 69950 - DNA, 25 bp, Homo sapien
tatatagttctgaccgaagagaaca

SEQ ID NO: 69951 - DNA, 25 bp, Homo sapien
gtatttctgacctaccgtgaccaaa

SEQ ID NO: 69952 - DNA, 25 bp, Homo sapien
gtatttctgaccaaccgtgaccaaa

SEQ ID NO: 69953 - DNA, 25 bp, Homo sapien
gagagtctgttgacccttggcaaat

SEQ ID NO: 69954 - DNA, 25 bp, Homo sapien
gagagtctgttgtcccttggcaaat

SEQ ID NO: 69955 - DNA, 25 bp, Homo sapien
gttcttgtaccattgacgtccatat

SEQ ID NO: 69956 - DNA, 25 bp, Homo sapien
gttcttgtaccaatgacgtccatat

SEQ ID NO: 69957 - DNA, 25 bp, Homo sapien
ggttcttgtcgaagttagtccatat

SEQ ID NO: 69958 - DNA, 25 bp, Homo sapien
ggttcttgtcgatgttagtccatat

SEQ ID NO: 69959 - DNA, 25 bp, Homo sapien
cagagtttttagttaccgtttcctt

SEQ ID NO: 69960 - DNA, 25 bp, Homo sapien
cagagtttttagataccgtttcctt

SEQ ID NO: 69961 - DNA, 25 bp, Homo sapien
aaatataagtgacctcgaccgtcca

SEQ ID NO: 69962 - DNA, 25 bp, Homo sapien
aaatataagtgagctcgaccgtcca

SEQ ID NO: 69963 - DNA, 25 bp, Homo sapien
acaaattacggtgaattcagtcaat

SEQ ID NO: 69964 - DNA, 25 bp, Homo sapien
acaaattacggtcaattcagtcaat

SEQ ID NO: 69965 - DNA, 25 bp, Homo sapien
aagactccgtactgatgctagtgaa

SEQ ID NO: 69966 - DNA, 25 bp, Homo sapien
aagactccgtacagatgctagtgaa

SEQ ID NO: 69967 - DNA, 25 bp, Homo sapien
ttgatgtcaacgatcgatgtgacag

SEQ ID NO: 69968 - DNA, 25 bp, Homo sapien
ttgatgtcaacgttcgatgtgacag

SEQ ID NO: 69969 - DNA, 25 bp, Homo sapien
accgtagggacagctatggtttgta

SEQ ID NO: 69970 - DNA, 25 bp, Homo sapien
accgtagggacacctatggtttgta

SEQ ID NO: 69971 - DNA, 25 bp, Homo sapien
cggggtgaactttgtgtctacagtc

SEQ ID NO: 69972 - DNA, 25 bp, Homo sapien
cggggtgaacttagtgtctacagtc

SEQ ID NO: 69973 - DNA, 25 bp, Homo sapien
gcatgtatagaccacattcttatag

SEQ ID NO: 69974 - DNA, 25 bp, Homo sapien
gcatgtatagacgacattcttatag

SEQ ID NO: 69975 - DNA, 25 bp, Homo sapien
cgtcaatgtgactctttcctaaagt

SEQ ID NO: 69976 - DNA, 25 bp, Homo sapien
cgtcaatgtgacactttcctaaagt

SEQ ID NO: 69977 - DNA, 25 bp, Homo sapien
caatgagacttattggttagactct

SEQ ID NO: 69978 - DNA, 25 bp, Homo sapien
caatgagacttaatggttagactct

SEQ ID NO: 69979 - DNA, 25 bp, Homo sapien
atactaaatcgatgtgtcgttcacc

SEQ ID NO: 69980 - DNA, 25 bp, Homo sapien
atactaaatcgaagtgtcgttcacc

SEQ ID NO: 69981 - DNA, 25 bp, Homo sapien
cgtatatacaagagatgtgtcactt

SEQ ID NO: 69982 - DNA, 25 bp, Homo sapien
cgtatatacaagtgatgtgtcactt

SEQ ID NO: 69983 - DNA, 25 bp, Homo sapien
ggtgaaagacattgacttgtccgtt

SEQ ID NO: 69984 - DNA, 25 bp, Homo sapien
ggtgaaagacatagacttgtccgtt

SEQ ID NO: 69985 - DNA, 25 bp, Homo sapien
tggtaagacagtcgggccgtgtttc

SEQ ID NO: 69986 - DNA, 25 bp, Homo sapien
tggtaagacagtggggccgtgtttc

SEQ ID NO: 69987 - DNA, 25 bp, Homo sapien
atcacagtggaggacgaacggtttc

SEQ ID NO: 69988 - DNA, 25 bp, Homo sapien
atcacagtggagcacgaacggtttc

SEQ ID NO: 69989 - DNA, 25 bp, Homo sapien
gatcaccgtccctgaagtatatttc

SEQ ID NO: 69990 - DNA, 25 bp, Homo sapien
gatcaccgtcccagaagtatatttc

SEQ ID NO: 69991 - DNA, 25 bp, Homo sapien
cctcgacgcgagaaacgactgtgtc

SEQ ID NO: 69992 - DNA, 25 bp, Homo sapien
cctcgacgcgagtaacgactgtgtc

SEQ ID NO: 69993 - DNA, 25 bp, Homo sapien
gtgttccagacgtccaaacgggttc

SEQ ID NO: 69994 - DNA, 25 bp, Homo sapien
gtgttccagacgaccaaacgggttc

SEQ ID NO: 69995 - DNA, 25 bp, Homo sapien
ggagctcgacaaccagaccgggtcc

SEQ ID NO: 69996 - DNA, 25 bp, Homo sapien
ggagctcgacaagcagaccgggtcc

SEQ ID NO: 69997 - DNA, 25 bp, Homo sapien
agtggaatcccaacgggtattgacg

SEQ ID NO: 69998 - DNA, 25 bp, Homo sapien
agtggaatcccatcgggtattgacg

SEQ ID NO: 69999 - DNA, 25 bp, Homo sapien
tcgaacccttcgatccgatcatgac

SEQ ID NO: 70000 - DNA, 25 bp, Homo sapien
tcgaacccttcgttccgatcatgac

SEQ ID NO: 70001 - DNA, 25 bp, Homo sapien
tgacagcactgcaacccgtcttcga

SEQ ID NO: 70002 - DNA, 25 bp, Homo sapien
tgacagcactgctacccgtcttcga

SEQ ID NO: 70003 - DNA, 25 bp, Homo sapien
caaccgtcactgcagccactgttta

SEQ ID NO: 70004 - DNA, 25 bp, Homo sapien
caaccgtcactggagccactgttta

SEQ ID NO: 70005 - DNA, 25 bp, Homo sapien
ggttggagataccattgacttcttt

SEQ ID NO: 70006 - DNA, 25 bp, Homo sapien
ggttggagatacgattgacttcttt

SEQ ID NO: 70007 - DNA, 25 bp, Homo sapien
acgcattaggtcgacgtccgacgac

SEQ ID NO: 70008 - DNA, 25 bp, Homo sapien
acgcattaggtccacgtccgacgac

SEQ ID NO: 70009 - DNA, 25 bp, Homo sapien
gcaatgtcgcgttgtcgtcggacgt

SEQ ID NO: 70010 - DNA, 25 bp, Homo sapien
gcaatgtcgcgtagtcgtcggacgt

SEQ ID NO: 70011 - DNA, 25 bp, Homo sapien
tttgtctctgtgacaattgtatcaa

SEQ ID NO: 70012 - DNA, 25 bp, Homo sapien
tttgtctctgtgtcaattgtatcaa

SEQ ID NO: 70013 - DNA, 25 bp, Homo sapien
ttctctcacccagtgagaaccacgt

SEQ ID NO: 70014 - DNA, 25 bp, Homo sapien
ttctctcacccactgagaaccacgt

SEQ ID NO: 70015 - DNA, 25 bp, Homo sapien
ctttttacaccaactgggaatacgt

SEQ ID NO: 70016 - DNA, 25 bp, Homo sapien
ctttttacaccatctgggaatacgt

SEQ ID NO: 70017 - DNA, 25 bp, Homo sapien
gtgaataacctctgggtgaacgtcg

SEQ ID NO: 70018 - DNA, 25 bp, Homo sapien
gtgaataacctcagggtgaacgtcg

SEQ ID NO: 70019 - DNA, 25 bp, Homo sapien
gtaaatacattctgggtgtagtccg

SEQ ID NO: 70020 - DNA, 25 bp, Homo sapien
gtaaatacattcagggtgtagtccg

SEQ ID NO: 70021 - DNA, 25 bp, Homo sapien
gagcacgttacaacctataaagact

SEQ ID NO: 70022 - DNA, 25 bp, Homo sapien
gagcacgttacatcctataaagact

SEQ ID NO: 70023 - DNA, 25 bp, Homo sapien
acgctattgtactacatagtaacga

SEQ ID NO: 70024 - DNA, 25 bp, Homo sapien
acgctattgtacaacatagtaacga

SEQ ID NO: 70025 - DNA, 25 bp, Homo sapien
ctctcgactgtcactctcgtcgaaa

SEQ ID NO: 70026 - DNA, 25 bp, Homo sapien
ctctcgactgtctctctcgtcgaaa

SEQ ID NO: 70027 - DNA, 25 bp, Homo sapien
ggtctcggactaaatccggtcagaa

SEQ ID NO: 70028 - DNA, 25 bp, Homo sapien
ggtctcggactatatccggtcagaa

SEQ ID NO: 70029 - DNA, 25 bp, Homo sapien
taaagatgagtacttcgtcgagaac

SEQ ID NO: 70030 - DNA, 25 bp, Homo sapien
taaagatgagtagttcgtcgagaac

SEQ ID NO: 70031 - DNA, 25 bp, Homo sapien
tcatagtcttggatctcgtgttcag

SEQ ID NO: 70032 - DNA, 25 bp, Homo sapien
tcatagtcttggttctcgtgttcag

SEQ ID NO: 70033 - DNA, 25 bp, Homo sapien
tgaaagggtggttacgcgtgaacac

SEQ ID NO: 70034 - DNA, 25 bp, Homo sapien
tgaaagggtggtaacgcgtgaacac

SEQ ID NO: 70035 - DNA, 25 bp, Homo sapien
caacatcatatagaccctgaacgag

SEQ ID NO: 70036 - DNA, 25 bp, Homo sapien
caacatcatatacaccctgaacgag

SEQ ID NO: 70037 - DNA, 25 bp, Homo sapien
agtacctcaatcactccgcgaggtg

SEQ ID NO: 70038 - DNA, 25 bp, Homo sapien
agtacctcaatctctccgcgaggtg

SEQ ID NO: 70039 - DNA, 25 bp, Homo sapien
gtactactaacactgacctggcctt

SEQ ID NO: 70040 - DNA, 25 bp, Homo sapien
gtactactaacagtgacctggcctt

SEQ ID NO: 70041 - DNA, 25 bp, Homo sapien
gactcttcattcacgtagagtcctt

SEQ ID NO: 70042 - DNA, 25 bp, Homo sapien
gactcttcattctcgtagagtcctt

SEQ ID NO: 70043 - DNA, 25 bp, Homo sapien
gaagttagacagttttgtagttccc

SEQ ID NO: 70044 - DNA, 25 bp, Homo sapien
gaagttagacagatttgtagttccc

SEQ ID NO: 70045 - DNA, 25 bp, Homo sapien
tctctctgactgagtatttccttag

SEQ ID NO: 70046 - DNA, 25 bp, Homo sapien
tctctctgactgtgtatttccttag

SEQ ID NO: 70047 - DNA, 25 bp, Homo sapien
agacatagtctgattgacgacaacg

SEQ ID NO: 70048 - DNA, 25 bp, Homo sapien
agacatagtctgtttgacgacaacg

SEQ ID NO: 70049 - DNA, 25 bp, Homo sapien
ttagaacagactgttgacacgatag

SEQ ID NO: 70050 - DNA, 25 bp, Homo sapien
ttagaacagactcttgacacgatag

SEQ ID NO: 70051 - DNA, 25 bp, Homo sapien
tctgacagacgtggttcgaccgaat

SEQ ID NO: 70052 - DNA, 25 bp, Homo sapien
tctgacagacgtcgttcgaccgaat

SEQ ID NO: 70053 - DNA, 25 bp, Homo sapien
gtgtagagtctacgttgaagtactc

SEQ ID NO: 70054 - DNA, 25 bp, Homo sapien
gtgtagagtctaggttgaagtactc

SEQ ID NO: 70055 - DNA, 25 bp, Homo sapien
ttgttaatccgttgagtagttacgc

SEQ ID NO: 70056 - DNA, 25 bp, Homo sapien
ttgttaatccgtagagtagttacgc

SEQ ID NO: 70057 - DNA, 25 bp, Homo sapien
gtagagttaaaccataagtcaacct

SEQ ID NO: 70058 - DNA, 25 bp, Homo sapien
gtagagttaaacgataagtcaacct

SEQ ID NO: 70059 - DNA, 25 bp, Homo sapien
tcagagtgttaaaaagagttcaccc

SEQ ID NO: 70060 - DNA, 25 bp, Homo sapien
tcagagtgttaataagagttcaccc

SEQ ID NO: 70061 - DNA, 25 bp, Homo sapien
ctaaacttttatagggtcactaccg

SEQ ID NO: 70062 - DNA, 25 bp, Homo sapien
ctaaacttttattgggtcactaccg

SEQ ID NO: 70063 - DNA, 25 bp, Homo sapien
gaaactggagttcgtgttactactg

SEQ ID NO: 70064 - DNA, 25 bp, Homo sapien
gaaactggagttggtgttactactg

SEQ ID NO: 70065 - DNA, 25 bp, Homo sapien
gatattcacagtttgttgtttactc

SEQ ID NO: 70066 - DNA, 25 bp, Homo sapien
gatattcacagtatgttgtttactc

SEQ ID NO: 70067 - DNA, 25 bp, Homo sapien
tgtcacgttgtctactctgtttatg

SEQ ID NO: 70068 - DNA, 25 bp, Homo sapien
tgtcacgttgtcaactctgtttatg

SEQ ID NO: 70069 - DNA, 25 bp, Homo sapien
ctagaacaccatccaaagggtcgag

SEQ ID NO: 70070 - DNA, 25 bp, Homo sapien
ctagaacaccatgcaaagggtcgag

SEQ ID NO: 70071 - DNA, 25 bp, Homo sapien
gacaggataccgaacaagtcgcaca

SEQ ID NO: 70072 - DNA, 25 bp, Homo sapien
gacaggataccgtacaagtcgcaca

SEQ ID NO: 70073 - DNA, 25 bp, Homo sapien
cgtgttggtggaatccggttgactt

SEQ ID NO: 70074 - DNA, 25 bp, Homo sapien
cgtgttggtggattccggttgactt

SEQ ID NO: 70075 - DNA, 25 bp, Homo sapien
aggaaattacgtccatgtatgacga

SEQ ID NO: 70076 - DNA, 25 bp, Homo sapien
aggaaattacgtgcatgtatgacga

SEQ ID NO: 70077 - DNA, 25 bp, Homo sapien
tgtaatagagtaatttttcgtacat

SEQ ID NO: 70078 - DNA, 25 bp, Homo sapien
tgtaatagagtattttttcgtacat

SEQ ID NO: 70079 - DNA, 25 bp, Homo sapien
aggaagttttttcactcgtcacgta

SEQ ID NO: 70080 - DNA, 25 bp, Homo sapien
aggaagttttttgactcgtcacgta

SEQ ID NO: 70081 - DNA, 25 bp, Homo sapien
gtctagtgtctcagatcctcctttc

SEQ ID NO: 70082 - DNA, 25 bp, Homo sapien
gtctagtgtctctgatcctcctttc

SEQ ID NO: 70083 - DNA, 25 bp, Homo sapien
gttggttctactttcacgtcacttc

SEQ ID NO: 70084 - DNA, 25 bp, Homo sapien
gttggttctactatcacgtcacttc

SEQ ID NO: 70085 - DNA, 25 bp, Homo sapien
actttgttatttgtctcggactgag

SEQ ID NO: 70086 - DNA, 25 bp, Homo sapien
actttgttatttctctcggactgag

SEQ ID NO: 70087 - DNA, 25 bp, Homo sapien
catccttaattgtacagttcgtgta

SEQ ID NO: 70088 - DNA, 25 bp, Homo sapien
catccttaattgaacagttcgtgta

SEQ ID NO: 70089 - DNA, 25 bp, Homo sapien
aaccatgtgttttaacattcgtgat

SEQ ID NO: 70090 - DNA, 25 bp, Homo sapien
aaccatgtgtttaaacattcgtgat

SEQ ID NO: 70091 - DNA, 25 bp, Homo sapien
actttagctatctagtcttcgtgtt

SEQ ID NO: 70092 - DNA, 25 bp, Homo sapien
actttagctatcaagtcttcgtgtt

SEQ ID NO: 70093 - DNA, 25 bp, Homo sapien
acttaagtctaggtctttatgtgtc

SEQ ID NO: 70094 - DNA, 25 bp, Homo sapien
acttaagtctagctctttatgtgtc

SEQ ID NO: 70095 - DNA, 25 bp, Homo sapien
gacaaatacaaatgttacgtgtctt

SEQ ID NO: 70096 - DNA, 25 bp, Homo sapien
gacaaatacaaaagttacgtgtctt

SEQ ID NO: 70097 - DNA, 25 bp, Homo sapien
gtgtctacttagagtcatctccttt

SEQ ID NO: 70098 - DNA, 25 bp, Homo sapien
gtgtctacttagtgtcatctccttt

SEQ ID NO: 70099 - DNA, 25 bp, Homo sapien
gttgttgtgtagtagtcatcccatt

SEQ ID NO: 70100 - DNA, 25 bp, Homo sapien
gttgttgtgtagaagtcatcccatt

SEQ ID NO: 70101 - DNA, 25 bp, Homo sapien
tggttatagaaaactacacttgttc

SEQ ID NO: 70102 - DNA, 25 bp, Homo sapien
tggttatagaaatctacacttgttc

SEQ ID NO: 70103 - DNA, 25 bp, Homo sapien
agaaataggtattaccattatctcg

SEQ ID NO: 70104 - DNA, 25 bp, Homo sapien
agaaataggtataaccattatctcg

SEQ ID NO: 70105 - DNA, 25 bp, Homo sapien
aagacgcaaacaatctctaggatcg

SEQ ID NO: 70106 - DNA, 25 bp, Homo sapien
aagacgcaaacattctctaggatcg

SEQ ID NO: 70107 - DNA, 25 bp, Homo sapien
atttgaaaaatcgtgttgtaacctc

SEQ ID NO: 70108 - DNA, 25 bp, Homo sapien
atttgaaaaatcctgttgtaacctc

SEQ ID NO: 70109 - DNA, 25 bp, Homo sapien
tccatgaaaacatctcgtccggact

SEQ ID NO: 70110 - DNA, 25 bp, Homo sapien
tccatgaaaacaactcgtccggact

SEQ ID NO: 70111 - DNA, 25 bp, Homo sapien
tgtcaaggacgtgttgttttactac

SEQ ID NO: 70112 - DNA, 25 bp, Homo sapien
tgtcaaggacgtcttgttttactac

SEQ ID NO: 70113 - DNA, 25 bp, Homo sapien
gagcgagatccttttacacgatacg

SEQ ID NO: 70114 - DNA, 25 bp, Homo sapien
gagcgagatcctattacacgatacg

SEQ ID NO: 70115 - DNA, 25 bp, Homo sapien
ttacagacgtcgtctgtgactgaat

SEQ ID NO: 70116 - DNA, 25 bp, Homo sapien
ttacagacgtcgactgtgactgaat

SEQ ID NO: 70117 - DNA, 25 bp, Homo sapien
caaggaaacggtcgtggcagaacgt

SEQ ID NO: 70118 - DNA, 25 bp, Homo sapien
caaggaaacggtggtggcagaacgt

SEQ ID NO: 70119 - DNA, 25 bp, Homo sapien
taactagaataggaggcactgacag

SEQ ID NO: 70120 - DNA, 25 bp, Homo sapien
taactagaatagcaggcactgacag

SEQ ID NO: 70121 - DNA, 25 bp, Homo sapien
gacatgtactatcttagtgtcttta

SEQ ID NO: 70122 - DNA, 25 bp, Homo sapien
gacatgtactatgttagtgtcttta

SEQ ID NO: 70123 - DNA, 25 bp, Homo sapien
tagaatgatgtcgtcactactttta

SEQ ID NO: 70124 - DNA, 25 bp, Homo sapien
tagaatgatgtcctcactactttta

SEQ ID NO: 70125 - DNA, 25 bp, Homo sapien
ggacataagatgtctctgtcctcaa

SEQ ID NO: 70126 - DNA, 25 bp, Homo sapien
ggacataagatgactctgtcctcaa

SEQ ID NO: 70127 - DNA, 25 bp, Homo sapien
aaaagactccaaggttcgtacgaac

SEQ ID NO: 70128 - DNA, 25 bp, Homo sapien
aaaagactccaacgttcgtacgaac

SEQ ID NO: 70129 - DNA, 25 bp, Homo sapien
gtaaccgacgtgtcggcgttgtaaa

SEQ ID NO: 70130 - DNA, 25 bp, Homo sapien
gtaaccgacgtgacggcgttgtaaa

SEQ ID NO: 70131 - DNA, 25 bp, Homo sapien
gtatacgtcgggacccgtgtgaacc

SEQ ID NO: 70132 - DNA, 25 bp, Homo sapien
gtatacgtcgggtcccgtgtgaacc

SEQ ID NO: 70133 - DNA, 25 bp, Homo sapien
agacaggagaagacgtaggacaaca

SEQ ID NO: 70134 - DNA, 25 bp, Homo sapien
agacaggagaagtcgtaggacaaca

SEQ ID NO: 70135 - DNA, 25 bp, Homo sapien
gacaggtgactgtggacgaatactt

SEQ ID NO: 70136 - DNA, 25 bp, Homo sapien
gacaggtgactgaggacgaatactt

SEQ ID NO: 70137 - DNA, 25 bp, Homo sapien
tacgggagtctctcggacggaccct

SEQ ID NO: 70138 - DNA, 25 bp, Homo sapien
tacgggagtctcacggacggaccct

SEQ ID NO: 70139 - DNA, 25 bp, Homo sapien
acgcgtgaacgaacccgggattcgt

SEQ ID NO: 70140 - DNA, 25 bp, Homo sapien
acgcgtgaacgatcccgggattcgt

SEQ ID NO: 70141 - DNA, 25 bp, Homo sapien
aagtaaataggactttaccgtctgt

SEQ ID NO: 70142 - DNA, 25 bp, Homo sapien
aagtaaataggagtttaccgtctgt

SEQ ID NO: 70143 - DNA, 25 bp, Homo sapien
agaccaaagggttctagatcgtgtt

SEQ ID NO: 70144 - DNA, 25 bp, Homo sapien
agaccaaagggtactagatcgtgtt

SEQ ID NO: 70145 - DNA, 25 bp, Homo sapien
tacgccgaacggtcgaatcctggta

SEQ ID NO: 70146 - DNA, 25 bp, Homo sapien
tacgccgaacggacgaatcctggta

SEQ ID NO: 70147 - DNA, 25 bp, Homo sapien
agcgagaaccactacggtgacagtg

SEQ ID NO: 70148 - DNA, 25 bp, Homo sapien
agcgagaaccacaacggtgacagtg

SEQ ID NO: 70149 - DNA, 25 bp, Homo sapien
acacgtcatcctaaaagacaaccgg

SEQ ID NO: 70150 - DNA, 25 bp, Homo sapien
acacgtcatccttaaagacaaccgg

SEQ ID NO: 70151 - DNA, 25 bp, Homo sapien
actgtacctcccagaagactaaggg

SEQ ID NO: 70152 - DNA, 25 bp, Homo sapien
actgtacctccctgaagactaaggg

SEQ ID NO: 70153 - DNA, 25 bp, Homo sapien
agaactgtctttttgaacaaaactg

SEQ ID NO: 70154 - DNA, 25 bp, Homo sapien
agaactgtctttatgaacaaaactg

SEQ ID NO: 70155 - DNA, 25 bp, Homo sapien
agtgtgttcttaaaatcagaaactc

SEQ ID NO: 70156 - DNA, 25 bp, Homo sapien
agtgtgttcttataatcagaaactc

SEQ ID NO: 70157 - DNA, 25 bp, Homo sapien
atctcgttgtacgtttcgaagggac

SEQ ID NO: 70158 - DNA, 25 bp, Homo sapien
atctcgttgtacctttcgaagggac

SEQ ID NO: 70159 - DNA, 25 bp, Homo sapien
ataccgtactgtgtttgtgtgggtc

SEQ ID NO: 70160 - DNA, 25 bp, Homo sapien
ataccgtactgtctttgtgtgggtc

SEQ ID NO: 70161 - DNA, 25 bp, Homo sapien
ggaacactacttcatctttttcggg

SEQ ID NO: 70162 - DNA, 25 bp, Homo sapien
ggaacactacttgatctttttcggg

SEQ ID NO: 70163 - DNA, 25 bp, Homo sapien
aaataaataaatttttagtcttcgt

SEQ ID NO: 70164 - DNA, 25 bp, Homo sapien
aaataaataaatatttagtcttcgt

SEQ ID NO: 70165 - DNA, 25 bp, Homo sapien
taattagtcctcaatcgcgtcatgt

SEQ ID NO: 70166 - DNA, 25 bp, Homo sapien
taattagtcctctatcgcgtcatgt

SEQ ID NO: 70167 - DNA, 25 bp, Homo sapien
accatgacgaccatgagcctgtggt

SEQ ID NO: 70168 - DNA, 25 bp, Homo sapien
accatgacgaccttgagcctgtggt

SEQ ID NO: 70169 - DNA, 25 bp, Homo sapien
cgtccatcaccttgaacgccttgtt

SEQ ID NO: 70170 - DNA, 25 bp, Homo sapien
cgtccatcacctagaacgccttgtt

SEQ ID NO: 70171 - DNA, 25 bp, Homo sapien
gtgaagtcaataagaccttttaact

SEQ ID NO: 70172 - DNA, 25 bp, Homo sapien
gtgaagtcaatatgaccttttaact

SEQ ID NO: 70173 - DNA, 25 bp, Homo sapien
gtataaggacgattcacttcttgcc

SEQ ID NO: 70174 - DNA, 25 bp, Homo sapien
gtataaggacgaatcacttcttgcc

SEQ ID NO: 70175 - DNA, 25 bp, Homo sapien
aagtacagatggtaacagctttttc

SEQ ID NO: 70176 - DNA, 25 bp, Homo sapien
aagtacagatggaaacagctttttc

SEQ ID NO: 70177 - DNA, 25 bp, Homo sapien
ttcgaggaggtcacgcaacctacgg

SEQ ID NO: 70178 - DNA, 25 bp, Homo sapien
ttcgaggaggtctcgcaacctacgg

SEQ ID NO: 70179 - DNA, 25 bp, Homo sapien
ataaaggagattctgaacgttcgtc

SEQ ID NO: 70180 - DNA, 25 bp, Homo sapien
ataaaggagattgtgaacgttcgtc

SEQ ID NO: 70181 - DNA, 25 bp, Homo sapien
cgcacgagaaaggaggtatcaactc

SEQ ID NO: 70182 - DNA, 25 bp, Homo sapien
cgcacgagaaagcaggtatcaactc

SEQ ID NO: 70183 - DNA, 25 bp, Homo sapien
accgggtaacaactgttcgtcaacc

SEQ ID NO: 70184 - DNA, 25 bp, Homo sapien
accgggtaacaagtgttcgtcaacc

SEQ ID NO: 70185 - DNA, 25 bp, Homo sapien
acgataccaaactggtgtcgtaatt

SEQ ID NO: 70186 - DNA, 25 bp, Homo sapien
acgataccaaacaggtgtcgtaatt

SEQ ID NO: 70187 - DNA, 25 bp, Homo sapien
taccccgacatgacgtcgcgcgggt

SEQ ID NO: 70188 - DNA, 25 bp, Homo sapien
taccccgacatgtcgtcgcgcgggt

SEQ ID NO: 70189 - DNA, 25 bp, Homo sapien
cattcctttacattgtggttcactg

SEQ ID NO: 70190 - DNA, 25 bp, Homo sapien
cattcctttacaatgtggttcactg

SEQ ID NO: 70191 - DNA, 25 bp, Homo sapien
gagacgcccttcttagggggcacct

SEQ ID NO: 70192 - DNA, 25 bp, Homo sapien
gagacgcccttcatagggggcacct

SEQ ID NO: 70193 - DNA, 25 bp, Homo sapien
cgacgacaggccaagggggctctct

SEQ ID NO: 70194 - DNA, 25 bp, Homo sapien
cgacgacaggcctagggggctctct

SEQ ID NO: 70195 - DNA, 25 bp, Homo sapien
ctggggtatacgtatgtgtctcggt

SEQ ID NO: 70196 - DNA, 25 bp, Homo sapien
ctggggtatacgaatgtgtctcggt

SEQ ID NO: 70197 - DNA, 25 bp, Homo sapien
caggattaacacatcgtcgacgaag

SEQ ID NO: 70198 - DNA, 25 bp, Homo sapien
caggattaacacttcgtcgacgaag

SEQ ID NO: 70199 - DNA, 25 bp, Homo sapien
gagtatctaccttcgacgacaggac

SEQ ID NO: 70200 - DNA, 25 bp, Homo sapien
gagtatctacctacgacgacaggac

SEQ ID NO: 70201 - DNA, 25 bp, Homo sapien
ctgacgtcaccgagacacaggttcg

SEQ ID NO: 70202 - DNA, 25 bp, Homo sapien
ctgacgtcaccgtgacacaggttcg

SEQ ID NO: 70203 - DNA, 25 bp, Homo sapien
cgagtcggtccgacaagtagtcgtg

SEQ ID NO: 70204 - DNA, 25 bp, Homo sapien
cgagtcggtccgtcaagtagtcgtg

SEQ ID NO: 70205 - DNA, 25 bp, Homo sapien
cgacctagtcaggttacgagaccga

SEQ ID NO: 70206 - DNA, 25 bp, Homo sapien
cgacctagtcagcttacgagaccga

SEQ ID NO: 70207 - DNA, 25 bp, Homo sapien
aaaccggaataccaccgagagtcag

SEQ ID NO: 70208 - DNA, 25 bp, Homo sapien
aaaccggaatacgaccgagagtcag

SEQ ID NO: 70209 - DNA, 25 bp, Homo sapien
tcactcccaaaggtaccttcggtcg

SEQ ID NO: 70210 - DNA, 25 bp, Homo sapien
tcactcccaaagctaccttcggtcg

SEQ ID NO: 70211 - DNA, 25 bp, Homo sapien
aggcccaggcgtcgacacgacgtct

SEQ ID NO: 70212 - DNA, 25 bp, Homo sapien
aggcccaggcgtggacacgacgtct

SEQ ID NO: 70213 - DNA, 25 bp, Homo sapien
aggtcgtcccaggtctcacccaggt

SEQ ID NO: 70214 - DNA, 25 bp, Homo sapien
aggtcgtcccagctctcacccaggt

SEQ ID NO: 70215 - DNA, 25 bp, Homo sapien
ctcgtaccagaccttaccggtaggt

SEQ ID NO: 70216 - DNA, 25 bp, Homo sapien
ctcgtaccagacgttaccggtaggt

SEQ ID NO: 70217 - DNA, 25 bp, Homo sapien
gaacagtcgtcactgtttcagttgt

SEQ ID NO: 70218 - DNA, 25 bp, Homo sapien
gaacagtcgtcagtgtttcagttgt

SEQ ID NO: 70219 - DNA, 25 bp, Homo sapien
agaaaaacctcattgtctatggtaa

SEQ ID NO: 70220 - DNA, 25 bp, Homo sapien
agaaaaacctcaatgtctatggtaa

SEQ ID NO: 70221 - DNA, 25 bp, Homo sapien
tacgaaagactttttgaactcgtaa

SEQ ID NO: 70222 - DNA, 25 bp, Homo sapien
tacgaaagacttattgaactcgtaa

SEQ ID NO: 70223 - DNA, 25 bp, Homo sapien
gaaataagacttattgtcttcgtgc

SEQ ID NO: 70224 - DNA, 25 bp, Homo sapien
gaaataagactttttgtcttcgtgc

SEQ ID NO: 70225 - DNA, 25 bp, Homo sapien
cacgagaaaaacgtttggtttttct

SEQ ID NO: 70226 - DNA, 25 bp, Homo sapien
cacgagaaaaacctttggtttttct

SEQ ID NO: 70227 - DNA, 25 bp, Homo sapien
ccaagaacagggttggtcggtttcg

SEQ ID NO: 70228 - DNA, 25 bp, Homo sapien
ccaagaacagggatggtcggtttcg

SEQ ID NO: 70229 - DNA, 25 bp, Homo sapien
caaaccaggtgctgtaggttgatgt

SEQ ID NO: 70230 - DNA, 25 bp, Homo sapien
caaaccaggtgcagtaggttgatgt

SEQ ID NO: 70231 - DNA, 25 bp, Homo sapien
cgacctcagccgacatagactgtgg

SEQ ID NO: 70232 - DNA, 25 bp, Homo sapien
cgacctcagccgtcatagactgtgg

SEQ ID NO: 70233 - DNA, 25 bp, Homo sapien
cgcgtccagccgtgacttgtcgtgg

SEQ ID NO: 70234 - DNA, 25 bp, Homo sapien
cgcgtccagccgagacttgtcgtgg

SEQ ID NO: 70235 - DNA, 25 bp, Homo sapien
tggctcgcgcgaacgtttatacggg

SEQ ID NO: 70236 - DNA, 25 bp, Homo sapien
tggctcgcgcgatcgtttatacggg

SEQ ID NO: 70237 - DNA, 25 bp, Homo sapien
aatatttgtcgaacatttcctgaag

SEQ ID NO: 70238 - DNA, 25 bp, Homo sapien
aatatttgtcgatcatttcctgaag

SEQ ID NO: 70239 - DNA, 25 bp, Homo sapien
catttgtctacgtggtaaccccaga

SEQ ID NO: 70240 - DNA, 25 bp, Homo sapien
catttgtctacgaggtaaccccaga

SEQ ID NO: 70241 - DNA, 25 bp, Homo sapien
ctttgtctagaagagacccgacgga

SEQ ID NO: 70242 - DNA, 25 bp, Homo sapien
ctttgtctagaacagacccgacgga

SEQ ID NO: 70243 - DNA, 25 bp, Homo sapien
ggaaaggtttattcccagagacaag

SEQ ID NO: 70244 - DNA, 25 bp, Homo sapien
ggaaaggtttatacccagagacaag

SEQ ID NO: 70245 - DNA, 25 bp, Homo sapien
aaaggtctacaaactgtcacatttg

SEQ ID NO: 70246 - DNA, 25 bp, Homo sapien
aaaggtctacaatctgtcacatttg

SEQ ID NO: 70247 - DNA, 25 bp, Homo sapien
caggagtcacatgtttcgacgatga

SEQ ID NO: 70248 - DNA, 25 bp, Homo sapien
caggagtcacatctttcgacgatga

SEQ ID NO: 70249 - DNA, 25 bp, Homo sapien
ccaaatgacccacttatcgtgaaag

SEQ ID NO: 70250 - DNA, 25 bp, Homo sapien
ccaaatgacccagttatcgtgaaag

SEQ ID NO: 70251 - DNA, 25 bp, Homo sapien
caatgactccgtcgaattaagactg

SEQ ID NO: 70252 - DNA, 25 bp, Homo sapien
caatgactccgtggaattaagactg

SEQ ID NO: 70253 - DNA, 25 bp, Homo sapien
gtatttggtcttgaatatccagatc

SEQ ID NO: 70254 - DNA, 25 bp, Homo sapien
gtatttggtcttcaatatccagatc

SEQ ID NO: 70255 - DNA, 25 bp, Homo sapien
ctctttagtttcatgacagtgaatt

SEQ ID NO: 70256 - DNA, 25 bp, Homo sapien
ctctttagtttcttgacagtgaatt

SEQ ID NO: 70257 - DNA, 25 bp, Homo sapien
actgtctctgtctcgggaatggata

SEQ ID NO: 70258 - DNA, 25 bp, Homo sapien
actgtctctgtcacgggaatggata

SEQ ID NO: 70259 - DNA, 25 bp, Homo sapien
ggcctagtaccattcaaacgatata

SEQ ID NO: 70260 - DNA, 25 bp, Homo sapien
ggcctagtaccaatcaaacgatata

SEQ ID NO: 70261 - DNA, 25 bp, Homo sapien
ctctcttatgttagttcggtttaaa

SEQ ID NO: 70262 - DNA, 25 bp, Homo sapien
ctctcttatgtttgttcggtttaaa

SEQ ID NO: 70263 - DNA, 25 bp, Homo sapien
ccaatccgtttatgaatcgactcag

SEQ ID NO: 70264 - DNA, 25 bp, Homo sapien
ccaatccgtttaagaatcgactcag

SEQ ID NO: 70265 - DNA, 25 bp, Homo sapien
cactgtgaaacgtccagtaaaccag

SEQ ID NO: 70266 - DNA, 25 bp, Homo sapien
cactgtgaaacgaccagtaaaccag

SEQ ID NO: 70267 - DNA, 25 bp, Homo sapien
tgcctgagcggtcctcatccaccag

SEQ ID NO: 70268 - DNA, 25 bp, Homo sapien
tgcctgagcggtgctcatccaccag

SEQ ID NO: 70269 - DNA, 25 bp, Homo sapien
aaccggattgtcctgtctcgactcc

SEQ ID NO: 70270 - DNA, 25 bp, Homo sapien
aaccggattgtcgtgtctcgactcc

SEQ ID NO: 70271 - DNA, 25 bp, Homo sapien
tcaatggtttctgtctgtgtaaccg

SEQ ID NO: 70272 - DNA, 25 bp, Homo sapien
tcaatggtttctctctgtgtaaccg

SEQ ID NO: 70273 - DNA, 25 bp, Homo sapien
ttatatactgtcctttctttgaagg

SEQ ID NO: 70274 - DNA, 25 bp, Homo sapien
ttatatactgtcgtttctttgaagg

SEQ ID NO: 70275 - DNA, 25 bp, Homo sapien
gtttgagttctcacttacaaaaacg

SEQ ID NO: 70276 - DNA, 25 bp, Homo sapien
gtttgagttctctcttacaaaaacg

SEQ ID NO: 70277 - DNA, 25 bp, Homo sapien
cgttgtaaattgtattcactttgac

SEQ ID NO: 70278 - DNA, 25 bp, Homo sapien
cgttgtaaattgaattcactttgac

SEQ ID NO: 70279 - DNA, 25 bp, Homo sapien
ttgtcaagacttgtccgtcttttac

SEQ ID NO: 70280 - DNA, 25 bp, Homo sapien
ttgtcaagacttctccgtcttttac

SEQ ID NO: 70281 - DNA, 25 bp, Homo sapien
tttgtcggaatttccttcttcactg

SEQ ID NO: 70282 - DNA, 25 bp, Homo sapien
tttgtcggaattaccttcttcactg

SEQ ID NO: 70283 - DNA, 25 bp, Homo sapien
taggcttctctccactctctgtaag

SEQ ID NO: 70284 - DNA, 25 bp, Homo sapien
taggcttctctcgactctctgtaag

SEQ ID NO: 70285 - DNA, 25 bp, Homo sapien
agtatcttaccgacatttgtacgag

SEQ ID NO: 70286 - DNA, 25 bp, Homo sapien
agtatcttaccgtcatttgtacgag

SEQ ID NO: 70287 - DNA, 25 bp, Homo sapien
agttccttacgttcgttttgactcg

SEQ ID NO: 70288 - DNA, 25 bp, Homo sapien
agttccttacgtacgttttgactcg

SEQ ID NO: 70289 - DNA, 25 bp, Homo sapien
aatggtctctcatcgtttcagaagt

SEQ ID NO: 70290 - DNA, 25 bp, Homo sapien
aatggtctctcaacgtttcagaagt

SEQ ID NO: 70291 - DNA, 25 bp, Homo sapien
gtttacctgagttctagtacctata

SEQ ID NO: 70292 - DNA, 25 bp, Homo sapien
gtttacctgagtactagtacctata

SEQ ID NO: 70293 - DNA, 25 bp, Homo sapien
gctttgtaactgattatgttcacga

SEQ ID NO: 70294 - DNA, 25 bp, Homo sapien
gctttgtaactgtttatgttcacga

SEQ ID NO: 70295 - DNA, 25 bp, Homo sapien
cccttcttccgtacttggtgccgta

SEQ ID NO: 70296 - DNA, 25 bp, Homo sapien
cccttcttccgttcttggtgccgta

SEQ ID NO: 70297 - DNA, 25 bp, Homo sapien
tcaactgaaacttagggtccatgag

SEQ ID NO: 70298 - DNA, 25 bp, Homo sapien
tcaactgaaactaagggtccatgag

SEQ ID NO: 70299 - DNA, 25 bp, Homo sapien
tctaagacgtttaaaagggtcccaa

SEQ ID NO: 70300 - DNA, 25 bp, Homo sapien
tctaagacgttttaaagggtcccaa

SEQ ID NO: 70301 - DNA, 25 bp, Homo sapien
aggacttcctactctggaccctaca

SEQ ID NO: 70302 - DNA, 25 bp, Homo sapien
aggacttcctacactggaccctaca

SEQ ID NO: 70303 - DNA, 25 bp, Homo sapien
agaaataacccgagtctggtcctca

SEQ ID NO: 70304 - DNA, 25 bp, Homo sapien
agaaataacccgtgtctggtcctca

SEQ ID NO: 70305 - DNA, 25 bp, Homo sapien
taataataccgtgtgggctctatat

SEQ ID NO: 70306 - DNA, 25 bp, Homo sapien
taataataccgtctgggctctatat

SEQ ID NO: 70307 - DNA, 25 bp, Homo sapien
taaagttataccagcggtttgtcta

SEQ ID NO: 70308 - DNA, 25 bp, Homo sapien
taaagttatacctgcggtttgtcta

SEQ ID NO: 70309 - DNA, 25 bp, Homo sapien
aactttaaaggtggactgtcgttac

SEQ ID NO: 70310 - DNA, 25 bp, Homo sapien
aactttaaaggtcgactgtcgttac

SEQ ID NO: 70311 - DNA, 25 bp, Homo sapien
cgagtcattcgaagtcactctgtga

SEQ ID NO: 70312 - DNA, 25 bp, Homo sapien
cgagtcattcgatgtcactctgtga

SEQ ID NO: 70313 - DNA, 25 bp, Homo sapien
tgacctccattcgttgactttacag

SEQ ID NO: 70314 - DNA, 25 bp, Homo sapien
tgacctccattccttgactttacag

SEQ ID NO: 70315 - DNA, 25 bp, Homo sapien
cgatacgtgtctacgttttactagt

SEQ ID NO: 70316 - DNA, 25 bp, Homo sapien
cgatacgtgtcttcgttttactagt

SEQ ID NO: 70317 - DNA, 25 bp, Homo sapien
ttcggtagcggctttgtgacgagtc

SEQ ID NO: 70318 - DNA, 25 bp, Homo sapien
ttcggtagcggcattgtgacgagtc

SEQ ID NO: 70319 - DNA, 25 bp, Homo sapien
gtttacagtgggtttacgtgaaacc

SEQ ID NO: 70320 - DNA, 25 bp, Homo sapien
gtttacagtgggattacgtgaaacc

SEQ ID NO: 70321 - DNA, 25 bp, Homo sapien
atattttacggatgtgtccaaaccg

SEQ ID NO: 70322 - DNA, 25 bp, Homo sapien
atattttacggaagtgtccaaaccg

SEQ ID NO: 70323 - DNA, 25 bp, Homo sapien
gcttctctgacgttcgatctacccg

SEQ ID NO: 70324 - DNA, 25 bp, Homo sapien
gcttctctgacgatcgatctacccg

SEQ ID NO: 70325 - DNA, 25 bp, Homo sapien
gaaggtgctagtgaaccacccgtcc

SEQ ID NO: 70326 - DNA, 25 bp, Homo sapien
gaaggtgctagtcaaccacccgtcc

SEQ ID NO: 70327 - DNA, 25 bp, Homo sapien
atagtcgagggagaaccccggtgac

SEQ ID NO: 70328 - DNA, 25 bp, Homo sapien
atagtcgagggacaaccccggtgac

SEQ ID NO: 70329 - DNA, 25 bp, Homo sapien
gtcaagttaagaaaccacacggact

SEQ ID NO: 70330 - DNA, 25 bp, Homo sapien
gtcaagttaagataccacacggact

SEQ ID NO: 70331 - DNA, 25 bp, Homo sapien
agtttgtttacatgctgtccagtct

SEQ ID NO: 70332 - DNA, 25 bp, Homo sapien
agtttgtttacaagctgtccagtct

SEQ ID NO: 70333 - DNA, 25 bp, Homo sapien
aatgttatggtacatctctgtattc

SEQ ID NO: 70334 - DNA, 25 bp, Homo sapien
aatgttatggtagatctctgtattc

SEQ ID NO: 70335 - DNA, 25 bp, Homo sapien
tattgttctgtaagatcctaaagtc

SEQ ID NO: 70336 - DNA, 25 bp, Homo sapien
tattgttctgtatgatcctaaagtc

SEQ ID NO: 70337 - DNA, 25 bp, Homo sapien
ttttgtaaaatgtccctagagtcgt

SEQ ID NO: 70338 - DNA, 25 bp, Homo sapien
ttttgtaaaatgaccctagagtcgt

SEQ ID NO: 70339 - DNA, 25 bp, Homo sapien
ttctattacacgaccggagagtagt

SEQ ID NO: 70340 - DNA, 25 bp, Homo sapien
ttctattacacgtccggagagtagt

SEQ ID NO: 70341 - DNA, 25 bp, Homo sapien
tctacgtaggtcgtactgcccacct

SEQ ID NO: 70342 - DNA, 25 bp, Homo sapien
tctacgtaggtcctactgcccacct

SEQ ID NO: 70343 - DNA, 25 bp, Homo sapien
tctcgagtctacctcgtccagtcct

SEQ ID NO: 70344 - DNA, 25 bp, Homo sapien
tctcgagtctacgtcgtccagtcct

SEQ ID NO: 70345 - DNA, 25 bp, Homo sapien
cctgctcccgggacgtggatcttct

SEQ ID NO: 70346 - DNA, 25 bp, Homo sapien
cctgctcccgggtcgtggatcttct

SEQ ID NO: 70347 - DNA, 25 bp, Homo sapien
tcctgaccccgagttgtttacctta

SEQ ID NO: 70348 - DNA, 25 bp, Homo sapien
tcctgaccccgacttgtttacctta

SEQ ID NO: 70349 - DNA, 25 bp, Homo sapien
ggacatcgacagattgtcaccttag

SEQ ID NO: 70350 - DNA, 25 bp, Homo sapien
ggacatcgacagtttgtcaccttag

SEQ ID NO: 70351 - DNA, 25 bp, Homo sapien
aggtgccgagcgtgcgtactccttg

SEQ ID NO: 70352 - DNA, 25 bp, Homo sapien
aggtgccgagcgagcgtactccttg

SEQ ID NO: 70353 - DNA, 25 bp, Homo sapien
tacccgagcgcgacacacagtatcg

SEQ ID NO: 70354 - DNA, 25 bp, Homo sapien
tacccgagcgcgtcacacagtatcg

SEQ ID NO: 70355 - DNA, 25 bp, Homo sapien
ggagttgtccttcctcaacaggtct

SEQ ID NO: 70356 - DNA, 25 bp, Homo sapien
ggagttgtccttgctcaacaggtct

SEQ ID NO: 70357 - DNA, 25 bp, Homo sapien
aagtgtccccctttccgaccggtga

SEQ ID NO: 70358 - DNA, 25 bp, Homo sapien
aagtgtccccctatccgaccggtga

SEQ ID NO: 70359 - DNA, 25 bp, Homo sapien
ttggaccccttctggtgtcccgtca

SEQ ID NO: 70360 - DNA, 25 bp, Homo sapien
ttggaccccttcaggtgtcccgtca

SEQ ID NO: 70361 - DNA, 25 bp, Homo sapien
atggcacctcttagggcacctagag

SEQ ID NO: 70362 - DNA, 25 bp, Homo sapien
atggcacctctttgggcacctagag

SEQ ID NO: 70363 - DNA, 25 bp, Homo sapien
ttcttacttggtgttgtcacgatgg

SEQ ID NO: 70364 - DNA, 25 bp, Homo sapien
ttcttacttggtcttgtcacgatgg

SEQ ID NO: 70365 - DNA, 25 bp, Homo sapien
ttctccgatagttcatggtcataga

SEQ ID NO: 70366 - DNA, 25 bp, Homo sapien
ttctccgatagtacatggtcataga

SEQ ID NO: 70367 - DNA, 25 bp, Homo sapien
cggagggatgttcagttctcataag

SEQ ID NO: 70368 - DNA, 25 bp, Homo sapien
cggagggatgttgagttctcataag

SEQ ID NO: 70369 - DNA, 25 bp, Homo sapien
atagtgcctgttgatgactcttaat

SEQ ID NO: 70370 - DNA, 25 bp, Homo sapien
atagtgcctgttcatgactcttaat

SEQ ID NO: 70371 - DNA, 25 bp, Homo sapien
tccagactcctggtcaattttcgaa

SEQ ID NO: 70372 - DNA, 25 bp, Homo sapien
tccagactcctgctcaattttcgaa

SEQ ID NO: 70373 - DNA, 25 bp, Homo sapien
gtactgtcactgtcatttcttgatt

SEQ ID NO: 70374 - DNA, 25 bp, Homo sapien
gtactgtcactgacatttcttgatt

SEQ ID NO: 70375 - DNA, 25 bp, Homo sapien
gtaagttttaggaatattttccccg

SEQ ID NO: 70376 - DNA, 25 bp, Homo sapien
gtaagttttaggtatattttccccg

SEQ ID NO: 70377 - DNA, 25 bp, Homo sapien
tctcttccgagtgttcgtccctcac

SEQ ID NO: 70378 - DNA, 25 bp, Homo sapien
tctcttccgagtcttcgtccctcac

SEQ ID NO: 70379 - DNA, 25 bp, Homo sapien
tgggtctggagaaggtccgtcccac

SEQ ID NO: 70380 - DNA, 25 bp, Homo sapien
tgggtctggagatggtccgtcccac

SEQ ID NO: 70381 - DNA, 25 bp, Homo sapien
gactccgagaggtccgacgaccgtg

SEQ ID NO: 70382 - DNA, 25 bp, Homo sapien
gactccgagaggaccgacgaccgtg

SEQ ID NO: 70383 - DNA, 25 bp, Homo sapien
gacggacggagaggtgtttccctat

SEQ ID NO: 70384 - DNA, 25 bp, Homo sapien
gacggacggagacgtgtttccctat

SEQ ID NO: 70385 - DNA, 25 bp, Homo sapien
attaagatgaggtcggttccgactc

SEQ ID NO: 70386 - DNA, 25 bp, Homo sapien
attaagatgaggacggttccgactc

SEQ ID NO: 70387 - DNA, 25 bp, Homo sapien
caatgaaagtactgatgttttactc

SEQ ID NO: 70388 - DNA, 25 bp, Homo sapien
caatgaaagtacagatgttttactc

SEQ ID NO: 70389 - DNA, 25 bp, Homo sapien
tgatagactaagagttttcgttacc

SEQ ID NO: 70390 - DNA, 25 bp, Homo sapien
tgatagactaagtgttttcgttacc

SEQ ID NO: 70391 - DNA, 25 bp, Homo sapien
gcgcagagaatatgcgctcgtgccc

SEQ ID NO: 70392 - DNA, 25 bp, Homo sapien
gcgcagagaataagcgctcgtgccc

SEQ ID NO: 70393 - DNA, 25 bp, Homo sapien
gtcaacggtgcgtccggtcgtcctt

SEQ ID NO: 70394 - DNA, 25 bp, Homo sapien
gtcaacggtgcgaccggtcgtcctt

SEQ ID NO: 70395 - DNA, 25 bp, Homo sapien
ggatcccgggacgaccgggaccact

SEQ ID NO: 70396 - DNA, 25 bp, Homo sapien
ggatcccgggaccaccgggaccact

SEQ ID NO: 70397 - DNA, 25 bp, Homo sapien
caatccgggagagacacaagtaccc

SEQ ID NO: 70398 - DNA, 25 bp, Homo sapien
caatccgggagacacacaagtaccc

SEQ ID NO: 70399 - DNA, 25 bp, Homo sapien
cgacttgttaaacgaacttacaacc

SEQ ID NO: 70400 - DNA, 25 bp, Homo sapien
cgacttgttaaaggaacttacaacc

SEQ ID NO: 70401 - DNA, 25 bp, Homo sapien
tatgtggttcagaaactttagtcac

SEQ ID NO: 70402 - DNA, 25 bp, Homo sapien
tatgtggttcagtaactttagtcac

SEQ ID NO: 70403 - DNA, 25 bp, Homo sapien
gaacagagtgtctcaagagtttcag

SEQ ID NO: 70404 - DNA, 25 bp, Homo sapien
gaacagagtgtcacaagagtttcag

SEQ ID NO: 70405 - DNA, 25 bp, Homo sapien
cgtaaatagggtaccaaattgtaca

SEQ ID NO: 70406 - DNA, 25 bp, Homo sapien
cgtaaatagggttccaaattgtaca

SEQ ID NO: 70407 - DNA, 25 bp, Homo sapien
gtcgaataaatcttgaacacatgga

SEQ ID NO: 70408 - DNA, 25 bp, Homo sapien
gtcgaataaatcatgaacacatgga

SEQ ID NO: 70409 - DNA, 25 bp, Homo sapien
ctgtcgaaggaacattaaaaccata

SEQ ID NO: 70410 - DNA, 25 bp, Homo sapien
ctgtcgaaggaagattaaaaccata

SEQ ID NO: 70411 - DNA, 25 bp, Homo sapien
gggccctttgtcgtgacaaaccaga

SEQ ID NO: 70412 - DNA, 25 bp, Homo sapien
gggccctttgtcctgacaaaccaga

SEQ ID NO: 70413 - DNA, 25 bp, Homo sapien
ccctgagttcctgaaacgacgacaa

SEQ ID NO: 70414 - DNA, 25 bp, Homo sapien
ccctgagttcctcaaacgacgacaa

SEQ ID NO: 70415 - DNA, 25 bp, Homo sapien
acgttaaacgtgtcaagacaaccac

SEQ ID NO: 70416 - DNA, 25 bp, Homo sapien
acgttaaacgtgacaagacaaccac

SEQ ID NO: 70417 - DNA, 25 bp, Homo sapien
tcgtcgaagggttccctaagccgac

SEQ ID NO: 70418 - DNA, 25 bp, Homo sapien
tcgtcgaagggtaccctaagccgac

SEQ ID NO: 70419 - DNA, 25 bp, Homo sapien
acttccgcatcaccaccgggatgga

SEQ ID NO: 70420 - DNA, 25 bp, Homo sapien
acttccgcatcagcaccgggatgga

SEQ ID NO: 70421 - DNA, 25 bp, Homo sapien
gtcgtcatgaattcggacagtataa

SEQ ID NO: 70422 - DNA, 25 bp, Homo sapien
gtcgtcatgaatacggacagtataa

SEQ ID NO: 70423 - DNA, 25 bp, Homo sapien
gtccggtagaatacagtcatctagg

SEQ ID NO: 70424 - DNA, 25 bp, Homo sapien
gtccggtagaattcagtcatctagg

SEQ ID NO: 70425 - DNA, 25 bp, Homo sapien
tgctcccgagaatgctgggcgagtc

SEQ ID NO: 70426 - DNA, 25 bp, Homo sapien
tgctcccgagaaagctgggcgagtc

SEQ ID NO: 70427 - DNA, 25 bp, Homo sapien
ctcatccgagaggtgtacagggctc

SEQ ID NO: 70428 - DNA, 25 bp, Homo sapien
ctcatccgagagctgtacagggctc

SEQ ID NO: 70429 - DNA, 25 bp, Homo sapien
gaagcatctggactgtgacgggtcc

SEQ ID NO: 70430 - DNA, 25 bp, Homo sapien
gaagcatctggagtgtgacgggtcc

SEQ ID NO: 70431 - DNA, 25 bp, Homo sapien
gatcgtcacgtggttgtcggactca

SEQ ID NO: 70432 - DNA, 25 bp, Homo sapien
gatcgtcacgtgcttgtcggactca

SEQ ID NO: 70433 - DNA, 25 bp, Homo sapien
tcgagagacgaaaaaccggacatag

SEQ ID NO: 70434 - DNA, 25 bp, Homo sapien
tcgagagacgaataaccggacatag

SEQ ID NO: 70435 - DNA, 25 bp, Homo sapien
aatagaaggagtcttctcagattct

SEQ ID NO: 70436 - DNA, 25 bp, Homo sapien
aatagaaggagtgttctcagattct

SEQ ID NO: 70437 - DNA, 25 bp, Homo sapien
taaacgaagtaggtcgacaaagact

SEQ ID NO: 70438 - DNA, 25 bp, Homo sapien
taaacgaagtagctcgacaaagact

SEQ ID NO: 70439 - DNA, 25 bp, Homo sapien
tcttataatgtcttacgagtcaagg

SEQ ID NO: 70440 - DNA, 25 bp, Homo sapien
tcttataatgtcatacgagtcaagg

SEQ ID NO: 70441 - DNA, 25 bp, Homo sapien
atgttaactcttggtagataccgtg

SEQ ID NO: 70442 - DNA, 25 bp, Homo sapien
atgttaactcttcgtagataccgtg

SEQ ID NO: 70443 - DNA, 25 bp, Homo sapien
aagaatatttgttcctcacaatggt

SEQ ID NO: 70444 - DNA, 25 bp, Homo sapien
aagaatatttgtacctcacaatggt

SEQ ID NO: 70445 - DNA, 25 bp, Homo sapien
aaacattttccgaccggtaggtgat

SEQ ID NO: 70446 - DNA, 25 bp, Homo sapien
aaacattttccgtccggtaggtgat

SEQ ID NO: 70447 - DNA, 25 bp, Homo sapien
ttaaattgtgccataagtgtttccg

SEQ ID NO: 70448 - DNA, 25 bp, Homo sapien
ttaaattgtgccttaagtgtttccg

SEQ ID NO: 70449 - DNA, 25 bp, Homo sapien
tcatgtgttttccagtggtttcaat

SEQ ID NO: 70450 - DNA, 25 bp, Homo sapien
tcatgtgttttcgagtggtttcaat

SEQ ID NO: 70451 - DNA, 25 bp, Homo sapien
tgttgaactttcttctggttcaaat

SEQ ID NO: 70452 - DNA, 25 bp, Homo sapien
tgttgaactttcatctggttcaaat

SEQ ID NO: 70453 - DNA, 25 bp, Homo sapien
gttgtgatgtctgtccatcctccct

SEQ ID NO: 70454 - DNA, 25 bp, Homo sapien
gttgtgatgtctctccatcctccct

SEQ ID NO: 70455 - DNA, 25 bp, Homo sapien
tcatgatatcggtctcagggtcctt

SEQ ID NO: 70456 - DNA, 25 bp, Homo sapien
tcatgatatcggactcagggtcctt

SEQ ID NO: 70457 - DNA, 25 bp, Homo sapien
ttatgtgacctggtccaagtccttt

SEQ ID NO: 70458 - DNA, 25 bp, Homo sapien
ttatgtgacctgctccaagtccttt

SEQ ID NO: 70459 - DNA, 25 bp, Homo sapien
tcaatacccgacatacagttaagtg

SEQ ID NO: 70460 - DNA, 25 bp, Homo sapien
tcaatacccgacttacagttaagtg

SEQ ID NO: 70461 - DNA, 25 bp, Homo sapien
tactcttagtccttctcgagaaatg

SEQ ID NO: 70462 - DNA, 25 bp, Homo sapien
tactcttagtccatctcgagaaatg

SEQ ID NO: 70463 - DNA, 25 bp, Homo sapien
tcagtaacaattccttcaggaagat

SEQ ID NO: 70464 - DNA, 25 bp, Homo sapien
tcagtaacaattgcttcaggaagat

SEQ ID NO: 70465 - DNA, 25 bp, Homo sapien
agcaggacgtatggtagcaggcaat

SEQ ID NO: 70466 - DNA, 25 bp, Homo sapien
agcaggacgtatcgtagcaggcaat

SEQ ID NO: 70467 - DNA, 25 bp, Homo sapien
agcggcctctcgagaccgcttacag

SEQ ID NO: 70468 - DNA, 25 bp, Homo sapien
agcggcctctcgtgaccgcttacag

SEQ ID NO: 70469 - DNA, 25 bp, Homo sapien
cggggtccgtccgtaggtccaacag

SEQ ID NO: 70470 - DNA, 25 bp, Homo sapien
cggggtccgtccctaggtccaacag

SEQ ID NO: 70471 - DNA, 25 bp, Homo sapien
agtctccactcctgagcgacctaag

SEQ ID NO: 70472 - DNA, 25 bp, Homo sapien
agtctccactccagagcgacctaag

SEQ ID NO: 70473 - DNA, 25 bp, Homo sapien
ggccaacacgtcgtgctagacgagg

SEQ ID NO: 70474 - DNA, 25 bp, Homo sapien
ggccaacacgtcctgctagacgagg

SEQ ID NO: 70475 - DNA, 25 bp, Homo sapien
ctccgatcacacccgctcagagtag

SEQ ID NO: 70476 - DNA, 25 bp, Homo sapien
ctccgatcacacgcgctcagagtag

SEQ ID NO: 70477 - DNA, 25 bp, Homo sapien
gagccccatcgacagcttacagagg

SEQ ID NO: 70478 - DNA, 25 bp, Homo sapien
gagccccatcgagagcttacagagg

SEQ ID NO: 70479 - DNA, 25 bp, Homo sapien
aaccctcttctttaggtctcttgtg

SEQ ID NO: 70480 - DNA, 25 bp, Homo sapien
aaccctcttcttaaggtctcttgtg

SEQ ID NO: 70481 - DNA, 25 bp, Homo sapien
gaactgtttccgatgtctcttatac

SEQ ID NO: 70482 - DNA, 25 bp, Homo sapien
gaactgtttccgttgtctcttatac

SEQ ID NO: 70483 - DNA, 25 bp, Homo sapien
aaaaattgtgtcaccggtagtcctg

SEQ ID NO: 70484 - DNA, 25 bp, Homo sapien
aaaaattgtgtctccggtagtcctg

SEQ ID NO: 70485 - DNA, 25 bp, Homo sapien
gaagagcatctcgaagagtatcctg

SEQ ID NO: 70486 - DNA, 25 bp, Homo sapien
gaagagcatctccaagagtatcctg

SEQ ID NO: 70487 - DNA, 25 bp, Homo sapien
tcattgtatcttgatcaagattttg

SEQ ID NO: 70488 - DNA, 25 bp, Homo sapien
tcattgtatcttcatcaagattttg

SEQ ID NO: 70489 - DNA, 25 bp, Homo sapien
tcaaggttttttcaagactcttgtt

SEQ ID NO: 70490 - DNA, 25 bp, Homo sapien
tcaaggttttttgaagactcttgtt

SEQ ID NO: 70491 - DNA, 25 bp, Homo sapien
tacaggatttgtacaatgtacattc

SEQ ID NO: 70492 - DNA, 25 bp, Homo sapien
tacaggatttgttcaatgtacattc

SEQ ID NO: 70493 - DNA, 25 bp, Homo sapien
attaggttactacgttactactatg

SEQ ID NO: 70494 - DNA, 25 bp, Homo sapien
attaggttactaggttactactatg

SEQ ID NO: 70495 - DNA, 25 bp, Homo sapien
cgatatacctcttgggtatgagact

SEQ ID NO: 70496 - DNA, 25 bp, Homo sapien
cgatatacctctagggtatgagact

SEQ ID NO: 70497 - DNA, 25 bp, Homo sapien
aggtcgactcctccaggaacagcga

SEQ ID NO: 70498 - DNA, 25 bp, Homo sapien
aggtcgactcctgcaggaacagcga

SEQ ID NO: 70499 - DNA, 25 bp, Homo sapien
ggatcgacaacgaggtctagtacat

SEQ ID NO: 70500 - DNA, 25 bp, Homo sapien
ggatcgacaacgtggtctagtacat

SEQ ID NO: 70501 - DNA, 25 bp, Homo sapien
cagtcgttcgaaaccgggtacctaa

SEQ ID NO: 70502 - DNA, 25 bp, Homo sapien
cagtcgttcgaatccgggtacctaa

SEQ ID NO: 70503 - DNA, 25 bp, Homo sapien
atcctggtctgtgtcgtgttattta

SEQ ID NO: 70504 - DNA, 25 bp, Homo sapien
atcctggtctgtctcgtgttattta

SEQ ID NO: 70505 - DNA, 25 bp, Homo sapien
aacactggtccacgacttgatctta

SEQ ID NO: 70506 - DNA, 25 bp, Homo sapien
aacactggtccaggacttgatctta

SEQ ID NO: 70507 - DNA, 25 bp, Homo sapien
agaaacctttcgagggtgcacatta

SEQ ID NO: 70508 - DNA, 25 bp, Homo sapien
agaaacctttcgtgggtgcacatta

SEQ ID NO: 70509 - DNA, 25 bp, Homo sapien
attcatgatgtctacactaagtcag

SEQ ID NO: 70510 - DNA, 25 bp, Homo sapien
attcatgatgtcaacactaagtcag

SEQ ID NO: 70511 - DNA, 25 bp, Homo sapien
ctctcatatgatagacttttcgtgt

SEQ ID NO: 70512 - DNA, 25 bp, Homo sapien
ctctcatatgattgacttttcgtgt

SEQ ID NO: 70513 - DNA, 25 bp, Homo sapien
cgttgactctgacatgtctctttct

SEQ ID NO: 70514 - DNA, 25 bp, Homo sapien
cgttgactctgagatgtctctttct

SEQ ID NO: 70515 - DNA, 25 bp, Homo sapien
ttccgtatcgactaggtgtctgatc

SEQ ID NO: 70516 - DNA, 25 bp, Homo sapien
ttccgtatcgacaaggtgtctgatc

SEQ ID NO: 70517 - DNA, 25 bp, Homo sapien
atctgtatgactgtgagtcagacct

SEQ ID NO: 70518 - DNA, 25 bp, Homo sapien
atctgtatgactctgagtcagacct

SEQ ID NO: 70519 - DNA, 25 bp, Homo sapien
tacgtagagtacttgtaggtgcacc

SEQ ID NO: 70520 - DNA, 25 bp, Homo sapien
tacgtagagtacatgtaggtgcacc

SEQ ID NO: 70521 - DNA, 25 bp, Homo sapien
cccattgaaagtgtactgtcagtgt

SEQ ID NO: 70522 - DNA, 25 bp, Homo sapien
cccattgaaagtctactgtcagtgt

SEQ ID NO: 70523 - DNA, 25 bp, Homo sapien
cttttgaggaaccaaatgtccgtgt

SEQ ID NO: 70524 - DNA, 25 bp, Homo sapien
cttttgaggaacgaaatgtccgtgt

SEQ ID NO: 70525 - DNA, 25 bp, Homo sapien
agtagaggagaaacctcatttttct

SEQ ID NO: 70526 - DNA, 25 bp, Homo sapien
agtagaggagaatcctcatttttct

SEQ ID NO: 70527 - DNA, 25 bp, Homo sapien
gaagtacaagatccaatacttttgc

SEQ ID NO: 70528 - DNA, 25 bp, Homo sapien
gaagtacaagatgcaatacttttgc

SEQ ID NO: 70529 - DNA, 25 bp, Homo sapien
gaaatatgagacgaaaaccttttct

SEQ ID NO: 70530 - DNA, 25 bp, Homo sapien
gaaatatgagaccaaaaccttttct

SEQ ID NO: 70531 - DNA, 25 bp, Homo sapien
ggttcgtaagaacatagtcttattc

SEQ ID NO: 70532 - DNA, 25 bp, Homo sapien
ggttcgtaagaagatagtcttattc

SEQ ID NO: 70533 - DNA, 25 bp, Homo sapien
tggtatatgtctgttataccattct

SEQ ID NO: 70534 - DNA, 25 bp, Homo sapien
tggtatatgtctcttataccattct

SEQ ID NO: 70535 - DNA, 25 bp, Homo sapien
agacgtaagtttcgtctttacattt

SEQ ID NO: 70536 - DNA, 25 bp, Homo sapien
agacgtaagtttggtctttacattt

SEQ ID NO: 70537 - DNA, 25 bp, Homo sapien
cgtttggagttttgttccacgatgt

SEQ ID NO: 70538 - DNA, 25 bp, Homo sapien
cgtttggagtttagttccacgatgt

SEQ ID NO: 70539 - DNA, 25 bp, Homo sapien
tgtgtggtctttgtagtcggacctt

SEQ ID NO: 70540 - DNA, 25 bp, Homo sapien
tgtgtggtctttctagtcggacctt

SEQ ID NO: 70541 - DNA, 25 bp, Homo sapien
tcaacctctctttctgcggtagcct

SEQ ID NO: 70542 - DNA, 25 bp, Homo sapien
tcaacctctcttactgcggtagcct

SEQ ID NO: 70543 - DNA, 25 bp, Homo sapien
taccgtgtagttcactgagagtaaa

SEQ ID NO: 70544 - DNA, 25 bp, Homo sapien
taccgtgtagttgactgagagtaaa

SEQ ID NO: 70545 - DNA, 25 bp, Homo sapien
aaggtaccagtcgacggggactgac

SEQ ID NO: 70546 - DNA, 25 bp, Homo sapien
aaggtaccagtccacggggactgac

SEQ ID NO: 70547 - DNA, 25 bp, Homo sapien
ctgtaggtatcttatgttgggacca

SEQ ID NO: 70548 - DNA, 25 bp, Homo sapien
ctgtaggtatctaatgttgggacca

SEQ ID NO: 70549 - DNA, 25 bp, Homo sapien
tctcggtcttgaatctcggggaaag

SEQ ID NO: 70550 - DNA, 25 bp, Homo sapien
tctcggtcttgattctcggggaaag

SEQ ID NO: 70551 - DNA, 25 bp, Homo sapien
cctcgaccccggacttgggtacaga

SEQ ID NO: 70552 - DNA, 25 bp, Homo sapien
cctcgaccccggtcttgggtacaga

SEQ ID NO: 70553 - DNA, 25 bp, Homo sapien
cgacctccatctgtcgttactgact

SEQ ID NO: 70554 - DNA, 25 bp, Homo sapien
cgacctccatctctcgttactgact

SEQ ID NO: 70555 - DNA, 25 bp, Homo sapien
agtcttgcgtcctcgtagacctacg

SEQ ID NO: 70556 - DNA, 25 bp, Homo sapien
agtcttgcgtccacgtagacctacg

SEQ ID NO: 70557 - DNA, 25 bp, Homo sapien
agtctattcggaggtccatagtaaa

SEQ ID NO: 70558 - DNA, 25 bp, Homo sapien
agtctattcggacgtccatagtaaa

SEQ ID NO: 70559 - DNA, 25 bp, Homo sapien
cacttcgactttcgttcgatgataa

SEQ ID NO: 70560 - DNA, 25 bp, Homo sapien
cacttcgactttggttcgatgataa

SEQ ID NO: 70561 - DNA, 25 bp, Homo sapien
ccttcatatgtgtctgagtaatatt

SEQ ID NO: 70562 - DNA, 25 bp, Homo sapien
ccttcatatgtgactgagtaatatt

SEQ ID NO: 70563 - DNA, 25 bp, Homo sapien
taggtactggctcgagtacagtaat

SEQ ID NO: 70564 - DNA, 25 bp, Homo sapien
taggtactggctggagtacagtaat

SEQ ID NO: 70565 - DNA, 25 bp, Homo sapien
agtgggtctcgtgtttagcataccg

SEQ ID NO: 70566 - DNA, 25 bp, Homo sapien
agtgggtctcgtctttagcataccg

SEQ ID NO: 70567 - DNA, 25 bp, Homo sapien
gtgtgtggatcgtaatctatccgaa

SEQ ID NO: 70568 - DNA, 25 bp, Homo sapien
gtgtgtggatcgaaatctatccgaa

SEQ ID NO: 70569 - DNA, 25 bp, Homo sapien
cgatttgactaatcatcaaacggat

SEQ ID NO: 70570 - DNA, 25 bp, Homo sapien
cgatttgactaaacatcaaacggat

SEQ ID NO: 70571 - DNA, 25 bp, Homo sapien
cgaccgatgtccacgtctcaaggga

SEQ ID NO: 70572 - DNA, 25 bp, Homo sapien
cgaccgatgtcctcgtctcaaggga

SEQ ID NO: 70573 - DNA, 25 bp, Homo sapien
acatagggtaccttgaacagaggaa

SEQ ID NO: 70574 - DNA, 25 bp, Homo sapien
acatagggtaccatgaacagaggaa

SEQ ID NO: 70575 - DNA, 25 bp, Homo sapien
ataagtgttacctcgcagagaggaa

SEQ ID NO: 70576 - DNA, 25 bp, Homo sapien
ataagtgttaccacgcagagaggaa

SEQ ID NO: 70577 - DNA, 25 bp, Homo sapien
gttagattgtcctaccgttcaccaa

SEQ ID NO: 70578 - DNA, 25 bp, Homo sapien
gttagattgtccaaccgttcaccaa

SEQ ID NO: 70579 - DNA, 25 bp, Homo sapien
ggggattgtgctccttgagcaaact

SEQ ID NO: 70580 - DNA, 25 bp, Homo sapien
ggggattgtgctgcttgagcaaact

SEQ ID NO: 70581 - DNA, 25 bp, Homo sapien
acgtttgagtcttatgacgcaatac

SEQ ID NO: 70582 - DNA, 25 bp, Homo sapien
acgtttgagtctaatgacgcaatac

SEQ ID NO: 70583 - DNA, 25 bp, Homo sapien
aggttcttgtcgaagttagtccata

SEQ ID NO: 70584 - DNA, 25 bp, Homo sapien
aggttcttgtcgtagttagtccata

SEQ ID NO: 70585 - DNA, 25 bp, Homo sapien
aggtttgtatgttatcgaacctctt

SEQ ID NO: 70586 - DNA, 25 bp, Homo sapien
aggtttgtatgtaatcgaacctctt

SEQ ID NO: 70587 - DNA, 25 bp, Homo sapien
aaattcagtgtattgacgttcctat

SEQ ID NO: 70588 - DNA, 25 bp, Homo sapien
aaattcagtgtaatgacgttcctat

SEQ ID NO: 70589 - DNA, 25 bp, Homo sapien
ccaaaatacgtggaatatcttgaat

SEQ ID NO: 70590 - DNA, 25 bp, Homo sapien
ccaaaatacgtgcaatatcttgaat

SEQ ID NO: 70591 - DNA, 25 bp, Homo sapien
tccaagaaccgctattacttgtaag

SEQ ID NO: 70592 - DNA, 25 bp, Homo sapien
tccaagaaccgcaattacttgtaag

SEQ ID NO: 70593 - DNA, 25 bp, Homo sapien
tggttgtcacgacgtcattcgacag

SEQ ID NO: 70594 - DNA, 25 bp, Homo sapien
tggttgtcacgaggtcattcgacag

SEQ ID NO: 70595 - DNA, 25 bp, Homo sapien
ccagcgagggcagcatgcttgacga

SEQ ID NO: 70596 - DNA, 25 bp, Homo sapien
ccagcgagggcaccatgcttgacga

SEQ ID NO: 70597 - DNA, 25 bp, Homo sapien
ggggtgaactcgtcacgtctgacgc

SEQ ID NO: 70598 - DNA, 25 bp, Homo sapien
ggggtgaactcgacacgtctgacgc

SEQ ID NO: 70599 - DNA, 25 bp, Homo sapien
tatgtaaactcgaatcgacgttatg

SEQ ID NO: 70600 - DNA, 25 bp, Homo sapien
tatgtaaactcgtatcgacgttatg

SEQ ID NO: 70601 - DNA, 25 bp, Homo sapien
gtaaatagtgactcattcactaatg

SEQ ID NO: 70602 - DNA, 25 bp, Homo sapien
gtaaatagtgacacattcactaatg

SEQ ID NO: 70603 - DNA, 25 bp, Homo sapien
aaatgaactgattgacttgacgtac

SEQ ID NO: 70604 - DNA, 25 bp, Homo sapien
aaatgaactgatagacttgacgtac

SEQ ID NO: 70605 - DNA, 25 bp, Homo sapien
actgtaaactaattgacttgaccgt

SEQ ID NO: 70606 - DNA, 25 bp, Homo sapien
actgtaaactaaatgacttgaccgt

SEQ ID NO: 70607 - DNA, 25 bp, Homo sapien
cgtgtataataggatacttttacct

SEQ ID NO: 70608 - DNA, 25 bp, Homo sapien
cgtgtataatagcatacttttacct

SEQ ID NO: 70609 - DNA, 25 bp, Homo sapien
gtcgaaaatatgttactattcctgt

SEQ ID NO: 70610 - DNA, 25 bp, Homo sapien
gtcgaaaatatgatactattcctgt

SEQ ID NO: 70611 - DNA, 25 bp, Homo sapien
aagtacagaacgagggacttctttc

SEQ ID NO: 70612 - DNA, 25 bp, Homo sapien
aagtacagaacgtgggacttctttc

SEQ ID NO: 70613 - DNA, 25 bp, Homo sapien
aaaacaagggagacacacgtctttt

SEQ ID NO: 70614 - DNA, 25 bp, Homo sapien
aaaacaagggagtcacacgtctttt

SEQ ID NO: 70615 - DNA, 25 bp, Homo sapien
ggaacaccgtcagatcattattctt

SEQ ID NO: 70616 - DNA, 25 bp, Homo sapien
ggaacaccgtcacatcattattctt

SEQ ID NO: 70617 - DNA, 25 bp, Homo sapien
cgtcgactcggactcgctgtcgtct

SEQ ID NO: 70618 - DNA, 25 bp, Homo sapien
cgtcgactcggagtcgctgtcgtct

SEQ ID NO: 70619 - DNA, 25 bp, Homo sapien
ggatcctacacgaccgaaagggttt

SEQ ID NO: 70620 - DNA, 25 bp, Homo sapien
ggatcctacacgtccgaaagggttt

SEQ ID NO: 70621 - DNA, 25 bp, Homo sapien
ctggacctgaccccgaatagggttc

SEQ ID NO: 70622 - DNA, 25 bp, Homo sapien
ctggacctgaccgcgaatagggttc

SEQ ID NO: 70623 - DNA, 25 bp, Homo sapien
atggattcccgaagtcgacatccgg

SEQ ID NO: 70624 - DNA, 25 bp, Homo sapien
atggattcccgatgtcgacatccgg

SEQ ID NO: 70625 - DNA, 25 bp, Homo sapien
gaacctacttcgtcacgaccagttc

SEQ ID NO: 70626 - DNA, 25 bp, Homo sapien
gaacctacttcgacacgaccagttc

SEQ ID NO: 70627 - DNA, 25 bp, Homo sapien
tgtaactaccgtcgaaccccatcga

SEQ ID NO: 70628 - DNA, 25 bp, Homo sapien
tgtaactaccgtggaaccccatcga

SEQ ID NO: 70629 - DNA, 25 bp, Homo sapien
aaccgtcactgcagccactgtttat

SEQ ID NO: 70630 - DNA, 25 bp, Homo sapien
aaccgtcactgctgccactgtttat

SEQ ID NO: 70631 - DNA, 25 bp, Homo sapien
gaccgagaccggtttgtacttcttt

SEQ ID NO: 70632 - DNA, 25 bp, Homo sapien
gaccgagaccggattgtacttcttt

SEQ ID NO: 70633 - DNA, 25 bp, Homo sapien
aatgacaacgcattaggtcgacgtc

SEQ ID NO: 70634 - DNA, 25 bp, Homo sapien
aatgacaacgcaataggtcgacgtc

SEQ ID NO: 70635 - DNA, 25 bp, Homo sapien
tcgcgttgtcgtcggacgtcgacct

SEQ ID NO: 70636 - DNA, 25 bp, Homo sapien
tcgcgttgtcgtgggacgtcgacct

SEQ ID NO: 70637 - DNA, 25 bp, Homo sapien
ttctgtccggttctatttagttaaa

SEQ ID NO: 70638 - DNA, 25 bp, Homo sapien
ttctgtccggttgtatttagttaaa

SEQ ID NO: 70639 - DNA, 25 bp, Homo sapien
tgtaccgtctccaatttagacagca

SEQ ID NO: 70640 - DNA, 25 bp, Homo sapien
tgtaccgtctcctatttagacagca

SEQ ID NO: 70641 - DNA, 25 bp, Homo sapien
attctttacccgtttcggtcgaaag

SEQ ID NO: 70642 - DNA, 25 bp, Homo sapien
attctttacccgattcggtcgaaag

SEQ ID NO: 70643 - DNA, 25 bp, Homo sapien
agttaatacccgataacgggtaacc

SEQ ID NO: 70644 - DNA, 25 bp, Homo sapien
agttaatacccgttaacgggtaacc

SEQ ID NO: 70645 - DNA, 25 bp, Homo sapien
gtaaggtaattctgtcgttgttcac

SEQ ID NO: 70646 - DNA, 25 bp, Homo sapien
gtaaggtaattcagtcgttgttcac

SEQ ID NO: 70647 - DNA, 25 bp, Homo sapien
gaagcgtatatgacctatataagac

SEQ ID NO: 70648 - DNA, 25 bp, Homo sapien
gaagcgtatatgtcctatataagac

SEQ ID NO: 70649 - DNA, 25 bp, Homo sapien
caagttattctagtcatgtacacga

SEQ ID NO: 70650 - DNA, 25 bp, Homo sapien
caagttattctactcatgtacacga

SEQ ID NO: 70651 - DNA, 25 bp, Homo sapien
aactagactgtcaagtcagtgaaat

SEQ ID NO: 70652 - DNA, 25 bp, Homo sapien
aactagactgtctagtcagtgaaat

SEQ ID NO: 70653 - DNA, 25 bp, Homo sapien
ggctacgagactcttaccctcaaca

SEQ ID NO: 70654 - DNA, 25 bp, Homo sapien
ggctacgagactgttaccctcaaca

SEQ ID NO: 70655 - DNA, 25 bp, Homo sapien
tactaagattcgttcttactgaaga

SEQ ID NO: 70656 - DNA, 25 bp, Homo sapien
tactaagattcgatcttactgaaga

SEQ ID NO: 70657 - DNA, 25 bp, Homo sapien
atcaagtctatgtgtctgtggtgac

SEQ ID NO: 70658 - DNA, 25 bp, Homo sapien
atcaagtctatgagtctgtggtgac

SEQ ID NO: 70659 - DNA, 25 bp, Homo sapien
agaaggagcggttgagtagacacac

SEQ ID NO: 70660 - DNA, 25 bp, Homo sapien
agaaggagcggtagagtagacacac

SEQ ID NO: 70661 - DNA, 25 bp, Homo sapien
gaagataagacagaccctaacacga

SEQ ID NO: 70662 - DNA, 25 bp, Homo sapien
gaagataagacacaccctaacacga

SEQ ID NO: 70663 - DNA, 25 bp, Homo sapien
agagccagaagaacccgtcatcgtg

SEQ ID NO: 70664 - DNA, 25 bp, Homo sapien
agagccagaagatcccgtcatcgtg

SEQ ID NO: 70665 - DNA, 25 bp, Homo sapien
gacgcagacgaacgacacaggcctc

SEQ ID NO: 70666 - DNA, 25 bp, Homo sapien
gacgcagacgaaggacacaggcctc

SEQ ID NO: 70667 - DNA, 25 bp, Homo sapien
gctgttccttcgactcagtctctct

SEQ ID NO: 70668 - DNA, 25 bp, Homo sapien
gctgttccttcgtctcagtctctct

SEQ ID NO: 70669 - DNA, 25 bp, Homo sapien
aaaagtttcattatgtacgtgttcc

SEQ ID NO: 70670 - DNA, 25 bp, Homo sapien
aaaagtttcattttgtacgtgttcc

SEQ ID NO: 70671 - DNA, 25 bp, Homo sapien
gacatctgactgtaattcgtcctta

SEQ ID NO: 70672 - DNA, 25 bp, Homo sapien
gacatctgactgaaattcgtcctta

SEQ ID NO: 70673 - DNA, 25 bp, Homo sapien
tagacatagtctgattgacgacaac

SEQ ID NO: 70674 - DNA, 25 bp, Homo sapien
tagacatagtctcattgacgacaac

SEQ ID NO: 70675 - DNA, 25 bp, Homo sapien
tcaaatagactcgtagtgactacaa

SEQ ID NO: 70676 - DNA, 25 bp, Homo sapien
tcaaatagactcctagtgactacaa

SEQ ID NO: 70677 - DNA, 25 bp, Homo sapien
tccgtgaaacgtgtctgtatcagat

SEQ ID NO: 70678 - DNA, 25 bp, Homo sapien
tccgtgaaacgtctctgtatcagat

SEQ ID NO: 70679 - DNA, 25 bp, Homo sapien
gtagaagacaggttgtaacgtcgac

SEQ ID NO: 70680 - DNA, 25 bp, Homo sapien
gtagaagacaggatgtaacgtcgac

SEQ ID NO: 70681 - DNA, 25 bp, Homo sapien
tcttgatatccgttttagtatcgac

SEQ ID NO: 70682 - DNA, 25 bp, Homo sapien
tcttgatatccgatttagtatcgac

SEQ ID NO: 70683 - DNA, 25 bp, Homo sapien
gtaattactgaccattgtgtatctc

SEQ ID NO: 70684 - DNA, 25 bp, Homo sapien
gtaattactgacgattgtgtatctc

SEQ ID NO: 70685 - DNA, 25 bp, Homo sapien
gtatcgtttagtaaagtttacaccc

SEQ ID NO: 70686 - DNA, 25 bp, Homo sapien
gtatcgtttagttaagtttacaccc

SEQ ID NO: 70687 - DNA, 25 bp, Homo sapien
tacttatgttttgagggtccgtccg

SEQ ID NO: 70688 - DNA, 25 bp, Homo sapien
tacttatgttttcagggtccgtccg

SEQ ID NO: 70689 - DNA, 25 bp, Homo sapien
aaactggagttcgtgttactactgt

SEQ ID NO: 70690 - DNA, 25 bp, Homo sapien
aaactggagttcctgttactactgt

SEQ ID NO: 70691 - DNA, 25 bp, Homo sapien
cgaattttaggttgtcggtttactc

SEQ ID NO: 70692 - DNA, 25 bp, Homo sapien
cgaattttaggtagtcggtttactc

SEQ ID NO: 70693 - DNA, 25 bp, Homo sapien
gtatccgttgacactacttttatcg

SEQ ID NO: 70694 - DNA, 25 bp, Homo sapien
gtatccgttgactctacttttatcg

SEQ ID NO: 70695 - DNA, 25 bp, Homo sapien
actgaaactcaaccactaaggtgaa

SEQ ID NO: 70696 - DNA, 25 bp, Homo sapien
actgaaactcaagcactaaggtgaa

SEQ ID NO: 70697 - DNA, 25 bp, Homo sapien
gaaggtgaccgaactcagtagagaa

SEQ ID NO: 70698 - DNA, 25 bp, Homo sapien
gaaggtgaccgatctcagtagagaa

SEQ ID NO: 70699 - DNA, 25 bp, Homo sapien
gaaagaaaggacaccacagtgacca

SEQ ID NO: 70700 - DNA, 25 bp, Homo sapien
gaaagaaaggactccacagtgacca

SEQ ID NO: 70701 - DNA, 25 bp, Homo sapien
ggaaattacgtccatgtatgacgac

SEQ ID NO: 70702 - DNA, 25 bp, Homo sapien
ggaaattacgtcgatgtatgacgac

SEQ ID NO: 70703 - DNA, 25 bp, Homo sapien
agtgaataatctgtttaacgacgac

SEQ ID NO: 70704 - DNA, 25 bp, Homo sapien
agtgaataatctctttaacgacgac

SEQ ID NO: 70705 - DNA, 25 bp, Homo sapien
gagagaagctttctattatcgacga

SEQ ID NO: 70706 - DNA, 25 bp, Homo sapien
gagagaagctttgtattatcgacga

SEQ ID NO: 70707 - DNA, 25 bp, Homo sapien
agacaggctctgtctgtcctcgtcc

SEQ ID NO: 70708 - DNA, 25 bp, Homo sapien
agacaggctctgactgtcctcgtcc

SEQ ID NO: 70709 - DNA, 25 bp, Homo sapien
tagtgtctctgtttctgtccgttcg

SEQ ID NO: 70710 - DNA, 25 bp, Homo sapien
tagtgtctctgtatctgtccgttcg

SEQ ID NO: 70711 - DNA, 25 bp, Homo sapien
atttagttaattgtctttcgtcacg

SEQ ID NO: 70712 - DNA, 25 bp, Homo sapien
atttagttaattctctttcgtcacg

SEQ ID NO: 70713 - DNA, 25 bp, Homo sapien
ttgtcttaagttgtcttccgtagta

SEQ ID NO: 70714 - DNA, 25 bp, Homo sapien
ttgtcttaagttctcttccgtagta

SEQ ID NO: 70715 - DNA, 25 bp, Homo sapien
acatttgtttgttgacactccgtta

SEQ ID NO: 70716 - DNA, 25 bp, Homo sapien
acatttgtttgtagacactccgtta

SEQ ID NO: 70717 - DNA, 25 bp, Homo sapien
caattgtatctgtgagtcttcttat

SEQ ID NO: 70718 - DNA, 25 bp, Homo sapien
caattgtatctgagagtcttcttat

SEQ ID NO: 70719 - DNA, 25 bp, Homo sapien
acttgagtcgagactatgagtcttc

SEQ ID NO: 70720 - DNA, 25 bp, Homo sapien
acttgagtcgagtctatgagtcttc

SEQ ID NO: 70721 - DNA, 25 bp, Homo sapien
gattaatagacttatgttactgtcc

SEQ ID NO: 70722 - DNA, 25 bp, Homo sapien
gattaatagactaatgttactgtcc

SEQ ID NO: 70723 - DNA, 25 bp, Homo sapien
gtgtctacttagagtcatctccttt

SEQ ID NO: 70724 - DNA, 25 bp, Homo sapien
gtgtctacttagtgtcatctccttt

SEQ ID NO: 70725 - DNA, 25 bp, Homo sapien
ggttagttgtgtttcagtcctcctt

SEQ ID NO: 70726 - DNA, 25 bp, Homo sapien
ggttagttgtgtatcagtcctcctt

SEQ ID NO: 70727 - DNA, 25 bp, Homo sapien
gggggtttaaaacgtactcctgttt

SEQ ID NO: 70728 - DNA, 25 bp, Homo sapien
gggggtttaaaaggtactcctgttt

SEQ ID NO: 70729 - DNA, 25 bp, Homo sapien
ccaggaaatgattactcatttgtcg

SEQ ID NO: 70730 - DNA, 25 bp, Homo sapien
ccaggaaatgataactcatttgtcg

SEQ ID NO: 70731 - DNA, 25 bp, Homo sapien
aacgaaaaacattccgaagtagtcg

SEQ ID NO: 70732 - DNA, 25 bp, Homo sapien
aacgaaaaacataccgaagtagtcg

SEQ ID NO: 70733 - DNA, 25 bp, Homo sapien
tggtaaagaatcgtcgaggaacatc

SEQ ID NO: 70734 - DNA, 25 bp, Homo sapien
tggtaaagaatcctcgaggaacatc

SEQ ID NO: 70735 - DNA, 25 bp, Homo sapien
gctgtgaaactatccttgtgtttta

SEQ ID NO: 70736 - DNA, 25 bp, Homo sapien
gctgtgaaactaaccttgtgtttta

SEQ ID NO: 70737 - DNA, 25 bp, Homo sapien
gttctaagaaccgttgtctgttata

SEQ ID NO: 70738 - DNA, 25 bp, Homo sapien
gttctaagaacccttgtctgttata

SEQ ID NO: 70739 - DNA, 25 bp, Homo sapien
gagtcgagccctggagtccgatacg

SEQ ID NO: 70740 - DNA, 25 bp, Homo sapien
gagtcgagccctcgagtccgatacg

SEQ ID NO: 70741 - DNA, 25 bp, Homo sapien
tcgtcgagaccgtccgtgcagactg

SEQ ID NO: 70742 - DNA, 25 bp, Homo sapien
tcgtcgagaccgaccgtgcagactg

SEQ ID NO: 70743 - DNA, 25 bp, Homo sapien
acaaggaaacggtcgtggcagaacg

SEQ ID NO: 70744 - DNA, 25 bp, Homo sapien
acaaggaaacggacgtggcagaacg

SEQ ID NO: 70745 - DNA, 25 bp, Homo sapien
aataaatacgactgagtcactgaag

SEQ ID NO: 70746 - DNA, 25 bp, Homo sapien
aataaatacgacagagtcactgaag

SEQ ID NO: 70747 - DNA, 25 bp, Homo sapien
acattacttgaccttgtactgtaag

SEQ ID NO: 70748 - DNA, 25 bp, Homo sapien
acattacttgacgttgtactgtaag

SEQ ID NO: 70749 - DNA, 25 bp, Homo sapien
gagatttactgttccatctatttag

SEQ ID NO: 70750 - DNA, 25 bp, Homo sapien
gagatttactgtaccatctatttag

SEQ ID NO: 70751 - DNA, 25 bp, Homo sapien
gtaaacggatgatctgtgtcatcaa

SEQ ID NO: 70752 - DNA, 25 bp, Homo sapien
gtaaacggatgaactgtgtcatcaa

SEQ ID NO: 70753 - DNA, 25 bp, Homo sapien
acacagtagactgaaagtctttgaa

SEQ ID NO: 70754 - DNA, 25 bp, Homo sapien
acacagtagactcaaagtctttgaa

SEQ ID NO: 70755 - DNA, 25 bp, Homo sapien
cgaagacgacgtcgagagtttgaaa

SEQ ID NO: 70756 - DNA, 25 bp, Homo sapien
cgaagacgacgtggagagtttgaaa

SEQ ID NO: 70757 - DNA, 25 bp, Homo sapien
cgtaatgtcggacgtcctgtgaacc

SEQ ID NO: 70758 - DNA, 25 bp, Homo sapien
cgtaatgtcggaggtcctgtgaacc

SEQ ID NO: 70759 - DNA, 25 bp, Homo sapien
tcagggtaggagacacggtcaacga

SEQ ID NO: 70760 - DNA, 25 bp, Homo sapien
tcagggtaggagtcacggtcaacga

SEQ ID NO: 70761 - DNA, 25 bp, Homo sapien
acaggtaactggttccgactaacta

SEQ ID NO: 70762 - DNA, 25 bp, Homo sapien
acaggtaactggatccgactaacta

SEQ ID NO: 70763 - DNA, 25 bp, Homo sapien
cgggagtcgtcgactcacatcctct

SEQ ID NO: 70764 - DNA, 25 bp, Homo sapien
cgggagtcgtcgtctcacatcctct

SEQ ID NO: 70765 - DNA, 25 bp, Homo sapien
gcgcggacggtccacgcggtacttc

SEQ ID NO: 70766 - DNA, 25 bp, Homo sapien
gcgcggacggtcgacgcggtacttc

SEQ ID NO: 70767 - DNA, 25 bp, Homo sapien
aataaaggacggtttagcgtctcgt

SEQ ID NO: 70768 - DNA, 25 bp, Homo sapien
aataaaggacggattagcgtctcgt

SEQ ID NO: 70769 - DNA, 25 bp, Homo sapien
caaccaagagaggttctgagtgggt

SEQ ID NO: 70770 - DNA, 25 bp, Homo sapien
caaccaagagagcttctgagtgggt

SEQ ID NO: 70771 - DNA, 25 bp, Homo sapien
aaccatacgagatcctgtacatgga

SEQ ID NO: 70772 - DNA, 25 bp, Homo sapien
aaccatacgagaacctgtacatgga

SEQ ID NO: 70773 - DNA, 25 bp, Homo sapien
gcgagaaccactacggtgacagtgt

SEQ ID NO: 70774 - DNA, 25 bp, Homo sapien
gcgagaaccacttcggtgacagtgt

SEQ ID NO: 70775 - DNA, 25 bp, Homo sapien
tcgtcgactcacaacttgacaaagg

SEQ ID NO: 70776 - DNA, 25 bp, Homo sapien
tcgtcgactcactacttgacaaagg

SEQ ID NO: 70777 - DNA, 25 bp, Homo sapien
ttctcctccgtcaaagacacacagg

SEQ ID NO: 70778 - DNA, 25 bp, Homo sapien
ttctcctccgtctaagacacacagg

SEQ ID NO: 70779 - DNA, 25 bp, Homo sapien
gaattcatgttactacgacaaaatg

SEQ ID NO: 70780 - DNA, 25 bp, Homo sapien
gaattcatgttagtacgacaaaatg

SEQ ID NO: 70781 - DNA, 25 bp, Homo sapien
gcaatgtttgttaaagtcaaacctc

SEQ ID NO: 70782 - DNA, 25 bp, Homo sapien
gcaatgtttgtttaagtcaaacctc

SEQ ID NO: 70783 - DNA, 25 bp, Homo sapien
cttgtatgtttgttcgaatacggac

SEQ ID NO: 70784 - DNA, 25 bp, Homo sapien
cttgtatgtttgatcgaatacggac

SEQ ID NO: 70785 - DNA, 25 bp, Homo sapien
ttataagagtgtgtttttagtggct

SEQ ID NO: 70786 - DNA, 25 bp, Homo sapien
ttataagagtgtctttttagtggct

SEQ ID NO: 70787 - DNA, 25 bp, Homo sapien
cgtcaaagtcttttcttctttggag

SEQ ID NO: 70788 - DNA, 25 bp, Homo sapien
cgtcaaagtcttatcttctttggag

SEQ ID NO: 70789 - DNA, 25 bp, Homo sapien
agaaaaccaagttttttactgtcgt

SEQ ID NO: 70790 - DNA, 25 bp, Homo sapien
agaaaaccaagtattttactgtcgt

SEQ ID NO: 70791 - DNA, 25 bp, Homo sapien
ataaaagtacctgttcactcgatcg

SEQ ID NO: 70792 - DNA, 25 bp, Homo sapien
ataaaagtacctcttcactcgatcg

SEQ ID NO: 70793 - DNA, 25 bp, Homo sapien
agcacaagacctctgtcatcgtatg

SEQ ID NO: 70794 - DNA, 25 bp, Homo sapien
agcacaagacctgtgtcatcgtatg

SEQ ID NO: 70795 - DNA, 25 bp, Homo sapien
tccctctacctctgagaacatgttg

SEQ ID NO: 70796 - DNA, 25 bp, Homo sapien
tccctctacctcagagaacatgttg

SEQ ID NO: 70797 - DNA, 25 bp, Homo sapien
atgtatgcaattaacacttttatat

SEQ ID NO: 70798 - DNA, 25 bp, Homo sapien
atgtatgcaatttacacttttatat

SEQ ID NO: 70799 - DNA, 25 bp, Homo sapien
catagacgagtattcattttgtcac

SEQ ID NO: 70800 - DNA, 25 bp, Homo sapien
catagacgagtaatcattttgtcac

SEQ ID NO: 70801 - DNA, 25 bp, Homo sapien
aaaaaagtggactcagtacattttc

SEQ ID NO: 70802 - DNA, 25 bp, Homo sapien
aaaaaagtggacacagtacattttc

SEQ ID NO: 70803 - DNA, 25 bp, Homo sapien
cttacagggtttagacaacctctac

SEQ ID NO: 70804 - DNA, 25 bp, Homo sapien
cttacagggttttgacaacctctac

SEQ ID NO: 70805 - DNA, 25 bp, Homo sapien
atacttgaggattttgaacgttcac

SEQ ID NO: 70806 - DNA, 25 bp, Homo sapien
atacttgaggatattgaacgttcac

SEQ ID NO: 70807 - DNA, 25 bp, Homo sapien
tattgaaaaggatcgtatcgaactc

SEQ ID NO: 70808 - DNA, 25 bp, Homo sapien
tattgaaaaggaacgtatcgaactc

SEQ ID NO: 70809 - DNA, 25 bp, Homo sapien
caagggtaaatggatgttcagactc

SEQ ID NO: 70810 - DNA, 25 bp, Homo sapien
caagggtaaatgcatgttcagactc

SEQ ID NO: 70811 - DNA, 25 bp, Homo sapien
cgatccatctactgggtacaactac

SEQ ID NO: 70812 - DNA, 25 bp, Homo sapien
cgatccatctacagggtacaactac

SEQ ID NO: 70813 - DNA, 25 bp, Homo sapien
cacaccacactcaagtcgacagatg

SEQ ID NO: 70814 - DNA, 25 bp, Homo sapien
cacaccacactctagtcgacagatg

SEQ ID NO: 70815 - DNA, 25 bp, Homo sapien
acgtctcgacatagtggttcactgt

SEQ ID NO: 70816 - DNA, 25 bp, Homo sapien
acgtctcgacattgtggttcactgt

SEQ ID NO: 70817 - DNA, 25 bp, Homo sapien
agtgccctaccaatgtgggacacct

SEQ ID NO: 70818 - DNA, 25 bp, Homo sapien
agtgccctaccattgtgggacacct

SEQ ID NO: 70819 - DNA, 25 bp, Homo sapien
cggacagagcacaaggacgtggccc

SEQ ID NO: 70820 - DNA, 25 bp, Homo sapien
cggacagagcactaggacgtggccc

SEQ ID NO: 70821 - DNA, 25 bp, Homo sapien
actggacgtcgtaaccatgggtcgg

SEQ ID NO: 70822 - DNA, 25 bp, Homo sapien
actggacgtcgttaccatgggtcgg

SEQ ID NO: 70823 - DNA, 25 bp, Homo sapien
gcaggatctacatcatctcgccgtg

SEQ ID NO: 70824 - DNA, 25 bp, Homo sapien
gcaggatctacaacatctcgccgtg

SEQ ID NO: 70825 - DNA, 25 bp, Homo sapien
acagaattaccactacgtaaggtac

SEQ ID NO: 70826 - DNA, 25 bp, Homo sapien
acagaattaccagtacgtaaggtac

SEQ ID NO: 70827 - DNA, 25 bp, Homo sapien
acagactcagcgacaacaggctcgt

SEQ ID NO: 70828 - DNA, 25 bp, Homo sapien
acagactcagcgtcaacaggctcgt

SEQ ID NO: 70829 - DNA, 25 bp, Homo sapien
cggtcgtgccggatctagtatgtcg

SEQ ID NO: 70830 - DNA, 25 bp, Homo sapien
cggtcgtgccggttctagtatgtcg

SEQ ID NO: 70831 - DNA, 25 bp, Homo sapien
cgttacttacaggttgataccgact

SEQ ID NO: 70832 - DNA, 25 bp, Homo sapien
cgttacttacagcttgataccgact

SEQ ID NO: 70833 - DNA, 25 bp, Homo sapien
agactcaaggacctaccgtaatcag

SEQ ID NO: 70834 - DNA, 25 bp, Homo sapien
agactcaaggacgtaccgtaatcag

SEQ ID NO: 70835 - DNA, 25 bp, Homo sapien
atcacgaccaagtcctccttcgttg

SEQ ID NO: 70836 - DNA, 25 bp, Homo sapien
atcacgaccaagacctccttcgttg

SEQ ID NO: 70837 - DNA, 25 bp, Homo sapien
agacgaaccatgctcggtaacgctt

SEQ ID NO: 70838 - DNA, 25 bp, Homo sapien
agacgaaccatggtcggtaacgctt

SEQ ID NO: 70839 - DNA, 25 bp, Homo sapien
aggaggtcccagtcgtaccccaggt

SEQ ID NO: 70840 - DNA, 25 bp, Homo sapien
aggaggtcccagacgtaccccaggt

SEQ ID NO: 70841 - DNA, 25 bp, Homo sapien
cagttcctagtactctccgtgaggt

SEQ ID NO: 70842 - DNA, 25 bp, Homo sapien
cagttcctagtagtctccgtgaggt

SEQ ID NO: 70843 - DNA, 25 bp, Homo sapien
aacttcgtagtagtgtttcacgtgg

SEQ ID NO: 70844 - DNA, 25 bp, Homo sapien
aacttcgtagtactgtttcacgtgg

SEQ ID NO: 70845 - DNA, 25 bp, Homo sapien
gaaaaacctcattgtctatggtaat

SEQ ID NO: 70846 - DNA, 25 bp, Homo sapien
gaaaaacctcatagtctatggtaat

SEQ ID NO: 70847 - DNA, 25 bp, Homo sapien
gaaaaaccgtcttttcgaaccgaca

SEQ ID NO: 70848 - DNA, 25 bp, Homo sapien
gaaaaaccgtctattcgaaccgaca

SEQ ID NO: 70849 - DNA, 25 bp, Homo sapien
gagaaaaagattttgtcgtccctca

SEQ ID NO: 70850 - DNA, 25 bp, Homo sapien
gagaaaaagattatgtcgtccctca

SEQ ID NO: 70851 - DNA, 25 bp, Homo sapien
ctggagaaaaccactgtcttctttt

SEQ ID NO: 70852 - DNA, 25 bp, Homo sapien
ctggagaaaacctctgtcttctttt

SEQ ID NO: 70853 - DNA, 25 bp, Homo sapien
ccaaaagtaggatgtttcgatttcg

SEQ ID NO: 70854 - DNA, 25 bp, Homo sapien
ccaaaagtaggaagtttcgatttcg

SEQ ID NO: 70855 - DNA, 25 bp, Homo sapien
cgacacccagggtgtaggttcctct

SEQ ID NO: 70856 - DNA, 25 bp, Homo sapien
cgacacccagggagtaggttcctct

SEQ ID NO: 70857 - DNA, 25 bp, Homo sapien
gacctcagccgacatagactgtggt

SEQ ID NO: 70858 - DNA, 25 bp, Homo sapien
gacctcagccgagatagactgtggt

SEQ ID NO: 70859 - DNA, 25 bp, Homo sapien
atcttcgagccgtgtttgcgtgcgt

SEQ ID NO: 70860 - DNA, 25 bp, Homo sapien
atcttcgagccgagtttgcgtgcgt

SEQ ID NO: 70861 - DNA, 25 bp, Homo sapien
gtccgcaccgcaagtcttaccgagg

SEQ ID NO: 70862 - DNA, 25 bp, Homo sapien
gtccgcaccgcatgtcttaccgagg

SEQ ID NO: 70863 - DNA, 25 bp, Homo sapien
taatgttgttcgacctttcctccag

SEQ ID NO: 70864 - DNA, 25 bp, Homo sapien
taatgttgttcgtcctttcctccag

SEQ ID NO: 70865 - DNA, 25 bp, Homo sapien
aaatgttttacgtgctttcgtcccc

SEQ ID NO: 70866 - DNA, 25 bp, Homo sapien
aaatgttttacgagctttcgtcccc

SEQ ID NO: 70867 - DNA, 25 bp, Homo sapien
ctttgatagacaaagatctccgaac

SEQ ID NO: 70868 - DNA, 25 bp, Homo sapien
ctttgatagacatagatctccgaac

SEQ ID NO: 70869 - DNA, 25 bp, Homo sapien
ggaattgttcttcctgcagaagaag

SEQ ID NO: 70870 - DNA, 25 bp, Homo sapien
ggaattgttcttgctgcagaagaag

SEQ ID NO: 70871 - DNA, 25 bp, Homo sapien
aaggtctacaaactgtcacatttgt

SEQ ID NO: 70872 - DNA, 25 bp, Homo sapien
aaggtctacaaagtgtcacatttgt

SEQ ID NO: 70873 - DNA, 25 bp, Homo sapien
gcaggagtcaaaggtttcactgttc

SEQ ID NO: 70874 - DNA, 25 bp, Homo sapien
gcaggagtcaaacgtttcactgttc

SEQ ID NO: 70875 - DNA, 25 bp, Homo sapien
caataggacccttctttcaagatcg

SEQ ID NO: 70876 - DNA, 25 bp, Homo sapien
caataggaccctactttcaagatcg

SEQ ID NO: 70877 - DNA, 25 bp, Homo sapien
caactaccccgtcgttaaaagtatg

SEQ ID NO: 70878 - DNA, 25 bp, Homo sapien
caactaccccgtggttaaaagtatg

SEQ ID NO: 70879 - DNA, 25 bp, Homo sapien
tttattgtcttctttatgaagatgt

SEQ ID NO: 70880 - DNA, 25 bp, Homo sapien
tttattgtcttcattatgaagatgt

SEQ ID NO: 70881 - DNA, 25 bp, Homo sapien
agtcttcggtttactgacaggaatt

SEQ ID NO: 70882 - DNA, 25 bp, Homo sapien
agtcttcggttttctgacaggaatt

SEQ ID NO: 70883 - DNA, 25 bp, Homo sapien
cgttctcgtgtttttgaattcagta

SEQ ID NO: 70884 - DNA, 25 bp, Homo sapien
cgttctcgtgttattgaattcagta

SEQ ID NO: 70885 - DNA, 25 bp, Homo sapien
gctgtagtaccattagtaaccatga

SEQ ID NO: 70886 - DNA, 25 bp, Homo sapien
gctgtagtaccaatagtaaccatga

SEQ ID NO: 70887 - DNA, 25 bp, Homo sapien
cctttatcgtctagggtccttaaag

SEQ ID NO: 70888 - DNA, 25 bp, Homo sapien
cctttatcgtcttgggtccttaaag

SEQ ID NO: 70889 - DNA, 25 bp, Homo sapien
gtccatagccttaaggcataaccag

SEQ ID NO: 70890 - DNA, 25 bp, Homo sapien
gtccatagcctttaggcataaccag

SEQ ID NO: 70891 - DNA, 25 bp, Homo sapien
cactggtgagtgtaccctatatcca

SEQ ID NO: 70892 - DNA, 25 bp, Homo sapien
cactggtgagtgaaccctatatcca

SEQ ID NO: 70893 - DNA, 25 bp, Homo sapien
tgccagtgtgtggatcaaccaccac

SEQ ID NO: 70894 - DNA, 25 bp, Homo sapien
tgccagtgtgtgcatcaaccaccac

SEQ ID NO: 70895 - DNA, 25 bp, Homo sapien
cccgtgtttgactgagtaccgaccc

SEQ ID NO: 70896 - DNA, 25 bp, Homo sapien
cccgtgtttgacagagtaccgaccc

SEQ ID NO: 70897 - DNA, 25 bp, Homo sapien
ttacagggttttaagactttaacac

SEQ ID NO: 70898 - DNA, 25 bp, Homo sapien
ttacagggtttttagactttaacac

SEQ ID NO: 70899 - DNA, 25 bp, Homo sapien
ttatcactgtccattgcgttgaaag

SEQ ID NO: 70900 - DNA, 25 bp, Homo sapien
ttatcactgtcctttgcgttgaaag

SEQ ID NO: 70901 - DNA, 25 bp, Homo sapien
gtgttaattgaccttgacgaaaaag

SEQ ID NO: 70902 - DNA, 25 bp, Homo sapien
gtgttaattgacgttgacgaaaaag

SEQ ID NO: 70903 - DNA, 25 bp, Homo sapien
cgggtaattgacgattaccatatga

SEQ ID NO: 70904 - DNA, 25 bp, Homo sapien
cgggtaattgaccattaccatatga

SEQ ID NO: 70905 - DNA, 25 bp, Homo sapien
gtacatcagtctgctcgcctattta

SEQ ID NO: 70906 - DNA, 25 bp, Homo sapien
gtacatcagtctcctcgcctattta

SEQ ID NO: 70907 - DNA, 25 bp, Homo sapien
ttgtcagagattctcccagtcctct

SEQ ID NO: 70908 - DNA, 25 bp, Homo sapien
ttgtcagagattgtcccagtcctct

SEQ ID NO: 70909 - DNA, 25 bp, Homo sapien
gacgcagtcttccacgtctcgcaag

SEQ ID NO: 70910 - DNA, 25 bp, Homo sapien
gacgcagtcttcgacgtctcgcaag

SEQ ID NO: 70911 - DNA, 25 bp, Homo sapien
agatttcttctcgtcttacgagagt

SEQ ID NO: 70912 - DNA, 25 bp, Homo sapien
agatttcttctcctcttacgagagt

SEQ ID NO: 70913 - DNA, 25 bp, Homo sapien
ttgttctttcgtcgtggttgactcg

SEQ ID NO: 70914 - DNA, 25 bp, Homo sapien
ttgttctttcgtggtggttgactcg

SEQ ID NO: 70915 - DNA, 25 bp, Homo sapien
gaatggtctctcatcgtttcagaag

SEQ ID NO: 70916 - DNA, 25 bp, Homo sapien
gaatggtctctcttcgtttcagaag

SEQ ID NO: 70917 - DNA, 25 bp, Homo sapien
atgttatcttcgttgcttaccctag

SEQ ID NO: 70918 - DNA, 25 bp, Homo sapien
atgttatcttcgatgcttaccctag

SEQ ID NO: 70919 - DNA, 25 bp, Homo sapien
ttgatagatgatactcgtatccgta

SEQ ID NO: 70920 - DNA, 25 bp, Homo sapien
ttgatagatgattctcgtatccgta

SEQ ID NO: 70921 - DNA, 25 bp, Homo sapien
ccacttttagtcttttggtgccgac

SEQ ID NO: 70922 - DNA, 25 bp, Homo sapien
ccacttttagtcatttggtgccgac

SEQ ID NO: 70923 - DNA, 25 bp, Homo sapien
ctcaactggaacagggagtccagga

SEQ ID NO: 70924 - DNA, 25 bp, Homo sapien
ctcaactggaactgggagtccagga

SEQ ID NO: 70925 - DNA, 25 bp, Homo sapien
tccagagtatctttaaggctccaaa

SEQ ID NO: 70926 - DNA, 25 bp, Homo sapien
tccagagtatctataaggctccaaa

SEQ ID NO: 70927 - DNA, 25 bp, Homo sapien
aactatcttgacttggtacccacag

SEQ ID NO: 70928 - DNA, 25 bp, Homo sapien
aactatcttgacatggtacccacag

SEQ ID NO: 70929 - DNA, 25 bp, Homo sapien
agaaccagcccgagtcggagccaca

SEQ ID NO: 70930 - DNA, 25 bp, Homo sapien
agaaccagcccgtgtcggagccaca

SEQ ID NO: 70931 - DNA, 25 bp, Homo sapien
aactgaaccgtgagggacgtcgtta

SEQ ID NO: 70932 - DNA, 25 bp, Homo sapien
aactgaaccgtgtgggacgtcgtta

SEQ ID NO: 70933 - DNA, 25 bp, Homo sapien
tacaaacactacgttggtttgtgtg

SEQ ID NO: 70934 - DNA, 25 bp, Homo sapien
tacaaacactaccttggtttgtgtg

SEQ ID NO: 70935 - DNA, 25 bp, Homo sapien
atactttccagtaggactgtgttac

SEQ ID NO: 70936 - DNA, 25 bp, Homo sapien
atactttccagttggactgtgttac

SEQ ID NO: 70937 - DNA, 25 bp, Homo sapien
cgtatcctgtgataactactgtgta

SEQ ID NO: 70938 - DNA, 25 bp, Homo sapien
cgtatcctgtgaaaactactgtgta

SEQ ID NO: 70939 - DNA, 25 bp, Homo sapien
tgaacgtcccttgtgtaatttcggt

SEQ ID NO: 70940 - DNA, 25 bp, Homo sapien
tgaacgtcccttctgtaatttcggt

SEQ ID NO: 70941 - DNA, 25 bp, Homo sapien
atccactacttcgtatgtgttactt

SEQ ID NO: 70942 - DNA, 25 bp, Homo sapien
atccactacttcctatgtgttactt

SEQ ID NO: 70943 - DNA, 25 bp, Homo sapien
tgtaccgaccgttcttatgttaatt

SEQ ID NO: 70944 - DNA, 25 bp, Homo sapien
tgtaccgaccgtacttatgttaatt

SEQ ID NO: 70945 - DNA, 25 bp, Homo sapien
ttttaacaggaggttctgataacct

SEQ ID NO: 70946 - DNA, 25 bp, Homo sapien
ttttaacaggagcttctgataacct

SEQ ID NO: 70947 - DNA, 25 bp, Homo sapien
tctttttaggaacgtacagtaaacc

SEQ ID NO: 70948 - DNA, 25 bp, Homo sapien
tctttttaggaaggtacagtaaacc

SEQ ID NO: 70949 - DNA, 25 bp, Homo sapien
tcttactactggatacgattcctcg

SEQ ID NO: 70950 - DNA, 25 bp, Homo sapien
tcttactactggttacgattcctcg

SEQ ID NO: 70951 - DNA, 25 bp, Homo sapien
agtgtaatatgattcaggtcgtctc

SEQ ID NO: 70952 - DNA, 25 bp, Homo sapien
agtgtaatatgaatcaggtcgtctc

SEQ ID NO: 70953 - DNA, 25 bp, Homo sapien
tcgtcgaagagagaaccacgctgga

SEQ ID NO: 70954 - DNA, 25 bp, Homo sapien
tcgtcgaagagacaaccacgctgga

SEQ ID NO: 70955 - DNA, 25 bp, Homo sapien
ttcgaagtcgtatacctaccaagga

SEQ ID NO: 70956 - DNA, 25 bp, Homo sapien
ttcgaagtcgtaaacctaccaagga

SEQ ID NO: 70957 - DNA, 25 bp, Homo sapien
ttgtaatctaaatgtcttctcggtt

SEQ ID NO: 70958 - DNA, 25 bp, Homo sapien
ttgtaatctaaaagtcttctcggtt

SEQ ID NO: 70959 - DNA, 25 bp, Homo sapien
tttgtattgtgacatccggtgttct

SEQ ID NO: 70960 - DNA, 25 bp, Homo sapien
tttgtattgtgagatccggtgttct

SEQ ID NO: 70961 - DNA, 25 bp, Homo sapien
gtttcgttcttagactccgaaactc

SEQ ID NO: 70962 - DNA, 25 bp, Homo sapien
gtttcgttcttacactccgaaactc

SEQ ID NO: 70963 - DNA, 25 bp, Homo sapien
tttttgtacatataggtccctaatg

SEQ ID NO: 70964 - DNA, 25 bp, Homo sapien
tttttgtacataaaggtccctaatg

SEQ ID NO: 70965 - DNA, 25 bp, Homo sapien
ctgtcttaactggtcccagacgtgt

SEQ ID NO: 70966 - DNA, 25 bp, Homo sapien
ctgtcttaactgctcccagacgtgt

SEQ ID NO: 70967 - DNA, 25 bp, Homo sapien
ttctacgtaggtcgtactgcccacc

SEQ ID NO: 70968 - DNA, 25 bp, Homo sapien
ttctacgtaggtggtactgcccacc

SEQ ID NO: 70969 - DNA, 25 bp, Homo sapien
actcgagtacgtctctctaccccgt

SEQ ID NO: 70970 - DNA, 25 bp, Homo sapien
actcgagtacgtgtctctaccccgt

SEQ ID NO: 70971 - DNA, 25 bp, Homo sapien
ttccccgacgggagtgtagatcctt

SEQ ID NO: 70972 - DNA, 25 bp, Homo sapien
ttccccgacgggtgtgtagatcctt

SEQ ID NO: 70973 - DNA, 25 bp, Homo sapien
tagtccgcgacagttgtctttcttt

SEQ ID NO: 70974 - DNA, 25 bp, Homo sapien
tagtccgcgacacttgtctttcttt

SEQ ID NO: 70975 - DNA, 25 bp, Homo sapien
gtgacacggaagatgatgactcttg

SEQ ID NO: 70976 - DNA, 25 bp, Homo sapien
gtgacacggaagttgatgactcttg

SEQ ID NO: 70977 - DNA, 25 bp, Homo sapien
atggtgacccggtgacgactcctta

SEQ ID NO: 70978 - DNA, 25 bp, Homo sapien
atggtgacccggagacgactcctta

SEQ ID NO: 70979 - DNA, 25 bp, Homo sapien
gtcacccgagtcacgccacgtagtg

SEQ ID NO: 70980 - DNA, 25 bp, Homo sapien
gtcacccgagtctcgccacgtagtg

SEQ ID NO: 70981 - DNA, 25 bp, Homo sapien
acgtaatccgttcctcctcgggtct

SEQ ID NO: 70982 - DNA, 25 bp, Homo sapien
acgtaatccgttgctcctcgggtct

SEQ ID NO: 70983 - DNA, 25 bp, Homo sapien
gatctcactccttactcccggggat

SEQ ID NO: 70984 - DNA, 25 bp, Homo sapien
gatctcactcctaactcccggggat

SEQ ID NO: 70985 - DNA, 25 bp, Homo sapien
tggactccccgtcgtggtccctgag

SEQ ID NO: 70986 - DNA, 25 bp, Homo sapien
tggactccccgtggtggtccctgag

SEQ ID NO: 70987 - DNA, 25 bp, Homo sapien
tatggcacctcttagggcacctaga

SEQ ID NO: 70988 - DNA, 25 bp, Homo sapien
tatggcacctctaagggcacctaga

SEQ ID NO: 70989 - DNA, 25 bp, Homo sapien
tttggacttggtattgccgaagcgt

SEQ ID NO: 70990 - DNA, 25 bp, Homo sapien
tttggacttggttttgccgaagcgt

SEQ ID NO: 70991 - DNA, 25 bp, Homo sapien
gttccgcagagttgttagttcaaga

SEQ ID NO: 70992 - DNA, 25 bp, Homo sapien
gttccgcagagtagttagttcaaga

SEQ ID NO: 70993 - DNA, 25 bp, Homo sapien
accgggggatagtctttatcataat

SEQ ID NO: 70994 - DNA, 25 bp, Homo sapien
accgggggatagactttatcataat

SEQ ID NO: 70995 - DNA, 25 bp, Homo sapien
gacactagtgacttcgtctctaaat

SEQ ID NO: 70996 - DNA, 25 bp, Homo sapien
gacactagtgacatcgtctctaaat

SEQ ID NO: 70997 - DNA, 25 bp, Homo sapien
tcctgactcctggtaaattttcgaa

SEQ ID NO: 70998 - DNA, 25 bp, Homo sapien
tcctgactcctgctaaattttcgaa

SEQ ID NO: 70999 - DNA, 25 bp, Homo sapien
tgtagtcgtatgtcctgttttgaca

SEQ ID NO: 71000 - DNA, 25 bp, Homo sapien
tgtagtcgtatgacctgttttgaca

SEQ ID NO: 71001 - DNA, 25 bp, Homo sapien
gtaattaagtggagactttttcacc

SEQ ID NO: 71002 - DNA, 25 bp, Homo sapien
gtaattaagtggtgactttttcacc

SEQ ID NO: 71003 - DNA, 25 bp, Homo sapien
gttttttcggatcctttcctctgac

SEQ ID NO: 71004 - DNA, 25 bp, Homo sapien
gttttttcggatgctttcctctgac

SEQ ID NO: 71005 - DNA, 25 bp, Homo sapien
gtgggtcctgatagcgtcctctcca

SEQ ID NO: 71006 - DNA, 25 bp, Homo sapien
gtgggtcctgattgcgtcctctcca

SEQ ID NO: 71007 - DNA, 25 bp, Homo sapien
gcacgtcatgtgtccgtacgaccag

SEQ ID NO: 71008 - DNA, 25 bp, Homo sapien
gcacgtcatgtgaccgtacgaccag

SEQ ID NO: 71009 - DNA, 25 bp, Homo sapien
gagtcacaggggagttacgaccagt

SEQ ID NO: 71010 - DNA, 25 bp, Homo sapien
gagtcacaggggtgttacgaccagt

SEQ ID NO: 71011 - DNA, 25 bp, Homo sapien
tttaagtaagggtcggatccgagac

SEQ ID NO: 71012 - DNA, 25 bp, Homo sapien
tttaagtaagggacggatccgagac

SEQ ID NO: 71013 - DNA, 25 bp, Homo sapien
acaaagtaaaatcagtgtgtttcgc

SEQ ID NO: 71014 - DNA, 25 bp, Homo sapien
acaaagtaaaatgagtgtgtttcgc

SEQ ID NO: 71015 - DNA, 25 bp, Homo sapien
tgatacatacaacgtttcgtgttcc

SEQ ID NO: 71016 - DNA, 25 bp, Homo sapien
tgatacatacaaggtttcgtgttcc

SEQ ID NO: 71017 - DNA, 25 bp, Homo sapien
ctaacgtaagtatgtcctcggcctc

SEQ ID NO: 71018 - DNA, 25 bp, Homo sapien
ctaacgtaagtaagtcctcggcctc

SEQ ID NO: 71019 - DNA, 25 bp, Homo sapien
gagcaagaggcgtgcgcgactcctt

SEQ ID NO: 71020 - DNA, 25 bp, Homo sapien
gagcaagaggcgagcgcgactcctt

SEQ ID NO: 71021 - DNA, 25 bp, Homo sapien
gaagtcccgggtgtcgcggcccact

SEQ ID NO: 71022 - DNA, 25 bp, Homo sapien
gaagtcccgggtctcgcggcccact

SEQ ID NO: 71023 - DNA, 25 bp, Homo sapien
tacagtccggggtacgacaaaaccc

SEQ ID NO: 71024 - DNA, 25 bp, Homo sapien
tacagtccggggaacgacaaaaccc

SEQ ID NO: 71025 - DNA, 25 bp, Homo sapien
cgatctgtgaacagaaagaccaccc

SEQ ID NO: 71026 - DNA, 25 bp, Homo sapien
cgatctgtgaactgaaagaccaccc

SEQ ID NO: 71027 - DNA, 25 bp, Homo sapien
atgtggttcagaaactttagtcact

SEQ ID NO: 71028 - DNA, 25 bp, Homo sapien
atgtggttcagatactttagtcact

SEQ ID NO: 71029 - DNA, 25 bp, Homo sapien
aaagaggtctgcaacgagattcagt

SEQ ID NO: 71030 - DNA, 25 bp, Homo sapien
aaagaggtctgctacgagattcagt

SEQ ID NO: 71031 - DNA, 25 bp, Homo sapien
aaaagggttaccagagtatcctcat

SEQ ID NO: 71032 - DNA, 25 bp, Homo sapien
aaaagggttacctgagtatcctcat

SEQ ID NO: 71033 - DNA, 25 bp, Homo sapien
cgaataaatcttgaacacatggact

SEQ ID NO: 71034 - DNA, 25 bp, Homo sapien
cgaataaatcttcaacacatggact

SEQ ID NO: 71035 - DNA, 25 bp, Homo sapien
gtcgatggaatcttcatcatattaa

SEQ ID NO: 71036 - DNA, 25 bp, Homo sapien
gtcgatggaatcatcatcatattaa

SEQ ID NO: 71037 - DNA, 25 bp, Homo sapien
gcgcaattctgcaaactaaaccaag

SEQ ID NO: 71038 - DNA, 25 bp, Homo sapien
gcgcaattctgctaactaaaccaag

SEQ ID NO: 71039 - DNA, 25 bp, Homo sapien
actgaggtcgcttaatagacctaag

SEQ ID NO: 71040 - DNA, 25 bp, Homo sapien
actgaggtcgctaaatagacctaag

SEQ ID NO: 71041 - DNA, 25 bp, Homo sapien
tgtgtaagacggttcaagacaatca

SEQ ID NO: 71042 - DNA, 25 bp, Homo sapien
tgtgtaagacggatcaagacaatca

SEQ ID NO: 71043 - DNA, 25 bp, Homo sapien
gtagtaaggagttcccggagcacga

SEQ ID NO: 71044 - DNA, 25 bp, Homo sapien
gtagtaaggagtacccggagcacga

SEQ ID NO: 71045 - DNA, 25 bp, Homo sapien
ttgcacagtcaccacctggactgga

SEQ ID NO: 71046 - DNA, 25 bp, Homo sapien
ttgcacagtcacgacctggactgga

SEQ ID NO: 71047 - DNA, 25 bp, Homo sapien
ttcacagtgaatgagggactacaga

SEQ ID NO: 71048 - DNA, 25 bp, Homo sapien
ttcacagtgaatcagggactacaga

SEQ ID NO: 71049 - DNA, 25 bp, Homo sapien
gttccggtgaatagacgtcgatgga

SEQ ID NO: 71050 - DNA, 25 bp, Homo sapien
gttccggtgaattgacgtcgatgga

SEQ ID NO: 71051 - DNA, 25 bp, Homo sapien
taggtccaggaatgccgttaggacc

SEQ ID NO: 71052 - DNA, 25 bp, Homo sapien
taggtccaggaaagccgttaggacc

SEQ ID NO: 71053 - DNA, 25 bp, Homo sapien
cctcgtcgtagagtcctgtggactc

SEQ ID NO: 71054 - DNA, 25 bp, Homo sapien
cctcgtcgtagactcctgtggactc

SEQ ID NO: 71055 - DNA, 25 bp, Homo sapien
gataccgtgtgactctcggggtcct

SEQ ID NO: 71056 - DNA, 25 bp, Homo sapien
gataccgtgtgagtctcggggtcct

SEQ ID NO: 71057 - DNA, 25 bp, Homo sapien
acagtgtcgagtcgatgtggactcc

SEQ ID NO: 71058 - DNA, 25 bp, Homo sapien
acagtgtcgagtggatgtggactcc

SEQ ID NO: 71059 - DNA, 25 bp, Homo sapien
atcgagagacgaaaaaccggacata

SEQ ID NO: 71060 - DNA, 25 bp, Homo sapien
atcgagagacgataaaccggacata

SEQ ID NO: 71061 - DNA, 25 bp, Homo sapien
cagcagaaggagattgtctggattc

SEQ ID NO: 71062 - DNA, 25 bp, Homo sapien
cagcagaaggagtttgtctggattc

SEQ ID NO: 71063 - DNA, 25 bp, Homo sapien
tataaacaagtaggtcgaggaccct

SEQ ID NO: 71064 - DNA, 25 bp, Homo sapien
tataaacaagtacgtcgaggaccct

SEQ ID NO: 71065 - DNA, 25 bp, Homo sapien
gttgtctaaaattcttcagtcaagg

SEQ ID NO: 71066 - DNA, 25 bp, Homo sapien
gttgtctaaaatacttcagtcaagg

SEQ ID NO: 71067 - DNA, 25 bp, Homo sapien
cacttaaacccaggacgttaccgtg

SEQ ID NO: 71068 - DNA, 25 bp, Homo sapien
cacttaaacccacgacgttaccgtg

SEQ ID NO: 71069 - DNA, 25 bp, Homo sapien
gaacacttagactcctcactttggt

SEQ ID NO: 71070 - DNA, 25 bp, Homo sapien
gaacacttagacacctcactttggt

SEQ ID NO: 71071 - DNA, 25 bp, Homo sapien
gaaacctttcttaccagaggtcgat

SEQ ID NO: 71072 - DNA, 25 bp, Homo sapien
gaaacctttctttccagaggtcgat

SEQ ID NO: 71073 - DNA, 25 bp, Homo sapien
gtaaagtttgccttacagggagtcc

SEQ ID NO: 71074 - DNA, 25 bp, Homo sapien
gtaaagtttgccatacagggagtcc

SEQ ID NO: 71075 - DNA, 25 bp, Homo sapien
tcaggttatttccatattggctaat

SEQ ID NO: 71076 - DNA, 25 bp, Homo sapien
tcaggttatttcgatattggctaat

SEQ ID NO: 71077 - DNA, 25 bp, Homo sapien
tcgggatcttgttctttattcctaa

SEQ ID NO: 71078 - DNA, 25 bp, Homo sapien
tcgggatcttgtactttattcctaa

SEQ ID NO: 71079 - DNA, 25 bp, Homo sapien
ttgggttcgtttctccttcctcaac

SEQ ID NO: 71080 - DNA, 25 bp, Homo sapien
ttgggttcgtttgtccttcctcaac

SEQ ID NO: 71081 - DNA, 25 bp, Homo sapien
ctttctactgtgtccatgtgcactt

SEQ ID NO: 71082 - DNA, 25 bp, Homo sapien
ctttctactgtgaccatgtgcactt

SEQ ID NO: 71083 - DNA, 25 bp, Homo sapien
atgtccactggtactaagtgacttt

SEQ ID NO: 71084 - DNA, 25 bp, Homo sapien
atgtccactggttctaagtgacttt

SEQ ID NO: 71085 - DNA, 25 bp, Homo sapien
tttaactccgtcgtactgttaaggt

SEQ ID NO: 71086 - DNA, 25 bp, Homo sapien
tttaactccgtcctactgttaaggt

SEQ ID NO: 71087 - DNA, 25 bp, Homo sapien
tctttactccgtagtcgaagagatt

SEQ ID NO: 71088 - DNA, 25 bp, Homo sapien
tctttactccgttgtcgaagagatt

SEQ ID NO: 71089 - DNA, 25 bp, Homo sapien
taagttcatgttcctcttgagaaat

SEQ ID NO: 71090 - DNA, 25 bp, Homo sapien
taagttcatgttgctcttgagaaat

SEQ ID NO: 71091 - DNA, 25 bp, Homo sapien
cgcacggcgtattcggatggcagat

SEQ ID NO: 71092 - DNA, 25 bp, Homo sapien
cgcacggcgtatacggatggcagat

SEQ ID NO: 71093 - DNA, 25 bp, Homo sapien
gcggcgccgtcgacgacgcactgaa

SEQ ID NO: 71094 - DNA, 25 bp, Homo sapien
gcggcgccgtcgtcgacgcactgaa

SEQ ID NO: 71095 - DNA, 25 bp, Homo sapien
aggggtcagccaacggtacaaacag

SEQ ID NO: 71096 - DNA, 25 bp, Homo sapien
aggggtcagccatcggtacaaacag

SEQ ID NO: 71097 - DNA, 25 bp, Homo sapien
tacgtacacccttggtacgacataa

SEQ ID NO: 71098 - DNA, 25 bp, Homo sapien
tacgtacaccctaggtacgacataa

SEQ ID NO: 71099 - DNA, 25 bp, Homo sapien
cgaccaccgtacgtgtacgagaaat

SEQ ID NO: 71100 - DNA, 25 bp, Homo sapien
cgaccaccgtacctgtacgagaaat

SEQ ID NO: 71101 - DNA, 25 bp, Homo sapien
cgcggactcgacctcgctcgagaag

SEQ ID NO: 71102 - DNA, 25 bp, Homo sapien
cgcggactcgacgtcgctcgagaag

SEQ ID NO: 71103 - DNA, 25 bp, Homo sapien
gagtccgccatacacgccttcaggg

SEQ ID NO: 71104 - DNA, 25 bp, Homo sapien
gagtccgccatagacgccttcaggg

SEQ ID NO: 71105 - DNA, 25 bp, Homo sapien
aagaccctcttttggtttctaagtg

SEQ ID NO: 71106 - DNA, 25 bp, Homo sapien
aagaccctctttaggtttctaagtg

SEQ ID NO: 71107 - DNA, 25 bp, Homo sapien
ggtaaactgtttcctcttcttaatg

SEQ ID NO: 71108 - DNA, 25 bp, Homo sapien
ggtaaactgtttgctcttcttaatg

SEQ ID NO: 71109 - DNA, 25 bp, Homo sapien
atcaatgttgtcaaccgtgtatcca

SEQ ID NO: 71110 - DNA, 25 bp, Homo sapien
atcaatgttgtctaccgtgtatcca

SEQ ID NO: 71111 - DNA, 25 bp, Homo sapien
gaaatccgtgtcgacctagatcccg

SEQ ID NO: 71112 - DNA, 25 bp, Homo sapien
gaaatccgtgtccacctagatcccg

SEQ ID NO: 71113 - DNA, 25 bp, Homo sapien
tcggtatctttatcatagaatcctg

SEQ ID NO: 71114 - DNA, 25 bp, Homo sapien
tcggtatctttaacatagaatcctg

SEQ ID NO: 71115 - DNA, 25 bp, Homo sapien
aacggtttttctgatacgatcttcc

SEQ ID NO: 71116 - DNA, 25 bp, Homo sapien
aacggtttttctcatacgatcttcc

SEQ ID NO: 71117 - DNA, 25 bp, Homo sapien
cacggtaggtttacaagttcagttt

SEQ ID NO: 71118 - DNA, 25 bp, Homo sapien
cacggtaggttttcaagttcagttt

SEQ ID NO: 71119 - DNA, 25 bp, Homo sapien
cattcggtgacacgttgtacttact

SEQ ID NO: 71120 - DNA, 25 bp, Homo sapien
cattcggtgacaggttgtacttact

SEQ ID NO: 71121 - DNA, 25 bp, Homo sapien
aagatgtccttctggtgactcggac

SEQ ID NO: 71122 - DNA, 25 bp, Homo sapien
aagatgtccttcaggtgactcggac

SEQ ID NO: 71123 - DNA, 25 bp, Homo sapien
agggctcctcgtggggcacgacgac

SEQ ID NO: 71124 - DNA, 25 bp, Homo sapien
agggctcctcgtcgggcacgacgac

SEQ ID NO: 71125 - DNA, 25 bp, Homo sapien
gggtatgaatagagcctagacgacg

SEQ ID NO: 71126 - DNA, 25 bp, Homo sapien
gggtatgaatagtgcctagacgacg

SEQ ID NO: 71127 - DNA, 25 bp, Homo sapien
agagttgaaacaccgacgtcttagc

SEQ ID NO: 71128 - DNA, 25 bp, Homo sapien
agagttgaaacagcgacgtcttagc

SEQ ID NO: 71129 - DNA, 25 bp, Homo sapien
tcctgagtcttgatgtggtatttac

SEQ ID NO: 71130 - DNA, 25 bp, Homo sapien
tcctgagtcttgttgtggtatttac

SEQ ID NO: 71131 - DNA, 25 bp, Homo sapien
gcatcggtccaggacttcgatattt

SEQ ID NO: 71132 - DNA, 25 bp, Homo sapien
gcatcggtccagcacttcgatattt

SEQ ID NO: 71133 - DNA, 25 bp, Homo sapien
actcgtgtcgggactgtcatactta

SEQ ID NO: 71134 - DNA, 25 bp, Homo sapien
actcgtgtcgggtctgtcatactta

SEQ ID NO: 71135 - DNA, 25 bp, Homo sapien
agtctgtgtcgacggaaacaatcag

SEQ ID NO: 71136 - DNA, 25 bp, Homo sapien
agtctgtgtcgagggaaacaatcag

SEQ ID NO: 71137 - DNA, 25 bp, Homo sapien
atctaatatgatagttttaccgtcg

SEQ ID NO: 71138 - DNA, 25 bp, Homo sapien
atctaatatgattgttttaccgtcg

SEQ ID NO: 71139 - DNA, 25 bp, Homo sapien
cttgtacttgtacacattgtattcg

SEQ ID NO: 71140 - DNA, 25 bp, Homo sapien
cttgtacttgtagacattgtattcg

SEQ ID NO: 71141 - DNA, 25 bp, Homo sapien
cctttccttcacgaggtacttttcg

SEQ ID NO: 71142 - DNA, 25 bp, Homo sapien
cctttccttcaccaggtacttttcg

SEQ ID NO: 71143 - DNA, 25 bp, Homo sapien
actttcgactccagtagtcggtacc

SEQ ID NO: 71144 - DNA, 25 bp, Homo sapien
actttcgactcctgtagtcggtacc

SEQ ID NO: 71145 - DNA, 25 bp, Homo sapien
acctgtgagtacgtggtggcactcg

SEQ ID NO: 71146 - DNA, 25 bp, Homo sapien
acctgtgagtacctggtggcactcg

SEQ ID NO: 71147 - DNA, 25 bp, Homo sapien
ccccattgaaagtgtactgtcagtg

SEQ ID NO: 71148 - DNA, 25 bp, Homo sapien
ccccattgaaagagtactgtcagtg

SEQ ID NO: 71149 - DNA, 25 bp, Homo sapien
tttatgacaacacaaatgtccgtag

SEQ ID NO: 71150 - DNA, 25 bp, Homo sapien
tttatgacaacagaaatgtccgtag

SEQ ID NO: 71151 - DNA, 25 bp, Homo sapien
tagtagaggagaaacctcatttttc

SEQ ID NO: 71152 - DNA, 25 bp, Homo sapien
tagtagaggagatacctcatttttc

SEQ ID NO: 71153 - DNA, 25 bp, Homo sapien
gagactcaagatccaaagtgttttc

SEQ ID NO: 71154 - DNA, 25 bp, Homo sapien
gagactcaagatgcaaagtgttttc

SEQ ID NO: 71155 - DNA, 25 bp, Homo sapien
gaattaagtctcacaagctttgtct

SEQ ID NO: 71156 - DNA, 25 bp, Homo sapien
gaattaagtctctcaagctttgtct

SEQ ID NO: 71157 - DNA, 25 bp, Homo sapien
agatctgataggtacaatacttttc

SEQ ID NO: 71158 - DNA, 25 bp, Homo sapien
agatctgataggaacaatacttttc

SEQ ID NO: 71159 - DNA, 25 bp, Homo sapien
cggcgttattcagatgtaccaatct

SEQ ID NO: 71160 - DNA, 25 bp, Homo sapien
cggcgttattcacatgtaccaatct

SEQ ID NO: 71161 - DNA, 25 bp, Homo sapien
gactacagtttacagtcgtaaaatt

SEQ ID NO: 71162 - DNA, 25 bp, Homo sapien
gactacagtttagagtcgtaaaatt

SEQ ID NO: 71163 - DNA, 25 bp, Homo sapien
gtgactaatttttgtccaacagtgt

SEQ ID NO: 71164 - DNA, 25 bp, Homo sapien
gtgactaattttagtccaacagtgt

SEQ ID NO: 71165 - DNA, 25 bp, Homo sapien
ccgttttcttgtgtctcgaaagtgt

SEQ ID NO: 71166 - DNA, 25 bp, Homo sapien
ccgttttcttgtctctcgaaagtgt

SEQ ID NO: 71167 - DNA, 25 bp, Homo sapien
tgactccttcttgtgtcgtgagccg

SEQ ID NO: 71168 - DNA, 25 bp, Homo sapien
tgactccttcttctgtcgtgagccg

SEQ ID NO: 71169 - DNA, 25 bp, Homo sapien
gtatcctgagttcacttaagaacct

SEQ ID NO: 71170 - DNA, 25 bp, Homo sapien
gtatcctgagttgacttaagaacct

SEQ ID NO: 71171 - DNA, 25 bp, Homo sapien
gagcatctagtcgactgggactgac

SEQ ID NO: 71172 - DNA, 25 bp, Homo sapien
gagcatctagtccactgggactgac

SEQ ID NO: 71173 - DNA, 25 bp, Homo sapien
ccccaggacgttatgttgtggacca

SEQ ID NO: 71174 - DNA, 25 bp, Homo sapien
ccccaggacgttttgttgtggacca

SEQ ID NO: 71175 - DNA, 25 bp, Homo sapien
tcccgtttaggtaccggcggaacag

SEQ ID NO: 71176 - DNA, 25 bp, Homo sapien
tcccgtttaggttccggcggaacag

SEQ ID NO: 71177 - DNA, 25 bp, Homo sapien
cctcggtcctggacttgagcgtgga

SEQ ID NO: 71178 - DNA, 25 bp, Homo sapien
cctcggtcctggtcttgagcgtgga

SEQ ID NO: 71179 - DNA, 25 bp, Homo sapien
agccctccatctacagtgtacagtc

SEQ ID NO: 71180 - DNA, 25 bp, Homo sapien
agccctccatcttcagtgtacagtc

SEQ ID NO: 71181 - DNA, 25 bp, Homo sapien
cagtttcgcgtctcttcgacactac

SEQ ID NO: 71182 - DNA, 25 bp, Homo sapien
cagtttcgcgtcacttcgacactac

SEQ ID NO: 71183 - DNA, 25 bp, Homo sapien
accattccggtgttcagtgtaagac

SEQ ID NO: 71184 - DNA, 25 bp, Homo sapien
accattccggtgatcagtgtaagac

SEQ ID NO: 71185 - DNA, 25 bp, Homo sapien
ccgattcgtttaaggttcatttaac

SEQ ID NO: 71186 - DNA, 25 bp, Homo sapien
ccgattcgtttatggttcatttaac

SEQ ID NO: 71187 - DNA, 25 bp, Homo sapien
ttcccttcatttgtctaaacaatat

SEQ ID NO: 71188 - DNA, 25 bp, Homo sapien
ttcccttcatttctctaaacaatat

SEQ ID NO: 71189 - DNA, 25 bp, Homo sapien
tacgtctttgttccagacgagttat

SEQ ID NO: 71190 - DNA, 25 bp, Homo sapien
tacgtctttgttgcagacgagttat

SEQ ID NO: 71191 - DNA, 25 bp, Homo sapien
ataactgtctgtgttgtgcatacat

SEQ ID NO: 71192 - DNA, 25 bp, Homo sapien
ataactgtctgtcttgtgcatacat

SEQ ID NO: 71193 - DNA, 25 bp, Homo sapien
tgatcgtgaatgtagattatccaga

SEQ ID NO: 71194 - DNA, 25 bp, Homo sapien
tgatcgtgaatgaagattatccaga

SEQ ID NO: 71195 - DNA, 25 bp, Homo sapien
aagatgatgactaaaatcaacctga

SEQ ID NO: 71196 - DNA, 25 bp, Homo sapien
aagatgatgacttaaatcaacctga

SEQ ID NO: 71197 - DNA, 25 bp, Homo sapien
gaccgagtgttctcttcgcaggtga

SEQ ID NO: 71198 - DNA, 25 bp, Homo sapien
gaccgagtgttcacttcgcaggtga

SEQ ID NO: 71199 - DNA, 25 bp, Homo sapien
aagaagggtccgagaacataggcag

SEQ ID NO: 71200 - DNA, 25 bp, Homo sapien
aagaagggtccgtgaacataggcag

SEQ ID NO: 71201 - DNA, 25 bp, Homo sapien
aaagggacctctgacagtaatagaa

SEQ ID NO: 71202 - DNA, 25 bp, Homo sapien
aaagggacctctcacagtaatagaa

SEQ ID NO: 71203 - DNA, 25 bp, Homo sapien
tttgacctgacctccgttaaagata

SEQ ID NO: 71204 - DNA, 25 bp, Homo sapien
tttgacctgaccaccgttaaagata

SEQ ID NO: 71205 - DNA, 25 bp, Homo sapien
ctggattgtagactcttgaaacaat

SEQ ID NO: 71206 - DNA, 25 bp, Homo sapien
ctggattgtagagtcttgaaacaat

SEQ ID NO: 71207 - DNA, 25 bp, Homo sapien
gtgtttaagtcttcgtgacaaagac

SEQ ID NO: 71208 - DNA, 25 bp, Homo sapien
gtgtttaagtctacgtgacaaagac

SEQ ID NO: 71209 - DNA, 25 bp, Homo sapien
cgtactcttgtcatgttagttgata

SEQ ID NO: 71210 - DNA, 25 bp, Homo sapien
cgtactcttgtcttgttagttgata

SEQ ID NO: 71211 - DNA, 25 bp, Homo sapien
ggtttttgatatgaagtcgtactct

SEQ ID NO: 71212 - DNA, 25 bp, Homo sapien
ggtttttgatatcaagtcgtactct

SEQ ID NO: 71213 - DNA, 25 bp, Homo sapien
aacattcggagaatgacgtggtctt

SEQ ID NO: 71214 - DNA, 25 bp, Homo sapien
aacattcggagattgacgtggtctt

SEQ ID NO: 71215 - DNA, 25 bp, Homo sapien
ccataagattgagatgtcttgactt

SEQ ID NO: 71216 - DNA, 25 bp, Homo sapien
ccataagattgacatgtcttgactt

SEQ ID NO: 71217 - DNA, 25 bp, Homo sapien
cacaagacccggattgtacattatg

SEQ ID NO: 71218 - DNA, 25 bp, Homo sapien
cacaagacccggtttgtacattatg

SEQ ID NO: 71219 - DNA, 25 bp, Homo sapien
ctcggtcttcaactgtacttcaacg

SEQ ID NO: 71220 - DNA, 25 bp, Homo sapien
ctcggtcttcaagtgtacttcaacg

SEQ ID NO: 71221 - DNA, 25 bp, Homo sapien
cgaccggggcagagtccttcgcgac

SEQ ID NO: 71222 - DNA, 25 bp, Homo sapien
cgaccggggcagtgtccttcgcgac

SEQ ID NO: 71223 - DNA, 25 bp, Homo sapien
gaaggggaactcttcctacggactc

SEQ ID NO: 71224 - DNA, 25 bp, Homo sapien
gaaggggaactcatcctacggactc

SEQ ID NO: 71225 - DNA, 25 bp, Homo sapien
gggttgaaaccgattacagtaactc

SEQ ID NO: 71226 - DNA, 25 bp, Homo sapien
gggttgaaaccgtttacagtaactc

SEQ ID NO: 71227 - DNA, 25 bp, Homo sapien
gtcaatgatttctgttcataacgtc

SEQ ID NO: 71228 - DNA, 25 bp, Homo sapien
gtcaatgatttcagttcataacgtc

SEQ ID NO: 71229 - DNA, 25 bp, Homo sapien
actaatgtatcttttgattacggtc

SEQ ID NO: 71230 - DNA, 25 bp, Homo sapien
actaatgtatctattgattacggtc

SEQ ID NO: 71231 - DNA, 25 bp, Homo sapien
acaaaacaatacagattcgtcgtct

SEQ ID NO: 71232 - DNA, 25 bp, Homo sapien
acaaaacaatactgattcgtcgtct

SEQ ID NO: 71233 - DNA, 25 bp, Homo sapien
gtgtaaacaggaaagtcgtctactt

SEQ ID NO: 71234 - DNA, 25 bp, Homo sapien
gtgtaaacaggatagtcgtctactt

SEQ ID NO: 71235 - DNA, 25 bp, Homo sapien
tagtcagataacttgtttatccctt

SEQ ID NO: 71236 - DNA, 25 bp, Homo sapien
tagtcagataacatgtttatccctt

SEQ ID NO: 71237 - DNA, 25 bp, Homo sapien
taagtcagaaccagggatcccgcta

SEQ ID NO: 71238 - DNA, 25 bp, Homo sapien
taagtcagaacctgggatcccgcta

SEQ ID NO: 71239 - DNA, 25 bp, Homo sapien
aaacaaaccgtggtgagtccttctg

SEQ ID NO: 71240 - DNA, 25 bp, Homo sapien
aaacaaaccgtgctgagtccttctg

SEQ ID NO: 71241 - DNA, 25 bp, Homo sapien
gagactaaccaggttccttatcttt

SEQ ID NO: 71242 - DNA, 25 bp, Homo sapien
gagactaaccagcttccttatcttt

SEQ ID NO: 71243 - DNA, 25 bp, Homo sapien
ttcacgaccggcttctacttcgtct

SEQ ID NO: 71244 - DNA, 25 bp, Homo sapien
ttcacgaccggcatctacttcgtct

SEQ ID NO: 71245 - DNA, 25 bp, Homo sapien
ttcttacagttcctcaatggtctct

SEQ ID NO: 71246 - DNA, 25 bp, Homo sapien
ttcttacagttcgtcaatggtctct

SEQ ID NO: 71247 - DNA, 25 bp, Homo sapien
ggcacgttgcctcgaagagcggttc

SEQ ID NO: 71248 - DNA, 25 bp, Homo sapien
ggcacgttgcctggaagagcggttc

SEQ ID NO: 71249 - DNA, 25 bp, Homo sapien
tcggacagctccgtaggcatctcgg

SEQ ID NO: 71250 - DNA, 25 bp, Homo sapien
tcggacagctccctaggcatctcgg

SEQ ID NO: 71251 - DNA, 25 bp, Homo sapien
gaactgacgtcctccgaccttctgt

SEQ ID NO: 71252 - DNA, 25 bp, Homo sapien
gaactgacgtccaccgaccttctgt

SEQ ID NO: 71253 - DNA, 25 bp, Homo sapien
gaactctgtacgaaacccttatgag

SEQ ID NO: 71254 - DNA, 25 bp, Homo sapien
gaactctgtacgtaacccttatgag

SEQ ID NO: 71255 - DNA, 25 bp, Homo sapien
agtacagtcccgacaccatgttaag

SEQ ID NO: 71256 - DNA, 25 bp, Homo sapien
agtacagtcccgtcaccatgttaag

SEQ ID NO: 71257 - DNA, 25 bp, Homo sapien
aaaccgagaccgtttattcttgttt

SEQ ID NO: 71258 - DNA, 25 bp, Homo sapien
aaaccgagaccgattattcttgttt

SEQ ID NO: 71259 - DNA, 25 bp, Homo sapien
gccagacgggagaacgcgcgactac

SEQ ID NO: 71260 - DNA, 25 bp, Homo sapien
gccagacgggagtacgcgcgactac

SEQ ID NO: 71261 - DNA, 25 bp, Homo sapien
gtcgtcggacgtcgacctaatgcgt

SEQ ID NO: 71262 - DNA, 25 bp, Homo sapien
gtcgtcggacgtggacctaatgcgt

SEQ ID NO: 71263 - DNA, 25 bp, Homo sapien
ttttcaggtatccttttatcgtgaa

SEQ ID NO: 71264 - DNA, 25 bp, Homo sapien
ttttcaggtatcgttttatcgtgaa

SEQ ID NO: 71265 - DNA, 25 bp, Homo sapien
ttgtacgggtccaatttcgacgggg

SEQ ID NO: 71266 - DNA, 25 bp, Homo sapien
ttgtacgggtcctatttcgacgggg

SEQ ID NO: 71267 - DNA, 25 bp, Homo sapien
acatgcttgttccattggtacaagg

SEQ ID NO: 71268 - DNA, 25 bp, Homo sapien
acatgcttgttcgattggtacaagg

SEQ ID NO: 71269 - DNA, 25 bp, Homo sapien
agttactcttccatgcggtagaaag

SEQ ID NO: 71270 - DNA, 25 bp, Homo sapien
agttactcttccttgcggtagaaag

SEQ ID NO: 71271 - DNA, 25 bp, Homo sapien
atacaggaactttgtttaggtctac

SEQ ID NO: 71272 - DNA, 25 bp, Homo sapien
atacaggaacttagtttaggtctac

SEQ ID NO: 71273 - DNA, 25 bp, Homo sapien
caggtagactgtgttctagtacaac

SEQ ID NO: 71274 - DNA, 25 bp, Homo sapien
caggtagactgtcttctagtacaac

SEQ ID NO: 71275 - DNA, 25 bp, Homo sapien
taaactgttcgtcgtcatagtacaa

SEQ ID NO: 71276 - DNA, 25 bp, Homo sapien
taaactgttcgtggtcatagtacaa

SEQ ID NO: 71277 - DNA, 25 bp, Homo sapien
aacgtaacttctcacgtcaagaaag

SEQ ID NO: 71278 - DNA, 25 bp, Homo sapien
aacgtaacttctgacgtcaagaaag

SEQ ID NO: 71279 - DNA, 25 bp, Homo sapien
ggaacagatccttccgagtacgaaa

SEQ ID NO: 71280 - DNA, 25 bp, Homo sapien
ggaacagatcctaccgagtacgaaa

SEQ ID NO: 71281 - DNA, 25 bp, Homo sapien
tgttcaaagttctgtctgatcgaaa

SEQ ID NO: 71282 - DNA, 25 bp, Homo sapien
tgttcaaagttcagtctgatcgaaa

SEQ ID NO: 71283 - DNA, 25 bp, Homo sapien
agtgaagtatatatctcgttggcac

SEQ ID NO: 71284 - DNA, 25 bp, Homo sapien
agtgaagtatatttctcgttggcac

SEQ ID NO: 71285 - DNA, 25 bp, Homo sapien
gaaggagcggttgagtagacacact

SEQ ID NO: 71286 - DNA, 25 bp, Homo sapien
gaaggagcggttcagtagacacact

SEQ ID NO: 71287 - DNA, 25 bp, Homo sapien
gaggagtaagaagactcctcgaccc

SEQ ID NO: 71288 - DNA, 25 bp, Homo sapien
gaggagtaagaacactcctcgaccc

SEQ ID NO: 71289 - DNA, 25 bp, Homo sapien
gagctacagaagactcctccgacgc

SEQ ID NO: 71290 - DNA, 25 bp, Homo sapien
gagctacagaagtctcctccgacgc

SEQ ID NO: 71291 - DNA, 25 bp, Homo sapien
gacgggacgagacgacccgagctcc

SEQ ID NO: 71292 - DNA, 25 bp, Homo sapien
gacgggacgagaggacccgagctcc

SEQ ID NO: 71293 - DNA, 25 bp, Homo sapien
gtcgtgtcctctggaaccagcctac

SEQ ID NO: 71294 - DNA, 25 bp, Homo sapien
gtcgtgtcctctcgaaccagcctac

SEQ ID NO: 71295 - DNA, 25 bp, Homo sapien
aaaaggttcattacttagggactac

SEQ ID NO: 71296 - DNA, 25 bp, Homo sapien
aaaaggttcatttcttagggactac

SEQ ID NO: 71297 - DNA, 25 bp, Homo sapien
tagacattcctttacattgtggttc

SEQ ID NO: 71298 - DNA, 25 bp, Homo sapien
tagacattccttaacattgtggttc

SEQ ID NO: 71299 - DNA, 25 bp, Homo sapien
tcatgtcactgtccagtttacgaaa

SEQ ID NO: 71300 - DNA, 25 bp, Homo sapien
tcatgtcactgtgcagtttacgaaa

SEQ ID NO: 71301 - DNA, 25 bp, Homo sapien
tcaacagagagtcattaacgtaata

SEQ ID NO: 71302 - DNA, 25 bp, Homo sapien
tcaacagagagtgattaacgtaata

SEQ ID NO: 71303 - DNA, 25 bp, Homo sapien
tccgtcgaaccgtttctgtgtccat

SEQ ID NO: 71304 - DNA, 25 bp, Homo sapien
tccgtcgaaccgattctgtgtccat

SEQ ID NO: 71305 - DNA, 25 bp, Homo sapien
gtaggacaagtatgtgtaaccgact

SEQ ID NO: 71306 - DNA, 25 bp, Homo sapien
gtaggacaagtaagtgtaaccgact

SEQ ID NO: 71307 - DNA, 25 bp, Homo sapien
gtagagtactacatatttacatgac

SEQ ID NO: 71308 - DNA, 25 bp, Homo sapien
gtagagtactacttatttacatgac

SEQ ID NO: 71309 - DNA, 25 bp, Homo sapien
tgttactgtactcattgacatgtct

SEQ ID NO: 71310 - DNA, 25 bp, Homo sapien
tgttactgtactgattgacatgtct

SEQ ID NO: 71311 - DNA, 25 bp, Homo sapien
atgtgttagtatcatttaaccgtct

SEQ ID NO: 71312 - DNA, 25 bp, Homo sapien
atgtgttagtatgatttaaccgtct

SEQ ID NO: 71313 - DNA, 25 bp, Homo sapien
tctatttttagtactgctccgtccg

SEQ ID NO: 71314 - DNA, 25 bp, Homo sapien
tctatttttagttctgctccgtccg

SEQ ID NO: 71315 - DNA, 25 bp, Homo sapien
tttattctgggtaccgtttctcggt

SEQ ID NO: 71316 - DNA, 25 bp, Homo sapien
tttattctgggttccgtttctcggt

SEQ ID NO: 71317 - DNA, 25 bp, Homo sapien
cgaattttaggttgtcggtttactc

SEQ ID NO: 71318 - DNA, 25 bp, Homo sapien
cgaattttaggtagtcggtttactc

SEQ ID NO: 71319 - DNA, 25 bp, Homo sapien
cagtatctcttgtaagttctttatg

SEQ ID NO: 71320 - DNA, 25 bp, Homo sapien
cagtatctcttgaaagttctttatg

SEQ ID NO: 71321 - DNA, 25 bp, Homo sapien
gagtgaaataaaccactaaccagga

SEQ ID NO: 71322 - DNA, 25 bp, Homo sapien
gagtgaaataaagcactaaccagga

SEQ ID NO: 71323 - DNA, 25 bp, Homo sapien
ggaacgggaccgactcaagagagac

SEQ ID NO: 71324 - DNA, 25 bp, Homo sapien
ggaacgggaccgtctcaagagagac

SEQ ID NO: 71325 - DNA, 25 bp, Homo sapien
ggacaaaagaactcctacagaacca

SEQ ID NO: 71326 - DNA, 25 bp, Homo sapien
ggacaaaagaacacctacagaacca

SEQ ID NO: 71327 - DNA, 25 bp, Homo sapien
agaagatcactccttgtgcacgact

SEQ ID NO: 71328 - DNA, 25 bp, Homo sapien
agaagatcactcgttgtgcacgact

SEQ ID NO: 71329 - DNA, 25 bp, Homo sapien
catgtgataaatgttggacgtcgac

SEQ ID NO: 71330 - DNA, 25 bp, Homo sapien
catgtgataaatcttggacgtcgac

SEQ ID NO: 71331 - DNA, 25 bp, Homo sapien
ttaggatgccttctattaagacgac

SEQ ID NO: 71332 - DNA, 25 bp, Homo sapien
ttaggatgccttgtattaagacgac

SEQ ID NO: 71333 - DNA, 25 bp, Homo sapien
gagacggactcttgattcactaccc

SEQ ID NO: 71334 - DNA, 25 bp, Homo sapien
gagacggactctagattcactaccc

SEQ ID NO: 71335 - DNA, 25 bp, Homo sapien
ctaggactcaggtcttctcgagtcg

SEQ ID NO: 71336 - DNA, 25 bp, Homo sapien
ctaggactcaggacttctcgagtcg

SEQ ID NO: 71337 - DNA, 25 bp, Homo sapien
ttgtttaacggtcctttctcgtcac

SEQ ID NO: 71338 - DNA, 25 bp, Homo sapien
ttgtttaacggtgctttctcgtcac

SEQ ID NO: 71339 - DNA, 25 bp, Homo sapien
taagtttatagttgctctccctgac

SEQ ID NO: 71340 - DNA, 25 bp, Homo sapien
taagtttatagtagctctccctgac

SEQ ID NO: 71341 - DNA, 25 bp, Homo sapien
acatttatagttaggtgtctccttc

SEQ ID NO: 71342 - DNA, 25 bp, Homo sapien
acatttatagtttggtgtctccttc

SEQ ID NO: 71343 - DNA, 25 bp, Homo sapien
tcaattgtatctgtgagtcttctta

SEQ ID NO: 71344 - DNA, 25 bp, Homo sapien
tcaattgtatctctgagtcttctta

SEQ ID NO: 71345 - DNA, 25 bp, Homo sapien
aacttgatacaatcagtgtagtccc

SEQ ID NO: 71346 - DNA, 25 bp, Homo sapien
aacttgatacaaacagtgtagtccc

SEQ ID NO: 71347 - DNA, 25 bp, Homo sapien
ggatctcataaacagttaccgtacc

SEQ ID NO: 71348 - DNA, 25 bp, Homo sapien
ggatctcataaagagttaccgtacc

SEQ ID NO: 71349 - DNA, 25 bp, Homo sapien
tgtgtctcaagacgtcattaccatt

SEQ ID NO: 71350 - DNA, 25 bp, Homo sapien
tgtgtctcaagaggtcattaccatt

SEQ ID NO: 71351 - DNA, 25 bp, Homo sapien
ggatgtatttgatacagtcctccta

SEQ ID NO: 71352 - DNA, 25 bp, Homo sapien
ggatgtatttgaaacagtcctccta

SEQ ID NO: 71353 - DNA, 25 bp, Homo sapien
tgagggttgaaacacgaccctcttt

SEQ ID NO: 71354 - DNA, 25 bp, Homo sapien
tgagggttgaaagacgaccctcttt

SEQ ID NO: 71355 - DNA, 25 bp, Homo sapien
gccaggaaatgattactcatttgtc

SEQ ID NO: 71356 - DNA, 25 bp, Homo sapien
gccaggaaatgaatactcatttgtc

SEQ ID NO: 71357 - DNA, 25 bp, Homo sapien
gatcgaaaatacaaaccgaaagtct

SEQ ID NO: 71358 - DNA, 25 bp, Homo sapien
gatcgaaaatactaaccgaaagtct

SEQ ID NO: 71359 - DNA, 25 bp, Homo sapien
aggtgaagaaccacacagatacatc

SEQ ID NO: 71360 - DNA, 25 bp, Homo sapien
aggtgaagaacctcacagatacatc

SEQ ID NO: 71361 - DNA, 25 bp, Homo sapien
ccgttggaaaactttgtagttttct

SEQ ID NO: 71362 - DNA, 25 bp, Homo sapien
ccgttggaaaacattgtagttttct

SEQ ID NO: 71363 - DNA, 25 bp, Homo sapien
agtctcaaatcacttgtgtgtttat

SEQ ID NO: 71364 - DNA, 25 bp, Homo sapien
agtctcaaatcagttgtgtgtttat

SEQ ID NO: 71365 - DNA, 25 bp, Homo sapien
tgagtcgagccctggagtccgatac

SEQ ID NO: 71366 - DNA, 25 bp, Homo sapien
tgagtcgagcccaggagtccgatac

SEQ ID NO: 71367 - DNA, 25 bp, Homo sapien
ttgtcgaggacctaccggcacgaca

SEQ ID NO: 71368 - DNA, 25 bp, Homo sapien
ttgtcgaggaccaaccggcacgaca

SEQ ID NO: 71369 - DNA, 25 bp, Homo sapien
actcaggaggcctcgggtcacggac

SEQ ID NO: 71370 - DNA, 25 bp, Homo sapien
actcaggaggccacgggtcacggac

SEQ ID NO: 71371 - DNA, 25 bp, Homo sapien
aagatctacgactgtgtcgtcagaa

SEQ ID NO: 71372 - DNA, 25 bp, Homo sapien
aagatctacgacagtgtcgtcagaa

SEQ ID NO: 71373 - DNA, 25 bp, Homo sapien
caatagttctgacttcgaagtagat

SEQ ID NO: 71374 - DNA, 25 bp, Homo sapien
caatagttctgagttcgaagtagat

SEQ ID NO: 71375 - DNA, 25 bp, Homo sapien
gataattcgtcttccagtcattgtc

SEQ ID NO: 71376 - DNA, 25 bp, Homo sapien
gataattcgtctaccagtcattgtc

SEQ ID NO: 71377 - DNA, 25 bp, Homo sapien
gtaaacgaaccgaatgttcatcaca

SEQ ID NO: 71378 - DNA, 25 bp, Homo sapien
gtaaacgaaccgtatgttcatcaca

SEQ ID NO: 71379 - DNA, 25 bp, Homo sapien
aaaagaaccatatgtaccttgacag

SEQ ID NO: 71380 - DNA, 25 bp, Homo sapien
aaaagaaccataagtaccttgacag

SEQ ID NO: 71381 - DNA, 25 bp, Homo sapien
aagacgagaagaggtctcgtgaaca

SEQ ID NO: 71382 - DNA, 25 bp, Homo sapien
aagacgagaagacgtctcgtgaaca

SEQ ID NO: 71383 - DNA, 25 bp, Homo sapien
ctatatgtcaaatgtcgtgtgaacc

SEQ ID NO: 71384 - DNA, 25 bp, Homo sapien
ctatatgtcaaaagtcgtgtgaacc

SEQ ID NO: 71385 - DNA, 25 bp, Homo sapien
cagttttcgacgacgtacgttcaaa

SEQ ID NO: 71386 - DNA, 25 bp, Homo sapien
cagttttcgacgtcgtacgttcaaa

SEQ ID NO: 71387 - DNA, 25 bp, Homo sapien
aggtagactgtgttctagtacaaca

SEQ ID NO: 71388 - DNA, 25 bp, Homo sapien
aggtagactgtgatctagtacaaca

SEQ ID NO: 71389 - DNA, 25 bp, Homo sapien
tcgtggtgacggactccgactccct

SEQ ID NO: 71390 - DNA, 25 bp, Homo sapien
tcgtggtgacggtctccgactccct

SEQ ID NO: 71391 - DNA, 25 bp, Homo sapien
ggacggaggtcgaccggtactacta

SEQ ID NO: 71392 - DNA, 25 bp, Homo sapien
ggacggaggtcgtccggtactacta

SEQ ID NO: 71393 - DNA, 25 bp, Homo sapien
acaagaggaccgtttagactactgt

SEQ ID NO: 71394 - DNA, 25 bp, Homo sapien
acaagaggaccgattagactactgt

SEQ ID NO: 71395 - DNA, 25 bp, Homo sapien
acacaacaaagagtccttagttgag

SEQ ID NO: 71396 - DNA, 25 bp, Homo sapien
acacaacaaagactccttagttgag

SEQ ID NO: 71397 - DNA, 25 bp, Homo sapien
taacaccaaccgtcctcgttcggga

SEQ ID NO: 71398 - DNA, 25 bp, Homo sapien
taacaccaaccgacctcgttcggga

SEQ ID NO: 71399 - DNA, 25 bp, Homo sapien
acaggagaccagatccgttgaagtt

SEQ ID NO: 71400 - DNA, 25 bp, Homo sapien
acaggagaccagttccgttgaagtt

SEQ ID NO: 71401 - DNA, 25 bp, Homo sapien
agtcgactacataacaaacaaaggt

SEQ ID NO: 71402 - DNA, 25 bp, Homo sapien
agtcgactacattacaaacaaaggt

SEQ ID NO: 71403 - DNA, 25 bp, Homo sapien
gtttccctgtccttagacacacatg

SEQ ID NO: 71404 - DNA, 25 bp, Homo sapien
gtttccctgtccatagacacacatg

SEQ ID NO: 71405 - DNA, 25 bp, Homo sapien
ggtagtccctttactacaaaaatgt

SEQ ID NO: 71406 - DNA, 25 bp, Homo sapien
ggtagtcccttttctacaaaaatgt

SEQ ID NO: 71407 - DNA, 25 bp, Homo sapien
gtgaattttgcatagtcaaatacct

SEQ ID NO: 71408 - DNA, 25 bp, Homo sapien
gtgaattttgcaaagtcaaatacct

SEQ ID NO: 71409 - DNA, 25 bp, Homo sapien
tcttgatgtaaattcattcgtgact

SEQ ID NO: 71410 - DNA, 25 bp, Homo sapien
tcttgatgtaaaatcattcgtgact

SEQ ID NO: 71411 - DNA, 25 bp, Homo sapien
tataagagtgtgtttttagtggctt

SEQ ID NO: 71412 - DNA, 25 bp, Homo sapien
tataagagtgtgattttagtggctt

SEQ ID NO: 71413 - DNA, 25 bp, Homo sapien
ctcaaagtgtctattgtgtttcgga

SEQ ID NO: 71414 - DNA, 25 bp, Homo sapien
ctcaaagtgtcttttgtgtttcgga

SEQ ID NO: 71415 - DNA, 25 bp, Homo sapien
aaaactacaagttcgtctttcgcgc

SEQ ID NO: 71416 - DNA, 25 bp, Homo sapien
aaaactacaagtacgtctttcgcgc

SEQ ID NO: 71417 - DNA, 25 bp, Homo sapien
gatgaaatacatagtctcccgtgtc

SEQ ID NO: 71418 - DNA, 25 bp, Homo sapien
gatgaaatacattgtctcccgtgtc

SEQ ID NO: 71419 - DNA, 25 bp, Homo sapien
ggcaaagcgtctggtcgcccgtctc

SEQ ID NO: 71420 - DNA, 25 bp, Homo sapien
ggcaaagcgtctcgtcgcccgtctc

SEQ ID NO: 71421 - DNA, 25 bp, Homo sapien
tccacacaccaacgtgacctgttag

SEQ ID NO: 71422 - DNA, 25 bp, Homo sapien
tccacacaccaaggtgacctgttag

SEQ ID NO: 71423 - DNA, 25 bp, Homo sapien
aatgtatgcaattaacacttttata

SEQ ID NO: 71424 - DNA, 25 bp, Homo sapien
aatgtatgcaataaacacttttata

SEQ ID NO: 71425 - DNA, 25 bp, Homo sapien
gtcagtagcttatgtcattctttaa

SEQ ID NO: 71426 - DNA, 25 bp, Homo sapien
gtcagtagcttaagtcattctttaa

SEQ ID NO: 71427 - DNA, 25 bp, Homo sapien
aaagaagatttctctgtcatttgtc

SEQ ID NO: 71428 - DNA, 25 bp, Homo sapien
aaagaagatttcactgtcatttgtc

SEQ ID NO: 71429 - DNA, 25 bp, Homo sapien
taacaggtgtttacgtaatatcatc

SEQ ID NO: 71430 - DNA, 25 bp, Homo sapien
taacaggtgttttcgtaatatcatc

SEQ ID NO: 71431 - DNA, 25 bp, Homo sapien
tacctgagactttttcgaagacctc

SEQ ID NO: 71432 - DNA, 25 bp, Homo sapien
tacctgagacttattcgaagacctc

SEQ ID NO: 71433 - DNA, 25 bp, Homo sapien
agtattgaaaacgtatcgtcaaacc

SEQ ID NO: 71434 - DNA, 25 bp, Homo sapien
agtattgaaaacctatcgtcaaacc

SEQ ID NO: 71435 - DNA, 25 bp, Homo sapien
ccaagggtaaagagcgtttcaaccg

SEQ ID NO: 71436 - DNA, 25 bp, Homo sapien
ccaagggtaaagtgcgtttcaaccg

SEQ ID NO: 71437 - DNA, 25 bp, Homo sapien
gcgacaaacttattcgtgtcaacta

SEQ ID NO: 71438 - DNA, 25 bp, Homo sapien
gcgacaaacttaatcgtgtcaacta

SEQ ID NO: 71439 - DNA, 25 bp, Homo sapien
gacacaaactgtgaagtcacatatt

SEQ ID NO: 71440 - DNA, 25 bp, Homo sapien
gacacaaactgtcaagtcacatatt

SEQ ID NO: 71441 - DNA, 25 bp, Homo sapien
tccacaacagtaagggtctcagtgt

SEQ ID NO: 71442 - DNA, 25 bp, Homo sapien
tccacaacagtatgggtctcagtgt

SEQ ID NO: 71443 - DNA, 25 bp, Homo sapien
aggcccttaagatgtgtggtcctcg

SEQ ID NO: 71444 - DNA, 25 bp, Homo sapien
aggcccttaagaagtgtggtcctcg

SEQ ID NO: 71445 - DNA, 25 bp, Homo sapien
tcgtgcaccgcactaggtggtgccc

SEQ ID NO: 71446 - DNA, 25 bp, Homo sapien
tcgtgcaccgcagtaggtggtgccc

SEQ ID NO: 71447 - DNA, 25 bp, Homo sapien
ataggtactctaaccgaagccgcgg

SEQ ID NO: 71448 - DNA, 25 bp, Homo sapien
ataggtactctatccgaagccgcgg

SEQ ID NO: 71449 - DNA, 25 bp, Homo sapien
gactaggttccatgactcacctctg

SEQ ID NO: 71450 - DNA, 25 bp, Homo sapien
gactaggttccaagactcacctctg

SEQ ID NO: 71451 - DNA, 25 bp, Homo sapien
acagcatgtcctggtcgacgaggtc

SEQ ID NO: 71452 - DNA, 25 bp, Homo sapien
acagcatgtcctcgtcgacgaggtc

SEQ ID NO: 71453 - DNA, 25 bp, Homo sapien
tacaagacggcgaccacgaggagtc

SEQ ID NO: 71454 - DNA, 25 bp, Homo sapien
tacaagacggcgtccacgaggagtc

SEQ ID NO: 71455 - DNA, 25 bp, Homo sapien
aacagtcgtcactgtttcagttgtc

SEQ ID NO: 71456 - DNA, 25 bp, Homo sapien
aacagtcgtcacagtttcagttgtc

SEQ ID NO: 71457 - DNA, 25 bp, Homo sapien
aaaccagagtacaaccgtcaccgtt

SEQ ID NO: 71458 - DNA, 25 bp, Homo sapien
aaaccagagtactaccgtcaccgtt

SEQ ID NO: 71459 - DNA, 25 bp, Homo sapien
aggcacgagacacatcgtaactcga

SEQ ID NO: 71460 - DNA, 25 bp, Homo sapien
aggcacgagacagatcgtaactcga

SEQ ID NO: 71461 - DNA, 25 bp, Homo sapien
acgaccaagacacgtaacttcatcg

SEQ ID NO: 71462 - DNA, 25 bp, Homo sapien
acgaccaagacaggtaacttcatcg

SEQ ID NO: 71463 - DNA, 25 bp, Homo sapien
cgagaacaagtaggtcgaaaccgtt

SEQ ID NO: 71464 - DNA, 25 bp, Homo sapien
cgagaacaagtacgtcgaaaccgtt

SEQ ID NO: 71465 - DNA, 25 bp, Homo sapien
tccgtggccagtcgtacacccagtt

SEQ ID NO: 71466 - DNA, 25 bp, Homo sapien
tccgtggccagtggtacacccagtt

SEQ ID NO: 71467 - DNA, 25 bp, Homo sapien
acgagcctacatctcgtcctcaggt

SEQ ID NO: 71468 - DNA, 25 bp, Homo sapien
acgagcctacatgtcgtcctcaggt

SEQ ID NO: 71469 - DNA, 25 bp, Homo sapien
tagacttcgagtgtggtgttaccgg

SEQ ID NO: 71470 - DNA, 25 bp, Homo sapien
tagacttcgagtctggtgttaccgg

SEQ ID NO: 71471 - DNA, 25 bp, Homo sapien
gacacagaaccaattgtcatgcaat

SEQ ID NO: 71472 - DNA, 25 bp, Homo sapien
gacacagaaccatttgtcatgcaat

SEQ ID NO: 71473 - DNA, 25 bp, Homo sapien
gaaagaatctccactcgaaggtaca

SEQ ID NO: 71474 - DNA, 25 bp, Homo sapien
gaaagaatctcctctcgaaggtaca

SEQ ID NO: 71475 - DNA, 25 bp, Homo sapien
ggaagaaatattcatgcaccctaac

SEQ ID NO: 71476 - DNA, 25 bp, Homo sapien
ggaagaaatattgatgcaccctaac

SEQ ID NO: 71477 - DNA, 25 bp, Homo sapien
gaggagaaactctaccgtccctttt

SEQ ID NO: 71478 - DNA, 25 bp, Homo sapien
gaggagaaactcaaccgtccctttt

SEQ ID NO: 71479 - DNA, 25 bp, Homo sapien
aagaagaaaccgatatttcgttttc

SEQ ID NO: 71480 - DNA, 25 bp, Homo sapien
aagaagaaaccgttatttcgttttc

SEQ ID NO: 71481 - DNA, 25 bp, Homo sapien
aaaccagggagttactggtttctct

SEQ ID NO: 71482 - DNA, 25 bp, Homo sapien
aaaccagggagtaactggtttctct

SEQ ID NO: 71483 - DNA, 25 bp, Homo sapien
cgccaaggagagcatgactcgtcct

SEQ ID NO: 71484 - DNA, 25 bp, Homo sapien
cgccaaggagaggatgactcgtcct

SEQ ID NO: 71485 - DNA, 25 bp, Homo sapien
cccctacgagcgaggttggctgacg

SEQ ID NO: 71486 - DNA, 25 bp, Homo sapien
cccctacgagcgtggttggctgacg

SEQ ID NO: 71487 - DNA, 25 bp, Homo sapien
tcaccgtcaccgagggttccgagag

SEQ ID NO: 71488 - DNA, 25 bp, Homo sapien
tcaccgtcaccgtgggttccgagag

SEQ ID NO: 71489 - DNA, 25 bp, Homo sapien
tgtatcgtccggtctttccggacag

SEQ ID NO: 71490 - DNA, 25 bp, Homo sapien
tgtatcgtccggactttccggacag

SEQ ID NO: 71491 - DNA, 25 bp, Homo sapien
aatgttttacgtgctttcgtcccca

SEQ ID NO: 71492 - DNA, 25 bp, Homo sapien
aatgttttacgtcctttcgtcccca

SEQ ID NO: 71493 - DNA, 25 bp, Homo sapien
ctttgacaaagaagagtccacgtaa

SEQ ID NO: 71494 - DNA, 25 bp, Homo sapien
ctttgacaaagatgagtccacgtaa

SEQ ID NO: 71495 - DNA, 25 bp, Homo sapien
cttgtaccttgctgacgtaaaacag

SEQ ID NO: 71496 - DNA, 25 bp, Homo sapien
cttgtaccttgcagacgtaaaacag

SEQ ID NO: 71497 - DNA, 25 bp, Homo sapien
aaagtttacaaactggaactaccgg

SEQ ID NO: 71498 - DNA, 25 bp, Homo sapien
aaagtttacaaagtggaactaccgg

SEQ ID NO: 71499 - DNA, 25 bp, Homo sapien
aagagttaaagactttcactgttac

SEQ ID NO: 71500 - DNA, 25 bp, Homo sapien
aagagttaaagagtttcactgttac

SEQ ID NO: 71501 - DNA, 25 bp, Homo sapien
agtacgtgacatattgttacaaatc

SEQ ID NO: 71502 - DNA, 25 bp, Homo sapien
agtacgtgacattttgttacaaatc

SEQ ID NO: 71503 - DNA, 25 bp, Homo sapien
caacagaccgatcgtctccaagatg

SEQ ID NO: 71504 - DNA, 25 bp, Homo sapien
caacagaccgatggtctccaagatg

SEQ ID NO: 71505 - DNA, 25 bp, Homo sapien
gtctaggtacttcttcgtgaagatg

SEQ ID NO: 71506 - DNA, 25 bp, Homo sapien
gtctaggtacttgttcgtgaagatg

SEQ ID NO: 71507 - DNA, 25 bp, Homo sapien
agtctcttgtttctgactggtaatt

SEQ ID NO: 71508 - DNA, 25 bp, Homo sapien
agtctcttgtttgtgactggtaatt

SEQ ID NO: 71509 - DNA, 25 bp, Homo sapien
tttctctcgttttggattgacagtc

SEQ ID NO: 71510 - DNA, 25 bp, Homo sapien
tttctctcgtttaggattgacagtc

SEQ ID NO: 71511 - DNA, 25 bp, Homo sapien
gctgagaactataagtatccatata

SEQ ID NO: 71512 - DNA, 25 bp, Homo sapien
gctgagaactattagtatccatata

SEQ ID NO: 71513 - DNA, 25 bp, Homo sapien
gcatgtttgttcagggcctaaacta

SEQ ID NO: 71514 - DNA, 25 bp, Homo sapien
gcatgtttgttctgggcctaaacta

SEQ ID NO: 71515 - DNA, 25 bp, Homo sapien
gtccattttgtcagtgtcaacaaca

SEQ ID NO: 71516 - DNA, 25 bp, Homo sapien
gtccattttgtctgtgtcaacaaca

SEQ ID NO: 71517 - DNA, 25 bp, Homo sapien
actggtgagtgtaccctatatccag

SEQ ID NO: 71518 - DNA, 25 bp, Homo sapien
actggtgagtgttccctatatccag

SEQ ID NO: 71519 - DNA, 25 bp, Homo sapien
gtgccagtgtgtggatcaaccacca

SEQ ID NO: 71520 - DNA, 25 bp, Homo sapien
gtgccagtgtgtcgatcaaccacca

SEQ ID NO: 71521 - DNA, 25 bp, Homo sapien
gtccggtttgaatgagaccccacgt

SEQ ID NO: 71522 - DNA, 25 bp, Homo sapien
gtccggtttgaaagagaccccacgt

SEQ ID NO: 71523 - DNA, 25 bp, Homo sapien
ttcaggattttatgacttgtatcac

SEQ ID NO: 71524 - DNA, 25 bp, Homo sapien
ttcaggattttaagacttgtatcac

SEQ ID NO: 71525 - DNA, 25 bp, Homo sapien
tttttgtactcaaggtacttgaaag

SEQ ID NO: 71526 - DNA, 25 bp, Homo sapien
tttttgtactcatggtacttgaaag

SEQ ID NO: 71527 - DNA, 25 bp, Homo sapien
tgtatattttacaggaactaataaa

SEQ ID NO: 71528 - DNA, 25 bp, Homo sapien
tgtatattttactggaactaataaa

SEQ ID NO: 71529 - DNA, 25 bp, Homo sapien
cgatctaatttcgaaaccgataaag

SEQ ID NO: 71530 - DNA, 25 bp, Homo sapien
cgatctaatttccaaaccgataaag

SEQ ID NO: 71531 - DNA, 25 bp, Homo sapien
taatctgtatagaagccgtataaac

SEQ ID NO: 71532 - DNA, 25 bp, Homo sapien
taatctgtatagtagccgtataaac

SEQ ID NO: 71533 - DNA, 25 bp, Homo sapien
tttaagaagtgaaccccgagtcacc

SEQ ID NO: 71534 - DNA, 25 bp, Homo sapien
tttaagaagtgatccccgagtcacc

SEQ ID NO: 71535 - DNA, 25 bp, Homo sapien
tcgacgaatttcaacgtctgaaact

SEQ ID NO: 71536 - DNA, 25 bp, Homo sapien
tcgacgaatttctacgtctgaaact

SEQ ID NO: 71537 - DNA, 25 bp, Homo sapien
cttttcgtacgtgtctagacgaagt

SEQ ID NO: 71538 - DNA, 25 bp, Homo sapien
cttttcgtacgtctctagacgaagt

SEQ ID NO: 71539 - DNA, 25 bp, Homo sapien
tactctttgtgtatcgttgatacgt

SEQ ID NO: 71540 - DNA, 25 bp, Homo sapien
tactctttgtgtttcgttgatacgt

SEQ ID NO: 71541 - DNA, 25 bp, Homo sapien
gaatattcgtcttagtgttccaaat

SEQ ID NO: 71542 - DNA, 25 bp, Homo sapien
gaatattcgtctaagtgttccaaat

SEQ ID NO: 71543 - DNA, 25 bp, Homo sapien
aatgtacttttgttgactgtccata

SEQ ID NO: 71544 - DNA, 25 bp, Homo sapien
aatgtacttttgatgactgtccata

SEQ ID NO: 71545 - DNA, 25 bp, Homo sapien
cttgtttgatgactccgtaacacta

SEQ ID NO: 71546 - DNA, 25 bp, Homo sapien
cttgtttgatgagtccgtaacacta

SEQ ID NO: 71547 - DNA, 25 bp, Homo sapien
ccatgtttgtatcacctggtatcca

SEQ ID NO: 71548 - DNA, 25 bp, Homo sapien
ccatgtttgtatgacctggtatcca

SEQ ID NO: 71549 - DNA, 25 bp, Homo sapien
ctacaagtggcagaggtggccgcac

SEQ ID NO: 71550 - DNA, 25 bp, Homo sapien
ctacaagtggcacaggtggccgcac

SEQ ID NO: 71551 - DNA, 25 bp, Homo sapien
ccagagtatctttaaggctccaaag

SEQ ID NO: 71552 - DNA, 25 bp, Homo sapien
ccagagtatcttaaaggctccaaag

SEQ ID NO: 71553 - DNA, 25 bp, Homo sapien
aaacgttctgtcaagccgtaccaaa

SEQ ID NO: 71554 - DNA, 25 bp, Homo sapien
aaacgttctgtctagccgtaccaaa

SEQ ID NO: 71555 - DNA, 25 bp, Homo sapien
agaccagtcccgtggtgaccgaaga

SEQ ID NO: 71556 - DNA, 25 bp, Homo sapien
agaccagtcccgaggtgaccgaaga

SEQ ID NO: 71557 - DNA, 25 bp, Homo sapien
aaactgcccgtcacggagtcgtaaa

SEQ ID NO: 71558 - DNA, 25 bp, Homo sapien
aaactgcccgtctcggagtcgtaaa

SEQ ID NO: 71559 - DNA, 25 bp, Homo sapien
aaacacctatcatggtttgtcgtat

SEQ ID NO: 71560 - DNA, 25 bp, Homo sapien
aaacacctatcaaggtttgtcgtat

SEQ ID NO: 71561 - DNA, 25 bp, Homo sapien
tatactttccagtaggactgtgtta

SEQ ID NO: 71562 - DNA, 25 bp, Homo sapien
tatactttccagaaggactgtgtta

SEQ ID NO: 71563 - DNA, 25 bp, Homo sapien
aaatatccgggaccaacttagtgta

SEQ ID NO: 71564 - DNA, 25 bp, Homo sapien
aaatatccgggagcaacttagtgta

SEQ ID NO: 71565 - DNA, 25 bp, Homo sapien
tgaacccacctgtcaatgttgtagt

SEQ ID NO: 71566 - DNA, 25 bp, Homo sapien
tgaacccacctgacaatgttgtagt

SEQ ID NO: 71567 - DNA, 25 bp, Homo sapien
agaccgaccttattatgtgtgtatt

SEQ ID NO: 71568 - DNA, 25 bp, Homo sapien
agaccgaccttaatatgtgtgtatt

SEQ ID NO: 71569 - DNA, 25 bp, Homo sapien
gactcacctaatgtgttacgtatat

SEQ ID NO: 71570 - DNA, 25 bp, Homo sapien
gactcacctaatctgttacgtatat

SEQ ID NO: 71571 - DNA, 25 bp, Homo sapien
cacacatgagctactcggtaacagt

SEQ ID NO: 71572 - DNA, 25 bp, Homo sapien
cacacatgagcttctcggtaacagt

SEQ ID NO: 71573 - DNA, 25 bp, Homo sapien
gttcatcaggagtatacacggaacc

SEQ ID NO: 71574 - DNA, 25 bp, Homo sapien
gttcatcaggagaatacacggaacc

SEQ ID NO: 71575 - DNA, 25 bp, Homo sapien
gtctacactgaggtcgtagttcccg

SEQ ID NO: 71576 - DNA, 25 bp, Homo sapien
gtctacactgagctcgtagttcccg

SEQ ID NO: 71577 - DNA, 25 bp, Homo sapien
ttacttatgacgttagattcgtccg

SEQ ID NO: 71578 - DNA, 25 bp, Homo sapien
ttacttatgacgatagattcgtccg

SEQ ID NO: 71579 - DNA, 25 bp, Homo sapien
tcccgtaaggtagagaacacctgca

SEQ ID NO: 71580 - DNA, 25 bp, Homo sapien
tcccgtaaggtacagaacacctgca

SEQ ID NO: 71581 - DNA, 25 bp, Homo sapien
ggacgaagtcgagactctccaagga

SEQ ID NO: 71582 - DNA, 25 bp, Homo sapien
ggacgaagtcgacactctccaagga

SEQ ID NO: 71583 - DNA, 25 bp, Homo sapien
gtcggatcaatatgtcttctgtata

SEQ ID NO: 71584 - DNA, 25 bp, Homo sapien
gtcggatcaataagtcttctgtata

SEQ ID NO: 71585 - DNA, 25 bp, Homo sapien
tttattgtgacgtctctcgggtatt

SEQ ID NO: 71586 - DNA, 25 bp, Homo sapien
tttattgtgacgactctcgggtatt

SEQ ID NO: 71587 - DNA, 25 bp, Homo sapien
gtttcgttctgaccactcaaatgtg

SEQ ID NO: 71588 - DNA, 25 bp, Homo sapien
gtttcgttctgagcactcaaatgtg

SEQ ID NO: 71589 - DNA, 25 bp, Homo sapien
tttttcgacatagagctcaaattag

SEQ ID NO: 71590 - DNA, 25 bp, Homo sapien
tttttcgacatacagctcaaattag

SEQ ID NO: 71591 - DNA, 25 bp, Homo sapien
tcctgtctttacgacgccaaccggt

SEQ ID NO: 71592 - DNA, 25 bp, Homo sapien
tcctgtctttaccacgccaaccggt

SEQ ID NO: 71593 - DNA, 25 bp, Homo sapien
tctcgtacggactacccaccgaggt

SEQ ID NO: 71594 - DNA, 25 bp, Homo sapien
tctcgtacggacaacccaccgaggt

SEQ ID NO: 71595 - DNA, 25 bp, Homo sapien
atcccgtgacgtagtctcgtacccc

SEQ ID NO: 71596 - DNA, 25 bp, Homo sapien
atcccgtgacgttgtctcgtacccc

SEQ ID NO: 71597 - DNA, 25 bp, Homo sapien
tttctccgggattgtctgttcctgt

SEQ ID NO: 71598 - DNA, 25 bp, Homo sapien
tttctccgggatagtctgttcctgt

SEQ ID NO: 71599 - DNA, 25 bp, Homo sapien
atccggtgacctatctgtgtctgtt

SEQ ID NO: 71600 - DNA, 25 bp, Homo sapien
atccggtgacctttctgtgtctgtt

SEQ ID NO: 71601 - DNA, 25 bp, Homo sapien
atgcacgggaatgatcgttctatgt

SEQ ID NO: 71602 - DNA, 25 bp, Homo sapien
atgcacgggaatcatcgttctatgt

SEQ ID NO: 71603 - DNA, 25 bp, Homo sapien
tggtgacccggtgacgactccttaa

SEQ ID NO: 71604 - DNA, 25 bp, Homo sapien
tggtgacccggtcacgactccttaa

SEQ ID NO: 71605 - DNA, 25 bp, Homo sapien
ttgtaactaccgatccacccggtgg

SEQ ID NO: 71606 - DNA, 25 bp, Homo sapien
ttgtaactaccgttccacccggtgg

SEQ ID NO: 71607 - DNA, 25 bp, Homo sapien
ccgtagagacacttccgtcccgggg

SEQ ID NO: 71608 - DNA, 25 bp, Homo sapien
ccgtagagacacatccgtcccgggg

SEQ ID NO: 71609 - DNA, 25 bp, Homo sapien
gatatgactaccaatctccggggtt

SEQ ID NO: 71610 - DNA, 25 bp, Homo sapien
gatatgactacctatctccggggtt

SEQ ID NO: 71611 - DNA, 25 bp, Homo sapien
gtggactccccgtcgtggtccctga

SEQ ID NO: 71612 - DNA, 25 bp, Homo sapien
gtggactccccgacgtggtccctga

SEQ ID NO: 71613 - DNA, 25 bp, Homo sapien
gttgtagccctctactggccctgac

SEQ ID NO: 71614 - DNA, 25 bp, Homo sapien
gttgtagccctcaactggccctgac

SEQ ID NO: 71615 - DNA, 25 bp, Homo sapien
ttggcattcgttgtgctgactgtcg

SEQ ID NO: 71616 - DNA, 25 bp, Homo sapien
ttggcattcgttctgctgactgtcg

SEQ ID NO: 71617 - DNA, 25 bp, Homo sapien
gttccctaattttcgtctcacggtg

SEQ ID NO: 71618 - DNA, 25 bp, Homo sapien
gttccctaatttacgtctcacggtg

SEQ ID NO: 71619 - DNA, 25 bp, Homo sapien
ccggtcgggaactcttccacagatt

SEQ ID NO: 71620 - DNA, 25 bp, Homo sapien
ccggtcgggaacacttccacagatt

SEQ ID NO: 71621 - DNA, 25 bp, Homo sapien
gagtaagtgtacttcacctatctat

SEQ ID NO: 71622 - DNA, 25 bp, Homo sapien
gagtaagtgtacatcacctatctat

SEQ ID NO: 71623 - DNA, 25 bp, Homo sapien
caggactccgtagaagattctttta

SEQ ID NO: 71624 - DNA, 25 bp, Homo sapien
caggactccgtacaagattctttta

SEQ ID NO: 71625 - DNA, 25 bp, Homo sapien
gagggatctctttcatttttgacta

SEQ ID NO: 71626 - DNA, 25 bp, Homo sapien
gagggatctcttacatttttgacta

SEQ ID NO: 71627 - DNA, 25 bp, Homo sapien
gtagaataaaggagtatcttttccc

SEQ ID NO: 71628 - DNA, 25 bp, Homo sapien
gtagaataaaggtgtatcttttccc

SEQ ID NO: 71629 - DNA, 25 bp, Homo sapien
ggtagttttcggagcggttccttgc

SEQ ID NO: 71630 - DNA, 25 bp, Homo sapien
ggtagttttcggtgcggttccttgc

SEQ ID NO: 71631 - DNA, 25 bp, Homo sapien
gtttgtctctgatctgcttccctca

SEQ ID NO: 71632 - DNA, 25 bp, Homo sapien
gtttgtctctgaactgcttccctca

SEQ ID NO: 71633 - DNA, 25 bp, Homo sapien
gcacgtgagtgtgacacctctctca

SEQ ID NO: 71634 - DNA, 25 bp, Homo sapien
gcacgtgagtgtcacacctctctca

SEQ ID NO: 71635 - DNA, 25 bp, Homo sapien
gagtcccggagtctttcgactcgag

SEQ ID NO: 71636 - DNA, 25 bp, Homo sapien
gagtcccggagtgtttcgactcgag

SEQ ID NO: 71637 - DNA, 25 bp, Homo sapien
ttagtaggacggaccggttccagta

SEQ ID NO: 71638 - DNA, 25 bp, Homo sapien
ttagtaggacggtccggttccagta

SEQ ID NO: 71639 - DNA, 25 bp, Homo sapien
acagaaaacgagacgggtgtttgtc

SEQ ID NO: 71640 - DNA, 25 bp, Homo sapien
acagaaaacgagtcgggtgtttgtc

SEQ ID NO: 71641 - DNA, 25 bp, Homo sapien
tgataaaaaggtgatcgtatccgtc

SEQ ID NO: 71642 - DNA, 25 bp, Homo sapien
tgataaaaaggtcatcgtatccgtc

SEQ ID NO: 71643 - DNA, 25 bp, Homo sapien
ggagacgacgaaggacctgagcctc

SEQ ID NO: 71644 - DNA, 25 bp, Homo sapien
ggagacgacgaacgacctgagcctc

SEQ ID NO: 71645 - DNA, 25 bp, Homo sapien
gacagagagagagagccactacctt

SEQ ID NO: 71646 - DNA, 25 bp, Homo sapien
gacagagagagacagccactacctt

SEQ ID NO: 71647 - DNA, 25 bp, Homo sapien
agaagtcccgggtgtcgcggcccac

SEQ ID NO: 71648 - DNA, 25 bp, Homo sapien
agaagtcccgggagtcgcggcccac

SEQ ID NO: 71649 - DNA, 25 bp, Homo sapien
aggtatccggggtagaagacacccc

SEQ ID NO: 71650 - DNA, 25 bp, Homo sapien
aggtatccggggaagaagacacccc

SEQ ID NO: 71651 - DNA, 25 bp, Homo sapien
cggtctctatgatcaaagaaccccc

SEQ ID NO: 71652 - DNA, 25 bp, Homo sapien
cggtctctatgaacaaagaaccccc

SEQ ID NO: 71653 - DNA, 25 bp, Homo sapien
ttgtgtgtgtcagaaatcagtcgac

SEQ ID NO: 71654 - DNA, 25 bp, Homo sapien
ttgtgtgtgtcacaaatcagtcgac

SEQ ID NO: 71655 - DNA, 25 bp, Homo sapien
tggtgtcgtcacaaagatctcacgt

SEQ ID NO: 71656 - DNA, 25 bp, Homo sapien
tggtgtcgtcactaagatctcacgt

SEQ ID NO: 71657 - DNA, 25 bp, Homo sapien
ataaatgagtgtccaagttccgtca

SEQ ID NO: 71658 - DNA, 25 bp, Homo sapien
ataaatgagtgtgcaagttccgtca

SEQ ID NO: 71659 - DNA, 25 bp, Homo sapien
gaaaaacgtgttcaacctatgaggt

SEQ ID NO: 71660 - DNA, 25 bp, Homo sapien
gaaaaacgtgttgaacctatgaggt

SEQ ID NO: 71661 - DNA, 25 bp, Homo sapien
ggatgtgtaatttacatcagattaa

SEQ ID NO: 71662 - DNA, 25 bp, Homo sapien
ggatgtgtaattaacatcagattaa

SEQ ID NO: 71663 - DNA, 25 bp, Homo sapien
ggattgtcggtaaaccaaacctaca

SEQ ID NO: 71664 - DNA, 25 bp, Homo sapien
ggattgtcggtataccaaacctaca

SEQ ID NO: 71665 - DNA, 25 bp, Homo sapien
acagaggtgatattagaacctacga

SEQ ID NO: 71666 - DNA, 25 bp, Homo sapien
acagaggtgataatagaacctacga

SEQ ID NO: 71667 - DNA, 25 bp, Homo sapien
tagtagagacggagaacggaaccac

SEQ ID NO: 71668 - DNA, 25 bp, Homo sapien
tagtagagacggtgaacggaaccac

SEQ ID NO: 71669 - DNA, 25 bp, Homo sapien
gggtattggagttcccgtgaccacc

SEQ ID NO: 71670 - DNA, 25 bp, Homo sapien
gggtattggagtacccgtgaccacc

SEQ ID NO: 71671 - DNA, 25 bp, Homo sapien
tgactcagttacaccttagaccgga

SEQ ID NO: 71672 - DNA, 25 bp, Homo sapien
tgactcagttactccttagaccgga

SEQ ID NO: 71673 - DNA, 25 bp, Homo sapien
aattaaatgtaatcaggacaccaga

SEQ ID NO: 71674 - DNA, 25 bp, Homo sapien
aattaaatgtaaacaggacaccaga

SEQ ID NO: 71675 - DNA, 25 bp, Homo sapien
gtttcaccttaaaagaccatgacga

SEQ ID NO: 71676 - DNA, 25 bp, Homo sapien
gtttcaccttaatagaccatgacga

SEQ ID NO: 71677 - DNA, 25 bp, Homo sapien
tcggaacaagaatgaccgctggaca

SEQ ID NO: 71678 - DNA, 25 bp, Homo sapien
tcggaacaagaaagaccgctggaca

SEQ ID NO: 71679 - DNA, 25 bp, Homo sapien
tgagcctgtggaaccccgggacact

SEQ ID NO: 71680 - DNA, 25 bp, Homo sapien
tgagcctgtggatccccgggacact

SEQ ID NO: 71681 - DNA, 25 bp, Homo sapien
aagataagtaggtccctcgggacct

SEQ ID NO: 71682 - DNA, 25 bp, Homo sapien
aagataagtaggaccctcgggacct

SEQ ID NO: 71683 - DNA, 25 bp, Homo sapien
ctcggagtcactccacacaggacaa

SEQ ID NO: 71684 - DNA, 25 bp, Homo sapien
ctcggagtcactgcacacaggacaa

SEQ ID NO: 71685 - DNA, 25 bp, Homo sapien
acgacacaaggagtgttcaggattt

SEQ ID NO: 71686 - DNA, 25 bp, Homo sapien
acgacacaaggactgttcaggattt

SEQ ID NO: 71687 - DNA, 25 bp, Homo sapien
gaactaaccaaggagtcgggattgt

SEQ ID NO: 71688 - DNA, 25 bp, Homo sapien
gaactaaccaagcagtcgggattgt

SEQ ID NO: 71689 - DNA, 25 bp, Homo sapien
ttagtcaaacactctgctatgattg

SEQ ID NO: 71690 - DNA, 25 bp, Homo sapien
ttagtcaaacacactgctatgattg

SEQ ID NO: 71691 - DNA, 25 bp, Homo sapien
ttctgagtgccctggagtgactgtg

SEQ ID NO: 71692 - DNA, 25 bp, Homo sapien
ttctgagtgcccaggagtgactgtg

SEQ ID NO: 71693 - DNA, 25 bp, Homo sapien
caaaggtacgactcatcactttgtc

SEQ ID NO: 71694 - DNA, 25 bp, Homo sapien
caaaggtacgacacatcactttgtc

SEQ ID NO: 71695 - DNA, 25 bp, Homo sapien
gaaattgtctttacacacaagtgtt

SEQ ID NO: 71696 - DNA, 25 bp, Homo sapien
gaaattgtcttttcacacaagtgtt

SEQ ID NO: 71697 - DNA, 25 bp, Homo sapien
ggaactttgtcctactcaagatctc

SEQ ID NO: 71698 - DNA, 25 bp, Homo sapien
ggaactttgtccaactcaagatctc

SEQ ID NO: 71699 - DNA, 25 bp, Homo sapien
aggtcgtttgttatcttaggcttct

SEQ ID NO: 71700 - DNA, 25 bp, Homo sapien
aggtcgtttgttttcttaggcttct

SEQ ID NO: 71701 - DNA, 25 bp, Homo sapien
tacagtgggttttcttgttccctaa

SEQ ID NO: 71702 - DNA, 25 bp, Homo sapien
tacagtgggtttacttgttccctaa

SEQ ID NO: 71703 - DNA, 25 bp, Homo sapien
gacgacctctttctccgttcaccaa

SEQ ID NO: 71704 - DNA, 25 bp, Homo sapien
gacgacctctttgtccgttcaccaa

SEQ ID NO: 71705 - DNA, 25 bp, Homo sapien
aacctctcgtgtttccatgtgaata

SEQ ID NO: 71706 - DNA, 25 bp, Homo sapien
aacctctcgtgtatccatgtgaata

SEQ ID NO: 71707 - DNA, 25 bp, Homo sapien
acgtcgtccctgtcacattcgaata

SEQ ID NO: 71708 - DNA, 25 bp, Homo sapien
acgtcgtccctgacacattcgaata

SEQ ID NO: 71709 - DNA, 25 bp, Homo sapien
tcacgtttgactgtcaatgttaatt

SEQ ID NO: 71710 - DNA, 25 bp, Homo sapien
tcacgtttgactctcaatgttaatt

SEQ ID NO: 71711 - DNA, 25 bp, Homo sapien
gtttttgtccctatagacgtaaatt

SEQ ID NO: 71712 - DNA, 25 bp, Homo sapien
gtttttgtccctttagacgtaaatt

SEQ ID NO: 71713 - DNA, 25 bp, Homo sapien
tatattttgtcctcttcggagaagt

SEQ ID NO: 71714 - DNA, 25 bp, Homo sapien
tatattttgtccacttcggagaagt

SEQ ID NO: 71715 - DNA, 25 bp, Homo sapien
gccgtgtcgtcacacttgaggaagt

SEQ ID NO: 71716 - DNA, 25 bp, Homo sapien
gccgtgtcgtcagacttgaggaagt

SEQ ID NO: 71717 - DNA, 25 bp, Homo sapien
acgacggccgtcgacccacgtgaag

SEQ ID NO: 71718 - DNA, 25 bp, Homo sapien
acgacggccgtccacccacgtgaag

SEQ ID NO: 71719 - DNA, 25 bp, Homo sapien
ggacgatcctccacggtacagtaaa

SEQ ID NO: 71720 - DNA, 25 bp, Homo sapien
ggacgatcctcctcggtacagtaaa

SEQ ID NO: 71721 - DNA, 25 bp, Homo sapien
cgttccccgctggtacgacatatac

SEQ ID NO: 71722 - DNA, 25 bp, Homo sapien
cgttccccgctgctacgacatatac

SEQ ID NO: 71723 - DNA, 25 bp, Homo sapien
ctcgacaccgacgtgacggagatag

SEQ ID NO: 71724 - DNA, 25 bp, Homo sapien
ctcgacaccgacctgacggagatag

SEQ ID NO: 71725 - DNA, 25 bp, Homo sapien
gtcacgaccgacctcgtcggaaggt

SEQ ID NO: 71726 - DNA, 25 bp, Homo sapien
gtcacgaccgacgtcgtcggaaggt

SEQ ID NO: 71727 - DNA, 25 bp, Homo sapien
agtcatgtcaatagcgctctcaggg

SEQ ID NO: 71728 - DNA, 25 bp, Homo sapien
agtcatgtcaattgcgctctcaggg

SEQ ID NO: 71729 - DNA, 25 bp, Homo sapien
aagaccttttaaaggtcttctgaga

SEQ ID NO: 71730 - DNA, 25 bp, Homo sapien
aagaccttttaatggtcttctgaga

SEQ ID NO: 71731 - DNA, 25 bp, Homo sapien
gttaaatgttcacctgttcttaatg

SEQ ID NO: 71732 - DNA, 25 bp, Homo sapien
gttaaatgttcagctgttcttaatg

SEQ ID NO: 71733 - DNA, 25 bp, Homo sapien
aatccatttgactccgtttcgacga

SEQ ID NO: 71734 - DNA, 25 bp, Homo sapien
aatccatttgacaccgtttcgacga

SEQ ID NO: 71735 - DNA, 25 bp, Homo sapien
ataaagtggtgagacctatatgacc

SEQ ID NO: 71736 - DNA, 25 bp, Homo sapien
ataaagtggtgacacctatatgacc

SEQ ID NO: 71737 - DNA, 25 bp, Homo sapien
gaatggatctcttccataaatcctg

SEQ ID NO: 71738 - DNA, 25 bp, Homo sapien
gaatggatctctaccataaatcctg

SEQ ID NO: 71739 - DNA, 25 bp, Homo sapien
aagaggttttacgtttactaattcc

SEQ ID NO: 71740 - DNA, 25 bp, Homo sapien
aagaggttttacctttactaattcc

SEQ ID NO: 71741 - DNA, 25 bp, Homo sapien
cgggtgattttatactaacttctgt

SEQ ID NO: 71742 - DNA, 25 bp, Homo sapien
cgggtgattttaaactaacttctgt

SEQ ID NO: 71743 - DNA, 25 bp, Homo sapien
tacgtactcggttacaattgtatta

SEQ ID NO: 71744 - DNA, 25 bp, Homo sapien
tacgtactcggtaacaattgtatta

SEQ ID NO: 71745 - DNA, 25 bp, Homo sapien
actccctacgtcaggtgtatcggac

SEQ ID NO: 71746 - DNA, 25 bp, Homo sapien
actccctacgtctggtgtatcggac

SEQ ID NO: 71747 - DNA, 25 bp, Homo sapien
cagggcttctcgacggtgaccgcac

SEQ ID NO: 71748 - DNA, 25 bp, Homo sapien
cagggcttctcgtcggtgaccgcac

SEQ ID NO: 71749 - DNA, 25 bp, Homo sapien
cagtggtctttaagggtcaaacgac

SEQ ID NO: 71750 - DNA, 25 bp, Homo sapien
cagtggtctttatgggtcaaacgac

SEQ ID NO: 71751 - DNA, 25 bp, Homo sapien
tgtttagaacacgtgacgtgttagc

SEQ ID NO: 71752 - DNA, 25 bp, Homo sapien
tgtttagaacacctgacgtgttagc

SEQ ID NO: 71753 - DNA, 25 bp, Homo sapien
cgtagatagtatcaacgggttttct

SEQ ID NO: 71754 - DNA, 25 bp, Homo sapien
cgtagatagtatgaacgggttttct

SEQ ID NO: 71755 - DNA, 25 bp, Homo sapien
gtagatactctagacttgtttatct

SEQ ID NO: 71756 - DNA, 25 bp, Homo sapien
gtagatactctacacttgtttatct

SEQ ID NO: 71757 - DNA, 25 bp, Homo sapien
accgtagctgtgactgtacaagtta

SEQ ID NO: 71758 - DNA, 25 bp, Homo sapien
accgtagctgtgtctgtacaagtta

SEQ ID NO: 71759 - DNA, 25 bp, Homo sapien
cctgtgtcggaggaaacgacgatca

SEQ ID NO: 71760 - DNA, 25 bp, Homo sapien
cctgtgtcggagcaaacgacgatca

SEQ ID NO: 71761 - DNA, 25 bp, Homo sapien
aactttatgaaaactgtcgaccgac

SEQ ID NO: 71762 - DNA, 25 bp, Homo sapien
aactttatgaaatctgtcgaccgac

SEQ ID NO: 71763 - DNA, 25 bp, Homo sapien
aaggtacctgtaagatattcgaccc

SEQ ID NO: 71764 - DNA, 25 bp, Homo sapien
aaggtacctgtatgatattcgaccc

SEQ ID NO: 71765 - DNA, 25 bp, Homo sapien
ctaggtccttcaggagtttcgattc

SEQ ID NO: 71766 - DNA, 25 bp, Homo sapien
ctaggtccttcacgagtttcgattc

SEQ ID NO: 71767 - DNA, 25 bp, Homo sapien
ggacttctcatcgtaggtggtgtac

SEQ ID NO: 71768 - DNA, 25 bp, Homo sapien
ggacttctcatcctaggtggtgtac

SEQ ID NO: 71769 - DNA, 25 bp, Homo sapien
tacctgtgcatgtcggggtactacg

SEQ ID NO: 71770 - DNA, 25 bp, Homo sapien
tacctgtgcatgacggggtactacg

SEQ ID NO: 71771 - DNA, 25 bp, Homo sapien
cctttgcagagcaactgtcgagtct

SEQ ID NO: 71772 - DNA, 25 bp, Homo sapien
cctttgcagagctactgtcgagtct

SEQ ID NO: 71773 - DNA, 25 bp, Homo sapien
tttgtactagatcgaaacttccgtc

SEQ ID NO: 71774 - DNA, 25 bp, Homo sapien
tttgtactagatggaaacttccgtc

SEQ ID NO: 71775 - DNA, 25 bp, Homo sapien
tggtataggaagatagccaatttcc

SEQ ID NO: 71776 - DNA, 25 bp, Homo sapien
tggtataggaagttagccaatttcc

SEQ ID NO: 71777 - DNA, 25 bp, Homo sapien
ggaccacagacgtaacagatttttc

SEQ ID NO: 71778 - DNA, 25 bp, Homo sapien
ggaccacagacgaaacagatttttc

SEQ ID NO: 71779 - DNA, 25 bp, Homo sapien
acgattaagaccaacaagtcattca

SEQ ID NO: 71780 - DNA, 25 bp, Homo sapien
acgattaagacctacaagtcattca

SEQ ID NO: 71781 - DNA, 25 bp, Homo sapien
agaacaataggatctaagatcttcc

SEQ ID NO: 71782 - DNA, 25 bp, Homo sapien
agaacaataggaactaagatcttcc

SEQ ID NO: 71783 - DNA, 25 bp, Homo sapien
taggattatccaggatgtatcattc

SEQ ID NO: 71784 - DNA, 25 bp, Homo sapien
taggattatccacgatgtatcattc

SEQ ID NO: 71785 - DNA, 25 bp, Homo sapien
accgagttctatgatgtaacgattt

SEQ ID NO: 71786 - DNA, 25 bp, Homo sapien
accgagttctatcatgtaacgattt

SEQ ID NO: 71787 - DNA, 25 bp, Homo sapien
tcgtcaattttagtcctaagtatgt

SEQ ID NO: 71788 - DNA, 25 bp, Homo sapien
tcgtcaattttactcctaagtatgt

SEQ ID NO: 71789 - DNA, 25 bp, Homo sapien
gtcttatttacgtctccgtaatgtt

SEQ ID NO: 71790 - DNA, 25 bp, Homo sapien
gtcttatttacgactccgtaatgtt

SEQ ID NO: 71791 - DNA, 25 bp, Homo sapien
tgactcacttcctactccgggtgtc

SEQ ID NO: 71792 - DNA, 25 bp, Homo sapien
tgactcacttccaactccgggtgtc

SEQ ID NO: 71793 - DNA, 25 bp, Homo sapien
tgtacccggacctcttcagaactct

SEQ ID NO: 71794 - DNA, 25 bp, Homo sapien
tgtacccggaccacttcagaactct

SEQ ID NO: 71795 - DNA, 25 bp, Homo sapien
gggttcgtcgtcgactgtcggcaac

SEQ ID NO: 71796 - DNA, 25 bp, Homo sapien
gggttcgtcgtccactgtcggcaac

SEQ ID NO: 71797 - DNA, 25 bp, Homo sapien
tcaggagacttctcttgtgagacca

SEQ ID NO: 71798 - DNA, 25 bp, Homo sapien
tcaggagacttcacttgtgagacca

SEQ ID NO: 71799 - DNA, 25 bp, Homo sapien
ttcccgtttaggtaccggcggaaca

SEQ ID NO: 71800 - DNA, 25 bp, Homo sapien
ttcccgtttaggaaccggcggaaca

SEQ ID NO: 71801 - DNA, 25 bp, Homo sapien
ctccgtacctggaactcaacctgaa

SEQ ID NO: 71802 - DNA, 25 bp, Homo sapien
ctccgtacctggtactcaacctgaa

SEQ ID NO: 71803 - DNA, 25 bp, Homo sapien
tagcccttttctgcagatactagta

SEQ ID NO: 71804 - DNA, 25 bp, Homo sapien
tagcccttttctccagatactagta

SEQ ID NO: 71805 - DNA, 25 bp, Homo sapien
agctgtttggtccacttgacacggt

SEQ ID NO: 71806 - DNA, 25 bp, Homo sapien
agctgtttggtcgacttgacacggt

SEQ ID NO: 71807 - DNA, 25 bp, Homo sapien
aaccagttcaggtccgagttgagac

SEQ ID NO: 71808 - DNA, 25 bp, Homo sapien
aaccagttcaggaccgagttgagac

SEQ ID NO: 71809 - DNA, 25 bp, Homo sapien
acaaacgttgaaggtccagtgttga

SEQ ID NO: 71810 - DNA, 25 bp, Homo sapien
acaaacgttgaacgtccagtgttga

SEQ ID NO: 71811 - DNA, 25 bp, Homo sapien
ctttcatgtagtgtctgaacgatta

SEQ ID NO: 71812 - DNA, 25 bp, Homo sapien
ctttcatgtagtctctgaacgatta

SEQ ID NO: 71813 - DNA, 25 bp, Homo sapien
tcacgactttagtccagagtagttc

SEQ ID NO: 71814 - DNA, 25 bp, Homo sapien
tcacgactttagaccagagtagttc

SEQ ID NO: 71815 - DNA, 25 bp, Homo sapien
aataactgtctgtgttgtgcataca

SEQ ID NO: 71816 - DNA, 25 bp, Homo sapien
aataactgtctgagttgtgcataca

SEQ ID NO: 71817 - DNA, 25 bp, Homo sapien
tcagagttgaaggtgtgtctctaca

SEQ ID NO: 71818 - DNA, 25 bp, Homo sapien
tcagagttgaagctgtgtctctaca

SEQ ID NO: 71819 - DNA, 25 bp, Homo sapien
aggcgaagacctcaatcaacctaca

SEQ ID NO: 71820 - DNA, 25 bp, Homo sapien
aggcgaagacctgaatcaacctaca

SEQ ID NO: 71821 - DNA, 25 bp, Homo sapien
accagtgtctcctttcgggtcgaga

SEQ ID NO: 71822 - DNA, 25 bp, Homo sapien
accagtgtctccattcgggtcgaga

SEQ ID NO: 71823 - DNA, 25 bp, Homo sapien
acaggtcgtccgtgaacagagtcca

SEQ ID NO: 71824 - DNA, 25 bp, Homo sapien
acaggtcgtccgagaacagagtcca

SEQ ID NO: 71825 - DNA, 25 bp, Homo sapien
gtaggtgacatcaacagaatagaca

SEQ ID NO: 71826 - DNA, 25 bp, Homo sapien
gtaggtgacatctacagaatagaca

SEQ ID NO: 71827 - DNA, 25 bp, Homo sapien
tgacttgaaccttcgttaaagacat

SEQ ID NO: 71828 - DNA, 25 bp, Homo sapien
tgacttgaacctacgttaaagacat

SEQ ID NO: 71829 - DNA, 25 bp, Homo sapien
cttgaatgtaacactttgaagacat

SEQ ID NO: 71830 - DNA, 25 bp, Homo sapien
cttgaatgtaactctttgaagacat

SEQ ID NO: 71831 - DNA, 25 bp, Homo sapien
cgtttaatcgtatcggtacaacaac

SEQ ID NO: 71832 - DNA, 25 bp, Homo sapien
cgtttaatcgtaacggtacaacaac

SEQ ID NO: 71833 - DNA, 25 bp, Homo sapien
tctactctttcgagttaatatctac

SEQ ID NO: 71834 - DNA, 25 bp, Homo sapien
tctactctttcgtgttaatatctac

SEQ ID NO: 71835 - DNA, 25 bp, Homo sapien
acgtttttcgagatgattcgtctac

SEQ ID NO: 71836 - DNA, 25 bp, Homo sapien
acgtttttcgagttgattcgtctac

SEQ ID NO: 71837 - DNA, 25 bp, Homo sapien
aacattcaagactaggtgacgtcag

SEQ ID NO: 71838 - DNA, 25 bp, Homo sapien
aacattcaagacaaggtgacgtcag

SEQ ID NO: 71839 - DNA, 25 bp, Homo sapien
ccaaccatctaacatgctgtgactg

SEQ ID NO: 71840 - DNA, 25 bp, Homo sapien
ccaaccatctaagatgctgtgactg

SEQ ID NO: 71841 - DNA, 25 bp, Homo sapien
tctaaggaccacaattgcagttatt

SEQ ID NO: 71842 - DNA, 25 bp, Homo sapien
tctaaggaccactattgcagttatt

SEQ ID NO: 71843 - DNA, 25 bp, Homo sapien
ccgagactcgtctaaagtctatcaa

SEQ ID NO: 71844 - DNA, 25 bp, Homo sapien
ccgagactcgtcaaaagtctatcaa

SEQ ID NO: 71845 - DNA, 25 bp, Homo sapien
cacggatgtcggaagcgcttcgacc

SEQ ID NO: 71846 - DNA, 25 bp, Homo sapien
cacggatgtcggtagcgcttcgacc

SEQ ID NO: 71847 - DNA, 25 bp, Homo sapien
aggagaaacgtcgtcctcgtcgaca

SEQ ID NO: 71848 - DNA, 25 bp, Homo sapien
aggagaaacgtcctcctcgtcgaca

SEQ ID NO: 71849 - DNA, 25 bp, Homo sapien
cgaggtgaacactttttagtaacta

SEQ ID NO: 71850 - DNA, 25 bp, Homo sapien
cgaggtgaacacattttagtaacta

SEQ ID NO: 71851 - DNA, 25 bp, Homo sapien
actaatgatttctgttatgtaaccg

SEQ ID NO: 71852 - DNA, 25 bp, Homo sapien
actaatgatttcagttatgtaaccg

SEQ ID NO: 71853 - DNA, 25 bp, Homo sapien
tataatttcgtctttcatgacggtg

SEQ ID NO: 71854 - DNA, 25 bp, Homo sapien
tataatttcgtcattcatgacggtg

SEQ ID NO: 71855 - DNA, 25 bp, Homo sapien
aaataacacagttacaattcgtgtg

SEQ ID NO: 71856 - DNA, 25 bp, Homo sapien
aaataacacagtaacaattcgtgtg

SEQ ID NO: 71857 - DNA, 25 bp, Homo sapien
tggagaacagtatcaattcgtctct

SEQ ID NO: 71858 - DNA, 25 bp, Homo sapien
tggagaacagtaacaattcgtctct

SEQ ID NO: 71859 - DNA, 25 bp, Homo sapien
taaaggagaaacgttttatacccct

SEQ ID NO: 71860 - DNA, 25 bp, Homo sapien
taaaggagaaaccttttatacccct

SEQ ID NO: 71861 - DNA, 25 bp, Homo sapien
ggaacgtcgaaacagggtatgccca

SEQ ID NO: 71862 - DNA, 25 bp, Homo sapien
ggaacgtcgaaagagggtatgccca

SEQ ID NO: 71863 - DNA, 25 bp, Homo sapien
ggaagacaaattgtgattctatacc

SEQ ID NO: 71864 - DNA, 25 bp, Homo sapien
ggaagacaaattctgattctatacc

SEQ ID NO: 71865 - DNA, 25 bp, Homo sapien
aagacgtaaactgttctttgtattc

SEQ ID NO: 71866 - DNA, 25 bp, Homo sapien
aagacgtaaactcttctttgtattc

SEQ ID NO: 71867 - DNA, 25 bp, Homo sapien
tttactcgggtctgtctcttctcgt

SEQ ID NO: 71868 - DNA, 25 bp, Homo sapien
tttactcgggtcagtctcttctcgt

SEQ ID NO: 71869 - DNA, 25 bp, Homo sapien
ttttacacttttacgaccgttctct

SEQ ID NO: 71870 - DNA, 25 bp, Homo sapien
ttttacactttttcgaccgttctct

SEQ ID NO: 71871 - DNA, 25 bp, Homo sapien
tttagacatttacgtagcggttcgt

SEQ ID NO: 71872 - DNA, 25 bp, Homo sapien
tttagacatttaggtagcggttcgt

SEQ ID NO: 71873 - DNA, 25 bp, Homo sapien
aaaacgagacgatttttctctggtg

SEQ ID NO: 71874 - DNA, 25 bp, Homo sapien
aaaacgagacgaattttctctggtg

SEQ ID NO: 71875 - DNA, 25 bp, Homo sapien
ctaagatagccagacgggagaacgc

SEQ ID NO: 71876 - DNA, 25 bp, Homo sapien
ctaagatagccacacgggagaacgc

SEQ ID NO: 71877 - DNA, 25 bp, Homo sapien
gacgtcgacctaatgcgttgtcatt

SEQ ID NO: 71878 - DNA, 25 bp, Homo sapien
gacgtcgacctattgcgttgtcatt

SEQ ID NO: 71879 - DNA, 25 bp, Homo sapien
ttattcaggatcctttaatcagttg

SEQ ID NO: 71880 - DNA, 25 bp, Homo sapien
ttattcaggatcgtttaatcagttg

SEQ ID NO: 71881 - DNA, 25 bp, Homo sapien
tagacgaggaccaattatcctgctg

SEQ ID NO: 71882 - DNA, 25 bp, Homo sapien
tagacgaggacctattatcctgctg

SEQ ID NO: 71883 - DNA, 25 bp, Homo sapien
tgtcatagtgcttttcgttacaagg

SEQ ID NO: 71884 - DNA, 25 bp, Homo sapien
tgtcatagtgctattcgttacaagg

SEQ ID NO: 71885 - DNA, 25 bp, Homo sapien
agtcattggcatacggtacagaggt

SEQ ID NO: 71886 - DNA, 25 bp, Homo sapien
agtcattggcattcggtacagaggt

SEQ ID NO: 71887 - DNA, 25 bp, Homo sapien
acaaagaactcttgtactgaggtta

SEQ ID NO: 71888 - DNA, 25 bp, Homo sapien
acaaagaactctagtactgaggtta

SEQ ID NO: 71889 - DNA, 25 bp, Homo sapien
tcaggtagactgtgttctagtacaa

SEQ ID NO: 71890 - DNA, 25 bp, Homo sapien
tcaggtagactgagttctagtacaa

SEQ ID NO: 71891 - DNA, 25 bp, Homo sapien
ctacaaggttcgaagtcaagtaata

SEQ ID NO: 71892 - DNA, 25 bp, Homo sapien
ctacaaggttcgtagtcaagtaata

SEQ ID NO: 71893 - DNA, 25 bp, Homo sapien
taagtagcgtttacgtcccgaagag

SEQ ID NO: 71894 - DNA, 25 bp, Homo sapien
taagtagcgttttcgtcccgaagag

SEQ ID NO: 71895 - DNA, 25 bp, Homo sapien
aaaactactactgtcgacgtcgaaa

SEQ ID NO: 71896 - DNA, 25 bp, Homo sapien
aaaactactactctcgacgtcgaaa

SEQ ID NO: 71897 - DNA, 25 bp, Homo sapien
ttcatagagttaagtctttcgaaac

SEQ ID NO: 71898 - DNA, 25 bp, Homo sapien
ttcatagagttatgtctttcgaaac

SEQ ID NO: 71899 - DNA, 25 bp, Homo sapien
gtgaagtatatatctcgttggcaca

SEQ ID NO: 71900 - DNA, 25 bp, Homo sapien
gtgaagtatataactcgttggcaca

SEQ ID NO: 71901 - DNA, 25 bp, Homo sapien
aagtgaggacgtggtagagtcacac

SEQ ID NO: 71902 - DNA, 25 bp, Homo sapien
aagtgaggacgtcgtagagtcacac

SEQ ID NO: 71903 - DNA, 25 bp, Homo sapien
gagagagactaagacccctgacacc

SEQ ID NO: 71904 - DNA, 25 bp, Homo sapien
gagagagactaacacccctgacacc

SEQ ID NO: 71905 - DNA, 25 bp, Homo sapien
gagagacaagaaactaccccgacac

SEQ ID NO: 71906 - DNA, 25 bp, Homo sapien
gagagacaagaatctaccccgacac

SEQ ID NO: 71907 - DNA, 25 bp, Homo sapien
aggagtggacggtactcccggccac

SEQ ID NO: 71908 - DNA, 25 bp, Homo sapien
aggagtggacggaactcccggccac

SEQ ID NO: 71909 - DNA, 25 bp, Homo sapien
ggagttcgcgaggaacctagaccac

SEQ ID NO: 71910 - DNA, 25 bp, Homo sapien
ggagttcgcgagcaacctagaccac

SEQ ID NO: 71911 - DNA, 25 bp, Homo sapien
aaaggtgtccttacttcgagaagac

SEQ ID NO: 71912 - DNA, 25 bp, Homo sapien
aaaggtgtcctttcttcgagaagac

SEQ ID NO: 71913 - DNA, 25 bp, Homo sapien
ataagactcttttctattgtggttc

SEQ ID NO: 71914 - DNA, 25 bp, Homo sapien
ataagactctttactattgtggttc

SEQ ID NO: 71915 - DNA, 25 bp, Homo sapien
tgatgtcttgtaaagttctgaactc

SEQ ID NO: 71916 - DNA, 25 bp, Homo sapien
tgatgtcttgtatagttctgaactc

SEQ ID NO: 71917 - DNA, 25 bp, Homo sapien
tcttactatacacagtcttacaata

SEQ ID NO: 71918 - DNA, 25 bp, Homo sapien
tcttactatacagagtcttacaata

SEQ ID NO: 71919 - DNA, 25 bp, Homo sapien
tccgtgaacgcgtttgtggtcctct

SEQ ID NO: 71920 - DNA, 25 bp, Homo sapien
tccgtgaacgcgattgtggtcctct

SEQ ID NO: 71921 - DNA, 25 bp, Homo sapien
ttgtgtgacctttaggtgtaccgct

SEQ ID NO: 71922 - DNA, 25 bp, Homo sapien
ttgtgtgaccttaaggtgtaccgct

SEQ ID NO: 71923 - DNA, 25 bp, Homo sapien
atttaaactctttggtacgtatgac

SEQ ID NO: 71924 - DNA, 25 bp, Homo sapien
atttaaactcttaggtacgtatgac

SEQ ID NO: 71925 - DNA, 25 bp, Homo sapien
actgttaagacctttgacatgtact

SEQ ID NO: 71926 - DNA, 25 bp, Homo sapien
actgttaagaccattgacatgtact

SEQ ID NO: 71927 - DNA, 25 bp, Homo sapien
atttgagtacacattgtaagtcact

SEQ ID NO: 71928 - DNA, 25 bp, Homo sapien
atttgagtacactttgtaagtcact

SEQ ID NO: 71929 - DNA, 25 bp, Homo sapien
ttgttttactcctgtctccgtagac

SEQ ID NO: 71930 - DNA, 25 bp, Homo sapien
ttgttttactccagtctccgtagac

SEQ ID NO: 71931 - DNA, 25 bp, Homo sapien
tttcttgtgtgtaccgtctctatgc

SEQ ID NO: 71932 - DNA, 25 bp, Homo sapien
tttcttgtgtgttccgtctctatgc

SEQ ID NO: 71933 - DNA, 25 bp, Homo sapien
gaaaattcgtgtttcgtctattatc

SEQ ID NO: 71934 - DNA, 25 bp, Homo sapien
gaaaattcgtgtatcgtctattatc

SEQ ID NO: 71935 - DNA, 25 bp, Homo sapien
cggttgtgtctgtaattctttctcg

SEQ ID NO: 71936 - DNA, 25 bp, Homo sapien
cggttgtgtctgaaattctttctcg

SEQ ID NO: 71937 - DNA, 25 bp, Homo sapien
gaggagacatcatccaaagaagaga

SEQ ID NO: 71938 - DNA, 25 bp, Homo sapien
gaggagacatcaaccaaagaagaga

SEQ ID NO: 71939 - DNA, 25 bp, Homo sapien
gaacacggacctactcaagagtcat

SEQ ID NO: 71940 - DNA, 25 bp, Homo sapien
gaacacggaccttctcaagagtcat

SEQ ID NO: 71941 - DNA, 25 bp, Homo sapien
ggtcaaaaccactatcacagagcca

SEQ ID NO: 71942 - DNA, 25 bp, Homo sapien
ggtcaaaaccacaatcacagagcca

SEQ ID NO: 71943 - DNA, 25 bp, Homo sapien
accagaacatcaacaagaggccgac

SEQ ID NO: 71944 - DNA, 25 bp, Homo sapien
accagaacatcatcaagaggccgac

SEQ ID NO: 71945 - DNA, 25 bp, Homo sapien
atcgtgaataatccaagagactgtc

SEQ ID NO: 71946 - DNA, 25 bp, Homo sapien
atcgtgaataatgcaagagactgtc

SEQ ID NO: 71947 - DNA, 25 bp, Homo sapien
gcgggcgacctactaaaacgacgtc

SEQ ID NO: 71948 - DNA, 25 bp, Homo sapien
gcgggcgacctagtaaaacgacgtc

SEQ ID NO: 71949 - DNA, 25 bp, Homo sapien
aaacgtgctctctgagtttataacc

SEQ ID NO: 71950 - DNA, 25 bp, Homo sapien
aaacgtgctctcagagtttataacc

SEQ ID NO: 71951 - DNA, 25 bp, Homo sapien
cgtactagaccaggaatttcatacg

SEQ ID NO: 71952 - DNA, 25 bp, Homo sapien
cgtactagaccacgaatttcatacg

SEQ ID NO: 71953 - DNA, 25 bp, Homo sapien
ttgtagtagaacactttgttgtcac

SEQ ID NO: 71954 - DNA, 25 bp, Homo sapien
ttgtagtagaactctttgttgtcac

SEQ ID NO: 71955 - DNA, 25 bp, Homo sapien
tagatatttacgtgtcttttcagac

SEQ ID NO: 71956 - DNA, 25 bp, Homo sapien
tagatatttacgagtcttttcagac

SEQ ID NO: 71957 - DNA, 25 bp, Homo sapien
catttatagttaggtgtctccttct

SEQ ID NO: 71958 - DNA, 25 bp, Homo sapien
catttatagttacgtgtctccttct

SEQ ID NO: 71959 - DNA, 25 bp, Homo sapien
atccattgtattatcagtgttttct

SEQ ID NO: 71960 - DNA, 25 bp, Homo sapien
atccattgtattttcagtgttttct

SEQ ID NO: 71961 - DNA, 25 bp, Homo sapien
acacttgaaatatggtgatactctt

SEQ ID NO: 71962 - DNA, 25 bp, Homo sapien
acacttgaaataaggtgatactctt

SEQ ID NO: 71963 - DNA, 25 bp, Homo sapien
gccttggtaaaggagtctacactcc

SEQ ID NO: 71964 - DNA, 25 bp, Homo sapien
gccttggtaaagcagtctacactcc

SEQ ID NO: 71965 - DNA, 25 bp, Homo sapien
gtgtactgacaactacattaaatgt

SEQ ID NO: 71966 - DNA, 25 bp, Homo sapien
gtgtactgacaagtacattaaatgt

SEQ ID NO: 71967 - DNA, 25 bp, Homo sapien
atgtatatcttataactcacttctt

SEQ ID NO: 71968 - DNA, 25 bp, Homo sapien
atgtatatcttaaaactcacttctt

SEQ ID NO: 71969 - DNA, 25 bp, Homo sapien
tggggtctataaaaacccctcttct

SEQ ID NO: 71970 - DNA, 25 bp, Homo sapien
tggggtctataataacccctcttct

SEQ ID NO: 71971 - DNA, 25 bp, Homo sapien
ggcaggaacaggtgcccttctagtt

SEQ ID NO: 71972 - DNA, 25 bp, Homo sapien
ggcaggaacaggagcccttctagtt

SEQ ID NO: 71973 - DNA, 25 bp, Homo sapien
aaggaacaccacgaaccgaaagtct

SEQ ID NO: 71974 - DNA, 25 bp, Homo sapien
aaggaacaccaccaaccgaaagtct

SEQ ID NO: 71975 - DNA, 25 bp, Homo sapien
gtgggaaaacacatctaccataatc

SEQ ID NO: 71976 - DNA, 25 bp, Homo sapien
gtgggaaaacacttctaccataatc

SEQ ID NO: 71977 - DNA, 25 bp, Homo sapien
gtctgggaaaagttttaccttatct

SEQ ID NO: 71978 - DNA, 25 bp, Homo sapien
gtctgggaaaagatttaccttatct

SEQ ID NO: 71979 - DNA, 25 bp, Homo sapien
actcccaatttttgtgtgtttacgt

SEQ ID NO: 71980 - DNA, 25 bp, Homo sapien
actcccaattttagtgtgtttacgt

SEQ ID NO: 71981 - DNA, 25 bp, Homo sapien
ggagtaaggttcttggtccgactac

SEQ ID NO: 71982 - DNA, 25 bp, Homo sapien
ggagtaaggttcatggtccgactac

SEQ ID NO: 71983 - DNA, 25 bp, Homo sapien
tctgtcgggacttacaggggacgaa

SEQ ID NO: 71984 - DNA, 25 bp, Homo sapien
tctgtcgggactaacaggggacgaa

SEQ ID NO: 71985 - DNA, 25 bp, Homo sapien
acccggaggacctcgtgggacgacc

SEQ ID NO: 71986 - DNA, 25 bp, Homo sapien
acccggaggaccacgtgggacgacc

SEQ ID NO: 71987 - DNA, 25 bp, Homo sapien
cagacgataccgtgtgtacggtaaa

SEQ ID NO: 71988 - DNA, 25 bp, Homo sapien
cagacgataccgagtgtacggtaaa

SEQ ID NO: 71989 - DNA, 25 bp, Homo sapien
tcaatagttcagtctgtcaacgata

SEQ ID NO: 71990 - DNA, 25 bp, Homo sapien
tcaatagttcagactgtcaacgata

SEQ ID NO: 71991 - DNA, 25 bp, Homo sapien
gtaaatttactcgacaacgaatgtc

SEQ ID NO: 71992 - DNA, 25 bp, Homo sapien
gtaaatttactccacaacgaatgtc

SEQ ID NO: 71993 - DNA, 25 bp, Homo sapien
tacaagtatgacaccgttcatccga

SEQ ID NO: 71994 - DNA, 25 bp, Homo sapien
tacaagtatgactccgttcatccga

SEQ ID NO: 71995 - DNA, 25 bp, Homo sapien
gaaaacaaccatcgtacacatgaga

SEQ ID NO: 71996 - DNA, 25 bp, Homo sapien
gaaaacaaccatggtacacatgaga

SEQ ID NO: 71997 - DNA, 25 bp, Homo sapien
atacgagagacttaggcacgtgaaa

SEQ ID NO: 71998 - DNA, 25 bp, Homo sapien
atacgagagactaaggcacgtgaaa

SEQ ID NO: 71999 - DNA, 25 bp, Homo sapien
atatagtcacgaaagtcagtaaacc

SEQ ID NO: 72000 - DNA, 25 bp, Homo sapien
atatagtcacgatagtcagtaaacc

SEQ ID NO: 72001 - DNA, 25 bp, Homo sapien
tctgtttctcggagtacttccgaag

SEQ ID NO: 72002 - DNA, 25 bp, Homo sapien
tctgtttctcggtgtacttccgaag

SEQ ID NO: 72003 - DNA, 25 bp, Homo sapien
gggtacctacgtttacttacttaac

SEQ ID NO: 72004 - DNA, 25 bp, Homo sapien
gggtacctacgtatacttacttaac

SEQ ID NO: 72005 - DNA, 25 bp, Homo sapien
tgttgtgactcgtacttcgacctcc

SEQ ID NO: 72006 - DNA, 25 bp, Homo sapien
tgttgtgactcgaacttcgacctcc

SEQ ID NO: 72007 - DNA, 25 bp, Homo sapien
cgggtagaggtgaccgtcacgacta

SEQ ID NO: 72008 - DNA, 25 bp, Homo sapien
cgggtagaggtgtccgtcacgacta

SEQ ID NO: 72009 - DNA, 25 bp, Homo sapien
gtagaggaagcgtcttgactactag

SEQ ID NO: 72010 - DNA, 25 bp, Homo sapien
gtagaggaagcgacttgactactag

SEQ ID NO: 72011 - DNA, 25 bp, Homo sapien
gcgaacaaagaactcttgtactgag

SEQ ID NO: 72012 - DNA, 25 bp, Homo sapien
gcgaacaaagaagtcttgtactgag

SEQ ID NO: 72013 - DNA, 25 bp, Homo sapien
acaccaaccgtacttctgtgagaga

SEQ ID NO: 72014 - DNA, 25 bp, Homo sapien
acaccaaccgtagttctgtgagaga

SEQ ID NO: 72015 - DNA, 25 bp, Homo sapien
aaagaacgacataccgtttagagtt

SEQ ID NO: 72016 - DNA, 25 bp, Homo sapien
aaagaacgacattccgtttagagtt

SEQ ID NO: 72017 - DNA, 25 bp, Homo sapien
cgaacatataacagtctaaacgtgt

SEQ ID NO: 72018 - DNA, 25 bp, Homo sapien
cgaacatataactgtctaaacgtgt

SEQ ID NO: 72019 - DNA, 25 bp, Homo sapien
gtttccacttccttatagactaagg

SEQ ID NO: 72020 - DNA, 25 bp, Homo sapien
gtttccacttccatatagactaagg

SEQ ID NO: 72021 - DNA, 25 bp, Homo sapien
ggtctcaccttccatcaataaagtg

SEQ ID NO: 72022 - DNA, 25 bp, Homo sapien
ggtctcaccttcgatcaataaagtg

SEQ ID NO: 72023 - DNA, 25 bp, Homo sapien
ggtatatacttgtgttgcaaatacc

SEQ ID NO: 72024 - DNA, 25 bp, Homo sapien
ggtatatacttgagttgcaaatacc

SEQ ID NO: 72025 - DNA, 25 bp, Homo sapien
atcttgatgtaaattcattcgtgac

SEQ ID NO: 72026 - DNA, 25 bp, Homo sapien
atcttgatgtaatttcattcgtgac

SEQ ID NO: 72027 - DNA, 25 bp, Homo sapien
ctatatcggtgttttgcattcgtca

SEQ ID NO: 72028 - DNA, 25 bp, Homo sapien
ctatatcggtgtattgcattcgtca

SEQ ID NO: 72029 - DNA, 25 bp, Homo sapien
tacaaagtttgacttcttgtcgaat

SEQ ID NO: 72030 - DNA, 25 bp, Homo sapien
tacaaagtttgagttcttgtcgaat

SEQ ID NO: 72031 - DNA, 25 bp, Homo sapien
ggaaagtctgattcgtctttcgggt

SEQ ID NO: 72032 - DNA, 25 bp, Homo sapien
ggaaagtctgatacgtctttcgggt

SEQ ID NO: 72033 - DNA, 25 bp, Homo sapien
gactttaaacataagtttccgtgtc

SEQ ID NO: 72034 - DNA, 25 bp, Homo sapien
gactttaaacattagtttccgtgtc

SEQ ID NO: 72035 - DNA, 25 bp, Homo sapien
tggaaaatctgtgtacgtctccctc

SEQ ID NO: 72036 - DNA, 25 bp, Homo sapien
tggaaaatctgtctacgtctccctc

SEQ ID NO: 72037 - DNA, 25 bp, Homo sapien
tccgaaaccacacgtcgggtgttgt

SEQ ID NO: 72038 - DNA, 25 bp, Homo sapien
tccgaaaccacaggtcgggtgttgt

SEQ ID NO: 72039 - DNA, 25 bp, Homo sapien
actgatgaaactaagcactttgtta

SEQ ID NO: 72040 - DNA, 25 bp, Homo sapien
actgatgaaacttagcactttgtta

SEQ ID NO: 72041 - DNA, 25 bp, Homo sapien
gactcatgaccatacgagattttaa

SEQ ID NO: 72042 - DNA, 25 bp, Homo sapien
gactcatgaccaaacgagattttaa

SEQ ID NO: 72043 - DNA, 25 bp, Homo sapien
aaaacaggaatacatgttttctgtc

SEQ ID NO: 72044 - DNA, 25 bp, Homo sapien
aaaacaggaatagatgttttctgtc

SEQ ID NO: 72045 - DNA, 25 bp, Homo sapien
cacaagtgttttcgttatatctatg

SEQ ID NO: 72046 - DNA, 25 bp, Homo sapien
cacaagtgttttggttatatctatg

SEQ ID NO: 72047 - DNA, 25 bp, Homo sapien
tcgtttagactttgttcaagtaccc

SEQ ID NO: 72048 - DNA, 25 bp, Homo sapien
tcgtttagacttagttcaagtaccc

SEQ ID NO: 72049 - DNA, 25 bp, Homo sapien
agatttagaaacgaacgacaatcac

SEQ ID NO: 72050 - DNA, 25 bp, Homo sapien
agatttagaaaccaacgacaatcac

SEQ ID NO: 72051 - DNA, 25 bp, Homo sapien
aagacggtaaaaagttgactcaaca

SEQ ID NO: 72052 - DNA, 25 bp, Homo sapien
aagacggtaaaatgttgactcaaca

SEQ ID NO: 72053 - DNA, 25 bp, Homo sapien
tacgggacaaattcctgagtcaaca

SEQ ID NO: 72054 - DNA, 25 bp, Homo sapien
tacgggacaaatacctgagtcaaca

SEQ ID NO: 72055 - DNA, 25 bp, Homo sapien
gaacacaaccggtgtacgtcaatat

SEQ ID NO: 72056 - DNA, 25 bp, Homo sapien
gaacacaaccggagtacgtcaatat

SEQ ID NO: 72057 - DNA, 25 bp, Homo sapien
tgttcaaacagaggtaggtccgatt

SEQ ID NO: 72058 - DNA, 25 bp, Homo sapien
tgttcaaacagacgtaggtccgatt

SEQ ID NO: 72059 - DNA, 25 bp, Homo sapien
attcatgttaaatgtgtgcgacctc

SEQ ID NO: 72060 - DNA, 25 bp, Homo sapien
attcatgttaaaagtgtgcgacctc

SEQ ID NO: 72061 - DNA, 25 bp, Homo sapien
cgagtcgatgcactagtgggtgccc

SEQ ID NO: 72062 - DNA, 25 bp, Homo sapien
cgagtcgatgcagtagtgggtgccc

SEQ ID NO: 72063 - DNA, 25 bp, Homo sapien
gaagaggtcctagaggagccgcact

SEQ ID NO: 72064 - DNA, 25 bp, Homo sapien
gaagaggtcctacaggagccgcact

SEQ ID NO: 72065 - DNA, 25 bp, Homo sapien
ggagtaggttccatgtccgacctta

SEQ ID NO: 72066 - DNA, 25 bp, Homo sapien
ggagtaggttccttgtccgacctta

SEQ ID NO: 72067 - DNA, 25 bp, Homo sapien
ccgagccgtgcctgcgtcgaaggtc

SEQ ID NO: 72068 - DNA, 25 bp, Homo sapien
ccgagccgtgccagcgtcgaaggtc

SEQ ID NO: 72069 - DNA, 25 bp, Homo sapien
aacacgaaaggcacctagaggtgtt

SEQ ID NO: 72070 - DNA, 25 bp, Homo sapien
aacacgaaaggctcctagaggtgtt

SEQ ID NO: 72071 - DNA, 25 bp, Homo sapien
aaagacgtcacaacttcagtttcgt

SEQ ID NO: 72072 - DNA, 25 bp, Homo sapien
aaagacgtcacatcttcagtttcgt

SEQ ID NO: 72073 - DNA, 25 bp, Homo sapien
cggactgtacattttgtacacgacg

SEQ ID NO: 72074 - DNA, 25 bp, Homo sapien
cggactgtacatattgtacacgacg

SEQ ID NO: 72075 - DNA, 25 bp, Homo sapien
aggtatcgaattcatgttactacga

SEQ ID NO: 72076 - DNA, 25 bp, Homo sapien
aggtatcgaattgatgttactacga

SEQ ID NO: 72077 - DNA, 25 bp, Homo sapien
cagacccagacttagaacatctatc

SEQ ID NO: 72078 - DNA, 25 bp, Homo sapien
cagacccagactaagaacatctatc

SEQ ID NO: 72079 - DNA, 25 bp, Homo sapien
gagacacgtagaaggtaaatcctct

SEQ ID NO: 72080 - DNA, 25 bp, Homo sapien
gagacacgtagatggtaaatcctct

SEQ ID NO: 72081 - DNA, 25 bp, Homo sapien
cctcctggtactatggaaacccgtt

SEQ ID NO: 72082 - DNA, 25 bp, Homo sapien
cctcctggtactttggaaacccgtt

SEQ ID NO: 72083 - DNA, 25 bp, Homo sapien
agagggtcgtataggtcctacaggt

SEQ ID NO: 72084 - DNA, 25 bp, Homo sapien
agagggtcgtattggtcctacaggt

SEQ ID NO: 72085 - DNA, 25 bp, Homo sapien
gtgactgggttcctgttctaccggt

SEQ ID NO: 72086 - DNA, 25 bp, Homo sapien
gtgactgggttcgtgttctaccggt

SEQ ID NO: 72087 - DNA, 25 bp, Homo sapien
tcaagatgaattagtgactgaccat

SEQ ID NO: 72088 - DNA, 25 bp, Homo sapien
tcaagatgaatttgtgactgaccat

SEQ ID NO: 72089 - DNA, 25 bp, Homo sapien
caagactgaccctctgaagagtaag

SEQ ID NO: 72090 - DNA, 25 bp, Homo sapien
caagactgacccactgaagagtaag

SEQ ID NO: 72091 - DNA, 25 bp, Homo sapien
ggtaagaaatctcttccaaccgatc

SEQ ID NO: 72092 - DNA, 25 bp, Homo sapien
ggtaagaaatctgttccaaccgatc

SEQ ID NO: 72093 - DNA, 25 bp, Homo sapien
gtgtaaagaaatataccccagtttt

SEQ ID NO: 72094 - DNA, 25 bp, Homo sapien
gtgtaaagaaatttaccccagtttt

SEQ ID NO: 72095 - DNA, 25 bp, Homo sapien
gtgaaaaaacctttttctgttctgt

SEQ ID NO: 72096 - DNA, 25 bp, Homo sapien
gtgaaaaaacctatttctgttctgt

SEQ ID NO: 72097 - DNA, 25 bp, Homo sapien
aacacacaggtgtaatcggtgtttg

SEQ ID NO: 72098 - DNA, 25 bp, Homo sapien
aacacacaggtgaaatcggtgtttg

SEQ ID NO: 72099 - DNA, 25 bp, Homo sapien
gaccccagtgcagaggactcgtcct

SEQ ID NO: 72100 - DNA, 25 bp, Homo sapien
gaccccagtgcacaggactcgtcct

SEQ ID NO: 72101 - DNA, 25 bp, Homo sapien
ccgtcaggttagtgtgacgtctcac

SEQ ID NO: 72102 - DNA, 25 bp, Homo sapien
ccgtcaggttagagtgacgtctcac

SEQ ID NO: 72103 - DNA, 25 bp, Homo sapien
gtcccgtcacggacggagtcctgga

SEQ ID NO: 72104 - DNA, 25 bp, Homo sapien
gtcccgtcacggtcggagtcctgga

SEQ ID NO: 72105 - DNA, 25 bp, Homo sapien
gagtcgtacccgtcacttaccggca

SEQ ID NO: 72106 - DNA, 25 bp, Homo sapien
gagtcgtacccgacacttaccggca

SEQ ID NO: 72107 - DNA, 25 bp, Homo sapien
atttttatcgtcattccgccgtcga

SEQ ID NO: 72108 - DNA, 25 bp, Homo sapien
atttttatcgtctttccgccgtcga

SEQ ID NO: 72109 - DNA, 25 bp, Homo sapien
tattgactaaaaagacgtcacagaa

SEQ ID NO: 72110 - DNA, 25 bp, Homo sapien
tattgactaaaatgacgtcacagaa

SEQ ID NO: 72111 - DNA, 25 bp, Homo sapien
gactactaagactgagtacaccaag

SEQ ID NO: 72112 - DNA, 25 bp, Homo sapien
gactactaagacagagtacaccaag

SEQ ID NO: 72113 - DNA, 25 bp, Homo sapien
aaggtgactcaactggagacatcgg

SEQ ID NO: 72114 - DNA, 25 bp, Homo sapien
aaggtgactcaagtggagacatcgg

SEQ ID NO: 72115 - DNA, 25 bp, Homo sapien
acaaagtgaaaacgtcttgacttta

SEQ ID NO: 72116 - DNA, 25 bp, Homo sapien
acaaagtgaaaaggtcttgacttta

SEQ ID NO: 72117 - DNA, 25 bp, Homo sapien
cacgtactgtttattgttcgaatta

SEQ ID NO: 72118 - DNA, 25 bp, Homo sapien
cacgtactgttttttgttcgaatta

SEQ ID NO: 72119 - DNA, 25 bp, Homo sapien
caactaaagtattgctccaaagtag

SEQ ID NO: 72120 - DNA, 25 bp, Homo sapien
caactaaagtatagctccaaagtag

SEQ ID NO: 72121 - DNA, 25 bp, Homo sapien
aactagggtactcttcggtaagaac

SEQ ID NO: 72122 - DNA, 25 bp, Homo sapien
aactagggtactgttcggtaagaac

SEQ ID NO: 72123 - DNA, 25 bp, Homo sapien
acccttgttgtcttgactgctaaag

SEQ ID NO: 72124 - DNA, 25 bp, Homo sapien
acccttgttgtcatgactgctaaag

SEQ ID NO: 72125 - DNA, 25 bp, Homo sapien
acgttttgtcatgactatgacagtc

SEQ ID NO: 72126 - DNA, 25 bp, Homo sapien
acgttttgtcatcactatgacagtc

SEQ ID NO: 72127 - DNA, 25 bp, Homo sapien
acgtggacctaaatactccagtgtc

SEQ ID NO: 72128 - DNA, 25 bp, Homo sapien
acgtggacctaattactccagtgtc

SEQ ID NO: 72129 - DNA, 25 bp, Homo sapien
gtatgtagtcctaggaccaactcta

SEQ ID NO: 72130 - DNA, 25 bp, Homo sapien
gtatgtagtccttggaccaactcta

SEQ ID NO: 72131 - DNA, 25 bp, Homo sapien
agtattatctttggtcacgacacca

SEQ ID NO: 72132 - DNA, 25 bp, Homo sapien
agtattatctttcgtcacgacacca

SEQ ID NO: 72133 - DNA, 25 bp, Homo sapien
gtctaggtgtatttcctcaacctca

SEQ ID NO: 72134 - DNA, 25 bp, Homo sapien
gtctaggtgtatatcctcaacctca

SEQ ID NO: 72135 - DNA, 25 bp, Homo sapien
tgtctcgattgtgtgacaacacccc

SEQ ID NO: 72136 - DNA, 25 bp, Homo sapien
tgtctcgattgtctgacaacacccc

SEQ ID NO: 72137 - DNA, 25 bp, Homo sapien
gtcacgttgttccaaggtccccacg

SEQ ID NO: 72138 - DNA, 25 bp, Homo sapien
gtcacgttgttcgaaggtccccacg

SEQ ID NO: 72139 - DNA, 25 bp, Homo sapien
ttcaggtagtttaggtttcgttcac

SEQ ID NO: 72140 - DNA, 25 bp, Homo sapien
ttcaggtagttttggtttcgttcac

SEQ ID NO: 72141 - DNA, 25 bp, Homo sapien
atatttgtagttttgttttatataa

SEQ ID NO: 72142 - DNA, 25 bp, Homo sapien
atatttgtagttatgttttatataa

SEQ ID NO: 72143 - DNA, 25 bp, Homo sapien
ttatcgttctacatgtaataaaaat

SEQ ID NO: 72144 - DNA, 25 bp, Homo sapien
ttatcgttctacttgtaataaaaat

SEQ ID NO: 72145 - DNA, 25 bp, Homo sapien
cagtctattttatcatatatcaaaa

SEQ ID NO: 72146 - DNA, 25 bp, Homo sapien
cagtctattttaacatatatcaaaa

SEQ ID NO: 72147 - DNA, 25 bp, Homo sapien
aatctagtataaaccgtcgaagtaa

SEQ ID NO: 72148 - DNA, 25 bp, Homo sapien
aatctagtataatccgtcgaagtaa

SEQ ID NO: 72149 - DNA, 25 bp, Homo sapien
gtttaaccagagaccccgatctctc

SEQ ID NO: 72150 - DNA, 25 bp, Homo sapien
gtttaaccagagtccccgatctctc

SEQ ID NO: 72151 - DNA, 25 bp, Homo sapien
acgaagtctgtcacgcggactagtc

SEQ ID NO: 72152 - DNA, 25 bp, Homo sapien
acgaagtctgtctcgcggactagtc

SEQ ID NO: 72153 - DNA, 25 bp, Homo sapien
tactttatcgacttcctgacagact

SEQ ID NO: 72154 - DNA, 25 bp, Homo sapien
tactttatcgacatcctgacagact

SEQ ID NO: 72155 - DNA, 25 bp, Homo sapien
actccgtggtgtaccgtttagtact

SEQ ID NO: 72156 - DNA, 25 bp, Homo sapien
actccgtggtgttccgtttagtact

SEQ ID NO: 72157 - DNA, 25 bp, Homo sapien
agaatttgtactttcgtgtccaaat

SEQ ID NO: 72158 - DNA, 25 bp, Homo sapien
agaatttgtactatcgtgtccaaat

SEQ ID NO: 72159 - DNA, 25 bp, Homo sapien
cagtgttttctttgactgtcaatat

SEQ ID NO: 72160 - DNA, 25 bp, Homo sapien
cagtgttttcttagactgtcaatat

SEQ ID NO: 72161 - DNA, 25 bp, Homo sapien
caggtttgacttctccgtaaacgtt

SEQ ID NO: 72162 - DNA, 25 bp, Homo sapien
caggtttgacttgtccgtaaacgtt

SEQ ID NO: 72163 - DNA, 25 bp, Homo sapien
gactgtagttttcacctaggttcca

SEQ ID NO: 72164 - DNA, 25 bp, Homo sapien
gactgtagttttgacctaggttcca

SEQ ID NO: 72165 - DNA, 25 bp, Homo sapien
agaacataggcagattgggtcctac

SEQ ID NO: 72166 - DNA, 25 bp, Homo sapien
agaacataggcacattgggtcctac

SEQ ID NO: 72167 - DNA, 25 bp, Homo sapien
aacagagattcaaaggccaagacac

SEQ ID NO: 72168 - DNA, 25 bp, Homo sapien
aacagagattcataggccaagacac

SEQ ID NO: 72169 - DNA, 25 bp, Homo sapien
aaaactttcgtcgagaagtacaaaa

SEQ ID NO: 72170 - DNA, 25 bp, Homo sapien
aaaactttcgtccagaagtacaaaa

SEQ ID NO: 72171 - DNA, 25 bp, Homo sapien
aacatgtcgtcgaggagtacccaga

SEQ ID NO: 72172 - DNA, 25 bp, Homo sapien
aacatgtcgtcgtggagtacccaga

SEQ ID NO: 72173 - DNA, 25 bp, Homo sapien
aactaacgcctagtgagaggtacaa

SEQ ID NO: 72174 - DNA, 25 bp, Homo sapien
aactaacgcctactgagaggtacaa

SEQ ID NO: 72175 - DNA, 25 bp, Homo sapien
aaacaactatgatggttacgtgcac

SEQ ID NO: 72176 - DNA, 25 bp, Homo sapien
aaacaactatgaaggttacgtgcac

SEQ ID NO: 72177 - DNA, 25 bp, Homo sapien
cttaagttatcctaaggatcgttta

SEQ ID NO: 72178 - DNA, 25 bp, Homo sapien
cttaagttatccaaaggatcgttta

SEQ ID NO: 72179 - DNA, 25 bp, Homo sapien
aaccgcgggaactgactctacggta

SEQ ID NO: 72180 - DNA, 25 bp, Homo sapien
aaccgcgggaacagactctacggta

SEQ ID NO: 72181 - DNA, 25 bp, Homo sapien
gtatagccaatgtcgaatcgttgtg

SEQ ID NO: 72182 - DNA, 25 bp, Homo sapien
gtatagccaatgacgaatcgttgtg

SEQ ID NO: 72183 - DNA, 25 bp, Homo sapien
gtgccgacctcttactctatgtttt

SEQ ID NO: 72184 - DNA, 25 bp, Homo sapien
gtgccgacctctaactctatgtttt

SEQ ID NO: 72185 - DNA, 25 bp, Homo sapien
ggacccttagtaattcgttcgttgt

SEQ ID NO: 72186 - DNA, 25 bp, Homo sapien
ggacccttagtatttcgttcgttgt

SEQ ID NO: 72187 - DNA, 25 bp, Homo sapien
tcacacatgagctactcggtaacag

SEQ ID NO: 72188 - DNA, 25 bp, Homo sapien
tcacacatgagcaactcggtaacag

SEQ ID NO: 72189 - DNA, 25 bp, Homo sapien
gttcataaggagtaaccaacactct

SEQ ID NO: 72190 - DNA, 25 bp, Homo sapien
gttcataaggagaaaccaacactct

SEQ ID NO: 72191 - DNA, 25 bp, Homo sapien
ggtaacctagaggagtcgttacatc

SEQ ID NO: 72192 - DNA, 25 bp, Homo sapien
ggtaacctagagcagtcgttacatc

SEQ ID NO: 72193 - DNA, 25 bp, Homo sapien
ttaccagttacaagacttacgtcag

SEQ ID NO: 72194 - DNA, 25 bp, Homo sapien
ttaccagttacatgacttacgtcag

SEQ ID NO: 72195 - DNA, 25 bp, Homo sapien
aacccgaaggattcccactctgtca

SEQ ID NO: 72196 - DNA, 25 bp, Homo sapien
aacccgaaggatacccactctgtca

SEQ ID NO: 72197 - DNA, 25 bp, Homo sapien
cgtatgaagtcagaccaccttagaa

SEQ ID NO: 72198 - DNA, 25 bp, Homo sapien
cgtatgaagtcacaccaccttagaa

SEQ ID NO: 72199 - DNA, 25 bp, Homo sapien
tgaggaatcaaacgtctccgtgata

SEQ ID NO: 72200 - DNA, 25 bp, Homo sapien
tgaggaatcaaaggtctccgtgata

SEQ ID NO: 72201 - DNA, 25 bp, Homo sapien
tgttagttgccgactctccgtgttt

SEQ ID NO: 72202 - DNA, 25 bp, Homo sapien
tgttagttgccgtctctccgtgttt

SEQ ID NO: 72203 - DNA, 25 bp, Homo sapien
tgttcgttccggactaaagatagtt

SEQ ID NO: 72204 - DNA, 25 bp, Homo sapien
tgttcgttccggtctaaagatagtt

SEQ ID NO: 72205 - DNA, 25 bp, Homo sapien
ttttcgacatagagctcaaattagt

SEQ ID NO: 72206 - DNA, 25 bp, Homo sapien
ttttcgacatagtgctcaaattagt

SEQ ID NO: 72207 - DNA, 25 bp, Homo sapien
tgcttctataacgtcaccaacgttg

SEQ ID NO: 72208 - DNA, 25 bp, Homo sapien
tgcttctataacctcaccaacgttg

SEQ ID NO: 72209 - DNA, 25 bp, Homo sapien
tccgacgtctactacggcaggaggt

SEQ ID NO: 72210 - DNA, 25 bp, Homo sapien
tccgacgtctacaacggcaggaggt

SEQ ID NO: 72211 - DNA, 25 bp, Homo sapien
aagtcaccgtgcaagtgtcgcccct

SEQ ID NO: 72212 - DNA, 25 bp, Homo sapien
aagtcaccgtgctagtgtcgcccct

SEQ ID NO: 72213 - DNA, 25 bp, Homo sapien
ctttctccgggattgtctgttcctg

SEQ ID NO: 72214 - DNA, 25 bp, Homo sapien
ctttctccgggaatgtctgttcctg

SEQ ID NO: 72215 - DNA, 25 bp, Homo sapien
tcatcccgtgtactttactttggtt

SEQ ID NO: 72216 - DNA, 25 bp, Homo sapien
tcatcccgtgtagtttactttggtt

SEQ ID NO: 72217 - DNA, 25 bp, Homo sapien
ttccgaggagttgagtcttcgtgtt

SEQ ID NO: 72218 - DNA, 25 bp, Homo sapien
ttccgaggagttcagtcttcgtgtt

SEQ ID NO: 72219 - DNA, 25 bp, Homo sapien
tcgggtcccggtgcatcagttgacg

SEQ ID NO: 72220 - DNA, 25 bp, Homo sapien
tcgggtcccggtccatcagttgacg

SEQ ID NO: 72221 - DNA, 25 bp, Homo sapien
tgtaactaccgatccacccggtggt

SEQ ID NO: 72222 - DNA, 25 bp, Homo sapien
tgtaactaccgaaccacccggtggt

SEQ ID NO: 72223 - DNA, 25 bp, Homo sapien
ctacgagcgaccttcctttcggcgg

SEQ ID NO: 72224 - DNA, 25 bp, Homo sapien
ctacgagcgaccatcctttcggcgg

SEQ ID NO: 72225 - DNA, 25 bp, Homo sapien
gattgacaccgtagtcttgtgaggg

SEQ ID NO: 72226 - DNA, 25 bp, Homo sapien
gattgacaccgttgtcttgtgaggg

SEQ ID NO: 72227 - DNA, 25 bp, Homo sapien
gtgacttccctgtccggtccgcgga

SEQ ID NO: 72228 - DNA, 25 bp, Homo sapien
gtgacttccctgaccggtccgcgga

SEQ ID NO: 72229 - DNA, 25 bp, Homo sapien
ggggttccactcactggaccctcac

SEQ ID NO: 72230 - DNA, 25 bp, Homo sapien
ggggttccactctctggaccctcac

SEQ ID NO: 72231 - DNA, 25 bp, Homo sapien
ttggtccctacttggtgcaatgtct

SEQ ID NO: 72232 - DNA, 25 bp, Homo sapien
ttggtccctactaggtgcaatgtct

SEQ ID NO: 72233 - DNA, 25 bp, Homo sapien
tgcctacatttatctgtcacgtgtg

SEQ ID NO: 72234 - DNA, 25 bp, Homo sapien
tgcctacatttaactgtcacgtgtg

SEQ ID NO: 72235 - DNA, 25 bp, Homo sapien
tcgtagcgaagatctgccgacaatt

SEQ ID NO: 72236 - DNA, 25 bp, Homo sapien
tcgtagcgaagaactgccgacaatt

SEQ ID NO: 72237 - DNA, 25 bp, Homo sapien
agtaacagtgacttacagacattat

SEQ ID NO: 72238 - DNA, 25 bp, Homo sapien
agtaacagtgacatacagacattat

SEQ ID NO: 72239 - DNA, 25 bp, Homo sapien
aggacacctaaatattcggtttact

SEQ ID NO: 72240 - DNA, 25 bp, Homo sapien
aggacacctaaaaattcggtttact

SEQ ID NO: 72241 - DNA, 25 bp, Homo sapien
agggatctctttcatttttgactat

SEQ ID NO: 72242 - DNA, 25 bp, Homo sapien
agggatctctttgatttttgactat

SEQ ID NO: 72243 - DNA, 25 bp, Homo sapien
aggagaagacagtgacgtttttccc

SEQ ID NO: 72244 - DNA, 25 bp, Homo sapien
aggagaagacagagacgtttttccc

SEQ ID NO: 72245 - DNA, 25 bp, Homo sapien
gagttttctggaaggttcctctccg

SEQ ID NO: 72246 - DNA, 25 bp, Homo sapien
gagttttctggatggttcctctccg

SEQ ID NO: 72247 - DNA, 25 bp, Homo sapien
ggttttctgacagtctccgcactca

SEQ ID NO: 72248 - DNA, 25 bp, Homo sapien
ggttttctgacactctccgcactca

SEQ ID NO: 72249 - DNA, 25 bp, Homo sapien
gcgacgtcagtgacactccgttcta

SEQ ID NO: 72250 - DNA, 25 bp, Homo sapien
gcgacgtcagtgtcactccgttcta

SEQ ID NO: 72251 - DNA, 25 bp, Homo sapien
agtcccgaagtctttctgactctat

SEQ ID NO: 72252 - DNA, 25 bp, Homo sapien
agtcccgaagtcattctgactctat

SEQ ID NO: 72253 - DNA, 25 bp, Homo sapien
ttagaggacgggattttcctactat

SEQ ID NO: 72254 - DNA, 25 bp, Homo sapien
ttagaggacgggtttttcctactat

SEQ ID NO: 72255 - DNA, 25 bp, Homo sapien
gaagtaaaagagaccgggtcatctt

SEQ ID NO: 72256 - DNA, 25 bp, Homo sapien
gaagtaaaagagtccgggtcatctt

SEQ ID NO: 72257 - DNA, 25 bp, Homo sapien
gaaaacacgggtgtcgtaacgtctc

SEQ ID NO: 72258 - DNA, 25 bp, Homo sapien
gaaaacacgggtctcgtaacgtctc

SEQ ID NO: 72259 - DNA, 25 bp, Homo sapien
gagacgacgaaggacctgagcctcg

SEQ ID NO: 72260 - DNA, 25 bp, Homo sapien
gagacgacgaagcacctgagcctcg

SEQ ID NO: 72261 - DNA, 25 bp, Homo sapien
gacgagagacgacaagggactccct

SEQ ID NO: 72262 - DNA, 25 bp, Homo sapien
gacgagagacgagaagggactccct

SEQ ID NO: 72263 - DNA, 25 bp, Homo sapien
caagacccagggacggagacctcac

SEQ ID NO: 72264 - DNA, 25 bp, Homo sapien
caagacccagggtcggagacctcac

SEQ ID NO: 72265 - DNA, 25 bp, Homo sapien
gttaccgcgggcagaaacccacgac

SEQ ID NO: 72266 - DNA, 25 bp, Homo sapien
gttaccgcgggctgaaacccacgac

SEQ ID NO: 72267 - DNA, 25 bp, Homo sapien
ggaccagtgaaccatgaaccgcacc

SEQ ID NO: 72268 - DNA, 25 bp, Homo sapien
ggaccagtgaacgatgaaccgcacc

SEQ ID NO: 72269 - DNA, 25 bp, Homo sapien
ttagtgtgtctcagaagacatcccc

SEQ ID NO: 72270 - DNA, 25 bp, Homo sapien
ttagtgtgtctctgaagacatcccc

SEQ ID NO: 72271 - DNA, 25 bp, Homo sapien
tgagtagccacgaacgaatctccgt

SEQ ID NO: 72272 - DNA, 25 bp, Homo sapien
tgagtagccacgtacgaatctccgt

SEQ ID NO: 72273 - DNA, 25 bp, Homo sapien
ataaatgagtgtccaagttccgtca

SEQ ID NO: 72274 - DNA, 25 bp, Homo sapien
ataaatgagtgtgcaagttccgtca

SEQ ID NO: 72275 - DNA, 25 bp, Homo sapien
caaaaacacgtgacagcttaagggt

SEQ ID NO: 72276 - DNA, 25 bp, Homo sapien
caaaaacacgtgtcagcttaagggt

SEQ ID NO: 72277 - DNA, 25 bp, Homo sapien
ggaacttcactttacattaatctga

SEQ ID NO: 72278 - DNA, 25 bp, Homo sapien
ggaacttcacttaacattaatctga

SEQ ID NO: 72279 - DNA, 25 bp, Homo sapien
gattgtcggtaaaccaaacctacat

SEQ ID NO: 72280 - DNA, 25 bp, Homo sapien
gattgtcggtaatccaaacctacat

SEQ ID NO: 72281 - DNA, 25 bp, Homo sapien
agtcagcgagtgtcctgaacctaga

SEQ ID NO: 72282 - DNA, 25 bp, Homo sapien
agtcagcgagtgacctgaacctaga

SEQ ID NO: 72283 - DNA, 25 bp, Homo sapien
gtaccggtacggacttcggaccaca

SEQ ID NO: 72284 - DNA, 25 bp, Homo sapien
gtaccggtacggtcttcggaccaca

SEQ ID NO: 72285 - DNA, 25 bp, Homo sapien
tcagacgttgggtcccgtgacccgg

SEQ ID NO: 72286 - DNA, 25 bp, Homo sapien
tcagacgttgggacccgtgacccgg

SEQ ID NO: 72287 - DNA, 25 bp, Homo sapien
ggaatcagtgcgacctgtgaccctg

SEQ ID NO: 72288 - DNA, 25 bp, Homo sapien
ggaatcagtgcgtcctgtgaccctg

SEQ ID NO: 72289 - DNA, 25 bp, Homo sapien
aaaaacagtgaaccactgaaccttg

SEQ ID NO: 72290 - DNA, 25 bp, Homo sapien
aaaaacagtgaagcactgaaccttg

SEQ ID NO: 72291 - DNA, 25 bp, Homo sapien
taccactttaagacgcgtcccgaga

SEQ ID NO: 72292 - DNA, 25 bp, Homo sapien
taccactttaagtcgcgtcccgaga

SEQ ID NO: 72293 - DNA, 25 bp, Homo sapien
cagtaacaaaacagggctccgacga

SEQ ID NO: 72294 - DNA, 25 bp, Homo sapien
cagtaacaaaactgggctccgacga

SEQ ID NO: 72295 - DNA, 25 bp, Homo sapien
tgtgagcctgtggaaccccgggaca

SEQ ID NO: 72296 - DNA, 25 bp, Homo sapien
tgtgagcctgtgcaaccccgggaca

SEQ ID NO: 72297 - DNA, 25 bp, Homo sapien
acaagtaaagataaccctcgggaca

SEQ ID NO: 72298 - DNA, 25 bp, Homo sapien
acaagtaaagattaccctcgggaca

SEQ ID NO: 72299 - DNA, 25 bp, Homo sapien
tcatgtcgtcgtggacctggaccct

SEQ ID NO: 72300 - DNA, 25 bp, Homo sapien
tcatgtcgtcgtcgacctggaccct

SEQ ID NO: 72301 - DNA, 25 bp, Homo sapien
ccatagtgacgtccacgacagggcc

SEQ ID NO: 72302 - DNA, 25 bp, Homo sapien
ccatagtgacgtgcacgacagggcc

SEQ ID NO: 72303 - DNA, 25 bp, Homo sapien
acccataggaggttctcagggtatc

SEQ ID NO: 72304 - DNA, 25 bp, Homo sapien
acccataggaggatctcagggtatc

SEQ ID NO: 72305 - DNA, 25 bp, Homo sapien
ggaacaaccaaggatggtatacttt

SEQ ID NO: 72306 - DNA, 25 bp, Homo sapien
ggaacaaccaagcatggtatacttt

SEQ ID NO: 72307 - DNA, 25 bp, Homo sapien
gtgtgtcaaccatattttagtcttt

SEQ ID NO: 72308 - DNA, 25 bp, Homo sapien
gtgtgtcaaccaaattttagtcttt

SEQ ID NO: 72309 - DNA, 25 bp, Homo sapien
ttttcgactccctttggtagctggt

SEQ ID NO: 72310 - DNA, 25 bp, Homo sapien
ttttcgactcccattggtagctggt

SEQ ID NO: 72311 - DNA, 25 bp, Homo sapien
atagggacaccttatcacgttcttt

SEQ ID NO: 72312 - DNA, 25 bp, Homo sapien
atagggacacctaatcacgttcttt

SEQ ID NO: 72313 - DNA, 25 bp, Homo sapien
atgttgtttcttgctacatacggtt

SEQ ID NO: 72314 - DNA, 25 bp, Homo sapien
atgttgtttcttcctacatacggtt

SEQ ID NO: 72315 - DNA, 25 bp, Homo sapien
agaacttttctcagacccagactta

SEQ ID NO: 72316 - DNA, 25 bp, Homo sapien
agaacttttctctgacccagactta

SEQ ID NO: 72317 - DNA, 25 bp, Homo sapien
aggtctcttttgaccagagatatat

SEQ ID NO: 72318 - DNA, 25 bp, Homo sapien
aggtctcttttgtccagagatatat

SEQ ID NO: 72319 - DNA, 25 bp, Homo sapien
cagtggtagttttcctgaagcaaat

SEQ ID NO: 72320 - DNA, 25 bp, Homo sapien
cagtggtagtttacctgaagcaaat

SEQ ID NO: 72321 - DNA, 25 bp, Homo sapien
gaagtactttttctccttcaaagag

SEQ ID NO: 72322 - DNA, 25 bp, Homo sapien
gaagtactttttgtccttcaaagag

SEQ ID NO: 72323 - DNA, 25 bp, Homo sapien
aaactcctgaggttccttctgaaag

SEQ ID NO: 72324 - DNA, 25 bp, Homo sapien
aaactcctgaggatccttctgaaag

SEQ ID NO: 72325 - DNA, 25 bp, Homo sapien
aactccctggtagtctattgacata

SEQ ID NO: 72326 - DNA, 25 bp, Homo sapien
aactccctggtactctattgacata

SEQ ID NO: 72327 - DNA, 25 bp, Homo sapien
tagtctctctgtgtcagattaaatt

SEQ ID NO: 72328 - DNA, 25 bp, Homo sapien
tagtctctctgtctcagattaaatt

SEQ ID NO: 72329 - DNA, 25 bp, Homo sapien
agatgtttgtgtcccctggtaaatt

SEQ ID NO: 72330 - DNA, 25 bp, Homo sapien
agatgtttgtgtgccctggtaaatt

SEQ ID NO: 72331 - DNA, 25 bp, Homo sapien
agtttttgtccctatagacgtaaat

SEQ ID NO: 72332 - DNA, 25 bp, Homo sapien
agtttttgtcccaatagacgtaaat

SEQ ID NO: 72333 - DNA, 25 bp, Homo sapien
tcttctcgtcgacactggacgacaa

SEQ ID NO: 72334 - DNA, 25 bp, Homo sapien
tcttctcgtcgagactggacgacaa

SEQ ID NO: 72335 - DNA, 25 bp, Homo sapien
ctataccccgtcgactccagtaaag

SEQ ID NO: 72336 - DNA, 25 bp, Homo sapien
ctataccccgtccactccagtaaag

SEQ ID NO: 72337 - DNA, 25 bp, Homo sapien
cgactactctccacgtgacggtcaa

SEQ ID NO: 72338 - DNA, 25 bp, Homo sapien
cgactactctcctcgtgacggtcaa

SEQ ID NO: 72339 - DNA, 25 bp, Homo sapien
ccgttccccgctggtacgacatata

SEQ ID NO: 72340 - DNA, 25 bp, Homo sapien
ccgttccccgctcgtacgacatata

SEQ ID NO: 72341 - DNA, 25 bp, Homo sapien
tcgtcgacccgaactccgcgtgata

SEQ ID NO: 72342 - DNA, 25 bp, Homo sapien
tcgtcgacccgatctccgcgtgata

SEQ ID NO: 72343 - DNA, 25 bp, Homo sapien
tttacaacagacctcgtcgggagtc

SEQ ID NO: 72344 - DNA, 25 bp, Homo sapien
tttacaacagacgtcgtcgggagtc

SEQ ID NO: 72345 - DNA, 25 bp, Homo sapien
tagacttttaataccgtttcagagg

SEQ ID NO: 72346 - DNA, 25 bp, Homo sapien
tagacttttaattccgtttcagagg

SEQ ID NO: 72347 - DNA, 25 bp, Homo sapien
gaatctttacaaaggacttctaagg

SEQ ID NO: 72348 - DNA, 25 bp, Homo sapien
gaatctttacaatggacttctaagg

SEQ ID NO: 72349 - DNA, 25 bp, Homo sapien
gctaaatttacacgtgttctgaacc

SEQ ID NO: 72350 - DNA, 25 bp, Homo sapien
gctaaatttacaggtgttctgaacc

SEQ ID NO: 72351 - DNA, 25 bp, Homo sapien
acatccatttctggtcttttaagac

SEQ ID NO: 72352 - DNA, 25 bp, Homo sapien
acatccatttctcgtcttttaagac

SEQ ID NO: 72353 - DNA, 25 bp, Homo sapien
atcgggtggtcagactttatgacgg

SEQ ID NO: 72354 - DNA, 25 bp, Homo sapien
atcgggtggtcacactttatgacgg

SEQ ID NO: 72355 - DNA, 25 bp, Homo sapien
aatcggatctttcgaaacttatctg

SEQ ID NO: 72356 - DNA, 25 bp, Homo sapien
aatcggatctttggaaacttatctg

SEQ ID NO: 72357 - DNA, 25 bp, Homo sapien
gagaggttttaagttactcaatacc

SEQ ID NO: 72358 - DNA, 25 bp, Homo sapien
gagaggttttaacttactcaatacc

SEQ ID NO: 72359 - DNA, 25 bp, Homo sapien
gggggttttacgtagtacaacctgt

SEQ ID NO: 72360 - DNA, 25 bp, Homo sapien
gggggttttacgaagtacaacctgt

SEQ ID NO: 72361 - DNA, 25 bp, Homo sapien
gagagtcgcgttgaaactagacttg

SEQ ID NO: 72362 - DNA, 25 bp, Homo sapien
gagagtcgcgttcaaactagacttg

SEQ ID NO: 72363 - DNA, 25 bp, Homo sapien
aacgtccctctcagagacgactggg

SEQ ID NO: 72364 - DNA, 25 bp, Homo sapien
aacgtccctctctgagacgactggg

SEQ ID NO: 72365 - DNA, 25 bp, Homo sapien
acgggtcctctcttcggcgaccgaa

SEQ ID NO: 72366 - DNA, 25 bp, Homo sapien
acgggtcctctcatcggcgaccgaa

SEQ ID NO: 72367 - DNA, 25 bp, Homo sapien
actgtgagtcttataggggaaccac

SEQ ID NO: 72368 - DNA, 25 bp, Homo sapien
actgtgagtcttttaggggaaccac

SEQ ID NO: 72369 - DNA, 25 bp, Homo sapien
tttttagtaaaagtgacgatcacct

SEQ ID NO: 72370 - DNA, 25 bp, Homo sapien
tttttagtaaaactgacgatcacct

SEQ ID NO: 72371 - DNA, 25 bp, Homo sapien
atcgtgatactacagagggtcttcc

SEQ ID NO: 72372 - DNA, 25 bp, Homo sapien
atcgtgatactagagagggtcttcc

SEQ ID NO: 72373 - DNA, 25 bp, Homo sapien
agtagatactctagacttgtttatc

SEQ ID NO: 72374 - DNA, 25 bp, Homo sapien
agtagatactcttgacttgtttatc

SEQ ID NO: 72375 - DNA, 25 bp, Homo sapien
actgttcttgtttagtctagagttc

SEQ ID NO: 72376 - DNA, 25 bp, Homo sapien
actgttcttgttaagtctagagttc

SEQ ID NO: 72377 - DNA, 25 bp, Homo sapien
ctccctgtgtcgtgggagcagagcc

SEQ ID NO: 72378 - DNA, 25 bp, Homo sapien
ctccctgtgtcgagggagcagagcc

SEQ ID NO: 72379 - DNA, 25 bp, Homo sapien
atttattagagaaccacgaccgtct

SEQ ID NO: 72380 - DNA, 25 bp, Homo sapien
atttattagagatccacgaccgtct

SEQ ID NO: 72381 - DNA, 25 bp, Homo sapien
atatcgatgttgaaccgtcgtaccc

SEQ ID NO: 72382 - DNA, 25 bp, Homo sapien
atatcgatgttgtaccgtcgtaccc

SEQ ID NO: 72383 - DNA, 25 bp, Homo sapien
cgagagtccttttaagtttgttgtc

SEQ ID NO: 72384 - DNA, 25 bp, Homo sapien
cgagagtcctttaaagtttgttgtc

SEQ ID NO: 72385 - DNA, 25 bp, Homo sapien
ggtcttatgtatcctttagttgtac

SEQ ID NO: 72386 - DNA, 25 bp, Homo sapien
ggtcttatgtatgctttagttgtac

SEQ ID NO: 72387 - DNA, 25 bp, Homo sapien
cgtccgttaatgtacgtggttatag

SEQ ID NO: 72388 - DNA, 25 bp, Homo sapien
cgtccgttaatgaacgtggttatag

SEQ ID NO: 72389 - DNA, 25 bp, Homo sapien
cctttacagaccaacagtacgagtt

SEQ ID NO: 72390 - DNA, 25 bp, Homo sapien
cctttacagacctacagtacgagtt

SEQ ID NO: 72391 - DNA, 25 bp, Homo sapien
tcgtagttcgtgcacagacttcctc

SEQ ID NO: 72392 - DNA, 25 bp, Homo sapien
tcgtagttcgtggacagacttcctc

SEQ ID NO: 72393 - DNA, 25 bp, Homo sapien
gtctaaggtaagtgcctaaggttcc

SEQ ID NO: 72394 - DNA, 25 bp, Homo sapien
gtctaaggtaagagcctaaggttcc

SEQ ID NO: 72395 - DNA, 25 bp, Homo sapien
ggaccgtaaacgagccatgtattcc

SEQ ID NO: 72396 - DNA, 25 bp, Homo sapien
ggaccgtaaacgtgccatgtattcc

SEQ ID NO: 72397 - DNA, 25 bp, Homo sapien
gtgacttcagactcaaagttttcac

SEQ ID NO: 72398 - DNA, 25 bp, Homo sapien
gtgacttcagacacaaagttttcac

SEQ ID NO: 72399 - DNA, 25 bp, Homo sapien
agatctacacagtccaacgccttcc

SEQ ID NO: 72400 - DNA, 25 bp, Homo sapien
agatctacacagaccaacgccttcc

SEQ ID NO: 72401 - DNA, 25 bp, Homo sapien
gggttactccaccactaaccgattc

SEQ ID NO: 72402 - DNA, 25 bp, Homo sapien
gggttactccacgactaaccgattc

SEQ ID NO: 72403 - DNA, 25 bp, Homo sapien
tgtccggttctcgatgtccgatgtc

SEQ ID NO: 72404 - DNA, 25 bp, Homo sapien
tgtccggttctccatgtccgatgtc

SEQ ID NO: 72405 - DNA, 25 bp, Homo sapien
tcacgattttactcgtcgtaattgt

SEQ ID NO: 72406 - DNA, 25 bp, Homo sapien
tcacgattttacacgtcgtaattgt

SEQ ID NO: 72407 - DNA, 25 bp, Homo sapien
tctcatctcagacgactgtaatgtt

SEQ ID NO: 72408 - DNA, 25 bp, Homo sapien
tctcatctcagaggactgtaatgtt

SEQ ID NO: 72409 - DNA, 25 bp, Homo sapien
cagttctattcctcctagggtcgtc

SEQ ID NO: 72410 - DNA, 25 bp, Homo sapien
cagttctattccacctagggtcgtc

SEQ ID NO: 72411 - DNA, 25 bp, Homo sapien
catcccggtaccacctgtggacgct

SEQ ID NO: 72412 - DNA, 25 bp, Homo sapien
catcccggtacctcctgtggacgct

SEQ ID NO: 72413 - DNA, 25 bp, Homo sapien
acgtgtgtcgactacttcggtgcac

SEQ ID NO: 72414 - DNA, 25 bp, Homo sapien
acgtgtgtcgacaacttcggtgcac

SEQ ID NO: 72415 - DNA, 25 bp, Homo sapien
ccccgacgttccttgtggagacaca

SEQ ID NO: 72416 - DNA, 25 bp, Homo sapien
ccccgacgttccatgtggagacaca

SEQ ID NO: 72417 - DNA, 25 bp, Homo sapien
tcccctttgcatgaggtcgagacaa

SEQ ID NO: 72418 - DNA, 25 bp, Homo sapien
tcccctttgcatcaggtcgagacaa

SEQ ID NO: 72419 - DNA, 25 bp, Homo sapien
ctctggtccttgaaccagccacgaa

SEQ ID NO: 72420 - DNA, 25 bp, Homo sapien
ctctggtccttgtaccagccacgaa

SEQ ID NO: 72421 - DNA, 25 bp, Homo sapien
cgtgtccacttgtcctcagattaga

SEQ ID NO: 72422 - DNA, 25 bp, Homo sapien
cgtgtccacttgacctcagattaga

SEQ ID NO: 72423 - DNA, 25 bp, Homo sapien
gtttgtcggtctcacttaacagagt

SEQ ID NO: 72424 - DNA, 25 bp, Homo sapien
gtttgtcggtctgacttaacagagt

SEQ ID NO: 72425 - DNA, 25 bp, Homo sapien
agacctttcaggtctgtcttgagat

SEQ ID NO: 72426 - DNA, 25 bp, Homo sapien
agacctttcaggactgtcttgagat

SEQ ID NO: 72427 - DNA, 25 bp, Homo sapien
aacacttacgaaggttcatgtttag

SEQ ID NO: 72428 - DNA, 25 bp, Homo sapien
aacacttacgaacgttcatgtttag

SEQ ID NO: 72429 - DNA, 25 bp, Homo sapien
tccatgtgaccgttcgaacggttat

SEQ ID NO: 72430 - DNA, 25 bp, Homo sapien
tccatgtgaccgatcgaacggttat

SEQ ID NO: 72431 - DNA, 25 bp, Homo sapien
gtcaccttatccttcacgaggttcg

SEQ ID NO: 72432 - DNA, 25 bp, Homo sapien
gtcaccttatccatcacgaggttcg

SEQ ID NO: 72433 - DNA, 25 bp, Homo sapien
ctaacttctggttctgtgtcgatcc

SEQ ID NO: 72434 - DNA, 25 bp, Homo sapien
ctaacttctggtactgtgtcgatcc

SEQ ID NO: 72435 - DNA, 25 bp, Homo sapien
ctccattgagaggtgtgtcctgagt

SEQ ID NO: 72436 - DNA, 25 bp, Homo sapien
ctccattgagagctgtgtcctgagt

SEQ ID NO: 72437 - DNA, 25 bp, Homo sapien
cgacagaccgtgaatgtgtacataa

SEQ ID NO: 72438 - DNA, 25 bp, Homo sapien
cgacagaccgtgtatgtgtacataa

SEQ ID NO: 72439 - DNA, 25 bp, Homo sapien
aaccatagcctgcttctgaggagag

SEQ ID NO: 72440 - DNA, 25 bp, Homo sapien
aaccatagcctggttctgaggagag

SEQ ID NO: 72441 - DNA, 25 bp, Homo sapien
acagatcccgggtctaaggacgacg

SEQ ID NO: 72442 - DNA, 25 bp, Homo sapien
acagatcccgggactaaggacgacg

SEQ ID NO: 72443 - DNA, 25 bp, Homo sapien
gtagatccataccaacgtaagagca

SEQ ID NO: 72444 - DNA, 25 bp, Homo sapien
gtagatccatacgaacgtaagagca

SEQ ID NO: 72445 - DNA, 25 bp, Homo sapien
ggacttacaactcaagtcaagaaat

SEQ ID NO: 72446 - DNA, 25 bp, Homo sapien
ggacttacaactgaagtcaagaaat

SEQ ID NO: 72447 - DNA, 25 bp, Homo sapien
tcaagttaactaacttctaaaatat

SEQ ID NO: 72448 - DNA, 25 bp, Homo sapien
tcaagttaactatcttctaaaatat

SEQ ID NO: 72449 - DNA, 25 bp, Homo sapien
actattattcgttggaacactatag

SEQ ID NO: 72450 - DNA, 25 bp, Homo sapien
actattattcgtaggaacactatag

SEQ ID NO: 72451 - DNA, 25 bp, Homo sapien
tcttcttcgtcgacggtataatgat

SEQ ID NO: 72452 - DNA, 25 bp, Homo sapien
tcttcttcgtcgtcggtataatgat

SEQ ID NO: 72453 - DNA, 25 bp, Homo sapien
actgtttcgtcgcggagtcttcgag

SEQ ID NO: 72454 - DNA, 25 bp, Homo sapien
actgtttcgtcggggagtcttcgag

SEQ ID NO: 72455 - DNA, 25 bp, Homo sapien
gtctctcagacgtggtcgtagtaag

SEQ ID NO: 72456 - DNA, 25 bp, Homo sapien
gtctctcagacgaggtcgtagtaag

SEQ ID NO: 72457 - DNA, 25 bp, Homo sapien
gatccagtctcagcaggcttagaag

SEQ ID NO: 72458 - DNA, 25 bp, Homo sapien
gatccagtctcaccaggcttagaag

SEQ ID NO: 72459 - DNA, 25 bp, Homo sapien
tcaacggacacccatctgcatgtta

SEQ ID NO: 72460 - DNA, 25 bp, Homo sapien
tcaacggacaccgatctgcatgtta

SEQ ID NO: 72461 - DNA, 25 bp, Homo sapien
aggtccgtcaacatgtcgtatcaca

SEQ ID NO: 72462 - DNA, 25 bp, Homo sapien
aggtccgtcaacttgtcgtatcaca

SEQ ID NO: 72463 - DNA, 25 bp, Homo sapien
cgcaggcgtagtcgaagcggttccc

SEQ ID NO: 72464 - DNA, 25 bp, Homo sapien
cgcaggcgtagtggaagcggttccc

SEQ ID NO: 72465 - DNA, 25 bp, Homo sapien
agtcaggatgtcagtcctacgtcaa

SEQ ID NO: 72466 - DNA, 25 bp, Homo sapien
agtcaggatgtctgtcctacgtcaa

SEQ ID NO: 72467 - DNA, 25 bp, Homo sapien
tttccgttgaaatgttttagtcaca

SEQ ID NO: 72468 - DNA, 25 bp, Homo sapien
tttccgttgaaaagttttagtcaca

SEQ ID NO: 72469 - DNA, 25 bp, Homo sapien
acaactgatttcgtcgtcagaaccg

SEQ ID NO: 72470 - DNA, 25 bp, Homo sapien
acaactgatttcctcgtcagaaccg

SEQ ID NO: 72471 - DNA, 25 bp, Homo sapien
agtaatttcctaatctatgagactt

SEQ ID NO: 72472 - DNA, 25 bp, Homo sapien
agtaatttcctattctatgagactt

SEQ ID NO: 72473 - DNA, 25 bp, Homo sapien
tgaagattccctttaattgtacgtg

SEQ ID NO: 72474 - DNA, 25 bp, Homo sapien
tgaagattccctataattgtacgtg

SEQ ID NO: 72475 - DNA, 25 bp, Homo sapien
gacgaaacgatatctaaactcgttc

SEQ ID NO: 72476 - DNA, 25 bp, Homo sapien
gacgaaacgataactaaactcgttc

SEQ ID NO: 72477 - DNA, 25 bp, Homo sapien
tggtcgatagaacccgtgctaccct

SEQ ID NO: 72478 - DNA, 25 bp, Homo sapien
tggtcgatagaagccgtgctaccct

SEQ ID NO: 72479 - DNA, 25 bp, Homo sapien
aaggagaaagagcagaggtacccac

SEQ ID NO: 72480 - DNA, 25 bp, Homo sapien
aaggagaaagaggagaggtacccac

SEQ ID NO: 72481 - DNA, 25 bp, Homo sapien
aacgacaaatttggtgttgtactcc

SEQ ID NO: 72482 - DNA, 25 bp, Homo sapien
aacgacaaatttcgtgttgtactcc

SEQ ID NO: 72483 - DNA, 25 bp, Homo sapien
gaagaaatttcgttgtctttatacc

SEQ ID NO: 72484 - DNA, 25 bp, Homo sapien
gaagaaatttcgatgtctttatacc

SEQ ID NO: 72485 - DNA, 25 bp, Homo sapien
acaatttgggtctgtctctactgtc

SEQ ID NO: 72486 - DNA, 25 bp, Homo sapien
acaatttgggtcagtctctactgtc

SEQ ID NO: 72487 - DNA, 25 bp, Homo sapien
tcatgtttggttaacgtcctctctt

SEQ ID NO: 72488 - DNA, 25 bp, Homo sapien
tcatgtttggtttacgtcctctctt

SEQ ID NO: 72489 - DNA, 25 bp, Homo sapien
gttgactagttttacgtcatgttct

SEQ ID NO: 72490 - DNA, 25 bp, Homo sapien
gttgactagtttaacgtcatgttct

SEQ ID NO: 72491 - DNA, 25 bp, Homo sapien
gaagtaacagtttttcctcgacgtg

SEQ ID NO: 72492 - DNA, 25 bp, Homo sapien
gaagtaacagttattcctcgacgtg

SEQ ID NO: 72493 - DNA, 25 bp, Homo sapien
atggttactaagatagccagacggg

SEQ ID NO: 72494 - DNA, 25 bp, Homo sapien
atggttactaagttagccagacggg

SEQ ID NO: 72495 - DNA, 25 bp, Homo sapien
gtagtcgcgcgttctcccgtctggc

SEQ ID NO: 72496 - DNA, 25 bp, Homo sapien
gtagtcgcgcgtactcccgtctggc

SEQ ID NO: 72497 - DNA, 25 bp, Homo sapien
ttttagacattcctttacattgtgg

SEQ ID NO: 72498 - DNA, 25 bp, Homo sapien
ttttagacattcgtttacattgtgg

SEQ ID NO: 72499 - DNA, 25 bp, Homo sapien
ttacgaagacattttacctcttgag

SEQ ID NO: 72500 - DNA, 25 bp, Homo sapien
ttacgaagacatattacctcttgag

SEQ ID NO: 72501 - DNA, 25 bp, Homo sapien
tgactatagtttttttcgactatgg

SEQ ID NO: 72502 - DNA, 25 bp, Homo sapien
tgactatagtttatttcgactatgg

SEQ ID NO: 72503 - DNA, 25 bp, Homo sapien
aagcacttgtcctatcacgtcaggg

SEQ ID NO: 72504 - DNA, 25 bp, Homo sapien
aagcacttgtccaatcacgtcaggg

SEQ ID NO: 72505 - DNA, 25 bp, Homo sapien
attacttgaccttgtactgtaagga

SEQ ID NO: 72506 - DNA, 25 bp, Homo sapien
attacttgacctagtactgtaagga

SEQ ID NO: 72507 - DNA, 25 bp, Homo sapien
taatagacgtgtgtctctatactga

SEQ ID NO: 72508 - DNA, 25 bp, Homo sapien
taatagacgtgtctctctatactga

SEQ ID NO: 72509 - DNA, 25 bp, Homo sapien
cacaaccggtgtacgtcaatataga

SEQ ID NO: 72510 - DNA, 25 bp, Homo sapien
cacaaccggtgttcgtcaatataga

SEQ ID NO: 72511 - DNA, 25 bp, Homo sapien
aagatcgttagttgtctactcaaga

SEQ ID NO: 72512 - DNA, 25 bp, Homo sapien
aagatcgttagtagtctactcaaga

SEQ ID NO: 72513 - DNA, 25 bp, Homo sapien
gaacaacacgatcttacgtacgaaa

SEQ ID NO: 72514 - DNA, 25 bp, Homo sapien
gaacaacacgatgttacgtacgaaa

SEQ ID NO: 72515 - DNA, 25 bp, Homo sapien
ttgtttcagttaagtctttgacaac

SEQ ID NO: 72516 - DNA, 25 bp, Homo sapien
ttgtttcagttatgtctttgacaac

SEQ ID NO: 72517 - DNA, 25 bp, Homo sapien
gtgataagtacgtctcgagtggcaa

SEQ ID NO: 72518 - DNA, 25 bp, Homo sapien
gtgataagtacgactcgagtggcaa

SEQ ID NO: 72519 - DNA, 25 bp, Homo sapien
catagggagatcggtaagtcaccgt

SEQ ID NO: 72520 - DNA, 25 bp, Homo sapien
catagggagatccgtaagtcaccgt

SEQ ID NO: 72521 - DNA, 25 bp, Homo sapien
caataaaagagagaccctcagaccc

SEQ ID NO: 72522 - DNA, 25 bp, Homo sapien
caataaaagagacaccctcagaccc

SEQ ID NO: 72523 - DNA, 25 bp, Homo sapien
gaagaaagaggaatcacccacacac

SEQ ID NO: 72524 - DNA, 25 bp, Homo sapien
gaagaaagaggattcacccacacac

SEQ ID NO: 72525 - DNA, 25 bp, Homo sapien
atgaggagtcggtcccgggtcacac

SEQ ID NO: 72526 - DNA, 25 bp, Homo sapien
atgaggagtcggacccgggtcacac

SEQ ID NO: 72527 - DNA, 25 bp, Homo sapien
agagtctggtagtgcacgagaccac

SEQ ID NO: 72528 - DNA, 25 bp, Homo sapien
agagtctggtagagcacgagaccac

SEQ ID NO: 72529 - DNA, 25 bp, Homo sapien
caagagggatatacctcgagtagaa

SEQ ID NO: 72530 - DNA, 25 bp, Homo sapien
caagagggatattcctcgagtagaa

SEQ ID NO: 72531 - DNA, 25 bp, Homo sapien
ataaagtctggttctttgagtgtcc

SEQ ID NO: 72532 - DNA, 25 bp, Homo sapien
ataaagtctggtactttgagtgtcc

SEQ ID NO: 72533 - DNA, 25 bp, Homo sapien
ttgatgtttgtcgggttcaggactc

SEQ ID NO: 72534 - DNA, 25 bp, Homo sapien
ttgatgtttgtccggttcaggactc

SEQ ID NO: 72535 - DNA, 25 bp, Homo sapien
taggtattagaccatcttacaatgt

SEQ ID NO: 72536 - DNA, 25 bp, Homo sapien
taggtattagacgatcttacaatgt

SEQ ID NO: 72537 - DNA, 25 bp, Homo sapien
gccgtaaacgcgttgtgtccaatgt

SEQ ID NO: 72538 - DNA, 25 bp, Homo sapien
gccgtaaacgcgatgtgtccaatgt

SEQ ID NO: 72539 - DNA, 25 bp, Homo sapien
tgtgtgagacgctaagggtcacgtt

SEQ ID NO: 72540 - DNA, 25 bp, Homo sapien
tgtgtgagacgcaaagggtcacgtt

SEQ ID NO: 72541 - DNA, 25 bp, Homo sapien
tgttaaacgggttgagtgtaccgtc

SEQ ID NO: 72542 - DNA, 25 bp, Homo sapien
tgttaaacgggtagagtgtaccgtc

SEQ ID NO: 72543 - DNA, 25 bp, Homo sapien
tttataagaacgactgtaaacgtac

SEQ ID NO: 72544 - DNA, 25 bp, Homo sapien
tttataagaacgtctgtaaacgtac

SEQ ID NO: 72545 - DNA, 25 bp, Homo sapien
ttttgtgtaccgatacagtaatctt

SEQ ID NO: 72546 - DNA, 25 bp, Homo sapien
ttttgtgtaccgttacagtaatctt

SEQ ID NO: 72547 - DNA, 25 bp, Homo sapien
ttttgttacgaatgtcgtaccgaat

SEQ ID NO: 72548 - DNA, 25 bp, Homo sapien
ttttgttacgaaagtcgtaccgaat

SEQ ID NO: 72549 - DNA, 25 bp, Homo sapien
cttgtttgtgttagagctctaatac

SEQ ID NO: 72550 - DNA, 25 bp, Homo sapien
cttgtttgtgtttgagctctaatac

SEQ ID NO: 72551 - DNA, 25 bp, Homo sapien
gaatttccgtgttttcgtacttata

SEQ ID NO: 72552 - DNA, 25 bp, Homo sapien
gaatttccgtgtattcgtacttata

SEQ ID NO: 72553 - DNA, 25 bp, Homo sapien
cgatatgttcagaaatcttttatcg

SEQ ID NO: 72554 - DNA, 25 bp, Homo sapien
cgatatgttcagtaatcttttatcg

SEQ ID NO: 72555 - DNA, 25 bp, Homo sapien
gacggagaccttacccgaaaagaga

SEQ ID NO: 72556 - DNA, 25 bp, Homo sapien
gacggagacctttcccgaaaagaga

SEQ ID NO: 72557 - DNA, 25 bp, Homo sapien
gacgaccggacgactaccaagagaa

SEQ ID NO: 72558 - DNA, 25 bp, Homo sapien
gacgaccggacgtctaccaagagaa

SEQ ID NO: 72559 - DNA, 25 bp, Homo sapien
acagtgaaccactaccacaagcgca

SEQ ID NO: 72560 - DNA, 25 bp, Homo sapien
acagtgaaccacaaccacaagcgca

SEQ ID NO: 72561 - DNA, 25 bp, Homo sapien
caccagaacccgaccaaggaggagt

SEQ ID NO: 72562 - DNA, 25 bp, Homo sapien
caccagaacccgtccaaggaggagt

SEQ ID NO: 72563 - DNA, 25 bp, Homo sapien
cacgtgaaataaccaagactatgtc

SEQ ID NO: 72564 - DNA, 25 bp, Homo sapien
cacgtgaaataagcaagactatgtc

SEQ ID NO: 72565 - DNA, 25 bp, Homo sapien
ccgcggttacgacagcaaataacgc

SEQ ID NO: 72566 - DNA, 25 bp, Homo sapien
ccgcggttacgagagcaaataacgc

SEQ ID NO: 72567 - DNA, 25 bp, Homo sapien
aaacggtacccaccttagtataacc

SEQ ID NO: 72568 - DNA, 25 bp, Homo sapien
aaacggtacccagcttagtataacc

SEQ ID NO: 72569 - DNA, 25 bp, Homo sapien
gacagtccaggagtcgttacatact

SEQ ID NO: 72570 - DNA, 25 bp, Homo sapien
gacagtccaggactcgttacatact

SEQ ID NO: 72571 - DNA, 25 bp, Homo sapien
ttacgaacacaggtttcttagtctc

SEQ ID NO: 72572 - DNA, 25 bp, Homo sapien
ttacgaacacagctttcttagtctc

SEQ ID NO: 72573 - DNA, 25 bp, Homo sapien
ttagaaattacgaatgttttcgtcc

SEQ ID NO: 72574 - DNA, 25 bp, Homo sapien
ttagaaattacgtatgttttcgtcc

SEQ ID NO: 72575 - DNA, 25 bp, Homo sapien
gaactttagatggtgtctcagttct

SEQ ID NO: 72576 - DNA, 25 bp, Homo sapien
gaactttagatgctgtctcagttct

SEQ ID NO: 72577 - DNA, 25 bp, Homo sapien
tgttcattctttttcatttattact

SEQ ID NO: 72578 - DNA, 25 bp, Homo sapien
tgttcattctttatcatttattact

SEQ ID NO: 72579 - DNA, 25 bp, Homo sapien
gacctggattattaagttatctctt

SEQ ID NO: 72580 - DNA, 25 bp, Homo sapien
gacctggattataaagttatctctt

SEQ ID NO: 72581 - DNA, 25 bp, Homo sapien
ccttggtataacgattacgacgtaa

SEQ ID NO: 72582 - DNA, 25 bp, Homo sapien
ccttggtataaccattacgacgtaa

SEQ ID NO: 72583 - DNA, 25 bp, Homo sapien
tggtactgcattccatgtagaactt

SEQ ID NO: 72584 - DNA, 25 bp, Homo sapien
tggtactgcattgcatgtagaactt

SEQ ID NO: 72585 - DNA, 25 bp, Homo sapien
cgtgttactcattggacttcatctt

SEQ ID NO: 72586 - DNA, 25 bp, Homo sapien
cgtgttactcataggacttcatctt

SEQ ID NO: 72587 - DNA, 25 bp, Homo sapien
gtggggtctataaaaacccctcttc

SEQ ID NO: 72588 - DNA, 25 bp, Homo sapien
gtggggtctatataaacccctcttc

SEQ ID NO: 72589 - DNA, 25 bp, Homo sapien
ggctggaccgggacgacccttcatg

SEQ ID NO: 72590 - DNA, 25 bp, Homo sapien
ggctggaccgggtcgacccttcatg

SEQ ID NO: 72591 - DNA, 25 bp, Homo sapien
aaaggaacaccacgaaccgaaagtc

SEQ ID NO: 72592 - DNA, 25 bp, Homo sapien
aaaggaacaccaggaaccgaaagtc

SEQ ID NO: 72593 - DNA, 25 bp, Homo sapien
gggaggacaccaagtcaccattatc

SEQ ID NO: 72594 - DNA, 25 bp, Homo sapien
gggaggacaccatgtcaccattatc

SEQ ID NO: 72595 - DNA, 25 bp, Homo sapien
gtctggggaaaggtcaccctacttt

SEQ ID NO: 72596 - DNA, 25 bp, Homo sapien
gtctggggaaagctcaccctacttt

SEQ ID NO: 72597 - DNA, 25 bp, Homo sapien
ctggtcaattattcagactgtttgt

SEQ ID NO: 72598 - DNA, 25 bp, Homo sapien
ctggtcaattatacagactgtttgt

SEQ ID NO: 72599 - DNA, 25 bp, Homo sapien
tggacaaggttcttttcgacgatgt

SEQ ID NO: 72600 - DNA, 25 bp, Homo sapien
tggacaaggttcatttcgacgatgt

SEQ ID NO: 72601 - DNA, 25 bp, Homo sapien
ttctccgaggagttcagggacggaa

SEQ ID NO: 72602 - DNA, 25 bp, Homo sapien
ttctccgaggagatcagggacggaa

SEQ ID NO: 72603 - DNA, 25 bp, Homo sapien
acccagggacgcaacggggagatct

SEQ ID NO: 72604 - DNA, 25 bp, Homo sapien
acccagggacgctacggggagatct

SEQ ID NO: 72605 - DNA, 25 bp, Homo sapien
acgaagtaacacgaggtacggtaaa

SEQ ID NO: 72606 - DNA, 25 bp, Homo sapien
acgaagtaacaccaggtacggtaaa

SEQ ID NO: 72607 - DNA, 25 bp, Homo sapien
ctaatatagaacgagtgtcaacata

SEQ ID NO: 72608 - DNA, 25 bp, Homo sapien
ctaatatagaaccagtgtcaacata

SEQ ID NO: 72609 - DNA, 25 bp, Homo sapien
gaattcttacgaccaaacaaagtcg

SEQ ID NO: 72610 - DNA, 25 bp, Homo sapien
gaattcttacgagcaaacaaagtcg

SEQ ID NO: 72611 - DNA, 25 bp, Homo sapien
tactaaactaggaccttcattgacg

SEQ ID NO: 72612 - DNA, 25 bp, Homo sapien
tactaaactaggtccttcattgacg

SEQ ID NO: 72613 - DNA, 25 bp, Homo sapien
aataaacgtaagtccgttcatgaga

SEQ ID NO: 72614 - DNA, 25 bp, Homo sapien
aataaacgtaagaccgttcatgaga

SEQ ID NO: 72615 - DNA, 25 bp, Homo sapien
aagacgacgacaacggcctaaagta

SEQ ID NO: 72616 - DNA, 25 bp, Homo sapien
aagacgacgacatcggcctaaagta

SEQ ID NO: 72617 - DNA, 25 bp, Homo sapien
aatagtaccgacgtagtttacaatg

SEQ ID NO: 72618 - DNA, 25 bp, Homo sapien
aatagtaccgacctagtttacaatg

SEQ ID NO: 72619 - DNA, 25 bp, Homo sapien
ttaatatactgtcctgtattcctgg

SEQ ID NO: 72620 - DNA, 25 bp, Homo sapien
ttaatatactgtgctgtattcctgg

SEQ ID NO: 72621 - DNA, 25 bp, Homo sapien
cgggtacctacgtttacttacttaa

SEQ ID NO: 72622 - DNA, 25 bp, Homo sapien
cgggtacctacgattacttacttaa

SEQ ID NO: 72623 - DNA, 25 bp, Homo sapien
ttgagtgtaccgtctatcaccgcct

SEQ ID NO: 72624 - DNA, 25 bp, Homo sapien
ttgagtgtaccgactatcaccgcct

SEQ ID NO: 72625 - DNA, 25 bp, Homo sapien
tactgataaggtatccgtctcgacc

SEQ ID NO: 72626 - DNA, 25 bp, Homo sapien
tactgataaggtttccgtctcgacc

SEQ ID NO: 72627 - DNA, 25 bp, Homo sapien
agtaatgaggtgtcactcctactat

SEQ ID NO: 72628 - DNA, 25 bp, Homo sapien
agtaatgaggtgacactcctactat

SEQ ID NO: 72629 - DNA, 25 bp, Homo sapien
aacgaaagtagacttcgttactcag

SEQ ID NO: 72630 - DNA, 25 bp, Homo sapien
aacgaaagtagagttcgttactcag

SEQ ID NO: 72631 - DNA, 25 bp, Homo sapien
caccgaaccatacctgtgttagagg

SEQ ID NO: 72632 - DNA, 25 bp, Homo sapien
caccgaaccatagctgtgttagagg

SEQ ID NO: 72633 - DNA, 25 bp, Homo sapien
aaaagacacataactcgtgttagaa

SEQ ID NO: 72634 - DNA, 25 bp, Homo sapien
aaaagacacatatctcgtgttagaa

SEQ ID NO: 72635 - DNA, 25 bp, Homo sapien
cagacagagtaggtgttatacacta

SEQ ID NO: 72636 - DNA, 25 bp, Homo sapien
cagacagagtagctgttatacacta

SEQ ID NO: 72637 - DNA, 25 bp, Homo sapien
tgtgtccattcgtgtatgactaaca

SEQ ID NO: 72638 - DNA, 25 bp, Homo sapien
tgtgtccattcgagtatgactaaca

SEQ ID NO: 72639 - DNA, 25 bp, Homo sapien
agttgtccttcctacaagaagaggt

SEQ ID NO: 72640 - DNA, 25 bp, Homo sapien
agttgtccttccaacaagaagaggt

SEQ ID NO: 72641 - DNA, 25 bp, Homo sapien
tagttatctttcttctgcaagagcc

SEQ ID NO: 72642 - DNA, 25 bp, Homo sapien
tagttatctttcatctgcaagagcc

SEQ ID NO: 72643 - DNA, 25 bp, Homo sapien
atgttcgtttcacactcatatgtgc

SEQ ID NO: 72644 - DNA, 25 bp, Homo sapien
atgttcgtttcagactcatatgtgc

SEQ ID NO: 72645 - DNA, 25 bp, Homo sapien
atttcgtctgtgttggtgattgtcc

SEQ ID NO: 72646 - DNA, 25 bp, Homo sapien
atttcgtctgtgatggtgattgtcc

SEQ ID NO: 72647 - DNA, 25 bp, Homo sapien
cacaatttagaggttcttagtcgga

SEQ ID NO: 72648 - DNA, 25 bp, Homo sapien
cacaatttagagcttcttagtcgga

SEQ ID NO: 72649 - DNA, 25 bp, Homo sapien
gaacggtcggagatctctttagggt

SEQ ID NO: 72650 - DNA, 25 bp, Homo sapien
gaacggtcggagttctctttagggt

SEQ ID NO: 72651 - DNA, 25 bp, Homo sapien
acttcaacacctaagttgatcggtc

SEQ ID NO: 72652 - DNA, 25 bp, Homo sapien
acttcaacaccttagttgatcggtc

SEQ ID NO: 72653 - DNA, 25 bp, Homo sapien
gatacaatcagtgtagtcccttact

SEQ ID NO: 72654 - DNA, 25 bp, Homo sapien
gatacaatcagtctagtcccttact

SEQ ID NO: 72655 - DNA, 25 bp, Homo sapien
tcacaatttagactcggggtgacgt

SEQ ID NO: 72656 - DNA, 25 bp, Homo sapien
tcacaatttagagtcggggtgacgt

SEQ ID NO: 72657 - DNA, 25 bp, Homo sapien
ctgatgaaactaagcactttgttac

SEQ ID NO: 72658 - DNA, 25 bp, Homo sapien
ctgatgaaactatgcactttgttac

SEQ ID NO: 72659 - DNA, 25 bp, Homo sapien
cgttaagaccattgagttgtttaca

SEQ ID NO: 72660 - DNA, 25 bp, Homo sapien
cgttaagaccatagagttgtttaca

SEQ ID NO: 72661 - DNA, 25 bp, Homo sapien
cgaaaggacttagaggtttgtcttc

SEQ ID NO: 72662 - DNA, 25 bp, Homo sapien
cgaaaggacttacaggtttgtcttc

SEQ ID NO: 72663 - DNA, 25 bp, Homo sapien
acaatcctctcaggtattagtcttg

SEQ ID NO: 72664 - DNA, 25 bp, Homo sapien
acaatcctctcacgtattagtcttg

SEQ ID NO: 72665 - DNA, 25 bp, Homo sapien
tcggtataatgtttgtaacagtccc

SEQ ID NO: 72666 - DNA, 25 bp, Homo sapien
tcggtataatgtatgtaacagtccc

SEQ ID NO: 72667 - DNA, 25 bp, Homo sapien
tatgttagaaaatacctagaacacg

SEQ ID NO: 72668 - DNA, 25 bp, Homo sapien
tatgttagaaaaaacctagaacacg

SEQ ID NO: 72669 - DNA, 25 bp, Homo sapien
aagcgataaaacgtttactctaaga

SEQ ID NO: 72670 - DNA, 25 bp, Homo sapien
aagcgataaaacctttactctaaga

SEQ ID NO: 72671 - DNA, 25 bp, Homo sapien
taaggacaatccttgtgttcaacga

SEQ ID NO: 72672 - DNA, 25 bp, Homo sapien
taaggacaatccatgtgttcaacga

SEQ ID NO: 72673 - DNA, 25 bp, Homo sapien
cgaacacacacttgggtctcaacat

SEQ ID NO: 72674 - DNA, 25 bp, Homo sapien
cgaacacacactagggtctcaacat

SEQ ID NO: 72675 - DNA, 25 bp, Homo sapien
tcttcaaactaaggatctgtgactt

SEQ ID NO: 72676 - DNA, 25 bp, Homo sapien
tcttcaaactaacgatctgtgactt

SEQ ID NO: 72677 - DNA, 25 bp, Homo sapien
gatttttgaaaatgacttcgacctc

SEQ ID NO: 72678 - DNA, 25 bp, Homo sapien
gatttttgaaaaagacttcgacctc

SEQ ID NO: 72679 - DNA, 25 bp, Homo sapien
cctcgagtgacaaaggattgccact

SEQ ID NO: 72680 - DNA, 25 bp, Homo sapien
cctcgagtgacataggattgccact

SEQ ID NO: 72681 - DNA, 25 bp, Homo sapien
cctcaggtgccttggggtcaccact

SEQ ID NO: 72682 - DNA, 25 bp, Homo sapien
cctcaggtgcctaggggtcaccact

SEQ ID NO: 72683 - DNA, 25 bp, Homo sapien
ggacgtggtccagagtcctacccta

SEQ ID NO: 72684 - DNA, 25 bp, Homo sapien
ggacgtggtccacagtcctacccta

SEQ ID NO: 72685 - DNA, 25 bp, Homo sapien
gtcgagcacggagagccgaacttct

SEQ ID NO: 72686 - DNA, 25 bp, Homo sapien
gtcgagcacggacagccgaacttct

SEQ ID NO: 72687 - DNA, 25 bp, Homo sapien
tctagcaaggacgacccgaggtgtt

SEQ ID NO: 72688 - DNA, 25 bp, Homo sapien
tctagcaaggaccacccgaggtgtt

SEQ ID NO: 72689 - DNA, 25 bp, Homo sapien
cgaaagagtcacacgccgacgtttt

SEQ ID NO: 72690 - DNA, 25 bp, Homo sapien
cgaaagagtcactcgccgacgtttt

SEQ ID NO: 72691 - DNA, 25 bp, Homo sapien
ggactgtacattttgtacacgacgt

SEQ ID NO: 72692 - DNA, 25 bp, Homo sapien
ggactgtacattatgtacacgacgt

SEQ ID NO: 72693 - DNA, 25 bp, Homo sapien
tccgatacttgtagtgtctacgtac

SEQ ID NO: 72694 - DNA, 25 bp, Homo sapien
tccgatacttgttgtgtctacgtac

SEQ ID NO: 72695 - DNA, 25 bp, Homo sapien
agaaccactactggaactcgtcatc

SEQ ID NO: 72696 - DNA, 25 bp, Homo sapien
agaaccactactcgaactcgtcatc

SEQ ID NO: 72697 - DNA, 25 bp, Homo sapien
gagaactgtagacgaaccgtctctt

SEQ ID NO: 72698 - DNA, 25 bp, Homo sapien
gagaactgtagaggaaccgtctctt

SEQ ID NO: 72699 - DNA, 25 bp, Homo sapien
gacacaggattagagaaacgacctt

SEQ ID NO: 72700 - DNA, 25 bp, Homo sapien
gacacaggattacagaaacgacctt

SEQ ID NO: 72701 - DNA, 25 bp, Homo sapien
gagaaaggttataggtcagacagtg

SEQ ID NO: 72702 - DNA, 25 bp, Homo sapien
gagaaaggttattggtcagacagtg

SEQ ID NO: 72703 - DNA, 25 bp, Homo sapien
ataacagggctcgtgtctgagcggt

SEQ ID NO: 72704 - DNA, 25 bp, Homo sapien
ataacagggctcctgtctgagcggt

SEQ ID NO: 72705 - DNA, 25 bp, Homo sapien
tcacaaagggttttgtctgaactat

SEQ ID NO: 72706 - DNA, 25 bp, Homo sapien
tcacaaagggttatgtctgaactat

SEQ ID NO: 72707 - DNA, 25 bp, Homo sapien
aacagatgaccctttagtaaaaagt

SEQ ID NO: 72708 - DNA, 25 bp, Homo sapien
aacagatgacccattagtaaaaagt

SEQ ID NO: 72709 - DNA, 25 bp, Homo sapien
gtaagggatctccattacgaaaatt

SEQ ID NO: 72710 - DNA, 25 bp, Homo sapien
gtaagggatctcgattacgaaaatt

SEQ ID NO: 72711 - DNA, 25 bp, Homo sapien
gtaacagaaaacaatcctcagtttg

SEQ ID NO: 72712 - DNA, 25 bp, Homo sapien
gtaacagaaaactatcctcagtttg

SEQ ID NO: 72713 - DNA, 25 bp, Homo sapien
gtaaaagaaaccttgtttaattctt

SEQ ID NO: 72714 - DNA, 25 bp, Homo sapien
gtaaaagaaaccatgtttaattctt

SEQ ID NO: 72715 - DNA, 25 bp, Homo sapien
aacaaaacgggactactgtagtttg

SEQ ID NO: 72716 - DNA, 25 bp, Homo sapien
aacaaaacgggagtactgtagtttg

SEQ ID NO: 72717 - DNA, 25 bp, Homo sapien
accccgacggcagagacgaggttcg

SEQ ID NO: 72718 - DNA, 25 bp, Homo sapien
accccgacggcacagacgaggttcg

SEQ ID NO: 72719 - DNA, 25 bp, Homo sapien
cccaggtgtcgctgtcgactctcgg

SEQ ID NO: 72720 - DNA, 25 bp, Homo sapien
cccaggtgtcgcagtcgactctcgg

SEQ ID NO: 72721 - DNA, 25 bp, Homo sapien
gcaacgacacggaccggtccttgag

SEQ ID NO: 72722 - DNA, 25 bp, Homo sapien
gcaacgacacggtccggtccttgag

SEQ ID NO: 72723 - DNA, 25 bp, Homo sapien
gtggacggaccctccggaccggtca

SEQ ID NO: 72724 - DNA, 25 bp, Homo sapien
gtggacggacccaccggaccggtca

SEQ ID NO: 72725 - DNA, 25 bp, Homo sapien
ctactcgtcttcgtacgccgtcgag

SEQ ID NO: 72726 - DNA, 25 bp, Homo sapien
ctactcgtcttcctacgccgtcgag

SEQ ID NO: 72727 - DNA, 25 bp, Homo sapien
ttggactaccattaatcgaccgaag

SEQ ID NO: 72728 - DNA, 25 bp, Homo sapien
ttggactaccataaatcgaccgaag

SEQ ID NO: 72729 - DNA, 25 bp, Homo sapien
gtcgacatacaaacgatacaccatg

SEQ ID NO: 72730 - DNA, 25 bp, Homo sapien
gtcgacatacaatcgatacaccatg

SEQ ID NO: 72731 - DNA, 25 bp, Homo sapien
ttgtgtgaccaagtggaacctccgt

SEQ ID NO: 72732 - DNA, 25 bp, Homo sapien
ttgtgtgaccaactggaacctccgt

SEQ ID NO: 72733 - DNA, 25 bp, Homo sapien
aagggtcgaaaactcacggaccttc

SEQ ID NO: 72734 - DNA, 25 bp, Homo sapien
aagggtcgaaaagtcacggaccttc

SEQ ID NO: 72735 - DNA, 25 bp, Homo sapien
cggtagtcttttattcctgaatcta

SEQ ID NO: 72736 - DNA, 25 bp, Homo sapien
cggtagtctttttttcctgaatcta

SEQ ID NO: 72737 - DNA, 25 bp, Homo sapien
cactcaagtatatggcccagaagtg

SEQ ID NO: 72738 - DNA, 25 bp, Homo sapien
cactcaagtataaggcccagaagtg

SEQ ID NO: 72739 - DNA, 25 bp, Homo sapien
gaatacgggtaaggttccgaaggtc

SEQ ID NO: 72740 - DNA, 25 bp, Homo sapien
gaatacgggtaacgttccgaaggtc

SEQ ID NO: 72741 - DNA, 25 bp, Homo sapien
ctccgtcgtgtttgtactgcaagag

SEQ ID NO: 72742 - DNA, 25 bp, Homo sapien
ctccgtcgtgttagtactgcaagag

SEQ ID NO: 72743 - DNA, 25 bp, Homo sapien
acgttagtggcttaactaggtcagc

SEQ ID NO: 72744 - DNA, 25 bp, Homo sapien
acgttagtggctaaactaggtcagc

SEQ ID NO: 72745 - DNA, 25 bp, Homo sapien
ggagtggtactaaactccgatgact

SEQ ID NO: 72746 - DNA, 25 bp, Homo sapien
ggagtggtactatactccgatgact

SEQ ID NO: 72747 - DNA, 25 bp, Homo sapien
ggtttagtcagtagaaccggacttc

SEQ ID NO: 72748 - DNA, 25 bp, Homo sapien
ggtttagtcagttgaaccggacttc

SEQ ID NO: 72749 - DNA, 25 bp, Homo sapien
gtatatgtatctattgtcccaccag

SEQ ID NO: 72750 - DNA, 25 bp, Homo sapien
gtatatgtatcttttgtcccaccag

SEQ ID NO: 72751 - DNA, 25 bp, Homo sapien
cgtatgtgtatgttcttcatcccct

SEQ ID NO: 72752 - DNA, 25 bp, Homo sapien
cgtatgtgtatgatcttcatcccct

SEQ ID NO: 72753 - DNA, 25 bp, Homo sapien
ttctgttgtctggtcaggaccctcc

SEQ ID NO: 72754 - DNA, 25 bp, Homo sapien
ttctgttgtctgctcaggaccctcc

SEQ ID NO: 72755 - DNA, 25 bp, Homo sapien
gggtccttcttccttggtcacccag

SEQ ID NO: 72756 - DNA, 25 bp, Homo sapien
gggtccttcttcgttggtcacccag

SEQ ID NO: 72757 - DNA, 25 bp, Homo sapien
cttcaggatatttggtctccctcac

SEQ ID NO: 72758 - DNA, 25 bp, Homo sapien
cttcaggatattaggtctccctcac

SEQ ID NO: 72759 - DNA, 25 bp, Homo sapien
acgttcaaagtttcggttttcttaa

SEQ ID NO: 72760 - DNA, 25 bp, Homo sapien
acgttcaaagttacggttttcttaa

SEQ ID NO: 72761 - DNA, 25 bp, Homo sapien
tatgattcaccgtttacgataagat

SEQ ID NO: 72762 - DNA, 25 bp, Homo sapien
tatgattcaccgattacgataagat

SEQ ID NO: 72763 - DNA, 25 bp, Homo sapien
catctatttctttacatccataaga

SEQ ID NO: 72764 - DNA, 25 bp, Homo sapien
catctatttcttaacatccataaga

SEQ ID NO: 72765 - DNA, 25 bp, Homo sapien
atttattcgacgatcgtcatagtaa

SEQ ID NO: 72766 - DNA, 25 bp, Homo sapien
atttattcgacgttcgtcatagtaa

SEQ ID NO: 72767 - DNA, 25 bp, Homo sapien
tttagacacaacaccccggtgtatc

SEQ ID NO: 72768 - DNA, 25 bp, Homo sapien
tttagacacaactccccggtgtatc

SEQ ID NO: 72769 - DNA, 25 bp, Homo sapien
gacgaccgtcagacccgtgacagtc

SEQ ID NO: 72770 - DNA, 25 bp, Homo sapien
gacgaccgtcagtcccgtgacagtc

SEQ ID NO: 72771 - DNA, 25 bp, Homo sapien
gagtattacagattccgtcgataat

SEQ ID NO: 72772 - DNA, 25 bp, Homo sapien
gagtattacagaatccgtcgataat

SEQ ID NO: 72773 - DNA, 25 bp, Homo sapien
gactcctgtgactgtcctttagtgt

SEQ ID NO: 72774 - DNA, 25 bp, Homo sapien
gactcctgtgacagtcctttagtgt

SEQ ID NO: 72775 - DNA, 25 bp, Homo sapien
aaggatgttctttacgtgtccataa

SEQ ID NO: 72776 - DNA, 25 bp, Homo sapien
aaggatgttcttaacgtgtccataa

SEQ ID NO: 72777 - DNA, 25 bp, Homo sapien
cgacaggtctttctaaatgtcaata

SEQ ID NO: 72778 - DNA, 25 bp, Homo sapien
cgacaggtctttgtaaatgtcaata

SEQ ID NO: 72779 - DNA, 25 bp, Homo sapien
aaggttgacgtctttcccgtaaatt

SEQ ID NO: 72780 - DNA, 25 bp, Homo sapien
aaggttgacgtcattcccgtaaatt

SEQ ID NO: 72781 - DNA, 25 bp, Homo sapien
acgtgttctgtctgacttggtttca

SEQ ID NO: 72782 - DNA, 25 bp, Homo sapien
acgtgttctgtcagacttggtttca

SEQ ID NO: 72783 - DNA, 25 bp, Homo sapien
gagaacataggcagattgggtccta

SEQ ID NO: 72784 - DNA, 25 bp, Homo sapien
gagaacataggctgattgggtccta

SEQ ID NO: 72785 - DNA, 25 bp, Homo sapien
aataagtatgacaagatccgggaca

SEQ ID NO: 72786 - DNA, 25 bp, Homo sapien
aataagtatgactagatccgggaca

SEQ ID NO: 72787 - DNA, 25 bp, Homo sapien
aaagactttctttagataccaaaat

SEQ ID NO: 72788 - DNA, 25 bp, Homo sapien
aaagactttcttaagataccaaaat

SEQ ID NO: 72789 - DNA, 25 bp, Homo sapien
caaatatgtctgaagttttccagat

SEQ ID NO: 72790 - DNA, 25 bp, Homo sapien
caaatatgtctgtagttttccagat

SEQ ID NO: 72791 - DNA, 25 bp, Homo sapien
gacacaagaccttgtcgagaggaaa

SEQ ID NO: 72792 - DNA, 25 bp, Homo sapien
gacacaagacctagtcgagaggaaa

SEQ ID NO: 72793 - DNA, 25 bp, Homo sapien
acaacaacatcttggtgactgacga

SEQ ID NO: 72794 - DNA, 25 bp, Homo sapien
acaacaacatctaggtgactgacga

SEQ ID NO: 72795 - DNA, 25 bp, Homo sapien
aagtagtaaccttaaggaacttcag

SEQ ID NO: 72796 - DNA, 25 bp, Homo sapien
aagtagtaacctaaaggaacttcag

SEQ ID NO: 72797 - DNA, 25 bp, Homo sapien
aacgagtgacgatgatcgtacggta

SEQ ID NO: 72798 - DNA, 25 bp, Homo sapien
aacgagtgacgaagatcgtacggta

SEQ ID NO: 72799 - DNA, 25 bp, Homo sapien
tataaccaactttcgaaacggtgta

SEQ ID NO: 72800 - DNA, 25 bp, Homo sapien
tataaccaacttacgaaacggtgta

SEQ ID NO: 72801 - DNA, 25 bp, Homo sapien
ttgcgcaccctgaactacagtcttt

SEQ ID NO: 72802 - DNA, 25 bp, Homo sapien
ttgcgcaccctgtactacagtcttt

SEQ ID NO: 72803 - DNA, 25 bp, Homo sapien
tcgcccttactactatactcgtttt

SEQ ID NO: 72804 - DNA, 25 bp, Homo sapien
tcgcccttactagtatactcgtttt

SEQ ID NO: 72805 - DNA, 25 bp, Homo sapien
ctaccactagaagtactggtcaact

SEQ ID NO: 72806 - DNA, 25 bp, Homo sapien
ctaccactagaactactggtcaact

SEQ ID NO: 72807 - DNA, 25 bp, Homo sapien
agccaagagtgagaaccgaagactt

SEQ ID NO: 72808 - DNA, 25 bp, Homo sapien
agccaagagtgacaaccgaagactt

SEQ ID NO: 72809 - DNA, 25 bp, Homo sapien
gagaactctaggttgtagttcgatc

SEQ ID NO: 72810 - DNA, 25 bp, Homo sapien
gagaactctaggatgtagttcgatc

SEQ ID NO: 72811 - DNA, 25 bp, Homo sapien
tagatacattgaacgcttagtctag

SEQ ID NO: 72812 - DNA, 25 bp, Homo sapien
tagatacattgatcgcttagtctag

SEQ ID NO: 72813 - DNA, 25 bp, Homo sapien
actcaaggacgatgcccatcttcag

SEQ ID NO: 72814 - DNA, 25 bp, Homo sapien
actcaaggacgaagcccatcttcag

SEQ ID NO: 72815 - DNA, 25 bp, Homo sapien
agtaaggagtcaaacacccttcaac

SEQ ID NO: 72816 - DNA, 25 bp, Homo sapien
agtaaggagtcatacacccttcaac

SEQ ID NO: 72817 - DNA, 25 bp, Homo sapien
ggaggagcgtcatcaacccgctgaa

SEQ ID NO: 72818 - DNA, 25 bp, Homo sapien
ggaggagcgtcaacaacccgctgaa

SEQ ID NO: 72819 - DNA, 25 bp, Homo sapien
tcgtagatgccaactcttctgtctt

SEQ ID NO: 72820 - DNA, 25 bp, Homo sapien
tcgtagatgccatctcttctgtctt

SEQ ID NO: 72821 - DNA, 25 bp, Homo sapien
ttgtgtctcgggtctatacaaatgt

SEQ ID NO: 72822 - DNA, 25 bp, Homo sapien
ttgtgtctcgggactatacaaatgt

SEQ ID NO: 72823 - DNA, 25 bp, Homo sapien
tttgactagtgtctcttaaacatag

SEQ ID NO: 72824 - DNA, 25 bp, Homo sapien
tttgactagtgtgtcttaaacatag

SEQ ID NO: 72825 - DNA, 25 bp, Homo sapien
gattctagtacagtcactcaagtta

SEQ ID NO: 72826 - DNA, 25 bp, Homo sapien
gattctagtacactcactcaagtta

SEQ ID NO: 72827 - DNA, 25 bp, Homo sapien
atttcgatacacttacggcaggaag

SEQ ID NO: 72828 - DNA, 25 bp, Homo sapien
atttcgatacacatacggcaggaag

SEQ ID NO: 72829 - DNA, 25 bp, Homo sapien
aagtcacctgacaaggtcgaataat

SEQ ID NO: 72830 - DNA, 25 bp, Homo sapien
aagtcacctgactaggtcgaataat

SEQ ID NO: 72831 - DNA, 25 bp, Homo sapien
ttactcttggagttgtcggtatcaa

SEQ ID NO: 72832 - DNA, 25 bp, Homo sapien
ttactcttggagatgtcggtatcaa

SEQ ID NO: 72833 - DNA, 25 bp, Homo sapien
tcatcctccgagttttcggttcgga

SEQ ID NO: 72834 - DNA, 25 bp, Homo sapien
tcatcctccgagatttcggttcgga

SEQ ID NO: 72835 - DNA, 25 bp, Homo sapien
tccgaagagagtgtaccttcgctat

SEQ ID NO: 72836 - DNA, 25 bp, Homo sapien
tccgaagagagtctaccttcgctat

SEQ ID NO: 72837 - DNA, 25 bp, Homo sapien
gcgagtcccgggtaccagtcgtgtc

SEQ ID NO: 72838 - DNA, 25 bp, Homo sapien
gcgagtcccgggaaccagtcgtgtc

SEQ ID NO: 72839 - DNA, 25 bp, Homo sapien
tggtactacggagagacccgtggtt

SEQ ID NO: 72840 - DNA, 25 bp, Homo sapien
tggtactacggacagacccgtggtt

SEQ ID NO: 72841 - DNA, 25 bp, Homo sapien
gactcggacgcctctctcatcgggg

SEQ ID NO: 72842 - DNA, 25 bp, Homo sapien
gactcggacgccactctcatcgggg

SEQ ID NO: 72843 - DNA, 25 bp, Homo sapien
gtattcactccgaagtctttcagga

SEQ ID NO: 72844 - DNA, 25 bp, Homo sapien
gtattcactccgtagtctttcagga

SEQ ID NO: 72845 - DNA, 25 bp, Homo sapien
ggtcctcctctgtgggttccgcgac

SEQ ID NO: 72846 - DNA, 25 bp, Homo sapien
ggtcctcctctgagggttccgcgac

SEQ ID NO: 72847 - DNA, 25 bp, Homo sapien
gggtctgccctcagggacccgtgac

SEQ ID NO: 72848 - DNA, 25 bp, Homo sapien
gggtctgccctctgggacccgtgac

SEQ ID NO: 72849 - DNA, 25 bp, Homo sapien
gcttggttcccttcgggaaactgat

SEQ ID NO: 72850 - DNA, 25 bp, Homo sapien
gcttggttccctacgggaaactgat

SEQ ID NO: 72851 - DNA, 25 bp, Homo sapien
aatgaaccattttaggtcactgtag

SEQ ID NO: 72852 - DNA, 25 bp, Homo sapien
aatgaaccatttaaggtcactgtag

SEQ ID NO: 72853 - DNA, 25 bp, Homo sapien
tcgagacgttaactgtcactaaatt

SEQ ID NO: 72854 - DNA, 25 bp, Homo sapien
tcgagacgttaagtgtcactaaatt

SEQ ID NO: 72855 - DNA, 25 bp, Homo sapien
cagtaaagtgacataagacactgat

SEQ ID NO: 72856 - DNA, 25 bp, Homo sapien
cagtaaagtgacttaagacactgat

SEQ ID NO: 72857 - DNA, 25 bp, Homo sapien
ctggcaccaaggtatggactcttct

SEQ ID NO: 72858 - DNA, 25 bp, Homo sapien
ctggcaccaaggaatggactcttct

SEQ ID NO: 72859 - DNA, 25 bp, Homo sapien
aagggaccctttattcttattctag

SEQ ID NO: 72860 - DNA, 25 bp, Homo sapien
aagggacccttttttcttattctag

SEQ ID NO: 72861 - DNA, 25 bp, Homo sapien
agtgggtgtccgtggtttttctccg

SEQ ID NO: 72862 - DNA, 25 bp, Homo sapien
agtgggtgtccgaggtttttctccg

SEQ ID NO: 72863 - DNA, 25 bp, Homo sapien
gggactgctgaaaggtatcctctgc

SEQ ID NO: 72864 - DNA, 25 bp, Homo sapien
gggactgctgaatggtatcctctgc

SEQ ID NO: 72865 - DNA, 25 bp, Homo sapien
ggtttgctagaaggttccgaaggac

SEQ ID NO: 72866 - DNA, 25 bp, Homo sapien
ggtttgctagaacgttccgaaggac

SEQ ID NO: 72867 - DNA, 25 bp, Homo sapien
cgcgacgtcgggacctacgtggtca

SEQ ID NO: 72868 - DNA, 25 bp, Homo sapien
cgcgacgtcgggtcctacgtggtca

SEQ ID NO: 72869 - DNA, 25 bp, Homo sapien
gactcctgaagtttctctgtagcat

SEQ ID NO: 72870 - DNA, 25 bp, Homo sapien
gactcctgaagtatctctgtagcat

SEQ ID NO: 72871 - DNA, 25 bp, Homo sapien
tagagaacggatgtattcctactgt

SEQ ID NO: 72872 - DNA, 25 bp, Homo sapien
tagagaacggatctattcctactgt

SEQ ID NO: 72873 - DNA, 25 bp, Homo sapien
accaaacaagacaccgggtcaactt

SEQ ID NO: 72874 - DNA, 25 bp, Homo sapien
accaaacaagactccgggtcaactt

SEQ ID NO: 72875 - DNA, 25 bp, Homo sapien
gataaacaccctgtcgtacctactg

SEQ ID NO: 72876 - DNA, 25 bp, Homo sapien
gataaacaccctctcgtacctactg

SEQ ID NO: 72877 - DNA, 25 bp, Homo sapien
gcgtacacgacgtccgtcgaggctg

SEQ ID NO: 72878 - DNA, 25 bp, Homo sapien
gcgtacacgacgaccgtcgaggctg

SEQ ID NO: 72879 - DNA, 25 bp, Homo sapien
gacgaggacgaagaagaactgactt

SEQ ID NO: 72880 - DNA, 25 bp, Homo sapien
gacgaggacgaacaagaactgactt

SEQ ID NO: 72881 - DNA, 25 bp, Homo sapien
gaacccgaggagcacggagaccttg

SEQ ID NO: 72882 - DNA, 25 bp, Homo sapien
gaacccgaggaggacggagaccttg

SEQ ID NO: 72883 - DNA, 25 bp, Homo sapien
gtcgtaccggagacggaggccctaa

SEQ ID NO: 72884 - DNA, 25 bp, Homo sapien
gtcgtaccggagtcggaggccctaa

SEQ ID NO: 72885 - DNA, 25 bp, Homo sapien
gggccagtgaataggacaccgaccc

SEQ ID NO: 72886 - DNA, 25 bp, Homo sapien
gggccagtgaattggacaccgaccc

SEQ ID NO: 72887 - DNA, 25 bp, Homo sapien
taggtgtcctatagtactacttccc

SEQ ID NO: 72888 - DNA, 25 bp, Homo sapien
taggtgtcctattgtactacttccc

SEQ ID NO: 72889 - DNA, 25 bp, Homo sapien
ccgagcgctcagaaacatctctcgt

SEQ ID NO: 72890 - DNA, 25 bp, Homo sapien
ccgagcgctcagtaacatctctcgt

SEQ ID NO: 72891 - DNA, 25 bp, Homo sapien
acaaccgacgttccaatgttctctt

SEQ ID NO: 72892 - DNA, 25 bp, Homo sapien
acaaccgacgttgcaatgttctctt

SEQ ID NO: 72893 - DNA, 25 bp, Homo sapien
agaaccacagtgacaggtttcgttt

SEQ ID NO: 72894 - DNA, 25 bp, Homo sapien
agaaccacagtgtcaggtttcgttt

SEQ ID NO: 72895 - DNA, 25 bp, Homo sapien
agaacttcacattaggttattctga

SEQ ID NO: 72896 - DNA, 25 bp, Homo sapien
agaacttcacataaggttattctga

SEQ ID NO: 72897 - DNA, 25 bp, Homo sapien
gaattcgatataacggagatccaat

SEQ ID NO: 72898 - DNA, 25 bp, Homo sapien
gaattcgatatatcggagatccaat

SEQ ID NO: 72899 - DNA, 25 bp, Homo sapien
gaatcgaaggtcaagaacctacgag

SEQ ID NO: 72900 - DNA, 25 bp, Homo sapien
gaatcgaaggtctagaacctacgag

SEQ ID NO: 72901 - DNA, 25 bp, Homo sapien
acggacgggtactcggactcacact

SEQ ID NO: 72902 - DNA, 25 bp, Homo sapien
acggacgggtacacggactcacact

SEQ ID NO: 72903 - DNA, 25 bp, Homo sapien
tcgaacaggtggtccaggacatcgg

SEQ ID NO: 72904 - DNA, 25 bp, Homo sapien
tcgaacaggtggaccaggacatcgg

SEQ ID NO: 72905 - DNA, 25 bp, Homo sapien
ggaaccgggtctaccagtagaccca

SEQ ID NO: 72906 - DNA, 25 bp, Homo sapien
ggaaccgggtcttccagtagaccca

SEQ ID NO: 72907 - DNA, 25 bp, Homo sapien
gaacactgtgaagtctcgaacctga

SEQ ID NO: 72908 - DNA, 25 bp, Homo sapien
gaacactgtgaactctcgaacctga

SEQ ID NO: 72909 - DNA, 25 bp, Homo sapien
cgtaccacttttcttgttccgtaga

SEQ ID NO: 72910 - DNA, 25 bp, Homo sapien
cgtaccacttttgttgttccgtaga

SEQ ID NO: 72911 - DNA, 25 bp, Homo sapien
ctgccaaaaaggtcgtcgcgtagta

SEQ ID NO: 72912 - DNA, 25 bp, Homo sapien
ctgccaaaaaggacgtcgcgtagta

SEQ ID NO: 72913 - DNA, 25 bp, Homo sapien
gtaagtcctttcgacccctgcgaca

SEQ ID NO: 72914 - DNA, 25 bp, Homo sapien
gtaagtcctttccacccctgcgaca

SEQ ID NO: 72915 - DNA, 25 bp, Homo sapien
ttacagggaagcaccccgggacgtc

SEQ ID NO: 72916 - DNA, 25 bp, Homo sapien
ttacagggaagctccccgggacgtc

SEQ ID NO: 72917 - DNA, 25 bp, Homo sapien
tcatgtcgtcgtggacctggaccct

SEQ ID NO: 72918 - DNA, 25 bp, Homo sapien
tcatgtcgtcgtcgacctggaccct

SEQ ID NO: 72919 - DNA, 25 bp, Homo sapien
cctataggactggtccacgagaccc

SEQ ID NO: 72920 - DNA, 25 bp, Homo sapien
cctataggactgctccacgagaccc

SEQ ID NO: 72921 - DNA, 25 bp, Homo sapien
tacccaaggttcctctcgagggtcc

SEQ ID NO: 72922 - DNA, 25 bp, Homo sapien
tacccaaggttcgtctcgagggtcc

SEQ ID NO: 72923 - DNA, 25 bp, Homo sapien
ggaacgaaccatagtctgattcttt

SEQ ID NO: 72924 - DNA, 25 bp, Homo sapien
ggaacgaaccattgtctgattcttt

SEQ ID NO: 72925 - DNA, 25 bp, Homo sapien
ggtaccgacccagggttttagtttt

SEQ ID NO: 72926 - DNA, 25 bp, Homo sapien
ggtaccgacccacggttttagtttt

SEQ ID NO: 72927 - DNA, 25 bp, Homo sapien
gtcttcgcaccctttggtgtccgac

SEQ ID NO: 72928 - DNA, 25 bp, Homo sapien
gtcttcgcacccattggtgtccgac

SEQ ID NO: 72929 - DNA, 25 bp, Homo sapien
tatggcctcctgttccgttctctac

SEQ ID NO: 72930 - DNA, 25 bp, Homo sapien
tatggcctcctgatccgttctctac

SEQ ID NO: 72931 - DNA, 25 bp, Homo sapien
tgtgagttcctgtcacttacggtgt

SEQ ID NO: 72932 - DNA, 25 bp, Homo sapien
tgtgagttcctgacacttacggtgt

SEQ ID NO: 72933 - DNA, 25 bp, Homo sapien
aacagtggtgccaggccagacgttt

SEQ ID NO: 72934 - DNA, 25 bp, Homo sapien
aacagtggtgcctggccagacgttt

SEQ ID NO: 72935 - DNA, 25 bp, Homo sapien
aaggtctcttttgaccagagatata

SEQ ID NO: 72936 - DNA, 25 bp, Homo sapien
aaggtctcttttcaccagagatata

SEQ ID NO: 72937 - DNA, 25 bp, Homo sapien
tatggtgtctttccttacatgaaac

SEQ ID NO: 72938 - DNA, 25 bp, Homo sapien
tatggtgtctttgcttacatgaaac

SEQ ID NO: 72939 - DNA, 25 bp, Homo sapien
attattttctttcgacttaagaaga

SEQ ID NO: 72940 - DNA, 25 bp, Homo sapien
attattttctttggacttaagaaga

SEQ ID NO: 72941 - DNA, 25 bp, Homo sapien
ctcttcgtagggtcctgtctgaaag

SEQ ID NO: 72942 - DNA, 25 bp, Homo sapien
ctcttcgtagggacctgtctgaaag

SEQ ID NO: 72943 - DNA, 25 bp, Homo sapien
acccgttcgtgaacttattgactaa

SEQ ID NO: 72944 - DNA, 25 bp, Homo sapien
acccgttcgtgatcttattgactaa

SEQ ID NO: 72945 - DNA, 25 bp, Homo sapien
atccctcgtcggttgattaacgatc

SEQ ID NO: 72946 - DNA, 25 bp, Homo sapien
atccctcgtcggatgattaacgatc

SEQ ID NO: 72947 - DNA, 25 bp, Homo sapien
gaatctcctgtcacatggtataatg

SEQ ID NO: 72948 - DNA, 25 bp, Homo sapien
gaatctcctgtctcatggtataatg

SEQ ID NO: 72949 - DNA, 25 bp, Homo sapien
attttctccctcgttacgactaata

SEQ ID NO: 72950 - DNA, 25 bp, Homo sapien
attttctccctccttacgactaata

SEQ ID NO: 72951 - DNA, 25 bp, Homo sapien
cctcgactcggacactgcacgtaaa

SEQ ID NO: 72952 - DNA, 25 bp, Homo sapien
cctcgactcggagactgcacgtaaa

SEQ ID NO: 72953 - DNA, 25 bp, Homo sapien
ccgatcacacccgctcagagtagaa

SEQ ID NO: 72954 - DNA, 25 bp, Homo sapien
ccgatcacaccccctcagagtagaa

SEQ ID NO: 72955 - DNA, 25 bp, Homo sapien
gtcctacccacgagtcacggtcgga

SEQ ID NO: 72956 - DNA, 25 bp, Homo sapien
gtcctacccacgtgtcacggtcgga

SEQ ID NO: 72957 - DNA, 25 bp, Homo sapien
ttggttcacccctgcgacgcagcta

SEQ ID NO: 72958 - DNA, 25 bp, Homo sapien
ttggttcaccccagcgacgcagcta

SEQ ID NO: 72959 - DNA, 25 bp, Homo sapien
gtcgtcatccgcagtaccacaatag

SEQ ID NO: 72960 - DNA, 25 bp, Homo sapien
gtcgtcatccgctgtaccacaatag

SEQ ID NO: 72961 - DNA, 25 bp, Homo sapien
ttctcagaagacctcggtgagtgtg

SEQ ID NO: 72962 - DNA, 25 bp, Homo sapien
ttctcagaagacgtcggtgagtgtg

SEQ ID NO: 72963 - DNA, 25 bp, Homo sapien
caatttgaacttgtgttctaggtcg

SEQ ID NO: 72964 - DNA, 25 bp, Homo sapien
caatttgaacttctgttctaggtcg

SEQ ID NO: 72965 - DNA, 25 bp, Homo sapien
acatcttaaacagatcttcacagag

SEQ ID NO: 72966 - DNA, 25 bp, Homo sapien
acatcttaaacacatcttcacagag

SEQ ID NO: 72967 - DNA, 25 bp, Homo sapien
cgagtaatttactgcattcagaaac

SEQ ID NO: 72968 - DNA, 25 bp, Homo sapien
cgagtaatttacagcattcagaaac

SEQ ID NO: 72969 - DNA, 25 bp, Homo sapien
tgaaacacatttcggtttcttaaga

SEQ ID NO: 72970 - DNA, 25 bp, Homo sapien
tgaaacacatttgggtttcttaaga

SEQ ID NO: 72971 - DNA, 25 bp, Homo sapien
cggaggttactaacatatttaacgg

SEQ ID NO: 72972 - DNA, 25 bp, Homo sapien
cggaggttactatcatatttaacgg

SEQ ID NO: 72973 - DNA, 25 bp, Homo sapien
attggactttattcaatgttacccg

SEQ ID NO: 72974 - DNA, 25 bp, Homo sapien
attggactttatacaatgttacccg

SEQ ID NO: 72975 - DNA, 25 bp, Homo sapien
ggaggtttctaacttaccttaacag

SEQ ID NO: 72976 - DNA, 25 bp, Homo sapien
ggaggtttctaagttaccttaacag

SEQ ID NO: 72977 - DNA, 25 bp, Homo sapien
cgggagtagttgagaatcaaccagt

SEQ ID NO: 72978 - DNA, 25 bp, Homo sapien
cgggagtagttgtgaatcaaccagt

SEQ ID NO: 72979 - DNA, 25 bp, Homo sapien
aagacgtctcttgaaaacacagtag

SEQ ID NO: 72980 - DNA, 25 bp, Homo sapien
aagacgtctcttcaaaacacagtag

SEQ ID NO: 72981 - DNA, 25 bp, Homo sapien
aagtcccgactcagaccatcggtcg

SEQ ID NO: 72982 - DNA, 25 bp, Homo sapien
aagtcccgactctgaccatcggtcg

SEQ ID NO: 72983 - DNA, 25 bp, Homo sapien
agaggacgtcccttgacggccgaga

SEQ ID NO: 72984 - DNA, 25 bp, Homo sapien
agaggacgtcccatgacggccgaga

SEQ ID NO: 72985 - DNA, 25 bp, Homo sapien
cggtagagctttaggaggtatcaac

SEQ ID NO: 72986 - DNA, 25 bp, Homo sapien
cggtagagcttttggaggtatcaac

SEQ ID NO: 72987 - DNA, 25 bp, Homo sapien
ttatgatgtattgtgacactaacct

SEQ ID NO: 72988 - DNA, 25 bp, Homo sapien
ttatgatgtattctgacactaacct

SEQ ID NO: 72989 - DNA, 25 bp, Homo sapien
ttacggatacttttatggtcgttgc

SEQ ID NO: 72990 - DNA, 25 bp, Homo sapien
ttacggatacttatatggtcgttgc

SEQ ID NO: 72991 - DNA, 25 bp, Homo sapien
gagaactctgtatttgtgttcgtac

SEQ ID NO: 72992 - DNA, 25 bp, Homo sapien
gagaactctgtaattgtgttcgtac

SEQ ID NO: 72993 - DNA, 25 bp, Homo sapien
ggaggatcctgatagtctgagtaac

SEQ ID NO: 72994 - DNA, 25 bp, Homo sapien
ggaggatcctgaaagtctgagtaac

SEQ ID NO: 72995 - DNA, 25 bp, Homo sapien
cccacggtcgcctgaagaaagatcc

SEQ ID NO: 72996 - DNA, 25 bp, Homo sapien
cccacggtcgccagaagaaagatcc

SEQ ID NO: 72997 - DNA, 25 bp, Homo sapien
tctgttcacggaacactacgaccct

SEQ ID NO: 72998 - DNA, 25 bp, Homo sapien
tctgttcacggatcactacgaccct

SEQ ID NO: 72999 - DNA, 25 bp, Homo sapien
acctgagtttcgtaccgtcgccgtc

SEQ ID NO: 73000 - DNA, 25 bp, Homo sapien
acctgagtttcgaaccgtcgccgtc

SEQ ID NO: 73001 - DNA, 25 bp, Homo sapien
cgagtattcctttaaattcgttgta

SEQ ID NO: 73002 - DNA, 25 bp, Homo sapien
cgagtattccttaaaattcgttgta

SEQ ID NO: 73003 - DNA, 25 bp, Homo sapien
aagctttcttatcctacttgggtac

SEQ ID NO: 73004 - DNA, 25 bp, Homo sapien
aagctttcttatgctacttgggtac

SEQ ID NO: 73005 - DNA, 25 bp, Homo sapien
ctcactgttatgtgtcgtagttaga

SEQ ID NO: 73006 - DNA, 25 bp, Homo sapien
ctcactgttatgagtcgtagttaga

SEQ ID NO: 73007 - DNA, 25 bp, Homo sapien
ccgcttagaaccagtctataacgta

SEQ ID NO: 73008 - DNA, 25 bp, Homo sapien
ccgcttagaacctgtctataacgta

SEQ ID NO: 73009 - DNA, 25 bp, Homo sapien
gacctgtctcgtacatgattcctac

SEQ ID NO: 73010 - DNA, 25 bp, Homo sapien
gacctgtctcgttcatgattcctac

SEQ ID NO: 73011 - DNA, 25 bp, Homo sapien
gcagaataacgctgcgaaaggtttg

SEQ ID NO: 73012 - DNA, 25 bp, Homo sapien
gcagaataacgcagcgaaaggtttg

SEQ ID NO: 73013 - DNA, 25 bp, Homo sapien
gagagtacaacgaaaccaggttttc

SEQ ID NO: 73014 - DNA, 25 bp, Homo sapien
gagagtacaacgtaaccaggttttc

SEQ ID NO: 73015 - DNA, 25 bp, Homo sapien
gggaagtcatctttaaagttttcgc

SEQ ID NO: 73016 - DNA, 25 bp, Homo sapien
gggaagtcatctataaagttttcgc

SEQ ID NO: 73017 - DNA, 25 bp, Homo sapien
gattaccagaattaagtccggtacc

SEQ ID NO: 73018 - DNA, 25 bp, Homo sapien
gattaccagaataaagtccggtacc

SEQ ID NO: 73019 - DNA, 25 bp, Homo sapien
gagtttacccaccaagctcgagtca

SEQ ID NO: 73020 - DNA, 25 bp, Homo sapien
gagtttacccacgaagctcgagtca

SEQ ID NO: 73021 - DNA, 25 bp, Homo sapien
cggtggtacctcgaggtccgatgac

SEQ ID NO: 73022 - DNA, 25 bp, Homo sapien
cggtggtacctccaggtccgatgac

SEQ ID NO: 73023 - DNA, 25 bp, Homo sapien
acgatctttacaggtactacatgtg

SEQ ID NO: 73024 - DNA, 25 bp, Homo sapien
acgatctttacacgtactacatgtg

SEQ ID NO: 73025 - DNA, 25 bp, Homo sapien
ctcgagtctatgcaactgtatattt

SEQ ID NO: 73026 - DNA, 25 bp, Homo sapien
ctcgagtctatggaactgtatattt

SEQ ID NO: 73027 - DNA, 25 bp, Homo sapien
caatgtattctgtccattagtcgtc

SEQ ID NO: 73028 - DNA, 25 bp, Homo sapien
caatgtattctgaccattagtcgtc

SEQ ID NO: 73029 - DNA, 25 bp, Homo sapien
tgcatccacttcgggacctttagcc

SEQ ID NO: 73030 - DNA, 25 bp, Homo sapien
tgcatccacttccggacctttagcc

SEQ ID NO: 73031 - DNA, 25 bp, Homo sapien
gtccgtctgtcagactgtctgtgcc

SEQ ID NO: 73032 - DNA, 25 bp, Homo sapien
gtccgtctgtcacactgtctgtgcc

SEQ ID NO: 73033 - DNA, 25 bp, Homo sapien
tcccgacttcaacagtgagaccact

SEQ ID NO: 73034 - DNA, 25 bp, Homo sapien
tcccgacttcaagagtgagaccact

SEQ ID NO: 73035 - DNA, 25 bp, Homo sapien
ccctctttgcacagtcgagggaaat

SEQ ID NO: 73036 - DNA, 25 bp, Homo sapien
ccctctttgcactgtcgagggaaat

SEQ ID NO: 73037 - DNA, 25 bp, Homo sapien
tctggtccttgaaccagccacgaac

SEQ ID NO: 73038 - DNA, 25 bp, Homo sapien
tctggtccttgatccagccacgaac

SEQ ID NO: 73039 - DNA, 25 bp, Homo sapien
tcggtccacttctcaccgacctgaa

SEQ ID NO: 73040 - DNA, 25 bp, Homo sapien
tcggtccacttcacaccgacctgaa

SEQ ID NO: 73041 - DNA, 25 bp, Homo sapien
tctgggtttgcgacccgtaaacaag

SEQ ID NO: 73042 - DNA, 25 bp, Homo sapien
tctgggtttgcgtcccgtaaacaag

SEQ ID NO: 73043 - DNA, 25 bp, Homo sapien
aacttttgagttcctcgtttgtaat

SEQ ID NO: 73044 - DNA, 25 bp, Homo sapien
aacttttgagttgctcgtttgtaat

SEQ ID NO: 73045 - DNA, 25 bp, Homo sapien
atcaatttcgaatgttcttgttata

SEQ ID NO: 73046 - DNA, 25 bp, Homo sapien
atcaatttcgaaagttcttgttata

SEQ ID NO: 73047 - DNA, 25 bp, Homo sapien
ctcttgcgaccgttacgatgtctta

SEQ ID NO: 73048 - DNA, 25 bp, Homo sapien
ctcttgcgaccgatacgatgtctta

SEQ ID NO: 73049 - DNA, 25 bp, Homo sapien
gtcatcaatccttatacgtaggtta

SEQ ID NO: 73050 - DNA, 25 bp, Homo sapien
gtcatcaatcctaatacgtaggtta

SEQ ID NO: 73051 - DNA, 25 bp, Homo sapien
aatctctagattacgtagtgactcc

SEQ ID NO: 73052 - DNA, 25 bp, Homo sapien
aatctctagatttcgtagtgactcc

SEQ ID NO: 73053 - DNA, 25 bp, Homo sapien
cattcattgagttgtcggtcctgag

SEQ ID NO: 73054 - DNA, 25 bp, Homo sapien
cattcattgagtagtcggtcctgag

SEQ ID NO: 73055 - DNA, 25 bp, Homo sapien
tcgacatacaggtatgtgtactttt

SEQ ID NO: 73056 - DNA, 25 bp, Homo sapien
tcgacatacaggaatgtgtactttt

SEQ ID NO: 73057 - DNA, 25 bp, Homo sapien
atctcaagacctcgtcttcggtgga

SEQ ID NO: 73058 - DNA, 25 bp, Homo sapien
atctcaagacctggtcttcggtgga

SEQ ID NO: 73059 - DNA, 25 bp, Homo sapien
agcagactcccgtgcctacaggaag

SEQ ID NO: 73060 - DNA, 25 bp, Homo sapien
agcagactcccgagcctacaggaag

SEQ ID NO: 73061 - DNA, 25 bp, Homo sapien
tactgatccacacaacgaccggaca

SEQ ID NO: 73062 - DNA, 25 bp, Homo sapien
tactgatccacagaacgaccggaca

SEQ ID NO: 73063 - DNA, 25 bp, Homo sapien
ggtgactcaactggagacatcggaa

SEQ ID NO: 73064 - DNA, 25 bp, Homo sapien
ggtgactcaactcgagacatcggaa

SEQ ID NO: 73065 - DNA, 25 bp, Homo sapien
gtacagtgtcaattcatcatgaata

SEQ ID NO: 73066 - DNA, 25 bp, Homo sapien
gtacagtgtcaaatcatcatgaata

SEQ ID NO: 73067 - DNA, 25 bp, Homo sapien
atgttacaataacgatacactatgt

SEQ ID NO: 73068 - DNA, 25 bp, Homo sapien
atgttacaataaggatacactatgt

SEQ ID NO: 73069 - DNA, 25 bp, Homo sapien
aacttctgtccgtgctatatatgat

SEQ ID NO: 73070 - DNA, 25 bp, Homo sapien
aacttctgtccgagctatatatgat

SEQ ID NO: 73071 - DNA, 25 bp, Homo sapien
accctctcgtcctcggagtcttgag

SEQ ID NO: 73072 - DNA, 25 bp, Homo sapien
accctctcgtccacggagtcttgag

SEQ ID NO: 73073 - DNA, 25 bp, Homo sapien
gtctgcgacgcgtggtcgtcgttgt

SEQ ID NO: 73074 - DNA, 25 bp, Homo sapien
gtctgcgacgcgaggtcgtcgttgt

SEQ ID NO: 73075 - DNA, 25 bp, Homo sapien
actcctaaccccaagtctcgtgaag

SEQ ID NO: 73076 - DNA, 25 bp, Homo sapien
actcctaacccctagtctcgtgaag

SEQ ID NO: 73077 - DNA, 25 bp, Homo sapien
caacgtgtaacacaccagcaggttt

SEQ ID NO: 73078 - DNA, 25 bp, Homo sapien
caacgtgtaacagaccagcaggttt

SEQ ID NO: 73079 - DNA, 25 bp, Homo sapien
aggaccgaagacaggtcgaggactt

SEQ ID NO: 73080 - DNA, 25 bp, Homo sapien
aggaccgaagactggtcgaggactt

SEQ ID NO: 73081 - DNA, 25 bp, Homo sapien
cctaggggtaagtggtcggtgtctt

SEQ ID NO: 73082 - DNA, 25 bp, Homo sapien
cctaggggtaagaggtcggtgtctt

SEQ ID NO: 73083 - DNA, 25 bp, Homo sapien
aaaggagtgtacaggtcacgtccct

SEQ ID NO: 73084 - DNA, 25 bp, Homo sapien
aaaggagtgtactggtcacgtccct

SEQ ID NO: 73085 - DNA, 25 bp, Homo sapien
ccgctggagaagtttcacgtcacag

SEQ ID NO: 73086 - DNA, 25 bp, Homo sapien
ccgctggagaagattcacgtcacag

SEQ ID NO: 73087 - DNA, 25 bp, Homo sapien
tcccctggttggatcgtcatcaccg

SEQ ID NO: 73088 - DNA, 25 bp, Homo sapien
tcccctggttggttcgtcatcaccg

SEQ ID NO: 73089 - DNA, 25 bp, Homo sapien
agtcctgttctgtatctaaacgatt

SEQ ID NO: 73090 - DNA, 25 bp, Homo sapien
agtcctgttctgaatctaaacgatt

SEQ ID NO: 73091 - DNA, 25 bp, Homo sapien
caaattccgctttaatgtcgagtct

SEQ ID NO: 73092 - DNA, 25 bp, Homo sapien
caaattccgcttaaatgtcgagtct

SEQ ID NO: 73093 - DNA, 25 bp, Homo sapien
ttactaaacatattagatccttcgt

SEQ ID NO: 73094 - DNA, 25 bp, Homo sapien
ttactaaacataatagatccttcgt

SEQ ID NO: 73095 - DNA, 25 bp, Homo sapien
atgtggtaaaccaaagatcactcct

SEQ ID NO: 73096 - DNA, 25 bp, Homo sapien
atgtggtaaacctaagatcactcct

SEQ ID NO: 73097 - DNA, 25 bp, Homo sapien
aggagaaagagcagaggtacccact

SEQ ID NO: 73098 - DNA, 25 bp, Homo sapien
aggagaaagagctgaggtacccact

SEQ ID NO: 73099 - DNA, 25 bp, Homo sapien
aaaggaaaaggtgctggtagctcct

SEQ ID NO: 73100 - DNA, 25 bp, Homo sapien
aaaggaaaaggtcctggtagctcct

SEQ ID NO: 73101 - DNA, 25 bp, Homo sapien
acagatgattggttgtctttatcgc

SEQ ID NO: 73102 - DNA, 25 bp, Homo sapien
acagatgattggatgtctttatcgc

SEQ ID NO: 73103 - DNA, 25 bp, Homo sapien
aaagaatttgggacgttgtactcct

SEQ ID NO: 73104 - DNA, 25 bp, Homo sapien
aaagaatttgggtcgttgtactcct

SEQ ID NO: 73105 - DNA, 25 bp, Homo sapien
tgattttgaggttcgtccctagtct

SEQ ID NO: 73106 - DNA, 25 bp, Homo sapien
tgattttgaggtacgtccctagtct

SEQ ID NO: 73107 - DNA, 25 bp, Homo sapien
gtgtgttatagttaacgtccttgtc

SEQ ID NO: 73108 - DNA, 25 bp, Homo sapien
gtgtgttatagtaaacgtccttgtc

SEQ ID NO: 73109 - DNA, 25 bp, Homo sapien
agaagagacagtctatctcccacta

SEQ ID NO: 73110 - DNA, 25 bp, Homo sapien
agaagagacagtgtatctcccacta

SEQ ID NO: 73111 - DNA, 25 bp, Homo sapien
gagtaatggttactaagatagccag

SEQ ID NO: 73112 - DNA, 25 bp, Homo sapien
gagtaatggttagtaagatagccag

SEQ ID NO: 73113 - DNA, 25 bp, Homo sapien
gcgttctcccgtctggctatcttag

SEQ ID NO: 73114 - DNA, 25 bp, Homo sapien
gcgttctcccgtgtggctatcttag

SEQ ID NO: 73115 - DNA, 25 bp, Homo sapien
tttagacattcctttacattgtggt

SEQ ID NO: 73116 - DNA, 25 bp, Homo sapien
tttagacattccattacattgtggt

SEQ ID NO: 73117 - DNA, 25 bp, Homo sapien
ttctaatacttcgttaccttcgtgg

SEQ ID NO: 73118 - DNA, 25 bp, Homo sapien
ttctaatacttccttaccttcgtgg

SEQ ID NO: 73119 - DNA, 25 bp, Homo sapien
gtcatattttcttacgtacacttgg

SEQ ID NO: 73120 - DNA, 25 bp, Homo sapien
gtcatattttctaacgtacacttgg

SEQ ID NO: 73121 - DNA, 25 bp, Homo sapien
aagcgacatttctatgaccgaaggt

SEQ ID NO: 73122 - DNA, 25 bp, Homo sapien
aagcgacatttcaatgaccgaaggt

SEQ ID NO: 73123 - DNA, 25 bp, Homo sapien
atctcttcgtccttgtaggagatga

SEQ ID NO: 73124 - DNA, 25 bp, Homo sapien
atctcttcgtccatgtaggagatga

SEQ ID NO: 73125 - DNA, 25 bp, Homo sapien
ctatattagcgtattcctagctgat

SEQ ID NO: 73126 - DNA, 25 bp, Homo sapien
ctatattagcgttttcctagctgat

SEQ ID NO: 73127 - DNA, 25 bp, Homo sapien
tctacaaaggtgtgtcgtaaacaga

SEQ ID NO: 73128 - DNA, 25 bp, Homo sapien
tctacaaaggtgagtcgtaaacaga

SEQ ID NO: 73129 - DNA, 25 bp, Homo sapien
gacgtatctattacgtctatcaaga

SEQ ID NO: 73130 - DNA, 25 bp, Homo sapien
gacgtatctatttcgtctatcaaga

SEQ ID NO: 73131 - DNA, 25 bp, Homo sapien
ggacgagaccgtttcgttgagaata

SEQ ID NO: 73132 - DNA, 25 bp, Homo sapien
ggacgagaccgtatcgttgagaata

SEQ ID NO: 73133 - DNA, 25 bp, Homo sapien
ttgttatcaccgacgtctttgtcca

SEQ ID NO: 73134 - DNA, 25 bp, Homo sapien
ttgttatcaccgtcgtctttgtcca

SEQ ID NO: 73135 - DNA, 25 bp, Homo sapien
ttatataagacgtgtctattgccat

SEQ ID NO: 73136 - DNA, 25 bp, Homo sapien
ttatataagacgagtctattgccat

SEQ ID NO: 73137 - DNA, 25 bp, Homo sapien
cataggtcatatcgtaagtctaagt

SEQ ID NO: 73138 - DNA, 25 bp, Homo sapien
cataggtcatatggtaagtctaagt

SEQ ID NO: 73139 - DNA, 25 bp, Homo sapien
taagaagacgaattccgaaacacac

SEQ ID NO: 73140 - DNA, 25 bp, Homo sapien
taagaagacgaaatccgaaacacac

SEQ ID NO: 73141 - DNA, 25 bp, Homo sapien
gacgagaaaacgaatgcaccaccac

SEQ ID NO: 73142 - DNA, 25 bp, Homo sapien
gacgagaaaacgtatgcaccaccac

SEQ ID NO: 73143 - DNA, 25 bp, Homo sapien
atgagacggaggtccctgcaccacg

SEQ ID NO: 73144 - DNA, 25 bp, Homo sapien
atgagacggaggaccctgcaccacg

SEQ ID NO: 73145 - DNA, 25 bp, Homo sapien
cagagtctggtagtgcacgagacca

SEQ ID NO: 73146 - DNA, 25 bp, Homo sapien
cagagtctggtactgcacgagacca

SEQ ID NO: 73147 - DNA, 25 bp, Homo sapien
cagaggtgagaacactccgaagaga

SEQ ID NO: 73148 - DNA, 25 bp, Homo sapien
cagaggtgagaagactccgaagaga

SEQ ID NO: 73149 - DNA, 25 bp, Homo sapien
tgtacaagtgggtgtttcgagttcc

SEQ ID NO: 73150 - DNA, 25 bp, Homo sapien
tgtacaagtgggagtttcgagttcc

SEQ ID NO: 73151 - DNA, 25 bp, Homo sapien
ttacagtgttttagtttctgctacc

SEQ ID NO: 73152 - DNA, 25 bp, Homo sapien
ttacagtgtttttgtttctgctacc

SEQ ID NO: 73153 - DNA, 25 bp, Homo sapien
ttaggttctatttccgtctaaatgt

SEQ ID NO: 73154 - DNA, 25 bp, Homo sapien
ttaggttctattaccgtctaaatgt

SEQ ID NO: 73155 - DNA, 25 bp, Homo sapien
tgaccaaacggtaccgtacccatgt

SEQ ID NO: 73156 - DNA, 25 bp, Homo sapien
tgaccaaacggttccgtacccatgt

SEQ ID NO: 73157 - DNA, 25 bp, Homo sapien
ggtggaagacgctacagcagaactt

SEQ ID NO: 73158 - DNA, 25 bp, Homo sapien
ggtggaagacgcaacagcagaactt

SEQ ID NO: 73159 - DNA, 25 bp, Homo sapien
gtgtgtaaagaggtctgtaaacctc

SEQ ID NO: 73160 - DNA, 25 bp, Homo sapien
gtgtgtaaagagctctgtaaacctc

SEQ ID NO: 73161 - DNA, 25 bp, Homo sapien
gattatgagacgttactaaaactac

SEQ ID NO: 73162 - DNA, 25 bp, Homo sapien
gattatgagacgatactaaaactac

SEQ ID NO: 73163 - DNA, 25 bp, Homo sapien
atcttaggaccgaacgacgaactca

SEQ ID NO: 73164 - DNA, 25 bp, Homo sapien
atcttaggaccgtacgacgaactca

SEQ ID NO: 73165 - DNA, 25 bp, Homo sapien
ttacttgtatacatgtgtgaccgaa

SEQ ID NO: 73166 - DNA, 25 bp, Homo sapien
ttacttgtatacttgtgtgaccgaa

SEQ ID NO: 73167 - DNA, 25 bp, Homo sapien
gtttgtgtacgcagtgactcaatac

SEQ ID NO: 73168 - DNA, 25 bp, Homo sapien
gtttgtgtacgctgtgactcaatac

SEQ ID NO: 73169 - DNA, 25 bp, Homo sapien
cgaatttccggttaggtgtctaata

SEQ ID NO: 73170 - DNA, 25 bp, Homo sapien
cgaatttccggtaaggtgtctaata

SEQ ID NO: 73171 - DNA, 25 bp, Homo sapien
gaatacttccgaaagttcttttacg

SEQ ID NO: 73172 - DNA, 25 bp, Homo sapien
gaatacttccgatagttcttttacg

SEQ ID NO: 73173 - DNA, 25 bp, Homo sapien
tgagggacctgaacccggccaagac

SEQ ID NO: 73174 - DNA, 25 bp, Homo sapien
tgagggacctgatcccggccaagac

SEQ ID NO: 73175 - DNA, 25 bp, Homo sapien
gtaccgagacgaacaccatcagaca

SEQ ID NO: 73176 - DNA, 25 bp, Homo sapien
gtaccgagacgatcaccatcagaca

SEQ ID NO: 73177 - DNA, 25 bp, Homo sapien
aggtgaacacggacccaaacgacat

SEQ ID NO: 73178 - DNA, 25 bp, Homo sapien
aggtgaacacggtcccaaacgacat

SEQ ID NO: 73179 - DNA, 25 bp, Homo sapien
tctagggaacccccacaaaaccagt

SEQ ID NO: 73180 - DNA, 25 bp, Homo sapien
tctagggaacccgcacaaaaccagt

SEQ ID NO: 73181 - DNA, 25 bp, Homo sapien
gacgaaaatacgttcagagaacttc

SEQ ID NO: 73182 - DNA, 25 bp, Homo sapien
gacgaaaatacgatcagagaacttc

SEQ ID NO: 73183 - DNA, 25 bp, Homo sapien
gaggtaacatagaacgtaaaatctc

SEQ ID NO: 73184 - DNA, 25 bp, Homo sapien
gaggtaacatagtacgtaaaatctc

SEQ ID NO: 73185 - DNA, 25 bp, Homo sapien
agaatggacccgacatagatatctc

SEQ ID NO: 73186 - DNA, 25 bp, Homo sapien
agaatggacccgtcatagatatctc

SEQ ID NO: 73187 - DNA, 25 bp, Homo sapien
accgtccaggtggtcgtctacgttt

SEQ ID NO: 73188 - DNA, 25 bp, Homo sapien
accgtccaggtgctcgtctacgttt

SEQ ID NO: 73189 - DNA, 25 bp, Homo sapien
cgtacgataactgtttgtctagttt

SEQ ID NO: 73190 - DNA, 25 bp, Homo sapien
cgtacgataactctttgtctagttt

SEQ ID NO: 73191 - DNA, 25 bp, Homo sapien
tagaaattacgaatgttttcgtcct

SEQ ID NO: 73192 - DNA, 25 bp, Homo sapien
tagaaattacgattgttttcgtcct

SEQ ID NO: 73193 - DNA, 25 bp, Homo sapien
aaactattatatgttcgtcagactg

SEQ ID NO: 73194 - DNA, 25 bp, Homo sapien
aaactattatatcttcgtcagactg

SEQ ID NO: 73195 - DNA, 25 bp, Homo sapien
cttctttcttttactattgagttct

SEQ ID NO: 73196 - DNA, 25 bp, Homo sapien
cttctttctttttctattgagttct

SEQ ID NO: 73197 - DNA, 25 bp, Homo sapien
actctggttcttataggtacttctt

SEQ ID NO: 73198 - DNA, 25 bp, Homo sapien
actctggttcttttaggtacttctt

SEQ ID NO: 73199 - DNA, 25 bp, Homo sapien
ctactgtcggttttgattacgaaca

SEQ ID NO: 73200 - DNA, 25 bp, Homo sapien
ctactgtcggttatgattacgaaca

SEQ ID NO: 73201 - DNA, 25 bp, Homo sapien
gcgtattcctagctgatgtagaaca

SEQ ID NO: 73202 - DNA, 25 bp, Homo sapien
gcgtattcctaggtgatgtagaaca

SEQ ID NO: 73203 - DNA, 25 bp, Homo sapien
gttttaccagaggacctcgagtctt

SEQ ID NO: 73204 - DNA, 25 bp, Homo sapien
gttttaccagagcacctcgagtctt

SEQ ID NO: 73205 - DNA, 25 bp, Homo sapien
tgtggggtctataaaaacccctctt

SEQ ID NO: 73206 - DNA, 25 bp, Homo sapien
tgtggggtctattaaaacccctctt

SEQ ID NO: 73207 - DNA, 25 bp, Homo sapien
atggatcgtgataatacaccccatg

SEQ ID NO: 73208 - DNA, 25 bp, Homo sapien
atggatcgtgattatacaccccatg

SEQ ID NO: 73209 - DNA, 25 bp, Homo sapien
aagaggaacagaaggaaccccatgt

SEQ ID NO: 73210 - DNA, 25 bp, Homo sapien
aagaggaacagatggaaccccatgt

SEQ ID NO: 73211 - DNA, 25 bp, Homo sapien
gagagacactccagtgacacccatc

SEQ ID NO: 73212 - DNA, 25 bp, Homo sapien
gagagacactcctgtgacacccatc

SEQ ID NO: 73213 - DNA, 25 bp, Homo sapien
tgtaggcatcagttcacacaccatt

SEQ ID NO: 73214 - DNA, 25 bp, Homo sapien
tgtaggcatcagatcacacaccatt

SEQ ID NO: 73215 - DNA, 25 bp, Homo sapien
ctggttcatttaatgacttctatgt

SEQ ID NO: 73216 - DNA, 25 bp, Homo sapien
ctggttcatttattgacttctatgt

SEQ ID NO: 73217 - DNA, 25 bp, Homo sapien
cacggatatgttacttttcagatgt

SEQ ID NO: 73218 - DNA, 25 bp, Homo sapien
cacggatatgtttcttttcagatgt

SEQ ID NO: 73219 - DNA, 25 bp, Homo sapien
ctcggatgattcattcgacgaatag

SEQ ID NO: 73220 - DNA, 25 bp, Homo sapien
ctcggatgattctttcgacgaatag

SEQ ID NO: 73221 - DNA, 25 bp, Homo sapien
ttccaggagatctagggtgagatac

SEQ ID NO: 73222 - DNA, 25 bp, Homo sapien
ttccaggagatcaagggtgagatac

SEQ ID NO: 73223 - DNA, 25 bp, Homo sapien
cgacaggactacacggagagtaaag

SEQ ID NO: 73224 - DNA, 25 bp, Homo sapien
cgacaggactactcggagagtaaag

SEQ ID NO: 73225 - DNA, 25 bp, Homo sapien
tcaagagacactgacgtgaatagaa

SEQ ID NO: 73226 - DNA, 25 bp, Homo sapien
tcaagagacactcacgtgaatagaa

SEQ ID NO: 73227 - DNA, 25 bp, Homo sapien
attgtatacaccaaactaggagtcg

SEQ ID NO: 73228 - DNA, 25 bp, Homo sapien
attgtatacacctaactaggagtcg

SEQ ID NO: 73229 - DNA, 25 bp, Homo sapien
ctctttactgtgaccttccttgtag

SEQ ID NO: 73230 - DNA, 25 bp, Homo sapien
ctctttactgtgtccttccttgtag

SEQ ID NO: 73231 - DNA, 25 bp, Homo sapien
gaaagaaacttataccttcatgaga

SEQ ID NO: 73232 - DNA, 25 bp, Homo sapien
gaaagaaacttaaaccttcatgaga

SEQ ID NO: 73233 - DNA, 25 bp, Homo sapien
cagaaagtagaaaccttcgacaaga

SEQ ID NO: 73234 - DNA, 25 bp, Homo sapien
cagaaagtagaatccttcgacaaga

SEQ ID NO: 73235 - DNA, 25 bp, Homo sapien
gatatgtgcacgtgtttactaagtc

SEQ ID NO: 73236 - DNA, 25 bp, Homo sapien
gatatgtgcacgagtttactaagtc

SEQ ID NO: 73237 - DNA, 25 bp, Homo sapien
ctaatctcttacttgtttacagtgg

SEQ ID NO: 73238 - DNA, 25 bp, Homo sapien
ctaatctcttacatgtttacagtgg

SEQ ID NO: 73239 - DNA, 25 bp, Homo sapien
agagtacctactaatttacttgtag

SEQ ID NO: 73240 - DNA, 25 bp, Homo sapien
agagtacctacttatttacttgtag

SEQ ID NO: 73241 - DNA, 25 bp, Homo sapien
ccgagagaccgttacttgactccat

SEQ ID NO: 73242 - DNA, 25 bp, Homo sapien
ccgagagaccgtaacttgactccat

SEQ ID NO: 73243 - DNA, 25 bp, Homo sapien
tcagaaaggacttccgtactcctat

SEQ ID NO: 73244 - DNA, 25 bp, Homo sapien
tcagaaaggactaccgtactcctat

SEQ ID NO: 73245 - DNA, 25 bp, Homo sapien
gtaatgaggtgtcactcctactatt

SEQ ID NO: 73246 - DNA, 25 bp, Homo sapien
gtaatgaggtgtgactcctactatt

SEQ ID NO: 73247 - DNA, 25 bp, Homo sapien
aaagaaagtgtaagtctcactctta

SEQ ID NO: 73248 - DNA, 25 bp, Homo sapien
aaagaaagtgtatgtctcactctta

SEQ ID NO: 73249 - DNA, 25 bp, Homo sapien
caccgaacacctagtcgtgtctgaa

SEQ ID NO: 73250 - DNA, 25 bp, Homo sapien
caccgaacaccttgtcgtgtctgaa

SEQ ID NO: 73251 - DNA, 25 bp, Homo sapien
aggaagaacaacctctcggttagaa

SEQ ID NO: 73252 - DNA, 25 bp, Homo sapien
aggaagaacaacgtctcggttagaa

SEQ ID NO: 73253 - DNA, 25 bp, Homo sapien
agtaaagactagtgattacactact

SEQ ID NO: 73254 - DNA, 25 bp, Homo sapien
agtaaagactagagattacactact

SEQ ID NO: 73255 - DNA, 25 bp, Homo sapien
tgaaaagtcggttatagtactacca

SEQ ID NO: 73256 - DNA, 25 bp, Homo sapien
tgaaaagtcggtaatagtactacca

SEQ ID NO: 73257 - DNA, 25 bp, Homo sapien
gttgtgatcacctataataacgaat

SEQ ID NO: 73258 - DNA, 25 bp, Homo sapien
gttgtgatcaccaataataacgaat

SEQ ID NO: 73259 - DNA, 25 bp, Homo sapien
tgttatagtttactctggaatgcac

SEQ ID NO: 73260 - DNA, 25 bp, Homo sapien
tgttatagtttagtctggaatgcac

SEQ ID NO: 73261 - DNA, 25 bp, Homo sapien
aggttcgtgttttgatcatactggc

SEQ ID NO: 73262 - DNA, 25 bp, Homo sapien
aggttcgtgtttagatcatactggc

SEQ ID NO: 73263 - DNA, 25 bp, Homo sapien
aattttgtgtttcgttacctgtcac

SEQ ID NO: 73264 - DNA, 25 bp, Homo sapien
aattttgtgtttggttacctgtcac

SEQ ID NO: 73265 - DNA, 25 bp, Homo sapien
aactagatatttagggtcttctgaa

SEQ ID NO: 73266 - DNA, 25 bp, Homo sapien
aactagatattttgggtcttctgaa

SEQ ID NO: 73267 - DNA, 25 bp, Homo sapien
ctgaaggtttgtacgtctcttggag

SEQ ID NO: 73268 - DNA, 25 bp, Homo sapien
ctgaaggtttgttcgtctcttggag

SEQ ID NO: 73269 - DNA, 25 bp, Homo sapien
gtgtccacaccgatgtctttcggta

SEQ ID NO: 73270 - DNA, 25 bp, Homo sapien
gtgtccacaccgttgtctttcggta

SEQ ID NO: 73271 - DNA, 25 bp, Homo sapien
gactccatctgtagtacgtttgttt

SEQ ID NO: 73272 - DNA, 25 bp, Homo sapien
gactccatctgttgtacgtttgttt

SEQ ID NO: 73273 - DNA, 25 bp, Homo sapien
tgacaattgtgtctcgggtctatac

SEQ ID NO: 73274 - DNA, 25 bp, Homo sapien
tgacaattgtgtgtcgggtctatac

SEQ ID NO: 73275 - DNA, 25 bp, Homo sapien
ttactgaatattcgtcttagtgttc

SEQ ID NO: 73276 - DNA, 25 bp, Homo sapien
ttactgaatattggtcttagtgttc

SEQ ID NO: 73277 - DNA, 25 bp, Homo sapien
cttaacgacatttgtttgggtctac

SEQ ID NO: 73278 - DNA, 25 bp, Homo sapien
cttaacgacattagtttgggtctac

SEQ ID NO: 73279 - DNA, 25 bp, Homo sapien
gctaaaatgtctgatatttgtcttc

SEQ ID NO: 73280 - DNA, 25 bp, Homo sapien
gctaaaatgtctcatatttgtcttc

SEQ ID NO: 73281 - DNA, 25 bp, Homo sapien
gaaattgtacactcgttgtgtcttg

SEQ ID NO: 73282 - DNA, 25 bp, Homo sapien
gaaattgtacacacgttgtgtcttg

SEQ ID NO: 73283 - DNA, 25 bp, Homo sapien
tagaatttcgagttgttcagtccgg

SEQ ID NO: 73284 - DNA, 25 bp, Homo sapien
tagaatttcgagatgttcagtccgg

SEQ ID NO: 73285 - DNA, 25 bp, Homo sapien
tatgaagtaaaagtcacggacacac

SEQ ID NO: 73286 - DNA, 25 bp, Homo sapien
tatgaagtaaaactcacggacacac

SEQ ID NO: 73287 - DNA, 25 bp, Homo sapien
taggaaaaaccgttacagtcgaaag

SEQ ID NO: 73288 - DNA, 25 bp, Homo sapien
taggaaaaaccgatacagtcgaaag

SEQ ID NO: 73289 - DNA, 25 bp, Homo sapien
tcaggtaaattcacgtatgtcgaaa

SEQ ID NO: 73290 - DNA, 25 bp, Homo sapien
tcaggtaaattctcgtatgtcgaaa

SEQ ID NO: 73291 - DNA, 25 bp, Homo sapien
aaccaacacatttgtggtcttaaga

SEQ ID NO: 73292 - DNA, 25 bp, Homo sapien
aaccaacacattagtggtcttaaga

SEQ ID NO: 73293 - DNA, 25 bp, Homo sapien
cttacgataataaccggttgaactt

SEQ ID NO: 73294 - DNA, 25 bp, Homo sapien
cttacgataatatccggttgaactt

SEQ ID NO: 73295 - DNA, 25 bp, Homo sapien
tattgttttaaaaggacttcgaacc

SEQ ID NO: 73296 - DNA, 25 bp, Homo sapien
tattgttttaaatggacttcgaacc

SEQ ID NO: 73297 - DNA, 25 bp, Homo sapien
ctctgggtctagaaggaatgaccac

SEQ ID NO: 73298 - DNA, 25 bp, Homo sapien
ctctgggtctagtaggaatgaccac

SEQ ID NO: 73299 - DNA, 25 bp, Homo sapien
ctgaggcgccttggaagcgaccgac

SEQ ID NO: 73300 - DNA, 25 bp, Homo sapien
ctgaggcgccttcgaagcgaccgac

SEQ ID NO: 73301 - DNA, 25 bp, Homo sapien
ggacgtcggtccacatcgaacccga

SEQ ID NO: 73302 - DNA, 25 bp, Homo sapien
ggacgtcggtcctcatcgaacccga

SEQ ID NO: 73303 - DNA, 25 bp, Homo sapien
atcgagaacggagagtctgaattac

SEQ ID NO: 73304 - DNA, 25 bp, Homo sapien
atcgagaacggacagtctgaattac

SEQ ID NO: 73305 - DNA, 25 bp, Homo sapien
aacaggaaggtagactctgagggtc

SEQ ID NO: 73306 - DNA, 25 bp, Homo sapien
aacaggaaggtacactctgagggtc

SEQ ID NO: 73307 - DNA, 25 bp, Homo sapien
gcaaagagttagagccgtactgtta

SEQ ID NO: 73308 - DNA, 25 bp, Homo sapien
gcaaagagttagtgccgtactgtta

SEQ ID NO: 73309 - DNA, 25 bp, Homo sapien
gacggactgtacattttgtacacga

SEQ ID NO: 73310 - DNA, 25 bp, Homo sapien
gacggactgtactttttgtacacga

SEQ ID NO: 73311 - DNA, 25 bp, Homo sapien
gtctcgacggacttgtggttcacag

SEQ ID NO: 73312 - DNA, 25 bp, Homo sapien
gtctcgacggacatgtggttcacag

SEQ ID NO: 73313 - DNA, 25 bp, Homo sapien
agactcgaccgaatcgaacttcctt

SEQ ID NO: 73314 - DNA, 25 bp, Homo sapien
agactcgaccgattcgaacttcctt

SEQ ID NO: 73315 - DNA, 25 bp, Homo sapien
gacctaccgtaactcaccgtgtctt

SEQ ID NO: 73316 - DNA, 25 bp, Homo sapien
gacctaccgtaagtcaccgtgtctt

SEQ ID NO: 73317 - DNA, 25 bp, Homo sapien
cacacgatctagaaaaacgtccgtt

SEQ ID NO: 73318 - DNA, 25 bp, Homo sapien
cacacgatctagtaaaacgtccgtt

SEQ ID NO: 73319 - DNA, 25 bp, Homo sapien
gaaaacggtcagtaggacacgggtc

SEQ ID NO: 73320 - DNA, 25 bp, Homo sapien
gaaaacggtcagaaggacacgggtc

SEQ ID NO: 73321 - DNA, 25 bp, Homo sapien
caaaatggacgtagagtccgggtcg

SEQ ID NO: 73322 - DNA, 25 bp, Homo sapien
caaaatggacgttgagtccgggtcg

SEQ ID NO: 73323 - DNA, 25 bp, Homo sapien
cacagaaaagttgtgtcggaagtct

SEQ ID NO: 73324 - DNA, 25 bp, Homo sapien
cacagaaaagttctgtcggaagtct

SEQ ID NO: 73325 - DNA, 25 bp, Homo sapien
aacaggtcgtacactttgtggaaga

SEQ ID NO: 73326 - DNA, 25 bp, Homo sapien
aacaggtcgtactctttgtggaaga

SEQ ID NO: 73327 - DNA, 25 bp, Homo sapien
caacagggtcttttctgaaaacagt

SEQ ID NO: 73328 - DNA, 25 bp, Homo sapien
caacagggtcttatctgaaaacagt

SEQ ID NO: 73329 - DNA, 25 bp, Homo sapien
gaacaaaagacatacttaagtcttg

SEQ ID NO: 73330 - DNA, 25 bp, Homo sapien
gaacaaaagacaaacttaagtcttg

SEQ ID NO: 73331 - DNA, 25 bp, Homo sapien
gtgaaaaaacccaggtagaactttt

SEQ ID NO: 73332 - DNA, 25 bp, Homo sapien
gtgaaaaaaccctggtagaactttt

SEQ ID NO: 73333 - DNA, 25 bp, Homo sapien
aaaaaacgactattcgtcagttttg

SEQ ID NO: 73334 - DNA, 25 bp, Homo sapien
aaaaaacgactaatcgtcagttttg

SEQ ID NO: 73335 - DNA, 25 bp, Homo sapien
accccgacggcagagacgaggttcg

SEQ ID NO: 73336 - DNA, 25 bp, Homo sapien
accccgacggcacagacgaggttcg

SEQ ID NO: 73337 - DNA, 25 bp, Homo sapien
ttccccggtccctgtgagtaccgtg

SEQ ID NO: 73338 - DNA, 25 bp, Homo sapien
ttccccggtcccagtgagtaccgtg

SEQ ID NO: 73339 - DNA, 25 bp, Homo sapien
catacaacggcctgtgtcacttgag

SEQ ID NO: 73340 - DNA, 25 bp, Homo sapien
catacaacggccagtgtcacttgag

SEQ ID NO: 73341 - DNA, 25 bp, Homo sapien
gggaccacaccgactggccggtgac

SEQ ID NO: 73342 - DNA, 25 bp, Homo sapien
gggaccacaccgtctggccggtgac

SEQ ID NO: 73343 - DNA, 25 bp, Homo sapien
tcacttctactcgtaccggtacgcg

SEQ ID NO: 73344 - DNA, 25 bp, Homo sapien
tcacttctactcctaccggtacgcg

SEQ ID NO: 73345 - DNA, 25 bp, Homo sapien
tacctgacactaatacgaccgaacg

SEQ ID NO: 73346 - DNA, 25 bp, Homo sapien
tacctgacactattacgaccgaacg

SEQ ID NO: 73347 - DNA, 25 bp, Homo sapien
cgtactattatatcaacaccatcgt

SEQ ID NO: 73348 - DNA, 25 bp, Homo sapien
cgtactattataacaacaccatcgt

SEQ ID NO: 73349 - DNA, 25 bp, Homo sapien
cttcgacacacaaaagacacctcct

SEQ ID NO: 73350 - DNA, 25 bp, Homo sapien
cttcgacacacataagacacctcct

SEQ ID NO: 73351 - DNA, 25 bp, Homo sapien
aaaggttgaaaagacaaacacgttc

SEQ ID NO: 73352 - DNA, 25 bp, Homo sapien
aaaggttgaaaacacaaacacgttc

SEQ ID NO: 73353 - DNA, 25 bp, Homo sapien
cgggtcatgtaaacccatgaattac

SEQ ID NO: 73354 - DNA, 25 bp, Homo sapien
cgggtcatgtaatcccatgaattac

SEQ ID NO: 73355 - DNA, 25 bp, Homo sapien
cccatgtaagtagtcacgaagaata

SEQ ID NO: 73356 - DNA, 25 bp, Homo sapien
cccatgtaagtactcacgaagaata

SEQ ID NO: 73357 - DNA, 25 bp, Homo sapien
aaacgggttatattcgtcaagagtc

SEQ ID NO: 73358 - DNA, 25 bp, Homo sapien
aaacgggttataatcgtcaagagtc

SEQ ID NO: 73359 - DNA, 25 bp, Homo sapien
cctcgtcgttatagtctagacaaat

SEQ ID NO: 73360 - DNA, 25 bp, Homo sapien
cctcgtcgttattgtctagacaaat

SEQ ID NO: 73361 - DNA, 25 bp, Homo sapien
attgtcggcttactacgagcgacct

SEQ ID NO: 73362 - DNA, 25 bp, Homo sapien
attgtcggcttagtacgagcgacct

SEQ ID NO: 73363 - DNA, 25 bp, Homo sapien
ggaggacacttagtcgagactcact

SEQ ID NO: 73364 - DNA, 25 bp, Homo sapien
ggaggacacttactcgagactcact

SEQ ID NO: 73365 - DNA, 25 bp, Homo sapien
gtgttaaactttaaccggtacctac

SEQ ID NO: 73366 - DNA, 25 bp, Homo sapien
gtgttaaacttttaccggtacctac

SEQ ID NO: 73367 - DNA, 25 bp, Homo sapien
cggatgtgaagtttttccctaccac

SEQ ID NO: 73368 - DNA, 25 bp, Homo sapien
cggatgtgaagtatttccctaccac

SEQ ID NO: 73369 - DNA, 25 bp, Homo sapien
ggctatcgttgttttccactcctcc

SEQ ID NO: 73370 - DNA, 25 bp, Homo sapien
ggctatcgttgtattccactcctcc

SEQ ID NO: 73371 - DNA, 25 bp, Homo sapien
ctcccgttgttggtgaggacctccc

SEQ ID NO: 73372 - DNA, 25 bp, Homo sapien
ctcccgttgttgctgaggacctccc

SEQ ID NO: 73373 - DNA, 25 bp, Homo sapien
gcgacctctgttcttggagtcccag

SEQ ID NO: 73374 - DNA, 25 bp, Homo sapien
gcgacctctgttgttggagtcccag

SEQ ID NO: 73375 - DNA, 25 bp, Homo sapien
aggtcaggattctacgggtccccac

SEQ ID NO: 73376 - DNA, 25 bp, Homo sapien
aggtcaggattcaacgggtccccac

SEQ ID NO: 73377 - DNA, 25 bp, Homo sapien
atgtcagagatttaggttttcccgg

SEQ ID NO: 73378 - DNA, 25 bp, Homo sapien
atgtcagagattaaggttttcccgg

SEQ ID NO: 73379 - DNA, 25 bp, Homo sapien
taggagttcctgtttgagacgacga

SEQ ID NO: 73380 - DNA, 25 bp, Homo sapien
taggagttcctgattgagacgacga

SEQ ID NO: 73381 - DNA, 25 bp, Homo sapien
acattatttctctagagttcaagga

SEQ ID NO: 73382 - DNA, 25 bp, Homo sapien
acattatttctcaagagttcaagga

SEQ ID NO: 73383 - DNA, 25 bp, Homo sapien
tttagtctacgaagtcacaagatat

SEQ ID NO: 73384 - DNA, 25 bp, Homo sapien
tttagtctacgatgtcacaagatat

SEQ ID NO: 73385 - DNA, 25 bp, Homo sapien
tccagaccggtcactgccgatgttc

SEQ ID NO: 73386 - DNA, 25 bp, Homo sapien
tccagaccggtctctgccgatgttc

SEQ ID NO: 73387 - DNA, 25 bp, Homo sapien
cacgactgtcagctacgccgaaagc

SEQ ID NO: 73388 - DNA, 25 bp, Homo sapien
cacgactgtcaggtacgccgaaagc

SEQ ID NO: 73389 - DNA, 25 bp, Homo sapien
acagatgtgatatcgtccgcgataa

SEQ ID NO: 73390 - DNA, 25 bp, Homo sapien
acagatgtgataacgtccgcgataa

SEQ ID NO: 73391 - DNA, 25 bp, Homo sapien
gacccgtgttacgaccgtgtaatgt

SEQ ID NO: 73392 - DNA, 25 bp, Homo sapien
gacccgtgttaccaccgtgtaatgt

SEQ ID NO: 73393 - DNA, 25 bp, Homo sapien
caggatttagtttacgttcacaagg

SEQ ID NO: 73394 - DNA, 25 bp, Homo sapien
caggatttagttaacgttcacaagg

SEQ ID NO: 73395 - DNA, 25 bp, Homo sapien
cgtcagggtttataagaggtccaga

SEQ ID NO: 73396 - DNA, 25 bp, Homo sapien
cgtcagggtttaaaagaggtccaga

SEQ ID NO: 73397 - DNA, 25 bp, Homo sapien
aagaggtcgatcgagtccggaaatt

SEQ ID NO: 73398 - DNA, 25 bp, Homo sapien
aagaggtcgatccagtccggaaatt

SEQ ID NO: 73399 - DNA, 25 bp, Homo sapien
tacgatatcttcacttgtgtttatg

SEQ ID NO: 73400 - DNA, 25 bp, Homo sapien
tacgatatcttctcttgtgtttatg

SEQ ID NO: 73401 - DNA, 25 bp, Homo sapien
gaacataggcagattgggtcctacg

SEQ ID NO: 73402 - DNA, 25 bp, Homo sapien
gaacataggcagtttgggtcctacg

SEQ ID NO: 73403 - DNA, 25 bp, Homo sapien
ttatatatgaattgtccggtcgaac

SEQ ID NO: 73404 - DNA, 25 bp, Homo sapien
ttatatatgaatagtccggtcgaac

SEQ ID NO: 73405 - DNA, 25 bp, Homo sapien
gaaagacctttttgatacaccgaaa

SEQ ID NO: 73406 - DNA, 25 bp, Homo sapien
gaaagaccttttagatacaccgaaa

SEQ ID NO: 73407 - DNA, 25 bp, Homo sapien
tcaaatatgtctgaagttttccaga

SEQ ID NO: 73408 - DNA, 25 bp, Homo sapien
tcaaatatgtctcaagttttccaga

SEQ ID NO: 73409 - DNA, 25 bp, Homo sapien
ggcacgaagacctcgtggaggaata

SEQ ID NO: 73410 - DNA, 25 bp, Homo sapien
ggcacgaagaccacgtggaggaata

SEQ ID NO: 73411 - DNA, 25 bp, Homo sapien
acacacataatttcggagtcgtaaa

SEQ ID NO: 73412 - DNA, 25 bp, Homo sapien
acacacataattacggagtcgtaaa

SEQ ID NO: 73413 - DNA, 25 bp, Homo sapien
agaataaacgttcaggatctattac

SEQ ID NO: 73414 - DNA, 25 bp, Homo sapien
agaataaacgttgaggatctattac

SEQ ID NO: 73415 - DNA, 25 bp, Homo sapien
gaaacacagttacaagtctatgtac

SEQ ID NO: 73416 - DNA, 25 bp, Homo sapien
gaaacacagttagaagtctatgtac

SEQ ID NO: 73417 - DNA, 25 bp, Homo sapien
gaaacacccttccagataccgtgta

SEQ ID NO: 73418 - DNA, 25 bp, Homo sapien
gaaacacccttcgagataccgtgta

SEQ ID NO: 73419 - DNA, 25 bp, Homo sapien
tatttgagacacctctggaaatttt

SEQ ID NO: 73420 - DNA, 25 bp, Homo sapien
tatttgagacacgtctggaaatttt

SEQ ID NO: 73421 - DNA, 25 bp, Homo sapien
tgtccgattctggtatcgtcgtttt

SEQ ID NO: 73422 - DNA, 25 bp, Homo sapien
tgtccgattctgctatcgtcgtttt

SEQ ID NO: 73423 - DNA, 25 bp, Homo sapien
ctccacttagagttaccgtagtttt

SEQ ID NO: 73424 - DNA, 25 bp, Homo sapien
ctccacttagagataccgtagtttt

SEQ ID NO: 73425 - DNA, 25 bp, Homo sapien
aatctaaatgtcgaacacgaagatt

SEQ ID NO: 73426 - DNA, 25 bp, Homo sapien
aatctaaatgtccaacacgaagatt

SEQ ID NO: 73427 - DNA, 25 bp, Homo sapien
acaaacttgagaactacgttgtaac

SEQ ID NO: 73428 - DNA, 25 bp, Homo sapien
acaaacttgagatctacgttgtaac

SEQ ID NO: 73429 - DNA, 25 bp, Homo sapien
cataagtaatgaatcgtcttcgttg

SEQ ID NO: 73430 - DNA, 25 bp, Homo sapien
cataagtaatgattcgtcttcgttg

SEQ ID NO: 73431 - DNA, 25 bp, Homo sapien
ctcaaggagatgatcatttataacg

SEQ ID NO: 73432 - DNA, 25 bp, Homo sapien
ctcaaggagatgttcatttataacg

SEQ ID NO: 73433 - DNA, 25 bp, Homo sapien
ctaaggcgtacctgcgacccttcaa

SEQ ID NO: 73434 - DNA, 25 bp, Homo sapien
ctaaggcgtaccagcgacccttcaa

SEQ ID NO: 73435 - DNA, 25 bp, Homo sapien
gaggagcgtcatcaacccgctgaag

SEQ ID NO: 73436 - DNA, 25 bp, Homo sapien
gaggagcgtcatgaacccgctgaag

SEQ ID NO: 73437 - DNA, 25 bp, Homo sapien
cgaggtgcctacagtctcttgtcct

SEQ ID NO: 73438 - DNA, 25 bp, Homo sapien
cgaggtgcctactgtctcttgtcct

SEQ ID NO: 73439 - DNA, 25 bp, Homo sapien
attgtgtctcgggtctatacaaatg

SEQ ID NO: 73440 - DNA, 25 bp, Homo sapien
attgtgtctcggctctatacaaatg

SEQ ID NO: 73441 - DNA, 25 bp, Homo sapien
tgtgtgtctgttctgtcgacaaatg

SEQ ID NO: 73442 - DNA, 25 bp, Homo sapien
tgtgtgtctgttgtgtcgacaaatg

SEQ ID NO: 73443 - DNA, 25 bp, Homo sapien
gtgtgttgtacaagccttaagtcta

SEQ ID NO: 73444 - DNA, 25 bp, Homo sapien
gtgtgttgtacatgccttaagtcta

SEQ ID NO: 73445 - DNA, 25 bp, Homo sapien
atttgtgacacgaccgacagagaag

SEQ ID NO: 73446 - DNA, 25 bp, Homo sapien
atttgtgacacgtccgacagagaag

SEQ ID NO: 73447 - DNA, 25 bp, Homo sapien
gacatcattgacttggcgacgaaag

SEQ ID NO: 73448 - DNA, 25 bp, Homo sapien
gacatcattgacatggcgacgaaag

SEQ ID NO: 73449 - DNA, 25 bp, Homo sapien
ctcttatgagattagggtactcaag

SEQ ID NO: 73450 - DNA, 25 bp, Homo sapien
ctcttatgagataagggtactcaag

SEQ ID NO: 73451 - DNA, 25 bp, Homo sapien
catcctccgagttttcggttcggat

SEQ ID NO: 73452 - DNA, 25 bp, Homo sapien
catcctccgagtattcggttcggat

SEQ ID NO: 73453 - DNA, 25 bp, Homo sapien
tcttccggggagtcactcttcgctt

SEQ ID NO: 73454 - DNA, 25 bp, Homo sapien
tcttccggggagacactcttcgctt

SEQ ID NO: 73455 - DNA, 25 bp, Homo sapien
cgagtcccgggtaccagtcgtgtcg

SEQ ID NO: 73456 - DNA, 25 bp, Homo sapien
cgagtcccgggttccagtcgtgtcg

SEQ ID NO: 73457 - DNA, 25 bp, Homo sapien
ttggtaccggacgtctcccgttgtc

SEQ ID NO: 73458 - DNA, 25 bp, Homo sapien
ttggtaccggacctctcccgttgtc

SEQ ID NO: 73459 - DNA, 25 bp, Homo sapien
actggacgacgctcctctgcatcgg

SEQ ID NO: 73460 - DNA, 25 bp, Homo sapien
actggacgacgcacctctgcatcgg

SEQ ID NO: 73461 - DNA, 25 bp, Homo sapien
catgtaactccgtgtctttcaaacg

SEQ ID NO: 73462 - DNA, 25 bp, Homo sapien
catgtaactccgagtctttcaaacg

SEQ ID NO: 73463 - DNA, 25 bp, Homo sapien
cggtcttccccgagtgtttccgaac

SEQ ID NO: 73464 - DNA, 25 bp, Homo sapien
cggtcttccccgtgtgtttccgaac

SEQ ID NO: 73465 - DNA, 25 bp, Homo sapien
agggtctgccctcagggacccgtga

SEQ ID NO: 73466 - DNA, 25 bp, Homo sapien
agggtctgccctgagggacccgtga

SEQ ID NO: 73467 - DNA, 25 bp, Homo sapien
gacttccgtcgttcggagataatga

SEQ ID NO: 73468 - DNA, 25 bp, Homo sapien
gacttccgtcgtacggagataatga

SEQ ID NO: 73469 - DNA, 25 bp, Homo sapien
atcaaccagttttcggacacctacg

SEQ ID NO: 73470 - DNA, 25 bp, Homo sapien
atcaaccagtttacggacacctacg

SEQ ID NO: 73471 - DNA, 25 bp, Homo sapien
tcgtaacgtgcgtttgactaaaatc

SEQ ID NO: 73472 - DNA, 25 bp, Homo sapien
tcgtaacgtgcgattgactaaaatc

SEQ ID NO: 73473 - DNA, 25 bp, Homo sapien
ctatagggtagattacgaaactaac

SEQ ID NO: 73474 - DNA, 25 bp, Homo sapien
ctatagggtagaatacgaaactaac

SEQ ID NO: 73475 - DNA, 25 bp, Homo sapien
ggcaccaagagtcgtgagaactctc

SEQ ID NO: 73476 - DNA, 25 bp, Homo sapien
ggcaccaagagtggtgagaactctc

SEQ ID NO: 73477 - DNA, 25 bp, Homo sapien
agggcccctgaaggtctcatctctt

SEQ ID NO: 73478 - DNA, 25 bp, Homo sapien
agggcccctgaacgtctcatctctt

SEQ ID NO: 73479 - DNA, 25 bp, Homo sapien
gggatgtcccaggtcctgttctctg

SEQ ID NO: 73480 - DNA, 25 bp, Homo sapien
gggatgtcccagctcctgttctctg

SEQ ID NO: 73481 - DNA, 25 bp, Homo sapien
ggactgctgaaaggtatcctctgct

SEQ ID NO: 73482 - DNA, 25 bp, Homo sapien
ggactgctgaaacgtatcctctgct

SEQ ID NO: 73483 - DNA, 25 bp, Homo sapien
ttttatgcaaaagtctcatagtgac

SEQ ID NO: 73484 - DNA, 25 bp, Homo sapien
ttttatgcaaaactctcatagtgac

SEQ ID NO: 73485 - DNA, 25 bp, Homo sapien
acgtcgaccagagactctagggtca

SEQ ID NO: 73486 - DNA, 25 bp, Homo sapien
acgtcgaccagacactctagggtca

SEQ ID NO: 73487 - DNA, 25 bp, Homo sapien
aactccagaactttctggacgcact

SEQ ID NO: 73488 - DNA, 25 bp, Homo sapien
aactccagaactatctggacgcact

SEQ ID NO: 73489 - DNA, 25 bp, Homo sapien
ataatacaggatctacttacaaagt

SEQ ID NO: 73490 - DNA, 25 bp, Homo sapien
ataatacaggatgtacttacaaagt

SEQ ID NO: 73491 - DNA, 25 bp, Homo sapien
accaaataaggtaccggtaacattt

SEQ ID NO: 73492 - DNA, 25 bp, Homo sapien
accaaataaggttccggtaacattt

SEQ ID NO: 73493 - DNA, 25 bp, Homo sapien
gccgatagaaattcccgtgaccatt

SEQ ID NO: 73494 - DNA, 25 bp, Homo sapien
gccgatagaaatacccgtgaccatt

SEQ ID NO: 73495 - DNA, 25 bp, Homo sapien
caaggaagacgctcgtcacggacta

SEQ ID NO: 73496 - DNA, 25 bp, Homo sapien
caaggaagacgcacgtcacggacta

SEQ ID NO: 73497 - DNA, 25 bp, Homo sapien
tggacggaccgagaagaatgactct

SEQ ID NO: 73498 - DNA, 25 bp, Homo sapien
tggacggaccgacaagaatgactct

SEQ ID NO: 73499 - DNA, 25 bp, Homo sapien
agccgacaccgacaagataccttct

SEQ ID NO: 73500 - DNA, 25 bp, Homo sapien
agccgacaccgagaagataccttct

SEQ ID NO: 73501 - DNA, 25 bp, Homo sapien
gtcgccgggaaggagagacccttac

SEQ ID NO: 73502 - DNA, 25 bp, Homo sapien
gtcgccgggaagcagagacccttac

SEQ ID NO: 73503 - DNA, 25 bp, Homo sapien
gaagccctgaacagaggaacacccc

SEQ ID NO: 73504 - DNA, 25 bp, Homo sapien
gaagccctgaactgaggaacacccc

SEQ ID NO: 73505 - DNA, 25 bp, Homo sapien
ctatcggtccttggacacatcactc

SEQ ID NO: 73506 - DNA, 25 bp, Homo sapien
ctatcggtccttcgacacatcactc

SEQ ID NO: 73507 - DNA, 25 bp, Homo sapien
accgagtcctgagagacgatcatgt

SEQ ID NO: 73508 - DNA, 25 bp, Homo sapien
accgagtcctgacagacgatcatgt

SEQ ID NO: 73509 - DNA, 25 bp, Homo sapien
aggaaccgcgatcaaatgttccgtt

SEQ ID NO: 73510 - DNA, 25 bp, Homo sapien
aggaaccgcgatgaaatgttccgtt

SEQ ID NO: 73511 - DNA, 25 bp, Homo sapien
cagaaaccgatgaaacagttttctt

SEQ ID NO: 73512 - DNA, 25 bp, Homo sapien
cagaaaccgatgtaacagttttctt

SEQ ID NO: 73513 - DNA, 25 bp, Homo sapien
acagaagtccaataacgcttttcga

SEQ ID NO: 73514 - DNA, 25 bp, Homo sapien
acagaagtccaaaaacgcttttcga

SEQ ID NO: 73515 - DNA, 25 bp, Homo sapien
aagaattcagtatacaaatctcagg

SEQ ID NO: 73516 - DNA, 25 bp, Homo sapien
aagaattcagtaaacaaatctcagg

SEQ ID NO: 73517 - DNA, 25 bp, Homo sapien
acactgaagatcaagtagacgctaa

SEQ ID NO: 73518 - DNA, 25 bp, Homo sapien
acactgaagatctagtagacgctaa

SEQ ID NO: 73519 - DNA, 25 bp, Homo sapien
acgacagagggctacggacgtccct

SEQ ID NO: 73520 - DNA, 25 bp, Homo sapien
acgacagagggcaacggacgtccct

SEQ ID NO: 73521 - DNA, 25 bp, Homo sapien
ctaacagaggtgtcccggaccggtg

SEQ ID NO: 73522 - DNA, 25 bp, Homo sapien
ctaacagaggtgacccggaccggtg

SEQ ID NO: 73523 - DNA, 25 bp, Homo sapien
gtaaacggtgtcttccattacctca

SEQ ID NO: 73524 - DNA, 25 bp, Homo sapien
gtaaacggtgtcatccattacctca

SEQ ID NO: 73525 - DNA, 25 bp, Homo sapien
gacagacggtgacatcacttcctga

SEQ ID NO: 73526 - DNA, 25 bp, Homo sapien
gacagacggtgagatcacttcctga

SEQ ID NO: 73527 - DNA, 25 bp, Homo sapien
ttacgtatgtttcgttgttccgtaa

SEQ ID NO: 73528 - DNA, 25 bp, Homo sapien
ttacgtatgtttggttgttccgtaa

SEQ ID NO: 73529 - DNA, 25 bp, Homo sapien
cctgacatgacatggggatccgtga

SEQ ID NO: 73530 - DNA, 25 bp, Homo sapien
cctgacatgacaaggggatccgtga

SEQ ID NO: 73531 - DNA, 25 bp, Homo sapien
tcagcttgaacatccgcatcgcgaa

SEQ ID NO: 73532 - DNA, 25 bp, Homo sapien
tcagcttgaacaaccgcatcgcgaa

SEQ ID NO: 73533 - DNA, 25 bp, Homo sapien
tcatgtgcaacgacccacggaggac

SEQ ID NO: 73534 - DNA, 25 bp, Homo sapien
tcatgtgcaacgtcccacggaggac

SEQ ID NO: 73535 - DNA, 25 bp, Homo sapien
agtcaggacacgtttccaggaccct

SEQ ID NO: 73536 - DNA, 25 bp, Homo sapien
agtcaggacacgattccaggaccct

SEQ ID NO: 73537 - DNA, 25 bp, Homo sapien
tgcttgaactgttcactacagaccc

SEQ ID NO: 73538 - DNA, 25 bp, Homo sapien
tgcttgaactgtacactacagaccc

SEQ ID NO: 73539 - DNA, 25 bp, Homo sapien
tcccatggttagtactactatgccc

SEQ ID NO: 73540 - DNA, 25 bp, Homo sapien
tcccatggttagaactactatgccc

SEQ ID NO: 73541 - DNA, 25 bp, Homo sapien
cgagcgacccatatacagtttcctc

SEQ ID NO: 73542 - DNA, 25 bp, Homo sapien
cgagcgacccatttacagtttcctc

SEQ ID NO: 73543 - DNA, 25 bp, Homo sapien
gagacgcccagattctttacttctc

SEQ ID NO: 73544 - DNA, 25 bp, Homo sapien
gagacgcccagaatctttacttctc

SEQ ID NO: 73545 - DNA, 25 bp, Homo sapien
gagttggaccccttctggtgtcccg

SEQ ID NO: 73546 - DNA, 25 bp, Homo sapien
gagttggaccccatctggtgtcccg

SEQ ID NO: 73547 - DNA, 25 bp, Homo sapien
tatggacccctgacgcgtacttctc

SEQ ID NO: 73548 - DNA, 25 bp, Homo sapien
tatggacccctgtcgcgtacttctc

SEQ ID NO: 73549 - DNA, 25 bp, Homo sapien
tattgacgatccagaaccttcagtt

SEQ ID NO: 73550 - DNA, 25 bp, Homo sapien
tattgacgatcctgaaccttcagtt

SEQ ID NO: 73551 - DNA, 25 bp, Homo sapien
tgtatggtgtccaggccctgtgtgt

SEQ ID NO: 73552 - DNA, 25 bp, Homo sapien
tgtatggtgtcctggccctgtgtgt

SEQ ID NO: 73553 - DNA, 25 bp, Homo sapien
tacggtcacttcctgagtcaaatta

SEQ ID NO: 73554 - DNA, 25 bp, Homo sapien
tacggtcacttcgtgagtcaaatta

SEQ ID NO: 73555 - DNA, 25 bp, Homo sapien
ttcggtattttggtctcttagaaac

SEQ ID NO: 73556 - DNA, 25 bp, Homo sapien
ttcggtattttgctctcttagaaac

SEQ ID NO: 73557 - DNA, 25 bp, Homo sapien
ttcttattctttggacttagggaca

SEQ ID NO: 73558 - DNA, 25 bp, Homo sapien
ttcttattctttcgacttagggaca

SEQ ID NO: 73559 - DNA, 25 bp, Homo sapien
ttcttttccgggtccttccgaaagt

SEQ ID NO: 73560 - DNA, 25 bp, Homo sapien
ttcttttccgggaccttccgaaagt

SEQ ID NO: 73561 - DNA, 25 bp, Homo sapien
ctctgtcgggacaggtatctgaaat

SEQ ID NO: 73562 - DNA, 25 bp, Homo sapien
ctctgtcgggactggtatctgaaat

SEQ ID NO: 73563 - DNA, 25 bp, Homo sapien
atccctcggcgtggaacagtacatg

SEQ ID NO: 73564 - DNA, 25 bp, Homo sapien
atccctcggcgtcgaacagtacatg

SEQ ID NO: 73565 - DNA, 25 bp, Homo sapien
gaagttcccgtccacctttatattg

SEQ ID NO: 73566 - DNA, 25 bp, Homo sapien
gaagttcccgtcgacctttatattg

SEQ ID NO: 73567 - DNA, 25 bp, Homo sapien
gatttttgcacacctgtaacgaata

SEQ ID NO: 73568 - DNA, 25 bp, Homo sapien
gatttttgcacagctgtaacgaata

SEQ ID NO: 73569 - DNA, 25 bp, Homo sapien
tcctgttcgaactctcgcagtacaa

SEQ ID NO: 73570 - DNA, 25 bp, Homo sapien
tcctgttcgaacactcgcagtacaa

SEQ ID NO: 73571 - DNA, 25 bp, Homo sapien
ccgattgtacccactgacaacgaag

SEQ ID NO: 73572 - DNA, 25 bp, Homo sapien
ccgattgtaccctctgacaacgaag

SEQ ID NO: 73573 - DNA, 25 bp, Homo sapien
gacctgcaacgattctaggtcgaag

SEQ ID NO: 73574 - DNA, 25 bp, Homo sapien
gacctgcaacgaatctaggtcgaag

SEQ ID NO: 73575 - DNA, 25 bp, Homo sapien
tagttaccacccgcgacgactcgca

SEQ ID NO: 73576 - DNA, 25 bp, Homo sapien
tagttaccacccccgacgactcgca

SEQ ID NO: 73577 - DNA, 25 bp, Homo sapien
gagcgcatccactctcgacaacgta

SEQ ID NO: 73578 - DNA, 25 bp, Homo sapien
gagcgcatccacactcgacaacgta

SEQ ID NO: 73579 - DNA, 25 bp, Homo sapien
gtcgccaacgacctccgtggtagtg

SEQ ID NO: 73580 - DNA, 25 bp, Homo sapien
gtcgccaacgacgtccgtggtagtg

SEQ ID NO: 73581 - DNA, 25 bp, Homo sapien
agtttaccagttgtcgattaggtcg

SEQ ID NO: 73582 - DNA, 25 bp, Homo sapien
agtttaccagttctcgattaggtcg

SEQ ID NO: 73583 - DNA, 25 bp, Homo sapien
acatcaaaatcattcgttcaggagt

SEQ ID NO: 73584 - DNA, 25 bp, Homo sapien
acatcaaaatcaatcgttcaggagt

SEQ ID NO: 73585 - DNA, 25 bp, Homo sapien
cgactaattttgactgtcacagagg

SEQ ID NO: 73586 - DNA, 25 bp, Homo sapien
cgactaattttgtctgtcacagagg

SEQ ID NO: 73587 - DNA, 25 bp, Homo sapien
ataaaattattcgtattcttaaggt

SEQ ID NO: 73588 - DNA, 25 bp, Homo sapien
ataaaattattcctattcttaaggt

SEQ ID NO: 73589 - DNA, 25 bp, Homo sapien
cgagagttatgttcattcaaacggt

SEQ ID NO: 73590 - DNA, 25 bp, Homo sapien
cgagagttatgtacattcaaacggt

SEQ ID NO: 73591 - DNA, 25 bp, Homo sapien
tctgtggctttttcaatttcggagt

SEQ ID NO: 73592 - DNA, 25 bp, Homo sapien
tctgtggcttttacaatttcggagt

SEQ ID NO: 73593 - DNA, 25 bp, Homo sapien
tgagattttatacataccttaacgg

SEQ ID NO: 73594 - DNA, 25 bp, Homo sapien
tgagattttatagataccttaacgg

SEQ ID NO: 73595 - DNA, 25 bp, Homo sapien
gtggacggttccaggatctaacccg

SEQ ID NO: 73596 - DNA, 25 bp, Homo sapien
gtggacggttcctggatctaacccg

SEQ ID NO: 73597 - DNA, 25 bp, Homo sapien
aaagacgtctcttgaaaacacagta

SEQ ID NO: 73598 - DNA, 25 bp, Homo sapien
aaagacgtctctagaaaacacagta

SEQ ID NO: 73599 - DNA, 25 bp, Homo sapien
aacgtatccgtccaataaacggtac

SEQ ID NO: 73600 - DNA, 25 bp, Homo sapien
aacgtatccgtcgaataaacggtac

SEQ ID NO: 73601 - DNA, 25 bp, Homo sapien
cgatagagtcccgagagacccggtc

SEQ ID NO: 73602 - DNA, 25 bp, Homo sapien
cgatagagtccccagagacccggtc

SEQ ID NO: 73603 - DNA, 25 bp, Homo sapien
cgtatgactcctagagagcgtccca

SEQ ID NO: 73604 - DNA, 25 bp, Homo sapien
cgtatgactccttgagagcgtccca

SEQ ID NO: 73605 - DNA, 25 bp, Homo sapien
aatcgatgtattagggtctagacct

SEQ ID NO: 73606 - DNA, 25 bp, Homo sapien
aatcgatgtatttgggtctagacct

SEQ ID NO: 73607 - DNA, 25 bp, Homo sapien
agtaaggtcttctttggtcttcgac

SEQ ID NO: 73608 - DNA, 25 bp, Homo sapien
agtaaggtcttcattggtcttcgac

SEQ ID NO: 73609 - DNA, 25 bp, Homo sapien
ggagacttaaggtgtgtctcgtacg

SEQ ID NO: 73610 - DNA, 25 bp, Homo sapien
ggagacttaaggagtgtctcgtacg

SEQ ID NO: 73611 - DNA, 25 bp, Homo sapien
ggaggaacctctgaagatcgagttc

SEQ ID NO: 73612 - DNA, 25 bp, Homo sapien
ggaggaacctctcaagatcgagttc

SEQ ID NO: 73613 - DNA, 25 bp, Homo sapien
ccagagtgacttcataaaatagttc

SEQ ID NO: 73614 - DNA, 25 bp, Homo sapien
ccagagtgacttgataaaatagttc

SEQ ID NO: 73615 - DNA, 25 bp, Homo sapien
gtcgtgttccaacagtcgacactct

SEQ ID NO: 73616 - DNA, 25 bp, Homo sapien
gtcgtgttccaagagtcgacactct

SEQ ID NO: 73617 - DNA, 25 bp, Homo sapien
tgactgagtttgtgactacaccgtc

SEQ ID NO: 73618 - DNA, 25 bp, Homo sapien
tgactgagtttgagactacaccgtc

SEQ ID NO: 73619 - DNA, 25 bp, Homo sapien
cgatttgctttaccttctcgaggta

SEQ ID NO: 73620 - DNA, 25 bp, Homo sapien
cgatttgctttagcttctcgaggta

SEQ ID NO: 73621 - DNA, 25 bp, Homo sapien
aacgtctattcttggacattggatc

SEQ ID NO: 73622 - DNA, 25 bp, Homo sapien
aacgtctattctaggacattggatc

SEQ ID NO: 73623 - DNA, 25 bp, Homo sapien
tccactgttactgcaccgtatgtga

SEQ ID NO: 73624 - DNA, 25 bp, Homo sapien
tccactgttactccaccgtatgtga

SEQ ID NO: 73625 - DNA, 25 bp, Homo sapien
gtacctctgtgatcccgtcataaat

SEQ ID NO: 73626 - DNA, 25 bp, Homo sapien
gtacctctgtgaacccgtcataaat

SEQ ID NO: 73627 - DNA, 25 bp, Homo sapien
ggtacctgtccgaaccttcataata

SEQ ID NO: 73628 - DNA, 25 bp, Homo sapien
ggtacctgtccgtaccttcataata

SEQ ID NO: 73629 - DNA, 25 bp, Homo sapien
atgagaatcgccttcaaaggtattt

SEQ ID NO: 73630 - DNA, 25 bp, Homo sapien
atgagaatcgccatcaaaggtattt

SEQ ID NO: 73631 - DNA, 25 bp, Homo sapien
ctggcgtcagacaacccaggttttg

SEQ ID NO: 73632 - DNA, 25 bp, Homo sapien
ctggcgtcagactacccaggttttg

SEQ ID NO: 73633 - DNA, 25 bp, Homo sapien
gggaagtcaactacaaaattgtaca

SEQ ID NO: 73634 - DNA, 25 bp, Homo sapien
gggaagtcaacttcaaaattgtaca

SEQ ID NO: 73635 - DNA, 25 bp, Homo sapien
attactggatactacagaccgttcc

SEQ ID NO: 73636 - DNA, 25 bp, Homo sapien
attactggatacaacagaccgttcc

SEQ ID NO: 73637 - DNA, 25 bp, Homo sapien
ggtttccacctatcagactcttcga

SEQ ID NO: 73638 - DNA, 25 bp, Homo sapien
ggtttccacctaacagactcttcga

SEQ ID NO: 73639 - DNA, 25 bp, Homo sapien
tgtccgtacccgtagagtaacatga

SEQ ID NO: 73640 - DNA, 25 bp, Homo sapien
tgtccgtacccgaagagtaacatga

SEQ ID NO: 73641 - DNA, 25 bp, Homo sapien
gattcgtatacaggtcgtacaggtg

SEQ ID NO: 73642 - DNA, 25 bp, Homo sapien
gattcgtatacacgtcgtacaggtg

SEQ ID NO: 73643 - DNA, 25 bp, Homo sapien
gagacgtatatacacacttaatatt

SEQ ID NO: 73644 - DNA, 25 bp, Homo sapien
gagacgtatatagacacttaatatt

SEQ ID NO: 73645 - DNA, 25 bp, Homo sapien
actagtatattatgaccttgatgtc

SEQ ID NO: 73646 - DNA, 25 bp, Homo sapien
actagtatattaagaccttgatgtc

SEQ ID NO: 73647 - DNA, 25 bp, Homo sapien
gaatcctcttcatgccattcgcgtc

SEQ ID NO: 73648 - DNA, 25 bp, Homo sapien
gaatcctcttcaagccattcgcgtc

SEQ ID NO: 73649 - DNA, 25 bp, Homo sapien
gtacttcttcaggatccttgtctct

SEQ ID NO: 73650 - DNA, 25 bp, Homo sapien
gtacttcttcagcatccttgtctct

SEQ ID NO: 73651 - DNA, 25 bp, Homo sapien
cctcggtttcaactaccgaagtcct

SEQ ID NO: 73652 - DNA, 25 bp, Homo sapien
cctcggtttcaagtaccgaagtcct

SEQ ID NO: 73653 - DNA, 25 bp, Homo sapien
cccacgtttcccacggggagacagt

SEQ ID NO: 73654 - DNA, 25 bp, Homo sapien
cccacgtttccctcggggagacagt

SEQ ID NO: 73655 - DNA, 25 bp, Homo sapien
cctgggtcttgaaccaaacagacat

SEQ ID NO: 73656 - DNA, 25 bp, Homo sapien
cctgggtcttgatccaaacagacat

SEQ ID NO: 73657 - DNA, 25 bp, Homo sapien
ggtccatctcgttcccgaccgggta

SEQ ID NO: 73658 - DNA, 25 bp, Homo sapien
ggtccatctcgtacccgaccgggta

SEQ ID NO: 73659 - DNA, 25 bp, Homo sapien
atgggcttctcgacccttcgacagg

SEQ ID NO: 73660 - DNA, 25 bp, Homo sapien
atgggcttctcgtcccttcgacagg

SEQ ID NO: 73661 - DNA, 25 bp, Homo sapien
acgttttcacttcagtcgttttaag

SEQ ID NO: 73662 - DNA, 25 bp, Homo sapien
acgttttcacttgagtcgttttaag

SEQ ID NO: 73663 - DNA, 25 bp, Homo sapien
ctcgagatttgacttaccttttaag

SEQ ID NO: 73664 - DNA, 25 bp, Homo sapien
ctcgagatttgagttaccttttaag

SEQ ID NO: 73665 - DNA, 25 bp, Homo sapien
cgtctttcgatcttacttcgctcag

SEQ ID NO: 73666 - DNA, 25 bp, Homo sapien
cgtctttcgatcatacttcgctcag

SEQ ID NO: 73667 - DNA, 25 bp, Homo sapien
tctactcaatctgacatagggtcta

SEQ ID NO: 73668 - DNA, 25 bp, Homo sapien
tctactcaatctcacatagggtcta

SEQ ID NO: 73669 - DNA, 25 bp, Homo sapien
aatgctagtactttactgtggtcat

SEQ ID NO: 73670 - DNA, 25 bp, Homo sapien
aatgctagtactatactgtggtcat

SEQ ID NO: 73671 - DNA, 25 bp, Homo sapien
gttcaagtaggttgtgcgtccggag

SEQ ID NO: 73672 - DNA, 25 bp, Homo sapien
gttcaagtaggtagtgcgtccggag

SEQ ID NO: 73673 - DNA, 25 bp, Homo sapien
actgacaagagggtatgtgcgttga

SEQ ID NO: 73674 - DNA, 25 bp, Homo sapien
actgacaagaggctatgtgcgttga

SEQ ID NO: 73675 - DNA, 25 bp, Homo sapien
tatcgtaaaaacctctgtcgatgga

SEQ ID NO: 73676 - DNA, 25 bp, Homo sapien
tatcgtaaaaacgtctgtcgatgga

SEQ ID NO: 73677 - DNA, 25 bp, Homo sapien
cacgatactccctgacctaatgaac

SEQ ID NO: 73678 - DNA, 25 bp, Homo sapien
cacgatactcccagacctaatgaac

SEQ ID NO: 73679 - DNA, 25 bp, Homo sapien
actacatccatactccgacctagaa

SEQ ID NO: 73680 - DNA, 25 bp, Homo sapien
actacatccatagtccgacctagaa

SEQ ID NO: 73681 - DNA, 25 bp, Homo sapien
ggttcctcaactgtagacatcaaat

SEQ ID NO: 73682 - DNA, 25 bp, Homo sapien
ggttcctcaactctagacatcaaat

SEQ ID NO: 73683 - DNA, 25 bp, Homo sapien
gtgtcgtctcaattcaaaagtataa

SEQ ID NO: 73684 - DNA, 25 bp, Homo sapien
gtgtcgtctcaaatcaaaagtataa

SEQ ID NO: 73685 - DNA, 25 bp, Homo sapien
acacggtacacatcaagataaatgt

SEQ ID NO: 73686 - DNA, 25 bp, Homo sapien
acacggtacacaacaagataaatgt

SEQ ID NO: 73687 - DNA, 25 bp, Homo sapien
gaacttcaactgtgtcttatatggt

SEQ ID NO: 73688 - DNA, 25 bp, Homo sapien
gaacttcaactgagtcttatatggt

SEQ ID NO: 73689 - DNA, 25 bp, Homo sapien
caacgctttccttagtggtcttgag

SEQ ID NO: 73690 - DNA, 25 bp, Homo sapien
caacgctttcctaagtggtcttgag

SEQ ID NO: 73691 - DNA, 25 bp, Homo sapien
tctgacagacgctgcgtcgtctctt

SEQ ID NO: 73692 - DNA, 25 bp, Homo sapien
tctgacagacgcagcgtcgtctctt

SEQ ID NO: 73693 - DNA, 25 bp, Homo sapien
aatagacccacgaagccgtcgatcg

SEQ ID NO: 73694 - DNA, 25 bp, Homo sapien
aatagacccacgtagccgtcgatcg

SEQ ID NO: 73695 - DNA, 25 bp, Homo sapien
tacgtaaaccctgctgacagagttt

SEQ ID NO: 73696 - DNA, 25 bp, Homo sapien
tacgtaaaccctcctgacagagttt

SEQ ID NO: 73697 - DNA, 25 bp, Homo sapien
ctcggaccgcaaatgtctacggttt

SEQ ID NO: 73698 - DNA, 25 bp, Homo sapien
ctcggaccgcaattgtctacggttt

SEQ ID NO: 73699 - DNA, 25 bp, Homo sapien
cgccggcgagtccttggtccggctt

SEQ ID NO: 73700 - DNA, 25 bp, Homo sapien
cgccggcgagtcgttggtccggctt

SEQ ID NO: 73701 - DNA, 25 bp, Homo sapien
ctggagcggaagaggtcacgtgcct

SEQ ID NO: 73702 - DNA, 25 bp, Homo sapien
ctggagcggaagtggtcacgtgcct

SEQ ID NO: 73703 - DNA, 25 bp, Homo sapien
ccctggagagattagttagtcacga

SEQ ID NO: 73704 - DNA, 25 bp, Homo sapien
ccctggagagataagttagtcacga

SEQ ID NO: 73705 - DNA, 25 bp, Homo sapien
cacctctgggacaaagtcatctacc

SEQ ID NO: 73706 - DNA, 25 bp, Homo sapien
cacctctgggactaagtcatctacc

SEQ ID NO: 73707 - DNA, 25 bp, Homo sapien
ttcatctcttttcagaataatacaa

SEQ ID NO: 73708 - DNA, 25 bp, Homo sapien
ttcatctcttttgagaataatacaa

SEQ ID NO: 73709 - DNA, 25 bp, Homo sapien
agacaatcggtcataataatcagtt

SEQ ID NO: 73710 - DNA, 25 bp, Homo sapien
agacaatcggtcttaataatcagtt

SEQ ID NO: 73711 - DNA, 25 bp, Homo sapien
ctactacaacatttgtatcatacct

SEQ ID NO: 73712 - DNA, 25 bp, Homo sapien
ctactacaacatatgtatcatacct

SEQ ID NO: 73713 - DNA, 25 bp, Homo sapien
atgggtacaaaacaggtcacgacct

SEQ ID NO: 73714 - DNA, 25 bp, Homo sapien
atgggtacaaaagaggtcacgacct

SEQ ID NO: 73715 - DNA, 25 bp, Homo sapien
taaggagaaagagcagaggtaccca

SEQ ID NO: 73716 - DNA, 25 bp, Homo sapien
taaggagaaagaccagaggtaccca

SEQ ID NO: 73717 - DNA, 25 bp, Homo sapien
attctaaaagatgctaggtgctcct

SEQ ID NO: 73718 - DNA, 25 bp, Homo sapien
attctaaaagatcctaggtgctcct

SEQ ID NO: 73719 - DNA, 25 bp, Homo sapien
accgttaaatgtttcttagttctcc

SEQ ID NO: 73720 - DNA, 25 bp, Homo sapien
accgttaaatgtatcttagttctcc

SEQ ID NO: 73721 - DNA, 25 bp, Homo sapien
taagtaaatacttggttctttcctt

SEQ ID NO: 73722 - DNA, 25 bp, Homo sapien
taagtaaatactaggttctttcctt

SEQ ID NO: 73723 - DNA, 25 bp, Homo sapien
ttgaacattgaggttctctttcgtg

SEQ ID NO: 73724 - DNA, 25 bp, Homo sapien
ttgaacattgagcttctctttcgtg

SEQ ID NO: 73725 - DNA, 25 bp, Homo sapien
gtcttttagtctcacgtcacttgta

SEQ ID NO: 73726 - DNA, 25 bp, Homo sapien
gtcttttagtctgacgtcacttgta

SEQ ID NO: 73727 - DNA, 25 bp, Homo sapien
aagaaggacagtcctactccctaaa

SEQ ID NO: 73728 - DNA, 25 bp, Homo sapien
aagaaggacagtgctactccctaaa

SEQ ID NO: 73729 - DNA, 25 bp, Homo sapien
aggccgcgagtaatggttactaaga

SEQ ID NO: 73730 - DNA, 25 bp, Homo sapien
aggccgcgagtattggttactaaga

SEQ ID NO: 73731 - DNA, 25 bp, Homo sapien
cccgtctggctatcttagtaaccat

SEQ ID NO: 73732 - DNA, 25 bp, Homo sapien
cccgtctggctaacttagtaaccat

SEQ ID NO: 73733 - DNA, 25 bp, Homo sapien
tcatgaccttctaattacatctggg

SEQ ID NO: 73734 - DNA, 25 bp, Homo sapien
tcatgaccttcttattacatctggg

SEQ ID NO: 73735 - DNA, 25 bp, Homo sapien
ttccgtactcctattacctccgtgg

SEQ ID NO: 73736 - DNA, 25 bp, Homo sapien
ttccgtactccttttacctccgtgg

SEQ ID NO: 73737 - DNA, 25 bp, Homo sapien
ttccttgtttcgtatactacatcgg

SEQ ID NO: 73738 - DNA, 25 bp, Homo sapien
ttccttgtttcgaatactacatcgg

SEQ ID NO: 73739 - DNA, 25 bp, Homo sapien
cgacagtcgttctgaggacccaggt

SEQ ID NO: 73740 - DNA, 25 bp, Homo sapien
cgacagtcgttcagaggacccaggt

SEQ ID NO: 73741 - DNA, 25 bp, Homo sapien
tccttcgtcctagtcgcacgacaat

SEQ ID NO: 73742 - DNA, 25 bp, Homo sapien
tccttcgtcctactcgcacgacaat

SEQ ID NO: 73743 - DNA, 25 bp, Homo sapien
cctttagtctcaatcactgacgtga

SEQ ID NO: 73744 - DNA, 25 bp, Homo sapien
cctttagtctcattcactgacgtga

SEQ ID NO: 73745 - DNA, 25 bp, Homo sapien
cgaccatggttattcgtataacgaa

SEQ ID NO: 73746 - DNA, 25 bp, Homo sapien
cgaccatggttaatcgtataacgaa

SEQ ID NO: 73747 - DNA, 25 bp, Homo sapien
acgtcgtcatatagtcactataaga

SEQ ID NO: 73748 - DNA, 25 bp, Homo sapien
acgtcgtcatattgtcactataaga

SEQ ID NO: 73749 - DNA, 25 bp, Homo sapien
aaacggtacctgttacgttggtaaa

SEQ ID NO: 73750 - DNA, 25 bp, Homo sapien
aaacggtacctgatacgttggtaaa

SEQ ID NO: 73751 - DNA, 25 bp, Homo sapien
gttacctaccgacctttctgtccga

SEQ ID NO: 73752 - DNA, 25 bp, Homo sapien
gttacctaccgagctttctgtccga

SEQ ID NO: 73753 - DNA, 25 bp, Homo sapien
taattataccgatgctttgtccgat

SEQ ID NO: 73754 - DNA, 25 bp, Homo sapien
taattataccgaagctttgtccgat

SEQ ID NO: 73755 - DNA, 25 bp, Homo sapien
cgtatggtctacagtttaagtcaga

SEQ ID NO: 73756 - DNA, 25 bp, Homo sapien
cgtatggtctactgtttaagtcaga

SEQ ID NO: 73757 - DNA, 25 bp, Homo sapien
caagatgagatattccgaacagata

SEQ ID NO: 73758 - DNA, 25 bp, Homo sapien
caagatgagataatccgaacagata

SEQ ID NO: 73759 - DNA, 25 bp, Homo sapien
gaggaaaactaatgtcatacaactc

SEQ ID NO: 73760 - DNA, 25 bp, Homo sapien
gaggaaaactaaagtcatacaactc

SEQ ID NO: 73761 - DNA, 25 bp, Homo sapien
gagacggaaagaaaccctgcaacag

SEQ ID NO: 73762 - DNA, 25 bp, Homo sapien
gagacggaaagataccctgcaacag

SEQ ID NO: 73763 - DNA, 25 bp, Homo sapien
cagagtcgtaggacataccgaacca

SEQ ID NO: 73764 - DNA, 25 bp, Homo sapien
cagagtcgtaggtcataccgaacca

SEQ ID NO: 73765 - DNA, 25 bp, Homo sapien
gagtcgagacgacgatccgaaagag

SEQ ID NO: 73766 - DNA, 25 bp, Homo sapien
gagtcgagacgaggatccgaaagag

SEQ ID NO: 73767 - DNA, 25 bp, Homo sapien
gtctcgagtccgaggtttgagttcc

SEQ ID NO: 73768 - DNA, 25 bp, Homo sapien
gtctcgagtccgtggtttgagttcc

SEQ ID NO: 73769 - DNA, 25 bp, Homo sapien
gtcactttttagtgttactgttacc

SEQ ID NO: 73770 - DNA, 25 bp, Homo sapien
gtcactttttagagttactgttacc

SEQ ID NO: 73771 - DNA, 25 bp, Homo sapien
gttgtcgttcttttgcgtcgaaatt

SEQ ID NO: 73772 - DNA, 25 bp, Homo sapien
gttgtcgttcttatgcgtcgaaatt

SEQ ID NO: 73773 - DNA, 25 bp, Homo sapien
gtgtaccaaagaaccctccgacatt

SEQ ID NO: 73774 - DNA, 25 bp, Homo sapien
gtgtaccaaagatccctccgacatt

SEQ ID NO: 73775 - DNA, 25 bp, Homo sapien
ggtggaacgagagacccagtataca

SEQ ID NO: 73776 - DNA, 25 bp, Homo sapien
ggtggaacgagacacccagtataca

SEQ ID NO: 73777 - DNA, 25 bp, Homo sapien
gggtaaagaggtaaacagacactac

SEQ ID NO: 73778 - DNA, 25 bp, Homo sapien
gggtaaagaggttaacagacactac

SEQ ID NO: 73779 - DNA, 25 bp, Homo sapien
gattatcgaccgtttaaacgacact

SEQ ID NO: 73780 - DNA, 25 bp, Homo sapien
gattatcgaccgattaaacgacact

SEQ ID NO: 73781 - DNA, 25 bp, Homo sapien
tcttaggaccgaacgacgaactcag

SEQ ID NO: 73782 - DNA, 25 bp, Homo sapien
tcttaggaccgatcgacgaactcag

SEQ ID NO: 73783 - DNA, 25 bp, Homo sapien
tactttggtacaagtaggaccgcga

SEQ ID NO: 73784 - DNA, 25 bp, Homo sapien
tactttggtacatgtaggaccgcga

SEQ ID NO: 73785 - DNA, 25 bp, Homo sapien
gtttttgtgacgtgtcgacgcccta

SEQ ID NO: 73786 - DNA, 25 bp, Homo sapien
gtttttgtgacgagtcgacgcccta

SEQ ID NO: 73787 - DNA, 25 bp, Homo sapien
caattcccggtctgggtcagactat

SEQ ID NO: 73788 - DNA, 25 bp, Homo sapien
caattcccggtcagggtcagactat

SEQ ID NO: 73789 - DNA, 25 bp, Homo sapien
tgaactttctcggaagtttatttac

SEQ ID NO: 73790 - DNA, 25 bp, Homo sapien
tgaactttctcgcaagtttatttac

SEQ ID NO: 73791 - DNA, 25 bp, Homo sapien
gtcagggacctcaaccccgggagga

SEQ ID NO: 73792 - DNA, 25 bp, Homo sapien
gtcagggacctctaccccgggagga

SEQ ID NO: 73793 - DNA, 25 bp, Homo sapien
agtatcggtcgaacccggtcgagga

SEQ ID NO: 73794 - DNA, 25 bp, Homo sapien
agtatcggtcgatcccggtcgagga

SEQ ID NO: 73795 - DNA, 25 bp, Homo sapien
ggaaggaaccggaacccagtaagca

SEQ ID NO: 73796 - DNA, 25 bp, Homo sapien
ggaaggaaccggtacccagtaagca

SEQ ID NO: 73797 - DNA, 25 bp, Homo sapien
gtgcggaacccctgacgcaaaccga

SEQ ID NO: 73798 - DNA, 25 bp, Homo sapien
gtgcggaaccccagacgcaaaccga

SEQ ID NO: 73799 - DNA, 25 bp, Homo sapien
gagaacggaagaaccgaaactacta

SEQ ID NO: 73800 - DNA, 25 bp, Homo sapien
gagaacggaagatccgaaactacta

SEQ ID NO: 73801 - DNA, 25 bp, Homo sapien
gagagagagaagtcgtccacatctt

SEQ ID NO: 73802 - DNA, 25 bp, Homo sapien
gagagagagaagacgtccacatctt

SEQ ID NO: 73803 - DNA, 25 bp, Homo sapien
gtggtggtccggacaacgatatctc

SEQ ID NO: 73804 - DNA, 25 bp, Homo sapien
gtggtggtccggtcaacgatatctc

SEQ ID NO: 73805 - DNA, 25 bp, Homo sapien
actgttcaggtggttctacgtatgt

SEQ ID NO: 73806 - DNA, 25 bp, Homo sapien
actgttcaggtgcttctacgtatgt

SEQ ID NO: 73807 - DNA, 25 bp, Homo sapien
tagactagactcgtttcgactgttt

SEQ ID NO: 73808 - DNA, 25 bp, Homo sapien
tagactagactcctttcgactgttt

SEQ ID NO: 73809 - DNA, 25 bp, Homo sapien
taaaattgacttttcggtgtcgtct

SEQ ID NO: 73810 - DNA, 25 bp, Homo sapien
taaaattgacttatcggtgtcgtct

SEQ ID NO: 73811 - DNA, 25 bp, Homo sapien
gaacattatatcgatcgatgtactt

SEQ ID NO: 73812 - DNA, 25 bp, Homo sapien
gaacattatatccatcgatgtactt

SEQ ID NO: 73813 - DNA, 25 bp, Homo sapien
gtcgtatttatttcccttgtgtctt

SEQ ID NO: 73814 - DNA, 25 bp, Homo sapien
gtcgtatttattacccttgtgtctt

SEQ ID NO: 73815 - DNA, 25 bp, Homo sapien
actcgtggtatcaaatgttcatctt

SEQ ID NO: 73816 - DNA, 25 bp, Homo sapien
actcgtggtatctaatgttcatctt

SEQ ID NO: 73817 - DNA, 25 bp, Homo sapien
taccgtgggtttctcttcgagactt

SEQ ID NO: 73818 - DNA, 25 bp, Homo sapien
taccgtgggtttgtcttcgagactt

SEQ ID NO: 73819 - DNA, 25 bp, Homo sapien
ccgatgtatgtgagatgtgtacaca

SEQ ID NO: 73820 - DNA, 25 bp, Homo sapien
ccgatgtatgtgtgatgtgtacaca

SEQ ID NO: 73821 - DNA, 25 bp, Homo sapien
gttattaccaggaacaagtactctt

SEQ ID NO: 73822 - DNA, 25 bp, Homo sapien
gttattaccaggtacaagtactctt

SEQ ID NO: 73823 - DNA, 25 bp, Homo sapien
atgtggggtctataaaaacccctct

SEQ ID NO: 73824 - DNA, 25 bp, Homo sapien
atgtggggtctaaaaaaacccctct

SEQ ID NO: 73825 - DNA, 25 bp, Homo sapien
ggtgggtcgagaacatcaaccccta

SEQ ID NO: 73826 - DNA, 25 bp, Homo sapien
ggtgggtcgagatcatcaaccccta

SEQ ID NO: 73827 - DNA, 25 bp, Homo sapien
aaggtaaaacgaaagaacccacatg

SEQ ID NO: 73828 - DNA, 25 bp, Homo sapien
aaggtaaaacgatagaacccacatg

SEQ ID NO: 73829 - DNA, 25 bp, Homo sapien
cttgagtcacccagaacacccgatg

SEQ ID NO: 73830 - DNA, 25 bp, Homo sapien
cttgagtcaccctgaacacccgatg

SEQ ID NO: 73831 - DNA, 25 bp, Homo sapien
gtgggaatcacagaacgacctatat

SEQ ID NO: 73832 - DNA, 25 bp, Homo sapien
gtgggaatcacacaacgacctatat

SEQ ID NO: 73833 - DNA, 25 bp, Homo sapien
ggtccatctataaagtcttcgttct

SEQ ID NO: 73834 - DNA, 25 bp, Homo sapien
ggtccatctatatagtcttcgttct

SEQ ID NO: 73835 - DNA, 25 bp, Homo sapien
acgtgttacatcacttgtgttgttt

SEQ ID NO: 73836 - DNA, 25 bp, Homo sapien
acgtgttacatctcttgtgttgttt

SEQ ID NO: 73837 - DNA, 25 bp, Homo sapien
attggtactgacttctttgtcataa

SEQ ID NO: 73838 - DNA, 25 bp, Homo sapien
attggtactgacatctttgtcataa

SEQ ID NO: 73839 - DNA, 25 bp, Homo sapien
cggtaggatacttggtgtgacagac

SEQ ID NO: 73840 - DNA, 25 bp, Homo sapien
cggtaggatactaggtgtgacagac

SEQ ID NO: 73841 - DNA, 25 bp, Homo sapien
ctaccggacgtcacgagatagagaa

SEQ ID NO: 73842 - DNA, 25 bp, Homo sapien
ctaccggacgtctcgagatagagaa

SEQ ID NO: 73843 - DNA, 25 bp, Homo sapien
ttcaagaacactgactggtcagaag

SEQ ID NO: 73844 - DNA, 25 bp, Homo sapien
ttcaagaacactcactggtcagaag

SEQ ID NO: 73845 - DNA, 25 bp, Homo sapien
tattgtatacaccaaactaggagtc

SEQ ID NO: 73846 - DNA, 25 bp, Homo sapien
tattgtatacacgaaactaggagtc

SEQ ID NO: 73847 - DNA, 25 bp, Homo sapien
tctatgctgtgaaactatccttgtg

SEQ ID NO: 73848 - DNA, 25 bp, Homo sapien
tctatgctgtgatactatccttgtg

SEQ ID NO: 73849 - DNA, 25 bp, Homo sapien
ataacttaagacctcgtcgattaga

SEQ ID NO: 73850 - DNA, 25 bp, Homo sapien
ataacttaagacgtcgtcgattaga

SEQ ID NO: 73851 - DNA, 25 bp, Homo sapien
aacaagagaaacagtgtcgcaagat

SEQ ID NO: 73852 - DNA, 25 bp, Homo sapien
aacaagagaaactgtgtcgcaagat

SEQ ID NO: 73853 - DNA, 25 bp, Homo sapien
actatggaagactttacaaagtacg

SEQ ID NO: 73854 - DNA, 25 bp, Homo sapien
actatggaagacattacaaagtacg

SEQ ID NO: 73855 - DNA, 25 bp, Homo sapien
acgactccttaaagttataccagcg

SEQ ID NO: 73856 - DNA, 25 bp, Homo sapien
acgactccttaatgttataccagcg

SEQ ID NO: 73857 - DNA, 25 bp, Homo sapien
agataccgtactaactttctgatag

SEQ ID NO: 73858 - DNA, 25 bp, Homo sapien
agataccgtacttactttctgatag

SEQ ID NO: 73859 - DNA, 25 bp, Homo sapien
cccgagacgtccttactttctcatg

SEQ ID NO: 73860 - DNA, 25 bp, Homo sapien
cccgagacgtccatactttctcatg

SEQ ID NO: 73861 - DNA, 25 bp, Homo sapien
gtcaaagggactctcgtctcctcgt

SEQ ID NO: 73862 - DNA, 25 bp, Homo sapien
gtcaaagggactgtcgtctcctcgt

SEQ ID NO: 73863 - DNA, 25 bp, Homo sapien
gtaaagtaacgtcgactccttatat

SEQ ID NO: 73864 - DNA, 25 bp, Homo sapien
gtaaagtaacgtggactccttatat

SEQ ID NO: 73865 - DNA, 25 bp, Homo sapien
aaagaacgagggacgtcgactctta

SEQ ID NO: 73866 - DNA, 25 bp, Homo sapien
aaagaacgagggtcgtcgactctta

SEQ ID NO: 73867 - DNA, 25 bp, Homo sapien
acgaccaagacgacggtcggctgaa

SEQ ID NO: 73868 - DNA, 25 bp, Homo sapien
acgaccaagacgtcggtcggctgaa

SEQ ID NO: 73869 - DNA, 25 bp, Homo sapien
ggacaacaatatgctcggttagaat

SEQ ID NO: 73870 - DNA, 25 bp, Homo sapien
ggacaacaatatcctcggttagaat

SEQ ID NO: 73871 - DNA, 25 bp, Homo sapien
aataaaacagactgatctgacgtat

SEQ ID NO: 73872 - DNA, 25 bp, Homo sapien
aataaaacagacagatctgacgtat

SEQ ID NO: 73873 - DNA, 25 bp, Homo sapien
tgaaaatcgtgtcacatatgtacga

SEQ ID NO: 73874 - DNA, 25 bp, Homo sapien
tgaaaatcgtgtgacatatgtacga

SEQ ID NO: 73875 - DNA, 25 bp, Homo sapien
agtgatctaccgtgacataacctat

SEQ ID NO: 73876 - DNA, 25 bp, Homo sapien
agtgatctaccgagacataacctat

SEQ ID NO: 73877 - DNA, 25 bp, Homo sapien
ggattacgttctctcaggaattcta

SEQ ID NO: 73878 - DNA, 25 bp, Homo sapien
ggattacgttctgtcaggaattcta

SEQ ID NO: 73879 - DNA, 25 bp, Homo sapien
ggattctgttcttcgatcaagttta

SEQ ID NO: 73880 - DNA, 25 bp, Homo sapien
ggattctgttctacgatcaagttta

SEQ ID NO: 73881 - DNA, 25 bp, Homo sapien
ctttgtgtttgtcagttagggtcac

SEQ ID NO: 73882 - DNA, 25 bp, Homo sapien
ctttgtgtttgtgagttagggtcac

SEQ ID NO: 73883 - DNA, 25 bp, Homo sapien
aacttgtgcttctggagttttaaca

SEQ ID NO: 73884 - DNA, 25 bp, Homo sapien
aacttgtgcttcaggagttttaaca

SEQ ID NO: 73885 - DNA, 25 bp, Homo sapien
tgagacctttgtcagttttcgacga

SEQ ID NO: 73886 - DNA, 25 bp, Homo sapien
tgagacctttgtgagttttcgacga

SEQ ID NO: 73887 - DNA, 25 bp, Homo sapien
ctcggtccacttcgtgctttcggac

SEQ ID NO: 73888 - DNA, 25 bp, Homo sapien
ctcggtccacttggtgctttcggac

SEQ ID NO: 73889 - DNA, 25 bp, Homo sapien
ggattacattgtagtaccttcggat

SEQ ID NO: 73890 - DNA, 25 bp, Homo sapien
ggattacattgttgtaccttcggat

SEQ ID NO: 73891 - DNA, 25 bp, Homo sapien
atggtaatttgtctctgatcgtgac

SEQ ID NO: 73892 - DNA, 25 bp, Homo sapien
atggtaatttgtgtctgatcgtgac

SEQ ID NO: 73893 - DNA, 25 bp, Homo sapien
ttatcagagtttctcttaggtagtc

SEQ ID NO: 73894 - DNA, 25 bp, Homo sapien
ttatcagagtttgtcttaggtagtc

SEQ ID NO: 73895 - DNA, 25 bp, Homo sapien
gtcaccgagatttttgtcgggttac

SEQ ID NO: 73896 - DNA, 25 bp, Homo sapien
gtcaccgagattattgtcgggttac

SEQ ID NO: 73897 - DNA, 25 bp, Homo sapien
gcaaataaatgattctctgtcgttc

SEQ ID NO: 73898 - DNA, 25 bp, Homo sapien
gcaaataaatgaatctctgtcgttc

SEQ ID NO: 73899 - DNA, 25 bp, Homo sapien
gaacattatatgtgtctgtgtcctc

SEQ ID NO: 73900 - DNA, 25 bp, Homo sapien
gaacattatatgagtctgtgtcctc

SEQ ID NO: 73901 - DNA, 25 bp, Homo sapien
aatattatcacgatgtttcgccggt

SEQ ID NO: 73902 - DNA, 25 bp, Homo sapien
aatattatcacgttgtttcgccggt

SEQ ID NO: 73903 - DNA, 25 bp, Homo sapien
tactaagggaaaagtcaggacacat

SEQ ID NO: 73904 - DNA, 25 bp, Homo sapien
tactaagggaaatgtcaggacacat

SEQ ID NO: 73905 - DNA, 25 bp, Homo sapien
tgtagaaatcactctcagtgaaagt

SEQ ID NO: 73906 - DNA, 25 bp, Homo sapien
tgtagaaatcacactcagtgaaagt

SEQ ID NO: 73907 - DNA, 25 bp, Homo sapien
ttgaacaattctcacgtataggaaa

SEQ ID NO: 73908 - DNA, 25 bp, Homo sapien
ttgaacaattctgacgtataggaaa

SEQ ID NO: 73909 - DNA, 25 bp, Homo sapien
aagaacccgttctgagttcggaaga

SEQ ID NO: 73910 - DNA, 25 bp, Homo sapien
aagaacccgttcagagttcggaaga

SEQ ID NO: 73911 - DNA, 25 bp, Homo sapien
acggtacatcataccgtgttgaaca

SEQ ID NO: 73912 - DNA, 25 bp, Homo sapien
acggtacatcattccgtgttgaaca

SEQ ID NO: 73913 - DNA, 25 bp, Homo sapien
tttggatttaatcgacttgtacctc

SEQ ID NO: 73914 - DNA, 25 bp, Homo sapien
tttggatttaatggacttgtacctc

SEQ ID NO: 73915 - DNA, 25 bp, Homo sapien
tttctggtctagatggatgtgtgcc

SEQ ID NO: 73916 - DNA, 25 bp, Homo sapien
tttctggtctagttggatgtgtgcc

SEQ ID NO: 73917 - DNA, 25 bp, Homo sapien
acctgatggtcatttgaagacaccc

SEQ ID NO: 73918 - DNA, 25 bp, Homo sapien
acctgatggtcaattgaagacaccc

SEQ ID NO: 73919 - DNA, 25 bp, Homo sapien
gagctctgtcgacttccgaacccga

SEQ ID NO: 73920 - DNA, 25 bp, Homo sapien
gagctctgtcgagttccgaacccga

SEQ ID NO: 73921 - DNA, 25 bp, Homo sapien
attcgttacgagttgaccggaatga

SEQ ID NO: 73922 - DNA, 25 bp, Homo sapien
attcgttacgagatgaccggaatga

SEQ ID NO: 73923 - DNA, 25 bp, Homo sapien
tctaagtcaggagactcggagggtc

SEQ ID NO: 73924 - DNA, 25 bp, Homo sapien
tctaagtcaggacactcggagggtc

SEQ ID NO: 73925 - DNA, 25 bp, Homo sapien
cagagagaggtgggtgcgacgggtc

SEQ ID NO: 73926 - DNA, 25 bp, Homo sapien
cagagagaggtgcgtgcgacgggtc

SEQ ID NO: 73927 - DNA, 25 bp, Homo sapien
agagagacgtgacttgattcagtac

SEQ ID NO: 73928 - DNA, 25 bp, Homo sapien
agagagacgtgagttgattcagtac

SEQ ID NO: 73929 - DNA, 25 bp, Homo sapien
gtaccacgagtctgttggtctcgga

SEQ ID NO: 73930 - DNA, 25 bp, Homo sapien
gtaccacgagtcagttggtctcgga

SEQ ID NO: 73931 - DNA, 25 bp, Homo sapien
gaagatgacagaataatcttcctat

SEQ ID NO: 73932 - DNA, 25 bp, Homo sapien
gaagatgacagattaatcttcctat

SEQ ID NO: 73933 - DNA, 25 bp, Homo sapien
gactcgtcctaatggtaccgttgtt

SEQ ID NO: 73934 - DNA, 25 bp, Homo sapien
gactcgtcctaaaggtaccgttgtt

SEQ ID NO: 73935 - DNA, 25 bp, Homo sapien
ctatacggttagaacggaagcactt

SEQ ID NO: 73936 - DNA, 25 bp, Homo sapien
ctatacggttagtacggaagcactt

SEQ ID NO: 73937 - DNA, 25 bp, Homo sapien
agtaaaaggccgtaggactcggctg

SEQ ID NO: 73938 - DNA, 25 bp, Homo sapien
agtaaaaggccgaaggactcggctg

SEQ ID NO: 73939 - DNA, 25 bp, Homo sapien
acaaagaggcgaagacccgtgcgag

SEQ ID NO: 73940 - DNA, 25 bp, Homo sapien
acaaagaggcgatgacccgtgcgag

SEQ ID NO: 73941 - DNA, 25 bp, Homo sapien
ccaagaagagcttccgcgcgaggtc

SEQ ID NO: 73942 - DNA, 25 bp, Homo sapien
ccaagaagagctaccgcgcgaggtc

SEQ ID NO: 73943 - DNA, 25 bp, Homo sapien
aacaagcgtacagttgttggacaga

SEQ ID NO: 73944 - DNA, 25 bp, Homo sapien
aacaagcgtacacttgttggacaga

SEQ ID NO: 73945 - DNA, 25 bp, Homo sapien
aaagaggtctttgtgctagtaaagt

SEQ ID NO: 73946 - DNA, 25 bp, Homo sapien
aaagaggtctttctgctagtaaagt

SEQ ID NO: 73947 - DNA, 25 bp, Homo sapien
ctaaagacgatgtctgtaagtcatg

SEQ ID NO: 73948 - DNA, 25 bp, Homo sapien
ctaaagacgatgactgtaagtcatg

SEQ ID NO: 73949 - DNA, 25 bp, Homo sapien
gaaaaaactactacatggcttgtgt

SEQ ID NO: 73950 - DNA, 25 bp, Homo sapien
gaaaaaactacttcatggcttgtgt

SEQ ID NO: 73951 - DNA, 25 bp, Homo sapien
gaaaacgaaaccattccggtttgtg

SEQ ID NO: 73952 - DNA, 25 bp, Homo sapien
gaaaacgaaacctttccggtttgtg

SEQ ID NO: 73953 - DNA, 25 bp, Homo sapien
agcgccgacggcttcaggtgttcgc

SEQ ID NO: 73954 - DNA, 25 bp, Homo sapien
agcgccgacggcatcaggtgttcgc

SEQ ID NO: 73955 - DNA, 25 bp, Homo sapien
cccgtcttctccatgtagtctcgtg

SEQ ID NO: 73956 - DNA, 25 bp, Homo sapien
cccgtcttctccttgtagtctcgtg

SEQ ID NO: 73957 - DNA, 25 bp, Homo sapien
ccaacacctgttacgtgttattgag

SEQ ID NO: 73958 - DNA, 25 bp, Homo sapien
ccaacacctgtttcgtgttattgag

SEQ ID NO: 73959 - DNA, 25 bp, Homo sapien
gcagacacgccgtctcggccttgta

SEQ ID NO: 73960 - DNA, 25 bp, Homo sapien
gcagacacgccgactcggccttgta

SEQ ID NO: 73961 - DNA, 25 bp, Homo sapien
gctaccggcactggtccgactacga

SEQ ID NO: 73962 - DNA, 25 bp, Homo sapien
gctaccggcactcgtccgactacga

SEQ ID NO: 73963 - DNA, 25 bp, Homo sapien
tacctgacgtctatgacgacgaacg

SEQ ID NO: 73964 - DNA, 25 bp, Homo sapien
tacctgacgtctttgacgacgaacg

SEQ ID NO: 73965 - DNA, 25 bp, Homo sapien
gtcgtcgtcctatctaacaacatcg

SEQ ID NO: 73966 - DNA, 25 bp, Homo sapien
gtcgtcgtcctaactaacaacatcg

SEQ ID NO: 73967 - DNA, 25 bp, Homo sapien
ccttgaactaccaagaacagttccg

SEQ ID NO: 73968 - DNA, 25 bp, Homo sapien
ccttgaactacctagaacagttccg

SEQ ID NO: 73969 - DNA, 25 bp, Homo sapien
cgagttgaaaagtgacaacacttgt

SEQ ID NO: 73970 - DNA, 25 bp, Homo sapien
cgagttgaaaagagacaacacttgt

SEQ ID NO: 73971 - DNA, 25 bp, Homo sapien
ggtggaagttaaaccctacaaatta

SEQ ID NO: 73972 - DNA, 25 bp, Homo sapien
ggtggaagttaatccctacaaatta

SEQ ID NO: 73973 - DNA, 25 bp, Homo sapien
gatcgtaagtccttcacagatatat

SEQ ID NO: 73974 - DNA, 25 bp, Homo sapien
gatcgtaagtccatcacagatatat

SEQ ID NO: 73975 - DNA, 25 bp, Homo sapien
aaacggtagagttaaaccataagtc

SEQ ID NO: 73976 - DNA, 25 bp, Homo sapien
aaacggtagagtaaaaccataagtc

SEQ ID NO: 73977 - DNA, 25 bp, Homo sapien
ctgtcgagtcgaagtcttataacta

SEQ ID NO: 73978 - DNA, 25 bp, Homo sapien
ctgtcgagtcgatgtcttataacta

SEQ ID NO: 73979 - DNA, 25 bp, Homo sapien
cgtacgagcgttactagtaggtacc

SEQ ID NO: 73980 - DNA, 25 bp, Homo sapien
cgtacgagcgtttctagtaggtacc

SEQ ID NO: 73981 - DNA, 25 bp, Homo sapien
ggagacgcgcgttatagtcgagccc

SEQ ID NO: 73982 - DNA, 25 bp, Homo sapien
ggagacgcgcgtaatagtcgagccc

SEQ ID NO: 73983 - DNA, 25 bp, Homo sapien
ggttagaaccacaaccgtcgacccg

SEQ ID NO: 73984 - DNA, 25 bp, Homo sapien
ggttagaaccactaccgtcgacccg

SEQ ID NO: 73985 - DNA, 25 bp, Homo sapien
ttttgaagtcgcattcctacgaccc

SEQ ID NO: 73986 - DNA, 25 bp, Homo sapien
ttttgaagtcgctttcctacgaccc

SEQ ID NO: 73987 - DNA, 25 bp, Homo sapien
ggtaaagttgttttcctaccactcc

SEQ ID NO: 73988 - DNA, 25 bp, Homo sapien
ggtaaagttgttatcctaccactcc

SEQ ID NO: 73989 - DNA, 25 bp, Homo sapien
tacagggtttgcagtggtctctccc

SEQ ID NO: 73990 - DNA, 25 bp, Homo sapien
tacagggtttgctgtggtctctccc

SEQ ID NO: 73991 - DNA, 25 bp, Homo sapien
tgcacctatgttctgggagtatcaa

SEQ ID NO: 73992 - DNA, 25 bp, Homo sapien
tgcacctatgttgtgggagtatcaa

SEQ ID NO: 73993 - DNA, 25 bp, Homo sapien
gttaaacgatgtagagggtccccac

SEQ ID NO: 73994 - DNA, 25 bp, Homo sapien
gttaaacgatgttgagggtccccac

SEQ ID NO: 73995 - DNA, 25 bp, Homo sapien
acataaacgtatttgggttcctccc

SEQ ID NO: 73996 - DNA, 25 bp, Homo sapien
acataaacgtatatgggttcctccc

SEQ ID NO: 73997 - DNA, 25 bp, Homo sapien
ttgaagttccggtctacgagtcgcc

SEQ ID NO: 73998 - DNA, 25 bp, Homo sapien
ttgaagttccggactacgagtcgcc

SEQ ID NO: 73999 - DNA, 25 bp, Homo sapien
acgaatttgttgtgtcttcaaggac

SEQ ID NO: 74000 - DNA, 25 bp, Homo sapien
acgaatttgttgagtcttcaaggac

SEQ ID NO: 74001 - DNA, 25 bp, Homo sapien
gacaaattttctgatcccaagacga

SEQ ID NO: 74002 - DNA, 25 bp, Homo sapien
gacaaattttctcatcccaagacga

SEQ ID NO: 74003 - DNA, 25 bp, Homo sapien
tcaaaaccgtctactcccgaactta

SEQ ID NO: 74004 - DNA, 25 bp, Homo sapien
tcaaaaccgtcttctcccgaactta

SEQ ID NO: 74005 - DNA, 25 bp, Homo sapien
aacacctgtcacctacttcaaagac

SEQ ID NO: 74006 - DNA, 25 bp, Homo sapien
aacacctgtcacgtacttcaaagac

SEQ ID NO: 74007 - DNA, 25 bp, Homo sapien
acgatgtcgacttacctaagataag

SEQ ID NO: 74008 - DNA, 25 bp, Homo sapien
acgatgtcgactaacctaagataag

SEQ ID NO: 74009 - DNA, 25 bp, Homo sapien
ggctccggtatacgacacgtgaatg

SEQ ID NO: 74010 - DNA, 25 bp, Homo sapien
ggctccggtataggacacgtgaatg

SEQ ID NO: 74011 - DNA, 25 bp, Homo sapien
ggtagtcctgttacgtttactaagg

SEQ ID NO: 74012 - DNA, 25 bp, Homo sapien
ggtagtcctgtttcgtttactaagg

SEQ ID NO: 74013 - DNA, 25 bp, Homo sapien
tccgggtcacagtatcgggtcaaag

SEQ ID NO: 74014 - DNA, 25 bp, Homo sapien
tccgggtcacagaatcgggtcaaag

SEQ ID NO: 74015 - DNA, 25 bp, Homo sapien
cagatacgactggaaccggaaatgt

SEQ ID NO: 74016 - DNA, 25 bp, Homo sapien
cagatacgactgcaaccggaaatgt

SEQ ID NO: 74017 - DNA, 25 bp, Homo sapien
acgatatcttcacttgtgtttatgt

SEQ ID NO: 74018 - DNA, 25 bp, Homo sapien
acgatatcttcagttgtgtttatgt

SEQ ID NO: 74019 - DNA, 25 bp, Homo sapien
aactattaacaggtcttggtctcta

SEQ ID NO: 74020 - DNA, 25 bp, Homo sapien
aactattaacagctcttggtctcta

SEQ ID NO: 74021 - DNA, 25 bp, Homo sapien
tacttgacatacttctcggtgatcg

SEQ ID NO: 74022 - DNA, 25 bp, Homo sapien
tacttgacatacatctcggtgatcg

SEQ ID NO: 74023 - DNA, 25 bp, Homo sapien
caaagatttatgtaatacccgaaag

SEQ ID NO: 74024 - DNA, 25 bp, Homo sapien
caaagatttatgaaatacccgaaag

SEQ ID NO: 74025 - DNA, 25 bp, Homo sapien
gaaaatatgtctagattttccacag

SEQ ID NO: 74026 - DNA, 25 bp, Homo sapien
gaaaatatgtcttgattttccacag

SEQ ID NO: 74027 - DNA, 25 bp, Homo sapien
cgcgacagagactccgggaggaaac

SEQ ID NO: 74028 - DNA, 25 bp, Homo sapien
cgcgacagagacaccgggaggaaac

SEQ ID NO: 74029 - DNA, 25 bp, Homo sapien
acaactaaattctgggagtcgttaa

SEQ ID NO: 74030 - DNA, 25 bp, Homo sapien
acaactaaattcagggagtcgttaa

SEQ ID NO: 74031 - DNA, 25 bp, Homo sapien
gaaacaataatacaggatctactta

SEQ ID NO: 74032 - DNA, 25 bp, Homo sapien
gaaacaataatagaggatctactta

SEQ ID NO: 74033 - DNA, 25 bp, Homo sapien
aataacatcgacagagagtcataac

SEQ ID NO: 74034 - DNA, 25 bp, Homo sapien
aataacatcgactgagagtcataac

SEQ ID NO: 74035 - DNA, 25 bp, Homo sapien
gaaacattcgtaccaagtaccgtta

SEQ ID NO: 74036 - DNA, 25 bp, Homo sapien
gaaacattcgtagcaagtaccgtta

SEQ ID NO: 74037 - DNA, 25 bp, Homo sapien
ttgatgacaccgttgacaaatgtta

SEQ ID NO: 74038 - DNA, 25 bp, Homo sapien
ttgatgacaccgatgacaaatgtta

SEQ ID NO: 74039 - DNA, 25 bp, Homo sapien
gatatcaactgttgcaactcgtttt

SEQ ID NO: 74040 - DNA, 25 bp, Homo sapien
gatatcaactgtagcaactcgtttt

SEQ ID NO: 74041 - DNA, 25 bp, Homo sapien
agtcccaatgagaccgtcgtttcgt

SEQ ID NO: 74042 - DNA, 25 bp, Homo sapien
agtcccaatgagtccgtcgtttcgt

SEQ ID NO: 74043 - DNA, 25 bp, Homo sapien
tcgagacattccttcacgaagatat

SEQ ID NO: 74044 - DNA, 25 bp, Homo sapien
tcgagacattccatcacgaagatat

SEQ ID NO: 74045 - DNA, 25 bp, Homo sapien
atctacaactctgaggtcacttgaa

SEQ ID NO: 74046 - DNA, 25 bp, Homo sapien
atctacaactctcaggtcacttgaa

SEQ ID NO: 74047 - DNA, 25 bp, Homo sapien
ctaatagacatgattcattacgttg

SEQ ID NO: 74048 - DNA, 25 bp, Homo sapien
ctaatagacatgtttcattacgttg

SEQ ID NO: 74049 - DNA, 25 bp, Homo sapien
tctcaaggagatgatcatttataac

SEQ ID NO: 74050 - DNA, 25 bp, Homo sapien
tctcaaggagatcatcatttataac

SEQ ID NO: 74051 - DNA, 25 bp, Homo sapien
agtctgaggtgagtcaacctttcaa

SEQ ID NO: 74052 - DNA, 25 bp, Homo sapien
agtctgaggtgactcaacctttcaa

SEQ ID NO: 74053 - DNA, 25 bp, Homo sapien
ggaggtacctcgacttactctcaag

SEQ ID NO: 74054 - DNA, 25 bp, Homo sapien
ggaggtacctcgtcttactctcaag

SEQ ID NO: 74055 - DNA, 25 bp, Homo sapien
cgaggtgttcgtcctccgctgtcct

SEQ ID NO: 74056 - DNA, 25 bp, Homo sapien
cgaggtgttcgtgctccgctgtcct

SEQ ID NO: 74057 - DNA, 25 bp, Homo sapien
aagtcgtcgtggttctatgtaaatg

SEQ ID NO: 74058 - DNA, 25 bp, Homo sapien
aagtcgtcgtggatctatgtaaatg

SEQ ID NO: 74059 - DNA, 25 bp, Homo sapien
tcggtagctgttcctgtggacaaag

SEQ ID NO: 74060 - DNA, 25 bp, Homo sapien
tcggtagctgttgctgtggacaaag

SEQ ID NO: 74061 - DNA, 25 bp, Homo sapien
gggttgtacgtacgtgacggaacca

SEQ ID NO: 74062 - DNA, 25 bp, Homo sapien
gggttgtacgtaggtgacggaacca

SEQ ID NO: 74063 - DNA, 25 bp, Homo sapien
agggttcgacagagcacaagacact

SEQ ID NO: 74064 - DNA, 25 bp, Homo sapien
agggttcgacagtgcacaagacact

SEQ ID NO: 74065 - DNA, 25 bp, Homo sapien
agagacttttgactggcgacgaaag

SEQ ID NO: 74066 - DNA, 25 bp, Homo sapien
agagacttttgagtggcgacgaaag

SEQ ID NO: 74067 - DNA, 25 bp, Homo sapien
acctttgacgaatgggtcgtgaggt

SEQ ID NO: 74068 - DNA, 25 bp, Homo sapien
acctttgacgaaagggtcgtgaggt

SEQ ID NO: 74069 - DNA, 25 bp, Homo sapien
tacttctcgtatgtgtggttcggtt

SEQ ID NO: 74070 - DNA, 25 bp, Homo sapien
tacttctcgtatctgtggttcggtt

SEQ ID NO: 74071 - DNA, 25 bp, Homo sapien
tcttcgggtggctctgcttgcgtct

SEQ ID NO: 74072 - DNA, 25 bp, Homo sapien
tcttcgggtggcactgcttgcgtct

SEQ ID NO: 74073 - DNA, 25 bp, Homo sapien
cggtcgccgcacatccttcggtagt

SEQ ID NO: 74074 - DNA, 25 bp, Homo sapien
cggtcgccgcacttccttcggtagt

SEQ ID NO: 74075 - DNA, 25 bp, Homo sapien
ggactcggactagtcacactctgtc

SEQ ID NO: 74076 - DNA, 25 bp, Homo sapien
ggactcggactactcacactctgtc

SEQ ID NO: 74077 - DNA, 25 bp, Homo sapien
ccccggactacggaacctccgcccc

SEQ ID NO: 74078 - DNA, 25 bp, Homo sapien
ccccggactacgcaacctccgcccc

SEQ ID NO: 74079 - DNA, 25 bp, Homo sapien
gacatgaacccctcttgtctgacac

SEQ ID NO: 74080 - DNA, 25 bp, Homo sapien
gacatgaaccccacttgtctgacac

SEQ ID NO: 74081 - DNA, 25 bp, Homo sapien
gggacttccccgagtgtattccgaa

SEQ ID NO: 74082 - DNA, 25 bp, Homo sapien
gggacttccccgtgtgtattccgaa

SEQ ID NO: 74083 - DNA, 25 bp, Homo sapien
acgaagtctcccagggggtcccgga

SEQ ID NO: 74084 - DNA, 25 bp, Homo sapien
acgaagtctccctgggggtcccgga

SEQ ID NO: 74085 - DNA, 25 bp, Homo sapien
gtctatggtctatcgggaacatgag

SEQ ID NO: 74086 - DNA, 25 bp, Homo sapien
gtctatggtctaacgggaacatgag

SEQ ID NO: 74087 - DNA, 25 bp, Homo sapien
agcaacgtgagtatgccgaaccgcg

SEQ ID NO: 74088 - DNA, 25 bp, Homo sapien
agcaacgtgagtttgccgaaccgcg

SEQ ID NO: 74089 - DNA, 25 bp, Homo sapien
gtgtcgtaagtggttccgaaaaatc

SEQ ID NO: 74090 - DNA, 25 bp, Homo sapien
gtgtcgtaagtgcttccgaaaaatc

SEQ ID NO: 74091 - DNA, 25 bp, Homo sapien
cctacttggagacgtcgacaactaa

SEQ ID NO: 74092 - DNA, 25 bp, Homo sapien
cctacttggagaggtcgacaactaa

SEQ ID NO: 74093 - DNA, 25 bp, Homo sapien
ggcccggtataggttgtgaaactcc

SEQ ID NO: 74094 - DNA, 25 bp, Homo sapien
ggcccggtatagcttgtgaaactcc

SEQ ID NO: 74095 - DNA, 25 bp, Homo sapien
gaggcggtccgtctggctcatctcc

SEQ ID NO: 74096 - DNA, 25 bp, Homo sapien
gaggcggtccgtgtggctcatctcc

SEQ ID NO: 74097 - DNA, 25 bp, Homo sapien
cggagggtcacaatgtcctttctcc

SEQ ID NO: 74098 - DNA, 25 bp, Homo sapien
cggagggtcacattgtcctttctcc

SEQ ID NO: 74099 - DNA, 25 bp, Homo sapien
cgtgctgcttacgagggtcctctcc

SEQ ID NO: 74100 - DNA, 25 bp, Homo sapien
cgtgctgcttaccagggtcctctcc

SEQ ID NO: 74101 - DNA, 25 bp, Homo sapien
tgtttcaagtaagtgtcacgtgttc

SEQ ID NO: 74102 - DNA, 25 bp, Homo sapien
tgtttcaagtaactgtcacgtgttc

SEQ ID NO: 74103 - DNA, 25 bp, Homo sapien
cgtctaacagagacctagagctcta

SEQ ID NO: 74104 - DNA, 25 bp, Homo sapien
cgtctaacagagtcctagagctcta

SEQ ID NO: 74105 - DNA, 25 bp, Homo sapien
accacgacgaattttagagctacct

SEQ ID NO: 74106 - DNA, 25 bp, Homo sapien
accacgacgaatattagagctacct

SEQ ID NO: 74107 - DNA, 25 bp, Homo sapien
aagacagtatatcgacttacacaat

SEQ ID NO: 74108 - DNA, 25 bp, Homo sapien
aagacagtatatggacttacacaat

SEQ ID NO: 74109 - DNA, 25 bp, Homo sapien
cttataaaggtgggtcgttacaatt

SEQ ID NO: 74110 - DNA, 25 bp, Homo sapien
cttataaaggtgcgtcgttacaatt

SEQ ID NO: 74111 - DNA, 25 bp, Homo sapien
ctgaaataagtcaccgtgcaagtgt

SEQ ID NO: 74112 - DNA, 25 bp, Homo sapien
ctgaaataagtctccgtgcaagtgt

SEQ ID NO: 74113 - DNA, 25 bp, Homo sapien
ccaagtgaagtgtgtgtgacgacaa

SEQ ID NO: 74114 - DNA, 25 bp, Homo sapien
ccaagtgaagtgagtgtgacgacaa

SEQ ID NO: 74115 - DNA, 25 bp, Homo sapien
ccgaaggactgacagaggaggactt

SEQ ID NO: 74116 - DNA, 25 bp, Homo sapien
ccgaaggactgagagaggaggactt

SEQ ID NO: 74117 - DNA, 25 bp, Homo sapien
acgactggccgaggagaaacctctt

SEQ ID NO: 74118 - DNA, 25 bp, Homo sapien
acgactggccgacgagaaacctctt

SEQ ID NO: 74119 - DNA, 25 bp, Homo sapien
gtcgaccgtggcagcaagagcctcc

SEQ ID NO: 74120 - DNA, 25 bp, Homo sapien
gtcgaccgtggctgcaagagcctcc

SEQ ID NO: 74121 - DNA, 25 bp, Homo sapien
gtccagtgagcacgggacgacctcc

SEQ ID NO: 74122 - DNA, 25 bp, Homo sapien
gtccagtgagcaggggacgacctcc

SEQ ID NO: 74123 - DNA, 25 bp, Homo sapien
cataccgtacctgtcgaagatcacc

SEQ ID NO: 74124 - DNA, 25 bp, Homo sapien
cataccgtacctctcgaagatcacc

SEQ ID NO: 74125 - DNA, 25 bp, Homo sapien
actacggtcctgtcccggtcagtgt

SEQ ID NO: 74126 - DNA, 25 bp, Homo sapien
actacggtcctgacccggtcagtgt

SEQ ID NO: 74127 - DNA, 25 bp, Homo sapien
gaaccgcagtgaaagtctctcgggt

SEQ ID NO: 74128 - DNA, 25 bp, Homo sapien
gaaccgcagtgatagtctctcgggt

SEQ ID NO: 74129 - DNA, 25 bp, Homo sapien
gaaccgaagagacagtttactcagt

SEQ ID NO: 74130 - DNA, 25 bp, Homo sapien
gaaccgaagagagagtttactcagt

SEQ ID NO: 74131 - DNA, 25 bp, Homo sapien
aaaagtcacaaatagtgtttctcag

SEQ ID NO: 74132 - DNA, 25 bp, Homo sapien
aaaagtcacaaaaagtgtttctcag

SEQ ID NO: 74133 - DNA, 25 bp, Homo sapien
agaacgttcagatacaaacccaagt

SEQ ID NO: 74134 - DNA, 25 bp, Homo sapien
agaacgttcagaaacaaacccaagt

SEQ ID NO: 74135 - DNA, 25 bp, Homo sapien
cactgaagatcaagtagacgctaat

SEQ ID NO: 74136 - DNA, 25 bp, Homo sapien
cactgaagatcatgtagacgctaat

SEQ ID NO: 74137 - DNA, 25 bp, Homo sapien
acgacacgaaggagtcgggctacct

SEQ ID NO: 74138 - DNA, 25 bp, Homo sapien
acgacacgaaggtgtcgggctacct

SEQ ID NO: 74139 - DNA, 25 bp, Homo sapien
caaagtagaacgacccggccgagtg

SEQ ID NO: 74140 - DNA, 25 bp, Homo sapien
caaagtagaacgtcccggccgagtg

SEQ ID NO: 74141 - DNA, 25 bp, Homo sapien
gtaaaaggttacgtccattcctaca

SEQ ID NO: 74142 - DNA, 25 bp, Homo sapien
gtaaaaggttacctccattcctaca

SEQ ID NO: 74143 - DNA, 25 bp, Homo sapien
aaaggtacgactcatcactttgtca

SEQ ID NO: 74144 - DNA, 25 bp, Homo sapien
aaaggtacgactgatcactttgtca

SEQ ID NO: 74145 - DNA, 25 bp, Homo sapien
tagggtattgacttacgttcttaac

SEQ ID NO: 74146 - DNA, 25 bp, Homo sapien
tagggtattgacatacgttcttaac

SEQ ID NO: 74147 - DNA, 25 bp, Homo sapien
acccagggaaggaggatccgtcgac

SEQ ID NO: 74148 - DNA, 25 bp, Homo sapien
acccagggaaggtggatccgtcgac

SEQ ID NO: 74149 - DNA, 25 bp, Homo sapien
cacgaggtgaaatctctacatggaa

SEQ ID NO: 74150 - DNA, 25 bp, Homo sapien
cacgaggtgaaaactctacatggaa

SEQ ID NO: 74151 - DNA, 25 bp, Homo sapien
ccagaggaagacaccacagagaggg

SEQ ID NO: 74152 - DNA, 25 bp, Homo sapien
ccagaggaagactccacagagaggg

SEQ ID NO: 74153 - DNA, 25 bp, Homo sapien
agtgagatcacctccgagagacacc

SEQ ID NO: 74154 - DNA, 25 bp, Homo sapien
agtgagatcaccaccgagagacacc

SEQ ID NO: 74155 - DNA, 25 bp, Homo sapien
gtactatgacactcctctaagagcc

SEQ ID NO: 74156 - DNA, 25 bp, Homo sapien
gtactatgacacacctctaagagcc

SEQ ID NO: 74157 - DNA, 25 bp, Homo sapien
tgtcctcttgatacaatctaaaccc

SEQ ID NO: 74158 - DNA, 25 bp, Homo sapien
tgtcctcttgattcaatctaaaccc

SEQ ID NO: 74159 - DNA, 25 bp, Homo sapien
gtcagtcgcccttattcaggatccc

SEQ ID NO: 74160 - DNA, 25 bp, Homo sapien
gtcagtcgccctaattcaggatccc

SEQ ID NO: 74161 - DNA, 25 bp, Homo sapien
ggcgcgtccgagatgctgttaccca

SEQ ID NO: 74162 - DNA, 25 bp, Homo sapien
ggcgcgtccgagttgctgttaccca

SEQ ID NO: 74163 - DNA, 25 bp, Homo sapien
agttcgcgaccctcacgttggccgg

SEQ ID NO: 74164 - DNA, 25 bp, Homo sapien
agttcgcgacccacacgttggccgg

SEQ ID NO: 74165 - DNA, 25 bp, Homo sapien
ttgtggacccccaaggtacctccgt

SEQ ID NO: 74166 - DNA, 25 bp, Homo sapien
ttgtggaccccctaggtacctccgt

SEQ ID NO: 74167 - DNA, 25 bp, Homo sapien
gtttggatcctatacgtcccactct

SEQ ID NO: 74168 - DNA, 25 bp, Homo sapien
gtttggatcctaaacgtcccactct

SEQ ID NO: 74169 - DNA, 25 bp, Homo sapien
cagttggtgtcgaggaccttgtgtt

SEQ ID NO: 74170 - DNA, 25 bp, Homo sapien
cagttggtgtcgtggaccttgtgtt

SEQ ID NO: 74171 - DNA, 25 bp, Homo sapien
agtgtaccttcgtgagtctttatgc

SEQ ID NO: 74172 - DNA, 25 bp, Homo sapien
agtgtaccttcgagagtctttatgc

SEQ ID NO: 74173 - DNA, 25 bp, Homo sapien
aattacggatttcttctttgaagac

SEQ ID NO: 74174 - DNA, 25 bp, Homo sapien
aattacggatttgttctttgaagac

SEQ ID NO: 74175 - DNA, 25 bp, Homo sapien
tcttattctttggacttagggacat

SEQ ID NO: 74176 - DNA, 25 bp, Homo sapien
tcttattctttgcacttagggacat

SEQ ID NO: 74177 - DNA, 25 bp, Homo sapien
gtcttttacagtgtccctggaaagt

SEQ ID NO: 74178 - DNA, 25 bp, Homo sapien
gtcttttacagtctccctggaaagt

SEQ ID NO: 74179 - DNA, 25 bp, Homo sapien
ctgtcggtgaccaattcgagtaagt

SEQ ID NO: 74180 - DNA, 25 bp, Homo sapien
ctgtcggtgacctattcgagtaagt

SEQ ID NO: 74181 - DNA, 25 bp, Homo sapien
ctcctcgtcagtcgaactagtaaag

SEQ ID NO: 74182 - DNA, 25 bp, Homo sapien
ctcctcgtcagtggaactagtaaag

SEQ ID NO: 74183 - DNA, 25 bp, Homo sapien
gaagttcatgtccttcaatactttg

SEQ ID NO: 74184 - DNA, 25 bp, Homo sapien
gaagttcatgtcgttcaatactttg

SEQ ID NO: 74185 - DNA, 25 bp, Homo sapien
tatttatgtccactggtactaagtg

SEQ ID NO: 74186 - DNA, 25 bp, Homo sapien
tatttatgtccagtggtactaagtg

SEQ ID NO: 74187 - DNA, 25 bp, Homo sapien
gcctctgtgcccgtcgcagtacatc

SEQ ID NO: 74188 - DNA, 25 bp, Homo sapien
gcctctgtgcccctcgcagtacatc

SEQ ID NO: 74189 - DNA, 25 bp, Homo sapien
cacatgtgagcctctgtcatctaac

SEQ ID NO: 74190 - DNA, 25 bp, Homo sapien
cacatgtgagccactgtcatctaac

SEQ ID NO: 74191 - DNA, 25 bp, Homo sapien
tgacctgcaacgattctaggtcgaa

SEQ ID NO: 74192 - DNA, 25 bp, Homo sapien
tgacctgcaacgtttctaggtcgaa

SEQ ID NO: 74193 - DNA, 25 bp, Homo sapien
agttaccacccgcgacgactcgcac

SEQ ID NO: 74194 - DNA, 25 bp, Homo sapien
agttaccacccgggacgactcgcac

SEQ ID NO: 74195 - DNA, 25 bp, Homo sapien
gaggccaacacgtcgtgctagacga

SEQ ID NO: 74196 - DNA, 25 bp, Homo sapien
gaggccaacacgacgtgctagacga

SEQ ID NO: 74197 - DNA, 25 bp, Homo sapien
tggaccagatacacgcggagtaggt

SEQ ID NO: 74198 - DNA, 25 bp, Homo sapien
tggaccagatactcgcggagtaggt

SEQ ID NO: 74199 - DNA, 25 bp, Homo sapien
tgttccagtttctgtgttacgacgg

SEQ ID NO: 74200 - DNA, 25 bp, Homo sapien
tgttccagtttcagtgttacgacgg

SEQ ID NO: 74201 - DNA, 25 bp, Homo sapien
cgttaagagtcagtacgtttacggg

SEQ ID NO: 74202 - DNA, 25 bp, Homo sapien
cgttaagagtcactacgtttacggg

SEQ ID NO: 74203 - DNA, 25 bp, Homo sapien
gacccttttgtgacggtcttagagg

SEQ ID NO: 74204 - DNA, 25 bp, Homo sapien
gacccttttgtgtcggtcttagagg

SEQ ID NO: 74205 - DNA, 25 bp, Homo sapien
ttacaaacttttcctttcggtaagg

SEQ ID NO: 74206 - DNA, 25 bp, Homo sapien
ttacaaacttttgctttcggtaagg

SEQ ID NO: 74207 - DNA, 25 bp, Homo sapien
ctacggctctatttcatgtcaaagg

SEQ ID NO: 74208 - DNA, 25 bp, Homo sapien
ctacggctctatatcatgtcaaagg

SEQ ID NO: 74209 - DNA, 25 bp, Homo sapien
ctgtggcttgttctatgcctgtgtg

SEQ ID NO: 74210 - DNA, 25 bp, Homo sapien
ctgtggcttgttgtatgcctgtgtg

SEQ ID NO: 74211 - DNA, 25 bp, Homo sapien
cgtgagttttgttaaatccttacaa

SEQ ID NO: 74212 - DNA, 25 bp, Homo sapien
cgtgagttttgtaaaatccttacaa

SEQ ID NO: 74213 - DNA, 25 bp, Homo sapien
gggtgccagtgtgtggatcaaccac

SEQ ID NO: 74214 - DNA, 25 bp, Homo sapien
gggtgccagtgtctggatcaaccac

SEQ ID NO: 74215 - DNA, 25 bp, Homo sapien
aaaagttatggttaacgacacagac

SEQ ID NO: 74216 - DNA, 25 bp, Homo sapien
aaaagttatggtaaacgacacagac

SEQ ID NO: 74217 - DNA, 25 bp, Homo sapien
gacctaatcatcctaaagaacggac

SEQ ID NO: 74218 - DNA, 25 bp, Homo sapien
gacctaatcatcgtaaagaacggac

SEQ ID NO: 74219 - DNA, 25 bp, Homo sapien
cgactcaacaccgaaaactacggtg

SEQ ID NO: 74220 - DNA, 25 bp, Homo sapien
cgactcaacacccaaaactacggtg

SEQ ID NO: 74221 - DNA, 25 bp, Homo sapien
gtatcctcctctggagcgtaacggg

SEQ ID NO: 74222 - DNA, 25 bp, Homo sapien
gtatcctcctctcgagcgtaacggg

SEQ ID NO: 74223 - DNA, 25 bp, Homo sapien
gatccgtgacttcatggtaagacct

SEQ ID NO: 74224 - DNA, 25 bp, Homo sapien
gatccgtgacttgatggtaagacct

SEQ ID NO: 74225 - DNA, 25 bp, Homo sapien
gtaaggtcttgtagacgagtcttcc

SEQ ID NO: 74226 - DNA, 25 bp, Homo sapien
gtaaggtcttgttgacgagtcttcc

SEQ ID NO: 74227 - DNA, 25 bp, Homo sapien
gagtcatcttgctgtgtctacgacg

SEQ ID NO: 74228 - DNA, 25 bp, Homo sapien
gagtcatcttgcagtgtctacgacg

SEQ ID NO: 74229 - DNA, 25 bp, Homo sapien
gaggagacctccttcgatttgtcgt

SEQ ID NO: 74230 - DNA, 25 bp, Homo sapien
gaggagacctccatcgatttgtcgt

SEQ ID NO: 74231 - DNA, 25 bp, Homo sapien
gccgaagtgccttgttaaatgtgtc

SEQ ID NO: 74232 - DNA, 25 bp, Homo sapien
gccgaagtgcctagttaaatgtgtc

SEQ ID NO: 74233 - DNA, 25 bp, Homo sapien
cgtagtcctaagtaatacgtacatc

SEQ ID NO: 74234 - DNA, 25 bp, Homo sapien
cgtagtcctaagaaatacgtacatc

SEQ ID NO: 74235 - DNA, 25 bp, Homo sapien
acgtagtgttagaaagaacgacctt

SEQ ID NO: 74236 - DNA, 25 bp, Homo sapien
acgtagtgttagtaagaacgacctt

SEQ ID NO: 74237 - DNA, 25 bp, Homo sapien
cacttgtgctgtcttagtcagggta

SEQ ID NO: 74238 - DNA, 25 bp, Homo sapien
cacttgtgctgtgttagtcagggta

SEQ ID NO: 74239 - DNA, 25 bp, Homo sapien
tcgaacttttcttgtcaatcaggaa

SEQ ID NO: 74240 - DNA, 25 bp, Homo sapien
tcgaacttttctagtcaatcaggaa

SEQ ID NO: 74241 - DNA, 25 bp, Homo sapien
atccatgtatgtgcaagtgtgtcga

SEQ ID NO: 74242 - DNA, 25 bp, Homo sapien
atccatgtatgtccaagtgtgtcga

SEQ ID NO: 74243 - DNA, 25 bp, Homo sapien
aagtcctccgtgtaccccgcgaaat

SEQ ID NO: 74244 - DNA, 25 bp, Homo sapien
aagtcctccgtgaaccccgcgaaat

SEQ ID NO: 74245 - DNA, 25 bp, Homo sapien
gtagacctgtccaccttcgcttaag

SEQ ID NO: 74246 - DNA, 25 bp, Homo sapien
gtagacctgtcctccttcgcttaag

SEQ ID NO: 74247 - DNA, 25 bp, Homo sapien
gtataatcgaccagtcaaaagttta

SEQ ID NO: 74248 - DNA, 25 bp, Homo sapien
gtataatcgacctgtcaaaagttta

SEQ ID NO: 74249 - DNA, 25 bp, Homo sapien
tagaggtgacgacacccaagttttg

SEQ ID NO: 74250 - DNA, 25 bp, Homo sapien
tagaggtgacgagacccaagttttg

SEQ ID NO: 74251 - DNA, 25 bp, Homo sapien
aggaagaaattaaacacattgtata

SEQ ID NO: 74252 - DNA, 25 bp, Homo sapien
aggaagaaattatacacattgtata

SEQ ID NO: 74253 - DNA, 25 bp, Homo sapien
ccattatggttatgtctagatttca

SEQ ID NO: 74254 - DNA, 25 bp, Homo sapien
ccattatggttaagtctagatttca

SEQ ID NO: 74255 - DNA, 25 bp, Homo sapien
gtactatccagcagtcaactattga

SEQ ID NO: 74256 - DNA, 25 bp, Homo sapien
gtactatccagctgtcaactattga

SEQ ID NO: 74257 - DNA, 25 bp, Homo sapien
gagtccgtcctcttagcgaacttga

SEQ ID NO: 74258 - DNA, 25 bp, Homo sapien
gagtccgtcctcatagcgaacttga

SEQ ID NO: 74259 - DNA, 25 bp, Homo sapien
ttgatctttacaccactacagtagg

SEQ ID NO: 74260 - DNA, 25 bp, Homo sapien
ttgatctttacagcactacagtagg

SEQ ID NO: 74261 - DNA, 25 bp, Homo sapien
gagacgtagatcaaacactaatgtg

SEQ ID NO: 74262 - DNA, 25 bp, Homo sapien
gagacgtagatctaacactaatgtg

SEQ ID NO: 74263 - DNA, 25 bp, Homo sapien
ctaactaggtacgtaacttacatgc

SEQ ID NO: 74264 - DNA, 25 bp, Homo sapien
ctaactaggtacctaacttacatgc

SEQ ID NO: 74265 - DNA, 25 bp, Homo sapien
aatcacttggacacctacatgcgtc

SEQ ID NO: 74266 - DNA, 25 bp, Homo sapien
aatcacttggactcctacatgcgtc

SEQ ID NO: 74267 - DNA, 25 bp, Homo sapien
catctcgtacgacgttccatgttct

SEQ ID NO: 74268 - DNA, 25 bp, Homo sapien
catctcgtacgaggttccatgttct

SEQ ID NO: 74269 - DNA, 25 bp, Homo sapien
ttgtctccgaattactcgatgtcct

SEQ ID NO: 74270 - DNA, 25 bp, Homo sapien
ttgtctccgaataactcgatgtcct

SEQ ID NO: 74271 - DNA, 25 bp, Homo sapien
cctacgtttccaagcgacggggctg

SEQ ID NO: 74272 - DNA, 25 bp, Homo sapien
cctacgtttccatgcgacggggctg

SEQ ID NO: 74273 - DNA, 25 bp, Homo sapien
actgtggttatgatgtcaaaagcct

SEQ ID NO: 74274 - DNA, 25 bp, Homo sapien
actgtggttatgttgtcaaaagcct

SEQ ID NO: 74275 - DNA, 25 bp, Homo sapien
aggccagtctcgttcccagcaggct

SEQ ID NO: 74276 - DNA, 25 bp, Homo sapien
aggccagtctcgatcccagcaggct

SEQ ID NO: 74277 - DNA, 25 bp, Homo sapien
gtggactatccgacccatgaggtcg

SEQ ID NO: 74278 - DNA, 25 bp, Homo sapien
gtggactatccgtcccatgaggtcg

SEQ ID NO: 74279 - DNA, 25 bp, Homo sapien
gcttgtctccttcattatgttaacg

SEQ ID NO: 74280 - DNA, 25 bp, Homo sapien
gcttgtctccttgattatgttaacg

SEQ ID NO: 74281 - DNA, 25 bp, Homo sapien
ccggtggttagtctaattctttaag

SEQ ID NO: 74282 - DNA, 25 bp, Homo sapien
ccggtggttagtgtaattctttaag

SEQ ID NO: 74283 - DNA, 25 bp, Homo sapien
caatgtagtttcgtcttcttttcag

SEQ ID NO: 74284 - DNA, 25 bp, Homo sapien
caatgtagtttcctcttcttttcag

SEQ ID NO: 74285 - DNA, 25 bp, Homo sapien
attagtccttcttacatgtggtata

SEQ ID NO: 74286 - DNA, 25 bp, Homo sapien
attagtccttctaacatgtggtata

SEQ ID NO: 74287 - DNA, 25 bp, Homo sapien
tgactgtacgagtactgtcggtgag

SEQ ID NO: 74288 - DNA, 25 bp, Homo sapien
tgactgtacgagaactgtcggtgag

SEQ ID NO: 74289 - DNA, 25 bp, Homo sapien
ttcaatggatgtggtctagacgacg

SEQ ID NO: 74290 - DNA, 25 bp, Homo sapien
ttcaatggatgtcgtctagacgacg

SEQ ID NO: 74291 - DNA, 25 bp, Homo sapien
catgtaaatagctattgtcggtcga

SEQ ID NO: 74292 - DNA, 25 bp, Homo sapien
catgtaaatagcaattgtcggtcga

SEQ ID NO: 74293 - DNA, 25 bp, Homo sapien
tgcgattaacaatccttgtgatgga

SEQ ID NO: 74294 - DNA, 25 bp, Homo sapien
tgcgattaacaaaccttgtgatgga

SEQ ID NO: 74295 - DNA, 25 bp, Homo sapien
accaacaccgtccaagtaagtgtaa

SEQ ID NO: 74296 - DNA, 25 bp, Homo sapien
accaacaccgtcgaagtaagtgtaa

SEQ ID NO: 74297 - DNA, 25 bp, Homo sapien
acacatcccgtacaccgaggacaga

SEQ ID NO: 74298 - DNA, 25 bp, Homo sapien
acacatcccgtagaccgaggacaga

SEQ ID NO: 74299 - DNA, 25 bp, Homo sapien
ggatcctaccatggaacccaatact

SEQ ID NO: 74300 - DNA, 25 bp, Homo sapien
ggatcctaccatcgaacccaatact

SEQ ID NO: 74301 - DNA, 25 bp, Homo sapien
gttcgtctcatttaaatccgagtaa

SEQ ID NO: 74302 - DNA, 25 bp, Homo sapien
gttcgtctcattaaaatccgagtaa

SEQ ID NO: 74303 - DNA, 25 bp, Homo sapien
aacgtcggacactcaaatcaacagt

SEQ ID NO: 74304 - DNA, 25 bp, Homo sapien
aacgtcggacacacaaatcaacagt

SEQ ID NO: 74305 - DNA, 25 bp, Homo sapien
acgtatcgatacacatcttcatgtg

SEQ ID NO: 74306 - DNA, 25 bp, Homo sapien
acgtatcgatactcatcttcatgtg

SEQ ID NO: 74307 - DNA, 25 bp, Homo sapien
ctcaacgtttgtatcatggtattga

SEQ ID NO: 74308 - DNA, 25 bp, Homo sapien
ctcaacgtttgtttcatggtattga

SEQ ID NO: 74309 - DNA, 25 bp, Homo sapien
atttgcagtacgtgactacctgtct

SEQ ID NO: 74310 - DNA, 25 bp, Homo sapien
atttgcagtacgagactacctgtct

SEQ ID NO: 74311 - DNA, 25 bp, Homo sapien
aacaacaccgacgaacctcgtatct

SEQ ID NO: 74312 - DNA, 25 bp, Homo sapien
aacaacaccgaccaacctcgtatct

SEQ ID NO: 74313 - DNA, 25 bp, Homo sapien
aacatcacctccttcagtagtatat

SEQ ID NO: 74314 - DNA, 25 bp, Homo sapien
aacatcacctccatcagtagtatat

SEQ ID NO: 74315 - DNA, 25 bp, Homo sapien
accggacccaacctagtcgaggttg

SEQ ID NO: 74316 - DNA, 25 bp, Homo sapien
accggacccaacgtagtcgaggttg

SEQ ID NO: 74317 - DNA, 25 bp, Homo sapien
cgccggcgacgctactggttttatt

SEQ ID NO: 74318 - DNA, 25 bp, Homo sapien
cgccggcgacgcaactggttttatt

SEQ ID NO: 74319 - DNA, 25 bp, Homo sapien
cggacccgagagtggttacttctct

SEQ ID NO: 74320 - DNA, 25 bp, Homo sapien
cggacccgagagaggttacttctct

SEQ ID NO: 74321 - DNA, 25 bp, Homo sapien
accttcgggtaggatgttatcactg

SEQ ID NO: 74322 - DNA, 25 bp, Homo sapien
accttcgggtagcatgttatcactg

SEQ ID NO: 74323 - DNA, 25 bp, Homo sapien
cacattggggtcttagtgactcacc

SEQ ID NO: 74324 - DNA, 25 bp, Homo sapien
cacattggggtcatagtgactcacc

SEQ ID NO: 74325 - DNA, 25 bp, Homo sapien
gtcgaaccgttgtcgaaataatcaa

SEQ ID NO: 74326 - DNA, 25 bp, Homo sapien
gtcgaaccgttgacgaaataatcaa

SEQ ID NO: 74327 - DNA, 25 bp, Homo sapien
taagacaatggtgctaacaatacaa

SEQ ID NO: 74328 - DNA, 25 bp, Homo sapien
taagacaatggtcctaacaatacaa

SEQ ID NO: 74329 - DNA, 25 bp, Homo sapien
ctaatgacgatgtttgtaagtacct

SEQ ID NO: 74330 - DNA, 25 bp, Homo sapien
ctaatgacgatgattgtaagtacct

SEQ ID NO: 74331 - DNA, 25 bp, Homo sapien
aatttgtacaaatggatgaacacct

SEQ ID NO: 74332 - DNA, 25 bp, Homo sapien
aatttgtacaaaaggatgaacacct

SEQ ID NO: 74333 - DNA, 25 bp, Homo sapien
tacagggaaaaggagaggcctgagt

SEQ ID NO: 74334 - DNA, 25 bp, Homo sapien
tacagggaaaagcagaggcctgagt

SEQ ID NO: 74335 - DNA, 25 bp, Homo sapien
atgtaataaagaaaggtacactcct

SEQ ID NO: 74336 - DNA, 25 bp, Homo sapien
atgtaataaagataggtacactcct

SEQ ID NO: 74337 - DNA, 25 bp, Homo sapien
gactttaaagagaatttttcgtctc

SEQ ID NO: 74338 - DNA, 25 bp, Homo sapien
gactttaaagagtatttttcgtctc

SEQ ID NO: 74339 - DNA, 25 bp, Homo sapien
tcttgtaaagactatgtttttcctt

SEQ ID NO: 74340 - DNA, 25 bp, Homo sapien
tcttgtaaagacaatgtttttcctt

SEQ ID NO: 74341 - DNA, 25 bp, Homo sapien
ttgtcaaacaaggtttttctagtct

SEQ ID NO: 74342 - DNA, 25 bp, Homo sapien
ttgtcaaacaagctttttctagtct

SEQ ID NO: 74343 - DNA, 25 bp, Homo sapien
gtatttgtacgtcactctacttgtt

SEQ ID NO: 74344 - DNA, 25 bp, Homo sapien
gtatttgtacgtgactctacttgtt

SEQ ID NO: 74345 - DNA, 25 bp, Homo sapien
tgaggacggaagactcccctagaac

SEQ ID NO: 74346 - DNA, 25 bp, Homo sapien
tgaggacggaagtctcccctagaac

SEQ ID NO: 74347 - DNA, 25 bp, Homo sapien
gcgcattaggccgcgagtaatggtt

SEQ ID NO: 74348 - DNA, 25 bp, Homo sapien
gcgcattaggccccgagtaatggtt

SEQ ID NO: 74349 - DNA, 25 bp, Homo sapien
ctggctatcttagtaaccattactc

SEQ ID NO: 74350 - DNA, 25 bp, Homo sapien
ctggctatcttactaaccattactc

SEQ ID NO: 74351 - DNA, 25 bp, Homo sapien
ctcgactcttctacttcacttgagg

SEQ ID NO: 74352 - DNA, 25 bp, Homo sapien
ctcgactcttcttcttcacttgagg

SEQ ID NO: 74353 - DNA, 25 bp, Homo sapien
gtttccgtactatttattccccagg

SEQ ID NO: 74354 - DNA, 25 bp, Homo sapien
gtttccgtactaattattccccagg

SEQ ID NO: 74355 - DNA, 25 bp, Homo sapien
attcttggttcttataccatacgtg

SEQ ID NO: 74356 - DNA, 25 bp, Homo sapien
attcttggttctaataccatacgtg

SEQ ID NO: 74357 - DNA, 25 bp, Homo sapien
tcgtacatgttcctgtgaccgggtg

SEQ ID NO: 74358 - DNA, 25 bp, Homo sapien
tcgtacatgttcgtgtgaccgggtg

SEQ ID NO: 74359 - DNA, 25 bp, Homo sapien
tgtcttcccgtggtcgtccgcaacg

SEQ ID NO: 74360 - DNA, 25 bp, Homo sapien
tgtcttcccgtgctcgtccgcaacg

SEQ ID NO: 74361 - DNA, 25 bp, Homo sapien
cttttggtctgttctatcgactgag

SEQ ID NO: 74362 - DNA, 25 bp, Homo sapien
cttttggtctgtactatcgactgag

SEQ ID NO: 74363 - DNA, 25 bp, Homo sapien
ccccctgtggtttccgtatgaggag

SEQ ID NO: 74364 - DNA, 25 bp, Homo sapien
ccccctgtggttaccgtatgaggag

SEQ ID NO: 74365 - DNA, 25 bp, Homo sapien
cagtgtcagtgtactgactgtagga

SEQ ID NO: 74366 - DNA, 25 bp, Homo sapien
cagtgtcagtgttctgactgtagga

SEQ ID NO: 74367 - DNA, 25 bp, Homo sapien
cgaaagtgtccttccgtgtgctaaa

SEQ ID NO: 74368 - DNA, 25 bp, Homo sapien
cgaaagtgtcctaccgtgtgctaaa

SEQ ID NO: 74369 - DNA, 25 bp, Homo sapien
gacacgttccaatgtttctaccgac

SEQ ID NO: 74370 - DNA, 25 bp, Homo sapien
gacacgttccaaagtttctaccgac

SEQ ID NO: 74371 - DNA, 25 bp, Homo sapien
tcgagtttaccgttagtgtttgcca

SEQ ID NO: 74372 - DNA, 25 bp, Homo sapien
tcgagtttaccgatagtgtttgcca

SEQ ID NO: 74373 - DNA, 25 bp, Homo sapien
ccggtaagggtcagtttaagaccga

SEQ ID NO: 74374 - DNA, 25 bp, Homo sapien
ccggtaagggtctgtttaagaccga

SEQ ID NO: 74375 - DNA, 25 bp, Homo sapien
ccagtaaggtgaagtccgaaaacta

SEQ ID NO: 74376 - DNA, 25 bp, Homo sapien
ccagtaaggtgatgtccgaaaacta

SEQ ID NO: 74377 - DNA, 25 bp, Homo sapien
gagaagatacgagtgacagaaactc

SEQ ID NO: 74378 - DNA, 25 bp, Homo sapien
gagaagatacgactgacagaaactc

SEQ ID NO: 74379 - DNA, 25 bp, Homo sapien
ggtaggaagaagacccggaaccagt

SEQ ID NO: 74380 - DNA, 25 bp, Homo sapien
ggtaggaagaagtcccggaaccagt

SEQ ID NO: 74381 - DNA, 25 bp, Homo sapien
tggtaaataaggaccccgagaccag

SEQ ID NO: 74382 - DNA, 25 bp, Homo sapien
tggtaaataaggtccccgagaccag

SEQ ID NO: 74383 - DNA, 25 bp, Homo sapien
ggggtctaggatcacccgatacaag

SEQ ID NO: 74384 - DNA, 25 bp, Homo sapien
ggggtctaggatgacccgatacaag

SEQ ID NO: 74385 - DNA, 25 bp, Homo sapien
agtcgggtcacgactggttgtttca

SEQ ID NO: 74386 - DNA, 25 bp, Homo sapien
agtcgggtcacgtctggttgtttca

SEQ ID NO: 74387 - DNA, 25 bp, Homo sapien
atcgcgttgtcttgggttttgtaac

SEQ ID NO: 74388 - DNA, 25 bp, Homo sapien
atcgcgttgtctagggttttgtaac

SEQ ID NO: 74389 - DNA, 25 bp, Homo sapien
gaggtttctctctgtggtcgttaaa

SEQ ID NO: 74390 - DNA, 25 bp, Homo sapien
gaggtttctctcagtggtcgttaaa

SEQ ID NO: 74391 - DNA, 25 bp, Homo sapien
tgaggaactgacgtcctccgacctt

SEQ ID NO: 74392 - DNA, 25 bp, Homo sapien
tgaggaactgacctcctccgacctt

SEQ ID NO: 74393 - DNA, 25 bp, Homo sapien
gggtgcacgtaacactccggaacat

SEQ ID NO: 74394 - DNA, 25 bp, Homo sapien
gggtgcacgtaagactccggaacat

SEQ ID NO: 74395 - DNA, 25 bp, Homo sapien
ggtggtgaaggaaccagacgactac

SEQ ID NO: 74396 - DNA, 25 bp, Homo sapien
ggtggtgaaggatccagacgactac

SEQ ID NO: 74397 - DNA, 25 bp, Homo sapien
ggatgttacgacactccagagacct

SEQ ID NO: 74398 - DNA, 25 bp, Homo sapien
ggatgttacgactctccagagacct

SEQ ID NO: 74399 - DNA, 25 bp, Homo sapien
tcttaccgacggacgacgagacctc

SEQ ID NO: 74400 - DNA, 25 bp, Homo sapien
tcttaccgacggtcgacgagacctc

SEQ ID NO: 74401 - DNA, 25 bp, Homo sapien
cttctagtgtcaggtcggaacgtcc

SEQ ID NO: 74402 - DNA, 25 bp, Homo sapien
cttctagtgtcacgtcggaacgtcc

SEQ ID NO: 74403 - DNA, 25 bp, Homo sapien
ttttagtagagaagcgacgacattc

SEQ ID NO: 74404 - DNA, 25 bp, Homo sapien
ttttagtagagatgcgacgacattc

SEQ ID NO: 74405 - DNA, 25 bp, Homo sapien
attccggagttggacgacggagtct

SEQ ID NO: 74406 - DNA, 25 bp, Homo sapien
attccggagttgcacgacggagtct

SEQ ID NO: 74407 - DNA, 25 bp, Homo sapien
atgtcctcggactgtttactgttag

SEQ ID NO: 74408 - DNA, 25 bp, Homo sapien
atgtcctcggacagtttactgttag

SEQ ID NO: 74409 - DNA, 25 bp, Homo sapien
gacagggattactccttcagcggga

SEQ ID NO: 74410 - DNA, 25 bp, Homo sapien
gacagggattacaccttcagcggga

SEQ ID NO: 74411 - DNA, 25 bp, Homo sapien
acctactaggtcacccggtcgagga

SEQ ID NO: 74412 - DNA, 25 bp, Homo sapien
acctactaggtctcccggtcgagga

SEQ ID NO: 74413 - DNA, 25 bp, Homo sapien
aactactagaggtcccgtgtaagga

SEQ ID NO: 74414 - DNA, 25 bp, Homo sapien
aactactagaggacccgtgtaagga

SEQ ID NO: 74415 - DNA, 25 bp, Homo sapien
aggtaccgccactggcagaacgcga

SEQ ID NO: 74416 - DNA, 25 bp, Homo sapien
aggtaccgccacaggcagaacgcga

SEQ ID NO: 74417 - DNA, 25 bp, Homo sapien
gtagccgaggaaaccgaagtactca

SEQ ID NO: 74418 - DNA, 25 bp, Homo sapien
gtagccgaggaatccgaagtactca

SEQ ID NO: 74419 - DNA, 25 bp, Homo sapien
ttgagagggaagtcaccacagtcga

SEQ ID NO: 74420 - DNA, 25 bp, Homo sapien
ttgagagggaagacaccacagtcga

SEQ ID NO: 74421 - DNA, 25 bp, Homo sapien
gttggggtcgagactaccgaagtta

SEQ ID NO: 74422 - DNA, 25 bp, Homo sapien
gttggggtcgagtctaccgaagtta

SEQ ID NO: 74423 - DNA, 25 bp, Homo sapien
actttacgagttcgtctaacgtctg

SEQ ID NO: 74424 - DNA, 25 bp, Homo sapien
actttacgagttggtctaacgtctg

SEQ ID NO: 74425 - DNA, 25 bp, Homo sapien
tacacaattgtaggtcgtactgttt

SEQ ID NO: 74426 - DNA, 25 bp, Homo sapien
tacacaattgtacgtcgtactgttt

SEQ ID NO: 74427 - DNA, 25 bp, Homo sapien
acagaaaaacttttcagtagtcgtt

SEQ ID NO: 74428 - DNA, 25 bp, Homo sapien
acagaaaaacttatcagtagtcgtt

SEQ ID NO: 74429 - DNA, 25 bp, Homo sapien
tacataactcgttcatcgattactt

SEQ ID NO: 74430 - DNA, 25 bp, Homo sapien
tacataactcgtacatcgattactt

SEQ ID NO: 74431 - DNA, 25 bp, Homo sapien
cgtcgtttgatttgaccttgatctt

SEQ ID NO: 74432 - DNA, 25 bp, Homo sapien
cgtcgtttgattagaccttgatctt

SEQ ID NO: 74433 - DNA, 25 bp, Homo sapien
ctctgtggtgtcacactttccctgt

SEQ ID NO: 74434 - DNA, 25 bp, Homo sapien
ctctgtggtgtctcactttccctgt

SEQ ID NO: 74435 - DNA, 25 bp, Homo sapien
catctcggggtctcctcttacattt

SEQ ID NO: 74436 - DNA, 25 bp, Homo sapien
catctcggggtcacctcttacattt

SEQ ID NO: 74437 - DNA, 25 bp, Homo sapien
cgatgtatggtcgtatggtctacag

SEQ ID NO: 74438 - DNA, 25 bp, Homo sapien
cgatgtatggtcctatggtctacag

SEQ ID NO: 74439 - DNA, 25 bp, Homo sapien
cgattaccagttacaagacttacgt

SEQ ID NO: 74440 - DNA, 25 bp, Homo sapien
cgattaccagtttcaagacttacgt

SEQ ID NO: 74441 - DNA, 25 bp, Homo sapien
gcggtctaaagtttacatctccact

SEQ ID NO: 74442 - DNA, 25 bp, Homo sapien
gcggtctaaagtatacatctccact

SEQ ID NO: 74443 - DNA, 25 bp, Homo sapien
gtgggtagaaagacaactcctcgag

SEQ ID NO: 74444 - DNA, 25 bp, Homo sapien
gtgggtagaaagtcaactcctcgag

SEQ ID NO: 74445 - DNA, 25 bp, Homo sapien
agtgtaagaagagactaaaaccctg

SEQ ID NO: 74446 - DNA, 25 bp, Homo sapien
agtgtaagaagacactaaaaccctg

SEQ ID NO: 74447 - DNA, 25 bp, Homo sapien
tttcagtcctccaagacaaccgatg

SEQ ID NO: 74448 - DNA, 25 bp, Homo sapien
tttcagtcctcctagacaaccgatg

SEQ ID NO: 74449 - DNA, 25 bp, Homo sapien
ttgggtacctcgattgaagccaagt

SEQ ID NO: 74450 - DNA, 25 bp, Homo sapien
ttgggtacctcgtttgaagccaagt

SEQ ID NO: 74451 - DNA, 25 bp, Homo sapien
ggcctaccactaaagtttctagact

SEQ ID NO: 74452 - DNA, 25 bp, Homo sapien
ggcctaccactatagtttctagact

SEQ ID NO: 74453 - DNA, 25 bp, Homo sapien
cgaggactatccaatgttatttagt

SEQ ID NO: 74454 - DNA, 25 bp, Homo sapien
cgaggactatcctatgttatttagt

SEQ ID NO: 74455 - DNA, 25 bp, Homo sapien
ctgtaggacttcgtctgtgttttta

SEQ ID NO: 74456 - DNA, 25 bp, Homo sapien
ctgtaggacttcctctgtgttttta

SEQ ID NO: 74457 - DNA, 25 bp, Homo sapien
gacggagaccctttgtgtgactgta

SEQ ID NO: 74458 - DNA, 25 bp, Homo sapien
gacggagaccctatgtgtgactgta

SEQ ID NO: 74459 - DNA, 25 bp, Homo sapien
cagacgagatcgacgtatactgaaa

SEQ ID NO: 74460 - DNA, 25 bp, Homo sapien
cagacgagatcgtcgtatactgaaa

SEQ ID NO: 74461 - DNA, 25 bp, Homo sapien
cactaagaacctgctacgttgacaa

SEQ ID NO: 74462 - DNA, 25 bp, Homo sapien
cactaagaacctcctacgttgacaa

SEQ ID NO: 74463 - DNA, 25 bp, Homo sapien
tttctgagtcaccaagacaggactc

SEQ ID NO: 74464 - DNA, 25 bp, Homo sapien
tttctgagtcacgaagacaggactc

SEQ ID NO: 74465 - DNA, 25 bp, Homo sapien
ctatgctgtgaaactatccttgtgt

SEQ ID NO: 74466 - DNA, 25 bp, Homo sapien
ctatgctgtgaatctatccttgtgt

SEQ ID NO: 74467 - DNA, 25 bp, Homo sapien
gatagacttcgtaatcttcggttga

SEQ ID NO: 74468 - DNA, 25 bp, Homo sapien
gatagacttcgttatcttcggttga

SEQ ID NO: 74469 - DNA, 25 bp, Homo sapien
actaaaacgtagatcttccgtaaga

SEQ ID NO: 74470 - DNA, 25 bp, Homo sapien
actaaaacgtagttcttccgtaaga

SEQ ID NO: 74471 - DNA, 25 bp, Homo sapien
acgatgcgacaggtgttaccgaaag

SEQ ID NO: 74472 - DNA, 25 bp, Homo sapien
acgatgcgacagctgttaccgaaag

SEQ ID NO: 74473 - DNA, 25 bp, Homo sapien
taccgcccagacattacgtcacagg

SEQ ID NO: 74474 - DNA, 25 bp, Homo sapien
taccgcccagactttacgtcacagg

SEQ ID NO: 74475 - DNA, 25 bp, Homo sapien
ctagataccgtaatcttgtctttag

SEQ ID NO: 74476 - DNA, 25 bp, Homo sapien
ctagataccgtattcttgtctttag

SEQ ID NO: 74477 - DNA, 25 bp, Homo sapien
caacgtacaacttacttgtcttagg

SEQ ID NO: 74478 - DNA, 25 bp, Homo sapien
caacgtacaactaacttgtcttagg

SEQ ID NO: 74479 - DNA, 25 bp, Homo sapien
tccaagtagagaactttgttcttcg

SEQ ID NO: 74480 - DNA, 25 bp, Homo sapien
tccaagtagagatctttgttcttcg

SEQ ID NO: 74481 - DNA, 25 bp, Homo sapien
caagtaacgtgtcatactttatagt

SEQ ID NO: 74482 - DNA, 25 bp, Homo sapien
caagtaacgtgtgatactttatagt

SEQ ID NO: 74483 - DNA, 25 bp, Homo sapien
aaacgacgacggacgtgtctggtac

SEQ ID NO: 74484 - DNA, 25 bp, Homo sapien
aaacgacgacggtcgtgtctggtac

SEQ ID NO: 74485 - DNA, 25 bp, Homo sapien
aacaaagacgaaggtcggggtgacg

SEQ ID NO: 74486 - DNA, 25 bp, Homo sapien
aacaaagacgaacgtcggggtgacg

SEQ ID NO: 74487 - DNA, 25 bp, Homo sapien
gagaaacgaacactcccgttgaagt

SEQ ID NO: 74488 - DNA, 25 bp, Homo sapien
gagaaacgaacagtcccgttgaagt

SEQ ID NO: 74489 - DNA, 25 bp, Homo sapien
gaattacaaaaaccattgtcgtagt

SEQ ID NO: 74490 - DNA, 25 bp, Homo sapien
gaattacaaaaagcattgtcgtagt

SEQ ID NO: 74491 - DNA, 25 bp, Homo sapien
agtgtaatagccagtgacaatgtca

SEQ ID NO: 74492 - DNA, 25 bp, Homo sapien
agtgtaatagcctgtgacaatgtca

SEQ ID NO: 74493 - DNA, 25 bp, Homo sapien
ggtatactacactagacaaaccgat

SEQ ID NO: 74494 - DNA, 25 bp, Homo sapien
ggtatactacacaagacaaaccgat

SEQ ID NO: 74495 - DNA, 25 bp, Homo sapien
gacgtgagttctacaaggaatcttt

SEQ ID NO: 74496 - DNA, 25 bp, Homo sapien
gacgtgagttcttcaaggaatcttt

SEQ ID NO: 74497 - DNA, 25 bp, Homo sapien
gattctgttcttcgatcaagtttat

SEQ ID NO: 74498 - DNA, 25 bp, Homo sapien
gattctgttcttggatcaagtttat

SEQ ID NO: 74499 - DNA, 25 bp, Homo sapien
ctgttgtgtttgtgtctgaagtccg

SEQ ID NO: 74500 - DNA, 25 bp, Homo sapien
ctgttgtgtttgagtctgaagtccg

SEQ ID NO: 74501 - DNA, 25 bp, Homo sapien
attggtctgctaggagtacttttcc

SEQ ID NO: 74502 - DNA, 25 bp, Homo sapien
attggtctgctacgagtacttttcc

SEQ ID NO: 74503 - DNA, 25 bp, Homo sapien
gagctctgatctcaggttgtcgcgc

SEQ ID NO: 74504 - DNA, 25 bp, Homo sapien
gagctctgatctgaggttgtcgcgc

SEQ ID NO: 74505 - DNA, 25 bp, Homo sapien
cgtcgagtcttctcggtggtttgga

SEQ ID NO: 74506 - DNA, 25 bp, Homo sapien
cgtcgagtcttcacggtggtttgga

SEQ ID NO: 74507 - DNA, 25 bp, Homo sapien
aggatctcatctgtgttctagcgga

SEQ ID NO: 74508 - DNA, 25 bp, Homo sapien
aggatctcatctctgttctagcgga

SEQ ID NO: 74509 - DNA, 25 bp, Homo sapien
agtgagtgattttccttttcgtcac

SEQ ID NO: 74510 - DNA, 25 bp, Homo sapien
agtgagtgatttaccttttcgtcac

SEQ ID NO: 74511 - DNA, 25 bp, Homo sapien
tcgaggttagtacctttggtactct

SEQ ID NO: 74512 - DNA, 25 bp, Homo sapien
tcgaggttagtagctttggtactct

SEQ ID NO: 74513 - DNA, 25 bp, Homo sapien
tgtcaccgagatttttgtcgggtta

SEQ ID NO: 74514 - DNA, 25 bp, Homo sapien
tgtcaccgagatatttgtcgggtta

SEQ ID NO: 74515 - DNA, 25 bp, Homo sapien
ggaaacgaaatagtcctcgtggtta

SEQ ID NO: 74516 - DNA, 25 bp, Homo sapien
ggaaacgaaatactcctcgtggtta

SEQ ID NO: 74517 - DNA, 25 bp, Homo sapien
aaactcgatatgtgcacgtgtttac

SEQ ID NO: 74518 - DNA, 25 bp, Homo sapien
aaactcgatatgagcacgtgtttac

SEQ ID NO: 74519 - DNA, 25 bp, Homo sapien
aaaaatgatcggagtttcgttcgac

SEQ ID NO: 74520 - DNA, 25 bp, Homo sapien
aaaaatgatcggtgtttcgttcgac

SEQ ID NO: 74521 - DNA, 25 bp, Homo sapien
gaacaatggaagagtcaacgtaaac

SEQ ID NO: 74522 - DNA, 25 bp, Homo sapien
gaacaatggaagtgtcaacgtaaac

SEQ ID NO: 74523 - DNA, 25 bp, Homo sapien
ttgtagaaatcactctcagtgaaag

SEQ ID NO: 74524 - DNA, 25 bp, Homo sapien
ttgtagaaatcagtctcagtgaaag

SEQ ID NO: 74525 - DNA, 25 bp, Homo sapien
ttcgagaaaatttgtacacggacaa

SEQ ID NO: 74526 - DNA, 25 bp, Homo sapien
ttcgagaaaattagtacacggacaa

SEQ ID NO: 74527 - DNA, 25 bp, Homo sapien
gagacctcttctgtaccggactaag

SEQ ID NO: 74528 - DNA, 25 bp, Homo sapien
gagacctcttctctaccggactaag

SEQ ID NO: 74529 - DNA, 25 bp, Homo sapien
cacgcgacacctttccgtgggcaag

SEQ ID NO: 74530 - DNA, 25 bp, Homo sapien
cacgcgacacctatccgtgggcaag

SEQ ID NO: 74531 - DNA, 25 bp, Homo sapien
gactctctcgattcgactggtcata

SEQ ID NO: 74532 - DNA, 25 bp, Homo sapien
gactctctcgatacgactggtcata

SEQ ID NO: 74533 - DNA, 25 bp, Homo sapien
ttgtcgacctcaatggatgtttata

SEQ ID NO: 74534 - DNA, 25 bp, Homo sapien
ttgtcgacctcattggatgtttata

SEQ ID NO: 74535 - DNA, 25 bp, Homo sapien
acttgaggctcctgtgaaaacaccc

SEQ ID NO: 74536 - DNA, 25 bp, Homo sapien
acttgaggctccagtgaaaacaccc

SEQ ID NO: 74537 - DNA, 25 bp, Homo sapien
accgagatcttctatgaaagaccca

SEQ ID NO: 74538 - DNA, 25 bp, Homo sapien
accgagatcttcaatgaaagaccca

SEQ ID NO: 74539 - DNA, 25 bp, Homo sapien
attctgacttactgacacggaatga

SEQ ID NO: 74540 - DNA, 25 bp, Homo sapien
attctgacttacagacacggaatga

SEQ ID NO: 74541 - DNA, 25 bp, Homo sapien
gtcttgtcaaaccacaggaaggtct

SEQ ID NO: 74542 - DNA, 25 bp, Homo sapien
gtcttgtcaaacgacaggaaggtct

SEQ ID NO: 74543 - DNA, 25 bp, Homo sapien
cagacaagtttgaggacgagtgtct

SEQ ID NO: 74544 - DNA, 25 bp, Homo sapien
cagacaagtttgtggacgagtgtct

SEQ ID NO: 74545 - DNA, 25 bp, Homo sapien
agaaagtcatcttgtgtgtcagtcg

SEQ ID NO: 74546 - DNA, 25 bp, Homo sapien
agaaagtcatctagtgtgtcagtcg

SEQ ID NO: 74547 - DNA, 25 bp, Homo sapien
ccgagacccggtttctgtgctcgga

SEQ ID NO: 74548 - DNA, 25 bp, Homo sapien
ccgagacccggtatctgtgctcgga

SEQ ID NO: 74549 - DNA, 25 bp, Homo sapien
agaagatgacagaataatcttccta

SEQ ID NO: 74550 - DNA, 25 bp, Homo sapien
agaagatgacagtataatcttccta

SEQ ID NO: 74551 - DNA, 25 bp, Homo sapien
tggatgtcttaaaagtcctatcgtt

SEQ ID NO: 74552 - DNA, 25 bp, Homo sapien
tggatgtcttaatagtcctatcgtt

SEQ ID NO: 74553 - DNA, 25 bp, Homo sapien
gacacggttagagagactataactt

SEQ ID NO: 74554 - DNA, 25 bp, Homo sapien
gacacggttagacagactataactt

SEQ ID NO: 74555 - DNA, 25 bp, Homo sapien
gagaaaaggggacacatcgagacag

SEQ ID NO: 74556 - DNA, 25 bp, Homo sapien
gagaaaaggggagacatcgagacag

SEQ ID NO: 74557 - DNA, 25 bp, Homo sapien
gacaaagaggcgaagacccgtgcga

SEQ ID NO: 74558 - DNA, 25 bp, Homo sapien
gacaaagaggcgtagacccgtgcga

SEQ ID NO: 74559 - DNA, 25 bp, Homo sapien
tctcaatgggcttcgagccgtaggc

SEQ ID NO: 74560 - DNA, 25 bp, Homo sapien
tctcaatgggctacgagccgtaggc

SEQ ID NO: 74561 - DNA, 25 bp, Homo sapien
aaaagacgggcgttgtagtcgcaaa

SEQ ID NO: 74562 - DNA, 25 bp, Homo sapien
aaaagacgggcgatgtagtcgcaaa

SEQ ID NO: 74563 - DNA, 25 bp, Homo sapien
taaagaggtctttgtgctagtaaag

SEQ ID NO: 74564 - DNA, 25 bp, Homo sapien
taaagaggtcttagtgctagtaaag

SEQ ID NO: 74565 - DNA, 25 bp, Homo sapien
caaacggtatgttcggacagtgatg

SEQ ID NO: 74566 - DNA, 25 bp, Homo sapien
caaacggtatgtacggacagtgatg

SEQ ID NO: 74567 - DNA, 25 bp, Homo sapien
aaacagaacgtcgtcaaagatttgt

SEQ ID NO: 74568 - DNA, 25 bp, Homo sapien
aaacagaacgtcctcaaagatttgt

SEQ ID NO: 74569 - DNA, 25 bp, Homo sapien
aaaaggatacgcaacaaggttcttg

SEQ ID NO: 74570 - DNA, 25 bp, Homo sapien
aaaaggatacgctacaaggttcttg

SEQ ID NO: 74571 - DNA, 25 bp, Homo sapien
atgccgacgctcttctgctgtcttc

SEQ ID NO: 74572 - DNA, 25 bp, Homo sapien
atgccgacgctcatctgctgtcttc

SEQ ID NO: 74573 - DNA, 25 bp, Homo sapien
cctccttcctccgtcgtcgtcgtcg

SEQ ID NO: 74574 - DNA, 25 bp, Homo sapien
cctccttcctccctcgtcgtcgtcg

SEQ ID NO: 74575 - DNA, 25 bp, Homo sapien
cacccctcttactgtgttttcgacg

SEQ ID NO: 74576 - DNA, 25 bp, Homo sapien
cacccctcttacagtgttttcgacg

SEQ ID NO: 74577 - DNA, 25 bp, Homo sapien
ctgagacgtcggtcggtgtccttga

SEQ ID NO: 74578 - DNA, 25 bp, Homo sapien
ctgagacgtcggacggtgtccttga

SEQ ID NO: 74579 - DNA, 25 bp, Homo sapien
cgactaggcagtggtccgagacgag

SEQ ID NO: 74580 - DNA, 25 bp, Homo sapien
cgactaggcagtcgtccgagacgag

SEQ ID NO: 74581 - DNA, 25 bp, Homo sapien
tcacctgtcgacacgtgagacgaac

SEQ ID NO: 74582 - DNA, 25 bp, Homo sapien
tcacctgtcgactcgtgagacgaac

SEQ ID NO: 74583 - DNA, 25 bp, Homo sapien
cttgtctcccgatctataagaaacg

SEQ ID NO: 74584 - DNA, 25 bp, Homo sapien
cttgtctcccgaactataagaaacg

SEQ ID NO: 74585 - DNA, 25 bp, Homo sapien
cttgtatctccaggtacaatatgag

SEQ ID NO: 74586 - DNA, 25 bp, Homo sapien
cttgtatctccacgtacaatatgag

SEQ ID NO: 74587 - DNA, 25 bp, Homo sapien
cgagttgaaaagtgacaacacttgt

SEQ ID NO: 74588 - DNA, 25 bp, Homo sapien
cgagttgaaaagagacaacacttgt

SEQ ID NO: 74589 - DNA, 25 bp, Homo sapien
ggggtattaaatccaacaagagttc

SEQ ID NO: 74590 - DNA, 25 bp, Homo sapien
ggggtattaaatgcaacaagagttc

SEQ ID NO: 74591 - DNA, 25 bp, Homo sapien
gacgattaatcctccgacgactatc

SEQ ID NO: 74592 - DNA, 25 bp, Homo sapien
gacgattaatccaccgacgactatc

SEQ ID NO: 74593 - DNA, 25 bp, Homo sapien
agaaggtcatgttaacctaacatac

SEQ ID NO: 74594 - DNA, 25 bp, Homo sapien
agaaggtcatgtaaacctaacatac

SEQ ID NO: 74595 - DNA, 25 bp, Homo sapien
atgggtgagtcgaactcctaacctc

SEQ ID NO: 74596 - DNA, 25 bp, Homo sapien
atgggtgagtcgtactcctaacctc

SEQ ID NO: 74597 - DNA, 25 bp, Homo sapien
ttcgtagtagtgtttcacgtggttc

SEQ ID NO: 74598 - DNA, 25 bp, Homo sapien
ttcgtagtagtgattcacgtggttc

SEQ ID NO: 74599 - DNA, 25 bp, Homo sapien
ttgactcgtgtatcgtagctgcgcc

SEQ ID NO: 74600 - DNA, 25 bp, Homo sapien
ttgactcgtgtaacgtagctgcgcc

SEQ ID NO: 74601 - DNA, 25 bp, Homo sapien
ggttgaactgatttctacgacgtcc

SEQ ID NO: 74602 - DNA, 25 bp, Homo sapien
ggttgaactgatatctacgacgtcc

SEQ ID NO: 74603 - DNA, 25 bp, Homo sapien
tttttgaaacggatcctcacagaca

SEQ ID NO: 74604 - DNA, 25 bp, Homo sapien
tttttgaaacggttcctcacagaca

SEQ ID NO: 74605 - DNA, 25 bp, Homo sapien
gtaaggattatcttcctccatactg

SEQ ID NO: 74606 - DNA, 25 bp, Homo sapien
gtaaggattatcatcctccatactg

SEQ ID NO: 74607 - DNA, 25 bp, Homo sapien
aaaagggttgacatgtagtccctcc

SEQ ID NO: 74608 - DNA, 25 bp, Homo sapien
aaaagggttgacttgtagtccctcc

SEQ ID NO: 74609 - DNA, 25 bp, Homo sapien
ttgaccggtgttcttcggattgtaa

SEQ ID NO: 74610 - DNA, 25 bp, Homo sapien
ttgaccggtgttgttcggattgtaa

SEQ ID NO: 74611 - DNA, 25 bp, Homo sapien
gttaaacgattgaacggggacccac

SEQ ID NO: 74612 - DNA, 25 bp, Homo sapien
gttaaacgattgtacggggacccac

SEQ ID NO: 74613 - DNA, 25 bp, Homo sapien
taaagagtttgtcacggtgcatccc

SEQ ID NO: 74614 - DNA, 25 bp, Homo sapien
taaagagtttgtgacggtgcatccc

SEQ ID NO: 74615 - DNA, 25 bp, Homo sapien
tgaagttccggtctacgagtcgcct

SEQ ID NO: 74616 - DNA, 25 bp, Homo sapien
tgaagttccggtgtacgagtcgcct

SEQ ID NO: 74617 - DNA, 25 bp, Homo sapien
caagtttttactttctgtcaagaga

SEQ ID NO: 74618 - DNA, 25 bp, Homo sapien
caagtttttactatctgtcaagaga

SEQ ID NO: 74619 - DNA, 25 bp, Homo sapien
acaaattttctgatcccaagacgag

SEQ ID NO: 74620 - DNA, 25 bp, Homo sapien
acaaattttctgttcccaagacgag

SEQ ID NO: 74621 - DNA, 25 bp, Homo sapien
taaatacgtgtcaatcctcaatgag

SEQ ID NO: 74622 - DNA, 25 bp, Homo sapien
taaatacgtgtctatcctcaatgag

SEQ ID NO: 74623 - DNA, 25 bp, Homo sapien
taaaacggtaacatcgttcaaacga

SEQ ID NO: 74624 - DNA, 25 bp, Homo sapien
taaaacggtaacttcgttcaaacga

SEQ ID NO: 74625 - DNA, 25 bp, Homo sapien
actatagtgacttcctactgaagat

SEQ ID NO: 74626 - DNA, 25 bp, Homo sapien
actatagtgactacctactgaagat

SEQ ID NO: 74627 - DNA, 25 bp, Homo sapien
gaaccggtgactcaaacgtgaagtg

SEQ ID NO: 74628 - DNA, 25 bp, Homo sapien
gaaccggtgactgaaacgtgaagtg

SEQ ID NO: 74629 - DNA, 25 bp, Homo sapien
ggaggccttcttactactacgaagg

SEQ ID NO: 74630 - DNA, 25 bp, Homo sapien
ggaggccttctttctactacgaagg

SEQ ID NO: 74631 - DNA, 25 bp, Homo sapien
gacccgggcccgtatctggtcaagg

SEQ ID NO: 74632 - DNA, 25 bp, Homo sapien
gacccgggcccgaatctggtcaagg

SEQ ID NO: 74633 - DNA, 25 bp, Homo sapien
tcgacgggacttgaaccggaagttg

SEQ ID NO: 74634 - DNA, 25 bp, Homo sapien
tcgacgggacttcaaccggaagttg

SEQ ID NO: 74635 - DNA, 25 bp, Homo sapien
tgtagtccctcactctgagtttatg

SEQ ID NO: 74636 - DNA, 25 bp, Homo sapien
tgtagtccctcagtctgagtttatg

SEQ ID NO: 74637 - DNA, 25 bp, Homo sapien
taaatatcaaaggttaagcgtctca

SEQ ID NO: 74638 - DNA, 25 bp, Homo sapien
taaatatcaaagcttaagcgtctca

SEQ ID NO: 74639 - DNA, 25 bp, Homo sapien
tattgacagacttcctacgtcaccg

SEQ ID NO: 74640 - DNA, 25 bp, Homo sapien
tattgacagactacctacgtcaccg

SEQ ID NO: 74641 - DNA, 25 bp, Homo sapien
aattgttgtaagtagaccacgaaac

SEQ ID NO: 74642 - DNA, 25 bp, Homo sapien
aattgttgtaagaagaccacgaaac

SEQ ID NO: 74643 - DNA, 25 bp, Homo sapien
aaatgtatgtgtagattgccacaac

SEQ ID NO: 74644 - DNA, 25 bp, Homo sapien
aaatgtatgtgttgattgccacaac

SEQ ID NO: 74645 - DNA, 25 bp, Homo sapien
acggagtgacgagtcctgggcaaac

SEQ ID NO: 74646 - DNA, 25 bp, Homo sapien
acggagtgacgactcctgggcaaac

SEQ ID NO: 74647 - DNA, 25 bp, Homo sapien
ccgacggaattcagggagtcacaga

SEQ ID NO: 74648 - DNA, 25 bp, Homo sapien
ccgacggaattctgggagtcacaga

SEQ ID NO: 74649 - DNA, 25 bp, Homo sapien
aaagaagtaaagttggagtcactta

SEQ ID NO: 74650 - DNA, 25 bp, Homo sapien
aaagaagtaaagatggagtcactta

SEQ ID NO: 74651 - DNA, 25 bp, Homo sapien
attaataacgattatgagttcacaa

SEQ ID NO: 74652 - DNA, 25 bp, Homo sapien
attaataacgataatgagttcacaa

SEQ ID NO: 74653 - DNA, 25 bp, Homo sapien
aacacacttctggagttaccgtgat

SEQ ID NO: 74654 - DNA, 25 bp, Homo sapien
aacacacttctgcagttaccgtgat

SEQ ID NO: 74655 - DNA, 25 bp, Homo sapien
cgaagactacagtttacaaatttag

SEQ ID NO: 74656 - DNA, 25 bp, Homo sapien
cgaagactacagattacaaatttag

SEQ ID NO: 74657 - DNA, 25 bp, Homo sapien
atcgatcgtgtctacaactgttctg

SEQ ID NO: 74658 - DNA, 25 bp, Homo sapien
atcgatcgtgtcaacaactgttctg

SEQ ID NO: 74659 - DNA, 25 bp, Homo sapien
gtgccaatcaaacgtacgtgtgtgt

SEQ ID NO: 74660 - DNA, 25 bp, Homo sapien
gtgccaatcaaaggtacgtgtgtgt

SEQ ID NO: 74661 - DNA, 25 bp, Homo sapien
cgactcattccgaactcggtgatat

SEQ ID NO: 74662 - DNA, 25 bp, Homo sapien
cgactcattccgtactcggtgatat

SEQ ID NO: 74663 - DNA, 25 bp, Homo sapien
actctcagacctaggaactctagaa

SEQ ID NO: 74664 - DNA, 25 bp, Homo sapien
actctcagaccttggaactctagaa

SEQ ID NO: 74665 - DNA, 25 bp, Homo sapien
aactcttgaactttgcatcacgttg

SEQ ID NO: 74666 - DNA, 25 bp, Homo sapien
aactcttgaactatgcatcacgttg

SEQ ID NO: 74667 - DNA, 25 bp, Homo sapien
tcttaatgagataatcctattggac

SEQ ID NO: 74668 - DNA, 25 bp, Homo sapien
tcttaatgagattatcctattggac

SEQ ID NO: 74669 - DNA, 25 bp, Homo sapien
gtctgagggagagacccacttcgaa

SEQ ID NO: 74670 - DNA, 25 bp, Homo sapien
gtctgagggagacacccacttcgaa

SEQ ID NO: 74671 - DNA, 25 bp, Homo sapien
tgggtgtgctacgacttatctctaa

SEQ ID NO: 74672 - DNA, 25 bp, Homo sapien
tgggtgtgctaccacttatctctaa

SEQ ID NO: 74673 - DNA, 25 bp, Homo sapien
ccagggtctcgtcccgtggtcgtcc

SEQ ID NO: 74674 - DNA, 25 bp, Homo sapien
ccagggtctcgtgccgtggtcgtcc

SEQ ID NO: 74675 - DNA, 25 bp, Homo sapien
caatgtcgtgagttctgtgggaccg

SEQ ID NO: 74676 - DNA, 25 bp, Homo sapien
caatgtcgtgagatctgtgggaccg

SEQ ID NO: 74677 - DNA, 25 bp, Homo sapien
tcggtgttcgtctgactgttgcaaa

SEQ ID NO: 74678 - DNA, 25 bp, Homo sapien
tcggtgttcgtcagactgttgcaaa

SEQ ID NO: 74679 - DNA, 25 bp, Homo sapien
ggttgtacgtacgtgacggaaccac

SEQ ID NO: 74680 - DNA, 25 bp, Homo sapien
ggttgtacgtacctgacggaaccac

SEQ ID NO: 74681 - DNA, 25 bp, Homo sapien
ggattcgactacctcacacaagacc

SEQ ID NO: 74682 - DNA, 25 bp, Homo sapien
ggattcgactacgtcacacaagacc

SEQ ID NO: 74683 - DNA, 25 bp, Homo sapien
tagagacttttgactggcgacgaaa

SEQ ID NO: 74684 - DNA, 25 bp, Homo sapien
tagagacttttgtctggcgacgaaa

SEQ ID NO: 74685 - DNA, 25 bp, Homo sapien
accgttatggattcggtgacaatgt

SEQ ID NO: 74686 - DNA, 25 bp, Homo sapien
accgttatggatacggtgacaatgt

SEQ ID NO: 74687 - DNA, 25 bp, Homo sapien
tctttcagtactcgttgtccggtgt

SEQ ID NO: 74688 - DNA, 25 bp, Homo sapien
tctttcagtactggttgtccggtgt

SEQ ID NO: 74689 - DNA, 25 bp, Homo sapien
tcccggttggtcgatgagttgatgt

SEQ ID NO: 74690 - DNA, 25 bp, Homo sapien
tcccggttggtccatgagttgatgt

SEQ ID NO: 74691 - DNA, 25 bp, Homo sapien
cgggcgcgcgacagtgatgtcgagg

SEQ ID NO: 74692 - DNA, 25 bp, Homo sapien
cgggcgcgcgactgtgatgtcgagg

SEQ ID NO: 74693 - DNA, 25 bp, Homo sapien
gagagtcggatactgtcatactgtc

SEQ ID NO: 74694 - DNA, 25 bp, Homo sapien
gagagtcggatagtgtcatactgtc

SEQ ID NO: 74695 - DNA, 25 bp, Homo sapien
ccccggagggaagtccgacactgac

SEQ ID NO: 74696 - DNA, 25 bp, Homo sapien
ccccggagggaactccgacactgac

SEQ ID NO: 74697 - DNA, 25 bp, Homo sapien
gaatgaacgccctcgggtcacggtc

SEQ ID NO: 74698 - DNA, 25 bp, Homo sapien
gaatgaacgcccacgggtcacggtc

SEQ ID NO: 74699 - DNA, 25 bp, Homo sapien
gggttcatcccgaaggattctcgga

SEQ ID NO: 74700 - DNA, 25 bp, Homo sapien
gggttcatcccgtaggattctcgga

SEQ ID NO: 74701 - DNA, 25 bp, Homo sapien
tcactcccgagacgagtcgccggat

SEQ ID NO: 74702 - DNA, 25 bp, Homo sapien
tcactcccgagaggagtcgccggat

SEQ ID NO: 74703 - DNA, 25 bp, Homo sapien
atcactggactatcgaaaaccagag

SEQ ID NO: 74704 - DNA, 25 bp, Homo sapien
atcactggactaacgaaaaccagag

SEQ ID NO: 74705 - DNA, 25 bp, Homo sapien
gagcaacgtgagtatgccgaaccgc

SEQ ID NO: 74706 - DNA, 25 bp, Homo sapien
gagcaacgtgagaatgccgaaccgc

SEQ ID NO: 74707 - DNA, 25 bp, Homo sapien
cgtgtcaggtgtacctgagaaaacc

SEQ ID NO: 74708 - DNA, 25 bp, Homo sapien
cgtgtcaggtgttcctgagaaaacc

SEQ ID NO: 74709 - DNA, 25 bp, Homo sapien
tccagtgtggagtaggaacctacat

SEQ ID NO: 74710 - DNA, 25 bp, Homo sapien
tccagtgtggagaaggaacctacat

SEQ ID NO: 74711 - DNA, 25 bp, Homo sapien
taccgaggtaatattgatacaccac

SEQ ID NO: 74712 - DNA, 25 bp, Homo sapien
taccgaggtaattttgatacaccac

SEQ ID NO: 74713 - DNA, 25 bp, Homo sapien
gtacgacagccactggtgcaactcc

SEQ ID NO: 74714 - DNA, 25 bp, Homo sapien
gtacgacagccagtggtgcaactcc

SEQ ID NO: 74715 - DNA, 25 bp, Homo sapien
gagacgggtccaaggtttgtctcca

SEQ ID NO: 74716 - DNA, 25 bp, Homo sapien
gagacgggtccatggtttgtctcca

SEQ ID NO: 74717 - DNA, 25 bp, Homo sapien
gtctcgtttcacgatggtcctcctc

SEQ ID NO: 74718 - DNA, 25 bp, Homo sapien
gtctcgtttcaccatggtcctcctc

SEQ ID NO: 74719 - DNA, 25 bp, Homo sapien
tagtgttaaagtaactttcatgtcc

SEQ ID NO: 74720 - DNA, 25 bp, Homo sapien
tagtgttaaagttactttcatgtcc

SEQ ID NO: 74721 - DNA, 25 bp, Homo sapien
gacgtacaaaggaacctaaacctcg

SEQ ID NO: 74722 - DNA, 25 bp, Homo sapien
gacgtacaaaggtacctaaacctcg

SEQ ID NO: 74723 - DNA, 25 bp, Homo sapien
tacgagagagtatttgagagcacct

SEQ ID NO: 74724 - DNA, 25 bp, Homo sapien
tacgagagagtaattgagagcacct

SEQ ID NO: 74725 - DNA, 25 bp, Homo sapien
gaaacagtaaattcgtgtcacacct

SEQ ID NO: 74726 - DNA, 25 bp, Homo sapien
gaaacagtaaatacgtgtcacacct

SEQ ID NO: 74727 - DNA, 25 bp, Homo sapien
cgtacaaaggtgaactgttacaata

SEQ ID NO: 74728 - DNA, 25 bp, Homo sapien
cgtacaaaggtgtactgttacaata

SEQ ID NO: 74729 - DNA, 25 bp, Homo sapien
ttaactataggcaccgtgaaaacgt

SEQ ID NO: 74730 - DNA, 25 bp, Homo sapien
ttaactataggctccgtgaaaacgt

SEQ ID NO: 74731 - DNA, 25 bp, Homo sapien
aaagtcacttgtttgtgacgacaga

SEQ ID NO: 74732 - DNA, 25 bp, Homo sapien
aaagtcacttgtatgtgacgacaga

SEQ ID NO: 74733 - DNA, 25 bp, Homo sapien
gtaaggactgtttacaggaggtacc

SEQ ID NO: 74734 - DNA, 25 bp, Homo sapien
gtaaggactgttaacaggaggtacc

SEQ ID NO: 74735 - DNA, 25 bp, Homo sapien
agaagtgaccagaaataacttactc

SEQ ID NO: 74736 - DNA, 25 bp, Homo sapien
agaagtgaccagtaataacttactc

SEQ ID NO: 74737 - DNA, 25 bp, Homo sapien
ggcaacgtcggcagaaagaactcca

SEQ ID NO: 74738 - DNA, 25 bp, Homo sapien
ggcaacgtcggctgaaagaactcca

SEQ ID NO: 74739 - DNA, 25 bp, Homo sapien
gtccagtcggcacgtgggccgtctc

SEQ ID NO: 74740 - DNA, 25 bp, Homo sapien
gtccagtcggcaggtgggccgtctc

SEQ ID NO: 74741 - DNA, 25 bp, Homo sapien
gccaactcgttcattcgagggcgcc

SEQ ID NO: 74742 - DNA, 25 bp, Homo sapien
gccaactcgttctttcgagggcgcc

SEQ ID NO: 74743 - DNA, 25 bp, Homo sapien
gtacgacgtcctcgtcccggacatt

SEQ ID NO: 74744 - DNA, 25 bp, Homo sapien
gtacgacgtcctggtcccggacatt

SEQ ID NO: 74745 - DNA, 25 bp, Homo sapien
gatgcagtgagtcgtctcagtgtgt

SEQ ID NO: 74746 - DNA, 25 bp, Homo sapien
gatgcagtgagtggtctcagtgtgt

SEQ ID NO: 74747 - DNA, 25 bp, Homo sapien
gaaccgaaagacctacctcctctgt

SEQ ID NO: 74748 - DNA, 25 bp, Homo sapien
gaaccgaaagacgtacctcctctgt

SEQ ID NO: 74749 - DNA, 25 bp, Homo sapien
aaaaacagaaagtgtgtgacctaca

SEQ ID NO: 74750 - DNA, 25 bp, Homo sapien
aaaaacagaaagagtgtgacctaca

SEQ ID NO: 74751 - DNA, 25 bp, Homo sapien
agactagcaaagaaatcaccacagt

SEQ ID NO: 74752 - DNA, 25 bp, Homo sapien
agactagcaaagtaatcaccacagt

SEQ ID NO: 74753 - DNA, 25 bp, Homo sapien
ccacttgaagtccagtagtaccaat

SEQ ID NO: 74754 - DNA, 25 bp, Homo sapien
ccacttgaagtcgagtagtaccaat

SEQ ID NO: 74755 - DNA, 25 bp, Homo sapien
agacacaagcgcagatagtccacct

SEQ ID NO: 74756 - DNA, 25 bp, Homo sapien
agacacaagcgctgatagtccacct

SEQ ID NO: 74757 - DNA, 25 bp, Homo sapien
cgagagtaaccgtcccggaccgagg

SEQ ID NO: 74758 - DNA, 25 bp, Homo sapien
cgagagtaaccgacccggaccgagg

SEQ ID NO: 74759 - DNA, 25 bp, Homo sapien
actagaagtatcgtaccctgccaca

SEQ ID NO: 74760 - DNA, 25 bp, Homo sapien
actagaagtatcctaccctgccaca

SEQ ID NO: 74761 - DNA, 25 bp, Homo sapien
aggtacgactcatcactttgtcact

SEQ ID NO: 74762 - DNA, 25 bp, Homo sapien
aggtacgactcaacactttgtcact

SEQ ID NO: 74763 - DNA, 25 bp, Homo sapien
aaggtaggtcagttcggtcttctac

SEQ ID NO: 74764 - DNA, 25 bp, Homo sapien
aaggtaggtcagatcggtcttctac

SEQ ID NO: 74765 - DNA, 25 bp, Homo sapien
cgcaaggtcaagaggatgtgtcgac

SEQ ID NO: 74766 - DNA, 25 bp, Homo sapien
cgcaaggtcaagtggatgtgtcgac

SEQ ID NO: 74767 - DNA, 25 bp, Homo sapien
ccggagtcgaaatctccgggtagga

SEQ ID NO: 74768 - DNA, 25 bp, Homo sapien
ccggagtcgaaaactccgggtagga

SEQ ID NO: 74769 - DNA, 25 bp, Homo sapien
cccaagaggagcacccagggcgact

SEQ ID NO: 74770 - DNA, 25 bp, Homo sapien
cccaagaggagctcccagggcgact

SEQ ID NO: 74771 - DNA, 25 bp, Homo sapien
gtgagagcgacatcccaagcacgtc

SEQ ID NO: 74772 - DNA, 25 bp, Homo sapien
gtgagagcgacaacccaagcacgtc

SEQ ID NO: 74773 - DNA, 25 bp, Homo sapien
cctcatagacacaccacaagagaca

SEQ ID NO: 74774 - DNA, 25 bp, Homo sapien
cctcatagacactccacaagagaca

SEQ ID NO: 74775 - DNA, 25 bp, Homo sapien
cctcatagaaacaccgtaagagaca

SEQ ID NO: 74776 - DNA, 25 bp, Homo sapien
cctcatagaaactccgtaagagaca

SEQ ID NO: 74777 - DNA, 25 bp, Homo sapien
agtccgacataagtcgaggctccac

SEQ ID NO: 74778 - DNA, 25 bp, Homo sapien
agtccgacataactcgaggctccac

SEQ ID NO: 74779 - DNA, 25 bp, Homo sapien
ggtccgcactagacgtttcgcccag

SEQ ID NO: 74780 - DNA, 25 bp, Homo sapien
ggtccgcactagtcgtttcgcccag

SEQ ID NO: 74781 - DNA, 25 bp, Homo sapien
attcccgtaccgtgcttggtccgtg

SEQ ID NO: 74782 - DNA, 25 bp, Homo sapien
attcccgtaccgagcttggtccgtg

SEQ ID NO: 74783 - DNA, 25 bp, Homo sapien
gcggtaccccagcagtgtcccgtcg

SEQ ID NO: 74784 - DNA, 25 bp, Homo sapien
gcggtaccccaggagtgtcccgtcg

SEQ ID NO: 74785 - DNA, 25 bp, Homo sapien
tggtcttccagtacgtcacccgtct

SEQ ID NO: 74786 - DNA, 25 bp, Homo sapien
tggtcttccagttcgtcacccgtct

SEQ ID NO: 74787 - DNA, 25 bp, Homo sapien
agtttcgtgaccaggagactttatt

SEQ ID NO: 74788 - DNA, 25 bp, Homo sapien
agtttcgtgacctggagactttatt

SEQ ID NO: 74789 - DNA, 25 bp, Homo sapien
agcaatgtacgttgagttctgttgc

SEQ ID NO: 74790 - DNA, 25 bp, Homo sapien
agcaatgtacgtagagttctgttgc

SEQ ID NO: 74791 - DNA, 25 bp, Homo sapien
ttgtagatatttcttgtttgtaggc

SEQ ID NO: 74792 - DNA, 25 bp, Homo sapien
ttgtagatatttgttgtttgtaggc

SEQ ID NO: 74793 - DNA, 25 bp, Homo sapien
tttatgtcttctgctattgagcgaa

SEQ ID NO: 74794 - DNA, 25 bp, Homo sapien
tttatgtcttctcctattgagcgaa

SEQ ID NO: 74795 - DNA, 25 bp, Homo sapien
agtcttttcatctcctgtgtccaag

SEQ ID NO: 74796 - DNA, 25 bp, Homo sapien
agtcttttcatcacctgtgtccaag

SEQ ID NO: 74797 - DNA, 25 bp, Homo sapien
atgtcagtcctcaagagtcgaaagt

SEQ ID NO: 74798 - DNA, 25 bp, Homo sapien
atgtcagtcctctagagtcgaaagt

SEQ ID NO: 74799 - DNA, 25 bp, Homo sapien
tctcctcgtcagtcgaactagtaaa

SEQ ID NO: 74800 - DNA, 25 bp, Homo sapien
tctcctcgtcagacgaactagtaaa

SEQ ID NO: 74801 - DNA, 25 bp, Homo sapien
attacagtgtctcaccgaattattg

SEQ ID NO: 74802 - DNA, 25 bp, Homo sapien
attacagtgtctgaccgaattattg

SEQ ID NO: 74803 - DNA, 25 bp, Homo sapien
attatttccggtcatagtctatatg

SEQ ID NO: 74804 - DNA, 25 bp, Homo sapien
attatttccggtgatagtctatatg

SEQ ID NO: 74805 - DNA, 25 bp, Homo sapien
gattcgtgtgcctctgcactacttc

SEQ ID NO: 74806 - DNA, 25 bp, Homo sapien
gattcgtgtgccactgcactacttc

SEQ ID NO: 74807 - DNA, 25 bp, Homo sapien
cgctattggccctcgtcatcgttct

SEQ ID NO: 74808 - DNA, 25 bp, Homo sapien
cgctattggcccacgtcatcgttct

SEQ ID NO: 74809 - DNA, 25 bp, Homo sapien
gacactgacgaaccttcccgtcgaa

SEQ ID NO: 74810 - DNA, 25 bp, Homo sapien
gacactgacgaagcttcccgtcgaa

SEQ ID NO: 74811 - DNA, 25 bp, Homo sapien
gacgttactcactcggagtacccca

SEQ ID NO: 74812 - DNA, 25 bp, Homo sapien
gacgttactcacacggagtacccca

SEQ ID NO: 74813 - DNA, 25 bp, Homo sapien
gagttctcaatctcgtccaccgacg

SEQ ID NO: 74814 - DNA, 25 bp, Homo sapien
gagttctcaatcacgtccaccgacg

SEQ ID NO: 74815 - DNA, 25 bp, Homo sapien
ccgtcggaccagtacaacggaaagg

SEQ ID NO: 74816 - DNA, 25 bp, Homo sapien
ccgtcggaccagaacaacggaaagg

SEQ ID NO: 74817 - DNA, 25 bp, Homo sapien
cctgacaccagtactcaggaaggtg

SEQ ID NO: 74818 - DNA, 25 bp, Homo sapien
cctgacaccagttctcaggaaggtg

SEQ ID NO: 74819 - DNA, 25 bp, Homo sapien
cacgtcaaatcaccagattacgcag

SEQ ID NO: 74820 - DNA, 25 bp, Homo sapien
cacgtcaaatcagcagattacgcag

SEQ ID NO: 74821 - DNA, 25 bp, Homo sapien
tagccttaattggtctgtttagcga

SEQ ID NO: 74822 - DNA, 25 bp, Homo sapien
tagccttaattgctctgtttagcga

SEQ ID NO: 74823 - DNA, 25 bp, Homo sapien
tctaaattaaatcctttcgagtaaa

SEQ ID NO: 74824 - DNA, 25 bp, Homo sapien
tctaaattaaatgctttcgagtaaa

SEQ ID NO: 74825 - DNA, 25 bp, Homo sapien
tccgaggtctacaattttgcaaagg

SEQ ID NO: 74826 - DNA, 25 bp, Homo sapien
tccgaggtctactattttgcaaagg

SEQ ID NO: 74827 - DNA, 25 bp, Homo sapien
cagtcctctgttctctgccacgttg

SEQ ID NO: 74828 - DNA, 25 bp, Homo sapien
cagtcctctgttgtctgccacgttg

SEQ ID NO: 74829 - DNA, 25 bp, Homo sapien
gtaatccttgttgtctccttatatg

SEQ ID NO: 74830 - DNA, 25 bp, Homo sapien
gtaatccttgttctctccttatatg

SEQ ID NO: 74831 - DNA, 25 bp, Homo sapien
agggtgccagtgtgtggatcaacca

SEQ ID NO: 74832 - DNA, 25 bp, Homo sapien
agggtgccagtgagtggatcaacca

SEQ ID NO: 74833 - DNA, 25 bp, Homo sapien
agaaagttgggatgacactctcgac

SEQ ID NO: 74834 - DNA, 25 bp, Homo sapien
agaaagttgggaagacactctcgac

SEQ ID NO: 74835 - DNA, 25 bp, Homo sapien
aaaagttacgtcttaaagacaccag

SEQ ID NO: 74836 - DNA, 25 bp, Homo sapien
aaaagttacgtcataaagacaccag

SEQ ID NO: 74837 - DNA, 25 bp, Homo sapien
cataagcactacctaaaagtaccgg

SEQ ID NO: 74838 - DNA, 25 bp, Homo sapien
cataagcactacgtaaaagtaccgg

SEQ ID NO: 74839 - DNA, 25 bp, Homo sapien
tttttgacccctgtagacgaacggg

SEQ ID NO: 74840 - DNA, 25 bp, Homo sapien
tttttgacccctctagacgaacggg

SEQ ID NO: 74841 - DNA, 25 bp, Homo sapien
aatcactgacttaatggtaccgcat

SEQ ID NO: 74842 - DNA, 25 bp, Homo sapien
aatcactgactttatggtaccgcat

SEQ ID NO: 74843 - DNA, 25 bp, Homo sapien
agtaaatccttcagggtctactcct

SEQ ID NO: 74844 - DNA, 25 bp, Homo sapien
agtaaatccttctgggtctactcct

SEQ ID NO: 74845 - DNA, 25 bp, Homo sapien
ggtactcccttggagtctctacgtg

SEQ ID NO: 74846 - DNA, 25 bp, Homo sapien
ggtactcccttgcagtctctacgtg

SEQ ID NO: 74847 - DNA, 25 bp, Homo sapien
ggaacccgtctaacggttctagagt

SEQ ID NO: 74848 - DNA, 25 bp, Homo sapien
ggaacccgtctatcggttctagagt

SEQ ID NO: 74849 - DNA, 25 bp, Homo sapien
gccgtaagagccttattcaatcggc

SEQ ID NO: 74850 - DNA, 25 bp, Homo sapien
gccgtaagagccatattcaatcggc

SEQ ID NO: 74851 - DNA, 25 bp, Homo sapien
cgtagtacctgacactaatacgacc

SEQ ID NO: 74852 - DNA, 25 bp, Homo sapien
cgtagtacctgagactaatacgacc

SEQ ID NO: 74853 - DNA, 25 bp, Homo sapien
cagtagtaggtcaaacgtaaacctc

SEQ ID NO: 74854 - DNA, 25 bp, Homo sapien
cagtagtaggtctaacgtaaacctc

SEQ ID NO: 74855 - DNA, 25 bp, Homo sapien
actcagtgggtcatgtgtacaaggg

SEQ ID NO: 74856 - DNA, 25 bp, Homo sapien
actcagtgggtcttgtgtacaaggg

SEQ ID NO: 74857 - DNA, 25 bp, Homo sapien
tcaggtctttctttcagttcaggga

SEQ ID NO: 74858 - DNA, 25 bp, Homo sapien
tcaggtctttctatcagttcaggga

SEQ ID NO: 74859 - DNA, 25 bp, Homo sapien
cggaccctttttgacttcgggtcga

SEQ ID NO: 74860 - DNA, 25 bp, Homo sapien
cggaccctttttcacttcgggtcga

SEQ ID NO: 74861 - DNA, 25 bp, Homo sapien
gaagaccttgtctcacccagaacga

SEQ ID NO: 74862 - DNA, 25 bp, Homo sapien
gaagaccttgtcacacccagaacga

SEQ ID NO: 74863 - DNA, 25 bp, Homo sapien
gtaaccgtgatcactctcccatcag

SEQ ID NO: 74864 - DNA, 25 bp, Homo sapien
gtaaccgtgatctctctcccatcag

SEQ ID NO: 74865 - DNA, 25 bp, Homo sapien
gtataactacacgacccaaagtttg

SEQ ID NO: 74866 - DNA, 25 bp, Homo sapien
gtataactacaccacccaaagtttg

SEQ ID NO: 74867 - DNA, 25 bp, Homo sapien
gtataggtgacagaccctaaatttt

SEQ ID NO: 74868 - DNA, 25 bp, Homo sapien
gtataggtgacacaccctaaatttt

SEQ ID NO: 74869 - DNA, 25 bp, Homo sapien
ttacaggaactaataaacaatttta

SEQ ID NO: 74870 - DNA, 25 bp, Homo sapien
ttacaggaactattaaacaatttta

SEQ ID NO: 74871 - DNA, 25 bp, Homo sapien
tgtcattagtgtttattccatttca

SEQ ID NO: 74872 - DNA, 25 bp, Homo sapien
tgtcattagtgtatattccatttca

SEQ ID NO: 74873 - DNA, 25 bp, Homo sapien
agtgatttagtaatcaactattcgc

SEQ ID NO: 74874 - DNA, 25 bp, Homo sapien
agtgatttagtattcaactattcgc

SEQ ID NO: 74875 - DNA, 25 bp, Homo sapien
tagacagtcgttttgacaacttgat

SEQ ID NO: 74876 - DNA, 25 bp, Homo sapien
tagacagtcgttatgacaacttgat

SEQ ID NO: 74877 - DNA, 25 bp, Homo sapien
tagtcatctttatcgagatatacaa

SEQ ID NO: 74878 - DNA, 25 bp, Homo sapien
tagtcatctttaacgagatatacaa

SEQ ID NO: 74879 - DNA, 25 bp, Homo sapien
gtcatacctctaaacgagtaacttg

SEQ ID NO: 74880 - DNA, 25 bp, Homo sapien
gtcatacctctatacgagtaacttg

SEQ ID NO: 74881 - DNA, 25 bp, Homo sapien
aactaggtctaaggttaagtcgtcg

SEQ ID NO: 74882 - DNA, 25 bp, Homo sapien
aactaggtctaacgttaagtcgtcg

SEQ ID NO: 74883 - DNA, 25 bp, Homo sapien
acgttggacatagcagatgacgtag

SEQ ID NO: 74884 - DNA, 25 bp, Homo sapien
acgttggacataccagatgacgtag

SEQ ID NO: 74885 - DNA, 25 bp, Homo sapien
gactcgtccgacgttccagtgtctc

SEQ ID NO: 74886 - DNA, 25 bp, Homo sapien
gactcgtccgaccttccagtgtctc

SEQ ID NO: 74887 - DNA, 25 bp, Homo sapien
cttgtctccgaattactcgatgtcc

SEQ ID NO: 74888 - DNA, 25 bp, Homo sapien
cttgtctccgaaatactcgatgtcc

SEQ ID NO: 74889 - DNA, 25 bp, Homo sapien
ctctgtgttctcatgcccggtgctc

SEQ ID NO: 74890 - DNA, 25 bp, Homo sapien
ctctgtgttctcttgcccggtgctc

SEQ ID NO: 74891 - DNA, 25 bp, Homo sapien
cctaggttattcgtccgaagtagcc

SEQ ID NO: 74892 - DNA, 25 bp, Homo sapien
cctaggttattcctccgaagtagcc

SEQ ID NO: 74893 - DNA, 25 bp, Homo sapien
aggtcgttttcgaccacgaggagcc

SEQ ID NO: 74894 - DNA, 25 bp, Homo sapien
aggtcgttttcgtccacgaggagcc

SEQ ID NO: 74895 - DNA, 25 bp, Homo sapien
atggtcgttacctccagatgagtgg

SEQ ID NO: 74896 - DNA, 25 bp, Homo sapien
atggtcgttaccaccagatgagtgg

SEQ ID NO: 74897 - DNA, 25 bp, Homo sapien
tcgtttgtccttcgtgatgtctgcg

SEQ ID NO: 74898 - DNA, 25 bp, Homo sapien
tcgtttgtccttggtgatgtctgcg

SEQ ID NO: 74899 - DNA, 25 bp, Homo sapien
acgtgtattagtctaattctctttg

SEQ ID NO: 74900 - DNA, 25 bp, Homo sapien
acgtgtattagtgtaattctctttg

SEQ ID NO: 74901 - DNA, 25 bp, Homo sapien
gacggtgttgtctctttcttgtcta

SEQ ID NO: 74902 - DNA, 25 bp, Homo sapien
gacggtgttgtcactttcttgtcta

SEQ ID NO: 74903 - DNA, 25 bp, Homo sapien
aatagcctgtcttttggtcgtacat

SEQ ID NO: 74904 - DNA, 25 bp, Homo sapien
aatagcctgtctattggtcgtacat

SEQ ID NO: 74905 - DNA, 25 bp, Homo sapien
tcagatgtcgaggatgtctcgtgag

SEQ ID NO: 74906 - DNA, 25 bp, Homo sapien
tcagatgtcgagcatgtctcgtgag

SEQ ID NO: 74907 - DNA, 25 bp, Homo sapien
gttcagtatgtgttcttgtcttgac

SEQ ID NO: 74908 - DNA, 25 bp, Homo sapien
gttcagtatgtgatcttgtcttgac

SEQ ID NO: 74909 - DNA, 25 bp, Homo sapien
ttaccatgtcagtttgtagtgtaca

SEQ ID NO: 74910 - DNA, 25 bp, Homo sapien
ttaccatgtcagattgtagtgtaca

SEQ ID NO: 74911 - DNA, 25 bp, Homo sapien
gtcattaaacctactatttatgaga

SEQ ID NO: 74912 - DNA, 25 bp, Homo sapien
gtcattaaaccttctatttatgaga

SEQ ID NO: 74913 - DNA, 25 bp, Homo sapien
cctgcaccgtacctatagtttcgaa

SEQ ID NO: 74914 - DNA, 25 bp, Homo sapien
cctgcaccgtacgtatagtttcgaa

SEQ ID NO: 74915 - DNA, 25 bp, Homo sapien
acatgtccggtacgaacagtgtcaa

SEQ ID NO: 74916 - DNA, 25 bp, Homo sapien
acatgtccggtaggaacagtgtcaa

SEQ ID NO: 74917 - DNA, 25 bp, Homo sapien
tctctccacggtgaacctagtaatt

SEQ ID NO: 74918 - DNA, 25 bp, Homo sapien
tctctccacggtcaacctagtaatt

SEQ ID NO: 74919 - DNA, 25 bp, Homo sapien
agtcctcccttattaacctgtagaa

SEQ ID NO: 74920 - DNA, 25 bp, Homo sapien
agtcctcccttaataacctgtagaa

SEQ ID NO: 74921 - DNA, 25 bp, Homo sapien
gaccggcacccaaaatcgtagaagt

SEQ ID NO: 74922 - DNA, 25 bp, Homo sapien
gaccggcacccataatcgtagaagt

SEQ ID NO: 74923 - DNA, 25 bp, Homo sapien
cgtagacgactcatcttttcgaagg

SEQ ID NO: 74924 - DNA, 25 bp, Homo sapien
cgtagacgactcttcttttcgaagg

SEQ ID NO: 74925 - DNA, 25 bp, Homo sapien
caagtctccgtcacatgttacttgc

SEQ ID NO: 74926 - DNA, 25 bp, Homo sapien
caagtctccgtctcatgttacttgc

SEQ ID NO: 74927 - DNA, 25 bp, Homo sapien
gtctttcagtcatgactagtatgct

SEQ ID NO: 74928 - DNA, 25 bp, Homo sapien
gtctttcagtcaagactagtatgct

SEQ ID NO: 74929 - DNA, 25 bp, Homo sapien
aactaacacttagagaactactatc

SEQ ID NO: 74930 - DNA, 25 bp, Homo sapien
aactaacacttacagaactactatc

SEQ ID NO: 74931 - DNA, 25 bp, Homo sapien
actatccctcacttcgtctacttct

SEQ ID NO: 74932 - DNA, 25 bp, Homo sapien
actatccctcacatcgtctacttct

SEQ ID NO: 74933 - DNA, 25 bp, Homo sapien
ccgtgacccgaacttcgacgtaggg

SEQ ID NO: 74934 - DNA, 25 bp, Homo sapien
ccgtgacccgaagttcgacgtaggg

SEQ ID NO: 74935 - DNA, 25 bp, Homo sapien
cctcggccgcaagttccgatactgt

SEQ ID NO: 74936 - DNA, 25 bp, Homo sapien
cctcggccgcaacttccgatactgt

SEQ ID NO: 74937 - DNA, 25 bp, Homo sapien
gtggacccgaactatcttacttctt

SEQ ID NO: 74938 - DNA, 25 bp, Homo sapien
gtggacccgaacaatcttacttctt

SEQ ID NO: 74939 - DNA, 25 bp, Homo sapien
tacctccggtgtaaacctttacctg

SEQ ID NO: 74940 - DNA, 25 bp, Homo sapien
tacctccggtgttaacctttacctg

SEQ ID NO: 74941 - DNA, 25 bp, Homo sapien
ctcacggtgggtactcttgaccacc

SEQ ID NO: 74942 - DNA, 25 bp, Homo sapien
ctcacggtgggttctcttgaccacc

SEQ ID NO: 74943 - DNA, 25 bp, Homo sapien
gtcaaccgtctgtcggcaaacaaga

SEQ ID NO: 74944 - DNA, 25 bp, Homo sapien
gtcaaccgtctgacggcaaacaaga

SEQ ID NO: 74945 - DNA, 25 bp, Homo sapien
aacctactggtaaaacaactaacat

SEQ ID NO: 74946 - DNA, 25 bp, Homo sapien
aacctactggtataacaactaacat

SEQ ID NO: 74947 - DNA, 25 bp, Homo sapien
cttatgcatcggattatacgtatct

SEQ ID NO: 74948 - DNA, 25 bp, Homo sapien
cttatgcatcggtttatacgtatct

SEQ ID NO: 74949 - DNA, 25 bp, Homo sapien
ggattggtaaaatggatttacatct

SEQ ID NO: 74950 - DNA, 25 bp, Homo sapien
ggattggtaaaaaggatttacatct

SEQ ID NO: 74951 - DNA, 25 bp, Homo sapien
cgaagggacaaaagaaggtccttgt

SEQ ID NO: 74952 - DNA, 25 bp, Homo sapien
cgaagggacaaatgaaggtccttgt

SEQ ID NO: 74953 - DNA, 25 bp, Homo sapien
ggtgagacgaagacaggacactcct

SEQ ID NO: 74954 - DNA, 25 bp, Homo sapien
ggtgagacgaagtcaggacactcct

SEQ ID NO: 74955 - DNA, 25 bp, Homo sapien
gactttagaagtacattttctgtca

SEQ ID NO: 74956 - DNA, 25 bp, Homo sapien
gactttagaagttcattttctgtca

SEQ ID NO: 74957 - DNA, 25 bp, Homo sapien
cctaagagagtttatgtttttccta

SEQ ID NO: 74958 - DNA, 25 bp, Homo sapien
cctaagagagttaatgtttttccta

SEQ ID NO: 74959 - DNA, 25 bp, Homo sapien
gacttagaaaaaggtttacttcatc

SEQ ID NO: 74960 - DNA, 25 bp, Homo sapien
gacttagaaaaacgtttacttcatc

SEQ ID NO: 74961 - DNA, 25 bp, Homo sapien
caggaattgacgtttactagttctt

SEQ ID NO: 74962 - DNA, 25 bp, Homo sapien
caggaattgacgattactagttctt

SEQ ID NO: 74963 - DNA, 25 bp, Homo sapien
aaggagtgtatagactccccagata

SEQ ID NO: 74964 - DNA, 25 bp, Homo sapien
aaggagtgtatacactccccagata

SEQ ID NO: 74965 - DNA, 25 bp, Homo sapien
gttcgcgcgcattaggccgcgagta

SEQ ID NO: 74966 - DNA, 25 bp, Homo sapien
gttcgcgcgcataaggccgcgagta

SEQ ID NO: 74967 - DNA, 25 bp, Homo sapien
tcttagtaaccattactcgcggcct

SEQ ID NO: 74968 - DNA, 25 bp, Homo sapien
tcttagtaaccaatactcgcggcct

SEQ ID NO: 74969 - DNA, 25 bp, Homo sapien
ccttacctagttactcctattggag

SEQ ID NO: 74970 - DNA, 25 bp, Homo sapien
ccttacctagtttctcctattggag

SEQ ID NO: 74971 - DNA, 25 bp, Homo sapien
tctgtcgtagaattttctccccatg

SEQ ID NO: 74972 - DNA, 25 bp, Homo sapien
tctgtcgtagaaatttctccccatg

SEQ ID NO: 74973 - DNA, 25 bp, Homo sapien
gttctagaattttctcactactgtg

SEQ ID NO: 74974 - DNA, 25 bp, Homo sapien
gttctagaatttactcactactgtg

SEQ ID NO: 74975 - DNA, 25 bp, Homo sapien
tgaatgttacttacgaccgacgggt

SEQ ID NO: 74976 - DNA, 25 bp, Homo sapien
tgaatgttactttcgaccgacgggt

SEQ ID NO: 74977 - DNA, 25 bp, Homo sapien
tgtctgcccgtggtctcgctccacg

SEQ ID NO: 74978 - DNA, 25 bp, Homo sapien
tgtctgcccgtgctctcgctccacg

SEQ ID NO: 74979 - DNA, 25 bp, Homo sapien
ttcttaccctattacgtccgctgag

SEQ ID NO: 74980 - DNA, 25 bp, Homo sapien
ttcttaccctataacgtccgctgag

SEQ ID NO: 74981 - DNA, 25 bp, Homo sapien
tccccctgtggtttccgtatgagga

SEQ ID NO: 74982 - DNA, 25 bp, Homo sapien
tccccctgtggtatccgtatgagga

SEQ ID NO: 74983 - DNA, 25 bp, Homo sapien
ccaggtcgagtgatcgttctgggac

SEQ ID NO: 74984 - DNA, 25 bp, Homo sapien
ccaggtcgagtgttcgttctgggac

SEQ ID NO: 74985 - DNA, 25 bp, Homo sapien
ccgaaaggtccaggtcttccgaaac

SEQ ID NO: 74986 - DNA, 25 bp, Homo sapien
ccgaaaggtccacgtcttccgaaac

SEQ ID NO: 74987 - DNA, 25 bp, Homo sapien
aagtatcctaatcctaccgtaggac

SEQ ID NO: 74988 - DNA, 25 bp, Homo sapien
aagtatcctaatgctaccgtaggac

SEQ ID NO: 74989 - DNA, 25 bp, Homo sapien
ttcaggttatactttgtcttgctca

SEQ ID NO: 74990 - DNA, 25 bp, Homo sapien
ttcaggttatacattgtcttgctca

SEQ ID NO: 74991 - DNA, 25 bp, Homo sapien
cccagaggcgtctacttaggaccga

SEQ ID NO: 74992 - DNA, 25 bp, Homo sapien
cccagaggcgtcaacttaggaccga

SEQ ID NO: 74993 - DNA, 25 bp, Homo sapien
ccagaagaagtaggaccagaaacat

SEQ ID NO: 74994 - DNA, 25 bp, Homo sapien
ccagaagaagtacgaccagaaacat

SEQ ID NO: 74995 - DNA, 25 bp, Homo sapien
cgaaagatagaatcgacggaaaccg

SEQ ID NO: 74996 - DNA, 25 bp, Homo sapien
cgaaagatagaaacgacggaaaccg

SEQ ID NO: 74997 - DNA, 25 bp, Homo sapien
ctggaggaaaagacaccgggccagt

SEQ ID NO: 74998 - DNA, 25 bp, Homo sapien
ctggaggaaaagtcaccgggccagt

SEQ ID NO: 74999 - DNA, 25 bp, Homo sapien
tgaagaataaggacccgaaatcgag

SEQ ID NO: 75000 - DNA, 25 bp, Homo sapien
tgaagaataaggtcccgaaatcgag

SEQ ID NO: 75001 - DNA, 25 bp, Homo sapien
gggcttaggtacctcccgacacaag

SEQ ID NO: 75002 - DNA, 25 bp, Homo sapien
gggcttaggtacgtcccgacacaag

SEQ ID NO: 75003 - DNA, 25 bp, Homo sapien
gcggtcgtctagactttcttctccc

SEQ ID NO: 75004 - DNA, 25 bp, Homo sapien
gcggtcgtctagtctttcttctccc

SEQ ID NO: 75005 - DNA, 25 bp, Homo sapien
tacgcgtttgttgaggtctttgttc

SEQ ID NO: 75006 - DNA, 25 bp, Homo sapien
tacgcgtttgttcaggtctttgttc

SEQ ID NO: 75007 - DNA, 25 bp, Homo sapien
tagtgtttctcctgtccagttagca

SEQ ID NO: 75008 - DNA, 25 bp, Homo sapien
tagtgtttctccagtccagttagca

SEQ ID NO: 75009 - DNA, 25 bp, Homo sapien
atcgacactgacgtcccgaactctt

SEQ ID NO: 75010 - DNA, 25 bp, Homo sapien
atcgacactgacctcccgaactctt

SEQ ID NO: 75011 - DNA, 25 bp, Homo sapien
ggtgacagaacctcgtcggaccgat

SEQ ID NO: 75012 - DNA, 25 bp, Homo sapien
ggtgacagaaccacgtcggaccgat

SEQ ID NO: 75013 - DNA, 25 bp, Homo sapien
ggagatagaacgagactcggacgcc

SEQ ID NO: 75014 - DNA, 25 bp, Homo sapien
ggagatagaacgtgactcggacgcc

SEQ ID NO: 75015 - DNA, 25 bp, Homo sapien
ggatcgtaaacacgacacagacacc

SEQ ID NO: 75016 - DNA, 25 bp, Homo sapien
ggatcgtaaacaggacacagacacc

SEQ ID NO: 75017 - DNA, 25 bp, Homo sapien
aaacttaaacggagacgacacacct

SEQ ID NO: 75018 - DNA, 25 bp, Homo sapien
aaacttaaacggtgacgacacacct

SEQ ID NO: 75019 - DNA, 25 bp, Homo sapien
cctctatagacactaccgaacctct

SEQ ID NO: 75020 - DNA, 25 bp, Homo sapien
cctctatagacagtaccgaacctct

SEQ ID NO: 75021 - DNA, 25 bp, Homo sapien
ttttttggagtatgtaccgacattc

SEQ ID NO: 75022 - DNA, 25 bp, Homo sapien
ttttttggagtaagtaccgacattc

SEQ ID NO: 75023 - DNA, 25 bp, Homo sapien
ggtctccgggtcgacgacgaagatc

SEQ ID NO: 75024 - DNA, 25 bp, Homo sapien
ggtctccgggtccacgacgaagatc

SEQ ID NO: 75025 - DNA, 25 bp, Homo sapien
tgtccgtcgagacgttaactgtcac

SEQ ID NO: 75026 - DNA, 25 bp, Homo sapien
tgtccgtcgagaggttaactgtcac

SEQ ID NO: 75027 - DNA, 25 bp, Homo sapien
atacggtgattcgtccatggttgga

SEQ ID NO: 75028 - DNA, 25 bp, Homo sapien
atacggtgattcctccatggttgga

SEQ ID NO: 75029 - DNA, 25 bp, Homo sapien
agacctatgttcaccccggtacgga

SEQ ID NO: 75030 - DNA, 25 bp, Homo sapien
agacctatgttctccccggtacgga

SEQ ID NO: 75031 - DNA, 25 bp, Homo sapien
acaccctgcggatccctgtgtcgga

SEQ ID NO: 75032 - DNA, 25 bp, Homo sapien
acaccctgcggaaccctgtgtcgga

SEQ ID NO: 75033 - DNA, 25 bp, Homo sapien
atccgtaccccacgagcagacagga

SEQ ID NO: 75034 - DNA, 25 bp, Homo sapien
atccgtaccccaggagcagacagga

SEQ ID NO: 75035 - DNA, 25 bp, Homo sapien
gtcgccatgaacgtcgacgaagtga

SEQ ID NO: 75036 - DNA, 25 bp, Homo sapien
gtcgccatgaacctcgacgaagtga

SEQ ID NO: 75037 - DNA, 25 bp, Homo sapien
tgagaacaggaccaaccgaagtgac

SEQ ID NO: 75038 - DNA, 25 bp, Homo sapien
tgagaacaggacgaaccgaagtgac

SEQ ID NO: 75039 - DNA, 25 bp, Homo sapien
ttgagaggtgcaactactgaagaac

SEQ ID NO: 75040 - DNA, 25 bp, Homo sapien
ttgagaggtgcatctactgaagaac

SEQ ID NO: 75041 - DNA, 25 bp, Homo sapien
acttgtcctagtgacgttaactcag

SEQ ID NO: 75042 - DNA, 25 bp, Homo sapien
acttgtcctagtcacgttaactcag

SEQ ID NO: 75043 - DNA, 25 bp, Homo sapien
ttactacagattcaggttaatctgt

SEQ ID NO: 75044 - DNA, 25 bp, Homo sapien
ttactacagattgaggttaatctgt

SEQ ID NO: 75045 - DNA, 25 bp, Homo sapien
tgaacaccaattttcagtagtcgtt

SEQ ID NO: 75046 - DNA, 25 bp, Homo sapien
tgaacaccaattatcagtagtcgtt

SEQ ID NO: 75047 - DNA, 25 bp, Homo sapien
gaataactcttcgtacataacgtgt

SEQ ID NO: 75048 - DNA, 25 bp, Homo sapien
gaataactcttcctacataacgtgt

SEQ ID NO: 75049 - DNA, 25 bp, Homo sapien
ctgtttcaacattaccgttgattgt

SEQ ID NO: 75050 - DNA, 25 bp, Homo sapien
ctgtttcaacataaccgttgattgt

SEQ ID NO: 75051 - DNA, 25 bp, Homo sapien
ctagttggtcgtatgattttcctgt

SEQ ID NO: 75052 - DNA, 25 bp, Homo sapien
ctagttggtcgtttgattttcctgt

SEQ ID NO: 75053 - DNA, 25 bp, Homo sapien
ctgtcgtgagtttcatcttaatatt

SEQ ID NO: 75054 - DNA, 25 bp, Homo sapien
ctgtcgtgagttacatcttaatatt

SEQ ID NO: 75055 - DNA, 25 bp, Homo sapien
accatgatattcgtttgtctacgta

SEQ ID NO: 75056 - DNA, 25 bp, Homo sapien
accatgatattcctttgtctacgta

SEQ ID NO: 75057 - DNA, 25 bp, Homo sapien
agtcgattaccagttacaagactta

SEQ ID NO: 75058 - DNA, 25 bp, Homo sapien
agtcgattaccacttacaagactta

SEQ ID NO: 75059 - DNA, 25 bp, Homo sapien
ggagtaaaagtcttaagacgactca

SEQ ID NO: 75060 - DNA, 25 bp, Homo sapien
ggagtaaaagtcataagacgactca

SEQ ID NO: 75061 - DNA, 25 bp, Homo sapien
tgggtagaaagacaactcctcgagt

SEQ ID NO: 75062 - DNA, 25 bp, Homo sapien
tgggtagaaagagaactcctcgagt

SEQ ID NO: 75063 - DNA, 25 bp, Homo sapien
tagtgatgaagacagaagaaccctt

SEQ ID NO: 75064 - DNA, 25 bp, Homo sapien
tagtgatgaagagagaagaaccctt

SEQ ID NO: 75065 - DNA, 25 bp, Homo sapien
tctcggttccagaagacaaccagtt

SEQ ID NO: 75066 - DNA, 25 bp, Homo sapien
tctcggttccagtagacaaccagtt

SEQ ID NO: 75067 - DNA, 25 bp, Homo sapien
ctgaggaccagactgaagtaccaga

SEQ ID NO: 75068 - DNA, 25 bp, Homo sapien
ctgaggaccagagtgaagtaccaga

SEQ ID NO: 75069 - DNA, 25 bp, Homo sapien
ggcccgtcacggaagtgtatcagta

SEQ ID NO: 75070 - DNA, 25 bp, Homo sapien
ggcccgtcacggtagtgtatcagta

SEQ ID NO: 75071 - DNA, 25 bp, Homo sapien
accgacactccgaatgtcagtgtta

SEQ ID NO: 75072 - DNA, 25 bp, Homo sapien
accgacactccgtatgtcagtgtta

SEQ ID NO: 75073 - DNA, 25 bp, Homo sapien
tccctgcgcatcgtctgtttttatc

SEQ ID NO: 75074 - DNA, 25 bp, Homo sapien
tccctgcgcatcctctgtttttatc

SEQ ID NO: 75075 - DNA, 25 bp, Homo sapien
tgggaactacctttgtcagtctgac

SEQ ID NO: 75076 - DNA, 25 bp, Homo sapien
tgggaactacctatgtcagtctgac

SEQ ID NO: 75077 - DNA, 25 bp, Homo sapien
ttcagagtgttcacgttacagtaaa

SEQ ID NO: 75078 - DNA, 25 bp, Homo sapien
ttcagagtgttctcgttacagtaaa

SEQ ID NO: 75079 - DNA, 25 bp, Homo sapien
gttataagacaccttgtttagacaa

SEQ ID NO: 75080 - DNA, 25 bp, Homo sapien
gttataagacacgttgtttagacaa

SEQ ID NO: 75081 - DNA, 25 bp, Homo sapien
gtttgactccgtcagagaacggctc

SEQ ID NO: 75082 - DNA, 25 bp, Homo sapien
gtttgactccgtgagagaacggctc

SEQ ID NO: 75083 - DNA, 25 bp, Homo sapien
cattcagtgaataagtcactgtgtt

SEQ ID NO: 75084 - DNA, 25 bp, Homo sapien
cattcagtgaattagtcactgtgtt

SEQ ID NO: 75085 - DNA, 25 bp, Homo sapien
gacttcttcgtatgttctcggtggg

SEQ ID NO: 75086 - DNA, 25 bp, Homo sapien
gacttcttcgtaagttctcggtggg

SEQ ID NO: 75087 - DNA, 25 bp, Homo sapien
gtctacaaacggatttaccgaacga

SEQ ID NO: 75088 - DNA, 25 bp, Homo sapien
gtctacaaacggttttaccgaacga

SEQ ID NO: 75089 - DNA, 25 bp, Homo sapien
tctacaaacggatttaccgaacgag

SEQ ID NO: 75090 - DNA, 25 bp, Homo sapien
tctacaaacggaattaccgaacgag

SEQ ID NO: 75091 - DNA, 25 bp, Homo sapien
cctaccggacaaaatgcgtcacagg

SEQ ID NO: 75092 - DNA, 25 bp, Homo sapien
cctaccggacaatatgcgtcacagg

SEQ ID NO: 75093 - DNA, 25 bp, Homo sapien
caggtacggacaacttcgctacttg

SEQ ID NO: 75094 - DNA, 25 bp, Homo sapien
caggtacggacatcttcgctacttg

SEQ ID NO: 75095 - DNA, 25 bp, Homo sapien
aaacgtacaacttacttgtcttagg

SEQ ID NO: 75096 - DNA, 25 bp, Homo sapien
aaacgtacaactaacttgtcttagg

SEQ ID NO: 75097 - DNA, 25 bp, Homo sapien
tccaacgtagtctacttcttcttgg

SEQ ID NO: 75098 - DNA, 25 bp, Homo sapien
tccaacgtagtcaacttcttcttgg

SEQ ID NO: 75099 - DNA, 25 bp, Homo sapien
cacctgcactgtcactctttacagt

SEQ ID NO: 75100 - DNA, 25 bp, Homo sapien
cacctgcactgtgactctttacagt

SEQ ID NO: 75101 - DNA, 25 bp, Homo sapien
atacaacgacgtctctcgtcttgac

SEQ ID NO: 75102 - DNA, 25 bp, Homo sapien
atacaacgacgtgtctcgtcttgac

SEQ ID NO: 75103 - DNA, 25 bp, Homo sapien
tacaaaacggaggtctaggggacgt

SEQ ID NO: 75104 - DNA, 25 bp, Homo sapien
tacaaaacggagctctaggggacgt

SEQ ID NO: 75105 - DNA, 25 bp, Homo sapien
aaaagaacgacataccgtttagagt

SEQ ID NO: 75106 - DNA, 25 bp, Homo sapien
aaaagaacgacaaaccgtttagagt

SEQ ID NO: 75107 - DNA, 25 bp, Homo sapien
gaaatgagaaacaagacactttcat

SEQ ID NO: 75108 - DNA, 25 bp, Homo sapien
gaaatgagaaactagacactttcat

SEQ ID NO: 75109 - DNA, 25 bp, Homo sapien
agttcgttacccagtgacattctta

SEQ ID NO: 75110 - DNA, 25 bp, Homo sapien
agttcgttaccctgtgacattctta

SEQ ID NO: 75111 - DNA, 25 bp, Homo sapien
ggttctctacagtgacaaactctat

SEQ ID NO: 75112 - DNA, 25 bp, Homo sapien
ggttctctacagagacaaactctat

SEQ ID NO: 75113 - DNA, 25 bp, Homo sapien
gacgtgagttctacaaggaatcttt

SEQ ID NO: 75114 - DNA, 25 bp, Homo sapien
gacgtgagttcttcaaggaatcttt

SEQ ID NO: 75115 - DNA, 25 bp, Homo sapien
tttcttctgtcgagtcgaagtctta

SEQ ID NO: 75116 - DNA, 25 bp, Homo sapien
tttcttctgtcgtgtcgaagtctta

SEQ ID NO: 75117 - DNA, 25 bp, Homo sapien
actttggtttagtggtacgaatacc

SEQ ID NO: 75118 - DNA, 25 bp, Homo sapien
actttggtttagaggtacgaatacc

SEQ ID NO: 75119 - DNA, 25 bp, Homo sapien
cgattgaagtgttggagacttttcc

SEQ ID NO: 75120 - DNA, 25 bp, Homo sapien
cgattgaagtgtaggagacttttcc

SEQ ID NO: 75121 - DNA, 25 bp, Homo sapien
ggtcacgtcgaactagagtttccga

SEQ ID NO: 75122 - DNA, 25 bp, Homo sapien
ggtcacgtcgaagtagagtttccga

SEQ ID NO: 75123 - DNA, 25 bp, Homo sapien
cttcgtagtttcaatgggtcttgga

SEQ ID NO: 75124 - DNA, 25 bp, Homo sapien
cttcgtagtttctatgggtcttgga

SEQ ID NO: 75125 - DNA, 25 bp, Homo sapien
agtggtcctttcgtttctgtggtac

SEQ ID NO: 75126 - DNA, 25 bp, Homo sapien
agtggtcctttcctttctgtggtac

SEQ ID NO: 75127 - DNA, 25 bp, Homo sapien
atgattattttcttcgtttgacgac

SEQ ID NO: 75128 - DNA, 25 bp, Homo sapien
atgattattttcatcgtttgacgac

SEQ ID NO: 75129 - DNA, 25 bp, Homo sapien
tgatcatttataacgttatcggtcc

SEQ ID NO: 75130 - DNA, 25 bp, Homo sapien
tgatcatttatatcgttatcggtcc

SEQ ID NO: 75131 - DNA, 25 bp, Homo sapien
caggaccgaatcttttgttggtata

SEQ ID NO: 75132 - DNA, 25 bp, Homo sapien
caggaccgaatcatttgttggtata

SEQ ID NO: 75133 - DNA, 25 bp, Homo sapien
gtaaacgaatacatgtccttgtgaa

SEQ ID NO: 75134 - DNA, 25 bp, Homo sapien
gtaaacgaatacttgtccttgtgaa

SEQ ID NO: 75135 - DNA, 25 bp, Homo sapien
gtaaactcaatttctcactttgtat

SEQ ID NO: 75136 - DNA, 25 bp, Homo sapien
gtaaactcaattactcactttgtat

SEQ ID NO: 75137 - DNA, 25 bp, Homo sapien
gacaaaattactggaattctttgac

SEQ ID NO: 75138 - DNA, 25 bp, Homo sapien
gacaaaattactcgaattctttgac

SEQ ID NO: 75139 - DNA, 25 bp, Homo sapien
acgaaaagtggaagaagtccgcaaa

SEQ ID NO: 75140 - DNA, 25 bp, Homo sapien
acgaaaagtggatgaagtccgcaaa

SEQ ID NO: 75141 - DNA, 25 bp, Homo sapien
attgtagaaatcactctcagtgaaa

SEQ ID NO: 75142 - DNA, 25 bp, Homo sapien
attgtagaaatctctctcagtgaaa

SEQ ID NO: 75143 - DNA, 25 bp, Homo sapien
tcgaaaatgttatcgaccggacacc

SEQ ID NO: 75144 - DNA, 25 bp, Homo sapien
tcgaaaatgttaacgaccggacacc

SEQ ID NO: 75145 - DNA, 25 bp, Homo sapien
ctgaaactttctcaaccggttacag

SEQ ID NO: 75146 - DNA, 25 bp, Homo sapien
ctgaaactttctgaaccggttacag

SEQ ID NO: 75147 - DNA, 25 bp, Homo sapien
ccgtccaccgtctccgagggttaag

SEQ ID NO: 75148 - DNA, 25 bp, Homo sapien
ccgtccaccgtcaccgagggttaag

SEQ ID NO: 75149 - DNA, 25 bp, Homo sapien
cgaacttctcgaaccgaagagtaaa

SEQ ID NO: 75150 - DNA, 25 bp, Homo sapien
cgaacttctcgatccgaagagtaaa

SEQ ID NO: 75151 - DNA, 25 bp, Homo sapien
tggtccttcgagtgacgatttaata

SEQ ID NO: 75152 - DNA, 25 bp, Homo sapien
tggtccttcgagagacgatttaata

SEQ ID NO: 75153 - DNA, 25 bp, Homo sapien
ttggcagtctccttcgaattcccac

SEQ ID NO: 75154 - DNA, 25 bp, Homo sapien
ttggcagtctccatcgaattcccac

SEQ ID NO: 75155 - DNA, 25 bp, Homo sapien
ccgtgatcatacacggaaagaccca

SEQ ID NO: 75156 - DNA, 25 bp, Homo sapien
ccgtgatcatactcggaaagaccca

SEQ ID NO: 75157 - DNA, 25 bp, Homo sapien
ctgtgatttactcacaaaggaatga

SEQ ID NO: 75158 - DNA, 25 bp, Homo sapien
ctgtgatttactgacaaaggaatga

SEQ ID NO: 75159 - DNA, 25 bp, Homo sapien
tgtcattaaaaccaacggtatgttc

SEQ ID NO: 75160 - DNA, 25 bp, Homo sapien
tgtcattaaaacgaacggtatgttc

SEQ ID NO: 75161 - DNA, 25 bp, Homo sapien
catataatctatggtcgtgaggttc

SEQ ID NO: 75162 - DNA, 25 bp, Homo sapien
catataatctatcgtcgtgaggttc

SEQ ID NO: 75163 - DNA, 25 bp, Homo sapien
gaaaagtccctctgtagtctggtcg

SEQ ID NO: 75164 - DNA, 25 bp, Homo sapien
gaaaagtccctcagtagtctggtcg

SEQ ID NO: 75165 - DNA, 25 bp, Homo sapien
tccgaaccggggatactttctcggg

SEQ ID NO: 75166 - DNA, 25 bp, Homo sapien
tccgaaccggggttactttctcggg

SEQ ID NO: 75167 - DNA, 25 bp, Homo sapien
agaagaccggggacatcgtgtacca

SEQ ID NO: 75168 - DNA, 25 bp, Homo sapien
agaagaccggggtcatcgtgtacca

SEQ ID NO: 75169 - DNA, 25 bp, Homo sapien
cgattcgaagtaaatccgtactcta

SEQ ID NO: 75170 - DNA, 25 bp, Homo sapien
cgattcgaagtatatccgtactcta

SEQ ID NO: 75171 - DNA, 25 bp, Homo sapien
gaacagtaagggaactactagactt

SEQ ID NO: 75172 - DNA, 25 bp, Homo sapien
gaacagtaagggtactactagactt

SEQ ID NO: 75173 - DNA, 25 bp, Homo sapien
aagaaacggggacacagggactacg

SEQ ID NO: 75174 - DNA, 25 bp, Homo sapien
aagaaacggggagacagggactacg

SEQ ID NO: 75175 - DNA, 25 bp, Homo sapien
gaaagaagagagagactcgaggcac

SEQ ID NO: 75176 - DNA, 25 bp, Homo sapien
gaaagaagagagtgactcgaggcac

SEQ ID NO: 75177 - DNA, 25 bp, Homo sapien
taacaagagacttcagtcacgagcc

SEQ ID NO: 75178 - DNA, 25 bp, Homo sapien
taacaagagactacagtcacgagcc

SEQ ID NO: 75179 - DNA, 25 bp, Homo sapien
aaaacgacgggatttaccgaagaac

SEQ ID NO: 75180 - DNA, 25 bp, Homo sapien
aaaacgacgggaattaccgaagaac

SEQ ID NO: 75181 - DNA, 25 bp, Homo sapien
aaacgaggcggacgtctcgagaaag

SEQ ID NO: 75182 - DNA, 25 bp, Homo sapien
aaacgaggcggaggtctcgagaaag

SEQ ID NO: 75183 - DNA, 25 bp, Homo sapien
aaaacggacgtgtcgaacatcctag

SEQ ID NO: 75184 - DNA, 25 bp, Homo sapien
aaaacggacgtgacgaacatcctag

SEQ ID NO: 75185 - DNA, 25 bp, Homo sapien
aaaaagaccgtctcaaatttacgtg

SEQ ID NO: 75186 - DNA, 25 bp, Homo sapien
aaaaagaccgtcacaaatttacgtg

SEQ ID NO: 75187 - DNA, 25 bp, Homo sapien
acaaagaatcgctctaagagatttt

SEQ ID NO: 75188 - DNA, 25 bp, Homo sapien
acaaagaatcgcactaagagatttt

SEQ ID NO: 75189 - DNA, 25 bp, Homo sapien
aggaccacgcttgtgcgatcgtgtc

SEQ ID NO: 75190 - DNA, 25 bp, Homo sapien
aggaccacgcttctgcgatcgtgtc

SEQ ID NO: 75191 - DNA, 25 bp, Homo sapien
gaaccctttacttcggtgtcggtcg

SEQ ID NO: 75192 - DNA, 25 bp, Homo sapien
gaaccctttactacggtgtcggtcg

SEQ ID NO: 75193 - DNA, 25 bp, Homo sapien
cactccgctcggtgtcgtttctgcg

SEQ ID NO: 75194 - DNA, 25 bp, Homo sapien
cactccgctcggagtcgtttctgcg

SEQ ID NO: 75195 - DNA, 25 bp, Homo sapien
ttcgagtcggataagtgtctttgac

SEQ ID NO: 75196 - DNA, 25 bp, Homo sapien
ttcgagtcggattagtgtctttgac

SEQ ID NO: 75197 - DNA, 25 bp, Homo sapien
ccgacttgcagtggtcggagtagtc

SEQ ID NO: 75198 - DNA, 25 bp, Homo sapien
ccgacttgcagtcgtcggagtagtc

SEQ ID NO: 75199 - DNA, 25 bp, Homo sapien
cgcaccttcgacttggagagtatct

SEQ ID NO: 75200 - DNA, 25 bp, Homo sapien
cgcaccttcgacatggagagtatct

SEQ ID NO: 75201 - DNA, 25 bp, Homo sapien
tctcgtcgctcagaccttgagaaag

SEQ ID NO: 75202 - DNA, 25 bp, Homo sapien
tctcgtcgctcacaccttgagaaag

SEQ ID NO: 75203 - DNA, 25 bp, Homo sapien
ccggctcctctacctaaactaagag

SEQ ID NO: 75204 - DNA, 25 bp, Homo sapien
ccggctcctctagctaaactaagag

SEQ ID NO: 75205 - DNA, 25 bp, Homo sapien
ctagttgcaaaatcacgaacttctg

SEQ ID NO: 75206 - DNA, 25 bp, Homo sapien
ctagttgcaaaaacacgaacttctg

SEQ ID NO: 75207 - DNA, 25 bp, Homo sapien
cggggtgttaaacaacacattgttg

SEQ ID NO: 75208 - DNA, 25 bp, Homo sapien
cggggtgttaaagaacacattgttg

SEQ ID NO: 75209 - DNA, 25 bp, Homo sapien
ggattcatgcactcgacactactcg

SEQ ID NO: 75210 - DNA, 25 bp, Homo sapien
ggattcatgcacacgacactactcg

SEQ ID NO: 75211 - DNA, 25 bp, Homo sapien
aagaatgtcgatggaacctaaaact

SEQ ID NO: 75212 - DNA, 25 bp, Homo sapien
aagaatgtcgatcgaacctaaaact

SEQ ID NO: 75213 - DNA, 25 bp, Homo sapien
acgtgattgatcaagtcttacaatc

SEQ ID NO: 75214 - DNA, 25 bp, Homo sapien
acgtgattgatctagtcttacaatc

SEQ ID NO: 75215 - DNA, 25 bp, Homo sapien
acatgtagagttagtctagtgcatc

SEQ ID NO: 75216 - DNA, 25 bp, Homo sapien
acatgtagagtttgtctagtgcatc

SEQ ID NO: 75217 - DNA, 25 bp, Homo sapien
agttgactactgtcgtcactggtgc

SEQ ID NO: 75218 - DNA, 25 bp, Homo sapien
agttgactactgacgtcactggtgc

SEQ ID NO: 75219 - DNA, 25 bp, Homo sapien
gagttgagacgtcatgtgctacccc

SEQ ID NO: 75220 - DNA, 25 bp, Homo sapien
gagttgagacgtgatgtgctacccc

SEQ ID NO: 75221 - DNA, 25 bp, Homo sapien
tttttgacaatgatcgggacggacc

SEQ ID NO: 75222 - DNA, 25 bp, Homo sapien
tttttgacaatgttcgggacggacc

SEQ ID NO: 75223 - DNA, 25 bp, Homo sapien
taagcatattagttccgtcacaaag

SEQ ID NO: 75224 - DNA, 25 bp, Homo sapien
taagcatattagatccgtcacaaag

SEQ ID NO: 75225 - DNA, 25 bp, Homo sapien
aaagggttgacatgtagtccctcct

SEQ ID NO: 75226 - DNA, 25 bp, Homo sapien
aaagggttgacaagtagtccctcct

SEQ ID NO: 75227 - DNA, 25 bp, Homo sapien
tagacacgatttccaaggtttgtaa

SEQ ID NO: 75228 - DNA, 25 bp, Homo sapien
tagacacgatttgcaaggtttgtaa

SEQ ID NO: 75229 - DNA, 25 bp, Homo sapien
ttaaacgattgaacggggacccact

SEQ ID NO: 75230 - DNA, 25 bp, Homo sapien
ttaaacgattgatcggggacccact

SEQ ID NO: 75231 - DNA, 25 bp, Homo sapien
ttataagaggttcagggtggaaccc

SEQ ID NO: 75232 - DNA, 25 bp, Homo sapien
ttataagaggttgagggtggaaccc

SEQ ID NO: 75233 - DNA, 25 bp, Homo sapien
ttcgtgaacttcgaggttgagtccc

SEQ ID NO: 75234 - DNA, 25 bp, Homo sapien
ttcgtgaacttccaggttgagtccc

SEQ ID NO: 75235 - DNA, 25 bp, Homo sapien
agtgagttgtcttatcttcaaaacg

SEQ ID NO: 75236 - DNA, 25 bp, Homo sapien
agtgagttgtctaatcttcaaaacg

SEQ ID NO: 75237 - DNA, 25 bp, Homo sapien
aaattgtatgttcttccaacgacag

SEQ ID NO: 75238 - DNA, 25 bp, Homo sapien
aaattgtatgttgttccaacgacag

SEQ ID NO: 75239 - DNA, 25 bp, Homo sapien
agattttacgtttttcctcaagggt

SEQ ID NO: 75240 - DNA, 25 bp, Homo sapien
agattttacgttattcctcaagggt

SEQ ID NO: 75241 - DNA, 25 bp, Homo sapien
ttaagacgctagagtgtctcaagga

SEQ ID NO: 75242 - DNA, 25 bp, Homo sapien
ttaagacgctagtgtgtctcaagga

SEQ ID NO: 75243 - DNA, 25 bp, Homo sapien
tcactaaggtatttctacggtgaga

SEQ ID NO: 75244 - DNA, 25 bp, Homo sapien
tcactaaggtatatctacggtgaga

SEQ ID NO: 75245 - DNA, 25 bp, Homo sapien
tcactcctcgaccaacagtggatag

SEQ ID NO: 75246 - DNA, 25 bp, Homo sapien
tcactcctcgacgaacagtggatag

SEQ ID NO: 75247 - DNA, 25 bp, Homo sapien
ccaagctcttacataacaacgaagg

SEQ ID NO: 75248 - DNA, 25 bp, Homo sapien
ccaagctcttacttaacaacgaagg

SEQ ID NO: 75249 - DNA, 25 bp, Homo sapien
gaccggggcccgtaaaaacgtaaag

SEQ ID NO: 75250 - DNA, 25 bp, Homo sapien
gaccggggcccgaaaaaacgtaaag

SEQ ID NO: 75251 - DNA, 25 bp, Homo sapien
tcgacgagaactaaatcgggcattg

SEQ ID NO: 75252 - DNA, 25 bp, Homo sapien
tcgacgagaacttaatcgggcattg

SEQ ID NO: 75253 - DNA, 25 bp, Homo sapien
ttcgaggcctcactcggagctgccg

SEQ ID NO: 75254 - DNA, 25 bp, Homo sapien
ttcgaggcctcagtcggagctgccg

SEQ ID NO: 75255 - DNA, 25 bp, Homo sapien
gtattcaagggttacagtcgtctca

SEQ ID NO: 75256 - DNA, 25 bp, Homo sapien
gtattcaagggtaacagtcgtctca

SEQ ID NO: 75257 - DNA, 25 bp, Homo sapien
gttattagaacgatccctagttaca

SEQ ID NO: 75258 - DNA, 25 bp, Homo sapien
gttattagaacgttccctagttaca

SEQ ID NO: 75259 - DNA, 25 bp, Homo sapien
atattcgttgaacgaacaacgataa

SEQ ID NO: 75260 - DNA, 25 bp, Homo sapien
atattcgttgaaggaacaacgataa

SEQ ID NO: 75261 - DNA, 25 bp, Homo sapien
cagatgtatttaaacttgaacataa

SEQ ID NO: 75262 - DNA, 25 bp, Homo sapien
cagatgtatttatacttgaacataa

SEQ ID NO: 75263 - DNA, 25 bp, Homo sapien
cacggggtctaaacctgggacggaa

SEQ ID NO: 75264 - DNA, 25 bp, Homo sapien
cacggggtctaatcctgggacggaa

SEQ ID NO: 75265 - DNA, 25 bp, Homo sapien
tggacggtacaacttcgggtcgaaa

SEQ ID NO: 75266 - DNA, 25 bp, Homo sapien
tggacggtacaagttcgggtcgaaa

SEQ ID NO: 75267 - DNA, 25 bp, Homo sapien
caggaagaaggtagggtcacctacg

SEQ ID NO: 75268 - DNA, 25 bp, Homo sapien
caggaagaaggttgggtcacctacg

SEQ ID NO: 75269 - DNA, 25 bp, Homo sapien
atcaataatgtacgagttcactaag

SEQ ID NO: 75270 - DNA, 25 bp, Homo sapien
atcaataatgtaggagttcactaag

SEQ ID NO: 75271 - DNA, 25 bp, Homo sapien
atatagacagataggagttcctgac

SEQ ID NO: 75272 - DNA, 25 bp, Homo sapien
atatagacagattggagttcctgac

SEQ ID NO: 75273 - DNA, 25 bp, Homo sapien
acgttgaacgagttgtgtaaatttt

SEQ ID NO: 75274 - DNA, 25 bp, Homo sapien
acgttgaacgagatgtgtaaatttt

SEQ ID NO: 75275 - DNA, 25 bp, Homo sapien
tcgatcgtgtctacaactgttctgt

SEQ ID NO: 75276 - DNA, 25 bp, Homo sapien
tcgatcgtgtcttcaactgttctgt

SEQ ID NO: 75277 - DNA, 25 bp, Homo sapien
tgccgggtaccatccgtactgttgt

SEQ ID NO: 75278 - DNA, 25 bp, Homo sapien
tgccgggtaccaaccgtactgttgt

SEQ ID NO: 75279 - DNA, 25 bp, Homo sapien
cacatgtaccgactcgtacgtgata

SEQ ID NO: 75280 - DNA, 25 bp, Homo sapien
cacatgtaccgagtcgtacgtgata

SEQ ID NO: 75281 - DNA, 25 bp, Homo sapien
ggacccaacgttagaaacctacgaa

SEQ ID NO: 75282 - DNA, 25 bp, Homo sapien
ggacccaacgtttgaaacctacgaa

SEQ ID NO: 75283 - DNA, 25 bp, Homo sapien
actacacggaattgagaatcctatg

SEQ ID NO: 75284 - DNA, 25 bp, Homo sapien
actacacggaatagagaatcctatg

SEQ ID NO: 75285 - DNA, 25 bp, Homo sapien
catagacggaatgatctctattggg

SEQ ID NO: 75286 - DNA, 25 bp, Homo sapien
catagacggaatcatctctattggg

SEQ ID NO: 75287 - DNA, 25 bp, Homo sapien
tcctaggcggaacctccacttcggg

SEQ ID NO: 75288 - DNA, 25 bp, Homo sapien
tcctaggcggaagctccacttcggg

SEQ ID NO: 75289 - DNA, 25 bp, Homo sapien
ttggggtgatacacgaattctcagt

SEQ ID NO: 75290 - DNA, 25 bp, Homo sapien
ttggggtgatactcgaattctcagt

SEQ ID NO: 75291 - DNA, 25 bp, Homo sapien
ccgagggtctcgacctaggtccgtc

SEQ ID NO: 75292 - DNA, 25 bp, Homo sapien
ccgagggtctcgtcctaggtccgtc

SEQ ID NO: 75293 - DNA, 25 bp, Homo sapien
cagattcgttgaacttggaacgtct

SEQ ID NO: 75294 - DNA, 25 bp, Homo sapien
cagattcgttgatcttggaacgtct

SEQ ID NO: 75295 - DNA, 25 bp, Homo sapien
cagttcgtcttgatcgttgaaagta

SEQ ID NO: 75296 - DNA, 25 bp, Homo sapien
cagttcgtcttgttcgttgaaagta

SEQ ID NO: 75297 - DNA, 25 bp, Homo sapien
caggctcttctcgacggtaaccgac

SEQ ID NO: 75298 - DNA, 25 bp, Homo sapien
caggctcttctccacggtaaccgac

SEQ ID NO: 75299 - DNA, 25 bp, Homo sapien
gacgttcgatctacccgtacatacc

SEQ ID NO: 75300 - DNA, 25 bp, Homo sapien
gacgttcgatcttcccgtacatacc

SEQ ID NO: 75301 - DNA, 25 bp, Homo sapien
gagacttatcaaatcggcacgtaaa

SEQ ID NO: 75302 - DNA, 25 bp, Homo sapien
gagacttatcaattcggcacgtaaa

SEQ ID NO: 75303 - DNA, 25 bp, Homo sapien
taccttatcgggtcggtggacatag

SEQ ID NO: 75304 - DNA, 25 bp, Homo sapien
taccttatcgggacggtggacatag

SEQ ID NO: 75305 - DNA, 25 bp, Homo sapien
atctgttcggctcttgctcgatcgt

SEQ ID NO: 75306 - DNA, 25 bp, Homo sapien
atctgttcggctgttgctcgatcgt

SEQ ID NO: 75307 - DNA, 25 bp, Homo sapien
cccgtgttcgagtgataggcaatcg

SEQ ID NO: 75308 - DNA, 25 bp, Homo sapien
cccgtgttcgagagataggcaatcg

SEQ ID NO: 75309 - DNA, 25 bp, Homo sapien
agacgggtcgggaaggacttgagag

SEQ ID NO: 75310 - DNA, 25 bp, Homo sapien
agacgggtcgggtaggacttgagag

SEQ ID NO: 75311 - DNA, 25 bp, Homo sapien
ggacgagggatacttgatcgtgtac

SEQ ID NO: 75312 - DNA, 25 bp, Homo sapien
ggacgagggatagttgatcgtgtac

SEQ ID NO: 75313 - DNA, 25 bp, Homo sapien
cgtgaggtgaaggtccacgactgta

SEQ ID NO: 75314 - DNA, 25 bp, Homo sapien
cgtgaggtgaagctccacgactgta

SEQ ID NO: 75315 - DNA, 25 bp, Homo sapien
atgacacgcggcacgtggtgatgac

SEQ ID NO: 75316 - DNA, 25 bp, Homo sapien
atgacacgcggctcgtggtgatgac

SEQ ID NO: 75317 - DNA, 25 bp, Homo sapien
ggttcatcccgaaggattctcggat

SEQ ID NO: 75318 - DNA, 25 bp, Homo sapien
ggttcatcccgatggattctcggat

SEQ ID NO: 75319 - DNA, 25 bp, Homo sapien
ttcactcccataggaacaccgaggt

SEQ ID NO: 75320 - DNA, 25 bp, Homo sapien
ttcactcccatacgaacaccgaggt

SEQ ID NO: 75321 - DNA, 25 bp, Homo sapien
gtcactcaacttcaacggccgaggt

SEQ ID NO: 75322 - DNA, 25 bp, Homo sapien
gtcactcaacttgaacggccgaggt

SEQ ID NO: 75323 - DNA, 25 bp, Homo sapien
gggcatcaagaaagccgccgtgact

SEQ ID NO: 75324 - DNA, 25 bp, Homo sapien
gggcatcaagaatgccgccgtgact

SEQ ID NO: 75325 - DNA, 25 bp, Homo sapien
ctgtcattgtcactgaagagcgtcc

SEQ ID NO: 75326 - DNA, 25 bp, Homo sapien
ctgtcattgtcagtgaagagcgtcc

SEQ ID NO: 75327 - DNA, 25 bp, Homo sapien
ttcgaggtgaagagagagaccacac

SEQ ID NO: 75328 - DNA, 25 bp, Homo sapien
ttcgaggtgaagtgagagaccacac

SEQ ID NO: 75329 - DNA, 25 bp, Homo sapien
ttgggtagatagggtgagtaccccg

SEQ ID NO: 75330 - DNA, 25 bp, Homo sapien
ttgggtagatagcgtgagtaccccg

SEQ ID NO: 75331 - DNA, 25 bp, Homo sapien
gtagaaggtcgaaggggcacatcac

SEQ ID NO: 75332 - DNA, 25 bp, Homo sapien
gtagaaggtcgatggggcacatcac

SEQ ID NO: 75333 - DNA, 25 bp, Homo sapien
gacgacaggccaagggggctctctc

SEQ ID NO: 75334 - DNA, 25 bp, Homo sapien
gacgacaggccatgggggctctctc

SEQ ID NO: 75335 - DNA, 25 bp, Homo sapien
gccggtgtcgacgaccgggtcttcc

SEQ ID NO: 75336 - DNA, 25 bp, Homo sapien
gccggtgtcgaccaccgggtcttcc

SEQ ID NO: 75337 - DNA, 25 bp, Homo sapien
gttgtgttagtaaacacttcattcc

SEQ ID NO: 75338 - DNA, 25 bp, Homo sapien
gttgtgttagtatacacttcattcc

SEQ ID NO: 75339 - DNA, 25 bp, Homo sapien
ggtactataaaaggtacctaaaccc

SEQ ID NO: 75340 - DNA, 25 bp, Homo sapien
ggtactataaaacgtacctaaaccc

SEQ ID NO: 75341 - DNA, 25 bp, Homo sapien
atcgtacgtaaatgctggaacacct

SEQ ID NO: 75342 - DNA, 25 bp, Homo sapien
atcgtacgtaaaagctggaacacct

SEQ ID NO: 75343 - DNA, 25 bp, Homo sapien
acgaacaacgtcctgtacgacacct

SEQ ID NO: 75344 - DNA, 25 bp, Homo sapien
acgaacaacgtcgtgtacgacacct

SEQ ID NO: 75345 - DNA, 25 bp, Homo sapien
cgaaacagacataaccgtgtcaaat

SEQ ID NO: 75346 - DNA, 25 bp, Homo sapien
cgaaacagacattaccgtgtcaaat

SEQ ID NO: 75347 - DNA, 25 bp, Homo sapien
acatcgagcttcctgtacaagacgt

SEQ ID NO: 75348 - DNA, 25 bp, Homo sapien
acatcgagcttcgtgtacaagacgt

SEQ ID NO: 75349 - DNA, 25 bp, Homo sapien
aatgacagagtttctgtgcgaagac

SEQ ID NO: 75350 - DNA, 25 bp, Homo sapien
aatgacagagttactgtgcgaagac

SEQ ID NO: 75351 - DNA, 25 bp, Homo sapien
agatcgaacgggttacaggaatcac

SEQ ID NO: 75352 - DNA, 25 bp, Homo sapien
agatcgaacgggatacaggaatcac

SEQ ID NO: 75353 - DNA, 25 bp, Homo sapien
aaaacggagcagaacattacaatac

SEQ ID NO: 75354 - DNA, 25 bp, Homo sapien
aaaacggagcagtacattacaatac

SEQ ID NO: 75355 - DNA, 25 bp, Homo sapien
ggacaaccggcctaataatacgtca

SEQ ID NO: 75356 - DNA, 25 bp, Homo sapien
ggacaaccggccaaataatacgtca

SEQ ID NO: 75357 - DNA, 25 bp, Homo sapien
tccagtcggcacgtgggccgtctcg

SEQ ID NO: 75358 - DNA, 25 bp, Homo sapien
tccagtcggcacctgggccgtctcg

SEQ ID NO: 75359 - DNA, 25 bp, Homo sapien
cccgtttcggtcactgagggtcgcc

SEQ ID NO: 75360 - DNA, 25 bp, Homo sapien
cccgtttcggtctctgagggtcgcc

SEQ ID NO: 75361 - DNA, 25 bp, Homo sapien
ccctccgtagctcgtcagggacagg

SEQ ID NO: 75362 - DNA, 25 bp, Homo sapien
ccctccgtagctggtcagggacagg

SEQ ID NO: 75363 - DNA, 25 bp, Homo sapien
gaggaacgtaggagtctctacggtt

SEQ ID NO: 75364 - DNA, 25 bp, Homo sapien
gaggaacgtaggtgtctctacggtt

SEQ ID NO: 75365 - DNA, 25 bp, Homo sapien
ctaactgaaagactactttccgtgt

SEQ ID NO: 75366 - DNA, 25 bp, Homo sapien
ctaactgaaagagtactttccgtgt

SEQ ID NO: 75367 - DNA, 25 bp, Homo sapien
aaaaaacgacgaaatgtgttcctaa

SEQ ID NO: 75368 - DNA, 25 bp, Homo sapien
aaaaaacgacgatatgtgttcctaa

SEQ ID NO: 75369 - DNA, 25 bp, Homo sapien
acaaggaaccacagtcgcatcgaca

SEQ ID NO: 75370 - DNA, 25 bp, Homo sapien
acaaggaaccactgtcgcatcgaca

SEQ ID NO: 75371 - DNA, 25 bp, Homo sapien
caattgtatagtaactgtgacacaa

SEQ ID NO: 75372 - DNA, 25 bp, Homo sapien
caattgtatagttactgtgacacaa

SEQ ID NO: 75373 - DNA, 25 bp, Homo sapien
gaactgtagacgtacgatgccacga

SEQ ID NO: 75374 - DNA, 25 bp, Homo sapien
gaactgtagacgaacgatgccacga

SEQ ID NO: 75375 - DNA, 25 bp, Homo sapien
caaggactgttagcactgaccgagg

SEQ ID NO: 75376 - DNA, 25 bp, Homo sapien
caaggactgttaccactgaccgagg

SEQ ID NO: 75377 - DNA, 25 bp, Homo sapien
tccctgaggttggaccctgacccgg

SEQ ID NO: 75378 - DNA, 25 bp, Homo sapien
tccctgaggttgcaccctgacccgg

SEQ ID NO: 75379 - DNA, 25 bp, Homo sapien
caaggtgattaaacttctgtacgat

SEQ ID NO: 75380 - DNA, 25 bp, Homo sapien
caaggtgattaatcttctgtacgat

SEQ ID NO: 75381 - DNA, 25 bp, Homo sapien
aggtaggtcagttcggtcttctacg

SEQ ID NO: 75382 - DNA, 25 bp, Homo sapien
aggtaggtcagtacggtcttctacg

SEQ ID NO: 75383 - DNA, 25 bp, Homo sapien
tcacgaaggtaaatgtgcgatttcc

SEQ ID NO: 75384 - DNA, 25 bp, Homo sapien
tcacgaaggtaattgtgcgatttcc

SEQ ID NO: 75385 - DNA, 25 bp, Homo sapien
tatgagtcgaaattccaagtagtca

SEQ ID NO: 75386 - DNA, 25 bp, Homo sapien
tatgagtcgaaaatccaagtagtca

SEQ ID NO: 75387 - DNA, 25 bp, Homo sapien
agaaggagtactaacccaggtccga

SEQ ID NO: 75388 - DNA, 25 bp, Homo sapien
agaaggagtacttacccaggtccga

SEQ ID NO: 75389 - DNA, 25 bp, Homo sapien
cgggaagacgtatccccggtcacac

SEQ ID NO: 75390 - DNA, 25 bp, Homo sapien
cgggaagacgtaaccccggtcacac

SEQ ID NO: 75391 - DNA, 25 bp, Homo sapien
acctgaagacctaccactaggacca

SEQ ID NO: 75392 - DNA, 25 bp, Homo sapien
acctgaagaccttccactaggacca

SEQ ID NO: 75393 - DNA, 25 bp, Homo sapien
tcccaagaagactctataggaccag

SEQ ID NO: 75394 - DNA, 25 bp, Homo sapien
tcccaagaagacactataggaccag

SEQ ID NO: 75395 - DNA, 25 bp, Homo sapien
aagtcataaaacgtacaaggtccta

SEQ ID NO: 75396 - DNA, 25 bp, Homo sapien
aagtcataaaacctacaaggtccta

SEQ ID NO: 75397 - DNA, 25 bp, Homo sapien
gggccgacgaagacgtgatcgccca

SEQ ID NO: 75398 - DNA, 25 bp, Homo sapien
gggccgacgaagtcgtgatcgccca

SEQ ID NO: 75399 - DNA, 25 bp, Homo sapien
aagtcctgcacctgcgttggtcccg

SEQ ID NO: 75400 - DNA, 25 bp, Homo sapien
aagtcctgcaccagcgttggtcccg

SEQ ID NO: 75401 - DNA, 25 bp, Homo sapien
aagggtccatgacgatgttccgacg

SEQ ID NO: 75402 - DNA, 25 bp, Homo sapien
aagggtccatgaggatgttccgacg

SEQ ID NO: 75403 - DNA, 25 bp, Homo sapien
agggtccaacagagtccctcgtagt

SEQ ID NO: 75404 - DNA, 25 bp, Homo sapien
agggtccaacagtgtccctcgtagt

SEQ ID NO: 75405 - DNA, 25 bp, Homo sapien
gtggtcgcgactacgggttatttct

SEQ ID NO: 75406 - DNA, 25 bp, Homo sapien
gtggtcgcgacttcgggttatttct

SEQ ID NO: 75407 - DNA, 25 bp, Homo sapien
cgagacgtgacttcggtactttttc

SEQ ID NO: 75408 - DNA, 25 bp, Homo sapien
cgagacgtgactacggtactttttc

SEQ ID NO: 75409 - DNA, 25 bp, Homo sapien
gcagtaatttgacttgtctttgtgc

SEQ ID NO: 75410 - DNA, 25 bp, Homo sapien
gcagtaatttgagttgtctttgtgc

SEQ ID NO: 75411 - DNA, 25 bp, Homo sapien
ttatgtcttctgctattgagcgaac

SEQ ID NO: 75412 - DNA, 25 bp, Homo sapien
ttatgtcttctggtattgagcgaac

SEQ ID NO: 75413 - DNA, 25 bp, Homo sapien
tttgttatgtcatcattgtccatag

SEQ ID NO: 75414 - DNA, 25 bp, Homo sapien
tttgttatgtcaacattgtccatag

SEQ ID NO: 75415 - DNA, 25 bp, Homo sapien
atatcttagcccatagagtcctagg

SEQ ID NO: 75416 - DNA, 25 bp, Homo sapien
atatcttagcccttagagtcctagg

SEQ ID NO: 75417 - DNA, 25 bp, Homo sapien
atctttagaccgttctaacgtgaaa

SEQ ID NO: 75418 - DNA, 25 bp, Homo sapien
atctttagaccgatctaacgtgaaa

SEQ ID NO: 75419 - DNA, 25 bp, Homo sapien
atatatgtgtcaccttaatcgattg

SEQ ID NO: 75420 - DNA, 25 bp, Homo sapien
atatatgtgtcagcttaatcgattg

SEQ ID NO: 75421 - DNA, 25 bp, Homo sapien
cataactcttacgggtcattgaatg

SEQ ID NO: 75422 - DNA, 25 bp, Homo sapien
cataactcttaccggtcattgaatg

SEQ ID NO: 75423 - DNA, 25 bp, Homo sapien
attctttccggtagtcactctagct

SEQ ID NO: 75424 - DNA, 25 bp, Homo sapien
attctttccggttgtcactctagct

SEQ ID NO: 75425 - DNA, 25 bp, Homo sapien
acttcgtggccctctacatcggtac

SEQ ID NO: 75426 - DNA, 25 bp, Homo sapien
acttcgtggcccactacatcggtac

SEQ ID NO: 75427 - DNA, 25 bp, Homo sapien
ctgtccgtggaaccttctccgtgaa

SEQ ID NO: 75428 - DNA, 25 bp, Homo sapien
ctgtccgtggaagcttctccgtgaa

SEQ ID NO: 75429 - DNA, 25 bp, Homo sapien
actctaccgactttgtagaccccga

SEQ ID NO: 75430 - DNA, 25 bp, Homo sapien
actctaccgactatgtagaccccga

SEQ ID NO: 75431 - DNA, 25 bp, Homo sapien
aagtttacattccacgtacccacgg

SEQ ID NO: 75432 - DNA, 25 bp, Homo sapien
aagtttacattcgacgtacccacgg

SEQ ID NO: 75433 - DNA, 25 bp, Homo sapien
aatgagtaccattacagaaaaacgg

SEQ ID NO: 75434 - DNA, 25 bp, Homo sapien
aatgagtaccataacagaaaaacgg

SEQ ID NO: 75435 - DNA, 25 bp, Homo sapien
ggctcgagccacgaccagagaaagg

SEQ ID NO: 75436 - DNA, 25 bp, Homo sapien
ggctcgagccaccaccagagaaagg

SEQ ID NO: 75437 - DNA, 25 bp, Homo sapien
agtagactaaaccacagaaagctag

SEQ ID NO: 75438 - DNA, 25 bp, Homo sapien
agtagactaaacgacagaaagctag

SEQ ID NO: 75439 - DNA, 25 bp, Homo sapien
actatacattcgactgttaatcgtg

SEQ ID NO: 75440 - DNA, 25 bp, Homo sapien
actatacattcgtctgttaatcgtg

SEQ ID NO: 75441 - DNA, 25 bp, Homo sapien
ctatacatatagatttcacgtaata

SEQ ID NO: 75442 - DNA, 25 bp, Homo sapien
ctatacatatagttttcacgtaata

SEQ ID NO: 75443 - DNA, 25 bp, Homo sapien
caacggtgtacattttttcattagg

SEQ ID NO: 75444 - DNA, 25 bp, Homo sapien
caacggtgtacaatttttcattagg

SEQ ID NO: 75445 - DNA, 25 bp, Homo sapien
gaagtccctttcctctgccatagtc

SEQ ID NO: 75446 - DNA, 25 bp, Homo sapien
gaagtccctttcgtctgccatagtc

SEQ ID NO: 75447 - DNA, 25 bp, Homo sapien
gtattcctttgtgtactcctttcag

SEQ ID NO: 75448 - DNA, 25 bp, Homo sapien
gtattcctttgtctactcctttcag

SEQ ID NO: 75449 - DNA, 25 bp, Homo sapien
gatttccagtggtgattctacatca

SEQ ID NO: 75450 - DNA, 25 bp, Homo sapien
gatttccagtggagattctacatca

SEQ ID NO: 75451 - DNA, 25 bp, Homo sapien
gagaaagttgggatgacactctcga

SEQ ID NO: 75452 - DNA, 25 bp, Homo sapien
gagaaagttgggttgacactctcga

SEQ ID NO: 75453 - DNA, 25 bp, Homo sapien
aagttacgaaattagactaccgtag

SEQ ID NO: 75454 - DNA, 25 bp, Homo sapien
aagttacgaaataagactaccgtag

SEQ ID NO: 75455 - DNA, 25 bp, Homo sapien
cataagatacttaaaaaccgacgag

SEQ ID NO: 75456 - DNA, 25 bp, Homo sapien
cataagatactttaaaaccgacgag

SEQ ID NO: 75457 - DNA, 25 bp, Homo sapien
tctttcaactcctgataaactaggg

SEQ ID NO: 75458 - DNA, 25 bp, Homo sapien
tctttcaactccagataaactaggg

SEQ ID NO: 75459 - DNA, 25 bp, Homo sapien
aaatcactgacttaatggtaccgca

SEQ ID NO: 75460 - DNA, 25 bp, Homo sapien
aaatcactgactaaatggtaccgca

SEQ ID NO: 75461 - DNA, 25 bp, Homo sapien
atgaacatccttgtggtcgtccgtt

SEQ ID NO: 75462 - DNA, 25 bp, Homo sapien
atgaacatccttctggtcgtccgtt

SEQ ID NO: 75463 - DNA, 25 bp, Homo sapien
tcgcatcccaggaagtcgtcacgtg

SEQ ID NO: 75464 - DNA, 25 bp, Homo sapien
tcgcatcccaggtagtcgtcacgtg

SEQ ID NO: 75465 - DNA, 25 bp, Homo sapien
ccaacccaagtctgtcgtcgagacg

SEQ ID NO: 75466 - DNA, 25 bp, Homo sapien
ccaacccaagtcagtcgtcgagacg

SEQ ID NO: 75467 - DNA, 25 bp, Homo sapien
ccgtaagagccttattcaatcggcg

SEQ ID NO: 75468 - DNA, 25 bp, Homo sapien
ccgtaagagcctaattcaatcggcg

SEQ ID NO: 75469 - DNA, 25 bp, Homo sapien
caccggaccggaggactaatcaccg

SEQ ID NO: 75470 - DNA, 25 bp, Homo sapien
caccggaccggacgactaatcaccg

SEQ ID NO: 75471 - DNA, 25 bp, Homo sapien
catctacgtgtgactacgaagaccc

SEQ ID NO: 75472 - DNA, 25 bp, Homo sapien
catctacgtgtgtctacgaagaccc

SEQ ID NO: 75473 - DNA, 25 bp, Homo sapien
gtcagtcggtgtcttcgacacaacc

SEQ ID NO: 75474 - DNA, 25 bp, Homo sapien
gtcagtcggtgtgttcgacacaacc

SEQ ID NO: 75475 - DNA, 25 bp, Homo sapien
gtgtactttactttggttcatgaca

SEQ ID NO: 75476 - DNA, 25 bp, Homo sapien
gtgtactttactatggttcatgaca

SEQ ID NO: 75477 - DNA, 25 bp, Homo sapien
acgaccttatttgacttcatcagag

SEQ ID NO: 75478 - DNA, 25 bp, Homo sapien
acgaccttatttcacttcatcagag

SEQ ID NO: 75479 - DNA, 25 bp, Homo sapien
gggagacccttccttacccagaagg

SEQ ID NO: 75480 - DNA, 25 bp, Homo sapien
gggagacccttcgttacccagaagg

SEQ ID NO: 75481 - DNA, 25 bp, Homo sapien
gtaaccgtgatcactctcccatcag

SEQ ID NO: 75482 - DNA, 25 bp, Homo sapien
gtaaccgtgatctctctcccatcag

SEQ ID NO: 75483 - DNA, 25 bp, Homo sapien
aagaatcgtcactcgctcaaattgg

SEQ ID NO: 75484 - DNA, 25 bp, Homo sapien
aagaatcgtcacacgctcaaattgg

SEQ ID NO: 75485 - DNA, 25 bp, Homo sapien
aaaggtcgacctgacccaaaccttt

SEQ ID NO: 75486 - DNA, 25 bp, Homo sapien
aaaggtcgacctcacccaaaccttt

SEQ ID NO: 75487 - DNA, 25 bp, Homo sapien
ttaagcgaaacaagccaatcgattt

SEQ ID NO: 75488 - DNA, 25 bp, Homo sapien
ttaagcgaaacatgccaatcgattt

SEQ ID NO: 75489 - DNA, 25 bp, Homo sapien
tgtcattgatgtaattcaatcttaa

SEQ ID NO: 75490 - DNA, 25 bp, Homo sapien
tgtcattgatgttattcaatcttaa

SEQ ID NO: 75491 - DNA, 25 bp, Homo sapien
gtcggtcatttgattcaacttttct

SEQ ID NO: 75492 - DNA, 25 bp, Homo sapien
gtcggtcatttgtttcaacttttct

SEQ ID NO: 75493 - DNA, 25 bp, Homo sapien
tacactgtctttagacgagtattta

SEQ ID NO: 75494 - DNA, 25 bp, Homo sapien
tacactgtcttttgacgagtattta

SEQ ID NO: 75495 - DNA, 25 bp, Homo sapien
tgtacatcttctacggagaactcta

SEQ ID NO: 75496 - DNA, 25 bp, Homo sapien
tgtacatcttcttcggagaactcta

SEQ ID NO: 75497 - DNA, 25 bp, Homo sapien
ttctatcctctaccagagagttctg

SEQ ID NO: 75498 - DNA, 25 bp, Homo sapien
ttctatcctctagcagagagttctg

SEQ ID NO: 75499 - DNA, 25 bp, Homo sapien
aacgaggacaacgtaagagtactgt

SEQ ID NO: 75500 - DNA, 25 bp, Homo sapien
aacgaggacaacctaagagtactgt

SEQ ID NO: 75501 - DNA, 25 bp, Homo sapien
tgagacacggacaaccagaaacgtt

SEQ ID NO: 75502 - DNA, 25 bp, Homo sapien
tgagacacggactaccagaaacgtt

SEQ ID NO: 75503 - DNA, 25 bp, Homo sapien
gacacgactgacgtcgccggtcttc

SEQ ID NO: 75504 - DNA, 25 bp, Homo sapien
gacacgactgacctcgccggtcttc

SEQ ID NO: 75505 - DNA, 25 bp, Homo sapien
cttgtctggtactcgaccgaagtcc

SEQ ID NO: 75506 - DNA, 25 bp, Homo sapien
cttgtctggtacacgaccgaagtcc

SEQ ID NO: 75507 - DNA, 25 bp, Homo sapien
ctatgactctctggcaccgaggtcc

SEQ ID NO: 75508 - DNA, 25 bp, Homo sapien
ctatgactctctcgcaccgaggtcc

SEQ ID NO: 75509 - DNA, 25 bp, Homo sapien
ccggttcctctctccgaagtgtctc

SEQ ID NO: 75510 - DNA, 25 bp, Homo sapien
ccggttcctctcaccgaagtgtctc

SEQ ID NO: 75511 - DNA, 25 bp, Homo sapien
taagtgtctttgacccaggtgtctc

SEQ ID NO: 75512 - DNA, 25 bp, Homo sapien
taagtgtctttgtcccaggtgtctc

SEQ ID NO: 75513 - DNA, 25 bp, Homo sapien
cttgttttaccttctcaaggacggg

SEQ ID NO: 75514 - DNA, 25 bp, Homo sapien
cttgttttacctactcaaggacggg

SEQ ID NO: 75515 - DNA, 25 bp, Homo sapien
cttgctttaactacctcatgctcgg

SEQ ID NO: 75516 - DNA, 25 bp, Homo sapien
cttgctttaacttcctcatgctcgg

SEQ ID NO: 75517 - DNA, 25 bp, Homo sapien
cgcgttttcctactctacctatgtg

SEQ ID NO: 75518 - DNA, 25 bp, Homo sapien
cgcgttttcctagtctacctatgtg

SEQ ID NO: 75519 - DNA, 25 bp, Homo sapien
tcggttttcacttttacggtgtgta

SEQ ID NO: 75520 - DNA, 25 bp, Homo sapien
tcggttttcactattacggtgtgta

SEQ ID NO: 75521 - DNA, 25 bp, Homo sapien
acacttccttgtattaggtcgtcat

SEQ ID NO: 75522 - DNA, 25 bp, Homo sapien
acacttccttgttttaggtcgtcat

SEQ ID NO: 75523 - DNA, 25 bp, Homo sapien
gtcagatgtcgaggatgtctcgtga

SEQ ID NO: 75524 - DNA, 25 bp, Homo sapien
gtcagatgtcgacgatgtctcgtga

SEQ ID NO: 75525 - DNA, 25 bp, Homo sapien
gtgtctagactaggattttctcaga

SEQ ID NO: 75526 - DNA, 25 bp, Homo sapien
gtgtctagactacgattttctcaga

SEQ ID NO: 75527 - DNA, 25 bp, Homo sapien
attccattcggttatacgtatgtaa

SEQ ID NO: 75528 - DNA, 25 bp, Homo sapien
attccattcggtaatacgtatgtaa

SEQ ID NO: 75529 - DNA, 25 bp, Homo sapien
cgatattacattgttactcatgaga

SEQ ID NO: 75530 - DNA, 25 bp, Homo sapien
cgatattacattcttactcatgaga

SEQ ID NO: 75531 - DNA, 25 bp, Homo sapien
gttcgtaccgtccttatcatacgaa

SEQ ID NO: 75532 - DNA, 25 bp, Homo sapien
gttcgtaccgtcgttatcatacgaa

SEQ ID NO: 75533 - DNA, 25 bp, Homo sapien
tgatcccgtcgtcgataccttcgaa

SEQ ID NO: 75534 - DNA, 25 bp, Homo sapien
tgatcccgtcgtggataccttcgaa

SEQ ID NO: 75535 - DNA, 25 bp, Homo sapien
tgtttctccggtgaccttagtaaag

SEQ ID NO: 75536 - DNA, 25 bp, Homo sapien
tgtttctccggtcaccttagtaaag

SEQ ID NO: 75537 - DNA, 25 bp, Homo sapien
ttatcctccctggttaagtttaaga

SEQ ID NO: 75538 - DNA, 25 bp, Homo sapien
ttatcctccctgcttaagtttaaga

SEQ ID NO: 75539 - DNA, 25 bp, Homo sapien
ggccggcgacccaagcatcgtagaa

SEQ ID NO: 75540 - DNA, 25 bp, Homo sapien
ggccggcgaccctagcatcgtagaa

SEQ ID NO: 75541 - DNA, 25 bp, Homo sapien
cccgtgacgacctatttctcaagtt

SEQ ID NO: 75542 - DNA, 25 bp, Homo sapien
cccgtgacgaccaatttctcaagtt

SEQ ID NO: 75543 - DNA, 25 bp, Homo sapien
aagtcgtcagcaagatcgttttggt

SEQ ID NO: 75544 - DNA, 25 bp, Homo sapien
aagtcgtcagcatgatcgttttggt

SEQ ID NO: 75545 - DNA, 25 bp, Homo sapien
tagaagcttgtcatcaggatgttgc

SEQ ID NO: 75546 - DNA, 25 bp, Homo sapien
tagaagcttgtcttcaggatgttgc

SEQ ID NO: 75547 - DNA, 25 bp, Homo sapien
gctacaatcttagtagatcactagc

SEQ ID NO: 75548 - DNA, 25 bp, Homo sapien
gctacaatcttactagatcactagc

SEQ ID NO: 75549 - DNA, 25 bp, Homo sapien
gtacctacactaagtcgtactctct

SEQ ID NO: 75550 - DNA, 25 bp, Homo sapien
gtacctacactatgtcgtactctct

SEQ ID NO: 75551 - DNA, 25 bp, Homo sapien
ccgatactcacgaaccttcctaggg

SEQ ID NO: 75552 - DNA, 25 bp, Homo sapien
ccgatactcacgtaccttcctaggg

SEQ ID NO: 75553 - DNA, 25 bp, Homo sapien
ctcgagtcaacttatcttaccatgg

SEQ ID NO: 75554 - DNA, 25 bp, Homo sapien
ctcgagtcaactaatcttaccatgg

SEQ ID NO: 75555 - DNA, 25 bp, Homo sapien
gtaggtactccatcaatccatttgt

SEQ ID NO: 75556 - DNA, 25 bp, Homo sapien
gtaggtactccaacaatccatttgt

SEQ ID NO: 75557 - DNA, 25 bp, Homo sapien
ttttgtccgggatacctctctcctg

SEQ ID NO: 75558 - DNA, 25 bp, Homo sapien
ttttgtccgggaaacctctctcctg

SEQ ID NO: 75559 - DNA, 25 bp, Homo sapien
tcgttcggagggacactcagccacc

SEQ ID NO: 75560 - DNA, 25 bp, Homo sapien
tcgttcggagggtcactcagccacc

SEQ ID NO: 75561 - DNA, 25 bp, Homo sapien
gaggtccgtggactgctaaacaaga

SEQ ID NO: 75562 - DNA, 25 bp, Homo sapien
gaggtccgtggagtgctaaacaaga

SEQ ID NO: 75563 - DNA, 25 bp, Homo sapien
gaggaccttgtgttggtcaactaaa

SEQ ID NO: 75564 - DNA, 25 bp, Homo sapien
gaggaccttgtgatggtcaactaaa

SEQ ID NO: 75565 - DNA, 25 bp, Homo sapien
tgtgactttgcgtgcgtaaaaatac

SEQ ID NO: 75566 - DNA, 25 bp, Homo sapien
tgtgactttgcgagcgtaaaaatac

SEQ ID NO: 75567 - DNA, 25 bp, Homo sapien
atatattaaaaacatatatacatat

SEQ ID NO: 75568 - DNA, 25 bp, Homo sapien
atatattaaaaagatatatacatat

SEQ ID NO: 75569 - DNA, 25 bp, Homo sapien
aatgagacagacaaaacggccatgt

SEQ ID NO: 75570 - DNA, 25 bp, Homo sapien
aatgagacagactaaacggccatgt

SEQ ID NO: 75571 - DNA, 25 bp, Homo sapien
tggacagtacggtcaggaccctcgt

SEQ ID NO: 75572 - DNA, 25 bp, Homo sapien
tggacagtacggacaggaccctcgt

SEQ ID NO: 75573 - DNA, 25 bp, Homo sapien
cgcttctgaattgatctttaccctg

SEQ ID NO: 75574 - DNA, 25 bp, Homo sapien
cgcttctgaattcatctttaccctg

SEQ ID NO: 75575 - DNA, 25 bp, Homo sapien
ccacgttgatcttatgtttttcctg

SEQ ID NO: 75576 - DNA, 25 bp, Homo sapien
ccacgttgatctaatgtttttcctg

SEQ ID NO: 75577 - DNA, 25 bp, Homo sapien
ccttaggaaaaatcgttattcctgt

SEQ ID NO: 75578 - DNA, 25 bp, Homo sapien
ccttaggaaaaaacgttattcctgt

SEQ ID NO: 75579 - DNA, 25 bp, Homo sapien
accccatgaagtaggttttattctt

SEQ ID NO: 75580 - DNA, 25 bp, Homo sapien
accccatgaagttggttttattctt

SEQ ID NO: 75581 - DNA, 25 bp, Homo sapien
ggtgtagtatcttcccaccagatat

SEQ ID NO: 75582 - DNA, 25 bp, Homo sapien
ggtgtagtatctacccaccagatat

SEQ ID NO: 75583 - DNA, 25 bp, Homo sapien
cgccgcatttggtcggcggtcgtgg

SEQ ID NO: 75584 - DNA, 25 bp, Homo sapien
cgccgcatttggacggcggtcgtgg

SEQ ID NO: 75585 - DNA, 25 bp, Homo sapien
aaccattactcgcggcctaatgcgc

SEQ ID NO: 75586 - DNA, 25 bp, Homo sapien
aaccattactcggggcctaatgcgc

SEQ ID NO: 75587 - DNA, 25 bp, Homo sapien
cttacctagttactcctattggagt

SEQ ID NO: 75588 - DNA, 25 bp, Homo sapien
cttacctagttagtcctattggagt

SEQ ID NO: 75589 - DNA, 25 bp, Homo sapien
ttttaaaggttttcacgtaccatag

SEQ ID NO: 75590 - DNA, 25 bp, Homo sapien
ttttaaaggtttacacgtaccatag

SEQ ID NO: 75591 - DNA, 25 bp, Homo sapien
cttttaagatctgtcgtcacacttg

SEQ ID NO: 75592 - DNA, 25 bp, Homo sapien
cttttaagatctctcgtcacacttg

SEQ ID NO: 75593 - DNA, 25 bp, Homo sapien
ctttaaagtgtctttcgtcggaggg

SEQ ID NO: 75594 - DNA, 25 bp, Homo sapien
ctttaaagtgtcattcgtcggaggg

SEQ ID NO: 75595 - DNA, 25 bp, Homo sapien
gtgtctgcccgtggtctcgctccac

SEQ ID NO: 75596 - DNA, 25 bp, Homo sapien
gtgtctgcccgtcgtctcgctccac

SEQ ID NO: 75597 - DNA, 25 bp, Homo sapien
gtcttaccactcgtatcaactcgag

SEQ ID NO: 75598 - DNA, 25 bp, Homo sapien
gtcttaccactcctatcaactcgag

SEQ ID NO: 75599 - DNA, 25 bp, Homo sapien
ccccgtcgtggttccgttggaggat

SEQ ID NO: 75600 - DNA, 25 bp, Homo sapien
ccccgtcgtggtaccgttggaggat

SEQ ID NO: 75601 - DNA, 25 bp, Homo sapien
ctcacgtgtcatgaggttcaggaga

SEQ ID NO: 75602 - DNA, 25 bp, Homo sapien
ctcacgtgtcatcaggttcaggaga

SEQ ID NO: 75603 - DNA, 25 bp, Homo sapien
tccgaaaggtccaggtcttccgaaa

SEQ ID NO: 75604 - DNA, 25 bp, Homo sapien
tccgaaaggtcctggtcttccgaaa

SEQ ID NO: 75605 - DNA, 25 bp, Homo sapien
gataaagtcctaaaccttcgaagac

SEQ ID NO: 75606 - DNA, 25 bp, Homo sapien
gataaagtcctataccttcgaagac

SEQ ID NO: 75607 - DNA, 25 bp, Homo sapien
tacagatgtatcttctgcttagcaa

SEQ ID NO: 75608 - DNA, 25 bp, Homo sapien
tacagatgtatcatctgcttagcaa

SEQ ID NO: 75609 - DNA, 25 bp, Homo sapien
cccgaacttccatcctagagacaga

SEQ ID NO: 75610 - DNA, 25 bp, Homo sapien
cccgaacttccaacctagagacaga

SEQ ID NO: 75611 - DNA, 25 bp, Homo sapien
agtcgaataagtggaccaaacacta

SEQ ID NO: 75612 - DNA, 25 bp, Homo sapien
agtcgaataagtcgaccaaacacta

SEQ ID NO: 75613 - DNA, 25 bp, Homo sapien
acgacaggaagaagacgcggaacca

SEQ ID NO: 75614 - DNA, 25 bp, Homo sapien
acgacaggaagatgacgcggaacca

SEQ ID NO: 75615 - DNA, 25 bp, Homo sapien
ttcggaaaaagagacactaggccat

SEQ ID NO: 75616 - DNA, 25 bp, Homo sapien
ttcggaaaaagacacactaggccat

SEQ ID NO: 75617 - DNA, 25 bp, Homo sapien
cttaaataagagactaccaaatgag

SEQ ID NO: 75618 - DNA, 25 bp, Homo sapien
cttaaataagagtctaccaaatgag

SEQ ID NO: 75619 - DNA, 25 bp, Homo sapien
tcggaactgaggtcaccccgacaag

SEQ ID NO: 75620 - DNA, 25 bp, Homo sapien
tcggaactgaggacaccccgacaag

SEQ ID NO: 75621 - DNA, 25 bp, Homo sapien
cggtgtctccggagagtcttctccc

SEQ ID NO: 75622 - DNA, 25 bp, Homo sapien
cggtgtctccggtgagtcttctccc

SEQ ID NO: 75623 - DNA, 25 bp, Homo sapien
cttaaggattttaggtctttcgttc

SEQ ID NO: 75624 - DNA, 25 bp, Homo sapien
cttaaggatttttggtctttcgttc

SEQ ID NO: 75625 - DNA, 25 bp, Homo sapien
gtctattctcgctgtccatgtgtcc

SEQ ID NO: 75626 - DNA, 25 bp, Homo sapien
gtctattctcgcagtccatgtgtcc

SEQ ID NO: 75627 - DNA, 25 bp, Homo sapien
atctaagtgacgaccgacgaatctt

SEQ ID NO: 75628 - DNA, 25 bp, Homo sapien
atctaagtgacgtccgacgaatctt

SEQ ID NO: 75629 - DNA, 25 bp, Homo sapien
ggtgaagacccgtcggtaaccgtgt

SEQ ID NO: 75630 - DNA, 25 bp, Homo sapien
ggtgaagacccgacggtaaccgtgt

SEQ ID NO: 75631 - DNA, 25 bp, Homo sapien
gacgagagtaaacgaaccggacctg

SEQ ID NO: 75632 - DNA, 25 bp, Homo sapien
gacgagagtaaaggaaccggacctg

SEQ ID NO: 75633 - DNA, 25 bp, Homo sapien
gaggtgacaacagcagtcagacccg

SEQ ID NO: 75634 - DNA, 25 bp, Homo sapien
gaggtgacaacaccagtcagacccg

SEQ ID NO: 75635 - DNA, 25 bp, Homo sapien
acctgtaaccctagagagacgacct

SEQ ID NO: 75636 - DNA, 25 bp, Homo sapien
acctgtaacccttgagagacgacct

SEQ ID NO: 75637 - DNA, 25 bp, Homo sapien
tccgtctaaaccttaaggacgctct

SEQ ID NO: 75638 - DNA, 25 bp, Homo sapien
tccgtctaaaccataaggacgctct

SEQ ID NO: 75639 - DNA, 25 bp, Homo sapien
tgtacaggacgataccgagacgttc

SEQ ID NO: 75640 - DNA, 25 bp, Homo sapien
tgtacaggacgaaaccgagacgttc

SEQ ID NO: 75641 - DNA, 25 bp, Homo sapien
cgggcgccgggagagcgagagcgtc

SEQ ID NO: 75642 - DNA, 25 bp, Homo sapien
cgggcgccgggacagcgagagcgtc

SEQ ID NO: 75643 - DNA, 25 bp, Homo sapien
atcgtatcgggactgtcagtgtcga

SEQ ID NO: 75644 - DNA, 25 bp, Homo sapien
atcgtatcgggagtgtcagtgtcga

SEQ ID NO: 75645 - DNA, 25 bp, Homo sapien
agtccggagttcgttttggtttcgg

SEQ ID NO: 75646 - DNA, 25 bp, Homo sapien
agtccggagttccttttggtttcgg

SEQ ID NO: 75647 - DNA, 25 bp, Homo sapien
gtaccttgtctctgccccgttgaga

SEQ ID NO: 75648 - DNA, 25 bp, Homo sapien
gtaccttgtctcagccccgttgaga

SEQ ID NO: 75649 - DNA, 25 bp, Homo sapien
acaccggtccggatccctcttggag

SEQ ID NO: 75650 - DNA, 25 bp, Homo sapien
acaccggtccggttccctcttggag

SEQ ID NO: 75651 - DNA, 25 bp, Homo sapien
agcgacgccaccatcagcaacagga

SEQ ID NO: 75652 - DNA, 25 bp, Homo sapien
agcgacgccaccttcagcaacagga

SEQ ID NO: 75653 - DNA, 25 bp, Homo sapien
agtcccgagtgatcggtcaagggta

SEQ ID NO: 75654 - DNA, 25 bp, Homo sapien
agtcccgagtgaacggtcaagggta

SEQ ID NO: 75655 - DNA, 25 bp, Homo sapien
gagtctggtgaccaacgtgaagtga

SEQ ID NO: 75656 - DNA, 25 bp, Homo sapien
gagtctggtgacgaacgtgaagtga

SEQ ID NO: 75657 - DNA, 25 bp, Homo sapien
gtgcaggtaccgacactgacagaac

SEQ ID NO: 75658 - DNA, 25 bp, Homo sapien
gtgcaggtaccgtcactgacagaac

SEQ ID NO: 75659 - DNA, 25 bp, Homo sapien
cagtcgtcactttacgtgatgtcac

SEQ ID NO: 75660 - DNA, 25 bp, Homo sapien
cagtcgtcacttaacgtgatgtcac

SEQ ID NO: 75661 - DNA, 25 bp, Homo sapien
ttacaagtcttcgacgtagtatttt

SEQ ID NO: 75662 - DNA, 25 bp, Homo sapien
ttacaagtcttccacgtagtatttt

SEQ ID NO: 75663 - DNA, 25 bp, Homo sapien
catcaccgatatctctcatagtgtg

SEQ ID NO: 75664 - DNA, 25 bp, Homo sapien
catcaccgatatgtctcatagtgtg

SEQ ID NO: 75665 - DNA, 25 bp, Homo sapien
agaataactcttcgtacataacgtg

SEQ ID NO: 75666 - DNA, 25 bp, Homo sapien
agaataactcttggtacataacgtg

SEQ ID NO: 75667 - DNA, 25 bp, Homo sapien
ttggatcaaatatccttagatactg

SEQ ID NO: 75668 - DNA, 25 bp, Homo sapien
ttggatcaaataaccttagatactg

SEQ ID NO: 75669 - DNA, 25 bp, Homo sapien
tctagttggtcgtatgattttcctg

SEQ ID NO: 75670 - DNA, 25 bp, Homo sapien
tctagttggtcgaatgattttcctg

SEQ ID NO: 75671 - DNA, 25 bp, Homo sapien
cttcgtgagttaacccgttaattgt

SEQ ID NO: 75672 - DNA, 25 bp, Homo sapien
cttcgtgagttatcccgttaattgt

SEQ ID NO: 75673 - DNA, 25 bp, Homo sapien
acaacgtgatatctctttggtgtag

SEQ ID NO: 75674 - DNA, 25 bp, Homo sapien
acaacgtgatatgtctttggtgtag

SEQ ID NO: 75675 - DNA, 25 bp, Homo sapien
gtcattaccgtattcttatgactga

SEQ ID NO: 75676 - DNA, 25 bp, Homo sapien
gtcattaccgtaatcttatgactga

SEQ ID NO: 75677 - DNA, 25 bp, Homo sapien
gtgtataaattcttaagaaccgact

SEQ ID NO: 75678 - DNA, 25 bp, Homo sapien
gtgtataaattcataagaaccgact

SEQ ID NO: 75679 - DNA, 25 bp, Homo sapien
ttaggaaaggagtagactcctcagt

SEQ ID NO: 75680 - DNA, 25 bp, Homo sapien
ttaggaaaggagaagactcctcagt

SEQ ID NO: 75681 - DNA, 25 bp, Homo sapien
ggatcgatacgatagaaaacaccat

SEQ ID NO: 75682 - DNA, 25 bp, Homo sapien
ggatcgatacgaaagaaaacaccat

SEQ ID NO: 75683 - DNA, 25 bp, Homo sapien
gtccggttcaatatacaaccagtac

SEQ ID NO: 75684 - DNA, 25 bp, Homo sapien
gtccggttcaatttacaaccagtac

SEQ ID NO: 75685 - DNA, 25 bp, Homo sapien
tctcaggtccaactacaagaacaag

SEQ ID NO: 75686 - DNA, 25 bp, Homo sapien
tctcaggtccaagtacaagaacaag

SEQ ID NO: 75687 - DNA, 25 bp, Homo sapien
ccgcccgtagaggactatgtgcaga

SEQ ID NO: 75688 - DNA, 25 bp, Homo sapien
ccgcccgtagagcactatgtgcaga

SEQ ID NO: 75689 - DNA, 25 bp, Homo sapien
ccgactccagataatcagtcgacta

SEQ ID NO: 75690 - DNA, 25 bp, Homo sapien
ccgactccagattatcagtcgacta

SEQ ID NO: 75691 - DNA, 25 bp, Homo sapien
ccctgcgcatcgtctgtttttatct

SEQ ID NO: 75692 - DNA, 25 bp, Homo sapien
ccctgcgcatcgactgtttttatct

SEQ ID NO: 75693 - DNA, 25 bp, Homo sapien
ggaacctactctttgtcgattaact

SEQ ID NO: 75694 - DNA, 25 bp, Homo sapien
ggaacctactctatgtcgattaact

SEQ ID NO: 75695 - DNA, 25 bp, Homo sapien
ttaggtcgtctccagtagtaataaa

SEQ ID NO: 75696 - DNA, 25 bp, Homo sapien
ttaggtcgtctcgagtagtaataaa

SEQ ID NO: 75697 - DNA, 25 bp, Homo sapien
ctgttaaaacctgtgtttacgaaca

SEQ ID NO: 75698 - DNA, 25 bp, Homo sapien
ctgttaaaacctctgtttacgaaca

SEQ ID NO: 75699 - DNA, 25 bp, Homo sapien
tttattaaccctgaggatcgtcctc

SEQ ID NO: 75700 - DNA, 25 bp, Homo sapien
tttattaaccctcaggatcgtcctc

SEQ ID NO: 75701 - DNA, 25 bp, Homo sapien
ccaacggacctgactctacttaagt

SEQ ID NO: 75702 - DNA, 25 bp, Homo sapien
ccaacggacctgtctctacttaagt

SEQ ID NO: 75703 - DNA, 25 bp, Homo sapien
gcaacaagacgtctccgtcgttctg

SEQ ID NO: 75704 - DNA, 25 bp, Homo sapien
gcaacaagacgtgtccgtcgttctg

SEQ ID NO: 75705 - DNA, 25 bp, Homo sapien
atcaagaagggaactaccggctagt

SEQ ID NO: 75706 - DNA, 25 bp, Homo sapien
atcaagaagggatctaccggctagt

SEQ ID NO: 75707 - DNA, 25 bp, Homo sapien
tataaaacacggaaactctattgag

SEQ ID NO: 75708 - DNA, 25 bp, Homo sapien
tataaaacacggtaactctattgag

SEQ ID NO: 75709 - DNA, 25 bp, Homo sapien
gtcaaacagaaactagacaccttga

SEQ ID NO: 75710 - DNA, 25 bp, Homo sapien
gtcaaacagaaagtagacaccttga

SEQ ID NO: 75711 - DNA, 25 bp, Homo sapien
agagtaggtccaagtgcatcttgac

SEQ ID NO: 75712 - DNA, 25 bp, Homo sapien
agagtaggtccatgtgcatcttgac

SEQ ID NO: 75713 - DNA, 25 bp, Homo sapien
cgggttcctcgtgtgcaaagtctat

SEQ ID NO: 75714 - DNA, 25 bp, Homo sapien
cgggttcctcgtctgcaaagtctat

SEQ ID NO: 75715 - DNA, 25 bp, Homo sapien
gtgattcttaacatgacatactgtt

SEQ ID NO: 75716 - DNA, 25 bp, Homo sapien
gtgattcttaacttgacatactgtt

SEQ ID NO: 75717 - DNA, 25 bp, Homo sapien
gttttgtcgcgtggtaagtactcta

SEQ ID NO: 75718 - DNA, 25 bp, Homo sapien
gttttgtcgcgtcgtaagtactcta

SEQ ID NO: 75719 - DNA, 25 bp, Homo sapien
tttagtttagtgtgcgtagtagccc

SEQ ID NO: 75720 - DNA, 25 bp, Homo sapien
tttagtttagtgagcgtagtagccc

SEQ ID NO: 75721 - DNA, 25 bp, Homo sapien
cattcaggtagttgaaggttttacc

SEQ ID NO: 75722 - DNA, 25 bp, Homo sapien
cattcaggtagtagaaggttttacc

SEQ ID NO: 75723 - DNA, 25 bp, Homo sapien
tacacgtgtctaaaagtttcgacac

SEQ ID NO: 75724 - DNA, 25 bp, Homo sapien
tacacgtgtctataagtttcgacac

SEQ ID NO: 75725 - DNA, 25 bp, Homo sapien
gcttactctcaaaggacgtttcgga

SEQ ID NO: 75726 - DNA, 25 bp, Homo sapien
gcttactctcaatggacgtttcgga

SEQ ID NO: 75727 - DNA, 25 bp, Homo sapien
tactcgtactttggtttagtggtac

SEQ ID NO: 75728 - DNA, 25 bp, Homo sapien
tactcgtactttcgtttagtggtac

SEQ ID NO: 75729 - DNA, 25 bp, Homo sapien
atcatttacaattgtcgttgtggac

SEQ ID NO: 75730 - DNA, 25 bp, Homo sapien
atcatttacaatagtcgttgtggac

SEQ ID NO: 75731 - DNA, 25 bp, Homo sapien
tcgaaattgtatacgtgtttcgtca

SEQ ID NO: 75732 - DNA, 25 bp, Homo sapien
tcgaaattgtattcgtgtttcgtca

SEQ ID NO: 75733 - DNA, 25 bp, Homo sapien
ctgacgacaatgctttgtgtggtta

SEQ ID NO: 75734 - DNA, 25 bp, Homo sapien
ctgacgacaatggtttgtgtggtta

SEQ ID NO: 75735 - DNA, 25 bp, Homo sapien
gactaacgaattttatcttggacta

SEQ ID NO: 75736 - DNA, 25 bp, Homo sapien
gactaacgaattatatcttggacta

SEQ ID NO: 75737 - DNA, 25 bp, Homo sapien
gtagaacgaaaaacctcatgttatt

SEQ ID NO: 75738 - DNA, 25 bp, Homo sapien
gtagaacgaaaatcctcatgttatt

SEQ ID NO: 75739 - DNA, 25 bp, Homo sapien
accaaaagttacgatatttctttca

SEQ ID NO: 75740 - DNA, 25 bp, Homo sapien
accaaaagttaccatatttctttca

SEQ ID NO: 75741 - DNA, 25 bp, Homo sapien
acgaaaagtggaagaagtccgcaaa

SEQ ID NO: 75742 - DNA, 25 bp, Homo sapien
acgaaaagtggatgaagtccgcaaa

SEQ ID NO: 75743 - DNA, 25 bp, Homo sapien
cttgtagatcatgttgtcaggacaa

SEQ ID NO: 75744 - DNA, 25 bp, Homo sapien
cttgtagatcatcttgtcaggacaa

SEQ ID NO: 75745 - DNA, 25 bp, Homo sapien
tcgacggaaggttccgacgggacaa

SEQ ID NO: 75746 - DNA, 25 bp, Homo sapien
tcgacggaaggtaccgacgggacaa

SEQ ID NO: 75747 - DNA, 25 bp, Homo sapien
tctcaaacttattgaacgggttcta

SEQ ID NO: 75748 - DNA, 25 bp, Homo sapien
tctcaaacttatagaacgggttcta

SEQ ID NO: 75749 - DNA, 25 bp, Homo sapien
tctgaaaccgtctctacaggcttta

SEQ ID NO: 75750 - DNA, 25 bp, Homo sapien
tctgaaaccgtcactacaggcttta

SEQ ID NO: 75751 - DNA, 25 bp, Homo sapien
cgagacccgtcaaccggagaaacta

SEQ ID NO: 75752 - DNA, 25 bp, Homo sapien
cgagacccgtcatccggagaaacta

SEQ ID NO: 75753 - DNA, 25 bp, Homo sapien
ggaccggtcgaggtgacatttataa

SEQ ID NO: 75754 - DNA, 25 bp, Homo sapien
ggaccggtcgagctgacatttataa

SEQ ID NO: 75755 - DNA, 25 bp, Homo sapien
ttggcgagtccaactcacattttta

SEQ ID NO: 75756 - DNA, 25 bp, Homo sapien
ttggcgagtccatctcacattttta

SEQ ID NO: 75757 - DNA, 25 bp, Homo sapien
tcggaatatacgaggaaatactcaa

SEQ ID NO: 75758 - DNA, 25 bp, Homo sapien
tcggaatatacgtggaaatactcaa

SEQ ID NO: 75759 - DNA, 25 bp, Homo sapien
cggatttacgtgtataatgacctca

SEQ ID NO: 75760 - DNA, 25 bp, Homo sapien
cggatttacgtgaataatgacctca

SEQ ID NO: 75761 - DNA, 25 bp, Homo sapien
gtcattaaaaccaacggtatgttct

SEQ ID NO: 75762 - DNA, 25 bp, Homo sapien
gtcattaaaacctacggtatgttct

SEQ ID NO: 75763 - DNA, 25 bp, Homo sapien
tataatctaccgtttgtaggtctct

SEQ ID NO: 75764 - DNA, 25 bp, Homo sapien
tataatctaccgattgtaggtctct

SEQ ID NO: 75765 - DNA, 25 bp, Homo sapien
tggataaatcacgtatgagtttccg

SEQ ID NO: 75766 - DNA, 25 bp, Homo sapien
tggataaatcacctatgagtttccg

SEQ ID NO: 75767 - DNA, 25 bp, Homo sapien
ttctgaaagatcacatgttctgtgg

SEQ ID NO: 75768 - DNA, 25 bp, Homo sapien
ttctgaaagatctcatgttctgtgg

SEQ ID NO: 75769 - DNA, 25 bp, Homo sapien
caagcgacggggttcttcgttgtca

SEQ ID NO: 75770 - DNA, 25 bp, Homo sapien
caagcgacggggatcttcgttgtca

SEQ ID NO: 75771 - DNA, 25 bp, Homo sapien
cgattgacataatcgtctgtgtcta

SEQ ID NO: 75772 - DNA, 25 bp, Homo sapien
cgattgacataaacgtctgtgtcta

SEQ ID NO: 75773 - DNA, 25 bp, Homo sapien
gaccaaaacggtactactagactag

SEQ ID NO: 75774 - DNA, 25 bp, Homo sapien
gaccaaaacggttctactagactag

SEQ ID NO: 75775 - DNA, 25 bp, Homo sapien
ataacaagaactgaagcagactacg

SEQ ID NO: 75776 - DNA, 25 bp, Homo sapien
ataacaagaactcaagcagactacg

SEQ ID NO: 75777 - DNA, 25 bp, Homo sapien
agatcaagagagagactgtcgaaca

SEQ ID NO: 75778 - DNA, 25 bp, Homo sapien
agatcaagagagtgactgtcgaaca

SEQ ID NO: 75779 - DNA, 25 bp, Homo sapien
attcaggagattctagacgtagaca

SEQ ID NO: 75780 - DNA, 25 bp, Homo sapien
attcaggagattgtagacgtagaca

SEQ ID NO: 75781 - DNA, 25 bp, Homo sapien
acaccgggaagtacacgaagacgta

SEQ ID NO: 75782 - DNA, 25 bp, Homo sapien
acaccgggaagttcacgaagacgta

SEQ ID NO: 75783 - DNA, 25 bp, Homo sapien
ctcgaggcagacgtcgtcgagaaag

SEQ ID NO: 75784 - DNA, 25 bp, Homo sapien
ctcgaggcagacctcgtcgagaaag

SEQ ID NO: 75785 - DNA, 25 bp, Homo sapien
aagaagtagatgtcgttcaaagtag

SEQ ID NO: 75786 - DNA, 25 bp, Homo sapien
aagaagtagatgacgttcaaagtag

SEQ ID NO: 75787 - DNA, 25 bp, Homo sapien
aataaagactcatcaaatatcagtt

SEQ ID NO: 75788 - DNA, 25 bp, Homo sapien
aataaagactcaacaaatatcagtt

SEQ ID NO: 75789 - DNA, 25 bp, Homo sapien
aaagaagtacccctagagaaaggtt

SEQ ID NO: 75790 - DNA, 25 bp, Homo sapien
aaagaagtacccgtagagaaaggtt

SEQ ID NO: 75791 - DNA, 25 bp, Homo sapien
atagaccccatggagacatgtatct

SEQ ID NO: 75792 - DNA, 25 bp, Homo sapien
atagaccccatgcagacatgtatct

SEQ ID NO: 75793 - DNA, 25 bp, Homo sapien
aacccgtggacctgacgagtggtcg

SEQ ID NO: 75794 - DNA, 25 bp, Homo sapien
aacccgtggaccagacgagtggtcg

SEQ ID NO: 75795 - DNA, 25 bp, Homo sapien
acacgtgtctggtcggttttagacg

SEQ ID NO: 75796 - DNA, 25 bp, Homo sapien
acacgtgtctggacggttttagacg

SEQ ID NO: 75797 - DNA, 25 bp, Homo sapien
ccgagtcgtcataagtcttattaga

SEQ ID NO: 75798 - DNA, 25 bp, Homo sapien
ccgagtcgtcattagtcttattaga

SEQ ID NO: 75799 - DNA, 25 bp, Homo sapien
ccactcgccagtcactggagagtct

SEQ ID NO: 75800 - DNA, 25 bp, Homo sapien
ccactcgccagtgactggagagtct

SEQ ID NO: 75801 - DNA, 25 bp, Homo sapien
cgcccttcggtcatagacagtatac

SEQ ID NO: 75802 - DNA, 25 bp, Homo sapien
cgcccttcggtcttagacagtatac

SEQ ID NO: 75803 - DNA, 25 bp, Homo sapien
tcgtcaccactccttctggaatagt

SEQ ID NO: 75804 - DNA, 25 bp, Homo sapien
tcgtcaccactcgttctggaatagt

SEQ ID NO: 75805 - DNA, 25 bp, Homo sapien
acaggctccctgttacaagtaacag

SEQ ID NO: 75806 - DNA, 25 bp, Homo sapien
acaggctccctgatacaagtaacag

SEQ ID NO: 75807 - DNA, 25 bp, Homo sapien
tatgtgtcccataaccacacttcgg

SEQ ID NO: 75808 - DNA, 25 bp, Homo sapien
tatgtgtcccattaccacacttcgg

SEQ ID NO: 75809 - DNA, 25 bp, Homo sapien
tggtgtgagaaacctaccacttttg

SEQ ID NO: 75810 - DNA, 25 bp, Homo sapien
tggtgtgagaaagctaccacttttg

SEQ ID NO: 75811 - DNA, 25 bp, Homo sapien
aggatgaagtcatactatactatcg

SEQ ID NO: 75812 - DNA, 25 bp, Homo sapien
aggatgaagtcaaactatactatcg

SEQ ID NO: 75813 - DNA, 25 bp, Homo sapien
cgaaaggtcgaaggaaccaaagact

SEQ ID NO: 75814 - DNA, 25 bp, Homo sapien
cgaaaggtcgaacgaaccaaagact

SEQ ID NO: 75815 - DNA, 25 bp, Homo sapien
gacttagttgaacttcttagaagtc

SEQ ID NO: 75816 - DNA, 25 bp, Homo sapien
gacttagttgaagttcttagaagtc

SEQ ID NO: 75817 - DNA, 25 bp, Homo sapien
ccagtctgagtccatctgtgcatcg

SEQ ID NO: 75818 - DNA, 25 bp, Homo sapien
ccagtctgagtcgatctgtgcatcg

SEQ ID NO: 75819 - DNA, 25 bp, Homo sapien
gagttccactagtctcctgactagc

SEQ ID NO: 75820 - DNA, 25 bp, Homo sapien
gagttccactagactcctgactagc

SEQ ID NO: 75821 - DNA, 25 bp, Homo sapien
acggttcagacagtagtgacacccc

SEQ ID NO: 75822 - DNA, 25 bp, Homo sapien
acggttcagacactagtgacacccc

SEQ ID NO: 75823 - DNA, 25 bp, Homo sapien
ttttagacagaacttgaacagacac

SEQ ID NO: 75824 - DNA, 25 bp, Homo sapien
ttttagacagaagttgaacagacac

SEQ ID NO: 75825 - DNA, 25 bp, Homo sapien
gagaactattactgtttcacaaacg

SEQ ID NO: 75826 - DNA, 25 bp, Homo sapien
gagaactattacagtttcacaaacg

SEQ ID NO: 75827 - DNA, 25 bp, Homo sapien
aaacgaagttgaagtgatccgcacc

SEQ ID NO: 75828 - DNA, 25 bp, Homo sapien
aaacgaagttgatgtgatccgcacc

SEQ ID NO: 75829 - DNA, 25 bp, Homo sapien
gacagaagttgagacggtcttgtcc

SEQ ID NO: 75830 - DNA, 25 bp, Homo sapien
gacagaagttgacacggtcttgtcc

SEQ ID NO: 75831 - DNA, 25 bp, Homo sapien
ttacgaaagatgaaccggggaccct

SEQ ID NO: 75832 - DNA, 25 bp, Homo sapien
ttacgaaagatgtaccggggaccct

SEQ ID NO: 75833 - DNA, 25 bp, Homo sapien
tttataaggttctccgaggacccct

SEQ ID NO: 75834 - DNA, 25 bp, Homo sapien
tttataaggttcaccgaggacccct

SEQ ID NO: 75835 - DNA, 25 bp, Homo sapien
tttgaccgtgccaggctgacgcccg

SEQ ID NO: 75836 - DNA, 25 bp, Homo sapien
tttgaccgtgcctggctgacgcccg

SEQ ID NO: 75837 - DNA, 25 bp, Homo sapien
ttgattgtctcacttgaacgtagac

SEQ ID NO: 75838 - DNA, 25 bp, Homo sapien
ttgattgtctcagttgaacgtagac

SEQ ID NO: 75839 - DNA, 25 bp, Homo sapien
taaattcttgttgtgtcaaacctag

SEQ ID NO: 75840 - DNA, 25 bp, Homo sapien
taaattcttgttctgtcaaacctag

SEQ ID NO: 75841 - DNA, 25 bp, Homo sapien
aagtcttctttatttcccatgtggt

SEQ ID NO: 75842 - DNA, 25 bp, Homo sapien
aagtcttctttaattcccatgtggt

SEQ ID NO: 75843 - DNA, 25 bp, Homo sapien
ctaaggactagtaatcctcaatggt

SEQ ID NO: 75844 - DNA, 25 bp, Homo sapien
ctaaggactagttatcctcaatggt

SEQ ID NO: 75845 - DNA, 25 bp, Homo sapien
cactaaggtatttctacggtgagag

SEQ ID NO: 75846 - DNA, 25 bp, Homo sapien
cactaaggtattactacggtgagag

SEQ ID NO: 75847 - DNA, 25 bp, Homo sapien
ctgtatcctgactcacagtgacaag

SEQ ID NO: 75848 - DNA, 25 bp, Homo sapien
ctgtatcctgacacacagtgacaag

SEQ ID NO: 75849 - DNA, 25 bp, Homo sapien
tacttattgttcaaacatcgacagg

SEQ ID NO: 75850 - DNA, 25 bp, Homo sapien
tacttattgttctaacatcgacagg

SEQ ID NO: 75851 - DNA, 25 bp, Homo sapien
ctaggttcccgataaatctagaagt

SEQ ID NO: 75852 - DNA, 25 bp, Homo sapien
ctaggttcccgaaaaatctagaagt

SEQ ID NO: 75853 - DNA, 25 bp, Homo sapien
cgacgagaactaaatcgggcattgt

SEQ ID NO: 75854 - DNA, 25 bp, Homo sapien
cgacgagaactatatcgggcattgt

SEQ ID NO: 75855 - DNA, 25 bp, Homo sapien
tcgaggtcaaacctcggacacaggg

SEQ ID NO: 75856 - DNA, 25 bp, Homo sapien
tcgaggtcaaacgtcggacacaggg

SEQ ID NO: 75857 - DNA, 25 bp, Homo sapien
tatatctatagtgtgaagtcaccga

SEQ ID NO: 75858 - DNA, 25 bp, Homo sapien
tatatctatagtctgaagtcaccga

SEQ ID NO: 75859 - DNA, 25 bp, Homo sapien
catagttttagagttcccttataga

SEQ ID NO: 75860 - DNA, 25 bp, Homo sapien
catagttttagacttcccttataga

SEQ ID NO: 75861 - DNA, 25 bp, Homo sapien
attcgttagaacgataccgtattaa

SEQ ID NO: 75862 - DNA, 25 bp, Homo sapien
attcgttagaaccataccgtattaa

SEQ ID NO: 75863 - DNA, 25 bp, Homo sapien
aagtcttgtaaatctgtgaacaaca

SEQ ID NO: 75864 - DNA, 25 bp, Homo sapien
aagtcttgtaaaactgtgaacaaca

SEQ ID NO: 75865 - DNA, 25 bp, Homo sapien
aacttagtgtaaacctgggcgaaag

SEQ ID NO: 75866 - DNA, 25 bp, Homo sapien
aacttagtgtaatcctgggcgaaag

SEQ ID NO: 75867 - DNA, 25 bp, Homo sapien
ggtcacgtaatactactcgggcaaa

SEQ ID NO: 75868 - DNA, 25 bp, Homo sapien
ggtcacgtaatagtactcgggcaaa

SEQ ID NO: 75869 - DNA, 25 bp, Homo sapien
aggcaataggacctaggtccacacg

SEQ ID NO: 75870 - DNA, 25 bp, Homo sapien
aggcaataggacgtaggtccacacg

SEQ ID NO: 75871 - DNA, 25 bp, Homo sapien
tacagataattcagaggtcctatcg

SEQ ID NO: 75872 - DNA, 25 bp, Homo sapien
tacagataattctgaggtcctatcg

SEQ ID NO: 75873 - DNA, 25 bp, Homo sapien
catatagacagataggagttcctga

SEQ ID NO: 75874 - DNA, 25 bp, Homo sapien
catatagacagaaaggagttcctga

SEQ ID NO: 75875 - DNA, 25 bp, Homo sapien
actaagaacgaaaggagtttgtcct

SEQ ID NO: 75876 - DNA, 25 bp, Homo sapien
actaagaacgaatggagtttgtcct

SEQ ID NO: 75877 - DNA, 25 bp, Homo sapien
tagagtcgagctacggcggttctcg

SEQ ID NO: 75878 - DNA, 25 bp, Homo sapien
tagagtcgagcttcggcggttctcg

SEQ ID NO: 75879 - DNA, 25 bp, Homo sapien
gtgagtgtgactgacccgagtttgt

SEQ ID NO: 75880 - DNA, 25 bp, Homo sapien
gtgagtgtgactcacccgagtttgt

SEQ ID NO: 75881 - DNA, 25 bp, Homo sapien
gtatacatgtacacaccgacgttta

SEQ ID NO: 75882 - DNA, 25 bp, Homo sapien
gtatacatgtactcaccgacgttta

SEQ ID NO: 75883 - DNA, 25 bp, Homo sapien
gcccacacttaaggactcactcgaa

SEQ ID NO: 75884 - DNA, 25 bp, Homo sapien
gcccacacttaacgactcactcgaa

SEQ ID NO: 75885 - DNA, 25 bp, Homo sapien
agacgacgggattgagaacctcata

SEQ ID NO: 75886 - DNA, 25 bp, Homo sapien
agacgacgggatagagaacctcata

SEQ ID NO: 75887 - DNA, 25 bp, Homo sapien
tattacggattggtctcactctgga

SEQ ID NO: 75888 - DNA, 25 bp, Homo sapien
tattacggattgctctcactctgga

SEQ ID NO: 75889 - DNA, 25 bp, Homo sapien
tctaagtcggggttctcccgttggg

SEQ ID NO: 75890 - DNA, 25 bp, Homo sapien
tctaagtcggggatctcccgttggg

SEQ ID NO: 75891 - DNA, 25 bp, Homo sapien
tataagggtcgaactcccattttgt

SEQ ID NO: 75892 - DNA, 25 bp, Homo sapien
tataagggtcgatctcccattttgt

SEQ ID NO: 75893 - DNA, 25 bp, Homo sapien
gagacggtcacgtccgtggtccgtc

SEQ ID NO: 75894 - DNA, 25 bp, Homo sapien
gagacggtcacgaccgtggtccgtc

SEQ ID NO: 75895 - DNA, 25 bp, Homo sapien
gttagtctctgtacttgggtagtct

SEQ ID NO: 75896 - DNA, 25 bp, Homo sapien
gttagtctctgttcttgggtagtct

SEQ ID NO: 75897 - DNA, 25 bp, Homo sapien
agtgtcctttagcttcggatagtac

SEQ ID NO: 75898 - DNA, 25 bp, Homo sapien
agtgtcctttaggttcggatagtac

SEQ ID NO: 75899 - DNA, 25 bp, Homo sapien
cgagagcctccaggtcggtgcagac

SEQ ID NO: 75900 - DNA, 25 bp, Homo sapien
cgagagcctccacgtcggtgcagac

SEQ ID NO: 75901 - DNA, 25 bp, Homo sapien
gagaactatcgtagtccgtccacac

SEQ ID NO: 75902 - DNA, 25 bp, Homo sapien
gagaactatcgttgtccgtccacac

SEQ ID NO: 75903 - DNA, 25 bp, Homo sapien
agaccccatagttcggcacgtaaag

SEQ ID NO: 75904 - DNA, 25 bp, Homo sapien
agaccccatagtacggcacgtaaag

SEQ ID NO: 75905 - DNA, 25 bp, Homo sapien
tacccaacaacgacgttgtgacaag

SEQ ID NO: 75906 - DNA, 25 bp, Homo sapien
tacccaacaacgtcgttgtgacaag

SEQ ID NO: 75907 - DNA, 25 bp, Homo sapien
tattttcgagatcttatcgtcaggt

SEQ ID NO: 75908 - DNA, 25 bp, Homo sapien
tattttcgagatgttatcgtcaggt

SEQ ID NO: 75909 - DNA, 25 bp, Homo sapien
ggttcttatcgagggaaggtccatg

SEQ ID NO: 75910 - DNA, 25 bp, Homo sapien
ggttcttatcgacggaaggtccatg

SEQ ID NO: 75911 - DNA, 25 bp, Homo sapien
taaaagtcagagacggacgtccagg

SEQ ID NO: 75912 - DNA, 25 bp, Homo sapien
taaaagtcagagtcggacgtccagg

SEQ ID NO: 75913 - DNA, 25 bp, Homo sapien
tgtacaggagaagtggtcacgtgac

SEQ ID NO: 75914 - DNA, 25 bp, Homo sapien
tgtacaggagaactggtcacgtgac

SEQ ID NO: 75915 - DNA, 25 bp, Homo sapien
ccgagatggacatcttccgacgtga

SEQ ID NO: 75916 - DNA, 25 bp, Homo sapien
ccgagatggacaacttccgacgtga

SEQ ID NO: 75917 - DNA, 25 bp, Homo sapien
gcccgacgggccagtcagtgactga

SEQ ID NO: 75918 - DNA, 25 bp, Homo sapien
gcccgacgggcctgtcagtgactga

SEQ ID NO: 75919 - DNA, 25 bp, Homo sapien
gccatcccgaattacttctactgag

SEQ ID NO: 75920 - DNA, 25 bp, Homo sapien
gccatcccgaataacttctactgag

SEQ ID NO: 75921 - DNA, 25 bp, Homo sapien
ggttcttcccaaggaatccacgagt

SEQ ID NO: 75922 - DNA, 25 bp, Homo sapien
ggttcttcccaacgaatccacgagt

SEQ ID NO: 75923 - DNA, 25 bp, Homo sapien
ctctaccatataccaggtctcaggt

SEQ ID NO: 75924 - DNA, 25 bp, Homo sapien
ctctaccatatagcaggtctcaggt

SEQ ID NO: 75925 - DNA, 25 bp, Homo sapien
gacaacaagaagtcggtacccgact

SEQ ID NO: 75926 - DNA, 25 bp, Homo sapien
gacaacaagaagacggtacccgact

SEQ ID NO: 75927 - DNA, 25 bp, Homo sapien
ggcatcccgaagaaggacgcgtcct

SEQ ID NO: 75928 - DNA, 25 bp, Homo sapien
ggcatcccgaagtaggacgcgtcct

SEQ ID NO: 75929 - DNA, 25 bp, Homo sapien
gttctggtgaagaaaggtcacgacc

SEQ ID NO: 75930 - DNA, 25 bp, Homo sapien
gttctggtgaagtaaggtcacgacc

SEQ ID NO: 75931 - DNA, 25 bp, Homo sapien
cttcgggtgcagacaggtgtcaccg

SEQ ID NO: 75932 - DNA, 25 bp, Homo sapien
cttcgggtgcagtcaggtgtcaccg

SEQ ID NO: 75933 - DNA, 25 bp, Homo sapien
gacgagcgtggacgtggcacatccg

SEQ ID NO: 75934 - DNA, 25 bp, Homo sapien
gacgagcgtggaggtggcacatccg

SEQ ID NO: 75935 - DNA, 25 bp, Homo sapien
aacacgaaggtcacgggggtcttcc

SEQ ID NO: 75936 - DNA, 25 bp, Homo sapien
aacacgaaggtctcgggggtcttcc

SEQ ID NO: 75937 - DNA, 25 bp, Homo sapien
ggtactcggtcgtgccgggacttcc

SEQ ID NO: 75938 - DNA, 25 bp, Homo sapien
ggtactcggtcgagccgggacttcc

SEQ ID NO: 75939 - DNA, 25 bp, Homo sapien
ggttgtcttaaagacctacacttcc

SEQ ID NO: 75940 - DNA, 25 bp, Homo sapien
ggttgtcttaaacacctacacttcc

SEQ ID NO: 75941 - DNA, 25 bp, Homo sapien
gaagggattaaaggtaccaaagcac

SEQ ID NO: 75942 - DNA, 25 bp, Homo sapien
gaagggattaaacgtaccaaagcac

SEQ ID NO: 75943 - DNA, 25 bp, Homo sapien
cgatctcgacaaagtctcgggaccc

SEQ ID NO: 75944 - DNA, 25 bp, Homo sapien
cgatctcgacaatgtctcgggaccc

SEQ ID NO: 75945 - DNA, 25 bp, Homo sapien
tccgaacaagtcttaacgactgtct

SEQ ID NO: 75946 - DNA, 25 bp, Homo sapien
tccgaacaagtcataacgactgtct

SEQ ID NO: 75947 - DNA, 25 bp, Homo sapien
gcaacagtactaagtatgttcattt

SEQ ID NO: 75948 - DNA, 25 bp, Homo sapien
gcaacagtactatgtatgttcattt

SEQ ID NO: 75949 - DNA, 25 bp, Homo sapien
gggaactgatctacacttacataat

SEQ ID NO: 75950 - DNA, 25 bp, Homo sapien
gggaactgatcttcacttacataat

SEQ ID NO: 75951 - DNA, 25 bp, Homo sapien
agtcgaagactttctcggtcaggta

SEQ ID NO: 75952 - DNA, 25 bp, Homo sapien
agtcgaagacttactcggtcaggta

SEQ ID NO: 75953 - DNA, 25 bp, Homo sapien
agatgaagaccgacagtgaacgtta

SEQ ID NO: 75954 - DNA, 25 bp, Homo sapien
agatgaagaccgtcagtgaacgtta

SEQ ID NO: 75955 - DNA, 25 bp, Homo sapien
aaagacggagcaggacagagcagaa

SEQ ID NO: 75956 - DNA, 25 bp, Homo sapien
aaagacggagcacgacagagcagaa

SEQ ID NO: 75957 - DNA, 25 bp, Homo sapien
ggacaccgggcctcaaactacacat

SEQ ID NO: 75958 - DNA, 25 bp, Homo sapien
ggacaccgggccacaaactacacat

SEQ ID NO: 75959 - DNA, 25 bp, Homo sapien
accgagtgagaagtgagagcacctg

SEQ ID NO: 75960 - DNA, 25 bp, Homo sapien
accgagtgagaactgagagcacctg

SEQ ID NO: 75961 - DNA, 25 bp, Homo sapien
cctctcatgaacactgaaggtcctc

SEQ ID NO: 75962 - DNA, 25 bp, Homo sapien
cctctcatgaactctgaaggtcctc

SEQ ID NO: 75963 - DNA, 25 bp, Homo sapien
cctctccgaggtctcgatgaaagta

SEQ ID NO: 75964 - DNA, 25 bp, Homo sapien
cctctccgaggtgtcgatgaaagta

SEQ ID NO: 75965 - DNA, 25 bp, Homo sapien
gggagtcgaggtctctcacgacgtt

SEQ ID NO: 75966 - DNA, 25 bp, Homo sapien
gggagtcgaggtgtctcacgacgtt

SEQ ID NO: 75967 - DNA, 25 bp, Homo sapien
tctaactgaaagactactttccgtg

SEQ ID NO: 75968 - DNA, 25 bp, Homo sapien
tctaactgaaagtctactttccgtg

SEQ ID NO: 75969 - DNA, 25 bp, Homo sapien
aagacatcgagaaatgacttccgga

SEQ ID NO: 75970 - DNA, 25 bp, Homo sapien
aagacatcgagatatgacttccgga

SEQ ID NO: 75971 - DNA, 25 bp, Homo sapien
gaaacagatgattattacaacgact

SEQ ID NO: 75972 - DNA, 25 bp, Homo sapien
gaaacagatgataattacaacgact

SEQ ID NO: 75973 - DNA, 25 bp, Homo sapien
agaactcggtctgaatattacacaa

SEQ ID NO: 75974 - DNA, 25 bp, Homo sapien
agaactcggtctcaatattacacaa

SEQ ID NO: 75975 - DNA, 25 bp, Homo sapien
gagaccttaacgtcttcgtcctaca

SEQ ID NO: 75976 - DNA, 25 bp, Homo sapien
gagaccttaacgacttcgtcctaca

SEQ ID NO: 75977 - DNA, 25 bp, Homo sapien
agatccgtgtagacctgaccgtaag

SEQ ID NO: 75978 - DNA, 25 bp, Homo sapien
agatccgtgtagtcctgaccgtaag

SEQ ID NO: 75979 - DNA, 25 bp, Homo sapien
gtccctgggttagaagctgacctga

SEQ ID NO: 75980 - DNA, 25 bp, Homo sapien
gtccctgggttacaagctgacctga

SEQ ID NO: 75981 - DNA, 25 bp, Homo sapien
cctggggtatcaagttgtcttaggt

SEQ ID NO: 75982 - DNA, 25 bp, Homo sapien
cctggggtatcatgttgtcttaggt

SEQ ID NO: 75983 - DNA, 25 bp, Homo sapien
aacggaatcactactgtcttactcg

SEQ ID NO: 75984 - DNA, 25 bp, Homo sapien
aacggaatcacttctgtcttactcg

SEQ ID NO: 75985 - DNA, 25 bp, Homo sapien
ttccgaaggaaatttcatcttatcg

SEQ ID NO: 75986 - DNA, 25 bp, Homo sapien
ttccgaaggaaaattcatcttatcg

SEQ ID NO: 75987 - DNA, 25 bp, Homo sapien
aggagtcgaaagacctacagtaaca

SEQ ID NO: 75988 - DNA, 25 bp, Homo sapien
aggagtcgaaagtcctacagtaaca

SEQ ID NO: 75989 - DNA, 25 bp, Homo sapien
ggaaaagagtctaaccctaggtaaa

SEQ ID NO: 75990 - DNA, 25 bp, Homo sapien
ggaaaagagtcttaccctaggtaaa

SEQ ID NO: 75991 - DNA, 25 bp, Homo sapien
acttgtaagacatccccggtgacag

SEQ ID NO: 75992 - DNA, 25 bp, Homo sapien
acttgtaagacaaccccggtgacag

SEQ ID NO: 75993 - DNA, 25 bp, Homo sapien
ccactgaaatcgacccagagacctt

SEQ ID NO: 75994 - DNA, 25 bp, Homo sapien
ccactgaaatcgtcccagagacctt

SEQ ID NO: 75995 - DNA, 25 bp, Homo sapien
atccaaaagacttctatagcccgta

SEQ ID NO: 75996 - DNA, 25 bp, Homo sapien
atccaaaagactactatagcccgta

SEQ ID NO: 75997 - DNA, 25 bp, Homo sapien
gtcaaaaacggaagtaggtctcgac

SEQ ID NO: 75998 - DNA, 25 bp, Homo sapien
gtcaaaaacggatgtaggtctcgac

SEQ ID NO: 75999 - DNA, 25 bp, Homo sapien
cggtgacgagaaaacgaatgcacca

SEQ ID NO: 76000 - DNA, 25 bp, Homo sapien
cggtgacgagaatacgaatgcacca

SEQ ID NO: 76001 - DNA, 25 bp, Homo sapien
aagtccagagactcgtgtccggccc

SEQ ID NO: 76002 - DNA, 25 bp, Homo sapien
aagtccagagacacgtgtccggccc

SEQ ID NO: 76003 - DNA, 25 bp, Homo sapien
agagtccgtccacaggaagtccctc

SEQ ID NO: 76004 - DNA, 25 bp, Homo sapien
agagtccgtccagaggaagtccctc

SEQ ID NO: 76005 - DNA, 25 bp, Homo sapien
gggtccaggagaaacccgtcgtagt

SEQ ID NO: 76006 - DNA, 25 bp, Homo sapien
gggtccaggagatacccgtcgtagt

SEQ ID NO: 76007 - DNA, 25 bp, Homo sapien
ggagtccgataaaggtccgtgttct

SEQ ID NO: 76008 - DNA, 25 bp, Homo sapien
ggagtccgataatggtccgtgttct

SEQ ID NO: 76009 - DNA, 25 bp, Homo sapien
attgaactgacttgtgagtcttttc

SEQ ID NO: 76010 - DNA, 25 bp, Homo sapien
attgaactgactagtgagtcttttc

SEQ ID NO: 76011 - DNA, 25 bp, Homo sapien
catttttagaatagactgtctgttc

SEQ ID NO: 76012 - DNA, 25 bp, Homo sapien
catttttagaattgactgtctgttc

SEQ ID NO: 76013 - DNA, 25 bp, Homo sapien
tttgtcttcattaacgtgttgactc

SEQ ID NO: 76014 - DNA, 25 bp, Homo sapien
tttgtcttcatttacgtgttgactc

SEQ ID NO: 76015 - DNA, 25 bp, Homo sapien
ttcttctacttctcggtctgccctg

SEQ ID NO: 76016 - DNA, 25 bp, Homo sapien
ttcttctacttcacggtctgccctg

SEQ ID NO: 76017 - DNA, 25 bp, Homo sapien
attttttgccacgtagagtctctgg

SEQ ID NO: 76018 - DNA, 25 bp, Homo sapien
attttttgccacctagagtctctgg

SEQ ID NO: 76019 - DNA, 25 bp, Homo sapien
agcttcttaccactaacgtcgaaga

SEQ ID NO: 76020 - DNA, 25 bp, Homo sapien
agcttcttaccagtaacgtcgaaga

SEQ ID NO: 76021 - DNA, 25 bp, Homo sapien
ggtctatgtgtacctttaatcatta

SEQ ID NO: 76022 - DNA, 25 bp, Homo sapien
ggtctatgtgtagctttaatcatta

SEQ ID NO: 76023 - DNA, 25 bp, Homo sapien
cgcccacttgtacttcattgatatg

SEQ ID NO: 76024 - DNA, 25 bp, Homo sapien
cgcccacttgtagttcattgatatg

SEQ ID NO: 76025 - DNA, 25 bp, Homo sapien
aattctttccggtagtcactctagc

SEQ ID NO: 76026 - DNA, 25 bp, Homo sapien
aattctttccggaagtcactctagc

SEQ ID NO: 76027 - DNA, 25 bp, Homo sapien
ttcgttcgtccaaacctctcgtgac

SEQ ID NO: 76028 - DNA, 25 bp, Homo sapien
ttcgttcgtccatacctctcgtgac

SEQ ID NO: 76029 - DNA, 25 bp, Homo sapien
tcgtgtggactcctcgtccgtcgaa

SEQ ID NO: 76030 - DNA, 25 bp, Homo sapien
tcgtgtggactcgtcgtccgtcgaa

SEQ ID NO: 76031 - DNA, 25 bp, Homo sapien
acttccacgatcatgtacgtcccga

SEQ ID NO: 76032 - DNA, 25 bp, Homo sapien
acttccacgatcttgtacgtcccga

SEQ ID NO: 76033 - DNA, 25 bp, Homo sapien
cagtttccagtcctcgatctcacga

SEQ ID NO: 76034 - DNA, 25 bp, Homo sapien
cagtttccagtcgtcgatctcacga

SEQ ID NO: 76035 - DNA, 25 bp, Homo sapien
aacagagtccactccgtcaaaagac

SEQ ID NO: 76036 - DNA, 25 bp, Homo sapien
aacagagtccacaccgtcaaaagac

SEQ ID NO: 76037 - DNA, 25 bp, Homo sapien
atccggtacacatcccagagaaagg

SEQ ID NO: 76038 - DNA, 25 bp, Homo sapien
atccggtacacaacccagagaaagg

SEQ ID NO: 76039 - DNA, 25 bp, Homo sapien
gacgacacacactccgacaaggtcg

SEQ ID NO: 76040 - DNA, 25 bp, Homo sapien
gacgacacacacaccgacaaggtcg

SEQ ID NO: 76041 - DNA, 25 bp, Homo sapien
actaccaacacgacttcaggtgtcg

SEQ ID NO: 76042 - DNA, 25 bp, Homo sapien
actaccaacacgtcttcaggtgtcg

SEQ ID NO: 76043 - DNA, 25 bp, Homo sapien
ctaaagtagagaattctagacttac

SEQ ID NO: 76044 - DNA, 25 bp, Homo sapien
ctaaagtagagatttctagacttac

SEQ ID NO: 76045 - DNA, 25 bp, Homo sapien
ccgtagaagagtactttaagtctga

SEQ ID NO: 76046 - DNA, 25 bp, Homo sapien
ccgtagaagagttctttaagtctga

SEQ ID NO: 76047 - DNA, 25 bp, Homo sapien
agttaccgtttactcttccatagtg

SEQ ID NO: 76048 - DNA, 25 bp, Homo sapien
agttaccgtttagtcttccatagtg

SEQ ID NO: 76049 - DNA, 25 bp, Homo sapien
tatttcccttgtgtcttcttgttac

SEQ ID NO: 76050 - DNA, 25 bp, Homo sapien
tatttcccttgtctcttcttgttac

SEQ ID NO: 76051 - DNA, 25 bp, Homo sapien
gatgccccgcagtgtttctatgtca

SEQ ID NO: 76052 - DNA, 25 bp, Homo sapien
gatgccccgcagagtttctatgtca

SEQ ID NO: 76053 - DNA, 25 bp, Homo sapien
gaggaggttagtgttgacatcgtta

SEQ ID NO: 76054 - DNA, 25 bp, Homo sapien
gaggaggttagtcttgacatcgtta

SEQ ID NO: 76055 - DNA, 25 bp, Homo sapien
gcggaggttgaaaaagacgtccacg

SEQ ID NO: 76056 - DNA, 25 bp, Homo sapien
gcggaggttgaataagacgtccacg

SEQ ID NO: 76057 - DNA, 25 bp, Homo sapien
atattatgtagttaaaccgtcgacg

SEQ ID NO: 76058 - DNA, 25 bp, Homo sapien
atattatgtagtaaaaccgtcgacg

SEQ ID NO: 76059 - DNA, 25 bp, Homo sapien
cttttgatcgggtagaactgtcgag

SEQ ID NO: 76060 - DNA, 25 bp, Homo sapien
cttttgatcgggaagaactgtcgag

SEQ ID NO: 76061 - DNA, 25 bp, Homo sapien
aataaacgacgtcaaggaaccgcga

SEQ ID NO: 76062 - DNA, 25 bp, Homo sapien
aataaacgacgtgaaggaaccgcga

SEQ ID NO: 76063 - DNA, 25 bp, Homo sapien
aagaaagaccgtaccgtggtcttta

SEQ ID NO: 76064 - DNA, 25 bp, Homo sapien
aagaaagaccgttccgtggtcttta

SEQ ID NO: 76065 - DNA, 25 bp, Homo sapien
tgatcgcatcccacggatccagtag

SEQ ID NO: 76066 - DNA, 25 bp, Homo sapien
tgatcgcatccctcggatccagtag

SEQ ID NO: 76067 - DNA, 25 bp, Homo sapien
ccgaacctccaggactagtcagacg

SEQ ID NO: 76068 - DNA, 25 bp, Homo sapien
ccgaacctccagcactagtcagacg

SEQ ID NO: 76069 - DNA, 25 bp, Homo sapien
tacagtccctagtttcgacatccgg

SEQ ID NO: 76070 - DNA, 25 bp, Homo sapien
tacagtccctagattcgacatccgg

SEQ ID NO: 76071 - DNA, 25 bp, Homo sapien
ccgggaccggagcacacgatgcgac

SEQ ID NO: 76072 - DNA, 25 bp, Homo sapien
ccgggaccggaggacacgatgcgac

SEQ ID NO: 76073 - DNA, 25 bp, Homo sapien
ccggtcgtcggtgagactgaatccc

SEQ ID NO: 76074 - DNA, 25 bp, Homo sapien
ccggtcgtcggtcagactgaatccc

SEQ ID NO: 76075 - DNA, 25 bp, Homo sapien
ctcggaccgttcagactcgaaaccc

SEQ ID NO: 76076 - DNA, 25 bp, Homo sapien
ctcggaccgttctgactcgaaaccc

SEQ ID NO: 76077 - DNA, 25 bp, Homo sapien
ctacttgtctttcgtctagatgaat

SEQ ID NO: 76078 - DNA, 25 bp, Homo sapien
ctacttgtctttggtctagatgaat

SEQ ID NO: 76079 - DNA, 25 bp, Homo sapien
acgacctttacttgtttacatcggg

SEQ ID NO: 76080 - DNA, 25 bp, Homo sapien
acgacctttactagtttacatcggg

SEQ ID NO: 76081 - DNA, 25 bp, Homo sapien
acgaccctttcttctccgaagagag

SEQ ID NO: 76082 - DNA, 25 bp, Homo sapien
acgaccctttctactccgaagagag

SEQ ID NO: 76083 - DNA, 25 bp, Homo sapien
tgagaccgtttccacgcttccagga

SEQ ID NO: 76084 - DNA, 25 bp, Homo sapien
tgagaccgtttcgacgcttccagga

SEQ ID NO: 76085 - DNA, 25 bp, Homo sapien
gaggactgtcaagtctcaaaatcgg

SEQ ID NO: 76086 - DNA, 25 bp, Homo sapien
gaggactgtcaactctcaaaatcgg

SEQ ID NO: 76087 - DNA, 25 bp, Homo sapien
aaaggtcctacgacccaagtaattg

SEQ ID NO: 76088 - DNA, 25 bp, Homo sapien
aaaggtcctacgtcccaagtaattg

SEQ ID NO: 76089 - DNA, 25 bp, Homo sapien
gttcaggaaaaccccgacataattt

SEQ ID NO: 76090 - DNA, 25 bp, Homo sapien
gttcaggaaaacgccgacataattt

SEQ ID NO: 76091 - DNA, 25 bp, Homo sapien
tatctgtaaatttttcaatgttaat

SEQ ID NO: 76092 - DNA, 25 bp, Homo sapien
tatctgtaaattattcaatgttaat

SEQ ID NO: 76093 - DNA, 25 bp, Homo sapien
tgtcgtgtcattgtttcaataatcc

SEQ ID NO: 76094 - DNA, 25 bp, Homo sapien
tgtcgtgtcattctttcaataatcc

SEQ ID NO: 76095 - DNA, 25 bp, Homo sapien
tttcgattctttgacagagtttccg

SEQ ID NO: 76096 - DNA, 25 bp, Homo sapien
tttcgattctttcacagagtttccg

SEQ ID NO: 76097 - DNA, 25 bp, Homo sapien
tagtcttttacgaagtatacgtcta

SEQ ID NO: 76098 - DNA, 25 bp, Homo sapien
tagtcttttacgtagtatacgtcta

SEQ ID NO: 76099 - DNA, 25 bp, Homo sapien
gttatctctatccaggtactctctg

SEQ ID NO: 76100 - DNA, 25 bp, Homo sapien
gttatctctatcgaggtactctctg

SEQ ID NO: 76101 - DNA, 25 bp, Homo sapien
ggacagggctcagtgagtcgtctgt

SEQ ID NO: 76102 - DNA, 25 bp, Homo sapien
ggacagggctcactgagtcgtctgt

SEQ ID NO: 76103 - DNA, 25 bp, Homo sapien
gagatacaggactccgtagaagatt

SEQ ID NO: 76104 - DNA, 25 bp, Homo sapien
gagatacaggacaccgtagaagatt

SEQ ID NO: 76105 - DNA, 25 bp, Homo sapien
tctacgactgtaatcggggtcttct

SEQ ID NO: 76106 - DNA, 25 bp, Homo sapien
tctacgactgtattcggggtcttct

SEQ ID NO: 76107 - DNA, 25 bp, Homo sapien
gtctctcggtcgttccggaagtcct

SEQ ID NO: 76108 - DNA, 25 bp, Homo sapien
gtctctcggtcgatccggaagtcct

SEQ ID NO: 76109 - DNA, 25 bp, Homo sapien
tatgtaccgctggttccgaggttcg

SEQ ID NO: 76110 - DNA, 25 bp, Homo sapien
tatgtaccgctgcttccgaggttcg

SEQ ID NO: 76111 - DNA, 25 bp, Homo sapien
tcgtagttcctctcttcggggtgtc

SEQ ID NO: 76112 - DNA, 25 bp, Homo sapien
tcgtagttcctcacttcggggtgtc

SEQ ID NO: 76113 - DNA, 25 bp, Homo sapien
aagtgttacgggagttcaggttctc

SEQ ID NO: 76114 - DNA, 25 bp, Homo sapien
aagtgttacgggtgttcaggttctc

SEQ ID NO: 76115 - DNA, 25 bp, Homo sapien
gtcgtttctcggtctcaagtggcgg

SEQ ID NO: 76116 - DNA, 25 bp, Homo sapien
gtcgtttctcggactcaagtggcgg

SEQ ID NO: 76117 - DNA, 25 bp, Homo sapien
cttgtcttgtaaaaccacatattgg

SEQ ID NO: 76118 - DNA, 25 bp, Homo sapien
cttgtcttgtaataccacatattgg

SEQ ID NO: 76119 - DNA, 25 bp, Homo sapien
gcgttttcctactctacctatgtgt

SEQ ID NO: 76120 - DNA, 25 bp, Homo sapien
gcgttttcctacactacctatgtgt

SEQ ID NO: 76121 - DNA, 25 bp, Homo sapien
gtgtggtagtttccttttaccttga

SEQ ID NO: 76122 - DNA, 25 bp, Homo sapien
gtgtggtagtttgcttttaccttga

SEQ ID NO: 76123 - DNA, 25 bp, Homo sapien
agacttgtccgtcttttacatctga

SEQ ID NO: 76124 - DNA, 25 bp, Homo sapien
agacttgtccgtgttttacatctga

SEQ ID NO: 76125 - DNA, 25 bp, Homo sapien
aatgttgacttgagttgtctctgac

SEQ ID NO: 76126 - DNA, 25 bp, Homo sapien
aatgttgacttgtgttgtctctgac

SEQ ID NO: 76127 - DNA, 25 bp, Homo sapien
ctttgtgtgtcaggatgttttcaac

SEQ ID NO: 76128 - DNA, 25 bp, Homo sapien
ctttgtgtgtcacgatgttttcaac

SEQ ID NO: 76129 - DNA, 25 bp, Homo sapien
tttctcgcttggtttcgctacgaag

SEQ ID NO: 76130 - DNA, 25 bp, Homo sapien
tttctcgcttggattcgctacgaag

SEQ ID NO: 76131 - DNA, 25 bp, Homo sapien
ttttctacggttgtctccatcgaca

SEQ ID NO: 76132 - DNA, 25 bp, Homo sapien
ttttctacggttctctccatcgaca

SEQ ID NO: 76133 - DNA, 25 bp, Homo sapien
gttcggtgtcattcttactcgacat

SEQ ID NO: 76134 - DNA, 25 bp, Homo sapien
gttcggtgtcatacttactcgacat

SEQ ID NO: 76135 - DNA, 25 bp, Homo sapien
gatcccgtcgtcgataccttcgaac

SEQ ID NO: 76136 - DNA, 25 bp, Homo sapien
gatcccgtcgtccataccttcgaac

SEQ ID NO: 76137 - DNA, 25 bp, Homo sapien
tgtatgttatcgaacctcttgtaaa

SEQ ID NO: 76138 - DNA, 25 bp, Homo sapien
tgtatgttatcgtacctcttgtaaa

SEQ ID NO: 76139 - DNA, 25 bp, Homo sapien
tgtcgtctccctgtggatcttaaga

SEQ ID NO: 76140 - DNA, 25 bp, Homo sapien
tgtcgtctccctctggatcttaaga

SEQ ID NO: 76141 - DNA, 25 bp, Homo sapien
tggccgtaccctccaaggggtagaa

SEQ ID NO: 76142 - DNA, 25 bp, Homo sapien
tggccgtaccctgcaaggggtagaa

SEQ ID NO: 76143 - DNA, 25 bp, Homo sapien
cgtgacgacccacgtgacgtgaagc

SEQ ID NO: 76144 - DNA, 25 bp, Homo sapien
cgtgacgacccaggtgacgtgaagc

SEQ ID NO: 76145 - DNA, 25 bp, Homo sapien
aagtcgtcaacagagtctgacaagg

SEQ ID NO: 76146 - DNA, 25 bp, Homo sapien
aagtcgtcaacacagtctgacaagg

SEQ ID NO: 76147 - DNA, 25 bp, Homo sapien
agaatccttcatcagtcgtttatga

SEQ ID NO: 76148 - DNA, 25 bp, Homo sapien
agaatccttcatgagtcgtttatga

SEQ ID NO: 76149 - DNA, 25 bp, Homo sapien
gctacgacaacttgtgatatcatga

SEQ ID NO: 76150 - DNA, 25 bp, Homo sapien
gctacgacaactagtgatatcatga

SEQ ID NO: 76151 - DNA, 25 bp, Homo sapien
taagtacctccgtagtacgactgtc

SEQ ID NO: 76152 - DNA, 25 bp, Homo sapien
taagtacctccgaagtacgactgtc

SEQ ID NO: 76153 - DNA, 25 bp, Homo sapien
gataaccctaccatagtcgtacggg

SEQ ID NO: 76154 - DNA, 25 bp, Homo sapien
gataaccctaccttagtcgtacggg

SEQ ID NO: 76155 - DNA, 25 bp, Homo sapien
accacgacgaacattttaccgaggg

SEQ ID NO: 76156 - DNA, 25 bp, Homo sapien
accacgacgaactttttaccgaggg

SEQ ID NO: 76157 - DNA, 25 bp, Homo sapien
gtacggatcccctacttaccgtttg

SEQ ID NO: 76158 - DNA, 25 bp, Homo sapien
gtacggatccccaacttaccgtttg

SEQ ID NO: 76159 - DNA, 25 bp, Homo sapien
ttctttccacgagacctcgtccttg

SEQ ID NO: 76160 - DNA, 25 bp, Homo sapien
ttctttccacgacacctcgtccttg

SEQ ID NO: 76161 - DNA, 25 bp, Homo sapien
ttcgggacggagtcctcagtccagg

SEQ ID NO: 76162 - DNA, 25 bp, Homo sapien
ttcgggacggagacctcagtccagg

SEQ ID NO: 76163 - DNA, 25 bp, Homo sapien
aggtgctggtagctcctcaggaaca

SEQ ID NO: 76164 - DNA, 25 bp, Homo sapien
aggtgctggtaggtcctcaggaaca

SEQ ID NO: 76165 - DNA, 25 bp, Homo sapien
gggagtcttcggttttcacaagaga

SEQ ID NO: 76166 - DNA, 25 bp, Homo sapien
gggagtcttcggatttcacaagaga

SEQ ID NO: 76167 - DNA, 25 bp, Homo sapien
gtgagttactggaggcacaaactct

SEQ ID NO: 76168 - DNA, 25 bp, Homo sapien
gtgagttactggtggcacaaactct

SEQ ID NO: 76169 - DNA, 25 bp, Homo sapien
ggtactttcttatacggaaaacatt

SEQ ID NO: 76170 - DNA, 25 bp, Homo sapien
ggtactttcttaaacggaaaacatt

SEQ ID NO: 76171 - DNA, 25 bp, Homo sapien
actgtctccgacaaaaggccgaagt

SEQ ID NO: 76172 - DNA, 25 bp, Homo sapien
actgtctccgactaaaggccgaagt

SEQ ID NO: 76173 - DNA, 25 bp, Homo sapien
tgacatacgacacacaggactcccg

SEQ ID NO: 76174 - DNA, 25 bp, Homo sapien
tgacatacgacagacaggactcccg

SEQ ID NO: 76175 - DNA, 25 bp, Homo sapien
gcttctgaattgatctttaccctgt

SEQ ID NO: 76176 - DNA, 25 bp, Homo sapien
gcttctgaattgttctttaccctgt

SEQ ID NO: 76177 - DNA, 25 bp, Homo sapien
ccgacttctttattttttatgctgt

SEQ ID NO: 76178 - DNA, 25 bp, Homo sapien
ccgacttctttaatttttatgctgt

SEQ ID NO: 76179 - DNA, 25 bp, Homo sapien
cctaggcaaaactttttcgtcgcgt

SEQ ID NO: 76180 - DNA, 25 bp, Homo sapien
cctaggcaaaacattttcgtcgcgt

SEQ ID NO: 76181 - DNA, 25 bp, Homo sapien
ccccatagcaggagttttgtcctgt

SEQ ID NO: 76182 - DNA, 25 bp, Homo sapien
ccccatagcaggtgttttgtcctgt

SEQ ID NO: 76183 - DNA, 25 bp, Homo sapien
gtgtgtacatcttcgccgccgggtt

SEQ ID NO: 76184 - DNA, 25 bp, Homo sapien
gtgtgtacatctacgccgccgggtt

SEQ ID NO: 76185 - DNA, 25 bp, Homo sapien
gacgttttcactttcacagtctttc

SEQ ID NO: 76186 - DNA, 25 bp, Homo sapien
gacgttttcactatcacagtctttc

SEQ ID NO: 76187 - DNA, 25 bp, Homo sapien
tactcgcggcctaatgcgcgcgaac

SEQ ID NO: 76188 - DNA, 25 bp, Homo sapien
tactcgcggccttatgcgcgcgaac

SEQ ID NO: 76189 - DNA, 25 bp, Homo sapien
tctctcctagtctttcctgttgaag

SEQ ID NO: 76190 - DNA, 25 bp, Homo sapien
tctctcctagtcattcctgttgaag

SEQ ID NO: 76191 - DNA, 25 bp, Homo sapien
ttttatcaggttatctacttcagag

SEQ ID NO: 76192 - DNA, 25 bp, Homo sapien
ttttatcaggttttctacttcagag

SEQ ID NO: 76193 - DNA, 25 bp, Homo sapien
ttattacggattggtctcactctgg

SEQ ID NO: 76194 - DNA, 25 bp, Homo sapien
ttattacggattcgtctcactctgg

SEQ ID NO: 76195 - DNA, 25 bp, Homo sapien
tttttagagtttcgtgtccaggacg

SEQ ID NO: 76196 - DNA, 25 bp, Homo sapien
tttttagagtttggtgtccaggacg

SEQ ID NO: 76197 - DNA, 25 bp, Homo sapien
gagtgccacgtggtcgtcgcgccac

SEQ ID NO: 76198 - DNA, 25 bp, Homo sapien
gagtgccacgtgctcgtcgcgccac

SEQ ID NO: 76199 - DNA, 25 bp, Homo sapien
gtcgtgtcaactgctatcgtaagga

SEQ ID NO: 76200 - DNA, 25 bp, Homo sapien
gtcgtgtcaactcctatcgtaagga

SEQ ID NO: 76201 - DNA, 25 bp, Homo sapien
ggccccgtgtggtacctccagagga

SEQ ID NO: 76202 - DNA, 25 bp, Homo sapien
ggccccgtgtggaacctccagagga

SEQ ID NO: 76203 - DNA, 25 bp, Homo sapien
cacgtgtcgagtagttccagtcaga

SEQ ID NO: 76204 - DNA, 25 bp, Homo sapien
cacgtgtcgagttgttccagtcaga

SEQ ID NO: 76205 - DNA, 25 bp, Homo sapien
cgaaagacgccactactctccggaa

SEQ ID NO: 76206 - DNA, 25 bp, Homo sapien
cgaaagacgccagtactctccggaa

SEQ ID NO: 76207 - DNA, 25 bp, Homo sapien
agataaagtcctaaaccttcgaaga

SEQ ID NO: 76208 - DNA, 25 bp, Homo sapien
agataaagtccttaaccttcgaaga

SEQ ID NO: 76209 - DNA, 25 bp, Homo sapien
cgacaatgaacttttcttacgaaga

SEQ ID NO: 76210 - DNA, 25 bp, Homo sapien
cgacaatgaactattcttacgaaga

SEQ ID NO: 76211 - DNA, 25 bp, Homo sapien
ccacatcgcccacgtcgtaagaaga

SEQ ID NO: 76212 - DNA, 25 bp, Homo sapien
ccacatcgcccaggtcgtaagaaga

SEQ ID NO: 76213 - DNA, 25 bp, Homo sapien
gtcgaataagtggaccaaacactac

SEQ ID NO: 76214 - DNA, 25 bp, Homo sapien
gtcgaataagtgcaccaaacactac

SEQ ID NO: 76215 - DNA, 25 bp, Homo sapien
atggtaggaagaagacgcggaacca

SEQ ID NO: 76216 - DNA, 25 bp, Homo sapien
atggtaggaagatgacgcggaacca

SEQ ID NO: 76217 - DNA, 25 bp, Homo sapien
ccggaaagaaaggacgcgaagtcca

SEQ ID NO: 76218 - DNA, 25 bp, Homo sapien
ccggaaagaaagcacgcgaagtcca

SEQ ID NO: 76219 - DNA, 25 bp, Homo sapien
ctcaacaaaagaacccacagagcag

SEQ ID NO: 76220 - DNA, 25 bp, Homo sapien
ctcaacaaaagatcccacagagcag

SEQ ID NO: 76221 - DNA, 25 bp, Homo sapien
actccgaacaaggaatccccgaaag

SEQ ID NO: 76222 - DNA, 25 bp, Homo sapien
actccgaacaagcaatccccgaaag

SEQ ID NO: 76223 - DNA, 25 bp, Homo sapien
tcagttctccggaggcttactccgc

SEQ ID NO: 76224 - DNA, 25 bp, Homo sapien
tcagttctccggtggcttactccgc

SEQ ID NO: 76225 - DNA, 25 bp, Homo sapien
ttcgaggattccttgtgttttccac

SEQ ID NO: 76226 - DNA, 25 bp, Homo sapien
ttcgaggattccatgtgttttccac

SEQ ID NO: 76227 - DNA, 25 bp, Homo sapien
agatactacccgtgtgtcattgtcc

SEQ ID NO: 76228 - DNA, 25 bp, Homo sapien
agatactacccgagtgtcattgtcc

SEQ ID NO: 76229 - DNA, 25 bp, Homo sapien
atctacggtggaactcgtaagttcc

SEQ ID NO: 76230 - DNA, 25 bp, Homo sapien
atctacggtggatctcgtaagttcc

SEQ ID NO: 76231 - DNA, 25 bp, Homo sapien
ggtgtcgaggccttcgagtaaccga

SEQ ID NO: 76232 - DNA, 25 bp, Homo sapien
ggtgtcgaggccatcgagtaaccga

SEQ ID NO: 76233 - DNA, 25 bp, Homo sapien
caggtgtaaaagaacacggactccg

SEQ ID NO: 76234 - DNA, 25 bp, Homo sapien
caggtgtaaaagtacacggactccg

SEQ ID NO: 76235 - DNA, 25 bp, Homo sapien
aggtgacaacagcagtcagacccgt

SEQ ID NO: 76236 - DNA, 25 bp, Homo sapien
aggtgacaacaggagtcagacccgt

SEQ ID NO: 76237 - DNA, 25 bp, Homo sapien
agcagaagacatagagaacacacgt

SEQ ID NO: 76238 - DNA, 25 bp, Homo sapien
agcagaagacattgagaacacacgt

SEQ ID NO: 76239 - DNA, 25 bp, Homo sapien
ccgtcaatacctaagaggaccgtac

SEQ ID NO: 76240 - DNA, 25 bp, Homo sapien
ccgtcaataccttagaggaccgtac

SEQ ID NO: 76241 - DNA, 25 bp, Homo sapien
cgccaggtacgctacgggacgactc

SEQ ID NO: 76242 - DNA, 25 bp, Homo sapien
cgccaggtacgcaacgggacgactc

SEQ ID NO: 76243 - DNA, 25 bp, Homo sapien
gccgcctctggaggagtcggacctc

SEQ ID NO: 76244 - DNA, 25 bp, Homo sapien
gccgcctctggacgagtcggacctc

SEQ ID NO: 76245 - DNA, 25 bp, Homo sapien
cacgtatcgggacgtatgtgttctc

SEQ ID NO: 76246 - DNA, 25 bp, Homo sapien
cacgtatcgggaggtatgtgttctc

SEQ ID NO: 76247 - DNA, 25 bp, Homo sapien
acctcggatctaagctttggtttgg

SEQ ID NO: 76248 - DNA, 25 bp, Homo sapien
acctcggatctatgctttggtttgg

SEQ ID NO: 76249 - DNA, 25 bp, Homo sapien
ctcctgtgtatgttcctccttctga

SEQ ID NO: 76250 - DNA, 25 bp, Homo sapien
ctcctgtgtatgatcctccttctga

SEQ ID NO: 76251 - DNA, 25 bp, Homo sapien
actccggtcgggaccgcctctggat

SEQ ID NO: 76252 - DNA, 25 bp, Homo sapien
actccggtcgggtccgcctctggat

SEQ ID NO: 76253 - DNA, 25 bp, Homo sapien
aagggccgaccgtcagtcccaagat

SEQ ID NO: 76254 - DNA, 25 bp, Homo sapien
aagggccgaccgacagtcccaagat

SEQ ID NO: 76255 - DNA, 25 bp, Homo sapien
gcacggagtcgaacctcaacgggag

SEQ ID NO: 76256 - DNA, 25 bp, Homo sapien
gcacggagtcgatcctcaacgggag

SEQ ID NO: 76257 - DNA, 25 bp, Homo sapien
aaagttggtgaccatcgtgaagtca

SEQ ID NO: 76258 - DNA, 25 bp, Homo sapien
aaagttggtgacgatcgtgaagtca

SEQ ID NO: 76259 - DNA, 25 bp, Homo sapien
tcttgcgacgcgaccgtgacagcac

SEQ ID NO: 76260 - DNA, 25 bp, Homo sapien
tcttgcgacgcgtccgtgacagcac

SEQ ID NO: 76261 - DNA, 25 bp, Homo sapien
tagtcgcactctctcacgagacgac

SEQ ID NO: 76262 - DNA, 25 bp, Homo sapien
tagtcgcactctgtcacgagacgac

SEQ ID NO: 76263 - DNA, 25 bp, Homo sapien
cctaagtctctctagtaagtgtatt

SEQ ID NO: 76264 - DNA, 25 bp, Homo sapien
cctaagtctctcaagtaagtgtatt

SEQ ID NO: 76265 - DNA, 25 bp, Homo sapien
ctctacagactacattacactggtg

SEQ ID NO: 76266 - DNA, 25 bp, Homo sapien
ctctacagactagattacactggtg

SEQ ID NO: 76267 - DNA, 25 bp, Homo sapien
aaagaactatctatacataactcgt

SEQ ID NO: 76268 - DNA, 25 bp, Homo sapien
aaagaactatctttacataactcgt

SEQ ID NO: 76269 - DNA, 25 bp, Homo sapien
gagataaacagtttactcacaactg

SEQ ID NO: 76270 - DNA, 25 bp, Homo sapien
gagataaacagtatactcacaactg

SEQ ID NO: 76271 - DNA, 25 bp, Homo sapien
tatgttggtcaactattctgacatg

SEQ ID NO: 76272 - DNA, 25 bp, Homo sapien
tatgttggtcaagtattctgacatg

SEQ ID NO: 76273 - DNA, 25 bp, Homo sapien
ttactcggagcagtactgttaattg

SEQ ID NO: 76274 - DNA, 25 bp, Homo sapien
ttactcggagcactactgttaattg

SEQ ID NO: 76275 - DNA, 25 bp, Homo sapien
gatacaatgattctctcttgtttgt

SEQ ID NO: 76276 - DNA, 25 bp, Homo sapien
gatacaatgattgtctcttgtttgt

SEQ ID NO: 76277 - DNA, 25 bp, Homo sapien
tctaataaccgttgttttgtcagat

SEQ ID NO: 76278 - DNA, 25 bp, Homo sapien
tctaataaccgtagttttgtcagat

SEQ ID NO: 76279 - DNA, 25 bp, Homo sapien
agtaaaaagtctttaagactcggac

SEQ ID NO: 76280 - DNA, 25 bp, Homo sapien
agtaaaaagtctataagactcggac

SEQ ID NO: 76281 - DNA, 25 bp, Homo sapien
ccttaggaaaggagtagactcctca

SEQ ID NO: 76282 - DNA, 25 bp, Homo sapien
ccttaggaaaggtgtagactcctca

SEQ ID NO: 76283 - DNA, 25 bp, Homo sapien
agtcgatagagtcataaaccccagt

SEQ ID NO: 76284 - DNA, 25 bp, Homo sapien
agtcgatagagtgataaaccccagt

SEQ ID NO: 76285 - DNA, 25 bp, Homo sapien
tgccggttcaagacaccccagtacg

SEQ ID NO: 76286 - DNA, 25 bp, Homo sapien
tgccggttcaagtcaccccagtacg

SEQ ID NO: 76287 - DNA, 25 bp, Homo sapien
cccgttcctagactactaacaaagg

SEQ ID NO: 76288 - DNA, 25 bp, Homo sapien
cccgttcctagagtactaacaaagg

SEQ ID NO: 76289 - DNA, 25 bp, Homo sapien
ccgactccctgaggacgtttgcaag

SEQ ID NO: 76290 - DNA, 25 bp, Homo sapien
ccgactccctgacgacgtttgcaag

SEQ ID NO: 76291 - DNA, 25 bp, Homo sapien
ctgacccacggtaatcgtcgtcgca

SEQ ID NO: 76292 - DNA, 25 bp, Homo sapien
ctgacccacggttatcgtcgtcgca

SEQ ID NO: 76293 - DNA, 25 bp, Homo sapien
attgtacatcggttgtttcgttaac

SEQ ID NO: 76294 - DNA, 25 bp, Homo sapien
attgtacatcggatgtttcgttaac

SEQ ID NO: 76295 - DNA, 25 bp, Homo sapien
gtgacttgtcctagtgacgttaact

SEQ ID NO: 76296 - DNA, 25 bp, Homo sapien
gtgacttgtccttgtgacgttaact

SEQ ID NO: 76297 - DNA, 25 bp, Homo sapien
gagtcgtcttcatgagtaactaaga

SEQ ID NO: 76298 - DNA, 25 bp, Homo sapien
gagtcgtcttcaagagtaactaaga

SEQ ID NO: 76299 - DNA, 25 bp, Homo sapien
tgtacatcatctgtgttaacagata

SEQ ID NO: 76300 - DNA, 25 bp, Homo sapien
tgtacatcatctctgttaacagata

SEQ ID NO: 76301 - DNA, 25 bp, Homo sapien
ttaatacagttcgtggatgatctac

SEQ ID NO: 76302 - DNA, 25 bp, Homo sapien
ttaatacagttcctggatgatctac

SEQ ID NO: 76303 - DNA, 25 bp, Homo sapien
actgggacactgacgtcctacaagt

SEQ ID NO: 76304 - DNA, 25 bp, Homo sapien
actgggacactgtcgtcctacaagt

SEQ ID NO: 76305 - DNA, 25 bp, Homo sapien
ctcaagggacgtctaccctaactgt

SEQ ID NO: 76306 - DNA, 25 bp, Homo sapien
ctcaagggacgtgtaccctaactgt

SEQ ID NO: 76307 - DNA, 25 bp, Homo sapien
agtcaaggaagtcataccccgtctt

SEQ ID NO: 76308 - DNA, 25 bp, Homo sapien
agtcaaggaagtgataccccgtctt

SEQ ID NO: 76309 - DNA, 25 bp, Homo sapien
aataaatcaaggaactctatgtgcg

SEQ ID NO: 76310 - DNA, 25 bp, Homo sapien
aataaatcaaggtactctatgtgcg

SEQ ID NO: 76311 - DNA, 25 bp, Homo sapien
cgaaacgagcaacgtgaccattgat

SEQ ID NO: 76312 - DNA, 25 bp, Homo sapien
cgaaacgagcaaggtgaccattgat

SEQ ID NO: 76313 - DNA, 25 bp, Homo sapien
cagagaagtaccaggggatttcgat

SEQ ID NO: 76314 - DNA, 25 bp, Homo sapien
cagagaagtacctggggatttcgat

SEQ ID NO: 76315 - DNA, 25 bp, Homo sapien
ggttacgactctgtaaacattactt

SEQ ID NO: 76316 - DNA, 25 bp, Homo sapien
ggttacgactctctaaacattactt

SEQ ID NO: 76317 - DNA, 25 bp, Homo sapien
acggtatctctttcgttccattgtt

SEQ ID NO: 76318 - DNA, 25 bp, Homo sapien
acggtatctcttacgttccattgtt

SEQ ID NO: 76319 - DNA, 25 bp, Homo sapien
gatttcttgtgtgtaccgtctctat

SEQ ID NO: 76320 - DNA, 25 bp, Homo sapien
gatttcttgtgtctaccgtctctat

SEQ ID NO: 76321 - DNA, 25 bp, Homo sapien
tttatctagtggtccgttagacctc

SEQ ID NO: 76322 - DNA, 25 bp, Homo sapien
tttatctagtggaccgttagacctc

SEQ ID NO: 76323 - DNA, 25 bp, Homo sapien
ttacagttattgaggtcgtcttctc

SEQ ID NO: 76324 - DNA, 25 bp, Homo sapien
ttacagttattgtggtcgtcttctc

SEQ ID NO: 76325 - DNA, 25 bp, Homo sapien
tacaactgttagagtagttttcact

SEQ ID NO: 76326 - DNA, 25 bp, Homo sapien
tacaactgttagtgtagttttcact

SEQ ID NO: 76327 - DNA, 25 bp, Homo sapien
tagttactcctattggagttttcga

SEQ ID NO: 76328 - DNA, 25 bp, Homo sapien
tagttactcctaatggagttttcga

SEQ ID NO: 76329 - DNA, 25 bp, Homo sapien
gaatagtcttttggtttactcggac

SEQ ID NO: 76330 - DNA, 25 bp, Homo sapien
gaatagtcttttcgtttactcggac

SEQ ID NO: 76331 - DNA, 25 bp, Homo sapien
gacgagtttacttttagcttggaac

SEQ ID NO: 76332 - DNA, 25 bp, Homo sapien
gacgagtttactattagcttggaac

SEQ ID NO: 76333 - DNA, 25 bp, Homo sapien
tacattttgtacacgacgttggtaa

SEQ ID NO: 76334 - DNA, 25 bp, Homo sapien
tacattttgtactcgacgttggtaa

SEQ ID NO: 76335 - DNA, 25 bp, Homo sapien
ctagctactttgctttcgttgtaaa

SEQ ID NO: 76336 - DNA, 25 bp, Homo sapien
ctagctactttggtttcgttgtaaa

SEQ ID NO: 76337 - DNA, 25 bp, Homo sapien
cgacaacgaatgtctatattgctaa

SEQ ID NO: 76338 - DNA, 25 bp, Homo sapien
cgacaacgaatgactatattgctaa

SEQ ID NO: 76339 - DNA, 25 bp, Homo sapien
cggagacgagaacactctcattaaa

SEQ ID NO: 76340 - DNA, 25 bp, Homo sapien
cggagacgagaagactctcattaaa

SEQ ID NO: 76341 - DNA, 25 bp, Homo sapien
ccaaaggtactcaatctttgttaag

SEQ ID NO: 76342 - DNA, 25 bp, Homo sapien
ccaaaggtactctatctttgttaag

SEQ ID NO: 76343 - DNA, 25 bp, Homo sapien
caaaaggagtctcaatccgacggaa

SEQ ID NO: 76344 - DNA, 25 bp, Homo sapien
caaaaggagtctgaatccgacggaa

SEQ ID NO: 76345 - DNA, 25 bp, Homo sapien
ctcaaggtgactttttcagagtaaa

SEQ ID NO: 76346 - DNA, 25 bp, Homo sapien
ctcaaggtgactatttcagagtaaa

SEQ ID NO: 76347 - DNA, 25 bp, Homo sapien
actcaggaaggtttgaacggtaaac

SEQ ID NO: 76348 - DNA, 25 bp, Homo sapien
actcaggaaggtatgaacggtaaac

SEQ ID NO: 76349 - DNA, 25 bp, Homo sapien
tcaaacttattgaacgggttctagt

SEQ ID NO: 76350 - DNA, 25 bp, Homo sapien
tcaaacttattgtacgggttctagt

SEQ ID NO: 76351 - DNA, 25 bp, Homo sapien
tctaaatctttatccaggagtttag

SEQ ID NO: 76352 - DNA, 25 bp, Homo sapien
tctaaatctttaaccaggagtttag

SEQ ID NO: 76353 - DNA, 25 bp, Homo sapien
cgagatacggtcaaccagaaccata

SEQ ID NO: 76354 - DNA, 25 bp, Homo sapien
cgagatacggtctaccagaaccata

SEQ ID NO: 76355 - DNA, 25 bp, Homo sapien
gtgcggagcgaggtgtcacctttaa

SEQ ID NO: 76356 - DNA, 25 bp, Homo sapien
gtgcggagcgagctgtcacctttaa

SEQ ID NO: 76357 - DNA, 25 bp, Homo sapien
gtgtgggtctcagtccataccttta

SEQ ID NO: 76358 - DNA, 25 bp, Homo sapien
gtgtgggtctcactccataccttta

SEQ ID NO: 76359 - DNA, 25 bp, Homo sapien
ctggaatgtcgaacccatttcatac

SEQ ID NO: 76360 - DNA, 25 bp, Homo sapien
ctggaatgtcgatcccatttcatac

SEQ ID NO: 76361 - DNA, 25 bp, Homo sapien
ggttttacggactaatcgacactta

SEQ ID NO: 76362 - DNA, 25 bp, Homo sapien
ggttttacggacaaatcgacactta

SEQ ID NO: 76363 - DNA, 25 bp, Homo sapien
gtgattaagaccaaaggctgtgtct

SEQ ID NO: 76364 - DNA, 25 bp, Homo sapien
gtgattaagacctaaggctgtgtct

SEQ ID NO: 76365 - DNA, 25 bp, Homo sapien
tctaacatacccttggtatcgtgct

SEQ ID NO: 76366 - DNA, 25 bp, Homo sapien
tctaacatacccatggtatcgtgct

SEQ ID NO: 76367 - DNA, 25 bp, Homo sapien
gtggataaatcacgtatgagtttcc

SEQ ID NO: 76368 - DNA, 25 bp, Homo sapien
gtggataaatcaggtatgagtttcc

SEQ ID NO: 76369 - DNA, 25 bp, Homo sapien
ctcgagaaagatcaggttggtttcc

SEQ ID NO: 76370 - DNA, 25 bp, Homo sapien
ctcgagaaagatgaggttggtttcc

SEQ ID NO: 76371 - DNA, 25 bp, Homo sapien
tacgacgttgagctcttcgttctca

SEQ ID NO: 76372 - DNA, 25 bp, Homo sapien
tacgacgttgaggtcttcgttctca

SEQ ID NO: 76373 - DNA, 25 bp, Homo sapien
acggtattaaggttctctggtctat

SEQ ID NO: 76374 - DNA, 25 bp, Homo sapien
acggtattaaggatctctggtctat

SEQ ID NO: 76375 - DNA, 25 bp, Homo sapien
tctcacaaaggtaactctgtactag

SEQ ID NO: 76376 - DNA, 25 bp, Homo sapien
tctcacaaaggttactctgtactag

SEQ ID NO: 76377 - DNA, 25 bp, Homo sapien
ctaacaagaaggtgtctagacgagt

SEQ ID NO: 76378 - DNA, 25 bp, Homo sapien
ctaacaagaaggagtctagacgagt

SEQ ID NO: 76379 - DNA, 25 bp, Homo sapien
tggacaaagagaaggactcgtcaaa

SEQ ID NO: 76380 - DNA, 25 bp, Homo sapien
tggacaaagagatggactcgtcaaa

SEQ ID NO: 76381 - DNA, 25 bp, Homo sapien
atcaggtagactgtgttctagtaca

SEQ ID NO: 76382 - DNA, 25 bp, Homo sapien
atcaggtagactctgttctagtaca

SEQ ID NO: 76383 - DNA, 25 bp, Homo sapien
tagggtgactagacgacgaagtcta

SEQ ID NO: 76384 - DNA, 25 bp, Homo sapien
tagggtgactagtcgacgaagtcta

SEQ ID NO: 76385 - DNA, 25 bp, Homo sapien
atcaggcgtagcttcgcgagtaaga

SEQ ID NO: 76386 - DNA, 25 bp, Homo sapien
atcaggcgtagcatcgcgagtaaga

SEQ ID NO: 76387 - DNA, 25 bp, Homo sapien
aagtagactaggttccagactagta

SEQ ID NO: 76388 - DNA, 25 bp, Homo sapien
aagtagactaggatccagactagta

SEQ ID NO: 76389 - DNA, 25 bp, Homo sapien
gtataagtgtcacagaactatcaga

SEQ ID NO: 76390 - DNA, 25 bp, Homo sapien
gtataagtgtcagagaactatcaga

SEQ ID NO: 76391 - DNA, 25 bp, Homo sapien
aagatgtaccacgtagaaaccgcga

SEQ ID NO: 76392 - DNA, 25 bp, Homo sapien
aagatgtaccacctagaaaccgcga

SEQ ID NO: 76393 - DNA, 25 bp, Homo sapien
gagaaccaccacaggaaacagttct

SEQ ID NO: 76394 - DNA, 25 bp, Homo sapien
gagaaccaccactggaaacagttct

SEQ ID NO: 76395 - DNA, 25 bp, Homo sapien
gaaccatgcgacgaagaagtctcgt

SEQ ID NO: 76396 - DNA, 25 bp, Homo sapien
gaaccatgcgaccaagaagtctcgt

SEQ ID NO: 76397 - DNA, 25 bp, Homo sapien
acactctctgtgcacattggtcgtc

SEQ ID NO: 76398 - DNA, 25 bp, Homo sapien
acactctctgtggacattggtcgtc

SEQ ID NO: 76399 - DNA, 25 bp, Homo sapien
ccgtcgtactgttaaggtctattga

SEQ ID NO: 76400 - DNA, 25 bp, Homo sapien
ccgtcgtactgtaaaggtctattga

SEQ ID NO: 76401 - DNA, 25 bp, Homo sapien
tccgcacgcgcacatgtgtgtatac

SEQ ID NO: 76402 - DNA, 25 bp, Homo sapien
tccgcacgcgcagatgtgtgtatac

SEQ ID NO: 76403 - DNA, 25 bp, Homo sapien
gccccttcggtagtgtcgagtagac

SEQ ID NO: 76404 - DNA, 25 bp, Homo sapien
gccccttcggtactgtcgagtagac

SEQ ID NO: 76405 - DNA, 25 bp, Homo sapien
ttccacggactccttctagagaaat

SEQ ID NO: 76406 - DNA, 25 bp, Homo sapien
ttccacggactcgttctagagaaat

SEQ ID NO: 76407 - DNA, 25 bp, Homo sapien
tagcatccctcgttcgagaaacacg

SEQ ID NO: 76408 - DNA, 25 bp, Homo sapien
tagcatccctcgatcgagaaacacg

SEQ ID NO: 76409 - DNA, 25 bp, Homo sapien
gttttcccatagtcaccttcgtcgt

SEQ ID NO: 76410 - DNA, 25 bp, Homo sapien
gttttcccatagacaccttcgtcgt

SEQ ID NO: 76411 - DNA, 25 bp, Homo sapien
atagttttcgaaaacaacacttttg

SEQ ID NO: 76412 - DNA, 25 bp, Homo sapien
atagttttcgaatacaacacttttg

SEQ ID NO: 76413 - DNA, 25 bp, Homo sapien
agggacaaagtctaacttactaacg

SEQ ID NO: 76414 - DNA, 25 bp, Homo sapien
agggacaaagtcaaacttactaacg

SEQ ID NO: 76415 - DNA, 25 bp, Homo sapien
gcgaaaggtcgaaggaaccaaagac

SEQ ID NO: 76416 - DNA, 25 bp, Homo sapien
gcgaaaggtcgatggaaccaaagac

SEQ ID NO: 76417 - DNA, 25 bp, Homo sapien
agtgtagctgaaacggtccaaagtc

SEQ ID NO: 76418 - DNA, 25 bp, Homo sapien
agtgtagctgaatcggtccaaagtc

SEQ ID NO: 76419 - DNA, 25 bp, Homo sapien
gacacatctgattcgatcttaaatg

SEQ ID NO: 76420 - DNA, 25 bp, Homo sapien
gacacatctgatacgatcttaaatg

SEQ ID NO: 76421 - DNA, 25 bp, Homo sapien
agttccactagtctcctgactagcg

SEQ ID NO: 76422 - DNA, 25 bp, Homo sapien
agttccactagtgtcctgactagcg

SEQ ID NO: 76423 - DNA, 25 bp, Homo sapien
ggtgtcagtacagagtcgcttcttc

SEQ ID NO: 76424 - DNA, 25 bp, Homo sapien
ggtgtcagtacacagtcgcttcttc

SEQ ID NO: 76425 - DNA, 25 bp, Homo sapien
tgtgtgtcagaacttcctacttaca

SEQ ID NO: 76426 - DNA, 25 bp, Homo sapien
tgtgtgtcagaagttcctacttaca

SEQ ID NO: 76427 - DNA, 25 bp, Homo sapien
gtaggacttctagtttccgagatag

SEQ ID NO: 76428 - DNA, 25 bp, Homo sapien
gtaggacttctactttccgagatag

SEQ ID NO: 76429 - DNA, 25 bp, Homo sapien
ctacaagttcgtctttcgcgcactg

SEQ ID NO: 76430 - DNA, 25 bp, Homo sapien
ctacaagttcgtgtttcgcgcactg

SEQ ID NO: 76431 - DNA, 25 bp, Homo sapien
cacggaagtccagtaggtccttcgc

SEQ ID NO: 76432 - DNA, 25 bp, Homo sapien
cacggaagtccactaggtccttcgc

SEQ ID NO: 76433 - DNA, 25 bp, Homo sapien
gacaaagactcaacccgggtccgct

SEQ ID NO: 76434 - DNA, 25 bp, Homo sapien
gacaaagactcatcccgggtccgct

SEQ ID NO: 76435 - DNA, 25 bp, Homo sapien
ttataggtggtctcggcgaagccct

SEQ ID NO: 76436 - DNA, 25 bp, Homo sapien
ttataggtggtcacggcgaagccct

SEQ ID NO: 76437 - DNA, 25 bp, Homo sapien
tttagtaggtggacggctagccccg

SEQ ID NO: 76438 - DNA, 25 bp, Homo sapien
tttagtaggtggtcggctagccccg

SEQ ID NO: 76439 - DNA, 25 bp, Homo sapien
ttgatggcttatttgaactacgtct

SEQ ID NO: 76440 - DNA, 25 bp, Homo sapien
ttgatggcttatatgaactacgtct

SEQ ID NO: 76441 - DNA, 25 bp, Homo sapien
gttaattctggtcaatccaaacctg

SEQ ID NO: 76442 - DNA, 25 bp, Homo sapien
gttaattctggtgaatccaaacctg

SEQ ID NO: 76443 - DNA, 25 bp, Homo sapien
gatacttttttttagtcccctctgg

SEQ ID NO: 76444 - DNA, 25 bp, Homo sapien
gatactttttttaagtcccctctgg

SEQ ID NO: 76445 - DNA, 25 bp, Homo sapien
cattatgtgttattagcccaatggt

SEQ ID NO: 76446 - DNA, 25 bp, Homo sapien
cattatgtgttaatagcccaatggt

SEQ ID NO: 76447 - DNA, 25 bp, Homo sapien
tcatatttactttactaccggagag

SEQ ID NO: 76448 - DNA, 25 bp, Homo sapien
tcatatttacttaactaccggagag

SEQ ID NO: 76449 - DNA, 25 bp, Homo sapien
cctgtatcctgactcacagtgacaa

SEQ ID NO: 76450 - DNA, 25 bp, Homo sapien
cctgtatcctgagtcacagtgacaa

SEQ ID NO: 76451 - DNA, 25 bp, Homo sapien
cgttattgtcggaaacaacacaggt

SEQ ID NO: 76452 - DNA, 25 bp, Homo sapien
cgttattgtcggtaacaacacaggt

SEQ ID NO: 76453 - DNA, 25 bp, Homo sapien
ccgtttccactataaacactagggt

SEQ ID NO: 76454 - DNA, 25 bp, Homo sapien
ccgtttccactaaaaacactagggt

SEQ ID NO: 76455 - DNA, 25 bp, Homo sapien
ctggtaactctaaactagccattgt

SEQ ID NO: 76456 - DNA, 25 bp, Homo sapien
ctggtaactctatactagccattgt

SEQ ID NO: 76457 - DNA, 25 bp, Homo sapien
cgggtcttacacttcggtcaccggg

SEQ ID NO: 76458 - DNA, 25 bp, Homo sapien
cgggtcttacacatcggtcaccggg

SEQ ID NO: 76459 - DNA, 25 bp, Homo sapien
ttatcgtaagtctcgatgtcccggt

SEQ ID NO: 76460 - DNA, 25 bp, Homo sapien
ttatcgtaagtcacgatgtcccggt

SEQ ID NO: 76461 - DNA, 25 bp, Homo sapien
atgtatttacgaggttccaccctga

SEQ ID NO: 76462 - DNA, 25 bp, Homo sapien
atgtatttacgacgttccaccctga

SEQ ID NO: 76463 - DNA, 25 bp, Homo sapien
agttaaagagctgacaccgttctaa

SEQ ID NO: 76464 - DNA, 25 bp, Homo sapien
agttaaagagctcacaccgttctaa

SEQ ID NO: 76465 - DNA, 25 bp, Homo sapien
gttccgtaacgatctgtgaacagaa

SEQ ID NO: 76466 - DNA, 25 bp, Homo sapien
gttccgtaacgaactgtgaacagaa

SEQ ID NO: 76467 - DNA, 25 bp, Homo sapien
acttatgaaccctgtgactgtaaat

SEQ ID NO: 76468 - DNA, 25 bp, Homo sapien
acttatgaacccagtgactgtaaat

SEQ ID NO: 76469 - DNA, 25 bp, Homo sapien
ggtgtcaacaaccacctggtgaaat

SEQ ID NO: 76470 - DNA, 25 bp, Homo sapien
ggtgtcaacaacgacctggtgaaat

SEQ ID NO: 76471 - DNA, 25 bp, Homo sapien
ggtttaaaggacctgtgcgtcaagt

SEQ ID NO: 76472 - DNA, 25 bp, Homo sapien
ggtttaaaggacgtgtgcgtcaagt

SEQ ID NO: 76473 - DNA, 25 bp, Homo sapien
taaaatatgtctcagtgtcacagtc

SEQ ID NO: 76474 - DNA, 25 bp, Homo sapien
taaaatatgtctgagtgtcacagtc

SEQ ID NO: 76475 - DNA, 25 bp, Homo sapien
atataactactttggagtttcagac

SEQ ID NO: 76476 - DNA, 25 bp, Homo sapien
atataactacttaggagtttcagac

SEQ ID NO: 76477 - DNA, 25 bp, Homo sapien
gataaagtctaaaggagtttcgacc

SEQ ID NO: 76478 - DNA, 25 bp, Homo sapien
gataaagtctaatggagtttcgacc

SEQ ID NO: 76479 - DNA, 25 bp, Homo sapien
aacgcgtcacctacggacgttcttc

SEQ ID NO: 76480 - DNA, 25 bp, Homo sapien
aacgcgtcaccttcggacgttcttc

SEQ ID NO: 76481 - DNA, 25 bp, Homo sapien
gagggtgtgtctgcccgtggtctcg

SEQ ID NO: 76482 - DNA, 25 bp, Homo sapien
gagggtgtgtctccccgtggtctcg

SEQ ID NO: 76483 - DNA, 25 bp, Homo sapien
agtgctagtgtcacgtctgcgtttc

SEQ ID NO: 76484 - DNA, 25 bp, Homo sapien
agtgctagtgtctcgtctgcgtttc

SEQ ID NO: 76485 - DNA, 25 bp, Homo sapien
gggaccacctgttgcgactccggaa

SEQ ID NO: 76486 - DNA, 25 bp, Homo sapien
gggaccacctgtagcgactccggaa

SEQ ID NO: 76487 - DNA, 25 bp, Homo sapien
ccgccgtggacttgtcgaactccaa

SEQ ID NO: 76488 - DNA, 25 bp, Homo sapien
ccgccgtggactagtcgaactccaa

SEQ ID NO: 76489 - DNA, 25 bp, Homo sapien
ggctccgagattgttcacctcggat

SEQ ID NO: 76490 - DNA, 25 bp, Homo sapien
ggctccgagattcttcacctcggat

SEQ ID NO: 76491 - DNA, 25 bp, Homo sapien
gtccactcggggtacttccccgggt

SEQ ID NO: 76492 - DNA, 25 bp, Homo sapien
gtccactcggggaacttccccgggt

SEQ ID NO: 76493 - DNA, 25 bp, Homo sapien
ttataagggtcgaactcccattttg

SEQ ID NO: 76494 - DNA, 25 bp, Homo sapien
ttataagggtcgtactcccattttg

SEQ ID NO: 76495 - DNA, 25 bp, Homo sapien
gacgactctcattccgtaagtccgc

SEQ ID NO: 76496 - DNA, 25 bp, Homo sapien
gacgactctcataccgtaagtccgc

SEQ ID NO: 76497 - DNA, 25 bp, Homo sapien
gagtagtctctgacgtattggttcg

SEQ ID NO: 76498 - DNA, 25 bp, Homo sapien
gagtagtctctgtcgtattggttcg

SEQ ID NO: 76499 - DNA, 25 bp, Homo sapien
gtgtcgtcgtacacggttgagattc

SEQ ID NO: 76500 - DNA, 25 bp, Homo sapien
gtgtcgtcgtactcggttgagattc

SEQ ID NO: 76501 - DNA, 25 bp, Homo sapien
cgagagtctctcacgatgagtggcc

SEQ ID NO: 76502 - DNA, 25 bp, Homo sapien
cgagagtctctctcgatgagtggcc

SEQ ID NO: 76503 - DNA, 25 bp, Homo sapien
ggagaactatcgtagtccgtccaca

SEQ ID NO: 76504 - DNA, 25 bp, Homo sapien
ggagaactatcgaagtccgtccaca

SEQ ID NO: 76505 - DNA, 25 bp, Homo sapien
aagatcccatgtacgtccacgacca

SEQ ID NO: 76506 - DNA, 25 bp, Homo sapien
aagatcccatgttcgtccacgacca

SEQ ID NO: 76507 - DNA, 25 bp, Homo sapien
acgataaacaagtcgttttacatag

SEQ ID NO: 76508 - DNA, 25 bp, Homo sapien
acgataaacaagacgttttacatag

SEQ ID NO: 76509 - DNA, 25 bp, Homo sapien
tattttcacacgagttttcgtgagt

SEQ ID NO: 76510 - DNA, 25 bp, Homo sapien
tattttcacacgtgttttcgtgagt

SEQ ID NO: 76511 - DNA, 25 bp, Homo sapien
ttcttcgtcaagaacgggtccgttg

SEQ ID NO: 76512 - DNA, 25 bp, Homo sapien
ttcttcgtcaagtacgggtccgttg

SEQ ID NO: 76513 - DNA, 25 bp, Homo sapien
ctgaacttcaagaggacccgtatcg

SEQ ID NO: 76514 - DNA, 25 bp, Homo sapien
ctgaacttcaagtggacccgtatcg

SEQ ID NO: 76515 - DNA, 25 bp, Homo sapien
ggtatatcaaaggtggtacactaac

SEQ ID NO: 76516 - DNA, 25 bp, Homo sapien
ggtatatcaaagctggtacactaac

SEQ ID NO: 76517 - DNA, 25 bp, Homo sapien
ctccgaaagaaactcttgactagac

SEQ ID NO: 76518 - DNA, 25 bp, Homo sapien
ctccgaaagaaagtcttgactagac

SEQ ID NO: 76519 - DNA, 25 bp, Homo sapien
attcaacaggccttcaggactgacg

SEQ ID NO: 76520 - DNA, 25 bp, Homo sapien
attcaacaggccatcaggactgacg

SEQ ID NO: 76521 - DNA, 25 bp, Homo sapien
attacatctgcgacttcttcttgag

SEQ ID NO: 76522 - DNA, 25 bp, Homo sapien
attacatctgcgtcttcttcttgag

SEQ ID NO: 76523 - DNA, 25 bp, Homo sapien
ttttcttccctttgcgactccagag

SEQ ID NO: 76524 - DNA, 25 bp, Homo sapien
ttttcttcccttagcgactccagag

SEQ ID NO: 76525 - DNA, 25 bp, Homo sapien
cgtgtctccatctgccggctcagag

SEQ ID NO: 76526 - DNA, 25 bp, Homo sapien
cgtgtctccatcagccggctcagag

SEQ ID NO: 76527 - DNA, 25 bp, Homo sapien
tcgggcaaacagtcggcgtctaact

SEQ ID NO: 76528 - DNA, 25 bp, Homo sapien
tcgggcaaacagacggcgtctaact

SEQ ID NO: 76529 - DNA, 25 bp, Homo sapien
cgggaccggaaaagtgacggtcact

SEQ ID NO: 76530 - DNA, 25 bp, Homo sapien
cgggaccggaaatgtgacggtcact

SEQ ID NO: 76531 - DNA, 25 bp, Homo sapien
tattctgggtgaaaagccgagtacc

SEQ ID NO: 76532 - DNA, 25 bp, Homo sapien
tattctgggtgataagccgagtacc

SEQ ID NO: 76533 - DNA, 25 bp, Homo sapien
ctatcggggcagtcggttctacccg

SEQ ID NO: 76534 - DNA, 25 bp, Homo sapien
ctatcggggcagacggttctacccg

SEQ ID NO: 76535 - DNA, 25 bp, Homo sapien
tctgtaggggagacggttcttctcg

SEQ ID NO: 76536 - DNA, 25 bp, Homo sapien
tctgtaggggagtcggttcttctcg

SEQ ID NO: 76537 - DNA, 25 bp, Homo sapien
ctacgtaagaccacggggagattcc

SEQ ID NO: 76538 - DNA, 25 bp, Homo sapien
ctacgtaagacctcggggagattcc

SEQ ID NO: 76539 - DNA, 25 bp, Homo sapien
tgtagttgagtctcggaggagcccc

SEQ ID NO: 76540 - DNA, 25 bp, Homo sapien
tgtagttgagtcacggaggagcccc

SEQ ID NO: 76541 - DNA, 25 bp, Homo sapien
ggaggtcctcaagacgcagtacccc

SEQ ID NO: 76542 - DNA, 25 bp, Homo sapien
ggaggtcctcaacacgcagtacccc

SEQ ID NO: 76543 - DNA, 25 bp, Homo sapien
gggggtttaaaggaccgaaaccgta

SEQ ID NO: 76544 - DNA, 25 bp, Homo sapien
gggggtttaaagcaccgaaaccgta

SEQ ID NO: 76545 - DNA, 25 bp, Homo sapien
acggggttgaaactccgggacgacc

SEQ ID NO: 76546 - DNA, 25 bp, Homo sapien
acggggttgaaagtccgggacgacc

SEQ ID NO: 76547 - DNA, 25 bp, Homo sapien
ctcgcgaaatgattatacgacttct

SEQ ID NO: 76548 - DNA, 25 bp, Homo sapien
ctcgcgaaatgaatatacgacttct

SEQ ID NO: 76549 - DNA, 25 bp, Homo sapien
gactaacaaatgtattcacgtcgtt

SEQ ID NO: 76550 - DNA, 25 bp, Homo sapien
gactaacaaatgaattcacgtcgtt

SEQ ID NO: 76551 - DNA, 25 bp, Homo sapien
gaggactttcgtagacttcataagt

SEQ ID NO: 76552 - DNA, 25 bp, Homo sapien
gaggactttcgttgacttcataagt

SEQ ID NO: 76553 - DNA, 25 bp, Homo sapien
agcgcaacgtttcctgtctaggtgt

SEQ ID NO: 76554 - DNA, 25 bp, Homo sapien
agcgcaacgtttgctgtctaggtgt

SEQ ID NO: 76555 - DNA, 25 bp, Homo sapien
gatgaagaccgacagtgaacgttat

SEQ ID NO: 76556 - DNA, 25 bp, Homo sapien
gatgaagaccgagagtgaacgttat

SEQ ID NO: 76557 - DNA, 25 bp, Homo sapien
accaggaagccgacgaggacacgga

SEQ ID NO: 76558 - DNA, 25 bp, Homo sapien
accaggaagccgtcgaggacacgga

SEQ ID NO: 76559 - DNA, 25 bp, Homo sapien
caaggggtcgactcgaaacaacgac

SEQ ID NO: 76560 - DNA, 25 bp, Homo sapien
caaggggtcgacacgaaacaacgac

SEQ ID NO: 76561 - DNA, 25 bp, Homo sapien
accggtggtcacgtccgaagaaccg

SEQ ID NO: 76562 - DNA, 25 bp, Homo sapien
accggtggtcacctccgaagaaccg

SEQ ID NO: 76563 - DNA, 25 bp, Homo sapien
tacgtcctgaccactgaattcctcg

SEQ ID NO: 76564 - DNA, 25 bp, Homo sapien
tacgtcctgacctctgaattcctcg

SEQ ID NO: 76565 - DNA, 25 bp, Homo sapien
ccgtctcaggcgtctgcttaaagtg

SEQ ID NO: 76566 - DNA, 25 bp, Homo sapien
ccgtctcaggcgactgcttaaagtg

SEQ ID NO: 76567 - DNA, 25 bp, Homo sapien
tgtcgggtaggcttttacagactgt

SEQ ID NO: 76568 - DNA, 25 bp, Homo sapien
tgtcgggtaggcatttacagactgt

SEQ ID NO: 76569 - DNA, 25 bp, Homo sapien
ttagattcagagactttataccggt

SEQ ID NO: 76570 - DNA, 25 bp, Homo sapien
ttagattcagagtctttataccggt

SEQ ID NO: 76571 - DNA, 25 bp, Homo sapien
aaatctagaagtctctattcgagac

SEQ ID NO: 76572 - DNA, 25 bp, Homo sapien
aaatctagaagtgtctattcgagac

SEQ ID NO: 76573 - DNA, 25 bp, Homo sapien
aaaacacaagtttatgttacacact

SEQ ID NO: 76574 - DNA, 25 bp, Homo sapien
aaaacacaagttaatgttacacact

SEQ ID NO: 76575 - DNA, 25 bp, Homo sapien
ggaccacggtactaaatgacacaca

SEQ ID NO: 76576 - DNA, 25 bp, Homo sapien
ggaccacggtacaaaatgacacaca

SEQ ID NO: 76577 - DNA, 25 bp, Homo sapien
tcacccgttaagacttgacctacga

SEQ ID NO: 76578 - DNA, 25 bp, Homo sapien
tcacccgttaagtcttgacctacga

SEQ ID NO: 76579 - DNA, 25 bp, Homo sapien
aagtctgtcgagaccagacgctgag

SEQ ID NO: 76580 - DNA, 25 bp, Homo sapien
aagtctgtcgagtccagacgctgag

SEQ ID NO: 76581 - DNA, 25 bp, Homo sapien
ccggaggcttactccgcggacctga

SEQ ID NO: 76582 - DNA, 25 bp, Homo sapien
ccggaggcttacaccgcggacctga

SEQ ID NO: 76583 - DNA, 25 bp, Homo sapien
tcctgggttaccttgtcgaggttgg

SEQ ID NO: 76584 - DNA, 25 bp, Homo sapien
tcctgggttaccatgtcgaggttgg

SEQ ID NO: 76585 - DNA, 25 bp, Homo sapien
atcatggatatctttcgaggtttcg

SEQ ID NO: 76586 - DNA, 25 bp, Homo sapien
atcatggatatcattcgaggtttcg

SEQ ID NO: 76587 - DNA, 25 bp, Homo sapien
tcccacttgaaatttccggttctcg

SEQ ID NO: 76588 - DNA, 25 bp, Homo sapien
tcccacttgaaaattccggttctcg

SEQ ID NO: 76589 - DNA, 25 bp, Homo sapien
caggagtgaaaggaacctagaacta

SEQ ID NO: 76590 - DNA, 25 bp, Homo sapien
caggagtgaaagcaacctagaacta

SEQ ID NO: 76591 - DNA, 25 bp, Homo sapien
ggaaagagatcttccgctaggtaaa

SEQ ID NO: 76592 - DNA, 25 bp, Homo sapien
ggaaagagatctaccgctaggtaaa

SEQ ID NO: 76593 - DNA, 25 bp, Homo sapien
acttgtaagacatccccggtgacag

SEQ ID NO: 76594 - DNA, 25 bp, Homo sapien
acttgtaagacaaccccggtgacag

SEQ ID NO: 76595 - DNA, 25 bp, Homo sapien
caattaaggacgaccacagaatctt

SEQ ID NO: 76596 - DNA, 25 bp, Homo sapien
caattaaggacgtccacagaatctt

SEQ ID NO: 76597 - DNA, 25 bp, Homo sapien
attaaaagacgacgacaacggccta

SEQ ID NO: 76598 - DNA, 25 bp, Homo sapien
attaaaagacgaggacaacggccta

SEQ ID NO: 76599 - DNA, 25 bp, Homo sapien
gtcgaaacagacggagaggttctga

SEQ ID NO: 76600 - DNA, 25 bp, Homo sapien
gtcgaaacagaccgagaggttctga

SEQ ID NO: 76601 - DNA, 25 bp, Homo sapien
ggcggacacgtagaacgaaggccca

SEQ ID NO: 76602 - DNA, 25 bp, Homo sapien
ggcggacacgtacaacgaaggccca

SEQ ID NO: 76603 - DNA, 25 bp, Homo sapien
tgaccagtagctgtagtaacggccc

SEQ ID NO: 76604 - DNA, 25 bp, Homo sapien
tgaccagtagctctagtaacggccc

SEQ ID NO: 76605 - DNA, 25 bp, Homo sapien
agtagtcccaaccagtcaaggccct

SEQ ID NO: 76606 - DNA, 25 bp, Homo sapien
agtagtcccaacgagtcaaggccct

SEQ ID NO: 76607 - DNA, 25 bp, Homo sapien
tctacaggagtcagtatccgtgtat

SEQ ID NO: 76608 - DNA, 25 bp, Homo sapien
tctacaggagtctgtatccgtgtat

SEQ ID NO: 76609 - DNA, 25 bp, Homo sapien
agttcacggtaaacgtgtccgggtt

SEQ ID NO: 76610 - DNA, 25 bp, Homo sapien
agttcacggtaatcgtgtccgggtt

SEQ ID NO: 76611 - DNA, 25 bp, Homo sapien
tatcgacagacgtgtgagtctttta

SEQ ID NO: 76612 - DNA, 25 bp, Homo sapien
tatcgacagacgagtgagtctttta

SEQ ID NO: 76613 - DNA, 25 bp, Homo sapien
cgattatttcaagtgactgttattc

SEQ ID NO: 76614 - DNA, 25 bp, Homo sapien
cgattatttcaactgactgttattc

SEQ ID NO: 76615 - DNA, 25 bp, Homo sapien
atttgtttcgacttaacgtctttgc

SEQ ID NO: 76616 - DNA, 25 bp, Homo sapien
atttgtttcgacataacgtctttgc

SEQ ID NO: 76617 - DNA, 25 bp, Homo sapien
tctcttctttcgacgatctgggttc

SEQ ID NO: 76618 - DNA, 25 bp, Homo sapien
tctcttctttcgtcgatctgggttc

SEQ ID NO: 76619 - DNA, 25 bp, Homo sapien
tctttttgccgtggtacagggtgac

SEQ ID NO: 76620 - DNA, 25 bp, Homo sapien
tctttttgccgtcgtacagggtgac

SEQ ID NO: 76621 - DNA, 25 bp, Homo sapien
ccttcggtcctaggtaagcgaagta

SEQ ID NO: 76622 - DNA, 25 bp, Homo sapien
ccttcggtcctacgtaagcgaagta

SEQ ID NO: 76623 - DNA, 25 bp, Homo sapien
atcttgtgtaagttctttcactgta

SEQ ID NO: 76624 - DNA, 25 bp, Homo sapien
atcttgtgtaagatctttcactgta

SEQ ID NO: 76625 - DNA, 25 bp, Homo sapien
ggatctcatatacttcattgatgtt

SEQ ID NO: 76626 - DNA, 25 bp, Homo sapien
ggatctcatatagttcattgatgtt

SEQ ID NO: 76627 - DNA, 25 bp, Homo sapien
atgctttcgtagtcagtcacctgtc

SEQ ID NO: 76628 - DNA, 25 bp, Homo sapien
atgctttcgtagacagtcacctgtc

SEQ ID NO: 76629 - DNA, 25 bp, Homo sapien
tcgttcgtccaaacctctcgtgact

SEQ ID NO: 76630 - DNA, 25 bp, Homo sapien
tcgttcgtccaatcctctcgtgact

SEQ ID NO: 76631 - DNA, 25 bp, Homo sapien
ttggtcggactcctactccgtgtcc

SEQ ID NO: 76632 - DNA, 25 bp, Homo sapien
ttggtcggactcgtactccgtgtcc

SEQ ID NO: 76633 - DNA, 25 bp, Homo sapien
acttcccgtacttgacgtcctgcga

SEQ ID NO: 76634 - DNA, 25 bp, Homo sapien
acttcccgtactagacgtcctgcga

SEQ ID NO: 76635 - DNA, 25 bp, Homo sapien
cacttccacagtcgagcgttcacga

SEQ ID NO: 76636 - DNA, 25 bp, Homo sapien
cacttccacagtggagcgttcacga

SEQ ID NO: 76637 - DNA, 25 bp, Homo sapien
accatatccaaacgtcggacaagac

SEQ ID NO: 76638 - DNA, 25 bp, Homo sapien
accatatccaaaggtcggacaagac

SEQ ID NO: 76639 - DNA, 25 bp, Homo sapien
agtcgggtccaaccagaggcaagag

SEQ ID NO: 76640 - DNA, 25 bp, Homo sapien
agtcgggtccaagcagaggcaagag

SEQ ID NO: 76641 - DNA, 25 bp, Homo sapien
gtacgacaccagacgcaaagacggt

SEQ ID NO: 76642 - DNA, 25 bp, Homo sapien
gtacgacaccagtcgcaaagacggt

SEQ ID NO: 76643 - DNA, 25 bp, Homo sapien
aactaccaacacgacttcaggtgtc

SEQ ID NO: 76644 - DNA, 25 bp, Homo sapien
aactaccaacaccacttcaggtgtc

SEQ ID NO: 76645 - DNA, 25 bp, Homo sapien
gctaagaagacgagtacaagacttc

SEQ ID NO: 76646 - DNA, 25 bp, Homo sapien
gctaagaagacgtgtacaagacttc

SEQ ID NO: 76647 - DNA, 25 bp, Homo sapien
tccaagacgaggatgtctaatccga

SEQ ID NO: 76648 - DNA, 25 bp, Homo sapien
tccaagacgaggttgtctaatccga

SEQ ID NO: 76649 - DNA, 25 bp, Homo sapien
cgttcacttgtactttcctaacgtg

SEQ ID NO: 76650 - DNA, 25 bp, Homo sapien
cgttcacttgtagtttcctaacgtg

SEQ ID NO: 76651 - DNA, 25 bp, Homo sapien
ttatttcccttgtgtcttcttgtta

SEQ ID NO: 76652 - DNA, 25 bp, Homo sapien
ttatttcccttgagtcttcttgtta

SEQ ID NO: 76653 - DNA, 25 bp, Homo sapien
gagttccccgtctccttttctgtta

SEQ ID NO: 76654 - DNA, 25 bp, Homo sapien
gagttccccgtcaccttttctgtta

SEQ ID NO: 76655 - DNA, 25 bp, Homo sapien
gtaagggttatactcggacctgtta

SEQ ID NO: 76656 - DNA, 25 bp, Homo sapien
gtaagggttatagtcggacctgtta

SEQ ID NO: 76657 - DNA, 25 bp, Homo sapien
gtggaggtgtagaccaaactccagt

SEQ ID NO: 76658 - DNA, 25 bp, Homo sapien
gtggaggtgtagtccaaactccagt

SEQ ID NO: 76659 - DNA, 25 bp, Homo sapien
tatattatgtagttaaaccgtcgac

SEQ ID NO: 76660 - DNA, 25 bp, Homo sapien
tatattatgtagataaaccgtcgac

SEQ ID NO: 76661 - DNA, 25 bp, Homo sapien
tttatcagtggagacgtcgtcgagt

SEQ ID NO: 76662 - DNA, 25 bp, Homo sapien
tttatcagtggacacgtcgtcgagt

SEQ ID NO: 76663 - DNA, 25 bp, Homo sapien
aaaagtacacgaagagaactcgtca

SEQ ID NO: 76664 - DNA, 25 bp, Homo sapien
aaaagtacacgatgagaactcgtca

SEQ ID NO: 76665 - DNA, 25 bp, Homo sapien
agagaagagtcgaccgagggttcat

SEQ ID NO: 76666 - DNA, 25 bp, Homo sapien
agagaagagtcgtccgagggttcat

SEQ ID NO: 76667 - DNA, 25 bp, Homo sapien
gaacgacatccagacgaactcccag

SEQ ID NO: 76668 - DNA, 25 bp, Homo sapien
gaacgacatccacacgaactcccag

SEQ ID NO: 76669 - DNA, 25 bp, Homo sapien
gtaccaaccaaagactagtccgtag

SEQ ID NO: 76670 - DNA, 25 bp, Homo sapien
gtaccaaccaaacactagtccgtag

SEQ ID NO: 76671 - DNA, 25 bp, Homo sapien
ggacaccccagactcgacatagcga

SEQ ID NO: 76672 - DNA, 25 bp, Homo sapien
ggacaccccagagtcgacatagcga

SEQ ID NO: 76673 - DNA, 25 bp, Homo sapien
agccggcaccgcaggaccatgacga

SEQ ID NO: 76674 - DNA, 25 bp, Homo sapien
agccggcaccgctggaccatgacga

SEQ ID NO: 76675 - DNA, 25 bp, Homo sapien
ccgtcgtcgtctgtgatacaatccc

SEQ ID NO: 76676 - DNA, 25 bp, Homo sapien
ccgtcgtcgtctctgatacaatccc

SEQ ID NO: 76677 - DNA, 25 bp, Homo sapien
ggtgcacggttcagactacaacccc

SEQ ID NO: 76678 - DNA, 25 bp, Homo sapien
ggtgcacggttctgactacaacccc

SEQ ID NO: 76679 - DNA, 25 bp, Homo sapien
ctatctgtctttttctagacatggt

SEQ ID NO: 76680 - DNA, 25 bp, Homo sapien
ctatctgtctttatctagacatggt

SEQ ID NO: 76681 - DNA, 25 bp, Homo sapien
ggacgccattttcatgtacatcggg

SEQ ID NO: 76682 - DNA, 25 bp, Homo sapien
ggacgccattttgatgtacatcggg

SEQ ID NO: 76683 - DNA, 25 bp, Homo sapien
agtccatgtagtagactccaagaga

SEQ ID NO: 76684 - DNA, 25 bp, Homo sapien
agtccatgtagttgactccaagaga

SEQ ID NO: 76685 - DNA, 25 bp, Homo sapien
ggacactattgttcctttactgaga

SEQ ID NO: 76686 - DNA, 25 bp, Homo sapien
ggacactattgtacctttactgaga

SEQ ID NO: 76687 - DNA, 25 bp, Homo sapien
ggagacacgccagaccaaaagtctg

SEQ ID NO: 76688 - DNA, 25 bp, Homo sapien
ggagacacgccacaccaaaagtctg

SEQ ID NO: 76689 - DNA, 25 bp, Homo sapien
acgagtccagttgaccaaacatctg

SEQ ID NO: 76690 - DNA, 25 bp, Homo sapien
acgagtccagttcaccaaacatctg

SEQ ID NO: 76691 - DNA, 25 bp, Homo sapien
gttgatgaggaattccaataattgt

SEQ ID NO: 76692 - DNA, 25 bp, Homo sapien
gttgatgaggaaatccaataattgt

SEQ ID NO: 76693 - DNA, 25 bp, Homo sapien
gtatgttaagaaaattcaatctaaa

SEQ ID NO: 76694 - DNA, 25 bp, Homo sapien
gtatgttaagaatattcaatctaaa

SEQ ID NO: 76695 - DNA, 25 bp, Homo sapien
atatgttcaggtaggttcaaaatcc

SEQ ID NO: 76696 - DNA, 25 bp, Homo sapien
atatgttcaggttggttcaaaatcc

SEQ ID NO: 76697 - DNA, 25 bp, Homo sapien
ttttcgattctttgacagagtttcc

SEQ ID NO: 76698 - DNA, 25 bp, Homo sapien
ttttcgattcttagacagagtttcc

SEQ ID NO: 76699 - DNA, 25 bp, Homo sapien
gtgatttagtacagagaacgtctac

SEQ ID NO: 76700 - DNA, 25 bp, Homo sapien
gtgatttagtactgagaacgtctac

SEQ ID NO: 76701 - DNA, 25 bp, Homo sapien
ggtgaagtttcctgtagactcgctg

SEQ ID NO: 76702 - DNA, 25 bp, Homo sapien
ggtgaagtttccagtagactcgctg

SEQ ID NO: 76703 - DNA, 25 bp, Homo sapien
gagaagggaccatgtgacgtgactt

SEQ ID NO: 76704 - DNA, 25 bp, Homo sapien
gagaagggaccaagtgacgtgactt

SEQ ID NO: 76705 - DNA, 25 bp, Homo sapien
cacaacaggtacctcatgaagacta

SEQ ID NO: 76706 - DNA, 25 bp, Homo sapien
cacaacaggtacgtcatgaagacta

SEQ ID NO: 76707 - DNA, 25 bp, Homo sapien
ttcgacgtgtacctacggtggtgcc

SEQ ID NO: 76708 - DNA, 25 bp, Homo sapien
ttcgacgtgtacgtacggtggtgcc

SEQ ID NO: 76709 - DNA, 25 bp, Homo sapien
gtctcgtctagttgaccggagagcc

SEQ ID NO: 76710 - DNA, 25 bp, Homo sapien
gtctcgtctagtagaccggagagcc

SEQ ID NO: 76711 - DNA, 25 bp, Homo sapien
tactctagcttgaataccaggtccg

SEQ ID NO: 76712 - DNA, 25 bp, Homo sapien
tactctagcttgtataccaggtccg

SEQ ID NO: 76713 - DNA, 25 bp, Homo sapien
gttcgtcctacttttctctggtgtc

SEQ ID NO: 76714 - DNA, 25 bp, Homo sapien
gttcgtcctactattctctggtgtc

SEQ ID NO: 76715 - DNA, 25 bp, Homo sapien
aacgttcaggagagttcagattatc

SEQ ID NO: 76716 - DNA, 25 bp, Homo sapien
aacgttcaggagtgttcagattatc

SEQ ID NO: 76717 - DNA, 25 bp, Homo sapien
tctcttctcgtgtctcccgggtggt

SEQ ID NO: 76718 - DNA, 25 bp, Homo sapien
tctcttctcgtgactcccgggtggt

SEQ ID NO: 76719 - DNA, 25 bp, Homo sapien
tttctcttagtgatcctacaattgg

SEQ ID NO: 76720 - DNA, 25 bp, Homo sapien
tttctcttagtgttcctacaattgg

SEQ ID NO: 76721 - DNA, 25 bp, Homo sapien
gtctttgtcatatactaacgctgtt

SEQ ID NO: 76722 - DNA, 25 bp, Homo sapien
gtctttgtcataaactaacgctgtt

SEQ ID NO: 76723 - DNA, 25 bp, Homo sapien
gttgcatttgcgattgtagcttgag

SEQ ID NO: 76724 - DNA, 25 bp, Homo sapien
gttgcatttgcgtttgtagcttgag

SEQ ID NO: 76725 - DNA, 25 bp, Homo sapien
attctcgtctgtctgttaaacctga

SEQ ID NO: 76726 - DNA, 25 bp, Homo sapien
attctcgtctgtgtgttaaacctga

SEQ ID NO: 76727 - DNA, 25 bp, Homo sapien
aaggttgatctgagttgtccttact

SEQ ID NO: 76728 - DNA, 25 bp, Homo sapien
aaggttgatctgtgttgtccttact

SEQ ID NO: 76729 - DNA, 25 bp, Homo sapien
tttgtggtactatgattgttgccac

SEQ ID NO: 76730 - DNA, 25 bp, Homo sapien
tttgtggtactaagattgttgccac

SEQ ID NO: 76731 - DNA, 25 bp, Homo sapien
tttcgtgttcagctttgtatctaac

SEQ ID NO: 76732 - DNA, 25 bp, Homo sapien
tttcgtgttcaggtttgtatctaac

SEQ ID NO: 76733 - DNA, 25 bp, Homo sapien
ttttccggtccgtcaccgtatacaa

SEQ ID NO: 76734 - DNA, 25 bp, Homo sapien
ttttccggtccgacaccgtatacaa

SEQ ID NO: 76735 - DNA, 25 bp, Homo sapien
gatcggttcgatcgtctcgacgaca

SEQ ID NO: 76736 - DNA, 25 bp, Homo sapien
gatcggttcgatggtctcgacgaca

SEQ ID NO: 76737 - DNA, 25 bp, Homo sapien
gttcacctgtcgtgtcttctcgacc

SEQ ID NO: 76738 - DNA, 25 bp, Homo sapien
gttcacctgtcgagtcttctcgacc

SEQ ID NO: 76739 - DNA, 25 bp, Homo sapien
gtatgttatcgaacctcttgtaaat

SEQ ID NO: 76740 - DNA, 25 bp, Homo sapien
gtatgttatcgatcctcttgtaaat

SEQ ID NO: 76741 - DNA, 25 bp, Homo sapien
tctacctctctggtcgggtttagaa

SEQ ID NO: 76742 - DNA, 25 bp, Homo sapien
tctacctctctgctcgggtttagaa

SEQ ID NO: 76743 - DNA, 25 bp, Homo sapien
ggaggatcctctacacaggggtgaa

SEQ ID NO: 76744 - DNA, 25 bp, Homo sapien
ggaggatcctcttcacaggggtgaa

SEQ ID NO: 76745 - DNA, 25 bp, Homo sapien
gagtgatcaccacctgaggaagtct

SEQ ID NO: 76746 - DNA, 25 bp, Homo sapien
gagtgatcaccagctgaggaagtct

SEQ ID NO: 76747 - DNA, 25 bp, Homo sapien
taagttacaacacgatacttaaagg

SEQ ID NO: 76748 - DNA, 25 bp, Homo sapien
taagttacaacaggatacttaaagg

SEQ ID NO: 76749 - DNA, 25 bp, Homo sapien
gaatccttcatcagtcgtttatgac

SEQ ID NO: 76750 - DNA, 25 bp, Homo sapien
gaatccttcatctgtcgtttatgac

SEQ ID NO: 76751 - DNA, 25 bp, Homo sapien
aatcgaactctctgtgttctcatgc

SEQ ID NO: 76752 - DNA, 25 bp, Homo sapien
aatcgaactctcagtgttctcatgc

SEQ ID NO: 76753 - DNA, 25 bp, Homo sapien
attaagttcccgttactgactgcgt

SEQ ID NO: 76754 - DNA, 25 bp, Homo sapien
attaagttcccgatactgactgcgt

SEQ ID NO: 76755 - DNA, 25 bp, Homo sapien
atacagtccaccatgtacgacatcg

SEQ ID NO: 76756 - DNA, 25 bp, Homo sapien
atacagtccaccttgtacgacatcg

SEQ ID NO: 76757 - DNA, 25 bp, Homo sapien
caacagcgtatgtctacacgagagg

SEQ ID NO: 76758 - DNA, 25 bp, Homo sapien
caacagcgtatgactacacgagagg

SEQ ID NO: 76759 - DNA, 25 bp, Homo sapien
gtcggatcctcctgtaataccttca

SEQ ID NO: 76760 - DNA, 25 bp, Homo sapien
gtcggatcctccagtaataccttca

SEQ ID NO: 76761 - DNA, 25 bp, Homo sapien
ttcttaaccgaatacttcgtgcttg

SEQ ID NO: 76762 - DNA, 25 bp, Homo sapien
ttcttaaccgaaaacttcgtgcttg

SEQ ID NO: 76763 - DNA, 25 bp, Homo sapien
tccgtcacagagtcctctgaccatg

SEQ ID NO: 76764 - DNA, 25 bp, Homo sapien
tccgtcacagagacctctgaccatg

SEQ ID NO: 76765 - DNA, 25 bp, Homo sapien
agttgtccggtttcctcacaaacag

SEQ ID NO: 76766 - DNA, 25 bp, Homo sapien
agttgtccggttacctcacaaacag

SEQ ID NO: 76767 - DNA, 25 bp, Homo sapien
ggggtctcctgtcattccgaataca

SEQ ID NO: 76768 - DNA, 25 bp, Homo sapien
ggggtctcctgtgattccgaataca

SEQ ID NO: 76769 - DNA, 25 bp, Homo sapien
ggattactatcgaggccgacataat

SEQ ID NO: 76770 - DNA, 25 bp, Homo sapien
ggattactatcgtggccgacataat

SEQ ID NO: 76771 - DNA, 25 bp, Homo sapien
gacttccttttggtatagacctatt

SEQ ID NO: 76772 - DNA, 25 bp, Homo sapien
gacttccttttgctatagacctatt

SEQ ID NO: 76773 - DNA, 25 bp, Homo sapien
cctgtccctcctaagaggtccagat

SEQ ID NO: 76774 - DNA, 25 bp, Homo sapien
cctgtccctccttagaggtccagat

SEQ ID NO: 76775 - DNA, 25 bp, Homo sapien
tgtcctcgacgtctagaggccagtt

SEQ ID NO: 76776 - DNA, 25 bp, Homo sapien
tgtcctcgacgtgtagaggccagtt

SEQ ID NO: 76777 - DNA, 25 bp, Homo sapien
gatttcgatactttgcattccactg

SEQ ID NO: 76778 - DNA, 25 bp, Homo sapien
gatttcgatactatgcattccactg

SEQ ID NO: 76779 - DNA, 25 bp, Homo sapien
atattcttgttagatcttctgactg

SEQ ID NO: 76780 - DNA, 25 bp, Homo sapien
atattcttgttacatcttctgactg

SEQ ID NO: 76781 - DNA, 25 bp, Homo sapien
tcccgtttgaaattttgtcgtcggt

SEQ ID NO: 76782 - DNA, 25 bp, Homo sapien
tcccgtttgaaaatttgtcgtcggt

SEQ ID NO: 76783 - DNA, 25 bp, Homo sapien
ctccccgtttggaggtttcgcgggt

SEQ ID NO: 76784 - DNA, 25 bp, Homo sapien
ctccccgtttggtggtttcgcgggt

SEQ ID NO: 76785 - DNA, 25 bp, Homo sapien
agttcgacctactcggctccaggtt

SEQ ID NO: 76786 - DNA, 25 bp, Homo sapien
agttcgacctacacggctccaggtt

SEQ ID NO: 76787 - DNA, 25 bp, Homo sapien
ggttagacgttttcactttcacagt

SEQ ID NO: 76788 - DNA, 25 bp, Homo sapien
ggttagacgtttacactttcacagt

SEQ ID NO: 76789 - DNA, 25 bp, Homo sapien
ccacgaccgccgaccaaatgcggcg

SEQ ID NO: 76790 - DNA, 25 bp, Homo sapien
ccacgaccgccgtccaaatgcggcg

SEQ ID NO: 76791 - DNA, 25 bp, Homo sapien
tacctttatcgagtacactttgaag

SEQ ID NO: 76792 - DNA, 25 bp, Homo sapien
tacctttatcgactacactttgaag

SEQ ID NO: 76793 - DNA, 25 bp, Homo sapien
tattttcagtttcttacgttacagg

SEQ ID NO: 76794 - DNA, 25 bp, Homo sapien
tattttcagtttgttacgttacagg

SEQ ID NO: 76795 - DNA, 25 bp, Homo sapien
tatattctgtagttgatccatctgg

SEQ ID NO: 76796 - DNA, 25 bp, Homo sapien
tatattctgtagatgatccatctgg

SEQ ID NO: 76797 - DNA, 25 bp, Homo sapien
ttttcgtaggttcgtgtcctgtgtc

SEQ ID NO: 76798 - DNA, 25 bp, Homo sapien
ttttcgtaggttggtgtcctgtgtc

SEQ ID NO: 76799 - DNA, 25 bp, Homo sapien
gggtctctcgtggtgtcgtgtcttc

SEQ ID NO: 76800 - DNA, 25 bp, Homo sapien
gggtctctcgtgctgtcgtgtcttc

SEQ ID NO: 76801 - DNA, 25 bp, Homo sapien
ggtggtcctatagctatgtctatga

SEQ ID NO: 76802 - DNA, 25 bp, Homo sapien
ggtggtcctatacctatgtctatga

SEQ ID NO: 76803 - DNA, 25 bp, Homo sapien
gggtccctgccgtaactccgaagga

SEQ ID NO: 76804 - DNA, 25 bp, Homo sapien
gggtccctgccgaaactccgaagga

SEQ ID NO: 76805 - DNA, 25 bp, Homo sapien
actgtcagttagttccagttagact

SEQ ID NO: 76806 - DNA, 25 bp, Homo sapien
actgtcagttagatccagttagact

SEQ ID NO: 76807 - DNA, 25 bp, Homo sapien
agagacgtcacctgacccacggtaa

SEQ ID NO: 76808 - DNA, 25 bp, Homo sapien
agagacgtcaccagacccacggtaa

SEQ ID NO: 76809 - DNA, 25 bp, Homo sapien
gatcaagaatccacaccttacggaa

SEQ ID NO: 76810 - DNA, 25 bp, Homo sapien
gatcaagaatcctcaccttacggaa

SEQ ID NO: 76811 - DNA, 25 bp, Homo sapien
gacaatgaacttttcttacgaagac

SEQ ID NO: 76812 - DNA, 25 bp, Homo sapien
gacaatgaacttatcttacgaagac

SEQ ID NO: 76813 - DNA, 25 bp, Homo sapien
cgtctaatccgacaggttaacaaga

SEQ ID NO: 76814 - DNA, 25 bp, Homo sapien
cgtctaatccgagaggttaacaaga

SEQ ID NO: 76815 - DNA, 25 bp, Homo sapien
tgtaaacaaggtgacataaactaca

SEQ ID NO: 76816 - DNA, 25 bp, Homo sapien
tgtaaacaaggtcacataaactaca

SEQ ID NO: 76817 - DNA, 25 bp, Homo sapien
gacgacgatagaagccggtaaccta

SEQ ID NO: 76818 - DNA, 25 bp, Homo sapien
gacgacgatagatgccggtaaccta

SEQ ID NO: 76819 - DNA, 25 bp, Homo sapien
cggtagaaagaagacgcgaaaccag

SEQ ID NO: 76820 - DNA, 25 bp, Homo sapien
cggtagaaagaacacgcgaaaccag

SEQ ID NO: 76821 - DNA, 25 bp, Homo sapien
ctgctgaagaagaaccccacgacca

SEQ ID NO: 76822 - DNA, 25 bp, Homo sapien
ctgctgaagaagtaccccacgacca

SEQ ID NO: 76823 - DNA, 25 bp, Homo sapien
tccgagctaaggtgtcccacgaacc

SEQ ID NO: 76824 - DNA, 25 bp, Homo sapien
tccgagctaaggagtcccacgaacc

SEQ ID NO: 76825 - DNA, 25 bp, Homo sapien
gtccttctcgggaggcctcggagct

SEQ ID NO: 76826 - DNA, 25 bp, Homo sapien
gtccttctcgggtggcctcggagct

SEQ ID NO: 76827 - DNA, 25 bp, Homo sapien
tgtcccttgtacgttggtttgcacc

SEQ ID NO: 76828 - DNA, 25 bp, Homo sapien
tgtcccttgtaccttggtttgcacc

SEQ ID NO: 76829 - DNA, 25 bp, Homo sapien
tgcatctacccgtggtcctggtacc

SEQ ID NO: 76830 - DNA, 25 bp, Homo sapien
tgcatctacccgaggtcctggtacc

SEQ ID NO: 76831 - DNA, 25 bp, Homo sapien
agtcccgtggacatgtctcgttctc

SEQ ID NO: 76832 - DNA, 25 bp, Homo sapien
agtcccgtggacttgtctcgttctc

SEQ ID NO: 76833 - DNA, 25 bp, Homo sapien
aggacgacccacttcgacttaccga

SEQ ID NO: 76834 - DNA, 25 bp, Homo sapien
aggacgacccacatcgacttaccga

SEQ ID NO: 76835 - DNA, 25 bp, Homo sapien
gggtagacggagatacacgagaccc

SEQ ID NO: 76836 - DNA, 25 bp, Homo sapien
gggtagacggagttacacgagaccc

SEQ ID NO: 76837 - DNA, 25 bp, Homo sapien
agaggtgacaacagcagtcagaccc

SEQ ID NO: 76838 - DNA, 25 bp, Homo sapien
agaggtgacaactgcagtcagaccc

SEQ ID NO: 76839 - DNA, 25 bp, Homo sapien
agactgaggacaaatgtaaccacgt

SEQ ID NO: 76840 - DNA, 25 bp, Homo sapien
agactgaggacatatgtaaccacgt

SEQ ID NO: 76841 - DNA, 25 bp, Homo sapien
actcagagaagtacggagacgcgac

SEQ ID NO: 76842 - DNA, 25 bp, Homo sapien
actcagagaagttcggagacgcgac

SEQ ID NO: 76843 - DNA, 25 bp, Homo sapien
cacgacaggagactaggagcgactc

SEQ ID NO: 76844 - DNA, 25 bp, Homo sapien
cacgacaggagagtaggagcgactc

SEQ ID NO: 76845 - DNA, 25 bp, Homo sapien
cccgcacctgctgagtatcggcctc

SEQ ID NO: 76846 - DNA, 25 bp, Homo sapien
cccgcacctgctcagtatcggcctc

SEQ ID NO: 76847 - DNA, 25 bp, Homo sapien
cgaccctgtcgacctatggtctgtc

SEQ ID NO: 76848 - DNA, 25 bp, Homo sapien
cgaccctgtcgagctatggtctgtc

SEQ ID NO: 76849 - DNA, 25 bp, Homo sapien
cctctgtatcaatattcgtggttgc

SEQ ID NO: 76850 - DNA, 25 bp, Homo sapien
cctctgtatcaaaattcgtggttgc

SEQ ID NO: 76851 - DNA, 25 bp, Homo sapien
atcttgtgtaaaattcggttactgc

SEQ ID NO: 76852 - DNA, 25 bp, Homo sapien
atcttgtgtaaatttcggttactgc

SEQ ID NO: 76853 - DNA, 25 bp, Homo sapien
atctggtgtaggtaccgccactggc

SEQ ID NO: 76854 - DNA, 25 bp, Homo sapien
atctggtgtaggaaccgccactggc

SEQ ID NO: 76855 - DNA, 25 bp, Homo sapien
ggttctcgctcgtccgtcccagtga

SEQ ID NO: 76856 - DNA, 25 bp, Homo sapien
ggttctcgctcgaccgtcccagtga

SEQ ID NO: 76857 - DNA, 25 bp, Homo sapien
ggtcgtacagggaccacaacgtgga

SEQ ID NO: 76858 - DNA, 25 bp, Homo sapien
ggtcgtacagggtccacaacgtgga

SEQ ID NO: 76859 - DNA, 25 bp, Homo sapien
agctggtggtcgaacgtgaccgtca

SEQ ID NO: 76860 - DNA, 25 bp, Homo sapien
agctggtggtcgtacgtgaccgtca

SEQ ID NO: 76861 - DNA, 25 bp, Homo sapien
atctaggacggtacagtgtaagaac

SEQ ID NO: 76862 - DNA, 25 bp, Homo sapien
atctaggacggttcagtgtaagaac

SEQ ID NO: 76863 - DNA, 25 bp, Homo sapien
ctgtgctacgccatctagagacact

SEQ ID NO: 76864 - DNA, 25 bp, Homo sapien
ctgtgctacgccttctagagacact

SEQ ID NO: 76865 - DNA, 25 bp, Homo sapien
cctaagtcaccgaactaaggactgt

SEQ ID NO: 76866 - DNA, 25 bp, Homo sapien
cctaagtcaccgtactaaggactgt

SEQ ID NO: 76867 - DNA, 25 bp, Homo sapien
cccgaagacacctttacatcgacgg

SEQ ID NO: 76868 - DNA, 25 bp, Homo sapien
cccgaagacaccattacatcgacgg

SEQ ID NO: 76869 - DNA, 25 bp, Homo sapien
aaaagaactatctatacataactcg

SEQ ID NO: 76870 - DNA, 25 bp, Homo sapien
aaaagaactatcaatacataactcg

SEQ ID NO: 76871 - DNA, 25 bp, Homo sapien
aagaagaaattaaccgtatacctcg

SEQ ID NO: 76872 - DNA, 25 bp, Homo sapien
aagaagaaattatccgtatacctcg

SEQ ID NO: 76873 - DNA, 25 bp, Homo sapien
ttataagtcaatagttctgacttcg

SEQ ID NO: 76874 - DNA, 25 bp, Homo sapien
ttataagtcaattgttctgacttcg

SEQ ID NO: 76875 - DNA, 25 bp, Homo sapien
tttctgagtccagtctcttgatctt

SEQ ID NO: 76876 - DNA, 25 bp, Homo sapien
tttctgagtccactctcttgatctt

SEQ ID NO: 76877 - DNA, 25 bp, Homo sapien
gacaaagtgacttttctcctgtttt

SEQ ID NO: 76878 - DNA, 25 bp, Homo sapien
gacaaagtgactattctcctgtttt

SEQ ID NO: 76879 - DNA, 25 bp, Homo sapien
tatatgactcgttttttagtccgac

SEQ ID NO: 76880 - DNA, 25 bp, Homo sapien
tatatgactcgtattttagtccgac

SEQ ID NO: 76881 - DNA, 25 bp, Homo sapien
gaagtctacttaagactcgtcgact

SEQ ID NO: 76882 - DNA, 25 bp, Homo sapien
gaagtctacttatgactcgtcgact

SEQ ID NO: 76883 - DNA, 25 bp, Homo sapien
ctcaggtaaaggacgtttcctctat

SEQ ID NO: 76884 - DNA, 25 bp, Homo sapien
ctcaggtaaaggtcgtttcctctat

SEQ ID NO: 76885 - DNA, 25 bp, Homo sapien
aagtcgaagagtcgttaaagccagt

SEQ ID NO: 76886 - DNA, 25 bp, Homo sapien
aagtcgaagagtggttaaagccagt

SEQ ID NO: 76887 - DNA, 25 bp, Homo sapien
gtgccggttcaagacaccccagtac

SEQ ID NO: 76888 - DNA, 25 bp, Homo sapien
gtgccggttcaacacaccccagtac

SEQ ID NO: 76889 - DNA, 25 bp, Homo sapien
ccgttctctatctgatcgacaaagg

SEQ ID NO: 76890 - DNA, 25 bp, Homo sapien
ccgttctctatcagatcgacaaagg

SEQ ID NO: 76891 - DNA, 25 bp, Homo sapien
tctcgatcgcctctgactttccaag

SEQ ID NO: 76892 - DNA, 25 bp, Homo sapien
tctcgatcgcctgtgactttccaag

SEQ ID NO: 76893 - DNA, 25 bp, Homo sapien
tcgaccgaagcgaagtgtctgacta

SEQ ID NO: 76894 - DNA, 25 bp, Homo sapien
tcgaccgaagcgtagtgtctgacta

SEQ ID NO: 76895 - DNA, 25 bp, Homo sapien
tacttacactggttgtggtgtaaac

SEQ ID NO: 76896 - DNA, 25 bp, Homo sapien
tacttacactggatgtggtgtaaac

SEQ ID NO: 76897 - DNA, 25 bp, Homo sapien
ggtgacttgtcctagtgacgttaac

SEQ ID NO: 76898 - DNA, 25 bp, Homo sapien
ggtgacttgtccaagtgacgttaac

SEQ ID NO: 76899 - DNA, 25 bp, Homo sapien
ccagtacttctcctaagtgaataga

SEQ ID NO: 76900 - DNA, 25 bp, Homo sapien
ccagtacttctcgtaagtgaataga

SEQ ID NO: 76901 - DNA, 25 bp, Homo sapien
tgaagtacatctgtctaaacatatg

SEQ ID NO: 76902 - DNA, 25 bp, Homo sapien
tgaagtacatctctctaaacatatg

SEQ ID NO: 76903 - DNA, 25 bp, Homo sapien
gtacaaagttcatgtgatcacttat

SEQ ID NO: 76904 - DNA, 25 bp, Homo sapien
gtacaaagttcaagtgatcacttat

SEQ ID NO: 76905 - DNA, 25 bp, Homo sapien
ttatgggacccgttactgcagaagt

SEQ ID NO: 76906 - DNA, 25 bp, Homo sapien
ttatgggacccgatactgcagaagt

SEQ ID NO: 76907 - DNA, 25 bp, Homo sapien
gaccaggacccgaacccgagactgt

SEQ ID NO: 76908 - DNA, 25 bp, Homo sapien
gaccaggacccgtacccgagactgt

SEQ ID NO: 76909 - DNA, 25 bp, Homo sapien
cagacaaagacacagaccttgtctt

SEQ ID NO: 76910 - DNA, 25 bp, Homo sapien
cagacaaagacagagaccttgtctt

SEQ ID NO: 76911 - DNA, 25 bp, Homo sapien
gaaaaagtcacagatctctactttg

SEQ ID NO: 76912 - DNA, 25 bp, Homo sapien
gaaaaagtcacacatctctactttg

SEQ ID NO: 76913 - DNA, 25 bp, Homo sapien
ggaataagtcaatccgacttatttt

SEQ ID NO: 76914 - DNA, 25 bp, Homo sapien
ggaataagtcaaaccgacttatttt

SEQ ID NO: 76915 - DNA, 25 bp, Homo sapien
caggaagtacctagtgaggtctttt

SEQ ID NO: 76916 - DNA, 25 bp, Homo sapien
caggaagtaccttgtgaggtctttt

SEQ ID NO: 76917 - DNA, 25 bp, Homo sapien
aagaccgtatgttacactttactgt

SEQ ID NO: 76918 - DNA, 25 bp, Homo sapien
aagaccgtatgtaacactttactgt

SEQ ID NO: 76919 - DNA, 25 bp, Homo sapien
aagagatctccatgtaccccttgtt

SEQ ID NO: 76920 - DNA, 25 bp, Homo sapien
aagagatctccaagtaccccttgtt

SEQ ID NO: 76921 - DNA, 25 bp, Homo sapien
tgatttcttgtgtgtaccgtctcta

SEQ ID NO: 76922 - DNA, 25 bp, Homo sapien
tgatttcttgtgagtaccgtctcta

SEQ ID NO: 76923 - DNA, 25 bp, Homo sapien
ttaatttaggtgacgtcgaacctcg

SEQ ID NO: 76924 - DNA, 25 bp, Homo sapien
ttaatttaggtgtcgtcgaacctcg

SEQ ID NO: 76925 - DNA, 25 bp, Homo sapien
cacagtttcgtgagccgtcgcctcg

SEQ ID NO: 76926 - DNA, 25 bp, Homo sapien
cacagtttcgtgtgccgtcgcctcg

SEQ ID NO: 76927 - DNA, 25 bp, Homo sapien
tacaatgtacggtgtacggtttgac

SEQ ID NO: 76928 - DNA, 25 bp, Homo sapien
tacaatgtacggagtacggtttgac

SEQ ID NO: 76929 - DNA, 25 bp, Homo sapien
gtatacgtcataatcgggttttcga

SEQ ID NO: 76930 - DNA, 25 bp, Homo sapien
gtatacgtcatattcgggttttcga

SEQ ID NO: 76931 - DNA, 25 bp, Homo sapien
taagtcgtattatgttttacctgac

SEQ ID NO: 76932 - DNA, 25 bp, Homo sapien
taagtcgtattaagttttacctgac

SEQ ID NO: 76933 - DNA, 25 bp, Homo sapien
gaatcggacttatctgcctcgggac

SEQ ID NO: 76934 - DNA, 25 bp, Homo sapien
gaatcggacttaactgcctcgggac

SEQ ID NO: 76935 - DNA, 25 bp, Homo sapien
tacatttgttcgtcggtcgtggaga

SEQ ID NO: 76936 - DNA, 25 bp, Homo sapien
tacatttgttcgacggtcgtggaga

SEQ ID NO: 76937 - DNA, 25 bp, Homo sapien
tccttttcgtctaagtgtgtgtcaa

SEQ ID NO: 76938 - DNA, 25 bp, Homo sapien
tccttttcgtcttagtgtgtgtcaa

SEQ ID NO: 76939 - DNA, 25 bp, Homo sapien
gtaaagacatcgttcatttgcacac

SEQ ID NO: 76940 - DNA, 25 bp, Homo sapien
gtaaagacatcgatcatttgcacac

SEQ ID NO: 76941 - DNA, 25 bp, Homo sapien
tgatcacgagaaatcatcatgtaaa

SEQ ID NO: 76942 - DNA, 25 bp, Homo sapien
tgatcacgagaattcatcatgtaaa

SEQ ID NO: 76943 - DNA, 25 bp, Homo sapien
ttaaacggaccaaccacttgttcag

SEQ ID NO: 76944 - DNA, 25 bp, Homo sapien
ttaaacggaccatccacttgttcag

SEQ ID NO: 76945 - DNA, 25 bp, Homo sapien
aaaaggatcttaatacaggtcgaca

SEQ ID NO: 76946 - DNA, 25 bp, Homo sapien
aaaaggatcttattacaggtcgaca

SEQ ID NO: 76947 - DNA, 25 bp, Homo sapien
acaaaggatacttttacggagcaac

SEQ ID NO: 76948 - DNA, 25 bp, Homo sapien
acaaaggatactattacggagcaac

SEQ ID NO: 76949 - DNA, 25 bp, Homo sapien
aaccagggagttcatgaccataaat

SEQ ID NO: 76950 - DNA, 25 bp, Homo sapien
aaccagggagttgatgaccataaat

SEQ ID NO: 76951 - DNA, 25 bp, Homo sapien
atccaaatttaagaccggtgtctgt

SEQ ID NO: 76952 - DNA, 25 bp, Homo sapien
atccaaatttaacaccggtgtctgt

SEQ ID NO: 76953 - DNA, 25 bp, Homo sapien
tcacagatctttattatcggtttag

SEQ ID NO: 76954 - DNA, 25 bp, Homo sapien
tcacagatcttttttatcggtttag

SEQ ID NO: 76955 - DNA, 25 bp, Homo sapien
cgaaacgtgtagttaccaagtttta

SEQ ID NO: 76956 - DNA, 25 bp, Homo sapien
cgaaacgtgtagataccaagtttta

SEQ ID NO: 76957 - DNA, 25 bp, Homo sapien
ggaggacgtgagaagtccccgttta

SEQ ID NO: 76958 - DNA, 25 bp, Homo sapien
ggaggacgtgagtagtccccgttta

SEQ ID NO: 76959 - DNA, 25 bp, Homo sapien
tgtgaggtctcagacaagaacttaa

SEQ ID NO: 76960 - DNA, 25 bp, Homo sapien
tgtgaggtctcacacaagaacttaa

SEQ ID NO: 76961 - DNA, 25 bp, Homo sapien
cggtgaattcagtcaatttcacgtc

SEQ ID NO: 76962 - DNA, 25 bp, Homo sapien
cggtgaattcagacaatttcacgtc

SEQ ID NO: 76963 - DNA, 25 bp, Homo sapien
gttttatcagaccaatgaacaacgt

SEQ ID NO: 76964 - DNA, 25 bp, Homo sapien
gttttatcagacgaatgaacaacgt

SEQ ID NO: 76965 - DNA, 25 bp, Homo sapien
gtcagttaagacactaatttcggct

SEQ ID NO: 76966 - DNA, 25 bp, Homo sapien
gtcagttaagactctaatttcggct

SEQ ID NO: 76967 - DNA, 25 bp, Homo sapien
ctcgttctgtcctctggttcgtcct

SEQ ID NO: 76968 - DNA, 25 bp, Homo sapien
ctcgttctgtccactggttcgtcct

SEQ ID NO: 76969 - DNA, 25 bp, Homo sapien
tgtgatgtttcacgttggttgtacc

SEQ ID NO: 76970 - DNA, 25 bp, Homo sapien
tgtgatgtttcaggttggttgtacc

SEQ ID NO: 76971 - DNA, 25 bp, Homo sapien
agtgtgacataacattttcgtttcc

SEQ ID NO: 76972 - DNA, 25 bp, Homo sapien
agtgtgacataagattttcgtttcc

SEQ ID NO: 76973 - DNA, 25 bp, Homo sapien
ttgatcctggtactcttcgtattca

SEQ ID NO: 76974 - DNA, 25 bp, Homo sapien
ttgatcctggtagtcttcgtattca

SEQ ID NO: 76975 - DNA, 25 bp, Homo sapien
tccactgtcttaaggttttagttta

SEQ ID NO: 76976 - DNA, 25 bp, Homo sapien
tccactgtcttatggttttagttta

SEQ ID NO: 76977 - DNA, 25 bp, Homo sapien
attccatggtgtcacttcgtacagt

SEQ ID NO: 76978 - DNA, 25 bp, Homo sapien
attccatggtgtgacttcgtacagt

SEQ ID NO: 76979 - DNA, 25 bp, Homo sapien
gaccctttaaggagtctcgacgagt

SEQ ID NO: 76980 - DNA, 25 bp, Homo sapien
gaccctttaaggtgtctcgacgagt

SEQ ID NO: 76981 - DNA, 25 bp, Homo sapien
ctggtcacaaggacggttcgctaaa

SEQ ID NO: 76982 - DNA, 25 bp, Homo sapien
ctggtcacaaggtcggttcgctaaa

SEQ ID NO: 76983 - DNA, 25 bp, Homo sapien
tcaagtagactaggttccagactag

SEQ ID NO: 76984 - DNA, 25 bp, Homo sapien
tcaagtagactacgttccagactag

SEQ ID NO: 76985 - DNA, 25 bp, Homo sapien
taccggtgctagacgacgacaccac

SEQ ID NO: 76986 - DNA, 25 bp, Homo sapien
taccggtgctagtcgacgacaccac

SEQ ID NO: 76987 - DNA, 25 bp, Homo sapien
tcaggcgtagcttcgcgagtaagac

SEQ ID NO: 76988 - DNA, 25 bp, Homo sapien
tcaggcgtagctacgcgagtaagac

SEQ ID NO: 76989 - DNA, 25 bp, Homo sapien
aaggagtagactcctcagtctatac

SEQ ID NO: 76990 - DNA, 25 bp, Homo sapien
aaggagtagactgctcagtctatac

SEQ ID NO: 76991 - DNA, 25 bp, Homo sapien
gtgtaaggtctagacagactagcaa

SEQ ID NO: 76992 - DNA, 25 bp, Homo sapien
gtgtaaggtctacacagactagcaa

SEQ ID NO: 76993 - DNA, 25 bp, Homo sapien
gtatgtagtcacataaactcctgac

SEQ ID NO: 76994 - DNA, 25 bp, Homo sapien
gtatgtagtcacttaaactcctgac

SEQ ID NO: 76995 - DNA, 25 bp, Homo sapien
agcacgcactagaacaactgtatct

SEQ ID NO: 76996 - DNA, 25 bp, Homo sapien
agcacgcactagtacaactgtatct

SEQ ID NO: 76997 - DNA, 25 bp, Homo sapien
gaccacgtatccaacaacagttcgt

SEQ ID NO: 76998 - DNA, 25 bp, Homo sapien
gaccacgtatcctacaacagttcgt

SEQ ID NO: 76999 - DNA, 25 bp, Homo sapien
ccgctctgtcgccgactcagagtgc

SEQ ID NO: 77000 - DNA, 25 bp, Homo sapien
ccgctctgtcgcggactcagagtgc

SEQ ID NO: 77001 - DNA, 25 bp, Homo sapien
ccgtcgtctcgttaagcgacttcaa

SEQ ID NO: 77002 - DNA, 25 bp, Homo sapien
ccgtcgtctcgtaaagcgacttcaa

SEQ ID NO: 77003 - DNA, 25 bp, Homo sapien
ccgaccgtcaggttagtgtgacgtc

SEQ ID NO: 77004 - DNA, 25 bp, Homo sapien
ccgaccgtcaggatagtgtgacgtc

SEQ ID NO: 77005 - DNA, 25 bp, Homo sapien
cgacgtctccgaggtgtcgtagcgc

SEQ ID NO: 77006 - DNA, 25 bp, Homo sapien
cgacgtctccgacgtgtcgtagcgc

SEQ ID NO: 77007 - DNA, 25 bp, Homo sapien
cagcgactacctacggtagaaacgt

SEQ ID NO: 77008 - DNA, 25 bp, Homo sapien
cagcgactaccttcggtagaaacgt

SEQ ID NO: 77009 - DNA, 25 bp, Homo sapien
caggcatctcccttcggtataacgc

SEQ ID NO: 77010 - DNA, 25 bp, Homo sapien
caggcatctcccatcggtataacgc

SEQ ID NO: 77011 - DNA, 25 bp, Homo sapien
tgtttcccataatctgcgttgtagt

SEQ ID NO: 77012 - DNA, 25 bp, Homo sapien
tgtttcccataaactgcgttgtagt

SEQ ID NO: 77013 - DNA, 25 bp, Homo sapien
agttttactaaaacaacagtcctgg

SEQ ID NO: 77014 - DNA, 25 bp, Homo sapien
agttttactaaatcaacagtcctgg

SEQ ID NO: 77015 - DNA, 25 bp, Homo sapien
atgtgacaaagtcaaacgtctgatc

SEQ ID NO: 77016 - DNA, 25 bp, Homo sapien
atgtgacaaagtgaaacgtctgatc

SEQ ID NO: 77017 - DNA, 25 bp, Homo sapien
cataaggtagaaggaaccttctaga

SEQ ID NO: 77018 - DNA, 25 bp, Homo sapien
cataaggtagaacgaaccttctaga

SEQ ID NO: 77019 - DNA, 25 bp, Homo sapien
agttagacttaacgtgtccaattct

SEQ ID NO: 77020 - DNA, 25 bp, Homo sapien
agttagacttaaggtgtccaattct

SEQ ID NO: 77021 - DNA, 25 bp, Homo sapien
gaccatagtgatgtgtcctacatta

SEQ ID NO: 77022 - DNA, 25 bp, Homo sapien
gaccatagtgatctgtcctacatta

SEQ ID NO: 77023 - DNA, 25 bp, Homo sapien
gattacgcagagtttcctaatgtcg

SEQ ID NO: 77024 - DNA, 25 bp, Homo sapien
gattacgcagagattcctaatgtcg

SEQ ID NO: 77025 - DNA, 25 bp, Homo sapien
tgggtgtcaacatatacatatgttc

SEQ ID NO: 77026 - DNA, 25 bp, Homo sapien
tgggtgtcaacaaatacatatgttc

SEQ ID NO: 77027 - DNA, 25 bp, Homo sapien
gtggtgtcaaacactgtgtacttca

SEQ ID NO: 77028 - DNA, 25 bp, Homo sapien
gtggtgtcaaactctgtgtacttca

SEQ ID NO: 77029 - DNA, 25 bp, Homo sapien
agagtgacatcacctttaccgaaga

SEQ ID NO: 77030 - DNA, 25 bp, Homo sapien
agagtgacatcagctttaccgaaga

SEQ ID NO: 77031 - DNA, 25 bp, Homo sapien
gtttctaattcgagtttccacactg

SEQ ID NO: 77032 - DNA, 25 bp, Homo sapien
gtttctaattcgtgtttccacactg

SEQ ID NO: 77033 - DNA, 25 bp, Homo sapien
acaggaggtccagtgtccctccgtt

SEQ ID NO: 77034 - DNA, 25 bp, Homo sapien
acaggaggtccactgtccctccgtt

SEQ ID NO: 77035 - DNA, 25 bp, Homo sapien
aagatggactcaaccttcttccgat

SEQ ID NO: 77036 - DNA, 25 bp, Homo sapien
aagatggactcatccttcttccgat

SEQ ID NO: 77037 - DNA, 25 bp, Homo sapien
ttagtggtggtaactgggaaaccct

SEQ ID NO: 77038 - DNA, 25 bp, Homo sapien
ttagtggtggtatctgggaaaccct

SEQ ID NO: 77039 - DNA, 25 bp, Homo sapien
tttgaggtctgtaggctgaacgacc

SEQ ID NO: 77040 - DNA, 25 bp, Homo sapien
tttgaggtctgttggctgaacgacc

SEQ ID NO: 77041 - DNA, 25 bp, Homo sapien
ggacgggtttgtcgtgaacgtacct

SEQ ID NO: 77042 - DNA, 25 bp, Homo sapien
ggacgggtttgtggtgaacgtacct

SEQ ID NO: 77043 - DNA, 25 bp, Homo sapien
ttttgggtgtaatgtcgaaactctc

SEQ ID NO: 77044 - DNA, 25 bp, Homo sapien
ttttgggtgtaaagtcgaaactctc

SEQ ID NO: 77045 - DNA, 25 bp, Homo sapien
gattttcgtttgtaactcaacattg

SEQ ID NO: 77046 - DNA, 25 bp, Homo sapien
gattttcgtttgaaactcaacattg

SEQ ID NO: 77047 - DNA, 25 bp, Homo sapien
tatttaggttacaagacccaataag

SEQ ID NO: 77048 - DNA, 25 bp, Homo sapien
tatttaggttactagacccaataag

SEQ ID NO: 77049 - DNA, 25 bp, Homo sapien
tctagtatgaatcactctccgaaag

SEQ ID NO: 77050 - DNA, 25 bp, Homo sapien
tctagtatgaatgactctccgaaag

SEQ ID NO: 77051 - DNA, 25 bp, Homo sapien
gacttatcctaagtcctgtcgcata

SEQ ID NO: 77052 - DNA, 25 bp, Homo sapien
gacttatcctaactcctgtcgcata

SEQ ID NO: 77053 - DNA, 25 bp, Homo sapien
cttgtcttccattacgtaaccagtg

SEQ ID NO: 77054 - DNA, 25 bp, Homo sapien
cttgtcttccataacgtaaccagtg

SEQ ID NO: 77055 - DNA, 25 bp, Homo sapien
acatttcactcaggaaacacatggt

SEQ ID NO: 77056 - DNA, 25 bp, Homo sapien
acatttcactcacgaaacacatggt

SEQ ID NO: 77057 - DNA, 25 bp, Homo sapien
atcggtatatctagaaccaatctgt

SEQ ID NO: 77058 - DNA, 25 bp, Homo sapien
atcggtatatcttgaaccaatctgt

SEQ ID NO: 77059 - DNA, 25 bp, Homo sapien
tggcgtcgttcctgtacccatgggt

SEQ ID NO: 77060 - DNA, 25 bp, Homo sapien
tggcgtcgttccagtacccatgggt

SEQ ID NO: 77061 - DNA, 25 bp, Homo sapien
ttacgtatgtcgtcacttatgtggt

SEQ ID NO: 77062 - DNA, 25 bp, Homo sapien
ttacgtatgtcgacacttatgtggt

SEQ ID NO: 77063 - DNA, 25 bp, Homo sapien
ttacacgagcgtacacgctcaccga

SEQ ID NO: 77064 - DNA, 25 bp, Homo sapien
ttacacgagcgttcacgctcaccga

SEQ ID NO: 77065 - DNA, 25 bp, Homo sapien
ttagactcagactacaccgttcaag

SEQ ID NO: 77066 - DNA, 25 bp, Homo sapien
ttagactcagacaacaccgttcaag

SEQ ID NO: 77067 - DNA, 25 bp, Homo sapien
ttcacttcgacaagtgacaactaag

SEQ ID NO: 77068 - DNA, 25 bp, Homo sapien
ttcacttcgacatgtgacaactaag

SEQ ID NO: 77069 - DNA, 25 bp, Homo sapien
ggatttcccctctgtgatgtaacat

SEQ ID NO: 77070 - DNA, 25 bp, Homo sapien
ggatttcccctcagtgatgtaacat

SEQ ID NO: 77071 - DNA, 25 bp, Homo sapien
ggaccaaacacgactatggttaaat

SEQ ID NO: 77072 - DNA, 25 bp, Homo sapien
ggaccaaacacgtctatggttaaat

SEQ ID NO: 77073 - DNA, 25 bp, Homo sapien
gtcttatacagttacttggttcaag

SEQ ID NO: 77074 - DNA, 25 bp, Homo sapien
gtcttatacagtaacttggttcaag

SEQ ID NO: 77075 - DNA, 25 bp, Homo sapien
tctgatactgagattgtgttacatc

SEQ ID NO: 77076 - DNA, 25 bp, Homo sapien
tctgatactgagtttgtgttacatc

SEQ ID NO: 77077 - DNA, 25 bp, Homo sapien
agtgtaaactcttgggtcttaagtc

SEQ ID NO: 77078 - DNA, 25 bp, Homo sapien
agtgtaaactctagggtcttaagtc

SEQ ID NO: 77079 - DNA, 25 bp, Homo sapien
gataaactacgaagggtcttacaca

SEQ ID NO: 77080 - DNA, 25 bp, Homo sapien
gataaactacgatgggtcttacaca

SEQ ID NO: 77081 - DNA, 25 bp, Homo sapien
acctcacgagtaagtgtacttcacc

SEQ ID NO: 77082 - DNA, 25 bp, Homo sapien
acctcacgagtatgtgtacttcacc

SEQ ID NO: 77083 - DNA, 25 bp, Homo sapien
ggccggtagtactgcgcttggtctc

SEQ ID NO: 77084 - DNA, 25 bp, Homo sapien
ggccggtagtacagcgcttggtctc

SEQ ID NO: 77085 - DNA, 25 bp, Homo sapien
agtcggtaagtctcctctcttctct

SEQ ID NO: 77086 - DNA, 25 bp, Homo sapien
agtcggtaagtcacctctcttctct

SEQ ID NO: 77087 - DNA, 25 bp, Homo sapien
gggcaccctgtgtcgtcccgtgaac

SEQ ID NO: 77088 - DNA, 25 bp, Homo sapien
gggcaccctgtgacgtcccgtgaac

SEQ ID NO: 77089 - DNA, 25 bp, Homo sapien
tccggcctgggtttcgacccaagac

SEQ ID NO: 77090 - DNA, 25 bp, Homo sapien
tccggcctgggtatcgacccaagac

SEQ ID NO: 77091 - DNA, 25 bp, Homo sapien
actccgcgaggtgttaccctgtgac

SEQ ID NO: 77092 - DNA, 25 bp, Homo sapien
actccgcgaggtcttaccctgtgac

SEQ ID NO: 77093 - DNA, 25 bp, Homo sapien
cacatcggacggagtctccctggac

SEQ ID NO: 77094 - DNA, 25 bp, Homo sapien
cacatcggacggtgtctccctggac

SEQ ID NO: 77095 - DNA, 25 bp, Homo sapien
tttaagggtcaattccattcgtcct

SEQ ID NO: 77096 - DNA, 25 bp, Homo sapien
tttaagggtcaaatccattcgtcct

SEQ ID NO: 77097 - DNA, 25 bp, Homo sapien
agacgagtctcctccgtcactgagc

SEQ ID NO: 77098 - DNA, 25 bp, Homo sapien
agacgagtctccaccgtcactgagc

SEQ ID NO: 77099 - DNA, 25 bp, Homo sapien
agagtagtctctgacgtattggttc

SEQ ID NO: 77100 - DNA, 25 bp, Homo sapien
agagtagtctctcacgtattggttc

SEQ ID NO: 77101 - DNA, 25 bp, Homo sapien
tatcgtctcttccgtataaggtaac

SEQ ID NO: 77102 - DNA, 25 bp, Homo sapien
tatcgtctcttcggtataaggtaac

SEQ ID NO: 77103 - DNA, 25 bp, Homo sapien
tgaggtctctaccaatggtaggtcc

SEQ ID NO: 77104 - DNA, 25 bp, Homo sapien
tgaggtctctacgaatggtaggtcc

SEQ ID NO: 77105 - DNA, 25 bp, Homo sapien
aggaactctatgtgcgtgccgacga

SEQ ID NO: 77106 - DNA, 25 bp, Homo sapien
aggaactctatgagcgtgccgacga

SEQ ID NO: 77107 - DNA, 25 bp, Homo sapien
gatctaccatgtgtcgagagacaga

SEQ ID NO: 77108 - DNA, 25 bp, Homo sapien
gatctaccatgtctcgagagacaga

SEQ ID NO: 77109 - DNA, 25 bp, Homo sapien
gaaacacgatagtctcttacacgaa

SEQ ID NO: 77110 - DNA, 25 bp, Homo sapien
gaaacacgatagactcttacacgaa

SEQ ID NO: 77111 - DNA, 25 bp, Homo sapien
ttattttcacacgagttttcgtgag

SEQ ID NO: 77112 - DNA, 25 bp, Homo sapien
ttattttcacaccagttttcgtgag

SEQ ID NO: 77113 - DNA, 25 bp, Homo sapien
tattggtgaacgaacgggtctctgg

SEQ ID NO: 77114 - DNA, 25 bp, Homo sapien
tattggtgaacgtacgggtctctgg

SEQ ID NO: 77115 - DNA, 25 bp, Homo sapien
tcgggtttcaagacggagctcttcg

SEQ ID NO: 77116 - DNA, 25 bp, Homo sapien
tcgggtttcaagtcggagctcttcg

SEQ ID NO: 77117 - DNA, 25 bp, Homo sapien
ggtgtaccacaatcgggtctcttct

SEQ ID NO: 77118 - DNA, 25 bp, Homo sapien
ggtgtaccacaaacgggtctcttct

SEQ ID NO: 77119 - DNA, 25 bp, Homo sapien
cgcggacagcaacgcttacgacagg

SEQ ID NO: 77120 - DNA, 25 bp, Homo sapien
cgcggacagcaaggcttacgacagg

SEQ ID NO: 77121 - DNA, 25 bp, Homo sapien
gcgacaacaggctcgtcaggcacgc

SEQ ID NO: 77122 - DNA, 25 bp, Homo sapien
gcgacaacaggcacgtcaggcacgc

SEQ ID NO: 77123 - DNA, 25 bp, Homo sapien
ggacagtctcggacttcttctataa

SEQ ID NO: 77124 - DNA, 25 bp, Homo sapien
ggacagtctcggtcttcttctataa

SEQ ID NO: 77125 - DNA, 25 bp, Homo sapien
gtctatctgatttccactccgaagt

SEQ ID NO: 77126 - DNA, 25 bp, Homo sapien
gtctatctgattaccactccgaagt

SEQ ID NO: 77127 - DNA, 25 bp, Homo sapien
gtcgtttacctttagacccctcaga

SEQ ID NO: 77128 - DNA, 25 bp, Homo sapien
gtcgtttaccttaagacccctcaga

SEQ ID NO: 77129 - DNA, 25 bp, Homo sapien
ttggtacctaaatgactcccgtcaa

SEQ ID NO: 77130 - DNA, 25 bp, Homo sapien
ttggtacctaaaagactcccgtcaa

SEQ ID NO: 77131 - DNA, 25 bp, Homo sapien
tcggtcctcgcgtacatggacggca

SEQ ID NO: 77132 - DNA, 25 bp, Homo sapien
tcggtcctcgcgaacatggacggca

SEQ ID NO: 77133 - DNA, 25 bp, Homo sapien
tttctgtcaggaaaggactcggtcc

SEQ ID NO: 77134 - DNA, 25 bp, Homo sapien
tttctgtcaggataggactcggtcc

SEQ ID NO: 77135 - DNA, 25 bp, Homo sapien
ggttcggggaagtcagtctcgaccc

SEQ ID NO: 77136 - DNA, 25 bp, Homo sapien
ggttcggggaagacagtctcgaccc

SEQ ID NO: 77137 - DNA, 25 bp, Homo sapien
ctcttagggaaggacgattgagtcc

SEQ ID NO: 77138 - DNA, 25 bp, Homo sapien
ctcttagggaagcacgattgagtcc

SEQ ID NO: 77139 - DNA, 25 bp, Homo sapien
tttgagagacgcacaagagaattcc

SEQ ID NO: 77140 - DNA, 25 bp, Homo sapien
tttgagagacgctcaagagaattcc

SEQ ID NO: 77141 - DNA, 25 bp, Homo sapien
tgtgtcggatgttcagagggctcca

SEQ ID NO: 77142 - DNA, 25 bp, Homo sapien
tgtgtcggatgtacagagggctcca

SEQ ID NO: 77143 - DNA, 25 bp, Homo sapien
ggggccctgaacgaccagtctgacc

SEQ ID NO: 77144 - DNA, 25 bp, Homo sapien
ggggccctgaaccaccagtctgacc

SEQ ID NO: 77145 - DNA, 25 bp, Homo sapien
gggggcttcgactccggaaccctac

SEQ ID NO: 77146 - DNA, 25 bp, Homo sapien
gggggcttcgacaccggaaccctac

SEQ ID NO: 77147 - DNA, 25 bp, Homo sapien
cacgggttgtgataccagggagacc

SEQ ID NO: 77148 - DNA, 25 bp, Homo sapien
cacgggttgtgaaaccagggagacc

SEQ ID NO: 77149 - DNA, 25 bp, Homo sapien
gtctcgtggagacataggtacattc

SEQ ID NO: 77150 - DNA, 25 bp, Homo sapien
gtctcgtggagagataggtacattc

SEQ ID NO: 77151 - DNA, 25 bp, Homo sapien
gacttcagtagaagttatcccgttt

SEQ ID NO: 77152 - DNA, 25 bp, Homo sapien
gacttcagtagatgttatcccgttt

SEQ ID NO: 77153 - DNA, 25 bp, Homo sapien
gtgtagacttgtttgactaaataat

SEQ ID NO: 77154 - DNA, 25 bp, Homo sapien
gtgtagacttgtatgactaaataat

SEQ ID NO: 77155 - DNA, 25 bp, Homo sapien
ctgagggaagtttccttacttaggt

SEQ ID NO: 77156 - DNA, 25 bp, Homo sapien
ctgagggaagttaccttacttaggt

SEQ ID NO: 77157 - DNA, 25 bp, Homo sapien
ctgttcgaaacctaagtgtaacttt

SEQ ID NO: 77158 - DNA, 25 bp, Homo sapien
ctgttcgaaaccaaagtgtaacttt

SEQ ID NO: 77159 - DNA, 25 bp, Homo sapien
ctcataagaaccacagtgacaggtt

SEQ ID NO: 77160 - DNA, 25 bp, Homo sapien
ctcataagaacctcagtgacaggtt

SEQ ID NO: 77161 - DNA, 25 bp, Homo sapien
cgaaggggtcacacgtaaaaagact

SEQ ID NO: 77162 - DNA, 25 bp, Homo sapien
cgaaggggtcactcgtaaaaagact

SEQ ID NO: 77163 - DNA, 25 bp, Homo sapien
gatgcgggtccggcggtaagaactc

SEQ ID NO: 77164 - DNA, 25 bp, Homo sapien
gatgcgggtccgccggtaagaactc

SEQ ID NO: 77165 - DNA, 25 bp, Homo sapien
attcggtgacacctcggaattcacc

SEQ ID NO: 77166 - DNA, 25 bp, Homo sapien
attcggtgacacgtcggaattcacc

SEQ ID NO: 77167 - DNA, 25 bp, Homo sapien
tcgtcgcagccgtgtgcttcagcgg

SEQ ID NO: 77168 - DNA, 25 bp, Homo sapien
tcgtcgcagccgagtgcttcagcgg

SEQ ID NO: 77169 - DNA, 25 bp, Homo sapien
tgtcggagtacaagctcttcagatt

SEQ ID NO: 77170 - DNA, 25 bp, Homo sapien
tgtcggagtacatgctcttcagatt

SEQ ID NO: 77171 - DNA, 25 bp, Homo sapien
ctaaggtacaatactacttaaggtt

SEQ ID NO: 77172 - DNA, 25 bp, Homo sapien
ctaaggtacaattctacttaaggtt

SEQ ID NO: 77173 - DNA, 25 bp, Homo sapien
taacagtcaaatcttacgttgtaga

SEQ ID NO: 77174 - DNA, 25 bp, Homo sapien
taacagtcaaatgttacgttgtaga

SEQ ID NO: 77175 - DNA, 25 bp, Homo sapien
aaatcctaattcttcgtgagtaagt

SEQ ID NO: 77176 - DNA, 25 bp, Homo sapien
aaatcctaattcatcgtgagtaagt

SEQ ID NO: 77177 - DNA, 25 bp, Homo sapien
aagacgtgtaagttcatgtagacca

SEQ ID NO: 77178 - DNA, 25 bp, Homo sapien
aagacgtgtaagatcatgtagacca

SEQ ID NO: 77179 - DNA, 25 bp, Homo sapien
agtacagtgaagtcttcgactccga

SEQ ID NO: 77180 - DNA, 25 bp, Homo sapien
agtacagtgaagacttcgactccga

SEQ ID NO: 77181 - DNA, 25 bp, Homo sapien
aagtcgaggagtcgacagagactga

SEQ ID NO: 77182 - DNA, 25 bp, Homo sapien
aagtcgaggagtggacagagactga

SEQ ID NO: 77183 - DNA, 25 bp, Homo sapien
gaaggacggacgtggacgccactga

SEQ ID NO: 77184 - DNA, 25 bp, Homo sapien
gaaggacggacgaggacgccactga

SEQ ID NO: 77185 - DNA, 25 bp, Homo sapien
ctcctcgggagacactggcggttga

SEQ ID NO: 77186 - DNA, 25 bp, Homo sapien
ctcctcgggagagactggcggttga

SEQ ID NO: 77187 - DNA, 25 bp, Homo sapien
cactacatgggttgattggtgtttc

SEQ ID NO: 77188 - DNA, 25 bp, Homo sapien
cactacatgggtagattggtgtttc

SEQ ID NO: 77189 - DNA, 25 bp, Homo sapien
ccactgtcgcggaaattccggtttc

SEQ ID NO: 77190 - DNA, 25 bp, Homo sapien
ccactgtcgcggtaattccggtttc

SEQ ID NO: 77191 - DNA, 25 bp, Homo sapien
ccagtgagtgtaaaattcctttata

SEQ ID NO: 77192 - DNA, 25 bp, Homo sapien
ccagtgagtgtataattcctttata

SEQ ID NO: 77193 - DNA, 25 bp, Homo sapien
cagaacgtgtttactgcatgtaaag

SEQ ID NO: 77194 - DNA, 25 bp, Homo sapien
cagaacgtgttttctgcatgtaaag

SEQ ID NO: 77195 - DNA, 25 bp, Homo sapien
aacctgaagagttcccacgagtaaa

SEQ ID NO: 77196 - DNA, 25 bp, Homo sapien
aacctgaagagtacccacgagtaaa

SEQ ID NO: 77197 - DNA, 25 bp, Homo sapien
aataaagacggaaccttagaatcat

SEQ ID NO: 77198 - DNA, 25 bp, Homo sapien
aataaagacggatccttagaatcat

SEQ ID NO: 77199 - DNA, 25 bp, Homo sapien
taagtaaaacggaaccaaggactca

SEQ ID NO: 77200 - DNA, 25 bp, Homo sapien
taagtaaaacggtaccaaggactca

SEQ ID NO: 77201 - DNA, 25 bp, Homo sapien
tacgaaacagacataaccgtgtcaa

SEQ ID NO: 77202 - DNA, 25 bp, Homo sapien
tacgaaacagacttaaccgtgtcaa

SEQ ID NO: 77203 - DNA, 25 bp, Homo sapien
ggctgaacgggaggaaccgacacca

SEQ ID NO: 77204 - DNA, 25 bp, Homo sapien
ggctgaacgggacgaaccgacacca

SEQ ID NO: 77205 - DNA, 25 bp, Homo sapien
gcgcactacgatgcagagacggccc

SEQ ID NO: 77206 - DNA, 25 bp, Homo sapien
gcgcactacgatccagagacggccc

SEQ ID NO: 77207 - DNA, 25 bp, Homo sapien
gagtgacccagacagaaaacaccct

SEQ ID NO: 77208 - DNA, 25 bp, Homo sapien
gagtgacccagagagaaaacaccct

SEQ ID NO: 77209 - DNA, 25 bp, Homo sapien
cgtacgaggtagaagagtcgacttt

SEQ ID NO: 77210 - DNA, 25 bp, Homo sapien
cgtacgaggtagtagagtcgacttt

SEQ ID NO: 77211 - DNA, 25 bp, Homo sapien
agtccgacgaatgacgttccggggt

SEQ ID NO: 77212 - DNA, 25 bp, Homo sapien
agtccgacgaatcacgttccggggt

SEQ ID NO: 77213 - DNA, 25 bp, Homo sapien
gagcgaacgacattcagtcctttat

SEQ ID NO: 77214 - DNA, 25 bp, Homo sapien
gagcgaacgacaatcagtcctttat

SEQ ID NO: 77215 - DNA, 25 bp, Homo sapien
taggttcctaatcactgtctgttac

SEQ ID NO: 77216 - DNA, 25 bp, Homo sapien
taggttcctaatgactgtctgttac

SEQ ID NO: 77217 - DNA, 25 bp, Homo sapien
ccttgagtttgaaagactattttcg

SEQ ID NO: 77218 - DNA, 25 bp, Homo sapien
ccttgagtttgatagactattttcg

SEQ ID NO: 77219 - DNA, 25 bp, Homo sapien
ctctgtctttgaaccaccggcgttc

SEQ ID NO: 77220 - DNA, 25 bp, Homo sapien
ctctgtctttgatccaccggcgttc

SEQ ID NO: 77221 - DNA, 25 bp, Homo sapien
cttttatgttgtctcacggtagtcc

SEQ ID NO: 77222 - DNA, 25 bp, Homo sapien
cttttatgttgtgtcacggtagtcc

SEQ ID NO: 77223 - DNA, 25 bp, Homo sapien
cctttgggtctggtactaggtaagg

SEQ ID NO: 77224 - DNA, 25 bp, Homo sapien
cctttgggtctgctactaggtaagg

SEQ ID NO: 77225 - DNA, 25 bp, Homo sapien
ttcttgtcaacgtttatctgatgta

SEQ ID NO: 77226 - DNA, 25 bp, Homo sapien
ttcttgtcaacgattatctgatgta

SEQ ID NO: 77227 - DNA, 25 bp, Homo sapien
ttttactacagttcatctaatgtgt

SEQ ID NO: 77228 - DNA, 25 bp, Homo sapien
ttttactacagtacatctaatgtgt

SEQ ID NO: 77229 - DNA, 25 bp, Homo sapien
attcttcacgtggtcataaatgtct

SEQ ID NO: 77230 - DNA, 25 bp, Homo sapien
attcttcacgtgctcataaatgtct

SEQ ID NO: 77231 - DNA, 25 bp, Homo sapien
gtcgtcacaaagatctcacgtgact

SEQ ID NO: 77232 - DNA, 25 bp, Homo sapien
gtcgtcacaaagttctcacgtgact

SEQ ID NO: 77233 - DNA, 25 bp, Homo sapien
ttccgtcagaacagtattcgtgtcc

SEQ ID NO: 77234 - DNA, 25 bp, Homo sapien
ttccgtcagaactgtattcgtgtcc

SEQ ID NO: 77235 - DNA, 25 bp, Homo sapien
ttgtctcgtctctgtaggtctcgca

SEQ ID NO: 77236 - DNA, 25 bp, Homo sapien
ttgtctcgtctcagtaggtctcgca

SEQ ID NO: 77237 - DNA, 25 bp, Homo sapien
cactcgtcccatctagtctgtcaga

SEQ ID NO: 77238 - DNA, 25 bp, Homo sapien
cactcgtcccatgtagtctgtcaga

SEQ ID NO: 77239 - DNA, 25 bp, Homo sapien
catgtcgaccaacctggataagtac

SEQ ID NO: 77240 - DNA, 25 bp, Homo sapien
catgtcgaccaagctggataagtac

SEQ ID NO: 77241 - DNA, 25 bp, Homo sapien
agggtcgtcacacaaaggtctaaat

SEQ ID NO: 77242 - DNA, 25 bp, Homo sapien
agggtcgtcacagaaaggtctaaat

SEQ ID NO: 77243 - DNA, 25 bp, Homo sapien
gtcgctaccagtacgcctagagcag

SEQ ID NO: 77244 - DNA, 25 bp, Homo sapien
gtcgctaccagttcgcctagagcag

SEQ ID NO: 77245 - DNA, 25 bp, Homo sapien
attaaaccaaagtcgttcaggacgc

SEQ ID NO: 77246 - DNA, 25 bp, Homo sapien
attaaaccaaagacgttcaggacgc

SEQ ID NO: 77247 - DNA, 25 bp, Homo sapien
ttaaaccaaacgaagaccggacttc

SEQ ID NO: 77248 - DNA, 25 bp, Homo sapien
ttaaaccaaacgtagaccggacttc

SEQ ID NO: 77249 - DNA, 25 bp, Homo sapien
cttcaaagaaagagacttacttcga

SEQ ID NO: 77250 - DNA, 25 bp, Homo sapien
cttcaaagaaagtgacttacttcga

SEQ ID NO: 77251 - DNA, 25 bp, Homo sapien
ccgataacactgattttccttcgag

SEQ ID NO: 77252 - DNA, 25 bp, Homo sapien
ccgataacactgtttttccttcgag

SEQ ID NO: 77253 - DNA, 25 bp, Homo sapien
attgtctctactagggattctttta

SEQ ID NO: 77254 - DNA, 25 bp, Homo sapien
attgtctctacttgggattctttta

SEQ ID NO: 77255 - DNA, 25 bp, Homo sapien
gtcgtcccagtctccggtttctttc

SEQ ID NO: 77256 - DNA, 25 bp, Homo sapien
gtcgtcccagtcaccggtttctttc

SEQ ID NO: 77257 - DNA, 25 bp, Homo sapien
gtgtcagggtttaaaggacctgtgc

SEQ ID NO: 77258 - DNA, 25 bp, Homo sapien
gtgtcagggttttaaggacctgtgc

SEQ ID NO: 77259 - DNA, 25 bp, Homo sapien
agtggggtatattcccaacgccagt

SEQ ID NO: 77260 - DNA, 25 bp, Homo sapien
agtggggtatatacccaacgccagt

SEQ ID NO: 77261 - DNA, 25 bp, Homo sapien
taatatactgagttcgtaagaccga

SEQ ID NO: 77262 - DNA, 25 bp, Homo sapien
taatatactgagatcgtaagaccga

SEQ ID NO: 77263 - DNA, 25 bp, Homo sapien
atatcgagttcgatacagtaccgat

SEQ ID NO: 77264 - DNA, 25 bp, Homo sapien
atatcgagttcgttacagtaccgat

SEQ ID NO: 77265 - DNA, 25 bp, Homo sapien
caagtatacacgaagacgaatatca

SEQ ID NO: 77266 - DNA, 25 bp, Homo sapien
caagtatacacgtagacgaatatca

SEQ ID NO: 77267 - DNA, 25 bp, Homo sapien
agtagtatcaacaaccgagggttca

SEQ ID NO: 77268 - DNA, 25 bp, Homo sapien
agtagtatcaactaccgagggttca

SEQ ID NO: 77269 - DNA, 25 bp, Homo sapien
gaagagataaccacgcaactcccga

SEQ ID NO: 77270 - DNA, 25 bp, Homo sapien
gaagagataacctcgcaactcccga

SEQ ID NO: 77271 - DNA, 25 bp, Homo sapien
gaaaaaaccgaaacaacatccgtcg

SEQ ID NO: 77272 - DNA, 25 bp, Homo sapien
gaaaaaaccgaatcaacatccgtcg

SEQ ID NO: 77273 - DNA, 25 bp, Homo sapien
ggtcaaccccagactcaataggtac

SEQ ID NO: 77274 - DNA, 25 bp, Homo sapien
ggtcaaccccagtctcaataggtac

SEQ ID NO: 77275 - DNA, 25 bp, Homo sapien
tccacgcaccgcaggtcccagagta

SEQ ID NO: 77276 - DNA, 25 bp, Homo sapien
tccacgcaccgctggtcccagagta

SEQ ID NO: 77277 - DNA, 25 bp, Homo sapien
ccgacgactacgtctttcataaccc

SEQ ID NO: 77278 - DNA, 25 bp, Homo sapien
ccgacgactacgactttcataaccc

SEQ ID NO: 77279 - DNA, 25 bp, Homo sapien
gggccgacgtgtagtaaccaacctc

SEQ ID NO: 77280 - DNA, 25 bp, Homo sapien
gggccgacgtgttgtaaccaacctc

SEQ ID NO: 77281 - DNA, 25 bp, Homo sapien
actatctgtctttttctagacatgg

SEQ ID NO: 77282 - DNA, 25 bp, Homo sapien
actatctgtcttattctagacatgg

SEQ ID NO: 77283 - DNA, 25 bp, Homo sapien
ggactcttgcttacatgtcacttgg

SEQ ID NO: 77284 - DNA, 25 bp, Homo sapien
ggactcttgctttcatgtcacttgg

SEQ ID NO: 77285 - DNA, 25 bp, Homo sapien
ggtcggttgtatcgatccagaagag

SEQ ID NO: 77286 - DNA, 25 bp, Homo sapien
ggtcggttgtatggatccagaagag

SEQ ID NO: 77287 - DNA, 25 bp, Homo sapien
gatattgtgtaacctctcatgagac

SEQ ID NO: 77288 - DNA, 25 bp, Homo sapien
gatattgtgtaagctctcatgagac

SEQ ID NO: 77289 - DNA, 25 bp, Homo sapien
gcgacagttacagaccatacaatta

SEQ ID NO: 77290 - DNA, 25 bp, Homo sapien
gcgacagttacacaccatacaatta

SEQ ID NO: 77291 - DNA, 25 bp, Homo sapien
tcacgtacgcagtagccacaaattg

SEQ ID NO: 77292 - DNA, 25 bp, Homo sapien
tcacgtacgcagaagccacaaattg

SEQ ID NO: 77293 - DNA, 25 bp, Homo sapien
cggtctgaggaaatcccgaaacttg

SEQ ID NO: 77294 - DNA, 25 bp, Homo sapien
cggtctgaggaattcccgaaacttg

SEQ ID NO: 77295 - DNA, 25 bp, Homo sapien
ttaccgtctaaataattcataaaaa

SEQ ID NO: 77296 - DNA, 25 bp, Homo sapien
ttaccgtctaaaaaattcataaaaa

SEQ ID NO: 77297 - DNA, 25 bp, Homo sapien
gagatcttcatgagagctcaaaaaa

SEQ ID NO: 77298 - DNA, 25 bp, Homo sapien
gagatcttcatgtgagctcaaaaaa

SEQ ID NO: 77299 - DNA, 25 bp, Homo sapien
gtttgctttctttcgtcaagaattc

SEQ ID NO: 77300 - DNA, 25 bp, Homo sapien
gtttgctttcttacgtcaagaattc

SEQ ID NO: 77301 - DNA, 25 bp, Homo sapien
ttattgtgtacgatagacatacgta

SEQ ID NO: 77302 - DNA, 25 bp, Homo sapien
ttattgtgtacgttagacatacgta

SEQ ID NO: 77303 - DNA, 25 bp, Homo sapien
agaagtttaccgaagacgtagactg

SEQ ID NO: 77304 - DNA, 25 bp, Homo sapien
agaagtttaccgtagacgtagactg

SEQ ID NO: 77305 - DNA, 25 bp, Homo sapien
tagggaagggctgtgtgacgaactt

SEQ ID NO: 77306 - DNA, 25 bp, Homo sapien
tagggaagggctctgtgacgaactt

SEQ ID NO: 77307 - DNA, 25 bp, Homo sapien
tttccaaaggtttcagtggaactat

SEQ ID NO: 77308 - DNA, 25 bp, Homo sapien
tttccaaaggttacagtggaactat

SEQ ID NO: 77309 - DNA, 25 bp, Homo sapien
tcctcagagtgactcggtgtcggcc

SEQ ID NO: 77310 - DNA, 25 bp, Homo sapien
tcctcagagtgagtcggtgtcggcc

SEQ ID NO: 77311 - DNA, 25 bp, Homo sapien
cgtccgacagataccgaacgagacc

SEQ ID NO: 77312 - DNA, 25 bp, Homo sapien
cgtccgacagattccgaacgagacc

SEQ ID NO: 77313 - DNA, 25 bp, Homo sapien
gacgttcgcctgcaaccagtgtccg

SEQ ID NO: 77314 - DNA, 25 bp, Homo sapien
gacgttcgcctggaaccagtgtccg

SEQ ID NO: 77315 - DNA, 25 bp, Homo sapien
tctttcactgatcctctgtgtgtct

SEQ ID NO: 77316 - DNA, 25 bp, Homo sapien
tctttcactgatgctctgtgtgtct

SEQ ID NO: 77317 - DNA, 25 bp, Homo sapien
caattcgagggtatgtcaatattac

SEQ ID NO: 77318 - DNA, 25 bp, Homo sapien
caattcgagggtttgtcaatattac

SEQ ID NO: 77319 - DNA, 25 bp, Homo sapien
tgattcttcctgtccccgagtgttg

SEQ ID NO: 77320 - DNA, 25 bp, Homo sapien
tgattcttcctgaccccgagtgttg

SEQ ID NO: 77321 - DNA, 25 bp, Homo sapien
gtttcatttgtactctccagttgtg

SEQ ID NO: 77322 - DNA, 25 bp, Homo sapien
gtttcatttgtagtctccagttgtg

SEQ ID NO: 77323 - DNA, 25 bp, Homo sapien
gttccttgttaatcctaagtatgta

SEQ ID NO: 77324 - DNA, 25 bp, Homo sapien
gttccttgttaaacctaagtatgta

SEQ ID NO: 77325 - DNA, 25 bp, Homo sapien
ttcacactttgattcgaacttgtag

SEQ ID NO: 77326 - DNA, 25 bp, Homo sapien
ttcacactttgaatcgaacttgtag

SEQ ID NO: 77327 - DNA, 25 bp, Homo sapien
gtgtctttttctcgtacaactctta

SEQ ID NO: 77328 - DNA, 25 bp, Homo sapien
gtgtctttttctggtacaactctta

SEQ ID NO: 77329 - DNA, 25 bp, Homo sapien
aagtgttgtgatcttgtttccttac

SEQ ID NO: 77330 - DNA, 25 bp, Homo sapien
aagtgttgtgatgttgtttccttac

SEQ ID NO: 77331 - DNA, 25 bp, Homo sapien
atcgttggtagagattgtctgcaac

SEQ ID NO: 77332 - DNA, 25 bp, Homo sapien
atcgttggtagacattgtctgcaac

SEQ ID NO: 77333 - DNA, 25 bp, Homo sapien
actgttgggttacttatttactaac

SEQ ID NO: 77334 - DNA, 25 bp, Homo sapien
actgttgggttagttatttactaac

SEQ ID NO: 77335 - DNA, 25 bp, Homo sapien
tatattgcggcctcatcgtcaggac

SEQ ID NO: 77336 - DNA, 25 bp, Homo sapien
tatattgcggccacatcgtcaggac

SEQ ID NO: 77337 - DNA, 25 bp, Homo sapien
cgagtatcgagtcgtctacgaccat

SEQ ID NO: 77338 - DNA, 25 bp, Homo sapien
cgagtatcgagtggtctacgaccat

SEQ ID NO: 77339 - DNA, 25 bp, Homo sapien
gttcagtcgttgttggttcgtccat

SEQ ID NO: 77340 - DNA, 25 bp, Homo sapien
gttcagtcgttgatggttcgtccat

SEQ ID NO: 77341 - DNA, 25 bp, Homo sapien
gttgttgtttctacctgttcggaat

SEQ ID NO: 77342 - DNA, 25 bp, Homo sapien
gttgttgtttcttcctgttcggaat

SEQ ID NO: 77343 - DNA, 25 bp, Homo sapien
gttcttttgttcagtcgttcgagaa

SEQ ID NO: 77344 - DNA, 25 bp, Homo sapien
gttcttttgttctgtcgttcgagaa

SEQ ID NO: 77345 - DNA, 25 bp, Homo sapien
ttgggtcacttttacacggggtgaa

SEQ ID NO: 77346 - DNA, 25 bp, Homo sapien
ttgggtcactttaacacggggtgaa

SEQ ID NO: 77347 - DNA, 25 bp, Homo sapien
cgcaggtatctcgacatgaggaatt

SEQ ID NO: 77348 - DNA, 25 bp, Homo sapien
cgcaggtatctccacatgaggaatt

SEQ ID NO: 77349 - DNA, 25 bp, Homo sapien
gttatactactacgattctgaatgt

SEQ ID NO: 77350 - DNA, 25 bp, Homo sapien
gttatactactaggattctgaatgt

SEQ ID NO: 77351 - DNA, 25 bp, Homo sapien
gaatccttaatgttctctgaaacgt

SEQ ID NO: 77352 - DNA, 25 bp, Homo sapien
gaatccttaatgatctctgaaacgt

SEQ ID NO: 77353 - DNA, 25 bp, Homo sapien
tagtcgacctctgtgtcctcacttc

SEQ ID NO: 77354 - DNA, 25 bp, Homo sapien
tagtcgacctctctgtcctcacttc

SEQ ID NO: 77355 - DNA, 25 bp, Homo sapien
attagacttgtcgttactcccacgt

SEQ ID NO: 77356 - DNA, 25 bp, Homo sapien
attagacttgtccttactcccacgt

SEQ ID NO: 77357 - DNA, 25 bp, Homo sapien
actaataccgtagctctgtgacatc

SEQ ID NO: 77358 - DNA, 25 bp, Homo sapien
actaataccgtacctctgtgacatc

SEQ ID NO: 77359 - DNA, 25 bp, Homo sapien
tacagacgtccgtctcgtcgacgaa

SEQ ID NO: 77360 - DNA, 25 bp, Homo sapien
tacagacgtccgactcgtcgacgaa

SEQ ID NO: 77361 - DNA, 25 bp, Homo sapien
cggcgataaacctgtaactccacaa

SEQ ID NO: 77362 - DNA, 25 bp, Homo sapien
cggcgataaaccagtaactccacaa

SEQ ID NO: 77363 - DNA, 25 bp, Homo sapien
tcttaacagaaaactacgcttcaag

SEQ ID NO: 77364 - DNA, 25 bp, Homo sapien
tcttaacagaaatctacgcttcaag

SEQ ID NO: 77365 - DNA, 25 bp, Homo sapien
gtcagtcactggtccgtccgaccaa

SEQ ID NO: 77366 - DNA, 25 bp, Homo sapien
gtcagtcactggaccgtccgaccaa

SEQ ID NO: 77367 - DNA, 25 bp, Homo sapien
ttgtttctgttgtcccgacaaacgg

SEQ ID NO: 77368 - DNA, 25 bp, Homo sapien
ttgtttctgttgacccgacaaacgg

SEQ ID NO: 77369 - DNA, 25 bp, Homo sapien
gggtctttactccttcaccagtaca

SEQ ID NO: 77370 - DNA, 25 bp, Homo sapien
gggtctttactcgttcaccagtaca

SEQ ID NO: 77371 - DNA, 25 bp, Homo sapien
aggattactatcgaggccgacataa

SEQ ID NO: 77372 - DNA, 25 bp, Homo sapien
aggattactatccaggccgacataa

SEQ ID NO: 77373 - DNA, 25 bp, Homo sapien
gtgtttacgtttaggttagcctctt

SEQ ID NO: 77374 - DNA, 25 bp, Homo sapien
gtgtttacgttttggttagcctctt

SEQ ID NO: 77375 - DNA, 25 bp, Homo sapien
cctcttcactttttgggacccgtat

SEQ ID NO: 77376 - DNA, 25 bp, Homo sapien
cctcttcactttatgggacccgtat

SEQ ID NO: 77377 - DNA, 25 bp, Homo sapien
ccttcaccgcgtcttggctctacga

SEQ ID NO: 77378 - DNA, 25 bp, Homo sapien
ccttcaccgcgtgttggctctacga

SEQ ID NO: 77379 - DNA, 25 bp, Homo sapien
atttcgactcaaacgccttcctaca

SEQ ID NO: 77380 - DNA, 25 bp, Homo sapien
atttcgactcaatcgccttcctaca

SEQ ID NO: 77381 - DNA, 25 bp, Homo sapien
aaagttcttggacacgttttgacag

SEQ ID NO: 77382 - DNA, 25 bp, Homo sapien
aaagttcttggagacgttttgacag

SEQ ID NO: 77383 - DNA, 25 bp, Homo sapien
tcctttctgattacttattcgtcgg

SEQ ID NO: 77384 - DNA, 25 bp, Homo sapien
tcctttctgatttcttattcgtcgg

SEQ ID NO: 77385 - DNA, 25 bp, Homo sapien
tcccttcttgactccgttcttcggg

SEQ ID NO: 77386 - DNA, 25 bp, Homo sapien
tcccttcttgacaccgttcttcggg

SEQ ID NO: 77387 - DNA, 25 bp, Homo sapien
ataagtcactagtggctccgagatt

SEQ ID NO: 77388 - DNA, 25 bp, Homo sapien
ataagtcactagaggctccgagatt

SEQ ID NO: 77389 - DNA, 25 bp, Homo sapien
caaggacacaatgggttagacgttt

SEQ ID NO: 77390 - DNA, 25 bp, Homo sapien
caaggacacaatcggttagacgttt

SEQ ID NO: 77391 - DNA, 25 bp, Homo sapien
gaaagactgtgaaagtgaaaacgtc

SEQ ID NO: 77392 - DNA, 25 bp, Homo sapien
gaaagactgtgatagtgaaaacgtc

SEQ ID NO: 77393 - DNA, 25 bp, Homo sapien
taccttttcgactcatattacggag

SEQ ID NO: 77394 - DNA, 25 bp, Homo sapien
taccttttcgacacatattacggag

SEQ ID NO: 77395 - DNA, 25 bp, Homo sapien
atcttcgtttgtctatagtctatgg

SEQ ID NO: 77396 - DNA, 25 bp, Homo sapien
atcttcgtttgtgtatagtctatgg

SEQ ID NO: 77397 - DNA, 25 bp, Homo sapien
atacttcgttttcatcgataatggt

SEQ ID NO: 77398 - DNA, 25 bp, Homo sapien
atacttcgttttgatcgataatggt

SEQ ID NO: 77399 - DNA, 25 bp, Homo sapien
ttcgtccgggttcgtcaccttcgtc

SEQ ID NO: 77400 - DNA, 25 bp, Homo sapien
ttcgtccgggttggtcaccttcgtc

SEQ ID NO: 77401 - DNA, 25 bp, Homo sapien
cgtggttctactggtgtcggtcctt

SEQ ID NO: 77402 - DNA, 25 bp, Homo sapien
cgtggttctactcgtgtcggtcctt

SEQ ID NO: 77403 - DNA, 25 bp, Homo sapien
gtgtgtaccgtctctatgctataat

SEQ ID NO: 77404 - DNA, 25 bp, Homo sapien
gtgtgtaccgtcactatgctataat

SEQ ID NO: 77405 - DNA, 25 bp, Homo sapien
gtctccgtgtctgagaacccaagga

SEQ ID NO: 77406 - DNA, 25 bp, Homo sapien
gtctccgtgtctcagaacccaagga

SEQ ID NO: 77407 - DNA, 25 bp, Homo sapien
ccctgtcagtgttaactcatctgac

SEQ ID NO: 77408 - DNA, 25 bp, Homo sapien
ccctgtcagtgtaaactcatctgac

SEQ ID NO: 77409 - DNA, 25 bp, Homo sapien
gtaacgtcgtccttagaaccaccaa

SEQ ID NO: 77410 - DNA, 25 bp, Homo sapien
gtaacgtcgtccatagaaccaccaa

SEQ ID NO: 77411 - DNA, 25 bp, Homo sapien
accgaaattcctacacccacggaag

SEQ ID NO: 77412 - DNA, 25 bp, Homo sapien
accgaaattccttcacccacggaag

SEQ ID NO: 77413 - DNA, 25 bp, Homo sapien
taaagtgacacttgtatcaacgaaa

SEQ ID NO: 77414 - DNA, 25 bp, Homo sapien
taaagtgacactagtatcaacgaaa

SEQ ID NO: 77415 - DNA, 25 bp, Homo sapien
tgactatccagctggtataacaaga

SEQ ID NO: 77416 - DNA, 25 bp, Homo sapien
tgactatccagcaggtataacaaga

SEQ ID NO: 77417 - DNA, 25 bp, Homo sapien
tgtaaaccagtcgactacaagaaag

SEQ ID NO: 77418 - DNA, 25 bp, Homo sapien
tgtaaaccagtccactacaagaaag

SEQ ID NO: 77419 - DNA, 25 bp, Homo sapien
taacgactaagaagtcccgagaaag

SEQ ID NO: 77420 - DNA, 25 bp, Homo sapien
taacgactaagatgtcccgagaaag

SEQ ID NO: 77421 - DNA, 25 bp, Homo sapien
cggtaggaagaagacacggaaccag

SEQ ID NO: 77422 - DNA, 25 bp, Homo sapien
cggtaggaagaacacacggaaccag

SEQ ID NO: 77423 - DNA, 25 bp, Homo sapien
taggtgaagaagaccgaaagacccg

SEQ ID NO: 77424 - DNA, 25 bp, Homo sapien
taggtgaagaagtccgaaagacccg

SEQ ID NO: 77425 - DNA, 25 bp, Homo sapien
gtagatagacggagtccacagaccc

SEQ ID NO: 77426 - DNA, 25 bp, Homo sapien
gtagatagacggtgtccacagaccc

SEQ ID NO: 77427 - DNA, 25 bp, Homo sapien
cgtaccgtcgggtggcctcagagtc

SEQ ID NO: 77428 - DNA, 25 bp, Homo sapien
cgtaccgtcgggaggcctcagagtc

SEQ ID NO: 77429 - DNA, 25 bp, Homo sapien
tgctcttgacctaggacttcggagc

SEQ ID NO: 77430 - DNA, 25 bp, Homo sapien
tgctcttgaccttggacttcggagc

SEQ ID NO: 77431 - DNA, 25 bp, Homo sapien
ccgtctcggtcgtggttgtggtacc

SEQ ID NO: 77432 - DNA, 25 bp, Homo sapien
ccgtctcggtcgaggttgtggtacc

SEQ ID NO: 77433 - DNA, 25 bp, Homo sapien
ggtccctcagacatgtactgtttct

SEQ ID NO: 77434 - DNA, 25 bp, Homo sapien
ggtccctcagacttgtactgtttct

SEQ ID NO: 77435 - DNA, 25 bp, Homo sapien
aggcactaccgcttctctgtgtcga

SEQ ID NO: 77436 - DNA, 25 bp, Homo sapien
aggcactaccgcatctctgtgtcga

SEQ ID NO: 77437 - DNA, 25 bp, Homo sapien
gaggtaaccgacagacacacggtcc

SEQ ID NO: 77438 - DNA, 25 bp, Homo sapien
gaggtaaccgactgacacacggtcc

SEQ ID NO: 77439 - DNA, 25 bp, Homo sapien
cggtgacatcctgagactagagtcc

SEQ ID NO: 77440 - DNA, 25 bp, Homo sapien
cggtgacatcctcagactagagtcc

SEQ ID NO: 77441 - DNA, 25 bp, Homo sapien
tgctgtggacctgaggtagagcact

SEQ ID NO: 77442 - DNA, 25 bp, Homo sapien
tgctgtggacctcaggtagagcact

SEQ ID NO: 77443 - DNA, 25 bp, Homo sapien
ctcgcgtcgggacttgcgagccgac

SEQ ID NO: 77444 - DNA, 25 bp, Homo sapien
ctcgcgtcgggagttgcgagccgac

SEQ ID NO: 77445 - DNA, 25 bp, Homo sapien
ctgacagtggagtagcagcacgtct

SEQ ID NO: 77446 - DNA, 25 bp, Homo sapien
ctgacagtggagaagcagcacgtct

SEQ ID NO: 77447 - DNA, 25 bp, Homo sapien
cctgaagtgactagaacgagaccgc

SEQ ID NO: 77448 - DNA, 25 bp, Homo sapien
cctgaagtgacttgaacgagaccgc

SEQ ID NO: 77449 - DNA, 25 bp, Homo sapien
ccccctggtgtcagtagagttcgtc

SEQ ID NO: 77450 - DNA, 25 bp, Homo sapien
ccccctggtgtctgtagagttcgtc

SEQ ID NO: 77451 - DNA, 25 bp, Homo sapien
cctctttaaactttgtctggagtcc

SEQ ID NO: 77452 - DNA, 25 bp, Homo sapien
cctctttaaactatgtctggagtcc

SEQ ID NO: 77453 - DNA, 25 bp, Homo sapien
gtcttctgtgaaaatcggttacttc

SEQ ID NO: 77454 - DNA, 25 bp, Homo sapien
gtcttctgtgaatatcggttacttc

SEQ ID NO: 77455 - DNA, 25 bp, Homo sapien
ccgtgtgtaggaccacccatacttc

SEQ ID NO: 77456 - DNA, 25 bp, Homo sapien
ccgtgtgtaggagcacccatacttc

SEQ ID NO: 77457 - DNA, 25 bp, Homo sapien
gctgggtttgggacctcccagtgta

SEQ ID NO: 77458 - DNA, 25 bp, Homo sapien
gctgggtttgggtcctcccagtgta

SEQ ID NO: 77459 - DNA, 25 bp, Homo sapien
aagtccgtcgggacccaacagtgta

SEQ ID NO: 77460 - DNA, 25 bp, Homo sapien
aagtccgtcgggtcccaacagtgta

SEQ ID NO: 77461 - DNA, 25 bp, Homo sapien
atcctggggtaaggtagacctctat

SEQ ID NO: 77462 - DNA, 25 bp, Homo sapien
atcctggggtaacgtagacctctat

SEQ ID NO: 77463 - DNA, 25 bp, Homo sapien
gaactcaggggtacgggtaatacct

SEQ ID NO: 77464 - DNA, 25 bp, Homo sapien
gaactcaggggttcgggtaatacct

SEQ ID NO: 77465 - DNA, 25 bp, Homo sapien
caggacagactcatctagagacact

SEQ ID NO: 77466 - DNA, 25 bp, Homo sapien
caggacagactcttctagagacact

SEQ ID NO: 77467 - DNA, 25 bp, Homo sapien
tttccaaggaccaactaaggacgtt

SEQ ID NO: 77468 - DNA, 25 bp, Homo sapien
tttccaaggacctactaaggacgtt

SEQ ID NO: 77469 - DNA, 25 bp, Homo sapien
ccgacggtggacctattacatgagg

SEQ ID NO: 77470 - DNA, 25 bp, Homo sapien
ccgacggtggacgtattacatgagg

SEQ ID NO: 77471 - DNA, 25 bp, Homo sapien
agtagaagactttagtacatatacc

SEQ ID NO: 77472 - DNA, 25 bp, Homo sapien
agtagaagacttaagtacatatacc

SEQ ID NO: 77473 - DNA, 25 bp, Homo sapien
tgagagaaactgataccgtaagttc

SEQ ID NO: 77474 - DNA, 25 bp, Homo sapien
tgagagaaactgttaccgtaagttc

SEQ ID NO: 77475 - DNA, 25 bp, Homo sapien
tttaatcaattggttacgactctgt

SEQ ID NO: 77476 - DNA, 25 bp, Homo sapien
tttaatcaattgcttacgactctgt

SEQ ID NO: 77477 - DNA, 25 bp, Homo sapien
ttcggccacttatcgttacgatctt

SEQ ID NO: 77478 - DNA, 25 bp, Homo sapien
ttcggccacttaacgttacgatctt

SEQ ID NO: 77479 - DNA, 25 bp, Homo sapien
aaacgtgactttgtcttcgttatgt

SEQ ID NO: 77480 - DNA, 25 bp, Homo sapien
aaacgtgactttctcttcgttatgt

SEQ ID NO: 77481 - DNA, 25 bp, Homo sapien
tgttgtgacttctctcttagtccga

SEQ ID NO: 77482 - DNA, 25 bp, Homo sapien
tgttgtgacttcactcttagtccga

SEQ ID NO: 77483 - DNA, 25 bp, Homo sapien
ttgtagacagtcaattcgacttcga

SEQ ID NO: 77484 - DNA, 25 bp, Homo sapien
ttgtagacagtctattcgacttcga

SEQ ID NO: 77485 - DNA, 25 bp, Homo sapien
ccgaggaacaggatcgttgttttag

SEQ ID NO: 77486 - DNA, 25 bp, Homo sapien
ccgaggaacaggttcgttgttttag

SEQ ID NO: 77487 - DNA, 25 bp, Homo sapien
caggaaactggtgaatgtcttacgt

SEQ ID NO: 77488 - DNA, 25 bp, Homo sapien
caggaaactggtcaatgtcttacgt

SEQ ID NO: 77489 - DNA, 25 bp, Homo sapien
atccaggttcctgtacccccagtgt

SEQ ID NO: 77490 - DNA, 25 bp, Homo sapien
atccaggttcctctacccccagtgt

SEQ ID NO: 77491 - DNA, 25 bp, Homo sapien
caggctcactcttatcgagtccagg

SEQ ID NO: 77492 - DNA, 25 bp, Homo sapien
caggctcactctaatcgagtccagg

SEQ ID NO: 77493 - DNA, 25 bp, Homo sapien
gtatgtcctctctgactttaacaag

SEQ ID NO: 77494 - DNA, 25 bp, Homo sapien
gtatgtcctctcagactttaacaag

SEQ ID NO: 77495 - DNA, 25 bp, Homo sapien
tcgtcgacagtggatatgtctcaat

SEQ ID NO: 77496 - DNA, 25 bp, Homo sapien
tcgtcgacagtgcatatgtctcaat

SEQ ID NO: 77497 - DNA, 25 bp, Homo sapien
gactgaccgtggacgtgagtcgaaa

SEQ ID NO: 77498 - DNA, 25 bp, Homo sapien
gactgaccgtggtcgtgagtcgaaa

SEQ ID NO: 77499 - DNA, 25 bp, Homo sapien
tcctgtgtaccctgagacgtagaat

SEQ ID NO: 77500 - DNA, 25 bp, Homo sapien
tcctgtgtacccagagacgtagaat

SEQ ID NO: 77501 - DNA, 25 bp, Homo sapien
ggacctcttctactcaggtacataa

SEQ ID NO: 77502 - DNA, 25 bp, Homo sapien
ggacctcttctagtcaggtacataa

SEQ ID NO: 77503 - DNA, 25 bp, Homo sapien
gcaagttatctcgtctaaacataag

SEQ ID NO: 77504 - DNA, 25 bp, Homo sapien
gcaagttatctcctctaaacataag

SEQ ID NO: 77505 - DNA, 25 bp, Homo sapien
cgacaaattcttgagagtcctaagt

SEQ ID NO: 77506 - DNA, 25 bp, Homo sapien
cgacaaattcttcagagtcctaagt

SEQ ID NO: 77507 - DNA, 25 bp, Homo sapien
tctcatgaccggttactgctaggag

SEQ ID NO: 77508 - DNA, 25 bp, Homo sapien
tctcatgaccggatactgctaggag

SEQ ID NO: 77509 - DNA, 25 bp, Homo sapien
aaccggtcgcccatctccgagaggt

SEQ ID NO: 77510 - DNA, 25 bp, Homo sapien
aaccggtcgcccttctccgagaggt

SEQ ID NO: 77511 - DNA, 25 bp, Homo sapien
aacaaaacatctgacctgtgtgtat

SEQ ID NO: 77512 - DNA, 25 bp, Homo sapien
aacaaaacatctcacctgtgtgtat

SEQ ID NO: 77513 - DNA, 25 bp, Homo sapien
gtaaaaatacaagacctcactctgg

SEQ ID NO: 77514 - DNA, 25 bp, Homo sapien
gtaaaaatacaacacctcactctgg

SEQ ID NO: 77515 - DNA, 25 bp, Homo sapien
ggtaaaacgcaacaacttaatatgt

SEQ ID NO: 77516 - DNA, 25 bp, Homo sapien
ggtaaaacgcaagaacttaatatgt

SEQ ID NO: 77517 - DNA, 25 bp, Homo sapien
caaatacgtcgctgggattctcttt

SEQ ID NO: 77518 - DNA, 25 bp, Homo sapien
caaatacgtcgcagggattctcttt

SEQ ID NO: 77519 - DNA, 25 bp, Homo sapien
aaagaccgtatgttacactttactg

SEQ ID NO: 77520 - DNA, 25 bp, Homo sapien
aaagaccgtatgatacactttactg

SEQ ID NO: 77521 - DNA, 25 bp, Homo sapien
actgaggatccatgaacctctggtt

SEQ ID NO: 77522 - DNA, 25 bp, Homo sapien
actgaggatccaagaacctctggtt

SEQ ID NO: 77523 - DNA, 25 bp, Homo sapien
aattatcttatgtctcacgtccgtg

SEQ ID NO: 77524 - DNA, 25 bp, Homo sapien
aattatcttatgactcacgtccgtg

SEQ ID NO: 77525 - DNA, 25 bp, Homo sapien
ttttgtcaggtgtcgtccaccgtgt

SEQ ID NO: 77526 - DNA, 25 bp, Homo sapien
ttttgtcaggtgacgtccaccgtgt

SEQ ID NO: 77527 - DNA, 25 bp, Homo sapien
acaggtgtcgagagcctcgagctgt

SEQ ID NO: 77528 - DNA, 25 bp, Homo sapien
acaggtgtcgagtgcctcgagctgt

SEQ ID NO: 77529 - DNA, 25 bp, Homo sapien
gaacagggtcggtgtcctctgctac

SEQ ID NO: 77530 - DNA, 25 bp, Homo sapien
gaacagggtcggagtcctctgctac

SEQ ID NO: 77531 - DNA, 25 bp, Homo sapien
atcagtcatacaacggcctgtgtca

SEQ ID NO: 77532 - DNA, 25 bp, Homo sapien
atcagtcatacatcggcctgtgtca

SEQ ID NO: 77533 - DNA, 25 bp, Homo sapien
ttcatcgattactttcttcggtaca

SEQ ID NO: 77534 - DNA, 25 bp, Homo sapien
ttcatcgattacattcttcggtaca

SEQ ID NO: 77535 - DNA, 25 bp, Homo sapien
gagaagggattacgttctctcagga

SEQ ID NO: 77536 - DNA, 25 bp, Homo sapien
gagaagggattaggttctctcagga

SEQ ID NO: 77537 - DNA, 25 bp, Homo sapien
acaatttttgtctgatcgtggtgac

SEQ ID NO: 77538 - DNA, 25 bp, Homo sapien
acaatttttgtcagatcgtggtgac

SEQ ID NO: 77539 - DNA, 25 bp, Homo sapien
atcctttttagttggtcgttctaag

SEQ ID NO: 77540 - DNA, 25 bp, Homo sapien
atcctttttagtaggtcgttctaag

SEQ ID NO: 77541 - DNA, 25 bp, Homo sapien
gtaactaaagtgttcagaagtccaa

SEQ ID NO: 77542 - DNA, 25 bp, Homo sapien
gtaactaaagtgatcagaagtccaa

SEQ ID NO: 77543 - DNA, 25 bp, Homo sapien
gtgtaccaaaggtcactaatctaaa

SEQ ID NO: 77544 - DNA, 25 bp, Homo sapien
gtgtaccaaaggacactaatctaaa

SEQ ID NO: 77545 - DNA, 25 bp, Homo sapien
gtgttaaaggccacaattctagtaa

SEQ ID NO: 77546 - DNA, 25 bp, Homo sapien
gtgttaaaggcctcaattctagtaa

SEQ ID NO: 77547 - DNA, 25 bp, Homo sapien
taaatgatcactaaagacggtcgaa

SEQ ID NO: 77548 - DNA, 25 bp, Homo sapien
taaatgatcacttaagacggtcgaa

SEQ ID NO: 77549 - DNA, 25 bp, Homo sapien
accactgtatctttatgtcgagcaa

SEQ ID NO: 77550 - DNA, 25 bp, Homo sapien
accactgtatctatatgtcgagcaa

SEQ ID NO: 77551 - DNA, 25 bp, Homo sapien
aacgtgaccattgatgtccagtaaa

SEQ ID NO: 77552 - DNA, 25 bp, Homo sapien
aacgtgaccattcatgtccagtaaa

SEQ ID NO: 77553 - DNA, 25 bp, Homo sapien
tatccaaatttaagaccggtgtctg

SEQ ID NO: 77554 - DNA, 25 bp, Homo sapien
tatccaaatttatgaccggtgtctg

SEQ ID NO: 77555 - DNA, 25 bp, Homo sapien
cacagatctttattatcggtttagt

SEQ ID NO: 77556 - DNA, 25 bp, Homo sapien
cacagatctttaatatcggtttagt

SEQ ID NO: 77557 - DNA, 25 bp, Homo sapien
cgtaaacgtgagacctagatttaat

SEQ ID NO: 77558 - DNA, 25 bp, Homo sapien
cgtaaacgtgagtcctagatttaat

SEQ ID NO: 77559 - DNA, 25 bp, Homo sapien
ggaacgagtgacacgtctgatttaa

SEQ ID NO: 77560 - DNA, 25 bp, Homo sapien
ggaacgagtgactcgtctgatttaa

SEQ ID NO: 77561 - DNA, 25 bp, Homo sapien
ttcgagtgttcagacataaacaaac

SEQ ID NO: 77562 - DNA, 25 bp, Homo sapien
ttcgagtgttcacacataaacaaac

SEQ ID NO: 77563 - DNA, 25 bp, Homo sapien
ggtcgaacttcactcaaataagaac

SEQ ID NO: 77564 - DNA, 25 bp, Homo sapien
ggtcgaacttcagtcaaataagaac

SEQ ID NO: 77565 - DNA, 25 bp, Homo sapien
tgttttatcagaccaatgaacaacg

SEQ ID NO: 77566 - DNA, 25 bp, Homo sapien
tgttttatcagagcaatgaacaacg

SEQ ID NO: 77567 - DNA, 25 bp, Homo sapien
ggcagtttgacaagaagtgttccct

SEQ ID NO: 77568 - DNA, 25 bp, Homo sapien
ggcagtttgacatgaagtgttccct

SEQ ID NO: 77569 - DNA, 25 bp, Homo sapien
gttcttttaccatctgagtctgcct

SEQ ID NO: 77570 - DNA, 25 bp, Homo sapien
gttcttttaccaactgagtctgcct

SEQ ID NO: 77571 - DNA, 25 bp, Homo sapien
gttatttgtcacaatgttactgacc

SEQ ID NO: 77572 - DNA, 25 bp, Homo sapien
gttatttgtcactatgttactgacc

SEQ ID NO: 77573 - DNA, 25 bp, Homo sapien
gtgtgacataacattttcgtttccc

SEQ ID NO: 77574 - DNA, 25 bp, Homo sapien
gtgtgacataactttttcgtttccc

SEQ ID NO: 77575 - DNA, 25 bp, Homo sapien
ttgagtccattatttcgtgattcga

SEQ ID NO: 77576 - DNA, 25 bp, Homo sapien
ttgagtccattaattcgtgattcga

SEQ ID NO: 77577 - DNA, 25 bp, Homo sapien
gtcccgtcctttagtttagtaatga

SEQ ID NO: 77578 - DNA, 25 bp, Homo sapien
gtcccgtccttttgtttagtaatga

SEQ ID NO: 77579 - DNA, 25 bp, Homo sapien
gttatcatcagtttacttgtacagt

SEQ ID NO: 77580 - DNA, 25 bp, Homo sapien
gttatcatcagtatacttgtacagt

SEQ ID NO: 77581 - DNA, 25 bp, Homo sapien
ccagtaaaacagacgtctcacgagt

SEQ ID NO: 77582 - DNA, 25 bp, Homo sapien
ccagtaaaacagtcgtctcacgagt

SEQ ID NO: 77583 - DNA, 25 bp, Homo sapien
caggtcaaagaggctgttgaaagag

SEQ ID NO: 77584 - DNA, 25 bp, Homo sapien
caggtcaaagagcctgttgaaagag

SEQ ID NO: 77585 - DNA, 25 bp, Homo sapien
caagtagactaggttccagactagt

SEQ ID NO: 77586 - DNA, 25 bp, Homo sapien
caagtagactagcttccagactagt

SEQ ID NO: 77587 - DNA, 25 bp, Homo sapien
gacacggtgaagaaacgacaactcg

SEQ ID NO: 77588 - DNA, 25 bp, Homo sapien
gacacggtgaagtaacgacaactcg

SEQ ID NO: 77589 - DNA, 25 bp, Homo sapien
agtagggtgactagacgacgaagtc

SEQ ID NO: 77590 - DNA, 25 bp, Homo sapien
agtagggtgacttgacgacgaagtc

SEQ ID NO: 77591 - DNA, 25 bp, Homo sapien
gagggagtgacttctcgtagtcttc

SEQ ID NO: 77592 - DNA, 25 bp, Homo sapien
gagggagtgactactcgtagtcttc

SEQ ID NO: 77593 - DNA, 25 bp, Homo sapien
ctgagggttacgaaacacagtaata

SEQ ID NO: 77594 - DNA, 25 bp, Homo sapien
ctgagggttacgtaacacagtaata

SEQ ID NO: 77595 - DNA, 25 bp, Homo sapien
gttgtgtaacataattactactgac

SEQ ID NO: 77596 - DNA, 25 bp, Homo sapien
gttgtgtaacattattactactgac

SEQ ID NO: 77597 - DNA, 25 bp, Homo sapien
gacgtccgcctagacacagtgatct

SEQ ID NO: 77598 - DNA, 25 bp, Homo sapien
gacgtccgcctacacacagtgatct

SEQ ID NO: 77599 - DNA, 25 bp, Homo sapien
ggaccacgtatccaacaacagttcg

SEQ ID NO: 77600 - DNA, 25 bp, Homo sapien
ggaccacgtatcgaacaacagttcg

SEQ ID NO: 77601 - DNA, 25 bp, Homo sapien
ccgactgtacactatacagtagtgc

SEQ ID NO: 77602 - DNA, 25 bp, Homo sapien
ccgactgtacacaatacagtagtgc

SEQ ID NO: 77603 - DNA, 25 bp, Homo sapien
gtcgttgtctacagacacttgtaac

SEQ ID NO: 77604 - DNA, 25 bp, Homo sapien
gtcgttgtctactgacacttgtaac

SEQ ID NO: 77605 - DNA, 25 bp, Homo sapien
cgaccgtcaggttagtgtgacgtct

SEQ ID NO: 77606 - DNA, 25 bp, Homo sapien
cgaccgtcaggtaagtgtgacgtct

SEQ ID NO: 77607 - DNA, 25 bp, Homo sapien
tgactactccatacgtacgtgcgtt

SEQ ID NO: 77608 - DNA, 25 bp, Homo sapien
tgactactccattcgtacgtgcgtt

SEQ ID NO: 77609 - DNA, 25 bp, Homo sapien
aagtcgactaccaagtgttatatct

SEQ ID NO: 77610 - DNA, 25 bp, Homo sapien
aagtcgactacctagtgttatatct

SEQ ID NO: 77611 - DNA, 25 bp, Homo sapien
taagtcgtacccacgttactaaggt

SEQ ID NO: 77612 - DNA, 25 bp, Homo sapien
taagtcgtaccctcgttactaaggt

SEQ ID NO: 77613 - DNA, 25 bp, Homo sapien
gtttcgacctactacctgactttgt

SEQ ID NO: 77614 - DNA, 25 bp, Homo sapien
gtttcgacctacaacctgactttgt

SEQ ID NO: 77615 - DNA, 25 bp, Homo sapien
atgtttgcactaaaactagcatgcg

SEQ ID NO: 77616 - DNA, 25 bp, Homo sapien
atgtttgcactataactagcatgcg

SEQ ID NO: 77617 - DNA, 25 bp, Homo sapien
tacttggacaaacaaagtcagcgtc

SEQ ID NO: 77618 - DNA, 25 bp, Homo sapien
tacttggacaaagaaagtcagcgtc

SEQ ID NO: 77619 - DNA, 25 bp, Homo sapien
caacgaagtaaacgaacatttcgtc

SEQ ID NO: 77620 - DNA, 25 bp, Homo sapien
caacgaagtaaaggaacatttcgtc

SEQ ID NO: 77621 - DNA, 25 bp, Homo sapien
caataacgtgtagtgtgtcaaattc

SEQ ID NO: 77622 - DNA, 25 bp, Homo sapien
caataacgtgtactgtgtcaaattc

SEQ ID NO: 77623 - DNA, 25 bp, Homo sapien
gtgtaaaaggatcttctctacatta

SEQ ID NO: 77624 - DNA, 25 bp, Homo sapien
gtgtaaaaggatgttctctacatta

SEQ ID NO: 77625 - DNA, 25 bp, Homo sapien
tttgattaccaacgttgttaatgtc

SEQ ID NO: 77626 - DNA, 25 bp, Homo sapien
tttgattaccaaggttgttaatgtc

SEQ ID NO: 77627 - DNA, 25 bp, Homo sapien
acgggttcaagatcatcataagttt

SEQ ID NO: 77628 - DNA, 25 bp, Homo sapien
acgggttcaagaacatcataagttt

SEQ ID NO: 77629 - DNA, 25 bp, Homo sapien
ggtggtcaatacaaccggaagttat

SEQ ID NO: 77630 - DNA, 25 bp, Homo sapien
ggtggtcaatactaccggaagttat

SEQ ID NO: 77631 - DNA, 25 bp, Homo sapien
tagtgacatcgaccgtttccagacc

SEQ ID NO: 77632 - DNA, 25 bp, Homo sapien
tagtgacatcgagcgtttccagacc

SEQ ID NO: 77633 - DNA, 25 bp, Homo sapien
tgtctcattacgtattgccacactg

SEQ ID NO: 77634 - DNA, 25 bp, Homo sapien
tgtctcattacgaattgccacactg

SEQ ID NO: 77635 - DNA, 25 bp, Homo sapien
caggaagtccaggtgacctcctctt

SEQ ID NO: 77636 - DNA, 25 bp, Homo sapien
caggaagtccagctgacctcctctt

SEQ ID NO: 77637 - DNA, 25 bp, Homo sapien
caagatggactcaaccttcttccga

SEQ ID NO: 77638 - DNA, 25 bp, Homo sapien
caagatggactctaccttcttccga

SEQ ID NO: 77639 - DNA, 25 bp, Homo sapien
cttagtggtggtaactgggaaaccc

SEQ ID NO: 77640 - DNA, 25 bp, Homo sapien
cttagtggtggttactgggaaaccc

SEQ ID NO: 77641 - DNA, 25 bp, Homo sapien
tattgagtagatctggtataaaccc

SEQ ID NO: 77642 - DNA, 25 bp, Homo sapien
tattgagtagatgtggtataaaccc

SEQ ID NO: 77643 - DNA, 25 bp, Homo sapien
tgatatatttgtcgtgatacacact

SEQ ID NO: 77644 - DNA, 25 bp, Homo sapien
tgatatatttgtggtgatacacact

SEQ ID NO: 77645 - DNA, 25 bp, Homo sapien
ctttttgagagtgtaggaaacctac

SEQ ID NO: 77646 - DNA, 25 bp, Homo sapien
ctttttgagagtctaggaaacctac

SEQ ID NO: 77647 - DNA, 25 bp, Homo sapien
agtctttcctggtctgtgaacattg

SEQ ID NO: 77648 - DNA, 25 bp, Homo sapien
agtctttcctggactgtgaacattg

SEQ ID NO: 77649 - DNA, 25 bp, Homo sapien
tttttcggtgactttcaacaataag

SEQ ID NO: 77650 - DNA, 25 bp, Homo sapien
tttttcggtgacattcaacaataag

SEQ ID NO: 77651 - DNA, 25 bp, Homo sapien
tagtcatgtacacgacttccgaaag

SEQ ID NO: 77652 - DNA, 25 bp, Homo sapien
tagtcatgtacaggacttccgaaag

SEQ ID NO: 77653 - DNA, 25 bp, Homo sapien
atcgtcttataaggtctttcaagta

SEQ ID NO: 77654 - DNA, 25 bp, Homo sapien
atcgtcttataacgtctttcaagta

SEQ ID NO: 77655 - DNA, 25 bp, Homo sapien
tttgtctactcatatcgatcaaggt

SEQ ID NO: 77656 - DNA, 25 bp, Homo sapien
tttgtctactcaaatcgatcaaggt

SEQ ID NO: 77657 - DNA, 25 bp, Homo sapien
tgtcactcatcgaacctcagtgagt

SEQ ID NO: 77658 - DNA, 25 bp, Homo sapien
tgtcactcatcgtacctcagtgagt

SEQ ID NO: 77659 - DNA, 25 bp, Homo sapien
gtatcaacatctggaaccacatctg

SEQ ID NO: 77660 - DNA, 25 bp, Homo sapien
gtatcaacatctcgaaccacatctg

SEQ ID NO: 77661 - DNA, 25 bp, Homo sapien
gggactctatctgtaccctgtcggg

SEQ ID NO: 77662 - DNA, 25 bp, Homo sapien
gggactctatctctaccctgtcggg

SEQ ID NO: 77663 - DNA, 25 bp, Homo sapien
gggtcttatgtctccttatatatgt

SEQ ID NO: 77664 - DNA, 25 bp, Homo sapien
gggtcttatgtcaccttatatatgt

SEQ ID NO: 77665 - DNA, 25 bp, Homo sapien
catctacaatctacacggtcatggt

SEQ ID NO: 77666 - DNA, 25 bp, Homo sapien
catctacaatcttcacggtcatggt

SEQ ID NO: 77667 - DNA, 25 bp, Homo sapien
gtgtactgatcacaccgttcacgag

SEQ ID NO: 77668 - DNA, 25 bp, Homo sapien
gtgtactgatcagaccgttcacgag

SEQ ID NO: 77669 - DNA, 25 bp, Homo sapien
tctccttactacaaggacaccgaga

SEQ ID NO: 77670 - DNA, 25 bp, Homo sapien
tctccttactactaggacaccgaga

SEQ ID NO: 77671 - DNA, 25 bp, Homo sapien
ggtttccccttacgactcgactaca

SEQ ID NO: 77672 - DNA, 25 bp, Homo sapien
ggtttccccttaggactcgactaca

SEQ ID NO: 77673 - DNA, 25 bp, Homo sapien
gatcaaacacgtacatttgtacaag

SEQ ID NO: 77674 - DNA, 25 bp, Homo sapien
gatcaaacacgttcatttgtacaag

SEQ ID NO: 77675 - DNA, 25 bp, Homo sapien
cgtcttatacagttacttggttcaa

SEQ ID NO: 77676 - DNA, 25 bp, Homo sapien
cgtcttatacagatacttggttcaa

SEQ ID NO: 77677 - DNA, 25 bp, Homo sapien
tctttacaggatgtgtactatatcg

SEQ ID NO: 77678 - DNA, 25 bp, Homo sapien
tctttacaggatctgtactatatcg

SEQ ID NO: 77679 - DNA, 25 bp, Homo sapien
agtgtcaacttgtgctaccaagtct

SEQ ID NO: 77680 - DNA, 25 bp, Homo sapien
agtgtcaacttgagctaccaagtct

SEQ ID NO: 77681 - DNA, 25 bp, Homo sapien
ggtaaatacggatgtagtaccacaa

SEQ ID NO: 77682 - DNA, 25 bp, Homo sapien
ggtaaatacggaagtagtaccacaa

SEQ ID NO: 77683 - DNA, 25 bp, Homo sapien
tacgactcacggaaggtctcctaag

SEQ ID NO: 77684 - DNA, 25 bp, Homo sapien
tacgactcacggtaggtctcctaag

SEQ ID NO: 77685 - DNA, 25 bp, Homo sapien
cggacctgagcaacgactgtggttg

SEQ ID NO: 77686 - DNA, 25 bp, Homo sapien
cggacctgagcatcgactgtggttg

SEQ ID NO: 77687 - DNA, 25 bp, Homo sapien
gggtccgaagtctcctctgtctctt

SEQ ID NO: 77688 - DNA, 25 bp, Homo sapien
gggtccgaagtcacctctgtctctt

SEQ ID NO: 77689 - DNA, 25 bp, Homo sapien
cgggtccctgtgtcccgtctgtgac

SEQ ID NO: 77690 - DNA, 25 bp, Homo sapien
cgggtccctgtgacccgtctgtgac

SEQ ID NO: 77691 - DNA, 25 bp, Homo sapien
aaagaacgtctctgttctgtttcac

SEQ ID NO: 77692 - DNA, 25 bp, Homo sapien
aaagaacgtctcagttctgtttcac

SEQ ID NO: 77693 - DNA, 25 bp, Homo sapien
cgtacccgagctacaatccttagac

SEQ ID NO: 77694 - DNA, 25 bp, Homo sapien
cgtacccgagcttcaatccttagac

SEQ ID NO: 77695 - DNA, 25 bp, Homo sapien
ccatgaggtcgaagtctaccctgga

SEQ ID NO: 77696 - DNA, 25 bp, Homo sapien
ccatgaggtcgatgtctaccctgga

SEQ ID NO: 77697 - DNA, 25 bp, Homo sapien
ttctgattgtcaatttcattgtcag

SEQ ID NO: 77698 - DNA, 25 bp, Homo sapien
ttctgattgtcattttcattgtcag

SEQ ID NO: 77699 - DNA, 25 bp, Homo sapien
gaacgatttatttcgtgtactgagc

SEQ ID NO: 77700 - DNA, 25 bp, Homo sapien
gaacgatttattacgtgtactgagc

SEQ ID NO: 77701 - DNA, 25 bp, Homo sapien
ttagagtcctgtgaacttggtagtc

SEQ ID NO: 77702 - DNA, 25 bp, Homo sapien
ttagagtcctgtcaacttggtagtc

SEQ ID NO: 77703 - DNA, 25 bp, Homo sapien
actcgtctgtctcgactcaggtaat

SEQ ID NO: 77704 - DNA, 25 bp, Homo sapien
actcgtctgtctggactcaggtaat

SEQ ID NO: 77705 - DNA, 25 bp, Homo sapien
tgacttctccgtaaacgttaggtcc

SEQ ID NO: 77706 - DNA, 25 bp, Homo sapien
tgacttctccgttaacgttaggtcc

SEQ ID NO: 77707 - DNA, 25 bp, Homo sapien
aggactcctctgtggtgcgacaccg

SEQ ID NO: 77708 - DNA, 25 bp, Homo sapien
aggactcctctgaggtgcgacaccg

SEQ ID NO: 77709 - DNA, 25 bp, Homo sapien
cgtgtcttcatgagtcggcacagcg

SEQ ID NO: 77710 - DNA, 25 bp, Homo sapien
cgtgtcttcatgtgtcggcacagcg

SEQ ID NO: 77711 - DNA, 25 bp, Homo sapien
caaaccgatgacttctgtacgacca

SEQ ID NO: 77712 - DNA, 25 bp, Homo sapien
caaaccgatgacatctgtacgacca

SEQ ID NO: 77713 - DNA, 25 bp, Homo sapien
acagtttatcaagatttcacgtaag

SEQ ID NO: 77714 - DNA, 25 bp, Homo sapien
acagtttatcaacatttcacgtaag

SEQ ID NO: 77715 - DNA, 25 bp, Homo sapien
agttgtctaaacctccttctcgtgg

SEQ ID NO: 77716 - DNA, 25 bp, Homo sapien
agttgtctaaacgtccttctcgtgg

SEQ ID NO: 77717 - DNA, 25 bp, Homo sapien
ttctttgtcaaggtcggagttgttc

SEQ ID NO: 77718 - DNA, 25 bp, Homo sapien
ttctttgtcaagctcggagttgttc

SEQ ID NO: 77719 - DNA, 25 bp, Homo sapien
gtttagcacaaatgagtgtctgtct

SEQ ID NO: 77720 - DNA, 25 bp, Homo sapien
gtttagcacaaaagagtgtctgtct

SEQ ID NO: 77721 - DNA, 25 bp, Homo sapien
gggtagagagaacgtttcacgagtc

SEQ ID NO: 77722 - DNA, 25 bp, Homo sapien
gggtagagagaaggtttcacgagtc

SEQ ID NO: 77723 - DNA, 25 bp, Homo sapien
acctgacaggtctcttggcgacgtc

SEQ ID NO: 77724 - DNA, 25 bp, Homo sapien
acctgacaggtcacttggcgacgtc

SEQ ID NO: 77725 - DNA, 25 bp, Homo sapien
cggtaagactggagttcttcagtca

SEQ ID NO: 77726 - DNA, 25 bp, Homo sapien
cggtaagactggtgttcttcagtca

SEQ ID NO: 77727 - DNA, 25 bp, Homo sapien
tactattgatcgtactcctcagaag

SEQ ID NO: 77728 - DNA, 25 bp, Homo sapien
tactattgatcgaactcctcagaag

SEQ ID NO: 77729 - DNA, 25 bp, Homo sapien
gtgtatctttatgagacccctgaac

SEQ ID NO: 77730 - DNA, 25 bp, Homo sapien
gtgtatctttatcagacccctgaac

SEQ ID NO: 77731 - DNA, 25 bp, Homo sapien
tgaacgtcttttcaccccgtgacac

SEQ ID NO: 77732 - DNA, 25 bp, Homo sapien
tgaacgtcttttgaccccgtgacac

SEQ ID NO: 77733 - DNA, 25 bp, Homo sapien
ggtgtcgtgtcttcatgagtcggca

SEQ ID NO: 77734 - DNA, 25 bp, Homo sapien
ggtgtcgtgtctacatgagtcggca

SEQ ID NO: 77735 - DNA, 25 bp, Homo sapien
gatgtcgaggtaagagtcccggtcc

SEQ ID NO: 77736 - DNA, 25 bp, Homo sapien
gatgtcgaggtatgagtcccggtcc

SEQ ID NO: 77737 - DNA, 25 bp, Homo sapien
gtgacggagggacgagatctcaccc

SEQ ID NO: 77738 - DNA, 25 bp, Homo sapien
gtgacggagggaggagatctcaccc

SEQ ID NO: 77739 - DNA, 25 bp, Homo sapien
ctattgagcgaacgacattcagtcc

SEQ ID NO: 77740 - DNA, 25 bp, Homo sapien
ctattgagcgaaggacattcagtcc

SEQ ID NO: 77741 - DNA, 25 bp, Homo sapien
tttgttgtagaaaacacgaaattcc

SEQ ID NO: 77742 - DNA, 25 bp, Homo sapien
tttgttgtagaatacacgaaattcc

SEQ ID NO: 77743 - DNA, 25 bp, Homo sapien
tgttcgtggtgtatgaggaccttca

SEQ ID NO: 77744 - DNA, 25 bp, Homo sapien
tgttcgtggtgtttgaggaccttca

SEQ ID NO: 77745 - DNA, 25 bp, Homo sapien
gtgctccgtgactggacgcagccca

SEQ ID NO: 77746 - DNA, 25 bp, Homo sapien
gtgctccgtgacaggacgcagccca

SEQ ID NO: 77747 - DNA, 25 bp, Homo sapien
ggccttgaagacccgcaccgactac

SEQ ID NO: 77748 - DNA, 25 bp, Homo sapien
ggccttgaagacgcgcaccgactac

SEQ ID NO: 77749 - DNA, 25 bp, Homo sapien
aggttctgtgaggactgggaacatc

SEQ ID NO: 77750 - DNA, 25 bp, Homo sapien
aggttctgtgagcactgggaacatc

SEQ ID NO: 77751 - DNA, 25 bp, Homo sapien
gcgttccgggagcacgaggaccttc

SEQ ID NO: 77752 - DNA, 25 bp, Homo sapien
gcgttccgggaggacgaggaccttc

SEQ ID NO: 77753 - DNA, 25 bp, Homo sapien
gacgtctgtgggagttagtgccttt

SEQ ID NO: 77754 - DNA, 25 bp, Homo sapien
gacgtctgtgggtgttagtgccttt

SEQ ID NO: 77755 - DNA, 25 bp, Homo sapien
tgtacgtctgtgtgtgtaaaccttt

SEQ ID NO: 77756 - DNA, 25 bp, Homo sapien
tgtacgtctgtgagtgtaaaccttt

SEQ ID NO: 77757 - DNA, 25 bp, Homo sapien
tgggcgtgtagtagtcaataccagg

SEQ ID NO: 77758 - DNA, 25 bp, Homo sapien
tgggcgtgtagttgtcaataccagg

SEQ ID NO: 77759 - DNA, 25 bp, Homo sapien
ccgttcaagaccttaggagaccttt

SEQ ID NO: 77760 - DNA, 25 bp, Homo sapien
ccgttcaagaccataggagaccttt

SEQ ID NO: 77761 - DNA, 25 bp, Homo sapien
acgctaacaaccactagggcaggtt

SEQ ID NO: 77762 - DNA, 25 bp, Homo sapien
acgctaacaacctctagggcaggtt

SEQ ID NO: 77763 - DNA, 25 bp, Homo sapien
agaaggaggtcacgagtcccaagat

SEQ ID NO: 77764 - DNA, 25 bp, Homo sapien
agaaggaggtcaggagtcccaagat

SEQ ID NO: 77765 - DNA, 25 bp, Homo sapien
gactgcggcgtcaggcggattacca

SEQ ID NO: 77766 - DNA, 25 bp, Homo sapien
gactgcggcgtctggcggattacca

SEQ ID NO: 77767 - DNA, 25 bp, Homo sapien
attcctgacacgaggggtctaccac

SEQ ID NO: 77768 - DNA, 25 bp, Homo sapien
attcctgacacgtggggtctaccac

SEQ ID NO: 77769 - DNA, 25 bp, Homo sapien
gtccagtccgtgttgcttaagcgag

SEQ ID NO: 77770 - DNA, 25 bp, Homo sapien
gtccagtccgtgatgcttaagcgag

SEQ ID NO: 77771 - DNA, 25 bp, Homo sapien
ggtccgtccgatgtcttcagagtgt

SEQ ID NO: 77772 - DNA, 25 bp, Homo sapien
ggtccgtccgatctcttcagagtgt

SEQ ID NO: 77773 - DNA, 25 bp, Homo sapien
gttcggtcaagtactactgaaatct

SEQ ID NO: 77774 - DNA, 25 bp, Homo sapien
gttcggtcaagttctactgaaatct

SEQ ID NO: 77775 - DNA, 25 bp, Homo sapien
cagtcgtaaagttttgtcgtgagct

SEQ ID NO: 77776 - DNA, 25 bp, Homo sapien
cagtcgtaaagtattgtcgtgagct

SEQ ID NO: 77777 - DNA, 25 bp, Homo sapien
atctcaagtgtttactgtcgtaact

SEQ ID NO: 77778 - DNA, 25 bp, Homo sapien
atctcaagtgttaactgtcgtaact

SEQ ID NO: 77779 - DNA, 25 bp, Homo sapien
gaaagacgtgtaaggtcaaaaccga

SEQ ID NO: 77780 - DNA, 25 bp, Homo sapien
gaaagacgtgtatggtcaaaaccga

SEQ ID NO: 77781 - DNA, 25 bp, Homo sapien
tcggaaaatgtaagccttcactcca

SEQ ID NO: 77782 - DNA, 25 bp, Homo sapien
tcggaaaatgtatgccttcactcca

SEQ ID NO: 77783 - DNA, 25 bp, Homo sapien
tccagtcagtgtcgtccgggtccgg

SEQ ID NO: 77784 - DNA, 25 bp, Homo sapien
tccagtcagtgtggtccgggtccgg

SEQ ID NO: 77785 - DNA, 25 bp, Homo sapien
ggaacatcggagtggagtcacatta

SEQ ID NO: 77786 - DNA, 25 bp, Homo sapien
ggaacatcggagaggagtcacatta

SEQ ID NO: 77787 - DNA, 25 bp, Homo sapien
cgtgtaggagaccactggggtctta

SEQ ID NO: 77788 - DNA, 25 bp, Homo sapien
cgtgtaggagacgactggggtctta

SEQ ID NO: 77789 - DNA, 25 bp, Homo sapien
cacacaggtggacatttgtagttta

SEQ ID NO: 77790 - DNA, 25 bp, Homo sapien
cacacaggtggagatttgtagttta

SEQ ID NO: 77791 - DNA, 25 bp, Homo sapien
cactggtggagtaattgctagtttc

SEQ ID NO: 77792 - DNA, 25 bp, Homo sapien
cactggtggagttattgctagtttc

SEQ ID NO: 77793 - DNA, 25 bp, Homo sapien
gtcatgagtgaaatttccttattct

SEQ ID NO: 77794 - DNA, 25 bp, Homo sapien
gtcatgagtgaattttccttattct

SEQ ID NO: 77795 - DNA, 25 bp, Homo sapien
agaagtcgattttgtccttattact

SEQ ID NO: 77796 - DNA, 25 bp, Homo sapien
agaagtcgatttagtccttattact

SEQ ID NO: 77797 - DNA, 25 bp, Homo sapien
tactcggaagattcctccatagaag

SEQ ID NO: 77798 - DNA, 25 bp, Homo sapien
tactcggaagatacctccatagaag

SEQ ID NO: 77799 - DNA, 25 bp, Homo sapien
gtcgagaacggaacacttaaataag

SEQ ID NO: 77800 - DNA, 25 bp, Homo sapien
gtcgagaacggatcacttaaataag

SEQ ID NO: 77801 - DNA, 25 bp, Homo sapien
catataaacggaacacttaggttga

SEQ ID NO: 77802 - DNA, 25 bp, Homo sapien
catataaacggatcacttaggttga

SEQ ID NO: 77803 - DNA, 25 bp, Homo sapien
taaataccgactcactcacggaaga

SEQ ID NO: 77804 - DNA, 25 bp, Homo sapien
taaataccgactgactcacggaaga

SEQ ID NO: 77805 - DNA, 25 bp, Homo sapien
aggtgaatagtgtcgaaccaactca

SEQ ID NO: 77806 - DNA, 25 bp, Homo sapien
aggtgaatagtgacgaaccaactca

SEQ ID NO: 77807 - DNA, 25 bp, Homo sapien
gtggcatcggtcgagagacgcccgc

SEQ ID NO: 77808 - DNA, 25 bp, Homo sapien
gtggcatcggtccagagacgcccgc

SEQ ID NO: 77809 - DNA, 25 bp, Homo sapien
gagtgacccagacagaaaacaccct

SEQ ID NO: 77810 - DNA, 25 bp, Homo sapien
gagtgacccagagagaaaacaccct

SEQ ID NO: 77811 - DNA, 25 bp, Homo sapien
gatgtaaggagtaaggtcgactcct

SEQ ID NO: 77812 - DNA, 25 bp, Homo sapien
gatgtaaggagttaggtcgactcct

SEQ ID NO: 77813 - DNA, 25 bp, Homo sapien
cagtccgacgaatgacgttccgggg

SEQ ID NO: 77814 - DNA, 25 bp, Homo sapien
cagtccgacgaaagacgttccgggg

SEQ ID NO: 77815 - DNA, 25 bp, Homo sapien
agtgagaccgaggacggtccttgta

SEQ ID NO: 77816 - DNA, 25 bp, Homo sapien
agtgagaccgagcacggtccttgta

SEQ ID NO: 77817 - DNA, 25 bp, Homo sapien
ttaggttcctaatcactgtctgtta

SEQ ID NO: 77818 - DNA, 25 bp, Homo sapien
ttaggttcctaaacactgtctgtta

SEQ ID NO: 77819 - DNA, 25 bp, Homo sapien
ttggtcttctacgacgaacttttag

SEQ ID NO: 77820 - DNA, 25 bp, Homo sapien
ttggtcttctaccacgaacttttag

SEQ ID NO: 77821 - DNA, 25 bp, Homo sapien
tcctgtcgttattcccagaatgttc

SEQ ID NO: 77822 - DNA, 25 bp, Homo sapien
tcctgtcgttatacccagaatgttc

SEQ ID NO: 77823 - DNA, 25 bp, Homo sapien
tgtgtattttccaacgtgtgtagtc

SEQ ID NO: 77824 - DNA, 25 bp, Homo sapien
tgtgtattttcctacgtgtgtagtc

SEQ ID NO: 77825 - DNA, 25 bp, Homo sapien
tttgtgggtcgtccatggtacgatt

SEQ ID NO: 77826 - DNA, 25 bp, Homo sapien
tttgtgggtcgtgcatggtacgatt

SEQ ID NO: 77827 - DNA, 25 bp, Homo sapien
tttttctagacgttgaactgctgat

SEQ ID NO: 77828 - DNA, 25 bp, Homo sapien
tttttctagacgatgaactgctgat

SEQ ID NO: 77829 - DNA, 25 bp, Homo sapien
gttttataacctgaactagacatgt

SEQ ID NO: 77830 - DNA, 25 bp, Homo sapien
gttttataacctcaactagacatgt

SEQ ID NO: 77831 - DNA, 25 bp, Homo sapien
ggttcttcaacgtctaaaaagtcgt

SEQ ID NO: 77832 - DNA, 25 bp, Homo sapien
ggttcttcaacgactaaaaagtcgt

SEQ ID NO: 77833 - DNA, 25 bp, Homo sapien
ccgccagcgacgaactcgacggact

SEQ ID NO: 77834 - DNA, 25 bp, Homo sapien
ccgccagcgacgtactcgacggact

SEQ ID NO: 77835 - DNA, 25 bp, Homo sapien
ttccctctgaccagttatgtcgtcc

SEQ ID NO: 77836 - DNA, 25 bp, Homo sapien
ttccctctgacctgttatgtcgtcc

SEQ ID NO: 77837 - DNA, 25 bp, Homo sapien
cgctctctgtcttgtcagtctcgga

SEQ ID NO: 77838 - DNA, 25 bp, Homo sapien
cgctctctgtctagtcagtctcgga

SEQ ID NO: 77839 - DNA, 25 bp, Homo sapien
ccgttcctgttaatactcgtgttga

SEQ ID NO: 77840 - DNA, 25 bp, Homo sapien
ccgttcctgttattactcgtgttga

SEQ ID NO: 77841 - DNA, 25 bp, Homo sapien
cctgtgcccctctgtgactatagac

SEQ ID NO: 77842 - DNA, 25 bp, Homo sapien
cctgtgcccctcagtgactatagac

SEQ ID NO: 77843 - DNA, 25 bp, Homo sapien
ggtggacgtcctaacaggactaaga

SEQ ID NO: 77844 - DNA, 25 bp, Homo sapien
ggtggacgtccttacaggactaaga

SEQ ID NO: 77845 - DNA, 25 bp, Homo sapien
aagtcgaacccgtcgacctagtaaa

SEQ ID NO: 77846 - DNA, 25 bp, Homo sapien
aagtcgaacccgacgacctagtaaa

SEQ ID NO: 77847 - DNA, 25 bp, Homo sapien
aacggagaacagtcgttctagacaa

SEQ ID NO: 77848 - DNA, 25 bp, Homo sapien
aacggagaacagacgttctagacaa

SEQ ID NO: 77849 - DNA, 25 bp, Homo sapien
taataggaatagacgtacctggttc

SEQ ID NO: 77850 - DNA, 25 bp, Homo sapien
taataggaatagtcgtacctggttc

SEQ ID NO: 77851 - DNA, 25 bp, Homo sapien
gttctaaagaatttgcttcttcgac

SEQ ID NO: 77852 - DNA, 25 bp, Homo sapien
gttctaaagaatatgcttcttcgac

SEQ ID NO: 77853 - DNA, 25 bp, Homo sapien
tcacgattacacatttttacctggg

SEQ ID NO: 77854 - DNA, 25 bp, Homo sapien
tcacgattacacttttttacctggg

SEQ ID NO: 77855 - DNA, 25 bp, Homo sapien
ctcagttcgttttggatctccttta

SEQ ID NO: 77856 - DNA, 25 bp, Homo sapien
ctcagttcgtttaggatctccttta

SEQ ID NO: 77857 - DNA, 25 bp, Homo sapien
ttgacgccgtggtgcgctttctttc

SEQ ID NO: 77858 - DNA, 25 bp, Homo sapien
ttgacgccgtggagcgctttctttc

SEQ ID NO: 77859 - DNA, 25 bp, Homo sapien
tggtcgagggcgaccctgccttgtc

SEQ ID NO: 77860 - DNA, 25 bp, Homo sapien
tggtcgagggcgtccctgccttgtc

SEQ ID NO: 77861 - DNA, 25 bp, Homo sapien
cgtcagggaccttccggaacgcctt

SEQ ID NO: 77862 - DNA, 25 bp, Homo sapien
cgtcagggacctaccggaacgcctt

SEQ ID NO: 77863 - DNA, 25 bp, Homo sapien
tcgttattgacgttgtcagaccgat

SEQ ID NO: 77864 - DNA, 25 bp, Homo sapien
tcgttattgacgatgtcagaccgat

SEQ ID NO: 77865 - DNA, 25 bp, Homo sapien
atctttgtcgtatctagtactcgat

SEQ ID NO: 77866 - DNA, 25 bp, Homo sapien
atctttgtcgtaactagtactcgat

SEQ ID NO: 77867 - DNA, 25 bp, Homo sapien
cggattacacggttaccatactcag

SEQ ID NO: 77868 - DNA, 25 bp, Homo sapien
cggattacacggataccatactcag

SEQ ID NO: 77869 - DNA, 25 bp, Homo sapien
gaggtacagacgtcccggagttcag

SEQ ID NO: 77870 - DNA, 25 bp, Homo sapien
gaggtacagacgacccggagttcag

SEQ ID NO: 77871 - DNA, 25 bp, Homo sapien
agagagtgaccgacgtccttaccca

SEQ ID NO: 77872 - DNA, 25 bp, Homo sapien
agagagtgaccgtcgtccttaccca

SEQ ID NO: 77873 - DNA, 25 bp, Homo sapien
aaataaaccgaatcctacctcggcg

SEQ ID NO: 77874 - DNA, 25 bp, Homo sapien
aaataaaccgaaacctacctcggcg

SEQ ID NO: 77875 - DNA, 25 bp, Homo sapien
gtaaccaccgtgacctcacaggtac

SEQ ID NO: 77876 - DNA, 25 bp, Homo sapien
gtaaccaccgtgtcctcacaggtac

SEQ ID NO: 77877 - DNA, 25 bp, Homo sapien
gcaccgcgaccgcggccgcagtgtc

SEQ ID NO: 77878 - DNA, 25 bp, Homo sapien
gcaccgcgaccggggccgcagtgtc

SEQ ID NO: 77879 - DNA, 25 bp, Homo sapien
aggccgacgcagtgtcggcagcccc

SEQ ID NO: 77880 - DNA, 25 bp, Homo sapien
aggccgacgcagagtcggcagcccc

SEQ ID NO: 77881 - DNA, 25 bp, Homo sapien
ggccggactgtggaacgacaacccg

SEQ ID NO: 77882 - DNA, 25 bp, Homo sapien
ggccggactgtgcaacgacaacccg

SEQ ID NO: 77883 - DNA, 25 bp, Homo sapien
acacactgacttgtattgacatccg

SEQ ID NO: 77884 - DNA, 25 bp, Homo sapien
acacactgacttctattgacatccg

SEQ ID NO: 77885 - DNA, 25 bp, Homo sapien
ggataatcctttcatgtgacaggcg

SEQ ID NO: 77886 - DNA, 25 bp, Homo sapien
ggataatcctttgatgtgacaggcg

SEQ ID NO: 77887 - DNA, 25 bp, Homo sapien
gggcttatgactcgatgtcagaaac

SEQ ID NO: 77888 - DNA, 25 bp, Homo sapien
gggcttatgactggatgtcagaaac

SEQ ID NO: 77889 - DNA, 25 bp, Homo sapien
tataattcgtgtagacttcatggac

SEQ ID NO: 77890 - DNA, 25 bp, Homo sapien
tataattcgtgttgacttcatggac

SEQ ID NO: 77891 - DNA, 25 bp, Homo sapien
tgacagttcaactgtcataagttta

SEQ ID NO: 77892 - DNA, 25 bp, Homo sapien
tgacagttcaacagtcataagttta

SEQ ID NO: 77893 - DNA, 25 bp, Homo sapien
tcgacgagtccgtgaccacccattt

SEQ ID NO: 77894 - DNA, 25 bp, Homo sapien
tcgacgagtccgagaccacccattt

SEQ ID NO: 77895 - DNA, 25 bp, Homo sapien
ggtccgggacaccacctcaaatgtt

SEQ ID NO: 77896 - DNA, 25 bp, Homo sapien
ggtccgggacacgacctcaaatgtt

SEQ ID NO: 77897 - DNA, 25 bp, Homo sapien
aggtccaaatatatccaacgagata

SEQ ID NO: 77898 - DNA, 25 bp, Homo sapien
aggtccaaatatttccaacgagata

SEQ ID NO: 77899 - DNA, 25 bp, Homo sapien
gaaagtccagtgagagcccaaaggg

SEQ ID NO: 77900 - DNA, 25 bp, Homo sapien
gaaagtccagtgtgagcccaaaggg

SEQ ID NO: 77901 - DNA, 25 bp, Homo sapien
ttgtgaatgactagactcaaaattc

SEQ ID NO: 77902 - DNA, 25 bp, Homo sapien
ttgtgaatgacttgactcaaaattc

SEQ ID NO: 77903 - DNA, 25 bp, Homo sapien
ttattagtcacgattctgtacgtag

SEQ ID NO: 77904 - DNA, 25 bp, Homo sapien
ttattagtcacgtttctgtacgtag

SEQ ID NO: 77905 - DNA, 25 bp, Homo sapien
actatctgtcctaagacgtgtctcg

SEQ ID NO: 77906 - DNA, 25 bp, Homo sapien
actatctgtccttagacgtgtctcg

SEQ ID NO: 77907 - DNA, 25 bp, Homo sapien
aaagagtctctactgtgacggttgt

SEQ ID NO: 77908 - DNA, 25 bp, Homo sapien
aaagagtctctagtgtgacggttgt

SEQ ID NO: 77909 - DNA, 25 bp, Homo sapien
tttccaagagtccttcagaagaata

SEQ ID NO: 77910 - DNA, 25 bp, Homo sapien
tttccaagagtcgttcagaagaata

SEQ ID NO: 77911 - DNA, 25 bp, Homo sapien
atcctccgagttttcggttcggatt

SEQ ID NO: 77912 - DNA, 25 bp, Homo sapien
atcctccgagttatcggttcggatt

SEQ ID NO: 77913 - DNA, 25 bp, Homo sapien
cgctccgaagtttgcgttcgtgctc

SEQ ID NO: 77914 - DNA, 25 bp, Homo sapien
cgctccgaagttagcgttcgtgctc

SEQ ID NO: 77915 - DNA, 25 bp, Homo sapien
gacttaccatctcaagtctcggccg

SEQ ID NO: 77916 - DNA, 25 bp, Homo sapien
gacttaccatctgaagtctcggccg

SEQ ID NO: 77917 - DNA, 25 bp, Homo sapien
cctccagtggtacctctgtagttct

SEQ ID NO: 77918 - DNA, 25 bp, Homo sapien
cctccagtggtagctctgtagttct

SEQ ID NO: 77919 - DNA, 25 bp, Homo sapien
catatccatgggtgtcaacatatac

SEQ ID NO: 77920 - DNA, 25 bp, Homo sapien
catatccatgggagtcaacatatac

SEQ ID NO: 77921 - DNA, 25 bp, Homo sapien
gattccaccgaggtcctcgggattg

SEQ ID NO: 77922 - DNA, 25 bp, Homo sapien
gattccaccgagctcctcgggattg

SEQ ID NO: 77923 - DNA, 25 bp, Homo sapien
cttctctcctgtctctccggtttgt

SEQ ID NO: 77924 - DNA, 25 bp, Homo sapien
cttctctcctgtgtctccggtttgt

SEQ ID NO: 77925 - DNA, 25 bp, Homo sapien
gtgtctttgtgattccagtgttgat

SEQ ID NO: 77926 - DNA, 25 bp, Homo sapien
gtgtctttgtgaatccagtgttgat

SEQ ID NO: 77927 - DNA, 25 bp, Homo sapien
aggtcttttaaatccatacttgtgt

SEQ ID NO: 77928 - DNA, 25 bp, Homo sapien
aggtcttttaaaaccatacttgtgt

SEQ ID NO: 77929 - DNA, 25 bp, Homo sapien
tgtcgtttttccaggcatatcttgt

SEQ ID NO: 77930 - DNA, 25 bp, Homo sapien
tgtcgtttttcctggcatatcttgt

SEQ ID NO: 77931 - DNA, 25 bp, Homo sapien
acactgacttttctggttgtccttc

SEQ ID NO: 77932 - DNA, 25 bp, Homo sapien
acactgacttttgtggttgtccttc

SEQ ID NO: 77933 - DNA, 25 bp, Homo sapien
atcgttatggtagagtttggacctc

SEQ ID NO: 77934 - DNA, 25 bp, Homo sapien
atcgttatggtacagtttggacctc

SEQ ID NO: 77935 - DNA, 25 bp, Homo sapien
ctgttggtgtaaccttttgtgaact

SEQ ID NO: 77936 - DNA, 25 bp, Homo sapien
ctgttggtgtaagcttttgtgaact

SEQ ID NO: 77937 - DNA, 25 bp, Homo sapien
tcttatggtccctcagttccgaact

SEQ ID NO: 77938 - DNA, 25 bp, Homo sapien
tcttatggtcccacagttccgaact

SEQ ID NO: 77939 - DNA, 25 bp, Homo sapien
ccgagtatcgagtcgtctacgacca

SEQ ID NO: 77940 - DNA, 25 bp, Homo sapien
ccgagtatcgagacgtctacgacca

SEQ ID NO: 77941 - DNA, 25 bp, Homo sapien
cgtcaagcgtatgaggaggtgtcca

SEQ ID NO: 77942 - DNA, 25 bp, Homo sapien
cgtcaagcgtatcaggaggtgtcca

SEQ ID NO: 77943 - DNA, 25 bp, Homo sapien
ttccttacctctagcgtggtcggaa

SEQ ID NO: 77944 - DNA, 25 bp, Homo sapien
ttccttacctcttgcgtggtcggaa

SEQ ID NO: 77945 - DNA, 25 bp, Homo sapien
ttcctctcttgtgtggtgtcggagg

SEQ ID NO: 77946 - DNA, 25 bp, Homo sapien
ttcctctcttgtctggtgtcggagg

SEQ ID NO: 77947 - DNA, 25 bp, Homo sapien
tttggtgcctttaccgggcttacac

SEQ ID NO: 77948 - DNA, 25 bp, Homo sapien
tttggtgccttttccgggcttacac

SEQ ID NO: 77949 - DNA, 25 bp, Homo sapien
taggtggtcttctccgagaggtaaa

SEQ ID NO: 77950 - DNA, 25 bp, Homo sapien
taggtggtcttcaccgagaggtaaa

SEQ ID NO: 77951 - DNA, 25 bp, Homo sapien
cgatcgactacacaagtactgaaag

SEQ ID NO: 77952 - DNA, 25 bp, Homo sapien
cgatcgactacagaagtactgaaag

SEQ ID NO: 77953 - DNA, 25 bp, Homo sapien
acttcttcactgtcgttcgacaagt

SEQ ID NO: 77954 - DNA, 25 bp, Homo sapien
acttcttcactgacgttcgacaagt

SEQ ID NO: 77955 - DNA, 25 bp, Homo sapien
ggccgtacctctgttacccactgac

SEQ ID NO: 77956 - DNA, 25 bp, Homo sapien
ggccgtacctctcttacccactgac

SEQ ID NO: 77957 - DNA, 25 bp, Homo sapien
aattagacttgtcgttactcccacg

SEQ ID NO: 77958 - DNA, 25 bp, Homo sapien
aattagacttgtggttactcccacg

SEQ ID NO: 77959 - DNA, 25 bp, Homo sapien
ctaataccgtagctctgtgacatcg

SEQ ID NO: 77960 - DNA, 25 bp, Homo sapien
ctaataccgtaggtctgtgacatcg

SEQ ID NO: 77961 - DNA, 25 bp, Homo sapien
acacacgtccggtactgtagacata

SEQ ID NO: 77962 - DNA, 25 bp, Homo sapien
acacacgtccggaactgtagacata

SEQ ID NO: 77963 - DNA, 25 bp, Homo sapien
aacgagcgaaacctggaaccaccaa

SEQ ID NO: 77964 - DNA, 25 bp, Homo sapien
aacgagcgaaacgtggaaccaccaa

SEQ ID NO: 77965 - DNA, 25 bp, Homo sapien
cactcataagggaaacctatacaga

SEQ ID NO: 77966 - DNA, 25 bp, Homo sapien
cactcataagggtaacctatacaga

SEQ ID NO: 77967 - DNA, 25 bp, Homo sapien
gtactgtcatggacatccctacagg

SEQ ID NO: 77968 - DNA, 25 bp, Homo sapien
gtactgtcatggtcatccctacagg

SEQ ID NO: 77969 - DNA, 25 bp, Homo sapien
tagttttcttggtcctacagaaagg

SEQ ID NO: 77970 - DNA, 25 bp, Homo sapien
tagttttcttggacctacagaaagg

SEQ ID NO: 77971 - DNA, 25 bp, Homo sapien
attcgtataactcttcagaagtaga

SEQ ID NO: 77972 - DNA, 25 bp, Homo sapien
attcgtataactgttcagaagtaga

SEQ ID NO: 77973 - DNA, 25 bp, Homo sapien
ggtattactccgaggtcacgaccaa

SEQ ID NO: 77974 - DNA, 25 bp, Homo sapien
ggtattactccgtggtcacgaccaa

SEQ ID NO: 77975 - DNA, 25 bp, Homo sapien
ggagtattattcacggtatgtccca

SEQ ID NO: 77976 - DNA, 25 bp, Homo sapien
ggagtattattctcggtatgtccca

SEQ ID NO: 77977 - DNA, 25 bp, Homo sapien
ttctactcacatcttgtggacccat

SEQ ID NO: 77978 - DNA, 25 bp, Homo sapien
ttctactcacatgttgtggacccat

SEQ ID NO: 77979 - DNA, 25 bp, Homo sapien
taccaccgggctctgtggctctcga

SEQ ID NO: 77980 - DNA, 25 bp, Homo sapien
taccaccgggctgtgtggctctcga

SEQ ID NO: 77981 - DNA, 25 bp, Homo sapien
tctcgaccagtaacccgttgtctca

SEQ ID NO: 77982 - DNA, 25 bp, Homo sapien
tctcgaccagtatcccgttgtctca

SEQ ID NO: 77983 - DNA, 25 bp, Homo sapien
aagttcttggacacgttttgacagt

SEQ ID NO: 77984 - DNA, 25 bp, Homo sapien
aagttcttggactcgttttgacagt

SEQ ID NO: 77985 - DNA, 25 bp, Homo sapien
ccttcatgattttcttctgtcgagt

SEQ ID NO: 77986 - DNA, 25 bp, Homo sapien
ccttcatgatttacttctgtcgagt

SEQ ID NO: 77987 - DNA, 25 bp, Homo sapien
acccttcttgttaccgatttggtgt

SEQ ID NO: 77988 - DNA, 25 bp, Homo sapien
acccttcttgtttccgatttggtgt

SEQ ID NO: 77989 - DNA, 25 bp, Homo sapien
actataacacagaggtcgtccgaaa

SEQ ID NO: 77990 - DNA, 25 bp, Homo sapien
actataacacagtggtcgtccgaaa

SEQ ID NO: 77991 - DNA, 25 bp, Homo sapien
cagtatataagtcgcactgcaaaag

SEQ ID NO: 77992 - DNA, 25 bp, Homo sapien
cagtatataagtggcactgcaaaag

SEQ ID NO: 77993 - DNA, 25 bp, Homo sapien
actgtgaaagtgaaaacgtctaacc

SEQ ID NO: 77994 - DNA, 25 bp, Homo sapien
actgtgaaagtgtaaacgtctaacc

SEQ ID NO: 77995 - DNA, 25 bp, Homo sapien
tatcgttttcactacgttttagaag

SEQ ID NO: 77996 - DNA, 25 bp, Homo sapien
tatcgttttcacaacgttttagaag

SEQ ID NO: 77997 - DNA, 25 bp, Homo sapien
ttatcgttccgtattgttagtgacg

SEQ ID NO: 77998 - DNA, 25 bp, Homo sapien
ttatcgttccgttttgttagtgacg

SEQ ID NO: 77999 - DNA, 25 bp, Homo sapien
gatacttcgttttcatcgataatgg

SEQ ID NO: 78000 - DNA, 25 bp, Homo sapien
gatacttcgtttacatcgataatgg

SEQ ID NO: 78001 - DNA, 25 bp, Homo sapien
gattccgtgcttcgtcactccggtc

SEQ ID NO: 78002 - DNA, 25 bp, Homo sapien
gattccgtgcttggtcactccggtc

SEQ ID NO: 78003 - DNA, 25 bp, Homo sapien
ggtctcttaggttcgtcgtccgtat

SEQ ID NO: 78004 - DNA, 25 bp, Homo sapien
ggtctcttaggtacgtcgtccgtat

SEQ ID NO: 78005 - DNA, 25 bp, Homo sapien
gtggtctcgtcttgtattcgataag

SEQ ID NO: 78006 - DNA, 25 bp, Homo sapien
gtggtctcgtctagtattcgataag

SEQ ID NO: 78007 - DNA, 25 bp, Homo sapien
atttgtagtctcagtgaaccaagga

SEQ ID NO: 78008 - DNA, 25 bp, Homo sapien
atttgtagtctctgtgaaccaagga

SEQ ID NO: 78009 - DNA, 25 bp, Homo sapien
tccctgtcagtgttaactcatctga

SEQ ID NO: 78010 - DNA, 25 bp, Homo sapien
tccctgtcagtgataactcatctga

SEQ ID NO: 78011 - DNA, 25 bp, Homo sapien
tgttagtctctcaagaactcccaag

SEQ ID NO: 78012 - DNA, 25 bp, Homo sapien
tgttagtctctctagaactcccaag

SEQ ID NO: 78013 - DNA, 25 bp, Homo sapien
ccaaaggtccttaccaccgcagagt

SEQ ID NO: 78014 - DNA, 25 bp, Homo sapien
ccaaaggtcctttccaccgcagagt

SEQ ID NO: 78015 - DNA, 25 bp, Homo sapien
caatagttcagtctgtcaacgataa

SEQ ID NO: 78016 - DNA, 25 bp, Homo sapien
caatagttcagtgtgtcaacgataa

SEQ ID NO: 78017 - DNA, 25 bp, Homo sapien
agactagaccaatgtatttacaaga

SEQ ID NO: 78018 - DNA, 25 bp, Homo sapien
agactagaccaaagtatttacaaga

SEQ ID NO: 78019 - DNA, 25 bp, Homo sapien
tgagaaccagtcttctacttaaaat

SEQ ID NO: 78020 - DNA, 25 bp, Homo sapien
tgagaaccagtcatctacttaaaat

SEQ ID NO: 78021 - DNA, 25 bp, Homo sapien
taccgataacgaagtacctgtgaaa

SEQ ID NO: 78022 - DNA, 25 bp, Homo sapien
taccgataacgatgtacctgtgaaa

SEQ ID NO: 78023 - DNA, 25 bp, Homo sapien
tgacgaagtagagactcgggaccga

SEQ ID NO: 78024 - DNA, 25 bp, Homo sapien
tgacgaagtagacactcgggaccga

SEQ ID NO: 78025 - DNA, 25 bp, Homo sapien
ttggtagaaaggaaccaggaacctc

SEQ ID NO: 78026 - DNA, 25 bp, Homo sapien
ttggtagaaaggtaccaggaacctc

SEQ ID NO: 78027 - DNA, 25 bp, Homo sapien
gacgggagacggacccgtcagaccc

SEQ ID NO: 78028 - DNA, 25 bp, Homo sapien
gacgggagacggtcccgtcagaccc

SEQ ID NO: 78029 - DNA, 25 bp, Homo sapien
cgtccgtcgaggtggctccgtagaa

SEQ ID NO: 78030 - DNA, 25 bp, Homo sapien
cgtccgtcgaggaggctccgtagaa

SEQ ID NO: 78031 - DNA, 25 bp, Homo sapien
gtcttcgtccccaggacatcggaac

SEQ ID NO: 78032 - DNA, 25 bp, Homo sapien
gtcttcgtcccctggacatcggaac

SEQ ID NO: 78033 - DNA, 25 bp, Homo sapien
gtcctgcgcgtgtgcttgtcggaca

SEQ ID NO: 78034 - DNA, 25 bp, Homo sapien
gtcctgcgcgtgagcttgtcggaca

SEQ ID NO: 78035 - DNA, 25 bp, Homo sapien
cgtccactccattgtcgtgtgtgta

SEQ ID NO: 78036 - DNA, 25 bp, Homo sapien
cgtccactccatagtcgtgtgtgta

SEQ ID NO: 78037 - DNA, 25 bp, Homo sapien
ggcactaccgcttctctgtgtcgac

SEQ ID NO: 78038 - DNA, 25 bp, Homo sapien
ggcactaccgctactctgtgtcgac

SEQ ID NO: 78039 - DNA, 25 bp, Homo sapien
gaggacccgacactcgactgcacgt

SEQ ID NO: 78040 - DNA, 25 bp, Homo sapien
gaggacccgacagtcgactgcacgt

SEQ ID NO: 78041 - DNA, 25 bp, Homo sapien
ctgtgactacccaagacaggtcacg

SEQ ID NO: 78042 - DNA, 25 bp, Homo sapien
ctgtgactaccctagacaggtcacg

SEQ ID NO: 78043 - DNA, 25 bp, Homo sapien
cctgctgtggacctgaggtagagca

SEQ ID NO: 78044 - DNA, 25 bp, Homo sapien
cctgctgtggacgtgaggtagagca

SEQ ID NO: 78045 - DNA, 25 bp, Homo sapien
atctcctgggacctgtggaaccggt

SEQ ID NO: 78046 - DNA, 25 bp, Homo sapien
atctcctgggacgtgtggaaccggt

SEQ ID NO: 78047 - DNA, 25 bp, Homo sapien
tcttcggtgaagtgtcagtcagtgt

SEQ ID NO: 78048 - DNA, 25 bp, Homo sapien
tcttcggtgaagagtcagtcagtgt

SEQ ID NO: 78049 - DNA, 25 bp, Homo sapien
ccatcggtgataggaacagatcgcg

SEQ ID NO: 78050 - DNA, 25 bp, Homo sapien
ccatcggtgatacgaacagatcgcg

SEQ ID NO: 78051 - DNA, 25 bp, Homo sapien
cttcctcgggtcagtaacgtctcct

SEQ ID NO: 78052 - DNA, 25 bp, Homo sapien
cttcctcgggtctgtaacgtctcct

SEQ ID NO: 78053 - DNA, 25 bp, Homo sapien
cctgttaaacgtttgtctaagatta

SEQ ID NO: 78054 - DNA, 25 bp, Homo sapien
cctgttaaacgtatgtctaagatta

SEQ ID NO: 78055 - DNA, 25 bp, Homo sapien
cttcttgagagagtcggatactgtc

SEQ ID NO: 78056 - DNA, 25 bp, Homo sapien
cttcttgagagactcggatactgtc

SEQ ID NO: 78057 - DNA, 25 bp, Homo sapien
cttgtgtaagtaaattcgatctgtc

SEQ ID NO: 78058 - DNA, 25 bp, Homo sapien
cttgtgtaagtatattcgatctgtc

SEQ ID NO: 78059 - DNA, 25 bp, Homo sapien
gtttgtggtgtcaaacactgtgtac

SEQ ID NO: 78060 - DNA, 25 bp, Homo sapien
gtttgtggtgtctaacactgtgtac

SEQ ID NO: 78061 - DNA, 25 bp, Homo sapien
gtcccgggtcacctgaacagtgtac

SEQ ID NO: 78062 - DNA, 25 bp, Homo sapien
gtcccgggtcacgtgaacagtgtac

SEQ ID NO: 78063 - DNA, 25 bp, Homo sapien
tcctgcggtgcaggaagacgtcgac

SEQ ID NO: 78064 - DNA, 25 bp, Homo sapien
tcctgcggtgcacgaagacgtcgac

SEQ ID NO: 78065 - DNA, 25 bp, Homo sapien
agaactcaggggtacgggtaatacc

SEQ ID NO: 78066 - DNA, 25 bp, Homo sapien
agaactcaggggaacgggtaatacc

SEQ ID NO: 78067 - DNA, 25 bp, Homo sapien
agaaccaggaaaactctgttaaact

SEQ ID NO: 78068 - DNA, 25 bp, Homo sapien
agaaccaggaaatctctgttaaact

SEQ ID NO: 78069 - DNA, 25 bp, Homo sapien
ccaaggtactgtgtagtagagactt

SEQ ID NO: 78070 - DNA, 25 bp, Homo sapien
ccaaggtactgtctagtagagactt

SEQ ID NO: 78071 - DNA, 25 bp, Homo sapien
ccggagtaggacgtaactgaggaca

SEQ ID NO: 78072 - DNA, 25 bp, Homo sapien
ccggagtaggacctaactgaggaca

SEQ ID NO: 78073 - DNA, 25 bp, Homo sapien
gtacgacgtgactttgtacattacc

SEQ ID NO: 78074 - DNA, 25 bp, Homo sapien
gtacgacgtgacattgtacattacc

SEQ ID NO: 78075 - DNA, 25 bp, Homo sapien
gaacataactgtaacgacgattata

SEQ ID NO: 78076 - DNA, 25 bp, Homo sapien
gaacataactgttacgacgattata

SEQ ID NO: 78077 - DNA, 25 bp, Homo sapien
ttttaatcaattggttacgactctg

SEQ ID NO: 78078 - DNA, 25 bp, Homo sapien
ttttaatcaattcgttacgactctg

SEQ ID NO: 78079 - DNA, 25 bp, Homo sapien
tttacaggaactaccgtccgaactt

SEQ ID NO: 78080 - DNA, 25 bp, Homo sapien
tttacaggaacttccgtccgaactt

SEQ ID NO: 78081 - DNA, 25 bp, Homo sapien
gcactgattttcgtctcgtgactat

SEQ ID NO: 78082 - DNA, 25 bp, Homo sapien
gcactgattttcctctcgtgactat

SEQ ID NO: 78083 - DNA, 25 bp, Homo sapien
agtcgtctgattttacttttcacag

SEQ ID NO: 78084 - DNA, 25 bp, Homo sapien
agtcgtctgattatacttttcacag

SEQ ID NO: 78085 - DNA, 25 bp, Homo sapien
gactttaaagtcatttccgtctcga

SEQ ID NO: 78086 - DNA, 25 bp, Homo sapien
gactttaaagtcttttccgtctcga

SEQ ID NO: 78087 - DNA, 25 bp, Homo sapien
gtgtcaagtcgttcgttgtcgttta

SEQ ID NO: 78088 - DNA, 25 bp, Homo sapien
gtgtcaagtcgtacgttgtcgttta

SEQ ID NO: 78089 - DNA, 25 bp, Homo sapien
tacaggaaactggtgaatgtcttac

SEQ ID NO: 78090 - DNA, 25 bp, Homo sapien
tacaggaaactgctgaatgtcttac

SEQ ID NO: 78091 - DNA, 25 bp, Homo sapien
tcacagggtctttttaacccagtgt

SEQ ID NO: 78092 - DNA, 25 bp, Homo sapien
tcacagggtcttattaacccagtgt

SEQ ID NO: 78093 - DNA, 25 bp, Homo sapien
aaggttctatgtcatgagtctcagg

SEQ ID NO: 78094 - DNA, 25 bp, Homo sapien
aaggttctatgtgatgagtctcagg

SEQ ID NO: 78095 - DNA, 25 bp, Homo sapien
atatctttcgtctgatcttctcaag

SEQ ID NO: 78096 - DNA, 25 bp, Homo sapien
atatctttcgtcagatcttctcaag

SEQ ID NO: 78097 - DNA, 25 bp, Homo sapien
ctacgactgtaggagtatcccgaat

SEQ ID NO: 78098 - DNA, 25 bp, Homo sapien
ctacgactgtagcagtatcccgaat

SEQ ID NO: 78099 - DNA, 25 bp, Homo sapien
gacctacccggagtgtcgtcagaac

SEQ ID NO: 78100 - DNA, 25 bp, Homo sapien
gacctacccggactgtcgtcagaac

SEQ ID NO: 78101 - DNA, 25 bp, Homo sapien
cctactgttaccaggagacgtagaa

SEQ ID NO: 78102 - DNA, 25 bp, Homo sapien
cctactgttacctggagacgtagaa

SEQ ID NO: 78103 - DNA, 25 bp, Homo sapien
gagaaaccttcactcagtgactaaa

SEQ ID NO: 78104 - DNA, 25 bp, Homo sapien
gagaaaccttcagtcagtgactaaa

SEQ ID NO: 78105 - DNA, 25 bp, Homo sapien
gtaacagttctcgtcaaacataacg

SEQ ID NO: 78106 - DNA, 25 bp, Homo sapien
gtaacagttctcctcaaacataacg

SEQ ID NO: 78107 - DNA, 25 bp, Homo sapien
gaaaatcgctcgataagtctctaag

SEQ ID NO: 78108 - DNA, 25 bp, Homo sapien
gaaaatcgctcgttaagtctctaag

SEQ ID NO: 78109 - DNA, 25 bp, Homo sapien
cacaagtagaggttactgctaaagt

SEQ ID NO: 78110 - DNA, 25 bp, Homo sapien
cacaagtagaggatactgctaaagt

SEQ ID NO: 78111 - DNA, 25 bp, Homo sapien
acgagtgacccgtctcacgaagagt

SEQ ID NO: 78112 - DNA, 25 bp, Homo sapien
acgagtgacccgactcacgaagagt

SEQ ID NO: 78113 - DNA, 25 bp, Homo sapien
acaagtgtaatcgactcctgtgact

SEQ ID NO: 78114 - DNA, 25 bp, Homo sapien
acaagtgtaatccactcctgtgact

SEQ ID NO: 78115 - DNA, 25 bp, Homo sapien
aacaataacagtgaccccgtctagg

SEQ ID NO: 78116 - DNA, 25 bp, Homo sapien
aacaataacagtcaccccgtctagg

SEQ ID NO: 78117 - DNA, 25 bp, Homo sapien
gtaaaaccgatacaattcagtatcg

SEQ ID NO: 78118 - DNA, 25 bp, Homo sapien
gtaaaaccgatagaattcagtatcg

SEQ ID NO: 78119 - DNA, 25 bp, Homo sapien
ctcaacgaaccaagggacttccttt

SEQ ID NO: 78120 - DNA, 25 bp, Homo sapien
ctcaacgaaccatgggacttccttt

SEQ ID NO: 78121 - DNA, 25 bp, Homo sapien
ccaaaagacagtgtaaagtcttatg

SEQ ID NO: 78122 - DNA, 25 bp, Homo sapien
ccaaaagacagtctaaagtcttatg

SEQ ID NO: 78123 - DNA, 25 bp, Homo sapien
acaaggagacagtgccctcgtttgt

SEQ ID NO: 78124 - DNA, 25 bp, Homo sapien
acaaggagacagagccctcgtttgt

SEQ ID NO: 78125 - DNA, 25 bp, Homo sapien
aaataactttgtgtctagttctcgt

SEQ ID NO: 78126 - DNA, 25 bp, Homo sapien
aaataactttgtctctagttctcgt

SEQ ID NO: 78127 - DNA, 25 bp, Homo sapien
ttttgtaagttgtcctcgttacgtg

SEQ ID NO: 78128 - DNA, 25 bp, Homo sapien
ttttgtaagttgacctcgttacgtg

SEQ ID NO: 78129 - DNA, 25 bp, Homo sapien
acaggtatcgtggagcactcggttg

SEQ ID NO: 78130 - DNA, 25 bp, Homo sapien
acaggtatcgtgcagcactcggttg

SEQ ID NO: 78131 - DNA, 25 bp, Homo sapien
aacgatggtcggactcctctttagt

SEQ ID NO: 78132 - DNA, 25 bp, Homo sapien
aacgatggtcggtctcctctttagt

SEQ ID NO: 78133 - DNA, 25 bp, Homo sapien
tcatcgtagacatagtccgtttcag

SEQ ID NO: 78134 - DNA, 25 bp, Homo sapien
tcatcgtagacaaagtccgtttcag

SEQ ID NO: 78135 - DNA, 25 bp, Homo sapien
tgatcgtacggtaagttcttttaca

SEQ ID NO: 78136 - DNA, 25 bp, Homo sapien
tgatcgtacggttagttcttttaca

SEQ ID NO: 78137 - DNA, 25 bp, Homo sapien
gaaagatcgtatatttctcaaacga

SEQ ID NO: 78138 - DNA, 25 bp, Homo sapien
gaaagatcgtatttttctcaaacga

SEQ ID NO: 78139 - DNA, 25 bp, Homo sapien
agaattttctgttcgatcatatgac

SEQ ID NO: 78140 - DNA, 25 bp, Homo sapien
agaattttctgtacgatcatatgac

SEQ ID NO: 78141 - DNA, 25 bp, Homo sapien
agtcttttcttgtcggtgtttagac

SEQ ID NO: 78142 - DNA, 25 bp, Homo sapien
agtcttttcttgacggtgtttagac

SEQ ID NO: 78143 - DNA, 25 bp, Homo sapien
gtatcgaaggtgacacgggtcctga

SEQ ID NO: 78144 - DNA, 25 bp, Homo sapien
gtatcgaaggtgtcacgggtcctga

SEQ ID NO: 78145 - DNA, 25 bp, Homo sapien
gtaccaacaggcttagtcctctgaa

SEQ ID NO: 78146 - DNA, 25 bp, Homo sapien
gtaccaacaggcatagtcctctgaa

SEQ ID NO: 78147 - DNA, 25 bp, Homo sapien
ttacaaaggagcacaaatctagtaa

SEQ ID NO: 78148 - DNA, 25 bp, Homo sapien
ttacaaaggagctcaaatctagtaa

SEQ ID NO: 78149 - DNA, 25 bp, Homo sapien
caaaggatgtctaaaacgtgtcaag

SEQ ID NO: 78150 - DNA, 25 bp, Homo sapien
caaaggatgtcttaaacgtgtcaag

SEQ ID NO: 78151 - DNA, 25 bp, Homo sapien
cgaccctgtttgtgtgtcggacaag

SEQ ID NO: 78152 - DNA, 25 bp, Homo sapien
cgaccctgtttgagtgtcggacaag

SEQ ID NO: 78153 - DNA, 25 bp, Homo sapien
aagaggcatatttcagtccagaaga

SEQ ID NO: 78154 - DNA, 25 bp, Homo sapien
aagaggcatattacagtccagaaga

SEQ ID NO: 78155 - DNA, 25 bp, Homo sapien
caaacttgtaagttcgagtagtcta

SEQ ID NO: 78156 - DNA, 25 bp, Homo sapien
caaacttgtaagatcgagtagtcta

SEQ ID NO: 78157 - DNA, 25 bp, Homo sapien
tcactgaccttgtgtataggtgtta

SEQ ID NO: 78158 - DNA, 25 bp, Homo sapien
tcactgaccttgagtataggtgtta

SEQ ID NO: 78159 - DNA, 25 bp, Homo sapien
ctacagacggtcacatatgatgtaa

SEQ ID NO: 78160 - DNA, 25 bp, Homo sapien
ctacagacggtctcatatgatgtaa

SEQ ID NO: 78161 - DNA, 25 bp, Homo sapien
aacgacggtacttcggtatatttga

SEQ ID NO: 78162 - DNA, 25 bp, Homo sapien
aacgacggtactacggtatatttga

SEQ ID NO: 78163 - DNA, 25 bp, Homo sapien
ccagtgtagtcaggacttaattgaa

SEQ ID NO: 78164 - DNA, 25 bp, Homo sapien
ccagtgtagtcacgacttaattgaa

SEQ ID NO: 78165 - DNA, 25 bp, Homo sapien
gtgtaagtctcactcttaaaagaac

SEQ ID NO: 78166 - DNA, 25 bp, Homo sapien
gtgtaagtctcagtcttaaaagaac

SEQ ID NO: 78167 - DNA, 25 bp, Homo sapien
tgtttcggtcatcgattaaacaacg

SEQ ID NO: 78168 - DNA, 25 bp, Homo sapien
tgtttcggtcatggattaaacaacg

SEQ ID NO: 78169 - DNA, 25 bp, Homo sapien
ggtcacgtttgaaaggaagtcccct

SEQ ID NO: 78170 - DNA, 25 bp, Homo sapien
ggtcacgtttgataggaagtcccct

SEQ ID NO: 78171 - DNA, 25 bp, Homo sapien
ggttctatttagttaaaacgtcccc

SEQ ID NO: 78172 - DNA, 25 bp, Homo sapien
ggttctatttagataaaacgtcccc

SEQ ID NO: 78173 - DNA, 25 bp, Homo sapien
ttactttgtgaaatatgtctgtcct

SEQ ID NO: 78174 - DNA, 25 bp, Homo sapien
ttactttgtgaattatgtctgtcct

SEQ ID NO: 78175 - DNA, 25 bp, Homo sapien
gttgaatgtacgttcttttcctccc

SEQ ID NO: 78176 - DNA, 25 bp, Homo sapien
gttgaatgtacgatcttttcctccc

SEQ ID NO: 78177 - DNA, 25 bp, Homo sapien
gttaagtacagtattttctgatcca

SEQ ID NO: 78178 - DNA, 25 bp, Homo sapien
gttaagtacagttttttctgatcca

SEQ ID NO: 78179 - DNA, 25 bp, Homo sapien
tgtttagtccgtcttttctgaatca

SEQ ID NO: 78180 - DNA, 25 bp, Homo sapien
tgtttagtccgtgttttctgaatca

SEQ ID NO: 78181 - DNA, 25 bp, Homo sapien
gttagttgtccttttcattagtaca

SEQ ID NO: 78182 - DNA, 25 bp, Homo sapien
gttagttgtcctattcattagtaca

SEQ ID NO: 78183 - DNA, 25 bp, Homo sapien
cagtggaactattagtatcacgagt

SEQ ID NO: 78184 - DNA, 25 bp, Homo sapien
cagtggaactataagtatcacgagt

SEQ ID NO: 78185 - DNA, 25 bp, Homo sapien
ggtcgacaaagacttctcgaagaga

SEQ ID NO: 78186 - DNA, 25 bp, Homo sapien
ggtcgacaaagagttctcgaagaga

SEQ ID NO: 78187 - DNA, 25 bp, Homo sapien
ccaatatactaggtcccgacgtcta

SEQ ID NO: 78188 - DNA, 25 bp, Homo sapien
ccaatatactagctcccgacgtcta

SEQ ID NO: 78189 - DNA, 25 bp, Homo sapien
gacacgggaccgtaacgacgaatcg

SEQ ID NO: 78190 - DNA, 25 bp, Homo sapien
gacacgggaccgaaacgacgaatcg

SEQ ID NO: 78191 - DNA, 25 bp, Homo sapien
gtagggtgactagacgacgaagtct

SEQ ID NO: 78192 - DNA, 25 bp, Homo sapien
gtagggtgactacacgacgaagtct

SEQ ID NO: 78193 - DNA, 25 bp, Homo sapien
cggagcggtcgctacgcgagcttct

SEQ ID NO: 78194 - DNA, 25 bp, Homo sapien
cggagcggtcgcaacgcgagcttct

SEQ ID NO: 78195 - DNA, 25 bp, Homo sapien
actgagggttacgaaacacagtaat

SEQ ID NO: 78196 - DNA, 25 bp, Homo sapien
actgagggttaccaaacacagtaat

SEQ ID NO: 78197 - DNA, 25 bp, Homo sapien
gttgcgtaaagaaatacactatact

SEQ ID NO: 78198 - DNA, 25 bp, Homo sapien
gttgcgtaaagatatacactatact

SEQ ID NO: 78199 - DNA, 25 bp, Homo sapien
tcgtcctctatagacactaccgaac

SEQ ID NO: 78200 - DNA, 25 bp, Homo sapien
tcgtcctctatacacactaccgaac

SEQ ID NO: 78201 - DNA, 25 bp, Homo sapien
tggaccacgtatccaacaacagttc

SEQ ID NO: 78202 - DNA, 25 bp, Homo sapien
tggaccacgtatgcaacaacagttc

SEQ ID NO: 78203 - DNA, 25 bp, Homo sapien
gaaacgacgacttcacaaaagatgg

SEQ ID NO: 78204 - DNA, 25 bp, Homo sapien
gaaacgacgactacacaaaagatgg

SEQ ID NO: 78205 - DNA, 25 bp, Homo sapien
cgtcgtttactactactattagaag

SEQ ID NO: 78206 - DNA, 25 bp, Homo sapien
cgtcgtttactagtactattagaag

SEQ ID NO: 78207 - DNA, 25 bp, Homo sapien
acgactacctcagtatctgtgacga

SEQ ID NO: 78208 - DNA, 25 bp, Homo sapien
acgactacctcactatctgtgacga

SEQ ID NO: 78209 - DNA, 25 bp, Homo sapien
aggactatccacagtatacggtcga

SEQ ID NO: 78210 - DNA, 25 bp, Homo sapien
aggactatccactgtatacggtcga

SEQ ID NO: 78211 - DNA, 25 bp, Homo sapien
taaagtcatccgagttcgtgtctct

SEQ ID NO: 78212 - DNA, 25 bp, Homo sapien
taaagtcatccgtgttcgtgtctct

SEQ ID NO: 78213 - DNA, 25 bp, Homo sapien
accgtcgaccctagtcatacagtgt

SEQ ID NO: 78214 - DNA, 25 bp, Homo sapien
accgtcgacccttgtcatacagtgt

SEQ ID NO: 78215 - DNA, 25 bp, Homo sapien
ggtttcgacctactacctgactttg

SEQ ID NO: 78216 - DNA, 25 bp, Homo sapien
ggtttcgacctagtacctgactttg

SEQ ID NO: 78217 - DNA, 25 bp, Homo sapien
atgtttgacctctatcatctatgtg

SEQ ID NO: 78218 - DNA, 25 bp, Homo sapien
atgtttgacctcaatcatctatgtg

SEQ ID NO: 78219 - DNA, 25 bp, Homo sapien
catttgtgtaattgaaatcatcgtc

SEQ ID NO: 78220 - DNA, 25 bp, Homo sapien
catttgtgtaatagaaatcatcgtc

SEQ ID NO: 78221 - DNA, 25 bp, Homo sapien
tttacgacagaacagaaattccgtg

SEQ ID NO: 78222 - DNA, 25 bp, Homo sapien
tttacgacagaagagaaattccgtg

SEQ ID NO: 78223 - DNA, 25 bp, Homo sapien
ctttaccgtgtagtgagtgattttc

SEQ ID NO: 78224 - DNA, 25 bp, Homo sapien
ctttaccgtgtactgagtgattttc

SEQ ID NO: 78225 - DNA, 25 bp, Homo sapien
gtgtataaagtgtccttttccttac

SEQ ID NO: 78226 - DNA, 25 bp, Homo sapien
gtgtataaagtgaccttttccttac

SEQ ID NO: 78227 - DNA, 25 bp, Homo sapien
gtgttttaaaaccttgtgttacatc

SEQ ID NO: 78228 - DNA, 25 bp, Homo sapien
gtgttttaaaacgttgtgttacatc

SEQ ID NO: 78229 - DNA, 25 bp, Homo sapien
aaggttcaagagtcctagaacttct

SEQ ID NO: 78230 - DNA, 25 bp, Homo sapien
aaggttcaagagacctagaacttct

SEQ ID NO: 78231 - DNA, 25 bp, Homo sapien
gaggactcaaacaccggactcgttc

SEQ ID NO: 78232 - DNA, 25 bp, Homo sapien
gaggactcaaactccggactcgttc

SEQ ID NO: 78233 - DNA, 25 bp, Homo sapien
agtcgacatcgacgtttcctaaggt

SEQ ID NO: 78234 - DNA, 25 bp, Homo sapien
agtcgacatcgaggtttcctaaggt

SEQ ID NO: 78235 - DNA, 25 bp, Homo sapien
cctcaatgatattgcgcacacgacg

SEQ ID NO: 78236 - DNA, 25 bp, Homo sapien
cctcaatgatatagcgcacacgacg

SEQ ID NO: 78237 - DNA, 25 bp, Homo sapien
ccagtccagtgtcacccggtcgtgt

SEQ ID NO: 78238 - DNA, 25 bp, Homo sapien
ccagtccagtgtgacccggtcgtgt

SEQ ID NO: 78239 - DNA, 25 bp, Homo sapien
acggtgtgtctctctttctcccgat

SEQ ID NO: 78240 - DNA, 25 bp, Homo sapien
acggtgtgtctcactttctcccgat

SEQ ID NO: 78241 - DNA, 25 bp, Homo sapien
ttacggggttcacaggttaaccgtc

SEQ ID NO: 78242 - DNA, 25 bp, Homo sapien
ttacggggttcagaggttaaccgtc

SEQ ID NO: 78243 - DNA, 25 bp, Homo sapien
gtctccgatgttatggttaaaccta

SEQ ID NO: 78244 - DNA, 25 bp, Homo sapien
gtctccgatgttttggttaaaccta

SEQ ID NO: 78245 - DNA, 25 bp, Homo sapien
tgatatatttgtcgtgatacacact

SEQ ID NO: 78246 - DNA, 25 bp, Homo sapien
tgatatatttgtggtgatacacact

SEQ ID NO: 78247 - DNA, 25 bp, Homo sapien
catttatgtttagtggagataccct

SEQ ID NO: 78248 - DNA, 25 bp, Homo sapien
catttatgtttactggagataccct

SEQ ID NO: 78249 - DNA, 25 bp, Homo sapien
ttttaccgtcggtcgtgtgccattt

SEQ ID NO: 78250 - DNA, 25 bp, Homo sapien
ttttaccgtcggacgtgtgccattt

SEQ ID NO: 78251 - DNA, 25 bp, Homo sapien
ttttcatgggtattaactaactaag

SEQ ID NO: 78252 - DNA, 25 bp, Homo sapien
ttttcatgggtaataactaactaag

SEQ ID NO: 78253 - DNA, 25 bp, Homo sapien
tggtcacggtaacgacttccagaag

SEQ ID NO: 78254 - DNA, 25 bp, Homo sapien
tggtcacggtaaggacttccagaag

SEQ ID NO: 78255 - DNA, 25 bp, Homo sapien
gagcgtcctaaagtcattacatata

SEQ ID NO: 78256 - DNA, 25 bp, Homo sapien
gagcgtcctaaactcattacatata

SEQ ID NO: 78257 - DNA, 25 bp, Homo sapien
cttttactatcataaatacatgact

SEQ ID NO: 78258 - DNA, 25 bp, Homo sapien
cttttactatcaaaaatacatgact

SEQ ID NO: 78259 - DNA, 25 bp, Homo sapien
ctcctgtcctcagaaccttactgag

SEQ ID NO: 78260 - DNA, 25 bp, Homo sapien
ctcctgtcctcacaaccttactgag

SEQ ID NO: 78261 - DNA, 25 bp, Homo sapien
tatcatcggttggaacctttacagt

SEQ ID NO: 78262 - DNA, 25 bp, Homo sapien
tatcatcggttgcaacctttacagt

SEQ ID NO: 78263 - DNA, 25 bp, Homo sapien
cggactctcgtcacaccattcgggt

SEQ ID NO: 78264 - DNA, 25 bp, Homo sapien
cggactctcgtctcaccattcgggt

SEQ ID NO: 78265 - DNA, 25 bp, Homo sapien
ggactactgtttacctaagatatgt

SEQ ID NO: 78266 - DNA, 25 bp, Homo sapien
ggactactgttttcctaagatatgt

SEQ ID NO: 78267 - DNA, 25 bp, Homo sapien
acatctacaatctacacggtcatgg

SEQ ID NO: 78268 - DNA, 25 bp, Homo sapien
acatctacaatcaacacggtcatgg

SEQ ID NO: 78269 - DNA, 25 bp, Homo sapien
cgtgtactgatcacaccgttcacga

SEQ ID NO: 78270 - DNA, 25 bp, Homo sapien
cgtgtactgatctcaccgttcacga

SEQ ID NO: 78271 - DNA, 25 bp, Homo sapien
tgtcgactcaccacagatatcgaga

SEQ ID NO: 78272 - DNA, 25 bp, Homo sapien
tgtcgactcacctcagatatcgaga

SEQ ID NO: 78273 - DNA, 25 bp, Homo sapien
agaggttatcccatatagactccaa

SEQ ID NO: 78274 - DNA, 25 bp, Homo sapien
agaggttatcccttatagactccaa

SEQ ID NO: 78275 - DNA, 25 bp, Homo sapien
gaacgaaccacgttcaatttacgaa

SEQ ID NO: 78276 - DNA, 25 bp, Homo sapien
gaacgaaccacgatcaatttacgaa

SEQ ID NO: 78277 - DNA, 25 bp, Homo sapien
gtgacaatacagtcttctttcacag

SEQ ID NO: 78278 - DNA, 25 bp, Homo sapien
gtgacaatacagacttctttcacag

SEQ ID NO: 78279 - DNA, 25 bp, Homo sapien
ctttacaggatgtgtactatatcgt

SEQ ID NO: 78280 - DNA, 25 bp, Homo sapien
ctttacaggatgagtactatatcgt

SEQ ID NO: 78281 - DNA, 25 bp, Homo sapien
taggtacaattggtgtacaccaatt

SEQ ID NO: 78282 - DNA, 25 bp, Homo sapien
taggtacaattgctgtacaccaatt

SEQ ID NO: 78283 - DNA, 25 bp, Homo sapien
acgttaaatcggtgacgagacaaac

SEQ ID NO: 78284 - DNA, 25 bp, Homo sapien
acgttaaatcggagacgagacaaac

SEQ ID NO: 78285 - DNA, 25 bp, Homo sapien
taacatacgacgacggtcacatata

SEQ ID NO: 78286 - DNA, 25 bp, Homo sapien
taacatacgacgtcggtcacatata

SEQ ID NO: 78287 - DNA, 25 bp, Homo sapien
gacatcgtgacatccgtgtgtgttg

SEQ ID NO: 78288 - DNA, 25 bp, Homo sapien
gacatcgtgacaaccgtgtgtgttg

SEQ ID NO: 78289 - DNA, 25 bp, Homo sapien
aaggtccgaaacaccgttgtggtgt

SEQ ID NO: 78290 - DNA, 25 bp, Homo sapien
aaggtccgaaactccgttgtggtgt

SEQ ID NO: 78291 - DNA, 25 bp, Homo sapien
cgaggtccatgtcctgtcgctttga

SEQ ID NO: 78292 - DNA, 25 bp, Homo sapien
cgaggtccatgtgctgtcgctttga

SEQ ID NO: 78293 - DNA, 25 bp, Homo sapien
ccggcccgaggtgaaactacgcaaa

SEQ ID NO: 78294 - DNA, 25 bp, Homo sapien
ccggcccgaggtcaaactacgcaaa

SEQ ID NO: 78295 - DNA, 25 bp, Homo sapien
gtgccggcttacaacgtccgatgag

SEQ ID NO: 78296 - DNA, 25 bp, Homo sapien
gtgccggcttactacgtccgatgag

SEQ ID NO: 78297 - DNA, 25 bp, Homo sapien
ccctctgggtaaattacacctgtga

SEQ ID NO: 78298 - DNA, 25 bp, Homo sapien
ccctctgggtaatttacacctgtga

SEQ ID NO: 78299 - DNA, 25 bp, Homo sapien
tcttttcgtacaattgcattgtctg

SEQ ID NO: 78300 - DNA, 25 bp, Homo sapien
tcttttcgtacatttgcattgtctg

SEQ ID NO: 78301 - DNA, 25 bp, Homo sapien
ggacttaatattcactgtctgtacc

SEQ ID NO: 78302 - DNA, 25 bp, Homo sapien
ggacttaatattgactgtctgtacc

SEQ ID NO: 78303 - DNA, 25 bp, Homo sapien
actgtaccacgtgacacttggactc

SEQ ID NO: 78304 - DNA, 25 bp, Homo sapien
actgtaccacgtcacacttggactc

SEQ ID NO: 78305 - DNA, 25 bp, Homo sapien
ccgtccgtcgtccagtcagtggact

SEQ ID NO: 78306 - DNA, 25 bp, Homo sapien
ccgtccgtcgtcgagtcagtggact

SEQ ID NO: 78307 - DNA, 25 bp, Homo sapien
aaatcccacgtttacgtgtggtcct

SEQ ID NO: 78308 - DNA, 25 bp, Homo sapien
aaatcccacgttaacgtgtggtcct

SEQ ID NO: 78309 - DNA, 25 bp, Homo sapien
gccatccacgtgtggtggactccgt

SEQ ID NO: 78310 - DNA, 25 bp, Homo sapien
gccatccacgtgaggtggactccgt

SEQ ID NO: 78311 - DNA, 25 bp, Homo sapien
ccgttgtaaatgagcgagcgacggc

SEQ ID NO: 78312 - DNA, 25 bp, Homo sapien
ccgttgtaaatgtgcgagcgacggc

SEQ ID NO: 78313 - DNA, 25 bp, Homo sapien
acaacaaatgaggtctgacgtacaa

SEQ ID NO: 78314 - DNA, 25 bp, Homo sapien
acaacaaatgagctctgacgtacaa

SEQ ID NO: 78315 - DNA, 25 bp, Homo sapien
catcactataaaccatttcgtcaag

SEQ ID NO: 78316 - DNA, 25 bp, Homo sapien
catcactataaagcatttcgtcaag

SEQ ID NO: 78317 - DNA, 25 bp, Homo sapien
agtcacgtataagataccttttaag

SEQ ID NO: 78318 - DNA, 25 bp, Homo sapien
agtcacgtataacataccttttaag

SEQ ID NO: 78319 - DNA, 25 bp, Homo sapien
ttatcctgtacacttccattgtagg

SEQ ID NO: 78320 - DNA, 25 bp, Homo sapien
ttatcctgtacagttccattgtagg

SEQ ID NO: 78321 - DNA, 25 bp, Homo sapien
tattcagtccaattaatgtctcgtg

SEQ ID NO: 78322 - DNA, 25 bp, Homo sapien
tattcagtccaaataatgtctcgtg

SEQ ID NO: 78323 - DNA, 25 bp, Homo sapien
gtatcgtagaagaggttgtccacgc

SEQ ID NO: 78324 - DNA, 25 bp, Homo sapien
gtatcgtagaagtggttgtccacgc

SEQ ID NO: 78325 - DNA, 25 bp, Homo sapien
catgtcggtgtcgttatggcgagtc

SEQ ID NO: 78326 - DNA, 25 bp, Homo sapien
catgtcggtgtccttatggcgagtc

SEQ ID NO: 78327 - DNA, 25 bp, Homo sapien
cgttagcggcgtcttctgtggttac

SEQ ID NO: 78328 - DNA, 25 bp, Homo sapien
cgttagcggcgtgttctgtggttac

SEQ ID NO: 78329 - DNA, 25 bp, Homo sapien
gtaaatgactgttacgtctcttaaa

SEQ ID NO: 78330 - DNA, 25 bp, Homo sapien
gtaaatgactgtaacgtctcttaaa

SEQ ID NO: 78331 - DNA, 25 bp, Homo sapien
gtgtgttcatttgatctctcttaaa

SEQ ID NO: 78332 - DNA, 25 bp, Homo sapien
gtgtgttcatttcatctctcttaaa

SEQ ID NO: 78333 - DNA, 25 bp, Homo sapien
tgaaccgtttacagaccgcctaacc

SEQ ID NO: 78334 - DNA, 25 bp, Homo sapien
tgaaccgtttactgaccgcctaacc

SEQ ID NO: 78335 - DNA, 25 bp, Homo sapien
gggtcgtcttcgtcccgagtcagca

SEQ ID NO: 78336 - DNA, 25 bp, Homo sapien
gggtcgtcttcgacccgagtcagca

SEQ ID NO: 78337 - DNA, 25 bp, Homo sapien
gggtcgtcaccgacatcattgtctc

SEQ ID NO: 78338 - DNA, 25 bp, Homo sapien
gggtcgtcaccgtcatcattgtctc

SEQ ID NO: 78339 - DNA, 25 bp, Homo sapien
tgtgggtgttgtcgagactttcctc

SEQ ID NO: 78340 - DNA, 25 bp, Homo sapien
tgtgggtgttgtggagactttcctc

SEQ ID NO: 78341 - DNA, 25 bp, Homo sapien
tattgagcgaacgacattcagtcct

SEQ ID NO: 78342 - DNA, 25 bp, Homo sapien
tattgagcgaaccacattcagtcct

SEQ ID NO: 78343 - DNA, 25 bp, Homo sapien
gtttttcgaggaatcacaaactttt

SEQ ID NO: 78344 - DNA, 25 bp, Homo sapien
gtttttcgaggattcacaaactttt

SEQ ID NO: 78345 - DNA, 25 bp, Homo sapien
ttgttgtcggtgattcttcccttcc

SEQ ID NO: 78346 - DNA, 25 bp, Homo sapien
ttgttgtcggtgtttcttcccttcc

SEQ ID NO: 78347 - DNA, 25 bp, Homo sapien
tgtgaccggagttgggtcacaccca

SEQ ID NO: 78348 - DNA, 25 bp, Homo sapien
tgtgaccggagtagggtcacaccca

SEQ ID NO: 78349 - DNA, 25 bp, Homo sapien
ggtccgtcgtaaaaacccaccgaca

SEQ ID NO: 78350 - DNA, 25 bp, Homo sapien
ggtccgtcgtaataacccaccgaca

SEQ ID NO: 78351 - DNA, 25 bp, Homo sapien
gtgtctactgtggaagaggaccatc

SEQ ID NO: 78352 - DNA, 25 bp, Homo sapien
gtgtctactgtgcaagaggaccatc

SEQ ID NO: 78353 - DNA, 25 bp, Homo sapien
gtctcaggtgagacaggacgcagac

SEQ ID NO: 78354 - DNA, 25 bp, Homo sapien
gtctcaggtgagtcaggacgcagac

SEQ ID NO: 78355 - DNA, 25 bp, Homo sapien
agtcctgcggcgatcaggcgccact

SEQ ID NO: 78356 - DNA, 25 bp, Homo sapien
agtcctgcggcgttcaggcgccact

SEQ ID NO: 78357 - DNA, 25 bp, Homo sapien
ggtgtactcaggtgtgtcacctttt

SEQ ID NO: 78358 - DNA, 25 bp, Homo sapien
ggtgtactcaggagtgtcacctttt

SEQ ID NO: 78359 - DNA, 25 bp, Homo sapien
ggggacgtaagtatacatacccagg

SEQ ID NO: 78360 - DNA, 25 bp, Homo sapien
ggggacgtaagtttacatacccagg

SEQ ID NO: 78361 - DNA, 25 bp, Homo sapien
aagtcctaaaccttcgaagaccttg

SEQ ID NO: 78362 - DNA, 25 bp, Homo sapien
aagtcctaaaccatcgaagaccttg

SEQ ID NO: 78363 - DNA, 25 bp, Homo sapien
aagaccacaaacacccggtcagttt

SEQ ID NO: 78364 - DNA, 25 bp, Homo sapien
aagaccacaaactcccggtcagttt

SEQ ID NO: 78365 - DNA, 25 bp, Homo sapien
agacaaagagactcccggcaggact

SEQ ID NO: 78366 - DNA, 25 bp, Homo sapien
agacaaagagacacccggcaggact

SEQ ID NO: 78367 - DNA, 25 bp, Homo sapien
agacacggggtcacccgtagtggca

SEQ ID NO: 78368 - DNA, 25 bp, Homo sapien
agacacggggtctcccgtagtggca

SEQ ID NO: 78369 - DNA, 25 bp, Homo sapien
gattcctgacacgaggggtctacca

SEQ ID NO: 78370 - DNA, 25 bp, Homo sapien
gattcctgacaccaggggtctacca

SEQ ID NO: 78371 - DNA, 25 bp, Homo sapien
atccagtcctcgagtcttcacggtg

SEQ ID NO: 78372 - DNA, 25 bp, Homo sapien
atccagtcctcgtgtcttcacggtg

SEQ ID NO: 78373 - DNA, 25 bp, Homo sapien
gttgcgtccgaagtcactcatgtgt

SEQ ID NO: 78374 - DNA, 25 bp, Homo sapien
gttgcgtccgaactcactcatgtgt

SEQ ID NO: 78375 - DNA, 25 bp, Homo sapien
ggttcggaagagaccgtagtaaatc

SEQ ID NO: 78376 - DNA, 25 bp, Homo sapien
ggttcggaagagtccgtagtaaatc

SEQ ID NO: 78377 - DNA, 25 bp, Homo sapien
gacgtgtagaatcgttagtgtaatc

SEQ ID NO: 78378 - DNA, 25 bp, Homo sapien
gacgtgtagaatggttagtgtaatc

SEQ ID NO: 78379 - DNA, 25 bp, Homo sapien
agttatacatgtttagtcgtacttc

SEQ ID NO: 78380 - DNA, 25 bp, Homo sapien
agttatacatgtatagtcgtacttc

SEQ ID NO: 78381 - DNA, 25 bp, Homo sapien
ataaaactcgtaatgtcaaacctgg

SEQ ID NO: 78382 - DNA, 25 bp, Homo sapien
ataaaactcgtattgtcaaacctgg

SEQ ID NO: 78383 - DNA, 25 bp, Homo sapien
cggaaaacttatagctatccacaag

SEQ ID NO: 78384 - DNA, 25 bp, Homo sapien
cggaaaacttattgctatccacaag

SEQ ID NO: 78385 - DNA, 25 bp, Homo sapien
aatttgtgtcgtcaactcgactcac

SEQ ID NO: 78386 - DNA, 25 bp, Homo sapien
aatttgtgtcgtgaactcgactcac

SEQ ID NO: 78387 - DNA, 25 bp, Homo sapien
tgaacatctgtgtcggcccgttcta

SEQ ID NO: 78388 - DNA, 25 bp, Homo sapien
tgaacatctgtgacggcccgttcta

SEQ ID NO: 78389 - DNA, 25 bp, Homo sapien
acctaatagtaccactggttgttaa

SEQ ID NO: 78390 - DNA, 25 bp, Homo sapien
acctaatagtacgactggttgttaa

SEQ ID NO: 78391 - DNA, 25 bp, Homo sapien
gaagaggtaggagtatgttggttaa

SEQ ID NO: 78392 - DNA, 25 bp, Homo sapien
gaagaggtaggactatgttggttaa

SEQ ID NO: 78393 - DNA, 25 bp, Homo sapien
gccaggtggtgtcattccgtgttta

SEQ ID NO: 78394 - DNA, 25 bp, Homo sapien
gccaggtggtgtgattccgtgttta

SEQ ID NO: 78395 - DNA, 25 bp, Homo sapien
ggtcatgaggttatgttccttattc

SEQ ID NO: 78396 - DNA, 25 bp, Homo sapien
ggtcatgaggttttgttccttattc

SEQ ID NO: 78397 - DNA, 25 bp, Homo sapien
aagaagtcgattttgtccttattac

SEQ ID NO: 78398 - DNA, 25 bp, Homo sapien
aagaagtcgattatgtccttattac

SEQ ID NO: 78399 - DNA, 25 bp, Homo sapien
gtaccgaaaagttcatcctaaaagt

SEQ ID NO: 78400 - DNA, 25 bp, Homo sapien
gtaccgaaaagtacatcctaaaagt

SEQ ID NO: 78401 - DNA, 25 bp, Homo sapien
tgtcgaagacggaacctccaacttg

SEQ ID NO: 78402 - DNA, 25 bp, Homo sapien
tgtcgaagacggtacctccaacttg

SEQ ID NO: 78403 - DNA, 25 bp, Homo sapien
cgttacaaacggatcctttgtctta

SEQ ID NO: 78404 - DNA, 25 bp, Homo sapien
cgttacaaacggttcctttgtctta

SEQ ID NO: 78405 - DNA, 25 bp, Homo sapien
aacgaaccgttcctcactgacaacg

SEQ ID NO: 78406 - DNA, 25 bp, Homo sapien
aacgaaccgttcgtcactgacaacg

SEQ ID NO: 78407 - DNA, 25 bp, Homo sapien
tgaaaaatagcgtcaaccaacttag

SEQ ID NO: 78408 - DNA, 25 bp, Homo sapien
tgaaaaatagcgacaaccaacttag

SEQ ID NO: 78409 - DNA, 25 bp, Homo sapien
gtgacaatgtgcaaaacggactcgg

SEQ ID NO: 78410 - DNA, 25 bp, Homo sapien
gtgacaatgtgctaaacggactcgg

SEQ ID NO: 78411 - DNA, 25 bp, Homo sapien
ggtcacccaagtcaaaaacacgtcc

SEQ ID NO: 78412 - DNA, 25 bp, Homo sapien
ggtcacccaagtgaaaaacacgtcc

SEQ ID NO: 78413 - DNA, 25 bp, Homo sapien
aagtcggaggacaaggacgactacc

SEQ ID NO: 78414 - DNA, 25 bp, Homo sapien
aagtcggaggactaggacgactacc

SEQ ID NO: 78415 - DNA, 25 bp, Homo sapien
gtagacacgcgatacatgtccgggc

SEQ ID NO: 78416 - DNA, 25 bp, Homo sapien
gtagacacgcgaaacatgtccgggc

SEQ ID NO: 78417 - DNA, 25 bp, Homo sapien
tagaggagaccaacaggtccttagc

SEQ ID NO: 78418 - DNA, 25 bp, Homo sapien
tagaggagaccatcaggtccttagc

SEQ ID NO: 78419 - DNA, 25 bp, Homo sapien
aggtagtcacaagacgttctgtcac

SEQ ID NO: 78420 - DNA, 25 bp, Homo sapien
aggtagtcacaacacgttctgtcac

SEQ ID NO: 78421 - DNA, 25 bp, Homo sapien
ttaggtggtcaaagaacttcgttac

SEQ ID NO: 78422 - DNA, 25 bp, Homo sapien
ttaggtggtcaatgaacttcgttac

SEQ ID NO: 78423 - DNA, 25 bp, Homo sapien
tcttagcgttccaccacgacatttc

SEQ ID NO: 78424 - DNA, 25 bp, Homo sapien
tcttagcgttcctccacgacatttc

SEQ ID NO: 78425 - DNA, 25 bp, Homo sapien
tttataatctccaacagtgtagtag

SEQ ID NO: 78426 - DNA, 25 bp, Homo sapien
tttataatctcctacagtgtagtag

SEQ ID NO: 78427 - DNA, 25 bp, Homo sapien
tttgtggttcccagcgacgtgtatt

SEQ ID NO: 78428 - DNA, 25 bp, Homo sapien
tttgtggttccctgcgacgtgtatt

SEQ ID NO: 78429 - DNA, 25 bp, Homo sapien
ttttaagtcgggtacacgtcgtgtt

SEQ ID NO: 78430 - DNA, 25 bp, Homo sapien
ttttaagtcgggaacacgtcgtgtt

SEQ ID NO: 78431 - DNA, 25 bp, Homo sapien
agttttataacctgaactagacatg

SEQ ID NO: 78432 - DNA, 25 bp, Homo sapien
agttttataaccagaactagacatg

SEQ ID NO: 78433 - DNA, 25 bp, Homo sapien
gtatcgttcaagctcaaagacgggt

SEQ ID NO: 78434 - DNA, 25 bp, Homo sapien
gtatcgttcaaggtcaaagacgggt

SEQ ID NO: 78435 - DNA, 25 bp, Homo sapien
aacctccaggactagtcagacgact

SEQ ID NO: 78436 - DNA, 25 bp, Homo sapien
aacctccaggacaagtcagacgact

SEQ ID NO: 78437 - DNA, 25 bp, Homo sapien
ttaccactctagtgtttatggtcac

SEQ ID NO: 78438 - DNA, 25 bp, Homo sapien
ttaccactctagagtttatggtcac

SEQ ID NO: 78439 - DNA, 25 bp, Homo sapien
cgctctctgtcttgtcagtctcgga

SEQ ID NO: 78440 - DNA, 25 bp, Homo sapien
cgctctctgtctagtcagtctcgga

SEQ ID NO: 78441 - DNA, 25 bp, Homo sapien
gggttcacttgaatcgtgtctctga

SEQ ID NO: 78442 - DNA, 25 bp, Homo sapien
gggttcacttgattcgtgtctctga

SEQ ID NO: 78443 - DNA, 25 bp, Homo sapien
tcccttgctccgtctgtgtttgtac

SEQ ID NO: 78444 - DNA, 25 bp, Homo sapien
tcccttgctccgactgtgtttgtac

SEQ ID NO: 78445 - DNA, 25 bp, Homo sapien
cgtggctctcgttctagtgtctcaa

SEQ ID NO: 78446 - DNA, 25 bp, Homo sapien
cgtggctctcgtactagtgtctcaa

SEQ ID NO: 78447 - DNA, 25 bp, Homo sapien
aagtgagtcctggacgacccgaaca

SEQ ID NO: 78448 - DNA, 25 bp, Homo sapien
aagtgagtcctgcacgacccgaaca

SEQ ID NO: 78449 - DNA, 25 bp, Homo sapien
gacggaacactgtcctactaaacta

SEQ ID NO: 78450 - DNA, 25 bp, Homo sapien
gacggaacactgacctactaaacta

SEQ ID NO: 78451 - DNA, 25 bp, Homo sapien
ctaccaaaatagagctctaggtctc

SEQ ID NO: 78452 - DNA, 25 bp, Homo sapien
ctaccaaaatagtgctctaggtctc

SEQ ID NO: 78453 - DNA, 25 bp, Homo sapien
gttacaaatagaagttgtcctttgc

SEQ ID NO: 78454 - DNA, 25 bp, Homo sapien
gttacaaatagatgttgtcctttgc

SEQ ID NO: 78455 - DNA, 25 bp, Homo sapien
gtcacaaataatcgttctaccttgg

SEQ ID NO: 78456 - DNA, 25 bp, Homo sapien
gtcacaaataatggttctaccttgg

SEQ ID NO: 78457 - DNA, 25 bp, Homo sapien
tccgggtttatgttacttccttgtg

SEQ ID NO: 78458 - DNA, 25 bp, Homo sapien
tccgggtttatgatacttccttgtg

SEQ ID NO: 78459 - DNA, 25 bp, Homo sapien
tatggtcatgtgtccctttctatta

SEQ ID NO: 78460 - DNA, 25 bp, Homo sapien
tatggtcatgtgaccctttctatta

SEQ ID NO: 78461 - DNA, 25 bp, Homo sapien
tcgagtctggggacccggtctttga

SEQ ID NO: 78462 - DNA, 25 bp, Homo sapien
tcgagtctggggtcccggtctttga

SEQ ID NO: 78463 - DNA, 25 bp, Homo sapien
gagtcacgggacacccggttcccga

SEQ ID NO: 78464 - DNA, 25 bp, Homo sapien
gagtcacgggactcccggttcccga

SEQ ID NO: 78465 - DNA, 25 bp, Homo sapien
gtcgatattccttcgtcagacacat

SEQ ID NO: 78466 - DNA, 25 bp, Homo sapien
gtcgatattcctacgtcagacacat

SEQ ID NO: 78467 - DNA, 25 bp, Homo sapien
catctaggtcgtcagtgagtactca

SEQ ID NO: 78468 - DNA, 25 bp, Homo sapien
catctaggtcgtgagtgagtactca

SEQ ID NO: 78469 - DNA, 25 bp, Homo sapien
agacttaccggaggtcatacgacag

SEQ ID NO: 78470 - DNA, 25 bp, Homo sapien
agacttaccggacgtcatacgacag

SEQ ID NO: 78471 - DNA, 25 bp, Homo sapien
gaagacgaacccacgaacgtgtcag

SEQ ID NO: 78472 - DNA, 25 bp, Homo sapien
gaagacgaaccctcgaacgtgtcag

SEQ ID NO: 78473 - DNA, 25 bp, Homo sapien
ggagaagtgaagactttctacccta

SEQ ID NO: 78474 - DNA, 25 bp, Homo sapien
ggagaagtgaagtctttctacccta

SEQ ID NO: 78475 - DNA, 25 bp, Homo sapien
cgaaaaagacgattcctcgtcccgg

SEQ ID NO: 78476 - DNA, 25 bp, Homo sapien
cgaaaaagacgaatcctcgtcccgg

SEQ ID NO: 78477 - DNA, 25 bp, Homo sapien
gagacccccgtgacctcaacggtgt

SEQ ID NO: 78478 - DNA, 25 bp, Homo sapien
gagacccccgtgtcctcaacggtgt

SEQ ID NO: 78479 - DNA, 25 bp, Homo sapien
ctaccgcgccagagccgatagtgtg

SEQ ID NO: 78480 - DNA, 25 bp, Homo sapien
ctaccgcgccagtgccgatagtgtg

SEQ ID NO: 78481 - DNA, 25 bp, Homo sapien
agacgaccagctgggcacgcctcct

SEQ ID NO: 78482 - DNA, 25 bp, Homo sapien
agacgaccagctcggcacgcctcct

SEQ ID NO: 78483 - DNA, 25 bp, Homo sapien
gacgtcggacttagaaccggtcccg

SEQ ID NO: 78484 - DNA, 25 bp, Homo sapien
gacgtcggactttgaaccggtcccg

SEQ ID NO: 78485 - DNA, 25 bp, Homo sapien
gcacctcgacttcgttatcaaccac

SEQ ID NO: 78486 - DNA, 25 bp, Homo sapien
gcacctcgacttggttatcaaccac

SEQ ID NO: 78487 - DNA, 25 bp, Homo sapien
tggccagtccttctttagccgcgcg

SEQ ID NO: 78488 - DNA, 25 bp, Homo sapien
tggccagtccttgtttagccgcgcg

SEQ ID NO: 78489 - DNA, 25 bp, Homo sapien
gggcgttggacttgtatccaagaca

SEQ ID NO: 78490 - DNA, 25 bp, Homo sapien
gggcgttggactagtatccaagaca

SEQ ID NO: 78491 - DNA, 25 bp, Homo sapien
tagattgtgtaggtacttacaagga

SEQ ID NO: 78492 - DNA, 25 bp, Homo sapien
tagattgtgtagctacttacaagga

SEQ ID NO: 78493 - DNA, 25 bp, Homo sapien
gacagttaacgatgtcatcacctta

SEQ ID NO: 78494 - DNA, 25 bp, Homo sapien
gacagttaacgaagtcatcacctta

SEQ ID NO: 78495 - DNA, 25 bp, Homo sapien
ggactagaaggaaccactcctattg

SEQ ID NO: 78496 - DNA, 25 bp, Homo sapien
ggactagaaggatccactcctattg

SEQ ID NO: 78497 - DNA, 25 bp, Homo sapien
gtcgtcgggacacatcacaaaagtt

SEQ ID NO: 78498 - DNA, 25 bp, Homo sapien
gtcgtcgggacagatcacaaaagtt

SEQ ID NO: 78499 - DNA, 25 bp, Homo sapien
aaggctggaaagactccatagaaga

SEQ ID NO: 78500 - DNA, 25 bp, Homo sapien
aaggctggaaagtctccatagaaga

SEQ ID NO: 78501 - DNA, 25 bp, Homo sapien
aaccgcggtagtaggcccaacggaa

SEQ ID NO: 78502 - DNA, 25 bp, Homo sapien
aaccgcggtagttggcccaacggaa

SEQ ID NO: 78503 - DNA, 25 bp, Homo sapien
tcctgaatcttcggtatcaaaatta

SEQ ID NO: 78504 - DNA, 25 bp, Homo sapien
tcctgaatcttccgtatcaaaatta

SEQ ID NO: 78505 - DNA, 25 bp, Homo sapien
cttctagttcgatgtcgtgtagtag

SEQ ID NO: 78506 - DNA, 25 bp, Homo sapien
cttctagttcgaagtcgtgtagtag

SEQ ID NO: 78507 - DNA, 25 bp, Homo sapien
agtacctgtcacaggtcgtgtacag

SEQ ID NO: 78508 - DNA, 25 bp, Homo sapien
agtacctgtcactggtcgtgtacag

SEQ ID NO: 78509 - DNA, 25 bp, Homo sapien
aacgagactcacctgcgacgagtcc

SEQ ID NO: 78510 - DNA, 25 bp, Homo sapien
aacgagactcacgtgcgacgagtcc

SEQ ID NO: 78511 - DNA, 25 bp, Homo sapien
tcccagagagaccccggaagacctc

SEQ ID NO: 78512 - DNA, 25 bp, Homo sapien
tcccagagagacgccggaagacctc

SEQ ID NO: 78513 - DNA, 25 bp, Homo sapien
atcccctgtcggttcggtccgggtc

SEQ ID NO: 78514 - DNA, 25 bp, Homo sapien
atcccctgtcggatcggtccgggtc

SEQ ID NO: 78515 - DNA, 25 bp, Homo sapien
cgacgtccctggtgcgtggtgctac

SEQ ID NO: 78516 - DNA, 25 bp, Homo sapien
cgacgtccctggagcgtggtgctac

SEQ ID NO: 78517 - DNA, 25 bp, Homo sapien
gtggctgccattgaagtgtcggcct

SEQ ID NO: 78518 - DNA, 25 bp, Homo sapien
gtggctgccattcaagtgtcggcct

SEQ ID NO: 78519 - DNA, 25 bp, Homo sapien
caccgagtgtaaagtctgtgttact

SEQ ID NO: 78520 - DNA, 25 bp, Homo sapien
caccgagtgtaatgtctgtgttact

SEQ ID NO: 78521 - DNA, 25 bp, Homo sapien
tccgatgagagttgtcccgtaatct

SEQ ID NO: 78522 - DNA, 25 bp, Homo sapien
tccgatgagagtagtcccgtaatct

SEQ ID NO: 78523 - DNA, 25 bp, Homo sapien
gtccccgaggtgctcgccagtgtgt

SEQ ID NO: 78524 - DNA, 25 bp, Homo sapien
gtccccgaggtggtcgccagtgtgt

SEQ ID NO: 78525 - DNA, 25 bp, Homo sapien
ctctcctccgtggagttcccttgtt

SEQ ID NO: 78526 - DNA, 25 bp, Homo sapien
ctctcctccgtgcagttcccttgtt

SEQ ID NO: 78527 - DNA, 25 bp, Homo sapien
cgttcattggtaatctcattgtaat

SEQ ID NO: 78528 - DNA, 25 bp, Homo sapien
cgttcattggtattctcattgtaat

SEQ ID NO: 78529 - DNA, 25 bp, Homo sapien
agagttatttaacaccgacttgttt

SEQ ID NO: 78530 - DNA, 25 bp, Homo sapien
agagttatttaagaccgacttgttt

SEQ ID NO: 78531 - DNA, 25 bp, Homo sapien
gtgatgtttaccagaaccttcgttc

SEQ ID NO: 78532 - DNA, 25 bp, Homo sapien
gtgatgtttacctgaaccttcgttc

SEQ ID NO: 78533 - DNA, 25 bp, Homo sapien
gaaccactttgtaggattctccttc

SEQ ID NO: 78534 - DNA, 25 bp, Homo sapien
gaaccactttgttggattctccttc

SEQ ID NO: 78535 - DNA, 25 bp, Homo sapien
cgtgttaggtaactatcttgacctc

SEQ ID NO: 78536 - DNA, 25 bp, Homo sapien
cgtgttaggtaagtatcttgacctc

SEQ ID NO: 78537 - DNA, 25 bp, Homo sapien
gcctgttggtgtaaccttttgtgaa

SEQ ID NO: 78538 - DNA, 25 bp, Homo sapien
gcctgttggtgttaccttttgtgaa

SEQ ID NO: 78539 - DNA, 25 bp, Homo sapien
ctttggggacatcgttagacgaact

SEQ ID NO: 78540 - DNA, 25 bp, Homo sapien
ctttggggacatggttagacgaact

SEQ ID NO: 78541 - DNA, 25 bp, Homo sapien
gagagtagacgatcgtcagatacat

SEQ ID NO: 78542 - DNA, 25 bp, Homo sapien
gagagtagacgaacgtcagatacat

SEQ ID NO: 78543 - DNA, 25 bp, Homo sapien
agtgaagcatcaggacgggtaacta

SEQ ID NO: 78544 - DNA, 25 bp, Homo sapien
agtgaagcatcacgacgggtaacta

SEQ ID NO: 78545 - DNA, 25 bp, Homo sapien
tctttagtccagagcggtgtggaca

SEQ ID NO: 78546 - DNA, 25 bp, Homo sapien
tctttagtccagtgcggtgtggaca

SEQ ID NO: 78547 - DNA, 25 bp, Homo sapien
gtctctgtctcctcgggtgtcggga

SEQ ID NO: 78548 - DNA, 25 bp, Homo sapien
gtctctgtctccacgggtgtcggga

SEQ ID NO: 78549 - DNA, 25 bp, Homo sapien
gacgttctcttcacagggacggtaa

SEQ ID NO: 78550 - DNA, 25 bp, Homo sapien
gacgttctcttctcagggacggtaa

SEQ ID NO: 78551 - DNA, 25 bp, Homo sapien
gtggggtctgtctccctaggtgtaa

SEQ ID NO: 78552 - DNA, 25 bp, Homo sapien
gtggggtctgtcaccctaggtgtaa

SEQ ID NO: 78553 - DNA, 25 bp, Homo sapien
gtgtcggtcctcgagaagactggaa

SEQ ID NO: 78554 - DNA, 25 bp, Homo sapien
gtgtcggtcctccagaagactggaa

SEQ ID NO: 78555 - DNA, 25 bp, Homo sapien
cctttcttcgatttacgttgacaag

SEQ ID NO: 78556 - DNA, 25 bp, Homo sapien
cctttcttcgatatacgttgacaag

SEQ ID NO: 78557 - DNA, 25 bp, Homo sapien
ggtcatcctcttcatcctctataga

SEQ ID NO: 78558 - DNA, 25 bp, Homo sapien
ggtcatcctcttgatcctctataga

SEQ ID NO: 78559 - DNA, 25 bp, Homo sapien
gaaattagacttgtcgttactccca

SEQ ID NO: 78560 - DNA, 25 bp, Homo sapien
gaaattagacttctcgttactccca

SEQ ID NO: 78561 - DNA, 25 bp, Homo sapien
cgtaatatctggtgtagactactag

SEQ ID NO: 78562 - DNA, 25 bp, Homo sapien
cgtaatatctggagtagactactag

SEQ ID NO: 78563 - DNA, 25 bp, Homo sapien
atcgagtctcgttttcgtcgacata

SEQ ID NO: 78564 - DNA, 25 bp, Homo sapien
atcgagtctcgtattcgtcgacata

SEQ ID NO: 78565 - DNA, 25 bp, Homo sapien
gacgaaaacacgtcgtgaacccaaa

SEQ ID NO: 78566 - DNA, 25 bp, Homo sapien
gacgaaaacacgacgtgaacccaaa

SEQ ID NO: 78567 - DNA, 25 bp, Homo sapien
actcataagggaaacctatacagac

SEQ ID NO: 78568 - DNA, 25 bp, Homo sapien
actcataagggatacctatacagac

SEQ ID NO: 78569 - DNA, 25 bp, Homo sapien
accgaatagggaggtcctctctaga

SEQ ID NO: 78570 - DNA, 25 bp, Homo sapien
accgaatagggacgtcctctctaga

SEQ ID NO: 78571 - DNA, 25 bp, Homo sapien
tttatctttgtgtgctcaccttagg

SEQ ID NO: 78572 - DNA, 25 bp, Homo sapien
tttatctttgtgagctcaccttagg

SEQ ID NO: 78573 - DNA, 25 bp, Homo sapien
caattatatcacaggctcaaagaga

SEQ ID NO: 78574 - DNA, 25 bp, Homo sapien
caattatatcactggctcaaagaga

SEQ ID NO: 78575 - DNA, 25 bp, Homo sapien
tggtagtgccatagagtcaaccgaa

SEQ ID NO: 78576 - DNA, 25 bp, Homo sapien
tggtagtgccattgagtcaaccgaa

SEQ ID NO: 78577 - DNA, 25 bp, Homo sapien
gagtaggagcacacggatagtgcaa

SEQ ID NO: 78578 - DNA, 25 bp, Homo sapien
gagtaggagcactcggatagtgcaa

SEQ ID NO: 78579 - DNA, 25 bp, Homo sapien
tttagtcactatatggtaaaccgca

SEQ ID NO: 78580 - DNA, 25 bp, Homo sapien
tttagtcactatttggtaaaccgca

SEQ ID NO: 78581 - DNA, 25 bp, Homo sapien
attcaacggaatctggagtacctga

SEQ ID NO: 78582 - DNA, 25 bp, Homo sapien
attcaacggaatgtggagtacctga

SEQ ID NO: 78583 - DNA, 25 bp, Homo sapien
ttctctcgcctaaaccgggttccag

SEQ ID NO: 78584 - DNA, 25 bp, Homo sapien
ttctctcgcctataccgggttccag

SEQ ID NO: 78585 - DNA, 25 bp, Homo sapien
aaaagttcttggacacgttttgaca

SEQ ID NO: 78586 - DNA, 25 bp, Homo sapien
aaaagttcttggtcacgttttgaca

SEQ ID NO: 78587 - DNA, 25 bp, Homo sapien
acttcttgatttcctataggtacac

SEQ ID NO: 78588 - DNA, 25 bp, Homo sapien
acttcttgatttgctataggtacac

SEQ ID NO: 78589 - DNA, 25 bp, Homo sapien
cccctcttgatctcgattactttgt

SEQ ID NO: 78590 - DNA, 25 bp, Homo sapien
cccctcttgatcacgattactttgt

SEQ ID NO: 78591 - DNA, 25 bp, Homo sapien
cactgtcacaaaaggtcgccagaca

SEQ ID NO: 78592 - DNA, 25 bp, Homo sapien
cactgtcacaaatggtcgccagaca

SEQ ID NO: 78593 - DNA, 25 bp, Homo sapien
accagtatataagtcgcactgcaaa

SEQ ID NO: 78594 - DNA, 25 bp, Homo sapien
accagtatataactcgcactgcaaa

SEQ ID NO: 78595 - DNA, 25 bp, Homo sapien
aaacgtctaacccattgtgtccttg

SEQ ID NO: 78596 - DNA, 25 bp, Homo sapien
aaacgtctaaccgattgtgtccttg

SEQ ID NO: 78597 - DNA, 25 bp, Homo sapien
atcgttttcactacgttttagaagt

SEQ ID NO: 78598 - DNA, 25 bp, Homo sapien
atcgttttcacttcgttttagaagt

SEQ ID NO: 78599 - DNA, 25 bp, Homo sapien
cttcgttgacgttgttgtctagaag

SEQ ID NO: 78600 - DNA, 25 bp, Homo sapien
cttcgttgacgtagttgtctagaag

SEQ ID NO: 78601 - DNA, 25 bp, Homo sapien
gaacttcgttttatgatcactgagt

SEQ ID NO: 78602 - DNA, 25 bp, Homo sapien
gaacttcgttttttgatcactgagt

SEQ ID NO: 78603 - DNA, 25 bp, Homo sapien
ttcacgtgtcttgtcactcccacgt

SEQ ID NO: 78604 - DNA, 25 bp, Homo sapien
ttcacgtgtcttctcactcccacgt

SEQ ID NO: 78605 - DNA, 25 bp, Homo sapien
tgcgtccgtttttcgcgtcctacgt

SEQ ID NO: 78606 - DNA, 25 bp, Homo sapien
tgcgtccgttttacgcgtcctacgt

SEQ ID NO: 78607 - DNA, 25 bp, Homo sapien
ggtctactttagataccgtactaac

SEQ ID NO: 78608 - DNA, 25 bp, Homo sapien
ggtctactttagttaccgtactaac

SEQ ID NO: 78609 - DNA, 25 bp, Homo sapien
ttgacgtactacatggaacttagaa

SEQ ID NO: 78610 - DNA, 25 bp, Homo sapien
ttgacgtactacttggaacttagaa

SEQ ID NO: 78611 - DNA, 25 bp, Homo sapien
cctgtcagtgttaactcatctgact

SEQ ID NO: 78612 - DNA, 25 bp, Homo sapien
cctgtcagtgtttactcatctgact

SEQ ID NO: 78613 - DNA, 25 bp, Homo sapien
gtcttcttcaaggacgtcccgtaag

SEQ ID NO: 78614 - DNA, 25 bp, Homo sapien
gtcttcttcaagcacgtcccgtaag

SEQ ID NO: 78615 - DNA, 25 bp, Homo sapien
caaaactccttggacctccgagagt

SEQ ID NO: 78616 - DNA, 25 bp, Homo sapien
caaaactccttgcacctccgagagt

SEQ ID NO: 78617 - DNA, 25 bp, Homo sapien
agaagtccacgttccgaccacaaga

SEQ ID NO: 78618 - DNA, 25 bp, Homo sapien
agaagtccacgtaccgaccacaaga

SEQ ID NO: 78619 - DNA, 25 bp, Homo sapien
agaagacggaaattactcacgagga

SEQ ID NO: 78620 - DNA, 25 bp, Homo sapien
agaagacggaaaatactcacgagga

SEQ ID NO: 78621 - DNA, 25 bp, Homo sapien
aggaggaccatcttctatcacaaag

SEQ ID NO: 78622 - DNA, 25 bp, Homo sapien
aggaggaccatcatctatcacaaag

SEQ ID NO: 78623 - DNA, 25 bp, Homo sapien
tacggacgatcgagtctttagaaat

SEQ ID NO: 78624 - DNA, 25 bp, Homo sapien
tacggacgatcgtgtctttagaaat

SEQ ID NO: 78625 - DNA, 25 bp, Homo sapien
tcgagaagacgtgtctcggcgaacc

SEQ ID NO: 78626 - DNA, 25 bp, Homo sapien
tcgagaagacgtctctcggcgaacc

SEQ ID NO: 78627 - DNA, 25 bp, Homo sapien
agacgaaggtcgaccaggacacacc

SEQ ID NO: 78628 - DNA, 25 bp, Homo sapien
agacgaaggtcgtccaggacacacc

SEQ ID NO: 78629 - DNA, 25 bp, Homo sapien
tgacggggacacctccaggaacacc

SEQ ID NO: 78630 - DNA, 25 bp, Homo sapien
tgacggggacacgtccaggaacacc

SEQ ID NO: 78631 - DNA, 25 bp, Homo sapien
ccgcgcggacggtcctcgtgctgaa

SEQ ID NO: 78632 - DNA, 25 bp, Homo sapien
ccgcgcggacggacctcgtgctgaa

SEQ ID NO: 78633 - DNA, 25 bp, Homo sapien
gtctttccggacaggggtctgtaac

SEQ ID NO: 78634 - DNA, 25 bp, Homo sapien
gtctttccggactggggtctgtaac

SEQ ID NO: 78635 - DNA, 25 bp, Homo sapien
ctcctgtccgggactgtgtcctaca

SEQ ID NO: 78636 - DNA, 25 bp, Homo sapien
ctcctgtccgggtctgtgtcctaca

SEQ ID NO: 78637 - DNA, 25 bp, Homo sapien
acctcgtccacacattggggtagta

SEQ ID NO: 78638 - DNA, 25 bp, Homo sapien
acctcgtccacagattggggtagta

SEQ ID NO: 78639 - DNA, 25 bp, Homo sapien
ggcacccgacgttactcgtgagcga

SEQ ID NO: 78640 - DNA, 25 bp, Homo sapien
ggcacccgacgtaactcgtgagcga

SEQ ID NO: 78641 - DNA, 25 bp, Homo sapien
cgatgacccgacttctcgacagaca

SEQ ID NO: 78642 - DNA, 25 bp, Homo sapien
cgatgacccgacatctcgacagaca

SEQ ID NO: 78643 - DNA, 25 bp, Homo sapien
cggtgacacacctagaagactaccg

SEQ ID NO: 78644 - DNA, 25 bp, Homo sapien
cggtgacacaccaagaagactaccg

SEQ ID NO: 78645 - DNA, 25 bp, Homo sapien
ctcctgtacatactcgggagagacc

SEQ ID NO: 78646 - DNA, 25 bp, Homo sapien
ctcctgtacatagtcgggagagacc

SEQ ID NO: 78647 - DNA, 25 bp, Homo sapien
ctcctggacgaccttggggacgagt

SEQ ID NO: 78648 - DNA, 25 bp, Homo sapien
ctcctggacgacgttggggacgagt

SEQ ID NO: 78649 - DNA, 25 bp, Homo sapien
acctcagtgaagtgtcagtgacgtt

SEQ ID NO: 78650 - DNA, 25 bp, Homo sapien
acctcagtgaagagtcagtgacgtt

SEQ ID NO: 78651 - DNA, 25 bp, Homo sapien
actcaggagtgtgaccagagtacgg

SEQ ID NO: 78652 - DNA, 25 bp, Homo sapien
actcaggagtgtcaccagagtacgg

SEQ ID NO: 78653 - DNA, 25 bp, Homo sapien
tccctcggtcgtacgtaaccacggt

SEQ ID NO: 78654 - DNA, 25 bp, Homo sapien
tccctcggtcgttcgtaaccacggt

SEQ ID NO: 78655 - DNA, 25 bp, Homo sapien
ctgttgactacctttgtagagattt

SEQ ID NO: 78656 - DNA, 25 bp, Homo sapien
ctgttgactaccattgtagagattt

SEQ ID NO: 78657 - DNA, 25 bp, Homo sapien
cttctagtttgattcggagttgtct

SEQ ID NO: 78658 - DNA, 25 bp, Homo sapien
cttctagtttgaatcggagttgtct

SEQ ID NO: 78659 - DNA, 25 bp, Homo sapien
tgtaggtattaaatctctatcgttc

SEQ ID NO: 78660 - DNA, 25 bp, Homo sapien
tgtaggtattaattctctatcgttc

SEQ ID NO: 78661 - DNA, 25 bp, Homo sapien
tttgtggtgtcaaacactgtgtact

SEQ ID NO: 78662 - DNA, 25 bp, Homo sapien
tttgtggtgtcatacactgtgtact

SEQ ID NO: 78663 - DNA, 25 bp, Homo sapien
ggtcaccgaggttccttaaggttac

SEQ ID NO: 78664 - DNA, 25 bp, Homo sapien
ggtcaccgaggtaccttaaggttac

SEQ ID NO: 78665 - DNA, 25 bp, Homo sapien
cccgcggacgacaggtaaggtcacg

SEQ ID NO: 78666 - DNA, 25 bp, Homo sapien
cccgcggacgactggtaaggtcacg

SEQ ID NO: 78667 - DNA, 25 bp, Homo sapien
aagaacagggcgtcggcgagttacc

SEQ ID NO: 78668 - DNA, 25 bp, Homo sapien
aagaacagggcgacggcgagttacc

SEQ ID NO: 78669 - DNA, 25 bp, Homo sapien
agagaacagggtacccgtgtattaa

SEQ ID NO: 78670 - DNA, 25 bp, Homo sapien
agagaacagggttcccgtgtattaa

SEQ ID NO: 78671 - DNA, 25 bp, Homo sapien
acagaggttctcctagtagaagtat

SEQ ID NO: 78672 - DNA, 25 bp, Homo sapien
acagaggttctcgtagtagaagtat

SEQ ID NO: 78673 - DNA, 25 bp, Homo sapien
accacgaggcacgacatgaggacga

SEQ ID NO: 78674 - DNA, 25 bp, Homo sapien
accacgaggcaccacatgaggacga

SEQ ID NO: 78675 - DNA, 25 bp, Homo sapien
gtagagcacacttgtctgtagtacc

SEQ ID NO: 78676 - DNA, 25 bp, Homo sapien
gtagagcacactagtctgtagtacc

SEQ ID NO: 78677 - DNA, 25 bp, Homo sapien
gtagatacacacacacgatgtatat

SEQ ID NO: 78678 - DNA, 25 bp, Homo sapien
gtagatacacactcacgatgtatat

SEQ ID NO: 78679 - DNA, 25 bp, Homo sapien
ttcagagaaatcttacgtaaacttg

SEQ ID NO: 78680 - DNA, 25 bp, Homo sapien
ttcagagaaatcatacgtaaacttg

SEQ ID NO: 78681 - DNA, 25 bp, Homo sapien
ttaacaggaagttaatcacgagctt

SEQ ID NO: 78682 - DNA, 25 bp, Homo sapien
ttaacaggaagtaaatcacgagctt

SEQ ID NO: 78683 - DNA, 25 bp, Homo sapien
tgcactgattttcgtctcgtgacta

SEQ ID NO: 78684 - DNA, 25 bp, Homo sapien
tgcactgattttggtctcgtgacta

SEQ ID NO: 78685 - DNA, 25 bp, Homo sapien
gaaccttcgatttgtattttcaagt

SEQ ID NO: 78686 - DNA, 25 bp, Homo sapien
gaaccttcgattagtattttcaagt

SEQ ID NO: 78687 - DNA, 25 bp, Homo sapien
tgacgtttaaatagtcgtttctcca

SEQ ID NO: 78688 - DNA, 25 bp, Homo sapien
tgacgtttaaattgtcgtttctcca

SEQ ID NO: 78689 - DNA, 25 bp, Homo sapien
gagtaaaatctatcttgtcgtctta

SEQ ID NO: 78690 - DNA, 25 bp, Homo sapien
gagtaaaatctaacttgtcgtctta

SEQ ID NO: 78691 - DNA, 25 bp, Homo sapien
atcagaaccatggtcattgttatac

SEQ ID NO: 78692 - DNA, 25 bp, Homo sapien
atcagaaccatgctcattgttatac

SEQ ID NO: 78693 - DNA, 25 bp, Homo sapien
ccgtaggttctttctcaaatcttag

SEQ ID NO: 78694 - DNA, 25 bp, Homo sapien
ccgtaggttcttactcaaatcttag

SEQ ID NO: 78695 - DNA, 25 bp, Homo sapien
aagggtcttagattcagctctagat

SEQ ID NO: 78696 - DNA, 25 bp, Homo sapien
aagggtcttagaatcagctctagat

SEQ ID NO: 78697 - DNA, 25 bp, Homo sapien
aatttttacacatcgagactcgaag

SEQ ID NO: 78698 - DNA, 25 bp, Homo sapien
aatttttacacaacgagactcgaag

SEQ ID NO: 78699 - DNA, 25 bp, Homo sapien
actacgactgtaggagtatcccgaa

SEQ ID NO: 78700 - DNA, 25 bp, Homo sapien
actacgactgtacgagtatcccgaa

SEQ ID NO: 78701 - DNA, 25 bp, Homo sapien
agatccctcgagtaggtccagagac

SEQ ID NO: 78702 - DNA, 25 bp, Homo sapien
agatccctcgagaaggtccagagac

SEQ ID NO: 78703 - DNA, 25 bp, Homo sapien
cgcccgttcatgtacgactagtaga

SEQ ID NO: 78704 - DNA, 25 bp, Homo sapien
cgcccgttcatgaacgactagtaga

SEQ ID NO: 78705 - DNA, 25 bp, Homo sapien
aacctcgtcgagtctatgacgataa

SEQ ID NO: 78706 - DNA, 25 bp, Homo sapien
aacctcgtcgagactatgacgataa

SEQ ID NO: 78707 - DNA, 25 bp, Homo sapien
aactgttcgtcgtcatagtacaaac

SEQ ID NO: 78708 - DNA, 25 bp, Homo sapien
aactgttcgtcgacatagtacaaac

SEQ ID NO: 78709 - DNA, 25 bp, Homo sapien
tgaaattcacggaacatctatagag

SEQ ID NO: 78710 - DNA, 25 bp, Homo sapien
tgaaattcacggtacatctatagag

SEQ ID NO: 78711 - DNA, 25 bp, Homo sapien
tacacaagtagaggttactgctaaa

SEQ ID NO: 78712 - DNA, 25 bp, Homo sapien
tacacaagtagacgttactgctaaa

SEQ ID NO: 78713 - DNA, 25 bp, Homo sapien
tcggtgacacggttaccgacgaaga

SEQ ID NO: 78714 - DNA, 25 bp, Homo sapien
tcggtgacacggataccgacgaaga

SEQ ID NO: 78715 - DNA, 25 bp, Homo sapien
caccagtgagaggataccgaaggat

SEQ ID NO: 78716 - DNA, 25 bp, Homo sapien
caccagtgagagcataccgaaggat

SEQ ID NO: 78717 - DNA, 25 bp, Homo sapien
aaaaatgtacaggacccggtcgatg

SEQ ID NO: 78718 - DNA, 25 bp, Homo sapien
aaaaatgtacagcacccggtcgatg

SEQ ID NO: 78719 - DNA, 25 bp, Homo sapien
gagaagtaccgaaaacctgtcaatg

SEQ ID NO: 78720 - DNA, 25 bp, Homo sapien
gagaagtaccgataacctgtcaatg

SEQ ID NO: 78721 - DNA, 25 bp, Homo sapien
tcaggacaccgaagggacttctccc

SEQ ID NO: 78722 - DNA, 25 bp, Homo sapien
tcaggacaccgatgggacttctccc

SEQ ID NO: 78723 - DNA, 25 bp, Homo sapien
agaagaccggtggtttagtcttacc

SEQ ID NO: 78724 - DNA, 25 bp, Homo sapien
agaagaccggtgctttagtcttacc

SEQ ID NO: 78725 - DNA, 25 bp, Homo sapien
cgaggtagacaggatccctcttgcg

SEQ ID NO: 78726 - DNA, 25 bp, Homo sapien
cgaggtagacagcatccctcttgcg

SEQ ID NO: 78727 - DNA, 25 bp, Homo sapien
gaagaagaacttcttcctacttgtc

SEQ ID NO: 78728 - DNA, 25 bp, Homo sapien
gaagaagaacttgttcctacttgtc

SEQ ID NO: 78729 - DNA, 25 bp, Homo sapien
catcttttaagttggtcctttcgtc

SEQ ID NO: 78730 - DNA, 25 bp, Homo sapien
catcttttaagtaggtcctttcgtc

SEQ ID NO: 78731 - DNA, 25 bp, Homo sapien
ggggttacgtccggtcctggtcgtg

SEQ ID NO: 78732 - DNA, 25 bp, Homo sapien
ggggttacgtcccgtcctggtcgtg

SEQ ID NO: 78733 - DNA, 25 bp, Homo sapien
aagagttcgtggagtctcctgtgtg

SEQ ID NO: 78734 - DNA, 25 bp, Homo sapien
aagagttcgtggtgtctcctgtgtg

SEQ ID NO: 78735 - DNA, 25 bp, Homo sapien
tcgacttgtcgattgtcctcttcta

SEQ ID NO: 78736 - DNA, 25 bp, Homo sapien
tcgacttgtcgaatgtcctcttcta

SEQ ID NO: 78737 - DNA, 25 bp, Homo sapien
acatcgtcggtaatgtcacttttag

SEQ ID NO: 78738 - DNA, 25 bp, Homo sapien
acatcgtcggtattgtcacttttag

SEQ ID NO: 78739 - DNA, 25 bp, Homo sapien
aacatcgttttcagacactaaagag

SEQ ID NO: 78740 - DNA, 25 bp, Homo sapien
aacatcgttttctgacactaaagag

SEQ ID NO: 78741 - DNA, 25 bp, Homo sapien
actttgtcgtagtgatcataacgac

SEQ ID NO: 78742 - DNA, 25 bp, Homo sapien
actttgtcgtagagatcataacgac

SEQ ID NO: 78743 - DNA, 25 bp, Homo sapien
tcctttctctgttgtgtgattacac

SEQ ID NO: 78744 - DNA, 25 bp, Homo sapien
tcctttctctgtagtgtgattacac

SEQ ID NO: 78745 - DNA, 25 bp, Homo sapien
agttgtggtcttacagggcctagac

SEQ ID NO: 78746 - DNA, 25 bp, Homo sapien
agttgtggtctttcagggcctagac

SEQ ID NO: 78747 - DNA, 25 bp, Homo sapien
taccaacaggcttagtcctctgaag

SEQ ID NO: 78748 - DNA, 25 bp, Homo sapien
taccaacaggctaagtcctctgaag

SEQ ID NO: 78749 - DNA, 25 bp, Homo sapien
gtcataagggcgtcaaacgactgaa

SEQ ID NO: 78750 - DNA, 25 bp, Homo sapien
gtcataagggcgacaaacgactgaa

SEQ ID NO: 78751 - DNA, 25 bp, Homo sapien
cgagacgagggtactgaaacggcaa

SEQ ID NO: 78752 - DNA, 25 bp, Homo sapien
cgagacgagggttctgaaacggcaa

SEQ ID NO: 78753 - DNA, 25 bp, Homo sapien
gatacacttttagaggtcggacatg

SEQ ID NO: 78754 - DNA, 25 bp, Homo sapien
gatacacttttacaggtcggacatg

SEQ ID NO: 78755 - DNA, 25 bp, Homo sapien
gaggaccatcttctatcacaaagta

SEQ ID NO: 78756 - DNA, 25 bp, Homo sapien
gaggaccatcttgtatcacaaagta

SEQ ID NO: 78757 - DNA, 25 bp, Homo sapien
ctcaaccttaagtacgacggtacta

SEQ ID NO: 78758 - DNA, 25 bp, Homo sapien
ctcaaccttaagaacgacggtacta

SEQ ID NO: 78759 - DNA, 25 bp, Homo sapien
cgactgctacgttcaaataggttta

SEQ ID NO: 78760 - DNA, 25 bp, Homo sapien
cgactgctacgtacaaataggttta

SEQ ID NO: 78761 - DNA, 25 bp, Homo sapien
tcaaatacggtcacattagagttaa

SEQ ID NO: 78762 - DNA, 25 bp, Homo sapien
tcaaatacggtctcattagagttaa

SEQ ID NO: 78763 - DNA, 25 bp, Homo sapien
aatgacggtactcgagttagttcca

SEQ ID NO: 78764 - DNA, 25 bp, Homo sapien
aatgacggtactggagttagttcca

SEQ ID NO: 78765 - DNA, 25 bp, Homo sapien
ctgtagtccgaggtctatacttgaa

SEQ ID NO: 78766 - DNA, 25 bp, Homo sapien
ctgtagtccgagctctatacttgaa

SEQ ID NO: 78767 - DNA, 25 bp, Homo sapien
gagggagtctcactcttaaaataca

SEQ ID NO: 78768 - DNA, 25 bp, Homo sapien
gagggagtctcagtcttaaaataca

SEQ ID NO: 78769 - DNA, 25 bp, Homo sapien
tggttgtgtcactaatgtaaaacac

SEQ ID NO: 78770 - DNA, 25 bp, Homo sapien
tggttgtgtcacaaatgtaaaacac

SEQ ID NO: 78771 - DNA, 25 bp, Homo sapien
tggactgtctgaaaggatatccatc

SEQ ID NO: 78772 - DNA, 25 bp, Homo sapien
tggactgtctgataggatatccatc

SEQ ID NO: 78773 - DNA, 25 bp, Homo sapien
gagtctctgtctattcgaaaccccc

SEQ ID NO: 78774 - DNA, 25 bp, Homo sapien
gagtctctgtcttttcgaaaccccc

SEQ ID NO: 78775 - DNA, 25 bp, Homo sapien
gtactttctgtgacaaattgtccgt

SEQ ID NO: 78776 - DNA, 25 bp, Homo sapien
gtactttctgtgtcaaattgtccgt

SEQ ID NO: 78777 - DNA, 25 bp, Homo sapien
gggaattagtaccttatttctctcc

SEQ ID NO: 78778 - DNA, 25 bp, Homo sapien
gggaattagtacgttatttctctcc

SEQ ID NO: 78779 - DNA, 25 bp, Homo sapien
gtatgagaaaacatgtttgactccc

SEQ ID NO: 78780 - DNA, 25 bp, Homo sapien
gtatgagaaaacttgtttgactccc

SEQ ID NO: 78781 - DNA, 25 bp, Homo sapien
gtgttttgtacctcttctgaatcac

SEQ ID NO: 78782 - DNA, 25 bp, Homo sapien
gtgttttgtaccacttctgaatcac

SEQ ID NO: 78783 - DNA, 25 bp, Homo sapien
tgtttctgccttttccgtagtataa

SEQ ID NO: 78784 - DNA, 25 bp, Homo sapien
tgtttctgccttatccgtagtataa

SEQ ID NO: 78785 - DNA, 25 bp, Homo sapien
taggagtgactatagtatccgacgt

SEQ ID NO: 78786 - DNA, 25 bp, Homo sapien
taggagtgactaaagtatccgacgt

SEQ ID NO: 78787 - DNA, 25 bp, Homo sapien
aaggaagaacgactatccgaacaag

SEQ ID NO: 78788 - DNA, 25 bp, Homo sapien
aaggaagaacgagtatccgaacaag

SEQ ID NO: 78789 - DNA, 25 bp, Homo sapien
cccaatgacagtgactacaacgtca

SEQ ID NO: 78790 - DNA, 25 bp, Homo sapien
cccaatgacagtcactacaacgtca

SEQ ID NO: 78791 - DNA, 25 bp, Homo sapien
acacgggaccgtaacgacgaatcgg

SEQ ID NO: 78792 - DNA, 25 bp, Homo sapien
acacgggaccgttacgacgaatcgg

SEQ ID NO: 78793 - DNA, 25 bp, Homo sapien
gatgagggtcactagagacgatgtc

SEQ ID NO: 78794 - DNA, 25 bp, Homo sapien
gatgagggtcacaagagacgatgtc

SEQ ID NO: 78795 - DNA, 25 bp, Homo sapien
gtcggcggcgcaggacgtacattcg

SEQ ID NO: 78796 - DNA, 25 bp, Homo sapien
gtcggcggcgcacgacgtacattcg

SEQ ID NO: 78797 - DNA, 25 bp, Homo sapien
acttgtcggttcgaaacacgatgat

SEQ ID NO: 78798 - DNA, 25 bp, Homo sapien
acttgtcggttccaaacacgatgat

SEQ ID NO: 78799 - DNA, 25 bp, Homo sapien
tttttagctatacacaatacatatt

SEQ ID NO: 78800 - DNA, 25 bp, Homo sapien
tttttagctatagacaatacatatt

SEQ ID NO: 78801 - DNA, 25 bp, Homo sapien
tttcacgtactaagaacacccgatg

SEQ ID NO: 78802 - DNA, 25 bp, Homo sapien
tttcacgtactatgaacacccgatg

SEQ ID NO: 78803 - DNA, 25 bp, Homo sapien
taagtaccagatcgaacagtccttc

SEQ ID NO: 78804 - DNA, 25 bp, Homo sapien
taagtaccagatggaacagtccttc

SEQ ID NO: 78805 - DNA, 25 bp, Homo sapien
aaacgacagtactcgcaaagagtgc

SEQ ID NO: 78806 - DNA, 25 bp, Homo sapien
aaacgacagtacacgcaaagagtgc

SEQ ID NO: 78807 - DNA, 25 bp, Homo sapien
cgtcgtataccactcctaagtagag

SEQ ID NO: 78808 - DNA, 25 bp, Homo sapien
cgtcgtataccagtcctaagtagag

SEQ ID NO: 78809 - DNA, 25 bp, Homo sapien
tgcgaccctcacagtattatgacac

SEQ ID NO: 78810 - DNA, 25 bp, Homo sapien
tgcgaccctcactgtattatgacac

SEQ ID NO: 78811 - DNA, 25 bp, Homo sapien
ggtacgactacctcagtatctgtga

SEQ ID NO: 78812 - DNA, 25 bp, Homo sapien
ggtacgactaccacagtatctgtga

SEQ ID NO: 78813 - DNA, 25 bp, Homo sapien
ggaagacctccgagtctctacggtc

SEQ ID NO: 78814 - DNA, 25 bp, Homo sapien
ggaagacctccgtgtctctacggtc

SEQ ID NO: 78815 - DNA, 25 bp, Homo sapien
atacgtcctctcgtgtgtaacagtg

SEQ ID NO: 78816 - DNA, 25 bp, Homo sapien
atacgtcctctcctgtgtaacagtg

SEQ ID NO: 78817 - DNA, 25 bp, Homo sapien
agggtatccctgttcttgtacttgg

SEQ ID NO: 78818 - DNA, 25 bp, Homo sapien
agggtatccctgatcttgtacttgg

SEQ ID NO: 78819 - DNA, 25 bp, Homo sapien
ttatccctccgaccatctagtagtg

SEQ ID NO: 78820 - DNA, 25 bp, Homo sapien
ttatccctccgagcatctagtagtg

SEQ ID NO: 78821 - DNA, 25 bp, Homo sapien
aggtttgacattacagagtcatgtc

SEQ ID NO: 78822 - DNA, 25 bp, Homo sapien
aggtttgacatttcagagtcatgtc

SEQ ID NO: 78823 - DNA, 25 bp, Homo sapien
tacgtacacacacacgaaattcagg

SEQ ID NO: 78824 - DNA, 25 bp, Homo sapien
tacgtacacacagacgaaattcagg

SEQ ID NO: 78825 - DNA, 25 bp, Homo sapien
aatttaccgtctgttaggaatattc

SEQ ID NO: 78826 - DNA, 25 bp, Homo sapien
aatttaccgtctcttaggaatattc

SEQ ID NO: 78827 - DNA, 25 bp, Homo sapien
agtgtataaagtgtccttttcctta

SEQ ID NO: 78828 - DNA, 25 bp, Homo sapien
agtgtataaagtctccttttcctta

SEQ ID NO: 78829 - DNA, 25 bp, Homo sapien
gtgtttaaagaaccattgttacatc

SEQ ID NO: 78830 - DNA, 25 bp, Homo sapien
gtgtttaaagaagcattgttacatc

SEQ ID NO: 78831 - DNA, 25 bp, Homo sapien
ggttcgacagagcacaagacacttc

SEQ ID NO: 78832 - DNA, 25 bp, Homo sapien
ggttcgacagaggacaagacacttc

SEQ ID NO: 78833 - DNA, 25 bp, Homo sapien
gaacgagtcaaagaagaactacttc

SEQ ID NO: 78834 - DNA, 25 bp, Homo sapien
gaacgagtcaaacaagaactacttc

SEQ ID NO: 78835 - DNA, 25 bp, Homo sapien
gaagacgacaaaggtttccttaccg

SEQ ID NO: 78836 - DNA, 25 bp, Homo sapien
gaagacgacaaacgtttccttaccg

SEQ ID NO: 78837 - DNA, 25 bp, Homo sapien
accgtcaaaatgtgtcctagtgacg

SEQ ID NO: 78838 - DNA, 25 bp, Homo sapien
accgtcaaaatgagtcctagtgacg

SEQ ID NO: 78839 - DNA, 25 bp, Homo sapien
ccagccgacggtgtccgagtgtagt

SEQ ID NO: 78840 - DNA, 25 bp, Homo sapien
ccagccgacggtctccgagtgtagt

SEQ ID NO: 78841 - DNA, 25 bp, Homo sapien
aaggtgtttcgacgtcttctcccga

SEQ ID NO: 78842 - DNA, 25 bp, Homo sapien
aaggtgtttcgaggtcttctcccga

SEQ ID NO: 78843 - DNA, 25 bp, Homo sapien
aaaggggttcgacgattgaaccgtt

SEQ ID NO: 78844 - DNA, 25 bp, Homo sapien
aaaggggttcgaggattgaaccgtt

SEQ ID NO: 78845 - DNA, 25 bp, Homo sapien
gtgtccatgatcatgttttacccta

SEQ ID NO: 78846 - DNA, 25 bp, Homo sapien
gtgtccatgatcttgttttacccta

SEQ ID NO: 78847 - DNA, 25 bp, Homo sapien
tgatatatttgtcgtgatacacact

SEQ ID NO: 78848 - DNA, 25 bp, Homo sapien
tgatatatttgtggtgatacacact

SEQ ID NO: 78849 - DNA, 25 bp, Homo sapien
gacttgtattttgtggacggaccct

SEQ ID NO: 78850 - DNA, 25 bp, Homo sapien
gacttgtattttctggacggaccct

SEQ ID NO: 78851 - DNA, 25 bp, Homo sapien
ttctcctcgacgtcggggcgacctt

SEQ ID NO: 78852 - DNA, 25 bp, Homo sapien
ttctcctcgacgacggggcgacctt

SEQ ID NO: 78853 - DNA, 25 bp, Homo sapien
ttcactgcggaaagtactgcgtaag

SEQ ID NO: 78854 - DNA, 25 bp, Homo sapien
ttcactgcggaatgtactgcgtaag

SEQ ID NO: 78855 - DNA, 25 bp, Homo sapien
tttcactggtagtctctctcagaac

SEQ ID NO: 78856 - DNA, 25 bp, Homo sapien
tttcactggtagactctctcagaac

SEQ ID NO: 78857 - DNA, 25 bp, Homo sapien
tatgtccaagtagtcatgacacaga

SEQ ID NO: 78858 - DNA, 25 bp, Homo sapien
tatgtccaagtactcatgacacaga

SEQ ID NO: 78859 - DNA, 25 bp, Homo sapien
cgtttgtacatccaacaaacgataa

SEQ ID NO: 78860 - DNA, 25 bp, Homo sapien
cgtttgtacatcgaacaaacgataa

SEQ ID NO: 78861 - DNA, 25 bp, Homo sapien
atcctttactcaaaactttactaga

SEQ ID NO: 78862 - DNA, 25 bp, Homo sapien
atcctttactcataactttactaga

SEQ ID NO: 78863 - DNA, 25 bp, Homo sapien
attaagtgtgtcacaacctttacag

SEQ ID NO: 78864 - DNA, 25 bp, Homo sapien
attaagtgtgtctcaacctttacag

SEQ ID NO: 78865 - DNA, 25 bp, Homo sapien
gttgagtctcctacacccttagggt

SEQ ID NO: 78866 - DNA, 25 bp, Homo sapien
gttgagtctccttcacccttagggt

SEQ ID NO: 78867 - DNA, 25 bp, Homo sapien
agactatgttgtaccacagatctgt

SEQ ID NO: 78868 - DNA, 25 bp, Homo sapien
agactatgttgttccacagatctgt

SEQ ID NO: 78869 - DNA, 25 bp, Homo sapien
acaacgtcaacttcagcagcatcgg

SEQ ID NO: 78870 - DNA, 25 bp, Homo sapien
acaacgtcaactacagcagcatcgg

SEQ ID NO: 78871 - DNA, 25 bp, Homo sapien
ttctgacaatcctcagtctcacgag

SEQ ID NO: 78872 - DNA, 25 bp, Homo sapien
ttctgacaatccacagtctcacgag

SEQ ID NO: 78873 - DNA, 25 bp, Homo sapien
gtgtacatcctctgtcaattctaga

SEQ ID NO: 78874 - DNA, 25 bp, Homo sapien
gtgtacatcctcagtcaattctaga

SEQ ID NO: 78875 - DNA, 25 bp, Homo sapien
ccgtggcatcccattaactaacgaa

SEQ ID NO: 78876 - DNA, 25 bp, Homo sapien
ccgtggcatccctttaactaacgaa

SEQ ID NO: 78877 - DNA, 25 bp, Homo sapien
tcgggagaacccttaagatttcaat

SEQ ID NO: 78878 - DNA, 25 bp, Homo sapien
tcgggagaacccataagatttcaat

SEQ ID NO: 78879 - DNA, 25 bp, Homo sapien
gtgacgtaatcaatttttactgaca

SEQ ID NO: 78880 - DNA, 25 bp, Homo sapien
gtgacgtaatcattttttactgaca

SEQ ID NO: 78881 - DNA, 25 bp, Homo sapien
tttcagtgacggttaactatactag

SEQ ID NO: 78882 - DNA, 25 bp, Homo sapien
tttcagtgacggataactatactag

SEQ ID NO: 78883 - DNA, 25 bp, Homo sapien
gttggtatttgtactgacaccaaca

SEQ ID NO: 78884 - DNA, 25 bp, Homo sapien
gttggtatttgttctgacaccaaca

SEQ ID NO: 78885 - DNA, 25 bp, Homo sapien
agttaaggtggagacgactaaactc

SEQ ID NO: 78886 - DNA, 25 bp, Homo sapien
agttaaggtggacacgactaaactc

SEQ ID NO: 78887 - DNA, 25 bp, Homo sapien
agacggtcgacgacggtacagagca

SEQ ID NO: 78888 - DNA, 25 bp, Homo sapien
agacggtcgacgtcggtacagagca

SEQ ID NO: 78889 - DNA, 25 bp, Homo sapien
gtactatgtagactccgtggttgtg

SEQ ID NO: 78890 - DNA, 25 bp, Homo sapien
gtactatgtagagtccgtggttgtg

SEQ ID NO: 78891 - DNA, 25 bp, Homo sapien
catccgatatactccgtcggtgtgg

SEQ ID NO: 78892 - DNA, 25 bp, Homo sapien
catccgatatacaccgtcggtgtgg

SEQ ID NO: 78893 - DNA, 25 bp, Homo sapien
cgaggcaatgtcgtcgacccttgat

SEQ ID NO: 78894 - DNA, 25 bp, Homo sapien
cgaggcaatgtcctcgacccttgat

SEQ ID NO: 78895 - DNA, 25 bp, Homo sapien
ggcccgaggtgaaactacgcaaacg

SEQ ID NO: 78896 - DNA, 25 bp, Homo sapien
ggcccgaggtgatactacgcaaacg

SEQ ID NO: 78897 - DNA, 25 bp, Homo sapien
gtcggcggcttcacaccgaacgtcg

SEQ ID NO: 78898 - DNA, 25 bp, Homo sapien
gtcggcggcttctcaccgaacgtcg

SEQ ID NO: 78899 - DNA, 25 bp, Homo sapien
acccttggtttcttacaccaagacg

SEQ ID NO: 78900 - DNA, 25 bp, Homo sapien
acccttggtttcatacaccaagacg

SEQ ID NO: 78901 - DNA, 25 bp, Homo sapien
ccatatgcattcagacattgtagta

SEQ ID NO: 78902 - DNA, 25 bp, Homo sapien
ccatatgcattctgacattgtagta

SEQ ID NO: 78903 - DNA, 25 bp, Homo sapien
ggatgagacgtttgacttctgacgg

SEQ ID NO: 78904 - DNA, 25 bp, Homo sapien
ggatgagacgttagacttctgacgg

SEQ ID NO: 78905 - DNA, 25 bp, Homo sapien
aatgtgcacgtgtattcggtacgac

SEQ ID NO: 78906 - DNA, 25 bp, Homo sapien
aatgtgcacgtgaattcggtacgac

SEQ ID NO: 78907 - DNA, 25 bp, Homo sapien
ccgtcgaccgtaacggtgagtggac

SEQ ID NO: 78908 - DNA, 25 bp, Homo sapien
ccgtcgaccgtatcggtgagtggac

SEQ ID NO: 78909 - DNA, 25 bp, Homo sapien
ggaccgtccacttccgtcgtgggct

SEQ ID NO: 78910 - DNA, 25 bp, Homo sapien
ggaccgtccactaccgtcgtgggct

SEQ ID NO: 78911 - DNA, 25 bp, Homo sapien
tgccatccacgtgtggtggactccg

SEQ ID NO: 78912 - DNA, 25 bp, Homo sapien
tgccatccacgtctggtggactccg

SEQ ID NO: 78913 - DNA, 25 bp, Homo sapien
cgtgtgaacatgacgtcgaccggcc

SEQ ID NO: 78914 - DNA, 25 bp, Homo sapien
cgtgtgaacatgtcgtcgaccggcc

SEQ ID NO: 78915 - DNA, 25 bp, Homo sapien
caagaacctcgaggtcgtgctccac

SEQ ID NO: 78916 - DNA, 25 bp, Homo sapien
caagaacctcgacgtcgtgctccac

SEQ ID NO: 78917 - DNA, 25 bp, Homo sapien
catctaacacgcttgttctctagac

SEQ ID NO: 78918 - DNA, 25 bp, Homo sapien
catctaacacgcatgttctctagac

SEQ ID NO: 78919 - DNA, 25 bp, Homo sapien
agagagttataaggtactttttaga

SEQ ID NO: 78920 - DNA, 25 bp, Homo sapien
agagagttataacgtactttttaga

SEQ ID NO: 78921 - DNA, 25 bp, Homo sapien
atatctgtactacactatctttggg

SEQ ID NO: 78922 - DNA, 25 bp, Homo sapien
atatctgtactagactatctttggg

SEQ ID NO: 78923 - DNA, 25 bp, Homo sapien
tatagttcatccaaaaatccgtgtg

SEQ ID NO: 78924 - DNA, 25 bp, Homo sapien
tatagttcatcctaaaatccgtgtg

SEQ ID NO: 78925 - DNA, 25 bp, Homo sapien
aatcgtagaattcgtttcactgacg

SEQ ID NO: 78926 - DNA, 25 bp, Homo sapien
aatcgtagaattggtttcactgacg

SEQ ID NO: 78927 - DNA, 25 bp, Homo sapien
tcgtcgagtatcgtttcgtgaggtt

SEQ ID NO: 78928 - DNA, 25 bp, Homo sapien
tcgtcgagtatcctttcgtgaggtt

SEQ ID NO: 78929 - DNA, 25 bp, Homo sapien
ccggttggcgctcttctactgggtc

SEQ ID NO: 78930 - DNA, 25 bp, Homo sapien
ccggttggcgctgttctactgggtc

SEQ ID NO: 78931 - DNA, 25 bp, Homo sapien
tggtaaatgactttcttacttgcct

SEQ ID NO: 78932 - DNA, 25 bp, Homo sapien
tggtaaatgactatcttacttgcct

SEQ ID NO: 78933 - DNA, 25 bp, Homo sapien
ttcgttcagtttactttactgtgaa

SEQ ID NO: 78934 - DNA, 25 bp, Homo sapien
ttcgttcagttttctttactgtgaa

SEQ ID NO: 78935 - DNA, 25 bp, Homo sapien
tgtagacagttggtgaatcttaacc

SEQ ID NO: 78936 - DNA, 25 bp, Homo sapien
tgtagacagttgctgaatcttaacc

SEQ ID NO: 78937 - DNA, 25 bp, Homo sapien
tggaccgacatgtcccgactcaaca

SEQ ID NO: 78938 - DNA, 25 bp, Homo sapien
tggaccgacatgacccgactcaaca

SEQ ID NO: 78939 - DNA, 25 bp, Homo sapien
ttaggggaaccgaccgtcctattcc

SEQ ID NO: 78940 - DNA, 25 bp, Homo sapien
ttaggggaaccgtccgtcctattcc

SEQ ID NO: 78941 - DNA, 25 bp, Homo sapien
ttgtggggacgtaccgacttgtccc

SEQ ID NO: 78942 - DNA, 25 bp, Homo sapien
ttgtggggacgttccgacttgtccc

SEQ ID NO: 78943 - DNA, 25 bp, Homo sapien
ttgttagggaaaccattgacgtcat

SEQ ID NO: 78944 - DNA, 25 bp, Homo sapien
ttgttagggaaagcattgacgtcat

SEQ ID NO: 78945 - DNA, 25 bp, Homo sapien
tgttttgaggaaatcaattactctc

SEQ ID NO: 78946 - DNA, 25 bp, Homo sapien
tgttttgaggaattcaattactctc

SEQ ID NO: 78947 - DNA, 25 bp, Homo sapien
gttttgtcggaatttccttcttcac

SEQ ID NO: 78948 - DNA, 25 bp, Homo sapien
gttttgtcggaaattccttcttcac

SEQ ID NO: 78949 - DNA, 25 bp, Homo sapien
tggcggagtcggacgtcaccccgac

SEQ ID NO: 78950 - DNA, 25 bp, Homo sapien
tggcggagtcggtcgtcaccccgac

SEQ ID NO: 78951 - DNA, 25 bp, Homo sapien
tcgacggtagaggagaaccaccaca

SEQ ID NO: 78952 - DNA, 25 bp, Homo sapien
tcgacggtagagcagaaccaccaca

SEQ ID NO: 78953 - DNA, 25 bp, Homo sapien
gagtacgtcggcaagtagcaccagc

SEQ ID NO: 78954 - DNA, 25 bp, Homo sapien
gagtacgtcggctagtagcaccagc

SEQ ID NO: 78955 - DNA, 25 bp, Homo sapien
ttaatcgtcgacaccggacctagtc

SEQ ID NO: 78956 - DNA, 25 bp, Homo sapien
ttaatcgtcgactccggacctagtc

SEQ ID NO: 78957 - DNA, 25 bp, Homo sapien
actcttgacgtggttcaggacccct

SEQ ID NO: 78958 - DNA, 25 bp, Homo sapien
actcttgacgtgcttcaggacccct

SEQ ID NO: 78959 - DNA, 25 bp, Homo sapien
agtctatcagtgccttccggtcttt

SEQ ID NO: 78960 - DNA, 25 bp, Homo sapien
agtctatcagtggcttccggtcttt

SEQ ID NO: 78961 - DNA, 25 bp, Homo sapien
gggagactagggataccgaaccaag

SEQ ID NO: 78962 - DNA, 25 bp, Homo sapien
gggagactagggttaccgaaccaag

SEQ ID NO: 78963 - DNA, 25 bp, Homo sapien
gtgataccagaagttcgaagaccaa

SEQ ID NO: 78964 - DNA, 25 bp, Homo sapien
gtgataccagaacttcgaagaccaa

SEQ ID NO: 78965 - DNA, 25 bp, Homo sapien
aggaccgaaaacacccggaatcgtg

SEQ ID NO: 78966 - DNA, 25 bp, Homo sapien
aggaccgaaaactcccggaatcgtg

SEQ ID NO: 78967 - DNA, 25 bp, Homo sapien
agaccctaagactccctgacgggag

SEQ ID NO: 78968 - DNA, 25 bp, Homo sapien
agaccctaagacaccctgacgggag

SEQ ID NO: 78969 - DNA, 25 bp, Homo sapien
gataccgtggtcacccggaggacct

SEQ ID NO: 78970 - DNA, 25 bp, Homo sapien
gataccgtggtctcccggaggacct

SEQ ID NO: 78971 - DNA, 25 bp, Homo sapien
gaatattgagacgtcggggataccc

SEQ ID NO: 78972 - DNA, 25 bp, Homo sapien
gaatattgagacctcggggataccc

SEQ ID NO: 78973 - DNA, 25 bp, Homo sapien
gaatctttcctcaagactattcggg

SEQ ID NO: 78974 - DNA, 25 bp, Homo sapien
gaatctttcctctagactattcggg

SEQ ID NO: 78975 - DNA, 25 bp, Homo sapien
acgtttctctcgaaatcatcaagtg

SEQ ID NO: 78976 - DNA, 25 bp, Homo sapien
acgtttctctcgtaatcatcaagtg

SEQ ID NO: 78977 - DNA, 25 bp, Homo sapien
cggttttataagactcataaacgtt

SEQ ID NO: 78978 - DNA, 25 bp, Homo sapien
cggttttataagtctcataaacgtt

SEQ ID NO: 78979 - DNA, 25 bp, Homo sapien
gtgttaaagtgttctgcgtaacgtc

SEQ ID NO: 78980 - DNA, 25 bp, Homo sapien
gtgttaaagtgtactgcgtaacgtc

SEQ ID NO: 78981 - DNA, 25 bp, Homo sapien
agtagttacaagaagtgctactgtc

SEQ ID NO: 78982 - DNA, 25 bp, Homo sapien
agtagttacaagtagtgctactgtc

SEQ ID NO: 78983 - DNA, 25 bp, Homo sapien
atagctgtaatgaacagacactgtt

SEQ ID NO: 78984 - DNA, 25 bp, Homo sapien
atagctgtaatgtacagacactgtt

SEQ ID NO: 78985 - DNA, 25 bp, Homo sapien
ctagacgttagtagctagaccacaa

SEQ ID NO: 78986 - DNA, 25 bp, Homo sapien
ctagacgttagttgctagaccacaa

SEQ ID NO: 78987 - DNA, 25 bp, Homo sapien
agtgttgtgtgtcagtacctctaga

SEQ ID NO: 78988 - DNA, 25 bp, Homo sapien
agtgttgtgtgtgagtacctctaga

SEQ ID NO: 78989 - DNA, 25 bp, Homo sapien
acacaatctgcttcgggaccgttta

SEQ ID NO: 78990 - DNA, 25 bp, Homo sapien
acacaatctgctacgggaccgttta

SEQ ID NO: 78991 - DNA, 25 bp, Homo sapien
ccagagtatactgactggatgaata

SEQ ID NO: 78992 - DNA, 25 bp, Homo sapien
ccagagtatactcactggatgaata

SEQ ID NO: 78993 - DNA, 25 bp, Homo sapien
acaaggacgtgcactgtatgtgaaa

SEQ ID NO: 78994 - DNA, 25 bp, Homo sapien
acaaggacgtgctctgtatgtgaaa

SEQ ID NO: 78995 - DNA, 25 bp, Homo sapien
cccgggtggtctcgttcggtgtttt

SEQ ID NO: 78996 - DNA, 25 bp, Homo sapien
cccgggtggtctggttcggtgtttt

SEQ ID NO: 78997 - DNA, 25 bp, Homo sapien
catggtggtagtggttggttatgtt

SEQ ID NO: 78998 - DNA, 25 bp, Homo sapien
catggtggtagtcgttggttatgtt

SEQ ID NO: 78999 - DNA, 25 bp, Homo sapien
aaaaacgtcattcttcgatttgtag

SEQ ID NO: 79000 - DNA, 25 bp, Homo sapien
aaaaacgtcattgttcgatttgtag

SEQ ID NO: 79001 - DNA, 25 bp, Homo sapien
gtccggaaatgcttcgtttagaggt

SEQ ID NO: 79002 - DNA, 25 bp, Homo sapien
gtccggaaatgcatcgtttagaggt

SEQ ID NO: 79003 - DNA, 25 bp, Homo sapien
cttgtcaacagaaaactccgaaatg

SEQ ID NO: 79004 - DNA, 25 bp, Homo sapien
cttgtcaacagataactccgaaatg

SEQ ID NO: 79005 - DNA, 25 bp, Homo sapien
cgttaagacaggaaccttcggtcca

SEQ ID NO: 79006 - DNA, 25 bp, Homo sapien
cgttaagacaggtaccttcggtcca

SEQ ID NO: 79007 - DNA, 25 bp, Homo sapien
agcacacggtctcttcagtcacacg

SEQ ID NO: 79008 - DNA, 25 bp, Homo sapien
agcacacggtctgttcagtcacacg

SEQ ID NO: 79009 - DNA, 25 bp, Homo sapien
agaaaaacgcggaaactcaacttcg

SEQ ID NO: 79010 - DNA, 25 bp, Homo sapien
agaaaaacgcggtaactcaacttcg

SEQ ID NO: 79011 - DNA, 25 bp, Homo sapien
gtgacaattagaaaatcacctgtgt

SEQ ID NO: 79012 - DNA, 25 bp, Homo sapien
gtgacaattagataatcacctgtgt

SEQ ID NO: 79013 - DNA, 25 bp, Homo sapien
ggtcacccaaccatataaccctctg

SEQ ID NO: 79014 - DNA, 25 bp, Homo sapien
ggtcacccaaccttataaccctctg

SEQ ID NO: 79015 - DNA, 25 bp, Homo sapien
tcaaccagattcaaggacctactgt

SEQ ID NO: 79016 - DNA, 25 bp, Homo sapien
tcaaccagattctaggacctactgt

SEQ ID NO: 79017 - DNA, 25 bp, Homo sapien
tgtaatacagagacatctccggagg

SEQ ID NO: 79018 - DNA, 25 bp, Homo sapien
tgtaatacagagtcatctccggagg

SEQ ID NO: 79019 - DNA, 25 bp, Homo sapien
ttttaattcaacgtggtcctccgga

SEQ ID NO: 79020 - DNA, 25 bp, Homo sapien
ttttaattcaacctggtcctccgga

SEQ ID NO: 79021 - DNA, 25 bp, Homo sapien
cgaggatatacatgttcgttcttca

SEQ ID NO: 79022 - DNA, 25 bp, Homo sapien
cgaggatatacaagttcgttcttca

SEQ ID NO: 79023 - DNA, 25 bp, Homo sapien
ctgtggtggtactatggctgttcga

SEQ ID NO: 79024 - DNA, 25 bp, Homo sapien
ctgtggtggtacaatggctgttcga

SEQ ID NO: 79025 - DNA, 25 bp, Homo sapien
cttggtgtgacaagtcagacatgaa

SEQ ID NO: 79026 - DNA, 25 bp, Homo sapien
cttggtgtgacatgtcagacatgaa

SEQ ID NO: 79027 - DNA, 25 bp, Homo sapien
cttcttgtcgaattcaacaggatat

SEQ ID NO: 79028 - DNA, 25 bp, Homo sapien
cttcttgtcgaaatcaacaggatat

SEQ ID NO: 79029 - DNA, 25 bp, Homo sapien
tttgtggttcccagcgacgtgtatt

SEQ ID NO: 79030 - DNA, 25 bp, Homo sapien
tttgtggttccctgcgacgtgtatt

SEQ ID NO: 79031 - DNA, 25 bp, Homo sapien
attgtagatcgacaacgacgtggta

SEQ ID NO: 79032 - DNA, 25 bp, Homo sapien
attgtagatcgagaacgacgtggta

SEQ ID NO: 79033 - DNA, 25 bp, Homo sapien
gagtttaatacctaacacgtactta

SEQ ID NO: 79034 - DNA, 25 bp, Homo sapien
gagtttaataccaaacacgtactta

SEQ ID NO: 79035 - DNA, 25 bp, Homo sapien
ggactcttacaacgtcagaaataat

SEQ ID NO: 79036 - DNA, 25 bp, Homo sapien
ggactcttacaaggtcagaaataat

SEQ ID NO: 79037 - DNA, 25 bp, Homo sapien
gaatcactccaggacaagtcaccct

SEQ ID NO: 79038 - DNA, 25 bp, Homo sapien
gaatcactccagcacaagtcaccct

SEQ ID NO: 79039 - DNA, 25 bp, Homo sapien
gcaccactctcgtgaggacgggtcc

SEQ ID NO: 79040 - DNA, 25 bp, Homo sapien
gcaccactctcgagaggacgggtcc

SEQ ID NO: 79041 - DNA, 25 bp, Homo sapien
cacgtctctctgtcatcggtccggg

SEQ ID NO: 79042 - DNA, 25 bp, Homo sapien
cacgtctctctgacatcggtccggg

SEQ ID NO: 79043 - DNA, 25 bp, Homo sapien
cggtctcattgcagtcgtgtccgaa

SEQ ID NO: 79044 - DNA, 25 bp, Homo sapien
cggtctcattgctgtcgtgtccgaa

SEQ ID NO: 79045 - DNA, 25 bp, Homo sapien
cccgtgtctccgatcgtgtgtggga

SEQ ID NO: 79046 - DNA, 25 bp, Homo sapien
cccgtgtctccgttcgtgtgtggga

SEQ ID NO: 79047 - DNA, 25 bp, Homo sapien
ccgacctcacgttcggtgtcggaca

SEQ ID NO: 79048 - DNA, 25 bp, Homo sapien
ccgacctcacgtacggtgtcggaca

SEQ ID NO: 79049 - DNA, 25 bp, Homo sapien
aactggtcctaggtctaggtcaaca

SEQ ID NO: 79050 - DNA, 25 bp, Homo sapien
aactggtcctagctctaggtcaaca

SEQ ID NO: 79051 - DNA, 25 bp, Homo sapien
actcgagtcctgacctactttacta

SEQ ID NO: 79052 - DNA, 25 bp, Homo sapien
actcgagtcctgtcctactttacta

SEQ ID NO: 79053 - DNA, 25 bp, Homo sapien
caacaaagacagaccctagatctag

SEQ ID NO: 79054 - DNA, 25 bp, Homo sapien
caacaaagacagtccctagatctag

SEQ ID NO: 79055 - DNA, 25 bp, Homo sapien
ctcttaacaacgagttcctctttgg

SEQ ID NO: 79056 - DNA, 25 bp, Homo sapien
ctcttaacaacgtgttcctctttgg

SEQ ID NO: 79057 - DNA, 25 bp, Homo sapien
aacacaaatagactgttcacctggg

SEQ ID NO: 79058 - DNA, 25 bp, Homo sapien
aacacaaatagagtgttcacctggg

SEQ ID NO: 79059 - DNA, 25 bp, Homo sapien
gacgatgttgtgtttctaccttgcg

SEQ ID NO: 79060 - DNA, 25 bp, Homo sapien
gacgatgttgtgattctaccttgcg

SEQ ID NO: 79061 - DNA, 25 bp, Homo sapien
aaacgacatgtgtcccttttctgtc

SEQ ID NO: 79062 - DNA, 25 bp, Homo sapien
aaacgacatgtgacccttttctgtc

SEQ ID NO: 79063 - DNA, 25 bp, Homo sapien
aggtcacggcggaccattgtcttga

SEQ ID NO: 79064 - DNA, 25 bp, Homo sapien
aggtcacggcggtccattgtcttga

SEQ ID NO: 79065 - DNA, 25 bp, Homo sapien
ggagtccgggactcctatgccccga

SEQ ID NO: 79066 - DNA, 25 bp, Homo sapien
ggagtccgggacacctatgccccga

SEQ ID NO: 79067 - DNA, 25 bp, Homo sapien
gtgtaatgtctcttcgtaaacacat

SEQ ID NO: 79068 - DNA, 25 bp, Homo sapien
gtgtaatgtctcatcgtaaacacat

SEQ ID NO: 79069 - DNA, 25 bp, Homo sapien
ttactctagccgtagtcgagcgaca

SEQ ID NO: 79070 - DNA, 25 bp, Homo sapien
ttactctagccgaagtcgagcgaca

SEQ ID NO: 79071 - DNA, 25 bp, Homo sapien
aaactgtcgcagagtacgagtcaag

SEQ ID NO: 79072 - DNA, 25 bp, Homo sapien
aaactgtcgcagtgtacgagtcaag

SEQ ID NO: 79073 - DNA, 25 bp, Homo sapien
caagactccccgacgaacgagcgag

SEQ ID NO: 79074 - DNA, 25 bp, Homo sapien
caagactccccgtcgaacgagcgag

SEQ ID NO: 79075 - DNA, 25 bp, Homo sapien
ggtgtaaagtaattccttctcccca

SEQ ID NO: 79076 - DNA, 25 bp, Homo sapien
ggtgtaaagtaaatccttctcccca

SEQ ID NO: 79077 - DNA, 25 bp, Homo sapien
ctaaggacagaactcctacgcccgg

SEQ ID NO: 79078 - DNA, 25 bp, Homo sapien
ctaaggacagaagtcctacgcccgg

SEQ ID NO: 79079 - DNA, 25 bp, Homo sapien
gtagacccccggacctctaactgag

SEQ ID NO: 79080 - DNA, 25 bp, Homo sapien
gtagacccccggtcctctaactgag

SEQ ID NO: 79081 - DNA, 25 bp, Homo sapien
aggacccgtcgcgggcccaactgtg

SEQ ID NO: 79082 - DNA, 25 bp, Homo sapien
aggacccgtcgccggcccaactgtg

SEQ ID NO: 79083 - DNA, 25 bp, Homo sapien
agacccatccggtccgcgactgtgt

SEQ ID NO: 79084 - DNA, 25 bp, Homo sapien
agacccatccggaccgcgactgtgt

SEQ ID NO: 79085 - DNA, 25 bp, Homo sapien
cggtacgccttcaggagcggtcccg

SEQ ID NO: 79086 - DNA, 25 bp, Homo sapien
cggtacgccttctggagcggtcccg

SEQ ID NO: 79087 - DNA, 25 bp, Homo sapien
gcagttcgattccggtttcgacccg

SEQ ID NO: 79088 - DNA, 25 bp, Homo sapien
gcagttcgattcgggtttcgacccg

SEQ ID NO: 79089 - DNA, 25 bp, Homo sapien
ggcaccgtccctgtgtatccgggcg

SEQ ID NO: 79090 - DNA, 25 bp, Homo sapien
ggcaccgtccctctgtatccgggcg

SEQ ID NO: 79091 - DNA, 25 bp, Homo sapien
gtagccttggacgtgtgtcccggcc

SEQ ID NO: 79092 - DNA, 25 bp, Homo sapien
gtagccttggacctgtgtcccggcc

SEQ ID NO: 79093 - DNA, 25 bp, Homo sapien
tttatgtgtcgtgttgtccagagac

SEQ ID NO: 79094 - DNA, 25 bp, Homo sapien
tttatgtgtcgtcttgtccagagac

SEQ ID NO: 79095 - DNA, 25 bp, Homo sapien
ttacacttatcatgtttcaagtaat

SEQ ID NO: 79096 - DNA, 25 bp, Homo sapien
ttacacttatcaagtttcaagtaat

SEQ ID NO: 79097 - DNA, 25 bp, Homo sapien
gtaagtaagtgaactcactcaatgg

SEQ ID NO: 79098 - DNA, 25 bp, Homo sapien
gtaagtaagtgatctcactcaatgg

SEQ ID NO: 79099 - DNA, 25 bp, Homo sapien
tcgtactggacaaaccccgaatatt

SEQ ID NO: 79100 - DNA, 25 bp, Homo sapien
tcgtactggacataccccgaatatt

SEQ ID NO: 79101 - DNA, 25 bp, Homo sapien
ctctcgagaacaacccagtcgaaag

SEQ ID NO: 79102 - DNA, 25 bp, Homo sapien
ctctcgagaacatcccagtcgaaag

SEQ ID NO: 79103 - DNA, 25 bp, Homo sapien
aaggttgtatcaagcccatcgaaac

SEQ ID NO: 79104 - DNA, 25 bp, Homo sapien
aaggttgtatcatgcccatcgaaac

SEQ ID NO: 79105 - DNA, 25 bp, Homo sapien
gtcgtctgtttctgataccaaatta

SEQ ID NO: 79106 - DNA, 25 bp, Homo sapien
gtcgtctgtttcagataccaaatta

SEQ ID NO: 79107 - DNA, 25 bp, Homo sapien
accttcttcagttcgaccgtcatga

SEQ ID NO: 79108 - DNA, 25 bp, Homo sapien
accttcttcagtacgaccgtcatga

SEQ ID NO: 79109 - DNA, 25 bp, Homo sapien
tagagcagtaacagcgtctactata

SEQ ID NO: 79110 - DNA, 25 bp, Homo sapien
tagagcagtaactgcgtctactata

SEQ ID NO: 79111 - DNA, 25 bp, Homo sapien
ataaacgaccgactagcgactaaac

SEQ ID NO: 79112 - DNA, 25 bp, Homo sapien
ataaacgaccgagtagcgactaaac

SEQ ID NO: 79113 - DNA, 25 bp, Homo sapien
gcccctaggtaatgaccggaaaccc

SEQ ID NO: 79114 - DNA, 25 bp, Homo sapien
gcccctaggtaaagaccggaaaccc

SEQ ID NO: 79115 - DNA, 25 bp, Homo sapien
acccttcttcggttgcgcgggcgtc

SEQ ID NO: 79116 - DNA, 25 bp, Homo sapien
acccttcttcggatgcgcgggcgtc

SEQ ID NO: 79117 - DNA, 25 bp, Homo sapien
cttctacttctgtcggtggtgctac

SEQ ID NO: 79118 - DNA, 25 bp, Homo sapien
cttctacttctgacggtggtgctac

SEQ ID NO: 79119 - DNA, 25 bp, Homo sapien
gctcaccatgtagcagtatcggcct

SEQ ID NO: 79120 - DNA, 25 bp, Homo sapien
gctcaccatgtaccagtatcggcct

SEQ ID NO: 79121 - DNA, 25 bp, Homo sapien
cccaccagttaactcgcggtgtagt

SEQ ID NO: 79122 - DNA, 25 bp, Homo sapien
cccaccagttaagtcgcggtgtagt

SEQ ID NO: 79123 - DNA, 25 bp, Homo sapien
tccagtcaggttaaacctatagtat

SEQ ID NO: 79124 - DNA, 25 bp, Homo sapien
tccagtcaggtttaacctatagtat

SEQ ID NO: 79125 - DNA, 25 bp, Homo sapien
ttctagcaggtagtacctcagtggt

SEQ ID NO: 79126 - DNA, 25 bp, Homo sapien
ttctagcaggtactacctcagtggt

SEQ ID NO: 79127 - DNA, 25 bp, Homo sapien
tctccttaacggttctctccttggt
